United States Patent Application Publication US 2015/0232836 A1 - sequence listing, part 11

SEQ ID NO: 311904 - DNA, 15 bp, Homo sapiens
catatagagcccctt

SEQ ID NO: 311905 - DNA, 15 bp, Homo sapiens
gcatatagagcccct

SEQ ID NO: 311906 - DNA, 15 bp, Homo sapiens
agcatatagagcccc

SEQ ID NO: 311907 - DNA, 15 bp, Homo sapiens
tagcatatagagccc

SEQ ID NO: 311908 - DNA, 15 bp, Homo sapiens
ctagcatatagagcc

SEQ ID NO: 311909 - DNA, 15 bp, Homo sapiens
tctagcatatagagc

SEQ ID NO: 311910 - DNA, 15 bp, Homo sapiens
ctctagcatatagag

SEQ ID NO: 311911 - DNA, 15 bp, Homo sapiens
tctctagcatataga

SEQ ID NO: 311912 - DNA, 15 bp, Homo sapiens
atctctagcatatag

SEQ ID NO: 311913 - DNA, 15 bp, Homo sapiens
aatctctagcatata

SEQ ID NO: 311914 - DNA, 15 bp, Homo sapiens
aaatctctagcatat

SEQ ID NO: 311915 - DNA, 15 bp, Homo sapiens
gaaatctctagcata

SEQ ID NO: 311916 - DNA, 15 bp, Homo sapiens
ggaaatctctagcat

SEQ ID NO: 311917 - DNA, 15 bp, Homo sapiens
tggaaatctctagca

SEQ ID NO: 311918 - DNA, 15 bp, Homo sapiens
ttggaaatctctagc

SEQ ID NO: 311919 - DNA, 15 bp, Homo sapiens
tttggaaatctctag

SEQ ID NO: 311920 - DNA, 15 bp, Homo sapiens
atttggaaatctcta

SEQ ID NO: 311921 - DNA, 15 bp, Homo sapiens
aatttggaaatctct

SEQ ID NO: 311922 - DNA, 15 bp, Homo sapiens
aaatttggaaatctc

SEQ ID NO: 311923 - DNA, 15 bp, Homo sapiens
taaatttggaaatct

SEQ ID NO: 311924 - DNA, 15 bp, Homo sapiens
ataaatttggaaatc

SEQ ID NO: 311925 - DNA, 15 bp, Homo sapiens
aataaatttggaaat

SEQ ID NO: 311926 - DNA, 15 bp, Homo sapiens
aaataaatttggaaa

SEQ ID NO: 311927 - DNA, 15 bp, Homo sapiens
gaaataaatttggaa

SEQ ID NO: 311928 - DNA, 15 bp, Homo sapiens
agaaataaatttgga

SEQ ID NO: 311929 - DNA, 15 bp, Homo sapiens
aagaaataaatttgg

SEQ ID NO: 311930 - DNA, 15 bp, Homo sapiens
gaagaaataaatttg

SEQ ID NO: 311931 - DNA, 15 bp, Homo sapiens
tgaagaaataaattt

SEQ ID NO: 311932 - DNA, 15 bp, Homo sapiens
ctgaagaaataaatt

SEQ ID NO: 311933 - DNA, 15 bp, Homo sapiens
gctgaagaaataaat

SEQ ID NO: 311934 - DNA, 15 bp, Homo sapiens
ggctgaagaaataaa

SEQ ID NO: 311935 - DNA, 15 bp, Homo sapiens
gggctgaagaaataa

SEQ ID NO: 311936 - DNA, 15 bp, Homo sapiens
agggctgaagaaata

SEQ ID NO: 311937 - DNA, 15 bp, Homo sapiens
cagggctgaagaaat

SEQ ID NO: 311938 - DNA, 15 bp, Homo sapiens
tcagggctgaagaaa

SEQ ID NO: 311939 - DNA, 15 bp, Homo sapiens
atcagggctgaagaa

SEQ ID NO: 311940 - DNA, 15 bp, Homo sapiens
gatcagggctgaaga

SEQ ID NO: 311941 - DNA, 15 bp, Homo sapiens
agatcagggctgaag

SEQ ID NO: 311942 - DNA, 15 bp, Homo sapiens
aagatcagggctgaa

SEQ ID NO: 311943 - DNA, 15 bp, Homo sapiens
aaagatcagggctga

SEQ ID NO: 311944 - DNA, 15 bp, Homo sapiens
aaaagatcagggctg

SEQ ID NO: 311945 - DNA, 15 bp, Homo sapiens
gaaaagatcagggct

SEQ ID NO: 311946 - DNA, 15 bp, Homo sapiens
tgaaaagatcagggc

SEQ ID NO: 311947 - DNA, 15 bp, Homo sapiens
gtgaaaagatcaggg

SEQ ID NO: 311948 - DNA, 15 bp, Homo sapiens
tgtgaaaagatcagg

SEQ ID NO: 311949 - DNA, 15 bp, Homo sapiens
ctgtgaaaagatcag

SEQ ID NO: 311950 - DNA, 15 bp, Homo sapiens
tctgtgaaaagatca

SEQ ID NO: 311951 - DNA, 15 bp, Homo sapiens
ctctgtgaaaagatc

SEQ ID NO: 311952 - DNA, 15 bp, Homo sapiens
cctctgtgaaaagat

SEQ ID NO: 311953 - DNA, 15 bp, Homo sapiens
acctctgtgaaaaga

SEQ ID NO: 311954 - DNA, 15 bp, Homo sapiens
gacctctgtgaaaag

SEQ ID NO: 311955 - DNA, 15 bp, Homo sapiens
tgacctctgtgaaaa

SEQ ID NO: 311956 - DNA, 15 bp, Homo sapiens
ttgacctctgtgaaa

SEQ ID NO: 311957 - DNA, 15 bp, Homo sapiens
cttgacctctgtgaa

SEQ ID NO: 311958 - DNA, 15 bp, Homo sapiens
ccttgacctctgtga

SEQ ID NO: 311959 - DNA, 15 bp, Homo sapiens
gccttgacctctgtg

SEQ ID NO: 311960 - DNA, 15 bp, Homo sapiens
agccttgacctctgt

SEQ ID NO: 311961 - DNA, 15 bp, Homo sapiens
aagccttgacctctg

SEQ ID NO: 311962 - DNA, 15 bp, Homo sapiens
aaagccttgacctct

SEQ ID NO: 311963 - DNA, 15 bp, Homo sapiens
aaaagccttgacctc

SEQ ID NO: 311964 - DNA, 15 bp, Homo sapiens
taaaagccttgacct

SEQ ID NO: 311965 - DNA, 15 bp, Homo sapiens
ataaaagccttgacc

SEQ ID NO: 311966 - DNA, 15 bp, Homo sapiens
tataaaagccttgac

SEQ ID NO: 311967 - DNA, 15 bp, Homo sapiens
ctataaaagccttga

SEQ ID NO: 311968 - DNA, 15 bp, Homo sapiens
gctataaaagccttg

SEQ ID NO: 311969 - DNA, 15 bp, Homo sapiens
ggctataaaagcctt

SEQ ID NO: 311970 - DNA, 15 bp, Homo sapiens
tggctataaaagcct

SEQ ID NO: 311971 - DNA, 15 bp, Homo sapiens
ttggctataaaagcc

SEQ ID NO: 311972 - DNA, 15 bp, Homo sapiens
gttggctataaaagc

SEQ ID NO: 311973 - DNA, 15 bp, Homo sapiens
tgttggctataaaag

SEQ ID NO: 311974 - DNA, 15 bp, Homo sapiens
ctgttggctataaaa

SEQ ID NO: 311975 - DNA, 15 bp, Homo sapiens
tctgttggctataaa

SEQ ID NO: 311976 - DNA, 15 bp, Homo sapiens
ttctgttggctataa

SEQ ID NO: 311977 - DNA, 15 bp, Homo sapiens
gttctgttggctata

SEQ ID NO: 311978 - DNA, 15 bp, Homo sapiens
agttctgttggctat

SEQ ID NO: 311979 - DNA, 15 bp, Homo sapiens
gagttctgttggcta

SEQ ID NO: 311980 - DNA, 15 bp, Homo sapiens
agagttctgttggct

SEQ ID NO: 311981 - DNA, 15 bp, Homo sapiens
aagagttctgttggc

SEQ ID NO: 311982 - DNA, 15 bp, Homo sapiens
caagagttctgttgg

SEQ ID NO: 311983 - DNA, 15 bp, Homo sapiens
tcaagagttctgttg

SEQ ID NO: 311984 - DNA, 15 bp, Homo sapiens
atcaagagttctgtt

SEQ ID NO: 311985 - DNA, 15 bp, Homo sapiens
aatcaagagttctgt

SEQ ID NO: 311986 - DNA, 15 bp, Homo sapiens
gaatcaagagttctg

SEQ ID NO: 311987 - DNA, 15 bp, Homo sapiens
ggaatcaagagttct

SEQ ID NO: 311988 - DNA, 15 bp, Homo sapiens
aggaatcaagagttc

SEQ ID NO: 311989 - DNA, 15 bp, Homo sapiens
taggaatcaagagtt

SEQ ID NO: 311990 - DNA, 15 bp, Homo sapiens
gtaggaatcaagagt

SEQ ID NO: 311991 - DNA, 15 bp, Homo sapiens
agtaggaatcaagag

SEQ ID NO: 311992 - DNA, 15 bp, Homo sapiens
gagtaggaatcaaga

SEQ ID NO: 311993 - DNA, 15 bp, Homo sapiens
ggagtaggaatcaag

SEQ ID NO: 311994 - DNA, 15 bp, Homo sapiens
gggagtaggaatcaa

SEQ ID NO: 311995 - DNA, 15 bp, Homo sapiens
ggggagtaggaatca

SEQ ID NO: 311996 - DNA, 15 bp, Homo sapiens
aggggagtaggaatc

SEQ ID NO: 311997 - DNA, 15 bp, Homo sapiens
gaggggagtaggaat

SEQ ID NO: 311998 - DNA, 15 bp, Homo sapiens
agaggggagtaggaa

SEQ ID NO: 311999 - DNA, 15 bp, Homo sapiens
tagaggggagtagga

SEQ ID NO: 312000 - DNA, 15 bp, Homo sapiens
gtagaggggagtagg

SEQ ID NO: 312001 - DNA, 15 bp, Homo sapiens
ggtagaggggagtag

SEQ ID NO: 312002 - DNA, 15 bp, Homo sapiens
gggtagaggggagta

SEQ ID NO: 312003 - DNA, 15 bp, Homo sapiens
tgggtagaggggagt

SEQ ID NO: 312004 - DNA, 15 bp, Homo sapiens
ttgggtagaggggag

SEQ ID NO: 312005 - DNA, 15 bp, Homo sapiens
attgggtagagggga

SEQ ID NO: 312006 - DNA, 15 bp, Homo sapiens
cattgggtagagggg

SEQ ID NO: 312007 - DNA, 15 bp, Homo sapiens
acattgggtagaggg

SEQ ID NO: 312008 - DNA, 15 bp, Homo sapiens
gacattgggtagagg

SEQ ID NO: 312009 - DNA, 15 bp, Homo sapiens
agacattgggtagag

SEQ ID NO: 312010 - DNA, 15 bp, Homo sapiens
gagacattgggtaga

SEQ ID NO: 312011 - DNA, 15 bp, Homo sapiens
ggagacattgggtag

SEQ ID NO: 312012 - DNA, 15 bp, Homo sapiens
tggagacattgggta

SEQ ID NO: 312013 - DNA, 15 bp, Homo sapiens
ttggagacattgggt

SEQ ID NO: 312014 - DNA, 15 bp, Homo sapiens
tttggagacattggg

SEQ ID NO: 312015 - DNA, 15 bp, Homo sapiens
atttggagacattgg

SEQ ID NO: 312016 - DNA, 15 bp, Homo sapiens
tatttggagacattg

SEQ ID NO: 312017 - DNA, 15 bp, Homo sapiens
atatttggagacatt

SEQ ID NO: 312018 - DNA, 15 bp, Homo sapiens
tatatttggagacat

SEQ ID NO: 312019 - DNA, 15 bp, Homo sapiens
ttatatttggagaca

SEQ ID NO: 312020 - DNA, 15 bp, Homo sapiens
tttatatttggagac

SEQ ID NO: 312021 - DNA, 15 bp, Homo sapiens
gtttatatttggaga

SEQ ID NO: 312022 - DNA, 15 bp, Homo sapiens
agtttatatttggag

SEQ ID NO: 312023 - DNA, 15 bp, Homo sapiens
tagtttatatttgga

SEQ ID NO: 312024 - DNA, 15 bp, Homo sapiens
ttagtttatatttgg

SEQ ID NO: 312025 - DNA, 15 bp, Homo sapiens
tttagtttatatttg

SEQ ID NO: 312026 - DNA, 15 bp, Homo sapiens
ttttagtttatattt

SEQ ID NO: 312027 - DNA, 15 bp, Homo sapiens
attttagtttatatt

SEQ ID NO: 312028 - DNA, 15 bp, Homo sapiens
gattttagtttatat

SEQ ID NO: 312029 - DNA, 15 bp, Homo sapiens
tgattttagtttata

SEQ ID NO: 312030 - DNA, 15 bp, Homo sapiens
ttgattttagtttat

SEQ ID NO: 312031 - DNA, 15 bp, Homo sapiens
tttgattttagttta

SEQ ID NO: 312032 - DNA, 15 bp, Homo sapiens
atttgattttagttt

SEQ ID NO: 312033 - DNA, 15 bp, Homo sapiens
tatttgattttagtt

SEQ ID NO: 312034 - DNA, 15 bp, Homo sapiens
ttatttgattttagt

SEQ ID NO: 312035 - DNA, 15 bp, Homo sapiens
tttatttgattttag

SEQ ID NO: 312036 - DNA, 15 bp, Homo sapiens
atttatttgatttta

SEQ ID NO: 312037 - DNA, 15 bp, Homo sapiens
tatttatttgatttt

SEQ ID NO: 312038 - DNA, 15 bp, Homo sapiens
ttatttatttgattt

SEQ ID NO: 312039 - DNA, 15 bp, Homo sapiens
tttatttatttgatt

SEQ ID NO: 312040 - DNA, 15 bp, Homo sapiens
ttttatttatttgat

SEQ ID NO: 312041 - DNA, 15 bp, Homo sapiens
tttttatttatttga

SEQ ID NO: 312042 - DNA, 15 bp, Homo sapiens
atttttatttatttg

SEQ ID NO: 312043 - DNA, 15 bp, Homo sapiens
gatttttatttattt

SEQ ID NO: 312044 - DNA, 15 bp, Homo sapiens
agatttttatttatt

SEQ ID NO: 312045 - DNA, 15 bp, Homo sapiens
aagatttttatttat

SEQ ID NO: 312046 - DNA, 15 bp, Homo sapiens
aaagatttttattta

SEQ ID NO: 312047 - DNA, 15 bp, Homo sapiens
aaaagatttttattt

SEQ ID NO: 312048 - DNA, 15 bp, Homo sapiens
aaaaagatttttatt

SEQ ID NO: 312049 - DNA, 15 bp, Homo sapiens
aaaaaagatttttat

SEQ ID NO: 312050 - DNA, 15 bp, Homo sapiens
aaaaaaagattttta

SEQ ID NO: 312051 - DNA, 15 bp, Homo sapiens
aaaaaaaagattttt

SEQ ID NO: 312052 - DNA, 15 bp, Homo sapiens
gaaaaaaaagatttt

SEQ ID NO: 312053 - DNA, 15 bp, Homo sapiens
agaaaaaaaagattt

SEQ ID NO: 312054 - DNA, 15 bp, Homo sapiens
tagaaaaaaaagatt

SEQ ID NO: 312055 - DNA, 15 bp, Homo sapiens
gtagaaaaaaaagat

SEQ ID NO: 312056 - DNA, 15 bp, Homo sapiens
ggtagaaaaaaaaga

SEQ ID NO: 312057 - DNA, 15 bp, Homo sapiens
gggtagaaaaaaaag

SEQ ID NO: 312058 - DNA, 15 bp, Homo sapiens
agggtagaaaaaaaa

SEQ ID NO: 312059 - DNA, 15 bp, Homo sapiens
cagggtagaaaaaaa

SEQ ID NO: 312060 - DNA, 15 bp, Homo sapiens
ccagggtagaaaaaa

SEQ ID NO: 312061 - DNA, 15 bp, Homo sapiens
accagggtagaaaaa

SEQ ID NO: 312062 - DNA, 15 bp, Homo sapiens
gaccagggtagaaaa

SEQ ID NO: 312063 - DNA, 15 bp, Homo sapiens
agaccagggtagaaa

SEQ ID NO: 312064 - DNA, 15 bp, Homo sapiens
aagaccagggtagaa

SEQ ID NO: 312065 - DNA, 15 bp, Homo sapiens
aaagaccagggtaga

SEQ ID NO: 312066 - DNA, 15 bp, Homo sapiens
gaaagaccagggtag

SEQ ID NO: 312067 - DNA, 15 bp, Homo sapiens
agaaagaccagggta

SEQ ID NO: 312068 - DNA, 15 bp, Homo sapiens
gagaaagaccagggt

SEQ ID NO: 312069 - DNA, 15 bp, Homo sapiens
ggagaaagaccaggg

SEQ ID NO: 312070 - DNA, 15 bp, Homo sapiens
tggagaaagaccagg

SEQ ID NO: 312071 - DNA, 15 bp, Homo sapiens
atggagaaagaccag

SEQ ID NO: 312072 - DNA, 15 bp, Homo sapiens
aatggagaaagacca

SEQ ID NO: 312073 - DNA, 15 bp, Homo sapiens
aaatggagaaagacc

SEQ ID NO: 312074 - DNA, 15 bp, Homo sapiens
aaaatggagaaagac

SEQ ID NO: 312075 - DNA, 15 bp, Homo sapiens
taaaatggagaaaga

SEQ ID NO: 312076 - DNA, 15 bp, Homo sapiens
ataaaatggagaaag

SEQ ID NO: 312077 - DNA, 15 bp, Homo sapiens
aataaaatggagaaa

SEQ ID NO: 312078 - DNA, 15 bp, Homo sapiens
taataaaatggagaa

SEQ ID NO: 312079 - DNA, 15 bp, Homo sapiens
ttaataaaatggaga

SEQ ID NO: 312080 - DNA, 15 bp, Homo sapiens
tttaataaaatggag

SEQ ID NO: 312081 - DNA, 15 bp, Homo sapiens
gtttaataaaatgga

SEQ ID NO: 312082 - DNA, 15 bp, Homo sapiens
tgtttaataaaatgg

SEQ ID NO: 312083 - DNA, 15 bp, Homo sapiens
atgtttaataaaatg

SEQ ID NO: 312084 - DNA, 15 bp, Homo sapiens
aatgtttaataaaat

SEQ ID NO: 312085 - DNA, 15 bp, Homo sapiens
aaatgtttaataaaa

SEQ ID NO: 312086 - DNA, 15 bp, Homo sapiens
taaatgtttaataaa

SEQ ID NO: 312087 - DNA, 15 bp, Homo sapiens
ataaatgtttaataa

SEQ ID NO: 312088 - DNA, 15 bp, Homo sapiens
gataaatgtttaata

SEQ ID NO: 312089 - DNA, 15 bp, Homo sapiens
tgataaatgtttaat

SEQ ID NO: 312090 - DNA, 15 bp, Homo sapiens
ttgataaatgtttaa

SEQ ID NO: 312091 - DNA, 15 bp, Homo sapiens
cttgataaatgttta

SEQ ID NO: 312092 - DNA, 15 bp, Homo sapiens
acttgataaatgttt

SEQ ID NO: 312093 - DNA, 15 bp, Homo sapiens
gacttgataaatgtt

SEQ ID NO: 312094 - DNA, 15 bp, Homo sapiens
tgacttgataaatgt

SEQ ID NO: 312095 - DNA, 15 bp, Homo sapiens
ttgacttgataaatg

SEQ ID NO: 312096 - DNA, 15 bp, Homo sapiens
tttgacttgataaat

SEQ ID NO: 312097 - DNA, 15 bp, Homo sapiens
ttttgacttgataaa

SEQ ID NO: 312098 - DNA, 15 bp, Homo sapiens
tttttgacttgataa

SEQ ID NO: 312099 - DNA, 15 bp, Homo sapiens
gtttttgacttgata

SEQ ID NO: 312100 - DNA, 15 bp, Homo sapiens
agtttttgacttgat

SEQ ID NO: 312101 - DNA, 15 bp, Homo sapiens
aagtttttgacttga

SEQ ID NO: 312102 - DNA, 15 bp, Homo sapiens
taagtttttgacttg

SEQ ID NO: 312103 - DNA, 15 bp, Homo sapiens
ctaagtttttgactt

SEQ ID NO: 312104 - DNA, 15 bp, Homo sapiens
cctaagtttttgact

SEQ ID NO: 312105 - DNA, 15 bp, Homo sapiens
tcctaagtttttgac

SEQ ID NO: 312106 - DNA, 15 bp, Homo sapiens
ctcctaagtttttga

SEQ ID NO: 312107 - DNA, 15 bp, Homo sapiens
gctcctaagtttttg

SEQ ID NO: 312108 - DNA, 15 bp, Homo sapiens
agctcctaagttttt

SEQ ID NO: 312109 - DNA, 15 bp, Homo sapiens
tagctcctaagtttt

SEQ ID NO: 312110 - DNA, 15 bp, Homo sapiens
atagctcctaagttt

SEQ ID NO: 312111 - DNA, 15 bp, Homo sapiens
gatagctcctaagtt

SEQ ID NO: 312112 - DNA, 15 bp, Homo sapiens
agatagctcctaagt

SEQ ID NO: 312113 - DNA, 15 bp, Homo sapiens
tagatagctcctaag

SEQ ID NO: 312114 - DNA, 15 bp, Homo sapiens
atagatagctcctaa

SEQ ID NO: 312115 - DNA, 15 bp, Homo sapiens
aatagatagctccta

SEQ ID NO: 312116 - DNA, 15 bp, Homo sapiens
taatagatagctcct

SEQ ID NO: 312117 - DNA, 15 bp, Homo sapiens
ttaatagatagctcc

SEQ ID NO: 312118 - DNA, 15 bp, Homo sapiens
attaatagatagctc

SEQ ID NO: 312119 - DNA, 15 bp, Homo sapiens
aattaatagatagct

SEQ ID NO: 312120 - DNA, 15 bp, Homo sapiens
gaattaatagatagc

SEQ ID NO: 312121 - DNA, 15 bp, Homo sapiens
agaattaatagatag

SEQ ID NO: 312122 - DNA, 15 bp, Homo sapiens
aagaattaatagata

SEQ ID NO: 312123 - DNA, 15 bp, Homo sapiens
caagaattaatagat

SEQ ID NO: 312124 - DNA, 15 bp, Homo sapiens
acaagaattaataga

SEQ ID NO: 312125 - DNA, 15 bp, Homo sapiens
gacaagaattaatag

SEQ ID NO: 312126 - DNA, 15 bp, Homo sapiens
agacaagaattaata

SEQ ID NO: 312127 - DNA, 15 bp, Homo sapiens
cagacaagaattaat

SEQ ID NO: 312128 - DNA, 15 bp, Homo sapiens
ccagacaagaattaa

SEQ ID NO: 312129 - DNA, 15 bp, Homo sapiens
tccagacaagaatta

SEQ ID NO: 312130 - DNA, 15 bp, Homo sapiens
gtccagacaagaatt

SEQ ID NO: 312131 - DNA, 15 bp, Homo sapiens
ggtccagacaagaat

SEQ ID NO: 312132 - DNA, 15 bp, Homo sapiens
tggtccagacaagaa

SEQ ID NO: 312133 - DNA, 15 bp, Homo sapiens
gtggtccagacaaga

SEQ ID NO: 312134 - DNA, 15 bp, Homo sapiens
agtggtccagacaag

SEQ ID NO: 312135 - DNA, 15 bp, Homo sapiens
cagtggtccagacaa

SEQ ID NO: 312136 - DNA, 15 bp, Homo sapiens
gcagtggtccagaca

SEQ ID NO: 312137 - DNA, 15 bp, Homo sapiens
agcagtggtccagac

SEQ ID NO: 312138 - DNA, 15 bp, Homo sapiens
tagcagtggtccaga

SEQ ID NO: 312139 - DNA, 15 bp, Homo sapiens
ttagcagtggtccag

SEQ ID NO: 312140 - DNA, 15 bp, Homo sapiens
tttagcagtggtcca

SEQ ID NO: 312141 - DNA, 15 bp, Homo sapiens
ctttagcagtggtcc

SEQ ID NO: 312142 - DNA, 15 bp, Homo sapiens
tctttagcagtggtc

SEQ ID NO: 312143 - DNA, 15 bp, Homo sapiens
gtctttagcagtggt

SEQ ID NO: 312144 - DNA, 15 bp, Homo sapiens
agtctttagcagtgg

SEQ ID NO: 312145 - DNA, 15 bp, Homo sapiens
aagtctttagcagtg

SEQ ID NO: 312146 - DNA, 15 bp, Homo sapiens
gaagtctttagcagt

SEQ ID NO: 312147 - DNA, 15 bp, Homo sapiens
agaagtctttagcag

SEQ ID NO: 312148 - DNA, 15 bp, Homo sapiens
tagaagtctttagca

SEQ ID NO: 312149 - DNA, 15 bp, Homo sapiens
ttagaagtctttagc

SEQ ID NO: 312150 - DNA, 15 bp, Homo sapiens
gttagaagtctttag

SEQ ID NO: 312151 - DNA, 15 bp, Homo sapiens
ggttagaagtcttta

SEQ ID NO: 312152 - DNA, 15 bp, Homo sapiens
tggttagaagtcttt

SEQ ID NO: 312153 - DNA, 15 bp, Homo sapiens
ctggttagaagtctt

SEQ ID NO: 312154 - DNA, 15 bp, Homo sapiens
actggttagaagtct

SEQ ID NO: 312155 - DNA, 15 bp, Homo sapiens
gactggttagaagtc

SEQ ID NO: 312156 - DNA, 15 bp, Homo sapiens
agactggttagaagt

SEQ ID NO: 312157 - DNA, 15 bp, Homo sapiens
gagactggttagaag

SEQ ID NO: 312158 - DNA, 15 bp, Homo sapiens
ggagactggttagaa

SEQ ID NO: 312159 - DNA, 15 bp, Homo sapiens
gggagactggttaga

SEQ ID NO: 312160 - DNA, 15 bp, Homo sapiens
agggagactggttag

SEQ ID NO: 312161 - DNA, 15 bp, Homo sapiens
cagggagactggtta

SEQ ID NO: 312162 - DNA, 15 bp, Homo sapiens
acagggagactggtt

SEQ ID NO: 312163 - DNA, 15 bp, Homo sapiens
aacagggagactggt

SEQ ID NO: 312164 - DNA, 15 bp, Homo sapiens
gaacagggagactgg

SEQ ID NO: 312165 - DNA, 15 bp, Homo sapiens
ggaacagggagactg

SEQ ID NO: 312166 - DNA, 15 bp, Homo sapiens
gggaacagggagact

SEQ ID NO: 312167 - DNA, 15 bp, Homo sapiens
agggaacagggagac

SEQ ID NO: 312168 - DNA, 15 bp, Homo sapiens
aagggaacagggaga

SEQ ID NO: 312169 - DNA, 15 bp, Homo sapiens
aaagggaacagggag

SEQ ID NO: 312170 - DNA, 15 bp, Homo sapiens
gaaagggaacaggga

SEQ ID NO: 312171 - DNA, 15 bp, Homo sapiens
agaaagggaacaggg

SEQ ID NO: 312172 - DNA, 15 bp, Homo sapiens
aagaaagggaacagg

SEQ ID NO: 312173 - DNA, 15 bp, Homo sapiens
aaagaaagggaacag

SEQ ID NO: 312174 - DNA, 15 bp, Homo sapiens
gaaagaaagggaaca

SEQ ID NO: 312175 - DNA, 15 bp, Homo sapiens
agaaagaaagggaac

SEQ ID NO: 312176 - DNA, 15 bp, Homo sapiens
aagaaagaaagggaa

SEQ ID NO: 312177 - DNA, 15 bp, Homo sapiens
aaagaaagaaaggga

SEQ ID NO: 312178 - DNA, 15 bp, Homo sapiens
taaagaaagaaaggg

SEQ ID NO: 312179 - DNA, 15 bp, Homo sapiens
gtaaagaaagaaagg

SEQ ID NO: 312180 - DNA, 15 bp, Homo sapiens
agtaaagaaagaaag

SEQ ID NO: 312181 - DNA, 15 bp, Homo sapiens
cagtaaagaaagaaa

SEQ ID NO: 312182 - DNA, 15 bp, Homo sapiens
acagtaaagaaagaa

SEQ ID NO: 312183 - DNA, 15 bp, Homo sapiens
gacagtaaagaaaga

SEQ ID NO: 312184 - DNA, 15 bp, Homo sapiens
tgacagtaaagaaag

SEQ ID NO: 312185 - DNA, 15 bp, Homo sapiens
ttgacagtaaagaaa

SEQ ID NO: 312186 - DNA, 15 bp, Homo sapiens
tttgacagtaaagaa

SEQ ID NO: 312187 - DNA, 15 bp, Homo sapiens
gtttgacagtaaaga

SEQ ID NO: 312188 - DNA, 15 bp, Homo sapiens
agtttgacagtaaag

SEQ ID NO: 312189 - DNA, 15 bp, Homo sapiens
gagtttgacagtaaa

SEQ ID NO: 312190 - DNA, 15 bp, Homo sapiens
ggagtttgacagtaa

SEQ ID NO: 312191 - DNA, 15 bp, Homo sapiens
tggagtttgacagta

SEQ ID NO: 312192 - DNA, 15 bp, Homo sapiens
gtggagtttgacagt

SEQ ID NO: 312193 - DNA, 15 bp, Homo sapiens
tgtggagtttgacag

SEQ ID NO: 312194 - DNA, 15 bp, Homo sapiens
ttgtggagtttgaca

SEQ ID NO: 312195 - DNA, 15 bp, Homo sapiens
tttgtggagtttgac

SEQ ID NO: 312196 - DNA, 15 bp, Homo sapiens
ctttgtggagtttga

SEQ ID NO: 312197 - DNA, 15 bp, Homo sapiens
tctttgtggagtttg

SEQ ID NO: 312198 - DNA, 15 bp, Homo sapiens
ttctttgtggagttt

SEQ ID NO: 312199 - DNA, 15 bp, Homo sapiens
gttctttgtggagtt

SEQ ID NO: 312200 - DNA, 15 bp, Homo sapiens
tgttctttgtggagt

SEQ ID NO: 312201 - DNA, 15 bp, Homo sapiens
ttgttctttgtggag

SEQ ID NO: 312202 - DNA, 15 bp, Homo sapiens
tttgttctttgtgga

SEQ ID NO: 312203 - DNA, 15 bp, Homo sapiens
ttttgttctttgtgg

SEQ ID NO: 312204 - DNA, 15 bp, Homo sapiens
tttttgttctttgtg

SEQ ID NO: 312205 - DNA, 15 bp, Homo sapiens
atttttgttctttgt

SEQ ID NO: 312206 - DNA, 15 bp, Homo sapiens
catttttgttctttg

SEQ ID NO: 312207 - DNA, 15 bp, Homo sapiens
tcatttttgttcttt

SEQ ID NO: 312208 - DNA, 15 bp, Homo sapiens
atcatttttgttctt

SEQ ID NO: 312209 - DNA, 15 bp, Homo sapiens
aatcatttttgttct

SEQ ID NO: 312210 - DNA, 15 bp, Homo sapiens
caatcatttttgttc

SEQ ID NO: 312211 - DNA, 15 bp, Homo sapiens
acaatcatttttgtt

SEQ ID NO: 312212 - DNA, 15 bp, Homo sapiens
aacaatcatttttgt

SEQ ID NO: 312213 - DNA, 15 bp, Homo sapiens
aaacaatcatttttg

SEQ ID NO: 312214 - DNA, 15 bp, Homo sapiens
taaacaatcattttt

SEQ ID NO: 312215 - DNA, 15 bp, Homo sapiens
ttaaacaatcatttt

SEQ ID NO: 312216 - DNA, 15 bp, Homo sapiens
tttaaacaatcattt

SEQ ID NO: 312217 - DNA, 15 bp, Homo sapiens
ttttaaacaatcatt

SEQ ID NO: 312218 - DNA, 15 bp, Homo sapiens
tttttaaacaatcat

SEQ ID NO: 312219 - DNA, 15 bp, Homo sapiens
atttttaaacaatca

SEQ ID NO: 312220 - DNA, 15 bp, Homo sapiens
tatttttaaacaatc

SEQ ID NO: 312221 - DNA, 15 bp, Homo sapiens
atatttttaaacaat

SEQ ID NO: 312222 - DNA, 15 bp, Homo sapiens
tatatttttaaacaa

SEQ ID NO: 312223 - DNA, 15 bp, Homo sapiens
ttatatttttaaaca

SEQ ID NO: 312224 - DNA, 15 bp, Homo sapiens
tttatatttttaaac

SEQ ID NO: 312225 - DNA, 15 bp, Homo sapiens
atttatatttttaaa

SEQ ID NO: 312226 - DNA, 15 bp, Homo sapiens
aatttatatttttaa

SEQ ID NO: 312227 - DNA, 15 bp, Homo sapiens
caatttatattttta

SEQ ID NO: 312228 - DNA, 15 bp, Homo sapiens
tcaatttatattttt

SEQ ID NO: 312229 - DNA, 15 bp, Homo sapiens
atcaatttatatttt

SEQ ID NO: 312230 - DNA, 15 bp, Homo sapiens
aatcaatttatattt

SEQ ID NO: 312231 - DNA, 15 bp, Homo sapiens
gaatcaatttatatt

SEQ ID NO: 312232 - DNA, 15 bp, Homo sapiens
tgaatcaatttatat

SEQ ID NO: 312233 - DNA, 15 bp, Homo sapiens
gtgaatcaatttata

SEQ ID NO: 312234 - DNA, 15 bp, Homo sapiens
tgtgaatcaatttat

SEQ ID NO: 312235 - DNA, 15 bp, Homo sapiens
atgtgaatcaattta

SEQ ID NO: 312236 - DNA, 15 bp, Homo sapiens
aatgtgaatcaattt

SEQ ID NO: 312237 - DNA, 15 bp, Homo sapiens
caatgtgaatcaatt

SEQ ID NO: 312238 - DNA, 15 bp, Homo sapiens
gcaatgtgaatcaat

SEQ ID NO: 312239 - DNA, 15 bp, Homo sapiens
agcaatgtgaatcaa

SEQ ID NO: 312240 - DNA, 15 bp, Homo sapiens
gagcaatgtgaatca

SEQ ID NO: 312241 - DNA, 15 bp, Homo sapiens
agagcaatgtgaatc

SEQ ID NO: 312242 - DNA, 15 bp, Homo sapiens
gagagcaatgtgaat

SEQ ID NO: 312243 - DNA, 15 bp, Homo sapiens
agagagcaatgtgaa

SEQ ID NO: 312244 - DNA, 15 bp, Homo sapiens
tagagagcaatgtga

SEQ ID NO: 312245 - DNA, 15 bp, Homo sapiens
gtagagagcaatgtg

SEQ ID NO: 312246 - DNA, 15 bp, Homo sapiens
agtagagagcaatgt

SEQ ID NO: 312247 - DNA, 15 bp, Homo sapiens
aagtagagagcaatg

SEQ ID NO: 312248 - DNA, 15 bp, Homo sapiens
caagtagagagcaat

SEQ ID NO: 312249 - DNA, 15 bp, Homo sapiens
tcaagtagagagcaa

SEQ ID NO: 312250 - DNA, 15 bp, Homo sapiens
ttcaagtagagagca

SEQ ID NO: 312251 - DNA, 15 bp, Homo sapiens
cttcaagtagagagc

SEQ ID NO: 312252 - DNA, 15 bp, Homo sapiens
acttcaagtagagag

SEQ ID NO: 312253 - DNA, 15 bp, Homo sapiens
tacttcaagtagaga

SEQ ID NO: 312254 - DNA, 15 bp, Homo sapiens
gtacttcaagtagag

SEQ ID NO: 312255 - DNA, 15 bp, Homo sapiens
agtacttcaagtaga

SEQ ID NO: 312256 - DNA, 15 bp, Homo sapiens
aagtacttcaagtag

SEQ ID NO: 312257 - DNA, 15 bp, Homo sapiens
taagtacttcaagta

SEQ ID NO: 312258 - DNA, 15 bp, Homo sapiens
ttaagtacttcaagt

SEQ ID NO: 312259 - DNA, 15 bp, Homo sapiens
gttaagtacttcaag

SEQ ID NO: 312260 - DNA, 15 bp, Homo sapiens
tgttaagtacttcaa

SEQ ID NO: 312261 - DNA, 15 bp, Homo sapiens
ctgttaagtacttca

SEQ ID NO: 312262 - DNA, 15 bp, Homo sapiens
cctgttaagtacttc

SEQ ID NO: 312263 - DNA, 15 bp, Homo sapiens
tcctgttaagtactt

SEQ ID NO: 312264 - DNA, 15 bp, Homo sapiens
ttcctgttaagtact

SEQ ID NO: 312265 - DNA, 15 bp, Homo sapiens
attcctgttaagtac

SEQ ID NO: 312266 - DNA, 15 bp, Homo sapiens
aattcctgttaagta

SEQ ID NO: 312267 - DNA, 15 bp, Homo sapiens
taattcctgttaagt

SEQ ID NO: 312268 - DNA, 15 bp, Homo sapiens
ataattcctgttaag

SEQ ID NO: 312269 - DNA, 15 bp, Homo sapiens
tataattcctgttaa

SEQ ID NO: 312270 - DNA, 15 bp, Homo sapiens
ttataattcctgtta

SEQ ID NO: 312271 - DNA, 15 bp, Homo sapiens
tttataattcctgtt

SEQ ID NO: 312272 - DNA, 15 bp, Homo sapiens
ctttataattcctgt

SEQ ID NO: 312273 - DNA, 15 bp, Homo sapiens
gctttataattcctg

SEQ ID NO: 312274 - DNA, 15 bp, Homo sapiens
ggctttataattcct

SEQ ID NO: 312275 - DNA, 15 bp, Homo sapiens
gggctttataattcc

SEQ ID NO: 312276 - DNA, 15 bp, Homo sapiens
ggggctttataattc

SEQ ID NO: 312277 - DNA, 15 bp, Homo sapiens
aggggctttataatt

SEQ ID NO: 312278 - DNA, 15 bp, Homo sapiens
taggggctttataat

SEQ ID NO: 312279 - DNA, 15 bp, Homo sapiens
gtaggggctttataa

SEQ ID NO: 312280 - DNA, 15 bp, Homo sapiens
agtaggggctttata

SEQ ID NO: 312281 - DNA, 15 bp, Homo sapiens
cagtaggggctttat

SEQ ID NO: 312282 - DNA, 15 bp, Homo sapiens
tcagtaggggcttta

SEQ ID NO: 312283 - DNA, 15 bp, Homo sapiens
gtcagtaggggcttt

SEQ ID NO: 312284 - DNA, 15 bp, Homo sapiens
agtcagtaggggctt

SEQ ID NO: 312285 - DNA, 15 bp, Homo sapiens
aagtcagtaggggct

SEQ ID NO: 312286 - DNA, 15 bp, Homo sapiens
gaagtcagtaggggc

SEQ ID NO: 312287 - DNA, 15 bp, Homo sapiens
ggaagtcagtagggg

SEQ ID NO: 312288 - DNA, 15 bp, Homo sapiens
gggaagtcagtaggg

SEQ ID NO: 312289 - DNA, 15 bp, Homo sapiens
tgggaagtcagtagg

SEQ ID NO: 312290 - DNA, 15 bp, Homo sapiens
atgggaagtcagtag

SEQ ID NO: 312291 - DNA, 15 bp, Homo sapiens
gatgggaagtcagta

SEQ ID NO: 312292 - DNA, 15 bp, Homo sapiens
ggatgggaagtcagt

SEQ ID NO: 312293 - DNA, 15 bp, Homo sapiens
aggatgggaagtcag

SEQ ID NO: 312294 - DNA, 15 bp, Homo sapiens
gaggatgggaagtca

SEQ ID NO: 312295 - DNA, 15 bp, Homo sapiens
tgaggatgggaagtc

SEQ ID NO: 312296 - DNA, 15 bp, Homo sapiens
atgaggatgggaagt

SEQ ID NO: 312297 - DNA, 15 bp, Homo sapiens
gatgaggatgggaag

SEQ ID NO: 312298 - DNA, 15 bp, Homo sapiens
agatgaggatgggaa

SEQ ID NO: 312299 - DNA, 15 bp, Homo sapiens
aagatgaggatggga

SEQ ID NO: 312300 - DNA, 15 bp, Homo sapiens
caagatgaggatggg

SEQ ID NO: 312301 - DNA, 15 bp, Homo sapiens
acaagatgaggatgg

SEQ ID NO: 312302 - DNA, 15 bp, Homo sapiens
tacaagatgaggatg

SEQ ID NO: 312303 - DNA, 15 bp, Homo sapiens
ctacaagatgaggat

SEQ ID NO: 312304 - DNA, 15 bp, Homo sapiens
tctacaagatgagga

SEQ ID NO: 312305 - DNA, 15 bp, Homo sapiens
ttctacaagatgagg

SEQ ID NO: 312306 - DNA, 15 bp, Homo sapiens
attctacaagatgag

SEQ ID NO: 312307 - DNA, 15 bp, Homo sapiens
aattctacaagatga

SEQ ID NO: 312308 - DNA, 15 bp, Homo sapiens
aaattctacaagatg

SEQ ID NO: 312309 - DNA, 15 bp, Homo sapiens
aaaattctacaagat

SEQ ID NO: 312310 - DNA, 15 bp, Homo sapiens
gaaaattctacaaga

SEQ ID NO: 312311 - DNA, 15 bp, Homo sapiens
agaaaattctacaag

SEQ ID NO: 312312 - DNA, 15 bp, Homo sapiens
gagaaaattctacaa

SEQ ID NO: 312313 - DNA, 15 bp, Homo sapiens
ggagaaaattctaca

SEQ ID NO: 312314 - DNA, 15 bp, Homo sapiens
aggagaaaattctac

SEQ ID NO: 312315 - DNA, 15 bp, Homo sapiens
aaggagaaaattcta

SEQ ID NO: 312316 - DNA, 15 bp, Homo sapiens
caaggagaaaattct

SEQ ID NO: 312317 - DNA, 15 bp, Homo sapiens
acaaggagaaaattc

SEQ ID NO: 312318 - DNA, 15 bp, Homo sapiens
gacaaggagaaaatt

SEQ ID NO: 312319 - DNA, 15 bp, Homo sapiens
tgacaaggagaaaat

SEQ ID NO: 312320 - DNA, 15 bp, Homo sapiens
gtgacaaggagaaaa

SEQ ID NO: 312321 - DNA, 15 bp, Homo sapiens
agtgacaaggagaaa

SEQ ID NO: 312322 - DNA, 15 bp, Homo sapiens
cagtgacaaggagaa

SEQ ID NO: 312323 - DNA, 15 bp, Homo sapiens
acagtgacaaggaga

SEQ ID NO: 312324 - DNA, 15 bp, Homo sapiens
cacagtgacaaggag

SEQ ID NO: 312325 - DNA, 15 bp, Homo sapiens
gcacagtgacaagga

SEQ ID NO: 312326 - DNA, 15 bp, Homo sapiens
agcacagtgacaagg

SEQ ID NO: 312327 - DNA, 15 bp, Homo sapiens
aagcacagtgacaag

SEQ ID NO: 312328 - DNA, 15 bp, Homo sapiens
aaagcacagtgacaa

SEQ ID NO: 312329 - DNA, 15 bp, Homo sapiens
taaagcacagtgaca

SEQ ID NO: 312330 - DNA, 15 bp, Homo sapiens
ctaaagcacagtgac

SEQ ID NO: 312331 - DNA, 15 bp, Homo sapiens
gctaaagcacagtga

SEQ ID NO: 312332 - DNA, 15 bp, Homo sapiens
ggctaaagcacagtg

SEQ ID NO: 312333 - DNA, 15 bp, Homo sapiens
tggctaaagcacagt

SEQ ID NO: 312334 - DNA, 15 bp, Homo sapiens
gtggctaaagcacag

SEQ ID NO: 312335 - DNA, 15 bp, Homo sapiens
tgtggctaaagcaca

SEQ ID NO: 312336 - DNA, 15 bp, Homo sapiens
gtgtggctaaagcac

SEQ ID NO: 312337 - DNA, 15 bp, Homo sapiens
agtgtggctaaagca

SEQ ID NO: 312338 - DNA, 15 bp, Homo sapiens
cagtgtggctaaagc

SEQ ID NO: 312339 - DNA, 15 bp, Homo sapiens
tcagtgtggctaaag

SEQ ID NO: 312340 - DNA, 15 bp, Homo sapiens
ttcagtgtggctaaa

SEQ ID NO: 312341 - DNA, 15 bp, Homo sapiens
gttcagtgtggctaa

SEQ ID NO: 312342 - DNA, 15 bp, Homo sapiens
ggttcagtgtggcta

SEQ ID NO: 312343 - DNA, 15 bp, Homo sapiens
aggttcagtgtggct

SEQ ID NO: 312344 - DNA, 15 bp, Homo sapiens
aaggttcagtgtggc

SEQ ID NO: 312345 - DNA, 15 bp, Homo sapiens
aaaggttcagtgtgg

SEQ ID NO: 312346 - DNA, 15 bp, Homo sapiens
aaaaggttcagtgtg

SEQ ID NO: 312347 - DNA, 15 bp, Homo sapiens
aaaaaggttcagtgt

SEQ ID NO: 312348 - DNA, 15 bp, Homo sapiens
gaaaaaggttcagtg

SEQ ID NO: 312349 - DNA, 15 bp, Homo sapiens
agaaaaaggttcagt

SEQ ID NO: 312350 - DNA, 15 bp, Homo sapiens
aagaaaaaggttcag

SEQ ID NO: 312351 - DNA, 15 bp, Homo sapiens
aaagaaaaaggttca

SEQ ID NO: 312352 - DNA, 15 bp, Homo sapiens
taaagaaaaaggttc

SEQ ID NO: 312353 - DNA, 15 bp, Homo sapiens
ttaaagaaaaaggtt

SEQ ID NO: 312354 - DNA, 15 bp, Homo sapiens
tttaaagaaaaaggt

SEQ ID NO: 312355 - DNA, 15 bp, Homo sapiens
ttttaaagaaaaagg

SEQ ID NO: 312356 - DNA, 15 bp, Homo sapiens
attttaaagaaaaag

SEQ ID NO: 312357 - DNA, 15 bp, Homo sapiens
cattttaaagaaaaa

SEQ ID NO: 312358 - DNA, 15 bp, Homo sapiens
gcattttaaagaaaa

SEQ ID NO: 312359 - DNA, 15 bp, Homo sapiens
ggcattttaaagaaa

SEQ ID NO: 312360 - DNA, 15 bp, Homo sapiens
tggcattttaaagaa

SEQ ID NO: 312361 - DNA, 15 bp, Homo sapiens
ttggcattttaaaga

SEQ ID NO: 312362 - DNA, 15 bp, Homo sapiens
cttggcattttaaag

SEQ ID NO: 312363 - DNA, 15 bp, Homo sapiens
gcttggcattttaaa

SEQ ID NO: 312364 - DNA, 15 bp, Homo sapiens
ggcttggcattttaa

SEQ ID NO: 312365 - DNA, 15 bp, Homo sapiens
aggcttggcatttta

SEQ ID NO: 312366 - DNA, 15 bp, Homo sapiens
taggcttggcatttt

SEQ ID NO: 312367 - DNA, 15 bp, Homo sapiens
ataggcttggcattt

SEQ ID NO: 312368 - DNA, 15 bp, Homo sapiens
aataggcttggcatt

SEQ ID NO: 312369 - DNA, 15 bp, Homo sapiens
gaataggcttggcat

SEQ ID NO: 312370 - DNA, 15 bp, Homo sapiens
agaataggcttggca

SEQ ID NO: 312371 - DNA, 15 bp, Homo sapiens
aagaataggcttggc

SEQ ID NO: 312372 - DNA, 15 bp, Homo sapiens
taagaataggcttgg

SEQ ID NO: 312373 - DNA, 15 bp, Homo sapiens
gtaagaataggcttg

SEQ ID NO: 312374 - DNA, 15 bp, Homo sapiens
ggtaagaataggctt

SEQ ID NO: 312375 - DNA, 15 bp, Homo sapiens
aggtaagaataggct

SEQ ID NO: 312376 - DNA, 15 bp, Homo sapiens
aaggtaagaataggc

SEQ ID NO: 312377 - DNA, 15 bp, Homo sapiens
taaggtaagaatagg

SEQ ID NO: 312378 - DNA, 15 bp, Homo sapiens
ctaaggtaagaatag

SEQ ID NO: 312379 - DNA, 15 bp, Homo sapiens
cctaaggtaagaata

SEQ ID NO: 312380 - DNA, 15 bp, Homo sapiens
gcctaaggtaagaat

SEQ ID NO: 312381 - DNA, 15 bp, Homo sapiens
agcctaaggtaagaa

SEQ ID NO: 312382 - DNA, 15 bp, Homo sapiens
aagcctaaggtaaga

SEQ ID NO: 312383 - DNA, 15 bp, Homo sapiens
aaagcctaaggtaag

SEQ ID NO: 312384 - DNA, 15 bp, Homo sapiens
aaaagcctaaggtaa

SEQ ID NO: 312385 - DNA, 15 bp, Homo sapiens
taaaagcctaaggta

SEQ ID NO: 312386 - DNA, 15 bp, Homo sapiens
ataaaagcctaaggt

SEQ ID NO: 312387 - DNA, 15 bp, Homo sapiens
tataaaagcctaagg

SEQ ID NO: 312388 - DNA, 15 bp, Homo sapiens
atataaaagcctaag

SEQ ID NO: 312389 - DNA, 15 bp, Homo sapiens
aatataaaagcctaa

SEQ ID NO: 312390 - DNA, 15 bp, Homo sapiens
aaatataaaagccta

SEQ ID NO: 312391 - DNA, 15 bp, Homo sapiens
gaaatataaaagcct

SEQ ID NO: 312392 - DNA, 15 bp, Homo sapiens
agaaatataaaagcc

SEQ ID NO: 312393 - DNA, 15 bp, Homo sapiens
aagaaatataaaagc

SEQ ID NO: 312394 - DNA, 15 bp, Homo sapiens
gaagaaatataaaag

SEQ ID NO: 312395 - DNA, 15 bp, Homo sapiens
agaagaaatataaaa

SEQ ID NO: 312396 - DNA, 15 bp, Homo sapiens
aagaagaaatataaa

SEQ ID NO: 312397 - DNA, 15 bp, Homo sapiens
gaagaagaaatataa

SEQ ID NO: 312398 - DNA, 15 bp, Homo sapiens
ggaagaagaaatata

SEQ ID NO: 312399 - DNA, 15 bp, Homo sapiens
aggaagaagaaatat

SEQ ID NO: 312400 - DNA, 15 bp, Homo sapiens
aaggaagaagaaata

SEQ ID NO: 312401 - DNA, 15 bp, Homo sapiens
gaaggaagaagaaat

SEQ ID NO: 312402 - DNA, 15 bp, Homo sapiens
agaaggaagaagaaa

SEQ ID NO: 312403 - DNA, 15 bp, Homo sapiens
cagaaggaagaagaa

SEQ ID NO: 312404 - DNA, 15 bp, Homo sapiens
gcagaaggaagaaga

SEQ ID NO: 312405 - DNA, 15 bp, Homo sapiens
ggcagaaggaagaag

SEQ ID NO: 312406 - DNA, 15 bp, Homo sapiens
aggcagaaggaagaa

SEQ ID NO: 312407 - DNA, 15 bp, Homo sapiens
caggcagaaggaaga

SEQ ID NO: 312408 - DNA, 15 bp, Homo sapiens
ccaggcagaaggaag

SEQ ID NO: 312409 - DNA, 15 bp, Homo sapiens
tccaggcagaaggaa

SEQ ID NO: 312410 - DNA, 15 bp, Homo sapiens
ttccaggcagaagga

SEQ ID NO: 312411 - DNA, 15 bp, Homo sapiens
attccaggcagaagg

SEQ ID NO: 312412 - DNA, 15 bp, Homo sapiens
tattccaggcagaag

SEQ ID NO: 312413 - DNA, 15 bp, Homo sapiens
gtattccaggcagaa

SEQ ID NO: 312414 - DNA, 15 bp, Homo sapiens
agtattccaggcaga

SEQ ID NO: 312415 - DNA, 15 bp, Homo sapiens
gagtattccaggcag

SEQ ID NO: 312416 - DNA, 15 bp, Homo sapiens
agagtattccaggca

SEQ ID NO: 312417 - DNA, 15 bp, Homo sapiens
aagagtattccaggc

SEQ ID NO: 312418 - DNA, 15 bp, Homo sapiens
aaagagtattccagg

SEQ ID NO: 312419 - DNA, 15 bp, Homo sapiens
aaaagagtattccag

SEQ ID NO: 312420 - DNA, 15 bp, Homo sapiens
gaaaagagtattcca

SEQ ID NO: 312421 - DNA, 15 bp, Homo sapiens
ggaaaagagtattcc

SEQ ID NO: 312422 - DNA, 15 bp, Homo sapiens
gggaaaagagtattc

SEQ ID NO: 312423 - DNA, 15 bp, Homo sapiens
tgggaaaagagtatt

SEQ ID NO: 312424 - DNA, 15 bp, Homo sapiens
gtgggaaaagagtat

SEQ ID NO: 312425 - DNA, 15 bp, Homo sapiens
tgtgggaaaagagta

SEQ ID NO: 312426 - DNA, 15 bp, Homo sapiens
ctgtgggaaaagagt

SEQ ID NO: 312427 - DNA, 15 bp, Homo sapiens
actgtgggaaaagag

SEQ ID NO: 312428 - DNA, 15 bp, Homo sapiens
aactgtgggaaaaga

SEQ ID NO: 312429 - DNA, 15 bp, Homo sapiens
aaactgtgggaaaag

SEQ ID NO: 312430 - DNA, 15 bp, Homo sapiens
aaaactgtgggaaaa

SEQ ID NO: 312431 - DNA, 15 bp, Homo sapiens
caaaactgtgggaaa

SEQ ID NO: 312432 - DNA, 15 bp, Homo sapiens
gcaaaactgtgggaa

SEQ ID NO: 312433 - DNA, 15 bp, Homo sapiens
tgcaaaactgtggga

SEQ ID NO: 312434 - DNA, 15 bp, Homo sapiens
atgcaaaactgtggg

SEQ ID NO: 312435 - DNA, 15 bp, Homo sapiens
tatgcaaaactgtgg

SEQ ID NO: 312436 - DNA, 15 bp, Homo sapiens
ctatgcaaaactgtg

SEQ ID NO: 312437 - DNA, 15 bp, Homo sapiens
gctatgcaaaactgt

SEQ ID NO: 312438 - DNA, 15 bp, Homo sapiens
ggctatgcaaaactg

SEQ ID NO: 312439 - DNA, 15 bp, Homo sapiens
tggctatgcaaaact

SEQ ID NO: 312440 - DNA, 15 bp, Homo sapiens
ctggctatgcaaaac

SEQ ID NO: 312441 - DNA, 15 bp, Homo sapiens
actggctatgcaaaa

SEQ ID NO: 312442 - DNA, 15 bp, Homo sapiens
cactggctatgcaaa

SEQ ID NO: 312443 - DNA, 15 bp, Homo sapiens
gcactggctatgcaa

SEQ ID NO: 312444 - DNA, 15 bp, Homo sapiens
ggcactggctatgca

SEQ ID NO: 312445 - DNA, 15 bp, Homo sapiens
aggcactggctatgc

SEQ ID NO: 312446 - DNA, 15 bp, Homo sapiens
aaggcactggctatg

SEQ ID NO: 312447 - DNA, 15 bp, Homo sapiens
aaaggcactggctat

SEQ ID NO: 312448 - DNA, 15 bp, Homo sapiens
gaaaggcactggcta

SEQ ID NO: 312449 - DNA, 15 bp, Homo sapiens
agaaaggcactggct

SEQ ID NO: 312450 - DNA, 15 bp, Homo sapiens
cagaaaggcactggc

SEQ ID NO: 312451 - DNA, 15 bp, Homo sapiens
acagaaaggcactgg

SEQ ID NO: 312452 - DNA, 15 bp, Homo sapiens
gacagaaaggcactg

SEQ ID NO: 312453 - DNA, 15 bp, Homo sapiens
agacagaaaggcact

SEQ ID NO: 312454 - DNA, 15 bp, Homo sapiens
aagacagaaaggcac

SEQ ID NO: 312455 - DNA, 15 bp, Homo sapiens
aaagacagaaaggca

SEQ ID NO: 312456 - DNA, 15 bp, Homo sapiens
gaaagacagaaaggc

SEQ ID NO: 312457 - DNA, 15 bp, Homo sapiens
tgaaagacagaaagg

SEQ ID NO: 312458 - DNA, 15 bp, Homo sapiens
ctgaaagacagaaag

SEQ ID NO: 312459 - DNA, 15 bp, Homo sapiens
tctgaaagacagaaa

SEQ ID NO: 312460 - DNA, 15 bp, Homo sapiens
ttctgaaagacagaa

SEQ ID NO: 312461 - DNA, 15 bp, Homo sapiens
gttctgaaagacaga

SEQ ID NO: 312462 - DNA, 15 bp, Homo sapiens
agttctgaaagacag

SEQ ID NO: 312463 - DNA, 15 bp, Homo sapiens
gagttctgaaagaca

SEQ ID NO: 312464 - DNA, 15 bp, Homo sapiens
tgagttctgaaagac

SEQ ID NO: 312465 - DNA, 15 bp, Homo sapiens
ctgagttctgaaaga

SEQ ID NO: 312466 - DNA, 15 bp, Homo sapiens
gctgagttctgaaag

SEQ ID NO: 312467 - DNA, 15 bp, Homo sapiens
agctgagttctgaaa

SEQ ID NO: 312468 - DNA, 15 bp, Homo sapiens
gagctgagttctgaa

SEQ ID NO: 312469 - DNA, 15 bp, Homo sapiens
tgagctgagttctga

SEQ ID NO: 312470 - DNA, 15 bp, Homo sapiens
ctgagctgagttctg

SEQ ID NO: 312471 - DNA, 15 bp, Homo sapiens
tctgagctgagttct

SEQ ID NO: 312472 - DNA, 15 bp, Homo sapiens
ctctgagctgagttc

SEQ ID NO: 312473 - DNA, 15 bp, Homo sapiens
cctctgagctgagtt

SEQ ID NO: 312474 - DNA, 15 bp, Homo sapiens
ccctctgagctgagt

SEQ ID NO: 312475 - DNA, 15 bp, Homo sapiens
gccctctgagctgag

SEQ ID NO: 312476 - DNA, 15 bp, Homo sapiens
agccctctgagctga

SEQ ID NO: 312477 - DNA, 15 bp, Homo sapiens
aagccctctgagctg

SEQ ID NO: 312478 - DNA, 15 bp, Homo sapiens
gaagccctctgagct

SEQ ID NO: 312479 - DNA, 15 bp, Homo sapiens
ggaagccctctgagc

SEQ ID NO: 312480 - DNA, 15 bp, Homo sapiens
aggaagccctctgag

SEQ ID NO: 312481 - DNA, 15 bp, Homo sapiens
aaggaagccctctga

SEQ ID NO: 312482 - DNA, 15 bp, Homo sapiens
caaggaagccctctg

SEQ ID NO: 312483 - DNA, 15 bp, Homo sapiens
tcaaggaagccctct

SEQ ID NO: 312484 - DNA, 15 bp, Homo sapiens
gtcaaggaagccctc

SEQ ID NO: 312485 - DNA, 15 bp, Homo sapiens
ggtcaaggaagccct

SEQ ID NO: 312486 - DNA, 15 bp, Homo sapiens
tggtcaaggaagccc

SEQ ID NO: 312487 - DNA, 15 bp, Homo sapiens
gtggtcaaggaagcc

SEQ ID NO: 312488 - DNA, 15 bp, Homo sapiens
ggtggtcaaggaagc

SEQ ID NO: 312489 - DNA, 15 bp, Homo sapiens
tggtggtcaaggaag

SEQ ID NO: 312490 - DNA, 15 bp, Homo sapiens
ttggtggtcaaggaa

SEQ ID NO: 312491 - DNA, 15 bp, Homo sapiens
cttggtggtcaagga

SEQ ID NO: 312492 - DNA, 15 bp, Homo sapiens
gcttggtggtcaagg

SEQ ID NO: 312493 - DNA, 15 bp, Homo sapiens
agcttggtggtcaag

SEQ ID NO: 312494 - DNA, 15 bp, Homo sapiens
tagcttggtggtcaa

SEQ ID NO: 312495 - DNA, 15 bp, Homo sapiens
ttagcttggtggtca

SEQ ID NO: 312496 - DNA, 15 bp, Homo sapiens
tttagcttggtggtc

SEQ ID NO: 312497 - DNA, 15 bp, Homo sapiens
ttttagcttggtggt

SEQ ID NO: 312498 - DNA, 15 bp, Homo sapiens
attttagcttggtgg

SEQ ID NO: 312499 - DNA, 15 bp, Homo sapiens
gattttagcttggtg

SEQ ID NO: 312500 - DNA, 15 bp, Homo sapiens
tgattttagcttggt

SEQ ID NO: 312501 - DNA, 15 bp, Homo sapiens
atgattttagcttgg

SEQ ID NO: 312502 - DNA, 15 bp, Homo sapiens
gatgattttagcttg

SEQ ID NO: 312503 - DNA, 15 bp, Homo sapiens
tgatgattttagctt

SEQ ID NO: 312504 - DNA, 15 bp, Homo sapiens
gtgatgattttagct

SEQ ID NO: 312505 - DNA, 15 bp, Homo sapiens
agtgatgattttagc

SEQ ID NO: 312506 - DNA, 15 bp, Homo sapiens
cagtgatgattttag

SEQ ID NO: 312507 - DNA, 15 bp, Homo sapiens
acagtgatgatttta

SEQ ID NO: 312508 - DNA, 15 bp, Homo sapiens
cacagtgatgatttt

SEQ ID NO: 312509 - DNA, 15 bp, Homo sapiens
acacagtgatgattt

SEQ ID NO: 312510 - DNA, 15 bp, Homo sapiens
tacacagtgatgatt

SEQ ID NO: 312511 - DNA, 15 bp, Homo sapiens
atacacagtgatgat

SEQ ID NO: 312512 - DNA, 15 bp, Homo sapiens
aatacacagtgatga

SEQ ID NO: 312513 - DNA, 15 bp, Homo sapiens
caatacacagtgatg

SEQ ID NO: 312514 - DNA, 15 bp, Homo sapiens
acaatacacagtgat

SEQ ID NO: 312515 - DNA, 15 bp, Homo sapiens
tacaatacacagtga

SEQ ID NO: 312516 - DNA, 15 bp, Homo sapiens
atacaatacacagtg

SEQ ID NO: 312517 - DNA, 15 bp, Homo sapiens
gatacaatacacagt

SEQ ID NO: 312518 - DNA, 15 bp, Homo sapiens
tgatacaatacacag

SEQ ID NO: 312519 - DNA, 15 bp, Homo sapiens
atgatacaatacaca

SEQ ID NO: 312520 - DNA, 15 bp, Homo sapiens
aatgatacaatacac

SEQ ID NO: 312521 - DNA, 15 bp, Homo sapiens
gaatgatacaataca

SEQ ID NO: 312522 - DNA, 15 bp, Homo sapiens
agaatgatacaatac

SEQ ID NO: 312523 - DNA, 15 bp, Homo sapiens
gagaatgatacaata

SEQ ID NO: 312524 - DNA, 15 bp, Homo sapiens
ggagaatgatacaat

SEQ ID NO: 312525 - DNA, 15 bp, Homo sapiens
aggagaatgatacaa

SEQ ID NO: 312526 - DNA, 15 bp, Homo sapiens
aaggagaatgataca

SEQ ID NO: 312527 - DNA, 15 bp, Homo sapiens
gaaggagaatgatac

SEQ ID NO: 312528 - DNA, 15 bp, Homo sapiens
tgaaggagaatgata

SEQ ID NO: 312529 - DNA, 15 bp, Homo sapiens
ttgaaggagaatgat

SEQ ID NO: 312530 - DNA, 15 bp, Homo sapiens
tttgaaggagaatga

SEQ ID NO: 312531 - DNA, 15 bp, Homo sapiens
ttttgaaggagaatg

SEQ ID NO: 312532 - DNA, 15 bp, Homo sapiens
cttttgaaggagaat

SEQ ID NO: 312533 - DNA, 15 bp, Homo sapiens
acttttgaaggagaa

SEQ ID NO: 312534 - DNA, 15 bp, Homo sapiens
cacttttgaaggaga

SEQ ID NO: 312535 - DNA, 15 bp, Homo sapiens
acacttttgaaggag

SEQ ID NO: 312536 - DNA, 15 bp, Homo sapiens
tacacttttgaagga

SEQ ID NO: 312537 - DNA, 15 bp, Homo sapiens
ttacacttttgaagg

SEQ ID NO: 312538 - DNA, 15 bp, Homo sapiens
gttacacttttgaag

SEQ ID NO: 312539 - DNA, 15 bp, Homo sapiens
tgttacacttttgaa

SEQ ID NO: 312540 - DNA, 15 bp, Homo sapiens
ctgttacacttttga

SEQ ID NO: 312541 - DNA, 15 bp, Homo sapiens
gctgttacacttttg

SEQ ID NO: 312542 - DNA, 15 bp, Homo sapiens
tgctgttacactttt

SEQ ID NO: 312543 - DNA, 15 bp, Homo sapiens
atgctgttacacttt

SEQ ID NO: 312544 - DNA, 15 bp, Homo sapiens
gatgctgttacactt

SEQ ID NO: 312545 - DNA, 15 bp, Homo sapiens
ggatgctgttacact

SEQ ID NO: 312546 - DNA, 15 bp, Homo sapiens
tggatgctgttacac

SEQ ID NO: 312547 - DNA, 15 bp, Homo sapiens
atggatgctgttaca

SEQ ID NO: 312548 - DNA, 15 bp, Homo sapiens
gatggatgctgttac

SEQ ID NO: 312549 - DNA, 15 bp, Homo sapiens
agatggatgctgtta

SEQ ID NO: 312550 - DNA, 15 bp, Homo sapiens
tagatggatgctgtt

SEQ ID NO: 312551 - DNA, 15 bp, Homo sapiens
atagatggatgctgt

SEQ ID NO: 312552 - DNA, 15 bp, Homo sapiens
catagatggatgctg

SEQ ID NO: 312553 - DNA, 15 bp, Homo sapiens
tcatagatggatgct

SEQ ID NO: 312554 - DNA, 15 bp, Homo sapiens
gtcatagatggatgc

SEQ ID NO: 312555 - DNA, 15 bp, Homo sapiens
agtcatagatggatg

SEQ ID NO: 312556 - DNA, 15 bp, Homo sapiens
tagtcatagatggat

SEQ ID NO: 312557 - DNA, 15 bp, Homo sapiens
atagtcatagatgga

SEQ ID NO: 312558 - DNA, 15 bp, Homo sapiens
aatagtcatagatgg

SEQ ID NO: 312559 - DNA, 15 bp, Homo sapiens
aaatagtcatagatg

SEQ ID NO: 312560 - DNA, 15 bp, Homo sapiens
gaaatagtcatagat

SEQ ID NO: 312561 - DNA, 15 bp, Homo sapiens
ggaaatagtcataga

SEQ ID NO: 312562 - DNA, 15 bp, Homo sapiens
gggaaatagtcatag

SEQ ID NO: 312563 - DNA, 15 bp, Homo sapiens
tgggaaatagtcata

SEQ ID NO: 312564 - DNA, 15 bp, Homo sapiens
gtgggaaatagtcat

SEQ ID NO: 312565 - DNA, 15 bp, Homo sapiens
ggtgggaaatagtca

SEQ ID NO: 312566 - DNA, 15 bp, Homo sapiens
tggtgggaaatagtc

SEQ ID NO: 312567 - DNA, 15 bp, Homo sapiens
atggtgggaaatagt

SEQ ID NO: 312568 - DNA, 15 bp, Homo sapiens
gatggtgggaaatag

SEQ ID NO: 312569 - DNA, 15 bp, Homo sapiens
agatggtgggaaata

SEQ ID NO: 312570 - DNA, 15 bp, Homo sapiens
cagatggtgggaaat

SEQ ID NO: 312571 - DNA, 15 bp, Homo sapiens
tcagatggtgggaaa

SEQ ID NO: 312572 - DNA, 15 bp, Homo sapiens
ttcagatggtgggaa

SEQ ID NO: 312573 - DNA, 15 bp, Homo sapiens
tttcagatggtggga

SEQ ID NO: 312574 - DNA, 15 bp, Homo sapiens
atttcagatggtggg

SEQ ID NO: 312575 - DNA, 15 bp, Homo sapiens
aatttcagatggtgg

SEQ ID NO: 312576 - DNA, 15 bp, Homo sapiens
caatttcagatggtg

SEQ ID NO: 312577 - DNA, 15 bp, Homo sapiens
gcaatttcagatggt

SEQ ID NO: 312578 - DNA, 15 bp, Homo sapiens
ggcaatttcagatgg

SEQ ID NO: 312579 - DNA, 15 bp, Homo sapiens
aggcaatttcagatg

SEQ ID NO: 312580 - DNA, 15 bp, Homo sapiens
aaggcaatttcagat

SEQ ID NO: 312581 - DNA, 15 bp, Homo sapiens
aaaggcaatttcaga

SEQ ID NO: 312582 - DNA, 15 bp, Homo sapiens
gaaaggcaatttcag

SEQ ID NO: 312583 - DNA, 15 bp, Homo sapiens
agaaaggcaatttca

SEQ ID NO: 312584 - DNA, 15 bp, Homo sapiens
aagaaaggcaatttc

SEQ ID NO: 312585 - DNA, 15 bp, Homo sapiens
caagaaaggcaattt

SEQ ID NO: 312586 - DNA, 15 bp, Homo sapiens
acaagaaaggcaatt

SEQ ID NO: 312587 - DNA, 15 bp, Homo sapiens
aacaagaaaggcaat

SEQ ID NO: 312588 - DNA, 15 bp, Homo sapiens
taacaagaaaggcaa

SEQ ID NO: 312589 - DNA, 15 bp, Homo sapiens
gtaacaagaaaggca

SEQ ID NO: 312590 - DNA, 15 bp, Homo sapiens
ggtaacaagaaaggc

SEQ ID NO: 312591 - DNA, 15 bp, Homo sapiens
aggtaacaagaaagg

SEQ ID NO: 312592 - DNA, 15 bp, Homo sapiens
caggtaacaagaaag

SEQ ID NO: 312593 - DNA, 15 bp, Homo sapiens
acaggtaacaagaaa

SEQ ID NO: 312594 - DNA, 15 bp, Homo sapiens
gacaggtaacaagaa

SEQ ID NO: 312595 - DNA, 15 bp, Homo sapiens
agacaggtaacaaga

SEQ ID NO: 312596 - DNA, 15 bp, Homo sapiens
gagacaggtaacaag

SEQ ID NO: 312597 - DNA, 15 bp, Homo sapiens
ggagacaggtaacaa

SEQ ID NO: 312598 - DNA, 15 bp, Homo sapiens
gggagacaggtaaca

SEQ ID NO: 312599 - DNA, 15 bp, Homo sapiens
ggggagacaggtaac

SEQ ID NO: 312600 - DNA, 15 bp, Homo sapiens
tggggagacaggtaa

SEQ ID NO: 312601 - DNA, 15 bp, Homo sapiens
atggggagacaggta

SEQ ID NO: 312602 - DNA, 15 bp, Homo sapiens
gatggggagacaggt

SEQ ID NO: 312603 - DNA, 15 bp, Homo sapiens
ggatggggagacagg

SEQ ID NO: 312604 - DNA, 15 bp, Homo sapiens
gggatggggagacag

SEQ ID NO: 312605 - DNA, 15 bp, Homo sapiens
agggatggggagaca

SEQ ID NO: 312606 - DNA, 15 bp, Homo sapiens
tagggatggggagac

SEQ ID NO: 312607 - DNA, 15 bp, Homo sapiens
ctagggatggggaga

SEQ ID NO: 312608 - DNA, 15 bp, Homo sapiens
gctagggatggggag

SEQ ID NO: 312609 - DNA, 15 bp, Homo sapiens
ggctagggatgggga

SEQ ID NO: 312610 - DNA, 15 bp, Homo sapiens
tggctagggatgggg

SEQ ID NO: 312611 - DNA, 15 bp, Homo sapiens
gtggctagggatggg

SEQ ID NO: 312612 - DNA, 15 bp, Homo sapiens
agtggctagggatgg

SEQ ID NO: 312613 - DNA, 15 bp, Homo sapiens
gagtggctagggatg

SEQ ID NO: 312614 - DNA, 15 bp, Homo sapiens
ggagtggctagggat

SEQ ID NO: 312615 - DNA, 15 bp, Homo sapiens
gggagtggctaggga

SEQ ID NO: 312616 - DNA, 15 bp, Homo sapiens
ggggagtggctaggg

SEQ ID NO: 312617 - DNA, 15 bp, Homo sapiens
tggggagtggctagg

SEQ ID NO: 312618 - DNA, 15 bp, Homo sapiens
gtggggagtggctag

SEQ ID NO: 312619 - DNA, 15 bp, Homo sapiens
ggtggggagtggcta

SEQ ID NO: 312620 - DNA, 15 bp, Homo sapiens
gggtggggagtggct

SEQ ID NO: 312621 - DNA, 15 bp, Homo sapiens
ggggtggggagtggc

SEQ ID NO: 312622 - DNA, 15 bp, Homo sapiens
tggggtggggagtgg

SEQ ID NO: 312623 - DNA, 15 bp, Homo sapiens
ctggggtggggagtg

SEQ ID NO: 312624 - DNA, 15 bp, Homo sapiens
tctggggtggggagt

SEQ ID NO: 312625 - DNA, 15 bp, Homo sapiens
atctggggtggggag

SEQ ID NO: 312626 - DNA, 15 bp, Homo sapiens
aatctggggtgggga

SEQ ID NO: 312627 - DNA, 15 bp, Homo sapiens
caatctggggtgggg

SEQ ID NO: 312628 - DNA, 15 bp, Homo sapiens
acaatctggggtggg

SEQ ID NO: 312629 - DNA, 15 bp, Homo sapiens
tacaatctggggtgg

SEQ ID NO: 312630 - DNA, 15 bp, Homo sapiens
ttacaatctggggtg

SEQ ID NO: 312631 - DNA, 15 bp, Homo sapiens
gttacaatctggggt

SEQ ID NO: 312632 - DNA, 15 bp, Homo sapiens
ggttacaatctgggg

SEQ ID NO: 312633 - DNA, 15 bp, Homo sapiens
tggttacaatctggg

SEQ ID NO: 312634 - DNA, 15 bp, Homo sapiens
atggttacaatctgg

SEQ ID NO: 312635 - DNA, 15 bp, Homo sapiens
gatggttacaatctg

SEQ ID NO: 312636 - DNA, 15 bp, Homo sapiens
tgatggttacaatct

SEQ ID NO: 312637 - DNA, 15 bp, Homo sapiens
ctgatggttacaatc

SEQ ID NO: 312638 - DNA, 15 bp, Homo sapiens
gctgatggttacaat

SEQ ID NO: 312639 - DNA, 15 bp, Homo sapiens
ggctgatggttacaa

SEQ ID NO: 312640 - DNA, 15 bp, Homo sapiens
aggctgatggttaca

SEQ ID NO: 312641 - DNA, 15 bp, Homo sapiens
taggctgatggttac

SEQ ID NO: 312642 - DNA, 15 bp, Homo sapiens
ataggctgatggtta

SEQ ID NO: 312643 - DNA, 15 bp, Homo sapiens
gataggctgatggtt

SEQ ID NO: 312644 - DNA, 15 bp, Homo sapiens
agataggctgatggt

SEQ ID NO: 312645 - DNA, 15 bp, Homo sapiens
tagataggctgatgg

SEQ ID NO: 312646 - DNA, 15 bp, Homo sapiens
atagataggctgatg

SEQ ID NO: 312647 - DNA, 15 bp, Homo sapiens
aatagataggctgat

SEQ ID NO: 312648 - DNA, 15 bp, Homo sapiens
gaatagataggctga

SEQ ID NO: 312649 - DNA, 15 bp, Homo sapiens
agaatagataggctg

SEQ ID NO: 312650 - DNA, 15 bp, Homo sapiens
aagaatagataggct

SEQ ID NO: 312651 - DNA, 15 bp, Homo sapiens
taagaatagataggc

SEQ ID NO: 312652 - DNA, 15 bp, Homo sapiens
ataagaatagatagg

SEQ ID NO: 312653 - DNA, 15 bp, Homo sapiens
aataagaatagatag

SEQ ID NO: 312654 - DNA, 15 bp, Homo sapiens
aaataagaatagata

SEQ ID NO: 312655 - DNA, 15 bp, Homo sapiens
taaataagaatagat

SEQ ID NO: 312656 - DNA, 15 bp, Homo sapiens
gtaaataagaataga

SEQ ID NO: 312657 - DNA, 15 bp, Homo sapiens
ggtaaataagaatag

SEQ ID NO: 312658 - DNA, 15 bp, Homo sapiens
tggtaaataagaata

SEQ ID NO: 312659 - DNA, 15 bp, Homo sapiens
gtggtaaataagaat

SEQ ID NO: 312660 - DNA, 15 bp, Homo sapiens
agtggtaaataagaa

SEQ ID NO: 312661 - DNA, 15 bp, Homo sapiens
aagtggtaaataaga

SEQ ID NO: 312662 - DNA, 15 bp, Homo sapiens
aaagtggtaaataag

SEQ ID NO: 312663 - DNA, 15 bp, Homo sapiens
taaagtggtaaataa

SEQ ID NO: 312664 - DNA, 15 bp, Homo sapiens
ctaaagtggtaaata

SEQ ID NO: 312665 - DNA, 15 bp, Homo sapiens
cctaaagtggtaaat

SEQ ID NO: 312666 - DNA, 15 bp, Homo sapiens
acctaaagtggtaaa

SEQ ID NO: 312667 - DNA, 15 bp, Homo sapiens
gacctaaagtggtaa

SEQ ID NO: 312668 - DNA, 15 bp, Homo sapiens
agacctaaagtggta

SEQ ID NO: 312669 - DNA, 15 bp, Homo sapiens
tagacctaaagtggt

SEQ ID NO: 312670 - DNA, 15 bp, Homo sapiens
ctagacctaaagtgg

SEQ ID NO: 312671 - DNA, 15 bp, Homo sapiens
gctagacctaaagtg

SEQ ID NO: 312672 - DNA, 15 bp, Homo sapiens
tgctagacctaaagt

SEQ ID NO: 312673 - DNA, 15 bp, Homo sapiens
gtgctagacctaaag

SEQ ID NO: 312674 - DNA, 15 bp, Homo sapiens
ggtgctagacctaaa

SEQ ID NO: 312675 - DNA, 15 bp, Homo sapiens
aggtgctagacctaa

SEQ ID NO: 312676 - DNA, 15 bp, Homo sapiens
taggtgctagaccta

SEQ ID NO: 312677 - DNA, 15 bp, Homo sapiens
ctaggtgctagacct

SEQ ID NO: 312678 - DNA, 15 bp, Homo sapiens
tctaggtgctagacc

SEQ ID NO: 312679 - DNA, 15 bp, Homo sapiens
ttctaggtgctagac

SEQ ID NO: 312680 - DNA, 15 bp, Homo sapiens
tttctaggtgctaga

SEQ ID NO: 312681 - DNA, 15 bp, Homo sapiens
ctttctaggtgctag

SEQ ID NO: 312682 - DNA, 15 bp, Homo sapiens
actttctaggtgcta

SEQ ID NO: 312683 - DNA, 15 bp, Homo sapiens
gactttctaggtgct

SEQ ID NO: 312684 - DNA, 15 bp, Homo sapiens
ggactttctaggtgc

SEQ ID NO: 312685 - DNA, 15 bp, Homo sapiens
tggactttctaggtg

SEQ ID NO: 312686 - DNA, 15 bp, Homo sapiens
atggactttctaggt

SEQ ID NO: 312687 - DNA, 15 bp, Homo sapiens
gatggactttctagg

SEQ ID NO: 312688 - DNA, 15 bp, Homo sapiens
agatggactttctag

SEQ ID NO: 312689 - DNA, 15 bp, Homo sapiens
cagatggactttcta

SEQ ID NO: 312690 - DNA, 15 bp, Homo sapiens
acagatggactttct

SEQ ID NO: 312691 - DNA, 15 bp, Homo sapiens
tacagatggactttc

SEQ ID NO: 312692 - DNA, 15 bp, Homo sapiens
ctacagatggacttt

SEQ ID NO: 312693 - DNA, 15 bp, Homo sapiens
tctacagatggactt

SEQ ID NO: 312694 - DNA, 15 bp, Homo sapiens
ctctacagatggact

SEQ ID NO: 312695 - DNA, 15 bp, Homo sapiens
actctacagatggac

SEQ ID NO: 312696 - DNA, 15 bp, Homo sapiens
tactctacagatgga

SEQ ID NO: 312697 - DNA, 15 bp, Homo sapiens
ttactctacagatgg

SEQ ID NO: 312698 - DNA, 15 bp, Homo sapiens
cttactctacagatg

SEQ ID NO: 312699 - DNA, 15 bp, Homo sapiens
tcttactctacagat

SEQ ID NO: 312700 - DNA, 15 bp, Homo sapiens
ttcttactctacaga

SEQ ID NO: 312701 - DNA, 15 bp, Homo sapiens
tttcttactctacag

SEQ ID NO: 312702 - DNA, 15 bp, Homo sapiens
gtttcttactctaca

SEQ ID NO: 312703 - DNA, 15 bp, Homo sapiens
tgtttcttactctac

SEQ ID NO: 312704 - DNA, 15 bp, Homo sapiens
ctgtttcttactcta

SEQ ID NO: 312705 - DNA, 15 bp, Homo sapiens
tctgtttcttactct

SEQ ID NO: 312706 - DNA, 15 bp, Homo sapiens
ttctgtttcttactc

SEQ ID NO: 312707 - DNA, 15 bp, Homo sapiens
attctgtttcttact

SEQ ID NO: 312708 - DNA, 15 bp, Homo sapiens
tattctgtttcttac

SEQ ID NO: 312709 - DNA, 15 bp, Homo sapiens
atattctgtttctta

SEQ ID NO: 312710 - DNA, 15 bp, Homo sapiens
tatattctgtttctt

SEQ ID NO: 312711 - DNA, 15 bp, Homo sapiens
atatattctgtttct

SEQ ID NO: 312712 - DNA, 15 bp, Homo sapiens
catatattctgtttc

SEQ ID NO: 312713 - DNA, 15 bp, Homo sapiens
acatatattctgttt

SEQ ID NO: 312714 - DNA, 15 bp, Homo sapiens
aacatatattctgtt

SEQ ID NO: 312715 - DNA, 15 bp, Homo sapiens
aaacatatattctgt

SEQ ID NO: 312716 - DNA, 15 bp, Homo sapiens
aaaacatatattctg

SEQ ID NO: 312717 - DNA, 15 bp, Homo sapiens
gaaaacatatattct

SEQ ID NO: 312718 - DNA, 15 bp, Homo sapiens
ggaaaacatatattc

SEQ ID NO: 312719 - DNA, 15 bp, Homo sapiens
tggaaaacatatatt

SEQ ID NO: 312720 - DNA, 15 bp, Homo sapiens
atggaaaacatatat

SEQ ID NO: 312721 - DNA, 15 bp, Homo sapiens
tatggaaaacatata

SEQ ID NO: 312722 - DNA, 15 bp, Homo sapiens
atatggaaaacatat

SEQ ID NO: 312723 - DNA, 15 bp, Homo sapiens
aatatggaaaacata

SEQ ID NO: 312724 - DNA, 15 bp, Homo sapiens
aaatatggaaaacat

SEQ ID NO: 312725 - DNA, 15 bp, Homo sapiens
aaaatatggaaaaca

SEQ ID NO: 312726 - DNA, 15 bp, Homo sapiens
aaaaatatggaaaac

SEQ ID NO: 312727 - DNA, 15 bp, Homo sapiens
gaaaaatatggaaaa

SEQ ID NO: 312728 - DNA, 15 bp, Homo sapiens
ggaaaaatatggaaa

SEQ ID NO: 312729 - DNA, 15 bp, Homo sapiens
tggaaaaatatggaa

SEQ ID NO: 312730 - DNA, 15 bp, Homo sapiens
ttggaaaaatatgga

SEQ ID NO: 312731 - DNA, 15 bp, Homo sapiens
cttggaaaaatatgg

SEQ ID NO: 312732 - DNA, 15 bp, Homo sapiens
acttggaaaaatatg

SEQ ID NO: 312733 - DNA, 15 bp, Homo sapiens
tacttggaaaaatat

SEQ ID NO: 312734 - DNA, 15 bp, Homo sapiens
atacttggaaaaata

SEQ ID NO: 312735 - DNA, 15 bp, Homo sapiens
catacttggaaaaat

SEQ ID NO: 312736 - DNA, 15 bp, Homo sapiens
acatacttggaaaaa

SEQ ID NO: 312737 - DNA, 15 bp, Homo sapiens
cacatacttggaaaa

SEQ ID NO: 312738 - DNA, 15 bp, Homo sapiens
tcacatacttggaaa

SEQ ID NO: 312739 - DNA, 15 bp, Homo sapiens
gtcacatacttggaa

SEQ ID NO: 312740 - DNA, 15 bp, Homo sapiens
tgtcacatacttgga

SEQ ID NO: 312741 - DNA, 15 bp, Homo sapiens
ttgtcacatacttgg

SEQ ID NO: 312742 - DNA, 15 bp, Homo sapiens
gttgtcacatacttg

SEQ ID NO: 312743 - DNA, 15 bp, Homo sapiens
tgttgtcacatactt

SEQ ID NO: 312744 - DNA, 15 bp, Homo sapiens
ttgttgtcacatact

SEQ ID NO: 312745 - DNA, 15 bp, Homo sapiens
tttgttgtcacatac

SEQ ID NO: 312746 - DNA, 15 bp, Homo sapiens
gtttgttgtcacata

SEQ ID NO: 312747 - DNA, 15 bp, Homo sapiens
tgtttgttgtcacat

SEQ ID NO: 312748 - DNA, 15 bp, Homo sapiens
ttgtttgttgtcaca

SEQ ID NO: 312749 - DNA, 15 bp, Homo sapiens
gttgtttgttgtcac

SEQ ID NO: 312750 - DNA, 15 bp, Homo sapiens
tgttgtttgttgtca

SEQ ID NO: 312751 - DNA, 15 bp, Homo sapiens
gtgttgtttgttgtc

SEQ ID NO: 312752 - DNA, 15 bp, Homo sapiens
agtgttgtttgttgt

SEQ ID NO: 312753 - DNA, 15 bp, Homo sapiens
gagtgttgtttgttg

SEQ ID NO: 312754 - DNA, 15 bp, Homo sapiens
agagtgttgtttgtt

SEQ ID NO: 312755 - DNA, 15 bp, Homo sapiens
gagagtgttgtttgt

SEQ ID NO: 312756 - DNA, 15 bp, Homo sapiens
agagagtgttgtttg

SEQ ID NO: 312757 - DNA, 15 bp, Homo sapiens
aagagagtgttgttt

SEQ ID NO: 312758 - DNA, 15 bp, Homo sapiens
gaagagagtgttgtt

SEQ ID NO: 312759 - DNA, 15 bp, Homo sapiens
ggaagagagtgttgt

SEQ ID NO: 312760 - DNA, 15 bp, Homo sapiens
aggaagagagtgttg

SEQ ID NO: 312761 - DNA, 15 bp, Homo sapiens
gaggaagagagtgtt

SEQ ID NO: 312762 - DNA, 15 bp, Homo sapiens
agaggaagagagtgt

SEQ ID NO: 312763 - DNA, 15 bp, Homo sapiens
aagaggaagagagtg

SEQ ID NO: 312764 - DNA, 15 bp, Homo sapiens
aaagaggaagagagt

SEQ ID NO: 312765 - DNA, 15 bp, Homo sapiens
aaaagaggaagagag

SEQ ID NO: 312766 - DNA, 15 bp, Homo sapiens
taaaagaggaagaga

SEQ ID NO: 312767 - DNA, 15 bp, Homo sapiens
ttaaaagaggaagag

SEQ ID NO: 312768 - DNA, 15 bp, Homo sapiens
tttaaaagaggaaga

SEQ ID NO: 312769 - DNA, 15 bp, Homo sapiens
ttttaaaagaggaag

SEQ ID NO: 312770 - DNA, 15 bp, Homo sapiens
attttaaaagaggaa

SEQ ID NO: 312771 - DNA, 15 bp, Homo sapiens
cattttaaaagagga

SEQ ID NO: 312772 - DNA, 15 bp, Homo sapiens
gcattttaaaagagg

SEQ ID NO: 312773 - DNA, 15 bp, Homo sapiens
ggcattttaaaagag

SEQ ID NO: 312774 - DNA, 15 bp, Homo sapiens
tggcattttaaaaga

SEQ ID NO: 312775 - DNA, 15 bp, Homo sapiens
atggcattttaaaag

SEQ ID NO: 312776 - DNA, 15 bp, Homo sapiens
catggcattttaaaa

SEQ ID NO: 312777 - DNA, 15 bp, Homo sapiens
acatggcattttaaa

SEQ ID NO: 312778 - DNA, 15 bp, Homo sapiens
tacatggcattttaa

SEQ ID NO: 312779 - DNA, 15 bp, Homo sapiens
gtacatggcatttta

SEQ ID NO: 312780 - DNA, 15 bp, Homo sapiens
agtacatggcatttt

SEQ ID NO: 312781 - DNA, 15 bp, Homo sapiens
tagtacatggcattt

SEQ ID NO: 312782 - DNA, 15 bp, Homo sapiens
ctagtacatggcatt

SEQ ID NO: 312783 - DNA, 15 bp, Homo sapiens
actagtacatggcat

SEQ ID NO: 312784 - DNA, 15 bp, Homo sapiens
tactagtacatggca

SEQ ID NO: 312785 - DNA, 15 bp, Homo sapiens
atactagtacatggc

SEQ ID NO: 312786 - DNA, 15 bp, Homo sapiens
gatactagtacatgg

SEQ ID NO: 312787 - DNA, 15 bp, Homo sapiens
agatactagtacatg

SEQ ID NO: 312788 - DNA, 15 bp, Homo sapiens
tagatactagtacat

SEQ ID NO: 312789 - DNA, 15 bp, Homo sapiens
gtagatactagtaca

SEQ ID NO: 312790 - DNA, 15 bp, Homo sapiens
ggtagatactagtac

SEQ ID NO: 312791 - DNA, 15 bp, Homo sapiens
tggtagatactagta

SEQ ID NO: 312792 - DNA, 15 bp, Homo sapiens
atggtagatactagt

SEQ ID NO: 312793 - DNA, 15 bp, Homo sapiens
tatggtagatactag

SEQ ID NO: 312794 - DNA, 15 bp, Homo sapiens
atatggtagatacta

SEQ ID NO: 312795 - DNA, 15 bp, Homo sapiens
aatatggtagatact

SEQ ID NO: 312796 - DNA, 15 bp, Homo sapiens
gaatatggtagatac

SEQ ID NO: 312797 - DNA, 15 bp, Homo sapiens
ggaatatggtagata

SEQ ID NO: 312798 - DNA, 15 bp, Homo sapiens
tggaatatggtagat

SEQ ID NO: 312799 - DNA, 15 bp, Homo sapiens
ctggaatatggtaga

SEQ ID NO: 312800 - DNA, 15 bp, Homo sapiens
cctggaatatggtag

SEQ ID NO: 312801 - DNA, 15 bp, Homo sapiens
gcctggaatatggta

SEQ ID NO: 312802 - DNA, 15 bp, Homo sapiens
tgcctggaatatggt

SEQ ID NO: 312803 - DNA, 15 bp, Homo sapiens
gtgcctggaatatgg

SEQ ID NO: 312804 - DNA, 15 bp, Homo sapiens
tgtgcctggaatatg

SEQ ID NO: 312805 - DNA, 15 bp, Homo sapiens
ctgtgcctggaatat

SEQ ID NO: 312806 - DNA, 15 bp, Homo sapiens
actgtgcctggaata

SEQ ID NO: 312807 - DNA, 15 bp, Homo sapiens
aactgtgcctggaat

SEQ ID NO: 312808 - DNA, 15 bp, Homo sapiens
gaactgtgcctggaa

SEQ ID NO: 312809 - DNA, 15 bp, Homo sapiens
agaactgtgcctgga

SEQ ID NO: 312810 - DNA, 15 bp, Homo sapiens
tagaactgtgcctgg

SEQ ID NO: 312811 - DNA, 15 bp, Homo sapiens
ttagaactgtgcctg

SEQ ID NO: 312812 - DNA, 15 bp, Homo sapiens
tttagaactgtgcct

SEQ ID NO: 312813 - DNA, 15 bp, Homo sapiens
atttagaactgtgcc

SEQ ID NO: 312814 - DNA, 15 bp, Homo sapiens
catttagaactgtgc

SEQ ID NO: 312815 - DNA, 15 bp, Homo sapiens
gcatttagaactgtg

SEQ ID NO: 312816 - DNA, 15 bp, Homo sapiens
agcatttagaactgt

SEQ ID NO: 312817 - DNA, 15 bp, Homo sapiens
tagcatttagaactg

SEQ ID NO: 312818 - DNA, 15 bp, Homo sapiens
ctagcatttagaact

SEQ ID NO: 312819 - DNA, 15 bp, Homo sapiens
tctagcatttagaac

SEQ ID NO: 312820 - DNA, 15 bp, Homo sapiens
ctctagcatttagaa

SEQ ID NO: 312821 - DNA, 15 bp, Homo sapiens
gctctagcatttaga

SEQ ID NO: 312822 - DNA, 15 bp, Homo sapiens
agctctagcatttag

SEQ ID NO: 312823 - DNA, 15 bp, Homo sapiens
tagctctagcattta

SEQ ID NO: 312824 - DNA, 15 bp, Homo sapiens
atagctctagcattt

SEQ ID NO: 312825 - DNA, 15 bp, Homo sapiens
tatagctctagcatt

SEQ ID NO: 312826 - DNA, 15 bp, Homo sapiens
ttatagctctagcat

SEQ ID NO: 312827 - DNA, 15 bp, Homo sapiens
gttatagctctagca

SEQ ID NO: 312828 - DNA, 15 bp, Homo sapiens
tgttatagctctagc

SEQ ID NO: 312829 - DNA, 15 bp, Homo sapiens
ttgttatagctctag

SEQ ID NO: 312830 - DNA, 15 bp, Homo sapiens
attgttatagctcta

SEQ ID NO: 312831 - DNA, 15 bp, Homo sapiens
cattgttatagctct

SEQ ID NO: 312832 - DNA, 15 bp, Homo sapiens
tcattgttatagctc

SEQ ID NO: 312833 - DNA, 15 bp, Homo sapiens
ttcattgttatagct

SEQ ID NO: 312834 - DNA, 15 bp, Homo sapiens
attcattgttatagc

SEQ ID NO: 312835 - DNA, 15 bp, Homo sapiens
tattcattgttatag

SEQ ID NO: 312836 - DNA, 15 bp, Homo sapiens
ttattcattgttata

SEQ ID NO: 312837 - DNA, 15 bp, Homo sapiens
tttattcattgttat

SEQ ID NO: 312838 - DNA, 15 bp, Homo sapiens
atttattcattgtta

SEQ ID NO: 312839 - DNA, 15 bp, Homo sapiens
tatttattcattgtt

SEQ ID NO: 312840 - DNA, 15 bp, Homo sapiens
ttatttattcattgt

SEQ ID NO: 312841 - DNA, 15 bp, Homo sapiens
tttatttattcattg

SEQ ID NO: 312842 - DNA, 15 bp, Homo sapiens
ttttatttattcatt

SEQ ID NO: 312843 - DNA, 15 bp, Homo sapiens
gttttatttattcat

SEQ ID NO: 312844 - DNA, 15 bp, Homo sapiens
ggttttatttattca

SEQ ID NO: 312845 - DNA, 15 bp, Homo sapiens
tggttttatttattc

SEQ ID NO: 312846 - DNA, 15 bp, Homo sapiens
ttggttttatttatt

SEQ ID NO: 312847 - DNA, 15 bp, Homo sapiens
tttggttttatttat

SEQ ID NO: 312848 - DNA, 15 bp, Homo sapiens
ttttggttttattta

SEQ ID NO: 312849 - DNA, 15 bp, Homo sapiens
attttggttttattt

SEQ ID NO: 312850 - DNA, 15 bp, Homo sapiens
gattttggttttatt

SEQ ID NO: 312851 - DNA, 15 bp, Homo sapiens
ggattttggttttat

SEQ ID NO: 312852 - DNA, 15 bp, Homo sapiens
gggattttggtttta

SEQ ID NO: 312853 - DNA, 15 bp, Homo sapiens
ggggattttggtttt

SEQ ID NO: 312854 - DNA, 15 bp, Homo sapiens
tggggattttggttt

SEQ ID NO: 312855 - DNA, 15 bp, Homo sapiens
atggggattttggtt

SEQ ID NO: 312856 - DNA, 15 bp, Homo sapiens
gatggggattttggt

SEQ ID NO: 312857 - DNA, 15 bp, Homo sapiens
ggatggggattttgg

SEQ ID NO: 312858 - DNA, 15 bp, Homo sapiens
aggatggggattttg

SEQ ID NO: 312859 - DNA, 15 bp, Homo sapiens
aaggatggggatttt

SEQ ID NO: 312860 - DNA, 15 bp, Homo sapiens
caaggatggggattt

SEQ ID NO: 312861 - DNA, 15 bp, Homo sapiens
gcaaggatggggatt

SEQ ID NO: 312862 - DNA, 15 bp, Homo sapiens
tgcaaggatggggat

SEQ ID NO: 312863 - DNA, 15 bp, Homo sapiens
ctgcaaggatgggga

SEQ ID NO: 312864 - DNA, 15 bp, Homo sapiens
tctgcaaggatgggg

SEQ ID NO: 312865 - DNA, 15 bp, Homo sapiens
ttctgcaaggatggg

SEQ ID NO: 312866 - DNA, 15 bp, Homo sapiens
gttctgcaaggatgg

SEQ ID NO: 312867 - DNA, 15 bp, Homo sapiens
agttctgcaaggatg

SEQ ID NO: 312868 - DNA, 15 bp, Homo sapiens
cagttctgcaaggat

SEQ ID NO: 312869 - DNA, 15 bp, Homo sapiens
tcagttctgcaagga

SEQ ID NO: 312870 - DNA, 15 bp, Homo sapiens
gtcagttctgcaagg

SEQ ID NO: 312871 - DNA, 15 bp, Homo sapiens
agtcagttctgcaag

SEQ ID NO: 312872 - DNA, 15 bp, Homo sapiens
aagtcagttctgcaa

SEQ ID NO: 312873 - DNA, 15 bp, Homo sapiens
aaagtcagttctgca

SEQ ID NO: 312874 - DNA, 15 bp, Homo sapiens
gaaagtcagttctgc

SEQ ID NO: 312875 - DNA, 15 bp, Homo sapiens
agaaagtcagttctg

SEQ ID NO: 312876 - DNA, 15 bp, Homo sapiens
tagaaagtcagttct

SEQ ID NO: 312877 - DNA, 15 bp, Homo sapiens
ctagaaagtcagttc

SEQ ID NO: 312878 - DNA, 15 bp, Homo sapiens
actagaaagtcagtt

SEQ ID NO: 312879 - DNA, 15 bp, Homo sapiens
aactagaaagtcagt

SEQ ID NO: 312880 - DNA, 15 bp, Homo sapiens
aaactagaaagtcag

SEQ ID NO: 312881 - DNA, 15 bp, Homo sapiens
gaaactagaaagtca

SEQ ID NO: 312882 - DNA, 15 bp, Homo sapiens
tgaaactagaaagtc

SEQ ID NO: 312883 - DNA, 15 bp, Homo sapiens
ctgaaactagaaagt

SEQ ID NO: 312884 - DNA, 15 bp, Homo sapiens
cctgaaactagaaag

SEQ ID NO: 312885 - DNA, 15 bp, Homo sapiens
gcctgaaactagaaa

SEQ ID NO: 312886 - DNA, 15 bp, Homo sapiens
tgcctgaaactagaa

SEQ ID NO: 312887 - DNA, 15 bp, Homo sapiens
ttgcctgaaactaga

SEQ ID NO: 312888 - DNA, 15 bp, Homo sapiens
tttgcctgaaactag

SEQ ID NO: 312889 - DNA, 15 bp, Homo sapiens
ctttgcctgaaacta

SEQ ID NO: 312890 - DNA, 15 bp, Homo sapiens
tctttgcctgaaact

SEQ ID NO: 312891 - DNA, 15 bp, Homo sapiens
ctctttgcctgaaac

SEQ ID NO: 312892 - DNA, 15 bp, Homo sapiens
tctctttgcctgaaa

SEQ ID NO: 312893 - DNA, 15 bp, Homo sapiens
ctctctttgcctgaa

SEQ ID NO: 312894 - DNA, 15 bp, Homo sapiens
gctctctttgcctga

SEQ ID NO: 312895 - DNA, 15 bp, Homo sapiens
tgctctctttgcctg

SEQ ID NO: 312896 - DNA, 15 bp, Homo sapiens
ttgctctctttgcct

SEQ ID NO: 312897 - DNA, 15 bp, Homo sapiens
tttgctctctttgcc

SEQ ID NO: 312898 - DNA, 15 bp, Homo sapiens
atttgctctctttgc

SEQ ID NO: 312899 - DNA, 15 bp, Homo sapiens
catttgctctctttg

SEQ ID NO: 312900 - DNA, 15 bp, Homo sapiens
tcatttgctctcttt

SEQ ID NO: 312901 - DNA, 15 bp, Homo sapiens
ttcatttgctctctt

SEQ ID NO: 312902 - DNA, 15 bp, Homo sapiens
attcatttgctctct

SEQ ID NO: 312903 - DNA, 15 bp, Homo sapiens
cattcatttgctctc

SEQ ID NO: 312904 - DNA, 15 bp, Homo sapiens
tcattcatttgctct

SEQ ID NO: 312905 - DNA, 15 bp, Homo sapiens
ttcattcatttgctc

SEQ ID NO: 312906 - DNA, 15 bp, Homo sapiens
attcattcatttgct

SEQ ID NO: 312907 - DNA, 15 bp, Homo sapiens
tattcattcatttgc

SEQ ID NO: 312908 - DNA, 15 bp, Homo sapiens
ttattcattcatttg

SEQ ID NO: 312909 - DNA, 15 bp, Homo sapiens
tttattcattcattt

SEQ ID NO: 312910 - DNA, 15 bp, Homo sapiens
atttattcattcatt

SEQ ID NO: 312911 - DNA, 15 bp, Homo sapiens
catttattcattcat

SEQ ID NO: 312912 - DNA, 15 bp, Homo sapiens
tcatttattcattca

SEQ ID NO: 312913 - DNA, 15 bp, Homo sapiens
ctcatttattcattc

SEQ ID NO: 312914 - DNA, 15 bp, Homo sapiens
cctcatttattcatt

SEQ ID NO: 312915 - DNA, 15 bp, Homo sapiens
tcctcatttattcat

SEQ ID NO: 312916 - DNA, 15 bp, Homo sapiens
ttcctcatttattca

SEQ ID NO: 312917 - DNA, 15 bp, Homo sapiens
attcctcatttattc

SEQ ID NO: 312918 - DNA, 15 bp, Homo sapiens
tattcctcatttatt

SEQ ID NO: 312919 - DNA, 15 bp, Homo sapiens
gtattcctcatttat

SEQ ID NO: 312920 - DNA, 15 bp, Homo sapiens
tgtattcctcattta

SEQ ID NO: 312921 - DNA, 15 bp, Homo sapiens
atgtattcctcattt

SEQ ID NO: 312922 - DNA, 15 bp, Homo sapiens
tatgtattcctcatt

SEQ ID NO: 312923 - DNA, 15 bp, Homo sapiens
ctatgtattcctcat

SEQ ID NO: 312924 - DNA, 15 bp, Homo sapiens
actatgtattcctca

SEQ ID NO: 312925 - DNA, 15 bp, Homo sapiens
tactatgtattcctc

SEQ ID NO: 312926 - DNA, 15 bp, Homo sapiens
atactatgtattcct

SEQ ID NO: 312927 - DNA, 15 bp, Homo sapiens
catactatgtattcc

SEQ ID NO: 312928 - DNA, 15 bp, Homo sapiens
acatactatgtattc

SEQ ID NO: 312929 - DNA, 15 bp, Homo sapiens
cacatactatgtatt

SEQ ID NO: 312930 - DNA, 15 bp, Homo sapiens
tcacatactatgtat

SEQ ID NO: 312931 - DNA, 15 bp, Homo sapiens
ctcacatactatgta

SEQ ID NO: 312932 - DNA, 15 bp, Homo sapiens
tctcacatactatgt

SEQ ID NO: 312933 - DNA, 15 bp, Homo sapiens
atctcacatactatg

SEQ ID NO: 312934 - DNA, 15 bp, Homo sapiens
aatctcacatactat

SEQ ID NO: 312935 - DNA, 15 bp, Homo sapiens
caatctcacatacta

SEQ ID NO: 312936 - DNA, 15 bp, Homo sapiens
acaatctcacatact

SEQ ID NO: 312937 - DNA, 15 bp, Homo sapiens
tacaatctcacatac

SEQ ID NO: 312938 - DNA, 15 bp, Homo sapiens
atacaatctcacata

SEQ ID NO: 312939 - DNA, 15 bp, Homo sapiens
aatacaatctcacat

SEQ ID NO: 312940 - DNA, 15 bp, Homo sapiens
taatacaatctcaca

SEQ ID NO: 312941 - DNA, 15 bp, Homo sapiens
ttaatacaatctcac

SEQ ID NO: 312942 - DNA, 15 bp, Homo sapiens
tttaatacaatctca

SEQ ID NO: 312943 - DNA, 15 bp, Homo sapiens
ctttaatacaatctc

SEQ ID NO: 312944 - DNA, 15 bp, Homo sapiens
tctttaatacaatct

SEQ ID NO: 312945 - DNA, 15 bp, Homo sapiens
gtctttaatacaatc

SEQ ID NO: 312946 - DNA, 15 bp, Homo sapiens
agtctttaatacaat

SEQ ID NO: 312947 - DNA, 15 bp, Homo sapiens
cagtctttaatacaa

SEQ ID NO: 312948 - DNA, 15 bp, Homo sapiens
gcagtctttaataca

SEQ ID NO: 312949 - DNA, 15 bp, Homo sapiens
tgcagtctttaatac

SEQ ID NO: 312950 - DNA, 15 bp, Homo sapiens
ctgcagtctttaata

SEQ ID NO: 312951 - DNA, 15 bp, Homo sapiens
tctgcagtctttaat

SEQ ID NO: 312952 - DNA, 15 bp, Homo sapiens
ctctgcagtctttaa

SEQ ID NO: 312953 - DNA, 15 bp, Homo sapiens
tctctgcagtcttta

SEQ ID NO: 312954 - DNA, 15 bp, Homo sapiens
ttctctgcagtcttt

SEQ ID NO: 312955 - DNA, 15 bp, Homo sapiens
tttctctgcagtctt

SEQ ID NO: 312956 - DNA, 15 bp, Homo sapiens
ttttctctgcagtct

SEQ ID NO: 312957 - DNA, 15 bp, Homo sapiens
tttttctctgcagtc

SEQ ID NO: 312958 - DNA, 15 bp, Homo sapiens
gtttttctctgcagt

SEQ ID NO: 312959 - DNA, 15 bp, Homo sapiens
tgtttttctctgcag

SEQ ID NO: 312960 - DNA, 15 bp, Homo sapiens
ttgtttttctctgca

SEQ ID NO: 312961 - DNA, 15 bp, Homo sapiens
tttgtttttctctgc

SEQ ID NO: 312962 - DNA, 15 bp, Homo sapiens
ctttgtttttctctg

SEQ ID NO: 312963 - DNA, 15 bp, Homo sapiens
gctttgtttttctct

SEQ ID NO: 312964 - DNA, 15 bp, Homo sapiens
tgctttgtttttctc

SEQ ID NO: 312965 - DNA, 15 bp, Homo sapiens
ttgctttgtttttct

SEQ ID NO: 312966 - DNA, 15 bp, Homo sapiens
tttgctttgtttttc

SEQ ID NO: 312967 - DNA, 15 bp, Homo sapiens
ctttgctttgttttt

SEQ ID NO: 312968 - DNA, 15 bp, Homo sapiens
tctttgctttgtttt

SEQ ID NO: 312969 - DNA, 15 bp, Homo sapiens
ctctttgctttgttt

SEQ ID NO: 312970 - DNA, 15 bp, Homo sapiens
cctctttgctttgtt

SEQ ID NO: 312971 - DNA, 15 bp, Homo sapiens
tcctctttgctttgt

SEQ ID NO: 312972 - DNA, 15 bp, Homo sapiens
ctcctctttgctttg

SEQ ID NO: 312973 - DNA, 15 bp, Homo sapiens
cctcctctttgcttt

SEQ ID NO: 312974 - DNA, 15 bp, Homo sapiens
ccctcctctttgctt

SEQ ID NO: 312975 - DNA, 15 bp, Homo sapiens
gccctcctctttgct

SEQ ID NO: 312976 - DNA, 15 bp, Homo sapiens
tgccctcctctttgc

SEQ ID NO: 312977 - DNA, 15 bp, Homo sapiens
ttgccctcctctttg

SEQ ID NO: 312978 - DNA, 15 bp, Homo sapiens
cttgccctcctcttt

SEQ ID NO: 312979 - DNA, 15 bp, Homo sapiens
ccttgccctcctctt

SEQ ID NO: 312980 - DNA, 15 bp, Homo sapiens
tccttgccctcctct

SEQ ID NO: 312981 - DNA, 15 bp, Homo sapiens
ttccttgccctcctc

SEQ ID NO: 312982 - DNA, 15 bp, Homo sapiens
cttccttgccctcct

SEQ ID NO: 312983 - DNA, 15 bp, Homo sapiens
ccttccttgccctcc

SEQ ID NO: 312984 - DNA, 15 bp, Homo sapiens
gccttccttgccctc

SEQ ID NO: 312985 - DNA, 15 bp, Homo sapiens
agccttccttgccct

SEQ ID NO: 312986 - DNA, 15 bp, Homo sapiens
cagccttccttgccc

SEQ ID NO: 312987 - DNA, 15 bp, Homo sapiens
ccagccttccttgcc

SEQ ID NO: 312988 - DNA, 15 bp, Homo sapiens
accagccttccttgc

SEQ ID NO: 312989 - DNA, 15 bp, Homo sapiens
taccagccttccttg

SEQ ID NO: 312990 - DNA, 15 bp, Homo sapiens
ctaccagccttcctt

SEQ ID NO: 312991 - DNA, 15 bp, Homo sapiens
cctaccagccttcct

SEQ ID NO: 312992 - DNA, 15 bp, Homo sapiens
ccctaccagccttcc

SEQ ID NO: 312993 - DNA, 15 bp, Homo sapiens
tccctaccagccttc

SEQ ID NO: 312994 - DNA, 15 bp, Homo sapiens
ttccctaccagcctt

SEQ ID NO: 312995 - DNA, 15 bp, Homo sapiens
tttccctaccagcct

SEQ ID NO: 312996 - DNA, 15 bp, Homo sapiens
ctttccctaccagcc

SEQ ID NO: 312997 - DNA, 15 bp, Homo sapiens
cctttccctaccagc

SEQ ID NO: 312998 - DNA, 15 bp, Homo sapiens
tcctttccctaccag

SEQ ID NO: 312999 - DNA, 15 bp, Homo sapiens
ctcctttccctacca

SEQ ID NO: 313000 - DNA, 15 bp, Homo sapiens
actcctttccctacc

SEQ ID NO: 313001 - DNA, 15 bp, Homo sapiens
aactcctttccctac

SEQ ID NO: 313002 - DNA, 15 bp, Homo sapiens
aaactcctttcccta

SEQ ID NO: 313003 - DNA, 15 bp, Homo sapiens
aaaactcctttccct

SEQ ID NO: 313004 - DNA, 15 bp, Homo sapiens
taaaactcctttccc

SEQ ID NO: 313005 - DNA, 15 bp, Homo sapiens
ttaaaactcctttcc

SEQ ID NO: 313006 - DNA, 15 bp, Homo sapiens
tttaaaactcctttc

SEQ ID NO: 313007 - DNA, 15 bp, Homo sapiens
ttttaaaactccttt

SEQ ID NO: 313008 - DNA, 15 bp, Homo sapiens
attttaaaactcctt

SEQ ID NO: 313009 - DNA, 15 bp, Homo sapiens
aattttaaaactcct

SEQ ID NO: 313010 - DNA, 15 bp, Homo sapiens
aaattttaaaactcc

SEQ ID NO: 313011 - DNA, 15 bp, Homo sapiens
taaattttaaaactc

SEQ ID NO: 313012 - DNA, 15 bp, Homo sapiens
ttaaattttaaaact

SEQ ID NO: 313013 - DNA, 15 bp, Homo sapiens
tttaaattttaaaac

SEQ ID NO: 313014 - DNA, 15 bp, Homo sapiens
cttttaaattttaaa

SEQ ID NO: 313015 - DNA, 15 bp, Homo sapiens
tcttttaaattttaa

SEQ ID NO: 313016 - DNA, 15 bp, Homo sapiens
ctcttttaaatttta

SEQ ID NO: 313017 - DNA, 15 bp, Homo sapiens
tctcttttaaatttt

SEQ ID NO: 313018 - DNA, 15 bp, Homo sapiens
ctctcttttaaattt

SEQ ID NO: 313019 - DNA, 15 bp, Homo sapiens
actctcttttaaatt

SEQ ID NO: 313020 - DNA, 15 bp, Homo sapiens
cactctcttttaaat

SEQ ID NO: 313021 - DNA, 15 bp, Homo sapiens
tcactctcttttaaa

SEQ ID NO: 313022 - DNA, 15 bp, Homo sapiens
atcactctcttttaa

SEQ ID NO: 313023 - DNA, 15 bp, Homo sapiens
gatcactctctttta

SEQ ID NO: 313024 - DNA, 15 bp, Homo sapiens
tgatcactctctttt

SEQ ID NO: 313025 - DNA, 15 bp, Homo sapiens
ctgatcactctcttt

SEQ ID NO: 313026 - DNA, 15 bp, Homo sapiens
cctgatcactctctt

SEQ ID NO: 313027 - DNA, 15 bp, Homo sapiens
ccctgatcactctct

SEQ ID NO: 313028 - DNA, 15 bp, Homo sapiens
tccctgatcactctc

SEQ ID NO: 313029 - DNA, 15 bp, Homo sapiens
ttccctgatcactct

SEQ ID NO: 313030 - DNA, 15 bp, Homo sapiens
tttccctgatcactc

SEQ ID NO: 313031 - DNA, 15 bp, Homo sapiens
ctttccctgatcact

SEQ ID NO: 313032 - DNA, 15 bp, Homo sapiens
tctttccctgatcac

SEQ ID NO: 313033 - DNA, 15 bp, Homo sapiens
gtctttccctgatca

SEQ ID NO: 313034 - DNA, 15 bp, Homo sapiens
agtctttccctgatc

SEQ ID NO: 313035 - DNA, 15 bp, Homo sapiens
aagtctttccctgat

SEQ ID NO: 313036 - DNA, 15 bp, Homo sapiens
caagtctttccctga

SEQ ID NO: 313037 - DNA, 15 bp, Homo sapiens
tcaagtctttccctg

SEQ ID NO: 313038 - DNA, 15 bp, Homo sapiens
ctcaagtctttccct

SEQ ID NO: 313039 - DNA, 15 bp, Homo sapiens
actcaagtctttccc

SEQ ID NO: 313040 - DNA, 15 bp, Homo sapiens
cactcaagtctttcc

SEQ ID NO: 313041 - DNA, 15 bp, Homo sapiens
tcactcaagtctttc

SEQ ID NO: 313042 - DNA, 15 bp, Homo sapiens
atcactcaagtcttt

SEQ ID NO: 313043 - DNA, 15 bp, Homo sapiens
tatcactcaagtctt

SEQ ID NO: 313044 - DNA, 15 bp, Homo sapiens
atatcactcaagtct

SEQ ID NO: 313045 - DNA, 15 bp, Homo sapiens
aatatcactcaagtc

SEQ ID NO: 313046 - DNA, 15 bp, Homo sapiens
aaatatcactcaagt

SEQ ID NO: 313047 - DNA, 15 bp, Homo sapiens
caaatatcactcaag

SEQ ID NO: 313048 - DNA, 15 bp, Homo sapiens
ccaaatatcactcaa

SEQ ID NO: 313049 - DNA, 15 bp, Homo sapiens
cccaaatatcactca

SEQ ID NO: 313050 - DNA, 15 bp, Homo sapiens
gcccaaatatcactc

SEQ ID NO: 313051 - DNA, 15 bp, Homo sapiens
tgcccaaatatcact

SEQ ID NO: 313052 - DNA, 15 bp, Homo sapiens
ttgcccaaatatcac

SEQ ID NO: 313053 - DNA, 15 bp, Homo sapiens
tttgcccaaatatca

SEQ ID NO: 313054 - DNA, 15 bp, Homo sapiens
ctttgcccaaatatc

SEQ ID NO: 313055 - DNA, 15 bp, Homo sapiens
tctttgcccaaatat

SEQ ID NO: 313056 - DNA, 15 bp, Homo sapiens
atctttgcccaaata

SEQ ID NO: 313057 - DNA, 15 bp, Homo sapiens
gatctttgcccaaat

SEQ ID NO: 313058 - DNA, 15 bp, Homo sapiens
agatctttgcccaaa

SEQ ID NO: 313059 - DNA, 15 bp, Homo sapiens
cagatctttgcccaa

SEQ ID NO: 313060 - DNA, 15 bp, Homo sapiens
tcagatctttgccca

SEQ ID NO: 313061 - DNA, 15 bp, Homo sapiens
ttcagatctttgccc

SEQ ID NO: 313062 - DNA, 15 bp, Homo sapiens
cttcagatctttgcc

SEQ ID NO: 313063 - DNA, 15 bp, Homo sapiens
ccttcagatctttgc

SEQ ID NO: 313064 - DNA, 15 bp, Homo sapiens
tccttcagatctttg

SEQ ID NO: 313065 - DNA, 15 bp, Homo sapiens
ctccttcagatcttt

SEQ ID NO: 313066 - DNA, 15 bp, Homo sapiens
tctccttcagatctt

SEQ ID NO: 313067 - DNA, 15 bp, Homo sapiens
gtctccttcagatct

SEQ ID NO: 313068 - DNA, 15 bp, Homo sapiens
tgtctccttcagatc

SEQ ID NO: 313069 - DNA, 15 bp, Homo sapiens
ttgtctccttcagat

SEQ ID NO: 313070 - DNA, 15 bp, Homo sapiens
cttgtctccttcaga

SEQ ID NO: 313071 - DNA, 15 bp, Homo sapiens
tcttgtctccttcag

SEQ ID NO: 313072 - DNA, 15 bp, Homo sapiens
ctcttgtctccttca

SEQ ID NO: 313073 - DNA, 15 bp, Homo sapiens
tctcttgtctccttc

SEQ ID NO: 313074 - DNA, 15 bp, Homo sapiens
ctctcttgtctcctt

SEQ ID NO: 313075 - DNA, 15 bp, Homo sapiens
actctcttgtctcct

SEQ ID NO: 313076 - DNA, 15 bp, Homo sapiens
cactctcttgtctcc

SEQ ID NO: 313077 - DNA, 15 bp, Homo sapiens
tcactctcttgtctc

SEQ ID NO: 313078 - DNA, 15 bp, Homo sapiens
ctcactctcttgtct

SEQ ID NO: 313079 - DNA, 15 bp, Homo sapiens
gctcactctcttgtc

SEQ ID NO: 313080 - DNA, 15 bp, Homo sapiens
ggctcactctcttgt

SEQ ID NO: 313081 - DNA, 15 bp, Homo sapiens
tggctcactctcttg

SEQ ID NO: 313082 - DNA, 15 bp, Homo sapiens
ctggctcactctctt

SEQ ID NO: 313083 - DNA, 15 bp, Homo sapiens
tctggctcactctct

SEQ ID NO: 313084 - DNA, 15 bp, Homo sapiens
gtctggctcactctc

SEQ ID NO: 313085 - DNA, 15 bp, Homo sapiens
tgtctggctcactct

SEQ ID NO: 313086 - DNA, 15 bp, Homo sapiens
gtgtctggctcactc

SEQ ID NO: 313087 - DNA, 15 bp, Homo sapiens
tgtgtctggctcact

SEQ ID NO: 313088 - DNA, 15 bp, Homo sapiens
ttgtgtctggctcac

SEQ ID NO: 313089 - DNA, 15 bp, Homo sapiens
tttgtgtctggctca

SEQ ID NO: 313090 - DNA, 15 bp, Homo sapiens
gtttgtgtctggctc

SEQ ID NO: 313091 - DNA, 15 bp, Homo sapiens
tgtttgtgtctggct

SEQ ID NO: 313092 - DNA, 15 bp, Homo sapiens
ctgtttgtgtctggc

SEQ ID NO: 313093 - DNA, 15 bp, Homo sapiens
cctgtttgtgtctgg

SEQ ID NO: 313094 - DNA, 15 bp, Homo sapiens
tcctgtttgtgtctg

SEQ ID NO: 313095 - DNA, 15 bp, Homo sapiens
ctcctgtttgtgtct

SEQ ID NO: 313096 - DNA, 15 bp, Homo sapiens
actcctgtttgtgtc

SEQ ID NO: 313097 - DNA, 15 bp, Homo sapiens
gactcctgtttgtgt

SEQ ID NO: 313098 - DNA, 15 bp, Homo sapiens
tgactcctgtttgtg

SEQ ID NO: 313099 - DNA, 15 bp, Homo sapiens
ttgactcctgtttgt

SEQ ID NO: 313100 - DNA, 15 bp, Homo sapiens
tttgactcctgtttg

SEQ ID NO: 313101 - DNA, 15 bp, Homo sapiens
gtttgactcctgttt

SEQ ID NO: 313102 - DNA, 15 bp, Homo sapiens
tgtttgactcctgtt

SEQ ID NO: 313103 - DNA, 15 bp, Homo sapiens
atgtttgactcctgt

SEQ ID NO: 313104 - DNA, 15 bp, Homo sapiens
aatgtttgactcctg

SEQ ID NO: 313105 - DNA, 15 bp, Homo sapiens
gaatgtttgactcct

SEQ ID NO: 313106 - DNA, 15 bp, Homo sapiens
ggaatgtttgactcc

SEQ ID NO: 313107 - DNA, 15 bp, Homo sapiens
tggaatgtttgactc

SEQ ID NO: 313108 - DNA, 15 bp, Homo sapiens
gtggaatgtttgact

SEQ ID NO: 313109 - DNA, 15 bp, Homo sapiens
tgtggaatgtttgac

SEQ ID NO: 313110 - DNA, 15 bp, Homo sapiens
ctgtggaatgtttga

SEQ ID NO: 313111 - DNA, 15 bp, Homo sapiens
tctgtggaatgtttg

SEQ ID NO: 313112 - DNA, 15 bp, Homo sapiens
ctctgtggaatgttt

SEQ ID NO: 313113 - DNA, 15 bp, Homo sapiens
tctctgtggaatgtt

SEQ ID NO: 313114 - DNA, 15 bp, Homo sapiens
ctctctgtggaatgt

SEQ ID NO: 313115 - DNA, 15 bp, Homo sapiens
tctctctgtggaatg

SEQ ID NO: 313116 - DNA, 15 bp, Homo sapiens
ctctctctgtggaat

SEQ ID NO: 313117 - DNA, 15 bp, Homo sapiens
cctctctctgtggaa

SEQ ID NO: 313118 - DNA, 15 bp, Homo sapiens
acctctctctgtgga

SEQ ID NO: 313119 - DNA, 15 bp, Homo sapiens
tacctctctctgtgg

SEQ ID NO: 313120 - DNA, 15 bp, Homo sapiens
ctacctctctctgtg

SEQ ID NO: 313121 - DNA, 15 bp, Homo sapiens
cctacctctctctgt

SEQ ID NO: 313122 - DNA, 15 bp, Homo sapiens
tcctacctctctctg

SEQ ID NO: 313123 - DNA, 15 bp, Homo sapiens
ctcctacctctctct

SEQ ID NO: 313124 - DNA, 15 bp, Homo sapiens
actcctacctctctc

SEQ ID NO: 313125 - DNA, 15 bp, Homo sapiens
tactcctacctctct

SEQ ID NO: 313126 - DNA, 15 bp, Homo sapiens
atactcctacctctc

SEQ ID NO: 313127 - DNA, 15 bp, Homo sapiens
catactcctacctct

SEQ ID NO: 313128 - DNA, 15 bp, Homo sapiens
acatactcctacctc

SEQ ID NO: 313129 - DNA, 15 bp, Homo sapiens
gacatactcctacct

SEQ ID NO: 313130 - DNA, 15 bp, Homo sapiens
agacatactcctacc

SEQ ID NO: 313131 - DNA, 15 bp, Homo sapiens
cagacatactcctac

SEQ ID NO: 313132 - DNA, 15 bp, Homo sapiens
ccagacatactccta

SEQ ID NO: 313133 - DNA, 15 bp, Homo sapiens
accagacatactcct

SEQ ID NO: 313134 - DNA, 15 bp, Homo sapiens
caccagacatactcc

SEQ ID NO: 313135 - DNA, 15 bp, Homo sapiens
acaccagacatactc

SEQ ID NO: 313136 - DNA, 15 bp, Homo sapiens
cacaccagacatact

SEQ ID NO: 313137 - DNA, 15 bp, Homo sapiens
acacaccagacatac

SEQ ID NO: 313138 - DNA, 15 bp, Homo sapiens
aacacaccagacata

SEQ ID NO: 313139 - DNA, 15 bp, Homo sapiens
aaacacaccagacat

SEQ ID NO: 313140 - DNA, 15 bp, Homo sapiens
caaacacaccagaca

SEQ ID NO: 313141 - DNA, 15 bp, Homo sapiens
tcaaacacaccagac

SEQ ID NO: 313142 - DNA, 15 bp, Homo sapiens
ttcaaacacaccaga

SEQ ID NO: 313143 - DNA, 15 bp, Homo sapiens
cttcaaacacaccag

SEQ ID NO: 313144 - DNA, 15 bp, Homo sapiens
tcttcaaacacacca

SEQ ID NO: 313145 - DNA, 15 bp, Homo sapiens
ttcttcaaacacacc

SEQ ID NO: 313146 - DNA, 15 bp, Homo sapiens
gttcttcaaacacac

SEQ ID NO: 313147 - DNA, 15 bp, Homo sapiens
cgttcttcaaacaca

SEQ ID NO: 313148 - DNA, 15 bp, Homo sapiens
tcgttcttcaaacac

SEQ ID NO: 313149 - DNA, 15 bp, Homo sapiens
atcgttcttcaaaca

SEQ ID NO: 313150 - DNA, 15 bp, Homo sapiens
aatcgttcttcaaac

SEQ ID NO: 313151 - DNA, 15 bp, Homo sapiens
taatcgttcttcaaa

SEQ ID NO: 313152 - DNA, 15 bp, Homo sapiens
ctaatcgttcttcaa

SEQ ID NO: 313153 - DNA, 15 bp, Homo sapiens
cctaatcgttcttca

SEQ ID NO: 313154 - DNA, 15 bp, Homo sapiens
tcctaatcgttcttc

SEQ ID NO: 313155 - DNA, 15 bp, Homo sapiens
ctcctaatcgttctt

SEQ ID NO: 313156 - DNA, 15 bp, Homo sapiens
cctcctaatcgttct

SEQ ID NO: 313157 - DNA, 15 bp, Homo sapiens
acctcctaatcgttc

SEQ ID NO: 313158 - DNA, 15 bp, Homo sapiens
gacctcctaatcgtt

SEQ ID NO: 313159 - DNA, 15 bp, Homo sapiens
tgacctcctaatcgt

SEQ ID NO: 313160 - DNA, 15 bp, Homo sapiens
atgacctcctaatcg

SEQ ID NO: 313161 - DNA, 15 bp, Homo sapiens
tatgacctcctaatc

SEQ ID NO: 313162 - DNA, 15 bp, Homo sapiens
ctatgacctcctaat

SEQ ID NO: 313163 - DNA, 15 bp, Homo sapiens
gctatgacctcctaa

SEQ ID NO: 313164 - DNA, 15 bp, Homo sapiens
tgctatgacctccta

SEQ ID NO: 313165 - DNA, 15 bp, Homo sapiens
ttgctatgacctcct

SEQ ID NO: 313166 - DNA, 15 bp, Homo sapiens
tttgctatgacctcc

SEQ ID NO: 313167 - DNA, 15 bp, Homo sapiens
ttttgctatgacctc

SEQ ID NO: 313168 - DNA, 15 bp, Homo sapiens
attttgctatgacct

SEQ ID NO: 313169 - DNA, 15 bp, Homo sapiens
cattttgctatgacc

SEQ ID NO: 313170 - DNA, 15 bp, Homo sapiens
ccattttgctatgac

SEQ ID NO: 313171 - DNA, 15 bp, Homo sapiens
cccattttgctatga

SEQ ID NO: 313172 - DNA, 15 bp, Homo sapiens
gcccattttgctatg

SEQ ID NO: 313173 - DNA, 15 bp, Homo sapiens
tgcccattttgctat

SEQ ID NO: 313174 - DNA, 15 bp, Homo sapiens
ctgcccattttgcta

SEQ ID NO: 313175 - DNA, 15 bp, Homo sapiens
gctgcccattttgct

SEQ ID NO: 313176 - DNA, 15 bp, Homo sapiens
tgctgcccattttgc

SEQ ID NO: 313177 - DNA, 15 bp, Homo sapiens
ttgctgcccattttg

SEQ ID NO: 313178 - DNA, 15 bp, Homo sapiens
cttgctgcccatttt

SEQ ID NO: 313179 - DNA, 15 bp, Homo sapiens
acttgctgcccattt

SEQ ID NO: 313180 - DNA, 15 bp, Homo sapiens
tacttgctgcccatt

SEQ ID NO: 313181 - DNA, 15 bp, Homo sapiens
atacttgctgcccat

SEQ ID NO: 313182 - DNA, 15 bp, Homo sapiens
gatacttgctgccca

SEQ ID NO: 313183 - DNA, 15 bp, Homo sapiens
agatacttgctgccc

SEQ ID NO: 313184 - DNA, 15 bp, Homo sapiens
gagatacttgctgcc

SEQ ID NO: 313185 - DNA, 15 bp, Homo sapiens
agagatacttgctgc

SEQ ID NO: 313186 - DNA, 15 bp, Homo sapiens
gagagatacttgctg

SEQ ID NO: 313187 - DNA, 15 bp, Homo sapiens
agagagatacttgct

SEQ ID NO: 313188 - DNA, 15 bp, Homo sapiens
aagagagatacttgc

SEQ ID NO: 313189 - DNA, 15 bp, Homo sapiens
gaagagagatacttg

SEQ ID NO: 313190 - DNA, 15 bp, Homo sapiens
cgaagagagatactt

SEQ ID NO: 313191 - DNA, 15 bp, Homo sapiens
acgaagagagatact

SEQ ID NO: 313192 - DNA, 15 bp, Homo sapiens
gacgaagagagatac

SEQ ID NO: 313193 - DNA, 15 bp, Homo sapiens
agacgaagagagata

SEQ ID NO: 313194 - DNA, 15 bp, Homo sapiens
tagacgaagagagat

SEQ ID NO: 313195 - DNA, 15 bp, Homo sapiens
ttagacgaagagaga

SEQ ID NO: 313196 - DNA, 15 bp, Homo sapiens
attagacgaagagag

SEQ ID NO: 313197 - DNA, 15 bp, Homo sapiens
cattagacgaagaga

SEQ ID NO: 313198 - DNA, 15 bp, Homo sapiens
gcattagacgaagag

SEQ ID NO: 313199 - DNA, 15 bp, Homo sapiens
tgcattagacgaaga

SEQ ID NO: 313200 - DNA, 15 bp, Homo sapiens
ttgcattagacgaag

SEQ ID NO: 313201 - DNA, 15 bp, Homo sapiens
tttgcattagacgaa

SEQ ID NO: 313202 - DNA, 15 bp, Homo sapiens
ctttgcattagacga

SEQ ID NO: 313203 - DNA, 15 bp, Homo sapiens
actttgcattagacg

SEQ ID NO: 313204 - DNA, 15 bp, Homo sapiens
tactttgcattagac

SEQ ID NO: 313205 - DNA, 15 bp, Homo sapiens
atactttgcattaga

SEQ ID NO: 313206 - DNA, 15 bp, Homo sapiens
tatactttgcattag

SEQ ID NO: 313207 - DNA, 15 bp, Homo sapiens
ttatactttgcatta

SEQ ID NO: 313208 - DNA, 15 bp, Homo sapiens
tttatactttgcatt

SEQ ID NO: 313209 - DNA, 15 bp, Homo sapiens
ttttatactttgcat

SEQ ID NO: 313210 - DNA, 15 bp, Homo sapiens
cttttatactttgca

SEQ ID NO: 313211 - DNA, 15 bp, Homo sapiens
ccttttatactttgc

SEQ ID NO: 313212 - DNA, 15 bp, Homo sapiens
gccttttatactttg

SEQ ID NO: 313213 - DNA, 15 bp, Homo sapiens
ggccttttatacttt

SEQ ID NO: 313214 - DNA, 15 bp, Homo sapiens
aggccttttatactt

SEQ ID NO: 313215 - DNA, 15 bp, Homo sapiens
aaggccttttatact

SEQ ID NO: 313216 - DNA, 15 bp, Homo sapiens
aaaggccttttatac

SEQ ID NO: 313217 - DNA, 15 bp, Homo sapiens
taaaggccttttata

SEQ ID NO: 313218 - DNA, 15 bp, Homo sapiens
ataaaggccttttat

SEQ ID NO: 313219 - DNA, 15 bp, Homo sapiens
cataaaggcctttta

SEQ ID NO: 313220 - DNA, 15 bp, Homo sapiens
acataaaggcctttt

SEQ ID NO: 313221 - DNA, 15 bp, Homo sapiens
tacataaaggccttt

SEQ ID NO: 313222 - DNA, 15 bp, Homo sapiens
atacataaaggcctt

SEQ ID NO: 313223 - DNA, 15 bp, Homo sapiens
tatacataaaggcct

SEQ ID NO: 313224 - DNA, 15 bp, Homo sapiens
atatacataaaggcc

SEQ ID NO: 313225 - DNA, 15 bp, Homo sapiens
aatatacataaaggc

SEQ ID NO: 313226 - DNA, 15 bp, Homo sapiens
taatatacataaagg

SEQ ID NO: 313227 - DNA, 15 bp, Homo sapiens
gtaatatacataaag

SEQ ID NO: 313228 - DNA, 15 bp, Homo sapiens
tgtaatatacataaa

SEQ ID NO: 313229 - DNA, 15 bp, Homo sapiens
ttgtaatatacataa

SEQ ID NO: 313230 - DNA, 15 bp, Homo sapiens
cttgtaatatacata

SEQ ID NO: 313231 - DNA, 15 bp, Homo sapiens
acttgtaatatacat

SEQ ID NO: 313232 - DNA, 15 bp, Homo sapiens
gacttgtaatataca

SEQ ID NO: 313233 - DNA, 15 bp, Homo sapiens
agacttgtaatatac

SEQ ID NO: 313234 - DNA, 15 bp, Homo sapiens
tagacttgtaatata

SEQ ID NO: 313235 - DNA, 15 bp, Homo sapiens
atagacttgtaatat

SEQ ID NO: 313236 - DNA, 15 bp, Homo sapiens
tatagacttgtaata

SEQ ID NO: 313237 - DNA, 15 bp, Homo sapiens
ttatagacttgtaat

SEQ ID NO: 313238 - DNA, 15 bp, Homo sapiens
attatagacttgtaa

SEQ ID NO: 313239 - DNA, 15 bp, Homo sapiens
gattatagacttgta

SEQ ID NO: 313240 - DNA, 15 bp, Homo sapiens
ggattatagacttgt

SEQ ID NO: 313241 - DNA, 15 bp, Homo sapiens
aggattatagacttg

SEQ ID NO: 313242 - DNA, 15 bp, Homo sapiens
aaggattatagactt

SEQ ID NO: 313243 - DNA, 15 bp, Homo sapiens
aaaggattatagact

SEQ ID NO: 313244 - DNA, 15 bp, Homo sapiens
taaaggattatagac

SEQ ID NO: 313245 - DNA, 15 bp, Homo sapiens
ataaaggattataga

SEQ ID NO: 313246 - DNA, 15 bp, Homo sapiens
gataaaggattatag

SEQ ID NO: 313247 - DNA, 15 bp, Homo sapiens
agataaaggattata

SEQ ID NO: 313248 - DNA, 15 bp, Homo sapiens
cagataaaggattat

SEQ ID NO: 313249 - DNA, 15 bp, Homo sapiens
acagataaaggatta

SEQ ID NO: 313250 - DNA, 15 bp, Homo sapiens
tacagataaaggatt

SEQ ID NO: 313251 - DNA, 15 bp, Homo sapiens
ctacagataaaggat

SEQ ID NO: 313252 - DNA, 15 bp, Homo sapiens
actacagataaagga

SEQ ID NO: 313253 - DNA, 15 bp, Homo sapiens
aactacagataaagg

SEQ ID NO: 313254 - DNA, 15 bp, Homo sapiens
gaactacagataaag

SEQ ID NO: 313255 - DNA, 15 bp, Homo sapiens
ggaactacagataaa

SEQ ID NO: 313256 - DNA, 15 bp, Homo sapiens
tggaactacagataa

SEQ ID NO: 313257 - DNA, 15 bp, Homo sapiens
ttggaactacagata

SEQ ID NO: 313258 - DNA, 15 bp, Homo sapiens
tttggaactacagat

SEQ ID NO: 313259 - DNA, 15 bp, Homo sapiens
ttttggaactacaga

SEQ ID NO: 313260 - DNA, 15 bp, Homo sapiens
attttggaactacag

SEQ ID NO: 313261 - DNA, 15 bp, Homo sapiens
aattttggaactaca

SEQ ID NO: 313262 - DNA, 15 bp, Homo sapiens
caattttggaactac

SEQ ID NO: 313263 - DNA, 15 bp, Homo sapiens
tcaattttggaacta

SEQ ID NO: 313264 - DNA, 15 bp, Homo sapiens
ctcaattttggaact

SEQ ID NO: 313265 - DNA, 15 bp, Homo sapiens
tctcaattttggaac

SEQ ID NO: 313266 - DNA, 15 bp, Homo sapiens
ttctcaattttggaa

SEQ ID NO: 313267 - DNA, 15 bp, Homo sapiens
tttctcaattttgga

SEQ ID NO: 313268 - DNA, 15 bp, Homo sapiens
ctttctcaattttgg

SEQ ID NO: 313269 - DNA, 15 bp, Homo sapiens
gctttctcaattttg

SEQ ID NO: 313270 - DNA, 15 bp, Homo sapiens
agctttctcaatttt

SEQ ID NO: 313271 - DNA, 15 bp, Homo sapiens
aagctttctcaattt

SEQ ID NO: 313272 - DNA, 15 bp, Homo sapiens
aaagctttctcaatt

SEQ ID NO: 313273 - DNA, 15 bp, Homo sapiens
taaagctttctcaat

SEQ ID NO: 313274 - DNA, 15 bp, Homo sapiens
ttaaagctttctcaa

SEQ ID NO: 313275 - DNA, 15 bp, Homo sapiens
tttaaagctttctca

SEQ ID NO: 313276 - DNA, 15 bp, Homo sapiens
ttttaaagctttctc

SEQ ID NO: 313277 - DNA, 15 bp, Homo sapiens
attttaaagctttct

SEQ ID NO: 313278 - DNA, 15 bp, Homo sapiens
gattttaaagctttc

SEQ ID NO: 313279 - DNA, 15 bp, Homo sapiens
ggattttaaagcttt

SEQ ID NO: 313280 - DNA, 15 bp, Homo sapiens
tggattttaaagctt

SEQ ID NO: 313281 - DNA, 15 bp, Homo sapiens
ctggattttaaagct

SEQ ID NO: 313282 - DNA, 15 bp, Homo sapiens
actggattttaaagc

SEQ ID NO: 313283 - DNA, 15 bp, Homo sapiens
cactggattttaaag

SEQ ID NO: 313284 - DNA, 15 bp, Homo sapiens
tcactggattttaaa

SEQ ID NO: 313285 - DNA, 15 bp, Homo sapiens
atcactggattttaa

SEQ ID NO: 313286 - DNA, 15 bp, Homo sapiens
aatcactggatttta

SEQ ID NO: 313287 - DNA, 15 bp, Homo sapiens
gaatcactggatttt

SEQ ID NO: 313288 - DNA, 15 bp, Homo sapiens
agaatcactggattt

SEQ ID NO: 313289 - DNA, 15 bp, Homo sapiens
cagaatcactggatt

SEQ ID NO: 313290 - DNA, 15 bp, Homo sapiens
acagaatcactggat

SEQ ID NO: 313291 - DNA, 15 bp, Homo sapiens
cacagaatcactgga

SEQ ID NO: 313292 - DNA, 15 bp, Homo sapiens
acacagaatcactgg

SEQ ID NO: 313293 - DNA, 15 bp, Homo sapiens
cacacagaatcactg

SEQ ID NO: 313294 - DNA, 15 bp, Homo sapiens
acacacagaatcact

SEQ ID NO: 313295 - DNA, 15 bp, Homo sapiens
aacacacagaatcac

SEQ ID NO: 313296 - DNA, 15 bp, Homo sapiens
aaacacacagaatca

SEQ ID NO: 313297 - DNA, 15 bp, Homo sapiens
aaaacacacagaatc

SEQ ID NO: 313298 - DNA, 15 bp, Homo sapiens
caaaacacacagaat

SEQ ID NO: 313299 - DNA, 15 bp, Homo sapiens
acaaaacacacagaa

SEQ ID NO: 313300 - DNA, 15 bp, Homo sapiens
cacaaaacacacaga

SEQ ID NO: 313301 - DNA, 15 bp, Homo sapiens
gcacaaaacacacag

SEQ ID NO: 313302 - DNA, 15 bp, Homo sapiens
ggcacaaaacacaca

SEQ ID NO: 313303 - DNA, 15 bp, Homo sapiens
tggcacaaaacacac

SEQ ID NO: 313304 - DNA, 15 bp, Homo sapiens
ttggcacaaaacaca

SEQ ID NO: 313305 - DNA, 15 bp, Homo sapiens
tttggcacaaaacac

SEQ ID NO: 313306 - DNA, 15 bp, Homo sapiens
ttttggcacaaaaca

SEQ ID NO: 313307 - DNA, 15 bp, Homo sapiens
cttttggcacaaaac

SEQ ID NO: 313308 - DNA, 15 bp, Homo sapiens
acttttggcacaaaa

SEQ ID NO: 313309 - DNA, 15 bp, Homo sapiens
gacttttggcacaaa

SEQ ID NO: 313310 - DNA, 15 bp, Homo sapiens
tgacttttggcacaa

SEQ ID NO: 313311 - DNA, 15 bp, Homo sapiens
atgacttttggcaca

SEQ ID NO: 313312 - DNA, 15 bp, Homo sapiens
tatgacttttggcac

SEQ ID NO: 313313 - DNA, 15 bp, Homo sapiens
atatgacttttggca

SEQ ID NO: 313314 - DNA, 15 bp, Homo sapiens
catatgacttttggc

SEQ ID NO: 313315 - DNA, 15 bp, Homo sapiens
ccatatgacttttgg

SEQ ID NO: 313316 - DNA, 15 bp, Homo sapiens
gccatatgacttttg

SEQ ID NO: 313317 - DNA, 15 bp, Homo sapiens
tgccatatgactttt

SEQ ID NO: 313318 - DNA, 15 bp, Homo sapiens
atgccatatgacttt

SEQ ID NO: 313319 - DNA, 15 bp, Homo sapiens
gatgccatatgactt

SEQ ID NO: 313320 - DNA, 15 bp, Homo sapiens
tgatgccatatgact

SEQ ID NO: 313321 - DNA, 15 bp, Homo sapiens
ttgatgccatatgac

SEQ ID NO: 313322 - DNA, 15 bp, Homo sapiens
tttgatgccatatga

SEQ ID NO: 313323 - DNA, 15 bp, Homo sapiens
ttttgatgccatatg

SEQ ID NO: 313324 - DNA, 15 bp, Homo sapiens
gttttgatgccatat

SEQ ID NO: 313325 - DNA, 15 bp, Homo sapiens
ggttttgatgccata

SEQ ID NO: 313326 - DNA, 15 bp, Homo sapiens
tggttttgatgccat

SEQ ID NO: 313327 - DNA, 15 bp, Homo sapiens
atggttttgatgcca

SEQ ID NO: 313328 - DNA, 15 bp, Homo sapiens
tatggttttgatgcc

SEQ ID NO: 313329 - DNA, 15 bp, Homo sapiens
atatggttttgatgc

SEQ ID NO: 313330 - DNA, 15 bp, Homo sapiens
catatggttttgatg

SEQ ID NO: 313331 - DNA, 15 bp, Homo sapiens
acatatggttttgat

SEQ ID NO: 313332 - DNA, 15 bp, Homo sapiens
tacatatggttttga

SEQ ID NO: 313333 - DNA, 15 bp, Homo sapiens
ttacatatggttttg

SEQ ID NO: 313334 - DNA, 15 bp, Homo sapiens
tttacatatggtttt

SEQ ID NO: 313335 - DNA, 15 bp, Homo sapiens
gtttacatatggttt

SEQ ID NO: 313336 - DNA, 15 bp, Homo sapiens
agtttacatatggtt

SEQ ID NO: 313337 - DNA, 15 bp, Homo sapiens
cagtttacatatggt

SEQ ID NO: 313338 - DNA, 15 bp, Homo sapiens
ccagtttacatatgg

SEQ ID NO: 313339 - DNA, 15 bp, Homo sapiens
gccagtttacatatg

SEQ ID NO: 313340 - DNA, 15 bp, Homo sapiens
tgccagtttacatat

SEQ ID NO: 313341 - DNA, 15 bp, Homo sapiens
gtgccagtttacata

SEQ ID NO: 313342 - DNA, 15 bp, Homo sapiens
tgtgccagtttacat

SEQ ID NO: 313343 - DNA, 15 bp, Homo sapiens
ctgtgccagtttaca

SEQ ID NO: 313344 - DNA, 15 bp, Homo sapiens
tctgtgccagtttac

SEQ ID NO: 313345 - DNA, 15 bp, Homo sapiens
ctctgtgccagttta

SEQ ID NO: 313346 - DNA, 15 bp, Homo sapiens
gctctgtgccagttt

SEQ ID NO: 313347 - DNA, 15 bp, Homo sapiens
agctctgtgccagtt

SEQ ID NO: 313348 - DNA, 15 bp, Homo sapiens
tagctctgtgccagt

SEQ ID NO: 313349 - DNA, 15 bp, Homo sapiens
atagctctgtgccag

SEQ ID NO: 313350 - DNA, 15 bp, Homo sapiens
aatagctctgtgcca

SEQ ID NO: 313351 - DNA, 15 bp, Homo sapiens
aaatagctctgtgcc

SEQ ID NO: 313352 - DNA, 15 bp, Homo sapiens
taaatagctctgtgc

SEQ ID NO: 313353 - DNA, 15 bp, Homo sapiens
ataaatagctctgtg

SEQ ID NO: 313354 - DNA, 15 bp, Homo sapiens
tataaatagctctgt

SEQ ID NO: 313355 - DNA, 15 bp, Homo sapiens
ttataaatagctctg

SEQ ID NO: 313356 - DNA, 15 bp, Homo sapiens
attataaatagctct

SEQ ID NO: 313357 - DNA, 15 bp, Homo sapiens
gattataaatagctc

SEQ ID NO: 313358 - DNA, 15 bp, Homo sapiens
agattataaatagct

SEQ ID NO: 313359 - DNA, 15 bp, Homo sapiens
aagattataaatagc

SEQ ID NO: 313360 - DNA, 15 bp, Homo sapiens
aaagattataaatag

SEQ ID NO: 313361 - DNA, 15 bp, Homo sapiens
taaagattataaata

SEQ ID NO: 313362 - DNA, 15 bp, Homo sapiens
ataaagattataaat

SEQ ID NO: 313363 - DNA, 15 bp, Homo sapiens
gataaagattataaa

SEQ ID NO: 313364 - DNA, 15 bp, Homo sapiens
tgataaagattataa

SEQ ID NO: 313365 - DNA, 15 bp, Homo sapiens
atgataaagattata

SEQ ID NO: 313366 - DNA, 15 bp, Homo sapiens
tatgataaagattat

SEQ ID NO: 313367 - DNA, 15 bp, Homo sapiens
ttatgataaagatta

SEQ ID NO: 313368 - DNA, 15 bp, Homo sapiens
attatgataaagatt

SEQ ID NO: 313369 - DNA, 15 bp, Homo sapiens
aattatgataaagat

SEQ ID NO: 313370 - DNA, 15 bp, Homo sapiens
ccaattatgataaag

SEQ ID NO: 313371 - DNA, 15 bp, Homo sapiens
tccaattatgataaa

SEQ ID NO: 313372 - DNA, 15 bp, Homo sapiens
ttccaattatgataa

SEQ ID NO: 313373 - DNA, 15 bp, Homo sapiens
attccaattatgata

SEQ ID NO: 313374 - DNA, 15 bp, Homo sapiens
tattccaattatgat

SEQ ID NO: 313375 - DNA, 15 bp, Homo sapiens
atattccaattatga

SEQ ID NO: 313376 - DNA, 15 bp, Homo sapiens
aatattccaattatg

SEQ ID NO: 313377 - DNA, 15 bp, Homo sapiens
gaatattccaattat

SEQ ID NO: 313378 - DNA, 15 bp, Homo sapiens
agaatattccaatta

SEQ ID NO: 313379 - DNA, 15 bp, Homo sapiens
gagaatattccaatt

SEQ ID NO: 313380 - DNA, 15 bp, Homo sapiens
tgagaatattccaat

SEQ ID NO: 313381 - DNA, 15 bp, Homo sapiens
atgagaatattccaa

SEQ ID NO: 313382 - DNA, 15 bp, Homo sapiens
aatgagaatattcca

SEQ ID NO: 313383 - DNA, 15 bp, Homo sapiens
aaatgagaatattcc

SEQ ID NO: 313384 - DNA, 15 bp, Homo sapiens
gaaatgagaatattc

SEQ ID NO: 313385 - DNA, 15 bp, Homo sapiens
tgaaatgagaatatt

SEQ ID NO: 313386 - DNA, 15 bp, Homo sapiens
gtgaaatgagaatat

SEQ ID NO: 313387 - DNA, 15 bp, Homo sapiens
agtgaaatgagaata

SEQ ID NO: 313388 - DNA, 15 bp, Homo sapiens
cagtgaaatgagaat

SEQ ID NO: 313389 - DNA, 15 bp, Homo sapiens
gcagtgaaatgagaa

SEQ ID NO: 313390 - DNA, 15 bp, Homo sapiens
tgcagtgaaatgaga

SEQ ID NO: 313391 - DNA, 15 bp, Homo sapiens
ctgcagtgaaatgag

SEQ ID NO: 313392 - DNA, 15 bp, Homo sapiens
tctgcagtgaaatga

SEQ ID NO: 313393 - DNA, 15 bp, Homo sapiens
ttctgcagtgaaatg

SEQ ID NO: 313394 - DNA, 15 bp, Homo sapiens
tttctgcagtgaaat

SEQ ID NO: 313395 - DNA, 15 bp, Homo sapiens
atttctgcagtgaaa

SEQ ID NO: 313396 - DNA, 15 bp, Homo sapiens
tatttctgcagtgaa

SEQ ID NO: 313397 - DNA, 15 bp, Homo sapiens
atatttctgcagtga

SEQ ID NO: 313398 - DNA, 15 bp, Homo sapiens
aatatttctgcagtg

SEQ ID NO: 313399 - DNA, 15 bp, Homo sapiens
taatatttctgcagt

SEQ ID NO: 313400 - DNA, 15 bp, Homo sapiens
ttaatatttctgcag

SEQ ID NO: 313401 - DNA, 15 bp, Homo sapiens
attaatatttctgca

SEQ ID NO: 313402 - DNA, 15 bp, Homo sapiens
tattaatatttctgc

SEQ ID NO: 313403 - DNA, 15 bp, Homo sapiens
atattaatatttctg

SEQ ID NO: 313404 - DNA, 15 bp, Homo sapiens
catattaatatttct

SEQ ID NO: 313405 - DNA, 15 bp, Homo sapiens
acatattaatatttc

SEQ ID NO: 313406 - DNA, 15 bp, Homo sapiens
aacatattaatattt

SEQ ID NO: 313407 - DNA, 15 bp, Homo sapiens
aaacatattaatatt

SEQ ID NO: 313408 - DNA, 15 bp, Homo sapiens
caaacatattaatat

SEQ ID NO: 313409 - DNA, 15 bp, Homo sapiens
tcaaacatattaata

SEQ ID NO: 313410 - DNA, 15 bp, Homo sapiens
atcaaacatattaat

SEQ ID NO: 313411 - DNA, 15 bp, Homo sapiens
aatcaaacatattaa

SEQ ID NO: 313412 - DNA, 15 bp, Homo sapiens
caatcaaacatatta

SEQ ID NO: 313413 - DNA, 15 bp, Homo sapiens
ccaatcaaacatatt

SEQ ID NO: 313414 - DNA, 15 bp, Homo sapiens
cccaatcaaacatat

SEQ ID NO: 313415 - DNA, 15 bp, Homo sapiens
tcccaatcaaacata

SEQ ID NO: 313416 - DNA, 15 bp, Homo sapiens
ctcccaatcaaacat

SEQ ID NO: 313417 - DNA, 15 bp, Homo sapiens
gctcccaatcaaaca

SEQ ID NO: 313418 - DNA, 15 bp, Homo sapiens
agctcccaatcaaac

SEQ ID NO: 313419 - DNA, 15 bp, Homo sapiens
tagctcccaatcaaa

SEQ ID NO: 313420 - DNA, 15 bp, Homo sapiens
ttagctcccaatcaa

SEQ ID NO: 313421 - DNA, 15 bp, Homo sapiens
gttagctcccaatca

SEQ ID NO: 313422 - DNA, 15 bp, Homo sapiens
ggttagctcccaatc

SEQ ID NO: 313423 - DNA, 15 bp, Homo sapiens
gggttagctcccaat

SEQ ID NO: 313424 - DNA, 15 bp, Homo sapiens
tgggttagctcccaa

SEQ ID NO: 313425 - DNA, 15 bp, Homo sapiens
ctgggttagctccca

SEQ ID NO: 313426 - DNA, 15 bp, Homo sapiens
tctgggttagctccc

SEQ ID NO: 313427 - DNA, 15 bp, Homo sapiens
gtctgggttagctcc

SEQ ID NO: 313428 - DNA, 15 bp, Homo sapiens
ggtctgggttagctc

SEQ ID NO: 313429 - DNA, 15 bp, Homo sapiens
gggtctgggttagct

SEQ ID NO: 313430 - DNA, 15 bp, Homo sapiens
tgggtctgggttagc

SEQ ID NO: 313431 - DNA, 15 bp, Homo sapiens
gtgggtctgggttag

SEQ ID NO: 313432 - DNA, 15 bp, Homo sapiens
ggtgggtctgggtta

SEQ ID NO: 313433 - DNA, 15 bp, Homo sapiens
aggtgggtctgggtt

SEQ ID NO: 313434 - DNA, 15 bp, Homo sapiens
aaggtgggtctgggt

SEQ ID NO: 313435 - DNA, 15 bp, Homo sapiens
taaggtgggtctggg

SEQ ID NO: 313436 - DNA, 15 bp, Homo sapiens
ctaaggtgggtctgg

SEQ ID NO: 313437 - DNA, 15 bp, Homo sapiens
cctaaggtgggtctg

SEQ ID NO: 313438 - DNA, 15 bp, Homo sapiens
acctaaggtgggtct

SEQ ID NO: 313439 - DNA, 15 bp, Homo sapiens
cacctaaggtgggtc

SEQ ID NO: 313440 - DNA, 15 bp, Homo sapiens
acacctaaggtgggt

SEQ ID NO: 313441 - DNA, 15 bp, Homo sapiens
aacacctaaggtggg

SEQ ID NO: 313442 - DNA, 15 bp, Homo sapiens
taacacctaaggtgg

SEQ ID NO: 313443 - DNA, 15 bp, Homo sapiens
ctaacacctaaggtg

SEQ ID NO: 313444 - DNA, 15 bp, Homo sapiens
cctaacacctaaggt

SEQ ID NO: 313445 - DNA, 15 bp, Homo sapiens
acctaacacctaagg

SEQ ID NO: 313446 - DNA, 15 bp, Homo sapiens
tacctaacacctaag

SEQ ID NO: 313447 - DNA, 15 bp, Homo sapiens
atacctaacacctaa

SEQ ID NO: 313448 - DNA, 15 bp, Homo sapiens
aatacctaacaccta

SEQ ID NO: 313449 - DNA, 15 bp, Homo sapiens
taatacctaacacct

SEQ ID NO: 313450 - DNA, 15 bp, Homo sapiens
ataatacctaacacc

SEQ ID NO: 313451 - DNA, 15 bp, Homo sapiens
aataatacctaacac

SEQ ID NO: 313452 - DNA, 15 bp, Homo sapiens
aaataatacctaaca

SEQ ID NO: 313453 - DNA, 15 bp, Homo sapiens
caaataatacctaac

SEQ ID NO: 313454 - DNA, 15 bp, Homo sapiens
ccaaataatacctaa

SEQ ID NO: 313455 - DNA, 15 bp, Homo sapiens
gccaaataataccta

SEQ ID NO: 313456 - DNA, 15 bp, Homo sapiens
tgccaaataatacct

SEQ ID NO: 313457 - DNA, 15 bp, Homo sapiens
atgccaaataatacc

SEQ ID NO: 313458 - DNA, 15 bp, Homo sapiens
tatgccaaataatac

SEQ ID NO: 313459 - DNA, 15 bp, Homo sapiens
gtatgccaaataata

SEQ ID NO: 313460 - DNA, 15 bp, Homo sapiens
cgtatgccaaataat

SEQ ID NO: 313461 - DNA, 15 bp, Homo sapiens
acgtatgccaaataa

SEQ ID NO: 313462 - DNA, 15 bp, Homo sapiens
tacgtatgccaaata

SEQ ID NO: 313463 - DNA, 15 bp, Homo sapiens
gtacgtatgccaaat

SEQ ID NO: 313464 - DNA, 15 bp, Homo sapiens
ggtacgtatgccaaa

SEQ ID NO: 313465 - DNA, 15 bp, Homo sapiens
tggtacgtatgccaa

SEQ ID NO: 313466 - DNA, 15 bp, Homo sapiens
atggtacgtatgcca

SEQ ID NO: 313467 - DNA, 15 bp, Homo sapiens
tatggtacgtatgcc

SEQ ID NO: 313468 - DNA, 15 bp, Homo sapiens
atatggtacgtatgc

SEQ ID NO: 313469 - DNA, 15 bp, Homo sapiens
aatatggtacgtatg

SEQ ID NO: 313470 - DNA, 15 bp, Homo sapiens
taatatggtacgtat

SEQ ID NO: 313471 - DNA, 15 bp, Homo sapiens
ataatatggtacgta

SEQ ID NO: 313472 - DNA, 15 bp, Homo sapiens
gataatatggtacgt

SEQ ID NO: 313473 - DNA, 15 bp, Homo sapiens
tgataatatggtacg

SEQ ID NO: 313474 - DNA, 15 bp, Homo sapiens
atgataatatggtac

SEQ ID NO: 313475 - DNA, 15 bp, Homo sapiens
aatgataatatggta

SEQ ID NO: 313476 - DNA, 15 bp, Homo sapiens
gaatgataatatggt

SEQ ID NO: 313477 - DNA, 15 bp, Homo sapiens
agaatgataatatgg

SEQ ID NO: 313478 - DNA, 15 bp, Homo sapiens
tagaatgataatatg

SEQ ID NO: 313479 - DNA, 15 bp, Homo sapiens
ttagaatgataatat

SEQ ID NO: 313480 - DNA, 15 bp, Homo sapiens
attagaatgataata

SEQ ID NO: 313481 - DNA, 15 bp, Homo sapiens
gattagaatgataat

SEQ ID NO: 313482 - DNA, 15 bp, Homo sapiens
tgattagaatgataa

SEQ ID NO: 313483 - DNA, 15 bp, Homo sapiens
atgattagaatgata

SEQ ID NO: 313484 - DNA, 15 bp, Homo sapiens
aatgattagaatgat

SEQ ID NO: 313485 - DNA, 15 bp, Homo sapiens
gaatgattagaatga

SEQ ID NO: 313486 - DNA, 15 bp, Homo sapiens
agaatgattagaatg

SEQ ID NO: 313487 - DNA, 15 bp, Homo sapiens
tagaatgattagaat

SEQ ID NO: 313488 - DNA, 15 bp, Homo sapiens
ttagaatgattagaa

SEQ ID NO: 313489 - DNA, 15 bp, Homo sapiens
tttagaatgattaga

SEQ ID NO: 313490 - DNA, 15 bp, Homo sapiens
gtttagaatgattag

SEQ ID NO: 313491 - DNA, 15 bp, Homo sapiens
agtttagaatgatta

SEQ ID NO: 313492 - DNA, 15 bp, Homo sapiens
gagtttagaatgatt

SEQ ID NO: 313493 - DNA, 15 bp, Homo sapiens
ggagtttagaatgat

SEQ ID NO: 313494 - DNA, 15 bp, Homo sapiens
gggagtttagaatga

SEQ ID NO: 313495 - DNA, 15 bp, Homo sapiens
ggggagtttagaatg

SEQ ID NO: 313496 - DNA, 15 bp, Homo sapiens
gggggagtttagaat

SEQ ID NO: 313497 - DNA, 15 bp, Homo sapiens
tgggggagtttagaa

SEQ ID NO: 313498 - DNA, 15 bp, Homo sapiens
ttgggggagtttaga

SEQ ID NO: 313499 - DNA, 15 bp, Homo sapiens
tttgggggagtttag

SEQ ID NO: 313500 - DNA, 15 bp, Homo sapiens
ttttgggggagttta

SEQ ID NO: 313501 - DNA, 15 bp, Homo sapiens
attttgggggagttt

SEQ ID NO: 313502 - DNA, 15 bp, Homo sapiens
aattttgggggagtt

SEQ ID NO: 313503 - DNA, 15 bp, Homo sapiens
taattttgggggagt

SEQ ID NO: 313504 - DNA, 15 bp, Homo sapiens
ataattttgggggag

SEQ ID NO: 313505 - DNA, 15 bp, Homo sapiens
cataattttggggga

SEQ ID NO: 313506 - DNA, 15 bp, Homo sapiens
tcataattttggggg

SEQ ID NO: 313507 - DNA, 15 bp, Homo sapiens
ttcataattttgggg

SEQ ID NO: 313508 - DNA, 15 bp, Homo sapiens
tttcataattttggg

SEQ ID NO: 313509 - DNA, 15 bp, Homo sapiens
gtttcataattttgg

SEQ ID NO: 313510 - DNA, 15 bp, Homo sapiens
ggtttcataattttg

SEQ ID NO: 313511 - DNA, 15 bp, Homo sapiens
gggtttcataatttt

SEQ ID NO: 313512 - DNA, 15 bp, Homo sapiens
tgggtttcataattt

SEQ ID NO: 313513 - DNA, 15 bp, Homo sapiens
atgggtttcataatt

SEQ ID NO: 313514 - DNA, 15 bp, Homo sapiens
gatgggtttcataat

SEQ ID NO: 313515 - DNA, 15 bp, Homo sapiens
agatgggtttcataa

SEQ ID NO: 313516 - DNA, 15 bp, Homo sapiens
cagatgggtttcata

SEQ ID NO: 313517 - DNA, 15 bp, Homo sapiens
ccagatgggtttcat

SEQ ID NO: 313518 - DNA, 15 bp, Homo sapiens
gccagatgggtttca

SEQ ID NO: 313519 - DNA, 15 bp, Homo sapiens
tgccagatgggtttc

SEQ ID NO: 313520 - DNA, 15 bp, Homo sapiens
gtgccagatgggttt

SEQ ID NO: 313521 - DNA, 15 bp, Homo sapiens
ggtgccagatgggtt

SEQ ID NO: 313522 - DNA, 15 bp, Homo sapiens
tggtgccagatgggt

SEQ ID NO: 313523 - DNA, 15 bp, Homo sapiens
ttggtgccagatggg

SEQ ID NO: 313524 - DNA, 15 bp, Homo sapiens
cttggtgccagatgg

SEQ ID NO: 313525 - DNA, 15 bp, Homo sapiens
ccttggtgccagatg

SEQ ID NO: 313526 - DNA, 15 bp, Homo sapiens
cccttggtgccagat

SEQ ID NO: 313527 - DNA, 15 bp, Homo sapiens
acccttggtgccaga

SEQ ID NO: 313528 - DNA, 15 bp, Homo sapiens
aacccttggtgccag

SEQ ID NO: 313529 - DNA, 15 bp, Homo sapiens
aaacccttggtgcca

SEQ ID NO: 313530 - DNA, 15 bp, Homo sapiens
gaaacccttggtgcc

SEQ ID NO: 313531 - DNA, 15 bp, Homo sapiens
tgaaacccttggtgc

SEQ ID NO: 313532 - DNA, 15 bp, Homo sapiens
ctgaaacccttggtg

SEQ ID NO: 313533 - DNA, 15 bp, Homo sapiens
tctgaaacccttggt

SEQ ID NO: 313534 - DNA, 15 bp, Homo sapiens
gtctgaaacccttgg

SEQ ID NO: 313535 - DNA, 15 bp, Homo sapiens
tgtctgaaacccttg

SEQ ID NO: 313536 - DNA, 15 bp, Homo sapiens
ttgtctgaaaccctt

SEQ ID NO: 313537 - DNA, 15 bp, Homo sapiens
cttgtctgaaaccct

SEQ ID NO: 313538 - DNA, 15 bp, Homo sapiens
ccttgtctgaaaccc

SEQ ID NO: 313539 - DNA, 15 bp, Homo sapiens
cccttgtctgaaacc

SEQ ID NO: 313540 - DNA, 15 bp, Homo sapiens
tcccttgtctgaaac

SEQ ID NO: 313541 - DNA, 15 bp, Homo sapiens
atcccttgtctgaaa

SEQ ID NO: 313542 - DNA, 15 bp, Homo sapiens
aatcccttgtctgaa

SEQ ID NO: 313543 - DNA, 15 bp, Homo sapiens
taatcccttgtctga

SEQ ID NO: 313544 - DNA, 15 bp, Homo sapiens
ataatcccttgtctg

SEQ ID NO: 313545 - DNA, 15 bp, Homo sapiens
gataatcccttgtct

SEQ ID NO: 313546 - DNA, 15 bp, Homo sapiens
agataatcccttgtc

SEQ ID NO: 313547 - DNA, 15 bp, Homo sapiens
aagataatcccttgt

SEQ ID NO: 313548 - DNA, 15 bp, Homo sapiens
taagataatcccttg

SEQ ID NO: 313549 - DNA, 15 bp, Homo sapiens
ttaagataatccctt

SEQ ID NO: 313550 - DNA, 15 bp, Homo sapiens
tttaagataatccct

SEQ ID NO: 313551 - DNA, 15 bp, Homo sapiens
atttaagataatccc

SEQ ID NO: 313552 - DNA, 15 bp, Homo sapiens
aatttaagataatcc

SEQ ID NO: 313553 - DNA, 15 bp, Homo sapiens
aaatttaagataatc

SEQ ID NO: 313554 - DNA, 15 bp, Homo sapiens
taaatttaagataat

SEQ ID NO: 313555 - DNA, 15 bp, Homo sapiens
ataaatttaagataa

SEQ ID NO: 313556 - DNA, 15 bp, Homo sapiens
tataaatttaagata

SEQ ID NO: 313557 - DNA, 15 bp, Homo sapiens
atataaatttaagat

SEQ ID NO: 313558 - DNA, 15 bp, Homo sapiens
catataaatttaaga

SEQ ID NO: 313559 - DNA, 15 bp, Homo sapiens
tcatataaatttaag

SEQ ID NO: 313560 - DNA, 15 bp, Homo sapiens
atcatataaatttaa

SEQ ID NO: 313561 - DNA, 15 bp, Homo sapiens
aatcatataaattta

SEQ ID NO: 313562 - DNA, 15 bp, Homo sapiens
aaatcatataaattt

SEQ ID NO: 313563 - DNA, 15 bp, Homo sapiens
gaaatcatataaatt

SEQ ID NO: 313564 - DNA, 15 bp, Homo sapiens
agaaatcatataaat

SEQ ID NO: 313565 - DNA, 15 bp, Homo sapiens
gagaaatcatataaa

SEQ ID NO: 313566 - DNA, 15 bp, Homo sapiens
tgagaaatcatataa

SEQ ID NO: 313567 - DNA, 15 bp, Homo sapiens
ttgagaaatcatata

SEQ ID NO: 313568 - DNA, 15 bp, Homo sapiens
tttgagaaatcatat

SEQ ID NO: 313569 - DNA, 15 bp, Homo sapiens
ttttgagaaatcata

SEQ ID NO: 313570 - DNA, 15 bp, Homo sapiens
tttttgagaaatcat

SEQ ID NO: 313571 - DNA, 15 bp, Homo sapiens
gtttttgagaaatca

SEQ ID NO: 313572 - DNA, 15 bp, Homo sapiens
tgtttttgagaaatc

SEQ ID NO: 313573 - DNA, 15 bp, Homo sapiens
atgtttttgagaaat

SEQ ID NO: 313574 - DNA, 15 bp, Homo sapiens
catgtttttgagaaa

SEQ ID NO: 313575 - DNA, 15 bp, Homo sapiens
ccatgtttttgagaa

SEQ ID NO: 313576 - DNA, 15 bp, Homo sapiens
gccatgtttttgaga

SEQ ID NO: 313577 - DNA, 15 bp, Homo sapiens
tgccatgtttttgag

SEQ ID NO: 313578 - DNA, 15 bp, Homo sapiens
ctgccatgtttttga

SEQ ID NO: 313579 - DNA, 15 bp, Homo sapiens
tctgccatgtttttg

SEQ ID NO: 313580 - DNA, 15 bp, Homo sapiens
atctgccatgttttt

SEQ ID NO: 313581 - DNA, 15 bp, Homo sapiens
catctgccatgtttt

SEQ ID NO: 313582 - DNA, 15 bp, Homo sapiens
tcatctgccatgttt

SEQ ID NO: 313583 - DNA, 15 bp, Homo sapiens
ttcatctgccatgtt

SEQ ID NO: 313584 - DNA, 15 bp, Homo sapiens
tttcatctgccatgt

SEQ ID NO: 313585 - DNA, 15 bp, Homo sapiens
atttcatctgccatg

SEQ ID NO: 313586 - DNA, 15 bp, Homo sapiens
aatttcatctgccat

SEQ ID NO: 313587 - DNA, 15 bp, Homo sapiens
gaatttcatctgcca

SEQ ID NO: 313588 - DNA, 15 bp, Homo sapiens
agaatttcatctgcc

SEQ ID NO: 313589 - DNA, 15 bp, Homo sapiens
aagaatttcatctgc

SEQ ID NO: 313590 - DNA, 15 bp, Homo sapiens
aaagaatttcatctg

SEQ ID NO: 313591 - DNA, 15 bp, Homo sapiens
gaaagaatttcatct

SEQ ID NO: 313592 - DNA, 15 bp, Homo sapiens
ggaaagaatttcatc

SEQ ID NO: 313593 - DNA, 15 bp, Homo sapiens
aggaaagaatttcat

SEQ ID NO: 313594 - DNA, 15 bp, Homo sapiens
aaggaaagaatttca

SEQ ID NO: 313595 - DNA, 15 bp, Homo sapiens
gaaggaaagaatttc

SEQ ID NO: 313596 - DNA, 15 bp, Homo sapiens
agaaggaaagaattt

SEQ ID NO: 313597 - DNA, 15 bp, Homo sapiens
cagaaggaaagaatt

SEQ ID NO: 313598 - DNA, 15 bp, Homo sapiens
ccagaaggaaagaat

SEQ ID NO: 313599 - DNA, 15 bp, Homo sapiens
cccagaaggaaagaa

SEQ ID NO: 313600 - DNA, 15 bp, Homo sapiens
tcccagaaggaaaga

SEQ ID NO: 313601 - DNA, 15 bp, Homo sapiens
gtcccagaaggaaag

SEQ ID NO: 313602 - DNA, 15 bp, Homo sapiens
tgtcccagaaggaaa

SEQ ID NO: 313603 - DNA, 15 bp, Homo sapiens
ctgtcccagaaggaa

SEQ ID NO: 313604 - DNA, 15 bp, Homo sapiens
actgtcccagaagga

SEQ ID NO: 313605 - DNA, 15 bp, Homo sapiens
cactgtcccagaagg

SEQ ID NO: 313606 - DNA, 15 bp, Homo sapiens
tcactgtcccagaag

SEQ ID NO: 313607 - DNA, 15 bp, Homo sapiens
gtcactgtcccagaa

SEQ ID NO: 313608 - DNA, 15 bp, Homo sapiens
tgtcactgtcccaga

SEQ ID NO: 313609 - DNA, 15 bp, Homo sapiens
atgtcactgtcccag

SEQ ID NO: 313610 - DNA, 15 bp, Homo sapiens
catgtcactgtccca

SEQ ID NO: 313611 - DNA, 15 bp, Homo sapiens
acatgtcactgtccc

SEQ ID NO: 313612 - DNA, 15 bp, Homo sapiens
aacatgtcactgtcc

SEQ ID NO: 313613 - DNA, 15 bp, Homo sapiens
aaacatgtcactgtc

SEQ ID NO: 313614 - DNA, 15 bp, Homo sapiens
caaacatgtcactgt

SEQ ID NO: 313615 - DNA, 15 bp, Homo sapiens
acaaacatgtcactg

SEQ ID NO: 313616 - DNA, 15 bp, Homo sapiens
aacaaacatgtcact

SEQ ID NO: 313617 - DNA, 15 bp, Homo sapiens
gaacaaacatgtcac

SEQ ID NO: 313618 - DNA, 15 bp, Homo sapiens
ggaacaaacatgtca

SEQ ID NO: 313619 - DNA, 15 bp, Homo sapiens
aggaacaaacatgtc

SEQ ID NO: 313620 - DNA, 15 bp, Homo sapiens
caggaacaaacatgt

SEQ ID NO: 313621 - DNA, 15 bp, Homo sapiens
tcaggaacaaacatg

SEQ ID NO: 313622 - DNA, 15 bp, Homo sapiens
ttcaggaacaaacat

SEQ ID NO: 313623 - DNA, 15 bp, Homo sapiens
tttcaggaacaaaca

SEQ ID NO: 313624 - DNA, 15 bp, Homo sapiens
ctttcaggaacaaac

SEQ ID NO: 313625 - DNA, 15 bp, Homo sapiens
tctttcaggaacaaa

SEQ ID NO: 313626 - DNA, 15 bp, Homo sapiens
ttctttcaggaacaa

SEQ ID NO: 313627 - DNA, 15 bp, Homo sapiens
cttctttcaggaaca

SEQ ID NO: 313628 - DNA, 15 bp, Homo sapiens
tcttctttcaggaac

SEQ ID NO: 313629 - DNA, 15 bp, Homo sapiens
ttcttctttcaggaa

SEQ ID NO: 313630 - DNA, 15 bp, Homo sapiens
tttcttctttcagga

SEQ ID NO: 313631 - DNA, 15 bp, Homo sapiens
ctttcttctttcagg

SEQ ID NO: 313632 - DNA, 15 bp, Homo sapiens
cctttcttctttcag

SEQ ID NO: 313633 - DNA, 15 bp, Homo sapiens
gcctttcttctttca

SEQ ID NO: 313634 - DNA, 15 bp, Homo sapiens
tgcctttcttctttc

SEQ ID NO: 313635 - DNA, 15 bp, Homo sapiens
ttgcctttcttcttt

SEQ ID NO: 313636 - DNA, 15 bp, Homo sapiens
tttgcctttcttctt

SEQ ID NO: 313637 - DNA, 15 bp, Homo sapiens
ctttgcctttcttct

SEQ ID NO: 313638 - DNA, 15 bp, Homo sapiens
actttgcctttcttc

SEQ ID NO: 313639 - DNA, 15 bp, Homo sapiens
cactttgcctttctt

SEQ ID NO: 313640 - DNA, 15 bp, Homo sapiens
gcactttgcctttct

SEQ ID NO: 313641 - DNA, 15 bp, Homo sapiens
cgcactttgcctttc

SEQ ID NO: 313642 - DNA, 15 bp, Homo sapiens
gcgcactttgccttt

SEQ ID NO: 313643 - DNA, 15 bp, Homo sapiens
tgcgcactttgcctt

SEQ ID NO: 313644 - DNA, 15 bp, Homo sapiens
ctgcgcactttgcct

SEQ ID NO: 313645 - DNA, 15 bp, Homo sapiens
tctgcgcactttgcc

SEQ ID NO: 313646 - DNA, 15 bp, Homo sapiens
ctctgcgcactttgc

SEQ ID NO: 313647 - DNA, 15 bp, Homo sapiens
gctctgcgcactttg

SEQ ID NO: 313648 - DNA, 15 bp, Homo sapiens
tgctctgcgcacttt

SEQ ID NO: 313649 - DNA, 15 bp, Homo sapiens
ctgctctgcgcactt

SEQ ID NO: 313650 - DNA, 15 bp, Homo sapiens
cctgctctgcgcact

SEQ ID NO: 313651 - DNA, 15 bp, Homo sapiens
tcctgctctgcgcac

SEQ ID NO: 313652 - DNA, 15 bp, Homo sapiens
ttcctgctctgcgca

SEQ ID NO: 313653 - DNA, 15 bp, Homo sapiens
tttcctgctctgcgc

SEQ ID NO: 313654 - DNA, 15 bp, Homo sapiens
ttttcctgctctgcg

SEQ ID NO: 313655 - DNA, 15 bp, Homo sapiens
cttttcctgctctgc

SEQ ID NO: 313656 - DNA, 15 bp, Homo sapiens
gcttttcctgctctg

SEQ ID NO: 313657 - DNA, 15 bp, Homo sapiens
tgcttttcctgctct

SEQ ID NO: 313658 - DNA, 15 bp, Homo sapiens
ctgcttttcctgctc

SEQ ID NO: 313659 - DNA, 15 bp, Homo sapiens
gctgcttttcctgct

SEQ ID NO: 313660 - DNA, 15 bp, Homo sapiens
tgctgcttttcctgc

SEQ ID NO: 313661 - DNA, 15 bp, Homo sapiens
ttgctgcttttcctg

SEQ ID NO: 313662 - DNA, 15 bp, Homo sapiens
cttgctgcttttcct

SEQ ID NO: 313663 - DNA, 15 bp, Homo sapiens
gcttgctgcttttcc

SEQ ID NO: 313664 - DNA, 15 bp, Homo sapiens
tgcttgctgcttttc

SEQ ID NO: 313665 - DNA, 15 bp, Homo sapiens
atgcttgctgctttt

SEQ ID NO: 313666 - DNA, 15 bp, Homo sapiens
tatgcttgctgcttt

SEQ ID NO: 313667 - DNA, 15 bp, Homo sapiens
atatgcttgctgctt

SEQ ID NO: 313668 - DNA, 15 bp, Homo sapiens
gatatgcttgctgct

SEQ ID NO: 313669 - DNA, 15 bp, Homo sapiens
agatatgcttgctgc

SEQ ID NO: 313670 - DNA, 15 bp, Homo sapiens
gagatatgcttgctg

SEQ ID NO: 313671 - DNA, 15 bp, Homo sapiens
tgagatatgcttgct

SEQ ID NO: 313672 - DNA, 15 bp, Homo sapiens
ctgagatatgcttgc

SEQ ID NO: 313673 - DNA, 15 bp, Homo sapiens
actgagatatgcttg

SEQ ID NO: 313674 - DNA, 15 bp, Homo sapiens
tactgagatatgctt

SEQ ID NO: 313675 - DNA, 15 bp, Homo sapiens
ctactgagatatgct

SEQ ID NO: 313676 - DNA, 15 bp, Homo sapiens
cctactgagatatgc

SEQ ID NO: 313677 - DNA, 15 bp, Homo sapiens
gcctactgagatatg

SEQ ID NO: 313678 - DNA, 15 bp, Homo sapiens
agcctactgagatat

SEQ ID NO: 313679 - DNA, 15 bp, Homo sapiens
cagcctactgagata

SEQ ID NO: 313680 - DNA, 15 bp, Homo sapiens
acagcctactgagat

SEQ ID NO: 313681 - DNA, 15 bp, Homo sapiens
tacagcctactgaga

SEQ ID NO: 313682 - DNA, 15 bp, Homo sapiens
atacagcctactgag

SEQ ID NO: 313683 - DNA, 15 bp, Homo sapiens
aatacagcctactga

SEQ ID NO: 313684 - DNA, 15 bp, Homo sapiens
aaatacagcctactg

SEQ ID NO: 313685 - DNA, 15 bp, Homo sapiens
taaatacagcctact

SEQ ID NO: 313686 - DNA, 15 bp, Homo sapiens
ataaatacagcctac

SEQ ID NO: 313687 - DNA, 15 bp, Homo sapiens
tataaatacagccta

SEQ ID NO: 313688 - DNA, 15 bp, Homo sapiens
atataaatacagcct

SEQ ID NO: 313689 - DNA, 15 bp, Homo sapiens
aatataaatacagcc

SEQ ID NO: 313690 - DNA, 15 bp, Homo sapiens
caatataaatacagc

SEQ ID NO: 313691 - DNA, 15 bp, Homo sapiens
ccaatataaatacag

SEQ ID NO: 313692 - DNA, 15 bp, Homo sapiens
cccaatataaataca

SEQ ID NO: 313693 - DNA, 15 bp, Homo sapiens
gcccaatataaatac

SEQ ID NO: 313694 - DNA, 15 bp, Homo sapiens
cgcccaatataaata

SEQ ID NO: 313695 - DNA, 15 bp, Homo sapiens
ccgcccaatataaat

SEQ ID NO: 313696 - DNA, 15 bp, Homo sapiens
cccgcccaatataaa

SEQ ID NO: 313697 - DNA, 15 bp, Homo sapiens
ccccgcccaatataa

SEQ ID NO: 313698 - DNA, 15 bp, Homo sapiens
tccccgcccaatata

SEQ ID NO: 313699 - DNA, 15 bp, Homo sapiens
atccccgcccaatat

SEQ ID NO: 313700 - DNA, 15 bp, Homo sapiens
gatccccgcccaata

SEQ ID NO: 313701 - DNA, 15 bp, Homo sapiens
agatccccgcccaat

SEQ ID NO: 313702 - DNA, 15 bp, Homo sapiens
aagatccccgcccaa

SEQ ID NO: 313703 - DNA, 15 bp, Homo sapiens
taagatccccgccca

SEQ ID NO: 313704 - DNA, 15 bp, Homo sapiens
ttaagatccccgccc

SEQ ID NO: 313705 - DNA, 15 bp, Homo sapiens
tttaagatccccgcc

SEQ ID NO: 313706 - DNA, 15 bp, Homo sapiens
gtcacgcttgtctca

SEQ ID NO: 313707 - DNA, 15 bp, Homo sapiens
ggtcacgcttgtctc

SEQ ID NO: 313708 - DNA, 15 bp, Homo sapiens
tggtcacgcttgtct

SEQ ID NO: 313709 - DNA, 15 bp, Homo sapiens
ttggtcacgcttgtc

SEQ ID NO: 313710 - DNA, 15 bp, Homo sapiens
attggtcacgcttgt

SEQ ID NO: 313711 - DNA, 15 bp, Homo sapiens
cattggtcacgcttg

SEQ ID NO: 313712 - DNA, 15 bp, Homo sapiens
acattggtcacgctt

SEQ ID NO: 313713 - DNA, 15 bp, Homo sapiens
cacattggtcacgct

SEQ ID NO: 313714 - DNA, 15 bp, Homo sapiens
ccacattggtcacgc

SEQ ID NO: 313715 - DNA, 15 bp, Homo sapiens
accacattggtcacg

SEQ ID NO: 313716 - DNA, 15 bp, Homo sapiens
caccacattggtcac

SEQ ID NO: 313717 - DNA, 15 bp, Homo sapiens
tcaccacattggtca

SEQ ID NO: 313718 - DNA, 15 bp, Homo sapiens
ttcaccacattggtc

SEQ ID NO: 313719 - DNA, 15 bp, Homo sapiens
tttcaccacattggt

SEQ ID NO: 313720 - DNA, 15 bp, Homo sapiens
gtttcaccacattgg

SEQ ID NO: 313721 - DNA, 15 bp, Homo sapiens
ggtttcaccacattg

SEQ ID NO: 313722 - DNA, 15 bp, Homo sapiens
gggtttcaccacatt

SEQ ID NO: 313723 - DNA, 15 bp, Homo sapiens
agggtttcaccacat

SEQ ID NO: 313724 - DNA, 15 bp, Homo sapiens
cagggtttcaccaca

SEQ ID NO: 313725 - DNA, 15 bp, Homo sapiens
acagggtttcaccac

SEQ ID NO: 313726 - DNA, 15 bp, Homo sapiens
gagacagggtttcac

SEQ ID NO: 313727 - DNA, 15 bp, Homo sapiens
agagacagggtttca

SEQ ID NO: 313728 - DNA, 15 bp, Homo sapiens
tagagacagggtttc

SEQ ID NO: 313729 - DNA, 15 bp, Homo sapiens
gtagagacagggttt

SEQ ID NO: 313730 - DNA, 15 bp, Homo sapiens
agtagagacagggtt

SEQ ID NO: 313731 - DNA, 15 bp, Homo sapiens
tagtagagacagggt

SEQ ID NO: 313732 - DNA, 15 bp, Homo sapiens
ttagtagagacaggg

SEQ ID NO: 313733 - DNA, 15 bp, Homo sapiens
tttagtagagacagg

SEQ ID NO: 313734 - DNA, 15 bp, Homo sapiens
ttttagtagagacag

SEQ ID NO: 313735 - DNA, 15 bp, Homo sapiens
tttttagtagagaca

SEQ ID NO: 313736 - DNA, 15 bp, Homo sapiens
tgcccggctaatttt

SEQ ID NO: 313737 - DNA, 15 bp, Homo sapiens
atgcccggctaattt

SEQ ID NO: 313738 - DNA, 15 bp, Homo sapiens
catgcccggctaatt

SEQ ID NO: 313739 - DNA, 15 bp, Homo sapiens
gcatgcccggctaat

SEQ ID NO: 313740 - DNA, 15 bp, Homo sapiens
agcatgcccggctaa

SEQ ID NO: 313741 - DNA, 15 bp, Homo sapiens
gagcatgcccggcta

SEQ ID NO: 313742 - DNA, 15 bp, Homo sapiens
cgagcatgcccggct

SEQ ID NO: 313743 - DNA, 15 bp, Homo sapiens
acgagcatgcccggc

SEQ ID NO: 313744 - DNA, 15 bp, Homo sapiens
cacgagcatgcccgg

SEQ ID NO: 313745 - DNA, 15 bp, Homo sapiens
gcacgagcatgcccg

SEQ ID NO: 313746 - DNA, 15 bp, Homo sapiens
tgcacgagcatgccc

SEQ ID NO: 313747 - DNA, 15 bp, Homo sapiens
gtgcacgagcatgcc

SEQ ID NO: 313748 - DNA, 15 bp, Homo sapiens
tgtgcacgagcatgc

SEQ ID NO: 313749 - DNA, 15 bp, Homo sapiens
gtgtgcacgagcatg

SEQ ID NO: 313750 - DNA, 15 bp, Homo sapiens
ggtgtgcacgagcat

SEQ ID NO: 313751 - DNA, 15 bp, Homo sapiens
aggtgtgcacgagca

SEQ ID NO: 313752 - DNA, 15 bp, Homo sapiens
taggtgtgcacgagc

SEQ ID NO: 313753 - DNA, 15 bp, Homo sapiens
ataggtgtgcacgag

SEQ ID NO: 313754 - DNA, 15 bp, Homo sapiens
tataggtgtgcacga

SEQ ID NO: 313755 - DNA, 15 bp, Homo sapiens
ctataggtgtgcacg

SEQ ID NO: 313756 - DNA, 15 bp, Homo sapiens
actataggtgtgcac

SEQ ID NO: 313757 - DNA, 15 bp, Homo sapiens
gactataggtgtgca

SEQ ID NO: 313758 - DNA, 15 bp, Homo sapiens
ggactataggtgtgc

SEQ ID NO: 313759 - DNA, 15 bp, Homo sapiens
gggactataggtgtg

SEQ ID NO: 313760 - DNA, 15 bp, Homo sapiens
tgggactataggtgt

SEQ ID NO: 313761 - DNA, 15 bp, Homo sapiens
ttgggactataggtg

SEQ ID NO: 313762 - DNA, 15 bp, Homo sapiens
gttgggactataggt

SEQ ID NO: 313763 - DNA, 15 bp, Homo sapiens
agttgggactatagg

SEQ ID NO: 313764 - DNA, 15 bp, Homo sapiens
tagttgggactatag

SEQ ID NO: 313765 - DNA, 15 bp, Homo sapiens
gtagttgggactata

SEQ ID NO: 313766 - DNA, 15 bp, Homo sapiens
agtagttgggactat

SEQ ID NO: 313767 - DNA, 15 bp, Homo sapiens
gagtagttgggacta

SEQ ID NO: 313768 - DNA, 15 bp, Homo sapiens
tgagtagttgggact

SEQ ID NO: 313769 - DNA, 15 bp, Homo sapiens
ctgagtagttgggac

SEQ ID NO: 313770 - DNA, 15 bp, Homo sapiens
gctgagtagttggga

SEQ ID NO: 313771 - DNA, 15 bp, Homo sapiens
tgctgagtagttggg

SEQ ID NO: 313772 - DNA, 15 bp, Homo sapiens
ctgctgagtagttgg

SEQ ID NO: 313773 - DNA, 15 bp, Homo sapiens
cctgctgagtagttg

SEQ ID NO: 313774 - DNA, 15 bp, Homo sapiens
ccctgctgagtagtt

SEQ ID NO: 313775 - DNA, 15 bp, Homo sapiens
accctgctgagtagt

SEQ ID NO: 313776 - DNA, 15 bp, Homo sapiens
caccctgctgagtag

SEQ ID NO: 313777 - DNA, 15 bp, Homo sapiens
tcaccctgctgagta

SEQ ID NO: 313778 - DNA, 15 bp, Homo sapiens
ctcaccctgctgagt

SEQ ID NO: 313779 - DNA, 15 bp, Homo sapiens
cctcaccctgctgag

SEQ ID NO: 313780 - DNA, 15 bp, Homo sapiens
gcctcaccctgctga

SEQ ID NO: 313781 - DNA, 15 bp, Homo sapiens
tgcctcaccctgctg

SEQ ID NO: 313782 - DNA, 15 bp, Homo sapiens
ctgcctcaccctgct

SEQ ID NO: 313783 - DNA, 15 bp, Homo sapiens
cctgcctcaccctgc

SEQ ID NO: 313784 - DNA, 15 bp, Homo sapiens
tcctgcctcaccctg

SEQ ID NO: 313785 - DNA, 15 bp, Homo sapiens
ctcctgcctcaccct

SEQ ID NO: 313786 - DNA, 15 bp, Homo sapiens
tctcctgcctcaccc

SEQ ID NO: 313787 - DNA, 15 bp, Homo sapiens
ttctcctgcctcacc

SEQ ID NO: 313788 - DNA, 15 bp, Homo sapiens
gttctcctgcctcac

SEQ ID NO: 313789 - DNA, 15 bp, Homo sapiens
ggttctcctgcctca

SEQ ID NO: 313790 - DNA, 15 bp, Homo sapiens
aggttctcctgcctc

SEQ ID NO: 313791 - DNA, 15 bp, Homo sapiens
gaggttctcctgcct

SEQ ID NO: 313792 - DNA, 15 bp, Homo sapiens
agaggttctcctgcc

SEQ ID NO: 313793 - DNA, 15 bp, Homo sapiens
aagaggttctcctgc

SEQ ID NO: 313794 - DNA, 15 bp, Homo sapiens
caagaggttctcctg

SEQ ID NO: 313795 - DNA, 15 bp, Homo sapiens
tcaagaggttctcct

SEQ ID NO: 313796 - DNA, 15 bp, Homo sapiens
ttcaagaggttctcc

SEQ ID NO: 313797 - DNA, 15 bp, Homo sapiens
gttcaagaggttctc

SEQ ID NO: 313798 - DNA, 15 bp, Homo sapiens
ggttcaagaggttct

SEQ ID NO: 313799 - DNA, 15 bp, Homo sapiens
gggttcaagaggttc

SEQ ID NO: 313800 - DNA, 15 bp, Homo sapiens
cgggttcaagaggtt

SEQ ID NO: 313801 - DNA, 15 bp, Homo sapiens
ccgggttcaagaggt

SEQ ID NO: 313802 - DNA, 15 bp, Homo sapiens
cccgggttcaagagg

SEQ ID NO: 313803 - DNA, 15 bp, Homo sapiens
tcccgggttcaagag

SEQ ID NO: 313804 - DNA, 15 bp, Homo sapiens
ttcccgggttcaaga

SEQ ID NO: 313805 - DNA, 15 bp, Homo sapiens
cttcccgggttcaag

SEQ ID NO: 313806 - DNA, 15 bp, Homo sapiens
gcttcccgggttcaa

SEQ ID NO: 313807 - DNA, 15 bp, Homo sapiens
cgcttcccgggttca

SEQ ID NO: 313808 - DNA, 15 bp, Homo sapiens
ccgcttcccgggttc

SEQ ID NO: 313809 - DNA, 15 bp, Homo sapiens
tccgcttcccgggtt

SEQ ID NO: 313810 - DNA, 15 bp, Homo sapiens
ctccgcttcccgggt

SEQ ID NO: 313811 - DNA, 15 bp, Homo sapiens
cctccgcttcccggg

SEQ ID NO: 313812 - DNA, 15 bp, Homo sapiens
acctccgcttcccgg

SEQ ID NO: 313813 - DNA, 15 bp, Homo sapiens
aacctccgcttcccg

SEQ ID NO: 313814 - DNA, 15 bp, Homo sapiens
caacctccgcttccc

SEQ ID NO: 313815 - DNA, 15 bp, Homo sapiens
gcaacctccgcttcc

SEQ ID NO: 313816 - DNA, 15 bp, Homo sapiens
tgcaacctccgcttc

SEQ ID NO: 313817 - DNA, 15 bp, Homo sapiens
ctgcaacctccgctt

SEQ ID NO: 313818 - DNA, 15 bp, Homo sapiens
actgcaacctccgct

SEQ ID NO: 313819 - DNA, 15 bp, Homo sapiens
cactgcaacctccgc

SEQ ID NO: 313820 - DNA, 15 bp, Homo sapiens
tcactgcaacctccg

SEQ ID NO: 313821 - DNA, 15 bp, Homo sapiens
gtcggctcactgcaa

SEQ ID NO: 313822 - DNA, 15 bp, Homo sapiens
tgtcggctcactgca

SEQ ID NO: 313823 - DNA, 15 bp, Homo sapiens
atgtcggctcactgc

SEQ ID NO: 313824 - DNA, 15 bp, Homo sapiens
aatgtcggctcactg

SEQ ID NO: 313825 - DNA, 15 bp, Homo sapiens
caatgtcggctcact

SEQ ID NO: 313826 - DNA, 15 bp, Homo sapiens
gcaatgtcggctcac

SEQ ID NO: 313827 - DNA, 15 bp, Homo sapiens
tgcaatgtcggctca

SEQ ID NO: 313828 - DNA, 15 bp, Homo sapiens
gtgcaatgtcggctc

SEQ ID NO: 313829 - DNA, 15 bp, Homo sapiens
ggtgcaatgtcggct

SEQ ID NO: 313830 - DNA, 15 bp, Homo sapiens
gggtgcaatgtcggc

SEQ ID NO: 313831 - DNA, 15 bp, Homo sapiens
ggggtgcaatgtcgg

SEQ ID NO: 313832 - DNA, 15 bp, Homo sapiens
aggggtgcaatgtcg

SEQ ID NO: 313833 - DNA, 15 bp, Homo sapiens
caggggtgcaatgtc

SEQ ID NO: 313834 - DNA, 15 bp, Homo sapiens
gcaggggtgcaatgt

SEQ ID NO: 313835 - DNA, 15 bp, Homo sapiens
tgcaggggtgcaatg

SEQ ID NO: 313836 - DNA, 15 bp, Homo sapiens
gtgcaggggtgcaat

SEQ ID NO: 313837 - DNA, 15 bp, Homo sapiens
agtgcaggggtgcaa

SEQ ID NO: 313838 - DNA, 15 bp, Homo sapiens
gagtgcaggggtgca

SEQ ID NO: 313839 - DNA, 15 bp, Homo sapiens
ggagtgcaggggtgc

SEQ ID NO: 313840 - DNA, 15 bp, Homo sapiens
tggagtgcaggggtg

SEQ ID NO: 313841 - DNA, 15 bp, Homo sapiens
ctggagtgcaggggt

SEQ ID NO: 313842 - DNA, 15 bp, Homo sapiens
gctggagtgcagggg

SEQ ID NO: 313843 - DNA, 15 bp, Homo sapiens
ggctggagtgcaggg

SEQ ID NO: 313844 - DNA, 15 bp, Homo sapiens
aggctggagtgcagg

SEQ ID NO: 313845 - DNA, 15 bp, Homo sapiens
acccaggctggagtg

SEQ ID NO: 313846 - DNA, 15 bp, Homo sapiens
cacccaggctggagt

SEQ ID NO: 313847 - DNA, 15 bp, Homo sapiens
tcacccaggctggag

SEQ ID NO: 313848 - DNA, 15 bp, Homo sapiens
gtcacccaggctgga

SEQ ID NO: 313849 - DNA, 15 bp, Homo sapiens
tgtcacccaggctgg

SEQ ID NO: 313850 - DNA, 15 bp, Homo sapiens
ctgtcacccaggctg

SEQ ID NO: 313851 - DNA, 15 bp, Homo sapiens
tctgtcacccaggct

SEQ ID NO: 313852 - DNA, 15 bp, Homo sapiens
ctctgtcacccaggc

SEQ ID NO: 313853 - DNA, 15 bp, Homo sapiens
actctgtcacccagg

SEQ ID NO: 313854 - DNA, 15 bp, Homo sapiens
cactctgtcacccag

SEQ ID NO: 313855 - DNA, 15 bp, Homo sapiens
tcactctgtcaccca

SEQ ID NO: 313856 - DNA, 15 bp, Homo sapiens
ctcactctgtcaccc

SEQ ID NO: 313857 - DNA, 15 bp, Homo sapiens
actcactctgtcacc

SEQ ID NO: 313858 - DNA, 15 bp, Homo sapiens
gactcactctgtcac

SEQ ID NO: 313859 - DNA, 15 bp, Homo sapiens
agactcactctgtca

SEQ ID NO: 313860 - DNA, 15 bp, Homo sapiens
gagactcactctgtc

SEQ ID NO: 313861 - DNA, 15 bp, Homo sapiens
ggagactcactctgt

SEQ ID NO: 313862 - DNA, 15 bp, Homo sapiens
tggagactcactctg

SEQ ID NO: 313863 - DNA, 15 bp, Homo sapiens
atggagactcactct

SEQ ID NO: 313864 - DNA, 15 bp, Homo sapiens
aatggagactcactc

SEQ ID NO: 313865 - DNA, 15 bp, Homo sapiens
caatggagactcact

SEQ ID NO: 313866 - DNA, 15 bp, Homo sapiens
ccaatggagactcac

SEQ ID NO: 313867 - DNA, 15 bp, Homo sapiens
tccaatggagactca

SEQ ID NO: 313868 - DNA, 15 bp, Homo sapiens
ttccaatggagactc

SEQ ID NO: 313869 - DNA, 15 bp, Homo sapiens
tttccaatggagact

SEQ ID NO: 313870 - DNA, 15 bp, Homo sapiens
ttttccaatggagac

SEQ ID NO: 313871 - DNA, 15 bp, Homo sapiens
tttttccaatggaga

SEQ ID NO: 313872 - DNA, 15 bp, Homo sapiens
ttttttccaatggag

SEQ ID NO: 313873 - DNA, 15 bp, Homo sapiens
tttttttccaatgga

SEQ ID NO: 313874 - DNA, 15 bp, Homo sapiens
ttttttttccaatgg

SEQ ID NO: 313875 - DNA, 15 bp, Homo sapiens
tttttttttccaatg

SEQ ID NO: 313876 - DNA, 15 bp, Homo sapiens
ttttttttttccaat

SEQ ID NO: 313877 - DNA, 15 bp, Homo sapiens
tttttttttttccaa

SEQ ID NO: 313878 - DNA, 15 bp, Homo sapiens
ttttttttttttcca

SEQ ID NO: 313879 - DNA, 15 bp, Homo sapiens
tttttttttttttcc

SEQ ID NO: 313880 - DNA, 15 bp, Homo sapiens
ttctttttttttttt

SEQ ID NO: 313881 - DNA, 15 bp, Homo sapiens
gttcttttttttttt

SEQ ID NO: 313882 - DNA, 15 bp, Homo sapiens
tgttctttttttttt

SEQ ID NO: 313883 - DNA, 15 bp, Homo sapiens
ctgttcttttttttt

SEQ ID NO: 313884 - DNA, 15 bp, Homo sapiens
actgttctttttttt

SEQ ID NO: 313885 - DNA, 15 bp, Homo sapiens
cactgttcttttttt

SEQ ID NO: 313886 - DNA, 15 bp, Homo sapiens
acactgttctttttt

SEQ ID NO: 313887 - DNA, 15 bp, Homo sapiens
cacactgttcttttt

SEQ ID NO: 313888 - DNA, 15 bp, Homo sapiens
tcacactgttctttt

SEQ ID NO: 313889 - DNA, 15 bp, Homo sapiens
atcacactgttcttt

SEQ ID NO: 313890 - DNA, 15 bp, Homo sapiens
tatcacactgttctt

SEQ ID NO: 313891 - DNA, 15 bp, Homo sapiens
gtatcacactgttct

SEQ ID NO: 313892 - DNA, 15 bp, Homo sapiens
tgtatcacactgttc

SEQ ID NO: 313893 - DNA, 15 bp, Homo sapiens
atgtatcacactgtt

SEQ ID NO: 313894 - DNA, 15 bp, Homo sapiens
aatgtatcacactgt

SEQ ID NO: 313895 - DNA, 15 bp, Homo sapiens
caatgtatcacactg

SEQ ID NO: 313896 - DNA, 15 bp, Homo sapiens
tcaatgtatcacact

SEQ ID NO: 313897 - DNA, 15 bp, Homo sapiens
gtcaatgtatcacac

SEQ ID NO: 313898 - DNA, 15 bp, Homo sapiens
ggtcaatgtatcaca

SEQ ID NO: 313899 - DNA, 15 bp, Homo sapiens
aggtcaatgtatcac

SEQ ID NO: 313900 - DNA, 15 bp, Homo sapiens
taggtcaatgtatca

SEQ ID NO: 313901 - DNA, 15 bp, Homo sapiens
ttaggtcaatgtatc

SEQ ID NO: 313902 - DNA, 15 bp, Homo sapiens
cttaggtcaatgtat

SEQ ID NO: 313903 - DNA, 15 bp, Homo sapiens
ccttaggtcaatgta

SEQ ID NO: 313904 - DNA, 15 bp, Homo sapiens
accttaggtcaatgt

SEQ ID NO: 313905 - DNA, 15 bp, Homo sapiens
aaccttaggtcaatg

SEQ ID NO: 313906 - DNA, 15 bp, Homo sapiens
aaaccttaggtcaat

SEQ ID NO: 313907 - DNA, 15 bp, Homo sapiens
taaaccttaggtcaa

SEQ ID NO: 313908 - DNA, 15 bp, Homo sapiens
ttaaaccttaggtca

SEQ ID NO: 313909 - DNA, 15 bp, Homo sapiens
cttaaaccttaggtc

SEQ ID NO: 313910 - DNA, 15 bp, Homo sapiens
tcttaaaccttaggt

SEQ ID NO: 313911 - DNA, 15 bp, Homo sapiens
ttcttaaaccttagg

SEQ ID NO: 313912 - DNA, 15 bp, Homo sapiens
gttcttaaaccttag

SEQ ID NO: 313913 - DNA, 15 bp, Homo sapiens
tgttcttaaacctta

SEQ ID NO: 313914 - DNA, 15 bp, Homo sapiens
atgttcttaaacctt

SEQ ID NO: 313915 - DNA, 15 bp, Homo sapiens
catgttcttaaacct

SEQ ID NO: 313916 - DNA, 15 bp, Homo sapiens
gcatgttcttaaacc

SEQ ID NO: 313917 - DNA, 15 bp, Homo sapiens
tgcatgttcttaaac

SEQ ID NO: 313918 - DNA, 15 bp, Homo sapiens
ttgcatgttcttaaa

SEQ ID NO: 313919 - DNA, 15 bp, Homo sapiens
tttgcatgttcttaa

SEQ ID NO: 313920 - DNA, 15 bp, Homo sapiens
gtttgcatgttctta

SEQ ID NO: 313921 - DNA, 15 bp, Homo sapiens
agtttgcatgttctt

SEQ ID NO: 313922 - DNA, 15 bp, Homo sapiens
cagtttgcatgttct

SEQ ID NO: 313923 - DNA, 15 bp, Homo sapiens
tcagtttgcatgttc

SEQ ID NO: 313924 - DNA, 15 bp, Homo sapiens
atcagtttgcatgtt

SEQ ID NO: 313925 - DNA, 15 bp, Homo sapiens
tatcagtttgcatgt

SEQ ID NO: 313926 - DNA, 15 bp, Homo sapiens
gtatcagtttgcatg

SEQ ID NO: 313927 - DNA, 15 bp, Homo sapiens
agtatcagtttgcat

SEQ ID NO: 313928 - DNA, 15 bp, Homo sapiens
tagtatcagtttgca

SEQ ID NO: 313929 - DNA, 15 bp, Homo sapiens
atagtatcagtttgc

SEQ ID NO: 313930 - DNA, 15 bp, Homo sapiens
tatagtatcagtttg

SEQ ID NO: 313931 - DNA, 15 bp, Homo sapiens
atatagtatcagttt

SEQ ID NO: 313932 - DNA, 15 bp, Homo sapiens
tatatagtatcagtt

SEQ ID NO: 313933 - DNA, 15 bp, Homo sapiens
atatatagtatcagt

SEQ ID NO: 313934 - DNA, 15 bp, Homo sapiens
gatatatagtatcag

SEQ ID NO: 313935 - DNA, 15 bp, Homo sapiens
tgatatatagtatca

SEQ ID NO: 313936 - DNA, 15 bp, Homo sapiens
gtgatatatagtatc

SEQ ID NO: 313937 - DNA, 15 bp, Homo sapiens
agtgatatatagtat

SEQ ID NO: 313938 - DNA, 15 bp, Homo sapiens
aagtgatatatagta

SEQ ID NO: 313939 - DNA, 15 bp, Homo sapiens
taagtgatatatagt

SEQ ID NO: 313940 - DNA, 15 bp, Homo sapiens
ctaagtgatatatag

SEQ ID NO: 313941 - DNA, 15 bp, Homo sapiens
cctaagtgatatata

SEQ ID NO: 313942 - DNA, 15 bp, Homo sapiens
ccctaagtgatatat

SEQ ID NO: 313943 - DNA, 15 bp, Homo sapiens
tccctaagtgatata

SEQ ID NO: 313944 - DNA, 15 bp, Homo sapiens
gtccctaagtgatat

SEQ ID NO: 313945 - DNA, 15 bp, Homo sapiens
tgtccctaagtgata

SEQ ID NO: 313946 - DNA, 15 bp, Homo sapiens
ttgtccctaagtgat

SEQ ID NO: 313947 - DNA, 15 bp, Homo sapiens
tttgtccctaagtga

SEQ ID NO: 313948 - DNA, 15 bp, Homo sapiens
ttttgtccctaagtg

SEQ ID NO: 313949 - DNA, 15 bp, Homo sapiens
tttttgtccctaagt

SEQ ID NO: 313950 - DNA, 15 bp, Homo sapiens
gtttttgtccctaag

SEQ ID NO: 313951 - DNA, 15 bp, Homo sapiens
agtttttgtccctaa

SEQ ID NO: 313952 - DNA, 15 bp, Homo sapiens
aagtttttgtcccta

SEQ ID NO: 313953 - DNA, 15 bp, Homo sapiens
taagtttttgtccct

SEQ ID NO: 313954 - DNA, 15 bp, Homo sapiens
gtaagtttttgtccc

SEQ ID NO: 313955 - DNA, 15 bp, Homo sapiens
tgtaagtttttgtcc

SEQ ID NO: 313956 - DNA, 15 bp, Homo sapiens
atgtaagtttttgtc

SEQ ID NO: 313957 - DNA, 15 bp, Homo sapiens
catgtaagtttttgt

SEQ ID NO: 313958 - DNA, 15 bp, Homo sapiens
ccatgtaagtttttg

SEQ ID NO: 313959 - DNA, 15 bp, Homo sapiens
accatgtaagttttt

SEQ ID NO: 313960 - DNA, 15 bp, Homo sapiens
taccatgtaagtttt

SEQ ID NO: 313961 - DNA, 15 bp, Homo sapiens
ttaccatgtaagttt

SEQ ID NO: 313962 - DNA, 15 bp, Homo sapiens
tttaccatgtaagtt

SEQ ID NO: 313963 - DNA, 15 bp, Homo sapiens
ttttaccatgtaagt

SEQ ID NO: 313964 - DNA, 15 bp, Homo sapiens
cttttaccatgtaag

SEQ ID NO: 313965 - DNA, 15 bp, Homo sapiens
acttttaccatgtaa

SEQ ID NO: 313966 - DNA, 15 bp, Homo sapiens
tacttttaccatgta

SEQ ID NO: 313967 - DNA, 15 bp, Homo sapiens
ttacttttaccatgt

SEQ ID NO: 313968 - DNA, 15 bp, Homo sapiens
tttacttttaccatg

SEQ ID NO: 313969 - DNA, 15 bp, Homo sapiens
ttttacttttaccat

SEQ ID NO: 313970 - DNA, 15 bp, Homo sapiens
tttttacttttacca

SEQ ID NO: 313971 - DNA, 15 bp, Homo sapiens
ctttttacttttacc

SEQ ID NO: 313972 - DNA, 15 bp, Homo sapiens
tctttttacttttac

SEQ ID NO: 313973 - DNA, 15 bp, Homo sapiens
ttctttttactttta

SEQ ID NO: 313974 - DNA, 15 bp, Homo sapiens
tttctttttactttt

SEQ ID NO: 313975 - DNA, 15 bp, Homo sapiens
atttctttttacttt

SEQ ID NO: 313976 - DNA, 15 bp, Homo sapiens
catttctttttactt

SEQ ID NO: 313977 - DNA, 15 bp, Homo sapiens
acatttctttttact

SEQ ID NO: 313978 - DNA, 15 bp, Homo sapiens
tacatttctttttac

SEQ ID NO: 313979 - DNA, 15 bp, Homo sapiens
gtacatttcttttta

SEQ ID NO: 313980 - DNA, 15 bp, Homo sapiens
cgtacatttcttttt

SEQ ID NO: 313981 - DNA, 15 bp, Homo sapiens
tcgtacatttctttt

SEQ ID NO: 313982 - DNA, 15 bp, Homo sapiens
ttcgtacatttcttt

SEQ ID NO: 313983 - DNA, 15 bp, Homo sapiens
tttcgtacatttctt

SEQ ID NO: 313984 - DNA, 15 bp, Homo sapiens
ttttcgtacatttct

SEQ ID NO: 313985 - DNA, 15 bp, Homo sapiens
attttcgtacatttc

SEQ ID NO: 313986 - DNA, 15 bp, Homo sapiens
tattttcgtacattt

SEQ ID NO: 313987 - DNA, 15 bp, Homo sapiens
ttattttcgtacatt

SEQ ID NO: 313988 - DNA, 15 bp, Homo sapiens
attattttcgtacat

SEQ ID NO: 313989 - DNA, 15 bp, Homo sapiens
tattattttcgtaca

SEQ ID NO: 313990 - DNA, 15 bp, Homo sapiens
ttattattttcgtac

SEQ ID NO: 313991 - DNA, 15 bp, Homo sapiens
tttattattttcgta

SEQ ID NO: 313992 - DNA, 15 bp, Homo sapiens
ttttattattttcgt

SEQ ID NO: 313993 - DNA, 15 bp, Homo sapiens
tttttattattttcg

SEQ ID NO: 313994 - DNA, 15 bp, Homo sapiens
atttttattattttc

SEQ ID NO: 313995 - DNA, 15 bp, Homo sapiens
gatttttattatttt

SEQ ID NO: 313996 - DNA, 15 bp, Homo sapiens
tgatttttattattt

SEQ ID NO: 313997 - DNA, 15 bp, Homo sapiens
ttgatttttattatt

SEQ ID NO: 313998 - DNA, 15 bp, Homo sapiens
tttgatttttattat

SEQ ID NO: 313999 - DNA, 15 bp, Homo sapiens
atttgatttttatta

SEQ ID NO: 314000 - DNA, 15 bp, Homo sapiens
aatttgatttttatt

SEQ ID NO: 314001 - DNA, 15 bp, Homo sapiens
gaatttgatttttat

SEQ ID NO: 314002 - DNA, 15 bp, Homo sapiens
tgaatttgattttta

SEQ ID NO: 314003 - DNA, 15 bp, Homo sapiens
ttgaatttgattttt

SEQ ID NO: 314004 - DNA, 15 bp, Homo sapiens
cttgaatttgatttt

SEQ ID NO: 314005 - DNA, 15 bp, Homo sapiens
tcttgaatttgattt

SEQ ID NO: 314006 - DNA, 15 bp, Homo sapiens
atcttgaatttgatt

SEQ ID NO: 314007 - DNA, 15 bp, Homo sapiens
catcttgaatttgat

SEQ ID NO: 314008 - DNA, 15 bp, Homo sapiens
ccatcttgaatttga

SEQ ID NO: 314009 - DNA, 15 bp, Homo sapiens
accatcttgaatttg

SEQ ID NO: 314010 - DNA, 15 bp, Homo sapiens
caccatcttgaattt

SEQ ID NO: 314011 - DNA, 15 bp, Homo sapiens
ccaccatcttgaatt

SEQ ID NO: 314012 - DNA, 15 bp, Homo sapiens
accaccatcttgaat

SEQ ID NO: 314013 - DNA, 15 bp, Homo sapiens
aaccaccatcttgaa

SEQ ID NO: 314014 - DNA, 15 bp, Homo sapiens
taaccaccatcttga

SEQ ID NO: 314015 - DNA, 15 bp, Homo sapiens
ataaccaccatcttg

SEQ ID NO: 314016 - DNA, 15 bp, Homo sapiens
cataaccaccatctt

SEQ ID NO: 314017 - DNA, 15 bp, Homo sapiens
ccataaccaccatct

SEQ ID NO: 314018 - DNA, 15 bp, Homo sapiens
accataaccaccatc

SEQ ID NO: 314019 - DNA, 15 bp, Homo sapiens
caccataaccaccat

SEQ ID NO: 314020 - DNA, 15 bp, Homo sapiens
tcaccataaccacca

SEQ ID NO: 314021 - DNA, 15 bp, Homo sapiens
gtcaccataaccacc

SEQ ID NO: 314022 - DNA, 15 bp, Homo sapiens
cgtcaccataaccac

SEQ ID NO: 314023 - DNA, 15 bp, Homo sapiens
ccgtcaccataacca

SEQ ID NO: 314024 - DNA, 15 bp, Homo sapiens
cccgtcaccataacc

SEQ ID NO: 314025 - DNA, 15 bp, Homo sapiens
tcccgtcaccataac

SEQ ID NO: 314026 - DNA, 15 bp, Homo sapiens
ttcccgtcaccataa

SEQ ID NO: 314027 - DNA, 15 bp, Homo sapiens
tttcccgtcaccata

SEQ ID NO: 314028 - DNA, 15 bp, Homo sapiens
ctttcccgtcaccat

SEQ ID NO: 314029 - DNA, 15 bp, Homo sapiens
tctttcccgtcacca

SEQ ID NO: 314030 - DNA, 15 bp, Homo sapiens
ttctttcccgtcacc

SEQ ID NO: 314031 - DNA, 15 bp, Homo sapiens
gttctttcccgtcac

SEQ ID NO: 314032 - DNA, 15 bp, Homo sapiens
agttctttcccgtca

SEQ ID NO: 314033 - DNA, 15 bp, Homo sapiens
cagttctttcccgtc

SEQ ID NO: 314034 - DNA, 15 bp, Homo sapiens
tcagttctttcccgt

SEQ ID NO: 314035 - DNA, 15 bp, Homo sapiens
ctcagttctttcccg

SEQ ID NO: 314036 - DNA, 15 bp, Homo sapiens
cctcagttctttccc

SEQ ID NO: 314037 - DNA, 15 bp, Homo sapiens
gcctcagttctttcc

SEQ ID NO: 314038 - DNA, 15 bp, Homo sapiens
cgcctcagttctttc

SEQ ID NO: 314039 - DNA, 15 bp, Homo sapiens
ccgcctcagttcttt

SEQ ID NO: 314040 - DNA, 15 bp, Homo sapiens
tccgcctcagttctt

SEQ ID NO: 314041 - DNA, 15 bp, Homo sapiens
ttccgcctcagttct

SEQ ID NO: 314042 - DNA, 15 bp, Homo sapiens
tttccgcctcagttc

SEQ ID NO: 314043 - DNA, 15 bp, Homo sapiens
atttccgcctcagtt

SEQ ID NO: 314044 - DNA, 15 bp, Homo sapiens
tatttccgcctcagt

SEQ ID NO: 314045 - DNA, 15 bp, Homo sapiens
atatttccgcctcag

SEQ ID NO: 314046 - DNA, 15 bp, Homo sapiens
tatatttccgcctca

SEQ ID NO: 314047 - DNA, 15 bp, Homo sapiens
ttatatttccgcctc

SEQ ID NO: 314048 - DNA, 15 bp, Homo sapiens
cttatatttccgcct

SEQ ID NO: 314049 - DNA, 15 bp, Homo sapiens
ccttatatttccgcc

SEQ ID NO: 314050 - DNA, 15 bp, Homo sapiens
accttatatttccgc

SEQ ID NO: 314051 - DNA, 15 bp, Homo sapiens
aaccttatatttccg

SEQ ID NO: 314052 - DNA, 15 bp, Homo sapiens
caaccttatatttcc

SEQ ID NO: 314053 - DNA, 15 bp, Homo sapiens
acaaccttatatttc

SEQ ID NO: 314054 - DNA, 15 bp, Homo sapiens
gacaaccttatattt

SEQ ID NO: 314055 - DNA, 15 bp, Homo sapiens
tgacaaccttatatt

SEQ ID NO: 314056 - DNA, 15 bp, Homo sapiens
gtgacaaccttatat

SEQ ID NO: 314057 - DNA, 15 bp, Homo sapiens
agtgacaaccttata

SEQ ID NO: 314058 - DNA, 15 bp, Homo sapiens
tagtgacaaccttat

SEQ ID NO: 314059 - DNA, 15 bp, Homo sapiens
atagtgacaacctta

SEQ ID NO: 314060 - DNA, 15 bp, Homo sapiens
tatagtgacaacctt

SEQ ID NO: 314061 - DNA, 15 bp, Homo sapiens
atatagtgacaacct

SEQ ID NO: 314062 - DNA, 15 bp, Homo sapiens
aatatagtgacaacc

SEQ ID NO: 314063 - DNA, 15 bp, Homo sapiens
caatatagtgacaac

SEQ ID NO: 314064 - DNA, 15 bp, Homo sapiens
tcaatatagtgacaa

SEQ ID NO: 314065 - DNA, 15 bp, Homo sapiens
ctcaatatagtgaca

SEQ ID NO: 314066 - DNA, 15 bp, Homo sapiens
tctcaatatagtgac

SEQ ID NO: 314067 - DNA, 15 bp, Homo sapiens
ttctcaatatagtga

SEQ ID NO: 314068 - DNA, 15 bp, Homo sapiens
tttctcaatatagtg

SEQ ID NO: 314069 - DNA, 15 bp, Homo sapiens
atttctcaatatagt

SEQ ID NO: 314070 - DNA, 15 bp, Homo sapiens
aatttctcaatatag

SEQ ID NO: 314071 - DNA, 15 bp, Homo sapiens
aaatttctcaatata

SEQ ID NO: 314072 - DNA, 15 bp, Homo sapiens
aaaatttctcaatat

SEQ ID NO: 314073 - DNA, 15 bp, Homo sapiens
aaaaatttctcaata

SEQ ID NO: 314074 - DNA, 15 bp, Homo sapiens
gaaaaatttctcaat

SEQ ID NO: 314075 - DNA, 15 bp, Homo sapiens
agaaaaatttctcaa

SEQ ID NO: 314076 - DNA, 15 bp, Homo sapiens
tagaaaaatttctca

SEQ ID NO: 314077 - DNA, 15 bp, Homo sapiens
atagaaaaatttctc

SEQ ID NO: 314078 - DNA, 15 bp, Homo sapiens
gatagaaaaatttct

SEQ ID NO: 314079 - DNA, 15 bp, Homo sapiens
agatagaaaaatttc

SEQ ID NO: 314080 - DNA, 15 bp, Homo sapiens
aagatagaaaaattt

SEQ ID NO: 314081 - DNA, 15 bp, Homo sapiens
aaagatagaaaaatt

SEQ ID NO: 314082 - DNA, 15 bp, Homo sapiens
aaaagatagaaaaat

SEQ ID NO: 314083 - DNA, 15 bp, Homo sapiens
aaaaagatagaaaaa

SEQ ID NO: 314084 - DNA, 15 bp, Homo sapiens
aaaaaagatagaaaa

SEQ ID NO: 314085 - DNA, 15 bp, Homo sapiens
aaaaaaagatagaaa

SEQ ID NO: 314086 - DNA, 15 bp, Homo sapiens
gaaaaaaagatagaa

SEQ ID NO: 314087 - DNA, 15 bp, Homo sapiens
agaaaaaaagataga

SEQ ID NO: 314088 - DNA, 15 bp, Homo sapiens
aagaaaaaaagatag

SEQ ID NO: 314089 - DNA, 15 bp, Homo sapiens
aaagaaaaaaagata

SEQ ID NO: 314090 - DNA, 15 bp, Homo sapiens
aaaagaaaaaaagat

SEQ ID NO: 314091 - DNA, 15 bp, Homo sapiens
aaaaagaaaaaaaga

SEQ ID NO: 314092 - DNA, 15 bp, Homo sapiens
aaaaaagaaaaaaag

SEQ ID NO: 314093 - DNA, 15 bp, Homo sapiens
gaaaaaagaaaaaaa

SEQ ID NO: 314094 - DNA, 15 bp, Homo sapiens
agaaaaaagaaaaaa

SEQ ID NO: 314095 - DNA, 15 bp, Homo sapiens
aagaaaaaagaaaaa

SEQ ID NO: 314096 - DNA, 15 bp, Homo sapiens
aaagaaaaaagaaaa

SEQ ID NO: 314097 - DNA, 15 bp, Homo sapiens
aaaagaaaaaagaaa

SEQ ID NO: 314098 - DNA, 15 bp, Homo sapiens
aaaaagaaaaaagaa

SEQ ID NO: 314099 - DNA, 15 bp, Homo sapiens
aaaaaagaaaaaaga

SEQ ID NO: 314100 - DNA, 15 bp, Homo sapiens
aaaaaaagaaaaaag

SEQ ID NO: 314101 - DNA, 15 bp, Homo sapiens
cccgtctcaaaaaaa

SEQ ID NO: 314102 - DNA, 15 bp, Homo sapiens
ccccgtctcaaaaaa

SEQ ID NO: 314103 - DNA, 15 bp, Homo sapiens
accccgtctcaaaaa

SEQ ID NO: 314104 - DNA, 15 bp, Homo sapiens
gaccccgtctcaaaa

SEQ ID NO: 314105 - DNA, 15 bp, Homo sapiens
agaccccgtctcaaa

SEQ ID NO: 314106 - DNA, 15 bp, Homo sapiens
gagaccccgtctcaa

SEQ ID NO: 314107 - DNA, 15 bp, Homo sapiens
cgagaccccgtctca

SEQ ID NO: 314108 - DNA, 15 bp, Homo sapiens
gcgagaccccgtctc

SEQ ID NO: 314109 - DNA, 15 bp, Homo sapiens
agcgagaccccgtct

SEQ ID NO: 314110 - DNA, 15 bp, Homo sapiens
gagcgagaccccgtc

SEQ ID NO: 314111 - DNA, 15 bp, Homo sapiens
agagcgagaccccgt

SEQ ID NO: 314112 - DNA, 15 bp, Homo sapiens
cagagcgagaccccg

SEQ ID NO: 314113 - DNA, 15 bp, Homo sapiens
acagagcgagacccc

SEQ ID NO: 314114 - DNA, 15 bp, Homo sapiens
gacagagcgagaccc

SEQ ID NO: 314115 - DNA, 15 bp, Homo sapiens
cgacagagcgagacc

SEQ ID NO: 314116 - DNA, 15 bp, Homo sapiens
gcgacagagcgagac

SEQ ID NO: 314117 - DNA, 15 bp, Homo sapiens
ggcgacagagcgaga

SEQ ID NO: 314118 - DNA, 15 bp, Homo sapiens
gggcgacagagcgag

SEQ ID NO: 314119 - DNA, 15 bp, Homo sapiens
tgggcgacagagcga

SEQ ID NO: 314120 - DNA, 15 bp, Homo sapiens
ctgggcgacagagcg

SEQ ID NO: 314121 - DNA, 15 bp, Homo sapiens
tcctgggcgacagag

SEQ ID NO: 314122 - DNA, 15 bp, Homo sapiens
atcctgggcgacaga

SEQ ID NO: 314123 - DNA, 15 bp, Homo sapiens
catcctgggcgacag

SEQ ID NO: 314124 - DNA, 15 bp, Homo sapiens
ccatcctgggcgaca

SEQ ID NO: 314125 - DNA, 15 bp, Homo sapiens
tccatcctgggcgac

SEQ ID NO: 314126 - DNA, 15 bp, Homo sapiens
ctccatcctgggcga

SEQ ID NO: 314127 - DNA, 15 bp, Homo sapiens
actccatcctgggcg

SEQ ID NO: 314128 - DNA, 15 bp, Homo sapiens
cactccatcctgggc

SEQ ID NO: 314129 - DNA, 15 bp, Homo sapiens
gcactccatcctggg

SEQ ID NO: 314130 - DNA, 15 bp, Homo sapiens
tgcactccatcctgg

SEQ ID NO: 314131 - DNA, 15 bp, Homo sapiens
ctgcactccatcctg

SEQ ID NO: 314132 - DNA, 15 bp, Homo sapiens
actgcactccatcct

SEQ ID NO: 314133 - DNA, 15 bp, Homo sapiens
cactgcactccatcc

SEQ ID NO: 314134 - DNA, 15 bp, Homo sapiens
ccactgcactccatc

SEQ ID NO: 314135 - DNA, 15 bp, Homo sapiens
accactgcactccat

SEQ ID NO: 314136 - DNA, 15 bp, Homo sapiens
acaccactgcactcc

SEQ ID NO: 314137 - DNA, 15 bp, Homo sapiens
cacaccactgcactc

SEQ ID NO: 314138 - DNA, 15 bp, Homo sapiens
tcacaccactgcact

SEQ ID NO: 314139 - DNA, 15 bp, Homo sapiens
atcacaccactgcac

SEQ ID NO: 314140 - DNA, 15 bp, Homo sapiens
gatcacaccactgca

SEQ ID NO: 314141 - DNA, 15 bp, Homo sapiens
agatcacaccactgc

SEQ ID NO: 314142 - DNA, 15 bp, Homo sapiens
gagatcacaccactg

SEQ ID NO: 314143 - DNA, 15 bp, Homo sapiens
tgagatcacaccact

SEQ ID NO: 314144 - DNA, 15 bp, Homo sapiens
ctgagatcacaccac

SEQ ID NO: 314145 - DNA, 15 bp, Homo sapiens
gctgagatcacacca

SEQ ID NO: 314146 - DNA, 15 bp, Homo sapiens
agctgagatcacacc

SEQ ID NO: 314147 - DNA, 15 bp, Homo sapiens
gagctgagatcacac

SEQ ID NO: 314148 - DNA, 15 bp, Homo sapiens
tgagctgagatcaca

SEQ ID NO: 314149 - DNA, 15 bp, Homo sapiens
gtgagctgagatcac

SEQ ID NO: 314150 - DNA, 15 bp, Homo sapiens
agtgagctgagatca

SEQ ID NO: 314151 - DNA, 15 bp, Homo sapiens
cagtgagctgagatc

SEQ ID NO: 314152 - DNA, 15 bp, Homo sapiens
gcagtgagctgagat

SEQ ID NO: 314153 - DNA, 15 bp, Homo sapiens
tgcagtgagctgaga

SEQ ID NO: 314154 - DNA, 15 bp, Homo sapiens
ttgcagtgagctgag

SEQ ID NO: 314155 - DNA, 15 bp, Homo sapiens
gttgcagtgagctga

SEQ ID NO: 314156 - DNA, 15 bp, Homo sapiens
ggttgcagtgagctg

SEQ ID NO: 314157 - DNA, 15 bp, Homo sapiens
aggttgcagtgagct

SEQ ID NO: 314158 - DNA, 15 bp, Homo sapiens
ggaggttgcagtgag

SEQ ID NO: 314159 - DNA, 15 bp, Homo sapiens
cggaggttgcagtga

SEQ ID NO: 314160 - DNA, 15 bp, Homo sapiens
gcggaggttgcagtg

SEQ ID NO: 314161 - DNA, 15 bp, Homo sapiens
ggcggaggttgcagt

SEQ ID NO: 314162 - DNA, 15 bp, Homo sapiens
aggcggaggttgcag

SEQ ID NO: 314163 - DNA, 15 bp, Homo sapiens
gaggcggaggttgca

SEQ ID NO: 314164 - DNA, 15 bp, Homo sapiens
ggaggcggaggttgc

SEQ ID NO: 314165 - DNA, 15 bp, Homo sapiens
gggaggcggaggttg

SEQ ID NO: 314166 - DNA, 15 bp, Homo sapiens
tgggaggcggaggtt

SEQ ID NO: 314167 - DNA, 15 bp, Homo sapiens
ctgggaggcggaggt

SEQ ID NO: 314168 - DNA, 15 bp, Homo sapiens
cctgggaggcggagg

SEQ ID NO: 314169 - DNA, 15 bp, Homo sapiens
acctgggaggcggag

SEQ ID NO: 314170 - DNA, 15 bp, Homo sapiens
aacctgggaggcgga

SEQ ID NO: 314171 - DNA, 15 bp, Homo sapiens
aaacctgggaggcgg

SEQ ID NO: 314172 - DNA, 15 bp, Homo sapiens
taaacctgggaggcg

SEQ ID NO: 314173 - DNA, 15 bp, Homo sapiens
ttaaacctgggaggc

SEQ ID NO: 314174 - DNA, 15 bp, Homo sapiens
cttaaacctgggagg

SEQ ID NO: 314175 - DNA, 15 bp, Homo sapiens
acttaaacctgggag

SEQ ID NO: 314176 - DNA, 15 bp, Homo sapiens
cacttaaacctggga

SEQ ID NO: 314177 - DNA, 15 bp, Homo sapiens
tcacttaaacctggg

SEQ ID NO: 314178 - DNA, 15 bp, Homo sapiens
atcacttaaacctgg

SEQ ID NO: 314179 - DNA, 15 bp, Homo sapiens
aatcacttaaacctg

SEQ ID NO: 314180 - DNA, 15 bp, Homo sapiens
gaatcacttaaacct

SEQ ID NO: 314181 - DNA, 15 bp, Homo sapiens
agaatcacttaaacc

SEQ ID NO: 314182 - DNA, 15 bp, Homo sapiens
gagaatcacttaaac

SEQ ID NO: 314183 - DNA, 15 bp, Homo sapiens
ggagaatcacttaaa

SEQ ID NO: 314184 - DNA, 15 bp, Homo sapiens
aggagaatcacttaa

SEQ ID NO: 314185 - DNA, 15 bp, Homo sapiens
caggagaatcactta

SEQ ID NO: 314186 - DNA, 15 bp, Homo sapiens
gcaggagaatcactt

SEQ ID NO: 314187 - DNA, 15 bp, Homo sapiens
ggcaggagaatcact

SEQ ID NO: 314188 - DNA, 15 bp, Homo sapiens
aggcaggagaatcac

SEQ ID NO: 314189 - DNA, 15 bp, Homo sapiens
gaggcaggagaatca

SEQ ID NO: 314190 - DNA, 15 bp, Homo sapiens
tctgaggcaggagaa

SEQ ID NO: 314191 - DNA, 15 bp, Homo sapiens
gtctgaggcaggaga

SEQ ID NO: 314192 - DNA, 15 bp, Homo sapiens
agtctgaggcaggag

SEQ ID NO: 314193 - DNA, 15 bp, Homo sapiens
gagtctgaggcagga

SEQ ID NO: 314194 - DNA, 15 bp, Homo sapiens
ggagtctgaggcagg

SEQ ID NO: 314195 - DNA, 15 bp, Homo sapiens
gggagtctgaggcag

SEQ ID NO: 314196 - DNA, 15 bp, Homo sapiens
tgggagtctgaggca

SEQ ID NO: 314197 - DNA, 15 bp, Homo sapiens
ttgggagtctgaggc

SEQ ID NO: 314198 - DNA, 15 bp, Homo sapiens
cttgggagtctgagg

SEQ ID NO: 314199 - DNA, 15 bp, Homo sapiens
acttgggagtctgag

SEQ ID NO: 314200 - DNA, 15 bp, Homo sapiens
tacttgggagtctga

SEQ ID NO: 314201 - DNA, 15 bp, Homo sapiens
ctacttgggagtctg

SEQ ID NO: 314202 - DNA, 15 bp, Homo sapiens
gctacttgggagtct

SEQ ID NO: 314203 - DNA, 15 bp, Homo sapiens
agctacttgggagtc

SEQ ID NO: 314204 - DNA, 15 bp, Homo sapiens
cagctacttgggagt

SEQ ID NO: 314205 - DNA, 15 bp, Homo sapiens
ccagctacttgggag

SEQ ID NO: 314206 - DNA, 15 bp, Homo sapiens
cccagctacttggga

SEQ ID NO: 314207 - DNA, 15 bp, Homo sapiens
tcccagctacttggg

SEQ ID NO: 314208 - DNA, 15 bp, Homo sapiens
gtcccagctacttgg

SEQ ID NO: 314209 - DNA, 15 bp, Homo sapiens
agtcccagctacttg

SEQ ID NO: 314210 - DNA, 15 bp, Homo sapiens
tagtcccagctactt

SEQ ID NO: 314211 - DNA, 15 bp, Homo sapiens
gtagtcccagctact

SEQ ID NO: 314212 - DNA, 15 bp, Homo sapiens
tgtagtcccagctac

SEQ ID NO: 314213 - DNA, 15 bp, Homo sapiens
ctgtagtcccagcta

SEQ ID NO: 314214 - DNA, 15 bp, Homo sapiens
cgcacctgtagtccc

SEQ ID NO: 314215 - DNA, 15 bp, Homo sapiens
gcgcacctgtagtcc

SEQ ID NO: 314216 - DNA, 15 bp, Homo sapiens
cgcgcacctgtagtc

SEQ ID NO: 314217 - DNA, 15 bp, Homo sapiens
gcgcgcacctgtagt

SEQ ID NO: 314218 - DNA, 15 bp, Homo sapiens
ggcgcgcacctgtag

SEQ ID NO: 314219 - DNA, 15 bp, Homo sapiens
tggcgcgcacctgta

SEQ ID NO: 314220 - DNA, 15 bp, Homo sapiens
ttggcgcgcacctgt

SEQ ID NO: 314221 - DNA, 15 bp, Homo sapiens
gttggcgcgcacctg

SEQ ID NO: 314222 - DNA, 15 bp, Homo sapiens
tgttggcgcgcacct

SEQ ID NO: 314223 - DNA, 15 bp, Homo sapiens
gtgttggcgcgcacc

SEQ ID NO: 314224 - DNA, 15 bp, Homo sapiens
tgtgttggcgcgcac

SEQ ID NO: 314225 - DNA, 15 bp, Homo sapiens
gtgtgttggcgcgca

SEQ ID NO: 314226 - DNA, 15 bp, Homo sapiens
ggtgtgttggcgcgc

SEQ ID NO: 314227 - DNA, 15 bp, Homo sapiens
aggtgtgttggcgcg

SEQ ID NO: 314228 - DNA, 15 bp, Homo sapiens
caggtgtgttggcgc

SEQ ID NO: 314229 - DNA, 15 bp, Homo sapiens
ccaggtgtgttggcg

SEQ ID NO: 314230 - DNA, 15 bp, Homo sapiens
cccaggtgtgttggc

SEQ ID NO: 314231 - DNA, 15 bp, Homo sapiens
acccaggtgtgttgg

SEQ ID NO: 314232 - DNA, 15 bp, Homo sapiens
tacccaggtgtgttg

SEQ ID NO: 314233 - DNA, 15 bp, Homo sapiens
ttacccaggtgtgtt

SEQ ID NO: 314234 - DNA, 15 bp, Homo sapiens
attacccaggtgtgt

SEQ ID NO: 314235 - DNA, 15 bp, Homo sapiens
aattacccaggtgtg

SEQ ID NO: 314236 - DNA, 15 bp, Homo sapiens
aaattacccaggtgt

SEQ ID NO: 314237 - DNA, 15 bp, Homo sapiens
aaaattacccaggtg

SEQ ID NO: 314238 - DNA, 15 bp, Homo sapiens
caaaattacccaggt

SEQ ID NO: 314239 - DNA, 15 bp, Homo sapiens
acaaaattacccagg

SEQ ID NO: 314240 - DNA, 15 bp, Homo sapiens
aacaaaattacccag

SEQ ID NO: 314241 - DNA, 15 bp, Homo sapiens
aaacaaaattaccca

SEQ ID NO: 314242 - DNA, 15 bp, Homo sapiens
caaacaaaattaccc

SEQ ID NO: 314243 - DNA, 15 bp, Homo sapiens
acaaacaaaattacc

SEQ ID NO: 314244 - DNA, 15 bp, Homo sapiens
tacaaacaaaattac

SEQ ID NO: 314245 - DNA, 15 bp, Homo sapiens
atacaaacaaaatta

SEQ ID NO: 314246 - DNA, 15 bp, Homo sapiens
aatacaaacaaaatt

SEQ ID NO: 314247 - DNA, 15 bp, Homo sapiens
aaatacaaacaaaat

SEQ ID NO: 314248 - DNA, 15 bp, Homo sapiens
aaaatacaaacaaaa

SEQ ID NO: 314249 - DNA, 15 bp, Homo sapiens
aaaaatacaaacaaa

SEQ ID NO: 314250 - DNA, 15 bp, Homo sapiens
taaaaatacaaacaa

SEQ ID NO: 314251 - DNA, 15 bp, Homo sapiens
ctaaaaatacaaaca

SEQ ID NO: 314252 - DNA, 15 bp, Homo sapiens
actaaaaatacaaac

SEQ ID NO: 314253 - DNA, 15 bp, Homo sapiens
ccatctctactaaaa

SEQ ID NO: 314254 - DNA, 15 bp, Homo sapiens
cccatctctactaaa

SEQ ID NO: 314255 - DNA, 15 bp, Homo sapiens
ccccatctctactaa

SEQ ID NO: 314256 - DNA, 15 bp, Homo sapiens
accccatctctacta

SEQ ID NO: 314257 - DNA, 15 bp, Homo sapiens
aaccccatctctact

SEQ ID NO: 314258 - DNA, 15 bp, Homo sapiens
aaaccccatctctac

SEQ ID NO: 314259 - DNA, 15 bp, Homo sapiens
gaaaccccatctcta

SEQ ID NO: 314260 - DNA, 15 bp, Homo sapiens
tgaaaccccatctct

SEQ ID NO: 314261 - DNA, 15 bp, Homo sapiens
gtgaaaccccatctc

SEQ ID NO: 314262 - DNA, 15 bp, Homo sapiens
ggtgaaaccccatct

SEQ ID NO: 314263 - DNA, 15 bp, Homo sapiens
cggtgaaaccccatc

SEQ ID NO: 314264 - DNA, 15 bp, Homo sapiens
acggtgaaaccccat

SEQ ID NO: 314265 - DNA, 15 bp, Homo sapiens
cacggtgaaacccca

SEQ ID NO: 314266 - DNA, 15 bp, Homo sapiens
caacacggtgaaacc

SEQ ID NO: 314267 - DNA, 15 bp, Homo sapiens
ccaacacggtgaaac

SEQ ID NO: 314268 - DNA, 15 bp, Homo sapiens
gccaacacggtgaaa

SEQ ID NO: 314269 - DNA, 15 bp, Homo sapiens
agccaacacggtgaa

SEQ ID NO: 314270 - DNA, 15 bp, Homo sapiens
tagccaacacggtga

SEQ ID NO: 314271 - DNA, 15 bp, Homo sapiens
ctagccaacacggtg

SEQ ID NO: 314272 - DNA, 15 bp, Homo sapiens
cctagccaacacggt

SEQ ID NO: 314273 - DNA, 15 bp, Homo sapiens
gcctagccaacacgg

SEQ ID NO: 314274 - DNA, 15 bp, Homo sapiens
agcctagccaacacg

SEQ ID NO: 314275 - DNA, 15 bp, Homo sapiens
cagcctagccaacac

SEQ ID NO: 314276 - DNA, 15 bp, Homo sapiens
ccagcctagccaaca

SEQ ID NO: 314277 - DNA, 15 bp, Homo sapiens
accagcctagccaac

SEQ ID NO: 314278 - DNA, 15 bp, Homo sapiens
gaccagcctagccaa

SEQ ID NO: 314279 - DNA, 15 bp, Homo sapiens
agaccagcctagcca

SEQ ID NO: 314280 - DNA, 15 bp, Homo sapiens
gagaccagcctagcc

SEQ ID NO: 314281 - DNA, 15 bp, Homo sapiens
cgagaccagcctagc

SEQ ID NO: 314282 - DNA, 15 bp, Homo sapiens
tcgagaccagcctag

SEQ ID NO: 314283 - DNA, 15 bp, Homo sapiens
ttcgagaccagccta

SEQ ID NO: 314284 - DNA, 15 bp, Homo sapiens
gggatcacctgaggt

SEQ ID NO: 314285 - DNA, 15 bp, Homo sapiens
ggggatcacctgagg

SEQ ID NO: 314286 - DNA, 15 bp, Homo sapiens
gggggatcacctgag

SEQ ID NO: 314287 - DNA, 15 bp, Homo sapiens
cgggggatcacctga

SEQ ID NO: 314288 - DNA, 15 bp, Homo sapiens
ccgggggatcacctg

SEQ ID NO: 314289 - DNA, 15 bp, Homo sapiens
gccgggggatcacct

SEQ ID NO: 314290 - DNA, 15 bp, Homo sapiens
ggccgggggatcacc

SEQ ID NO: 314291 - DNA, 15 bp, Homo sapiens
aggccgggggatcac

SEQ ID NO: 314292 - DNA, 15 bp, Homo sapiens
gaggccgggggatca

SEQ ID NO: 314293 - DNA, 15 bp, Homo sapiens
cgaggccgggggatc

SEQ ID NO: 314294 - DNA, 15 bp, Homo sapiens
ccgaggccgggggat

SEQ ID NO: 314295 - DNA, 15 bp, Homo sapiens
accgaggccggggga

SEQ ID NO: 314296 - DNA, 15 bp, Homo sapiens
gaccgaggccggggg

SEQ ID NO: 314297 - DNA, 15 bp, Homo sapiens
agaccgaggccgggg

SEQ ID NO: 314298 - DNA, 15 bp, Homo sapiens
gagaccgaggccggg

SEQ ID NO: 314299 - DNA, 15 bp, Homo sapiens
ggagaccgaggccgg

SEQ ID NO: 314300 - DNA, 15 bp, Homo sapiens
gggagaccgaggccg

SEQ ID NO: 314301 - DNA, 15 bp, Homo sapiens
tgggagaccgaggcc

SEQ ID NO: 314302 - DNA, 15 bp, Homo sapiens
ttgggagaccgaggc

SEQ ID NO: 314303 - DNA, 15 bp, Homo sapiens
tttgggagaccgagg

SEQ ID NO: 314304 - DNA, 15 bp, Homo sapiens
ctttgggagaccgag

SEQ ID NO: 314305 - DNA, 15 bp, Homo sapiens
actttgggagaccga

SEQ ID NO: 314306 - DNA, 15 bp, Homo sapiens
cactttgggagaccg

SEQ ID NO: 314307 - DNA, 15 bp, Homo sapiens
gcactttgggagacc

SEQ ID NO: 314308 - DNA, 15 bp, Homo sapiens
agcactttgggagac

SEQ ID NO: 314309 - DNA, 15 bp, Homo sapiens
cagcactttgggaga

SEQ ID NO: 314310 - DNA, 15 bp, Homo sapiens
tatcccagcactttg

SEQ ID NO: 314311 - DNA, 15 bp, Homo sapiens
ttatcccagcacttt

SEQ ID NO: 314312 - DNA, 15 bp, Homo sapiens
gttatcccagcactt

SEQ ID NO: 314313 - DNA, 15 bp, Homo sapiens
tgttatcccagcact

SEQ ID NO: 314314 - DNA, 15 bp, Homo sapiens
ttgttatcccagcac

SEQ ID NO: 314315 - DNA, 15 bp, Homo sapiens
cttgttatcccagca

SEQ ID NO: 314316 - DNA, 15 bp, Homo sapiens
gcttgttatcccagc

SEQ ID NO: 314317 - DNA, 15 bp, Homo sapiens
cgcttgttatcccag

SEQ ID NO: 314318 - DNA, 15 bp, Homo sapiens
acgcttgttatccca

SEQ ID NO: 314319 - DNA, 15 bp, Homo sapiens
cacgcttgttatccc

SEQ ID NO: 314320 - DNA, 15 bp, Homo sapiens
tcacgcttgttatcc

SEQ ID NO: 314321 - DNA, 15 bp, Homo sapiens
ctcacgcttgttatc

SEQ ID NO: 314322 - DNA, 15 bp, Homo sapiens
gctcacgcttgttat

SEQ ID NO: 314323 - DNA, 15 bp, Homo sapiens
ggctcacgcttgtta

SEQ ID NO: 314324 - DNA, 15 bp, Homo sapiens
tggctcacgcttgtt

SEQ ID NO: 314325 - DNA, 15 bp, Homo sapiens
gtggctcacgcttgt

SEQ ID NO: 314326 - DNA, 15 bp, Homo sapiens
agtggctcacgcttg

SEQ ID NO: 314327 - DNA, 15 bp, Homo sapiens
cagtggctcacgctt

SEQ ID NO: 314328 - DNA, 15 bp, Homo sapiens
gcagtggctcacgct

SEQ ID NO: 314329 - DNA, 15 bp, Homo sapiens
cgcagtggctcacgc

SEQ ID NO: 314330 - DNA, 15 bp, Homo sapiens
gcgcagtggctcacg

SEQ ID NO: 314331 - DNA, 15 bp, Homo sapiens
ggcgcagtggctcac

SEQ ID NO: 314332 - DNA, 15 bp, Homo sapiens
gggcgcagtggctca

SEQ ID NO: 314333 - DNA, 15 bp, Homo sapiens
aagctgggcgcagtg

SEQ ID NO: 314334 - DNA, 15 bp, Homo sapiens
aaagctgggcgcagt

SEQ ID NO: 314335 - DNA, 15 bp, Homo sapiens
caaagctgggcgcag

SEQ ID NO: 314336 - DNA, 15 bp, Homo sapiens
acaaagctgggcgca

SEQ ID NO: 314337 - DNA, 15 bp, Homo sapiens
aacaaagctgggcgc

SEQ ID NO: 314338 - DNA, 15 bp, Homo sapiens
aaacaaagctgggcg

SEQ ID NO: 314339 - DNA, 15 bp, Homo sapiens
caaacaaagctgggc

SEQ ID NO: 314340 - DNA, 15 bp, Homo sapiens
gcaaacaaagctggg

SEQ ID NO: 314341 - DNA, 15 bp, Homo sapiens
tgcaaacaaagctgg

SEQ ID NO: 314342 - DNA, 15 bp, Homo sapiens
atgcaaacaaagctg

SEQ ID NO: 314343 - DNA, 15 bp, Homo sapiens
aatgcaaacaaagct

SEQ ID NO: 314344 - DNA, 15 bp, Homo sapiens
aaatgcaaacaaagc

SEQ ID NO: 314345 - DNA, 15 bp, Homo sapiens
aaaatgcaaacaaag

SEQ ID NO: 314346 - DNA, 15 bp, Homo sapiens
aaaaatgcaaacaaa

SEQ ID NO: 314347 - DNA, 15 bp, Homo sapiens
taaaaatgcaaacaa

SEQ ID NO: 314348 - DNA, 15 bp, Homo sapiens
ctaaaaatgcaaaca

SEQ ID NO: 314349 - DNA, 15 bp, Homo sapiens
cctaaaaatgcaaac

SEQ ID NO: 314350 - DNA, 15 bp, Homo sapiens
acctaaaaatgcaaa

SEQ ID NO: 314351 - DNA, 15 bp, Homo sapiens
cacctaaaaatgcaa

SEQ ID NO: 314352 - DNA, 15 bp, Homo sapiens
tcacctaaaaatgca

SEQ ID NO: 314353 - DNA, 15 bp, Homo sapiens
ctcacctaaaaatgc

SEQ ID NO: 314354 - DNA, 15 bp, Homo sapiens
tctcacctaaaaatg

SEQ ID NO: 314355 - DNA, 15 bp, Homo sapiens
atctcacctaaaaat

SEQ ID NO: 314356 - DNA, 15 bp, Homo sapiens
catctcacctaaaaa

SEQ ID NO: 314357 - DNA, 15 bp, Homo sapiens
ccatctcacctaaaa

SEQ ID NO: 314358 - DNA, 15 bp, Homo sapiens
cccatctcacctaaa

SEQ ID NO: 314359 - DNA, 15 bp, Homo sapiens
ccccatctcacctaa

SEQ ID NO: 314360 - DNA, 15 bp, Homo sapiens
accccatctcaccta

SEQ ID NO: 314361 - DNA, 15 bp, Homo sapiens
aaccccatctcacct

SEQ ID NO: 314362 - DNA, 15 bp, Homo sapiens
aaaccccatctcacc

SEQ ID NO: 314363 - DNA, 15 bp, Homo sapiens
gaaaccccatctcac

SEQ ID NO: 314364 - DNA, 15 bp, Homo sapiens
tgaaaccccatctca

SEQ ID NO: 314365 - DNA, 15 bp, Homo sapiens
tggtgaaaccccatc

SEQ ID NO: 314366 - DNA, 15 bp, Homo sapiens
gtggtgaaaccccat

SEQ ID NO: 314367 - DNA, 15 bp, Homo sapiens
cgtggtgaaacccca

SEQ ID NO: 314368 - DNA, 15 bp, Homo sapiens
acgtggtgaaacccc

SEQ ID NO: 314369 - DNA, 15 bp, Homo sapiens
aacgtggtgaaaccc

SEQ ID NO: 314370 - DNA, 15 bp, Homo sapiens
caacgtggtgaaacc

SEQ ID NO: 314371 - DNA, 15 bp, Homo sapiens
ccaacgtggtgaaac

SEQ ID NO: 314372 - DNA, 15 bp, Homo sapiens
gccaacgtggtgaaa

SEQ ID NO: 314373 - DNA, 15 bp, Homo sapiens
ggccaacgtggtgaa

SEQ ID NO: 314374 - DNA, 15 bp, Homo sapiens
tggccaacgtggtga

SEQ ID NO: 314375 - DNA, 15 bp, Homo sapiens
ctggccaacgtggtg

SEQ ID NO: 314376 - DNA, 15 bp, Homo sapiens
cctggccaacgtggt

SEQ ID NO: 314377 - DNA, 15 bp, Homo sapiens
gcctggccaacgtgg

SEQ ID NO: 314378 - DNA, 15 bp, Homo sapiens
agcctggccaacgtg

SEQ ID NO: 314379 - DNA, 15 bp, Homo sapiens
cagcctggccaacgt

SEQ ID NO: 314380 - DNA, 15 bp, Homo sapiens
ccagcctggccaacg

SEQ ID NO: 314381 - DNA, 15 bp, Homo sapiens
accagcctggccaac

SEQ ID NO: 314382 - DNA, 15 bp, Homo sapiens
gaccagcctggccaa

SEQ ID NO: 314383 - DNA, 15 bp, Homo sapiens
agaccagcctggcca

SEQ ID NO: 314384 - DNA, 15 bp, Homo sapiens
aagaccagcctggcc

SEQ ID NO: 314385 - DNA, 15 bp, Homo sapiens
caagaccagcctggc

SEQ ID NO: 314386 - DNA, 15 bp, Homo sapiens
tcaagaccagcctgg

SEQ ID NO: 314387 - DNA, 15 bp, Homo sapiens
catcacctgaggtca

SEQ ID NO: 314388 - DNA, 15 bp, Homo sapiens
gcatcacctgaggtc

SEQ ID NO: 314389 - DNA, 15 bp, Homo sapiens
tgcatcacctgaggt

SEQ ID NO: 314390 - DNA, 15 bp, Homo sapiens
gtgcatcacctgagg

SEQ ID NO: 314391 - DNA, 15 bp, Homo sapiens
ggtgcatcacctgag

SEQ ID NO: 314392 - DNA, 15 bp, Homo sapiens
aggtgcatcacctga

SEQ ID NO: 314393 - DNA, 15 bp, Homo sapiens
caggtgcatcacctg

SEQ ID NO: 314394 - DNA, 15 bp, Homo sapiens
gcaggtgcatcacct

SEQ ID NO: 314395 - DNA, 15 bp, Homo sapiens
ggcaggtgcatcacc

SEQ ID NO: 314396 - DNA, 15 bp, Homo sapiens
aggcaggtgcatcac

SEQ ID NO: 314397 - DNA, 15 bp, Homo sapiens
gaggcaggtgcatca

SEQ ID NO: 314398 - DNA, 15 bp, Homo sapiens
tgaggcaggtgcatc

SEQ ID NO: 314399 - DNA, 15 bp, Homo sapiens
ctgaggcaggtgcat

SEQ ID NO: 314400 - DNA, 15 bp, Homo sapiens
actgaggcaggtgca

SEQ ID NO: 314401 - DNA, 15 bp, Homo sapiens
gactgaggcaggtgc

SEQ ID NO: 314402 - DNA, 15 bp, Homo sapiens
agactgaggcaggtg

SEQ ID NO: 314403 - DNA, 15 bp, Homo sapiens
gagactgaggcaggt

SEQ ID NO: 314404 - DNA, 15 bp, Homo sapiens
ggagactgaggcagg

SEQ ID NO: 314405 - DNA, 15 bp, Homo sapiens
gggagactgaggcag

SEQ ID NO: 314406 - DNA, 15 bp, Homo sapiens
tgggagactgaggca

SEQ ID NO: 314407 - DNA, 15 bp, Homo sapiens
ttgggagactgaggc

SEQ ID NO: 314408 - DNA, 15 bp, Homo sapiens
tttgggagactgagg

SEQ ID NO: 314409 - DNA, 15 bp, Homo sapiens
ctttgggagactgag

SEQ ID NO: 314410 - DNA, 15 bp, Homo sapiens
actttgggagactga

SEQ ID NO: 314411 - DNA, 15 bp, Homo sapiens
cactttgggagactg

SEQ ID NO: 314412 - DNA, 15 bp, Homo sapiens
gcactttgggagact

SEQ ID NO: 314413 - DNA, 15 bp, Homo sapiens
tccagcactttggga

SEQ ID NO: 314414 - DNA, 15 bp, Homo sapiens
atccagcactttggg

SEQ ID NO: 314415 - DNA, 15 bp, Homo sapiens
aatccagcactttgg

SEQ ID NO: 314416 - DNA, 15 bp, Homo sapiens
taatccagcactttg

SEQ ID NO: 314417 - DNA, 15 bp, Homo sapiens
gtaatccagcacttt

SEQ ID NO: 314418 - DNA, 15 bp, Homo sapiens
tgtaatccagcactt

SEQ ID NO: 314419 - DNA, 15 bp, Homo sapiens
ctgtaatccagcact

SEQ ID NO: 314420 - DNA, 15 bp, Homo sapiens
cctgtaatccagcac

SEQ ID NO: 314421 - DNA, 15 bp, Homo sapiens
gcctgtaatccagca

SEQ ID NO: 314422 - DNA, 15 bp, Homo sapiens
cgcctgtaatccagc

SEQ ID NO: 314423 - DNA, 15 bp, Homo sapiens
acgcctgtaatccag

SEQ ID NO: 314424 - DNA, 15 bp, Homo sapiens
aacgcctgtaatcca

SEQ ID NO: 314425 - DNA, 15 bp, Homo sapiens
taacgcctgtaatcc

SEQ ID NO: 314426 - DNA, 15 bp, Homo sapiens
ctaacgcctgtaatc

SEQ ID NO: 314427 - DNA, 15 bp, Homo sapiens
gctaacgcctgtaat

SEQ ID NO: 314428 - DNA, 15 bp, Homo sapiens
ggctaacgcctgtaa

SEQ ID NO: 314429 - DNA, 15 bp, Homo sapiens
gggctaacgcctgta

SEQ ID NO: 314430 - DNA, 15 bp, Homo sapiens
ggggctaacgcctgt

SEQ ID NO: 314431 - DNA, 15 bp, Homo sapiens
aggggctaacgcctg

SEQ ID NO: 314432 - DNA, 15 bp, Homo sapiens
caggggctaacgcct

SEQ ID NO: 314433 - DNA, 15 bp, Homo sapiens
gcaggggctaacgcc

SEQ ID NO: 314434 - DNA, 15 bp, Homo sapiens
cgcaggggctaacgc

SEQ ID NO: 314435 - DNA, 15 bp, Homo sapiens
gcgcaggggctaacg

SEQ ID NO: 314436 - DNA, 15 bp, Homo sapiens
ggcgcaggggctaac

SEQ ID NO: 314437 - DNA, 15 bp, Homo sapiens
gggcgcaggggctaa

SEQ ID NO: 314438 - DNA, 15 bp, Homo sapiens
cgggcgcaggggcta

SEQ ID NO: 314439 - DNA, 15 bp, Homo sapiens
ccgggcgcaggggct

SEQ ID NO: 314440 - DNA, 15 bp, Homo sapiens
gccgggcgcaggggc

SEQ ID NO: 314441 - DNA, 15 bp, Homo sapiens
ggccgggcgcagggg

SEQ ID NO: 314442 - DNA, 15 bp, Homo sapiens
gggccgggcgcaggg

SEQ ID NO: 314443 - DNA, 15 bp, Homo sapiens
ggggccgggcgcagg

SEQ ID NO: 314444 - DNA, 15 bp, Homo sapiens
aggggccgggcgcag

SEQ ID NO: 314445 - DNA, 15 bp, Homo sapiens
caggggccgggcgca

SEQ ID NO: 314446 - DNA, 15 bp, Homo sapiens
tcaggggccgggcgc

SEQ ID NO: 314447 - DNA, 15 bp, Homo sapiens
ttcaggggccgggcg

SEQ ID NO: 314448 - DNA, 15 bp, Homo sapiens
cttcaggggccgggc

SEQ ID NO: 314449 - DNA, 15 bp, Homo sapiens
ccttcaggggccggg

SEQ ID NO: 314450 - DNA, 15 bp, Homo sapiens
tccttcaggggccgg

SEQ ID NO: 314451 - DNA, 15 bp, Homo sapiens
ttccttcaggggccg

SEQ ID NO: 314452 - DNA, 15 bp, Homo sapiens
tttccttcaggggcc

SEQ ID NO: 314453 - DNA, 15 bp, Homo sapiens
ttttccttcaggggc

SEQ ID NO: 314454 - DNA, 15 bp, Homo sapiens
attttccttcagggg

SEQ ID NO: 314455 - DNA, 15 bp, Homo sapiens
gattttccttcaggg

SEQ ID NO: 314456 - DNA, 15 bp, Homo sapiens
agattttccttcagg

SEQ ID NO: 314457 - DNA, 15 bp, Homo sapiens
tagattttccttcag

SEQ ID NO: 314458 - DNA, 15 bp, Homo sapiens
ttagattttccttca

SEQ ID NO: 314459 - DNA, 15 bp, Homo sapiens
tttagattttccttc

SEQ ID NO: 314460 - DNA, 15 bp, Homo sapiens
ctttagattttcctt

SEQ ID NO: 314461 - DNA, 15 bp, Homo sapiens
cctttagattttcct

SEQ ID NO: 314462 - DNA, 15 bp, Homo sapiens
tcctttagattttcc

SEQ ID NO: 314463 - DNA, 15 bp, Homo sapiens
ttcctttagattttc

SEQ ID NO: 314464 - DNA, 15 bp, Homo sapiens
cttcctttagatttt

SEQ ID NO: 314465 - DNA, 15 bp, Homo sapiens
tcttcctttagattt

SEQ ID NO: 314466 - DNA, 15 bp, Homo sapiens
ctcttcctttagatt

SEQ ID NO: 314467 - DNA, 15 bp, Homo sapiens
cctcttcctttagat

SEQ ID NO: 314468 - DNA, 15 bp, Homo sapiens
tcctcttcctttaga

SEQ ID NO: 314469 - DNA, 15 bp, Homo sapiens
ttcctcttcctttag

SEQ ID NO: 314470 - DNA, 15 bp, Homo sapiens
cttcctcttccttta

SEQ ID NO: 314471 - DNA, 15 bp, Homo sapiens
ccttcctcttccttt

SEQ ID NO: 314472 - DNA, 15 bp, Homo sapiens
accttcctcttcctt

SEQ ID NO: 314473 - DNA, 15 bp, Homo sapiens
caccttcctcttcct

SEQ ID NO: 314474 - DNA, 15 bp, Homo sapiens
acaccttcctcttcc

SEQ ID NO: 314475 - DNA, 15 bp, Homo sapiens
cacaccttcctcttc

SEQ ID NO: 314476 - DNA, 15 bp, Homo sapiens
gcacaccttcctctt

SEQ ID NO: 314477 - DNA, 15 bp, Homo sapiens
tgcacaccttcctct

SEQ ID NO: 314478 - DNA, 15 bp, Homo sapiens
ttgcacaccttcctc

SEQ ID NO: 314479 - DNA, 15 bp, Homo sapiens
tttgcacaccttcct

SEQ ID NO: 314480 - DNA, 15 bp, Homo sapiens
atttgcacaccttcc

SEQ ID NO: 314481 - DNA, 15 bp, Homo sapiens
catttgcacaccttc

SEQ ID NO: 314482 - DNA, 15 bp, Homo sapiens
acatttgcacacctt

SEQ ID NO: 314483 - DNA, 15 bp, Homo sapiens
cacatttgcacacct

SEQ ID NO: 314484 - DNA, 15 bp, Homo sapiens
acacatttgcacacc

SEQ ID NO: 314485 - DNA, 15 bp, Homo sapiens
cacacatttgcacac

SEQ ID NO: 314486 - DNA, 15 bp, Homo sapiens
gcacacatttgcaca

SEQ ID NO: 314487 - DNA, 15 bp, Homo sapiens
cgcacacatttgcac

SEQ ID NO: 314488 - DNA, 15 bp, Homo sapiens
gcgcacacatttgca

SEQ ID NO: 314489 - DNA, 15 bp, Homo sapiens
ggcgcacacatttgc

SEQ ID NO: 314490 - DNA, 15 bp, Homo sapiens
aggcgcacacatttg

SEQ ID NO: 314491 - DNA, 15 bp, Homo sapiens
aaggcgcacacattt

SEQ ID NO: 314492 - DNA, 15 bp, Homo sapiens
taaggcgcacacatt

SEQ ID NO: 314493 - DNA, 15 bp, Homo sapiens
ctaaggcgcacacat

SEQ ID NO: 314494 - DNA, 15 bp, Homo sapiens
cctaaggcgcacaca

SEQ ID NO: 314495 - DNA, 15 bp, Homo sapiens
gcctaaggcgcacac

SEQ ID NO: 314496 - DNA, 15 bp, Homo sapiens
cgcctaaggcgcaca

SEQ ID NO: 314497 - DNA, 15 bp, Homo sapiens
acgcctaaggcgcac

SEQ ID NO: 314498 - DNA, 15 bp, Homo sapiens
tacgcctaaggcgca

SEQ ID NO: 314499 - DNA, 15 bp, Homo sapiens
ttacgcctaaggcgc

SEQ ID NO: 314500 - DNA, 15 bp, Homo sapiens
attacgcctaaggcg

SEQ ID NO: 314501 - DNA, 15 bp, Homo sapiens
cattacgcctaaggc

SEQ ID NO: 314502 - DNA, 15 bp, Homo sapiens
ccattacgcctaagg

SEQ ID NO: 314503 - DNA, 15 bp, Homo sapiens
tccattacgcctaag

SEQ ID NO: 314504 - DNA, 15 bp, Homo sapiens
atccattacgcctaa

SEQ ID NO: 314505 - DNA, 15 bp, Homo sapiens
catccattacgccta

SEQ ID NO: 314506 - DNA, 15 bp, Homo sapiens
ccatccattacgcct

SEQ ID NO: 314507 - DNA, 15 bp, Homo sapiens
accatccattacgcc

SEQ ID NO: 314508 - DNA, 15 bp, Homo sapiens
caccatccattacgc

SEQ ID NO: 314509 - DNA, 15 bp, Homo sapiens
ccaccatccattacg

SEQ ID NO: 314510 - DNA, 15 bp, Homo sapiens
accaccatccattac

SEQ ID NO: 314511 - DNA, 15 bp, Homo sapiens
caccaccatccatta

SEQ ID NO: 314512 - DNA, 15 bp, Homo sapiens
gcaccaccatccatt

SEQ ID NO: 314513 - DNA, 15 bp, Homo sapiens
tgcaccaccatccat

SEQ ID NO: 314514 - DNA, 15 bp, Homo sapiens
ctgcaccaccatcca

SEQ ID NO: 314515 - DNA, 15 bp, Homo sapiens
gctgcaccaccatcc

SEQ ID NO: 314516 - DNA, 15 bp, Homo sapiens
tgctgcaccaccatc

SEQ ID NO: 314517 - DNA, 15 bp, Homo sapiens
ctgctgcaccaccat

SEQ ID NO: 314518 - DNA, 15 bp, Homo sapiens
actgctgcaccacca

SEQ ID NO: 314519 - DNA, 15 bp, Homo sapiens
cactgctgcaccacc

SEQ ID NO: 314520 - DNA, 15 bp, Homo sapiens
ccactgctgcaccac

SEQ ID NO: 314521 - DNA, 15 bp, Homo sapiens
cccactgctgcacca

SEQ ID NO: 314522 - DNA, 15 bp, Homo sapiens
acccactgctgcacc

SEQ ID NO: 314523 - DNA, 15 bp, Homo sapiens
aacccactgctgcac

SEQ ID NO: 314524 - DNA, 15 bp, Homo sapiens
taacccactgctgca

SEQ ID NO: 314525 - DNA, 15 bp, Homo sapiens
ttaacccactgctgc

SEQ ID NO: 314526 - DNA, 15 bp, Homo sapiens
tttaacccactgctg

SEQ ID NO: 314527 - DNA, 15 bp, Homo sapiens
ctttaacccactgct

SEQ ID NO: 314528 - DNA, 15 bp, Homo sapiens
actttaacccactgc

SEQ ID NO: 314529 - DNA, 15 bp, Homo sapiens
aactttaacccactg

SEQ ID NO: 314530 - DNA, 15 bp, Homo sapiens
taactttaacccact

SEQ ID NO: 314531 - DNA, 15 bp, Homo sapiens
ttaactttaacccac

SEQ ID NO: 314532 - DNA, 15 bp, Homo sapiens
gttaactttaaccca

SEQ ID NO: 314533 - DNA, 15 bp, Homo sapiens
tgttaactttaaccc

SEQ ID NO: 314534 - DNA, 15 bp, Homo sapiens
gtgttaactttaacc

SEQ ID NO: 314535 - DNA, 15 bp, Homo sapiens
cgtgttaactttaac

SEQ ID NO: 314536 - DNA, 15 bp, Homo sapiens
tcgtgttaactttaa

SEQ ID NO: 314537 - DNA, 15 bp, Homo sapiens
ctcgtgttaacttta

SEQ ID NO: 314538 - DNA, 15 bp, Homo sapiens
tctcgtgttaacttt

SEQ ID NO: 314539 - DNA, 15 bp, Homo sapiens
gtctcgtgttaactt

SEQ ID NO: 314540 - DNA, 15 bp, Homo sapiens
tgtctcgtgttaact

SEQ ID NO: 314541 - DNA, 15 bp, Homo sapiens
ctgtctcgtgttaac

SEQ ID NO: 314542 - DNA, 15 bp, Homo sapiens
actgtctcgtgttaa

SEQ ID NO: 314543 - DNA, 15 bp, Homo sapiens
cactgtctcgtgtta

SEQ ID NO: 314544 - DNA, 15 bp, Homo sapiens
tcactgtctcgtgtt

SEQ ID NO: 314545 - DNA, 15 bp, Homo sapiens
atcactgtctcgtgt

SEQ ID NO: 314546 - DNA, 15 bp, Homo sapiens
catcactgtctcgtg

SEQ ID NO: 314547 - DNA, 15 bp, Homo sapiens
gcatcactgtctcgt

SEQ ID NO: 314548 - DNA, 15 bp, Homo sapiens
tgcatcactgtctcg

SEQ ID NO: 314549 - DNA, 15 bp, Homo sapiens
ttgcatcactgtctc

SEQ ID NO: 314550 - DNA, 15 bp, Homo sapiens
attgcatcactgtct

SEQ ID NO: 314551 - DNA, 15 bp, Homo sapiens
gattgcatcactgtc

SEQ ID NO: 314552 - DNA, 15 bp, Homo sapiens
tgattgcatcactgt

SEQ ID NO: 314553 - DNA, 15 bp, Homo sapiens
gtgattgcatcactg

SEQ ID NO: 314554 - DNA, 15 bp, Homo sapiens
tgtgattgcatcact

SEQ ID NO: 314555 - DNA, 15 bp, Homo sapiens
ctgtgattgcatcac

SEQ ID NO: 314556 - DNA, 15 bp, Homo sapiens
tctgtgattgcatca

SEQ ID NO: 314557 - DNA, 15 bp, Homo sapiens
ttctgtgattgcatc

SEQ ID NO: 314558 - DNA, 15 bp, Homo sapiens
attctgtgattgcat

SEQ ID NO: 314559 - DNA, 15 bp, Homo sapiens
gattctgtgattgca

SEQ ID NO: 314560 - DNA, 15 bp, Homo sapiens
ggattctgtgattgc

SEQ ID NO: 314561 - DNA, 15 bp, Homo sapiens
tggattctgtgattg

SEQ ID NO: 314562 - DNA, 15 bp, Homo sapiens
ttggattctgtgatt

SEQ ID NO: 314563 - DNA, 15 bp, Homo sapiens
tttggattctgtgat

SEQ ID NO: 314564 - DNA, 15 bp, Homo sapiens
atttggattctgtga

SEQ ID NO: 314565 - DNA, 15 bp, Homo sapiens
aatttggattctgtg

SEQ ID NO: 314566 - DNA, 15 bp, Homo sapiens
caatttggattctgt

SEQ ID NO: 314567 - DNA, 15 bp, Homo sapiens
tcaatttggattctg

SEQ ID NO: 314568 - DNA, 15 bp, Homo sapiens
ctcaatttggattct

SEQ ID NO: 314569 - DNA, 15 bp, Homo sapiens
actcaatttggattc

SEQ ID NO: 314570 - DNA, 15 bp, Homo sapiens
cactcaatttggatt

SEQ ID NO: 314571 - DNA, 15 bp, Homo sapiens
gcactcaatttggat

SEQ ID NO: 314572 - DNA, 15 bp, Homo sapiens
tgcactcaatttgga

SEQ ID NO: 314573 - DNA, 15 bp, Homo sapiens
ctgcactcaatttgg

SEQ ID NO: 314574 - DNA, 15 bp, Homo sapiens
cctgcactcaatttg

SEQ ID NO: 314575 - DNA, 15 bp, Homo sapiens
acctgcactcaattt

SEQ ID NO: 314576 - DNA, 15 bp, Homo sapiens
gacctgcactcaatt

SEQ ID NO: 314577 - DNA, 15 bp, Homo sapiens
cgacctgcactcaat

SEQ ID NO: 314578 - DNA, 15 bp, Homo sapiens
gcgacctgcactcaa

SEQ ID NO: 314579 - DNA, 15 bp, Homo sapiens
agcgacctgcactca

SEQ ID NO: 314580 - DNA, 15 bp, Homo sapiens
aagcgacctgcactc

SEQ ID NO: 314581 - DNA, 15 bp, Homo sapiens
aaagcgacctgcact

SEQ ID NO: 314582 - DNA, 15 bp, Homo sapiens
taaagcgacctgcac

SEQ ID NO: 314583 - DNA, 15 bp, Homo sapiens
ttaaagcgacctgca

SEQ ID NO: 314584 - DNA, 15 bp, Homo sapiens
cttaaagcgacctgc

SEQ ID NO: 314585 - DNA, 15 bp, Homo sapiens
tcttaaagcgacctg

SEQ ID NO: 314586 - DNA, 15 bp, Homo sapiens
ttcttaaagcgacct

SEQ ID NO: 314587 - DNA, 15 bp, Homo sapiens
tttcttaaagcgacc

SEQ ID NO: 314588 - DNA, 15 bp, Homo sapiens
ctttcttaaagcgac

SEQ ID NO: 314589 - DNA, 15 bp, Homo sapiens
cctttcttaaagcga

SEQ ID NO: 314590 - DNA, 15 bp, Homo sapiens
tcctttcttaaagcg

SEQ ID NO: 314591 - DNA, 15 bp, Homo sapiens
ctcctttcttaaagc

SEQ ID NO: 314592 - DNA, 15 bp, Homo sapiens
actcctttcttaaag

SEQ ID NO: 314593 - DNA, 15 bp, Homo sapiens
tactcctttcttaaa

SEQ ID NO: 314594 - DNA, 15 bp, Homo sapiens
ctactcctttcttaa

SEQ ID NO: 314595 - DNA, 15 bp, Homo sapiens
gctactcctttctta

SEQ ID NO: 314596 - DNA, 15 bp, Homo sapiens
agctactcctttctt

SEQ ID NO: 314597 - DNA, 15 bp, Homo sapiens
cagctactcctttct

SEQ ID NO: 314598 - DNA, 15 bp, Homo sapiens
acagctactcctttc

SEQ ID NO: 314599 - DNA, 15 bp, Homo sapiens
tacagctactccttt

SEQ ID NO: 314600 - DNA, 15 bp, Homo sapiens
ttacagctactcctt

SEQ ID NO: 314601 - DNA, 15 bp, Homo sapiens
attacagctactcct

SEQ ID NO: 314602 - DNA, 15 bp, Homo sapiens
gattacagctactcc

SEQ ID NO: 314603 - DNA, 15 bp, Homo sapiens
agattacagctactc

SEQ ID NO: 314604 - DNA, 15 bp, Homo sapiens
cagattacagctact

SEQ ID NO: 314605 - DNA, 15 bp, Homo sapiens
tcagattacagctac

SEQ ID NO: 314606 - DNA, 15 bp, Homo sapiens
ttcagattacagcta

SEQ ID NO: 314607 - DNA, 15 bp, Homo sapiens
cttcagattacagct

SEQ ID NO: 314608 - DNA, 15 bp, Homo sapiens
gcttcagattacagc

SEQ ID NO: 314609 - DNA, 15 bp, Homo sapiens
ggcttcagattacag

SEQ ID NO: 314610 - DNA, 15 bp, Homo sapiens
aggcttcagattaca

SEQ ID NO: 314611 - DNA, 15 bp, Homo sapiens
caggcttcagattac

SEQ ID NO: 314612 - DNA, 15 bp, Homo sapiens
gcaggcttcagatta

SEQ ID NO: 314613 - DNA, 15 bp, Homo sapiens
agcaggcttcagatt

SEQ ID NO: 314614 - DNA, 15 bp, Homo sapiens
cagcaggcttcagat

SEQ ID NO: 314615 - DNA, 15 bp, Homo sapiens
ccagcaggcttcaga

SEQ ID NO: 314616 - DNA, 15 bp, Homo sapiens
tccagcaggcttcag

SEQ ID NO: 314617 - DNA, 15 bp, Homo sapiens
gtccagcaggcttca

SEQ ID NO: 314618 - DNA, 15 bp, Homo sapiens
cgtccagcaggcttc

SEQ ID NO: 314619 - DNA, 15 bp, Homo sapiens
gcgtccagcaggctt

SEQ ID NO: 314620 - DNA, 15 bp, Homo sapiens
agcgtccagcaggct

SEQ ID NO: 314621 - DNA, 15 bp, Homo sapiens
cagcgtccagcaggc

SEQ ID NO: 314622 - DNA, 15 bp, Homo sapiens
ccagcgtccagcagg

SEQ ID NO: 314623 - DNA, 15 bp, Homo sapiens
tccagcgtccagcag

SEQ ID NO: 314624 - DNA, 15 bp, Homo sapiens
atccagcgtccagca

SEQ ID NO: 314625 - DNA, 15 bp, Homo sapiens
aatccagcgtccagc

SEQ ID NO: 314626 - DNA, 15 bp, Homo sapiens
taatccagcgtccag

SEQ ID NO: 314627 - DNA, 15 bp, Homo sapiens
ctaatccagcgtcca

SEQ ID NO: 314628 - DNA, 15 bp, Homo sapiens
tctaatccagcgtcc

SEQ ID NO: 314629 - DNA, 15 bp, Homo sapiens
ttctaatccagcgtc

SEQ ID NO: 314630 - DNA, 15 bp, Homo sapiens
cttctaatccagcgt

SEQ ID NO: 314631 - DNA, 15 bp, Homo sapiens
ccttctaatccagcg

SEQ ID NO: 314632 - DNA, 15 bp, Homo sapiens
gccttctaatccagc

SEQ ID NO: 314633 - DNA, 15 bp, Homo sapiens
tgccttctaatccag

SEQ ID NO: 314634 - DNA, 15 bp, Homo sapiens
ctgccttctaatcca

SEQ ID NO: 314635 - DNA, 15 bp, Homo sapiens
gctgccttctaatcc

SEQ ID NO: 314636 - DNA, 15 bp, Homo sapiens
tgctgccttctaatc

SEQ ID NO: 314637 - DNA, 15 bp, Homo sapiens
ttgctgccttctaat

SEQ ID NO: 314638 - DNA, 15 bp, Homo sapiens
tttgctgccttctaa

SEQ ID NO: 314639 - DNA, 15 bp, Homo sapiens
ttttgctgccttcta

SEQ ID NO: 314640 - DNA, 15 bp, Homo sapiens
tttttgctgccttct

SEQ ID NO: 314641 - DNA, 15 bp, Homo sapiens
ttttttgctgccttc

SEQ ID NO: 314642 - DNA, 15 bp, Homo sapiens
tttttttgctgcctt

SEQ ID NO: 314643 - DNA, 15 bp, Homo sapiens
ctttttttgctgcct

SEQ ID NO: 314644 - DNA, 15 bp, Homo sapiens
gctttttttgctgcc

SEQ ID NO: 314645 - DNA, 15 bp, Homo sapiens
agctttttttgctgc

SEQ ID NO: 314646 - DNA, 15 bp, Homo sapiens
gagctttttttgctg

SEQ ID NO: 314647 - DNA, 15 bp, Homo sapiens
agagctttttttgct

SEQ ID NO: 314648 - DNA, 15 bp, Homo sapiens
cagagctttttttgc

SEQ ID NO: 314649 - DNA, 15 bp, Homo sapiens
acagagctttttttg

SEQ ID NO: 314650 - DNA, 15 bp, Homo sapiens
cacagagcttttttt

SEQ ID NO: 314651 - DNA, 15 bp, Homo sapiens
gcacagagctttttt

SEQ ID NO: 314652 - DNA, 15 bp, Homo sapiens
agcacagagcttttt

SEQ ID NO: 314653 - DNA, 15 bp, Homo sapiens
cagcacagagctttt

SEQ ID NO: 314654 - DNA, 15 bp, Homo sapiens
ccagcacagagcttt

SEQ ID NO: 314655 - DNA, 15 bp, Homo sapiens
gccagcacagagctt

SEQ ID NO: 314656 - DNA, 15 bp, Homo sapiens
agccagcacagagct

SEQ ID NO: 314657 - DNA, 15 bp, Homo sapiens
cagccagcacagagc

SEQ ID NO: 314658 - DNA, 15 bp, Homo sapiens
ccagccagcacagag

SEQ ID NO: 314659 - DNA, 15 bp, Homo sapiens
tccagccagcacaga

SEQ ID NO: 314660 - DNA, 15 bp, Homo sapiens
ctccagccagcacag

SEQ ID NO: 314661 - DNA, 15 bp, Homo sapiens
gctccagccagcaca

SEQ ID NO: 314662 - DNA, 15 bp, Homo sapiens
ggctccagccagcac

SEQ ID NO: 314663 - DNA, 15 bp, Homo sapiens
gggctccagccagca

SEQ ID NO: 314664 - DNA, 15 bp, Homo sapiens
ggggctccagccagc

SEQ ID NO: 314665 - DNA, 15 bp, Homo sapiens
gggggctccagccag

SEQ ID NO: 314666 - DNA, 15 bp, Homo sapiens
agggggctccagcca

SEQ ID NO: 314667 - DNA, 15 bp, Homo sapiens
gagggggctccagcc

SEQ ID NO: 314668 - DNA, 15 bp, Homo sapiens
tgagggggctccagc

SEQ ID NO: 314669 - DNA, 15 bp, Homo sapiens
ctgagggggctccag

SEQ ID NO: 314670 - DNA, 15 bp, Homo sapiens
actgagggggctcca

SEQ ID NO: 314671 - DNA, 15 bp, Homo sapiens
cactgagggggctcc

SEQ ID NO: 314672 - DNA, 15 bp, Homo sapiens
acactgagggggctc

SEQ ID NO: 314673 - DNA, 15 bp, Homo sapiens
cacactgagggggct

SEQ ID NO: 314674 - DNA, 15 bp, Homo sapiens
gcacactgagggggc

SEQ ID NO: 314675 - DNA, 15 bp, Homo sapiens
tgcacactgaggggg

SEQ ID NO: 314676 - DNA, 15 bp, Homo sapiens
ctgcacactgagggg

SEQ ID NO: 314677 - DNA, 15 bp, Homo sapiens
cctgcacactgaggg

SEQ ID NO: 314678 - DNA, 15 bp, Homo sapiens
gcctgcacactgagg

SEQ ID NO: 314679 - DNA, 15 bp, Homo sapiens
agcctgcacactgag

SEQ ID NO: 314680 - DNA, 15 bp, Homo sapiens
aagcctgcacactga

SEQ ID NO: 314681 - DNA, 15 bp, Homo sapiens
taagcctgcacactg

SEQ ID NO: 314682 - DNA, 15 bp, Homo sapiens
ctaagcctgcacact

SEQ ID NO: 314683 - DNA, 15 bp, Homo sapiens
tctaagcctgcacac

SEQ ID NO: 314684 - DNA, 15 bp, Homo sapiens
ctctaagcctgcaca

SEQ ID NO: 314685 - DNA, 15 bp, Homo sapiens
cctctaagcctgcac

SEQ ID NO: 314686 - DNA, 15 bp, Homo sapiens
ccctctaagcctgca

SEQ ID NO: 314687 - DNA, 15 bp, Homo sapiens
tccctctaagcctgc

SEQ ID NO: 314688 - DNA, 15 bp, Homo sapiens
gtccctctaagcctg

SEQ ID NO: 314689 - DNA, 15 bp, Homo sapiens
agtccctctaagcct

SEQ ID NO: 314690 - DNA, 15 bp, Homo sapiens
tagtccctctaagcc

SEQ ID NO: 314691 - DNA, 15 bp, Homo sapiens
ctagtccctctaagc

SEQ ID NO: 314692 - DNA, 15 bp, Homo sapiens
cctagtccctctaag

SEQ ID NO: 314693 - DNA, 15 bp, Homo sapiens
gcctagtccctctaa

SEQ ID NO: 314694 - DNA, 15 bp, Homo sapiens
agcctagtccctcta

SEQ ID NO: 314695 - DNA, 15 bp, Homo sapiens
cagcctagtccctct

SEQ ID NO: 314696 - DNA, 15 bp, Homo sapiens
ccagcctagtccctc

SEQ ID NO: 314697 - DNA, 15 bp, Homo sapiens
cccagcctagtccct

SEQ ID NO: 314698 - DNA, 15 bp, Homo sapiens
acccagcctagtccc

SEQ ID NO: 314699 - DNA, 15 bp, Homo sapiens
cacccagcctagtcc

SEQ ID NO: 314700 - DNA, 15 bp, Homo sapiens
acacccagcctagtc

SEQ ID NO: 314701 - DNA, 15 bp, Homo sapiens
cacacccagcctagt

SEQ ID NO: 314702 - DNA, 15 bp, Homo sapiens
ccacacccagcctag

SEQ ID NO: 314703 - DNA, 15 bp, Homo sapiens
tccacacccagccta

SEQ ID NO: 314704 - DNA, 15 bp, Homo sapiens
ctccacacccagcct

SEQ ID NO: 314705 - DNA, 15 bp, Homo sapiens
gctccacacccagcc

SEQ ID NO: 314706 - DNA, 15 bp, Homo sapiens
agctccacacccagc

SEQ ID NO: 314707 - DNA, 15 bp, Homo sapiens
cagctccacacccag

SEQ ID NO: 314708 - DNA, 15 bp, Homo sapiens
gcagctccacaccca

SEQ ID NO: 314709 - DNA, 15 bp, Homo sapiens
tgcagctccacaccc

SEQ ID NO: 314710 - DNA, 15 bp, Homo sapiens
ctgcagctccacacc

SEQ ID NO: 314711 - DNA, 15 bp, Homo sapiens
gctgcagctccacac

SEQ ID NO: 314712 - DNA, 15 bp, Homo sapiens
cgctgcagctccaca

SEQ ID NO: 314713 - DNA, 15 bp, Homo sapiens
acgctgcagctccac

SEQ ID NO: 314714 - DNA, 15 bp, Homo sapiens
tacgctgcagctcca

SEQ ID NO: 314715 - DNA, 15 bp, Homo sapiens
atacgctgcagctcc

SEQ ID NO: 314716 - DNA, 15 bp, Homo sapiens
gatacgctgcagctc

SEQ ID NO: 314717 - DNA, 15 bp, Homo sapiens
ggatacgctgcagct

SEQ ID NO: 314718 - DNA, 15 bp, Homo sapiens
tggatacgctgcagc

SEQ ID NO: 314719 - DNA, 15 bp, Homo sapiens
gtggatacgctgcag

SEQ ID NO: 314720 - DNA, 15 bp, Homo sapiens
tgtggatacgctgca

SEQ ID NO: 314721 - DNA, 15 bp, Homo sapiens
ctgtggatacgctgc

SEQ ID NO: 314722 - DNA, 15 bp, Homo sapiens
cctgtggatacgctg

SEQ ID NO: 314723 - DNA, 15 bp, Homo sapiens
acctgtggatacgct

SEQ ID NO: 314724 - DNA, 15 bp, Homo sapiens
tacctgtggatacgc

SEQ ID NO: 314725 - DNA, 15 bp, Homo sapiens
ttacctgtggatacg

SEQ ID NO: 314726 - DNA, 15 bp, Homo sapiens
tttacctgtggatac

SEQ ID NO: 314727 - DNA, 15 bp, Homo sapiens
ctttacctgtggata

SEQ ID NO: 314728 - DNA, 15 bp, Homo sapiens
gctttacctgtggat

SEQ ID NO: 314729 - DNA, 15 bp, Homo sapiens
tgctttacctgtgga

SEQ ID NO: 314730 - DNA, 15 bp, Homo sapiens
ctgctttacctgtgg

SEQ ID NO: 314731 - DNA, 15 bp, Homo sapiens
gctgctttacctgtg

SEQ ID NO: 314732 - DNA, 15 bp, Homo sapiens
agctgctttacctgt

SEQ ID NO: 314733 - DNA, 15 bp, Homo sapiens
gagctgctttacctg

SEQ ID NO: 314734 - DNA, 15 bp, Homo sapiens
ggagctgctttacct

SEQ ID NO: 314735 - DNA, 15 bp, Homo sapiens
gggagctgctttacc

SEQ ID NO: 314736 - DNA, 15 bp, Homo sapiens
agggagctgctttac

SEQ ID NO: 314737 - DNA, 15 bp, Homo sapiens
cagggagctgcttta

SEQ ID NO: 314738 - DNA, 15 bp, Homo sapiens
ccagggagctgcttt

SEQ ID NO: 314739 - DNA, 15 bp, Homo sapiens
gccagggagctgctt

SEQ ID NO: 314740 - DNA, 15 bp, Homo sapiens
agccagggagctgct

SEQ ID NO: 314741 - DNA, 15 bp, Homo sapiens
cagccagggagctgc

SEQ ID NO: 314742 - DNA, 15 bp, Homo sapiens
gcagccagggagctg

SEQ ID NO: 314743 - DNA, 15 bp, Homo sapiens
agcagccagggagct

SEQ ID NO: 314744 - DNA, 15 bp, Homo sapiens
gagcagccagggagc

SEQ ID NO: 314745 - DNA, 15 bp, Homo sapiens
agagcagccagggag

SEQ ID NO: 314746 - DNA, 15 bp, Homo sapiens
cagagcagccaggga

SEQ ID NO: 314747 - DNA, 15 bp, Homo sapiens
tcagagcagccaggg

SEQ ID NO: 314748 - DNA, 15 bp, Homo sapiens
atcagagcagccagg

SEQ ID NO: 314749 - DNA, 15 bp, Homo sapiens
catcagagcagccag

SEQ ID NO: 314750 - DNA, 15 bp, Homo sapiens
gcatcagagcagcca

SEQ ID NO: 314751 - DNA, 15 bp, Homo sapiens
ggcatcagagcagcc

SEQ ID NO: 314752 - DNA, 15 bp, Homo sapiens
tggcatcagagcagc

SEQ ID NO: 314753 - DNA, 15 bp, Homo sapiens
ctggcatcagagcag

SEQ ID NO: 314754 - DNA, 15 bp, Homo sapiens
cctggcatcagagca

SEQ ID NO: 314755 - DNA, 15 bp, Homo sapiens
ccctggcatcagagc

SEQ ID NO: 314756 - DNA, 15 bp, Homo sapiens
tccctggcatcagag

SEQ ID NO: 314757 - DNA, 15 bp, Homo sapiens
gtccctggcatcaga

SEQ ID NO: 314758 - DNA, 15 bp, Homo sapiens
cgtccctggcatcag

SEQ ID NO: 314759 - DNA, 15 bp, Homo sapiens
ccgtccctggcatca

SEQ ID NO: 314760 - DNA, 15 bp, Homo sapiens
gccgtccctggcatc

SEQ ID NO: 314761 - DNA, 15 bp, Homo sapiens
cgccgtccctggcat

SEQ ID NO: 314762 - DNA, 15 bp, Homo sapiens
ccgccgtccctggca

SEQ ID NO: 314763 - DNA, 15 bp, Homo sapiens
cccgccgtccctggc

SEQ ID NO: 314764 - DNA, 15 bp, Homo sapiens
tcccgccgtccctgg

SEQ ID NO: 314765 - DNA, 15 bp, Homo sapiens
ctcccgccgtccctg

SEQ ID NO: 314766 - DNA, 15 bp, Homo sapiens
tctcccgccgtccct

SEQ ID NO: 314767 - DNA, 15 bp, Homo sapiens
ctctcccgccgtccc

SEQ ID NO: 314768 - DNA, 15 bp, Homo sapiens
cctctcccgccgtcc

SEQ ID NO: 314769 - DNA, 15 bp, Homo sapiens
gcctctcccgccgtc

SEQ ID NO: 314770 - DNA, 15 bp, Homo sapiens
agcctctcccgccgt

SEQ ID NO: 314771 - DNA, 15 bp, Homo sapiens
gagcctctcccgccg

SEQ ID NO: 314772 - DNA, 15 bp, Homo sapiens
ggagcctctcccgcc

SEQ ID NO: 314773 - DNA, 15 bp, Homo sapiens
gggagcctctcccgc

SEQ ID NO: 314774 - DNA, 15 bp, Homo sapiens
ggggagcctctcccg

SEQ ID NO: 314775 - DNA, 15 bp, Homo sapiens
aggggagcctctccc

SEQ ID NO: 314776 - DNA, 15 bp, Homo sapiens
caggggagcctctcc

SEQ ID NO: 314777 - DNA, 15 bp, Homo sapiens
ccaggggagcctctc

SEQ ID NO: 314778 - DNA, 15 bp, Homo sapiens
cccaggggagcctct

SEQ ID NO: 314779 - DNA, 15 bp, Homo sapiens
gcccaggggagcctc

SEQ ID NO: 314780 - DNA, 15 bp, Homo sapiens
agcccaggggagcct

SEQ ID NO: 314781 - DNA, 15 bp, Homo sapiens
cagcccaggggagcc

SEQ ID NO: 314782 - DNA, 15 bp, Homo sapiens
ccagcccaggggagc

SEQ ID NO: 314783 - DNA, 15 bp, Homo sapiens
cccagcccaggggag

SEQ ID NO: 314784 - DNA, 15 bp, Homo sapiens
ccccagcccagggga

SEQ ID NO: 314785 - DNA, 15 bp, Homo sapiens
cccccagcccagggg

SEQ ID NO: 314786 - DNA, 15 bp, Homo sapiens
ccccccagcccaggg

SEQ ID NO: 314787 - DNA, 15 bp, Homo sapiens
tccccccagcccagg

SEQ ID NO: 314788 - DNA, 15 bp, Homo sapiens
gtccccccagcccag

SEQ ID NO: 314789 - DNA, 15 bp, Homo sapiens
tgtccccccagccca

SEQ ID NO: 314790 - DNA, 15 bp, Homo sapiens
ctgtccccccagccc

SEQ ID NO: 314791 - DNA, 15 bp, Homo sapiens
cctgtccccccagcc

SEQ ID NO: 314792 - DNA, 15 bp, Homo sapiens
ccctgtccccccagc

SEQ ID NO: 314793 - DNA, 15 bp, Homo sapiens
cccctgtccccccag

SEQ ID NO: 314794 - DNA, 15 bp, Homo sapiens
tcccctgtcccccca

SEQ ID NO: 314795 - DNA, 15 bp, Homo sapiens
ctcccctgtcccccc

SEQ ID NO: 314796 - DNA, 15 bp, Homo sapiens
tctcccctgtccccc

SEQ ID NO: 314797 - DNA, 15 bp, Homo sapiens
ctctcccctgtcccc

SEQ ID NO: 314798 - DNA, 15 bp, Homo sapiens
cctctcccctgtccc

SEQ ID NO: 314799 - DNA, 15 bp, Homo sapiens
gcctctcccctgtcc

SEQ ID NO: 314800 - DNA, 15 bp, Homo sapiens
tgcctctcccctgtc

SEQ ID NO: 314801 - DNA, 15 bp, Homo sapiens
ctgcctctcccctgt

SEQ ID NO: 314802 - DNA, 15 bp, Homo sapiens
cctgcctctcccctg

SEQ ID NO: 314803 - DNA, 15 bp, Homo sapiens
ccctgcctctcccct

SEQ ID NO: 314804 - DNA, 15 bp, Homo sapiens
cccctgcctctcccc

SEQ ID NO: 314805 - DNA, 15 bp, Homo sapiens
gcccctgcctctccc

SEQ ID NO: 314806 - DNA, 15 bp, Homo sapiens
tgcccctgcctctcc

SEQ ID NO: 314807 - DNA, 15 bp, Homo sapiens
gtgcccctgcctctc

SEQ ID NO: 314808 - DNA, 15 bp, Homo sapiens
agtgcccctgcctct

SEQ ID NO: 314809 - DNA, 15 bp, Homo sapiens
gagtgcccctgcctc

SEQ ID NO: 314810 - DNA, 15 bp, Homo sapiens
ggagtgcccctgcct

SEQ ID NO: 314811 - DNA, 15 bp, Homo sapiens
tggagtgcccctgcc

SEQ ID NO: 314812 - DNA, 15 bp, Homo sapiens
ctggagtgcccctgc

SEQ ID NO: 314813 - DNA, 15 bp, Homo sapiens
cctggagtgcccctg

SEQ ID NO: 314814 - DNA, 15 bp, Homo sapiens
ccctggagtgcccct

SEQ ID NO: 314815 - DNA, 15 bp, Homo sapiens
tccctggagtgcccc

SEQ ID NO: 314816 - DNA, 15 bp, Homo sapiens
ctccctggagtgccc

SEQ ID NO: 314817 - DNA, 15 bp, Homo sapiens
gctccctggagtgcc

SEQ ID NO: 314818 - DNA, 15 bp, Homo sapiens
tgctccctggagtgc

SEQ ID NO: 314819 - DNA, 15 bp, Homo sapiens
ctgctccctggagtg

SEQ ID NO: 314820 - DNA, 15 bp, Homo sapiens
tctgctccctggagt

SEQ ID NO: 314821 - DNA, 15 bp, Homo sapiens
ttctgctccctggag

SEQ ID NO: 314822 - DNA, 15 bp, Homo sapiens
tttctgctccctgga

SEQ ID NO: 314823 - DNA, 15 bp, Homo sapiens
ttttctgctccctgg

SEQ ID NO: 314824 - DNA, 15 bp, Homo sapiens
cttttctgctccctg

SEQ ID NO: 314825 - DNA, 15 bp, Homo sapiens
tcttttctgctccct

SEQ ID NO: 314826 - DNA, 15 bp, Homo sapiens
ctcttttctgctccc

SEQ ID NO: 314827 - DNA, 15 bp, Homo sapiens
cctcttttctgctcc

SEQ ID NO: 314828 - DNA, 15 bp, Homo sapiens
ccctcttttctgctc

SEQ ID NO: 314829 - DNA, 15 bp, Homo sapiens
cccctcttttctgct

SEQ ID NO: 314830 - DNA, 15 bp, Homo sapiens
acccctcttttctgc

SEQ ID NO: 314831 - DNA, 15 bp, Homo sapiens
cacccctcttttctg

SEQ ID NO: 314832 - DNA, 15 bp, Homo sapiens
gcacccctcttttct

SEQ ID NO: 314833 - DNA, 15 bp, Homo sapiens
tgcacccctcttttc

SEQ ID NO: 314834 - DNA, 15 bp, Homo sapiens
ttgcacccctctttt

SEQ ID NO: 314835 - DNA, 15 bp, Homo sapiens
cttgcacccctcttt

SEQ ID NO: 314836 - DNA, 15 bp, Homo sapiens
ccttgcacccctctt

SEQ ID NO: 314837 - DNA, 15 bp, Homo sapiens
cccttgcacccctct

SEQ ID NO: 314838 - DNA, 15 bp, Homo sapiens
tcccttgcacccctc

SEQ ID NO: 314839 - DNA, 15 bp, Homo sapiens
ctcccttgcacccct

SEQ ID NO: 314840 - DNA, 15 bp, Homo sapiens
tctcccttgcacccc

SEQ ID NO: 314841 - DNA, 15 bp, Homo sapiens
ctctcccttgcaccc

SEQ ID NO: 314842 - DNA, 15 bp, Homo sapiens
cctctcccttgcacc

SEQ ID NO: 314843 - DNA, 15 bp, Homo sapiens
tcctctcccttgcac

SEQ ID NO: 314844 - DNA, 15 bp, Homo sapiens
ttcctctcccttgca

SEQ ID NO: 314845 - DNA, 15 bp, Homo sapiens
tttcctctcccttgc

SEQ ID NO: 314846 - DNA, 15 bp, Homo sapiens
atttcctctcccttg

SEQ ID NO: 314847 - DNA, 15 bp, Homo sapiens
catttcctctccctt

SEQ ID NO: 314848 - DNA, 15 bp, Homo sapiens
gcatttcctctccct

SEQ ID NO: 314849 - DNA, 15 bp, Homo sapiens
cgcatttcctctccc

SEQ ID NO: 314850 - DNA, 15 bp, Homo sapiens
ccgcatttcctctcc

SEQ ID NO: 314851 - DNA, 15 bp, Homo sapiens
tccgcatttcctctc

SEQ ID NO: 314852 - DNA, 15 bp, Homo sapiens
ctccgcatttcctct

SEQ ID NO: 314853 - DNA, 15 bp, Homo sapiens
tctccgcatttcctc

SEQ ID NO: 314854 - DNA, 15 bp, Homo sapiens
gtctccgcatttcct

SEQ ID NO: 314855 - DNA, 15 bp, Homo sapiens
tgtctccgcatttcc

SEQ ID NO: 314856 - DNA, 15 bp, Homo sapiens
ctgtctccgcatttc

SEQ ID NO: 314857 - DNA, 15 bp, Homo sapiens
gctgtctccgcattt

SEQ ID NO: 314858 - DNA, 15 bp, Homo sapiens
tgctgtctccgcatt

SEQ ID NO: 314859 - DNA, 15 bp, Homo sapiens
ctgctgtctccgcat

SEQ ID NO: 314860 - DNA, 15 bp, Homo sapiens
gctgctgtctccgca

SEQ ID NO: 314861 - DNA, 15 bp, Homo sapiens
ggctgctgtctccgc

SEQ ID NO: 314862 - DNA, 15 bp, Homo sapiens
gggctgctgtctccg

SEQ ID NO: 314863 - DNA, 15 bp, Homo sapiens
ggggctgctgtctcc

SEQ ID NO: 314864 - DNA, 15 bp, Homo sapiens
aggggctgctgtctc

SEQ ID NO: 314865 - DNA, 15 bp, Homo sapiens
caggggctgctgtct

SEQ ID NO: 314866 - DNA, 15 bp, Homo sapiens
gcaggggctgctgtc

SEQ ID NO: 314867 - DNA, 15 bp, Homo sapiens
tgcaggggctgctgt

SEQ ID NO: 314868 - DNA, 15 bp, Homo sapiens
ttgcaggggctgctg

SEQ ID NO: 314869 - DNA, 15 bp, Homo sapiens
attgcaggggctgct

SEQ ID NO: 314870 - DNA, 15 bp, Homo sapiens
aattgcaggggctgc

SEQ ID NO: 314871 - DNA, 15 bp, Homo sapiens
aaattgcaggggctg

SEQ ID NO: 314872 - DNA, 15 bp, Homo sapiens
caaattgcaggggct

SEQ ID NO: 314873 - DNA, 15 bp, Homo sapiens
ccaaattgcaggggc

SEQ ID NO: 314874 - DNA, 15 bp, Homo sapiens
cccaaattgcagggg

SEQ ID NO: 314875 - DNA, 15 bp, Homo sapiens
gcccaaattgcaggg

SEQ ID NO: 314876 - DNA, 15 bp, Homo sapiens
tgcccaaattgcagg

SEQ ID NO: 314877 - DNA, 15 bp, Homo sapiens
ttgcccaaattgcag

SEQ ID NO: 314878 - DNA, 15 bp, Homo sapiens
tttgcccaaattgca

SEQ ID NO: 314879 - DNA, 15 bp, Homo sapiens
ttttgcccaaattgc

SEQ ID NO: 314880 - DNA, 15 bp, Homo sapiens
cttttgcccaaattg

SEQ ID NO: 314881 - DNA, 15 bp, Homo sapiens
ccttttgcccaaatt

SEQ ID NO: 314882 - DNA, 15 bp, Homo sapiens
cccttttgcccaaat

SEQ ID NO: 314883 - DNA, 15 bp, Homo sapiens
acccttttgcccaaa

SEQ ID NO: 314884 - DNA, 15 bp, Homo sapiens
cacccttttgcccaa

SEQ ID NO: 314885 - DNA, 15 bp, Homo sapiens
tcacccttttgccca

SEQ ID NO: 314886 - DNA, 15 bp, Homo sapiens
ctcacccttttgccc

SEQ ID NO: 314887 - DNA, 15 bp, Homo sapiens
actcacccttttgcc

SEQ ID NO: 314888 - DNA, 15 bp, Homo sapiens
cactcacccttttgc

SEQ ID NO: 314889 - DNA, 15 bp, Homo sapiens
ccactcacccttttg

SEQ ID NO: 314890 - DNA, 15 bp, Homo sapiens
tccactcaccctttt

SEQ ID NO: 314891 - DNA, 15 bp, Homo sapiens
atccactcacccttt

SEQ ID NO: 314892 - DNA, 15 bp, Homo sapiens
catccactcaccctt

SEQ ID NO: 314893 - DNA, 15 bp, Homo sapiens
tcatccactcaccct

SEQ ID NO: 314894 - DNA, 15 bp, Homo sapiens
ctcatccactcaccc

SEQ ID NO: 314895 - DNA, 15 bp, Homo sapiens
tctcatccactcacc

SEQ ID NO: 314896 - DNA, 15 bp, Homo sapiens
ctctcatccactcac

SEQ ID NO: 314897 - DNA, 15 bp, Homo sapiens
tctctcatccactca

SEQ ID NO: 314898 - DNA, 15 bp, Homo sapiens
ctctctcatccactc

SEQ ID NO: 314899 - DNA, 15 bp, Homo sapiens
cctctctcatccact

SEQ ID NO: 314900 - DNA, 15 bp, Homo sapiens
ccctctctcatccac

SEQ ID NO: 314901 - DNA, 15 bp, Homo sapiens
gccctctctcatcca

SEQ ID NO: 314902 - DNA, 15 bp, Homo sapiens
tgccctctctcatcc

SEQ ID NO: 314903 - DNA, 15 bp, Homo sapiens
ctgccctctctcatc

SEQ ID NO: 314904 - DNA, 15 bp, Homo sapiens
tctgccctctctcat

SEQ ID NO: 314905 - DNA, 15 bp, Homo sapiens
ctctgccctctctca

SEQ ID NO: 314906 - DNA, 15 bp, Homo sapiens
cctctgccctctctc

SEQ ID NO: 314907 - DNA, 15 bp, Homo sapiens
ccctctgccctctct

SEQ ID NO: 314908 - DNA, 15 bp, Homo sapiens
tccctctgccctctc

SEQ ID NO: 314909 - DNA, 15 bp, Homo sapiens
ctccctctgccctct

SEQ ID NO: 314910 - DNA, 15 bp, Homo sapiens
gctccctctgccctc

SEQ ID NO: 314911 - DNA, 15 bp, Homo sapiens
agctccctctgccct

SEQ ID NO: 314912 - DNA, 15 bp, Homo sapiens
cagctccctctgccc

SEQ ID NO: 314913 - DNA, 15 bp, Homo sapiens
ccagctccctctgcc

SEQ ID NO: 314914 - DNA, 15 bp, Homo sapiens
cccagctccctctgc

SEQ ID NO: 314915 - DNA, 15 bp, Homo sapiens
ccccagctccctctg

SEQ ID NO: 314916 - DNA, 15 bp, Homo sapiens
cccccagctccctct

SEQ ID NO: 314917 - DNA, 15 bp, Homo sapiens
ccccccagctccctc

SEQ ID NO: 314918 - DNA, 15 bp, Homo sapiens
tccccccagctccct

SEQ ID NO: 314919 - DNA, 15 bp, Homo sapiens
gtccccccagctccc

SEQ ID NO: 314920 - DNA, 15 bp, Homo sapiens
tgtccccccagctcc

SEQ ID NO: 314921 - DNA, 15 bp, Homo sapiens
ttgtccccccagctc

SEQ ID NO: 314922 - DNA, 15 bp, Homo sapiens
cttgtccccccagct

SEQ ID NO: 314923 - DNA, 15 bp, Homo sapiens
ccttgtccccccagc

SEQ ID NO: 314924 - DNA, 15 bp, Homo sapiens
gccttgtccccccag

SEQ ID NO: 314925 - DNA, 15 bp, Homo sapiens
ggccttgtcccccca

SEQ ID NO: 314926 - DNA, 15 bp, Homo sapiens
cggccttgtcccccc

SEQ ID NO: 314927 - DNA, 15 bp, Homo sapiens
tcggccttgtccccc

SEQ ID NO: 314928 - DNA, 15 bp, Homo sapiens
ttcggccttgtcccc

SEQ ID NO: 314929 - DNA, 15 bp, Homo sapiens
cttcggccttgtccc

SEQ ID NO: 314930 - DNA, 15 bp, Homo sapiens
ccttcggccttgtcc

SEQ ID NO: 314931 - DNA, 15 bp, Homo sapiens
gccttcggccttgtc

SEQ ID NO: 314932 - DNA, 15 bp, Homo sapiens
ggccttcggccttgt

SEQ ID NO: 314933 - DNA, 15 bp, Homo sapiens
tggccttcggccttg

SEQ ID NO: 314934 - DNA, 15 bp, Homo sapiens
ctggccttcggcctt

SEQ ID NO: 314935 - DNA, 15 bp, Homo sapiens
cctggccttcggcct

SEQ ID NO: 314936 - DNA, 15 bp, Homo sapiens
tcctggccttcggcc

SEQ ID NO: 314937 - DNA, 15 bp, Homo sapiens
gtcctggccttcggc

SEQ ID NO: 314938 - DNA, 15 bp, Homo sapiens
ggtcctggccttcgg

SEQ ID NO: 314939 - DNA, 15 bp, Homo sapiens
gggtcctggccttcg

SEQ ID NO: 314940 - DNA, 15 bp, Homo sapiens
tgggtcctggccttc

SEQ ID NO: 314941 - DNA, 15 bp, Homo sapiens
ctgggtcctggcctt

SEQ ID NO: 314942 - DNA, 15 bp, Homo sapiens
actgggtcctggcct

SEQ ID NO: 314943 - DNA, 15 bp, Homo sapiens
cactgggtcctggcc

SEQ ID NO: 314944 - DNA, 15 bp, Homo sapiens
tcactgggtcctggc

SEQ ID NO: 314945 - DNA, 15 bp, Homo sapiens
atcactgggtcctgg

SEQ ID NO: 314946 - DNA, 15 bp, Homo sapiens
gatcactgggtcctg

SEQ ID NO: 314947 - DNA, 15 bp, Homo sapiens
ggatcactgggtcct

SEQ ID NO: 314948 - DNA, 15 bp, Homo sapiens
gggatcactgggtcc

SEQ ID NO: 314949 - DNA, 15 bp, Homo sapiens
ggggatcactgggtc

SEQ ID NO: 314950 - DNA, 15 bp, Homo sapiens
tggggatcactgggt

SEQ ID NO: 314951 - DNA, 15 bp, Homo sapiens
ttggggatcactggg

SEQ ID NO: 314952 - DNA, 15 bp, Homo sapiens
tttggggatcactgg

SEQ ID NO: 314953 - DNA, 15 bp, Homo sapiens
atttggggatcactg

SEQ ID NO: 314954 - DNA, 15 bp, Homo sapiens
gatttggggatcact

SEQ ID NO: 314955 - DNA, 15 bp, Homo sapiens
ggatttggggatcac

SEQ ID NO: 314956 - DNA, 15 bp, Homo sapiens
gggatttggggatca

SEQ ID NO: 314957 - DNA, 15 bp, Homo sapiens
tgggatttggggatc

SEQ ID NO: 314958 - DNA, 15 bp, Homo sapiens
gtgggatttggggat

SEQ ID NO: 314959 - DNA, 15 bp, Homo sapiens
agtgggatttgggga

SEQ ID NO: 314960 - DNA, 15 bp, Homo sapiens
cagtgggatttgggg

SEQ ID NO: 314961 - DNA, 15 bp, Homo sapiens
gcagtgggatttggg

SEQ ID NO: 314962 - DNA, 15 bp, Homo sapiens
tgcagtgggatttgg

SEQ ID NO: 314963 - DNA, 15 bp, Homo sapiens
gtgcagtgggatttg

SEQ ID NO: 314964 - DNA, 15 bp, Homo sapiens
ggtgcagtgggattt

SEQ ID NO: 314965 - DNA, 15 bp, Homo sapiens
cggtgcagtgggatt

SEQ ID NO: 314966 - DNA, 15 bp, Homo sapiens
tcggtgcagtgggat

SEQ ID NO: 314967 - DNA, 15 bp, Homo sapiens
gtcggtgcagtggga

SEQ ID NO: 314968 - DNA, 15 bp, Homo sapiens
cgtcggtgcagtggg

SEQ ID NO: 314969 - DNA, 15 bp, Homo sapiens
ccgtcggtgcagtgg

SEQ ID NO: 314970 - DNA, 15 bp, Homo sapiens
tccgtcggtgcagtg

SEQ ID NO: 314971 - DNA, 15 bp, Homo sapiens
ttccgtcggtgcagt

SEQ ID NO: 314972 - DNA, 15 bp, Homo sapiens
cttccgtcggtgcag

SEQ ID NO: 314973 - DNA, 15 bp, Homo sapiens
tcttccgtcggtgca

SEQ ID NO: 314974 - DNA, 15 bp, Homo sapiens
ctcttccgtcggtgc

SEQ ID NO: 314975 - DNA, 15 bp, Homo sapiens
cctcttccgtcggtg

SEQ ID NO: 314976 - DNA, 15 bp, Homo sapiens
gcctcttccgtcggt

SEQ ID NO: 314977 - DNA, 15 bp, Homo sapiens
agcctcttccgtcgg

SEQ ID NO: 314978 - DNA, 15 bp, Homo sapiens
cagcctcttccgtcg

SEQ ID NO: 314979 - DNA, 15 bp, Homo sapiens
ccagcctcttccgtc

SEQ ID NO: 314980 - DNA, 15 bp, Homo sapiens
tccagcctcttccgt

SEQ ID NO: 314981 - DNA, 15 bp, Homo sapiens
ttccagcctcttccg

SEQ ID NO: 314982 - DNA, 15 bp, Homo sapiens
tttccagcctcttcc

SEQ ID NO: 314983 - DNA, 15 bp, Homo sapiens
ctttccagcctcttc

SEQ ID NO: 314984 - DNA, 15 bp, Homo sapiens
cctttccagcctctt

SEQ ID NO: 314985 - DNA, 15 bp, Homo sapiens
gcctttccagcctct

SEQ ID NO: 314986 - DNA, 15 bp, Homo sapiens
agcctttccagcctc

SEQ ID NO: 314987 - DNA, 15 bp, Homo sapiens
aagcctttccagcct

SEQ ID NO: 314988 - DNA, 15 bp, Homo sapiens
aaagcctttccagcc

SEQ ID NO: 314989 - DNA, 15 bp, Homo sapiens
aaaagcctttccagc

SEQ ID NO: 314990 - DNA, 15 bp, Homo sapiens
caaaagcctttccag

SEQ ID NO: 314991 - DNA, 15 bp, Homo sapiens
tcaaaagcctttcca

SEQ ID NO: 314992 - DNA, 15 bp, Homo sapiens
ttcaaaagcctttcc

SEQ ID NO: 314993 - DNA, 15 bp, Homo sapiens
attcaaaagcctttc

SEQ ID NO: 314994 - DNA, 15 bp, Homo sapiens
cattcaaaagccttt

SEQ ID NO: 314995 - DNA, 15 bp, Homo sapiens
tcattcaaaagcctt

SEQ ID NO: 314996 - DNA, 15 bp, Homo sapiens
ttcattcaaaagcct

SEQ ID NO: 314997 - DNA, 15 bp, Homo sapiens
cttcattcaaaagcc

SEQ ID NO: 314998 - DNA, 15 bp, Homo sapiens
acttcattcaaaagc

SEQ ID NO: 314999 - DNA, 15 bp, Homo sapiens
cacttcattcaaaag

SEQ ID NO: 315000 - DNA, 15 bp, Homo sapiens
tcacttcattcaaaa

SEQ ID NO: 315001 - DNA, 15 bp, Homo sapiens
ctcacttcattcaaa

SEQ ID NO: 315002 - DNA, 15 bp, Homo sapiens
actcacttcattcaa

SEQ ID NO: 315003 - DNA, 15 bp, Homo sapiens
cactcacttcattca

SEQ ID NO: 315004 - DNA, 15 bp, Homo sapiens
ccactcacttcattc

SEQ ID NO: 315005 - DNA, 15 bp, Homo sapiens
cccactcacttcatt

SEQ ID NO: 315006 - DNA, 15 bp, Homo sapiens
tcccactcacttcat

SEQ ID NO: 315007 - DNA, 15 bp, Homo sapiens
ttcccactcacttca

SEQ ID NO: 315008 - DNA, 15 bp, Homo sapiens
tttcccactcacttc

SEQ ID NO: 315009 - DNA, 15 bp, Homo sapiens
gtttcccactcactt

SEQ ID NO: 315010 - DNA, 15 bp, Homo sapiens
tgtttcccactcact

SEQ ID NO: 315011 - DNA, 15 bp, Homo sapiens
ctgtttcccactcac

SEQ ID NO: 315012 - DNA, 15 bp, Homo sapiens
gctgtttcccactca

SEQ ID NO: 315013 - DNA, 15 bp, Homo sapiens
cgctgtttcccactc

SEQ ID NO: 315014 - DNA, 15 bp, Homo sapiens
ccgctgtttcccact

SEQ ID NO: 315015 - DNA, 15 bp, Homo sapiens
tccgctgtttcccac

SEQ ID NO: 315016 - DNA, 15 bp, Homo sapiens
ctccgctgtttccca

SEQ ID NO: 315017 - DNA, 15 bp, Homo sapiens
cctccgctgtttccc

SEQ ID NO: 315018 - DNA, 15 bp, Homo sapiens
ccctccgctgtttcc

SEQ ID NO: 315019 - DNA, 15 bp, Homo sapiens
cccctccgctgtttc

SEQ ID NO: 315020 - DNA, 15 bp, Homo sapiens
gcccctccgctgttt

SEQ ID NO: 315021 - DNA, 15 bp, Homo sapiens
cgcccctccgctgtt

SEQ ID NO: 315022 - DNA, 15 bp, Homo sapiens
ccgcccctccgctgt

SEQ ID NO: 315023 - DNA, 15 bp, Homo sapiens
accgcccctccgctg

SEQ ID NO: 315024 - DNA, 15 bp, Homo sapiens
gaccgcccctccgct

SEQ ID NO: 315025 - DNA, 15 bp, Homo sapiens
tgaccgcccctccgc

SEQ ID NO: 315026 - DNA, 15 bp, Homo sapiens
atgaccgcccctccg

SEQ ID NO: 315027 - DNA, 15 bp, Homo sapiens
catgaccgcccctcc

SEQ ID NO: 315028 - DNA, 15 bp, Homo sapiens
ccatgaccgcccctc

SEQ ID NO: 315029 - DNA, 15 bp, Homo sapiens
cccatgaccgcccct

SEQ ID NO: 315030 - DNA, 15 bp, Homo sapiens
ccccatgaccgcccc

SEQ ID NO: 315031 - DNA, 15 bp, Homo sapiens
tccccatgaccgccc

SEQ ID NO: 315032 - DNA, 15 bp, Homo sapiens
ctccccatgaccgcc

SEQ ID NO: 315033 - DNA, 15 bp, Homo sapiens
cctccccatgaccgc

SEQ ID NO: 315034 - DNA, 15 bp, Homo sapiens
tcctccccatgaccg

SEQ ID NO: 315035 - DNA, 15 bp, Homo sapiens
ttcctccccatgacc

SEQ ID NO: 315036 - DNA, 15 bp, Homo sapiens
tttcctccccatgac

SEQ ID NO: 315037 - DNA, 15 bp, Homo sapiens
ctttcctccccatga

SEQ ID NO: 315038 - DNA, 15 bp, Homo sapiens
cctttcctccccatg

SEQ ID NO: 315039 - DNA, 15 bp, Homo sapiens
ccctttcctccccat

SEQ ID NO: 315040 - DNA, 15 bp, Homo sapiens
cccctttcctcccca

SEQ ID NO: 315041 - DNA, 15 bp, Homo sapiens
tcccctttcctcccc

SEQ ID NO: 315042 - DNA, 15 bp, Homo sapiens
ctcccctttcctccc

SEQ ID NO: 315043 - DNA, 15 bp, Homo sapiens
gctcccctttcctcc

SEQ ID NO: 315044 - DNA, 15 bp, Homo sapiens
agctcccctttcctc

SEQ ID NO: 315045 - DNA, 15 bp, Homo sapiens
tagctcccctttcct

SEQ ID NO: 315046 - DNA, 15 bp, Homo sapiens
ttagctcccctttcc

SEQ ID NO: 315047 - DNA, 15 bp, Homo sapiens
cttagctcccctttc

SEQ ID NO: 315048 - DNA, 15 bp, Homo sapiens
gcttagctccccttt

SEQ ID NO: 315049 - DNA, 15 bp, Homo sapiens
agcttagctcccctt

SEQ ID NO: 315050 - DNA, 15 bp, Homo sapiens
cagcttagctcccct

SEQ ID NO: 315051 - DNA, 15 bp, Homo sapiens
gcagcttagctcccc

SEQ ID NO: 315052 - DNA, 15 bp, Homo sapiens
agcagcttagctccc

SEQ ID NO: 315053 - DNA, 15 bp, Homo sapiens
cagcagcttagctcc

SEQ ID NO: 315054 - DNA, 15 bp, Homo sapiens
ccagcagcttagctc

SEQ ID NO: 315055 - DNA, 15 bp, Homo sapiens
cccagcagcttagct

SEQ ID NO: 315056 - DNA, 15 bp, Homo sapiens
acccagcagcttagc

SEQ ID NO: 315057 - DNA, 15 bp, Homo sapiens
gacccagcagcttag

SEQ ID NO: 315058 - DNA, 15 bp, Homo sapiens
cgacccagcagctta

SEQ ID NO: 315059 - DNA, 15 bp, Homo sapiens
ccgacccagcagctt

SEQ ID NO: 315060 - DNA, 15 bp, Homo sapiens
cccgacccagcagct

SEQ ID NO: 315061 - DNA, 15 bp, Homo sapiens
acccgacccagcagc

SEQ ID NO: 315062 - DNA, 15 bp, Homo sapiens
gacccgacccagcag

SEQ ID NO: 315063 - DNA, 15 bp, Homo sapiens
agacccgacccagca

SEQ ID NO: 315064 - DNA, 15 bp, Homo sapiens
cagacccgacccagc

SEQ ID NO: 315065 - DNA, 15 bp, Homo sapiens
tcagacccgacccag

SEQ ID NO: 315066 - DNA, 15 bp, Homo sapiens
ctcagacccgaccca

SEQ ID NO: 315067 - DNA, 15 bp, Homo sapiens
gctcagacccgaccc

SEQ ID NO: 315068 - DNA, 15 bp, Homo sapiens
tgctcagacccgacc

SEQ ID NO: 315069 - DNA, 15 bp, Homo sapiens
ctgctcagacccgac

SEQ ID NO: 315070 - DNA, 15 bp, Homo sapiens
gctgctcagacccga

SEQ ID NO: 315071 - DNA, 15 bp, Homo sapiens
tgctgctcagacccg

SEQ ID NO: 315072 - DNA, 15 bp, Homo sapiens
gtgctgctcagaccc

SEQ ID NO: 315073 - DNA, 15 bp, Homo sapiens
ggtgctgctcagacc

SEQ ID NO: 315074 - DNA, 15 bp, Homo sapiens
gggtgctgctcagac

SEQ ID NO: 315075 - DNA, 15 bp, Homo sapiens
ggggtgctgctcaga

SEQ ID NO: 315076 - DNA, 15 bp, Homo sapiens
tggggtgctgctcag

SEQ ID NO: 315077 - DNA, 15 bp, Homo sapiens
ttggggtgctgctca

SEQ ID NO: 315078 - DNA, 15 bp, Homo sapiens
cttggggtgctgctc

SEQ ID NO: 315079 - DNA, 15 bp, Homo sapiens
tcttggggtgctgct

SEQ ID NO: 315080 - DNA, 15 bp, Homo sapiens
gtcttggggtgctgc

SEQ ID NO: 315081 - DNA, 15 bp, Homo sapiens
agtcttggggtgctg

SEQ ID NO: 315082 - DNA, 15 bp, Homo sapiens
cagtcttggggtgct

SEQ ID NO: 315083 - DNA, 15 bp, Homo sapiens
ccagtcttggggtgc

SEQ ID NO: 315084 - DNA, 15 bp, Homo sapiens
tccagtcttggggtg

SEQ ID NO: 315085 - DNA, 15 bp, Homo sapiens
ctccagtcttggggt

SEQ ID NO: 315086 - DNA, 15 bp, Homo sapiens
gctccagtcttgggg

SEQ ID NO: 315087 - DNA, 15 bp, Homo sapiens
ggctccagtcttggg

SEQ ID NO: 315088 - DNA, 15 bp, Homo sapiens
gggctccagtcttgg

SEQ ID NO: 315089 - DNA, 15 bp, Homo sapiens
cgggctccagtcttg

SEQ ID NO: 315090 - DNA, 15 bp, Homo sapiens
tcgggctccagtctt

SEQ ID NO: 315091 - DNA, 15 bp, Homo sapiens
ctcgggctccagtct

SEQ ID NO: 315092 - DNA, 15 bp, Homo sapiens
cctcgggctccagtc

SEQ ID NO: 315093 - DNA, 15 bp, Homo sapiens
gcctcgggctccagt

SEQ ID NO: 315094 - DNA, 15 bp, Homo sapiens
tgcctcgggctccag

SEQ ID NO: 315095 - DNA, 15 bp, Homo sapiens
ttgcctcgggctcca

SEQ ID NO: 315096 - DNA, 15 bp, Homo sapiens
cttgcctcgggctcc

SEQ ID NO: 315097 - DNA, 15 bp, Homo sapiens
ccttgcctcgggctc

SEQ ID NO: 315098 - DNA, 15 bp, Homo sapiens
tccttgcctcgggct

SEQ ID NO: 315099 - DNA, 15 bp, Homo sapiens
ctccttgcctcgggc

SEQ ID NO: 315100 - DNA, 15 bp, Homo sapiens
cctccttgcctcggg

SEQ ID NO: 315101 - DNA, 15 bp, Homo sapiens
gcctccttgcctcgg

SEQ ID NO: 315102 - DNA, 15 bp, Homo sapiens
agcctccttgcctcg

SEQ ID NO: 315103 - DNA, 15 bp, Homo sapiens
gagcctccttgcctc

SEQ ID NO: 315104 - DNA, 15 bp, Homo sapiens
tgagcctccttgcct

SEQ ID NO: 315105 - DNA, 15 bp, Homo sapiens
gtgagcctccttgcc

SEQ ID NO: 315106 - DNA, 15 bp, Homo sapiens
cgtgagcctccttgc

SEQ ID NO: 315107 - DNA, 15 bp, Homo sapiens
ccgtgagcctccttg

SEQ ID NO: 315108 - DNA, 15 bp, Homo sapiens
cccgtgagcctcctt

SEQ ID NO: 315109 - DNA, 15 bp, Homo sapiens
tcccgtgagcctcct

SEQ ID NO: 315110 - DNA, 15 bp, Homo sapiens
ctcccgtgagcctcc

SEQ ID NO: 315111 - DNA, 15 bp, Homo sapiens
gctcccgtgagcctc

SEQ ID NO: 315112 - DNA, 15 bp, Homo sapiens
agctcccgtgagcct

SEQ ID NO: 315113 - DNA, 15 bp, Homo sapiens
cagctcccgtgagcc

SEQ ID NO: 315114 - DNA, 15 bp, Homo sapiens
gcagctcccgtgagc

SEQ ID NO: 315115 - DNA, 15 bp, Homo sapiens
agcagctcccgtgag

SEQ ID NO: 315116 - DNA, 15 bp, Homo sapiens
aagcagctcccgtga

SEQ ID NO: 315117 - DNA, 15 bp, Homo sapiens
gaagcagctcccgtg

SEQ ID NO: 315118 - DNA, 15 bp, Homo sapiens
ggaagcagctcccgt

SEQ ID NO: 315119 - DNA, 15 bp, Homo sapiens
tggaagcagctcccg

SEQ ID NO: 315120 - DNA, 15 bp, Homo sapiens
gtggaagcagctccc

SEQ ID NO: 315121 - DNA, 15 bp, Homo sapiens
ggtggaagcagctcc

SEQ ID NO: 315122 - DNA, 15 bp, Homo sapiens
tggtggaagcagctc

SEQ ID NO: 315123 - DNA, 15 bp, Homo sapiens
ttggtggaagcagct

SEQ ID NO: 315124 - DNA, 15 bp, Homo sapiens
cttggtggaagcagc

SEQ ID NO: 315125 - DNA, 15 bp, Homo sapiens
ccttggtggaagcag

SEQ ID NO: 315126 - DNA, 15 bp, Homo sapiens
cccttggtggaagca

SEQ ID NO: 315127 - DNA, 15 bp, Homo sapiens
gcccttggtggaagc

SEQ ID NO: 315128 - DNA, 15 bp, Homo sapiens
tgcccttggtggaag

SEQ ID NO: 315129 - DNA, 15 bp, Homo sapiens
ctgcccttggtggaa

SEQ ID NO: 315130 - DNA, 15 bp, Homo sapiens
actgcccttggtgga

SEQ ID NO: 315131 - DNA, 15 bp, Homo sapiens
gactgcccttggtgg

SEQ ID NO: 315132 - DNA, 15 bp, Homo sapiens
tgactgcccttggtg

SEQ ID NO: 315133 - DNA, 15 bp, Homo sapiens
ctgactgcccttggt

SEQ ID NO: 315134 - DNA, 15 bp, Homo sapiens
cctgactgcccttgg

SEQ ID NO: 315135 - DNA, 15 bp, Homo sapiens
tcctgactgcccttg

SEQ ID NO: 315136 - DNA, 15 bp, Homo sapiens
ttcctgactgccctt

SEQ ID NO: 315137 - DNA, 15 bp, Homo sapiens
cttcctgactgccct

SEQ ID NO: 315138 - DNA, 15 bp, Homo sapiens
ccttcctgactgccc

SEQ ID NO: 315139 - DNA, 15 bp, Homo sapiens
gccttcctgactgcc

SEQ ID NO: 315140 - DNA, 15 bp, Homo sapiens
cgccttcctgactgc

SEQ ID NO: 315141 - DNA, 15 bp, Homo sapiens
ccgccttcctgactg

SEQ ID NO: 315142 - DNA, 15 bp, Homo sapiens
gccgccttcctgact

SEQ ID NO: 315143 - DNA, 15 bp, Homo sapiens
ggccgccttcctgac

SEQ ID NO: 315144 - DNA, 15 bp, Homo sapiens
cggccgccttcctga

SEQ ID NO: 315145 - DNA, 15 bp, Homo sapiens
gcggccgccttcctg

SEQ ID NO: 315146 - DNA, 15 bp, Homo sapiens
ggcggccgccttcct

SEQ ID NO: 315147 - DNA, 15 bp, Homo sapiens
gggcggccgccttcc

SEQ ID NO: 315148 - DNA, 15 bp, Homo sapiens
agggcggccgccttc

SEQ ID NO: 315149 - DNA, 15 bp, Homo sapiens
cagggcggccgcctt

SEQ ID NO: 315150 - DNA, 15 bp, Homo sapiens
gcagggcggccgcct

SEQ ID NO: 315151 - DNA, 15 bp, Homo sapiens
tgcagggcggccgcc

SEQ ID NO: 315152 - DNA, 15 bp, Homo sapiens
ctgcagggcggccgc

SEQ ID NO: 315153 - DNA, 15 bp, Homo sapiens
gctgcagggcggccg

SEQ ID NO: 315154 - DNA, 15 bp, Homo sapiens
ggctgcagggcggcc

SEQ ID NO: 315155 - DNA, 15 bp, Homo sapiens
gggctgcagggcggc

SEQ ID NO: 315156 - DNA, 15 bp, Homo sapiens
tgggctgcagggcgg

SEQ ID NO: 315157 - DNA, 15 bp, Homo sapiens
ctgggctgcagggcg

SEQ ID NO: 315158 - DNA, 15 bp, Homo sapiens
gctgggctgcagggc

SEQ ID NO: 315159 - DNA, 15 bp, Homo sapiens
ggctgggctgcaggg

SEQ ID NO: 315160 - DNA, 15 bp, Homo sapiens
gggctgggctgcagg

SEQ ID NO: 315161 - DNA, 15 bp, Homo sapiens
agggctgggctgcag

SEQ ID NO: 315162 - DNA, 15 bp, Homo sapiens
cagggctgggctgca

SEQ ID NO: 315163 - DNA, 15 bp, Homo sapiens
ccagggctgggctgc

SEQ ID NO: 315164 - DNA, 15 bp, Homo sapiens
gccagggctgggctg

SEQ ID NO: 315165 - DNA, 15 bp, Homo sapiens
ggccagggctgggct

SEQ ID NO: 315166 - DNA, 15 bp, Homo sapiens
gggccagggctgggc

SEQ ID NO: 315167 - DNA, 15 bp, Homo sapiens
ggggccagggctggg

SEQ ID NO: 315168 - DNA, 15 bp, Homo sapiens
aggggccagggctgg

SEQ ID NO: 315169 - DNA, 15 bp, Homo sapiens
caggggccagggctg

SEQ ID NO: 315170 - DNA, 15 bp, Homo sapiens
gcaggggccagggct

SEQ ID NO: 315171 - DNA, 15 bp, Homo sapiens
agcaggggccagggc

SEQ ID NO: 315172 - DNA, 15 bp, Homo sapiens
gagcaggggccaggg

SEQ ID NO: 315173 - DNA, 15 bp, Homo sapiens
ggagcaggggccagg

SEQ ID NO: 315174 - DNA, 15 bp, Homo sapiens
gggagcaggggccag

SEQ ID NO: 315175 - DNA, 15 bp, Homo sapiens
agggagcaggggcca

SEQ ID NO: 315176 - DNA, 15 bp, Homo sapiens
gagggagcaggggcc

SEQ ID NO: 315177 - DNA, 15 bp, Homo sapiens
cgagggagcaggggc

SEQ ID NO: 315178 - DNA, 15 bp, Homo sapiens
ccgagggagcagggg

SEQ ID NO: 315179 - DNA, 15 bp, Homo sapiens
gccgagggagcaggg

SEQ ID NO: 315180 - DNA, 15 bp, Homo sapiens
agccgagggagcagg

SEQ ID NO: 315181 - DNA, 15 bp, Homo sapiens
gagccgagggagcag

SEQ ID NO: 315182 - DNA, 15 bp, Homo sapiens
ggagccgagggagca

SEQ ID NO: 315183 - DNA, 15 bp, Homo sapiens
gggagccgagggagc

SEQ ID NO: 315184 - DNA, 15 bp, Homo sapiens
agggagccgagggag

SEQ ID NO: 315185 - DNA, 15 bp, Homo sapiens
cagggagccgaggga

SEQ ID NO: 315186 - DNA, 15 bp, Homo sapiens
gcagggagccgaggg

SEQ ID NO: 315187 - DNA, 15 bp, Homo sapiens
agcagggagccgagg

SEQ ID NO: 315188 - DNA, 15 bp, Homo sapiens
tagcagggagccgag

SEQ ID NO: 315189 - DNA, 15 bp, Homo sapiens
gtagcagggagccga

SEQ ID NO: 315190 - DNA, 15 bp, Homo sapiens
agtagcagggagccg

SEQ ID NO: 315191 - DNA, 15 bp, Homo sapiens
aagtagcagggagcc

SEQ ID NO: 315192 - DNA, 15 bp, Homo sapiens
aaagtagcagggagc

SEQ ID NO: 315193 - DNA, 15 bp, Homo sapiens
aaaagtagcagggag

SEQ ID NO: 315194 - DNA, 15 bp, Homo sapiens
aaaaagtagcaggga

SEQ ID NO: 315195 - DNA, 15 bp, Homo sapiens
gaaaaagtagcaggg

SEQ ID NO: 315196 - DNA, 15 bp, Homo sapiens
tgaaaaagtagcagg

SEQ ID NO: 315197 - DNA, 15 bp, Homo sapiens
ttgaaaaagtagcag

SEQ ID NO: 315198 - DNA, 15 bp, Homo sapiens
tttgaaaaagtagca

SEQ ID NO: 315199 - DNA, 15 bp, Homo sapiens
ttttgaaaaagtagc

SEQ ID NO: 315200 - DNA, 15 bp, Homo sapiens
attttgaaaaagtag

SEQ ID NO: 315201 - DNA, 15 bp, Homo sapiens
gattttgaaaaagta

SEQ ID NO: 315202 - DNA, 15 bp, Homo sapiens
tgattttgaaaaagt

SEQ ID NO: 315203 - DNA, 15 bp, Homo sapiens
ctgattttgaaaaag

SEQ ID NO: 315204 - DNA, 15 bp, Homo sapiens
gctgattttgaaaaa

SEQ ID NO: 315205 - DNA, 15 bp, Homo sapiens
agctgattttgaaaa

SEQ ID NO: 315206 - DNA, 15 bp, Homo sapiens
cagctgattttgaaa

SEQ ID NO: 315207 - DNA, 15 bp, Homo sapiens
ccagctgattttgaa

SEQ ID NO: 315208 - DNA, 15 bp, Homo sapiens
accagctgattttga

SEQ ID NO: 315209 - DNA, 15 bp, Homo sapiens
caccagctgattttg

SEQ ID NO: 315210 - DNA, 15 bp, Homo sapiens
gcaccagctgatttt

SEQ ID NO: 315211 - DNA, 15 bp, Homo sapiens
agcaccagctgattt

SEQ ID NO: 315212 - DNA, 15 bp, Homo sapiens
cagcaccagctgatt

SEQ ID NO: 315213 - DNA, 15 bp, Homo sapiens
tcagcaccagctgat

SEQ ID NO: 315214 - DNA, 15 bp, Homo sapiens
gtcagcaccagctga

SEQ ID NO: 315215 - DNA, 15 bp, Homo sapiens
agtcagcaccagctg

SEQ ID NO: 315216 - DNA, 15 bp, Homo sapiens
cagtcagcaccagct

SEQ ID NO: 315217 - DNA, 15 bp, Homo sapiens
acagtcagcaccagc

SEQ ID NO: 315218 - DNA, 15 bp, Homo sapiens
aacagtcagcaccag

SEQ ID NO: 315219 - DNA, 15 bp, Homo sapiens
taacagtcagcacca

SEQ ID NO: 315220 - DNA, 15 bp, Homo sapiens
ttaacagtcagcacc

SEQ ID NO: 315221 - DNA, 15 bp, Homo sapiens
cttaacagtcagcac

SEQ ID NO: 315222 - DNA, 15 bp, Homo sapiens
ccttaacagtcagca

SEQ ID NO: 315223 - DNA, 15 bp, Homo sapiens
gccttaacagtcagc

SEQ ID NO: 315224 - DNA, 15 bp, Homo sapiens
tgccttaacagtcag

SEQ ID NO: 315225 - DNA, 15 bp, Homo sapiens
ttgccttaacagtca

SEQ ID NO: 315226 - DNA, 15 bp, Homo sapiens
attgccttaacagtc

SEQ ID NO: 315227 - DNA, 15 bp, Homo sapiens
aattgccttaacagt

SEQ ID NO: 315228 - DNA, 15 bp, Homo sapiens
aaattgccttaacag

SEQ ID NO: 315229 - DNA, 15 bp, Homo sapiens
gaaattgccttaaca

SEQ ID NO: 315230 - DNA, 15 bp, Homo sapiens
ggaaattgccttaac

SEQ ID NO: 315231 - DNA, 15 bp, Homo sapiens
gggaaattgccttaa

SEQ ID NO: 315232 - DNA, 15 bp, Homo sapiens
tgggaaattgcctta

SEQ ID NO: 315233 - DNA, 15 bp, Homo sapiens
ctgggaaattgcctt

SEQ ID NO: 315234 - DNA, 15 bp, Homo sapiens
gctgggaaattgcct

SEQ ID NO: 315235 - DNA, 15 bp, Homo sapiens
tgctgggaaattgcc

SEQ ID NO: 315236 - DNA, 15 bp, Homo sapiens
gtgctgggaaattgc

SEQ ID NO: 315237 - DNA, 15 bp, Homo sapiens
ggtgctgggaaattg

SEQ ID NO: 315238 - DNA, 15 bp, Homo sapiens
tggtgctgggaaatt

SEQ ID NO: 315239 - DNA, 15 bp, Homo sapiens
gtggtgctgggaaat

SEQ ID NO: 315240 - DNA, 15 bp, Homo sapiens
ggtggtgctgggaaa

SEQ ID NO: 315241 - DNA, 15 bp, Homo sapiens
tggtggtgctgggaa

SEQ ID NO: 315242 - DNA, 15 bp, Homo sapiens
ttggtggtgctggga

SEQ ID NO: 315243 - DNA, 15 bp, Homo sapiens
tttggtggtgctggg

SEQ ID NO: 315244 - DNA, 15 bp, Homo sapiens
gtttggtggtgctgg

SEQ ID NO: 315245 - DNA, 15 bp, Homo sapiens
ggtttggtggtgctg

SEQ ID NO: 315246 - DNA, 15 bp, Homo sapiens
cggtttggtggtgct

SEQ ID NO: 315247 - DNA, 15 bp, Homo sapiens
gcggtttggtggtgc

SEQ ID NO: 315248 - DNA, 15 bp, Homo sapiens
agcggtttggtggtg

SEQ ID NO: 315249 - DNA, 15 bp, Homo sapiens
cagcggtttggtggt

SEQ ID NO: 315250 - DNA, 15 bp, Homo sapiens
ccagcggtttggtgg

SEQ ID NO: 315251 - DNA, 15 bp, Homo sapiens
gccagcggtttggtg

SEQ ID NO: 315252 - DNA, 15 bp, Homo sapiens
ggccagcggtttggt

SEQ ID NO: 315253 - DNA, 15 bp, Homo sapiens
aggccagcggtttgg

SEQ ID NO: 315254 - DNA, 15 bp, Homo sapiens
gaggccagcggtttg

SEQ ID NO: 315255 - DNA, 15 bp, Homo sapiens
cgaggccagcggttt

SEQ ID NO: 315256 - DNA, 15 bp, Homo sapiens
ccgaggccagcggtt

SEQ ID NO: 315257 - DNA, 15 bp, Homo sapiens
gccgaggccagcggt

SEQ ID NO: 315258 - DNA, 15 bp, Homo sapiens
cgccgaggccagcgg

SEQ ID NO: 315259 - DNA, 15 bp, Homo sapiens
gcgccgaggccagcg

SEQ ID NO: 315260 - DNA, 15 bp, Homo sapiens
ggcgccgaggccagc

SEQ ID NO: 315261 - DNA, 15 bp, Homo sapiens
gggcgccgaggccag

SEQ ID NO: 315262 - DNA, 15 bp, Homo sapiens
agggcgccgaggcca

SEQ ID NO: 315263 - DNA, 15 bp, Homo sapiens
cagggcgccgaggcc

SEQ ID NO: 315264 - DNA, 15 bp, Homo sapiens
ccagggcgccgaggc

SEQ ID NO: 315265 - DNA, 15 bp, Homo sapiens
gccagggcgccgagg

SEQ ID NO: 315266 - DNA, 15 bp, Homo sapiens
agccagggcgccgag

SEQ ID NO: 315267 - DNA, 15 bp, Homo sapiens
cagccagggcgccga

SEQ ID NO: 315268 - DNA, 15 bp, Homo sapiens
tcagccagggcgccg

SEQ ID NO: 315269 - DNA, 15 bp, Homo sapiens
ctcagccagggcgcc

SEQ ID NO: 315270 - DNA, 15 bp, Homo sapiens
cctcagccagggcgc

SEQ ID NO: 315271 - DNA, 15 bp, Homo sapiens
ccctcagccagggcg

SEQ ID NO: 315272 - DNA, 15 bp, Homo sapiens
gccctcagccagggc

SEQ ID NO: 315273 - DNA, 15 bp, Homo sapiens
agccctcagccaggg

SEQ ID NO: 315274 - DNA, 15 bp, Homo sapiens
cagccctcagccagg

SEQ ID NO: 315275 - DNA, 15 bp, Homo sapiens
ccagccctcagccag

SEQ ID NO: 315276 - DNA, 15 bp, Homo sapiens
cccagccctcagcca

SEQ ID NO: 315277 - DNA, 15 bp, Homo sapiens
tcccagccctcagcc

SEQ ID NO: 315278 - DNA, 15 bp, Homo sapiens
atcccagccctcagc

SEQ ID NO: 315279 - DNA, 15 bp, Homo sapiens
catcccagccctcag

SEQ ID NO: 315280 - DNA, 15 bp, Homo sapiens
ccatcccagccctca

SEQ ID NO: 315281 - DNA, 15 bp, Homo sapiens
tccatcccagccctc

SEQ ID NO: 315282 - DNA, 15 bp, Homo sapiens
ctccatcccagccct

SEQ ID NO: 315283 - DNA, 15 bp, Homo sapiens
cctccatcccagccc

SEQ ID NO: 315284 - DNA, 15 bp, Homo sapiens
tcctccatcccagcc

SEQ ID NO: 315285 - DNA, 15 bp, Homo sapiens
gtcctccatcccagc

SEQ ID NO: 315286 - DNA, 15 bp, Homo sapiens
tgtcctccatcccag

SEQ ID NO: 315287 - DNA, 15 bp, Homo sapiens
ctgtcctccatccca

SEQ ID NO: 315288 - DNA, 15 bp, Homo sapiens
gctgtcctccatccc

SEQ ID NO: 315289 - DNA, 15 bp, Homo sapiens
agctgtcctccatcc

SEQ ID NO: 315290 - DNA, 15 bp, Homo sapiens
cagctgtcctccatc

SEQ ID NO: 315291 - DNA, 15 bp, Homo sapiens
ccagctgtcctccat

SEQ ID NO: 315292 - DNA, 15 bp, Homo sapiens
cccagctgtcctcca

SEQ ID NO: 315293 - DNA, 15 bp, Homo sapiens
acccagctgtcctcc

SEQ ID NO: 315294 - DNA, 15 bp, Homo sapiens
gacccagctgtcctc

SEQ ID NO: 315295 - DNA, 15 bp, Homo sapiens
ggacccagctgtcct

SEQ ID NO: 315296 - DNA, 15 bp, Homo sapiens
aggacccagctgtcc

SEQ ID NO: 315297 - DNA, 15 bp, Homo sapiens
aaggacccagctgtc

SEQ ID NO: 315298 - DNA, 15 bp, Homo sapiens
gaaggacccagctgt

SEQ ID NO: 315299 - DNA, 15 bp, Homo sapiens
agaaggacccagctg

SEQ ID NO: 315300 - DNA, 15 bp, Homo sapiens
tagaaggacccagct

SEQ ID NO: 315301 - DNA, 15 bp, Homo sapiens
ctagaaggacccagc

SEQ ID NO: 315302 - DNA, 15 bp, Homo sapiens
gctagaaggacccag

SEQ ID NO: 315303 - DNA, 15 bp, Homo sapiens
ggctagaaggaccca

SEQ ID NO: 315304 - DNA, 15 bp, Homo sapiens
tggctagaaggaccc

SEQ ID NO: 315305 - DNA, 15 bp, Homo sapiens
ctggctagaaggacc

SEQ ID NO: 315306 - DNA, 15 bp, Homo sapiens
gctggctagaaggac

SEQ ID NO: 315307 - DNA, 15 bp, Homo sapiens
ggctggctagaagga

SEQ ID NO: 315308 - DNA, 15 bp, Homo sapiens
gggctggctagaagg

SEQ ID NO: 315309 - DNA, 15 bp, Homo sapiens
ggggctggctagaag

SEQ ID NO: 315310 - DNA, 15 bp, Homo sapiens
gggggctggctagaa

SEQ ID NO: 315311 - DNA, 15 bp, Homo sapiens
tgggggctggctaga

SEQ ID NO: 315312 - DNA, 15 bp, Homo sapiens
gtgggggctggctag

SEQ ID NO: 315313 - DNA, 15 bp, Homo sapiens
ggtgggggctggcta

SEQ ID NO: 315314 - DNA, 15 bp, Homo sapiens
gggtgggggctggct

SEQ ID NO: 315315 - DNA, 15 bp, Homo sapiens
tgggtgggggctggc

SEQ ID NO: 315316 - DNA, 15 bp, Homo sapiens
gtgggtgggggctgg

SEQ ID NO: 315317 - DNA, 15 bp, Homo sapiens
agtgggtgggggctg

SEQ ID NO: 315318 - DNA, 15 bp, Homo sapiens
gagtgggtgggggct

SEQ ID NO: 315319 - DNA, 15 bp, Homo sapiens
agagtgggtgggggc

SEQ ID NO: 315320 - DNA, 15 bp, Homo sapiens
gagagtgggtggggg

SEQ ID NO: 315321 - DNA, 15 bp, Homo sapiens
agagagtgggtgggg

SEQ ID NO: 315322 - DNA, 15 bp, Homo sapiens
aagagagtgggtggg

SEQ ID NO: 315323 - DNA, 15 bp, Homo sapiens
aaagagagtgggtgg

SEQ ID NO: 315324 - DNA, 15 bp, Homo sapiens
caaagagagtgggtg

SEQ ID NO: 315325 - DNA, 15 bp, Homo sapiens
ccaaagagagtgggt

SEQ ID NO: 315326 - DNA, 15 bp, Homo sapiens
gccaaagagagtggg

SEQ ID NO: 315327 - DNA, 15 bp, Homo sapiens
agccaaagagagtgg

SEQ ID NO: 315328 - DNA, 15 bp, Homo sapiens
tagccaaagagagtg

SEQ ID NO: 315329 - DNA, 15 bp, Homo sapiens
gtagccaaagagagt

SEQ ID NO: 315330 - DNA, 15 bp, Homo sapiens
cgtagccaaagagag

SEQ ID NO: 315331 - DNA, 15 bp, Homo sapiens
acgtagccaaagaga

SEQ ID NO: 315332 - DNA, 15 bp, Homo sapiens
cacgtagccaaagag

SEQ ID NO: 315333 - DNA, 15 bp, Homo sapiens
tcacgtagccaaaga

SEQ ID NO: 315334 - DNA, 15 bp, Homo sapiens
ctcacgtagccaaag

SEQ ID NO: 315335 - DNA, 15 bp, Homo sapiens
actcacgtagccaaa

SEQ ID NO: 315336 - DNA, 15 bp, Homo sapiens
gactcacgtagccaa

SEQ ID NO: 315337 - DNA, 15 bp, Homo sapiens
tgactcacgtagcca

SEQ ID NO: 315338 - DNA, 15 bp, Homo sapiens
ttgactcacgtagcc

SEQ ID NO: 315339 - DNA, 15 bp, Homo sapiens
cttgactcacgtagc

SEQ ID NO: 315340 - DNA, 15 bp, Homo sapiens
ccttgactcacgtag

SEQ ID NO: 315341 - DNA, 15 bp, Homo sapiens
gccttgactcacgta

SEQ ID NO: 315342 - DNA, 15 bp, Homo sapiens
agccttgactcacgt

SEQ ID NO: 315343 - DNA, 15 bp, Homo sapiens
cagccttgactcacg

SEQ ID NO: 315344 - DNA, 15 bp, Homo sapiens
ccagccttgactcac

SEQ ID NO: 315345 - DNA, 15 bp, Homo sapiens
cccagccttgactca

SEQ ID NO: 315346 - DNA, 15 bp, Homo sapiens
gcccagccttgactc

SEQ ID NO: 315347 - DNA, 15 bp, Homo sapiens
cgcccagccttgact

SEQ ID NO: 315348 - DNA, 15 bp, Homo sapiens
tcgcccagccttgac

SEQ ID NO: 315349 - DNA, 15 bp, Homo sapiens
gtcgcccagccttga

SEQ ID NO: 315350 - DNA, 15 bp, Homo sapiens
ggtcgcccagccttg

SEQ ID NO: 315351 - DNA, 15 bp, Homo sapiens
tggtcgcccagcctt

SEQ ID NO: 315352 - DNA, 15 bp, Homo sapiens
ttggtcgcccagcct

SEQ ID NO: 315353 - DNA, 15 bp, Homo sapiens
attggtcgcccagcc

SEQ ID NO: 315354 - DNA, 15 bp, Homo sapiens
cattggtcgcccagc

SEQ ID NO: 315355 - DNA, 15 bp, Homo sapiens
tcattggtcgcccag

SEQ ID NO: 315356 - DNA, 15 bp, Homo sapiens
ctcattggtcgccca

SEQ ID NO: 315357 - DNA, 15 bp, Homo sapiens
cctcattggtcgccc

SEQ ID NO: 315358 - DNA, 15 bp, Homo sapiens
acctcattggtcgcc

SEQ ID NO: 315359 - DNA, 15 bp, Homo sapiens
aacctcattggtcgc

SEQ ID NO: 315360 - DNA, 15 bp, Homo sapiens
caacctcattggtcg

SEQ ID NO: 315361 - DNA, 15 bp, Homo sapiens
acaacctcattggtc

SEQ ID NO: 315362 - DNA, 15 bp, Homo sapiens
cacaacctcattggt

SEQ ID NO: 315363 - DNA, 15 bp, Homo sapiens
ccacaacctcattgg

SEQ ID NO: 315364 - DNA, 15 bp, Homo sapiens
gccacaacctcattg

SEQ ID NO: 315365 - DNA, 15 bp, Homo sapiens
ggccacaacctcatt

SEQ ID NO: 315366 - DNA, 15 bp, Homo sapiens
aggccacaacctcat

SEQ ID NO: 315367 - DNA, 15 bp, Homo sapiens
gaggccacaacctca

SEQ ID NO: 315368 - DNA, 15 bp, Homo sapiens
ggaggccacaacctc

SEQ ID NO: 315369 - DNA, 15 bp, Homo sapiens
cggaggccacaacct

SEQ ID NO: 315370 - DNA, 15 bp, Homo sapiens
ccggaggccacaacc

SEQ ID NO: 315371 - DNA, 15 bp, Homo sapiens
gccggaggccacaac

SEQ ID NO: 315372 - DNA, 15 bp, Homo sapiens
tgccggaggccacaa

SEQ ID NO: 315373 - DNA, 15 bp, Homo sapiens
ttgccggaggccaca

SEQ ID NO: 315374 - DNA, 15 bp, Homo sapiens
tttgccggaggccac

SEQ ID NO: 315375 - DNA, 15 bp, Homo sapiens
gtttgccggaggcca

SEQ ID NO: 315376 - DNA, 15 bp, Homo sapiens
tgtttgccggaggcc

SEQ ID NO: 315377 - DNA, 15 bp, Homo sapiens
ttgtttgccggaggc

SEQ ID NO: 315378 - DNA, 15 bp, Homo sapiens
attgtttgccggagg

SEQ ID NO: 315379 - DNA, 15 bp, Homo sapiens
cattgtttgccggag

SEQ ID NO: 315380 - DNA, 15 bp, Homo sapiens
tcattgtttgccgga

SEQ ID NO: 315381 - DNA, 15 bp, Homo sapiens
gtcattgtttgccgg

SEQ ID NO: 315382 - DNA, 15 bp, Homo sapiens
ggtcattgtttgccg

SEQ ID NO: 315383 - DNA, 15 bp, Homo sapiens
tggtcattgtttgcc

SEQ ID NO: 315384 - DNA, 15 bp, Homo sapiens
gtggtcattgtttgc

SEQ ID NO: 315385 - DNA, 15 bp, Homo sapiens
agtggtcattgtttg

SEQ ID NO: 315386 - DNA, 15 bp, Homo sapiens
tagtggtcattgttt

SEQ ID NO: 315387 - DNA, 15 bp, Homo sapiens
atagtggtcattgtt

SEQ ID NO: 315388 - DNA, 15 bp, Homo sapiens
aatagtggtcattgt

SEQ ID NO: 315389 - DNA, 15 bp, Homo sapiens
aaatagtggtcattg

SEQ ID NO: 315390 - DNA, 15 bp, Homo sapiens
taaatagtggtcatt

SEQ ID NO: 315391 - DNA, 15 bp, Homo sapiens
ctaaatagtggtcat

SEQ ID NO: 315392 - DNA, 15 bp, Homo sapiens
cctaaatagtggtca

SEQ ID NO: 315393 - DNA, 15 bp, Homo sapiens
gcctaaatagtggtc

SEQ ID NO: 315394 - DNA, 15 bp, Homo sapiens
ggcctaaatagtggt

SEQ ID NO: 315395 - DNA, 15 bp, Homo sapiens
cggcctaaatagtgg

SEQ ID NO: 315396 - DNA, 15 bp, Homo sapiens
ccggcctaaatagtg

SEQ ID NO: 315397 - DNA, 15 bp, Homo sapiens
gccggcctaaatagt

SEQ ID NO: 315398 - DNA, 15 bp, Homo sapiens
tgccggcctaaatag

SEQ ID NO: 315399 - DNA, 15 bp, Homo sapiens
ctgccggcctaaata

SEQ ID NO: 315400 - DNA, 15 bp, Homo sapiens
cctgccggcctaaat

SEQ ID NO: 315401 - DNA, 15 bp, Homo sapiens
acctgccggcctaaa

SEQ ID NO: 315402 - DNA, 15 bp, Homo sapiens
cacctgccggcctaa

SEQ ID NO: 315403 - DNA, 15 bp, Homo sapiens
acacctgccggccta

SEQ ID NO: 315404 - DNA, 15 bp, Homo sapiens
tacacctgccggcct

SEQ ID NO: 315405 - DNA, 15 bp, Homo sapiens
atacacctgccggcc

SEQ ID NO: 315406 - DNA, 15 bp, Homo sapiens
tatacacctgccggc

SEQ ID NO: 315407 - DNA, 15 bp, Homo sapiens
ctatacacctgccgg

SEQ ID NO: 315408 - DNA, 15 bp, Homo sapiens
cctatacacctgccg

SEQ ID NO: 315409 - DNA, 15 bp, Homo sapiens
ccctatacacctgcc

SEQ ID NO: 315410 - DNA, 15 bp, Homo sapiens
gccctatacacctgc

SEQ ID NO: 315411 - DNA, 15 bp, Homo sapiens
tgccctatacacctg

SEQ ID NO: 315412 - DNA, 15 bp, Homo sapiens
atgccctatacacct

SEQ ID NO: 315413 - DNA, 15 bp, Homo sapiens
catgccctatacacc

SEQ ID NO: 315414 - DNA, 15 bp, Homo sapiens
ccatgccctatacac

SEQ ID NO: 315415 - DNA, 15 bp, Homo sapiens
cccatgccctataca

SEQ ID NO: 315416 - DNA, 15 bp, Homo sapiens
ccccatgccctatac

SEQ ID NO: 315417 - DNA, 15 bp, Homo sapiens
cccccatgccctata

SEQ ID NO: 315418 - DNA, 15 bp, Homo sapiens
gcccccatgccctat

SEQ ID NO: 315419 - DNA, 15 bp, Homo sapiens
ggcccccatgcccta

SEQ ID NO: 315420 - DNA, 15 bp, Homo sapiens
gggcccccatgccct

SEQ ID NO: 315421 - DNA, 15 bp, Homo sapiens
tgggcccccatgccc

SEQ ID NO: 315422 - DNA, 15 bp, Homo sapiens
ctgggcccccatgcc

SEQ ID NO: 315423 - DNA, 15 bp, Homo sapiens
gctgggcccccatgc

SEQ ID NO: 315424 - DNA, 15 bp, Homo sapiens
agctgggcccccatg

SEQ ID NO: 315425 - DNA, 15 bp, Homo sapiens
cagctgggcccccat

SEQ ID NO: 315426 - DNA, 15 bp, Homo sapiens
gcagctgggccccca

SEQ ID NO: 315427 - DNA, 15 bp, Homo sapiens
ggcagctgggccccc

SEQ ID NO: 315428 - DNA, 15 bp, Homo sapiens
tggcagctgggcccc

SEQ ID NO: 315429 - DNA, 15 bp, Homo sapiens
ctggcagctgggccc

SEQ ID NO: 315430 - DNA, 15 bp, Homo sapiens
actggcagctgggcc

SEQ ID NO: 315431 - DNA, 15 bp, Homo sapiens
cactggcagctgggc

SEQ ID NO: 315432 - DNA, 15 bp, Homo sapiens
gcactggcagctggg

SEQ ID NO: 315433 - DNA, 15 bp, Homo sapiens
agcactggcagctgg

SEQ ID NO: 315434 - DNA, 15 bp, Homo sapiens
cagcactggcagctg

SEQ ID NO: 315435 - DNA, 15 bp, Homo sapiens
ccagcactggcagct

SEQ ID NO: 315436 - DNA, 15 bp, Homo sapiens
tccagcactggcagc

SEQ ID NO: 315437 - DNA, 15 bp, Homo sapiens
ctccagcactggcag

SEQ ID NO: 315438 - DNA, 15 bp, Homo sapiens
tctccagcactggca

SEQ ID NO: 315439 - DNA, 15 bp, Homo sapiens
gtctccagcactggc

SEQ ID NO: 315440 - DNA, 15 bp, Homo sapiens
tgtctccagcactgg

SEQ ID NO: 315441 - DNA, 15 bp, Homo sapiens
ttgtctccagcactg

SEQ ID NO: 315442 - DNA, 15 bp, Homo sapiens
cttgtctccagcact

SEQ ID NO: 315443 - DNA, 15 bp, Homo sapiens
ccttgtctccagcac

SEQ ID NO: 315444 - DNA, 15 bp, Homo sapiens
cccttgtctccagca

SEQ ID NO: 315445 - DNA, 15 bp, Homo sapiens
gcccttgtctccagc

SEQ ID NO: 315446 - DNA, 15 bp, Homo sapiens
ggcccttgtctccag

SEQ ID NO: 315447 - DNA, 15 bp, Homo sapiens
cggcccttgtctcca

SEQ ID NO: 315448 - DNA, 15 bp, Homo sapiens
acggcccttgtctcc

SEQ ID NO: 315449 - DNA, 15 bp, Homo sapiens
gacggcccttgtctc

SEQ ID NO: 315450 - DNA, 15 bp, Homo sapiens
ggacggcccttgtct

SEQ ID NO: 315451 - DNA, 15 bp, Homo sapiens
cggacggcccttgtc

SEQ ID NO: 315452 - DNA, 15 bp, Homo sapiens
tcggacggcccttgt

SEQ ID NO: 315453 - DNA, 15 bp, Homo sapiens
ctcggacggcccttg

SEQ ID NO: 315454 - DNA, 15 bp, Homo sapiens
tctcggacggccctt

SEQ ID NO: 315455 - DNA, 15 bp, Homo sapiens
atctcggacggccct

SEQ ID NO: 315456 - DNA, 15 bp, Homo sapiens
catctcggacggccc

SEQ ID NO: 315457 - DNA, 15 bp, Homo sapiens
tcatctcggacggcc

SEQ ID NO: 315458 - DNA, 15 bp, Homo sapiens
ttcatctcggacggc

SEQ ID NO: 315459 - DNA, 15 bp, Homo sapiens
gttcatctcggacgg

SEQ ID NO: 315460 - DNA, 15 bp, Homo sapiens
ggttcatctcggacg

SEQ ID NO: 315461 - DNA, 15 bp, Homo sapiens
gggttcatctcggac

SEQ ID NO: 315462 - DNA, 15 bp, Homo sapiens
agggttcatctcgga

SEQ ID NO: 315463 - DNA, 15 bp, Homo sapiens
aagggttcatctcgg

SEQ ID NO: 315464 - DNA, 15 bp, Homo sapiens
aaagggttcatctcg

SEQ ID NO: 315465 - DNA, 15 bp, Homo sapiens
gaaagggttcatctc

SEQ ID NO: 315466 - DNA, 15 bp, Homo sapiens
agaaagggttcatct

SEQ ID NO: 315467 - DNA, 15 bp, Homo sapiens
cagaaagggttcatc

SEQ ID NO: 315468 - DNA, 15 bp, Homo sapiens
gcagaaagggttcat

SEQ ID NO: 315469 - DNA, 15 bp, Homo sapiens
agcagaaagggttca

SEQ ID NO: 315470 - DNA, 15 bp, Homo sapiens
cagcagaaagggttc

SEQ ID NO: 315471 - DNA, 15 bp, Homo sapiens
gcagcagaaagggtt

SEQ ID NO: 315472 - DNA, 15 bp, Homo sapiens
ggcagcagaaagggt

SEQ ID NO: 315473 - DNA, 15 bp, Homo sapiens
aggcagcagaaaggg

SEQ ID NO: 315474 - DNA, 15 bp, Homo sapiens
caggcagcagaaagg

SEQ ID NO: 315475 - DNA, 15 bp, Homo sapiens
gcaggcagcagaaag

SEQ ID NO: 315476 - DNA, 15 bp, Homo sapiens
ggcaggcagcagaaa

SEQ ID NO: 315477 - DNA, 15 bp, Homo sapiens
tggcaggcagcagaa

SEQ ID NO: 315478 - DNA, 15 bp, Homo sapiens
ttggcaggcagcaga

SEQ ID NO: 315479 - DNA, 15 bp, Homo sapiens
cttggcaggcagcag

SEQ ID NO: 315480 - DNA, 15 bp, Homo sapiens
gcttggcaggcagca

SEQ ID NO: 315481 - DNA, 15 bp, Homo sapiens
ggcttggcaggcagc

SEQ ID NO: 315482 - DNA, 15 bp, Homo sapiens
tggcttggcaggcag

SEQ ID NO: 315483 - DNA, 15 bp, Homo sapiens
gtggcttggcaggca

SEQ ID NO: 315484 - DNA, 15 bp, Homo sapiens
agtggcttggcaggc

SEQ ID NO: 315485 - DNA, 15 bp, Homo sapiens
cagtggcttggcagg

SEQ ID NO: 315486 - DNA, 15 bp, Homo sapiens
ccagtggcttggcag

SEQ ID NO: 315487 - DNA, 15 bp, Homo sapiens
cccagtggcttggca

SEQ ID NO: 315488 - DNA, 15 bp, Homo sapiens
tcccagtggcttggc

SEQ ID NO: 315489 - DNA, 15 bp, Homo sapiens
ctcccagtggcttgg

SEQ ID NO: 315490 - DNA, 15 bp, Homo sapiens
cctcccagtggcttg

SEQ ID NO: 315491 - DNA, 15 bp, Homo sapiens
ccctcccagtggctt

SEQ ID NO: 315492 - DNA, 15 bp, Homo sapiens
cccctcccagtggct

SEQ ID NO: 315493 - DNA, 15 bp, Homo sapiens
acccctcccagtggc

SEQ ID NO: 315494 - DNA, 15 bp, Homo sapiens
tacccctcccagtgg

SEQ ID NO: 315495 - DNA, 15 bp, Homo sapiens
ctacccctcccagtg

SEQ ID NO: 315496 - DNA, 15 bp, Homo sapiens
cctacccctcccagt

SEQ ID NO: 315497 - DNA, 15 bp, Homo sapiens
acctacccctcccag

SEQ ID NO: 315498 - DNA, 15 bp, Homo sapiens
gacctacccctccca

SEQ ID NO: 315499 - DNA, 15 bp, Homo sapiens
agacctacccctccc

SEQ ID NO: 315500 - DNA, 15 bp, Homo sapiens
gagacctacccctcc

SEQ ID NO: 315501 - DNA, 15 bp, Homo sapiens
tgagacctacccctc

SEQ ID NO: 315502 - DNA, 15 bp, Homo sapiens
ctgagacctacccct

SEQ ID NO: 315503 - DNA, 15 bp, Homo sapiens
gctgagacctacccc

SEQ ID NO: 315504 - DNA, 15 bp, Homo sapiens
tgctgagacctaccc

SEQ ID NO: 315505 - DNA, 15 bp, Homo sapiens
ctgctgagacctacc

SEQ ID NO: 315506 - DNA, 15 bp, Homo sapiens
cctgctgagacctac

SEQ ID NO: 315507 - DNA, 15 bp, Homo sapiens
tcctgctgagaccta

SEQ ID NO: 315508 - DNA, 15 bp, Homo sapiens
atcctgctgagacct

SEQ ID NO: 315509 - DNA, 15 bp, Homo sapiens
aatcctgctgagacc

SEQ ID NO: 315510 - DNA, 15 bp, Homo sapiens
gaatcctgctgagac

SEQ ID NO: 315511 - DNA, 15 bp, Homo sapiens
ggaatcctgctgaga

SEQ ID NO: 315512 - DNA, 15 bp, Homo sapiens
gggaatcctgctgag

SEQ ID NO: 315513 - DNA, 15 bp, Homo sapiens
tgggaatcctgctga

SEQ ID NO: 315514 - DNA, 15 bp, Homo sapiens
ctgggaatcctgctg

SEQ ID NO: 315515 - DNA, 15 bp, Homo sapiens
tctgggaatcctgct

SEQ ID NO: 315516 - DNA, 15 bp, Homo sapiens
ttctgggaatcctgc

SEQ ID NO: 315517 - DNA, 15 bp, Homo sapiens
tttctgggaatcctg

SEQ ID NO: 315518 - DNA, 15 bp, Homo sapiens
gtttctgggaatcct

SEQ ID NO: 315519 - DNA, 15 bp, Homo sapiens
ggtttctgggaatcc

SEQ ID NO: 315520 - DNA, 15 bp, Homo sapiens
gggtttctgggaatc

SEQ ID NO: 315521 - DNA, 15 bp, Homo sapiens
ggggtttctgggaat

SEQ ID NO: 315522 - DNA, 15 bp, Homo sapiens
cggggtttctgggaa

SEQ ID NO: 315523 - DNA, 15 bp, Homo sapiens
gcggggtttctggga

SEQ ID NO: 315524 - DNA, 15 bp, Homo sapiens
ggcggggtttctggg

SEQ ID NO: 315525 - DNA, 15 bp, Homo sapiens
gggcggggtttctgg

SEQ ID NO: 315526 - DNA, 15 bp, Homo sapiens
ggggcggggtttctg

SEQ ID NO: 315527 - DNA, 15 bp, Homo sapiens
aggggcggggtttct

SEQ ID NO: 315528 - DNA, 15 bp, Homo sapiens
caggggcggggtttc

SEQ ID NO: 315529 - DNA, 15 bp, Homo sapiens
acaggggcggggttt

SEQ ID NO: 315530 - DNA, 15 bp, Homo sapiens
gacaggggcggggtt

SEQ ID NO: 315531 - DNA, 15 bp, Homo sapiens
ggacaggggcggggt

SEQ ID NO: 315532 - DNA, 15 bp, Homo sapiens
tggacaggggcgggg

SEQ ID NO: 315533 - DNA, 15 bp, Homo sapiens
ctggacaggggcggg

SEQ ID NO: 315534 - DNA, 15 bp, Homo sapiens
gctggacaggggcgg

SEQ ID NO: 315535 - DNA, 15 bp, Homo sapiens
ggctggacaggggcg

SEQ ID NO: 315536 - DNA, 15 bp, Homo sapiens
aggctggacaggggc

SEQ ID NO: 315537 - DNA, 15 bp, Homo sapiens
taggctggacagggg

SEQ ID NO: 315538 - DNA, 15 bp, Homo sapiens
ctaggctggacaggg

SEQ ID NO: 315539 - DNA, 15 bp, Homo sapiens
cctaggctggacagg

SEQ ID NO: 315540 - DNA, 15 bp, Homo sapiens
gcctaggctggacag

SEQ ID NO: 315541 - DNA, 15 bp, Homo sapiens
ggcctaggctggaca

SEQ ID NO: 315542 - DNA, 15 bp, Homo sapiens
gggcctaggctggac

SEQ ID NO: 315543 - DNA, 15 bp, Homo sapiens
ggggcctaggctgga

SEQ ID NO: 315544 - DNA, 15 bp, Homo sapiens
gggggcctaggctgg

SEQ ID NO: 315545 - DNA, 15 bp, Homo sapiens
ggggggcctaggctg

SEQ ID NO: 315546 - DNA, 15 bp, Homo sapiens
tggggggcctaggct

SEQ ID NO: 315547 - DNA, 15 bp, Homo sapiens
gtggggggcctaggc

SEQ ID NO: 315548 - DNA, 15 bp, Homo sapiens
ggtggggggcctagg

SEQ ID NO: 315549 - DNA, 15 bp, Homo sapiens
gggtggggggcctag

SEQ ID NO: 315550 - DNA, 15 bp, Homo sapiens
cgggtggggggccta

SEQ ID NO: 315551 - DNA, 15 bp, Homo sapiens
ccgggtggggggcct

SEQ ID NO: 315552 - DNA, 15 bp, Homo sapiens
accgggtggggggcc

SEQ ID NO: 315553 - DNA, 15 bp, Homo sapiens
caccgggtggggggc

SEQ ID NO: 315554 - DNA, 15 bp, Homo sapiens
acaccgggtgggggg

SEQ ID NO: 315555 - DNA, 15 bp, Homo sapiens
aacaccgggtggggg

SEQ ID NO: 315556 - DNA, 15 bp, Homo sapiens
taacaccgggtgggg

SEQ ID NO: 315557 - DNA, 15 bp, Homo sapiens
ctaacaccgggtggg

SEQ ID NO: 315558 - DNA, 15 bp, Homo sapiens
gctaacaccgggtgg

SEQ ID NO: 315559 - DNA, 15 bp, Homo sapiens
agctaacaccgggtg

SEQ ID NO: 315560 - DNA, 15 bp, Homo sapiens
tagctaacaccgggt

SEQ ID NO: 315561 - DNA, 15 bp, Homo sapiens
ttagctaacaccggg

SEQ ID NO: 315562 - DNA, 15 bp, Homo sapiens
gttagctaacaccgg

SEQ ID NO: 315563 - DNA, 15 bp, Homo sapiens
ggttagctaacaccg

SEQ ID NO: 315564 - DNA, 15 bp, Homo sapiens
gggttagctaacacc

SEQ ID NO: 315565 - DNA, 15 bp, Homo sapiens
tgggttagctaacac

SEQ ID NO: 315566 - DNA, 15 bp, Homo sapiens
ttgggttagctaaca

SEQ ID NO: 315567 - DNA, 15 bp, Homo sapiens
gttgggttagctaac

SEQ ID NO: 315568 - DNA, 15 bp, Homo sapiens
cgttgggttagctaa

SEQ ID NO: 315569 - DNA, 15 bp, Homo sapiens
acgttgggttagcta

SEQ ID NO: 315570 - DNA, 15 bp, Homo sapiens
aacgttgggttagct

SEQ ID NO: 315571 - DNA, 15 bp, Homo sapiens
taacgttgggttagc

SEQ ID NO: 315572 - DNA, 15 bp, Homo sapiens
ctaacgttgggttag

SEQ ID NO: 315573 - DNA, 15 bp, Homo sapiens
gctaacgttgggtta

SEQ ID NO: 315574 - DNA, 15 bp, Homo sapiens
ggctaacgttgggtt

SEQ ID NO: 315575 - DNA, 15 bp, Homo sapiens
gggctaacgttgggt

SEQ ID NO: 315576 - DNA, 15 bp, Homo sapiens
ggggctaacgttggg

SEQ ID NO: 315577 - DNA, 15 bp, Homo sapiens
gggggctaacgttgg

SEQ ID NO: 315578 - DNA, 15 bp, Homo sapiens
tgggggctaacgttg

SEQ ID NO: 315579 - DNA, 15 bp, Homo sapiens
ctgggggctaacgtt

SEQ ID NO: 315580 - DNA, 15 bp, Homo sapiens
cctgggggctaacgt

SEQ ID NO: 315581 - DNA, 15 bp, Homo sapiens
acctgggggctaacg

SEQ ID NO: 315582 - DNA, 15 bp, Homo sapiens
aacctgggggctaac

SEQ ID NO: 315583 - DNA, 15 bp, Homo sapiens
gaacctgggggctaa

SEQ ID NO: 315584 - DNA, 15 bp, Homo sapiens
ggaacctgggggcta

SEQ ID NO: 315585 - DNA, 15 bp, Homo sapiens
cggaacctgggggct

SEQ ID NO: 315586 - DNA, 15 bp, Homo sapiens
acggaacctgggggc

SEQ ID NO: 315587 - DNA, 15 bp, Homo sapiens
cacggaacctggggg

SEQ ID NO: 315588 - DNA, 15 bp, Homo sapiens
ccacggaacctgggg

SEQ ID NO: 315589 - DNA, 15 bp, Homo sapiens
cccacggaacctggg

SEQ ID NO: 315590 - DNA, 15 bp, Homo sapiens
ccccacggaacctgg

SEQ ID NO: 315591 - DNA, 15 bp, Homo sapiens
accccacggaacctg

SEQ ID NO: 315592 - DNA, 15 bp, Homo sapiens
aaccccacggaacct

SEQ ID NO: 315593 - DNA, 15 bp, Homo sapiens
caaccccacggaacc

SEQ ID NO: 315594 - DNA, 15 bp, Homo sapiens
ccaaccccacggaac

SEQ ID NO: 315595 - DNA, 15 bp, Homo sapiens
tccaaccccacggaa

SEQ ID NO: 315596 - DNA, 15 bp, Homo sapiens
ctccaaccccacgga

SEQ ID NO: 315597 - DNA, 15 bp, Homo sapiens
cctccaaccccacgg

SEQ ID NO: 315598 - DNA, 15 bp, Homo sapiens
ccctccaaccccacg

SEQ ID NO: 315599 - DNA, 15 bp, Homo sapiens
gccctccaaccccac

SEQ ID NO: 315600 - DNA, 15 bp, Homo sapiens
tgccctccaacccca

SEQ ID NO: 315601 - DNA, 15 bp, Homo sapiens
ctgccctccaacccc

SEQ ID NO: 315602 - DNA, 15 bp, Homo sapiens
cctgccctccaaccc

SEQ ID NO: 315603 - DNA, 15 bp, Homo sapiens
ccctgccctccaacc

SEQ ID NO: 315604 - DNA, 15 bp, Homo sapiens
tccctgccctccaac

SEQ ID NO: 315605 - DNA, 15 bp, Homo sapiens
ctccctgccctccaa

SEQ ID NO: 315606 - DNA, 15 bp, Homo sapiens
actccctgccctcca

SEQ ID NO: 315607 - DNA, 15 bp, Homo sapiens
gactccctgccctcc

SEQ ID NO: 315608 - DNA, 15 bp, Homo sapiens
ggactccctgccctc

SEQ ID NO: 315609 - DNA, 15 bp, Homo sapiens
aggactccctgccct

SEQ ID NO: 315610 - DNA, 15 bp, Homo sapiens
taggactccctgccc

SEQ ID NO: 315611 - DNA, 15 bp, Homo sapiens
ataggactccctgcc

SEQ ID NO: 315612 - DNA, 15 bp, Homo sapiens
aataggactccctgc

SEQ ID NO: 315613 - DNA, 15 bp, Homo sapiens
gaataggactccctg

SEQ ID NO: 315614 - DNA, 15 bp, Homo sapiens
agaataggactccct

SEQ ID NO: 315615 - DNA, 15 bp, Homo sapiens
aagaataggactccc

SEQ ID NO: 315616 - DNA, 15 bp, Homo sapiens
caagaataggactcc

SEQ ID NO: 315617 - DNA, 15 bp, Homo sapiens
ccaagaataggactc

SEQ ID NO: 315618 - DNA, 15 bp, Homo sapiens
cccaagaataggact

SEQ ID NO: 315619 - DNA, 15 bp, Homo sapiens
ccccaagaataggac

SEQ ID NO: 315620 - DNA, 15 bp, Homo sapiens
gccccaagaatagga

SEQ ID NO: 315621 - DNA, 15 bp, Homo sapiens
agccccaagaatagg

SEQ ID NO: 315622 - DNA, 15 bp, Homo sapiens
cagccccaagaatag

SEQ ID NO: 315623 - DNA, 15 bp, Homo sapiens
gcagccccaagaata

SEQ ID NO: 315624 - DNA, 15 bp, Homo sapiens
agcagccccaagaat

SEQ ID NO: 315625 - DNA, 15 bp, Homo sapiens
cagcagccccaagaa

SEQ ID NO: 315626 - DNA, 15 bp, Homo sapiens
gcagcagccccaaga

SEQ ID NO: 315627 - DNA, 15 bp, Homo sapiens
agcagcagccccaag

SEQ ID NO: 315628 - DNA, 15 bp, Homo sapiens
aagcagcagccccaa

SEQ ID NO: 315629 - DNA, 15 bp, Homo sapiens
gaagcagcagcccca

SEQ ID NO: 315630 - DNA, 15 bp, Homo sapiens
agaagcagcagcccc

SEQ ID NO: 315631 - DNA, 15 bp, Homo sapiens
cagaagcagcagccc

SEQ ID NO: 315632 - DNA, 15 bp, Homo sapiens
ccagaagcagcagcc

SEQ ID NO: 315633 - DNA, 15 bp, Homo sapiens
cccagaagcagcagc

SEQ ID NO: 315634 - DNA, 15 bp, Homo sapiens
ccccagaagcagcag

SEQ ID NO: 315635 - DNA, 15 bp, Homo sapiens
accccagaagcagca

SEQ ID NO: 315636 - DNA, 15 bp, Homo sapiens
caccccagaagcagc

SEQ ID NO: 315637 - DNA, 15 bp, Homo sapiens
acaccccagaagcag

SEQ ID NO: 315638 - DNA, 15 bp, Homo sapiens
cacaccccagaagca

SEQ ID NO: 315639 - DNA, 15 bp, Homo sapiens
ccacaccccagaagc

SEQ ID NO: 315640 - DNA, 15 bp, Homo sapiens
cccacaccccagaag

SEQ ID NO: 315641 - DNA, 15 bp, Homo sapiens
ccccacaccccagaa

SEQ ID NO: 315642 - DNA, 15 bp, Homo sapiens
tccccacaccccaga

SEQ ID NO: 315643 - DNA, 15 bp, Homo sapiens
ttccccacaccccag

SEQ ID NO: 315644 - DNA, 15 bp, Homo sapiens
cttccccacacccca

SEQ ID NO: 315645 - DNA, 15 bp, Homo sapiens
acttccccacacccc

SEQ ID NO: 315646 - DNA, 15 bp, Homo sapiens
cacttccccacaccc

SEQ ID NO: 315647 - DNA, 15 bp, Homo sapiens
gcacttccccacacc

SEQ ID NO: 315648 - DNA, 15 bp, Homo sapiens
tgcacttccccacac

SEQ ID NO: 315649 - DNA, 15 bp, Homo sapiens
ttgcacttccccaca

SEQ ID NO: 315650 - DNA, 15 bp, Homo sapiens
gttgcacttccccac

SEQ ID NO: 315651 - DNA, 15 bp, Homo sapiens
agttgcacttcccca

SEQ ID NO: 315652 - DNA, 15 bp, Homo sapiens
gagttgcacttcccc

SEQ ID NO: 315653 - DNA, 15 bp, Homo sapiens
ggagttgcacttccc

SEQ ID NO: 315654 - DNA, 15 bp, Homo sapiens
tggagttgcacttcc

SEQ ID NO: 315655 - DNA, 15 bp, Homo sapiens
gtggagttgcacttc

SEQ ID NO: 315656 - DNA, 15 bp, Homo sapiens
cgtggagttgcactt

SEQ ID NO: 315657 - DNA, 15 bp, Homo sapiens
ccgtggagttgcact

SEQ ID NO: 315658 - DNA, 15 bp, Homo sapiens
gccgtggagttgcac

SEQ ID NO: 315659 - DNA, 15 bp, Homo sapiens
tgccgtggagttgca

SEQ ID NO: 315660 - DNA, 15 bp, Homo sapiens
gtgccgtggagttgc

SEQ ID NO: 315661 - DNA, 15 bp, Homo sapiens
ggtgccgtggagttg

SEQ ID NO: 315662 - DNA, 15 bp, Homo sapiens
gggtgccgtggagtt

SEQ ID NO: 315663 - DNA, 15 bp, Homo sapiens
agggtgccgtggagt

SEQ ID NO: 315664 - DNA, 15 bp, Homo sapiens
cagggtgccgtggag

SEQ ID NO: 315665 - DNA, 15 bp, Homo sapiens
ccagggtgccgtgga

SEQ ID NO: 315666 - DNA, 15 bp, Homo sapiens
cccagggtgccgtgg

SEQ ID NO: 315667 - DNA, 15 bp, Homo sapiens
gcccagggtgccgtg

SEQ ID NO: 315668 - DNA, 15 bp, Homo sapiens
agcccagggtgccgt

SEQ ID NO: 315669 - DNA, 15 bp, Homo sapiens
cagcccagggtgccg

SEQ ID NO: 315670 - DNA, 15 bp, Homo sapiens
tcagcccagggtgcc

SEQ ID NO: 315671 - DNA, 15 bp, Homo sapiens
gtcagcccagggtgc

SEQ ID NO: 315672 - DNA, 15 bp, Homo sapiens
agtcagcccagggtg

SEQ ID NO: 315673 - DNA, 15 bp, Homo sapiens
gagtcagcccagggt

SEQ ID NO: 315674 - DNA, 15 bp, Homo sapiens
tgagtcagcccaggg

SEQ ID NO: 315675 - DNA, 15 bp, Homo sapiens
atgagtcagcccagg

SEQ ID NO: 315676 - DNA, 15 bp, Homo sapiens
aatgagtcagcccag

SEQ ID NO: 315677 - DNA, 15 bp, Homo sapiens
gaatgagtcagccca

SEQ ID NO: 315678 - DNA, 15 bp, Homo sapiens
tgaatgagtcagccc

SEQ ID NO: 315679 - DNA, 15 bp, Homo sapiens
ctgaatgagtcagcc

SEQ ID NO: 315680 - DNA, 15 bp, Homo sapiens
gctgaatgagtcagc

SEQ ID NO: 315681 - DNA, 15 bp, Homo sapiens
agctgaatgagtcag

SEQ ID NO: 315682 - DNA, 15 bp, Homo sapiens
aagctgaatgagtca

SEQ ID NO: 315683 - DNA, 15 bp, Homo sapiens
gaagctgaatgagtc

SEQ ID NO: 315684 - DNA, 15 bp, Homo sapiens
agaagctgaatgagt

SEQ ID NO: 315685 - DNA, 15 bp, Homo sapiens
tagaagctgaatgag

SEQ ID NO: 315686 - DNA, 15 bp, Homo sapiens
ttagaagctgaatga

SEQ ID NO: 315687 - DNA, 15 bp, Homo sapiens
tttagaagctgaatg

SEQ ID NO: 315688 - DNA, 15 bp, Homo sapiens
ctttagaagctgaat

SEQ ID NO: 315689 - DNA, 15 bp, Homo sapiens
gctttagaagctgaa

SEQ ID NO: 315690 - DNA, 15 bp, Homo sapiens
agctttagaagctga

SEQ ID NO: 315691 - DNA, 15 bp, Homo sapiens
aagctttagaagctg

SEQ ID NO: 315692 - DNA, 15 bp, Homo sapiens
gaagctttagaagct

SEQ ID NO: 315693 - DNA, 15 bp, Homo sapiens
tgaagctttagaagc

SEQ ID NO: 315694 - DNA, 15 bp, Homo sapiens
ctgaagctttagaag

SEQ ID NO: 315695 - DNA, 15 bp, Homo sapiens
cctgaagctttagaa

SEQ ID NO: 315696 - DNA, 15 bp, Homo sapiens
tcctgaagctttaga

SEQ ID NO: 315697 - DNA, 15 bp, Homo sapiens
ttcctgaagctttag

SEQ ID NO: 315698 - DNA, 15 bp, Homo sapiens
tttcctgaagcttta

SEQ ID NO: 315699 - DNA, 15 bp, Homo sapiens
gtttcctgaagcttt

SEQ ID NO: 315700 - DNA, 15 bp, Homo sapiens
tgtttcctgaagctt

SEQ ID NO: 315701 - DNA, 15 bp, Homo sapiens
atgtttcctgaagct

SEQ ID NO: 315702 - DNA, 15 bp, Homo sapiens
aatgtttcctgaagc

SEQ ID NO: 315703 - DNA, 15 bp, Homo sapiens
caatgtttcctgaag

SEQ ID NO: 315704 - DNA, 15 bp, Homo sapiens
acaatgtttcctgaa

SEQ ID NO: 315705 - DNA, 15 bp, Homo sapiens
aacaatgtttcctga

SEQ ID NO: 315706 - DNA, 15 bp, Homo sapiens
aaacaatgtttcctg

SEQ ID NO: 315707 - DNA, 15 bp, Homo sapiens
caaacaatgtttcct

SEQ ID NO: 315708 - DNA, 15 bp, Homo sapiens
ccaaacaatgtttcc

SEQ ID NO: 315709 - DNA, 15 bp, Homo sapiens
cccaaacaatgtttc

SEQ ID NO: 315710 - DNA, 15 bp, Homo sapiens
ccccaaacaatgttt

SEQ ID NO: 315711 - DNA, 15 bp, Homo sapiens
gccccaaacaatgtt

SEQ ID NO: 315712 - DNA, 15 bp, Homo sapiens
agccccaaacaatgt

SEQ ID NO: 315713 - DNA, 15 bp, Homo sapiens
cagccccaaacaatg

SEQ ID NO: 315714 - DNA, 15 bp, Homo sapiens
ccagccccaaacaat

SEQ ID NO: 315715 - DNA, 15 bp, Homo sapiens
cccagccccaaacaa

SEQ ID NO: 315716 - DNA, 15 bp, Homo sapiens
acccagccccaaaca

SEQ ID NO: 315717 - DNA, 15 bp, Homo sapiens
gacccagccccaaac

SEQ ID NO: 315718 - DNA, 15 bp, Homo sapiens
tgacccagccccaaa

SEQ ID NO: 315719 - DNA, 15 bp, Homo sapiens
gtgacccagccccaa

SEQ ID NO: 315720 - DNA, 15 bp, Homo sapiens
ggtgacccagcccca

SEQ ID NO: 315721 - DNA, 15 bp, Homo sapiens
tggtgacccagcccc

SEQ ID NO: 315722 - DNA, 15 bp, Homo sapiens
atggtgacccagccc

SEQ ID NO: 315723 - DNA, 15 bp, Homo sapiens
catggtgacccagcc

SEQ ID NO: 315724 - DNA, 15 bp, Homo sapiens
ccatggtgacccagc

SEQ ID NO: 315725 - DNA, 15 bp, Homo sapiens
cccatggtgacccag

SEQ ID NO: 315726 - DNA, 15 bp, Homo sapiens
acccatggtgaccca

SEQ ID NO: 315727 - DNA, 15 bp, Homo sapiens
cacccatggtgaccc

SEQ ID NO: 315728 - DNA, 15 bp, Homo sapiens
ccacccatggtgacc

SEQ ID NO: 315729 - DNA, 15 bp, Homo sapiens
cccacccatggtgac

SEQ ID NO: 315730 - DNA, 15 bp, Homo sapiens
gcccacccatggtga

SEQ ID NO: 315731 - DNA, 15 bp, Homo sapiens
ggcccacccatggtg

SEQ ID NO: 315732 - DNA, 15 bp, Homo sapiens
tggcccacccatggt

SEQ ID NO: 315733 - DNA, 15 bp, Homo sapiens
ctggcccacccatgg

SEQ ID NO: 315734 - DNA, 15 bp, Homo sapiens
tctggcccacccatg

SEQ ID NO: 315735 - DNA, 15 bp, Homo sapiens
ctctggcccacccat

SEQ ID NO: 315736 - DNA, 15 bp, Homo sapiens
tctctggcccaccca

SEQ ID NO: 315737 - DNA, 15 bp, Homo sapiens
ctctctggcccaccc

SEQ ID NO: 315738 - DNA, 15 bp, Homo sapiens
cctctctggcccacc

SEQ ID NO: 315739 - DNA, 15 bp, Homo sapiens
tcctctctggcccac

SEQ ID NO: 315740 - DNA, 15 bp, Homo sapiens
gtcctctctggccca

SEQ ID NO: 315741 - DNA, 15 bp, Homo sapiens
ggtcctctctggccc

SEQ ID NO: 315742 - DNA, 15 bp, Homo sapiens
gggtcctctctggcc

SEQ ID NO: 315743 - DNA, 15 bp, Homo sapiens
ggggtcctctctggc

SEQ ID NO: 315744 - DNA, 15 bp, Homo sapiens
aggggtcctctctgg

SEQ ID NO: 315745 - DNA, 15 bp, Homo sapiens
gaggggtcctctctg

SEQ ID NO: 315746 - DNA, 15 bp, Homo sapiens
tgaggggtcctctct

SEQ ID NO: 315747 - DNA, 15 bp, Homo sapiens
ttgaggggtcctctc

SEQ ID NO: 315748 - DNA, 15 bp, Homo sapiens
attgaggggtcctct

SEQ ID NO: 315749 - DNA, 15 bp, Homo sapiens
gattgaggggtcctc

SEQ ID NO: 315750 - DNA, 15 bp, Homo sapiens
ggattgaggggtcct

SEQ ID NO: 315751 - DNA, 15 bp, Homo sapiens
gggattgaggggtcc

SEQ ID NO: 315752 - DNA, 15 bp, Homo sapiens
ggggattgaggggtc

SEQ ID NO: 315753 - DNA, 15 bp, Homo sapiens
aggggattgaggggt

SEQ ID NO: 315754 - DNA, 15 bp, Homo sapiens
gaggggattgagggg

SEQ ID NO: 315755 - DNA, 15 bp, Homo sapiens
ggaggggattgaggg

SEQ ID NO: 315756 - DNA, 15 bp, Homo sapiens
cggaggggattgagg

SEQ ID NO: 315757 - DNA, 15 bp, Homo sapiens
ccggaggggattgag

SEQ ID NO: 315758 - DNA, 15 bp, Homo sapiens
tccggaggggattga

SEQ ID NO: 315759 - DNA, 15 bp, Homo sapiens
ctccggaggggattg

SEQ ID NO: 315760 - DNA, 15 bp, Homo sapiens
tctccggaggggatt

SEQ ID NO: 315761 - DNA, 15 bp, Homo sapiens
ctctccggaggggat

SEQ ID NO: 315762 - DNA, 15 bp, Homo sapiens
gctctccggagggga

SEQ ID NO: 315763 - DNA, 15 bp, Homo sapiens
ggctctccggagggg

SEQ ID NO: 315764 - DNA, 15 bp, Homo sapiens
tggctctccggaggg

SEQ ID NO: 315765 - DNA, 15 bp, Homo sapiens
ctggctctccggagg

SEQ ID NO: 315766 - DNA, 15 bp, Homo sapiens
cctggctctccggag

SEQ ID NO: 315767 - DNA, 15 bp, Homo sapiens
ccctggctctccgga

SEQ ID NO: 315768 - DNA, 15 bp, Homo sapiens
cccctggctctccgg

SEQ ID NO: 315769 - DNA, 15 bp, Homo sapiens
tcccctggctctccg

SEQ ID NO: 315770 - DNA, 15 bp, Homo sapiens
ctcccctggctctcc

SEQ ID NO: 315771 - DNA, 15 bp, Homo sapiens
cctcccctggctctc

SEQ ID NO: 315772 - DNA, 15 bp, Homo sapiens
ccctcccctggctct

SEQ ID NO: 315773 - DNA, 15 bp, Homo sapiens
cccctcccctggctc

SEQ ID NO: 315774 - DNA, 15 bp, Homo sapiens
ccccctcccctggct

SEQ ID NO: 315775 - DNA, 15 bp, Homo sapiens
tccccctcccctggc

SEQ ID NO: 315776 - DNA, 15 bp, Homo sapiens
ctccccctcccctgg

SEQ ID NO: 315777 - DNA, 15 bp, Homo sapiens
cctccccctcccctg

SEQ ID NO: 315778 - DNA, 15 bp, Homo sapiens
acctccccctcccct

SEQ ID NO: 315779 - DNA, 15 bp, Homo sapiens
cacctccccctcccc

SEQ ID NO: 315780 - DNA, 15 bp, Homo sapiens
gcacctccccctccc

SEQ ID NO: 315781 - DNA, 15 bp, Homo sapiens
ggcacctccccctcc

SEQ ID NO: 315782 - DNA, 15 bp, Homo sapiens
gggcacctccccctc

SEQ ID NO: 315783 - DNA, 15 bp, Homo sapiens
agggcacctccccct

SEQ ID NO: 315784 - DNA, 15 bp, Homo sapiens
aagggcacctccccc

SEQ ID NO: 315785 - DNA, 15 bp, Homo sapiens
gaagggcacctcccc

SEQ ID NO: 315786 - DNA, 15 bp, Homo sapiens
ggaagggcacctccc

SEQ ID NO: 315787 - DNA, 15 bp, Homo sapiens
gggaagggcacctcc

SEQ ID NO: 315788 - DNA, 15 bp, Homo sapiens
ggggaagggcacctc

SEQ ID NO: 315789 - DNA, 15 bp, Homo sapiens
tggggaagggcacct

SEQ ID NO: 315790 - DNA, 15 bp, Homo sapiens
atggggaagggcacc

SEQ ID NO: 315791 - DNA, 15 bp, Homo sapiens
catggggaagggcac

SEQ ID NO: 315792 - DNA, 15 bp, Homo sapiens
gcatggggaagggca

SEQ ID NO: 315793 - DNA, 15 bp, Homo sapiens
agcatggggaagggc

SEQ ID NO: 315794 - DNA, 15 bp, Homo sapiens
tagcatggggaaggg

SEQ ID NO: 315795 - DNA, 15 bp, Homo sapiens
atagcatggggaagg

SEQ ID NO: 315796 - DNA, 15 bp, Homo sapiens
gatagcatggggaag

SEQ ID NO: 315797 - DNA, 15 bp, Homo sapiens
agatagcatggggaa

SEQ ID NO: 315798 - DNA, 15 bp, Homo sapiens
gagatagcatgggga

SEQ ID NO: 315799 - DNA, 15 bp, Homo sapiens
ggagatagcatgggg

SEQ ID NO: 315800 - DNA, 15 bp, Homo sapiens
cggagatagcatggg

SEQ ID NO: 315801 - DNA, 15 bp, Homo sapiens
tcggagatagcatgg

SEQ ID NO: 315802 - DNA, 15 bp, Homo sapiens
ctcggagatagcatg

SEQ ID NO: 315803 - DNA, 15 bp, Homo sapiens
cctcggagatagcat

SEQ ID NO: 315804 - DNA, 15 bp, Homo sapiens
gcctcggagatagca

SEQ ID NO: 315805 - DNA, 15 bp, Homo sapiens
ggcctcggagatagc

SEQ ID NO: 315806 - DNA, 15 bp, Homo sapiens
gggcctcggagatag

SEQ ID NO: 315807 - DNA, 15 bp, Homo sapiens
tgggcctcggagata

SEQ ID NO: 315808 - DNA, 15 bp, Homo sapiens
gtgggcctcggagat

SEQ ID NO: 315809 - DNA, 15 bp, Homo sapiens
agtgggcctcggaga

SEQ ID NO: 315810 - DNA, 15 bp, Homo sapiens
cagtgggcctcggag

SEQ ID NO: 315811 - DNA, 15 bp, Homo sapiens
gcagtgggcctcgga

SEQ ID NO: 315812 - DNA, 15 bp, Homo sapiens
ggcagtgggcctcgg

SEQ ID NO: 315813 - DNA, 15 bp, Homo sapiens
tggcagtgggcctcg

SEQ ID NO: 315814 - DNA, 15 bp, Homo sapiens
atggcagtgggcctc

SEQ ID NO: 315815 - DNA, 15 bp, Homo sapiens
catggcagtgggcct

SEQ ID NO: 315816 - DNA, 15 bp, Homo sapiens
acatggcagtgggcc

SEQ ID NO: 315817 - DNA, 15 bp, Homo sapiens
cacatggcagtgggc

SEQ ID NO: 315818 - DNA, 15 bp, Homo sapiens
ccacatggcagtggg

SEQ ID NO: 315819 - DNA, 15 bp, Homo sapiens
gccacatggcagtgg

SEQ ID NO: 315820 - DNA, 15 bp, Homo sapiens
agccacatggcagtg

SEQ ID NO: 315821 - DNA, 15 bp, Homo sapiens
cagccacatggcagt

SEQ ID NO: 315822 - DNA, 15 bp, Homo sapiens
tcagccacatggcag

SEQ ID NO: 315823 - DNA, 15 bp, Homo sapiens
ttcagccacatggca

SEQ ID NO: 315824 - DNA, 15 bp, Homo sapiens
cttcagccacatggc

SEQ ID NO: 315825 - DNA, 15 bp, Homo sapiens
ccttcagccacatgg

SEQ ID NO: 315826 - DNA, 15 bp, Homo sapiens
gccttcagccacatg

SEQ ID NO: 315827 - DNA, 15 bp, Homo sapiens
agccttcagccacat

SEQ ID NO: 315828 - DNA, 15 bp, Homo sapiens
cagccttcagccaca

SEQ ID NO: 315829 - DNA, 15 bp, Homo sapiens
acagccttcagccac

SEQ ID NO: 315830 - DNA, 15 bp, Homo sapiens
cacagccttcagcca

SEQ ID NO: 315831 - DNA, 15 bp, Homo sapiens
gcacagccttcagcc

SEQ ID NO: 315832 - DNA, 15 bp, Homo sapiens
cgcacagccttcagc

SEQ ID NO: 315833 - DNA, 15 bp, Homo sapiens
ccgcacagccttcag

SEQ ID NO: 315834 - DNA, 15 bp, Homo sapiens
accgcacagccttca

SEQ ID NO: 315835 - DNA, 15 bp, Homo sapiens
aaccgcacagccttc

SEQ ID NO: 315836 - DNA, 15 bp, Homo sapiens
gaaccgcacagcctt

SEQ ID NO: 315837 - DNA, 15 bp, Homo sapiens
agaaccgcacagcct

SEQ ID NO: 315838 - DNA, 15 bp, Homo sapiens
cagaaccgcacagcc

SEQ ID NO: 315839 - DNA, 15 bp, Homo sapiens
ccagaaccgcacagc

SEQ ID NO: 315840 - DNA, 15 bp, Homo sapiens
cccagaaccgcacag

SEQ ID NO: 315841 - DNA, 15 bp, Homo sapiens
tcccagaaccgcaca

SEQ ID NO: 315842 - DNA, 15 bp, Homo sapiens
ttcccagaaccgcac

SEQ ID NO: 315843 - DNA, 15 bp, Homo sapiens
cttcccagaaccgca

SEQ ID NO: 315844 - DNA, 15 bp, Homo sapiens
tcttcccagaaccgc

SEQ ID NO: 315845 - DNA, 15 bp, Homo sapiens
ctcttcccagaaccg

SEQ ID NO: 315846 - DNA, 15 bp, Homo sapiens
cctcttcccagaacc

SEQ ID NO: 315847 - DNA, 15 bp, Homo sapiens
ccctcttcccagaac

SEQ ID NO: 315848 - DNA, 15 bp, Homo sapiens
cccctcttcccagaa

SEQ ID NO: 315849 - DNA, 15 bp, Homo sapiens
ccccctcttcccaga

SEQ ID NO: 315850 - DNA, 15 bp, Homo sapiens
tccccctcttcccag

SEQ ID NO: 315851 - DNA, 15 bp, Homo sapiens
ctccccctcttccca

SEQ ID NO: 315852 - DNA, 15 bp, Homo sapiens
cctccccctcttccc

SEQ ID NO: 315853 - DNA, 15 bp, Homo sapiens
acctccccctcttcc

SEQ ID NO: 315854 - DNA, 15 bp, Homo sapiens
cacctccccctcttc

SEQ ID NO: 315855 - DNA, 15 bp, Homo sapiens
ccacctccccctctt

SEQ ID NO: 315856 - DNA, 15 bp, Homo sapiens
gccacctccccctct

SEQ ID NO: 315857 - DNA, 15 bp, Homo sapiens
cgccacctccccctc

SEQ ID NO: 315858 - DNA, 15 bp, Homo sapiens
ccgccacctccccct

SEQ ID NO: 315859 - DNA, 15 bp, Homo sapiens
accgccacctccccc

SEQ ID NO: 315860 - DNA, 15 bp, Homo sapiens
caccgccacctcccc

SEQ ID NO: 315861 - DNA, 15 bp, Homo sapiens
ccaccgccacctccc

SEQ ID NO: 315862 - DNA, 15 bp, Homo sapiens
tccaccgccacctcc

SEQ ID NO: 315863 - DNA, 15 bp, Homo sapiens
ctccaccgccacctc

SEQ ID NO: 315864 - DNA, 15 bp, Homo sapiens
cctccaccgccacct

SEQ ID NO: 315865 - DNA, 15 bp, Homo sapiens
gcctccaccgccacc

SEQ ID NO: 315866 - DNA, 15 bp, Homo sapiens
agcctccaccgccac

SEQ ID NO: 315867 - DNA, 15 bp, Homo sapiens
cagcctccaccgcca

SEQ ID NO: 315868 - DNA, 15 bp, Homo sapiens
acagcctccaccgcc

SEQ ID NO: 315869 - DNA, 15 bp, Homo sapiens
aacagcctccaccgc

SEQ ID NO: 315870 - DNA, 15 bp, Homo sapiens
aaacagcctccaccg

SEQ ID NO: 315871 - DNA, 15 bp, Homo sapiens
caaacagcctccacc

SEQ ID NO: 315872 - DNA, 15 bp, Homo sapiens
acaaacagcctccac

SEQ ID NO: 315873 - DNA, 15 bp, Homo sapiens
gacaaacagcctcca

SEQ ID NO: 315874 - DNA, 15 bp, Homo sapiens
agacaaacagcctcc

SEQ ID NO: 315875 - DNA, 15 bp, Homo sapiens
gagacaaacagcctc

SEQ ID NO: 315876 - DNA, 15 bp, Homo sapiens
ggagacaaacagcct

SEQ ID NO: 315877 - DNA, 15 bp, Homo sapiens
aggagacaaacagcc

SEQ ID NO: 315878 - DNA, 15 bp, Homo sapiens
taggagacaaacagc

SEQ ID NO: 315879 - DNA, 15 bp, Homo sapiens
ttaggagacaaacag

SEQ ID NO: 315880 - DNA, 15 bp, Homo sapiens
gttaggagacaaaca

SEQ ID NO: 315881 - DNA, 15 bp, Homo sapiens
agttaggagacaaac

SEQ ID NO: 315882 - DNA, 15 bp, Homo sapiens
cagttaggagacaaa

SEQ ID NO: 315883 - DNA, 15 bp, Homo sapiens
ccagttaggagacaa

SEQ ID NO: 315884 - DNA, 15 bp, Homo sapiens
cccagttaggagaca

SEQ ID NO: 315885 - DNA, 15 bp, Homo sapiens
gcccagttaggagac

SEQ ID NO: 315886 - DNA, 15 bp, Homo sapiens
agcccagttaggaga

SEQ ID NO: 315887 - DNA, 15 bp, Homo sapiens
aagcccagttaggag

SEQ ID NO: 315888 - DNA, 15 bp, Homo sapiens
taagcccagttagga

SEQ ID NO: 315889 - DNA, 15 bp, Homo sapiens
ttaagcccagttagg

SEQ ID NO: 315890 - DNA, 15 bp, Homo sapiens
attaagcccagttag

SEQ ID NO: 315891 - DNA, 15 bp, Homo sapiens
gattaagcccagtta

SEQ ID NO: 315892 - DNA, 15 bp, Homo sapiens
agattaagcccagtt

SEQ ID NO: 315893 - DNA, 15 bp, Homo sapiens
cagattaagcccagt

SEQ ID NO: 315894 - DNA, 15 bp, Homo sapiens
tcagattaagcccag

SEQ ID NO: 315895 - DNA, 15 bp, Homo sapiens
ttcagattaagccca

SEQ ID NO: 315896 - DNA, 15 bp, Homo sapiens
tttcagattaagccc

SEQ ID NO: 315897 - DNA, 15 bp, Homo sapiens
gtttcagattaagcc

SEQ ID NO: 315898 - DNA, 15 bp, Homo sapiens
tgtttcagattaagc

SEQ ID NO: 315899 - DNA, 15 bp, Homo sapiens
gtgtttcagattaag

SEQ ID NO: 315900 - DNA, 15 bp, Homo sapiens
tgtgtttcagattaa

SEQ ID NO: 315901 - DNA, 15 bp, Homo sapiens
atgtgtttcagatta

SEQ ID NO: 315902 - DNA, 15 bp, Homo sapiens
catgtgtttcagatt

SEQ ID NO: 315903 - DNA, 15 bp, Homo sapiens
acatgtgtttcagat

SEQ ID NO: 315904 - DNA, 15 bp, Homo sapiens
tacatgtgtttcaga

SEQ ID NO: 315905 - DNA, 15 bp, Homo sapiens
atacatgtgtttcag

SEQ ID NO: 315906 - DNA, 15 bp, Homo sapiens
aatacatgtgtttca

SEQ ID NO: 315907 - DNA, 15 bp, Homo sapiens
caatacatgtgtttc

SEQ ID NO: 315908 - DNA, 15 bp, Homo sapiens
ccaatacatgtgttt

SEQ ID NO: 315909 - DNA, 15 bp, Homo sapiens
gccaatacatgtgtt

SEQ ID NO: 315910 - DNA, 15 bp, Homo sapiens
agccaatacatgtgt

SEQ ID NO: 315911 - DNA, 15 bp, Homo sapiens
aagccaatacatgtg

SEQ ID NO: 315912 - DNA, 15 bp, Homo sapiens
caagccaatacatgt

SEQ ID NO: 315913 - DNA, 15 bp, Homo sapiens
tcaagccaatacatg

SEQ ID NO: 315914 - DNA, 15 bp, Homo sapiens
ctcaagccaatacat

SEQ ID NO: 315915 - DNA, 15 bp, Homo sapiens
actcaagccaataca

SEQ ID NO: 315916 - DNA, 15 bp, Homo sapiens
aactcaagccaatac

SEQ ID NO: 315917 - DNA, 15 bp, Homo sapiens
caactcaagccaata

SEQ ID NO: 315918 - DNA, 15 bp, Homo sapiens
tcaactcaagccaat

SEQ ID NO: 315919 - DNA, 15 bp, Homo sapiens
atcaactcaagccaa

SEQ ID NO: 315920 - DNA, 15 bp, Homo sapiens
gatcaactcaagcca

SEQ ID NO: 315921 - DNA, 15 bp, Homo sapiens
ggatcaactcaagcc

SEQ ID NO: 315922 - DNA, 15 bp, Homo sapiens
cggatcaactcaagc

SEQ ID NO: 315923 - DNA, 15 bp, Homo sapiens
gcggatcaactcaag

SEQ ID NO: 315924 - DNA, 15 bp, Homo sapiens
ggcggatcaactcaa

SEQ ID NO: 315925 - DNA, 15 bp, Homo sapiens
aggcggatcaactca

SEQ ID NO: 315926 - DNA, 15 bp, Homo sapiens
gaggcggatcaactc

SEQ ID NO: 315927 - DNA, 15 bp, Homo sapiens
tgaggcggatcaact

SEQ ID NO: 315928 - DNA, 15 bp, Homo sapiens
gtgaggcggatcaac

SEQ ID NO: 315929 - DNA, 15 bp, Homo sapiens
cgtgaggcggatcaa

SEQ ID NO: 315930 - DNA, 15 bp, Homo sapiens
acgtgaggcggatca

SEQ ID NO: 315931 - DNA, 15 bp, Homo sapiens
cacgtgaggcggatc

SEQ ID NO: 315932 - DNA, 15 bp, Homo sapiens
ccacgtgaggcggat

SEQ ID NO: 315933 - DNA, 15 bp, Homo sapiens
tccacgtgaggcgga

SEQ ID NO: 315934 - DNA, 15 bp, Homo sapiens
ctccacgtgaggcgg

SEQ ID NO: 315935 - DNA, 15 bp, Homo sapiens
cctccacgtgaggcg

SEQ ID NO: 315936 - DNA, 15 bp, Homo sapiens
gcctccacgtgaggc

SEQ ID NO: 315937 - DNA, 15 bp, Homo sapiens
tgcctccacgtgagg

SEQ ID NO: 315938 - DNA, 15 bp, Homo sapiens
ttgcctccacgtgag

SEQ ID NO: 315939 - DNA, 15 bp, Homo sapiens
cttgcctccacgtga

SEQ ID NO: 315940 - DNA, 15 bp, Homo sapiens
tcttgcctccacgtg

SEQ ID NO: 315941 - DNA, 15 bp, Homo sapiens
atcttgcctccacgt

SEQ ID NO: 315942 - DNA, 15 bp, Homo sapiens
gatcttgcctccacg

SEQ ID NO: 315943 - DNA, 15 bp, Homo sapiens
tgatcttgcctccac

SEQ ID NO: 315944 - DNA, 15 bp, Homo sapiens
gtgatcttgcctcca

SEQ ID NO: 315945 - DNA, 15 bp, Homo sapiens
tgtgatcttgcctcc

SEQ ID NO: 315946 - DNA, 15 bp, Homo sapiens
ttgtgatcttgcctc

SEQ ID NO: 315947 - DNA, 15 bp, Homo sapiens
tttgtgatcttgcct

SEQ ID NO: 315948 - DNA, 15 bp, Homo sapiens
ttttgtgatcttgcc

SEQ ID NO: 315949 - DNA, 15 bp, Homo sapiens
cttttgtgatcttgc

SEQ ID NO: 315950 - DNA, 15 bp, Homo sapiens
gcttttgtgatcttg

SEQ ID NO: 315951 - DNA, 15 bp, Homo sapiens
agcttttgtgatctt

SEQ ID NO: 315952 - DNA, 15 bp, Homo sapiens
aagcttttgtgatct

SEQ ID NO: 315953 - DNA, 15 bp, Homo sapiens
gaagcttttgtgatc

SEQ ID NO: 315954 - DNA, 15 bp, Homo sapiens
agaagcttttgtgat

SEQ ID NO: 315955 - DNA, 15 bp, Homo sapiens
cagaagcttttgtga

SEQ ID NO: 315956 - DNA, 15 bp, Homo sapiens
acagaagcttttgtg

SEQ ID NO: 315957 - DNA, 15 bp, Homo sapiens
cacagaagcttttgt

SEQ ID NO: 315958 - DNA, 15 bp, Homo sapiens
acacagaagcttttg

SEQ ID NO: 315959 - DNA, 15 bp, Homo sapiens
aacacagaagctttt

SEQ ID NO: 315960 - DNA, 15 bp, Homo sapiens
aaacacagaagcttt

SEQ ID NO: 315961 - DNA, 15 bp, Homo sapiens
gaaacacagaagctt

SEQ ID NO: 315962 - DNA, 15 bp, Homo sapiens
agaaacacagaagct

SEQ ID NO: 315963 - DNA, 15 bp, Homo sapiens
aagaaacacagaagc

SEQ ID NO: 315964 - DNA, 15 bp, Homo sapiens
caagaaacacagaag

SEQ ID NO: 315965 - DNA, 15 bp, Homo sapiens
tcaagaaacacagaa

SEQ ID NO: 315966 - DNA, 15 bp, Homo sapiens
atcaagaaacacaga

SEQ ID NO: 315967 - DNA, 15 bp, Homo sapiens
catcaagaaacacag

SEQ ID NO: 315968 - DNA, 15 bp, Homo sapiens
acatcaagaaacaca

SEQ ID NO: 315969 - DNA, 15 bp, Homo sapiens
cacatcaagaaacac

SEQ ID NO: 315970 - DNA, 15 bp, Homo sapiens
ccacatcaagaaaca

SEQ ID NO: 315971 - DNA, 15 bp, Homo sapiens
cccacatcaagaaac

SEQ ID NO: 315972 - DNA, 15 bp, Homo sapiens
gcccacatcaagaaa

SEQ ID NO: 315973 - DNA, 15 bp, Homo sapiens
tgcccacatcaagaa

SEQ ID NO: 315974 - DNA, 15 bp, Homo sapiens
ttgcccacatcaaga

SEQ ID NO: 315975 - DNA, 15 bp, Homo sapiens
attgcccacatcaag

SEQ ID NO: 315976 - DNA, 15 bp, Homo sapiens
aattgcccacatcaa

SEQ ID NO: 315977 - DNA, 15 bp, Homo sapiens
caattgcccacatca

SEQ ID NO: 315978 - DNA, 15 bp, Homo sapiens
acaattgcccacatc

SEQ ID NO: 315979 - DNA, 15 bp, Homo sapiens
gacaattgcccacat

SEQ ID NO: 315980 - DNA, 15 bp, Homo sapiens
tgacaattgcccaca

SEQ ID NO: 315981 - DNA, 15 bp, Homo sapiens
ctgacaattgcccac

SEQ ID NO: 315982 - DNA, 15 bp, Homo sapiens
tctgacaattgccca

SEQ ID NO: 315983 - DNA, 15 bp, Homo sapiens
ttctgacaattgccc

SEQ ID NO: 315984 - DNA, 15 bp, Homo sapiens
tttctgacaattgcc

SEQ ID NO: 315985 - DNA, 15 bp, Homo sapiens
ttttctgacaattgc

SEQ ID NO: 315986 - DNA, 15 bp, Homo sapiens
attttctgacaattg

SEQ ID NO: 315987 - DNA, 15 bp, Homo sapiens
tattttctgacaatt

SEQ ID NO: 315988 - DNA, 15 bp, Homo sapiens
ttattttctgacaat

SEQ ID NO: 315989 - DNA, 15 bp, Homo sapiens
cttattttctgacaa

SEQ ID NO: 315990 - DNA, 15 bp, Homo sapiens
ccttattttctgaca

SEQ ID NO: 315991 - DNA, 15 bp, Homo sapiens
gccttattttctgac

SEQ ID NO: 315992 - DNA, 15 bp, Homo sapiens
ggccttattttctga

SEQ ID NO: 315993 - DNA, 15 bp, Homo sapiens
aggccttattttctg

SEQ ID NO: 315994 - DNA, 15 bp, Homo sapiens
caggccttattttct

SEQ ID NO: 315995 - DNA, 15 bp, Homo sapiens
tcaggccttattttc

SEQ ID NO: 315996 - DNA, 15 bp, Homo sapiens
gtcaggccttatttt

SEQ ID NO: 315997 - DNA, 15 bp, Homo sapiens
ggtcaggccttattt

SEQ ID NO: 315998 - DNA, 15 bp, Homo sapiens
aggtcaggccttatt

SEQ ID NO: 315999 - DNA, 15 bp, Homo sapiens
aaggtcaggccttat

SEQ ID NO: 316000 - DNA, 15 bp, Homo sapiens
caaggtcaggcctta

SEQ ID NO: 316001 - DNA, 15 bp, Homo sapiens
ccaaggtcaggcctt

SEQ ID NO: 316002 - DNA, 15 bp, Homo sapiens
gccaaggtcaggcct

SEQ ID NO: 316003 - DNA, 15 bp, Homo sapiens
ggccaaggtcaggcc

SEQ ID NO: 316004 - DNA, 15 bp, Homo sapiens
gggccaaggtcaggc

SEQ ID NO: 316005 - DNA, 15 bp, Homo sapiens
tgggccaaggtcagg

SEQ ID NO: 316006 - DNA, 15 bp, Homo sapiens
ctgggccaaggtcag

SEQ ID NO: 316007 - DNA, 15 bp, Homo sapiens
gctgggccaaggtca

SEQ ID NO: 316008 - DNA, 15 bp, Homo sapiens
tgctgggccaaggtc

SEQ ID NO: 316009 - DNA, 15 bp, Homo sapiens
ctgctgggccaaggt

SEQ ID NO: 316010 - DNA, 15 bp, Homo sapiens
cctgctgggccaagg

SEQ ID NO: 316011 - DNA, 15 bp, Homo sapiens
ccctgctgggccaag

SEQ ID NO: 316012 - DNA, 15 bp, Homo sapiens
tccctgctgggccaa

SEQ ID NO: 316013 - DNA, 15 bp, Homo sapiens
ctccctgctgggcca

SEQ ID NO: 316014 - DNA, 15 bp, Homo sapiens
cctccctgctgggcc

SEQ ID NO: 316015 - DNA, 15 bp, Homo sapiens
ccctccctgctgggc

SEQ ID NO: 316016 - DNA, 15 bp, Homo sapiens
accctccctgctggg

SEQ ID NO: 316017 - DNA, 15 bp, Homo sapiens
taccctccctgctgg

SEQ ID NO: 316018 - DNA, 15 bp, Homo sapiens
ataccctccctgctg

SEQ ID NO: 316019 - DNA, 15 bp, Homo sapiens
gataccctccctgct

SEQ ID NO: 316020 - DNA, 15 bp, Homo sapiens
agataccctccctgc

SEQ ID NO: 316021 - DNA, 15 bp, Homo sapiens
tagataccctccctg

SEQ ID NO: 316022 - DNA, 15 bp, Homo sapiens
gtagataccctccct

SEQ ID NO: 316023 - DNA, 15 bp, Homo sapiens
ggtagataccctccc

SEQ ID NO: 316024 - DNA, 15 bp, Homo sapiens
aggtagataccctcc

SEQ ID NO: 316025 - DNA, 15 bp, Homo sapiens
gaggtagataccctc

SEQ ID NO: 316026 - DNA, 15 bp, Homo sapiens
agaggtagataccct

SEQ ID NO: 316027 - DNA, 15 bp, Homo sapiens
gagaggtagataccc

SEQ ID NO: 316028 - DNA, 15 bp, Homo sapiens
ggagaggtagatacc

SEQ ID NO: 316029 - DNA, 15 bp, Homo sapiens
gggagaggtagatac

SEQ ID NO: 316030 - DNA, 15 bp, Homo sapiens
agggagaggtagata

SEQ ID NO: 316031 - DNA, 15 bp, Homo sapiens
cagggagaggtagat

SEQ ID NO: 316032 - DNA, 15 bp, Homo sapiens
tcagggagaggtaga

SEQ ID NO: 316033 - DNA, 15 bp, Homo sapiens
ctcagggagaggtag

SEQ ID NO: 316034 - DNA, 15 bp, Homo sapiens
gctcagggagaggta

SEQ ID NO: 316035 - DNA, 15 bp, Homo sapiens
ggctcagggagaggt

SEQ ID NO: 316036 - DNA, 15 bp, Homo sapiens
gggctcagggagagg

SEQ ID NO: 316037 - DNA, 15 bp, Homo sapiens
agggctcagggagag

SEQ ID NO: 316038 - DNA, 15 bp, Homo sapiens
gagggctcagggaga

SEQ ID NO: 316039 - DNA, 15 bp, Homo sapiens
ggagggctcagggag

SEQ ID NO: 316040 - DNA, 15 bp, Homo sapiens
gggagggctcaggga

SEQ ID NO: 316041 - DNA, 15 bp, Homo sapiens
ggggagggctcaggg

SEQ ID NO: 316042 - DNA, 15 bp, Homo sapiens
gggggagggctcagg

SEQ ID NO: 316043 - DNA, 15 bp, Homo sapiens
cgggggagggctcag

SEQ ID NO: 316044 - DNA, 15 bp, Homo sapiens
gcgggggagggctca

SEQ ID NO: 316045 - DNA, 15 bp, Homo sapiens
ggcgggggagggctc

SEQ ID NO: 316046 - DNA, 15 bp, Homo sapiens
aggcgggggagggct

SEQ ID NO: 316047 - DNA, 15 bp, Homo sapiens
caggcgggggagggc

SEQ ID NO: 316048 - DNA, 15 bp, Homo sapiens
gcaggcgggggaggg

SEQ ID NO: 316049 - DNA, 15 bp, Homo sapiens
agcaggcgggggagg

SEQ ID NO: 316050 - DNA, 15 bp, Homo sapiens
tagcaggcgggggag

SEQ ID NO: 316051 - DNA, 15 bp, Homo sapiens
ctagcaggcggggga

SEQ ID NO: 316052 - DNA, 15 bp, Homo sapiens
cctagcaggcggggg

SEQ ID NO: 316053 - DNA, 15 bp, Homo sapiens
tcctagcaggcgggg

SEQ ID NO: 316054 - DNA, 15 bp, Homo sapiens
gtcctagcaggcggg

SEQ ID NO: 316055 - DNA, 15 bp, Homo sapiens
cgtcctagcaggcgg

SEQ ID NO: 316056 - DNA, 15 bp, Homo sapiens
tcgtcctagcaggcg

SEQ ID NO: 316057 - DNA, 15 bp, Homo sapiens
ctcgtcctagcaggc

SEQ ID NO: 316058 - DNA, 15 bp, Homo sapiens
tctcgtcctagcagg

SEQ ID NO: 316059 - DNA, 15 bp, Homo sapiens
ctctcgtcctagcag

SEQ ID NO: 316060 - DNA, 15 bp, Homo sapiens
gctctcgtcctagca

SEQ ID NO: 316061 - DNA, 15 bp, Homo sapiens
cgctctcgtcctagc

SEQ ID NO: 316062 - DNA, 15 bp, Homo sapiens
ccgctctcgtcctag

SEQ ID NO: 316063 - DNA, 15 bp, Homo sapiens
cccgctctcgtccta

SEQ ID NO: 316064 - DNA, 15 bp, Homo sapiens
ccccgctctcgtcct

SEQ ID NO: 316065 - DNA, 15 bp, Homo sapiens
gccccgctctcgtcc

SEQ ID NO: 316066 - DNA, 15 bp, Homo sapiens
agccccgctctcgtc

SEQ ID NO: 316067 - DNA, 15 bp, Homo sapiens
aagccccgctctcgt

SEQ ID NO: 316068 - DNA, 15 bp, Homo sapiens
caagccccgctctcg

SEQ ID NO: 316069 - DNA, 15 bp, Homo sapiens
ccaagccccgctctc

SEQ ID NO: 316070 - DNA, 15 bp, Homo sapiens
tccaagccccgctct

SEQ ID NO: 316071 - DNA, 15 bp, Homo sapiens
atccaagccccgctc

SEQ ID NO: 316072 - DNA, 15 bp, Homo sapiens
tatccaagccccgct

SEQ ID NO: 316073 - DNA, 15 bp, Homo sapiens
gtatccaagccccgc

SEQ ID NO: 316074 - DNA, 15 bp, Homo sapiens
agtatccaagccccg

SEQ ID NO: 316075 - DNA, 15 bp, Homo sapiens
cagtatccaagcccc

SEQ ID NO: 316076 - DNA, 15 bp, Homo sapiens
gcagtatccaagccc

SEQ ID NO: 316077 - DNA, 15 bp, Homo sapiens
ggcagtatccaagcc

SEQ ID NO: 316078 - DNA, 15 bp, Homo sapiens
gggcagtatccaagc

SEQ ID NO: 316079 - DNA, 15 bp, Homo sapiens
agggcagtatccaag

SEQ ID NO: 316080 - DNA, 15 bp, Homo sapiens
aagggcagtatccaa

SEQ ID NO: 316081 - DNA, 15 bp, Homo sapiens
aaagggcagtatcca

SEQ ID NO: 316082 - DNA, 15 bp, Homo sapiens
caaagggcagtatcc

SEQ ID NO: 316083 - DNA, 15 bp, Homo sapiens
ccaaagggcagtatc

SEQ ID NO: 316084 - DNA, 15 bp, Homo sapiens
tccaaagggcagtat

SEQ ID NO: 316085 - DNA, 15 bp, Homo sapiens
gtccaaagggcagta

SEQ ID NO: 316086 - DNA, 15 bp, Homo sapiens
tgtccaaagggcagt

SEQ ID NO: 316087 - DNA, 15 bp, Homo sapiens
ctgtccaaagggcag

SEQ ID NO: 316088 - DNA, 15 bp, Homo sapiens
cctgtccaaagggca

SEQ ID NO: 316089 - DNA, 15 bp, Homo sapiens
tcctgtccaaagggc

SEQ ID NO: 316090 - DNA, 15 bp, Homo sapiens
atcctgtccaaaggg

SEQ ID NO: 316091 - DNA, 15 bp, Homo sapiens
catcctgtccaaagg

SEQ ID NO: 316092 - DNA, 15 bp, Homo sapiens
ccatcctgtccaaag

SEQ ID NO: 316093 - DNA, 15 bp, Homo sapiens
gccatcctgtccaaa

SEQ ID NO: 316094 - DNA, 15 bp, Homo sapiens
tgccatcctgtccaa

SEQ ID NO: 316095 - DNA, 15 bp, Homo sapiens
atgccatcctgtcca

SEQ ID NO: 316096 - DNA, 15 bp, Homo sapiens
gatgccatcctgtcc

SEQ ID NO: 316097 - DNA, 15 bp, Homo sapiens
tgatgccatcctgtc

SEQ ID NO: 316098 - DNA, 15 bp, Homo sapiens
atgatgccatcctgt

SEQ ID NO: 316099 - DNA, 15 bp, Homo sapiens
aatgatgccatcctg

SEQ ID NO: 316100 - DNA, 15 bp, Homo sapiens
caatgatgccatcct

SEQ ID NO: 316101 - DNA, 15 bp, Homo sapiens
acaatgatgccatcc

SEQ ID NO: 316102 - DNA, 15 bp, Homo sapiens
gacaatgatgccatc

SEQ ID NO: 316103 - DNA, 15 bp, Homo sapiens
agacaatgatgccat

SEQ ID NO: 316104 - DNA, 15 bp, Homo sapiens
cagacaatgatgcca

SEQ ID NO: 316105 - DNA, 15 bp, Homo sapiens
acagacaatgatgcc

SEQ ID NO: 316106 - DNA, 15 bp, Homo sapiens
cacagacaatgatgc

SEQ ID NO: 316107 - DNA, 15 bp, Homo sapiens
ccacagacaatgatg

SEQ ID NO: 316108 - DNA, 15 bp, Homo sapiens
gccacagacaatgat

SEQ ID NO: 316109 - DNA, 15 bp, Homo sapiens
agccacagacaatga

SEQ ID NO: 316110 - DNA, 15 bp, Homo sapiens
cagccacagacaatg

SEQ ID NO: 316111 - DNA, 15 bp, Homo sapiens
gcagccacagacaat

SEQ ID NO: 316112 - DNA, 15 bp, Homo sapiens
tgcagccacagacaa

SEQ ID NO: 316113 - DNA, 15 bp, Homo sapiens
ctgcagccacagaca

SEQ ID NO: 316114 - DNA, 15 bp, Homo sapiens
gctgcagccacagac

SEQ ID NO: 316115 - DNA, 15 bp, Homo sapiens
ggctgcagccacaga

SEQ ID NO: 316116 - DNA, 15 bp, Homo sapiens
tggctgcagccacag

SEQ ID NO: 316117 - DNA, 15 bp, Homo sapiens
ctggctgcagccaca

SEQ ID NO: 316118 - DNA, 15 bp, Homo sapiens
gctggctgcagccac

SEQ ID NO: 316119 - DNA, 15 bp, Homo sapiens
ggctggctgcagcca

SEQ ID NO: 316120 - DNA, 15 bp, Homo sapiens
tggctggctgcagcc

SEQ ID NO: 316121 - DNA, 15 bp, Homo sapiens
ctggctggctgcagc

SEQ ID NO: 316122 - DNA, 15 bp, Homo sapiens
gctggctggctgcag

SEQ ID NO: 316123 - DNA, 15 bp, Homo sapiens
cgctggctggctgca

SEQ ID NO: 316124 - DNA, 15 bp, Homo sapiens
ccgctggctggctgc

SEQ ID NO: 316125 - DNA, 15 bp, Homo sapiens
accgctggctggctg

SEQ ID NO: 316126 - DNA, 15 bp, Homo sapiens
gaccgctggctggct

SEQ ID NO: 316127 - DNA, 15 bp, Homo sapiens
cgaccgctggctggc

SEQ ID NO: 316128 - DNA, 15 bp, Homo sapiens
gcgaccgctggctgg

SEQ ID NO: 316129 - DNA, 15 bp, Homo sapiens
ggcgaccgctggctg

SEQ ID NO: 316130 - DNA, 15 bp, Homo sapiens
aggcgaccgctggct

SEQ ID NO: 316131 - DNA, 15 bp, Homo sapiens
caggcgaccgctggc

SEQ ID NO: 316132 - DNA, 15 bp, Homo sapiens
gcaggcgaccgctgg

SEQ ID NO: 316133 - DNA, 15 bp, Homo sapiens
agcaggcgaccgctg

SEQ ID NO: 316134 - DNA, 15 bp, Homo sapiens
gagcaggcgaccgct

SEQ ID NO: 316135 - DNA, 15 bp, Homo sapiens
tgagcaggcgaccgc

SEQ ID NO: 316136 - DNA, 15 bp, Homo sapiens
ctgagcaggcgaccg

SEQ ID NO: 316137 - DNA, 15 bp, Homo sapiens
gctgagcaggcgacc

SEQ ID NO: 316138 - DNA, 15 bp, Homo sapiens
ggctgagcaggcgac

SEQ ID NO: 316139 - DNA, 15 bp, Homo sapiens
gggctgagcaggcga

SEQ ID NO: 316140 - DNA, 15 bp, Homo sapiens
tgggctgagcaggcg

SEQ ID NO: 316141 - DNA, 15 bp, Homo sapiens
atgggctgagcaggc

SEQ ID NO: 316142 - DNA, 15 bp, Homo sapiens
catgggctgagcagg

SEQ ID NO: 316143 - DNA, 15 bp, Homo sapiens
tcatgggctgagcag

SEQ ID NO: 316144 - DNA, 15 bp, Homo sapiens
ctcatgggctgagca

SEQ ID NO: 316145 - DNA, 15 bp, Homo sapiens
gctcatgggctgagc

SEQ ID NO: 316146 - DNA, 15 bp, Homo sapiens
tgctcatgggctgag

SEQ ID NO: 316147 - DNA, 15 bp, Homo sapiens
ttgctcatgggctga

SEQ ID NO: 316148 - DNA, 15 bp, Homo sapiens
gttgctcatgggctg

SEQ ID NO: 316149 - DNA, 15 bp, Homo sapiens
ggttgctcatgggct

SEQ ID NO: 316150 - DNA, 15 bp, Homo sapiens
tggttgctcatgggc

SEQ ID NO: 316151 - DNA, 15 bp, Homo sapiens
gtggttgctcatggg

SEQ ID NO: 316152 - DNA, 15 bp, Homo sapiens
agtggttgctcatgg

SEQ ID NO: 316153 - DNA, 15 bp, Homo sapiens
cagtggttgctcatg

SEQ ID NO: 316154 - DNA, 15 bp, Homo sapiens
acagtggttgctcat

SEQ ID NO: 316155 - DNA, 15 bp, Homo sapiens
cacagtggttgctca

SEQ ID NO: 316156 - DNA, 15 bp, Homo sapiens
ccacagtggttgctc

SEQ ID NO: 316157 - DNA, 15 bp, Homo sapiens
tccacagtggttgct

SEQ ID NO: 316158 - DNA, 15 bp, Homo sapiens
gtccacagtggttgc

SEQ ID NO: 316159 - DNA, 15 bp, Homo sapiens
tgtccacagtggttg

SEQ ID NO: 316160 - DNA, 15 bp, Homo sapiens
ctgtccacagtggtt

SEQ ID NO: 316161 - DNA, 15 bp, Homo sapiens
cctgtccacagtggt

SEQ ID NO: 316162 - DNA, 15 bp, Homo sapiens
ccctgtccacagtgg

SEQ ID NO: 316163 - DNA, 15 bp, Homo sapiens
accctgtccacagtg

SEQ ID NO: 316164 - DNA, 15 bp, Homo sapiens
taccctgtccacagt

SEQ ID NO: 316165 - DNA, 15 bp, Homo sapiens
ataccctgtccacag

SEQ ID NO: 316166 - DNA, 15 bp, Homo sapiens
aataccctgtccaca

SEQ ID NO: 316167 - DNA, 15 bp, Homo sapiens
caataccctgtccac

SEQ ID NO: 316168 - DNA, 15 bp, Homo sapiens
gcaataccctgtcca

SEQ ID NO: 316169 - DNA, 15 bp, Homo sapiens
cgcaataccctgtcc

SEQ ID NO: 316170 - DNA, 15 bp, Homo sapiens
acgcaataccctgtc

SEQ ID NO: 316171 - DNA, 15 bp, Homo sapiens
cacgcaataccctgt

SEQ ID NO: 316172 - DNA, 15 bp, Homo sapiens
acacgcaataccctg

SEQ ID NO: 316173 - DNA, 15 bp, Homo sapiens
cacacgcaataccct

SEQ ID NO: 316174 - DNA, 15 bp, Homo sapiens
acacacgcaataccc

SEQ ID NO: 316175 - DNA, 15 bp, Homo sapiens
cacacacgcaatacc

SEQ ID NO: 316176 - DNA, 15 bp, Homo sapiens
gcacacacgcaatac

SEQ ID NO: 316177 - DNA, 15 bp, Homo sapiens
agcacacacgcaata

SEQ ID NO: 316178 - DNA, 15 bp, Homo sapiens
cagcacacacgcaat

SEQ ID NO: 316179 - DNA, 15 bp, Homo sapiens
tcagcacacacgcaa

SEQ ID NO: 316180 - DNA, 15 bp, Homo sapiens
ctcagcacacacgca

SEQ ID NO: 316181 - DNA, 15 bp, Homo sapiens
cctcagcacacacgc

SEQ ID NO: 316182 - DNA, 15 bp, Homo sapiens
ccctcagcacacacg

SEQ ID NO: 316183 - DNA, 15 bp, Homo sapiens
cccctcagcacacac

SEQ ID NO: 316184 - DNA, 15 bp, Homo sapiens
gcccctcagcacaca

SEQ ID NO: 316185 - DNA, 15 bp, Homo sapiens
cgcccctcagcacac

SEQ ID NO: 316186 - DNA, 15 bp, Homo sapiens
acgcccctcagcaca

SEQ ID NO: 316187 - DNA, 15 bp, Homo sapiens
gacgcccctcagcac

SEQ ID NO: 316188 - DNA, 15 bp, Homo sapiens
ggacgcccctcagca

SEQ ID NO: 316189 - DNA, 15 bp, Homo sapiens
tggacgcccctcagc

SEQ ID NO: 316190 - DNA, 15 bp, Homo sapiens
atggacgcccctcag

SEQ ID NO: 316191 - DNA, 15 bp, Homo sapiens
catggacgcccctca

SEQ ID NO: 316192 - DNA, 15 bp, Homo sapiens
gcatggacgcccctc

SEQ ID NO: 316193 - DNA, 15 bp, Homo sapiens
tgcatggacgcccct

SEQ ID NO: 316194 - DNA, 15 bp, Homo sapiens
ctgcatggacgcccc

SEQ ID NO: 316195 - DNA, 15 bp, Homo sapiens
tctgcatggacgccc

SEQ ID NO: 316196 - DNA, 15 bp, Homo sapiens
gtctgcatggacgcc

SEQ ID NO: 316197 - DNA, 15 bp, Homo sapiens
ggtctgcatggacgc

SEQ ID NO: 316198 - DNA, 15 bp, Homo sapiens
gggtctgcatggacg

SEQ ID NO: 316199 - DNA, 15 bp, Homo sapiens
ggggtctgcatggac

SEQ ID NO: 316200 - DNA, 15 bp, Homo sapiens
gggggtctgcatgga

SEQ ID NO: 316201 - DNA, 15 bp, Homo sapiens
tgggggtctgcatgg

SEQ ID NO: 316202 - DNA, 15 bp, Homo sapiens
gtgggggtctgcatg

SEQ ID NO: 316203 - DNA, 15 bp, Homo sapiens
cgtgggggtctgcat

SEQ ID NO: 316204 - DNA, 15 bp, Homo sapiens
gcgtgggggtctgca

SEQ ID NO: 316205 - DNA, 15 bp, Homo sapiens
agcgtgggggtctgc

SEQ ID NO: 316206 - DNA, 15 bp, Homo sapiens
aagcgtgggggtctg

SEQ ID NO: 316207 - DNA, 15 bp, Homo sapiens
caagcgtgggggtct

SEQ ID NO: 316208 - DNA, 15 bp, Homo sapiens
gcaagcgtgggggtc

SEQ ID NO: 316209 - DNA, 15 bp, Homo sapiens
ggcaagcgtgggggt

SEQ ID NO: 316210 - DNA, 15 bp, Homo sapiens
gggcaagcgtggggg

SEQ ID NO: 316211 - DNA, 15 bp, Homo sapiens
agggcaagcgtgggg

SEQ ID NO: 316212 - DNA, 15 bp, Homo sapiens
gagggcaagcgtggg

SEQ ID NO: 316213 - DNA, 15 bp, Homo sapiens
agagggcaagcgtgg

SEQ ID NO: 316214 - DNA, 15 bp, Homo sapiens
gagagggcaagcgtg

SEQ ID NO: 316215 - DNA, 15 bp, Homo sapiens
tgagagggcaagcgt

SEQ ID NO: 316216 - DNA, 15 bp, Homo sapiens
gtgagagggcaagcg

SEQ ID NO: 316217 - DNA, 15 bp, Homo sapiens
agtgagagggcaagc

SEQ ID NO: 316218 - DNA, 15 bp, Homo sapiens
cagtgagagggcaag

SEQ ID NO: 316219 - DNA, 15 bp, Homo sapiens
gcagtgagagggcaa

SEQ ID NO: 316220 - DNA, 15 bp, Homo sapiens
ggcagtgagagggca

SEQ ID NO: 316221 - DNA, 15 bp, Homo sapiens
gggcagtgagagggc

SEQ ID NO: 316222 - DNA, 15 bp, Homo sapiens
agggcagtgagaggg

SEQ ID NO: 316223 - DNA, 15 bp, Homo sapiens
aagggcagtgagagg

SEQ ID NO: 316224 - DNA, 15 bp, Homo sapiens
caagggcagtgagag

SEQ ID NO: 316225 - DNA, 15 bp, Homo sapiens
acaagggcagtgaga

SEQ ID NO: 316226 - DNA, 15 bp, Homo sapiens
tacaagggcagtgag

SEQ ID NO: 316227 - DNA, 15 bp, Homo sapiens
ctacaagggcagtga

SEQ ID NO: 316228 - DNA, 15 bp, Homo sapiens
cctacaagggcagtg

SEQ ID NO: 316229 - DNA, 15 bp, Homo sapiens
ccctacaagggcagt

SEQ ID NO: 316230 - DNA, 15 bp, Homo sapiens
accctacaagggcag

SEQ ID NO: 316231 - DNA, 15 bp, Homo sapiens
aaccctacaagggca

SEQ ID NO: 316232 - DNA, 15 bp, Homo sapiens
aaaccctacaagggc

SEQ ID NO: 316233 - DNA, 15 bp, Homo sapiens
aaaaccctacaaggg

SEQ ID NO: 316234 - DNA, 15 bp, Homo sapiens
gaaaaccctacaagg

SEQ ID NO: 316235 - DNA, 15 bp, Homo sapiens
tgaaaaccctacaag

SEQ ID NO: 316236 - DNA, 15 bp, Homo sapiens
ttgaaaaccctacaa

SEQ ID NO: 316237 - DNA, 15 bp, Homo sapiens
attgaaaaccctaca

SEQ ID NO: 316238 - DNA, 15 bp, Homo sapiens
gattgaaaaccctac

SEQ ID NO: 316239 - DNA, 15 bp, Homo sapiens
tgattgaaaacccta

SEQ ID NO: 316240 - DNA, 15 bp, Homo sapiens
atgattgaaaaccct

SEQ ID NO: 316241 - DNA, 15 bp, Homo sapiens
gatgattgaaaaccc

SEQ ID NO: 316242 - DNA, 15 bp, Homo sapiens
agatgattgaaaacc

SEQ ID NO: 316243 - DNA, 15 bp, Homo sapiens
gagatgattgaaaac

SEQ ID NO: 316244 - DNA, 15 bp, Homo sapiens
agagatgattgaaaa

SEQ ID NO: 316245 - DNA, 15 bp, Homo sapiens
gagagatgattgaaa

SEQ ID NO: 316246 - DNA, 15 bp, Homo sapiens
ggagagatgattgaa

SEQ ID NO: 316247 - DNA, 15 bp, Homo sapiens
aggagagatgattga

SEQ ID NO: 316248 - DNA, 15 bp, Homo sapiens
gaggagagatgattg

SEQ ID NO: 316249 - DNA, 15 bp, Homo sapiens
agaggagagatgatt

SEQ ID NO: 316250 - DNA, 15 bp, Homo sapiens
aagaggagagatgat

SEQ ID NO: 316251 - DNA, 15 bp, Homo sapiens
gaagaggagagatga

SEQ ID NO: 316252 - DNA, 15 bp, Homo sapiens
ggaagaggagagatg

SEQ ID NO: 316253 - DNA, 15 bp, Homo sapiens
gggaagaggagagat

SEQ ID NO: 316254 - DNA, 15 bp, Homo sapiens
agggaagaggagaga

SEQ ID NO: 316255 - DNA, 15 bp, Homo sapiens
aagggaagaggagag

SEQ ID NO: 316256 - DNA, 15 bp, Homo sapiens
taagggaagaggaga

SEQ ID NO: 316257 - DNA, 15 bp, Homo sapiens
ataagggaagaggag

SEQ ID NO: 316258 - DNA, 15 bp, Homo sapiens
gataagggaagagga

SEQ ID NO: 316259 - DNA, 15 bp, Homo sapiens
ggataagggaagagg

SEQ ID NO: 316260 - DNA, 15 bp, Homo sapiens
tggataagggaagag

SEQ ID NO: 316261 - DNA, 15 bp, Homo sapiens
ctggataagggaaga

SEQ ID NO: 316262 - DNA, 15 bp, Homo sapiens
tctggataagggaag

SEQ ID NO: 316263 - DNA, 15 bp, Homo sapiens
atctggataagggaa

SEQ ID NO: 316264 - DNA, 15 bp, Homo sapiens
catctggataaggga

SEQ ID NO: 316265 - DNA, 15 bp, Homo sapiens
ccatctggataaggg

SEQ ID NO: 316266 - DNA, 15 bp, Homo sapiens
gccatctggataagg

SEQ ID NO: 316267 - DNA, 15 bp, Homo sapiens
agccatctggataag

SEQ ID NO: 316268 - DNA, 15 bp, Homo sapiens
aagccatctggataa

SEQ ID NO: 316269 - DNA, 15 bp, Homo sapiens
caagccatctggata

SEQ ID NO: 316270 - DNA, 15 bp, Homo sapiens
tcaagccatctggat

SEQ ID NO: 316271 - DNA, 15 bp, Homo sapiens
ttcaagccatctgga

SEQ ID NO: 316272 - DNA, 15 bp, Homo sapiens
cttcaagccatctgg

SEQ ID NO: 316273 - DNA, 15 bp, Homo sapiens
acttcaagccatctg

SEQ ID NO: 316274 - DNA, 15 bp, Homo sapiens
cacttcaagccatct

SEQ ID NO: 316275 - DNA, 15 bp, Homo sapiens
ccacttcaagccatc

SEQ ID NO: 316276 - DNA, 15 bp, Homo sapiens
tccacttcaagccat

SEQ ID NO: 316277 - DNA, 15 bp, Homo sapiens
ctccacttcaagcca

SEQ ID NO: 316278 - DNA, 15 bp, Homo sapiens
cctccacttcaagcc

SEQ ID NO: 316279 - DNA, 15 bp, Homo sapiens
tcctccacttcaagc

SEQ ID NO: 316280 - DNA, 15 bp, Homo sapiens
atcctccacttcaag

SEQ ID NO: 316281 - DNA, 15 bp, Homo sapiens
aatcctccacttcaa

SEQ ID NO: 316282 - DNA, 15 bp, Homo sapiens
gaatcctccacttca

SEQ ID NO: 316283 - DNA, 15 bp, Homo sapiens
tgaatcctccacttc

SEQ ID NO: 316284 - DNA, 15 bp, Homo sapiens
ctgaatcctccactt

SEQ ID NO: 316285 - DNA, 15 bp, Homo sapiens
tctgaatcctccact

SEQ ID NO: 316286 - DNA, 15 bp, Homo sapiens
gtctgaatcctccac

SEQ ID NO: 316287 - DNA, 15 bp, Homo sapiens
agtctgaatcctcca

SEQ ID NO: 316288 - DNA, 15 bp, Homo sapiens
aagtctgaatcctcc

SEQ ID NO: 316289 - DNA, 15 bp, Homo sapiens
caagtctgaatcctc

SEQ ID NO: 316290 - DNA, 15 bp, Homo sapiens
gcaagtctgaatcct

SEQ ID NO: 316291 - DNA, 15 bp, Homo sapiens
ggcaagtctgaatcc

SEQ ID NO: 316292 - DNA, 15 bp, Homo sapiens
cggcaagtctgaatc

SEQ ID NO: 316293 - DNA, 15 bp, Homo sapiens
acggcaagtctgaat

SEQ ID NO: 316294 - DNA, 15 bp, Homo sapiens
aacggcaagtctgaa

SEQ ID NO: 316295 - DNA, 15 bp, Homo sapiens
taacggcaagtctga

SEQ ID NO: 316296 - DNA, 15 bp, Homo sapiens
ttaacggcaagtctg

SEQ ID NO: 316297 - DNA, 15 bp, Homo sapiens
attaacggcaagtct

SEQ ID NO: 316298 - DNA, 15 bp, Homo sapiens
tattaacggcaagtc

SEQ ID NO: 316299 - DNA, 15 bp, Homo sapiens
gtattaacggcaagt

SEQ ID NO: 316300 - DNA, 15 bp, Homo sapiens
agtattaacggcaag

SEQ ID NO: 316301 - DNA, 15 bp, Homo sapiens
gagtattaacggcaa

SEQ ID NO: 316302 - DNA, 15 bp, Homo sapiens
agagtattaacggca

SEQ ID NO: 316303 - DNA, 15 bp, Homo sapiens
cagagtattaacggc

SEQ ID NO: 316304 - DNA, 15 bp, Homo sapiens
ccagagtattaacgg

SEQ ID NO: 316305 - DNA, 15 bp, Homo sapiens
cccagagtattaacg

SEQ ID NO: 316306 - DNA, 15 bp, Homo sapiens
acccagagtattaac

SEQ ID NO: 316307 - DNA, 15 bp, Homo sapiens
gacccagagtattaa

SEQ ID NO: 316308 - DNA, 15 bp, Homo sapiens
ggacccagagtatta

SEQ ID NO: 316309 - DNA, 15 bp, Homo sapiens
gggacccagagtatt

SEQ ID NO: 316310 - DNA, 15 bp, Homo sapiens
agggacccagagtat

SEQ ID NO: 316311 - DNA, 15 bp, Homo sapiens
cagggacccagagta

SEQ ID NO: 316312 - DNA, 15 bp, Homo sapiens
acagggacccagagt

SEQ ID NO: 316313 - DNA, 15 bp, Homo sapiens
cacagggacccagag

SEQ ID NO: 316314 - DNA, 15 bp, Homo sapiens
acacagggacccaga

SEQ ID NO: 316315 - DNA, 15 bp, Homo sapiens
gacacagggacccag

SEQ ID NO: 316316 - DNA, 15 bp, Homo sapiens
agacacagggaccca

SEQ ID NO: 316317 - DNA, 15 bp, Homo sapiens
tagacacagggaccc

SEQ ID NO: 316318 - DNA, 15 bp, Homo sapiens
ctagacacagggacc

SEQ ID NO: 316319 - DNA, 15 bp, Homo sapiens
gctagacacagggac

SEQ ID NO: 316320 - DNA, 15 bp, Homo sapiens
agctagacacaggga

SEQ ID NO: 316321 - DNA, 15 bp, Homo sapiens
gagctagacacaggg

SEQ ID NO: 316322 - DNA, 15 bp, Homo sapiens
cgagctagacacagg

SEQ ID NO: 316323 - DNA, 15 bp, Homo sapiens
ccgagctagacacag

SEQ ID NO: 316324 - DNA, 15 bp, Homo sapiens
cccgagctagacaca

SEQ ID NO: 316325 - DNA, 15 bp, Homo sapiens
ccccgagctagacac

SEQ ID NO: 316326 - DNA, 15 bp, Homo sapiens
gccccgagctagaca

SEQ ID NO: 316327 - DNA, 15 bp, Homo sapiens
ggccccgagctagac

SEQ ID NO: 316328 - DNA, 15 bp, Homo sapiens
tggccccgagctaga

SEQ ID NO: 316329 - DNA, 15 bp, Homo sapiens
gtggccccgagctag

SEQ ID NO: 316330 - DNA, 15 bp, Homo sapiens
ggtggccccgagcta

SEQ ID NO: 316331 - DNA, 15 bp, Homo sapiens
aggtggccccgagct

SEQ ID NO: 316332 - DNA, 15 bp, Homo sapiens
aaggtggccccgagc

SEQ ID NO: 316333 - DNA, 15 bp, Homo sapiens
aaaggtggccccgag

SEQ ID NO: 316334 - DNA, 15 bp, Homo sapiens
caaaggtggccccga

SEQ ID NO: 316335 - DNA, 15 bp, Homo sapiens
ccaaaggtggccccg

SEQ ID NO: 316336 - DNA, 15 bp, Homo sapiens
tccaaaggtggcccc

SEQ ID NO: 316337 - DNA, 15 bp, Homo sapiens
gtccaaaggtggccc

SEQ ID NO: 316338 - DNA, 15 bp, Homo sapiens
ggtccaaaggtggcc

SEQ ID NO: 316339 - DNA, 15 bp, Homo sapiens
gggtccaaaggtggc

SEQ ID NO: 316340 - DNA, 15 bp, Homo sapiens
tgggtccaaaggtgg

SEQ ID NO: 316341 - DNA, 15 bp, Homo sapiens
atgggtccaaaggtg

SEQ ID NO: 316342 - DNA, 15 bp, Homo sapiens
catgggtccaaaggt

SEQ ID NO: 316343 - DNA, 15 bp, Homo sapiens
acatgggtccaaagg

SEQ ID NO: 316344 - DNA, 15 bp, Homo sapiens
gacatgggtccaaag

SEQ ID NO: 316345 - DNA, 15 bp, Homo sapiens
ggacatgggtccaaa

SEQ ID NO: 316346 - DNA, 15 bp, Homo sapiens
gggacatgggtccaa

SEQ ID NO: 316347 - DNA, 15 bp, Homo sapiens
agggacatgggtcca

SEQ ID NO: 316348 - DNA, 15 bp, Homo sapiens
aagggacatgggtcc

SEQ ID NO: 316349 - DNA, 15 bp, Homo sapiens
gaagggacatgggtc

SEQ ID NO: 316350 - DNA, 15 bp, Homo sapiens
ggaagggacatgggt

SEQ ID NO: 316351 - DNA, 15 bp, Homo sapiens
gggaagggacatggg

SEQ ID NO: 316352 - DNA, 15 bp, Homo sapiens
agggaagggacatgg

SEQ ID NO: 316353 - DNA, 15 bp, Homo sapiens
cagggaagggacatg

SEQ ID NO: 316354 - DNA, 15 bp, Homo sapiens
gcagggaagggacat

SEQ ID NO: 316355 - DNA, 15 bp, Homo sapiens
ggcagggaagggaca

SEQ ID NO: 316356 - DNA, 15 bp, Homo sapiens
tggcagggaagggac

SEQ ID NO: 316357 - DNA, 15 bp, Homo sapiens
ctggcagggaaggga

SEQ ID NO: 316358 - DNA, 15 bp, Homo sapiens
cctggcagggaaggg

SEQ ID NO: 316359 - DNA, 15 bp, Homo sapiens
gcctggcagggaagg

SEQ ID NO: 316360 - DNA, 15 bp, Homo sapiens
agcctggcagggaag

SEQ ID NO: 316361 - DNA, 15 bp, Homo sapiens
gagcctggcagggaa

SEQ ID NO: 316362 - DNA, 15 bp, Homo sapiens
ggagcctggcaggga

SEQ ID NO: 316363 - DNA, 15 bp, Homo sapiens
gggagcctggcaggg

SEQ ID NO: 316364 - DNA, 15 bp, Homo sapiens
agggagcctggcagg

SEQ ID NO: 316365 - DNA, 15 bp, Homo sapiens
gagggagcctggcag

SEQ ID NO: 316366 - DNA, 15 bp, Homo sapiens
tgagggagcctggca

SEQ ID NO: 316367 - DNA, 15 bp, Homo sapiens
gtgagggagcctggc

SEQ ID NO: 316368 - DNA, 15 bp, Homo sapiens
ggtgagggagcctgg

SEQ ID NO: 316369 - DNA, 15 bp, Homo sapiens
aggtgagggagcctg

SEQ ID NO: 316370 - DNA, 15 bp, Homo sapiens
gaggtgagggagcct

SEQ ID NO: 316371 - DNA, 15 bp, Homo sapiens
tgaggtgagggagcc

SEQ ID NO: 316372 - DNA, 15 bp, Homo sapiens
gtgaggtgagggagc

SEQ ID NO: 316373 - DNA, 15 bp, Homo sapiens
ggtgaggtgagggag

SEQ ID NO: 316374 - DNA, 15 bp, Homo sapiens
aggtgaggtgaggga

SEQ ID NO: 316375 - DNA, 15 bp, Homo sapiens
gaggtgaggtgaggg

SEQ ID NO: 316376 - DNA, 15 bp, Homo sapiens
tgaggtgaggtgagg

SEQ ID NO: 316377 - DNA, 15 bp, Homo sapiens
ctgaggtgaggtgag

SEQ ID NO: 316378 - DNA, 15 bp, Homo sapiens
gctgaggtgaggtga

SEQ ID NO: 316379 - DNA, 15 bp, Homo sapiens
ggctgaggtgaggtg

SEQ ID NO: 316380 - DNA, 15 bp, Homo sapiens
aggctgaggtgaggt

SEQ ID NO: 316381 - DNA, 15 bp, Homo sapiens
taggctgaggtgagg

SEQ ID NO: 316382 - DNA, 15 bp, Homo sapiens
gtaggctgaggtgag

SEQ ID NO: 316383 - DNA, 15 bp, Homo sapiens
ggtaggctgaggtga

SEQ ID NO: 316384 - DNA, 15 bp, Homo sapiens
gggtaggctgaggtg

SEQ ID NO: 316385 - DNA, 15 bp, Homo sapiens
tgggtaggctgaggt

SEQ ID NO: 316386 - DNA, 15 bp, Homo sapiens
gtgggtaggctgagg

SEQ ID NO: 316387 - DNA, 15 bp, Homo sapiens
tgtgggtaggctgag

SEQ ID NO: 316388 - DNA, 15 bp, Homo sapiens
atgtgggtaggctga

SEQ ID NO: 316389 - DNA, 15 bp, Homo sapiens
aatgtgggtaggctg

SEQ ID NO: 316390 - DNA, 15 bp, Homo sapiens
caatgtgggtaggct

SEQ ID NO: 316391 - DNA, 15 bp, Homo sapiens
acaatgtgggtaggc

SEQ ID NO: 316392 - DNA, 15 bp, Homo sapiens
cacaatgtgggtagg

SEQ ID NO: 316393 - DNA, 15 bp, Homo sapiens
tcacaatgtgggtag

SEQ ID NO: 316394 - DNA, 15 bp, Homo sapiens
gtcacaatgtgggta

SEQ ID NO: 316395 - DNA, 15 bp, Homo sapiens
tgtcacaatgtgggt

SEQ ID NO: 316396 - DNA, 15 bp, Homo sapiens
ttgtcacaatgtggg

SEQ ID NO: 316397 - DNA, 15 bp, Homo sapiens
attgtcacaatgtgg

SEQ ID NO: 316398 - DNA, 15 bp, Homo sapiens
gattgtcacaatgtg

SEQ ID NO: 316399 - DNA, 15 bp, Homo sapiens
tgattgtcacaatgt

SEQ ID NO: 316400 - DNA, 15 bp, Homo sapiens
atgattgtcacaatg

SEQ ID NO: 316401 - DNA, 15 bp, Homo sapiens
gatgattgtcacaat

SEQ ID NO: 316402 - DNA, 15 bp, Homo sapiens
agatgattgtcacaa

SEQ ID NO: 316403 - DNA, 15 bp, Homo sapiens
tagatgattgtcaca

SEQ ID NO: 316404 - DNA, 15 bp, Homo sapiens
gtagatgattgtcac

SEQ ID NO: 316405 - DNA, 15 bp, Homo sapiens
ggtagatgattgtca

SEQ ID NO: 316406 - DNA, 15 bp, Homo sapiens
tggtagatgattgtc

SEQ ID NO: 316407 - DNA, 15 bp, Homo sapiens
gtggtagatgattgt

SEQ ID NO: 316408 - DNA, 15 bp, Homo sapiens
ggtggtagatgattg

SEQ ID NO: 316409 - DNA, 15 bp, Homo sapiens
aggtggtagatgatt

SEQ ID NO: 316410 - DNA, 15 bp, Homo sapiens
caggtggtagatgat

SEQ ID NO: 316411 - DNA, 15 bp, Homo sapiens
tcaggtggtagatga

SEQ ID NO: 316412 - DNA, 15 bp, Homo sapiens
atcaggtggtagatg

SEQ ID NO: 316413 - DNA, 15 bp, Homo sapiens
gatcaggtggtagat

SEQ ID NO: 316414 - DNA, 15 bp, Homo sapiens
agatcaggtggtaga

SEQ ID NO: 316415 - DNA, 15 bp, Homo sapiens
cagatcaggtggtag

SEQ ID NO: 316416 - DNA, 15 bp, Homo sapiens
ccagatcaggtggta

SEQ ID NO: 316417 - DNA, 15 bp, Homo sapiens
cccagatcaggtggt

SEQ ID NO: 316418 - DNA, 15 bp, Homo sapiens
ccccagatcaggtgg

SEQ ID NO: 316419 - DNA, 15 bp, Homo sapiens
accccagatcaggtg

SEQ ID NO: 316420 - DNA, 15 bp, Homo sapiens
aaccccagatcaggt

SEQ ID NO: 316421 - DNA, 15 bp, Homo sapiens
aaaccccagatcagg

SEQ ID NO: 316422 - DNA, 15 bp, Homo sapiens
caaaccccagatcag

SEQ ID NO: 316423 - DNA, 15 bp, Homo sapiens
ccaaaccccagatca

SEQ ID NO: 316424 - DNA, 15 bp, Homo sapiens
cccaaaccccagatc

SEQ ID NO: 316425 - DNA, 15 bp, Homo sapiens
gcccaaaccccagat

SEQ ID NO: 316426 - DNA, 15 bp, Homo sapiens
agcccaaaccccaga

SEQ ID NO: 316427 - DNA, 15 bp, Homo sapiens
aagcccaaaccccag

SEQ ID NO: 316428 - DNA, 15 bp, Homo sapiens
taagcccaaacccca

SEQ ID NO: 316429 - DNA, 15 bp, Homo sapiens
ctaagcccaaacccc

SEQ ID NO: 316430 - DNA, 15 bp, Homo sapiens
tctaagcccaaaccc

SEQ ID NO: 316431 - DNA, 15 bp, Homo sapiens
atctaagcccaaacc

SEQ ID NO: 316432 - DNA, 15 bp, Homo sapiens
aatctaagcccaaac

SEQ ID NO: 316433 - DNA, 15 bp, Homo sapiens
gaatctaagcccaaa

SEQ ID NO: 316434 - DNA, 15 bp, Homo sapiens
agaatctaagcccaa

SEQ ID NO: 316435 - DNA, 15 bp, Homo sapiens
cagaatctaagccca

SEQ ID NO: 316436 - DNA, 15 bp, Homo sapiens
acagaatctaagccc

SEQ ID NO: 316437 - DNA, 15 bp, Homo sapiens
tacagaatctaagcc

SEQ ID NO: 316438 - DNA, 15 bp, Homo sapiens
ctacagaatctaagc

SEQ ID NO: 316439 - DNA, 15 bp, Homo sapiens
cctacagaatctaag

SEQ ID NO: 316440 - DNA, 15 bp, Homo sapiens
gcctacagaatctaa

SEQ ID NO: 316441 - DNA, 15 bp, Homo sapiens
tgcctacagaatcta

SEQ ID NO: 316442 - DNA, 15 bp, Homo sapiens
gtgcctacagaatct

SEQ ID NO: 316443 - DNA, 15 bp, Homo sapiens
ggtgcctacagaatc

SEQ ID NO: 316444 - DNA, 15 bp, Homo sapiens
tggtgcctacagaat

SEQ ID NO: 316445 - DNA, 15 bp, Homo sapiens
ttggtgcctacagaa

SEQ ID NO: 316446 - DNA, 15 bp, Homo sapiens
cttggtgcctacaga

SEQ ID NO: 316447 - DNA, 15 bp, Homo sapiens
tcttggtgcctacag

SEQ ID NO: 316448 - DNA, 15 bp, Homo sapiens
gtcttggtgcctaca

SEQ ID NO: 316449 - DNA, 15 bp, Homo sapiens
agtcttggtgcctac

SEQ ID NO: 316450 - DNA, 15 bp, Homo sapiens
tagtcttggtgccta

SEQ ID NO: 316451 - DNA, 15 bp, Homo sapiens
ttagtcttggtgcct

SEQ ID NO: 316452 - DNA, 15 bp, Homo sapiens
tttagtcttggtgcc

SEQ ID NO: 316453 - DNA, 15 bp, Homo sapiens
ctttagtcttggtgc

SEQ ID NO: 316454 - DNA, 15 bp, Homo sapiens
actttagtcttggtg

SEQ ID NO: 316455 - DNA, 15 bp, Homo sapiens
gactttagtcttggt

SEQ ID NO: 316456 - DNA, 15 bp, Homo sapiens
cgactttagtcttgg

SEQ ID NO: 316457 - DNA, 15 bp, Homo sapiens
gcgactttagtcttg

SEQ ID NO: 316458 - DNA, 15 bp, Homo sapiens
agcgactttagtctt

SEQ ID NO: 316459 - DNA, 15 bp, Homo sapiens
gagcgactttagtct

SEQ ID NO: 316460 - DNA, 15 bp, Homo sapiens
ggagcgactttagtc

SEQ ID NO: 316461 - DNA, 15 bp, Homo sapiens
aggagcgactttagt

SEQ ID NO: 316462 - DNA, 15 bp, Homo sapiens
aaggagcgactttag

SEQ ID NO: 316463 - DNA, 15 bp, Homo sapiens
gaaggagcgacttta

SEQ ID NO: 316464 - DNA, 15 bp, Homo sapiens
tgaaggagcgacttt

SEQ ID NO: 316465 - DNA, 15 bp, Homo sapiens
ttgaaggagcgactt

SEQ ID NO: 316466 - DNA, 15 bp, Homo sapiens
cttgaaggagcgact

SEQ ID NO: 316467 - DNA, 15 bp, Homo sapiens
acttgaaggagcgac

SEQ ID NO: 316468 - DNA, 15 bp, Homo sapiens
gacttgaaggagcga

SEQ ID NO: 316469 - DNA, 15 bp, Homo sapiens
ggacttgaaggagcg

SEQ ID NO: 316470 - DNA, 15 bp, Homo sapiens
tggacttgaaggagc

SEQ ID NO: 316471 - DNA, 15 bp, Homo sapiens
atggacttgaaggag

SEQ ID NO: 316472 - DNA, 15 bp, Homo sapiens
aatggacttgaagga

SEQ ID NO: 316473 - DNA, 15 bp, Homo sapiens
aaatggacttgaagg

SEQ ID NO: 316474 - DNA, 15 bp, Homo sapiens
caaatggacttgaag

SEQ ID NO: 316475 - DNA, 15 bp, Homo sapiens
tcaaatggacttgaa

SEQ ID NO: 316476 - DNA, 15 bp, Homo sapiens
ttcaaatggacttga

SEQ ID NO: 316477 - DNA, 15 bp, Homo sapiens
attcaaatggacttg

SEQ ID NO: 316478 - DNA, 15 bp, Homo sapiens
aattcaaatggactt

SEQ ID NO: 316479 - DNA, 15 bp, Homo sapiens
caattcaaatggact

SEQ ID NO: 316480 - DNA, 15 bp, Homo sapiens
acaattcaaatggac

SEQ ID NO: 316481 - DNA, 15 bp, Homo sapiens
cacaattcaaatgga

SEQ ID NO: 316482 - DNA, 15 bp, Homo sapiens
tcacaattcaaatgg

SEQ ID NO: 316483 - DNA, 15 bp, Homo sapiens
gtcacaattcaaatg

SEQ ID NO: 316484 - DNA, 15 bp, Homo sapiens
agtcacaattcaaat

SEQ ID NO: 316485 - DNA, 15 bp, Homo sapiens
aagtcacaattcaaa

SEQ ID NO: 316486 - DNA, 15 bp, Homo sapiens
aaagtcacaattcaa

SEQ ID NO: 316487 - DNA, 15 bp, Homo sapiens
taaagtcacaattca

SEQ ID NO: 316488 - DNA, 15 bp, Homo sapiens
ctaaagtcacaattc

SEQ ID NO: 316489 - DNA, 15 bp, Homo sapiens
actaaagtcacaatt

SEQ ID NO: 316490 - DNA, 15 bp, Homo sapiens
aactaaagtcacaat

SEQ ID NO: 316491 - DNA, 15 bp, Homo sapiens
aaactaaagtcacaa

SEQ ID NO: 316492 - DNA, 15 bp, Homo sapiens
gaaactaaagtcaca

SEQ ID NO: 316493 - DNA, 15 bp, Homo sapiens
ggaaactaaagtcac

SEQ ID NO: 316494 - DNA, 15 bp, Homo sapiens
aggaaactaaagtca

SEQ ID NO: 316495 - DNA, 15 bp, Homo sapiens
aaggaaactaaagtc

SEQ ID NO: 316496 - DNA, 15 bp, Homo sapiens
taaggaaactaaagt

SEQ ID NO: 316497 - DNA, 15 bp, Homo sapiens
ttaaggaaactaaag

SEQ ID NO: 316498 - DNA, 15 bp, Homo sapiens
tttaaggaaactaaa

SEQ ID NO: 316499 - DNA, 15 bp, Homo sapiens
atttaaggaaactaa

SEQ ID NO: 316500 - DNA, 15 bp, Homo sapiens
tatttaaggaaacta

SEQ ID NO: 316501 - DNA, 15 bp, Homo sapiens
gtatttaaggaaact

SEQ ID NO: 316502 - DNA, 15 bp, Homo sapiens
agtatttaaggaaac

SEQ ID NO: 316503 - DNA, 15 bp, Homo sapiens
tagtatttaaggaaa

SEQ ID NO: 316504 - DNA, 15 bp, Homo sapiens
atagtatttaaggaa

SEQ ID NO: 316505 - DNA, 15 bp, Homo sapiens
catagtatttaagga

SEQ ID NO: 316506 - DNA, 15 bp, Homo sapiens
gcatagtatttaagg

SEQ ID NO: 316507 - DNA, 15 bp, Homo sapiens
ggcatagtatttaag

SEQ ID NO: 316508 - DNA, 15 bp, Homo sapiens
tggcatagtatttaa

SEQ ID NO: 316509 - DNA, 15 bp, Homo sapiens
ctggcatagtattta

SEQ ID NO: 316510 - DNA, 15 bp, Homo sapiens
cctggcatagtattt

SEQ ID NO: 316511 - DNA, 15 bp, Homo sapiens
tcctggcatagtatt

SEQ ID NO: 316512 - DNA, 15 bp, Homo sapiens
atcctggcatagtat

SEQ ID NO: 316513 - DNA, 15 bp, Homo sapiens
tatcctggcatagta

SEQ ID NO: 316514 - DNA, 15 bp, Homo sapiens
ttatcctggcatagt

SEQ ID NO: 316515 - DNA, 15 bp, Homo sapiens
attatcctggcatag

SEQ ID NO: 316516 - DNA, 15 bp, Homo sapiens
cattatcctggcata

SEQ ID NO: 316517 - DNA, 15 bp, Homo sapiens
ccattatcctggcat

SEQ ID NO: 316518 - DNA, 15 bp, Homo sapiens
gccattatcctggca

SEQ ID NO: 316519 - DNA, 15 bp, Homo sapiens
ggccattatcctggc

SEQ ID NO: 316520 - DNA, 15 bp, Homo sapiens
tggccattatcctgg

SEQ ID NO: 316521 - DNA, 15 bp, Homo sapiens
ctggccattatcctg

SEQ ID NO: 316522 - DNA, 15 bp, Homo sapiens
cctggccattatcct

SEQ ID NO: 316523 - DNA, 15 bp, Homo sapiens
ccctggccattatcc

SEQ ID NO: 316524 - DNA, 15 bp, Homo sapiens
tccctggccattatc

SEQ ID NO: 316525 - DNA, 15 bp, Homo sapiens
atccctggccattat

SEQ ID NO: 316526 - DNA, 15 bp, Homo sapiens
catccctggccatta

SEQ ID NO: 316527 - DNA, 15 bp, Homo sapiens
ccatccctggccatt

SEQ ID NO: 316528 - DNA, 15 bp, Homo sapiens
accatccctggccat

SEQ ID NO: 316529 - DNA, 15 bp, Homo sapiens
caccatccctggcca

SEQ ID NO: 316530 - DNA, 15 bp, Homo sapiens
ccaccatccctggcc

SEQ ID NO: 316531 - DNA, 15 bp, Homo sapiens
gccaccatccctggc

SEQ ID NO: 316532 - DNA, 15 bp, Homo sapiens
agccaccatccctgg

SEQ ID NO: 316533 - DNA, 15 bp, Homo sapiens
gagccaccatccctg

SEQ ID NO: 316534 - DNA, 15 bp, Homo sapiens
tgagccaccatccct

SEQ ID NO: 316535 - DNA, 15 bp, Homo sapiens
gtgagccaccatccc

SEQ ID NO: 316536 - DNA, 15 bp, Homo sapiens
cgtgagccaccatcc

SEQ ID NO: 316537 - DNA, 15 bp, Homo sapiens
gcgtgagccaccatc

SEQ ID NO: 316538 - DNA, 15 bp, Homo sapiens
ggcgtgagccaccat

SEQ ID NO: 316539 - DNA, 15 bp, Homo sapiens
aggcgtgagccacca

SEQ ID NO: 316540 - DNA, 15 bp, Homo sapiens
gtacaggcgtgagcc

SEQ ID NO: 316541 - DNA, 15 bp, Homo sapiens
agtacaggcgtgagc

SEQ ID NO: 316542 - DNA, 15 bp, Homo sapiens
gagtacaggcgtgag

SEQ ID NO: 316543 - DNA, 15 bp, Homo sapiens
ggagtacaggcgtga

SEQ ID NO: 316544 - DNA, 15 bp, Homo sapiens
aggagtacaggcgtg

SEQ ID NO: 316545 - DNA, 15 bp, Homo sapiens
caggagtacaggcgt

SEQ ID NO: 316546 - DNA, 15 bp, Homo sapiens
ccaggagtacaggcg

SEQ ID NO: 316547 - DNA, 15 bp, Homo sapiens
gccaggagtacaggc

SEQ ID NO: 316548 - DNA, 15 bp, Homo sapiens
tgccaggagtacagg

SEQ ID NO: 316549 - DNA, 15 bp, Homo sapiens
gtgccaggagtacag

SEQ ID NO: 316550 - DNA, 15 bp, Homo sapiens
agtgccaggagtaca

SEQ ID NO: 316551 - DNA, 15 bp, Homo sapiens
aagtgccaggagtac

SEQ ID NO: 316552 - DNA, 15 bp, Homo sapiens
aaagtgccaggagta

SEQ ID NO: 316553 - DNA, 15 bp, Homo sapiens
caaagtgccaggagt

SEQ ID NO: 316554 - DNA, 15 bp, Homo sapiens
ccaaagtgccaggag

SEQ ID NO: 316555 - DNA, 15 bp, Homo sapiens
cccaaagtgccagga

SEQ ID NO: 316556 - DNA, 15 bp, Homo sapiens
tcccaaagtgccagg

SEQ ID NO: 316557 - DNA, 15 bp, Homo sapiens
atcccaaagtgccag

SEQ ID NO: 316558 - DNA, 15 bp, Homo sapiens
catcccaaagtgcca

SEQ ID NO: 316559 - DNA, 15 bp, Homo sapiens
gcatcccaaagtgcc

SEQ ID NO: 316560 - DNA, 15 bp, Homo sapiens
agcatcccaaagtgc

SEQ ID NO: 316561 - DNA, 15 bp, Homo sapiens
cagcatcccaaagtg

SEQ ID NO: 316562 - DNA, 15 bp, Homo sapiens
ccagcatcccaaagt

SEQ ID NO: 316563 - DNA, 15 bp, Homo sapiens
accagcatcccaaag

SEQ ID NO: 316564 - DNA, 15 bp, Homo sapiens
caccagcatcccaaa

SEQ ID NO: 316565 - DNA, 15 bp, Homo sapiens
ccaccagcatcccaa

SEQ ID NO: 316566 - DNA, 15 bp, Homo sapiens
tccaccagcatccca

SEQ ID NO: 316567 - DNA, 15 bp, Homo sapiens
atccaccagcatccc

SEQ ID NO: 316568 - DNA, 15 bp, Homo sapiens
gatccaccagcatcc

SEQ ID NO: 316569 - DNA, 15 bp, Homo sapiens
tgatccaccagcatc

SEQ ID NO: 316570 - DNA, 15 bp, Homo sapiens
gtgatccaccagcat

SEQ ID NO: 316571 - DNA, 15 bp, Homo sapiens
ggtgatccaccagca

SEQ ID NO: 316572 - DNA, 15 bp, Homo sapiens
aggtgatccaccagc

SEQ ID NO: 316573 - DNA, 15 bp, Homo sapiens
caggtgatccaccag

SEQ ID NO: 316574 - DNA, 15 bp, Homo sapiens
tcaggtgatccacca

SEQ ID NO: 316575 - DNA, 15 bp, Homo sapiens
tctcaggtgatccac

SEQ ID NO: 316576 - DNA, 15 bp, Homo sapiens
atctcaggtgatcca

SEQ ID NO: 316577 - DNA, 15 bp, Homo sapiens
gatctcaggtgatcc

SEQ ID NO: 316578 - DNA, 15 bp, Homo sapiens
tgatctcaggtgatc

SEQ ID NO: 316579 - DNA, 15 bp, Homo sapiens
ctgatctcaggtgat

SEQ ID NO: 316580 - DNA, 15 bp, Homo sapiens
cctgatctcaggtga

SEQ ID NO: 316581 - DNA, 15 bp, Homo sapiens
tcctgatctcaggtg

SEQ ID NO: 316582 - DNA, 15 bp, Homo sapiens
atcctgatctcaggt

SEQ ID NO: 316583 - DNA, 15 bp, Homo sapiens
aatcctgatctcagg

SEQ ID NO: 316584 - DNA, 15 bp, Homo sapiens
gaatcctgatctcag

SEQ ID NO: 316585 - DNA, 15 bp, Homo sapiens
ggaatcctgatctca

SEQ ID NO: 316586 - DNA, 15 bp, Homo sapiens
tggaatcctgatctc

SEQ ID NO: 316587 - DNA, 15 bp, Homo sapiens
ctggaatcctgatct

SEQ ID NO: 316588 - DNA, 15 bp, Homo sapiens
cctggaatcctgatc

SEQ ID NO: 316589 - DNA, 15 bp, Homo sapiens
gcctggaatcctgat

SEQ ID NO: 316590 - DNA, 15 bp, Homo sapiens
ggcctggaatcctga

SEQ ID NO: 316591 - DNA, 15 bp, Homo sapiens
tggcctggaatcctg

SEQ ID NO: 316592 - DNA, 15 bp, Homo sapiens
ctggcctggaatcct

SEQ ID NO: 316593 - DNA, 15 bp, Homo sapiens
gctggcctggaatcc

SEQ ID NO: 316594 - DNA, 15 bp, Homo sapiens
ggctggcctggaatc

SEQ ID NO: 316595 - DNA, 15 bp, Homo sapiens
aggctggcctggaat

SEQ ID NO: 316596 - DNA, 15 bp, Homo sapiens
caggctggcctggaa

SEQ ID NO: 316597 - DNA, 15 bp, Homo sapiens
ccaggctggcctgga

SEQ ID NO: 316598 - DNA, 15 bp, Homo sapiens
gccaggctggcctgg

SEQ ID NO: 316599 - DNA, 15 bp, Homo sapiens
ggccaggctggcctg

SEQ ID NO: 316600 - DNA, 15 bp, Homo sapiens
tggccaggctggcct

SEQ ID NO: 316601 - DNA, 15 bp, Homo sapiens
ttggccaggctggcc

SEQ ID NO: 316602 - DNA, 15 bp, Homo sapiens
gttggccaggctggc

SEQ ID NO: 316603 - DNA, 15 bp, Homo sapiens
gtgttggccaggctg

SEQ ID NO: 316604 - DNA, 15 bp, Homo sapiens
cgtgttggccaggct

SEQ ID NO: 316605 - DNA, 15 bp, Homo sapiens
ccgtgttggccaggc

SEQ ID NO: 316606 - DNA, 15 bp, Homo sapiens
accgtgttggccagg

SEQ ID NO: 316607 - DNA, 15 bp, Homo sapiens
caccgtgttggccag

SEQ ID NO: 316608 - DNA, 15 bp, Homo sapiens
tcaccgtgttggcca

SEQ ID NO: 316609 - DNA, 15 bp, Homo sapiens
tgttttagtagagat

SEQ ID NO: 316610 - DNA, 15 bp, Homo sapiens
atgttttagtagaga

SEQ ID NO: 316611 - DNA, 15 bp, Homo sapiens
tatgttttagtagag

SEQ ID NO: 316612 - DNA, 15 bp, Homo sapiens
ttatgttttagtaga

SEQ ID NO: 316613 - DNA, 15 bp, Homo sapiens
tttatgttttagtag

SEQ ID NO: 316614 - DNA, 15 bp, Homo sapiens
ttttatgttttagta

SEQ ID NO: 316615 - DNA, 15 bp, Homo sapiens
tttttatgttttagt

SEQ ID NO: 316616 - DNA, 15 bp, Homo sapiens
atttttatgttttag

SEQ ID NO: 316617 - DNA, 15 bp, Homo sapiens
aatttttatgtttta

SEQ ID NO: 316618 - DNA, 15 bp, Homo sapiens
taatttttatgtttt

SEQ ID NO: 316619 - DNA, 15 bp, Homo sapiens
ttaatttttatgttt

SEQ ID NO: 316620 - DNA, 15 bp, Homo sapiens
gttaatttttatgtt

SEQ ID NO: 316621 - DNA, 15 bp, Homo sapiens
ggttaatttttatgt

SEQ ID NO: 316622 - DNA, 15 bp, Homo sapiens
tggttaatttttatg

SEQ ID NO: 316623 - DNA, 15 bp, Homo sapiens
ctggttaatttttat

SEQ ID NO: 316624 - DNA, 15 bp, Homo sapiens
cctggttaattttta

SEQ ID NO: 316625 - DNA, 15 bp, Homo sapiens
acctggttaattttt

SEQ ID NO: 316626 - DNA, 15 bp, Homo sapiens
cacctggttaatttt

SEQ ID NO: 316627 - DNA, 15 bp, Homo sapiens
acacctggttaattt

SEQ ID NO: 316628 - DNA, 15 bp, Homo sapiens
cacacctggttaatt

SEQ ID NO: 316629 - DNA, 15 bp, Homo sapiens
ccacacctggttaat

SEQ ID NO: 316630 - DNA, 15 bp, Homo sapiens
accacacctggttaa

SEQ ID NO: 316631 - DNA, 15 bp, Homo sapiens
caccacacctggtta

SEQ ID NO: 316632 - DNA, 15 bp, Homo sapiens
ccaccacacctggtt

SEQ ID NO: 316633 - DNA, 15 bp, Homo sapiens
gccaccacacctggt

SEQ ID NO: 316634 - DNA, 15 bp, Homo sapiens
cgccaccacacctgg

SEQ ID NO: 316635 - DNA, 15 bp, Homo sapiens
ccgccaccacacctg

SEQ ID NO: 316636 - DNA, 15 bp, Homo sapiens
cccgccaccacacct

SEQ ID NO: 316637 - DNA, 15 bp, Homo sapiens
gcccgccaccacacc

SEQ ID NO: 316638 - DNA, 15 bp, Homo sapiens
tgcccgccaccacac

SEQ ID NO: 316639 - DNA, 15 bp, Homo sapiens
gtgcccgccaccaca

SEQ ID NO: 316640 - DNA, 15 bp, Homo sapiens
ggtgcccgccaccac

SEQ ID NO: 316641 - DNA, 15 bp, Homo sapiens
aggtgcccgccacca

SEQ ID NO: 316642 - DNA, 15 bp, Homo sapiens
caggtgcccgccacc

SEQ ID NO: 316643 - DNA, 15 bp, Homo sapiens
tctcctgagtagctg

SEQ ID NO: 316644 - DNA, 15 bp, Homo sapiens
gtctcctgagtagct

SEQ ID NO: 316645 - DNA, 15 bp, Homo sapiens
agtctcctgagtagc

SEQ ID NO: 316646 - DNA, 15 bp, Homo sapiens
cagtctcctgagtag

SEQ ID NO: 316647 - DNA, 15 bp, Homo sapiens
tcagtctcctgagta

SEQ ID NO: 316648 - DNA, 15 bp, Homo sapiens
ctcagtctcctgagt

SEQ ID NO: 316649 - DNA, 15 bp, Homo sapiens
cctcagtctcctgag

SEQ ID NO: 316650 - DNA, 15 bp, Homo sapiens
gcctcagtctcctga

SEQ ID NO: 316651 - DNA, 15 bp, Homo sapiens
tgcctcagtctcctg

SEQ ID NO: 316652 - DNA, 15 bp, Homo sapiens
ctgcctcagtctcct

SEQ ID NO: 316653 - DNA, 15 bp, Homo sapiens
cctgcctcagtctcc

SEQ ID NO: 316654 - DNA, 15 bp, Homo sapiens
tcctgcctcagtctc

SEQ ID NO: 316655 - DNA, 15 bp, Homo sapiens
ctcctgcctcagtct

SEQ ID NO: 316656 - DNA, 15 bp, Homo sapiens
tctcctgcctcagtc

SEQ ID NO: 316657 - DNA, 15 bp, Homo sapiens
ttctcctgcctcagt

SEQ ID NO: 316658 - DNA, 15 bp, Homo sapiens
gggttcaagcaattc

SEQ ID NO: 316659 - DNA, 15 bp, Homo sapiens
cgggttcaagcaatt

SEQ ID NO: 316660 - DNA, 15 bp, Homo sapiens
ccgggttcaagcaat

SEQ ID NO: 316661 - DNA, 15 bp, Homo sapiens
cccgggttcaagcaa

SEQ ID NO: 316662 - DNA, 15 bp, Homo sapiens
tcccgggttcaagca

SEQ ID NO: 316663 - DNA, 15 bp, Homo sapiens
ctcccgggttcaagc

SEQ ID NO: 316664 - DNA, 15 bp, Homo sapiens
cctcccgggttcaag

SEQ ID NO: 316665 - DNA, 15 bp, Homo sapiens
acctcccgggttcaa

SEQ ID NO: 316666 - DNA, 15 bp, Homo sapiens
cacctcccgggttca

SEQ ID NO: 316667 - DNA, 15 bp, Homo sapiens
ccacctcccgggttc

SEQ ID NO: 316668 - DNA, 15 bp, Homo sapiens
tccacctcccgggtt

SEQ ID NO: 316669 - DNA, 15 bp, Homo sapiens
ttccacctcccgggt

SEQ ID NO: 316670 - DNA, 15 bp, Homo sapiens
cttccacctcccggg

SEQ ID NO: 316671 - DNA, 15 bp, Homo sapiens
acttccacctcccgg

SEQ ID NO: 316672 - DNA, 15 bp, Homo sapiens
aacttccacctcccg

SEQ ID NO: 316673 - DNA, 15 bp, Homo sapiens
caacttccacctccc

SEQ ID NO: 316674 - DNA, 15 bp, Homo sapiens
gcaacttccacctcc

SEQ ID NO: 316675 - DNA, 15 bp, Homo sapiens
tgcaacttccacctc

SEQ ID NO: 316676 - DNA, 15 bp, Homo sapiens
gtgcaacttccacct

SEQ ID NO: 316677 - DNA, 15 bp, Homo sapiens
agtgcaacttccacc

SEQ ID NO: 316678 - DNA, 15 bp, Homo sapiens
cagtgcaacttccac

SEQ ID NO: 316679 - DNA, 15 bp, Homo sapiens
tcagtgcaacttcca

SEQ ID NO: 316680 - DNA, 15 bp, Homo sapiens
ctcagtgcaacttcc

SEQ ID NO: 316681 - DNA, 15 bp, Homo sapiens
gctcagtgcaacttc

SEQ ID NO: 316682 - DNA, 15 bp, Homo sapiens
agctcagtgcaactt

SEQ ID NO: 316683 - DNA, 15 bp, Homo sapiens
cagctcagtgcaact

SEQ ID NO: 316684 - DNA, 15 bp, Homo sapiens
tcagctcagtgcaac

SEQ ID NO: 316685 - DNA, 15 bp, Homo sapiens
ctcagctcagtgcaa

SEQ ID NO: 316686 - DNA, 15 bp, Homo sapiens
tctcagctcagtgca

SEQ ID NO: 316687 - DNA, 15 bp, Homo sapiens
atctcagctcagtgc

SEQ ID NO: 316688 - DNA, 15 bp, Homo sapiens
gatctcagctcagtg

SEQ ID NO: 316689 - DNA, 15 bp, Homo sapiens
cgatctcagctcagt

SEQ ID NO: 316690 - DNA, 15 bp, Homo sapiens
gcgatctcagctcag

SEQ ID NO: 316691 - DNA, 15 bp, Homo sapiens
cgcgatctcagctca

SEQ ID NO: 316692 - DNA, 15 bp, Homo sapiens
gcgcgatctcagctc

SEQ ID NO: 316693 - DNA, 15 bp, Homo sapiens
ggcgcgatctcagct

SEQ ID NO: 316694 - DNA, 15 bp, Homo sapiens
tggcgcgatctcagc

SEQ ID NO: 316695 - DNA, 15 bp, Homo sapiens
gtggcgcgatctcag

SEQ ID NO: 316696 - DNA, 15 bp, Homo sapiens
agtggcgcgatctca

SEQ ID NO: 316697 - DNA, 15 bp, Homo sapiens
cagtggcgcgatctc

SEQ ID NO: 316698 - DNA, 15 bp, Homo sapiens
aagtgcagtggcgcg

SEQ ID NO: 316699 - DNA, 15 bp, Homo sapiens
aaagtgcagtggcgc

SEQ ID NO: 316700 - DNA, 15 bp, Homo sapiens
taaagtgcagtggcg

SEQ ID NO: 316701 - DNA, 15 bp, Homo sapiens
ctaaagtgcagtggc

SEQ ID NO: 316702 - DNA, 15 bp, Homo sapiens
gctaaagtgcagtgg

SEQ ID NO: 316703 - DNA, 15 bp, Homo sapiens
ggctaaagtgcagtg

SEQ ID NO: 316704 - DNA, 15 bp, Homo sapiens
aggctaaagtgcagt

SEQ ID NO: 316705 - DNA, 15 bp, Homo sapiens
caggctaaagtgcag

SEQ ID NO: 316706 - DNA, 15 bp, Homo sapiens
ccaggctaaagtgca

SEQ ID NO: 316707 - DNA, 15 bp, Homo sapiens
cccaggctaaagtgc

SEQ ID NO: 316708 - DNA, 15 bp, Homo sapiens
gcccaggctaaagtg

SEQ ID NO: 316709 - DNA, 15 bp, Homo sapiens
cgcccaggctaaagt

SEQ ID NO: 316710 - DNA, 15 bp, Homo sapiens
tcgcccaggctaaag

SEQ ID NO: 316711 - DNA, 15 bp, Homo sapiens
gtcgcccaggctaaa

SEQ ID NO: 316712 - DNA, 15 bp, Homo sapiens
tgtcgcccaggctaa

SEQ ID NO: 316713 - DNA, 15 bp, Homo sapiens
ttgtcgcccaggcta

SEQ ID NO: 316714 - DNA, 15 bp, Homo sapiens
cttgtcgcccaggct

SEQ ID NO: 316715 - DNA, 15 bp, Homo sapiens
tcttgtcgcccaggc

SEQ ID NO: 316716 - DNA, 15 bp, Homo sapiens
ctcttgtcgcccagg

SEQ ID NO: 316717 - DNA, 15 bp, Homo sapiens
actcttgtcgcccag

SEQ ID NO: 316718 - DNA, 15 bp, Homo sapiens
cactcttgtcgccca

SEQ ID NO: 316719 - DNA, 15 bp, Homo sapiens
tcactcttgtcgccc

SEQ ID NO: 316720 - DNA, 15 bp, Homo sapiens
ttcactcttgtcgcc

SEQ ID NO: 316721 - DNA, 15 bp, Homo sapiens
tttcactcttgtcgc

SEQ ID NO: 316722 - DNA, 15 bp, Homo sapiens
gtttcactcttgtcg

SEQ ID NO: 316723 - DNA, 15 bp, Homo sapiens
agtttcactcttgtc

SEQ ID NO: 316724 - DNA, 15 bp, Homo sapiens
gagtttcactcttgt

SEQ ID NO: 316725 - DNA, 15 bp, Homo sapiens
agagtttcactcttg

SEQ ID NO: 316726 - DNA, 15 bp, Homo sapiens
gagacagagtttcac

SEQ ID NO: 316727 - DNA, 15 bp, Homo sapiens
tgagacagagtttca

SEQ ID NO: 316728 - DNA, 15 bp, Homo sapiens
ttgagacagagtttc

SEQ ID NO: 316729 - DNA, 15 bp, Homo sapiens
tttgagacagagttt

SEQ ID NO: 316730 - DNA, 15 bp, Homo sapiens
ttttgagacagagtt

SEQ ID NO: 316731 - DNA, 15 bp, Homo sapiens
tttttgagacagagt

SEQ ID NO: 316732 - DNA, 15 bp, Homo sapiens
gtttttgagacagag

SEQ ID NO: 316733 - DNA, 15 bp, Homo sapiens
tgtttttgagacaga

SEQ ID NO: 316734 - DNA, 15 bp, Homo sapiens
ttgtttttgagacag

SEQ ID NO: 316735 - DNA, 15 bp, Homo sapiens
tttgtttttgagaca

SEQ ID NO: 316736 - DNA, 15 bp, Homo sapiens
ttttgtttttgagac

SEQ ID NO: 316737 - DNA, 15 bp, Homo sapiens
tttttgtttttgaga

SEQ ID NO: 316738 - DNA, 15 bp, Homo sapiens
ttttttgtttttgag

SEQ ID NO: 316739 - DNA, 15 bp, Homo sapiens
tttttttgtttttga

SEQ ID NO: 316740 - DNA, 15 bp, Homo sapiens
ttttttttgtttttg

SEQ ID NO: 316741 - DNA, 15 bp, Homo sapiens
gttttttttgttttt

SEQ ID NO: 316742 - DNA, 15 bp, Homo sapiens
agttttttttgtttt

SEQ ID NO: 316743 - DNA, 15 bp, Homo sapiens
tagttttttttgttt

SEQ ID NO: 316744 - DNA, 15 bp, Homo sapiens
atagttttttttgtt

SEQ ID NO: 316745 - DNA, 15 bp, Homo sapiens
catagttttttttgt

SEQ ID NO: 316746 - DNA, 15 bp, Homo sapiens
gcatagttttttttg

SEQ ID NO: 316747 - DNA, 15 bp, Homo sapiens
ggcatagtttttttt

SEQ ID NO: 316748 - DNA, 15 bp, Homo sapiens
cggcatagttttttt

SEQ ID NO: 316749 - DNA, 15 bp, Homo sapiens
ccggcatagtttttt

SEQ ID NO: 316750 - DNA, 15 bp, Homo sapiens
cccggcatagttttt

SEQ ID NO: 316751 - DNA, 15 bp, Homo sapiens
tcccggcatagtttt

SEQ ID NO: 316752 - DNA, 15 bp, Homo sapiens
atcccggcatagttt

SEQ ID NO: 316753 - DNA, 15 bp, Homo sapiens
catcccggcatagtt

SEQ ID NO: 316754 - DNA, 15 bp, Homo sapiens
tcatcccggcatagt

SEQ ID NO: 316755 - DNA, 15 bp, Homo sapiens
ctcatcccggcatag

SEQ ID NO: 316756 - DNA, 15 bp, Homo sapiens
gctcatcccggcata

SEQ ID NO: 316757 - DNA, 15 bp, Homo sapiens
ggctcatcccggcat

SEQ ID NO: 316758 - DNA, 15 bp, Homo sapiens
aggctcatcccggca

SEQ ID NO: 316759 - DNA, 15 bp, Homo sapiens
caggctcatcccggc

SEQ ID NO: 316760 - DNA, 15 bp, Homo sapiens
acaggctcatcccgg

SEQ ID NO: 316761 - DNA, 15 bp, Homo sapiens
gacaggctcatcccg

SEQ ID NO: 316762 - DNA, 15 bp, Homo sapiens
agacaggctcatccc

SEQ ID NO: 316763 - DNA, 15 bp, Homo sapiens
gagacaggctcatcc

SEQ ID NO: 316764 - DNA, 15 bp, Homo sapiens
ggagacaggctcatc

SEQ ID NO: 316765 - DNA, 15 bp, Homo sapiens
aggagacaggctcat

SEQ ID NO: 316766 - DNA, 15 bp, Homo sapiens
gaggagacaggctca

SEQ ID NO: 316767 - DNA, 15 bp, Homo sapiens
ggaggagacaggctc

SEQ ID NO: 316768 - DNA, 15 bp, Homo sapiens
gggaggagacaggct

SEQ ID NO: 316769 - DNA, 15 bp, Homo sapiens
agggaggagacaggc

SEQ ID NO: 316770 - DNA, 15 bp, Homo sapiens
aagggaggagacagg

SEQ ID NO: 316771 - DNA, 15 bp, Homo sapiens
taagggaggagacag

SEQ ID NO: 316772 - DNA, 15 bp, Homo sapiens
ttaagggaggagaca

SEQ ID NO: 316773 - DNA, 15 bp, Homo sapiens
attaagggaggagac

SEQ ID NO: 316774 - DNA, 15 bp, Homo sapiens
aattaagggaggaga

SEQ ID NO: 316775 - DNA, 15 bp, Homo sapiens
aaattaagggaggag

SEQ ID NO: 316776 - DNA, 15 bp, Homo sapiens
gaaattaagggagga

SEQ ID NO: 316777 - DNA, 15 bp, Homo sapiens
agaaattaagggagg

SEQ ID NO: 316778 - DNA, 15 bp, Homo sapiens
aagaaattaagggag

SEQ ID NO: 316779 - DNA, 15 bp, Homo sapiens
taagaaattaaggga

SEQ ID NO: 316780 - DNA, 15 bp, Homo sapiens
gtaagaaattaaggg

SEQ ID NO: 316781 - DNA, 15 bp, Homo sapiens
agtaagaaattaagg

SEQ ID NO: 316782 - DNA, 15 bp, Homo sapiens
aagtaagaaattaag

SEQ ID NO: 316783 - DNA, 15 bp, Homo sapiens
caagtaagaaattaa

SEQ ID NO: 316784 - DNA, 15 bp, Homo sapiens
ccaagtaagaaatta

SEQ ID NO: 316785 - DNA, 15 bp, Homo sapiens
cccaagtaagaaatt

SEQ ID NO: 316786 - DNA, 15 bp, Homo sapiens
gcccaagtaagaaat

SEQ ID NO: 316787 - DNA, 15 bp, Homo sapiens
ggcccaagtaagaaa

SEQ ID NO: 316788 - DNA, 15 bp, Homo sapiens
tggcccaagtaagaa

SEQ ID NO: 316789 - DNA, 15 bp, Homo sapiens
ctggcccaagtaaga

SEQ ID NO: 316790 - DNA, 15 bp, Homo sapiens
tctggcccaagtaag

SEQ ID NO: 316791 - DNA, 15 bp, Homo sapiens
ctctggcccaagtaa

SEQ ID NO: 316792 - DNA, 15 bp, Homo sapiens
cctctggcccaagta

SEQ ID NO: 316793 - DNA, 15 bp, Homo sapiens
tcctctggcccaagt

SEQ ID NO: 316794 - DNA, 15 bp, Homo sapiens
ttcctctggcccaag

SEQ ID NO: 316795 - DNA, 15 bp, Homo sapiens
gttcctctggcccaa

SEQ ID NO: 316796 - DNA, 15 bp, Homo sapiens
agttcctctggccca

SEQ ID NO: 316797 - DNA, 15 bp, Homo sapiens
tagttcctctggccc

SEQ ID NO: 316798 - DNA, 15 bp, Homo sapiens
ctagttcctctggcc

SEQ ID NO: 316799 - DNA, 15 bp, Homo sapiens
tctagttcctctggc

SEQ ID NO: 316800 - DNA, 15 bp, Homo sapiens
ttctagttcctctgg

SEQ ID NO: 316801 - DNA, 15 bp, Homo sapiens
gttctagttcctctg

SEQ ID NO: 316802 - DNA, 15 bp, Homo sapiens
agttctagttcctct

SEQ ID NO: 316803 - DNA, 15 bp, Homo sapiens
tagttctagttcctc

SEQ ID NO: 316804 - DNA, 15 bp, Homo sapiens
ttagttctagttcct

SEQ ID NO: 316805 - DNA, 15 bp, Homo sapiens
gttagttctagttcc

SEQ ID NO: 316806 - DNA, 15 bp, Homo sapiens
tgttagttctagttc

SEQ ID NO: 316807 - DNA, 15 bp, Homo sapiens
ttgttagttctagtt

SEQ ID NO: 316808 - DNA, 15 bp, Homo sapiens
gttgttagttctagt

SEQ ID NO: 316809 - DNA, 15 bp, Homo sapiens
agttgttagttctag

SEQ ID NO: 316810 - DNA, 15 bp, Homo sapiens
aagttgttagttcta

SEQ ID NO: 316811 - DNA, 15 bp, Homo sapiens
gaagttgttagttct

SEQ ID NO: 316812 - DNA, 15 bp, Homo sapiens
agaagttgttagttc

SEQ ID NO: 316813 - DNA, 15 bp, Homo sapiens
gagaagttgttagtt

SEQ ID NO: 316814 - DNA, 15 bp, Homo sapiens
agagaagttgttagt

SEQ ID NO: 316815 - DNA, 15 bp, Homo sapiens
aagagaagttgttag

SEQ ID NO: 316816 - DNA, 15 bp, Homo sapiens
gaagagaagttgtta

SEQ ID NO: 316817 - DNA, 15 bp, Homo sapiens
agaagagaagttgtt

SEQ ID NO: 316818 - DNA, 15 bp, Homo sapiens
tagaagagaagttgt

SEQ ID NO: 316819 - DNA, 15 bp, Homo sapiens
ctagaagagaagttg

SEQ ID NO: 316820 - DNA, 15 bp, Homo sapiens
gctagaagagaagtt

SEQ ID NO: 316821 - DNA, 15 bp, Homo sapiens
ggctagaagagaagt

SEQ ID NO: 316822 - DNA, 15 bp, Homo sapiens
aggctagaagagaag

SEQ ID NO: 316823 - DNA, 15 bp, Homo sapiens
aaggctagaagagaa

SEQ ID NO: 316824 - DNA, 15 bp, Homo sapiens
caaggctagaagaga

SEQ ID NO: 316825 - DNA, 15 bp, Homo sapiens
gcaaggctagaagag

SEQ ID NO: 316826 - DNA, 15 bp, Homo sapiens
ggcaaggctagaaga

SEQ ID NO: 316827 - DNA, 15 bp, Homo sapiens
aggcaaggctagaag

SEQ ID NO: 316828 - DNA, 15 bp, Homo sapiens
gaggcaaggctagaa

SEQ ID NO: 316829 - DNA, 15 bp, Homo sapiens
ggaggcaaggctaga

SEQ ID NO: 316830 - DNA, 15 bp, Homo sapiens
aggaggcaaggctag

SEQ ID NO: 316831 - DNA, 15 bp, Homo sapiens
caggaggcaaggcta

SEQ ID NO: 316832 - DNA, 15 bp, Homo sapiens
acaggaggcaaggct

SEQ ID NO: 316833 - DNA, 15 bp, Homo sapiens
cacaggaggcaaggc

SEQ ID NO: 316834 - DNA, 15 bp, Homo sapiens
acacaggaggcaagg

SEQ ID NO: 316835 - DNA, 15 bp, Homo sapiens
tacacaggaggcaag

SEQ ID NO: 316836 - DNA, 15 bp, Homo sapiens
gtacacaggaggcaa

SEQ ID NO: 316837 - DNA, 15 bp, Homo sapiens
ggtacacaggaggca

SEQ ID NO: 316838 - DNA, 15 bp, Homo sapiens
aggtacacaggaggc

SEQ ID NO: 316839 - DNA, 15 bp, Homo sapiens
gaggtacacaggagg

SEQ ID NO: 316840 - DNA, 15 bp, Homo sapiens
tgaggtacacaggag

SEQ ID NO: 316841 - DNA, 15 bp, Homo sapiens
gtgaggtacacagga

SEQ ID NO: 316842 - DNA, 15 bp, Homo sapiens
agtgaggtacacagg

SEQ ID NO: 316843 - DNA, 15 bp, Homo sapiens
cagtgaggtacacag

SEQ ID NO: 316844 - DNA, 15 bp, Homo sapiens
tcagtgaggtacaca

SEQ ID NO: 316845 - DNA, 15 bp, Homo sapiens
ttcagtgaggtacac

SEQ ID NO: 316846 - DNA, 15 bp, Homo sapiens
attcagtgaggtaca

SEQ ID NO: 316847 - DNA, 15 bp, Homo sapiens
aattcagtgaggtac

SEQ ID NO: 316848 - DNA, 15 bp, Homo sapiens
aaattcagtgaggta

SEQ ID NO: 316849 - DNA, 15 bp, Homo sapiens
aaaattcagtgaggt

SEQ ID NO: 316850 - DNA, 15 bp, Homo sapiens
aaaaattcagtgagg

SEQ ID NO: 316851 - DNA, 15 bp, Homo sapiens
caaaaattcagtgag

SEQ ID NO: 316852 - DNA, 15 bp, Homo sapiens
ccaaaaattcagtga

SEQ ID NO: 316853 - DNA, 15 bp, Homo sapiens
accaaaaattcagtg

SEQ ID NO: 316854 - DNA, 15 bp, Homo sapiens
gaccaaaaattcagt

SEQ ID NO: 316855 - DNA, 15 bp, Homo sapiens
agaccaaaaattcag

SEQ ID NO: 316856 - DNA, 15 bp, Homo sapiens
gagaccaaaaattca

SEQ ID NO: 316857 - DNA, 15 bp, Homo sapiens
agagaccaaaaattc

SEQ ID NO: 316858 - DNA, 15 bp, Homo sapiens
tagagaccaaaaatt

SEQ ID NO: 316859 - DNA, 15 bp, Homo sapiens
ttagagaccaaaaat

SEQ ID NO: 316860 - DNA, 15 bp, Homo sapiens
attagagaccaaaaa

SEQ ID NO: 316861 - DNA, 15 bp, Homo sapiens
tattagagaccaaaa

SEQ ID NO: 316862 - DNA, 15 bp, Homo sapiens
ttattagagaccaaa

SEQ ID NO: 316863 - DNA, 15 bp, Homo sapiens
tttattagagaccaa

SEQ ID NO: 316864 - DNA, 15 bp, Homo sapiens
gtttattagagacca

SEQ ID NO: 316865 - DNA, 15 bp, Homo sapiens
ggtttattagagacc

SEQ ID NO: 316866 - DNA, 15 bp, Homo sapiens
tggtttattagagac

SEQ ID NO: 316867 - DNA, 15 bp, Homo sapiens
ctggtttattagaga

SEQ ID NO: 316868 - DNA, 15 bp, Homo sapiens
actggtttattagag

SEQ ID NO: 316869 - DNA, 15 bp, Homo sapiens
gactggtttattaga

SEQ ID NO: 316870 - DNA, 15 bp, Homo sapiens
agactggtttattag

SEQ ID NO: 316871 - DNA, 15 bp, Homo sapiens
cagactggtttatta

SEQ ID NO: 316872 - DNA, 15 bp, Homo sapiens
gcagactggtttatt

SEQ ID NO: 316873 - DNA, 15 bp, Homo sapiens
tgcagactggtttat

SEQ ID NO: 316874 - DNA, 15 bp, Homo sapiens
ctgcagactggttta

SEQ ID NO: 316875 - DNA, 15 bp, Homo sapiens
tctgcagactggttt

SEQ ID NO: 316876 - DNA, 15 bp, Homo sapiens
ctctgcagactggtt

SEQ ID NO: 316877 - DNA, 15 bp, Homo sapiens
cctctgcagactggt

SEQ ID NO: 316878 - DNA, 15 bp, Homo sapiens
gcctctgcagactgg

SEQ ID NO: 316879 - DNA, 15 bp, Homo sapiens
agcctctgcagactg

SEQ ID NO: 316880 - DNA, 15 bp, Homo sapiens
gagcctctgcagact

SEQ ID NO: 316881 - DNA, 15 bp, Homo sapiens
tgagcctctgcagac

SEQ ID NO: 316882 - DNA, 15 bp, Homo sapiens
ctgagcctctgcaga

SEQ ID NO: 316883 - DNA, 15 bp, Homo sapiens
cctgagcctctgcag

SEQ ID NO: 316884 - DNA, 15 bp, Homo sapiens
ccctgagcctctgca

SEQ ID NO: 316885 - DNA, 15 bp, Homo sapiens
cccctgagcctctgc

SEQ ID NO: 316886 - DNA, 15 bp, Homo sapiens
tcccctgagcctctg

SEQ ID NO: 316887 - DNA, 15 bp, Homo sapiens
ctcccctgagcctct

SEQ ID NO: 316888 - DNA, 15 bp, Homo sapiens
cctcccctgagcctc

SEQ ID NO: 316889 - DNA, 15 bp, Homo sapiens
gcctcccctgagcct

SEQ ID NO: 316890 - DNA, 15 bp, Homo sapiens
tgcctcccctgagcc

SEQ ID NO: 316891 - DNA, 15 bp, Homo sapiens
ctgcctcccctgagc

SEQ ID NO: 316892 - DNA, 15 bp, Homo sapiens
cctgcctcccctgag

SEQ ID NO: 316893 - DNA, 15 bp, Homo sapiens
gcctgcctcccctga

SEQ ID NO: 316894 - DNA, 15 bp, Homo sapiens
agcctgcctcccctg

SEQ ID NO: 316895 - DNA, 15 bp, Homo sapiens
gagcctgcctcccct

SEQ ID NO: 316896 - DNA, 15 bp, Homo sapiens
ggagcctgcctcccc

SEQ ID NO: 316897 - DNA, 15 bp, Homo sapiens
aggagcctgcctccc

SEQ ID NO: 316898 - DNA, 15 bp, Homo sapiens
caggagcctgcctcc

SEQ ID NO: 316899 - DNA, 15 bp, Homo sapiens
ccaggagcctgcctc

SEQ ID NO: 316900 - DNA, 15 bp, Homo sapiens
gccaggagcctgcct

SEQ ID NO: 316901 - DNA, 15 bp, Homo sapiens
tgccaggagcctgcc

SEQ ID NO: 316902 - DNA, 15 bp, Homo sapiens
ctgccaggagcctgc

SEQ ID NO: 316903 - DNA, 15 bp, Homo sapiens
gctgccaggagcctg

SEQ ID NO: 316904 - DNA, 15 bp, Homo sapiens
agctgccaggagcct

SEQ ID NO: 316905 - DNA, 15 bp, Homo sapiens
cagctgccaggagcc

SEQ ID NO: 316906 - DNA, 15 bp, Homo sapiens
ccagctgccaggagc

SEQ ID NO: 316907 - DNA, 15 bp, Homo sapiens
cccagctgccaggag

SEQ ID NO: 316908 - DNA, 15 bp, Homo sapiens
acccagctgccagga

SEQ ID NO: 316909 - DNA, 15 bp, Homo sapiens
cacccagctgccagg

SEQ ID NO: 316910 - DNA, 15 bp, Homo sapiens
ccacccagctgccag

SEQ ID NO: 316911 - DNA, 15 bp, Homo sapiens
cccacccagctgcca

SEQ ID NO: 316912 - DNA, 15 bp, Homo sapiens
ccccacccagctgcc

SEQ ID NO: 316913 - DNA, 15 bp, Homo sapiens
gccccacccagctgc

SEQ ID NO: 316914 - DNA, 15 bp, Homo sapiens
agccccacccagctg

SEQ ID NO: 316915 - DNA, 15 bp, Homo sapiens
cagccccacccagct

SEQ ID NO: 316916 - DNA, 15 bp, Homo sapiens
ccagccccacccagc

SEQ ID NO: 316917 - DNA, 15 bp, Homo sapiens
gccagccccacccag

SEQ ID NO: 316918 - DNA, 15 bp, Homo sapiens
ggccagccccaccca

SEQ ID NO: 316919 - DNA, 15 bp, Homo sapiens
gggccagccccaccc

SEQ ID NO: 316920 - DNA, 15 bp, Homo sapiens
ggggccagccccacc

SEQ ID NO: 316921 - DNA, 15 bp, Homo sapiens
tggggccagccccac

SEQ ID NO: 316922 - DNA, 15 bp, Homo sapiens
ctggggccagcccca

SEQ ID NO: 316923 - DNA, 15 bp, Homo sapiens
gctggggccagcccc

SEQ ID NO: 316924 - DNA, 15 bp, Homo sapiens
ggctggggccagccc

SEQ ID NO: 316925 - DNA, 15 bp, Homo sapiens
cggctggggccagcc

SEQ ID NO: 316926 - DNA, 15 bp, Homo sapiens
ccggctggggccagc

SEQ ID NO: 316927 - DNA, 15 bp, Homo sapiens
cccggctggggccag

SEQ ID NO: 316928 - DNA, 15 bp, Homo sapiens
acccggctggggcca

SEQ ID NO: 316929 - DNA, 15 bp, Homo sapiens
cacccggctggggcc

SEQ ID NO: 316930 - DNA, 15 bp, Homo sapiens
ccacccggctggggc

SEQ ID NO: 316931 - DNA, 15 bp, Homo sapiens
tccacccggctgggg

SEQ ID NO: 316932 - DNA, 15 bp, Homo sapiens
ctccacccggctggg

SEQ ID NO: 316933 - DNA, 15 bp, Homo sapiens
tctccacccggctgg

SEQ ID NO: 316934 - DNA, 15 bp, Homo sapiens
gtctccacccggctg

SEQ ID NO: 316935 - DNA, 15 bp, Homo sapiens
ggtctccacccggct

SEQ ID NO: 316936 - DNA, 15 bp, Homo sapiens
tggtctccacccggc

SEQ ID NO: 316937 - DNA, 15 bp, Homo sapiens
ctggtctccacccgg

SEQ ID NO: 316938 - DNA, 15 bp, Homo sapiens
gctggtctccacccg

SEQ ID NO: 316939 - DNA, 15 bp, Homo sapiens
agctggtctccaccc

SEQ ID NO: 316940 - DNA, 15 bp, Homo sapiens
cagctggtctccacc

SEQ ID NO: 316941 - DNA, 15 bp, Homo sapiens
acagctggtctccac

SEQ ID NO: 316942 - DNA, 15 bp, Homo sapiens
tacagctggtctcca

SEQ ID NO: 316943 - DNA, 15 bp, Homo sapiens
ctacagctggtctcc

SEQ ID NO: 316944 - DNA, 15 bp, Homo sapiens
cctacagctggtctc

SEQ ID NO: 316945 - DNA, 15 bp, Homo sapiens
gcctacagctggtct

SEQ ID NO: 316946 - DNA, 15 bp, Homo sapiens
ggcctacagctggtc

SEQ ID NO: 316947 - DNA, 15 bp, Homo sapiens
aggcctacagctggt

SEQ ID NO: 316948 - DNA, 15 bp, Homo sapiens
caggcctacagctgg

SEQ ID NO: 316949 - DNA, 15 bp, Homo sapiens
ccaggcctacagctg

SEQ ID NO: 316950 - DNA, 15 bp, Homo sapiens
tccaggcctacagct

SEQ ID NO: 316951 - DNA, 15 bp, Homo sapiens
atccaggcctacagc

SEQ ID NO: 316952 - DNA, 15 bp, Homo sapiens
catccaggcctacag

SEQ ID NO: 316953 - DNA, 15 bp, Homo sapiens
ccatccaggcctaca

SEQ ID NO: 316954 - DNA, 15 bp, Homo sapiens
accatccaggcctac

SEQ ID NO: 316955 - DNA, 15 bp, Homo sapiens
caccatccaggccta

SEQ ID NO: 316956 - DNA, 15 bp, Homo sapiens
ccaccatccaggcct

SEQ ID NO: 316957 - DNA, 15 bp, Homo sapiens
accaccatccaggcc

SEQ ID NO: 316958 - DNA, 15 bp, Homo sapiens
caccaccatccaggc

SEQ ID NO: 316959 - DNA, 15 bp, Homo sapiens
tcaccaccatccagg

SEQ ID NO: 316960 - DNA, 15 bp, Homo sapiens
ctcaccaccatccag

SEQ ID NO: 316961 - DNA, 15 bp, Homo sapiens
cctcaccaccatcca

SEQ ID NO: 316962 - DNA, 15 bp, Homo sapiens
gcctcaccaccatcc

SEQ ID NO: 316963 - DNA, 15 bp, Homo sapiens
ggcctcaccaccatc

SEQ ID NO: 316964 - DNA, 15 bp, Homo sapiens
aggcctcaccaccat

SEQ ID NO: 316965 - DNA, 15 bp, Homo sapiens
gaggcctcaccacca

SEQ ID NO: 316966 - DNA, 15 bp, Homo sapiens
agaggcctcaccacc

SEQ ID NO: 316967 - DNA, 15 bp, Homo sapiens
cagaggcctcaccac

SEQ ID NO: 316968 - DNA, 15 bp, Homo sapiens
acagaggcctcacca

SEQ ID NO: 316969 - DNA, 15 bp, Homo sapiens
gacagaggcctcacc

SEQ ID NO: 316970 - DNA, 15 bp, Homo sapiens
agacagaggcctcac

SEQ ID NO: 316971 - DNA, 15 bp, Homo sapiens
aagacagaggcctca

SEQ ID NO: 316972 - DNA, 15 bp, Homo sapiens
caagacagaggcctc

SEQ ID NO: 316973 - DNA, 15 bp, Homo sapiens
gcaagacagaggcct

SEQ ID NO: 316974 - DNA, 15 bp, Homo sapiens
cgcaagacagaggcc

SEQ ID NO: 316975 - DNA, 15 bp, Homo sapiens
gcgcaagacagaggc

SEQ ID NO: 316976 - DNA, 15 bp, Homo sapiens
agcgcaagacagagg

SEQ ID NO: 316977 - DNA, 15 bp, Homo sapiens
cagcgcaagacagag

SEQ ID NO: 316978 - DNA, 15 bp, Homo sapiens
gcagcgcaagacaga

SEQ ID NO: 316979 - DNA, 15 bp, Homo sapiens
tgcagcgcaagacag

SEQ ID NO: 316980 - DNA, 15 bp, Homo sapiens
ctgcagcgcaagaca

SEQ ID NO: 316981 - DNA, 15 bp, Homo sapiens
tctgcagcgcaagac

SEQ ID NO: 316982 - DNA, 15 bp, Homo sapiens
ttctgcagcgcaaga

SEQ ID NO: 316983 - DNA, 15 bp, Homo sapiens
tttctgcagcgcaag

SEQ ID NO: 316984 - DNA, 15 bp, Homo sapiens
ctttctgcagcgcaa

SEQ ID NO: 316985 - DNA, 15 bp, Homo sapiens
gctttctgcagcgca

SEQ ID NO: 316986 - DNA, 15 bp, Homo sapiens
agctttctgcagcgc

SEQ ID NO: 316987 - DNA, 15 bp, Homo sapiens
aagctttctgcagcg

SEQ ID NO: 316988 - DNA, 15 bp, Homo sapiens
aaagctttctgcagc

SEQ ID NO: 316989 - DNA, 15 bp, Homo sapiens
aaaagctttctgcag

SEQ ID NO: 316990 - DNA, 15 bp, Homo sapiens
gaaaagctttctgca

SEQ ID NO: 316991 - DNA, 15 bp, Homo sapiens
ggaaaagctttctgc

SEQ ID NO: 316992 - DNA, 15 bp, Homo sapiens
aggaaaagctttctg

SEQ ID NO: 316993 - DNA, 15 bp, Homo sapiens
caggaaaagctttct

SEQ ID NO: 316994 - DNA, 15 bp, Homo sapiens
acaggaaaagctttc

SEQ ID NO: 316995 - DNA, 15 bp, Homo sapiens
aacaggaaaagcttt

SEQ ID NO: 316996 - DNA, 15 bp, Homo sapiens
caacaggaaaagctt

SEQ ID NO: 316997 - DNA, 15 bp, Homo sapiens
acaacaggaaaagct

SEQ ID NO: 316998 - DNA, 15 bp, Homo sapiens
gacaacaggaaaagc

SEQ ID NO: 316999 - DNA, 15 bp, Homo sapiens
agacaacaggaaaag

SEQ ID NO: 317000 - DNA, 15 bp, Homo sapiens
tagacaacaggaaaa

SEQ ID NO: 317001 - DNA, 15 bp, Homo sapiens
gtagacaacaggaaa

SEQ ID NO: 317002 - DNA, 15 bp, Homo sapiens
tgtagacaacaggaa

SEQ ID NO: 317003 - DNA, 15 bp, Homo sapiens
gtgtagacaacagga

SEQ ID NO: 317004 - DNA, 15 bp, Homo sapiens
cgtgtagacaacagg

SEQ ID NO: 317005 - DNA, 15 bp, Homo sapiens
tcgtgtagacaacag

SEQ ID NO: 317006 - DNA, 15 bp, Homo sapiens
ttcgtgtagacaaca

SEQ ID NO: 317007 - DNA, 15 bp, Homo sapiens
tttcgtgtagacaac

SEQ ID NO: 317008 - DNA, 15 bp, Homo sapiens
ctttcgtgtagacaa

SEQ ID NO: 317009 - DNA, 15 bp, Homo sapiens
actttcgtgtagaca

SEQ ID NO: 317010 - DNA, 15 bp, Homo sapiens
aactttcgtgtagac

SEQ ID NO: 317011 - DNA, 15 bp, Homo sapiens
aaactttcgtgtaga

SEQ ID NO: 317012 - DNA, 15 bp, Homo sapiens
aaaactttcgtgtag

SEQ ID NO: 317013 - DNA, 15 bp, Homo sapiens
gaaaactttcgtgta

SEQ ID NO: 317014 - DNA, 15 bp, Homo sapiens
agaaaactttcgtgt

SEQ ID NO: 317015 - DNA, 15 bp, Homo sapiens
gagaaaactttcgtg

SEQ ID NO: 317016 - DNA, 15 bp, Homo sapiens
ggagaaaactttcgt

SEQ ID NO: 317017 - DNA, 15 bp, Homo sapiens
gggagaaaactttcg

SEQ ID NO: 317018 - DNA, 15 bp, Homo sapiens
agggagaaaactttc

SEQ ID NO: 317019 - DNA, 15 bp, Homo sapiens
cagggagaaaacttt

SEQ ID NO: 317020 - DNA, 15 bp, Homo sapiens
gcagggagaaaactt

SEQ ID NO: 317021 - DNA, 15 bp, Homo sapiens
tgcagggagaaaact

SEQ ID NO: 317022 - DNA, 15 bp, Homo sapiens
atgcagggagaaaac

SEQ ID NO: 317023 - DNA, 15 bp, Homo sapiens
catgcagggagaaaa

SEQ ID NO: 317024 - DNA, 15 bp, Homo sapiens
acatgcagggagaaa

SEQ ID NO: 317025 - DNA, 15 bp, Homo sapiens
gacatgcagggagaa

SEQ ID NO: 317026 - DNA, 15 bp, Homo sapiens
tgacatgcagggaga

SEQ ID NO: 317027 - DNA, 15 bp, Homo sapiens
ctgacatgcagggag

SEQ ID NO: 317028 - DNA, 15 bp, Homo sapiens
cctgacatgcaggga

SEQ ID NO: 317029 - DNA, 15 bp, Homo sapiens
ccctgacatgcaggg

SEQ ID NO: 317030 - DNA, 15 bp, Homo sapiens
gccctgacatgcagg

SEQ ID NO: 317031 - DNA, 15 bp, Homo sapiens
tgccctgacatgcag

SEQ ID NO: 317032 - DNA, 15 bp, Homo sapiens
ctgccctgacatgca

SEQ ID NO: 317033 - DNA, 15 bp, Homo sapiens
gctgccctgacatgc

SEQ ID NO: 317034 - DNA, 15 bp, Homo sapiens
ggctgccctgacatg

SEQ ID NO: 317035 - DNA, 15 bp, Homo sapiens
tggctgccctgacat

SEQ ID NO: 317036 - DNA, 15 bp, Homo sapiens
gtggctgccctgaca

SEQ ID NO: 317037 - DNA, 15 bp, Homo sapiens
cgtggctgccctgac

SEQ ID NO: 317038 - DNA, 15 bp, Homo sapiens
acgtggctgccctga

SEQ ID NO: 317039 - DNA, 15 bp, Homo sapiens
cacgtggctgccctg

SEQ ID NO: 317040 - DNA, 15 bp, Homo sapiens
gcacgtggctgccct

SEQ ID NO: 317041 - DNA, 15 bp, Homo sapiens
tgcacgtggctgccc

SEQ ID NO: 317042 - DNA, 15 bp, Homo sapiens
ttgcacgtggctgcc

SEQ ID NO: 317043 - DNA, 15 bp, Homo sapiens
cttgcacgtggctgc

SEQ ID NO: 317044 - DNA, 15 bp, Homo sapiens
tcttgcacgtggctg

SEQ ID NO: 317045 - DNA, 15 bp, Homo sapiens
ctcttgcacgtggct

SEQ ID NO: 317046 - DNA, 15 bp, Homo sapiens
gctcttgcacgtggc

SEQ ID NO: 317047 - DNA, 15 bp, Homo sapiens
tgctcttgcacgtgg

SEQ ID NO: 317048 - DNA, 15 bp, Homo sapiens
ctgctcttgcacgtg

SEQ ID NO: 317049 - DNA, 15 bp, Homo sapiens
gctgctcttgcacgt

SEQ ID NO: 317050 - DNA, 15 bp, Homo sapiens
agctgctcttgcacg

SEQ ID NO: 317051 - DNA, 15 bp, Homo sapiens
cagctgctcttgcac

SEQ ID NO: 317052 - DNA, 15 bp, Homo sapiens
ccagctgctcttgca

SEQ ID NO: 317053 - DNA, 15 bp, Homo sapiens
gccagctgctcttgc

SEQ ID NO: 317054 - DNA, 15 bp, Homo sapiens
agccagctgctcttg

SEQ ID NO: 317055 - DNA, 15 bp, Homo sapiens
cagccagctgctctt

SEQ ID NO: 317056 - DNA, 15 bp, Homo sapiens
ccagccagctgctct

SEQ ID NO: 317057 - DNA, 15 bp, Homo sapiens
cccagccagctgctc

SEQ ID NO: 317058 - DNA, 15 bp, Homo sapiens
tcccagccagctgct

SEQ ID NO: 317059 - DNA, 15 bp, Homo sapiens
ttcccagccagctgc

SEQ ID NO: 317060 - DNA, 15 bp, Homo sapiens
gttcccagccagctg

SEQ ID NO: 317061 - DNA, 15 bp, Homo sapiens
cgttcccagccagct

SEQ ID NO: 317062 - DNA, 15 bp, Homo sapiens
gcgttcccagccagc

SEQ ID NO: 317063 - DNA, 15 bp, Homo sapiens
tgcgttcccagccag

SEQ ID NO: 317064 - DNA, 15 bp, Homo sapiens
ctgcgttcccagcca

SEQ ID NO: 317065 - DNA, 15 bp, Homo sapiens
tctgcgttcccagcc

SEQ ID NO: 317066 - DNA, 15 bp, Homo sapiens
ctctgcgttcccagc

SEQ ID NO: 317067 - DNA, 15 bp, Homo sapiens
cctctgcgttcccag

SEQ ID NO: 317068 - DNA, 15 bp, Homo sapiens
acctctgcgttccca

SEQ ID NO: 317069 - DNA, 15 bp, Homo sapiens
gacctctgcgttccc

SEQ ID NO: 317070 - DNA, 15 bp, Homo sapiens
agacctctgcgttcc

SEQ ID NO: 317071 - DNA, 15 bp, Homo sapiens
cagacctctgcgttc

SEQ ID NO: 317072 - DNA, 15 bp, Homo sapiens
gcagacctctgcgtt

SEQ ID NO: 317073 - DNA, 15 bp, Homo sapiens
cgcagacctctgcgt

SEQ ID NO: 317074 - DNA, 15 bp, Homo sapiens
ccgcagacctctgcg

SEQ ID NO: 317075 - DNA, 15 bp, Homo sapiens
gccgcagacctctgc

SEQ ID NO: 317076 - DNA, 15 bp, Homo sapiens
agccgcagacctctg

SEQ ID NO: 317077 - DNA, 15 bp, Homo sapiens
gagccgcagacctct

SEQ ID NO: 317078 - DNA, 15 bp, Homo sapiens
cgagccgcagacctc

SEQ ID NO: 317079 - DNA, 15 bp, Homo sapiens
tcgagccgcagacct

SEQ ID NO: 317080 - DNA, 15 bp, Homo sapiens
ctcgagccgcagacc

SEQ ID NO: 317081 - DNA, 15 bp, Homo sapiens
cctcgagccgcagac

SEQ ID NO: 317082 - DNA, 15 bp, Homo sapiens
gcctcgagccgcaga

SEQ ID NO: 317083 - DNA, 15 bp, Homo sapiens
cgcctcgagccgcag

SEQ ID NO: 317084 - DNA, 15 bp, Homo sapiens
ccgcctcgagccgca

SEQ ID NO: 317085 - DNA, 15 bp, Homo sapiens
cccgcctcgagccgc

SEQ ID NO: 317086 - DNA, 15 bp, Homo sapiens
ccccgcctcgagccg

SEQ ID NO: 317087 - DNA, 15 bp, Homo sapiens
accccgcctcgagcc

SEQ ID NO: 317088 - DNA, 15 bp, Homo sapiens
aaccccgcctcgagc

SEQ ID NO: 317089 - DNA, 15 bp, Homo sapiens
aaaccccgcctcgag

SEQ ID NO: 317090 - DNA, 15 bp, Homo sapiens
taaaccccgcctcga

SEQ ID NO: 317091 - DNA, 15 bp, Homo sapiens
ctaaaccccgcctcg

SEQ ID NO: 317092 - DNA, 15 bp, Homo sapiens
tctaaaccccgcctc

SEQ ID NO: 317093 - DNA, 15 bp, Homo sapiens
ttctaaaccccgcct

SEQ ID NO: 317094 - DNA, 15 bp, Homo sapiens
tttctaaaccccgcc

SEQ ID NO: 317095 - DNA, 15 bp, Homo sapiens
ctttctaaaccccgc

SEQ ID NO: 317096 - DNA, 15 bp, Homo sapiens
tctttctaaaccccg

SEQ ID NO: 317097 - DNA, 15 bp, Homo sapiens
ttctttctaaacccc

SEQ ID NO: 317098 - DNA, 15 bp, Homo sapiens
tttctttctaaaccc

SEQ ID NO: 317099 - DNA, 15 bp, Homo sapiens
ttttctttctaaacc

SEQ ID NO: 317100 - DNA, 15 bp, Homo sapiens
gttttctttctaaac

SEQ ID NO: 317101 - DNA, 15 bp, Homo sapiens
ggttttctttctaaa

SEQ ID NO: 317102 - DNA, 15 bp, Homo sapiens
tggttttctttctaa

SEQ ID NO: 317103 - DNA, 15 bp, Homo sapiens
ctggttttctttcta

SEQ ID NO: 317104 - DNA, 15 bp, Homo sapiens
cctggttttctttct

SEQ ID NO: 317105 - DNA, 15 bp, Homo sapiens
gcctggttttctttc

SEQ ID NO: 317106 - DNA, 15 bp, Homo sapiens
agcctggttttcttt

SEQ ID NO: 317107 - DNA, 15 bp, Homo sapiens
cagcctggttttctt

SEQ ID NO: 317108 - DNA, 15 bp, Homo sapiens
gcagcctggttttct

SEQ ID NO: 317109 - DNA, 15 bp, Homo sapiens
agcagcctggttttc

SEQ ID NO: 317110 - DNA, 15 bp, Homo sapiens
aagcagcctggtttt

SEQ ID NO: 317111 - DNA, 15 bp, Homo sapiens
gaagcagcctggttt

SEQ ID NO: 317112 - DNA, 15 bp, Homo sapiens
ggaagcagcctggtt

SEQ ID NO: 317113 - DNA, 15 bp, Homo sapiens
aggaagcagcctggt

SEQ ID NO: 317114 - DNA, 15 bp, Homo sapiens
caggaagcagcctgg

SEQ ID NO: 317115 - DNA, 15 bp, Homo sapiens
gcaggaagcagcctg

SEQ ID NO: 317116 - DNA, 15 bp, Homo sapiens
agcaggaagcagcct

SEQ ID NO: 317117 - DNA, 15 bp, Homo sapiens
cagcaggaagcagcc

SEQ ID NO: 317118 - DNA, 15 bp, Homo sapiens
gcagcaggaagcagc

SEQ ID NO: 317119 - DNA, 15 bp, Homo sapiens
ggcagcaggaagcag

SEQ ID NO: 317120 - DNA, 15 bp, Homo sapiens
gggcagcaggaagca

SEQ ID NO: 317121 - DNA, 15 bp, Homo sapiens
cgggcagcaggaagc

SEQ ID NO: 317122 - DNA, 15 bp, Homo sapiens
acgggcagcaggaag

SEQ ID NO: 317123 - DNA, 15 bp, Homo sapiens
gacgggcagcaggaa

SEQ ID NO: 317124 - DNA, 15 bp, Homo sapiens
ggacgggcagcagga

SEQ ID NO: 317125 - DNA, 15 bp, Homo sapiens
aggacgggcagcagg

SEQ ID NO: 317126 - DNA, 15 bp, Homo sapiens
caggacgggcagcag

SEQ ID NO: 317127 - DNA, 15 bp, Homo sapiens
gcaggacgggcagca

SEQ ID NO: 317128 - DNA, 15 bp, Homo sapiens
ggcaggacgggcagc

SEQ ID NO: 317129 - DNA, 15 bp, Homo sapiens
aggcaggacgggcag

SEQ ID NO: 317130 - DNA, 15 bp, Homo sapiens
aaggcaggacgggca

SEQ ID NO: 317131 - DNA, 15 bp, Homo sapiens
taaggcaggacgggc

SEQ ID NO: 317132 - DNA, 15 bp, Homo sapiens
ttaaggcaggacggg

SEQ ID NO: 317133 - DNA, 15 bp, Homo sapiens
cttaaggcaggacgg

SEQ ID NO: 317134 - DNA, 15 bp, Homo sapiens
gcttaaggcaggacg

SEQ ID NO: 317135 - DNA, 15 bp, Homo sapiens
agcttaaggcaggac

SEQ ID NO: 317136 - DNA, 15 bp, Homo sapiens
cagcttaaggcagga

SEQ ID NO: 317137 - DNA, 15 bp, Homo sapiens
tcagcttaaggcagg

SEQ ID NO: 317138 - DNA, 15 bp, Homo sapiens
ctcagcttaaggcag

SEQ ID NO: 317139 - DNA, 15 bp, Homo sapiens
actcagcttaaggca

SEQ ID NO: 317140 - DNA, 15 bp, Homo sapiens
tactcagcttaaggc

SEQ ID NO: 317141 - DNA, 15 bp, Homo sapiens
ttactcagcttaagg

SEQ ID NO: 317142 - DNA, 15 bp, Homo sapiens
tttactcagcttaag

SEQ ID NO: 317143 - DNA, 15 bp, Homo sapiens
gtttactcagcttaa

SEQ ID NO: 317144 - DNA, 15 bp, Homo sapiens
agtttactcagctta

SEQ ID NO: 317145 - DNA, 15 bp, Homo sapiens
gagtttactcagctt

SEQ ID NO: 317146 - DNA, 15 bp, Homo sapiens
tgagtttactcagct

SEQ ID NO: 317147 - DNA, 15 bp, Homo sapiens
ttgagtttactcagc

SEQ ID NO: 317148 - DNA, 15 bp, Homo sapiens
tttgagtttactcag

SEQ ID NO: 317149 - DNA, 15 bp, Homo sapiens
ctttgagtttactca

SEQ ID NO: 317150 - DNA, 15 bp, Homo sapiens
cctttgagtttactc

SEQ ID NO: 317151 - DNA, 15 bp, Homo sapiens
gcctttgagtttact

SEQ ID NO: 317152 - DNA, 15 bp, Homo sapiens
tgcctttgagtttac

SEQ ID NO: 317153 - DNA, 15 bp, Homo sapiens
ttgcctttgagttta

SEQ ID NO: 317154 - DNA, 15 bp, Homo sapiens
attgcctttgagttt

SEQ ID NO: 317155 - DNA, 15 bp, Homo sapiens
gattgcctttgagtt

SEQ ID NO: 317156 - DNA, 15 bp, Homo sapiens
agattgcctttgagt

SEQ ID NO: 317157 - DNA, 15 bp, Homo sapiens
aagattgcctttgag

SEQ ID NO: 317158 - DNA, 15 bp, Homo sapiens
gaagattgcctttga

SEQ ID NO: 317159 - DNA, 15 bp, Homo sapiens
agaagattgcctttg

SEQ ID NO: 317160 - DNA, 15 bp, Homo sapiens
aagaagattgccttt

SEQ ID NO: 317161 - DNA, 15 bp, Homo sapiens
aaagaagattgcctt

SEQ ID NO: 317162 - DNA, 15 bp, Homo sapiens
gaaagaagattgcct

SEQ ID NO: 317163 - DNA, 15 bp, Homo sapiens
tgaaagaagattgcc

SEQ ID NO: 317164 - DNA, 15 bp, Homo sapiens
atgaaagaagattgc

SEQ ID NO: 317165 - DNA, 15 bp, Homo sapiens
catgaaagaagattg

SEQ ID NO: 317166 - DNA, 15 bp, Homo sapiens
gcatgaaagaagatt

SEQ ID NO: 317167 - DNA, 15 bp, Homo sapiens
ggcatgaaagaagat

SEQ ID NO: 317168 - DNA, 15 bp, Homo sapiens
aggcatgaaagaaga

SEQ ID NO: 317169 - DNA, 15 bp, Homo sapiens
gaggcatgaaagaag

SEQ ID NO: 317170 - DNA, 15 bp, Homo sapiens
tgaggcatgaaagaa

SEQ ID NO: 317171 - DNA, 15 bp, Homo sapiens
gtgaggcatgaaaga

SEQ ID NO: 317172 - DNA, 15 bp, Homo sapiens
cgtgaggcatgaaag

SEQ ID NO: 317173 - DNA, 15 bp, Homo sapiens
tcgtgaggcatgaaa

SEQ ID NO: 317174 - DNA, 15 bp, Homo sapiens
atcgtgaggcatgaa

SEQ ID NO: 317175 - DNA, 15 bp, Homo sapiens
tatcgtgaggcatga

SEQ ID NO: 317176 - DNA, 15 bp, Homo sapiens
atatcgtgaggcatg

SEQ ID NO: 317177 - DNA, 15 bp, Homo sapiens
aatatcgtgaggcat

SEQ ID NO: 317178 - DNA, 15 bp, Homo sapiens
caatatcgtgaggca

SEQ ID NO: 317179 - DNA, 15 bp, Homo sapiens
acaatatcgtgaggc

SEQ ID NO: 317180 - DNA, 15 bp, Homo sapiens
gacaatatcgtgagg

SEQ ID NO: 317181 - DNA, 15 bp, Homo sapiens
ggacaatatcgtgag

SEQ ID NO: 317182 - DNA, 15 bp, Homo sapiens
tggacaatatcgtga

SEQ ID NO: 317183 - DNA, 15 bp, Homo sapiens
ctggacaatatcgtg

SEQ ID NO: 317184 - DNA, 15 bp, Homo sapiens
actggacaatatcgt

SEQ ID NO: 317185 - DNA, 15 bp, Homo sapiens
cactggacaatatcg

SEQ ID NO: 317186 - DNA, 15 bp, Homo sapiens
ccactggacaatatc

SEQ ID NO: 317187 - DNA, 15 bp, Homo sapiens
tccactggacaatat

SEQ ID NO: 317188 - DNA, 15 bp, Homo sapiens
atccactggacaata

SEQ ID NO: 317189 - DNA, 15 bp, Homo sapiens
aatccactggacaat

SEQ ID NO: 317190 - DNA, 15 bp, Homo sapiens
taatccactggacaa

SEQ ID NO: 317191 - DNA, 15 bp, Homo sapiens
ataatccactggaca

SEQ ID NO: 317192 - DNA, 15 bp, Homo sapiens
gataatccactggac

SEQ ID NO: 317193 - DNA, 15 bp, Homo sapiens
agataatccactgga

SEQ ID NO: 317194 - DNA, 15 bp, Homo sapiens
cagataatccactgg

SEQ ID NO: 317195 - DNA, 15 bp, Homo sapiens
tcagataatccactg

SEQ ID NO: 317196 - DNA, 15 bp, Homo sapiens
atcagataatccact

SEQ ID NO: 317197 - DNA, 15 bp, Homo sapiens
aatcagataatccac

SEQ ID NO: 317198 - DNA, 15 bp, Homo sapiens
aaatcagataatcca

SEQ ID NO: 317199 - DNA, 15 bp, Homo sapiens
taaatcagataatcc

SEQ ID NO: 317200 - DNA, 15 bp, Homo sapiens
ttaaatcagataatc

SEQ ID NO: 317201 - DNA, 15 bp, Homo sapiens
attaaatcagataat

SEQ ID NO: 317202 - DNA, 15 bp, Homo sapiens
aattaaatcagataa

SEQ ID NO: 317203 - DNA, 15 bp, Homo sapiens
aaattaaatcagata

SEQ ID NO: 317204 - DNA, 15 bp, Homo sapiens
caaattaaatcagat

SEQ ID NO: 317205 - DNA, 15 bp, Homo sapiens
tcaaattaaatcaga

SEQ ID NO: 317206 - DNA, 15 bp, Homo sapiens
ttcaaattaaatcag

SEQ ID NO: 317207 - DNA, 15 bp, Homo sapiens
cttcaaattaaatca

SEQ ID NO: 317208 - DNA, 15 bp, Homo sapiens
ccttcaaattaaatc

SEQ ID NO: 317209 - DNA, 15 bp, Homo sapiens
tccttcaaattaaat

SEQ ID NO: 317210 - DNA, 15 bp, Homo sapiens
gtccttcaaattaaa

SEQ ID NO: 317211 - DNA, 15 bp, Homo sapiens
cgtccttcaaattaa

SEQ ID NO: 317212 - DNA, 15 bp, Homo sapiens
tcgtccttcaaatta

SEQ ID NO: 317213 - DNA, 15 bp, Homo sapiens
ctcgtccttcaaatt

SEQ ID NO: 317214 - DNA, 15 bp, Homo sapiens
tctcgtccttcaaat

SEQ ID NO: 317215 - DNA, 15 bp, Homo sapiens
ctctcgtccttcaaa

SEQ ID NO: 317216 - DNA, 15 bp, Homo sapiens
gctctcgtccttcaa

SEQ ID NO: 317217 - DNA, 15 bp, Homo sapiens
ggctctcgtccttca

SEQ ID NO: 317218 - DNA, 15 bp, Homo sapiens
tggctctcgtccttc

SEQ ID NO: 317219 - DNA, 15 bp, Homo sapiens
ttggctctcgtcctt

SEQ ID NO: 317220 - DNA, 15 bp, Homo sapiens
gttggctctcgtcct

SEQ ID NO: 317221 - DNA, 15 bp, Homo sapiens
tgttggctctcgtcc

SEQ ID NO: 317222 - DNA, 15 bp, Homo sapiens
ttgttggctctcgtc

SEQ ID NO: 317223 - DNA, 15 bp, Homo sapiens
attgttggctctcgt

SEQ ID NO: 317224 - DNA, 15 bp, Homo sapiens
gattgttggctctcg

SEQ ID NO: 317225 - DNA, 15 bp, Homo sapiens
tgattgttggctctc

SEQ ID NO: 317226 - DNA, 15 bp, Homo sapiens
gtgattgttggctct

SEQ ID NO: 317227 - DNA, 15 bp, Homo sapiens
tgtgattgttggctc

SEQ ID NO: 317228 - DNA, 15 bp, Homo sapiens
gtgtgattgttggct

SEQ ID NO: 317229 - DNA, 15 bp, Homo sapiens
tgtgtgattgttggc

SEQ ID NO: 317230 - DNA, 15 bp, Homo sapiens
ttgtgtgattgttgg

SEQ ID NO: 317231 - DNA, 15 bp, Homo sapiens
gttgtgtgattgttg

SEQ ID NO: 317232 - DNA, 15 bp, Homo sapiens
cgttgtgtgattgtt

SEQ ID NO: 317233 - DNA, 15 bp, Homo sapiens
acgttgtgtgattgt

SEQ ID NO: 317234 - DNA, 15 bp, Homo sapiens
gacgttgtgtgattg

SEQ ID NO: 317235 - DNA, 15 bp, Homo sapiens
ggacgttgtgtgatt

SEQ ID NO: 317236 - DNA, 15 bp, Homo sapiens
aggacgttgtgtgat

SEQ ID NO: 317237 - DNA, 15 bp, Homo sapiens
gaggacgttgtgtga

SEQ ID NO: 317238 - DNA, 15 bp, Homo sapiens
ggaggacgttgtgtg

SEQ ID NO: 317239 - DNA, 15 bp, Homo sapiens
gggaggacgttgtgt

SEQ ID NO: 317240 - DNA, 15 bp, Homo sapiens
tgggaggacgttgtg

SEQ ID NO: 317241 - DNA, 15 bp, Homo sapiens
ttgggaggacgttgt

SEQ ID NO: 317242 - DNA, 15 bp, Homo sapiens
tttgggaggacgttg

SEQ ID NO: 317243 - DNA, 15 bp, Homo sapiens
atttgggaggacgtt

SEQ ID NO: 317244 - DNA, 15 bp, Homo sapiens
aatttgggaggacgt

SEQ ID NO: 317245 - DNA, 15 bp, Homo sapiens
aaatttgggaggacg

SEQ ID NO: 317246 - DNA, 15 bp, Homo sapiens
aaaatttgggaggac

SEQ ID NO: 317247 - DNA, 15 bp, Homo sapiens
gaaaatttgggagga

SEQ ID NO: 317248 - DNA, 15 bp, Homo sapiens
agaaaatttgggagg

SEQ ID NO: 317249 - DNA, 15 bp, Homo sapiens
cagaaaatttgggag

SEQ ID NO: 317250 - DNA, 15 bp, Homo sapiens
tcagaaaatttggga

SEQ ID NO: 317251 - DNA, 15 bp, Homo sapiens
atcagaaaatttggg

SEQ ID NO: 317252 - DNA, 15 bp, Homo sapiens
gatcagaaaatttgg

SEQ ID NO: 317253 - DNA, 15 bp, Homo sapiens
ggatcagaaaatttg

SEQ ID NO: 317254 - DNA, 15 bp, Homo sapiens
tggatcagaaaattt

SEQ ID NO: 317255 - DNA, 15 bp, Homo sapiens
gtggatcagaaaatt

SEQ ID NO: 317256 - DNA, 15 bp, Homo sapiens
agtggatcagaaaat

SEQ ID NO: 317257 - DNA, 15 bp, Homo sapiens
aagtggatcagaaaa

SEQ ID NO: 317258 - DNA, 15 bp, Homo sapiens
aaagtggatcagaaa

SEQ ID NO: 317259 - DNA, 15 bp, Homo sapiens
caaagtggatcagaa

SEQ ID NO: 317260 - DNA, 15 bp, Homo sapiens
acaaagtggatcaga

SEQ ID NO: 317261 - DNA, 15 bp, Homo sapiens
aacaaagtggatcag

SEQ ID NO: 317262 - DNA, 15 bp, Homo sapiens
gaacaaagtggatca

SEQ ID NO: 317263 - DNA, 15 bp, Homo sapiens
agaacaaagtggatc

SEQ ID NO: 317264 - DNA, 15 bp, Homo sapiens
cagaacaaagtggat

SEQ ID NO: 317265 - DNA, 15 bp, Homo sapiens
ccagaacaaagtgga

SEQ ID NO: 317266 - DNA, 15 bp, Homo sapiens
cccagaacaaagtgg

SEQ ID NO: 317267 - DNA, 15 bp, Homo sapiens
tcccagaacaaagtg

SEQ ID NO: 317268 - DNA, 15 bp, Homo sapiens
ttcccagaacaaagt

SEQ ID NO: 317269 - DNA, 15 bp, Homo sapiens
cttcccagaacaaag

SEQ ID NO: 317270 - DNA, 15 bp, Homo sapiens
acttcccagaacaaa

SEQ ID NO: 317271 - DNA, 15 bp, Homo sapiens
gacttcccagaacaa

SEQ ID NO: 317272 - DNA, 15 bp, Homo sapiens
tgacttcccagaaca

SEQ ID NO: 317273 - DNA, 15 bp, Homo sapiens
ttgacttcccagaac

SEQ ID NO: 317274 - DNA, 15 bp, Homo sapiens
tttgacttcccagaa

SEQ ID NO: 317275 - DNA, 15 bp, Homo sapiens
ttttgacttcccaga

SEQ ID NO: 317276 - DNA, 15 bp, Homo sapiens
tttttgacttcccag

SEQ ID NO: 317277 - DNA, 15 bp, Homo sapiens
ctttttgacttccca

SEQ ID NO: 317278 - DNA, 15 bp, Homo sapiens
actttttgacttccc

SEQ ID NO: 317279 - DNA, 15 bp, Homo sapiens
cactttttgacttcc

SEQ ID NO: 317280 - DNA, 15 bp, Homo sapiens
acactttttgacttc

SEQ ID NO: 317281 - DNA, 15 bp, Homo sapiens
cacactttttgactt

SEQ ID NO: 317282 - DNA, 15 bp, Homo sapiens
acacactttttgact

SEQ ID NO: 317283 - DNA, 15 bp, Homo sapiens
cacacactttttgac

SEQ ID NO: 317284 - DNA, 15 bp, Homo sapiens
acacacactttttga

SEQ ID NO: 317285 - DNA, 15 bp, Homo sapiens
cacacacactttttg

SEQ ID NO: 317286 - DNA, 15 bp, Homo sapiens
gcacacacacttttt

SEQ ID NO: 317287 - DNA, 15 bp, Homo sapiens
agcacacacactttt

SEQ ID NO: 317288 - DNA, 15 bp, Homo sapiens
cagcacacacacttt

SEQ ID NO: 317289 - DNA, 15 bp, Homo sapiens
acagcacacacactt

SEQ ID NO: 317290 - DNA, 15 bp, Homo sapiens
cacagcacacacact

SEQ ID NO: 317291 - DNA, 15 bp, Homo sapiens
acacagcacacacac

SEQ ID NO: 317292 - DNA, 15 bp, Homo sapiens
cacacagcacacaca

SEQ ID NO: 317293 - DNA, 15 bp, Homo sapiens
ccacacagcacacac

SEQ ID NO: 317294 - DNA, 15 bp, Homo sapiens
cccacacagcacaca

SEQ ID NO: 317295 - DNA, 15 bp, Homo sapiens
acccacacagcacac

SEQ ID NO: 317296 - DNA, 15 bp, Homo sapiens
cacccacacagcaca

SEQ ID NO: 317297 - DNA, 15 bp, Homo sapiens
ccacccacacagcac

SEQ ID NO: 317298 - DNA, 15 bp, Homo sapiens
tccacccacacagca

SEQ ID NO: 317299 - DNA, 15 bp, Homo sapiens
atccacccacacagc

SEQ ID NO: 317300 - DNA, 15 bp, Homo sapiens
catccacccacacag

SEQ ID NO: 317301 - DNA, 15 bp, Homo sapiens
acatccacccacaca

SEQ ID NO: 317302 - DNA, 15 bp, Homo sapiens
aacatccacccacac

SEQ ID NO: 317303 - DNA, 15 bp, Homo sapiens
aaacatccacccaca

SEQ ID NO: 317304 - DNA, 15 bp, Homo sapiens
caaacatccacccac

SEQ ID NO: 317305 - DNA, 15 bp, Homo sapiens
acaaacatccaccca

SEQ ID NO: 317306 - DNA, 15 bp, Homo sapiens
cacaaacatccaccc

SEQ ID NO: 317307 - DNA, 15 bp, Homo sapiens
acacaaacatccacc

SEQ ID NO: 317308 - DNA, 15 bp, Homo sapiens
tacacaaacatccac

SEQ ID NO: 317309 - DNA, 15 bp, Homo sapiens
atacacaaacatcca

SEQ ID NO: 317310 - DNA, 15 bp, Homo sapiens
tatacacaaacatcc

SEQ ID NO: 317311 - DNA, 15 bp, Homo sapiens
atatacacaaacatc

SEQ ID NO: 317312 - DNA, 15 bp, Homo sapiens
tatatacacaaacat

SEQ ID NO: 317313 - DNA, 15 bp, Homo sapiens
ttatatacacaaaca

SEQ ID NO: 317314 - DNA, 15 bp, Homo sapiens
tttatatacacaaac

SEQ ID NO: 317315 - DNA, 15 bp, Homo sapiens
atttatatacacaaa

SEQ ID NO: 317316 - DNA, 15 bp, Homo sapiens
catttatatacacaa

SEQ ID NO: 317317 - DNA, 15 bp, Homo sapiens
ccatttatatacaca

SEQ ID NO: 317318 - DNA, 15 bp, Homo sapiens
tccatttatatacac

SEQ ID NO: 317319 - DNA, 15 bp, Homo sapiens
atccatttatataca

SEQ ID NO: 317320 - DNA, 15 bp, Homo sapiens
tatccatttatatac

SEQ ID NO: 317321 - DNA, 15 bp, Homo sapiens
ttatccatttatata

SEQ ID NO: 317322 - DNA, 15 bp, Homo sapiens
attatccatttatat

SEQ ID NO: 317323 - DNA, 15 bp, Homo sapiens
cattatccatttata

SEQ ID NO: 317324 - DNA, 15 bp, Homo sapiens
tcattatccatttat

SEQ ID NO: 317325 - DNA, 15 bp, Homo sapiens
ttcattatccattta

SEQ ID NO: 317326 - DNA, 15 bp, Homo sapiens
cttcattatccattt

SEQ ID NO: 317327 - DNA, 15 bp, Homo sapiens
ccttcattatccatt

SEQ ID NO: 317328 - DNA, 15 bp, Homo sapiens
tccttcattatccat

SEQ ID NO: 317329 - DNA, 15 bp, Homo sapiens
atccttcattatcca

SEQ ID NO: 317330 - DNA, 15 bp, Homo sapiens
catccttcattatcc

SEQ ID NO: 317331 - DNA, 15 bp, Homo sapiens
tcatccttcattatc

SEQ ID NO: 317332 - DNA, 15 bp, Homo sapiens
atcatccttcattat

SEQ ID NO: 317333 - DNA, 15 bp, Homo sapiens
catcatccttcatta

SEQ ID NO: 317334 - DNA, 15 bp, Homo sapiens
acatcatccttcatt

SEQ ID NO: 317335 - DNA, 15 bp, Homo sapiens
cacatcatccttcat

SEQ ID NO: 317336 - DNA, 15 bp, Homo sapiens
acacatcatccttca

SEQ ID NO: 317337 - DNA, 15 bp, Homo sapiens
aacacatcatccttc

SEQ ID NO: 317338 - DNA, 15 bp, Homo sapiens
caacacatcatcctt

SEQ ID NO: 317339 - DNA, 15 bp, Homo sapiens
ccaacacatcatcct

SEQ ID NO: 317340 - DNA, 15 bp, Homo sapiens
cccaacacatcatcc

SEQ ID NO: 317341 - DNA, 15 bp, Homo sapiens
ccccaacacatcatc

SEQ ID NO: 317342 - DNA, 15 bp, Homo sapiens
cccccaacacatcat

SEQ ID NO: 317343 - DNA, 15 bp, Homo sapiens
gcccccaacacatca

SEQ ID NO: 317344 - DNA, 15 bp, Homo sapiens
ggcccccaacacatc

SEQ ID NO: 317345 - DNA, 15 bp, Homo sapiens
tggcccccaacacat

SEQ ID NO: 317346 - DNA, 15 bp, Homo sapiens
ctggcccccaacaca

SEQ ID NO: 317347 - DNA, 15 bp, Homo sapiens
cctggcccccaacac

SEQ ID NO: 317348 - DNA, 15 bp, Homo sapiens
ccctggcccccaaca

SEQ ID NO: 317349 - DNA, 15 bp, Homo sapiens
gccctggcccccaac

SEQ ID NO: 317350 - DNA, 15 bp, Homo sapiens
tgccctggcccccaa

SEQ ID NO: 317351 - DNA, 15 bp, Homo sapiens
ctgccctggccccca

SEQ ID NO: 317352 - DNA, 15 bp, Homo sapiens
cctgccctggccccc

SEQ ID NO: 317353 - DNA, 15 bp, Homo sapiens
ccctgccctggcccc

SEQ ID NO: 317354 - DNA, 15 bp, Homo sapiens
cccctgccctggccc

SEQ ID NO: 317355 - DNA, 15 bp, Homo sapiens
tcccctgccctggcc

SEQ ID NO: 317356 - DNA, 15 bp, Homo sapiens
ctcccctgccctggc

SEQ ID NO: 317357 - DNA, 15 bp, Homo sapiens
tctcccctgccctgg

SEQ ID NO: 317358 - DNA, 15 bp, Homo sapiens
gtctcccctgccctg

SEQ ID NO: 317359 - DNA, 15 bp, Homo sapiens
tgtctcccctgccct

SEQ ID NO: 317360 - DNA, 15 bp, Homo sapiens
ttgtctcccctgccc

SEQ ID NO: 317361 - DNA, 15 bp, Homo sapiens
gttgtctcccctgcc

SEQ ID NO: 317362 - DNA, 15 bp, Homo sapiens
cgttgtctcccctgc

SEQ ID NO: 317363 - DNA, 15 bp, Homo sapiens
gcgttgtctcccctg

SEQ ID NO: 317364 - DNA, 15 bp, Homo sapiens
agcgttgtctcccct

SEQ ID NO: 317365 - DNA, 15 bp, Homo sapiens
cagcgttgtctcccc

SEQ ID NO: 317366 - DNA, 15 bp, Homo sapiens
acagcgttgtctccc

SEQ ID NO: 317367 - DNA, 15 bp, Homo sapiens
aacagcgttgtctcc

SEQ ID NO: 317368 - DNA, 15 bp, Homo sapiens
gaacagcgttgtctc

SEQ ID NO: 317369 - DNA, 15 bp, Homo sapiens
tgaacagcgttgtct

SEQ ID NO: 317370 - DNA, 15 bp, Homo sapiens
ctgaacagcgttgtc

SEQ ID NO: 317371 - DNA, 15 bp, Homo sapiens
tctgaacagcgttgt

SEQ ID NO: 317372 - DNA, 15 bp, Homo sapiens
atctgaacagcgttg

SEQ ID NO: 317373 - DNA, 15 bp, Homo sapiens
aatctgaacagcgtt

SEQ ID NO: 317374 - DNA, 15 bp, Homo sapiens
gaatctgaacagcgt

SEQ ID NO: 317375 - DNA, 15 bp, Homo sapiens
agaatctgaacagcg

SEQ ID NO: 317376 - DNA, 15 bp, Homo sapiens
tagaatctgaacagc

SEQ ID NO: 317377 - DNA, 15 bp, Homo sapiens
gtagaatctgaacag

SEQ ID NO: 317378 - DNA, 15 bp, Homo sapiens
tgtagaatctgaaca

SEQ ID NO: 317379 - DNA, 15 bp, Homo sapiens
atgtagaatctgaac

SEQ ID NO: 317380 - DNA, 15 bp, Homo sapiens
aatgtagaatctgaa

SEQ ID NO: 317381 - DNA, 15 bp, Homo sapiens
aaatgtagaatctga

SEQ ID NO: 317382 - DNA, 15 bp, Homo sapiens
aaaatgtagaatctg

SEQ ID NO: 317383 - DNA, 15 bp, Homo sapiens
aaaaatgtagaatct

SEQ ID NO: 317384 - DNA, 15 bp, Homo sapiens
aaaaaatgtagaatc

SEQ ID NO: 317385 - DNA, 15 bp, Homo sapiens
aaaaaaatgtagaat

SEQ ID NO: 317386 - DNA, 15 bp, Homo sapiens
aaaaaaaatgtagaa

SEQ ID NO: 317387 - DNA, 15 bp, Homo sapiens
aaaaaaaaatgtaga

SEQ ID NO: 317388 - DNA, 15 bp, Homo sapiens
gaaaaaaaaatgtag

SEQ ID NO: 317389 - DNA, 15 bp, Homo sapiens
ggaaaaaaaaatgta

SEQ ID NO: 317390 - DNA, 15 bp, Homo sapiens
aggaaaaaaaaatgt

SEQ ID NO: 317391 - DNA, 15 bp, Homo sapiens
aaggaaaaaaaaatg

SEQ ID NO: 317392 - DNA, 15 bp, Homo sapiens
aaaggaaaaaaaaat

SEQ ID NO: 317393 - DNA, 15 bp, Homo sapiens
aaaaggaaaaaaaaa

SEQ ID NO: 317394 - DNA, 15 bp, Homo sapiens
aaaaaggaaaaaaaa

SEQ ID NO: 317395 - DNA, 15 bp, Homo sapiens
aaaaaaggaaaaaaa

SEQ ID NO: 317396 - DNA, 15 bp, Homo sapiens
aaaaaaaggaaaaaa

SEQ ID NO: 317397 - DNA, 15 bp, Homo sapiens
aaaaaaaaggaaaaa

SEQ ID NO: 317398 - DNA, 15 bp, Homo sapiens
aaaaaaaaaggaaaa

SEQ ID NO: 317399 - DNA, 15 bp, Homo sapiens
aaaaaaaaaaggaaa

SEQ ID NO: 317400 - DNA, 15 bp, Homo sapiens
aaaaaaaaaaaggaa

SEQ ID NO: 317401 - DNA, 15 bp, Homo sapiens
aaaaaaaaaaaagga

SEQ ID NO: 317402 - DNA, 15 bp, Homo sapiens
aaaaaaaaaaaaagg

SEQ ID NO: 317403 - DNA, 15 bp, Homo sapiens
aaaaaaaaaaaaaaa

SEQ ID NO: 317404 - DNA, 15 bp, Homo sapiens
atctcaaaaaaaaaa

SEQ ID NO: 317405 - DNA, 15 bp, Homo sapiens
catctcaaaaaaaaa

SEQ ID NO: 317406 - DNA, 15 bp, Homo sapiens
ccatctcaaaaaaaa

SEQ ID NO: 317407 - DNA, 15 bp, Homo sapiens
tccatctcaaaaaaa

SEQ ID NO: 317408 - DNA, 15 bp, Homo sapiens
ctccatctcaaaaaa

SEQ ID NO: 317409 - DNA, 15 bp, Homo sapiens
actccatctcaaaaa

SEQ ID NO: 317410 - DNA, 15 bp, Homo sapiens
gactccatctcaaaa

SEQ ID NO: 317411 - DNA, 15 bp, Homo sapiens
agactccatctcaaa

SEQ ID NO: 317412 - DNA, 15 bp, Homo sapiens
aagactccatctcaa

SEQ ID NO: 317413 - DNA, 15 bp, Homo sapiens
caagactccatctca

SEQ ID NO: 317414 - DNA, 15 bp, Homo sapiens
gcaagactccatctc

SEQ ID NO: 317415 - DNA, 15 bp, Homo sapiens
agcaagactccatct

SEQ ID NO: 317416 - DNA, 15 bp, Homo sapiens
gagcaagactccatc

SEQ ID NO: 317417 - DNA, 15 bp, Homo sapiens
agagcaagactccat

SEQ ID NO: 317418 - DNA, 15 bp, Homo sapiens
cagagcaagactcca

SEQ ID NO: 317419 - DNA, 15 bp, Homo sapiens
acagagcaagactcc

SEQ ID NO: 317420 - DNA, 15 bp, Homo sapiens
aacagagcaagactc

SEQ ID NO: 317421 - DNA, 15 bp, Homo sapiens
caacagagcaagact

SEQ ID NO: 317422 - DNA, 15 bp, Homo sapiens
gcaacagagcaagac

SEQ ID NO: 317423 - DNA, 15 bp, Homo sapiens
ggcaacagagcaaga

SEQ ID NO: 317424 - DNA, 15 bp, Homo sapiens
gggcaacagagcaag

SEQ ID NO: 317425 - DNA, 15 bp, Homo sapiens
tgggcaacagagcaa

SEQ ID NO: 317426 - DNA, 15 bp, Homo sapiens
ctgggcaacagagca

SEQ ID NO: 317427 - DNA, 15 bp, Homo sapiens
gctgggcaacagagc

SEQ ID NO: 317428 - DNA, 15 bp, Homo sapiens
ggctgggcaacagag

SEQ ID NO: 317429 - DNA, 15 bp, Homo sapiens
aggctgggcaacaga

SEQ ID NO: 317430 - DNA, 15 bp, Homo sapiens
caggctgggcaacag

SEQ ID NO: 317431 - DNA, 15 bp, Homo sapiens
ccaggctgggcaaca

SEQ ID NO: 317432 - DNA, 15 bp, Homo sapiens
tccaggctgggcaac

SEQ ID NO: 317433 - DNA, 15 bp, Homo sapiens
ctccaggctgggcaa

SEQ ID NO: 317434 - DNA, 15 bp, Homo sapiens
actccaggctgggca

SEQ ID NO: 317435 - DNA, 15 bp, Homo sapiens
cactccaggctgggc

SEQ ID NO: 317436 - DNA, 15 bp, Homo sapiens
gcactccaggctggg

SEQ ID NO: 317437 - DNA, 15 bp, Homo sapiens
tgcactccaggctgg

SEQ ID NO: 317438 - DNA, 15 bp, Homo sapiens
ctgcactccaggctg

SEQ ID NO: 317439 - DNA, 15 bp, Homo sapiens
actgcactccaggct

SEQ ID NO: 317440 - DNA, 15 bp, Homo sapiens
cactgcactccaggc

SEQ ID NO: 317441 - DNA, 15 bp, Homo sapiens
ccactgcactccagg

SEQ ID NO: 317442 - DNA, 15 bp, Homo sapiens
cgccactgcactcca

SEQ ID NO: 317443 - DNA, 15 bp, Homo sapiens
gcgccactgcactcc

SEQ ID NO: 317444 - DNA, 15 bp, Homo sapiens
cgcgccactgcactc

SEQ ID NO: 317445 - DNA, 15 bp, Homo sapiens
tcgcgccactgcact

SEQ ID NO: 317446 - DNA, 15 bp, Homo sapiens
atcgcgccactgcac

SEQ ID NO: 317447 - DNA, 15 bp, Homo sapiens
gatcgcgccactgca

SEQ ID NO: 317448 - DNA, 15 bp, Homo sapiens
agatcgcgccactgc

SEQ ID NO: 317449 - DNA, 15 bp, Homo sapiens
gagatcgcgccactg

SEQ ID NO: 317450 - DNA, 15 bp, Homo sapiens
tgagatcgcgccact

SEQ ID NO: 317451 - DNA, 15 bp, Homo sapiens
ctgagatcgcgccac

SEQ ID NO: 317452 - DNA, 15 bp, Homo sapiens
gctgagatcgcgcca

SEQ ID NO: 317453 - DNA, 15 bp, Homo sapiens
agctgagatcgcgcc

SEQ ID NO: 317454 - DNA, 15 bp, Homo sapiens
gagctgagatcgcgc

SEQ ID NO: 317455 - DNA, 15 bp, Homo sapiens
tgagctgagatcgcg

SEQ ID NO: 317456 - DNA, 15 bp, Homo sapiens
gtgagctgagatcgc

SEQ ID NO: 317457 - DNA, 15 bp, Homo sapiens
agtgagctgagatcg

SEQ ID NO: 317458 - DNA, 15 bp, Homo sapiens
tggaggttgcagtga

SEQ ID NO: 317459 - DNA, 15 bp, Homo sapiens
gtggaggttgcagtg

SEQ ID NO: 317460 - DNA, 15 bp, Homo sapiens
agtggaggttgcagt

SEQ ID NO: 317461 - DNA, 15 bp, Homo sapiens
aagtggaggttgcag

SEQ ID NO: 317462 - DNA, 15 bp, Homo sapiens
gaagtggaggttgca

SEQ ID NO: 317463 - DNA, 15 bp, Homo sapiens
ggaagtggaggttgc

SEQ ID NO: 317464 - DNA, 15 bp, Homo sapiens
aggaagtggaggttg

SEQ ID NO: 317465 - DNA, 15 bp, Homo sapiens
caggaagtggaggtt

SEQ ID NO: 317466 - DNA, 15 bp, Homo sapiens
ccaggaagtggaggt

SEQ ID NO: 317467 - DNA, 15 bp, Homo sapiens
tccaggaagtggagg

SEQ ID NO: 317468 - DNA, 15 bp, Homo sapiens
atccaggaagtggag

SEQ ID NO: 317469 - DNA, 15 bp, Homo sapiens
aatccaggaagtgga

SEQ ID NO: 317470 - DNA, 15 bp, Homo sapiens
gaatccaggaagtgg

SEQ ID NO: 317471 - DNA, 15 bp, Homo sapiens
tgaatccaggaagtg

SEQ ID NO: 317472 - DNA, 15 bp, Homo sapiens
ttgaatccaggaagt

SEQ ID NO: 317473 - DNA, 15 bp, Homo sapiens
cttgaatccaggaag

SEQ ID NO: 317474 - DNA, 15 bp, Homo sapiens
acttgaatccaggaa

SEQ ID NO: 317475 - DNA, 15 bp, Homo sapiens
cacttgaatccagga

SEQ ID NO: 317476 - DNA, 15 bp, Homo sapiens
tcacttgaatccagg

SEQ ID NO: 317477 - DNA, 15 bp, Homo sapiens
atcacttgaatccag

SEQ ID NO: 317478 - DNA, 15 bp, Homo sapiens
aatcacttgaatcca

SEQ ID NO: 317479 - DNA, 15 bp, Homo sapiens
gaatcacttgaatcc

SEQ ID NO: 317480 - DNA, 15 bp, Homo sapiens
agaatcacttgaatc

SEQ ID NO: 317481 - DNA, 15 bp, Homo sapiens
gagaatcacttgaat

SEQ ID NO: 317482 - DNA, 15 bp, Homo sapiens
ggagaatcacttgaa

SEQ ID NO: 317483 - DNA, 15 bp, Homo sapiens
aggagaatcacttga

SEQ ID NO: 317484 - DNA, 15 bp, Homo sapiens
caggagaatcacttg

SEQ ID NO: 317485 - DNA, 15 bp, Homo sapiens
aaggcaggagaatca

SEQ ID NO: 317486 - DNA, 15 bp, Homo sapiens
taaggcaggagaatc

SEQ ID NO: 317487 - DNA, 15 bp, Homo sapiens
ctaaggcaggagaat

SEQ ID NO: 317488 - DNA, 15 bp, Homo sapiens
gctaaggcaggagaa

SEQ ID NO: 317489 - DNA, 15 bp, Homo sapiens
ggctaaggcaggaga

SEQ ID NO: 317490 - DNA, 15 bp, Homo sapiens
aggctaaggcaggag

SEQ ID NO: 317491 - DNA, 15 bp, Homo sapiens
gaggctaaggcagga

SEQ ID NO: 317492 - DNA, 15 bp, Homo sapiens
ggaggctaaggcagg

SEQ ID NO: 317493 - DNA, 15 bp, Homo sapiens
gggaggctaaggcag

SEQ ID NO: 317494 - DNA, 15 bp, Homo sapiens
tgggaggctaaggca

SEQ ID NO: 317495 - DNA, 15 bp, Homo sapiens
ttgggaggctaaggc

SEQ ID NO: 317496 - DNA, 15 bp, Homo sapiens
cttgggaggctaagg

SEQ ID NO: 317497 - DNA, 15 bp, Homo sapiens
acttgggaggctaag

SEQ ID NO: 317498 - DNA, 15 bp, Homo sapiens
tacttgggaggctaa

SEQ ID NO: 317499 - DNA, 15 bp, Homo sapiens
ctacttgggaggcta

SEQ ID NO: 317500 - DNA, 15 bp, Homo sapiens
gctacttgggaggct

SEQ ID NO: 317501 - DNA, 15 bp, Homo sapiens
agctacttgggaggc

SEQ ID NO: 317502 - DNA, 15 bp, Homo sapiens
cagctacttgggagg

SEQ ID NO: 317503 - DNA, 15 bp, Homo sapiens
atcccagctacttgg

SEQ ID NO: 317504 - DNA, 15 bp, Homo sapiens
aatcccagctacttg

SEQ ID NO: 317505 - DNA, 15 bp, Homo sapiens
taatcccagctactt

SEQ ID NO: 317506 - DNA, 15 bp, Homo sapiens
tgtggtggcgcatgc

SEQ ID NO: 317507 - DNA, 15 bp, Homo sapiens
gtgtggtggcgcatg

SEQ ID NO: 317508 - DNA, 15 bp, Homo sapiens
ggtgtggtggcgcat

SEQ ID NO: 317509 - DNA, 15 bp, Homo sapiens
gggtgtggtggcgca

SEQ ID NO: 317510 - DNA, 15 bp, Homo sapiens
cgggtgtggtggcgc

SEQ ID NO: 317511 - DNA, 15 bp, Homo sapiens
ccgggtgtggtggcg

SEQ ID NO: 317512 - DNA, 15 bp, Homo sapiens
agccgggtgtggtgg

SEQ ID NO: 317513 - DNA, 15 bp, Homo sapiens
tagccgggtgtggtg

SEQ ID NO: 317514 - DNA, 15 bp, Homo sapiens
ttagccgggtgtggt

SEQ ID NO: 317515 - DNA, 15 bp, Homo sapiens
attagccgggtgtgg

SEQ ID NO: 317516 - DNA, 15 bp, Homo sapiens
aattagccgggtgtg

SEQ ID NO: 317517 - DNA, 15 bp, Homo sapiens
aaattagccgggtgt

SEQ ID NO: 317518 - DNA, 15 bp, Homo sapiens
aaaattagccgggtg

SEQ ID NO: 317519 - DNA, 15 bp, Homo sapiens
aaaaattagccgggt

SEQ ID NO: 317520 - DNA, 15 bp, Homo sapiens
caaaaattagccggg

SEQ ID NO: 317521 - DNA, 15 bp, Homo sapiens
acaaaaattagccgg

SEQ ID NO: 317522 - DNA, 15 bp, Homo sapiens
tacaaaaattagccg

SEQ ID NO: 317523 - DNA, 15 bp, Homo sapiens
atacaaaaattagcc

SEQ ID NO: 317524 - DNA, 15 bp, Homo sapiens
agaaaccccatctct

SEQ ID NO: 317525 - DNA, 15 bp, Homo sapiens
gagaaaccccatctc

SEQ ID NO: 317526 - DNA, 15 bp, Homo sapiens
ggagaaaccccatct

SEQ ID NO: 317527 - DNA, 15 bp, Homo sapiens
tggagaaaccccatc

SEQ ID NO: 317528 - DNA, 15 bp, Homo sapiens
atggagaaaccccat

SEQ ID NO: 317529 - DNA, 15 bp, Homo sapiens
catggagaaacccca

SEQ ID NO: 317530 - DNA, 15 bp, Homo sapiens
acatggagaaacccc

SEQ ID NO: 317531 - DNA, 15 bp, Homo sapiens
aacatggagaaaccc

SEQ ID NO: 317532 - DNA, 15 bp, Homo sapiens
caacatggagaaacc

SEQ ID NO: 317533 - DNA, 15 bp, Homo sapiens
ccaacatggagaaac

SEQ ID NO: 317534 - DNA, 15 bp, Homo sapiens
gccaacatggagaaa

SEQ ID NO: 317535 - DNA, 15 bp, Homo sapiens
ggccaacatggagaa

SEQ ID NO: 317536 - DNA, 15 bp, Homo sapiens
tggccaacatggaga

SEQ ID NO: 317537 - DNA, 15 bp, Homo sapiens
ctggccaacatggag

SEQ ID NO: 317538 - DNA, 15 bp, Homo sapiens
cctggccaacatgga

SEQ ID NO: 317539 - DNA, 15 bp, Homo sapiens
tagatcacctgaggt

SEQ ID NO: 317540 - DNA, 15 bp, Homo sapiens
gtagatcacctgagg

SEQ ID NO: 317541 - DNA, 15 bp, Homo sapiens
ggtagatcacctgag

SEQ ID NO: 317542 - DNA, 15 bp, Homo sapiens
gggtagatcacctga

SEQ ID NO: 317543 - DNA, 15 bp, Homo sapiens
cgggtagatcacctg

SEQ ID NO: 317544 - DNA, 15 bp, Homo sapiens
gcgggtagatcacct

SEQ ID NO: 317545 - DNA, 15 bp, Homo sapiens
ggcgggtagatcacc

SEQ ID NO: 317546 - DNA, 15 bp, Homo sapiens
aggcgggtagatcac

SEQ ID NO: 317547 - DNA, 15 bp, Homo sapiens
gaggcgggtagatca

SEQ ID NO: 317548 - DNA, 15 bp, Homo sapiens
cgaggcgggtagatc

SEQ ID NO: 317549 - DNA, 15 bp, Homo sapiens
ccgaggcgggtagat

SEQ ID NO: 317550 - DNA, 15 bp, Homo sapiens
gccgaggcgggtaga

SEQ ID NO: 317551 - DNA, 15 bp, Homo sapiens
ggccgaggcgggtag

SEQ ID NO: 317552 - DNA, 15 bp, Homo sapiens
aggccgaggcgggta

SEQ ID NO: 317553 - DNA, 15 bp, Homo sapiens
gaggccgaggcgggt

SEQ ID NO: 317554 - DNA, 15 bp, Homo sapiens
agaggccgaggcggg

SEQ ID NO: 317555 - DNA, 15 bp, Homo sapiens
gagaggccgaggcgg

SEQ ID NO: 317556 - DNA, 15 bp, Homo sapiens
tgagaggccgaggcg

SEQ ID NO: 317557 - DNA, 15 bp, Homo sapiens
ttgagaggccgaggc

SEQ ID NO: 317558 - DNA, 15 bp, Homo sapiens
tttgagaggccgagg

SEQ ID NO: 317559 - DNA, 15 bp, Homo sapiens
ctttgagaggccgag

SEQ ID NO: 317560 - DNA, 15 bp, Homo sapiens
actttgagaggccga

SEQ ID NO: 317561 - DNA, 15 bp, Homo sapiens
cactttgagaggccg

SEQ ID NO: 317562 - DNA, 15 bp, Homo sapiens
gcactttgagaggcc

SEQ ID NO: 317563 - DNA, 15 bp, Homo sapiens
agcactttgagaggc

SEQ ID NO: 317564 - DNA, 15 bp, Homo sapiens
cagcactttgagagg

SEQ ID NO: 317565 - DNA, 15 bp, Homo sapiens
ccagcactttgagag

SEQ ID NO: 317566 - DNA, 15 bp, Homo sapiens
cccagcactttgaga

SEQ ID NO: 317567 - DNA, 15 bp, Homo sapiens
tcccagcactttgag

SEQ ID NO: 317568 - DNA, 15 bp, Homo sapiens
atcccagcactttga

SEQ ID NO: 317569 - DNA, 15 bp, Homo sapiens
aacctgtaatcccag

SEQ ID NO: 317570 - DNA, 15 bp, Homo sapiens
aaacctgtaatccca

SEQ ID NO: 317571 - DNA, 15 bp, Homo sapiens
caaacctgtaatccc

SEQ ID NO: 317572 - DNA, 15 bp, Homo sapiens
tcaaacctgtaatcc

SEQ ID NO: 317573 - DNA, 15 bp, Homo sapiens
ctcaaacctgtaatc

SEQ ID NO: 317574 - DNA, 15 bp, Homo sapiens
gctcaaacctgtaat

SEQ ID NO: 317575 - DNA, 15 bp, Homo sapiens
ggctcaaacctgtaa

SEQ ID NO: 317576 - DNA, 15 bp, Homo sapiens
tggctcaaacctgta

SEQ ID NO: 317577 - DNA, 15 bp, Homo sapiens
gtggctcaaacctgt

SEQ ID NO: 317578 - DNA, 15 bp, Homo sapiens
agtggctcaaacctg

SEQ ID NO: 317579 - DNA, 15 bp, Homo sapiens
cagtggctcaaacct

SEQ ID NO: 317580 - DNA, 15 bp, Homo sapiens
gcagtggctcaaacc

SEQ ID NO: 317581 - DNA, 15 bp, Homo sapiens
cgcagtggctcaaac

SEQ ID NO: 317582 - DNA, 15 bp, Homo sapiens
gcgcagtggctcaaa

SEQ ID NO: 317583 - DNA, 15 bp, Homo sapiens
ggcgcagtggctcaa

SEQ ID NO: 317584 - DNA, 15 bp, Homo sapiens
aggcgcagtggctca

SEQ ID NO: 317585 - DNA, 15 bp, Homo sapiens
caggcgcagtggctc

SEQ ID NO: 317586 - DNA, 15 bp, Homo sapiens
ccaggcgcagtggct

SEQ ID NO: 317587 - DNA, 15 bp, Homo sapiens
gccaggcgcagtggc

SEQ ID NO: 317588 - DNA, 15 bp, Homo sapiens
ggccaggcgcagtgg

SEQ ID NO: 317589 - DNA, 15 bp, Homo sapiens
aggccaggcgcagtg

SEQ ID NO: 317590 - DNA, 15 bp, Homo sapiens
aaggccaggcgcagt

SEQ ID NO: 317591 - DNA, 15 bp, Homo sapiens
aaaggccaggcgcag

SEQ ID NO: 317592 - DNA, 15 bp, Homo sapiens
aaaaggccaggcgca

SEQ ID NO: 317593 - DNA, 15 bp, Homo sapiens
aaaaaggccaggcgc

SEQ ID NO: 317594 - DNA, 15 bp, Homo sapiens
aaaaaaggccaggcg

SEQ ID NO: 317595 - DNA, 15 bp, Homo sapiens
aaaaaaaggccaggc

SEQ ID NO: 317596 - DNA, 15 bp, Homo sapiens
aaaaaaaaggccagg

SEQ ID NO: 317597 - DNA, 15 bp, Homo sapiens
aaaaaaaaaggccag

SEQ ID NO: 317598 - DNA, 15 bp, Homo sapiens
aaaaaaaaaaggcca

SEQ ID NO: 317599 - DNA, 15 bp, Homo sapiens
aaaaaaaaaaaggcc

SEQ ID NO: 317600 - DNA, 15 bp, Homo sapiens
aaaaaaaaaaaaggc

SEQ ID NO: 317601 - DNA, 15 bp, Homo sapiens
aactccatctcaaaa

SEQ ID NO: 317602 - DNA, 15 bp, Homo sapiens
aaactccatctcaaa

SEQ ID NO: 317603 - DNA, 15 bp, Homo sapiens
aaaactccatctcaa

SEQ ID NO: 317604 - DNA, 15 bp, Homo sapiens
gaaaactccatctca

SEQ ID NO: 317605 - DNA, 15 bp, Homo sapiens
tgaaaactccatctc

SEQ ID NO: 317606 - DNA, 15 bp, Homo sapiens
gtgaaaactccatct

SEQ ID NO: 317607 - DNA, 15 bp, Homo sapiens
agtgaaaactccatc

SEQ ID NO: 317608 - DNA, 15 bp, Homo sapiens
gagtgaaaactccat

SEQ ID NO: 317609 - DNA, 15 bp, Homo sapiens
agagtgaaaactcca

SEQ ID NO: 317610 - DNA, 15 bp, Homo sapiens
aagagtgaaaactcc

SEQ ID NO: 317611 - DNA, 15 bp, Homo sapiens
caagagtgaaaactc

SEQ ID NO: 317612 - DNA, 15 bp, Homo sapiens
acaagagtgaaaact

SEQ ID NO: 317613 - DNA, 15 bp, Homo sapiens
aacaagagtgaaaac

SEQ ID NO: 317614 - DNA, 15 bp, Homo sapiens
caacaagagtgaaaa

SEQ ID NO: 317615 - DNA, 15 bp, Homo sapiens
gcaacaagagtgaaa

SEQ ID NO: 317616 - DNA, 15 bp, Homo sapiens
ggcaacaagagtgaa

SEQ ID NO: 317617 - DNA, 15 bp, Homo sapiens
gggcaacaagagtga

SEQ ID NO: 317618 - DNA, 15 bp, Homo sapiens
tgggcaacaagagtg

SEQ ID NO: 317619 - DNA, 15 bp, Homo sapiens
ctgggcaacaagagt

SEQ ID NO: 317620 - DNA, 15 bp, Homo sapiens
cctgggcaacaagag

SEQ ID NO: 317621 - DNA, 15 bp, Homo sapiens
gcctgggcaacaaga

SEQ ID NO: 317622 - DNA, 15 bp, Homo sapiens
agcctgggcaacaag

SEQ ID NO: 317623 - DNA, 15 bp, Homo sapiens
cagcctgggcaacaa

SEQ ID NO: 317624 - DNA, 15 bp, Homo sapiens
ccagcctgggcaaca

SEQ ID NO: 317625 - DNA, 15 bp, Homo sapiens
tccagcctgggcaac

SEQ ID NO: 317626 - DNA, 15 bp, Homo sapiens
ctccagcctgggcaa

SEQ ID NO: 317627 - DNA, 15 bp, Homo sapiens
actccagcctgggca

SEQ ID NO: 317628 - DNA, 15 bp, Homo sapiens
aagatcgcaccactg

SEQ ID NO: 317629 - DNA, 15 bp, Homo sapiens
caagatcgcaccact

SEQ ID NO: 317630 - DNA, 15 bp, Homo sapiens
ccaagatcgcaccac

SEQ ID NO: 317631 - DNA, 15 bp, Homo sapiens
gccaagatcgcacca

SEQ ID NO: 317632 - DNA, 15 bp, Homo sapiens
agccaagatcgcacc

SEQ ID NO: 317633 - DNA, 15 bp, Homo sapiens
gagccaagatcgcac

SEQ ID NO: 317634 - DNA, 15 bp, Homo sapiens
tgagccaagatcgca

SEQ ID NO: 317635 - DNA, 15 bp, Homo sapiens
gtgagccaagatcgc

SEQ ID NO: 317636 - DNA, 15 bp, Homo sapiens
agtgagccaagatcg

SEQ ID NO: 317637 - DNA, 15 bp, Homo sapiens
cagtgagccaagatc

SEQ ID NO: 317638 - DNA, 15 bp, Homo sapiens
gcagtgagccaagat

SEQ ID NO: 317639 - DNA, 15 bp, Homo sapiens
tgcagtgagccaaga

SEQ ID NO: 317640 - DNA, 15 bp, Homo sapiens
ttgcagtgagccaag

SEQ ID NO: 317641 - DNA, 15 bp, Homo sapiens
gttgcagtgagccaa

SEQ ID NO: 317642 - DNA, 15 bp, Homo sapiens
ggttgcagtgagcca

SEQ ID NO: 317643 - DNA, 15 bp, Homo sapiens
ggtggaggttgcagt

SEQ ID NO: 317644 - DNA, 15 bp, Homo sapiens
aggtggaggttgcag

SEQ ID NO: 317645 - DNA, 15 bp, Homo sapiens
gaggtggaggttgca

SEQ ID NO: 317646 - DNA, 15 bp, Homo sapiens
ggaggtggaggttgc

SEQ ID NO: 317647 - DNA, 15 bp, Homo sapiens
gggaggtggaggttg

SEQ ID NO: 317648 - DNA, 15 bp, Homo sapiens
tgggaggtggaggtt

SEQ ID NO: 317649 - DNA, 15 bp, Homo sapiens
ttgggaggtggaggt

SEQ ID NO: 317650 - DNA, 15 bp, Homo sapiens
cttgggaggtggagg

SEQ ID NO: 317651 - DNA, 15 bp, Homo sapiens
acttgggaggtggag

SEQ ID NO: 317652 - DNA, 15 bp, Homo sapiens
aacttgggaggtgga

SEQ ID NO: 317653 - DNA, 15 bp, Homo sapiens
gaacttgggaggtgg

SEQ ID NO: 317654 - DNA, 15 bp, Homo sapiens
tgaacttgggaggtg

SEQ ID NO: 317655 - DNA, 15 bp, Homo sapiens
ttgaacttgggaggt

SEQ ID NO: 317656 - DNA, 15 bp, Homo sapiens
cttgaacttgggagg

SEQ ID NO: 317657 - DNA, 15 bp, Homo sapiens
acttgaacttgggag

SEQ ID NO: 317658 - DNA, 15 bp, Homo sapiens
cacttgaacttggga

SEQ ID NO: 317659 - DNA, 15 bp, Homo sapiens
tcacttgaacttggg

SEQ ID NO: 317660 - DNA, 15 bp, Homo sapiens
atcacttgaacttgg

SEQ ID NO: 317661 - DNA, 15 bp, Homo sapiens
aatcacttgaacttg

SEQ ID NO: 317662 - DNA, 15 bp, Homo sapiens
gaatcacttgaactt

SEQ ID NO: 317663 - DNA, 15 bp, Homo sapiens
agaatcacttgaact

SEQ ID NO: 317664 - DNA, 15 bp, Homo sapiens
gagaatcacttgaac

SEQ ID NO: 317665 - DNA, 15 bp, Homo sapiens
tggagaatcacttga

SEQ ID NO: 317666 - DNA, 15 bp, Homo sapiens
ctggagaatcacttg

SEQ ID NO: 317667 - DNA, 15 bp, Homo sapiens
gctggagaatcactt

SEQ ID NO: 317668 - DNA, 15 bp, Homo sapiens
ggctggagaatcact

SEQ ID NO: 317669 - DNA, 15 bp, Homo sapiens
aggctggagaatcac

SEQ ID NO: 317670 - DNA, 15 bp, Homo sapiens
aaggctggagaatca

SEQ ID NO: 317671 - DNA, 15 bp, Homo sapiens
taaggctggagaatc

SEQ ID NO: 317672 - DNA, 15 bp, Homo sapiens
ctaaggctggagaat

SEQ ID NO: 317673 - DNA, 15 bp, Homo sapiens
gctaaggctggagaa

SEQ ID NO: 317674 - DNA, 15 bp, Homo sapiens
ggctaaggctggaga

SEQ ID NO: 317675 - DNA, 15 bp, Homo sapiens
gggctaaggctggag

SEQ ID NO: 317676 - DNA, 15 bp, Homo sapiens
agggctaaggctgga

SEQ ID NO: 317677 - DNA, 15 bp, Homo sapiens
gagggctaaggctgg

SEQ ID NO: 317678 - DNA, 15 bp, Homo sapiens
ggagggctaaggctg

SEQ ID NO: 317679 - DNA, 15 bp, Homo sapiens
tggagggctaaggct

SEQ ID NO: 317680 - DNA, 15 bp, Homo sapiens
ttggagggctaaggc

SEQ ID NO: 317681 - DNA, 15 bp, Homo sapiens
cttggagggctaagg

SEQ ID NO: 317682 - DNA, 15 bp, Homo sapiens
acttggagggctaag

SEQ ID NO: 317683 - DNA, 15 bp, Homo sapiens
tacttggagggctaa

SEQ ID NO: 317684 - DNA, 15 bp, Homo sapiens
ctacttggagggcta

SEQ ID NO: 317685 - DNA, 15 bp, Homo sapiens
gctacttggagggct

SEQ ID NO: 317686 - DNA, 15 bp, Homo sapiens
agctacttggagggc

SEQ ID NO: 317687 - DNA, 15 bp, Homo sapiens
cagctacttggaggg

SEQ ID NO: 317688 - DNA, 15 bp, Homo sapiens
ccagctacttggagg

SEQ ID NO: 317689 - DNA, 15 bp, Homo sapiens
cccagctacttggag

SEQ ID NO: 317690 - DNA, 15 bp, Homo sapiens
tcccagctacttgga

SEQ ID NO: 317691 - DNA, 15 bp, Homo sapiens
acacctgtagtccca

SEQ ID NO: 317692 - DNA, 15 bp, Homo sapiens
cacacctgtagtccc

SEQ ID NO: 317693 - DNA, 15 bp, Homo sapiens
acacacctgtagtcc

SEQ ID NO: 317694 - DNA, 15 bp, Homo sapiens
cacacacctgtagtc

SEQ ID NO: 317695 - DNA, 15 bp, Homo sapiens
gcacacacctgtagt

SEQ ID NO: 317696 - DNA, 15 bp, Homo sapiens
ggcacacacctgtag

SEQ ID NO: 317697 - DNA, 15 bp, Homo sapiens
tggcacacacctgta

SEQ ID NO: 317698 - DNA, 15 bp, Homo sapiens
gtggcacacacctgt

SEQ ID NO: 317699 - DNA, 15 bp, Homo sapiens
ggtggcacacacctg

SEQ ID NO: 317700 - DNA, 15 bp, Homo sapiens
tggtggcacacacct

SEQ ID NO: 317701 - DNA, 15 bp, Homo sapiens
atggtggcacacacc

SEQ ID NO: 317702 - DNA, 15 bp, Homo sapiens
catggtggcacacac

SEQ ID NO: 317703 - DNA, 15 bp, Homo sapiens
gcatggtggcacaca

SEQ ID NO: 317704 - DNA, 15 bp, Homo sapiens
ggcatggtggcacac

SEQ ID NO: 317705 - DNA, 15 bp, Homo sapiens
aggcatggtggcaca

SEQ ID NO: 317706 - DNA, 15 bp, Homo sapiens
caggcatggtggcac

SEQ ID NO: 317707 - DNA, 15 bp, Homo sapiens
ccaggcatggtggca

SEQ ID NO: 317708 - DNA, 15 bp, Homo sapiens
gccaggcatggtggc

SEQ ID NO: 317709 - DNA, 15 bp, Homo sapiens
agccaggcatggtgg

SEQ ID NO: 317710 - DNA, 15 bp, Homo sapiens
tagccaggcatggtg

SEQ ID NO: 317711 - DNA, 15 bp, Homo sapiens
atagccaggcatggt

SEQ ID NO: 317712 - DNA, 15 bp, Homo sapiens
aatagccaggcatgg

SEQ ID NO: 317713 - DNA, 15 bp, Homo sapiens
aaatagccaggcatg

SEQ ID NO: 317714 - DNA, 15 bp, Homo sapiens
aaaatagccaggcat

SEQ ID NO: 317715 - DNA, 15 bp, Homo sapiens
taaaatagccaggca

SEQ ID NO: 317716 - DNA, 15 bp, Homo sapiens
ataaaatagccaggc

SEQ ID NO: 317717 - DNA, 15 bp, Homo sapiens
aataaaatagccagg

SEQ ID NO: 317718 - DNA, 15 bp, Homo sapiens
aaataaaatagccag

SEQ ID NO: 317719 - DNA, 15 bp, Homo sapiens
aaaataaaatagcca

SEQ ID NO: 317720 - DNA, 15 bp, Homo sapiens
taaaataaaatagcc

SEQ ID NO: 317721 - DNA, 15 bp, Homo sapiens
ataaaataaaatagc

SEQ ID NO: 317722 - DNA, 15 bp, Homo sapiens
aataaaataaaatag

SEQ ID NO: 317723 - DNA, 15 bp, Homo sapiens
aaataaaataaaata

SEQ ID NO: 317724 - DNA, 15 bp, Homo sapiens
aaaataaaataaaat

SEQ ID NO: 317725 - DNA, 15 bp, Homo sapiens
taaaataaaataaaa

SEQ ID NO: 317726 - DNA, 15 bp, Homo sapiens
ataaaataaaataaa

SEQ ID NO: 317727 - DNA, 15 bp, Homo sapiens
aataaaataaaataa

SEQ ID NO: 317728 - DNA, 15 bp, Homo sapiens
taaataaaataaaat

SEQ ID NO: 317729 - DNA, 15 bp, Homo sapiens
ataaataaaataaaa

SEQ ID NO: 317730 - DNA, 15 bp, Homo sapiens
aataaataaaataaa

SEQ ID NO: 317731 - DNA, 15 bp, Homo sapiens
aaataaataaaataa

SEQ ID NO: 317732 - DNA, 15 bp, Homo sapiens
taaataaataaaata

SEQ ID NO: 317733 - DNA, 15 bp, Homo sapiens
ataaataaataaaat

SEQ ID NO: 317734 - DNA, 15 bp, Homo sapiens
aataaataaataaaa

SEQ ID NO: 317735 - DNA, 15 bp, Homo sapiens
aaataaataaataaa

SEQ ID NO: 317736 - DNA, 15 bp, Homo sapiens
aaaataaataaataa

SEQ ID NO: 317737 - DNA, 15 bp, Homo sapiens
aaaaataaataaata

SEQ ID NO: 317738 - DNA, 15 bp, Homo sapiens
caaaaataaataaat

SEQ ID NO: 317739 - DNA, 15 bp, Homo sapiens
tcaaaaataaataaa

SEQ ID NO: 317740 - DNA, 15 bp, Homo sapiens
ctcaaaaataaataa

SEQ ID NO: 317741 - DNA, 15 bp, Homo sapiens
tctcaaaaataaata

SEQ ID NO: 317742 - DNA, 15 bp, Homo sapiens
gtctcaaaaataaat

SEQ ID NO: 317743 - DNA, 15 bp, Homo sapiens
agtctcaaaaataaa

SEQ ID NO: 317744 - DNA, 15 bp, Homo sapiens
tagtctcaaaaataa

SEQ ID NO: 317745 - DNA, 15 bp, Homo sapiens
ttagtctcaaaaata

SEQ ID NO: 317746 - DNA, 15 bp, Homo sapiens
cttagtctcaaaaat

SEQ ID NO: 317747 - DNA, 15 bp, Homo sapiens
acttagtctcaaaaa

SEQ ID NO: 317748 - DNA, 15 bp, Homo sapiens
gacttagtctcaaaa

SEQ ID NO: 317749 - DNA, 15 bp, Homo sapiens
agacttagtctcaaa

SEQ ID NO: 317750 - DNA, 15 bp, Homo sapiens
aagacttagtctcaa

SEQ ID NO: 317751 - DNA, 15 bp, Homo sapiens
caagacttagtctca

SEQ ID NO: 317752 - DNA, 15 bp, Homo sapiens
gcaagacttagtctc

SEQ ID NO: 317753 - DNA, 15 bp, Homo sapiens
agcaagacttagtct

SEQ ID NO: 317754 - DNA, 15 bp, Homo sapiens
gagcaagacttagtc

SEQ ID NO: 317755 - DNA, 15 bp, Homo sapiens
agagcaagacttagt

SEQ ID NO: 317756 - DNA, 15 bp, Homo sapiens
cagagcaagacttag

SEQ ID NO: 317757 - DNA, 15 bp, Homo sapiens
acagagcaagactta

SEQ ID NO: 317758 - DNA, 15 bp, Homo sapiens
aacagagcaagactt

SEQ ID NO: 317759 - DNA, 15 bp, Homo sapiens
cctgggcaacagagc

SEQ ID NO: 317760 - DNA, 15 bp, Homo sapiens
gcctgggcaacagag

SEQ ID NO: 317761 - DNA, 15 bp, Homo sapiens
agcctgggcaacaga

SEQ ID NO: 317762 - DNA, 15 bp, Homo sapiens
cagcctgggcaacag

SEQ ID NO: 317763 - DNA, 15 bp, Homo sapiens
atgccactgcactcc

SEQ ID NO: 317764 - DNA, 15 bp, Homo sapiens
tatgccactgcactc

SEQ ID NO: 317765 - DNA, 15 bp, Homo sapiens
ttatgccactgcact

SEQ ID NO: 317766 - DNA, 15 bp, Homo sapiens
attatgccactgcac

SEQ ID NO: 317767 - DNA, 15 bp, Homo sapiens
gattatgccactgca

SEQ ID NO: 317768 - DNA, 15 bp, Homo sapiens
cgattatgccactgc

SEQ ID NO: 317769 - DNA, 15 bp, Homo sapiens
ccgattatgccactg

SEQ ID NO: 317770 - DNA, 15 bp, Homo sapiens
gccgattatgccact

SEQ ID NO: 317771 - DNA, 15 bp, Homo sapiens
agccgattatgccac

SEQ ID NO: 317772 - DNA, 15 bp, Homo sapiens
gagccgattatgcca

SEQ ID NO: 317773 - DNA, 15 bp, Homo sapiens
tgagccgattatgcc

SEQ ID NO: 317774 - DNA, 15 bp, Homo sapiens
gtgagccgattatgc

SEQ ID NO: 317775 - DNA, 15 bp, Homo sapiens
agtgagccgattatg

SEQ ID NO: 317776 - DNA, 15 bp, Homo sapiens
cagtgagccgattat

SEQ ID NO: 317777 - DNA, 15 bp, Homo sapiens
gcagtgagccgatta

SEQ ID NO: 317778 - DNA, 15 bp, Homo sapiens
tgcagtgagccgatt

SEQ ID NO: 317779 - DNA, 15 bp, Homo sapiens
ttgcagtgagccgat

SEQ ID NO: 317780 - DNA, 15 bp, Homo sapiens
tgggaggcagaggtt

SEQ ID NO: 317781 - DNA, 15 bp, Homo sapiens
ctgggaggcagaggt

SEQ ID NO: 317782 - DNA, 15 bp, Homo sapiens
cctgggaggcagagg

SEQ ID NO: 317783 - DNA, 15 bp, Homo sapiens
acctgggaggcagag

SEQ ID NO: 317784 - DNA, 15 bp, Homo sapiens
aacctgggaggcaga

SEQ ID NO: 317785 - DNA, 15 bp, Homo sapiens
gaacctgggaggcag

SEQ ID NO: 317786 - DNA, 15 bp, Homo sapiens
tgaacctgggaggca

SEQ ID NO: 317787 - DNA, 15 bp, Homo sapiens
ttgaacctgggaggc

SEQ ID NO: 317788 - DNA, 15 bp, Homo sapiens
cttgaacctgggagg

SEQ ID NO: 317789 - DNA, 15 bp, Homo sapiens
acttgaacctgggag

SEQ ID NO: 317790 - DNA, 15 bp, Homo sapiens
cacttgaacctggga

SEQ ID NO: 317791 - DNA, 15 bp, Homo sapiens
tcacttgaacctggg

SEQ ID NO: 317792 - DNA, 15 bp, Homo sapiens
atcacttgaacctgg

SEQ ID NO: 317793 - DNA, 15 bp, Homo sapiens
aatcacttgaacctg

SEQ ID NO: 317794 - DNA, 15 bp, Homo sapiens
gaatcacttgaacct

SEQ ID NO: 317795 - DNA, 15 bp, Homo sapiens
agaatcacttgaacc

SEQ ID NO: 317796 - DNA, 15 bp, Homo sapiens
aggaggctgaggcag

SEQ ID NO: 317797 - DNA, 15 bp, Homo sapiens
caggaggctgaggca

SEQ ID NO: 317798 - DNA, 15 bp, Homo sapiens
tcaggaggctgaggc

SEQ ID NO: 317799 - DNA, 15 bp, Homo sapiens
ctcaggaggctgagg

SEQ ID NO: 317800 - DNA, 15 bp, Homo sapiens
actcaggaggctgag

SEQ ID NO: 317801 - DNA, 15 bp, Homo sapiens
tactcaggaggctga

SEQ ID NO: 317802 - DNA, 15 bp, Homo sapiens
ttactcaggaggctg

SEQ ID NO: 317803 - DNA, 15 bp, Homo sapiens
gttactcaggaggct

SEQ ID NO: 317804 - DNA, 15 bp, Homo sapiens
agttactcaggaggc

SEQ ID NO: 317805 - DNA, 15 bp, Homo sapiens
cagttactcaggagg

SEQ ID NO: 317806 - DNA, 15 bp, Homo sapiens
ccagttactcaggag

SEQ ID NO: 317807 - DNA, 15 bp, Homo sapiens
cccagttactcagga

SEQ ID NO: 317808 - DNA, 15 bp, Homo sapiens
tcccagttactcagg

SEQ ID NO: 317809 - DNA, 15 bp, Homo sapiens
atcccagttactcag

SEQ ID NO: 317810 - DNA, 15 bp, Homo sapiens
aatcccagttactca

SEQ ID NO: 317811 - DNA, 15 bp, Homo sapiens
taatcccagttactc

SEQ ID NO: 317812 - DNA, 15 bp, Homo sapiens
gtaatcccagttact

SEQ ID NO: 317813 - DNA, 15 bp, Homo sapiens
tgtaatcccagttac

SEQ ID NO: 317814 - DNA, 15 bp, Homo sapiens
ctgtaatcccagtta

SEQ ID NO: 317815 - DNA, 15 bp, Homo sapiens
cctgtaatcccagtt

SEQ ID NO: 317816 - DNA, 15 bp, Homo sapiens
ccctgtaatcccagt

SEQ ID NO: 317817 - DNA, 15 bp, Homo sapiens
cccctgtaatcccag

SEQ ID NO: 317818 - DNA, 15 bp, Homo sapiens
gcccctgtaatccca

SEQ ID NO: 317819 - DNA, 15 bp, Homo sapiens
ggcccctgtaatccc

SEQ ID NO: 317820 - DNA, 15 bp, Homo sapiens
aggcccctgtaatcc

SEQ ID NO: 317821 - DNA, 15 bp, Homo sapiens
caggcccctgtaatc

SEQ ID NO: 317822 - DNA, 15 bp, Homo sapiens
gcaggcccctgtaat

SEQ ID NO: 317823 - DNA, 15 bp, Homo sapiens
ggcaggcccctgtaa

SEQ ID NO: 317824 - DNA, 15 bp, Homo sapiens
tggcaggcccctgta

SEQ ID NO: 317825 - DNA, 15 bp, Homo sapiens
gtggcaggcccctgt

SEQ ID NO: 317826 - DNA, 15 bp, Homo sapiens
ggtggcaggcccctg

SEQ ID NO: 317827 - DNA, 15 bp, Homo sapiens
tggtggcaggcccct

SEQ ID NO: 317828 - DNA, 15 bp, Homo sapiens
gtggtggcaggcccc

SEQ ID NO: 317829 - DNA, 15 bp, Homo sapiens
cgtggtggcaggccc

SEQ ID NO: 317830 - DNA, 15 bp, Homo sapiens
gcgtggtggcaggcc

SEQ ID NO: 317831 - DNA, 15 bp, Homo sapiens
ggcgtggtggcaggc

SEQ ID NO: 317832 - DNA, 15 bp, Homo sapiens
aggcgtggtggcagg

SEQ ID NO: 317833 - DNA, 15 bp, Homo sapiens
caggcgtggtggcag

SEQ ID NO: 317834 - DNA, 15 bp, Homo sapiens
ccaggcgtggtggca

SEQ ID NO: 317835 - DNA, 15 bp, Homo sapiens
gccaggcgtggtggc

SEQ ID NO: 317836 - DNA, 15 bp, Homo sapiens
gtagccaggcgtggt

SEQ ID NO: 317837 - DNA, 15 bp, Homo sapiens
agtagccaggcgtgg

SEQ ID NO: 317838 - DNA, 15 bp, Homo sapiens
aagtagccaggcgtg

SEQ ID NO: 317839 - DNA, 15 bp, Homo sapiens
aaagtagccaggcgt

SEQ ID NO: 317840 - DNA, 15 bp, Homo sapiens
aaaagtagccaggcg

SEQ ID NO: 317841 - DNA, 15 bp, Homo sapiens
aaaaagtagccaggc

SEQ ID NO: 317842 - DNA, 15 bp, Homo sapiens
caaaaagtagccagg

SEQ ID NO: 317843 - DNA, 15 bp, Homo sapiens
acaaaaagtagccag

SEQ ID NO: 317844 - DNA, 15 bp, Homo sapiens
tacaaaaagtagcca

SEQ ID NO: 317845 - DNA, 15 bp, Homo sapiens
atacaaaaagtagcc

SEQ ID NO: 317846 - DNA, 15 bp, Homo sapiens
aatacaaaaagtagc

SEQ ID NO: 317847 - DNA, 15 bp, Homo sapiens
aaatacaaaaagtag

SEQ ID NO: 317848 - DNA, 15 bp, Homo sapiens
aaaatacaaaaagta

SEQ ID NO: 317849 - DNA, 15 bp, Homo sapiens
aaaaatacaaaaagt

SEQ ID NO: 317850 - DNA, 15 bp, Homo sapiens
taaaaatacaaaaag

SEQ ID NO: 317851 - DNA, 15 bp, Homo sapiens
atactaaaaatacaa

SEQ ID NO: 317852 - DNA, 15 bp, Homo sapiens
tatactaaaaataca

SEQ ID NO: 317853 - DNA, 15 bp, Homo sapiens
ctatactaaaaatac

SEQ ID NO: 317854 - DNA, 15 bp, Homo sapiens
tctatactaaaaata

SEQ ID NO: 317855 - DNA, 15 bp, Homo sapiens
atctatactaaaaat

SEQ ID NO: 317856 - DNA, 15 bp, Homo sapiens
catctatactaaaaa

SEQ ID NO: 317857 - DNA, 15 bp, Homo sapiens
ccatctatactaaaa

SEQ ID NO: 317858 - DNA, 15 bp, Homo sapiens
cccatctatactaaa

SEQ ID NO: 317859 - DNA, 15 bp, Homo sapiens
ccccatctatactaa

SEQ ID NO: 317860 - DNA, 15 bp, Homo sapiens
accccatctatacta

SEQ ID NO: 317861 - DNA, 15 bp, Homo sapiens
aaccccatctatact

SEQ ID NO: 317862 - DNA, 15 bp, Homo sapiens
aaaccccatctatac

SEQ ID NO: 317863 - DNA, 15 bp, Homo sapiens
gaaaccccatctata

SEQ ID NO: 317864 - DNA, 15 bp, Homo sapiens
tgaaaccccatctat

SEQ ID NO: 317865 - DNA, 15 bp, Homo sapiens
gtgaaaccccatcta

SEQ ID NO: 317866 - DNA, 15 bp, Homo sapiens
atggtgaaaccccat

SEQ ID NO: 317867 - DNA, 15 bp, Homo sapiens
catggtgaaacccca

SEQ ID NO: 317868 - DNA, 15 bp, Homo sapiens
acatggtgaaacccc

SEQ ID NO: 317869 - DNA, 15 bp, Homo sapiens
ccagcctggccaaca

SEQ ID NO: 317870 - DNA, 15 bp, Homo sapiens
gagaccagcctggcc

SEQ ID NO: 317871 - DNA, 15 bp, Homo sapiens
cgagaccagcctggc

SEQ ID NO: 317872 - DNA, 15 bp, Homo sapiens
tcgagaccagcctgg

SEQ ID NO: 317873 - DNA, 15 bp, Homo sapiens
gcctgaggtcaggag

SEQ ID NO: 317874 - DNA, 15 bp, Homo sapiens
agcctgaggtcagga

SEQ ID NO: 317875 - DNA, 15 bp, Homo sapiens
tagcctgaggtcagg

SEQ ID NO: 317876 - DNA, 15 bp, Homo sapiens
atagcctgaggtcag

SEQ ID NO: 317877 - DNA, 15 bp, Homo sapiens
gatagcctgaggtca

SEQ ID NO: 317878 - DNA, 15 bp, Homo sapiens
ggatagcctgaggtc

SEQ ID NO: 317879 - DNA, 15 bp, Homo sapiens
cggatagcctgaggt

SEQ ID NO: 317880 - DNA, 15 bp, Homo sapiens
gcggatagcctgagg

SEQ ID NO: 317881 - DNA, 15 bp, Homo sapiens
ggcggatagcctgag

SEQ ID NO: 317882 - DNA, 15 bp, Homo sapiens
aggcggatagcctga

SEQ ID NO: 317883 - DNA, 15 bp, Homo sapiens
caggcggatagcctg

SEQ ID NO: 317884 - DNA, 15 bp, Homo sapiens
gcaggcggatagcct

SEQ ID NO: 317885 - DNA, 15 bp, Homo sapiens
ggcaggcggatagcc

SEQ ID NO: 317886 - DNA, 15 bp, Homo sapiens
aggcaggcggatagc

SEQ ID NO: 317887 - DNA, 15 bp, Homo sapiens
gaggcaggcggatag

SEQ ID NO: 317888 - DNA, 15 bp, Homo sapiens
tgaggcaggcggata

SEQ ID NO: 317889 - DNA, 15 bp, Homo sapiens
tttgggaggctgagg

SEQ ID NO: 317890 - DNA, 15 bp, Homo sapiens
ctttgggaggctgag

SEQ ID NO: 317891 - DNA, 15 bp, Homo sapiens
actttgggaggctga

SEQ ID NO: 317892 - DNA, 15 bp, Homo sapiens
cactttgggaggctg

SEQ ID NO: 317893 - DNA, 15 bp, Homo sapiens
gcactttgggaggct

SEQ ID NO: 317894 - DNA, 15 bp, Homo sapiens
agtggctcatgcctg

SEQ ID NO: 317895 - DNA, 15 bp, Homo sapiens
gagcacagtggctca

SEQ ID NO: 317896 - DNA, 15 bp, Homo sapiens
cgagcacagtggctc

SEQ ID NO: 317897 - DNA, 15 bp, Homo sapiens
ccgagcacagtggct

SEQ ID NO: 317898 - DNA, 15 bp, Homo sapiens
accgagcacagtggc

SEQ ID NO: 317899 - DNA, 15 bp, Homo sapiens
taccgagcacagtgg

SEQ ID NO: 317900 - DNA, 15 bp, Homo sapiens
ctaccgagcacagtg

SEQ ID NO: 317901 - DNA, 15 bp, Homo sapiens
actaccgagcacagt

SEQ ID NO: 317902 - DNA, 15 bp, Homo sapiens
aactaccgagcacag

SEQ ID NO: 317903 - DNA, 15 bp, Homo sapiens
caactaccgagcaca

SEQ ID NO: 317904 - DNA, 15 bp, Homo sapiens
acaactaccgagcac

SEQ ID NO: 317905 - DNA, 15 bp, Homo sapiens
aacaactaccgagca

SEQ ID NO: 317906 - DNA, 15 bp, Homo sapiens
aaacaactaccgagc

SEQ ID NO: 317907 - DNA, 15 bp, Homo sapiens
aaaacaactaccgag

SEQ ID NO: 317908 - DNA, 15 bp, Homo sapiens
taaaacaactaccga

SEQ ID NO: 317909 - DNA, 15 bp, Homo sapiens
ataaaacaactaccg

SEQ ID NO: 317910 - DNA, 15 bp, Homo sapiens
aataaaacaactacc

SEQ ID NO: 317911 - DNA, 15 bp, Homo sapiens
aaataaaacaactac

SEQ ID NO: 317912 - DNA, 15 bp, Homo sapiens
aaaataaaacaacta

SEQ ID NO: 317913 - DNA, 15 bp, Homo sapiens
taaaataaaacaact

SEQ ID NO: 317914 - DNA, 15 bp, Homo sapiens
ttaaaataaaacaac

SEQ ID NO: 317915 - DNA, 15 bp, Homo sapiens
attaaaataaaacaa

SEQ ID NO: 317916 - DNA, 15 bp, Homo sapiens
tattaaaataaaaca

SEQ ID NO: 317917 - DNA, 15 bp, Homo sapiens
ctattaaaataaaac

SEQ ID NO: 317918 - DNA, 15 bp, Homo sapiens
actattaaaataaaa

SEQ ID NO: 317919 - DNA, 15 bp, Homo sapiens
tactattaaaataaa

SEQ ID NO: 317920 - DNA, 15 bp, Homo sapiens
ctactattaaaataa

SEQ ID NO: 317921 - DNA, 15 bp, Homo sapiens
cctactattaaaata

SEQ ID NO: 317922 - DNA, 15 bp, Homo sapiens
acctactattaaaat

SEQ ID NO: 317923 - DNA, 15 bp, Homo sapiens
aacctactattaaaa

SEQ ID NO: 317924 - DNA, 15 bp, Homo sapiens
taacctactattaaa

SEQ ID NO: 317925 - DNA, 15 bp, Homo sapiens
ataacctactattaa

SEQ ID NO: 317926 - DNA, 15 bp, Homo sapiens
aataacctactatta

SEQ ID NO: 317927 - DNA, 15 bp, Homo sapiens
aaataacctactatt

SEQ ID NO: 317928 - DNA, 15 bp, Homo sapiens
aaaataacctactat

SEQ ID NO: 317929 - DNA, 15 bp, Homo sapiens
taaaataacctacta

SEQ ID NO: 317930 - DNA, 15 bp, Homo sapiens
ataaaataacctact

SEQ ID NO: 317931 - DNA, 15 bp, Homo sapiens
aataaaataacctac

SEQ ID NO: 317932 - DNA, 15 bp, Homo sapiens
aaataaaataaccta

SEQ ID NO: 317933 - DNA, 15 bp, Homo sapiens
gaaataaaataacct

SEQ ID NO: 317934 - DNA, 15 bp, Homo sapiens
ggaaataaaataacc

SEQ ID NO: 317935 - DNA, 15 bp, Homo sapiens
tggaaataaaataac

SEQ ID NO: 317936 - DNA, 15 bp, Homo sapiens
atggaaataaaataa

SEQ ID NO: 317937 - DNA, 15 bp, Homo sapiens
aatggaaataaaata

SEQ ID NO: 317938 - DNA, 15 bp, Homo sapiens
aaatggaaataaaat

SEQ ID NO: 317939 - DNA, 15 bp, Homo sapiens
aaaatggaaataaaa

SEQ ID NO: 317940 - DNA, 15 bp, Homo sapiens
taaaatggaaataaa

SEQ ID NO: 317941 - DNA, 15 bp, Homo sapiens
gtaaaatggaaataa

SEQ ID NO: 317942 - DNA, 15 bp, Homo sapiens
tgtaaaatggaaata

SEQ ID NO: 317943 - DNA, 15 bp, Homo sapiens
ttgtaaaatggaaat

SEQ ID NO: 317944 - DNA, 15 bp, Homo sapiens
cttgtaaaatggaaa

SEQ ID NO: 317945 - DNA, 15 bp, Homo sapiens
tcttgtaaaatggaa

SEQ ID NO: 317946 - DNA, 15 bp, Homo sapiens
ctcttgtaaaatgga

SEQ ID NO: 317947 - DNA, 15 bp, Homo sapiens
tctcttgtaaaatgg

SEQ ID NO: 317948 - DNA, 15 bp, Homo sapiens
ttctcttgtaaaatg

SEQ ID NO: 317949 - DNA, 15 bp, Homo sapiens
tttctcttgtaaaat

SEQ ID NO: 317950 - DNA, 15 bp, Homo sapiens
ttttctcttgtaaaa

SEQ ID NO: 317951 - DNA, 15 bp, Homo sapiens
tttttctcttgtaaa

SEQ ID NO: 317952 - DNA, 15 bp, Homo sapiens
ttttttctcttgtaa

SEQ ID NO: 317953 - DNA, 15 bp, Homo sapiens
attttttctcttgta

SEQ ID NO: 317954 - DNA, 15 bp, Homo sapiens
cattttttctcttgt

SEQ ID NO: 317955 - DNA, 15 bp, Homo sapiens
ccattttttctcttg

SEQ ID NO: 317956 - DNA, 15 bp, Homo sapiens
accattttttctctt

SEQ ID NO: 317957 - DNA, 15 bp, Homo sapiens
caccattttttctct

SEQ ID NO: 317958 - DNA, 15 bp, Homo sapiens
tcaccattttttctc

SEQ ID NO: 317959 - DNA, 15 bp, Homo sapiens
atcaccattttttct

SEQ ID NO: 317960 - DNA, 15 bp, Homo sapiens
aatcaccattttttc

SEQ ID NO: 317961 - DNA, 15 bp, Homo sapiens
aaatcaccatttttt

SEQ ID NO: 317962 - DNA, 15 bp, Homo sapiens
taaatcaccattttt

SEQ ID NO: 317963 - DNA, 15 bp, Homo sapiens
ttaaatcaccatttt

SEQ ID NO: 317964 - DNA, 15 bp, Homo sapiens
tttaaatcaccattt

SEQ ID NO: 317965 - DNA, 15 bp, Homo sapiens
ctttaaatcaccatt

SEQ ID NO: 317966 - DNA, 15 bp, Homo sapiens
tctttaaatcaccat

SEQ ID NO: 317967 - DNA, 15 bp, Homo sapiens
ctctttaaatcacca

SEQ ID NO: 317968 - DNA, 15 bp, Homo sapiens
gctctttaaatcacc

SEQ ID NO: 317969 - DNA, 15 bp, Homo sapiens
agctctttaaatcac

SEQ ID NO: 317970 - DNA, 15 bp, Homo sapiens
tagctctttaaatca

SEQ ID NO: 317971 - DNA, 15 bp, Homo sapiens
gtagctctttaaatc

SEQ ID NO: 317972 - DNA, 15 bp, Homo sapiens
agtagctctttaaat

SEQ ID NO: 317973 - DNA, 15 bp, Homo sapiens
tagtagctctttaaa

SEQ ID NO: 317974 - DNA, 15 bp, Homo sapiens
ttagtagctctttaa

SEQ ID NO: 317975 - DNA, 15 bp, Homo sapiens
cttagtagctcttta

SEQ ID NO: 317976 - DNA, 15 bp, Homo sapiens
tcttagtagctcttt

SEQ ID NO: 317977 - DNA, 15 bp, Homo sapiens
gtcttagtagctctt

SEQ ID NO: 317978 - DNA, 15 bp, Homo sapiens
tgtcttagtagctct

SEQ ID NO: 317979 - DNA, 15 bp, Homo sapiens
gtgtcttagtagctc

SEQ ID NO: 317980 - DNA, 15 bp, Homo sapiens
tgtgtcttagtagct

SEQ ID NO: 317981 - DNA, 15 bp, Homo sapiens
ctgtgtcttagtagc

SEQ ID NO: 317982 - DNA, 15 bp, Homo sapiens
gctgtgtcttagtag

SEQ ID NO: 317983 - DNA, 15 bp, Homo sapiens
tgctgtgtcttagta

SEQ ID NO: 317984 - DNA, 15 bp, Homo sapiens
gtgctgtgtcttagt

SEQ ID NO: 317985 - DNA, 15 bp, Homo sapiens
agtgctgtgtcttag

SEQ ID NO: 317986 - DNA, 15 bp, Homo sapiens
cagtgctgtgtctta

SEQ ID NO: 317987 - DNA, 15 bp, Homo sapiens
tcagtgctgtgtctt

SEQ ID NO: 317988 - DNA, 15 bp, Homo sapiens
ctcagtgctgtgtct

SEQ ID NO: 317989 - DNA, 15 bp, Homo sapiens
tctcagtgctgtgtc

SEQ ID NO: 317990 - DNA, 15 bp, Homo sapiens
gtctcagtgctgtgt

SEQ ID NO: 317991 - DNA, 15 bp, Homo sapiens
ggtctcagtgctgtg

SEQ ID NO: 317992 - DNA, 15 bp, Homo sapiens
tggtctcagtgctgt

SEQ ID NO: 317993 - DNA, 15 bp, Homo sapiens
atggtctcagtgctg

SEQ ID NO: 317994 - DNA, 15 bp, Homo sapiens
catggtctcagtgct

SEQ ID NO: 317995 - DNA, 15 bp, Homo sapiens
acatggtctcagtgc

SEQ ID NO: 317996 - DNA, 15 bp, Homo sapiens
cacatggtctcagtg

SEQ ID NO: 317997 - DNA, 15 bp, Homo sapiens
acacatggtctcagt

SEQ ID NO: 317998 - DNA, 15 bp, Homo sapiens
cacacatggtctcag

SEQ ID NO: 317999 - DNA, 15 bp, Homo sapiens
tcacacatggtctca

SEQ ID NO: 318000 - DNA, 15 bp, Homo sapiens
atcacacatggtctc

SEQ ID NO: 318001 - DNA, 15 bp, Homo sapiens
catcacacatggtct

SEQ ID NO: 318002 - DNA, 15 bp, Homo sapiens
ccatcacacatggtc

SEQ ID NO: 318003 - DNA, 15 bp, Homo sapiens
gccatcacacatggt

SEQ ID NO: 318004 - DNA, 15 bp, Homo sapiens
tgccatcacacatgg

SEQ ID NO: 318005 - DNA, 15 bp, Homo sapiens
atgccatcacacatg

SEQ ID NO: 318006 - DNA, 15 bp, Homo sapiens
catgccatcacacat

SEQ ID NO: 318007 - DNA, 15 bp, Homo sapiens
gcatgccatcacaca

SEQ ID NO: 318008 - DNA, 15 bp, Homo sapiens
cgcatgccatcacac

SEQ ID NO: 318009 - DNA, 15 bp, Homo sapiens
gcgcatgccatcaca

SEQ ID NO: 318010 - DNA, 15 bp, Homo sapiens
ggcgcatgccatcac

SEQ ID NO: 318011 - DNA, 15 bp, Homo sapiens
aggcgcatgccatca

SEQ ID NO: 318012 - DNA, 15 bp, Homo sapiens
caggcgcatgccatc

SEQ ID NO: 318013 - DNA, 15 bp, Homo sapiens
gcaggcgcatgccat

SEQ ID NO: 318014 - DNA, 15 bp, Homo sapiens
tgcaggcgcatgcca

SEQ ID NO: 318015 - DNA, 15 bp, Homo sapiens
ctgcaggcgcatgcc

SEQ ID NO: 318016 - DNA, 15 bp, Homo sapiens
actgcaggcgcatgc

SEQ ID NO: 318017 - DNA, 15 bp, Homo sapiens
gactgcaggcgcatg

SEQ ID NO: 318018 - DNA, 15 bp, Homo sapiens
ggactgcaggcgcat

SEQ ID NO: 318019 - DNA, 15 bp, Homo sapiens
gggactgcaggcgca

SEQ ID NO: 318020 - DNA, 15 bp, Homo sapiens
tgggactgcaggcgc

SEQ ID NO: 318021 - DNA, 15 bp, Homo sapiens
ctgggactgcaggcg

SEQ ID NO: 318022 - DNA, 15 bp, Homo sapiens
gctgggactgcaggc

SEQ ID NO: 318023 - DNA, 15 bp, Homo sapiens
agctgggactgcagg

SEQ ID NO: 318024 - DNA, 15 bp, Homo sapiens
tagctgggactgcag

SEQ ID NO: 318025 - DNA, 15 bp, Homo sapiens
gtagctgggactgca

SEQ ID NO: 318026 - DNA, 15 bp, Homo sapiens
agtagctgggactgc

SEQ ID NO: 318027 - DNA, 15 bp, Homo sapiens
gagtagctgggactg

SEQ ID NO: 318028 - DNA, 15 bp, Homo sapiens
gtgagtagctgggac

SEQ ID NO: 318029 - DNA, 15 bp, Homo sapiens
cgtgagtagctggga

SEQ ID NO: 318030 - DNA, 15 bp, Homo sapiens
tcgtgagtagctggg

SEQ ID NO: 318031 - DNA, 15 bp, Homo sapiens
ctcgtgagtagctgg

SEQ ID NO: 318032 - DNA, 15 bp, Homo sapiens
cctcgtgagtagctg

SEQ ID NO: 318033 - DNA, 15 bp, Homo sapiens
gcctcgtgagtagct

SEQ ID NO: 318034 - DNA, 15 bp, Homo sapiens
agcctcgtgagtagc

SEQ ID NO: 318035 - DNA, 15 bp, Homo sapiens
cagcctcgtgagtag

SEQ ID NO: 318036 - DNA, 15 bp, Homo sapiens
tcagcctcgtgagta

SEQ ID NO: 318037 - DNA, 15 bp, Homo sapiens
ctcagcctcgtgagt

SEQ ID NO: 318038 - DNA, 15 bp, Homo sapiens
cctcagcctcgtgag

SEQ ID NO: 318039 - DNA, 15 bp, Homo sapiens
gcctcagcctcgtga

SEQ ID NO: 318040 - DNA, 15 bp, Homo sapiens
tgcctcagcctcgtg

SEQ ID NO: 318041 - DNA, 15 bp, Homo sapiens
ctgcctcagcctcgt

SEQ ID NO: 318042 - DNA, 15 bp, Homo sapiens
cctgcctcagcctcg

SEQ ID NO: 318043 - DNA, 15 bp, Homo sapiens
cctcctgcctcagcc

SEQ ID NO: 318044 - DNA, 15 bp, Homo sapiens
tcctcctgcctcagc

SEQ ID NO: 318045 - DNA, 15 bp, Homo sapiens
atcctcctgcctcag

SEQ ID NO: 318046 - DNA, 15 bp, Homo sapiens
gatcctcctgcctca

SEQ ID NO: 318047 - DNA, 15 bp, Homo sapiens
tgatcctcctgcctc

SEQ ID NO: 318048 - DNA, 15 bp, Homo sapiens
gtgatcctcctgcct

SEQ ID NO: 318049 - DNA, 15 bp, Homo sapiens
tgtgatcctcctgcc

SEQ ID NO: 318050 - DNA, 15 bp, Homo sapiens
atgtgatcctcctgc

SEQ ID NO: 318051 - DNA, 15 bp, Homo sapiens
catgtgatcctcctg

SEQ ID NO: 318052 - DNA, 15 bp, Homo sapiens
tcatgtgatcctcct

SEQ ID NO: 318053 - DNA, 15 bp, Homo sapiens
ctcatgtgatcctcc

SEQ ID NO: 318054 - DNA, 15 bp, Homo sapiens
cctcatgtgatcctc

SEQ ID NO: 318055 - DNA, 15 bp, Homo sapiens
acctcatgtgatcct

SEQ ID NO: 318056 - DNA, 15 bp, Homo sapiens
gacctcatgtgatcc

SEQ ID NO: 318057 - DNA, 15 bp, Homo sapiens
tgacctcatgtgatc

SEQ ID NO: 318058 - DNA, 15 bp, Homo sapiens
ctgacctcatgtgat

SEQ ID NO: 318059 - DNA, 15 bp, Homo sapiens
cctgacctcatgtga

SEQ ID NO: 318060 - DNA, 15 bp, Homo sapiens
tcctgacctcatgtg

SEQ ID NO: 318061 - DNA, 15 bp, Homo sapiens
ctcctgacctcatgt

SEQ ID NO: 318062 - DNA, 15 bp, Homo sapiens
ggaactcctgacctc

SEQ ID NO: 318063 - DNA, 15 bp, Homo sapiens
tggaactcctgacct

SEQ ID NO: 318064 - DNA, 15 bp, Homo sapiens
ctggaactcctgacc

SEQ ID NO: 318065 - DNA, 15 bp, Homo sapiens
cctggaactcctgac

SEQ ID NO: 318066 - DNA, 15 bp, Homo sapiens
gcctggaactcctga

SEQ ID NO: 318067 - DNA, 15 bp, Homo sapiens
agcctggaactcctg

SEQ ID NO: 318068 - DNA, 15 bp, Homo sapiens
cagcctggaactcct

SEQ ID NO: 318069 - DNA, 15 bp, Homo sapiens
acagcctggaactcc

SEQ ID NO: 318070 - DNA, 15 bp, Homo sapiens
cacagcctggaactc

SEQ ID NO: 318071 - DNA, 15 bp, Homo sapiens
ccacagcctggaact

SEQ ID NO: 318072 - DNA, 15 bp, Homo sapiens
tccacagcctggaac

SEQ ID NO: 318073 - DNA, 15 bp, Homo sapiens
ctccacagcctggaa

SEQ ID NO: 318074 - DNA, 15 bp, Homo sapiens
actccacagcctgga

SEQ ID NO: 318075 - DNA, 15 bp, Homo sapiens
cactccacagcctgg

SEQ ID NO: 318076 - DNA, 15 bp, Homo sapiens
gcactccacagcctg

SEQ ID NO: 318077 - DNA, 15 bp, Homo sapiens
agcactccacagcct

SEQ ID NO: 318078 - DNA, 15 bp, Homo sapiens
tagcactccacagcc

SEQ ID NO: 318079 - DNA, 15 bp, Homo sapiens
atagcactccacagc

SEQ ID NO: 318080 - DNA, 15 bp, Homo sapiens
catagcactccacag

SEQ ID NO: 318081 - DNA, 15 bp, Homo sapiens
ccatagcactccaca

SEQ ID NO: 318082 - DNA, 15 bp, Homo sapiens
accatagcactccac

SEQ ID NO: 318083 - DNA, 15 bp, Homo sapiens
aaccatagcactcca

SEQ ID NO: 318084 - DNA, 15 bp, Homo sapiens
caaccatagcactcc

SEQ ID NO: 318085 - DNA, 15 bp, Homo sapiens
acaaccatagcactc

SEQ ID NO: 318086 - DNA, 15 bp, Homo sapiens
cacaaccatagcact

SEQ ID NO: 318087 - DNA, 15 bp, Homo sapiens
acacaaccatagcac

SEQ ID NO: 318088 - DNA, 15 bp, Homo sapiens
tacacaaccatagca

SEQ ID NO: 318089 - DNA, 15 bp, Homo sapiens
ctacacaaccatagc

SEQ ID NO: 318090 - DNA, 15 bp, Homo sapiens
actacacaaccatag

SEQ ID NO: 318091 - DNA, 15 bp, Homo sapiens
cactacacaaccata

SEQ ID NO: 318092 - DNA, 15 bp, Homo sapiens
tcactacacaaccat

SEQ ID NO: 318093 - DNA, 15 bp, Homo sapiens
ttcactacacaacca

SEQ ID NO: 318094 - DNA, 15 bp, Homo sapiens
attcactacacaacc

SEQ ID NO: 318095 - DNA, 15 bp, Homo sapiens
tattcactacacaac

SEQ ID NO: 318096 - DNA, 15 bp, Homo sapiens
ctattcactacacaa

SEQ ID NO: 318097 - DNA, 15 bp, Homo sapiens
gctattcactacaca

SEQ ID NO: 318098 - DNA, 15 bp, Homo sapiens
ggctattcactacac

SEQ ID NO: 318099 - DNA, 15 bp, Homo sapiens
tggctattcactaca

SEQ ID NO: 318100 - DNA, 15 bp, Homo sapiens
gtggctattcactac

SEQ ID NO: 318101 - DNA, 15 bp, Homo sapiens
agtggctattcacta

SEQ ID NO: 318102 - DNA, 15 bp, Homo sapiens
tagtggctattcact

SEQ ID NO: 318103 - DNA, 15 bp, Homo sapiens
gtagtggctattcac

SEQ ID NO: 318104 - DNA, 15 bp, Homo sapiens
tgtagtggctattca

SEQ ID NO: 318105 - DNA, 15 bp, Homo sapiens
gtgtagtggctattc

SEQ ID NO: 318106 - DNA, 15 bp, Homo sapiens
agtgtagtggctatt

SEQ ID NO: 318107 - DNA, 15 bp, Homo sapiens
gagtgtagtggctat

SEQ ID NO: 318108 - DNA, 15 bp, Homo sapiens
ggagtgtagtggcta

SEQ ID NO: 318109 - DNA, 15 bp, Homo sapiens
tggagtgtagtggct

SEQ ID NO: 318110 - DNA, 15 bp, Homo sapiens
ctggagtgtagtggc

SEQ ID NO: 318111 - DNA, 15 bp, Homo sapiens
gctggagtgtagtgg

SEQ ID NO: 318112 - DNA, 15 bp, Homo sapiens
ggctggagtgtagtg

SEQ ID NO: 318113 - DNA, 15 bp, Homo sapiens
aggctggagtgtagt

SEQ ID NO: 318114 - DNA, 15 bp, Homo sapiens
caggctggagtgtag

SEQ ID NO: 318115 - DNA, 15 bp, Homo sapiens
ccaggctggagtgta

SEQ ID NO: 318116 - DNA, 15 bp, Homo sapiens
cccaggctggagtgt

SEQ ID NO: 318117 - DNA, 15 bp, Homo sapiens
tgcccaggctggagt

SEQ ID NO: 318118 - DNA, 15 bp, Homo sapiens
ctgcccaggctggag

SEQ ID NO: 318119 - DNA, 15 bp, Homo sapiens
gctgcccaggctgga

SEQ ID NO: 318120 - DNA, 15 bp, Homo sapiens
tgctgcccaggctgg

SEQ ID NO: 318121 - DNA, 15 bp, Homo sapiens
gtgctgcccaggctg

SEQ ID NO: 318122 - DNA, 15 bp, Homo sapiens
tgtgctgcccaggct

SEQ ID NO: 318123 - DNA, 15 bp, Homo sapiens
ctgtgctgcccaggc

SEQ ID NO: 318124 - DNA, 15 bp, Homo sapiens
gctgtgctgcccagg

SEQ ID NO: 318125 - DNA, 15 bp, Homo sapiens
tgctgtgctgcccag

SEQ ID NO: 318126 - DNA, 15 bp, Homo sapiens
ttgctgtgctgccca

SEQ ID NO: 318127 - DNA, 15 bp, Homo sapiens
cttgctgtgctgccc

SEQ ID NO: 318128 - DNA, 15 bp, Homo sapiens
tcttgctgtgctgcc

SEQ ID NO: 318129 - DNA, 15 bp, Homo sapiens
atcttgctgtgctgc

SEQ ID NO: 318130 - DNA, 15 bp, Homo sapiens
gatcttgctgtgctg

SEQ ID NO: 318131 - DNA, 15 bp, Homo sapiens
agatcttgctgtgct

SEQ ID NO: 318132 - DNA, 15 bp, Homo sapiens
aagatcttgctgtgc

SEQ ID NO: 318133 - DNA, 15 bp, Homo sapiens
caagatcttgctgtg

SEQ ID NO: 318134 - DNA, 15 bp, Homo sapiens
acaagatcttgctgt

SEQ ID NO: 318135 - DNA, 15 bp, Homo sapiens
gacaagatcttgctg

SEQ ID NO: 318136 - DNA, 15 bp, Homo sapiens
agacaagatcttgct

SEQ ID NO: 318137 - DNA, 15 bp, Homo sapiens
gagacaagatcttgc

SEQ ID NO: 318138 - DNA, 15 bp, Homo sapiens
ggagacaagatcttg

SEQ ID NO: 318139 - DNA, 15 bp, Homo sapiens
gggagacaagatctt

SEQ ID NO: 318140 - DNA, 15 bp, Homo sapiens
tgggagacaagatct

SEQ ID NO: 318141 - DNA, 15 bp, Homo sapiens
ttgggagacaagatc

SEQ ID NO: 318142 - DNA, 15 bp, Homo sapiens
tttgggagacaagat

SEQ ID NO: 318143 - DNA, 15 bp, Homo sapiens
ttttgggagacaaga

SEQ ID NO: 318144 - DNA, 15 bp, Homo sapiens
tttttgggagacaag

SEQ ID NO: 318145 - DNA, 15 bp, Homo sapiens
ttttttgggagacaa

SEQ ID NO: 318146 - DNA, 15 bp, Homo sapiens
tttttttgggagaca

SEQ ID NO: 318147 - DNA, 15 bp, Homo sapiens
ttttttttgggagac

SEQ ID NO: 318148 - DNA, 15 bp, Homo sapiens
tttttttttgggaga

SEQ ID NO: 318149 - DNA, 15 bp, Homo sapiens
ttttttttttgggag

SEQ ID NO: 318150 - DNA, 15 bp, Homo sapiens
tttttttttttggga

SEQ ID NO: 318151 - DNA, 15 bp, Homo sapiens
ttttttttttttggg

SEQ ID NO: 318152 - DNA, 15 bp, Homo sapiens
tttttttttttttgg

SEQ ID NO: 318153 - DNA, 15 bp, Homo sapiens
ttttttttttttttg

SEQ ID NO: 318154 - DNA, 15 bp, Homo sapiens
atttttttttttttt

SEQ ID NO: 318155 - DNA, 15 bp, Homo sapiens
aattttttttttttt

SEQ ID NO: 318156 - DNA, 15 bp, Homo sapiens
aaatttttttttttt

SEQ ID NO: 318157 - DNA, 15 bp, Homo sapiens
gaaattttttttttt

SEQ ID NO: 318158 - DNA, 15 bp, Homo sapiens
tgaaatttttttttt

SEQ ID NO: 318159 - DNA, 15 bp, Homo sapiens
ttgaaattttttttt

SEQ ID NO: 318160 - DNA, 15 bp, Homo sapiens
tttgaaatttttttt

SEQ ID NO: 318161 - DNA, 15 bp, Homo sapiens
atttgaaattttttt

SEQ ID NO: 318162 - DNA, 15 bp, Homo sapiens
catttgaaatttttt

SEQ ID NO: 318163 - DNA, 15 bp, Homo sapiens
acatttgaaattttt

SEQ ID NO: 318164 - DNA, 15 bp, Homo sapiens
cacatttgaaatttt

SEQ ID NO: 318165 - DNA, 15 bp, Homo sapiens
tcacatttgaaattt

SEQ ID NO: 318166 - DNA, 15 bp, Homo sapiens
ttcacatttgaaatt

SEQ ID NO: 318167 - DNA, 15 bp, Homo sapiens
gttcacatttgaaat

SEQ ID NO: 318168 - DNA, 15 bp, Homo sapiens
ggttcacatttgaaa

SEQ ID NO: 318169 - DNA, 15 bp, Homo sapiens
gggttcacatttgaa

SEQ ID NO: 318170 - DNA, 15 bp, Homo sapiens
tgggttcacatttga

SEQ ID NO: 318171 - DNA, 15 bp, Homo sapiens
ctgggttcacatttg

SEQ ID NO: 318172 - DNA, 15 bp, Homo sapiens
cctgggttcacattt

SEQ ID NO: 318173 - DNA, 15 bp, Homo sapiens
tcctgggttcacatt

SEQ ID NO: 318174 - DNA, 15 bp, Homo sapiens
atcctgggttcacat

SEQ ID NO: 318175 - DNA, 15 bp, Homo sapiens
gatcctgggttcaca

SEQ ID NO: 318176 - DNA, 15 bp, Homo sapiens
agatcctgggttcac

SEQ ID NO: 318177 - DNA, 15 bp, Homo sapiens
gagatcctgggttca

SEQ ID NO: 318178 - DNA, 15 bp, Homo sapiens
agagatcctgggttc

SEQ ID NO: 318179 - DNA, 15 bp, Homo sapiens
cagagatcctgggtt

SEQ ID NO: 318180 - DNA, 15 bp, Homo sapiens
tcagagatcctgggt

SEQ ID NO: 318181 - DNA, 15 bp, Homo sapiens
gtcagagatcctggg

SEQ ID NO: 318182 - DNA, 15 bp, Homo sapiens
ggtcagagatcctgg

SEQ ID NO: 318183 - DNA, 15 bp, Homo sapiens
gggtcagagatcctg

SEQ ID NO: 318184 - DNA, 15 bp, Homo sapiens
agggtcagagatcct

SEQ ID NO: 318185 - DNA, 15 bp, Homo sapiens
tagggtcagagatcc

SEQ ID NO: 318186 - DNA, 15 bp, Homo sapiens
ctagggtcagagatc

SEQ ID NO: 318187 - DNA, 15 bp, Homo sapiens
cctagggtcagagat

SEQ ID NO: 318188 - DNA, 15 bp, Homo sapiens
gcctagggtcagaga

SEQ ID NO: 318189 - DNA, 15 bp, Homo sapiens
ggcctagggtcagag

SEQ ID NO: 318190 - DNA, 15 bp, Homo sapiens
gggcctagggtcaga

SEQ ID NO: 318191 - DNA, 15 bp, Homo sapiens
agggcctagggtcag

SEQ ID NO: 318192 - DNA, 15 bp, Homo sapiens
cagggcctagggtca

SEQ ID NO: 318193 - DNA, 15 bp, Homo sapiens
gcagggcctagggtc

SEQ ID NO: 318194 - DNA, 15 bp, Homo sapiens
tgcagggcctagggt

SEQ ID NO: 318195 - DNA, 15 bp, Homo sapiens
gtgcagggcctaggg

SEQ ID NO: 318196 - DNA, 15 bp, Homo sapiens
agtgcagggcctagg

SEQ ID NO: 318197 - DNA, 15 bp, Homo sapiens
gagtgcagggcctag

SEQ ID NO: 318198 - DNA, 15 bp, Homo sapiens
ggagtgcagggccta

SEQ ID NO: 318199 - DNA, 15 bp, Homo sapiens
aggagtgcagggcct

SEQ ID NO: 318200 - DNA, 15 bp, Homo sapiens
taggagtgcagggcc

SEQ ID NO: 318201 - DNA, 15 bp, Homo sapiens
ttaggagtgcagggc

SEQ ID NO: 318202 - DNA, 15 bp, Homo sapiens
gttaggagtgcaggg

SEQ ID NO: 318203 - DNA, 15 bp, Homo sapiens
ggttaggagtgcagg

SEQ ID NO: 318204 - DNA, 15 bp, Homo sapiens
tggttaggagtgcag

SEQ ID NO: 318205 - DNA, 15 bp, Homo sapiens
atggttaggagtgca

SEQ ID NO: 318206 - DNA, 15 bp, Homo sapiens
catggttaggagtgc

SEQ ID NO: 318207 - DNA, 15 bp, Homo sapiens
ccatggttaggagtg

SEQ ID NO: 318208 - DNA, 15 bp, Homo sapiens
cccatggttaggagt

SEQ ID NO: 318209 - DNA, 15 bp, Homo sapiens
tcccatggttaggag

SEQ ID NO: 318210 - DNA, 15 bp, Homo sapiens
ctcccatggttagga

SEQ ID NO: 318211 - DNA, 15 bp, Homo sapiens
cctcccatggttagg

SEQ ID NO: 318212 - DNA, 15 bp, Homo sapiens
tcctcccatggttag

SEQ ID NO: 318213 - DNA, 15 bp, Homo sapiens
ttcctcccatggtta

SEQ ID NO: 318214 - DNA, 15 bp, Homo sapiens
cttcctcccatggtt

SEQ ID NO: 318215 - DNA, 15 bp, Homo sapiens
tcttcctcccatggt

SEQ ID NO: 318216 - DNA, 15 bp, Homo sapiens
ctcttcctcccatgg

SEQ ID NO: 318217 - DNA, 15 bp, Homo sapiens
gctcttcctcccatg

SEQ ID NO: 318218 - DNA, 15 bp, Homo sapiens
agctcttcctcccat

SEQ ID NO: 318219 - DNA, 15 bp, Homo sapiens
gagctcttcctccca

SEQ ID NO: 318220 - DNA, 15 bp, Homo sapiens
agagctcttcctccc

SEQ ID NO: 318221 - DNA, 15 bp, Homo sapiens
aagagctcttcctcc

SEQ ID NO: 318222 - DNA, 15 bp, Homo sapiens
caagagctcttcctc

SEQ ID NO: 318223 - DNA, 15 bp, Homo sapiens
tcaagagctcttcct

SEQ ID NO: 318224 - DNA, 15 bp, Homo sapiens
ttcaagagctcttcc

SEQ ID NO: 318225 - DNA, 15 bp, Homo sapiens
tttcaagagctcttc

SEQ ID NO: 318226 - DNA, 15 bp, Homo sapiens
ctttcaagagctctt

SEQ ID NO: 318227 - DNA, 15 bp, Homo sapiens
cctttcaagagctct

SEQ ID NO: 318228 - DNA, 15 bp, Homo sapiens
ccctttcaagagctc

SEQ ID NO: 318229 - DNA, 15 bp, Homo sapiens
tccctttcaagagct

SEQ ID NO: 318230 - DNA, 15 bp, Homo sapiens
ttccctttcaagagc

SEQ ID NO: 318231 - DNA, 15 bp, Homo sapiens
gttccctttcaagag

SEQ ID NO: 318232 - DNA, 15 bp, Homo sapiens
agttccctttcaaga

SEQ ID NO: 318233 - DNA, 15 bp, Homo sapiens
cagttccctttcaag

SEQ ID NO: 318234 - DNA, 15 bp, Homo sapiens
acagttccctttcaa

SEQ ID NO: 318235 - DNA, 15 bp, Homo sapiens
cacagttccctttca

SEQ ID NO: 318236 - DNA, 15 bp, Homo sapiens
ccacagttccctttc

SEQ ID NO: 318237 - DNA, 15 bp, Homo sapiens
cccacagttcccttt

SEQ ID NO: 318238 - DNA, 15 bp, Homo sapiens
tcccacagttccctt

SEQ ID NO: 318239 - DNA, 15 bp, Homo sapiens
ctcccacagttccct

SEQ ID NO: 318240 - DNA, 15 bp, Homo sapiens
tctcccacagttccc

SEQ ID NO: 318241 - DNA, 15 bp, Homo sapiens
ttctcccacagttcc

SEQ ID NO: 318242 - DNA, 15 bp, Homo sapiens
cttctcccacagttc

SEQ ID NO: 318243 - DNA, 15 bp, Homo sapiens
ccttctcccacagtt

SEQ ID NO: 318244 - DNA, 15 bp, Homo sapiens
cccttctcccacagt

SEQ ID NO: 318245 - DNA, 15 bp, Homo sapiens
tcccttctcccacag

SEQ ID NO: 318246 - DNA, 15 bp, Homo sapiens
ttcccttctcccaca

SEQ ID NO: 318247 - DNA, 15 bp, Homo sapiens
attcccttctcccac

SEQ ID NO: 318248 - DNA, 15 bp, Homo sapiens
cattcccttctccca

SEQ ID NO: 318249 - DNA, 15 bp, Homo sapiens
tcattcccttctccc

SEQ ID NO: 318250 - DNA, 15 bp, Homo sapiens
ctcattcccttctcc

SEQ ID NO: 318251 - DNA, 15 bp, Homo sapiens
gctcattcccttctc

SEQ ID NO: 318252 - DNA, 15 bp, Homo sapiens
agctcattcccttct

SEQ ID NO: 318253 - DNA, 15 bp, Homo sapiens
cagctcattcccttc

SEQ ID NO: 318254 - DNA, 15 bp, Homo sapiens
gcagctcattccctt

SEQ ID NO: 318255 - DNA, 15 bp, Homo sapiens
ggcagctcattccct

SEQ ID NO: 318256 - DNA, 15 bp, Homo sapiens
aggcagctcattccc

SEQ ID NO: 318257 - DNA, 15 bp, Homo sapiens
aaggcagctcattcc

SEQ ID NO: 318258 - DNA, 15 bp, Homo sapiens
caaggcagctcattc

SEQ ID NO: 318259 - DNA, 15 bp, Homo sapiens
acaaggcagctcatt

SEQ ID NO: 318260 - DNA, 15 bp, Homo sapiens
cacaaggcagctcat

SEQ ID NO: 318261 - DNA, 15 bp, Homo sapiens
tcacaaggcagctca

SEQ ID NO: 318262 - DNA, 15 bp, Homo sapiens
ctcacaaggcagctc

SEQ ID NO: 318263 - DNA, 15 bp, Homo sapiens
cctcacaaggcagct

SEQ ID NO: 318264 - DNA, 15 bp, Homo sapiens
gcctcacaaggcagc

SEQ ID NO: 318265 - DNA, 15 bp, Homo sapiens
ggcctcacaaggcag

SEQ ID NO: 318266 - DNA, 15 bp, Homo sapiens
tggcctcacaaggca

SEQ ID NO: 318267 - DNA, 15 bp, Homo sapiens
gtggcctcacaaggc

SEQ ID NO: 318268 - DNA, 15 bp, Homo sapiens
tgtggcctcacaagg

SEQ ID NO: 318269 - DNA, 15 bp, Homo sapiens
ctgtggcctcacaag

SEQ ID NO: 318270 - DNA, 15 bp, Homo sapiens
tctgtggcctcacaa

SEQ ID NO: 318271 - DNA, 15 bp, Homo sapiens
ttctgtggcctcaca

SEQ ID NO: 318272 - DNA, 15 bp, Homo sapiens
cttctgtggcctcac

SEQ ID NO: 318273 - DNA, 15 bp, Homo sapiens
acttctgtggcctca

SEQ ID NO: 318274 - DNA, 15 bp, Homo sapiens
gacttctgtggcctc

SEQ ID NO: 318275 - DNA, 15 bp, Homo sapiens
ggacttctgtggcct

SEQ ID NO: 318276 - DNA, 15 bp, Homo sapiens
tggacttctgtggcc

SEQ ID NO: 318277 - DNA, 15 bp, Homo sapiens
ttggacttctgtggc

SEQ ID NO: 318278 - DNA, 15 bp, Homo sapiens
tttggacttctgtgg

SEQ ID NO: 318279 - DNA, 15 bp, Homo sapiens
ctttggacttctgtg

SEQ ID NO: 318280 - DNA, 15 bp, Homo sapiens
tctttggacttctgt

SEQ ID NO: 318281 - DNA, 15 bp, Homo sapiens
gtctttggacttctg

SEQ ID NO: 318282 - DNA, 15 bp, Homo sapiens
tgtctttggacttct

SEQ ID NO: 318283 - DNA, 15 bp, Homo sapiens
ctgtctttggacttc

SEQ ID NO: 318284 - DNA, 15 bp, Homo sapiens
gctgtctttggactt

SEQ ID NO: 318285 - DNA, 15 bp, Homo sapiens
agctgtctttggact

SEQ ID NO: 318286 - DNA, 15 bp, Homo sapiens
aagctgtctttggac

SEQ ID NO: 318287 - DNA, 15 bp, Homo sapiens
caagctgtctttgga

SEQ ID NO: 318288 - DNA, 15 bp, Homo sapiens
tcaagctgtctttgg

SEQ ID NO: 318289 - DNA, 15 bp, Homo sapiens
ctcaagctgtctttg

SEQ ID NO: 318290 - DNA, 15 bp, Homo sapiens
tctcaagctgtcttt

SEQ ID NO: 318291 - DNA, 15 bp, Homo sapiens
ttctcaagctgtctt

SEQ ID NO: 318292 - DNA, 15 bp, Homo sapiens
attctcaagctgtct

SEQ ID NO: 318293 - DNA, 15 bp, Homo sapiens
aattctcaagctgtc

SEQ ID NO: 318294 - DNA, 15 bp, Homo sapiens
aaattctcaagctgt

SEQ ID NO: 318295 - DNA, 15 bp, Homo sapiens
caaattctcaagctg

SEQ ID NO: 318296 - DNA, 15 bp, Homo sapiens
ccaaattctcaagct

SEQ ID NO: 318297 - DNA, 15 bp, Homo sapiens
tccaaattctcaagc

SEQ ID NO: 318298 - DNA, 15 bp, Homo sapiens
ctccaaattctcaag

SEQ ID NO: 318299 - DNA, 15 bp, Homo sapiens
cctccaaattctcaa

SEQ ID NO: 318300 - DNA, 15 bp, Homo sapiens
ccctccaaattctca

SEQ ID NO: 318301 - DNA, 15 bp, Homo sapiens
tccctccaaattctc

SEQ ID NO: 318302 - DNA, 15 bp, Homo sapiens
gtccctccaaattct

SEQ ID NO: 318303 - DNA, 15 bp, Homo sapiens
tgtccctccaaattc

SEQ ID NO: 318304 - DNA, 15 bp, Homo sapiens
ctgtccctccaaatt

SEQ ID NO: 318305 - DNA, 15 bp, Homo sapiens
gctgtccctccaaat

SEQ ID NO: 318306 - DNA, 15 bp, Homo sapiens
tgctgtccctccaaa

SEQ ID NO: 318307 - DNA, 15 bp, Homo sapiens
gtgctgtccctccaa

SEQ ID NO: 318308 - DNA, 15 bp, Homo sapiens
cgtgctgtccctcca

SEQ ID NO: 318309 - DNA, 15 bp, Homo sapiens
acgtgctgtccctcc

SEQ ID NO: 318310 - DNA, 15 bp, Homo sapiens
cacgtgctgtccctc

SEQ ID NO: 318311 - DNA, 15 bp, Homo sapiens
gcacgtgctgtccct

SEQ ID NO: 318312 - DNA, 15 bp, Homo sapiens
ggcacgtgctgtccc

SEQ ID NO: 318313 - DNA, 15 bp, Homo sapiens
cggcacgtgctgtcc

SEQ ID NO: 318314 - DNA, 15 bp, Homo sapiens
ccggcacgtgctgtc

SEQ ID NO: 318315 - DNA, 15 bp, Homo sapiens
tccggcacgtgctgt

SEQ ID NO: 318316 - DNA, 15 bp, Homo sapiens
gtccggcacgtgctg

SEQ ID NO: 318317 - DNA, 15 bp, Homo sapiens
agtccggcacgtgct

SEQ ID NO: 318318 - DNA, 15 bp, Homo sapiens
cagtccggcacgtgc

SEQ ID NO: 318319 - DNA, 15 bp, Homo sapiens
ccagtccggcacgtg

SEQ ID NO: 318320 - DNA, 15 bp, Homo sapiens
cccagtccggcacgt

SEQ ID NO: 318321 - DNA, 15 bp, Homo sapiens
acccagtccggcacg

SEQ ID NO: 318322 - DNA, 15 bp, Homo sapiens
cacccagtccggcac

SEQ ID NO: 318323 - DNA, 15 bp, Homo sapiens
gcacccagtccggca

SEQ ID NO: 318324 - DNA, 15 bp, Homo sapiens
ggcacccagtccggc

SEQ ID NO: 318325 - DNA, 15 bp, Homo sapiens
aggcacccagtccgg

SEQ ID NO: 318326 - DNA, 15 bp, Homo sapiens
gaggcacccagtccg

SEQ ID NO: 318327 - DNA, 15 bp, Homo sapiens
agaggcacccagtcc

SEQ ID NO: 318328 - DNA, 15 bp, Homo sapiens
tagaggcacccagtc

SEQ ID NO: 318329 - DNA, 15 bp, Homo sapiens
atagaggcacccagt

SEQ ID NO: 318330 - DNA, 15 bp, Homo sapiens
catagaggcacccag

SEQ ID NO: 318331 - DNA, 15 bp, Homo sapiens
gcatagaggcaccca

SEQ ID NO: 318332 - DNA, 15 bp, Homo sapiens
agcatagaggcaccc

SEQ ID NO: 318333 - DNA, 15 bp, Homo sapiens
aagcatagaggcacc

SEQ ID NO: 318334 - DNA, 15 bp, Homo sapiens
caagcatagaggcac

SEQ ID NO: 318335 - DNA, 15 bp, Homo sapiens
ccaagcatagaggca

SEQ ID NO: 318336 - DNA, 15 bp, Homo sapiens
accaagcatagaggc

SEQ ID NO: 318337 - DNA, 15 bp, Homo sapiens
taccaagcatagagg

SEQ ID NO: 318338 - DNA, 15 bp, Homo sapiens
ataccaagcatagag

SEQ ID NO: 318339 - DNA, 15 bp, Homo sapiens
gataccaagcataga

SEQ ID NO: 318340 - DNA, 15 bp, Homo sapiens
ggataccaagcatag

SEQ ID NO: 318341 - DNA, 15 bp, Homo sapiens
cggataccaagcata

SEQ ID NO: 318342 - DNA, 15 bp, Homo sapiens
ccggataccaagcat

SEQ ID NO: 318343 - DNA, 15 bp, Homo sapiens
accggataccaagca

SEQ ID NO: 318344 - DNA, 15 bp, Homo sapiens
caccggataccaagc

SEQ ID NO: 318345 - DNA, 15 bp, Homo sapiens
tcaccggataccaag

SEQ ID NO: 318346 - DNA, 15 bp, Homo sapiens
atcaccggataccaa

SEQ ID NO: 318347 - DNA, 15 bp, Homo sapiens
aatcaccggatacca

SEQ ID NO: 318348 - DNA, 15 bp, Homo sapiens
gaatcaccggatacc

SEQ ID NO: 318349 - DNA, 15 bp, Homo sapiens
ggaatcaccggatac

SEQ ID NO: 318350 - DNA, 15 bp, Homo sapiens
tggaatcaccggata

SEQ ID NO: 318351 - DNA, 15 bp, Homo sapiens
atggaatcaccggat

SEQ ID NO: 318352 - DNA, 15 bp, Homo sapiens
catggaatcaccgga

SEQ ID NO: 318353 - DNA, 15 bp, Homo sapiens
ccatggaatcaccgg

SEQ ID NO: 318354 - DNA, 15 bp, Homo sapiens
tccatggaatcaccg

SEQ ID NO: 318355 - DNA, 15 bp, Homo sapiens
ctccatggaatcacc

SEQ ID NO: 318356 - DNA, 15 bp, Homo sapiens
cctccatggaatcac

SEQ ID NO: 318357 - DNA, 15 bp, Homo sapiens
tcctccatggaatca

SEQ ID NO: 318358 - DNA, 15 bp, Homo sapiens
ctcctccatggaatc

SEQ ID NO: 318359 - DNA, 15 bp, Homo sapiens
tctcctccatggaat

SEQ ID NO: 318360 - DNA, 15 bp, Homo sapiens
gtctcctccatggaa

SEQ ID NO: 318361 - DNA, 15 bp, Homo sapiens
ggtctcctccatgga

SEQ ID NO: 318362 - DNA, 15 bp, Homo sapiens
aggtctcctccatgg

SEQ ID NO: 318363 - DNA, 15 bp, Homo sapiens
caggtctcctccatg

SEQ ID NO: 318364 - DNA, 15 bp, Homo sapiens
ccaggtctcctccat

SEQ ID NO: 318365 - DNA, 15 bp, Homo sapiens
cccaggtctcctcca

SEQ ID NO: 318366 - DNA, 15 bp, Homo sapiens
acccaggtctcctcc

SEQ ID NO: 318367 - DNA, 15 bp, Homo sapiens
aacccaggtctcctc

SEQ ID NO: 318368 - DNA, 15 bp, Homo sapiens
gaacccaggtctcct

SEQ ID NO: 318369 - DNA, 15 bp, Homo sapiens
agaacccaggtctcc

SEQ ID NO: 318370 - DNA, 15 bp, Homo sapiens
cagaacccaggtctc

SEQ ID NO: 318371 - DNA, 15 bp, Homo sapiens
gcagaacccaggtct

SEQ ID NO: 318372 - DNA, 15 bp, Homo sapiens
ggcagaacccaggtc

SEQ ID NO: 318373 - DNA, 15 bp, Homo sapiens
gggcagaacccaggt

SEQ ID NO: 318374 - DNA, 15 bp, Homo sapiens
ggggcagaacccagg

SEQ ID NO: 318375 - DNA, 15 bp, Homo sapiens
tggggcagaacccag

SEQ ID NO: 318376 - DNA, 15 bp, Homo sapiens
atggggcagaaccca

SEQ ID NO: 318377 - DNA, 15 bp, Homo sapiens
aatggggcagaaccc

SEQ ID NO: 318378 - DNA, 15 bp, Homo sapiens
gaatggggcagaacc

SEQ ID NO: 318379 - DNA, 15 bp, Homo sapiens
agaatggggcagaac

SEQ ID NO: 318380 - DNA, 15 bp, Homo sapiens
gagaatggggcagaa

SEQ ID NO: 318381 - DNA, 15 bp, Homo sapiens
ggagaatggggcaga

SEQ ID NO: 318382 - DNA, 15 bp, Homo sapiens
aggagaatggggcag

SEQ ID NO: 318383 - DNA, 15 bp, Homo sapiens
caggagaatggggca

SEQ ID NO: 318384 - DNA, 15 bp, Homo sapiens
ccaggagaatggggc

SEQ ID NO: 318385 - DNA, 15 bp, Homo sapiens
cccaggagaatgggg

SEQ ID NO: 318386 - DNA, 15 bp, Homo sapiens
tcccaggagaatggg

SEQ ID NO: 318387 - DNA, 15 bp, Homo sapiens
ctcccaggagaatgg

SEQ ID NO: 318388 - DNA, 15 bp, Homo sapiens
cctcccaggagaatg

SEQ ID NO: 318389 - DNA, 15 bp, Homo sapiens
ccctcccaggagaat

SEQ ID NO: 318390 - DNA, 15 bp, Homo sapiens
cccctcccaggagaa

SEQ ID NO: 318391 - DNA, 15 bp, Homo sapiens
acccctcccaggaga

SEQ ID NO: 318392 - DNA, 15 bp, Homo sapiens
aacccctcccaggag

SEQ ID NO: 318393 - DNA, 15 bp, Homo sapiens
caacccctcccagga

SEQ ID NO: 318394 - DNA, 15 bp, Homo sapiens
gcaacccctcccagg

SEQ ID NO: 318395 - DNA, 15 bp, Homo sapiens
ggcaacccctcccag

SEQ ID NO: 318396 - DNA, 15 bp, Homo sapiens
gggcaacccctccca

SEQ ID NO: 318397 - DNA, 15 bp, Homo sapiens
tgggcaacccctccc

SEQ ID NO: 318398 - DNA, 15 bp, Homo sapiens
ttgggcaacccctcc

SEQ ID NO: 318399 - DNA, 15 bp, Homo sapiens
tttgggcaacccctc

SEQ ID NO: 318400 - DNA, 15 bp, Homo sapiens
ctttgggcaacccct

SEQ ID NO: 318401 - DNA, 15 bp, Homo sapiens
actttgggcaacccc

SEQ ID NO: 318402 - DNA, 15 bp, Homo sapiens
gactttgggcaaccc

SEQ ID NO: 318403 - DNA, 15 bp, Homo sapiens
agactttgggcaacc

SEQ ID NO: 318404 - DNA, 15 bp, Homo sapiens
aagactttgggcaac

SEQ ID NO: 318405 - DNA, 15 bp, Homo sapiens
taagactttgggcaa

SEQ ID NO: 318406 - DNA, 15 bp, Homo sapiens
ataagactttgggca

SEQ ID NO: 318407 - DNA, 15 bp, Homo sapiens
gataagactttgggc

SEQ ID NO: 318408 - DNA, 15 bp, Homo sapiens
tgataagactttggg

SEQ ID NO: 318409 - DNA, 15 bp, Homo sapiens
gtgataagactttgg

SEQ ID NO: 318410 - DNA, 15 bp, Homo sapiens
ggtgataagactttg

SEQ ID NO: 318411 - DNA, 15 bp, Homo sapiens
cggtgataagacttt

SEQ ID NO: 318412 - DNA, 15 bp, Homo sapiens
ccggtgataagactt

SEQ ID NO: 318413 - DNA, 15 bp, Homo sapiens
tccggtgataagact

SEQ ID NO: 318414 - DNA, 15 bp, Homo sapiens
ctccggtgataagac

SEQ ID NO: 318415 - DNA, 15 bp, Homo sapiens
actccggtgataaga

SEQ ID NO: 318416 - DNA, 15 bp, Homo sapiens
cactccggtgataag

SEQ ID NO: 318417 - DNA, 15 bp, Homo sapiens
ccactccggtgataa

SEQ ID NO: 318418 - DNA, 15 bp, Homo sapiens
cccactccggtgata

SEQ ID NO: 318419 - DNA, 15 bp, Homo sapiens
acccactccggtgat

SEQ ID NO: 318420 - DNA, 15 bp, Homo sapiens
gacccactccggtga

SEQ ID NO: 318421 - DNA, 15 bp, Homo sapiens
tgacccactccggtg

SEQ ID NO: 318422 - DNA, 15 bp, Homo sapiens
ctgacccactccggt

SEQ ID NO: 318423 - DNA, 15 bp, Homo sapiens
gctgacccactccgg

SEQ ID NO: 318424 - DNA, 15 bp, Homo sapiens
agctgacccactccg

SEQ ID NO: 318425 - DNA, 15 bp, Homo sapiens
cagctgacccactcc

SEQ ID NO: 318426 - DNA, 15 bp, Homo sapiens
gcagctgacccactc

SEQ ID NO: 318427 - DNA, 15 bp, Homo sapiens
ggcagctgacccact

SEQ ID NO: 318428 - DNA, 15 bp, Homo sapiens
aggcagctgacccac

SEQ ID NO: 318429 - DNA, 15 bp, Homo sapiens
gaggcagctgaccca

SEQ ID NO: 318430 - DNA, 15 bp, Homo sapiens
ggaggcagctgaccc

SEQ ID NO: 318431 - DNA, 15 bp, Homo sapiens
tggaggcagctgacc

SEQ ID NO: 318432 - DNA, 15 bp, Homo sapiens
ctggaggcagctgac

SEQ ID NO: 318433 - DNA, 15 bp, Homo sapiens
cctggaggcagctga

SEQ ID NO: 318434 - DNA, 15 bp, Homo sapiens
tcctggaggcagctg

SEQ ID NO: 318435 - DNA, 15 bp, Homo sapiens
gtcctggaggcagct

SEQ ID NO: 318436 - DNA, 15 bp, Homo sapiens
tgtcctggaggcagc

SEQ ID NO: 318437 - DNA, 15 bp, Homo sapiens
ttgtcctggaggcag

SEQ ID NO: 318438 - DNA, 15 bp, Homo sapiens
tttgtcctggaggca

SEQ ID NO: 318439 - DNA, 15 bp, Homo sapiens
ctttgtcctggaggc

SEQ ID NO: 318440 - DNA, 15 bp, Homo sapiens
gctttgtcctggagg

SEQ ID NO: 318441 - DNA, 15 bp, Homo sapiens
agctttgtcctggag

SEQ ID NO: 318442 - DNA, 15 bp, Homo sapiens
aagctttgtcctgga

SEQ ID NO: 318443 - DNA, 15 bp, Homo sapiens
aaagctttgtcctgg

SEQ ID NO: 318444 - DNA, 15 bp, Homo sapiens
taaagctttgtcctg

SEQ ID NO: 318445 - DNA, 15 bp, Homo sapiens
ctaaagctttgtcct

SEQ ID NO: 318446 - DNA, 15 bp, Homo sapiens
gctaaagctttgtcc

SEQ ID NO: 318447 - DNA, 15 bp, Homo sapiens
tgctaaagctttgtc

SEQ ID NO: 318448 - DNA, 15 bp, Homo sapiens
atgctaaagctttgt

SEQ ID NO: 318449 - DNA, 15 bp, Homo sapiens
tatgctaaagctttg

SEQ ID NO: 318450 - DNA, 15 bp, Homo sapiens
gtatgctaaagcttt

SEQ ID NO: 318451 - DNA, 15 bp, Homo sapiens
tgtatgctaaagctt

SEQ ID NO: 318452 - DNA, 15 bp, Homo sapiens
gtgtatgctaaagct

SEQ ID NO: 318453 - DNA, 15 bp, Homo sapiens
agtgtatgctaaagc

SEQ ID NO: 318454 - DNA, 15 bp, Homo sapiens
aagtgtatgctaaag

SEQ ID NO: 318455 - DNA, 15 bp, Homo sapiens
caagtgtatgctaaa

SEQ ID NO: 318456 - DNA, 15 bp, Homo sapiens
acaagtgtatgctaa

SEQ ID NO: 318457 - DNA, 15 bp, Homo sapiens
cacaagtgtatgcta

SEQ ID NO: 318458 - DNA, 15 bp, Homo sapiens
gcacaagtgtatgct

SEQ ID NO: 318459 - DNA, 15 bp, Homo sapiens
agcacaagtgtatgc

SEQ ID NO: 318460 - DNA, 15 bp, Homo sapiens
cagcacaagtgtatg

SEQ ID NO: 318461 - DNA, 15 bp, Homo sapiens
ccagcacaagtgtat

SEQ ID NO: 318462 - DNA, 15 bp, Homo sapiens
cccagcacaagtgta

SEQ ID NO: 318463 - DNA, 15 bp, Homo sapiens
gcccagcacaagtgt

SEQ ID NO: 318464 - DNA, 15 bp, Homo sapiens
ggcccagcacaagtg

SEQ ID NO: 318465 - DNA, 15 bp, Homo sapiens
tggcccagcacaagt

SEQ ID NO: 318466 - DNA, 15 bp, Homo sapiens
atggcccagcacaag

SEQ ID NO: 318467 - DNA, 15 bp, Homo sapiens
tatggcccagcacaa

SEQ ID NO: 318468 - DNA, 15 bp, Homo sapiens
gtatggcccagcaca

SEQ ID NO: 318469 - DNA, 15 bp, Homo sapiens
agtatggcccagcac

SEQ ID NO: 318470 - DNA, 15 bp, Homo sapiens
gagtatggcccagca

SEQ ID NO: 318471 - DNA, 15 bp, Homo sapiens
ggagtatggcccagc

SEQ ID NO: 318472 - DNA, 15 bp, Homo sapiens
tggagtatggcccag

SEQ ID NO: 318473 - DNA, 15 bp, Homo sapiens
gtggagtatggccca

SEQ ID NO: 318474 - DNA, 15 bp, Homo sapiens
cgtggagtatggccc

SEQ ID NO: 318475 - DNA, 15 bp, Homo sapiens
acgtggagtatggcc

SEQ ID NO: 318476 - DNA, 15 bp, Homo sapiens
cacgtggagtatggc

SEQ ID NO: 318477 - DNA, 15 bp, Homo sapiens
ccacgtggagtatgg

SEQ ID NO: 318478 - DNA, 15 bp, Homo sapiens
tccacgtggagtatg

SEQ ID NO: 318479 - DNA, 15 bp, Homo sapiens
ctccacgtggagtat

SEQ ID NO: 318480 - DNA, 15 bp, Homo sapiens
tctccacgtggagta

SEQ ID NO: 318481 - DNA, 15 bp, Homo sapiens
ttctccacgtggagt

SEQ ID NO: 318482 - DNA, 15 bp, Homo sapiens
cttctccacgtggag

SEQ ID NO: 318483 - DNA, 15 bp, Homo sapiens
gcttctccacgtgga

SEQ ID NO: 318484 - DNA, 15 bp, Homo sapiens
ggcttctccacgtgg

SEQ ID NO: 318485 - DNA, 15 bp, Homo sapiens
gggcttctccacgtg

SEQ ID NO: 318486 - DNA, 15 bp, Homo sapiens
agggcttctccacgt

SEQ ID NO: 318487 - DNA, 15 bp, Homo sapiens
cagggcttctccacg

SEQ ID NO: 318488 - DNA, 15 bp, Homo sapiens
gcagggcttctccac

SEQ ID NO: 318489 - DNA, 15 bp, Homo sapiens
agcagggcttctcca

SEQ ID NO: 318490 - DNA, 15 bp, Homo sapiens
cagcagggcttctcc

SEQ ID NO: 318491 - DNA, 15 bp, Homo sapiens
ccagcagggcttctc

SEQ ID NO: 318492 - DNA, 15 bp, Homo sapiens
cccagcagggcttct

SEQ ID NO: 318493 - DNA, 15 bp, Homo sapiens
ccccagcagggcttc

SEQ ID NO: 318494 - DNA, 15 bp, Homo sapiens
gccccagcagggctt

SEQ ID NO: 318495 - DNA, 15 bp, Homo sapiens
agccccagcagggct

SEQ ID NO: 318496 - DNA, 15 bp, Homo sapiens
cagccccagcagggc

SEQ ID NO: 318497 - DNA, 15 bp, Homo sapiens
ccagccccagcaggg

SEQ ID NO: 318498 - DNA, 15 bp, Homo sapiens
cccagccccagcagg

SEQ ID NO: 318499 - DNA, 15 bp, Homo sapiens
ccccagccccagcag

SEQ ID NO: 318500 - DNA, 15 bp, Homo sapiens
gccccagccccagca

SEQ ID NO: 318501 - DNA, 15 bp, Homo sapiens
ggccccagccccagc

SEQ ID NO: 318502 - DNA, 15 bp, Homo sapiens
gggccccagccccag

SEQ ID NO: 318503 - DNA, 15 bp, Homo sapiens
ggggccccagcccca

SEQ ID NO: 318504 - DNA, 15 bp, Homo sapiens
tggggccccagcccc

SEQ ID NO: 318505 - DNA, 15 bp, Homo sapiens
gtggggccccagccc

SEQ ID NO: 318506 - DNA, 15 bp, Homo sapiens
agtggggccccagcc

SEQ ID NO: 318507 - DNA, 15 bp, Homo sapiens
cagtggggccccagc

SEQ ID NO: 318508 - DNA, 15 bp, Homo sapiens
gcagtggggccccag

SEQ ID NO: 318509 - DNA, 15 bp, Homo sapiens
agcagtggggcccca

SEQ ID NO: 318510 - DNA, 15 bp, Homo sapiens
gagcagtggggcccc

SEQ ID NO: 318511 - DNA, 15 bp, Homo sapiens
agagcagtggggccc

SEQ ID NO: 318512 - DNA, 15 bp, Homo sapiens
cagagcagtggggcc

SEQ ID NO: 318513 - DNA, 15 bp, Homo sapiens
ccagagcagtggggc

SEQ ID NO: 318514 - DNA, 15 bp, Homo sapiens
tccagagcagtgggg

SEQ ID NO: 318515 - DNA, 15 bp, Homo sapiens
atccagagcagtggg

SEQ ID NO: 318516 - DNA, 15 bp, Homo sapiens
gatccagagcagtgg

SEQ ID NO: 318517 - DNA, 15 bp, Homo sapiens
agatccagagcagtg

SEQ ID NO: 318518 - DNA, 15 bp, Homo sapiens
aagatccagagcagt

SEQ ID NO: 318519 - DNA, 15 bp, Homo sapiens
aaagatccagagcag

SEQ ID NO: 318520 - DNA, 15 bp, Homo sapiens
taaagatccagagca

SEQ ID NO: 318521 - DNA, 15 bp, Homo sapiens
ttaaagatccagagc

SEQ ID NO: 318522 - DNA, 15 bp, Homo sapiens
tttaaagatccagag

SEQ ID NO: 318523 - DNA, 15 bp, Homo sapiens
ttttaaagatccaga

SEQ ID NO: 318524 - DNA, 15 bp, Homo sapiens
cttttaaagatccag

SEQ ID NO: 318525 - DNA, 15 bp, Homo sapiens
gcttttaaagatcca

SEQ ID NO: 318526 - DNA, 15 bp, Homo sapiens
agcttttaaagatcc

SEQ ID NO: 318527 - DNA, 15 bp, Homo sapiens
tagcttttaaagatc

SEQ ID NO: 318528 - DNA, 15 bp, Homo sapiens
atagcttttaaagat

SEQ ID NO: 318529 - DNA, 15 bp, Homo sapiens
aatagcttttaaaga

SEQ ID NO: 318530 - DNA, 15 bp, Homo sapiens
caatagcttttaaag

SEQ ID NO: 318531 - DNA, 15 bp, Homo sapiens
ccaatagcttttaaa

SEQ ID NO: 318532 - DNA, 15 bp, Homo sapiens
accaatagcttttaa

SEQ ID NO: 318533 - DNA, 15 bp, Homo sapiens
aaccaatagctttta

SEQ ID NO: 318534 - DNA, 15 bp, Homo sapiens
gaaccaatagctttt

SEQ ID NO: 318535 - DNA, 15 bp, Homo sapiens
tgaaccaatagcttt

SEQ ID NO: 318536 - DNA, 15 bp, Homo sapiens
ctgaaccaatagctt

SEQ ID NO: 318537 - DNA, 15 bp, Homo sapiens
cctgaaccaatagct

SEQ ID NO: 318538 - DNA, 15 bp, Homo sapiens
ccctgaaccaatagc

SEQ ID NO: 318539 - DNA, 15 bp, Homo sapiens
cccctgaaccaatag

SEQ ID NO: 318540 - DNA, 15 bp, Homo sapiens
gcccctgaaccaata

SEQ ID NO: 318541 - DNA, 15 bp, Homo sapiens
ggcccctgaaccaat

SEQ ID NO: 318542 - DNA, 15 bp, Homo sapiens
tggcccctgaaccaa

SEQ ID NO: 318543 - DNA, 15 bp, Homo sapiens
ctggcccctgaacca

SEQ ID NO: 318544 - DNA, 15 bp, Homo sapiens
cctggcccctgaacc

SEQ ID NO: 318545 - DNA, 15 bp, Homo sapiens
acctggcccctgaac

SEQ ID NO: 318546 - DNA, 15 bp, Homo sapiens
cacctggcccctgaa

SEQ ID NO: 318547 - DNA, 15 bp, Homo sapiens
acacctggcccctga

SEQ ID NO: 318548 - DNA, 15 bp, Homo sapiens
tacacctggcccctg

SEQ ID NO: 318549 - DNA, 15 bp, Homo sapiens
ttacacctggcccct

SEQ ID NO: 318550 - DNA, 15 bp, Homo sapiens
attacacctggcccc

SEQ ID NO: 318551 - DNA, 15 bp, Homo sapiens
cattacacctggccc

SEQ ID NO: 318552 - DNA, 15 bp, Homo sapiens
ccattacacctggcc

SEQ ID NO: 318553 - DNA, 15 bp, Homo sapiens
gccattacacctggc

SEQ ID NO: 318554 - DNA, 15 bp, Homo sapiens
agccattacacctgg

SEQ ID NO: 318555 - DNA, 15 bp, Homo sapiens
gagccattacacctg

SEQ ID NO: 318556 - DNA, 15 bp, Homo sapiens
tgagccattacacct

SEQ ID NO: 318557 - DNA, 15 bp, Homo sapiens
gtgagccattacacc

SEQ ID NO: 318558 - DNA, 15 bp, Homo sapiens
tgtgagccattacac

SEQ ID NO: 318559 - DNA, 15 bp, Homo sapiens
gtgtgagccattaca

SEQ ID NO: 318560 - DNA, 15 bp, Homo sapiens
ggtgtgagccattac

SEQ ID NO: 318561 - DNA, 15 bp, Homo sapiens
aggtgtgagccatta

SEQ ID NO: 318562 - DNA, 15 bp, Homo sapiens
taggtgtgagccatt

SEQ ID NO: 318563 - DNA, 15 bp, Homo sapiens
ataggtgtgagccat

SEQ ID NO: 318564 - DNA, 15 bp, Homo sapiens
tataggtgtgagcca

SEQ ID NO: 318565 - DNA, 15 bp, Homo sapiens
ttataggtgtgagcc

SEQ ID NO: 318566 - DNA, 15 bp, Homo sapiens
gttataggtgtgagc

SEQ ID NO: 318567 - DNA, 15 bp, Homo sapiens
ggttataggtgtgag

SEQ ID NO: 318568 - DNA, 15 bp, Homo sapiens
gggttataggtgtga

SEQ ID NO: 318569 - DNA, 15 bp, Homo sapiens
agggttataggtgtg

SEQ ID NO: 318570 - DNA, 15 bp, Homo sapiens
tagggttataggtgt

SEQ ID NO: 318571 - DNA, 15 bp, Homo sapiens
ctagggttataggtg

SEQ ID NO: 318572 - DNA, 15 bp, Homo sapiens
gctagggttataggt

SEQ ID NO: 318573 - DNA, 15 bp, Homo sapiens
tgctagggttatagg

SEQ ID NO: 318574 - DNA, 15 bp, Homo sapiens
gtgctagggttatag

SEQ ID NO: 318575 - DNA, 15 bp, Homo sapiens
agtgctagggttata

SEQ ID NO: 318576 - DNA, 15 bp, Homo sapiens
aagtgctagggttat

SEQ ID NO: 318577 - DNA, 15 bp, Homo sapiens
aaagtgctagggtta

SEQ ID NO: 318578 - DNA, 15 bp, Homo sapiens
caaagtgctagggtt

SEQ ID NO: 318579 - DNA, 15 bp, Homo sapiens
ccaaagtgctagggt

SEQ ID NO: 318580 - DNA, 15 bp, Homo sapiens
cccaaagtgctaggg

SEQ ID NO: 318581 - DNA, 15 bp, Homo sapiens
ttcagcctcccaaag

SEQ ID NO: 318582 - DNA, 15 bp, Homo sapiens
cttcagcctcccaaa

SEQ ID NO: 318583 - DNA, 15 bp, Homo sapiens
gcttcagcctcccaa

SEQ ID NO: 318584 - DNA, 15 bp, Homo sapiens
tgcttcagcctccca

SEQ ID NO: 318585 - DNA, 15 bp, Homo sapiens
ctgcttcagcctccc

SEQ ID NO: 318586 - DNA, 15 bp, Homo sapiens
cctgcttcagcctcc

SEQ ID NO: 318587 - DNA, 15 bp, Homo sapiens
acctgcttcagcctc

SEQ ID NO: 318588 - DNA, 15 bp, Homo sapiens
cacctgcttcagcct

SEQ ID NO: 318589 - DNA, 15 bp, Homo sapiens
ccacctgcttcagcc

SEQ ID NO: 318590 - DNA, 15 bp, Homo sapiens
tccacctgcttcagc

SEQ ID NO: 318591 - DNA, 15 bp, Homo sapiens
atccacctgcttcag

SEQ ID NO: 318592 - DNA, 15 bp, Homo sapiens
tatccacctgcttca

SEQ ID NO: 318593 - DNA, 15 bp, Homo sapiens
ctatccacctgcttc

SEQ ID NO: 318594 - DNA, 15 bp, Homo sapiens
gctatccacctgctt

SEQ ID NO: 318595 - DNA, 15 bp, Homo sapiens
ggctatccacctgct

SEQ ID NO: 318596 - DNA, 15 bp, Homo sapiens
aggctatccacctgc

SEQ ID NO: 318597 - DNA, 15 bp, Homo sapiens
caggctatccacctg

SEQ ID NO: 318598 - DNA, 15 bp, Homo sapiens
tcaggctatccacct

SEQ ID NO: 318599 - DNA, 15 bp, Homo sapiens
ctcaggctatccacc

SEQ ID NO: 318600 - DNA, 15 bp, Homo sapiens
cctcaggctatccac

SEQ ID NO: 318601 - DNA, 15 bp, Homo sapiens
acctcaggctatcca

SEQ ID NO: 318602 - DNA, 15 bp, Homo sapiens
gacctcaggctatcc

SEQ ID NO: 318603 - DNA, 15 bp, Homo sapiens
tgacctcaggctatc

SEQ ID NO: 318604 - DNA, 15 bp, Homo sapiens
ctgacctcaggctat

SEQ ID NO: 318605 - DNA, 15 bp, Homo sapiens
cctgacctcaggcta

SEQ ID NO: 318606 - DNA, 15 bp, Homo sapiens
tcctgacctcaggct

SEQ ID NO: 318607 - DNA, 15 bp, Homo sapiens
ctcctgacctcaggc

SEQ ID NO: 318608 - DNA, 15 bp, Homo sapiens
ggcttgtctcaaact

SEQ ID NO: 318609 - DNA, 15 bp, Homo sapiens
aggcttgtctcaaac

SEQ ID NO: 318610 - DNA, 15 bp, Homo sapiens
caggcttgtctcaaa

SEQ ID NO: 318611 - DNA, 15 bp, Homo sapiens
tcaggcttgtctcaa

SEQ ID NO: 318612 - DNA, 15 bp, Homo sapiens
atcaggcttgtctca

SEQ ID NO: 318613 - DNA, 15 bp, Homo sapiens
catcaggcttgtctc

SEQ ID NO: 318614 - DNA, 15 bp, Homo sapiens
tcatcaggcttgtct

SEQ ID NO: 318615 - DNA, 15 bp, Homo sapiens
ttcatcaggcttgtc

SEQ ID NO: 318616 - DNA, 15 bp, Homo sapiens
gttcatcaggcttgt

SEQ ID NO: 318617 - DNA, 15 bp, Homo sapiens
cgttcatcaggcttg

SEQ ID NO: 318618 - DNA, 15 bp, Homo sapiens
acgttcatcaggctt

SEQ ID NO: 318619 - DNA, 15 bp, Homo sapiens
cacgttcatcaggct

SEQ ID NO: 318620 - DNA, 15 bp, Homo sapiens
ccacgttcatcaggc

SEQ ID NO: 318621 - DNA, 15 bp, Homo sapiens
accacgttcatcagg

SEQ ID NO: 318622 - DNA, 15 bp, Homo sapiens
caccacgttcatcag

SEQ ID NO: 318623 - DNA, 15 bp, Homo sapiens
tcaccacgttcatca

SEQ ID NO: 318624 - DNA, 15 bp, Homo sapiens
ttcaccacgttcatc

SEQ ID NO: 318625 - DNA, 15 bp, Homo sapiens
tttcaccacgttcat

SEQ ID NO: 318626 - DNA, 15 bp, Homo sapiens
gtttcaccacgttca

SEQ ID NO: 318627 - DNA, 15 bp, Homo sapiens
ggtttcaccacgttc

SEQ ID NO: 318628 - DNA, 15 bp, Homo sapiens
gggtttcaccacgtt

SEQ ID NO: 318629 - DNA, 15 bp, Homo sapiens
ggggtttcaccacgt

SEQ ID NO: 318630 - DNA, 15 bp, Homo sapiens
tggggtttcaccacg

SEQ ID NO: 318631 - DNA, 15 bp, Homo sapiens
atggggtttcaccac

SEQ ID NO: 318632 - DNA, 15 bp, Homo sapiens
cgatggggtttcacc

SEQ ID NO: 318633 - DNA, 15 bp, Homo sapiens
gcgatggggtttcac

SEQ ID NO: 318634 - DNA, 15 bp, Homo sapiens
agcgatggggtttca

SEQ ID NO: 318635 - DNA, 15 bp, Homo sapiens
tagcgatggggtttc

SEQ ID NO: 318636 - DNA, 15 bp, Homo sapiens
atagcgatggggttt

SEQ ID NO: 318637 - DNA, 15 bp, Homo sapiens
aatagcgatggggtt

SEQ ID NO: 318638 - DNA, 15 bp, Homo sapiens
taatagcgatggggt

SEQ ID NO: 318639 - DNA, 15 bp, Homo sapiens
ttaatagcgatgggg

SEQ ID NO: 318640 - DNA, 15 bp, Homo sapiens
tttaatagcgatggg

SEQ ID NO: 318641 - DNA, 15 bp, Homo sapiens
ttttaatagcgatgg

SEQ ID NO: 318642 - DNA, 15 bp, Homo sapiens
attttaatagcgatg

SEQ ID NO: 318643 - DNA, 15 bp, Homo sapiens
tattttaatagcgat

SEQ ID NO: 318644 - DNA, 15 bp, Homo sapiens
gtattttaatagcga

SEQ ID NO: 318645 - DNA, 15 bp, Homo sapiens
tgtattttaatagcg

SEQ ID NO: 318646 - DNA, 15 bp, Homo sapiens
ttgtattttaatagc

SEQ ID NO: 318647 - DNA, 15 bp, Homo sapiens
tttgtattttaatag

SEQ ID NO: 318648 - DNA, 15 bp, Homo sapiens
ttttgtattttaata

SEQ ID NO: 318649 - DNA, 15 bp, Homo sapiens
tttttgtattttaat

SEQ ID NO: 318650 - DNA, 15 bp, Homo sapiens
ttttttgtattttaa

SEQ ID NO: 318651 - DNA, 15 bp, Homo sapiens
attttttgtatttta

SEQ ID NO: 318652 - DNA, 15 bp, Homo sapiens
ccatgcccggctaat

SEQ ID NO: 318653 - DNA, 15 bp, Homo sapiens
accatgcccggctaa

SEQ ID NO: 318654 - DNA, 15 bp, Homo sapiens
caccatgcccggcta

SEQ ID NO: 318655 - DNA, 15 bp, Homo sapiens
ccaccatgcccggct

SEQ ID NO: 318656 - DNA, 15 bp, Homo sapiens
tgccaccatgcccgg

SEQ ID NO: 318657 - DNA, 15 bp, Homo sapiens
ctgccaccatgcccg

SEQ ID NO: 318658 - DNA, 15 bp, Homo sapiens
cctgccaccatgccc

SEQ ID NO: 318659 - DNA, 15 bp, Homo sapiens
acctgccaccatgcc

SEQ ID NO: 318660 - DNA, 15 bp, Homo sapiens
cacctgccaccatgc

SEQ ID NO: 318661 - DNA, 15 bp, Homo sapiens
gcacctgccaccatg

SEQ ID NO: 318662 - DNA, 15 bp, Homo sapiens
ggcacctgccaccat

SEQ ID NO: 318663 - DNA, 15 bp, Homo sapiens
aggcacctgccacca

SEQ ID NO: 318664 - DNA, 15 bp, Homo sapiens
caggcacctgccacc

SEQ ID NO: 318665 - DNA, 15 bp, Homo sapiens
acaggcacctgccac

SEQ ID NO: 318666 - DNA, 15 bp, Homo sapiens
tacaggcacctgcca

SEQ ID NO: 318667 - DNA, 15 bp, Homo sapiens
ttacaggcacctgcc

SEQ ID NO: 318668 - DNA, 15 bp, Homo sapiens
attacaggcacctgc

SEQ ID NO: 318669 - DNA, 15 bp, Homo sapiens
aattacaggcacctg

SEQ ID NO: 318670 - DNA, 15 bp, Homo sapiens
gaattacaggcacct

SEQ ID NO: 318671 - DNA, 15 bp, Homo sapiens
ggaattacaggcacc

SEQ ID NO: 318672 - DNA, 15 bp, Homo sapiens
tggaattacaggcac

SEQ ID NO: 318673 - DNA, 15 bp, Homo sapiens
ctggaattacaggca

SEQ ID NO: 318674 - DNA, 15 bp, Homo sapiens
gctggaattacaggc

SEQ ID NO: 318675 - DNA, 15 bp, Homo sapiens
agctggaattacagg

SEQ ID NO: 318676 - DNA, 15 bp, Homo sapiens
tagctggaattacag

SEQ ID NO: 318677 - DNA, 15 bp, Homo sapiens
gtagctggaattaca

SEQ ID NO: 318678 - DNA, 15 bp, Homo sapiens
agtagctggaattac

SEQ ID NO: 318679 - DNA, 15 bp, Homo sapiens
aagtagctggaatta

SEQ ID NO: 318680 - DNA, 15 bp, Homo sapiens
caagtagctggaatt

SEQ ID NO: 318681 - DNA, 15 bp, Homo sapiens
ccaagtagctggaat

SEQ ID NO: 318682 - DNA, 15 bp, Homo sapiens
cccaagtagctggaa

SEQ ID NO: 318683 - DNA, 15 bp, Homo sapiens
tcccaagtagctgga

SEQ ID NO: 318684 - DNA, 15 bp, Homo sapiens
cgcctcagcctccca

SEQ ID NO: 318685 - DNA, 15 bp, Homo sapiens
ccgcctcagcctccc

SEQ ID NO: 318686 - DNA, 15 bp, Homo sapiens
cccgcctcagcctcc

SEQ ID NO: 318687 - DNA, 15 bp, Homo sapiens
tcccgcctcagcctc

SEQ ID NO: 318688 - DNA, 15 bp, Homo sapiens
ctcccgcctcagcct

SEQ ID NO: 318689 - DNA, 15 bp, Homo sapiens
tctcccgcctcagcc

SEQ ID NO: 318690 - DNA, 15 bp, Homo sapiens
ttctcccgcctcagc

SEQ ID NO: 318691 - DNA, 15 bp, Homo sapiens
attctcccgcctcag

SEQ ID NO: 318692 - DNA, 15 bp, Homo sapiens
gattctcccgcctca

SEQ ID NO: 318693 - DNA, 15 bp, Homo sapiens
cgattctcccgcctc

SEQ ID NO: 318694 - DNA, 15 bp, Homo sapiens
gcgattctcccgcct

SEQ ID NO: 318695 - DNA, 15 bp, Homo sapiens
agcgattctcccgcc

SEQ ID NO: 318696 - DNA, 15 bp, Homo sapiens
aagcgattctcccgc

SEQ ID NO: 318697 - DNA, 15 bp, Homo sapiens
caagcgattctcccg

SEQ ID NO: 318698 - DNA, 15 bp, Homo sapiens
tcaagcgattctccc

SEQ ID NO: 318699 - DNA, 15 bp, Homo sapiens
gggttcaagcgattc

SEQ ID NO: 318700 - DNA, 15 bp, Homo sapiens
tgggttcaagcgatt

SEQ ID NO: 318701 - DNA, 15 bp, Homo sapiens
ctgggttcaagcgat

SEQ ID NO: 318702 - DNA, 15 bp, Homo sapiens
cctgggttcaagcga

SEQ ID NO: 318703 - DNA, 15 bp, Homo sapiens
tcctgggttcaagcg

SEQ ID NO: 318704 - DNA, 15 bp, Homo sapiens
ctcctgggttcaagc

SEQ ID NO: 318705 - DNA, 15 bp, Homo sapiens
cctcctgggttcaag

SEQ ID NO: 318706 - DNA, 15 bp, Homo sapiens
gcctcctgggttcaa

SEQ ID NO: 318707 - DNA, 15 bp, Homo sapiens
cgcctcctgggttca

SEQ ID NO: 318708 - DNA, 15 bp, Homo sapiens
ccgcctcctgggttc

SEQ ID NO: 318709 - DNA, 15 bp, Homo sapiens
tccgcctcctgggtt

SEQ ID NO: 318710 - DNA, 15 bp, Homo sapiens
ctccgcctcctgggt

SEQ ID NO: 318711 - DNA, 15 bp, Homo sapiens
cctccgcctcctggg

SEQ ID NO: 318712 - DNA, 15 bp, Homo sapiens
acctccgcctcctgg

SEQ ID NO: 318713 - DNA, 15 bp, Homo sapiens
aacctccgcctcctg

SEQ ID NO: 318714 - DNA, 15 bp, Homo sapiens
caacctccgcctcct

SEQ ID NO: 318715 - DNA, 15 bp, Homo sapiens
gcaacctccgcctcc

SEQ ID NO: 318716 - DNA, 15 bp, Homo sapiens
tgcaacctccgcctc

SEQ ID NO: 318717 - DNA, 15 bp, Homo sapiens
ctgcaacctccgcct

SEQ ID NO: 318718 - DNA, 15 bp, Homo sapiens
actgcaacctccgcc

SEQ ID NO: 318719 - DNA, 15 bp, Homo sapiens
agcgatcttggctca

SEQ ID NO: 318720 - DNA, 15 bp, Homo sapiens
gagcgatcttggctc

SEQ ID NO: 318721 - DNA, 15 bp, Homo sapiens
ggagcgatcttggct

SEQ ID NO: 318722 - DNA, 15 bp, Homo sapiens
tggagcgatcttggc

SEQ ID NO: 318723 - DNA, 15 bp, Homo sapiens
gtggagcgatcttgg

SEQ ID NO: 318724 - DNA, 15 bp, Homo sapiens
agtggagcgatcttg

SEQ ID NO: 318725 - DNA, 15 bp, Homo sapiens
cagtggagcgatctt

SEQ ID NO: 318726 - DNA, 15 bp, Homo sapiens
acagtggagcgatct

SEQ ID NO: 318727 - DNA, 15 bp, Homo sapiens
tacagtggagcgatc

SEQ ID NO: 318728 - DNA, 15 bp, Homo sapiens
gtacagtggagcgat

SEQ ID NO: 318729 - DNA, 15 bp, Homo sapiens
agtacagtggagcga

SEQ ID NO: 318730 - DNA, 15 bp, Homo sapiens
gagtacagtggagcg

SEQ ID NO: 318731 - DNA, 15 bp, Homo sapiens
ggagtacagtggagc

SEQ ID NO: 318732 - DNA, 15 bp, Homo sapiens
tggagtacagtggag

SEQ ID NO: 318733 - DNA, 15 bp, Homo sapiens
ctggagtacagtgga

SEQ ID NO: 318734 - DNA, 15 bp, Homo sapiens
ggctctgtcgcccag

SEQ ID NO: 318735 - DNA, 15 bp, Homo sapiens
tggctctgtcgccca

SEQ ID NO: 318736 - DNA, 15 bp, Homo sapiens
ctggctctgtcgccc

SEQ ID NO: 318737 - DNA, 15 bp, Homo sapiens
tctggctctgtcgcc

SEQ ID NO: 318738 - DNA, 15 bp, Homo sapiens
gtctggctctgtcgc

SEQ ID NO: 318739 - DNA, 15 bp, Homo sapiens
agtctggctctgtcg

SEQ ID NO: 318740 - DNA, 15 bp, Homo sapiens
gagtctggctctgtc

SEQ ID NO: 318741 - DNA, 15 bp, Homo sapiens
agagtctggctctgt

SEQ ID NO: 318742 - DNA, 15 bp, Homo sapiens
cagagtctggctctg

SEQ ID NO: 318743 - DNA, 15 bp, Homo sapiens
acagagtctggctct

SEQ ID NO: 318744 - DNA, 15 bp, Homo sapiens
aacagagtctggctc

SEQ ID NO: 318745 - DNA, 15 bp, Homo sapiens
aaacagagtctggct

SEQ ID NO: 318746 - DNA, 15 bp, Homo sapiens
gaaacagagtctggc

SEQ ID NO: 318747 - DNA, 15 bp, Homo sapiens
tgaaacagagtctgg

SEQ ID NO: 318748 - DNA, 15 bp, Homo sapiens
ttgaaacagagtctg

SEQ ID NO: 318749 - DNA, 15 bp, Homo sapiens
tttgaaacagagtct

SEQ ID NO: 318750 - DNA, 15 bp, Homo sapiens
ttttgaaacagagtc

SEQ ID NO: 318751 - DNA, 15 bp, Homo sapiens
tttttgaaacagagt

SEQ ID NO: 318752 - DNA, 15 bp, Homo sapiens
ttttttgaaacagag

SEQ ID NO: 318753 - DNA, 15 bp, Homo sapiens
attttttgaaacaga

SEQ ID NO: 318754 - DNA, 15 bp, Homo sapiens
tattttttgaaacag

SEQ ID NO: 318755 - DNA, 15 bp, Homo sapiens
ttattttttgaaaca

SEQ ID NO: 318756 - DNA, 15 bp, Homo sapiens
tttattttttgaaac

SEQ ID NO: 318757 - DNA, 15 bp, Homo sapiens
ttttattttttgaaa

SEQ ID NO: 318758 - DNA, 15 bp, Homo sapiens
attttattttttgaa

SEQ ID NO: 318759 - DNA, 15 bp, Homo sapiens
tattttattttttga

SEQ ID NO: 318760 - DNA, 15 bp, Homo sapiens
atattttattttttg

SEQ ID NO: 318761 - DNA, 15 bp, Homo sapiens
tatattttatttttt

SEQ ID NO: 318762 - DNA, 15 bp, Homo sapiens
ttatattttattttt

SEQ ID NO: 318763 - DNA, 15 bp, Homo sapiens
tttatattttatttt

SEQ ID NO: 318764 - DNA, 15 bp, Homo sapiens
atttatattttattt

SEQ ID NO: 318765 - DNA, 15 bp, Homo sapiens
tatttatattttatt

SEQ ID NO: 318766 - DNA, 15 bp, Homo sapiens
ttatttatattttat

SEQ ID NO: 318767 - DNA, 15 bp, Homo sapiens
tttatttatatttta

SEQ ID NO: 318768 - DNA, 15 bp, Homo sapiens
atttatttatatttt

SEQ ID NO: 318769 - DNA, 15 bp, Homo sapiens
tatttatttatattt

SEQ ID NO: 318770 - DNA, 15 bp, Homo sapiens
ttatttatttatatt

SEQ ID NO: 318771 - DNA, 15 bp, Homo sapiens
tttatttatttatat

SEQ ID NO: 318772 - DNA, 15 bp, Homo sapiens
atttatttatttata

SEQ ID NO: 318773 - DNA, 15 bp, Homo sapiens
tatttatttatttat

SEQ ID NO: 318774 - DNA, 15 bp, Homo sapiens
ttatttatttattta

SEQ ID NO: 318775 - DNA, 15 bp, Homo sapiens
atttatttatttatt

SEQ ID NO: 318776 - DNA, 15 bp, Homo sapiens
ttttatttatttatt

SEQ ID NO: 318777 - DNA, 15 bp, Homo sapiens
cttttatttatttat

SEQ ID NO: 318778 - DNA, 15 bp, Homo sapiens
gcttttatttattta

SEQ ID NO: 318779 - DNA, 15 bp, Homo sapiens
agcttttatttattt

SEQ ID NO: 318780 - DNA, 15 bp, Homo sapiens
aagcttttatttatt

SEQ ID NO: 318781 - DNA, 15 bp, Homo sapiens
aaagcttttatttat

SEQ ID NO: 318782 - DNA, 15 bp, Homo sapiens
taaagcttttattta

SEQ ID NO: 318783 - DNA, 15 bp, Homo sapiens
ctaaagcttttattt

SEQ ID NO: 318784 - DNA, 15 bp, Homo sapiens
cctaaagcttttatt

SEQ ID NO: 318785 - DNA, 15 bp, Homo sapiens
gcctaaagcttttat

SEQ ID NO: 318786 - DNA, 15 bp, Homo sapiens
agcctaaagctttta

SEQ ID NO: 318787 - DNA, 15 bp, Homo sapiens
aagcctaaagctttt

SEQ ID NO: 318788 - DNA, 15 bp, Homo sapiens
taagcctaaagcttt

SEQ ID NO: 318789 - DNA, 15 bp, Homo sapiens
ttaagcctaaagctt

SEQ ID NO: 318790 - DNA, 15 bp, Homo sapiens
tttaagcctaaagct

SEQ ID NO: 318791 - DNA, 15 bp, Homo sapiens
ctttaagcctaaagc

SEQ ID NO: 318792 - DNA, 15 bp, Homo sapiens
cctttaagcctaaag

SEQ ID NO: 318793 - DNA, 15 bp, Homo sapiens
tcctttaagcctaaa

SEQ ID NO: 318794 - DNA, 15 bp, Homo sapiens
ctcctttaagcctaa

SEQ ID NO: 318795 - DNA, 15 bp, Homo sapiens
cctcctttaagccta

SEQ ID NO: 318796 - DNA, 15 bp, Homo sapiens
ccctcctttaagcct

SEQ ID NO: 318797 - DNA, 15 bp, Homo sapiens
accctcctttaagcc

SEQ ID NO: 318798 - DNA, 15 bp, Homo sapiens
gaccctcctttaagc

SEQ ID NO: 318799 - DNA, 15 bp, Homo sapiens
ggaccctcctttaag

SEQ ID NO: 318800 - DNA, 15 bp, Homo sapiens
gggaccctcctttaa

SEQ ID NO: 318801 - DNA, 15 bp, Homo sapiens
ggggaccctccttta

SEQ ID NO: 318802 - DNA, 15 bp, Homo sapiens
aggggaccctccttt

SEQ ID NO: 318803 - DNA, 15 bp, Homo sapiens
caggggaccctcctt

SEQ ID NO: 318804 - DNA, 15 bp, Homo sapiens
tcaggggaccctcct

SEQ ID NO: 318805 - DNA, 15 bp, Homo sapiens
gtcaggggaccctcc

SEQ ID NO: 318806 - DNA, 15 bp, Homo sapiens
cgtcaggggaccctc

SEQ ID NO: 318807 - DNA, 15 bp, Homo sapiens
gcgtcaggggaccct

SEQ ID NO: 318808 - DNA, 15 bp, Homo sapiens
tgcgtcaggggaccc

SEQ ID NO: 318809 - DNA, 15 bp, Homo sapiens
ctgcgtcaggggacc

SEQ ID NO: 318810 - DNA, 15 bp, Homo sapiens
tctgcgtcaggggac

SEQ ID NO: 318811 - DNA, 15 bp, Homo sapiens
gtctgcgtcagggga

SEQ ID NO: 318812 - DNA, 15 bp, Homo sapiens
tgtctgcgtcagggg

SEQ ID NO: 318813 - DNA, 15 bp, Homo sapiens
ctgtctgcgtcaggg

SEQ ID NO: 318814 - DNA, 15 bp, Homo sapiens
actgtctgcgtcagg

SEQ ID NO: 318815 - DNA, 15 bp, Homo sapiens
cactgtctgcgtcag

SEQ ID NO: 318816 - DNA, 15 bp, Homo sapiens
ccactgtctgcgtca

SEQ ID NO: 318817 - DNA, 15 bp, Homo sapiens
tccactgtctgcgtc

SEQ ID NO: 318818 - DNA, 15 bp, Homo sapiens
ttccactgtctgcgt

SEQ ID NO: 318819 - DNA, 15 bp, Homo sapiens
gttccactgtctgcg

SEQ ID NO: 318820 - DNA, 15 bp, Homo sapiens
tgttccactgtctgc

SEQ ID NO: 318821 - DNA, 15 bp, Homo sapiens
ttgttccactgtctg

SEQ ID NO: 318822 - DNA, 15 bp, Homo sapiens
tttgttccactgtct

SEQ ID NO: 318823 - DNA, 15 bp, Homo sapiens
ttttgttccactgtc

SEQ ID NO: 318824 - DNA, 15 bp, Homo sapiens
cttttgttccactgt

SEQ ID NO: 318825 - DNA, 15 bp, Homo sapiens
gcttttgttccactg

SEQ ID NO: 318826 - DNA, 15 bp, Homo sapiens
tgcttttgttccact

SEQ ID NO: 318827 - DNA, 15 bp, Homo sapiens
gtgcttttgttccac

SEQ ID NO: 318828 - DNA, 15 bp, Homo sapiens
tgtgcttttgttcca

SEQ ID NO: 318829 - DNA, 15 bp, Homo sapiens
ttgtgcttttgttcc

SEQ ID NO: 318830 - DNA, 15 bp, Homo sapiens
cttgtgcttttgttc

SEQ ID NO: 318831 - DNA, 15 bp, Homo sapiens
gcttgtgcttttgtt

SEQ ID NO: 318832 - DNA, 15 bp, Homo sapiens
agcttgtgcttttgt

SEQ ID NO: 318833 - DNA, 15 bp, Homo sapiens
aagcttgtgcttttg

SEQ ID NO: 318834 - DNA, 15 bp, Homo sapiens
taagcttgtgctttt

SEQ ID NO: 318835 - DNA, 15 bp, Homo sapiens
ataagcttgtgcttt

SEQ ID NO: 318836 - DNA, 15 bp, Homo sapiens
cataagcttgtgctt

SEQ ID NO: 318837 - DNA, 15 bp, Homo sapiens
ccataagcttgtgct

SEQ ID NO: 318838 - DNA, 15 bp, Homo sapiens
accataagcttgtgc

SEQ ID NO: 318839 - DNA, 15 bp, Homo sapiens
taccataagcttgtg

SEQ ID NO: 318840 - DNA, 15 bp, Homo sapiens
ataccataagcttgt

SEQ ID NO: 318841 - DNA, 15 bp, Homo sapiens
cataccataagcttg

SEQ ID NO: 318842 - DNA, 15 bp, Homo sapiens
tcataccataagctt

SEQ ID NO: 318843 - DNA, 15 bp, Homo sapiens
gtcataccataagct

SEQ ID NO: 318844 - DNA, 15 bp, Homo sapiens
agtcataccataagc

SEQ ID NO: 318845 - DNA, 15 bp, Homo sapiens
cagtcataccataag

SEQ ID NO: 318846 - DNA, 15 bp, Homo sapiens
acagtcataccataa

SEQ ID NO: 318847 - DNA, 15 bp, Homo sapiens
cacagtcataccata

SEQ ID NO: 318848 - DNA, 15 bp, Homo sapiens
ccacagtcataccat

SEQ ID NO: 318849 - DNA, 15 bp, Homo sapiens
cccacagtcatacca

SEQ ID NO: 318850 - DNA, 15 bp, Homo sapiens
gcccacagtcatacc

SEQ ID NO: 318851 - DNA, 15 bp, Homo sapiens
ggcccacagtcatac

SEQ ID NO: 318852 - DNA, 15 bp, Homo sapiens
gggcccacagtcata

SEQ ID NO: 318853 - DNA, 15 bp, Homo sapiens
agggcccacagtcat

SEQ ID NO: 318854 - DNA, 15 bp, Homo sapiens
cagggcccacagtca

SEQ ID NO: 318855 - DNA, 15 bp, Homo sapiens
tcagggcccacagtc

SEQ ID NO: 318856 - DNA, 15 bp, Homo sapiens
ctcagggcccacagt

SEQ ID NO: 318857 - DNA, 15 bp, Homo sapiens
cctcagggcccacag

SEQ ID NO: 318858 - DNA, 15 bp, Homo sapiens
gcctcagggcccaca

SEQ ID NO: 318859 - DNA, 15 bp, Homo sapiens
tgcctcagggcccac

SEQ ID NO: 318860 - DNA, 15 bp, Homo sapiens
ctgcctcagggccca

SEQ ID NO: 318861 - DNA, 15 bp, Homo sapiens
cctgcctcagggccc

SEQ ID NO: 318862 - DNA, 15 bp, Homo sapiens
ccctgcctcagggcc

SEQ ID NO: 318863 - DNA, 15 bp, Homo sapiens
cccctgcctcagggc

SEQ ID NO: 318864 - DNA, 15 bp, Homo sapiens
ccccctgcctcaggg

SEQ ID NO: 318865 - DNA, 15 bp, Homo sapiens
tccccctgcctcagg

SEQ ID NO: 318866 - DNA, 15 bp, Homo sapiens
ctccccctgcctcag

SEQ ID NO: 318867 - DNA, 15 bp, Homo sapiens
cctccccctgcctca

SEQ ID NO: 318868 - DNA, 15 bp, Homo sapiens
ccctccccctgcctc

SEQ ID NO: 318869 - DNA, 15 bp, Homo sapiens
cccctccccctgcct

SEQ ID NO: 318870 - DNA, 15 bp, Homo sapiens
gcccctccccctgcc

SEQ ID NO: 318871 - DNA, 15 bp, Homo sapiens
cgcccctccccctgc

SEQ ID NO: 318872 - DNA, 15 bp, Homo sapiens
ccgcccctccccctg

SEQ ID NO: 318873 - DNA, 15 bp, Homo sapiens
cccgcccctccccct

SEQ ID NO: 318874 - DNA, 15 bp, Homo sapiens
tcccgcccctccccc

SEQ ID NO: 318875 - DNA, 15 bp, Homo sapiens
ctcccgcccctcccc

SEQ ID NO: 318876 - DNA, 15 bp, Homo sapiens
tctcccgcccctccc

SEQ ID NO: 318877 - DNA, 15 bp, Homo sapiens
ttctcccgcccctcc

SEQ ID NO: 318878 - DNA, 15 bp, Homo sapiens
gttctcccgcccctc

SEQ ID NO: 318879 - DNA, 15 bp, Homo sapiens
ggttctcccgcccct

SEQ ID NO: 318880 - DNA, 15 bp, Homo sapiens
aggttctcccgcccc

SEQ ID NO: 318881 - DNA, 15 bp, Homo sapiens
aaggttctcccgccc

SEQ ID NO: 318882 - DNA, 15 bp, Homo sapiens
caaggttctcccgcc

SEQ ID NO: 318883 - DNA, 15 bp, Homo sapiens
gcaaggttctcccgc

SEQ ID NO: 318884 - DNA, 15 bp, Homo sapiens
agcaaggttctcccg

SEQ ID NO: 318885 - DNA, 15 bp, Homo sapiens
cagcaaggttctccc

SEQ ID NO: 318886 - DNA, 15 bp, Homo sapiens
ccagcaaggttctcc

SEQ ID NO: 318887 - DNA, 15 bp, Homo sapiens
cccagcaaggttctc

SEQ ID NO: 318888 - DNA, 15 bp, Homo sapiens
tcccagcaaggttct

SEQ ID NO: 318889 - DNA, 15 bp, Homo sapiens
ctcccagcaaggttc

SEQ ID NO: 318890 - DNA, 15 bp, Homo sapiens
cctcccagcaaggtt

SEQ ID NO: 318891 - DNA, 15 bp, Homo sapiens
ccctcccagcaaggt

SEQ ID NO: 318892 - DNA, 15 bp, Homo sapiens
tccctcccagcaagg

SEQ ID NO: 318893 - DNA, 15 bp, Homo sapiens
atccctcccagcaag

SEQ ID NO: 318894 - DNA, 15 bp, Homo sapiens
catccctcccagcaa

SEQ ID NO: 318895 - DNA, 15 bp, Homo sapiens
ccatccctcccagca

SEQ ID NO: 318896 - DNA, 15 bp, Homo sapiens
cccatccctcccagc

SEQ ID NO: 318897 - DNA, 15 bp, Homo sapiens
gcccatccctcccag

SEQ ID NO: 318898 - DNA, 15 bp, Homo sapiens
ggcccatccctccca

SEQ ID NO: 318899 - DNA, 15 bp, Homo sapiens
tggcccatccctccc

SEQ ID NO: 318900 - DNA, 15 bp, Homo sapiens
atggcccatccctcc

SEQ ID NO: 318901 - DNA, 15 bp, Homo sapiens
gatggcccatccctc

SEQ ID NO: 318902 - DNA, 15 bp, Homo sapiens
tgatggcccatccct

SEQ ID NO: 318903 - DNA, 15 bp, Homo sapiens
ttgatggcccatccc

SEQ ID NO: 318904 - DNA, 15 bp, Homo sapiens
cttgatggcccatcc

SEQ ID NO: 318905 - DNA, 15 bp, Homo sapiens
gcttgatggcccatc

SEQ ID NO: 318906 - DNA, 15 bp, Homo sapiens
agcttgatggcccat

SEQ ID NO: 318907 - DNA, 15 bp, Homo sapiens
cagcttgatggccca

SEQ ID NO: 318908 - DNA, 15 bp, Homo sapiens
tcagcttgatggccc

SEQ ID NO: 318909 - DNA, 15 bp, Homo sapiens
ctcagcttgatggcc

SEQ ID NO: 318910 - DNA, 15 bp, Homo sapiens
cctcagcttgatggc

SEQ ID NO: 318911 - DNA, 15 bp, Homo sapiens
ccctcagcttgatgg

SEQ ID NO: 318912 - DNA, 15 bp, Homo sapiens
accctcagcttgatg

SEQ ID NO: 318913 - DNA, 15 bp, Homo sapiens
gaccctcagcttgat

SEQ ID NO: 318914 - DNA, 15 bp, Homo sapiens
ggaccctcagcttga

SEQ ID NO: 318915 - DNA, 15 bp, Homo sapiens
tggaccctcagcttg

SEQ ID NO: 318916 - DNA, 15 bp, Homo sapiens
gtggaccctcagctt

SEQ ID NO: 318917 - DNA, 15 bp, Homo sapiens
agtggaccctcagct

SEQ ID NO: 318918 - DNA, 15 bp, Homo sapiens
aagtggaccctcagc

SEQ ID NO: 318919 - DNA, 15 bp, Homo sapiens
gaagtggaccctcag

SEQ ID NO: 318920 - DNA, 15 bp, Homo sapiens
agaagtggaccctca

SEQ ID NO: 318921 - DNA, 15 bp, Homo sapiens
cagaagtggaccctc

SEQ ID NO: 318922 - DNA, 15 bp, Homo sapiens
ccagaagtggaccct

SEQ ID NO: 318923 - DNA, 15 bp, Homo sapiens
cccagaagtggaccc

SEQ ID NO: 318924 - DNA, 15 bp, Homo sapiens
ccccagaagtggacc

SEQ ID NO: 318925 - DNA, 15 bp, Homo sapiens
cccccagaagtggac

SEQ ID NO: 318926 - DNA, 15 bp, Homo sapiens
gcccccagaagtgga

SEQ ID NO: 318927 - DNA, 15 bp, Homo sapiens
ggcccccagaagtgg

SEQ ID NO: 318928 - DNA, 15 bp, Homo sapiens
aggcccccagaagtg

SEQ ID NO: 318929 - DNA, 15 bp, Homo sapiens
caggcccccagaagt

SEQ ID NO: 318930 - DNA, 15 bp, Homo sapiens
ccaggcccccagaag

SEQ ID NO: 318931 - DNA, 15 bp, Homo sapiens
tccaggcccccagaa

SEQ ID NO: 318932 - DNA, 15 bp, Homo sapiens
ctccaggcccccaga

SEQ ID NO: 318933 - DNA, 15 bp, Homo sapiens
cctccaggcccccag

SEQ ID NO: 318934 - DNA, 15 bp, Homo sapiens
ccctccaggccccca

SEQ ID NO: 318935 - DNA, 15 bp, Homo sapiens
cccctccaggccccc

SEQ ID NO: 318936 - DNA, 15 bp, Homo sapiens
acccctccaggcccc

SEQ ID NO: 318937 - DNA, 15 bp, Homo sapiens
cacccctccaggccc

SEQ ID NO: 318938 - DNA, 15 bp, Homo sapiens
tcacccctccaggcc

SEQ ID NO: 318939 - DNA, 15 bp, Homo sapiens
ctcacccctccaggc

SEQ ID NO: 318940 - DNA, 15 bp, Homo sapiens
cctcacccctccagg

SEQ ID NO: 318941 - DNA, 15 bp, Homo sapiens
ccctcacccctccag

SEQ ID NO: 318942 - DNA, 15 bp, Homo sapiens
cccctcacccctcca

SEQ ID NO: 318943 - DNA, 15 bp, Homo sapiens
acccctcacccctcc

SEQ ID NO: 318944 - DNA, 15 bp, Homo sapiens
cacccctcacccctc

SEQ ID NO: 318945 - DNA, 15 bp, Homo sapiens
ccacccctcacccct

SEQ ID NO: 318946 - DNA, 15 bp, Homo sapiens
accacccctcacccc

SEQ ID NO: 318947 - DNA, 15 bp, Homo sapiens
gaccacccctcaccc

SEQ ID NO: 318948 - DNA, 15 bp, Homo sapiens
cgaccacccctcacc

SEQ ID NO: 318949 - DNA, 15 bp, Homo sapiens
gcgaccacccctcac

SEQ ID NO: 318950 - DNA, 15 bp, Homo sapiens
agcgaccacccctca

SEQ ID NO: 318951 - DNA, 15 bp, Homo sapiens
cagcgaccacccctc

SEQ ID NO: 318952 - DNA, 15 bp, Homo sapiens
gcagcgaccacccct

SEQ ID NO: 318953 - DNA, 15 bp, Homo sapiens
tgcagcgaccacccc

SEQ ID NO: 318954 - DNA, 15 bp, Homo sapiens
ctgcagcgaccaccc

SEQ ID NO: 318955 - DNA, 15 bp, Homo sapiens
cctgcagcgaccacc

SEQ ID NO: 318956 - DNA, 15 bp, Homo sapiens
ccctgcagcgaccac

SEQ ID NO: 318957 - DNA, 15 bp, Homo sapiens
cccctgcagcgacca

SEQ ID NO: 318958 - DNA, 15 bp, Homo sapiens
ccccctgcagcgacc

SEQ ID NO: 318959 - DNA, 15 bp, Homo sapiens
accccctgcagcgac

SEQ ID NO: 318960 - DNA, 15 bp, Homo sapiens
caccccctgcagcga

SEQ ID NO: 318961 - DNA, 15 bp, Homo sapiens
ccaccccctgcagcg

SEQ ID NO: 318962 - DNA, 15 bp, Homo sapiens
cccaccccctgcagc

SEQ ID NO: 318963 - DNA, 15 bp, Homo sapiens
ccccaccccctgcag

SEQ ID NO: 318964 - DNA, 15 bp, Homo sapiens
cccccaccccctgca

SEQ ID NO: 318965 - DNA, 15 bp, Homo sapiens
tcccccaccccctgc

SEQ ID NO: 318966 - DNA, 15 bp, Homo sapiens
ttcccccaccccctg

SEQ ID NO: 318967 - DNA, 15 bp, Homo sapiens
tttcccccaccccct

SEQ ID NO: 318968 - DNA, 15 bp, Homo sapiens
ctttcccccaccccc

SEQ ID NO: 318969 - DNA, 15 bp, Homo sapiens
actttcccccacccc

SEQ ID NO: 318970 - DNA, 15 bp, Homo sapiens
cactttcccccaccc

SEQ ID NO: 318971 - DNA, 15 bp, Homo sapiens
tcactttcccccacc

SEQ ID NO: 318972 - DNA, 15 bp, Homo sapiens
gtcactttcccccac

SEQ ID NO: 318973 - DNA, 15 bp, Homo sapiens
agtcactttccccca

SEQ ID NO: 318974 - DNA, 15 bp, Homo sapiens
tagtcactttccccc

SEQ ID NO: 318975 - DNA, 15 bp, Homo sapiens
ctagtcactttcccc

SEQ ID NO: 318976 - DNA, 15 bp, Homo sapiens
gctagtcactttccc

SEQ ID NO: 318977 - DNA, 15 bp, Homo sapiens
ggctagtcactttcc

SEQ ID NO: 318978 - DNA, 15 bp, Homo sapiens
gggctagtcactttc

SEQ ID NO: 318979 - DNA, 15 bp, Homo sapiens
agggctagtcacttt

SEQ ID NO: 318980 - DNA, 15 bp, Homo sapiens
cagggctagtcactt

SEQ ID NO: 318981 - DNA, 15 bp, Homo sapiens
gcagggctagtcact

SEQ ID NO: 318982 - DNA, 15 bp, Homo sapiens
ggcagggctagtcac

SEQ ID NO: 318983 - DNA, 15 bp, Homo sapiens
gggcagggctagtca

SEQ ID NO: 318984 - DNA, 15 bp, Homo sapiens
tgggcagggctagtc

SEQ ID NO: 318985 - DNA, 15 bp, Homo sapiens
ttgggcagggctagt

SEQ ID NO: 318986 - DNA, 15 bp, Homo sapiens
gttgggcagggctag

SEQ ID NO: 318987 - DNA, 15 bp, Homo sapiens
ggttgggcagggcta

SEQ ID NO: 318988 - DNA, 15 bp, Homo sapiens
gggttgggcagggct

SEQ ID NO: 318989 - DNA, 15 bp, Homo sapiens
ggggttgggcagggc

SEQ ID NO: 318990 - DNA, 15 bp, Homo sapiens
aggggttgggcaggg

SEQ ID NO: 318991 - DNA, 15 bp, Homo sapiens
caggggttgggcagg

SEQ ID NO: 318992 - DNA, 15 bp, Homo sapiens
ccaggggttgggcag

SEQ ID NO: 318993 - DNA, 15 bp, Homo sapiens
cccaggggttgggca

SEQ ID NO: 318994 - DNA, 15 bp, Homo sapiens
acccaggggttgggc

SEQ ID NO: 318995 - DNA, 15 bp, Homo sapiens
gacccaggggttggg

SEQ ID NO: 318996 - DNA, 15 bp, Homo sapiens
ggacccaggggttgg

SEQ ID NO: 318997 - DNA, 15 bp, Homo sapiens
aggacccaggggttg

SEQ ID NO: 318998 - DNA, 15 bp, Homo sapiens
caggacccaggggtt

SEQ ID NO: 318999 - DNA, 15 bp, Homo sapiens
ccaggacccaggggt

SEQ ID NO: 319000 - DNA, 15 bp, Homo sapiens
gccaggacccagggg

SEQ ID NO: 319001 - DNA, 15 bp, Homo sapiens
agccaggacccaggg

SEQ ID NO: 319002 - DNA, 15 bp, Homo sapiens
cagccaggacccagg

SEQ ID NO: 319003 - DNA, 15 bp, Homo sapiens
ccagccaggacccag

SEQ ID NO: 319004 - DNA, 15 bp, Homo sapiens
cccagccaggaccca

SEQ ID NO: 319005 - DNA, 15 bp, Homo sapiens
ccccagccaggaccc

SEQ ID NO: 319006 - DNA, 15 bp, Homo sapiens
accccagccaggacc

SEQ ID NO: 319007 - DNA, 15 bp, Homo sapiens
caccccagccaggac

SEQ ID NO: 319008 - DNA, 15 bp, Homo sapiens
ccaccccagccagga

SEQ ID NO: 319009 - DNA, 15 bp, Homo sapiens
gccaccccagccagg

SEQ ID NO: 319010 - DNA, 15 bp, Homo sapiens
ggccaccccagccag

SEQ ID NO: 319011 - DNA, 15 bp, Homo sapiens
tggccaccccagcca

SEQ ID NO: 319012 - DNA, 15 bp, Homo sapiens
ctggccaccccagcc

SEQ ID NO: 319013 - DNA, 15 bp, Homo sapiens
cctggccaccccagc

SEQ ID NO: 319014 - DNA, 15 bp, Homo sapiens
tcctggccaccccag

SEQ ID NO: 319015 - DNA, 15 bp, Homo sapiens
ttcctggccacccca

SEQ ID NO: 319016 - DNA, 15 bp, Homo sapiens
cttcctggccacccc

SEQ ID NO: 319017 - DNA, 15 bp, Homo sapiens
ccttcctggccaccc

SEQ ID NO: 319018 - DNA, 15 bp, Homo sapiens
cccttcctggccacc

SEQ ID NO: 319019 - DNA, 15 bp, Homo sapiens
ccccttcctggccac

SEQ ID NO: 319020 - DNA, 15 bp, Homo sapiens
accccttcctggcca

SEQ ID NO: 319021 - DNA, 15 bp, Homo sapiens
taccccttcctggcc

SEQ ID NO: 319022 - DNA, 15 bp, Homo sapiens
ctaccccttcctggc

SEQ ID NO: 319023 - DNA, 15 bp, Homo sapiens
gctaccccttcctgg

SEQ ID NO: 319024 - DNA, 15 bp, Homo sapiens
cgctaccccttcctg

SEQ ID NO: 319025 - DNA, 15 bp, Homo sapiens
ccgctaccccttcct

SEQ ID NO: 319026 - DNA, 15 bp, Homo sapiens
cccgctaccccttcc

SEQ ID NO: 319027 - DNA, 15 bp, Homo sapiens
ccccgctaccccttc

SEQ ID NO: 319028 - DNA, 15 bp, Homo sapiens
gccccgctacccctt

SEQ ID NO: 319029 - DNA, 15 bp, Homo sapiens
tgccccgctacccct

SEQ ID NO: 319030 - DNA, 15 bp, Homo sapiens
ctgccccgctacccc

SEQ ID NO: 319031 - DNA, 15 bp, Homo sapiens
actgccccgctaccc

SEQ ID NO: 319032 - DNA, 15 bp, Homo sapiens
cactgccccgctacc

SEQ ID NO: 319033 - DNA, 15 bp, Homo sapiens
gcactgccccgctac

SEQ ID NO: 319034 - DNA, 15 bp, Homo sapiens
tgcactgccccgcta

SEQ ID NO: 319035 - DNA, 15 bp, Homo sapiens
ctgcactgccccgct

SEQ ID NO: 319036 - DNA, 15 bp, Homo sapiens
actgcactgccccgc

SEQ ID NO: 319037 - DNA, 15 bp, Homo sapiens
cactgcactgccccg

SEQ ID NO: 319038 - DNA, 15 bp, Homo sapiens
acactgcactgcccc

SEQ ID NO: 319039 - DNA, 15 bp, Homo sapiens
gacactgcactgccc

SEQ ID NO: 319040 - DNA, 15 bp, Homo sapiens
cgacactgcactgcc

SEQ ID NO: 319041 - DNA, 15 bp, Homo sapiens
ccgacactgcactgc

SEQ ID NO: 319042 - DNA, 15 bp, Homo sapiens
cccgacactgcactg

SEQ ID NO: 319043 - DNA, 15 bp, Homo sapiens
ccccgacactgcact

SEQ ID NO: 319044 - DNA, 15 bp, Homo sapiens
cccccgacactgcac

SEQ ID NO: 319045 - DNA, 15 bp, Homo sapiens
tcccccgacactgca

SEQ ID NO: 319046 - DNA, 15 bp, Homo sapiens
ctcccccgacactgc

SEQ ID NO: 319047 - DNA, 15 bp, Homo sapiens
tctcccccgacactg

SEQ ID NO: 319048 - DNA, 15 bp, Homo sapiens
ctctcccccgacact

SEQ ID NO: 319049 - DNA, 15 bp, Homo sapiens
gctctcccccgacac

SEQ ID NO: 319050 - DNA, 15 bp, Homo sapiens
cgctctcccccgaca

SEQ ID NO: 319051 - DNA, 15 bp, Homo sapiens
ccgctctcccccgac

SEQ ID NO: 319052 - DNA, 15 bp, Homo sapiens
gccgctctcccccga

SEQ ID NO: 319053 - DNA, 15 bp, Homo sapiens
agccgctctcccccg

SEQ ID NO: 319054 - DNA, 15 bp, Homo sapiens
aagccgctctccccc

SEQ ID NO: 319055 - DNA, 15 bp, Homo sapiens
caagccgctctcccc

SEQ ID NO: 319056 - DNA, 15 bp, Homo sapiens
gcaagccgctctccc

SEQ ID NO: 319057 - DNA, 15 bp, Homo sapiens
agcaagccgctctcc

SEQ ID NO: 319058 - DNA, 15 bp, Homo sapiens
cagcaagccgctctc

SEQ ID NO: 319059 - DNA, 15 bp, Homo sapiens
gcagcaagccgctct

SEQ ID NO: 319060 - DNA, 15 bp, Homo sapiens
ggcagcaagccgctc

SEQ ID NO: 319061 - DNA, 15 bp, Homo sapiens
aggcagcaagccgct

SEQ ID NO: 319062 - DNA, 15 bp, Homo sapiens
gaggcagcaagccgc

SEQ ID NO: 319063 - DNA, 15 bp, Homo sapiens
cgaggcagcaagccg

SEQ ID NO: 319064 - DNA, 15 bp, Homo sapiens
acgaggcagcaagcc

SEQ ID NO: 319065 - DNA, 15 bp, Homo sapiens
aacgaggcagcaagc

SEQ ID NO: 319066 - DNA, 15 bp, Homo sapiens
gaacgaggcagcaag

SEQ ID NO: 319067 - DNA, 15 bp, Homo sapiens
agaacgaggcagcaa

SEQ ID NO: 319068 - DNA, 15 bp, Homo sapiens
aagaacgaggcagca

SEQ ID NO: 319069 - DNA, 15 bp, Homo sapiens
aaagaacgaggcagc

SEQ ID NO: 319070 - DNA, 15 bp, Homo sapiens
aaaagaacgaggcag

SEQ ID NO: 319071 - DNA, 15 bp, Homo sapiens
gaaaagaacgaggca

SEQ ID NO: 319072 - DNA, 15 bp, Homo sapiens
agaaaagaacgaggc

SEQ ID NO: 319073 - DNA, 15 bp, Homo sapiens
aagaaaagaacgagg

SEQ ID NO: 319074 - DNA, 15 bp, Homo sapiens
caagaaaagaacgag

SEQ ID NO: 319075 - DNA, 15 bp, Homo sapiens
gcaagaaaagaacga

SEQ ID NO: 319076 - DNA, 15 bp, Homo sapiens
tgcaagaaaagaacg

SEQ ID NO: 319077 - DNA, 15 bp, Homo sapiens
ctgcaagaaaagaac

SEQ ID NO: 319078 - DNA, 15 bp, Homo sapiens
cctgcaagaaaagaa

SEQ ID NO: 319079 - DNA, 15 bp, Homo sapiens
gcctgcaagaaaaga

SEQ ID NO: 319080 - DNA, 15 bp, Homo sapiens
ggcctgcaagaaaag

SEQ ID NO: 319081 - DNA, 15 bp, Homo sapiens
gggcctgcaagaaaa

SEQ ID NO: 319082 - DNA, 15 bp, Homo sapiens
ggggcctgcaagaaa

SEQ ID NO: 319083 - DNA, 15 bp, Homo sapiens
tggggcctgcaagaa

SEQ ID NO: 319084 - DNA, 15 bp, Homo sapiens
ctggggcctgcaaga

SEQ ID NO: 319085 - DNA, 15 bp, Homo sapiens
cctggggcctgcaag

SEQ ID NO: 319086 - DNA, 15 bp, Homo sapiens
tcctggggcctgcaa

SEQ ID NO: 319087 - DNA, 15 bp, Homo sapiens
atcctggggcctgca

SEQ ID NO: 319088 - DNA, 15 bp, Homo sapiens
catcctggggcctgc

SEQ ID NO: 319089 - DNA, 15 bp, Homo sapiens
gcatcctggggcctg

SEQ ID NO: 319090 - DNA, 15 bp, Homo sapiens
tgcatcctggggcct

SEQ ID NO: 319091 - DNA, 15 bp, Homo sapiens
ctgcatcctggggcc

SEQ ID NO: 319092 - DNA, 15 bp, Homo sapiens
cctgcatcctggggc

SEQ ID NO: 319093 - DNA, 15 bp, Homo sapiens
gcctgcatcctgggg

SEQ ID NO: 319094 - DNA, 15 bp, Homo sapiens
ggcctgcatcctggg

SEQ ID NO: 319095 - DNA, 15 bp, Homo sapiens
gggcctgcatcctgg

SEQ ID NO: 319096 - DNA, 15 bp, Homo sapiens
agggcctgcatcctg

SEQ ID NO: 319097 - DNA, 15 bp, Homo sapiens
cagggcctgcatcct

SEQ ID NO: 319098 - DNA, 15 bp, Homo sapiens
ccagggcctgcatcc

SEQ ID NO: 319099 - DNA, 15 bp, Homo sapiens
accagggcctgcatc

SEQ ID NO: 319100 - DNA, 15 bp, Homo sapiens
caccagggcctgcat

SEQ ID NO: 319101 - DNA, 15 bp, Homo sapiens
gcaccagggcctgca

SEQ ID NO: 319102 - DNA, 15 bp, Homo sapiens
agcaccagggcctgc

SEQ ID NO: 319103 - DNA, 15 bp, Homo sapiens
tagcaccagggcctg

SEQ ID NO: 319104 - DNA, 15 bp, Homo sapiens
gtagcaccagggcct

SEQ ID NO: 319105 - DNA, 15 bp, Homo sapiens
agtagcaccagggcc

SEQ ID NO: 319106 - DNA, 15 bp, Homo sapiens
gagtagcaccagggc

SEQ ID NO: 319107 - DNA, 15 bp, Homo sapiens
ggagtagcaccaggg

SEQ ID NO: 319108 - DNA, 15 bp, Homo sapiens
aggagtagcaccagg

SEQ ID NO: 319109 - DNA, 15 bp, Homo sapiens
gaggagtagcaccag

SEQ ID NO: 319110 - DNA, 15 bp, Homo sapiens
agaggagtagcacca

SEQ ID NO: 319111 - DNA, 15 bp, Homo sapiens
cagaggagtagcacc

SEQ ID NO: 319112 - DNA, 15 bp, Homo sapiens
gcagaggagtagcac

SEQ ID NO: 319113 - DNA, 15 bp, Homo sapiens
tgcagaggagtagca

SEQ ID NO: 319114 - DNA, 15 bp, Homo sapiens
atgcagaggagtagc

SEQ ID NO: 319115 - DNA, 15 bp, Homo sapiens
aatgcagaggagtag

SEQ ID NO: 319116 - DNA, 15 bp, Homo sapiens
caatgcagaggagta

SEQ ID NO: 319117 - DNA, 15 bp, Homo sapiens
ccaatgcagaggagt

SEQ ID NO: 319118 - DNA, 15 bp, Homo sapiens
tccaatgcagaggag

SEQ ID NO: 319119 - DNA, 15 bp, Homo sapiens
ctccaatgcagagga

SEQ ID NO: 319120 - DNA, 15 bp, Homo sapiens
gctccaatgcagagg

SEQ ID NO: 319121 - DNA, 15 bp, Homo sapiens
ggctccaatgcagag

SEQ ID NO: 319122 - DNA, 15 bp, Homo sapiens
gggctccaatgcaga

SEQ ID NO: 319123 - DNA, 15 bp, Homo sapiens
agggctccaatgcag

SEQ ID NO: 319124 - DNA, 15 bp, Homo sapiens
gagggctccaatgca

SEQ ID NO: 319125 - DNA, 15 bp, Homo sapiens
ggagggctccaatgc

SEQ ID NO: 319126 - DNA, 15 bp, Homo sapiens
aggagggctccaatg

SEQ ID NO: 319127 - DNA, 15 bp, Homo sapiens
gaggagggctccaat

SEQ ID NO: 319128 - DNA, 15 bp, Homo sapiens
cgaggagggctccaa

SEQ ID NO: 319129 - DNA, 15 bp, Homo sapiens
ccgaggagggctcca

SEQ ID NO: 319130 - DNA, 15 bp, Homo sapiens
cccgaggagggctcc

SEQ ID NO: 319131 - DNA, 15 bp, Homo sapiens
gcccgaggagggctc

SEQ ID NO: 319132 - DNA, 15 bp, Homo sapiens
tgcccgaggagggct

SEQ ID NO: 319133 - DNA, 15 bp, Homo sapiens
gtgcccgaggagggc

SEQ ID NO: 319134 - DNA, 15 bp, Homo sapiens
tgtgcccgaggaggg

SEQ ID NO: 319135 - DNA, 15 bp, Homo sapiens
ctgtgcccgaggagg

SEQ ID NO: 319136 - DNA, 15 bp, Homo sapiens
gctgtgcccgaggag

SEQ ID NO: 319137 - DNA, 15 bp, Homo sapiens
tgctgtgcccgagga

SEQ ID NO: 319138 - DNA, 15 bp, Homo sapiens
ctgctgtgcccgagg

SEQ ID NO: 319139 - DNA, 15 bp, Homo sapiens
gctgctgtgcccgag

SEQ ID NO: 319140 - DNA, 15 bp, Homo sapiens
agctgctgtgcccga

SEQ ID NO: 319141 - DNA, 15 bp, Homo sapiens
cagctgctgtgcccg

SEQ ID NO: 319142 - DNA, 15 bp, Homo sapiens
gcagctgctgtgccc

SEQ ID NO: 319143 - DNA, 15 bp, Homo sapiens
ggcagctgctgtgcc

SEQ ID NO: 319144 - DNA, 15 bp, Homo sapiens
tggcagctgctgtgc

SEQ ID NO: 319145 - DNA, 15 bp, Homo sapiens
ctggcagctgctgtg

SEQ ID NO: 319146 - DNA, 15 bp, Homo sapiens
tctggcagctgctgt

SEQ ID NO: 319147 - DNA, 15 bp, Homo sapiens
ttctggcagctgctg

SEQ ID NO: 319148 - DNA, 15 bp, Homo sapiens
gttctggcagctgct

SEQ ID NO: 319149 - DNA, 15 bp, Homo sapiens
ggttctggcagctgc

SEQ ID NO: 319150 - DNA, 15 bp, Homo sapiens
gggttctggcagctg

SEQ ID NO: 319151 - DNA, 15 bp, Homo sapiens
agggttctggcagct

SEQ ID NO: 319152 - DNA, 15 bp, Homo sapiens
cagggttctggcagc

SEQ ID NO: 319153 - DNA, 15 bp, Homo sapiens
gcagggttctggcag

SEQ ID NO: 319154 - DNA, 15 bp, Homo sapiens
ggcagggttctggca

SEQ ID NO: 319155 - DNA, 15 bp, Homo sapiens
tggcagggttctggc

SEQ ID NO: 319156 - DNA, 15 bp, Homo sapiens
ctggcagggttctgg

SEQ ID NO: 319157 - DNA, 15 bp, Homo sapiens
gctggcagggttctg

SEQ ID NO: 319158 - DNA, 15 bp, Homo sapiens
ggctggcagggttct

SEQ ID NO: 319159 - DNA, 15 bp, Homo sapiens
gggctggcagggttc

SEQ ID NO: 319160 - DNA, 15 bp, Homo sapiens
ggggctggcagggtt

SEQ ID NO: 319161 - DNA, 15 bp, Homo sapiens
gggggctggcagggt

SEQ ID NO: 319162 - DNA, 15 bp, Homo sapiens
ggggggctggcaggg

SEQ ID NO: 319163 - DNA, 15 bp, Homo sapiens
cggggggctggcagg

SEQ ID NO: 319164 - DNA, 15 bp, Homo sapiens
ccggggggctggcag

SEQ ID NO: 319165 - DNA, 15 bp, Homo sapiens
tccggggggctggca

SEQ ID NO: 319166 - DNA, 15 bp, Homo sapiens
ctccggggggctggc

SEQ ID NO: 319167 - DNA, 15 bp, Homo sapiens
cctccggggggctgg

SEQ ID NO: 319168 - DNA, 15 bp, Homo sapiens
tcctccggggggctg

SEQ ID NO: 319169 - DNA, 15 bp, Homo sapiens
ctcctccggggggct

SEQ ID NO: 319170 - DNA, 15 bp, Homo sapiens
cctcctccggggggc

SEQ ID NO: 319171 - DNA, 15 bp, Homo sapiens
acctcctccgggggg

SEQ ID NO: 319172 - DNA, 15 bp, Homo sapiens
gacctcctccggggg

SEQ ID NO: 319173 - DNA, 15 bp, Homo sapiens
tgacctcctccgggg

SEQ ID NO: 319174 - DNA, 15 bp, Homo sapiens
ctgacctcctccggg

SEQ ID NO: 319175 - DNA, 15 bp, Homo sapiens
actgacctcctccgg

SEQ ID NO: 319176 - DNA, 15 bp, Homo sapiens
tactgacctcctccg

SEQ ID NO: 319177 - DNA, 15 bp, Homo sapiens
ctactgacctcctcc

SEQ ID NO: 319178 - DNA, 15 bp, Homo sapiens
cctactgacctcctc

SEQ ID NO: 319179 - DNA, 15 bp, Homo sapiens
gcctactgacctcct

SEQ ID NO: 319180 - DNA, 15 bp, Homo sapiens
tgcctactgacctcc

SEQ ID NO: 319181 - DNA, 15 bp, Homo sapiens
ctgcctactgacctc

SEQ ID NO: 319182 - DNA, 15 bp, Homo sapiens
cctgcctactgacct

SEQ ID NO: 319183 - DNA, 15 bp, Homo sapiens
gcctgcctactgacc

SEQ ID NO: 319184 - DNA, 15 bp, Homo sapiens
cgcctgcctactgac

SEQ ID NO: 319185 - DNA, 15 bp, Homo sapiens
ccgcctgcctactga

SEQ ID NO: 319186 - DNA, 15 bp, Homo sapiens
cccgcctgcctactg

SEQ ID NO: 319187 - DNA, 15 bp, Homo sapiens
ccccgcctgcctact

SEQ ID NO: 319188 - DNA, 15 bp, Homo sapiens
tccccgcctgcctac

SEQ ID NO: 319189 - DNA, 15 bp, Homo sapiens
ctccccgcctgccta

SEQ ID NO: 319190 - DNA, 15 bp, Homo sapiens
cctccccgcctgcct

SEQ ID NO: 319191 - DNA, 15 bp, Homo sapiens
ccctccccgcctgcc

SEQ ID NO: 319192 - DNA, 15 bp, Homo sapiens
gccctccccgcctgc

SEQ ID NO: 319193 - DNA, 15 bp, Homo sapiens
cgccctccccgcctg

SEQ ID NO: 319194 - DNA, 15 bp, Homo sapiens
acgccctccccgcct

SEQ ID NO: 319195 - DNA, 15 bp, Homo sapiens
cacgccctccccgcc

SEQ ID NO: 319196 - DNA, 15 bp, Homo sapiens
ccacgccctccccgc

SEQ ID NO: 319197 - DNA, 15 bp, Homo sapiens
accacgccctccccg

SEQ ID NO: 319198 - DNA, 15 bp, Homo sapiens
gaccacgccctcccc

SEQ ID NO: 319199 - DNA, 15 bp, Homo sapiens
tgaccacgccctccc

SEQ ID NO: 319200 - DNA, 15 bp, Homo sapiens
ctgaccacgccctcc

SEQ ID NO: 319201 - DNA, 15 bp, Homo sapiens
gctgaccacgccctc

SEQ ID NO: 319202 - DNA, 15 bp, Homo sapiens
tgctgaccacgccct

SEQ ID NO: 319203 - DNA, 15 bp, Homo sapiens
atgctgaccacgccc

SEQ ID NO: 319204 - DNA, 15 bp, Homo sapiens
aatgctgaccacgcc

SEQ ID NO: 319205 - DNA, 15 bp, Homo sapiens
gaatgctgaccacgc

SEQ ID NO: 319206 - DNA, 15 bp, Homo sapiens
ggaatgctgaccacg

SEQ ID NO: 319207 - DNA, 15 bp, Homo sapiens
gggaatgctgaccac

SEQ ID NO: 319208 - DNA, 15 bp, Homo sapiens
ggggaatgctgacca

SEQ ID NO: 319209 - DNA, 15 bp, Homo sapiens
cggggaatgctgacc

SEQ ID NO: 319210 - DNA, 15 bp, Homo sapiens
gcggggaatgctgac

SEQ ID NO: 319211 - DNA, 15 bp, Homo sapiens
ggcggggaatgctga

SEQ ID NO: 319212 - DNA, 15 bp, Homo sapiens
gggcggggaatgctg

SEQ ID NO: 319213 - DNA, 15 bp, Homo sapiens
ggggcggggaatgct

SEQ ID NO: 319214 - DNA, 15 bp, Homo sapiens
aggggcggggaatgc

SEQ ID NO: 319215 - DNA, 15 bp, Homo sapiens
gaggggcggggaatg

SEQ ID NO: 319216 - DNA, 15 bp, Homo sapiens
ggaggggcggggaat

SEQ ID NO: 319217 - DNA, 15 bp, Homo sapiens
aggaggggcggggaa

SEQ ID NO: 319218 - DNA, 15 bp, Homo sapiens
aaggaggggcgggga

SEQ ID NO: 319219 - DNA, 15 bp, Homo sapiens
caaggaggggcgggg

SEQ ID NO: 319220 - DNA, 15 bp, Homo sapiens
ccaaggaggggcggg

SEQ ID NO: 319221 - DNA, 15 bp, Homo sapiens
gccaaggaggggcgg

SEQ ID NO: 319222 - DNA, 15 bp, Homo sapiens
tgccaaggaggggcg

SEQ ID NO: 319223 - DNA, 15 bp, Homo sapiens
ctgccaaggaggggc

SEQ ID NO: 319224 - DNA, 15 bp, Homo sapiens
cctgccaaggagggg

SEQ ID NO: 319225 - DNA, 15 bp, Homo sapiens
gcctgccaaggaggg

SEQ ID NO: 319226 - DNA, 15 bp, Homo sapiens
tgcctgccaaggagg

SEQ ID NO: 319227 - DNA, 15 bp, Homo sapiens
ctgcctgccaaggag

SEQ ID NO: 319228 - DNA, 15 bp, Homo sapiens
gctgcctgccaagga

SEQ ID NO: 319229 - DNA, 15 bp, Homo sapiens
tgctgcctgccaagg

SEQ ID NO: 319230 - DNA, 15 bp, Homo sapiens
gtgctgcctgccaag

SEQ ID NO: 319231 - DNA, 15 bp, Homo sapiens
cgtgctgcctgccaa

SEQ ID NO: 319232 - DNA, 15 bp, Homo sapiens
ccgtgctgcctgcca

SEQ ID NO: 319233 - DNA, 15 bp, Homo sapiens
cccgtgctgcctgcc

SEQ ID NO: 319234 - DNA, 15 bp, Homo sapiens
tcccgtgctgcctgc

SEQ ID NO: 319235 - DNA, 15 bp, Homo sapiens
ttcccgtgctgcctg

SEQ ID NO: 319236 - DNA, 15 bp, Homo sapiens
tttcccgtgctgcct

SEQ ID NO: 319237 - DNA, 15 bp, Homo sapiens
gtttcccgtgctgcc

SEQ ID NO: 319238 - DNA, 15 bp, Homo sapiens
tgtttcccgtgctgc

SEQ ID NO: 319239 - DNA, 15 bp, Homo sapiens
ctgtttcccgtgctg

SEQ ID NO: 319240 - DNA, 15 bp, Homo sapiens
cctgtttcccgtgct

SEQ ID NO: 319241 - DNA, 15 bp, Homo sapiens
tcctgtttcccgtgc

SEQ ID NO: 319242 - DNA, 15 bp, Homo sapiens
gtcctgtttcccgtg

SEQ ID NO: 319243 - DNA, 15 bp, Homo sapiens
tgtcctgtttcccgt

SEQ ID NO: 319244 - DNA, 15 bp, Homo sapiens
ctgtcctgtttcccg

SEQ ID NO: 319245 - DNA, 15 bp, Homo sapiens
cctgtcctgtttccc

SEQ ID NO: 319246 - DNA, 15 bp, Homo sapiens
ccctgtcctgtttcc

SEQ ID NO: 319247 - DNA, 15 bp, Homo sapiens
tccctgtcctgtttc

SEQ ID NO: 319248 - DNA, 15 bp, Homo sapiens
ttccctgtcctgttt

SEQ ID NO: 319249 - DNA, 15 bp, Homo sapiens
gttccctgtcctgtt

SEQ ID NO: 319250 - DNA, 15 bp, Homo sapiens
ggttccctgtcctgt

SEQ ID NO: 319251 - DNA, 15 bp, Homo sapiens
gggttccctgtcctg

SEQ ID NO: 319252 - DNA, 15 bp, Homo sapiens
cgggttccctgtcct

SEQ ID NO: 319253 - DNA, 15 bp, Homo sapiens
ccgggttccctgtcc

SEQ ID NO: 319254 - DNA, 15 bp, Homo sapiens
tccgggttccctgtc

SEQ ID NO: 319255 - DNA, 15 bp, Homo sapiens
gtccgggttccctgt

SEQ ID NO: 319256 - DNA, 15 bp, Homo sapiens
ggtccgggttccctg

SEQ ID NO: 319257 - DNA, 15 bp, Homo sapiens
gggtccgggttccct

SEQ ID NO: 319258 - DNA, 15 bp, Homo sapiens
tgggtccgggttccc

SEQ ID NO: 319259 - DNA, 15 bp, Homo sapiens
ctgggtccgggttcc

SEQ ID NO: 319260 - DNA, 15 bp, Homo sapiens
cctgggtccgggttc

SEQ ID NO: 319261 - DNA, 15 bp, Homo sapiens
acctgggtccgggtt

SEQ ID NO: 319262 - DNA, 15 bp, Homo sapiens
aacctgggtccgggt

SEQ ID NO: 319263 - DNA, 15 bp, Homo sapiens
gaacctgggtccggg

SEQ ID NO: 319264 - DNA, 15 bp, Homo sapiens
ggaacctgggtccgg

SEQ ID NO: 319265 - DNA, 15 bp, Homo sapiens
tggaacctgggtccg

SEQ ID NO: 319266 - DNA, 15 bp, Homo sapiens
ctggaacctgggtcc

SEQ ID NO: 319267 - DNA, 15 bp, Homo sapiens
cctggaacctgggtc

SEQ ID NO: 319268 - DNA, 15 bp, Homo sapiens
gcctggaacctgggt

SEQ ID NO: 319269 - DNA, 15 bp, Homo sapiens
ggcctggaacctggg

SEQ ID NO: 319270 - DNA, 15 bp, Homo sapiens
tggcctggaacctgg

SEQ ID NO: 319271 - DNA, 15 bp, Homo sapiens
ctggcctggaacctg

SEQ ID NO: 319272 - DNA, 15 bp, Homo sapiens
cctggcctggaacct

SEQ ID NO: 319273 - DNA, 15 bp, Homo sapiens
gcctggcctggaacc

SEQ ID NO: 319274 - DNA, 15 bp, Homo sapiens
agcctggcctggaac

SEQ ID NO: 319275 - DNA, 15 bp, Homo sapiens
aagcctggcctggaa

SEQ ID NO: 319276 - DNA, 15 bp, Homo sapiens
caagcctggcctgga

SEQ ID NO: 319277 - DNA, 15 bp, Homo sapiens
ccaagcctggcctgg

SEQ ID NO: 319278 - DNA, 15 bp, Homo sapiens
cccaagcctggcctg

SEQ ID NO: 319279 - DNA, 15 bp, Homo sapiens
gcccaagcctggcct

SEQ ID NO: 319280 - DNA, 15 bp, Homo sapiens
ggcccaagcctggcc

SEQ ID NO: 319281 - DNA, 15 bp, Homo sapiens
aggcccaagcctggc

SEQ ID NO: 319282 - DNA, 15 bp, Homo sapiens
aaggcccaagcctgg

SEQ ID NO: 319283 - DNA, 15 bp, Homo sapiens
aaaggcccaagcctg

SEQ ID NO: 319284 - DNA, 15 bp, Homo sapiens
taaaggcccaagcct

SEQ ID NO: 319285 - DNA, 15 bp, Homo sapiens
ataaaggcccaagcc

SEQ ID NO: 319286 - DNA, 15 bp, Homo sapiens
aataaaggcccaagc

SEQ ID NO: 319287 - DNA, 15 bp, Homo sapiens
aaataaaggcccaag

SEQ ID NO: 319288 - DNA, 15 bp, Homo sapiens
gaaataaaggcccaa

SEQ ID NO: 319289 - DNA, 15 bp, Homo sapiens
agaaataaaggccca

SEQ ID NO: 319290 - DNA, 15 bp, Homo sapiens
gagaaataaaggccc

SEQ ID NO: 319291 - DNA, 15 bp, Homo sapiens
agagaaataaaggcc

SEQ ID NO: 319292 - DNA, 15 bp, Homo sapiens
tagagaaataaaggc

SEQ ID NO: 319293 - DNA, 15 bp, Homo sapiens
ctagagaaataaagg

SEQ ID NO: 319294 - DNA, 15 bp, Homo sapiens
cctagagaaataaag

SEQ ID NO: 319295 - DNA, 15 bp, Homo sapiens
ccctagagaaataaa

SEQ ID NO: 319296 - DNA, 15 bp, Homo sapiens
gccctagagaaataa

SEQ ID NO: 319297 - DNA, 15 bp, Homo sapiens
agccctagagaaata

SEQ ID NO: 319298 - DNA, 15 bp, Homo sapiens
cagccctagagaaat

SEQ ID NO: 319299 - DNA, 15 bp, Homo sapiens
ccagccctagagaaa

SEQ ID NO: 319300 - DNA, 15 bp, Homo sapiens
tccagccctagagaa

SEQ ID NO: 319301 - DNA, 15 bp, Homo sapiens
ctccagccctagaga

SEQ ID NO: 319302 - DNA, 15 bp, Homo sapiens
actccagccctagag

SEQ ID NO: 319303 - DNA, 15 bp, Homo sapiens
aactccagccctaga

SEQ ID NO: 319304 - DNA, 15 bp, Homo sapiens
aaactccagccctag

SEQ ID NO: 319305 - DNA, 15 bp, Homo sapiens
gaaactccagcccta

SEQ ID NO: 319306 - DNA, 15 bp, Homo sapiens
agaaactccagccct

SEQ ID NO: 319307 - DNA, 15 bp, Homo sapiens
gagaaactccagccc

SEQ ID NO: 319308 - DNA, 15 bp, Homo sapiens
ggagaaactccagcc

SEQ ID NO: 319309 - DNA, 15 bp, Homo sapiens
tggagaaactccagc

SEQ ID NO: 319310 - DNA, 15 bp, Homo sapiens
ctggagaaactccag

SEQ ID NO: 319311 - DNA, 15 bp, Homo sapiens
gctggagaaactcca

SEQ ID NO: 319312 - DNA, 15 bp, Homo sapiens
tgctggagaaactcc

SEQ ID NO: 319313 - DNA, 15 bp, Homo sapiens
ctgctggagaaactc

SEQ ID NO: 319314 - DNA, 15 bp, Homo sapiens
gctgctggagaaact

SEQ ID NO: 319315 - DNA, 15 bp, Homo sapiens
tgctgctggagaaac

SEQ ID NO: 319316 - DNA, 15 bp, Homo sapiens
ttgctgctggagaaa

SEQ ID NO: 319317 - DNA, 15 bp, Homo sapiens
tttgctgctggagaa

SEQ ID NO: 319318 - DNA, 15 bp, Homo sapiens
ttttgctgctggaga

SEQ ID NO: 319319 - DNA, 15 bp, Homo sapiens
gttttgctgctggag

SEQ ID NO: 319320 - DNA, 15 bp, Homo sapiens
tgttttgctgctgga

SEQ ID NO: 319321 - DNA, 15 bp, Homo sapiens
ctgttttgctgctgg

SEQ ID NO: 319322 - DNA, 15 bp, Homo sapiens
tctgttttgctgctg

SEQ ID NO: 319323 - DNA, 15 bp, Homo sapiens
ctctgttttgctgct

SEQ ID NO: 319324 - DNA, 15 bp, Homo sapiens
tctctgttttgctgc

SEQ ID NO: 319325 - DNA, 15 bp, Homo sapiens
ctctctgttttgctg

SEQ ID NO: 319326 - DNA, 15 bp, Homo sapiens
tctctctgttttgct

SEQ ID NO: 319327 - DNA, 15 bp, Homo sapiens
ttctctctgttttgc

SEQ ID NO: 319328 - DNA, 15 bp, Homo sapiens
tttctctctgttttg

SEQ ID NO: 319329 - DNA, 15 bp, Homo sapiens
ttttctctctgtttt

SEQ ID NO: 319330 - DNA, 15 bp, Homo sapiens
attttctctctgttt

SEQ ID NO: 319331 - DNA, 15 bp, Homo sapiens
cattttctctctgtt

SEQ ID NO: 319332 - DNA, 15 bp, Homo sapiens
acattttctctctgt

SEQ ID NO: 319333 - DNA, 15 bp, Homo sapiens
gacattttctctctg

SEQ ID NO: 319334 - DNA, 15 bp, Homo sapiens
agacattttctctct

SEQ ID NO: 319335 - DNA, 15 bp, Homo sapiens
aagacattttctctc

SEQ ID NO: 319336 - DNA, 15 bp, Homo sapiens
caagacattttctct

SEQ ID NO: 319337 - DNA, 15 bp, Homo sapiens
gcaagacattttctc

SEQ ID NO: 319338 - DNA, 15 bp, Homo sapiens
ggcaagacattttct

SEQ ID NO: 319339 - DNA, 15 bp, Homo sapiens
aggcaagacattttc

SEQ ID NO: 319340 - DNA, 15 bp, Homo sapiens
aaggcaagacatttt

SEQ ID NO: 319341 - DNA, 15 bp, Homo sapiens
caaggcaagacattt

SEQ ID NO: 319342 - DNA, 15 bp, Homo sapiens
gcaaggcaagacatt

SEQ ID NO: 319343 - DNA, 15 bp, Homo sapiens
ggcaaggcaagacat

SEQ ID NO: 319344 - DNA, 15 bp, Homo sapiens
aggcaaggcaagaca

SEQ ID NO: 319345 - DNA, 15 bp, Homo sapiens
aaggcaaggcaagac

SEQ ID NO: 319346 - DNA, 15 bp, Homo sapiens
aaaggcaaggcaaga

SEQ ID NO: 319347 - DNA, 15 bp, Homo sapiens
gaaaggcaaggcaag

SEQ ID NO: 319348 - DNA, 15 bp, Homo sapiens
tgaaaggcaaggcaa

SEQ ID NO: 319349 - DNA, 15 bp, Homo sapiens
ctgaaaggcaaggca

SEQ ID NO: 319350 - DNA, 15 bp, Homo sapiens
cctgaaaggcaaggc

SEQ ID NO: 319351 - DNA, 15 bp, Homo sapiens
ccctgaaaggcaagg

SEQ ID NO: 319352 - DNA, 15 bp, Homo sapiens
cccctgaaaggcaag

SEQ ID NO: 319353 - DNA, 15 bp, Homo sapiens
tcccctgaaaggcaa

SEQ ID NO: 319354 - DNA, 15 bp, Homo sapiens
atcccctgaaaggca

SEQ ID NO: 319355 - DNA, 15 bp, Homo sapiens
catcccctgaaaggc

SEQ ID NO: 319356 - DNA, 15 bp, Homo sapiens
ccatcccctgaaagg

SEQ ID NO: 319357 - DNA, 15 bp, Homo sapiens
tccatcccctgaaag

SEQ ID NO: 319358 - DNA, 15 bp, Homo sapiens
ctccatcccctgaaa

SEQ ID NO: 319359 - DNA, 15 bp, Homo sapiens
actccatcccctgaa

SEQ ID NO: 319360 - DNA, 15 bp, Homo sapiens
tactccatcccctga

SEQ ID NO: 319361 - DNA, 15 bp, Homo sapiens
ctactccatcccctg

SEQ ID NO: 319362 - DNA, 15 bp, Homo sapiens
cctactccatcccct

SEQ ID NO: 319363 - DNA, 15 bp, Homo sapiens
ccctactccatcccc

SEQ ID NO: 319364 - DNA, 15 bp, Homo sapiens
tccctactccatccc

SEQ ID NO: 319365 - DNA, 15 bp, Homo sapiens
gtccctactccatcc

SEQ ID NO: 319366 - DNA, 15 bp, Homo sapiens
tgtccctactccatc

SEQ ID NO: 319367 - DNA, 15 bp, Homo sapiens
atgtccctactccat

SEQ ID NO: 319368 - DNA, 15 bp, Homo sapiens
catgtccctactcca

SEQ ID NO: 319369 - DNA, 15 bp, Homo sapiens
tcatgtccctactcc

SEQ ID NO: 319370 - DNA, 15 bp, Homo sapiens
ttcatgtccctactc

SEQ ID NO: 319371 - DNA, 15 bp, Homo sapiens
attcatgtccctact

SEQ ID NO: 319372 - DNA, 15 bp, Homo sapiens
tattcatgtccctac

SEQ ID NO: 319373 - DNA, 15 bp, Homo sapiens
ttattcatgtcccta

SEQ ID NO: 319374 - DNA, 15 bp, Homo sapiens
cttattcatgtccct

SEQ ID NO: 319375 - DNA, 15 bp, Homo sapiens
tcttattcatgtccc

SEQ ID NO: 319376 - DNA, 15 bp, Homo sapiens
atcttattcatgtcc

SEQ ID NO: 319377 - DNA, 15 bp, Homo sapiens
gatcttattcatgtc

SEQ ID NO: 319378 - DNA, 15 bp, Homo sapiens
ggatcttattcatgt

SEQ ID NO: 319379 - DNA, 15 bp, Homo sapiens
gggatcttattcatg

SEQ ID NO: 319380 - DNA, 15 bp, Homo sapiens
tgggatcttattcat

SEQ ID NO: 319381 - DNA, 15 bp, Homo sapiens
ttgggatcttattca

SEQ ID NO: 319382 - DNA, 15 bp, Homo sapiens
tttgggatcttattc

SEQ ID NO: 319383 - DNA, 15 bp, Homo sapiens
ttttgggatcttatt

SEQ ID NO: 319384 - DNA, 15 bp, Homo sapiens
cttttgggatcttat

SEQ ID NO: 319385 - DNA, 15 bp, Homo sapiens
tcttttgggatctta

SEQ ID NO: 319386 - DNA, 15 bp, Homo sapiens
ctcttttgggatctt

SEQ ID NO: 319387 - DNA, 15 bp, Homo sapiens
actcttttgggatct

SEQ ID NO: 319388 - DNA, 15 bp, Homo sapiens
tactcttttgggatc

SEQ ID NO: 319389 - DNA, 15 bp, Homo sapiens
ttactcttttgggat

SEQ ID NO: 319390 - DNA, 15 bp, Homo sapiens
tttactcttttggga

SEQ ID NO: 319391 - DNA, 15 bp, Homo sapiens
ttttactcttttggg

SEQ ID NO: 319392 - DNA, 15 bp, Homo sapiens
tttttactcttttgg

SEQ ID NO: 319393 - DNA, 15 bp, Homo sapiens
atttttactcttttg

SEQ ID NO: 319394 - DNA, 15 bp, Homo sapiens
gatttttactctttt

SEQ ID NO: 319395 - DNA, 15 bp, Homo sapiens
agatttttactcttt

SEQ ID NO: 319396 - DNA, 15 bp, Homo sapiens
cagatttttactctt

SEQ ID NO: 319397 - DNA, 15 bp, Homo sapiens
tcagatttttactct

SEQ ID NO: 319398 - DNA, 15 bp, Homo sapiens
ttcagatttttactc

SEQ ID NO: 319399 - DNA, 15 bp, Homo sapiens
cttcagatttttact

SEQ ID NO: 319400 - DNA, 15 bp, Homo sapiens
gcttcagatttttac

SEQ ID NO: 319401 - DNA, 15 bp, Homo sapiens
tgcttcagattttta

SEQ ID NO: 319402 - DNA, 15 bp, Homo sapiens
gtgcttcagattttt

SEQ ID NO: 319403 - DNA, 15 bp, Homo sapiens
agtgcttcagatttt

SEQ ID NO: 319404 - DNA, 15 bp, Homo sapiens
aagtgcttcagattt

SEQ ID NO: 319405 - DNA, 15 bp, Homo sapiens
aaagtgcttcagatt

SEQ ID NO: 319406 - DNA, 15 bp, Homo sapiens
aaaagtgcttcagat

SEQ ID NO: 319407 - DNA, 15 bp, Homo sapiens
taaaagtgcttcaga

SEQ ID NO: 319408 - DNA, 15 bp, Homo sapiens
ttaaaagtgcttcag

SEQ ID NO: 319409 - DNA, 15 bp, Homo sapiens
gttaaaagtgcttca

SEQ ID NO: 319410 - DNA, 15 bp, Homo sapiens
tgttaaaagtgcttc

SEQ ID NO: 319411 - DNA, 15 bp, Homo sapiens
ttgttaaaagtgctt

SEQ ID NO: 319412 - DNA, 15 bp, Homo sapiens
cttgttaaaagtgct

SEQ ID NO: 319413 - DNA, 15 bp, Homo sapiens
acttgttaaaagtgc

SEQ ID NO: 319414 - DNA, 15 bp, Homo sapiens
gacttgttaaaagtg

SEQ ID NO: 319415 - DNA, 15 bp, Homo sapiens
ggacttgttaaaagt

SEQ ID NO: 319416 - DNA, 15 bp, Homo sapiens
tggacttgttaaaag

SEQ ID NO: 319417 - DNA, 15 bp, Homo sapiens
ctggacttgttaaaa

SEQ ID NO: 319418 - DNA, 15 bp, Homo sapiens
cctggacttgttaaa

SEQ ID NO: 319419 - DNA, 15 bp, Homo sapiens
ccctggacttgttaa

SEQ ID NO: 319420 - DNA, 15 bp, Homo sapiens
gccctggacttgtta

SEQ ID NO: 319421 - DNA, 15 bp, Homo sapiens
tgccctggacttgtt

SEQ ID NO: 319422 - DNA, 15 bp, Homo sapiens
ttgccctggacttgt

SEQ ID NO: 319423 - DNA, 15 bp, Homo sapiens
attgccctggacttg

SEQ ID NO: 319424 - DNA, 15 bp, Homo sapiens
aattgccctggactt

SEQ ID NO: 319425 - DNA, 15 bp, Homo sapiens
gaattgccctggact

SEQ ID NO: 319426 - DNA, 15 bp, Homo sapiens
agaattgccctggac

SEQ ID NO: 319427 - DNA, 15 bp, Homo sapiens
gagaattgccctgga

SEQ ID NO: 319428 - DNA, 15 bp, Homo sapiens
ggagaattgccctgg

SEQ ID NO: 319429 - DNA, 15 bp, Homo sapiens
aggagaattgccctg

SEQ ID NO: 319430 - DNA, 15 bp, Homo sapiens
caggagaattgccct

SEQ ID NO: 319431 - DNA, 15 bp, Homo sapiens
gcaggagaattgccc

SEQ ID NO: 319432 - DNA, 15 bp, Homo sapiens
ggcaggagaattgcc

SEQ ID NO: 319433 - DNA, 15 bp, Homo sapiens
agctgaggcaggaga

SEQ ID NO: 319434 - DNA, 15 bp, Homo sapiens
aagctgaggcaggag

SEQ ID NO: 319435 - DNA, 15 bp, Homo sapiens
gaagctgaggcagga

SEQ ID NO: 319436 - DNA, 15 bp, Homo sapiens
ggaagctgaggcagg

SEQ ID NO: 319437 - DNA, 15 bp, Homo sapiens
gggaagctgaggcag

SEQ ID NO: 319438 - DNA, 15 bp, Homo sapiens
tgggaagctgaggca

SEQ ID NO: 319439 - DNA, 15 bp, Homo sapiens
ttgggaagctgaggc

SEQ ID NO: 319440 - DNA, 15 bp, Homo sapiens
cttgggaagctgagg

SEQ ID NO: 319441 - DNA, 15 bp, Homo sapiens
gcttgggaagctgag

SEQ ID NO: 319442 - DNA, 15 bp, Homo sapiens
tgcttgggaagctga

SEQ ID NO: 319443 - DNA, 15 bp, Homo sapiens
ctgcttgggaagctg

SEQ ID NO: 319444 - DNA, 15 bp, Homo sapiens
gctgcttgggaagct

SEQ ID NO: 319445 - DNA, 15 bp, Homo sapiens
agctgcttgggaagc

SEQ ID NO: 319446 - DNA, 15 bp, Homo sapiens
cagctgcttgggaag

SEQ ID NO: 319447 - DNA, 15 bp, Homo sapiens
ccagctgcttgggaa

SEQ ID NO: 319448 - DNA, 15 bp, Homo sapiens
cccagctgcttggga

SEQ ID NO: 319449 - DNA, 15 bp, Homo sapiens
tcccagctgcttggg

SEQ ID NO: 319450 - DNA, 15 bp, Homo sapiens
atcccagctgcttgg

SEQ ID NO: 319451 - DNA, 15 bp, Homo sapiens
aatcccagctgcttg

SEQ ID NO: 319452 - DNA, 15 bp, Homo sapiens
taatcccagctgctt

SEQ ID NO: 319453 - DNA, 15 bp, Homo sapiens
gtaatcccagctgct

SEQ ID NO: 319454 - DNA, 15 bp, Homo sapiens
tgtaatcccagctgc

SEQ ID NO: 319455 - DNA, 15 bp, Homo sapiens
ctgtaatcccagctg

SEQ ID NO: 319456 - DNA, 15 bp, Homo sapiens
tgcatgcctgtaatc

SEQ ID NO: 319457 - DNA, 15 bp, Homo sapiens
gtgcatgcctgtaat

SEQ ID NO: 319458 - DNA, 15 bp, Homo sapiens
ggtgcatgcctgtaa

SEQ ID NO: 319459 - DNA, 15 bp, Homo sapiens
ttggtggtgcatgcc

SEQ ID NO: 319460 - DNA, 15 bp, Homo sapiens
cttggtggtgcatgc

SEQ ID NO: 319461 - DNA, 15 bp, Homo sapiens
gcttggtggtgcatg

SEQ ID NO: 319462 - DNA, 15 bp, Homo sapiens
ggcttggtggtgcat

SEQ ID NO: 319463 - DNA, 15 bp, Homo sapiens
gggcttggtggtgca

SEQ ID NO: 319464 - DNA, 15 bp, Homo sapiens
cgggcttggtggtgc

SEQ ID NO: 319465 - DNA, 15 bp, Homo sapiens
ccgggcttggtggtg

SEQ ID NO: 319466 - DNA, 15 bp, Homo sapiens
gccgggcttggtggt

SEQ ID NO: 319467 - DNA, 15 bp, Homo sapiens
agccgggcttggtgg

SEQ ID NO: 319468 - DNA, 15 bp, Homo sapiens
gagccgggcttggtg

SEQ ID NO: 319469 - DNA, 15 bp, Homo sapiens
tgagccgggcttggt

SEQ ID NO: 319470 - DNA, 15 bp, Homo sapiens
atgagccgggcttgg

SEQ ID NO: 319471 - DNA, 15 bp, Homo sapiens
aatgagccgggcttg

SEQ ID NO: 319472 - DNA, 15 bp, Homo sapiens
aaatgagccgggctt

SEQ ID NO: 319473 - DNA, 15 bp, Homo sapiens
aaaatgagccgggct

SEQ ID NO: 319474 - DNA, 15 bp, Homo sapiens
caaaatgagccgggc

SEQ ID NO: 319475 - DNA, 15 bp, Homo sapiens
acaaaatgagccggg

SEQ ID NO: 319476 - DNA, 15 bp, Homo sapiens
tacaaaatgagccgg

SEQ ID NO: 319477 - DNA, 15 bp, Homo sapiens
atacaaaatgagccg

SEQ ID NO: 319478 - DNA, 15 bp, Homo sapiens
aatacaaaatgagcc

SEQ ID NO: 319479 - DNA, 15 bp, Homo sapiens
aaatacaaaatgagc

SEQ ID NO: 319480 - DNA, 15 bp, Homo sapiens
aaaatacaaaatgag

SEQ ID NO: 319481 - DNA, 15 bp, Homo sapiens
aaaaatacaaaatga

SEQ ID NO: 319482 - DNA, 15 bp, Homo sapiens
taaaaatacaaaatg

SEQ ID NO: 319483 - DNA, 15 bp, Homo sapiens
ctaaaaatacaaaat

SEQ ID NO: 319484 - DNA, 15 bp, Homo sapiens
agaaaccccgtctct

SEQ ID NO: 319485 - DNA, 15 bp, Homo sapiens
gagaaaccccgtctc

SEQ ID NO: 319486 - DNA, 15 bp, Homo sapiens
ggagaaaccccgtct

SEQ ID NO: 319487 - DNA, 15 bp, Homo sapiens
tggagaaaccccgtc

SEQ ID NO: 319488 - DNA, 15 bp, Homo sapiens
atggagaaaccccgt

SEQ ID NO: 319489 - DNA, 15 bp, Homo sapiens
catggagaaaccccg

SEQ ID NO: 319490 - DNA, 15 bp, Homo sapiens
accaacatggagaaa

SEQ ID NO: 319491 - DNA, 15 bp, Homo sapiens
gaccaacatggagaa

SEQ ID NO: 319492 - DNA, 15 bp, Homo sapiens
tgaccaacatggaga

SEQ ID NO: 319493 - DNA, 15 bp, Homo sapiens
ctgaccaacatggag

SEQ ID NO: 319494 - DNA, 15 bp, Homo sapiens
cctgaccaacatgga

SEQ ID NO: 319495 - DNA, 15 bp, Homo sapiens
gggagttcgagacca

SEQ ID NO: 319496 - DNA, 15 bp, Homo sapiens
cgggagttcgagacc

SEQ ID NO: 319497 - DNA, 15 bp, Homo sapiens
tcgggagttcgagac

SEQ ID NO: 319498 - DNA, 15 bp, Homo sapiens
gtcgggagttcgaga

SEQ ID NO: 319499 - DNA, 15 bp, Homo sapiens
ggtcgggagttcgag

SEQ ID NO: 319500 - DNA, 15 bp, Homo sapiens
aggtcgggagttcga

SEQ ID NO: 319501 - DNA, 15 bp, Homo sapiens
gaggtcgggagttcg

SEQ ID NO: 319502 - DNA, 15 bp, Homo sapiens
tgaggtcgggagttc

SEQ ID NO: 319503 - DNA, 15 bp, Homo sapiens
ttgaggtcgggagtt

SEQ ID NO: 319504 - DNA, 15 bp, Homo sapiens
cttgaggtcgggagt

SEQ ID NO: 319505 - DNA, 15 bp, Homo sapiens
acttgaggtcgggag

SEQ ID NO: 319506 - DNA, 15 bp, Homo sapiens
cacttgaggtcggga

SEQ ID NO: 319507 - DNA, 15 bp, Homo sapiens
tcacttgaggtcggg

SEQ ID NO: 319508 - DNA, 15 bp, Homo sapiens
atcacttgaggtcgg

SEQ ID NO: 319509 - DNA, 15 bp, Homo sapiens
aatcacttgaggtcg

SEQ ID NO: 319510 - DNA, 15 bp, Homo sapiens
gaatcacttgaggtc

SEQ ID NO: 319511 - DNA, 15 bp, Homo sapiens
agaatcacttgaggt

SEQ ID NO: 319512 - DNA, 15 bp, Homo sapiens
gagaatcacttgagg

SEQ ID NO: 319513 - DNA, 15 bp, Homo sapiens
ggagaatcacttgag

SEQ ID NO: 319514 - DNA, 15 bp, Homo sapiens
cgaggcaggagaatc

SEQ ID NO: 319515 - DNA, 15 bp, Homo sapiens
ccgaggcaggagaat

SEQ ID NO: 319516 - DNA, 15 bp, Homo sapiens
gccgaggcaggagaa

SEQ ID NO: 319517 - DNA, 15 bp, Homo sapiens
ggccgaggcaggaga

SEQ ID NO: 319518 - DNA, 15 bp, Homo sapiens
aggccgaggcaggag

SEQ ID NO: 319519 - DNA, 15 bp, Homo sapiens
gaggccgaggcagga

SEQ ID NO: 319520 - DNA, 15 bp, Homo sapiens
ggcactttgggaggc

SEQ ID NO: 319521 - DNA, 15 bp, Homo sapiens
cggcactttgggagg

SEQ ID NO: 319522 - DNA, 15 bp, Homo sapiens
ccggcactttgggag

SEQ ID NO: 319523 - DNA, 15 bp, Homo sapiens
cccggcactttggga

SEQ ID NO: 319524 - DNA, 15 bp, Homo sapiens
tcccggcactttggg

SEQ ID NO: 319525 - DNA, 15 bp, Homo sapiens
atcccggcactttgg

SEQ ID NO: 319526 - DNA, 15 bp, Homo sapiens
catcccggcactttg

SEQ ID NO: 319527 - DNA, 15 bp, Homo sapiens
tcatcccggcacttt

SEQ ID NO: 319528 - DNA, 15 bp, Homo sapiens
gtcatcccggcactt

SEQ ID NO: 319529 - DNA, 15 bp, Homo sapiens
tgtcatcccggcact

SEQ ID NO: 319530 - DNA, 15 bp, Homo sapiens
ctgtcatcccggcac

SEQ ID NO: 319531 - DNA, 15 bp, Homo sapiens
cctgtcatcccggca

SEQ ID NO: 319532 - DNA, 15 bp, Homo sapiens
acctgtcatcccggc

SEQ ID NO: 319533 - DNA, 15 bp, Homo sapiens
cacctgtcatcccgg

SEQ ID NO: 319534 - DNA, 15 bp, Homo sapiens
acacctgtcatcccg

SEQ ID NO: 319535 - DNA, 15 bp, Homo sapiens
cacacctgtcatccc

SEQ ID NO: 319536 - DNA, 15 bp, Homo sapiens
tcacacctgtcatcc

SEQ ID NO: 319537 - DNA, 15 bp, Homo sapiens
ctcacacctgtcatc

SEQ ID NO: 319538 - DNA, 15 bp, Homo sapiens
gctcacacctgtcat

SEQ ID NO: 319539 - DNA, 15 bp, Homo sapiens
ggctcacacctgtca

SEQ ID NO: 319540 - DNA, 15 bp, Homo sapiens
tggctcacacctgtc

SEQ ID NO: 319541 - DNA, 15 bp, Homo sapiens
gcggtggctcacacc

SEQ ID NO: 319542 - DNA, 15 bp, Homo sapiens
tgcggtggctcacac

SEQ ID NO: 319543 - DNA, 15 bp, Homo sapiens
gtgcggtggctcaca

SEQ ID NO: 319544 - DNA, 15 bp, Homo sapiens
ggtgcggtggctcac

SEQ ID NO: 319545 - DNA, 15 bp, Homo sapiens
aggtgcggtggctca

SEQ ID NO: 319546 - DNA, 15 bp, Homo sapiens
caggtgcggtggctc

SEQ ID NO: 319547 - DNA, 15 bp, Homo sapiens
ccaggtgcggtggct

SEQ ID NO: 319548 - DNA, 15 bp, Homo sapiens
gccaggtgcggtggc

SEQ ID NO: 319549 - DNA, 15 bp, Homo sapiens
ggccaggtgcggtgg

SEQ ID NO: 319550 - DNA, 15 bp, Homo sapiens
tggccaggtgcggtg

SEQ ID NO: 319551 - DNA, 15 bp, Homo sapiens
ctggccaggtgcggt

SEQ ID NO: 319552 - DNA, 15 bp, Homo sapiens
cctggccaggtgcgg

SEQ ID NO: 319553 - DNA, 15 bp, Homo sapiens
tcctggccaggtgcg

SEQ ID NO: 319554 - DNA, 15 bp, Homo sapiens
atcctggccaggtgc

SEQ ID NO: 319555 - DNA, 15 bp, Homo sapiens
gatcctggccaggtg

SEQ ID NO: 319556 - DNA, 15 bp, Homo sapiens
agatcctggccaggt

SEQ ID NO: 319557 - DNA, 15 bp, Homo sapiens
aagatcctggccagg

SEQ ID NO: 319558 - DNA, 15 bp, Homo sapiens
aaagatcctggccag

SEQ ID NO: 319559 - DNA, 15 bp, Homo sapiens
aaaagatcctggcca

SEQ ID NO: 319560 - DNA, 15 bp, Homo sapiens
gaaaagatcctggcc

SEQ ID NO: 319561 - DNA, 15 bp, Homo sapiens
agaaaagatcctggc

SEQ ID NO: 319562 - DNA, 15 bp, Homo sapiens
gagaaaagatcctgg

SEQ ID NO: 319563 - DNA, 15 bp, Homo sapiens
tgagaaaagatcctg

SEQ ID NO: 319564 - DNA, 15 bp, Homo sapiens
atgagaaaagatcct

SEQ ID NO: 319565 - DNA, 15 bp, Homo sapiens
aatgagaaaagatcc

SEQ ID NO: 319566 - DNA, 15 bp, Homo sapiens
taatgagaaaagatc

SEQ ID NO: 319567 - DNA, 15 bp, Homo sapiens
gtaatgagaaaagat

SEQ ID NO: 319568 - DNA, 15 bp, Homo sapiens
ggtaatgagaaaaga

SEQ ID NO: 319569 - DNA, 15 bp, Homo sapiens
aggtaatgagaaaag

SEQ ID NO: 319570 - DNA, 15 bp, Homo sapiens
aaggtaatgagaaaa

SEQ ID NO: 319571 - DNA, 15 bp, Homo sapiens
caaggtaatgagaaa

SEQ ID NO: 319572 - DNA, 15 bp, Homo sapiens
acaaggtaatgagaa

SEQ ID NO: 319573 - DNA, 15 bp, Homo sapiens
gacaaggtaatgaga

SEQ ID NO: 319574 - DNA, 15 bp, Homo sapiens
agacaaggtaatgag

SEQ ID NO: 319575 - DNA, 15 bp, Homo sapiens
aagacaaggtaatga

SEQ ID NO: 319576 - DNA, 15 bp, Homo sapiens
gaagacaaggtaatg

SEQ ID NO: 319577 - DNA, 15 bp, Homo sapiens
ggaagacaaggtaat

SEQ ID NO: 319578 - DNA, 15 bp, Homo sapiens
aggaagacaaggtaa

SEQ ID NO: 319579 - DNA, 15 bp, Homo sapiens
taggaagacaaggta

SEQ ID NO: 319580 - DNA, 15 bp, Homo sapiens
ctaggaagacaaggt

SEQ ID NO: 319581 - DNA, 15 bp, Homo sapiens
actaggaagacaagg

SEQ ID NO: 319582 - DNA, 15 bp, Homo sapiens
cactaggaagacaag

SEQ ID NO: 319583 - DNA, 15 bp, Homo sapiens
ccactaggaagacaa

SEQ ID NO: 319584 - DNA, 15 bp, Homo sapiens
cccactaggaagaca

SEQ ID NO: 319585 - DNA, 15 bp, Homo sapiens
ccccactaggaagac

SEQ ID NO: 319586 - DNA, 15 bp, Homo sapiens
cccccactaggaaga

SEQ ID NO: 319587 - DNA, 15 bp, Homo sapiens
gcccccactaggaag

SEQ ID NO: 319588 - DNA, 15 bp, Homo sapiens
agcccccactaggaa

SEQ ID NO: 319589 - DNA, 15 bp, Homo sapiens
gagcccccactagga

SEQ ID NO: 319590 - DNA, 15 bp, Homo sapiens
ggagcccccactagg

SEQ ID NO: 319591 - DNA, 15 bp, Homo sapiens
tggagcccccactag

SEQ ID NO: 319592 - DNA, 15 bp, Homo sapiens
gtggagcccccacta

SEQ ID NO: 319593 - DNA, 15 bp, Homo sapiens
agtggagcccccact

SEQ ID NO: 319594 - DNA, 15 bp, Homo sapiens
cagtggagcccccac

SEQ ID NO: 319595 - DNA, 15 bp, Homo sapiens
tcagtggagccccca

SEQ ID NO: 319596 - DNA, 15 bp, Homo sapiens
ctcagtggagccccc

SEQ ID NO: 319597 - DNA, 15 bp, Homo sapiens
gctcagtggagcccc

SEQ ID NO: 319598 - DNA, 15 bp, Homo sapiens
tgctcagtggagccc

SEQ ID NO: 319599 - DNA, 15 bp, Homo sapiens
ctgctcagtggagcc

SEQ ID NO: 319600 - DNA, 15 bp, Homo sapiens
cctgctcagtggagc

SEQ ID NO: 319601 - DNA, 15 bp, Homo sapiens
acctgctcagtggag

SEQ ID NO: 319602 - DNA, 15 bp, Homo sapiens
gacctgctcagtgga

SEQ ID NO: 319603 - DNA, 15 bp, Homo sapiens
tgacctgctcagtgg

SEQ ID NO: 319604 - DNA, 15 bp, Homo sapiens
atgacctgctcagtg

SEQ ID NO: 319605 - DNA, 15 bp, Homo sapiens
catgacctgctcagt

SEQ ID NO: 319606 - DNA, 15 bp, Homo sapiens
acatgacctgctcag

SEQ ID NO: 319607 - DNA, 15 bp, Homo sapiens
aacatgacctgctca

SEQ ID NO: 319608 - DNA, 15 bp, Homo sapiens
gaacatgacctgctc

SEQ ID NO: 319609 - DNA, 15 bp, Homo sapiens
ggaacatgacctgct

SEQ ID NO: 319610 - DNA, 15 bp, Homo sapiens
gggaacatgacctgc

SEQ ID NO: 319611 - DNA, 15 bp, Homo sapiens
cgggaacatgacctg

SEQ ID NO: 319612 - DNA, 15 bp, Homo sapiens
ccgggaacatgacct

SEQ ID NO: 319613 - DNA, 15 bp, Homo sapiens
tccgggaacatgacc

SEQ ID NO: 319614 - DNA, 15 bp, Homo sapiens
gtccgggaacatgac

SEQ ID NO: 319615 - DNA, 15 bp, Homo sapiens
tgtccgggaacatga

SEQ ID NO: 319616 - DNA, 15 bp, Homo sapiens
atgtccgggaacatg

SEQ ID NO: 319617 - DNA, 15 bp, Homo sapiens
aatgtccgggaacat

SEQ ID NO: 319618 - DNA, 15 bp, Homo sapiens
aaatgtccgggaaca

SEQ ID NO: 319619 - DNA, 15 bp, Homo sapiens
caaatgtccgggaac

SEQ ID NO: 319620 - DNA, 15 bp, Homo sapiens
acaaatgtccgggaa

SEQ ID NO: 319621 - DNA, 15 bp, Homo sapiens
aacaaatgtccggga

SEQ ID NO: 319622 - DNA, 15 bp, Homo sapiens
gaacaaatgtccggg

SEQ ID NO: 319623 - DNA, 15 bp, Homo sapiens
cgaacaaatgtccgg

SEQ ID NO: 319624 - DNA, 15 bp, Homo sapiens
ccgaacaaatgtccg

SEQ ID NO: 319625 - DNA, 15 bp, Homo sapiens
tccgaacaaatgtcc

SEQ ID NO: 319626 - DNA, 15 bp, Homo sapiens
atccgaacaaatgtc

SEQ ID NO: 319627 - DNA, 15 bp, Homo sapiens
tatccgaacaaatgt

SEQ ID NO: 319628 - DNA, 15 bp, Homo sapiens
gtatccgaacaaatg

SEQ ID NO: 319629 - DNA, 15 bp, Homo sapiens
agtatccgaacaaat

SEQ ID NO: 319630 - DNA, 15 bp, Homo sapiens
cagtatccgaacaaa

SEQ ID NO: 319631 - DNA, 15 bp, Homo sapiens
tcagtatccgaacaa

SEQ ID NO: 319632 - DNA, 15 bp, Homo sapiens
gtcagtatccgaaca

SEQ ID NO: 319633 - DNA, 15 bp, Homo sapiens
ggtcagtatccgaac

SEQ ID NO: 319634 - DNA, 15 bp, Homo sapiens
tggtcagtatccgaa

SEQ ID NO: 319635 - DNA, 15 bp, Homo sapiens
ctggtcagtatccga

SEQ ID NO: 319636 - DNA, 15 bp, Homo sapiens
cctggtcagtatccg

SEQ ID NO: 319637 - DNA, 15 bp, Homo sapiens
gcctggtcagtatcc

SEQ ID NO: 319638 - DNA, 15 bp, Homo sapiens
agcctggtcagtatc

SEQ ID NO: 319639 - DNA, 15 bp, Homo sapiens
cagcctggtcagtat

SEQ ID NO: 319640 - DNA, 15 bp, Homo sapiens
acagcctggtcagta

SEQ ID NO: 319641 - DNA, 15 bp, Homo sapiens
cacagcctggtcagt

SEQ ID NO: 319642 - DNA, 15 bp, Homo sapiens
ccacagcctggtcag

SEQ ID NO: 319643 - DNA, 15 bp, Homo sapiens
gccacagcctggtca

SEQ ID NO: 319644 - DNA, 15 bp, Homo sapiens
tgccacagcctggtc

SEQ ID NO: 319645 - DNA, 15 bp, Homo sapiens
ctgccacagcctggt

SEQ ID NO: 319646 - DNA, 15 bp, Homo sapiens
cctgccacagcctgg

SEQ ID NO: 319647 - DNA, 15 bp, Homo sapiens
ccctgccacagcctg

SEQ ID NO: 319648 - DNA, 15 bp, Homo sapiens
tccctgccacagcct

SEQ ID NO: 319649 - DNA, 15 bp, Homo sapiens
ctccctgccacagcc

SEQ ID NO: 319650 - DNA, 15 bp, Homo sapiens
actccctgccacagc

SEQ ID NO: 319651 - DNA, 15 bp, Homo sapiens
cactccctgccacag

SEQ ID NO: 319652 - DNA, 15 bp, Homo sapiens
tcactccctgccaca

SEQ ID NO: 319653 - DNA, 15 bp, Homo sapiens
ctcactccctgccac

SEQ ID NO: 319654 - DNA, 15 bp, Homo sapiens
cctcactccctgcca

SEQ ID NO: 319655 - DNA, 15 bp, Homo sapiens
ccctcactccctgcc

SEQ ID NO: 319656 - DNA, 15 bp, Homo sapiens
accctcactccctgc

SEQ ID NO: 319657 - DNA, 15 bp, Homo sapiens
taccctcactccctg

SEQ ID NO: 319658 - DNA, 15 bp, Homo sapiens
ataccctcactccct

SEQ ID NO: 319659 - DNA, 15 bp, Homo sapiens
cataccctcactccc

SEQ ID NO: 319660 - DNA, 15 bp, Homo sapiens
ccataccctcactcc

SEQ ID NO: 319661 - DNA, 15 bp, Homo sapiens
tccataccctcactc

SEQ ID NO: 319662 - DNA, 15 bp, Homo sapiens
ctccataccctcact

SEQ ID NO: 319663 - DNA, 15 bp, Homo sapiens
actccataccctcac

SEQ ID NO: 319664 - DNA, 15 bp, Homo sapiens
cactccataccctca

SEQ ID NO: 319665 - DNA, 15 bp, Homo sapiens
tcactccataccctc

SEQ ID NO: 319666 - DNA, 15 bp, Homo sapiens
gtcactccataccct

SEQ ID NO: 319667 - DNA, 15 bp, Homo sapiens
ggtcactccataccc

SEQ ID NO: 319668 - DNA, 15 bp, Homo sapiens
aggtcactccatacc

SEQ ID NO: 319669 - DNA, 15 bp, Homo sapiens
gaggtcactccatac

SEQ ID NO: 319670 - DNA, 15 bp, Homo sapiens
agaggtcactccata

SEQ ID NO: 319671 - DNA, 15 bp, Homo sapiens
gagaggtcactccat

SEQ ID NO: 319672 - DNA, 15 bp, Homo sapiens
agagaggtcactcca

SEQ ID NO: 319673 - DNA, 15 bp, Homo sapiens
gagagaggtcactcc

SEQ ID NO: 319674 - DNA, 15 bp, Homo sapiens
ggagagaggtcactc

SEQ ID NO: 319675 - DNA, 15 bp, Homo sapiens
aggagagaggtcact

SEQ ID NO: 319676 - DNA, 15 bp, Homo sapiens
caggagagaggtcac

SEQ ID NO: 319677 - DNA, 15 bp, Homo sapiens
gcaggagagaggtca

SEQ ID NO: 319678 - DNA, 15 bp, Homo sapiens
ggcaggagagaggtc

SEQ ID NO: 319679 - DNA, 15 bp, Homo sapiens
gggcaggagagaggt

SEQ ID NO: 319680 - DNA, 15 bp, Homo sapiens
tgggcaggagagagg

SEQ ID NO: 319681 - DNA, 15 bp, Homo sapiens
ctgggcaggagagag

SEQ ID NO: 319682 - DNA, 15 bp, Homo sapiens
tctgggcaggagaga

SEQ ID NO: 319683 - DNA, 15 bp, Homo sapiens
ttctgggcaggagag

SEQ ID NO: 319684 - DNA, 15 bp, Homo sapiens
tttctgggcaggaga

SEQ ID NO: 319685 - DNA, 15 bp, Homo sapiens
ctttctgggcaggag

SEQ ID NO: 319686 - DNA, 15 bp, Homo sapiens
cctttctgggcagga

SEQ ID NO: 319687 - DNA, 15 bp, Homo sapiens
ccctttctgggcagg

SEQ ID NO: 319688 - DNA, 15 bp, Homo sapiens
gccctttctgggcag

SEQ ID NO: 319689 - DNA, 15 bp, Homo sapiens
cgccctttctgggca

SEQ ID NO: 319690 - DNA, 15 bp, Homo sapiens
gcgccctttctgggc

SEQ ID NO: 319691 - DNA, 15 bp, Homo sapiens
tgcgccctttctggg

SEQ ID NO: 319692 - DNA, 15 bp, Homo sapiens
ctgcgccctttctgg

SEQ ID NO: 319693 - DNA, 15 bp, Homo sapiens
gctgcgccctttctg

SEQ ID NO: 319694 - DNA, 15 bp, Homo sapiens
agctgcgccctttct

SEQ ID NO: 319695 - DNA, 15 bp, Homo sapiens
cagctgcgccctttc

SEQ ID NO: 319696 - DNA, 15 bp, Homo sapiens
ccagctgcgcccttt

SEQ ID NO: 319697 - DNA, 15 bp, Homo sapiens
cccagctgcgccctt

SEQ ID NO: 319698 - DNA, 15 bp, Homo sapiens
acccagctgcgccct

SEQ ID NO: 319699 - DNA, 15 bp, Homo sapiens
aacccagctgcgccc

SEQ ID NO: 319700 - DNA, 15 bp, Homo sapiens
gaacccagctgcgcc

SEQ ID NO: 319701 - DNA, 15 bp, Homo sapiens
ggaacccagctgcgc

SEQ ID NO: 319702 - DNA, 15 bp, Homo sapiens
gggaacccagctgcg

SEQ ID NO: 319703 - DNA, 15 bp, Homo sapiens
tgggaacccagctgc

SEQ ID NO: 319704 - DNA, 15 bp, Homo sapiens
ttgggaacccagctg

SEQ ID NO: 319705 - DNA, 15 bp, Homo sapiens
cttgggaacccagct

SEQ ID NO: 319706 - DNA, 15 bp, Homo sapiens
ccttgggaacccagc

SEQ ID NO: 319707 - DNA, 15 bp, Homo sapiens
gccttgggaacccag

SEQ ID NO: 319708 - DNA, 15 bp, Homo sapiens
tgccttgggaaccca

SEQ ID NO: 319709 - DNA, 15 bp, Homo sapiens
ctgccttgggaaccc

SEQ ID NO: 319710 - DNA, 15 bp, Homo sapiens
tctgccttgggaacc

SEQ ID NO: 319711 - DNA, 15 bp, Homo sapiens
atctgccttgggaac

SEQ ID NO: 319712 - DNA, 15 bp, Homo sapiens
tatctgccttgggaa

SEQ ID NO: 319713 - DNA, 15 bp, Homo sapiens
gtatctgccttggga

SEQ ID NO: 319714 - DNA, 15 bp, Homo sapiens
tgtatctgccttggg

SEQ ID NO: 319715 - DNA, 15 bp, Homo sapiens
ctgtatctgccttgg

SEQ ID NO: 319716 - DNA, 15 bp, Homo sapiens
cctgtatctgccttg

SEQ ID NO: 319717 - DNA, 15 bp, Homo sapiens
gcctgtatctgcctt

SEQ ID NO: 319718 - DNA, 15 bp, Homo sapiens
tgcctgtatctgcct

SEQ ID NO: 319719 - DNA, 15 bp, Homo sapiens
gtgcctgtatctgcc

SEQ ID NO: 319720 - DNA, 15 bp, Homo sapiens
tgtgcctgtatctgc

SEQ ID NO: 319721 - DNA, 15 bp, Homo sapiens
atgtgcctgtatctg

SEQ ID NO: 319722 - DNA, 15 bp, Homo sapiens
catgtgcctgtatct

SEQ ID NO: 319723 - DNA, 15 bp, Homo sapiens
ccatgtgcctgtatc

SEQ ID NO: 319724 - DNA, 15 bp, Homo sapiens
tccatgtgcctgtat

SEQ ID NO: 319725 - DNA, 15 bp, Homo sapiens
ctccatgtgcctgta

SEQ ID NO: 319726 - DNA, 15 bp, Homo sapiens
cctccatgtgcctgt

SEQ ID NO: 319727 - DNA, 15 bp, Homo sapiens
ccctccatgtgcctg

SEQ ID NO: 319728 - DNA, 15 bp, Homo sapiens
tccctccatgtgcct

SEQ ID NO: 319729 - DNA, 15 bp, Homo sapiens
ttccctccatgtgcc

SEQ ID NO: 319730 - DNA, 15 bp, Homo sapiens
cttccctccatgtgc

SEQ ID NO: 319731 - DNA, 15 bp, Homo sapiens
gcttccctccatgtg

SEQ ID NO: 319732 - DNA, 15 bp, Homo sapiens
ggcttccctccatgt

SEQ ID NO: 319733 - DNA, 15 bp, Homo sapiens
aggcttccctccatg

SEQ ID NO: 319734 - DNA, 15 bp, Homo sapiens
caggcttccctccat

SEQ ID NO: 319735 - DNA, 15 bp, Homo sapiens
ccaggcttccctcca

SEQ ID NO: 319736 - DNA, 15 bp, Homo sapiens
cccaggcttccctcc

SEQ ID NO: 319737 - DNA, 15 bp, Homo sapiens
gcccaggcttccctc

SEQ ID NO: 319738 - DNA, 15 bp, Homo sapiens
ggcccaggcttccct

SEQ ID NO: 319739 - DNA, 15 bp, Homo sapiens
tggcccaggcttccc

SEQ ID NO: 319740 - DNA, 15 bp, Homo sapiens
atggcccaggcttcc

SEQ ID NO: 319741 - DNA, 15 bp, Homo sapiens
tatggcccaggcttc

SEQ ID NO: 319742 - DNA, 15 bp, Homo sapiens
atatggcccaggctt

SEQ ID NO: 319743 - DNA, 15 bp, Homo sapiens
catatggcccaggct

SEQ ID NO: 319744 - DNA, 15 bp, Homo sapiens
tcatatggcccaggc

SEQ ID NO: 319745 - DNA, 15 bp, Homo sapiens
ctcatatggcccagg

SEQ ID NO: 319746 - DNA, 15 bp, Homo sapiens
actcatatggcccag

SEQ ID NO: 319747 - DNA, 15 bp, Homo sapiens
cactcatatggccca

SEQ ID NO: 319748 - DNA, 15 bp, Homo sapiens
acactcatatggccc

SEQ ID NO: 319749 - DNA, 15 bp, Homo sapiens
aacactcatatggcc

SEQ ID NO: 319750 - DNA, 15 bp, Homo sapiens
taacactcatatggc

SEQ ID NO: 319751 - DNA, 15 bp, Homo sapiens
ataacactcatatgg

SEQ ID NO: 319752 - DNA, 15 bp, Homo sapiens
cataacactcatatg

SEQ ID NO: 319753 - DNA, 15 bp, Homo sapiens
ccataacactcatat

SEQ ID NO: 319754 - DNA, 15 bp, Homo sapiens
cccataacactcata

SEQ ID NO: 319755 - DNA, 15 bp, Homo sapiens
ccccataacactcat

SEQ ID NO: 319756 - DNA, 15 bp, Homo sapiens
accccataacactca

SEQ ID NO: 319757 - DNA, 15 bp, Homo sapiens
caccccataacactc

SEQ ID NO: 319758 - DNA, 15 bp, Homo sapiens
tcaccccataacact

SEQ ID NO: 319759 - DNA, 15 bp, Homo sapiens
ctcaccccataacac

SEQ ID NO: 319760 - DNA, 15 bp, Homo sapiens
actcaccccataaca

SEQ ID NO: 319761 - DNA, 15 bp, Homo sapiens
cactcaccccataac

SEQ ID NO: 319762 - DNA, 15 bp, Homo sapiens
acactcaccccataa

SEQ ID NO: 319763 - DNA, 15 bp, Homo sapiens
aacactcaccccata

SEQ ID NO: 319764 - DNA, 15 bp, Homo sapiens
caacactcaccccat

SEQ ID NO: 319765 - DNA, 15 bp, Homo sapiens
ccaacactcacccca

SEQ ID NO: 319766 - DNA, 15 bp, Homo sapiens
gccaacactcacccc

SEQ ID NO: 319767 - DNA, 15 bp, Homo sapiens
cgccaacactcaccc

SEQ ID NO: 319768 - DNA, 15 bp, Homo sapiens
ccgccaacactcacc

SEQ ID NO: 319769 - DNA, 15 bp, Homo sapiens
tccgccaacactcac

SEQ ID NO: 319770 - DNA, 15 bp, Homo sapiens
ctccgccaacactca

SEQ ID NO: 319771 - DNA, 15 bp, Homo sapiens
cctccgccaacactc

SEQ ID NO: 319772 - DNA, 15 bp, Homo sapiens
gcctccgccaacact

SEQ ID NO: 319773 - DNA, 15 bp, Homo sapiens
ggcctccgccaacac

SEQ ID NO: 319774 - DNA, 15 bp, Homo sapiens
gggcctccgccaaca

SEQ ID NO: 319775 - DNA, 15 bp, Homo sapiens
tgggcctccgccaac

SEQ ID NO: 319776 - DNA, 15 bp, Homo sapiens
gtgggcctccgccaa

SEQ ID NO: 319777 - DNA, 15 bp, Homo sapiens
ggtgggcctccgcca

SEQ ID NO: 319778 - DNA, 15 bp, Homo sapiens
gggtgggcctccgcc

SEQ ID NO: 319779 - DNA, 15 bp, Homo sapiens
agggtgggcctccgc

SEQ ID NO: 319780 - DNA, 15 bp, Homo sapiens
aagggtgggcctccg

SEQ ID NO: 319781 - DNA, 15 bp, Homo sapiens
caagggtgggcctcc

SEQ ID NO: 319782 - DNA, 15 bp, Homo sapiens
tcaagggtgggcctc

SEQ ID NO: 319783 - DNA, 15 bp, Homo sapiens
ctcaagggtgggcct

SEQ ID NO: 319784 - DNA, 15 bp, Homo sapiens
cctcaagggtgggcc

SEQ ID NO: 319785 - DNA, 15 bp, Homo sapiens
ccctcaagggtgggc

SEQ ID NO: 319786 - DNA, 15 bp, Homo sapiens
tccctcaagggtggg

SEQ ID NO: 319787 - DNA, 15 bp, Homo sapiens
gtccctcaagggtgg

SEQ ID NO: 319788 - DNA, 15 bp, Homo sapiens
tgtccctcaagggtg

SEQ ID NO: 319789 - DNA, 15 bp, Homo sapiens
ttgtccctcaagggt

SEQ ID NO: 319790 - DNA, 15 bp, Homo sapiens
cttgtccctcaaggg

SEQ ID NO: 319791 - DNA, 15 bp, Homo sapiens
tcttgtccctcaagg

SEQ ID NO: 319792 - DNA, 15 bp, Homo sapiens
ctcttgtccctcaag

SEQ ID NO: 319793 - DNA, 15 bp, Homo sapiens
gctcttgtccctcaa

SEQ ID NO: 319794 - DNA, 15 bp, Homo sapiens
tgctcttgtccctca

SEQ ID NO: 319795 - DNA, 15 bp, Homo sapiens
ctgctcttgtccctc

SEQ ID NO: 319796 - DNA, 15 bp, Homo sapiens
gctgctcttgtccct

SEQ ID NO: 319797 - DNA, 15 bp, Homo sapiens
agctgctcttgtccc

SEQ ID NO: 319798 - DNA, 15 bp, Homo sapiens
cagctgctcttgtcc

SEQ ID NO: 319799 - DNA, 15 bp, Homo sapiens
ccagctgctcttgtc

SEQ ID NO: 319800 - DNA, 15 bp, Homo sapiens
cccagctgctcttgt

SEQ ID NO: 319801 - DNA, 15 bp, Homo sapiens
gcccagctgctcttg

SEQ ID NO: 319802 - DNA, 15 bp, Homo sapiens
tgcccagctgctctt

SEQ ID NO: 319803 - DNA, 15 bp, Homo sapiens
atgcccagctgctct

SEQ ID NO: 319804 - DNA, 15 bp, Homo sapiens
gatgcccagctgctc

SEQ ID NO: 319805 - DNA, 15 bp, Homo sapiens
agatgcccagctgct

SEQ ID NO: 319806 - DNA, 15 bp, Homo sapiens
aagatgcccagctgc

SEQ ID NO: 319807 - DNA, 15 bp, Homo sapiens
caagatgcccagctg

SEQ ID NO: 319808 - DNA, 15 bp, Homo sapiens
ccaagatgcccagct

SEQ ID NO: 319809 - DNA, 15 bp, Homo sapiens
gccaagatgcccagc

SEQ ID NO: 319810 - DNA, 15 bp, Homo sapiens
cgccaagatgcccag

SEQ ID NO: 319811 - DNA, 15 bp, Homo sapiens
tcgccaagatgccca

SEQ ID NO: 319812 - DNA, 15 bp, Homo sapiens
ctcgccaagatgccc

SEQ ID NO: 319813 - DNA, 15 bp, Homo sapiens
tctcgccaagatgcc

SEQ ID NO: 319814 - DNA, 15 bp, Homo sapiens
ctctcgccaagatgc

SEQ ID NO: 319815 - DNA, 15 bp, Homo sapiens
gctctcgccaagatg

SEQ ID NO: 319816 - DNA, 15 bp, Homo sapiens
ggctctcgccaagat

SEQ ID NO: 319817 - DNA, 15 bp, Homo sapiens
gggctctcgccaaga

SEQ ID NO: 319818 - DNA, 15 bp, Homo sapiens
agggctctcgccaag

SEQ ID NO: 319819 - DNA, 15 bp, Homo sapiens
cagggctctcgccaa

SEQ ID NO: 319820 - DNA, 15 bp, Homo sapiens
ccagggctctcgcca

SEQ ID NO: 319821 - DNA, 15 bp, Homo sapiens
tccagggctctcgcc

SEQ ID NO: 319822 - DNA, 15 bp, Homo sapiens
gtccagggctctcgc

SEQ ID NO: 319823 - DNA, 15 bp, Homo sapiens
agtccagggctctcg

SEQ ID NO: 319824 - DNA, 15 bp, Homo sapiens
aagtccagggctctc

SEQ ID NO: 319825 - DNA, 15 bp, Homo sapiens
aaagtccagggctct

SEQ ID NO: 319826 - DNA, 15 bp, Homo sapiens
gaaagtccagggctc

SEQ ID NO: 319827 - DNA, 15 bp, Homo sapiens
cgaaagtccagggct

SEQ ID NO: 319828 - DNA, 15 bp, Homo sapiens
acgaaagtccagggc

SEQ ID NO: 319829 - DNA, 15 bp, Homo sapiens
cacgaaagtccaggg

SEQ ID NO: 319830 - DNA, 15 bp, Homo sapiens
tcacgaaagtccagg

SEQ ID NO: 319831 - DNA, 15 bp, Homo sapiens
ctcacgaaagtccag

SEQ ID NO: 319832 - DNA, 15 bp, Homo sapiens
cctcacgaaagtcca

SEQ ID NO: 319833 - DNA, 15 bp, Homo sapiens
acctcacgaaagtcc

SEQ ID NO: 319834 - DNA, 15 bp, Homo sapiens
gacctcacgaaagtc

SEQ ID NO: 319835 - DNA, 15 bp, Homo sapiens
tgacctcacgaaagt

SEQ ID NO: 319836 - DNA, 15 bp, Homo sapiens
ctgacctcacgaaag

SEQ ID NO: 319837 - DNA, 15 bp, Homo sapiens
tctgacctcacgaaa

SEQ ID NO: 319838 - DNA, 15 bp, Homo sapiens
ctctgacctcacgaa

SEQ ID NO: 319839 - DNA, 15 bp, Homo sapiens
actctgacctcacga

SEQ ID NO: 319840 - DNA, 15 bp, Homo sapiens
tactctgacctcacg

SEQ ID NO: 319841 - DNA, 15 bp, Homo sapiens
atactctgacctcac

SEQ ID NO: 319842 - DNA, 15 bp, Homo sapiens
catactctgacctca

SEQ ID NO: 319843 - DNA, 15 bp, Homo sapiens
tcatactctgacctc

SEQ ID NO: 319844 - DNA, 15 bp, Homo sapiens
ttcatactctgacct

SEQ ID NO: 319845 - DNA, 15 bp, Homo sapiens
attcatactctgacc

SEQ ID NO: 319846 - DNA, 15 bp, Homo sapiens
aattcatactctgac

SEQ ID NO: 319847 - DNA, 15 bp, Homo sapiens
gaattcatactctga

SEQ ID NO: 319848 - DNA, 15 bp, Homo sapiens
agaattcatactctg

SEQ ID NO: 319849 - DNA, 15 bp, Homo sapiens
cagaattcatactct

SEQ ID NO: 319850 - DNA, 15 bp, Homo sapiens
gcagaattcatactc

SEQ ID NO: 319851 - DNA, 15 bp, Homo sapiens
cgcagaattcatact

SEQ ID NO: 319852 - DNA, 15 bp, Homo sapiens
acgcagaattcatac

SEQ ID NO: 319853 - DNA, 15 bp, Homo sapiens
gacgcagaattcata

SEQ ID NO: 319854 - DNA, 15 bp, Homo sapiens
agacgcagaattcat

SEQ ID NO: 319855 - DNA, 15 bp, Homo sapiens
gagacgcagaattca

SEQ ID NO: 319856 - DNA, 15 bp, Homo sapiens
ggagacgcagaattc

SEQ ID NO: 319857 - DNA, 15 bp, Homo sapiens
gggagacgcagaatt

SEQ ID NO: 319858 - DNA, 15 bp, Homo sapiens
agggagacgcagaat

SEQ ID NO: 319859 - DNA, 15 bp, Homo sapiens
gagggagacgcagaa

SEQ ID NO: 319860 - DNA, 15 bp, Homo sapiens
agagggagacgcaga

SEQ ID NO: 319861 - DNA, 15 bp, Homo sapiens
aagagggagacgcag

SEQ ID NO: 319862 - DNA, 15 bp, Homo sapiens
gaagagggagacgca

SEQ ID NO: 319863 - DNA, 15 bp, Homo sapiens
ggaagagggagacgc

SEQ ID NO: 319864 - DNA, 15 bp, Homo sapiens
aggaagagggagacg

SEQ ID NO: 319865 - DNA, 15 bp, Homo sapiens
taggaagagggagac

SEQ ID NO: 319866 - DNA, 15 bp, Homo sapiens
ctaggaagagggaga

SEQ ID NO: 319867 - DNA, 15 bp, Homo sapiens
gctaggaagagggag

SEQ ID NO: 319868 - DNA, 15 bp, Homo sapiens
agctaggaagaggga

SEQ ID NO: 319869 - DNA, 15 bp, Homo sapiens
aagctaggaagaggg

SEQ ID NO: 319870 - DNA, 15 bp, Homo sapiens
aaagctaggaagagg

SEQ ID NO: 319871 - DNA, 15 bp, Homo sapiens
caaagctaggaagag

SEQ ID NO: 319872 - DNA, 15 bp, Homo sapiens
acaaagctaggaaga

SEQ ID NO: 319873 - DNA, 15 bp, Homo sapiens
cacaaagctaggaag

SEQ ID NO: 319874 - DNA, 15 bp, Homo sapiens
tcacaaagctaggaa

SEQ ID NO: 319875 - DNA, 15 bp, Homo sapiens
gtcacaaagctagga

SEQ ID NO: 319876 - DNA, 15 bp, Homo sapiens
ggtcacaaagctagg

SEQ ID NO: 319877 - DNA, 15 bp, Homo sapiens
gggtcacaaagctag

SEQ ID NO: 319878 - DNA, 15 bp, Homo sapiens
agggtcacaaagcta

SEQ ID NO: 319879 - DNA, 15 bp, Homo sapiens
tagggtcacaaagct

SEQ ID NO: 319880 - DNA, 15 bp, Homo sapiens
ctagggtcacaaagc

SEQ ID NO: 319881 - DNA, 15 bp, Homo sapiens
tctagggtcacaaag

SEQ ID NO: 319882 - DNA, 15 bp, Homo sapiens
gtctagggtcacaaa

SEQ ID NO: 319883 - DNA, 15 bp, Homo sapiens
tgtctagggtcacaa

SEQ ID NO: 319884 - DNA, 15 bp, Homo sapiens
ttgtctagggtcaca

SEQ ID NO: 319885 - DNA, 15 bp, Homo sapiens
gttgtctagggtcac

SEQ ID NO: 319886 - DNA, 15 bp, Homo sapiens
ggttgtctagggtca

SEQ ID NO: 319887 - DNA, 15 bp, Homo sapiens
gggttgtctagggtc

SEQ ID NO: 319888 - DNA, 15 bp, Homo sapiens
agggttgtctagggt

SEQ ID NO: 319889 - DNA, 15 bp, Homo sapiens
aagggttgtctaggg

SEQ ID NO: 319890 - DNA, 15 bp, Homo sapiens
taagggttgtctagg

SEQ ID NO: 319891 - DNA, 15 bp, Homo sapiens
gtaagggttgtctag

SEQ ID NO: 319892 - DNA, 15 bp, Homo sapiens
ggtaagggttgtcta

SEQ ID NO: 319893 - DNA, 15 bp, Homo sapiens
aggtaagggttgtct

SEQ ID NO: 319894 - DNA, 15 bp, Homo sapiens
gaggtaagggttgtc

SEQ ID NO: 319895 - DNA, 15 bp, Homo sapiens
tgaggtaagggttgt

SEQ ID NO: 319896 - DNA, 15 bp, Homo sapiens
ctgaggtaagggttg

SEQ ID NO: 319897 - DNA, 15 bp, Homo sapiens
actgaggtaagggtt

SEQ ID NO: 319898 - DNA, 15 bp, Homo sapiens
gactgaggtaagggt

SEQ ID NO: 319899 - DNA, 15 bp, Homo sapiens
agactgaggtaaggg

SEQ ID NO: 319900 - DNA, 15 bp, Homo sapiens
aagactgaggtaagg

SEQ ID NO: 319901 - DNA, 15 bp, Homo sapiens
aaagactgaggtaag

SEQ ID NO: 319902 - DNA, 15 bp, Homo sapiens
caaagactgaggtaa

SEQ ID NO: 319903 - DNA, 15 bp, Homo sapiens
gcaaagactgaggta

SEQ ID NO: 319904 - DNA, 15 bp, Homo sapiens
agcaaagactgaggt

SEQ ID NO: 319905 - DNA, 15 bp, Homo sapiens
aagcaaagactgagg

SEQ ID NO: 319906 - DNA, 15 bp, Homo sapiens
gaagcaaagactgag

SEQ ID NO: 319907 - DNA, 15 bp, Homo sapiens
ggaagcaaagactga

SEQ ID NO: 319908 - DNA, 15 bp, Homo sapiens
aggaagcaaagactg

SEQ ID NO: 319909 - DNA, 15 bp, Homo sapiens
aaggaagcaaagact

SEQ ID NO: 319910 - DNA, 15 bp, Homo sapiens
caaggaagcaaagac

SEQ ID NO: 319911 - DNA, 15 bp, Homo sapiens
gcaaggaagcaaaga

SEQ ID NO: 319912 - DNA, 15 bp, Homo sapiens
ggcaaggaagcaaag

SEQ ID NO: 319913 - DNA, 15 bp, Homo sapiens
aggcaaggaagcaaa

SEQ ID NO: 319914 - DNA, 15 bp, Homo sapiens
taggcaaggaagcaa

SEQ ID NO: 319915 - DNA, 15 bp, Homo sapiens
ataggcaaggaagca

SEQ ID NO: 319916 - DNA, 15 bp, Homo sapiens
cataggcaaggaagc

SEQ ID NO: 319917 - DNA, 15 bp, Homo sapiens
tcataggcaaggaag

SEQ ID NO: 319918 - DNA, 15 bp, Homo sapiens
ttcataggcaaggaa

SEQ ID NO: 319919 - DNA, 15 bp, Homo sapiens
tttcataggcaagga

SEQ ID NO: 319920 - DNA, 15 bp, Homo sapiens
atttcataggcaagg

SEQ ID NO: 319921 - DNA, 15 bp, Homo sapiens
catttcataggcaag

SEQ ID NO: 319922 - DNA, 15 bp, Homo sapiens
ccatttcataggcaa

SEQ ID NO: 319923 - DNA, 15 bp, Homo sapiens
cccatttcataggca

SEQ ID NO: 319924 - DNA, 15 bp, Homo sapiens
tcccatttcataggc

SEQ ID NO: 319925 - DNA, 15 bp, Homo sapiens
atcccatttcatagg

SEQ ID NO: 319926 - DNA, 15 bp, Homo sapiens
tatcccatttcatag

SEQ ID NO: 319927 - DNA, 15 bp, Homo sapiens
ttatcccatttcata

SEQ ID NO: 319928 - DNA, 15 bp, Homo sapiens
tttatcccatttcat

SEQ ID NO: 319929 - DNA, 15 bp, Homo sapiens
ttttatcccatttca

SEQ ID NO: 319930 - DNA, 15 bp, Homo sapiens
tttttatcccatttc

SEQ ID NO: 319931 - DNA, 15 bp, Homo sapiens
gtttttatcccattt

SEQ ID NO: 319932 - DNA, 15 bp, Homo sapiens
tgtttttatcccatt

SEQ ID NO: 319933 - DNA, 15 bp, Homo sapiens
gtgtttttatcccat

SEQ ID NO: 319934 - DNA, 15 bp, Homo sapiens
ggtgtttttatccca

SEQ ID NO: 319935 - DNA, 15 bp, Homo sapiens
gggtgtttttatccc

SEQ ID NO: 319936 - DNA, 15 bp, Homo sapiens
tgggtgtttttatcc

SEQ ID NO: 319937 - DNA, 15 bp, Homo sapiens
atgggtgtttttatc

SEQ ID NO: 319938 - DNA, 15 bp, Homo sapiens
aatgggtgtttttat

SEQ ID NO: 319939 - DNA, 15 bp, Homo sapiens
gaatgggtgttttta

SEQ ID NO: 319940 - DNA, 15 bp, Homo sapiens
agaatgggtgttttt

SEQ ID NO: 319941 - DNA, 15 bp, Homo sapiens
tagaatgggtgtttt

SEQ ID NO: 319942 - DNA, 15 bp, Homo sapiens
gtagaatgggtgttt

SEQ ID NO: 319943 - DNA, 15 bp, Homo sapiens
tgtagaatgggtgtt

SEQ ID NO: 319944 - DNA, 15 bp, Homo sapiens
ctgtagaatgggtgt

SEQ ID NO: 319945 - DNA, 15 bp, Homo sapiens
cctgtagaatgggtg

SEQ ID NO: 319946 - DNA, 15 bp, Homo sapiens
ccctgtagaatgggt

SEQ ID NO: 319947 - DNA, 15 bp, Homo sapiens
gccctgtagaatggg

SEQ ID NO: 319948 - DNA, 15 bp, Homo sapiens
ggccctgtagaatgg

SEQ ID NO: 319949 - DNA, 15 bp, Homo sapiens
tggccctgtagaatg

SEQ ID NO: 319950 - DNA, 15 bp, Homo sapiens
atggccctgtagaat

SEQ ID NO: 319951 - DNA, 15 bp, Homo sapiens
catggccctgtagaa

SEQ ID NO: 319952 - DNA, 15 bp, Homo sapiens
acatggccctgtaga

SEQ ID NO: 319953 - DNA, 15 bp, Homo sapiens
cacatggccctgtag

SEQ ID NO: 319954 - DNA, 15 bp, Homo sapiens
ccacatggccctgta

SEQ ID NO: 319955 - DNA, 15 bp, Homo sapiens
gccacatggccctgt

SEQ ID NO: 319956 - DNA, 15 bp, Homo sapiens
ggccacatggccctg

SEQ ID NO: 319957 - DNA, 15 bp, Homo sapiens
tggccacatggccct

SEQ ID NO: 319958 - DNA, 15 bp, Homo sapiens
gtggccacatggccc

SEQ ID NO: 319959 - DNA, 15 bp, Homo sapiens
agtggccacatggcc

SEQ ID NO: 319960 - DNA, 15 bp, Homo sapiens
gagtggccacatggc

SEQ ID NO: 319961 - DNA, 15 bp, Homo sapiens
tgagtggccacatgg

SEQ ID NO: 319962 - DNA, 15 bp, Homo sapiens
atgagtggccacatg

SEQ ID NO: 319963 - DNA, 15 bp, Homo sapiens
aatgagtggccacat

SEQ ID NO: 319964 - DNA, 15 bp, Homo sapiens
aaatgagtggccaca

SEQ ID NO: 319965 - DNA, 15 bp, Homo sapiens
taaatgagtggccac

SEQ ID NO: 319966 - DNA, 15 bp, Homo sapiens
ataaatgagtggcca

SEQ ID NO: 319967 - DNA, 15 bp, Homo sapiens
aataaatgagtggcc

SEQ ID NO: 319968 - DNA, 15 bp, Homo sapiens
aaataaatgagtggc

SEQ ID NO: 319969 - DNA, 15 bp, Homo sapiens
gaaataaatgagtgg

SEQ ID NO: 319970 - DNA, 15 bp, Homo sapiens
agaaataaatgagtg

SEQ ID NO: 319971 - DNA, 15 bp, Homo sapiens
gagaaataaatgagt

SEQ ID NO: 319972 - DNA, 15 bp, Homo sapiens
tgagaaataaatgag

SEQ ID NO: 319973 - DNA, 15 bp, Homo sapiens
atgagaaataaatga

SEQ ID NO: 319974 - DNA, 15 bp, Homo sapiens
gatgagaaataaatg

SEQ ID NO: 319975 - DNA, 15 bp, Homo sapiens
agatgagaaataaat

SEQ ID NO: 319976 - DNA, 15 bp, Homo sapiens
tagatgagaaataaa

SEQ ID NO: 319977 - DNA, 15 bp, Homo sapiens
gtagatgagaaataa

SEQ ID NO: 319978 - DNA, 15 bp, Homo sapiens
ggtagatgagaaata

SEQ ID NO: 319979 - DNA, 15 bp, Homo sapiens
tggtagatgagaaat

SEQ ID NO: 319980 - DNA, 15 bp, Homo sapiens
ttggtagatgagaaa

SEQ ID NO: 319981 - DNA, 15 bp, Homo sapiens
tttggtagatgagaa

SEQ ID NO: 319982 - DNA, 15 bp, Homo sapiens
gtttggtagatgaga

SEQ ID NO: 319983 - DNA, 15 bp, Homo sapiens
tgtttggtagatgag

SEQ ID NO: 319984 - DNA, 15 bp, Homo sapiens
gtgtttggtagatga

SEQ ID NO: 319985 - DNA, 15 bp, Homo sapiens
ggtgtttggtagatg

SEQ ID NO: 319986 - DNA, 15 bp, Homo sapiens
aggtgtttggtagat

SEQ ID NO: 319987 - DNA, 15 bp, Homo sapiens
taggtgtttggtaga

SEQ ID NO: 319988 - DNA, 15 bp, Homo sapiens
gtaggtgtttggtag

SEQ ID NO: 319989 - DNA, 15 bp, Homo sapiens
agtaggtgtttggta

SEQ ID NO: 319990 - DNA, 15 bp, Homo sapiens
gagtaggtgtttggt

SEQ ID NO: 319991 - DNA, 15 bp, Homo sapiens
cgagtaggtgtttgg

SEQ ID NO: 319992 - DNA, 15 bp, Homo sapiens
tcgagtaggtgtttg

SEQ ID NO: 319993 - DNA, 15 bp, Homo sapiens
gtcgagtaggtgttt

SEQ ID NO: 319994 - DNA, 15 bp, Homo sapiens
tgtcgagtaggtgtt

SEQ ID NO: 319995 - DNA, 15 bp, Homo sapiens
ctgtcgagtaggtgt

SEQ ID NO: 319996 - DNA, 15 bp, Homo sapiens
cctgtcgagtaggtg

SEQ ID NO: 319997 - DNA, 15 bp, Homo sapiens
ccctgtcgagtaggt

SEQ ID NO: 319998 - DNA, 15 bp, Homo sapiens
cccctgtcgagtagg

SEQ ID NO: 319999 - DNA, 15 bp, Homo sapiens
gcccctgtcgagtag

SEQ ID NO: 320000 - DNA, 15 bp, Homo sapiens
agcccctgtcgagta

SEQ ID NO: 320001 - DNA, 15 bp, Homo sapiens
cagcccctgtcgagt

SEQ ID NO: 320002 - DNA, 15 bp, Homo sapiens
ccagcccctgtcgag

SEQ ID NO: 320003 - DNA, 15 bp, Homo sapiens
gccagcccctgtcga

SEQ ID NO: 320004 - DNA, 15 bp, Homo sapiens
tgccagcccctgtcg

SEQ ID NO: 320005 - DNA, 15 bp, Homo sapiens
ttgccagcccctgtc

SEQ ID NO: 320006 - DNA, 15 bp, Homo sapiens
attgccagcccctgt

SEQ ID NO: 320007 - DNA, 15 bp, Homo sapiens
cattgccagcccctg

SEQ ID NO: 320008 - DNA, 15 bp, Homo sapiens
ccattgccagcccct

SEQ ID NO: 320009 - DNA, 15 bp, Homo sapiens
cccattgccagcccc

SEQ ID NO: 320010 - DNA, 15 bp, Homo sapiens
gcccattgccagccc

SEQ ID NO: 320011 - DNA, 15 bp, Homo sapiens
cgcccattgccagcc

SEQ ID NO: 320012 - DNA, 15 bp, Homo sapiens
ccgcccattgccagc

SEQ ID NO: 320013 - DNA, 15 bp, Homo sapiens
tccgcccattgccag

SEQ ID NO: 320014 - DNA, 15 bp, Homo sapiens
ttccgcccattgcca

SEQ ID NO: 320015 - DNA, 15 bp, Homo sapiens
tttccgcccattgcc

SEQ ID NO: 320016 - DNA, 15 bp, Homo sapiens
atttccgcccattgc

SEQ ID NO: 320017 - DNA, 15 bp, Homo sapiens
tatttccgcccattg

SEQ ID NO: 320018 - DNA, 15 bp, Homo sapiens
ttatttccgcccatt

SEQ ID NO: 320019 - DNA, 15 bp, Homo sapiens
tttatttccgcccat

SEQ ID NO: 320020 - DNA, 15 bp, Homo sapiens
ttttatttccgccca

SEQ ID NO: 320021 - DNA, 15 bp, Homo sapiens
tttttatttccgccc

SEQ ID NO: 320022 - DNA, 15 bp, Homo sapiens
gtttttatttccgcc

SEQ ID NO: 320023 - DNA, 15 bp, Homo sapiens
agtttttatttccgc

SEQ ID NO: 320024 - DNA, 15 bp, Homo sapiens
gagtttttatttccg

SEQ ID NO: 320025 - DNA, 15 bp, Homo sapiens
tgagtttttatttcc

SEQ ID NO: 320026 - DNA, 15 bp, Homo sapiens
ctgagtttttatttc

SEQ ID NO: 320027 - DNA, 15 bp, Homo sapiens
actgagtttttattt

SEQ ID NO: 320028 - DNA, 15 bp, Homo sapiens
aactgagtttttatt

SEQ ID NO: 320029 - DNA, 15 bp, Homo sapiens
gaactgagtttttat

SEQ ID NO: 320030 - DNA, 15 bp, Homo sapiens
agaactgagttttta

SEQ ID NO: 320031 - DNA, 15 bp, Homo sapiens
cagaactgagttttt

SEQ ID NO: 320032 - DNA, 15 bp, Homo sapiens
gcagaactgagtttt

SEQ ID NO: 320033 - DNA, 15 bp, Homo sapiens
ggcagaactgagttt

SEQ ID NO: 320034 - DNA, 15 bp, Homo sapiens
cggcagaactgagtt

SEQ ID NO: 320035 - DNA, 15 bp, Homo sapiens
ccggcagaactgagt

SEQ ID NO: 320036 - DNA, 15 bp, Homo sapiens
cccggcagaactgag

SEQ ID NO: 320037 - DNA, 15 bp, Homo sapiens
acccggcagaactga

SEQ ID NO: 320038 - DNA, 15 bp, Homo sapiens
cacccggcagaactg

SEQ ID NO: 320039 - DNA, 15 bp, Homo sapiens
gcacccggcagaact

SEQ ID NO: 320040 - DNA, 15 bp, Homo sapiens
cgcacccggcagaac

SEQ ID NO: 320041 - DNA, 15 bp, Homo sapiens
ccgcacccggcagaa

SEQ ID NO: 320042 - DNA, 15 bp, Homo sapiens
accgcacccggcaga

SEQ ID NO: 320043 - DNA, 15 bp, Homo sapiens
caccgcacccggcag

SEQ ID NO: 320044 - DNA, 15 bp, Homo sapiens
ccaccgcacccggca

SEQ ID NO: 320045 - DNA, 15 bp, Homo sapiens
gccaccgcacccggc

SEQ ID NO: 320046 - DNA, 15 bp, Homo sapiens
agccaccgcacccgg

SEQ ID NO: 320047 - DNA, 15 bp, Homo sapiens
gagccaccgcacccg

SEQ ID NO: 320048 - DNA, 15 bp, Homo sapiens
tgagccaccgcaccc

SEQ ID NO: 320049 - DNA, 15 bp, Homo sapiens
gtgagccaccgcacc

SEQ ID NO: 320050 - DNA, 15 bp, Homo sapiens
tgtgagccaccgcac

SEQ ID NO: 320051 - DNA, 15 bp, Homo sapiens
gtgtgagccaccgca

SEQ ID NO: 320052 - DNA, 15 bp, Homo sapiens
ggtgtgagccaccgc

SEQ ID NO: 320053 - DNA, 15 bp, Homo sapiens
aggtgtgagccaccg

SEQ ID NO: 320054 - DNA, 15 bp, Homo sapiens
caggtgtgagccacc

SEQ ID NO: 320055 - DNA, 15 bp, Homo sapiens
acaggtgtgagccac

SEQ ID NO: 320056 - DNA, 15 bp, Homo sapiens
tacaggtgtgagcca

SEQ ID NO: 320057 - DNA, 15 bp, Homo sapiens
ttacaggtgtgagcc

SEQ ID NO: 320058 - DNA, 15 bp, Homo sapiens
attacaggtgtgagc

SEQ ID NO: 320059 - DNA, 15 bp, Homo sapiens
gattacaggtgtgag

SEQ ID NO: 320060 - DNA, 15 bp, Homo sapiens
ggattacaggtgtga

SEQ ID NO: 320061 - DNA, 15 bp, Homo sapiens
gggattacaggtgtg

SEQ ID NO: 320062 - DNA, 15 bp, Homo sapiens
tgggattacaggtgt

SEQ ID NO: 320063 - DNA, 15 bp, Homo sapiens
ctgctgggattacag

SEQ ID NO: 320064 - DNA, 15 bp, Homo sapiens
actgctgggattaca

SEQ ID NO: 320065 - DNA, 15 bp, Homo sapiens
cactgctgggattac

SEQ ID NO: 320066 - DNA, 15 bp, Homo sapiens
acactgctgggatta

SEQ ID NO: 320067 - DNA, 15 bp, Homo sapiens
cacactgctgggatt

SEQ ID NO: 320068 - DNA, 15 bp, Homo sapiens
ccacactgctgggat

SEQ ID NO: 320069 - DNA, 15 bp, Homo sapiens
cccacactgctggga

SEQ ID NO: 320070 - DNA, 15 bp, Homo sapiens
tcccacactgctggg

SEQ ID NO: 320071 - DNA, 15 bp, Homo sapiens
ctcccacactgctgg

SEQ ID NO: 320072 - DNA, 15 bp, Homo sapiens
cctcccacactgctg

SEQ ID NO: 320073 - DNA, 15 bp, Homo sapiens
gcctcccacactgct

SEQ ID NO: 320074 - DNA, 15 bp, Homo sapiens
cgcctcccacactgc

SEQ ID NO: 320075 - DNA, 15 bp, Homo sapiens
ccgcctcccacactg

SEQ ID NO: 320076 - DNA, 15 bp, Homo sapiens
tccgcctcccacact

SEQ ID NO: 320077 - DNA, 15 bp, Homo sapiens
ctccgcctcccacac

SEQ ID NO: 320078 - DNA, 15 bp, Homo sapiens
gctccgcctcccaca

SEQ ID NO: 320079 - DNA, 15 bp, Homo sapiens
tgctccgcctcccac

SEQ ID NO: 320080 - DNA, 15 bp, Homo sapiens
ctgctccgcctccca

SEQ ID NO: 320081 - DNA, 15 bp, Homo sapiens
cctgctccgcctccc

SEQ ID NO: 320082 - DNA, 15 bp, Homo sapiens
tcctgctccgcctcc

SEQ ID NO: 320083 - DNA, 15 bp, Homo sapiens
atcctgctccgcctc

SEQ ID NO: 320084 - DNA, 15 bp, Homo sapiens
catcctgctccgcct

SEQ ID NO: 320085 - DNA, 15 bp, Homo sapiens
tcatcctgctccgcc

SEQ ID NO: 320086 - DNA, 15 bp, Homo sapiens
atcatcctgctccgc

SEQ ID NO: 320087 - DNA, 15 bp, Homo sapiens
gatcatcctgctccg

SEQ ID NO: 320088 - DNA, 15 bp, Homo sapiens
ggatcatcctgctcc

SEQ ID NO: 320089 - DNA, 15 bp, Homo sapiens
gggatcatcctgctc

SEQ ID NO: 320090 - DNA, 15 bp, Homo sapiens
agggatcatcctgct

SEQ ID NO: 320091 - DNA, 15 bp, Homo sapiens
aagggatcatcctgc

SEQ ID NO: 320092 - DNA, 15 bp, Homo sapiens
caagggatcatcctg

SEQ ID NO: 320093 - DNA, 15 bp, Homo sapiens
tcaagggatcatcct

SEQ ID NO: 320094 - DNA, 15 bp, Homo sapiens
ttcaagggatcatcc

SEQ ID NO: 320095 - DNA, 15 bp, Homo sapiens
attcaagggatcatc

SEQ ID NO: 320096 - DNA, 15 bp, Homo sapiens
gattcaagggatcat

SEQ ID NO: 320097 - DNA, 15 bp, Homo sapiens
ggattcaagggatca

SEQ ID NO: 320098 - DNA, 15 bp, Homo sapiens
tggattcaagggatc

SEQ ID NO: 320099 - DNA, 15 bp, Homo sapiens
ctggattcaagggat

SEQ ID NO: 320100 - DNA, 15 bp, Homo sapiens
cctggattcaaggga

SEQ ID NO: 320101 - DNA, 15 bp, Homo sapiens
tcctggattcaaggg

SEQ ID NO: 320102 - DNA, 15 bp, Homo sapiens
ctcctggattcaagg

SEQ ID NO: 320103 - DNA, 15 bp, Homo sapiens
actcctggattcaag

SEQ ID NO: 320104 - DNA, 15 bp, Homo sapiens
aactcctggattcaa

SEQ ID NO: 320105 - DNA, 15 bp, Homo sapiens
aaactcctggattca

SEQ ID NO: 320106 - DNA, 15 bp, Homo sapiens
caaactcctggattc

SEQ ID NO: 320107 - DNA, 15 bp, Homo sapiens
tcaaactcctggatt

SEQ ID NO: 320108 - DNA, 15 bp, Homo sapiens
ctcaaactcctggat

SEQ ID NO: 320109 - DNA, 15 bp, Homo sapiens
tctcaaactcctgga

SEQ ID NO: 320110 - DNA, 15 bp, Homo sapiens
gtctcaaactcctgg

SEQ ID NO: 320111 - DNA, 15 bp, Homo sapiens
tgctggtctcaaact

SEQ ID NO: 320112 - DNA, 15 bp, Homo sapiens
atgctggtctcaaac

SEQ ID NO: 320113 - DNA, 15 bp, Homo sapiens
tatgctggtctcaaa

SEQ ID NO: 320114 - DNA, 15 bp, Homo sapiens
ctatgctggtctcaa

SEQ ID NO: 320115 - DNA, 15 bp, Homo sapiens
cctatgctggtctca

SEQ ID NO: 320116 - DNA, 15 bp, Homo sapiens
gcctatgctggtctc

SEQ ID NO: 320117 - DNA, 15 bp, Homo sapiens
tgcctatgctggtct

SEQ ID NO: 320118 - DNA, 15 bp, Homo sapiens
ttgcctatgctggtc

SEQ ID NO: 320119 - DNA, 15 bp, Homo sapiens
gttgcctatgctggt

SEQ ID NO: 320120 - DNA, 15 bp, Homo sapiens
tgttgcctatgctgg

SEQ ID NO: 320121 - DNA, 15 bp, Homo sapiens
atgttgcctatgctg

SEQ ID NO: 320122 - DNA, 15 bp, Homo sapiens
tatgttgcctatgct

SEQ ID NO: 320123 - DNA, 15 bp, Homo sapiens
ctatgttgcctatgc

SEQ ID NO: 320124 - DNA, 15 bp, Homo sapiens
actatgttgcctatg

SEQ ID NO: 320125 - DNA, 15 bp, Homo sapiens
cactatgttgcctat

SEQ ID NO: 320126 - DNA, 15 bp, Homo sapiens
tcactatgttgccta

SEQ ID NO: 320127 - DNA, 15 bp, Homo sapiens
ctcactatgttgcct

SEQ ID NO: 320128 - DNA, 15 bp, Homo sapiens
tctcactatgttgcc

SEQ ID NO: 320129 - DNA, 15 bp, Homo sapiens
gtctcactatgttgc

SEQ ID NO: 320130 - DNA, 15 bp, Homo sapiens
ggtctcactatgttg

SEQ ID NO: 320131 - DNA, 15 bp, Homo sapiens
gggtctcactatgtt

SEQ ID NO: 320132 - DNA, 15 bp, Homo sapiens
ggggtctcactatgt

SEQ ID NO: 320133 - DNA, 15 bp, Homo sapiens
aggggtctcactatg

SEQ ID NO: 320134 - DNA, 15 bp, Homo sapiens
caggggtctcactat

SEQ ID NO: 320135 - DNA, 15 bp, Homo sapiens
acaggggtctcacta

SEQ ID NO: 320136 - DNA, 15 bp, Homo sapiens
gacaggggtctcact

SEQ ID NO: 320137 - DNA, 15 bp, Homo sapiens
agacaggggtctcac

SEQ ID NO: 320138 - DNA, 15 bp, Homo sapiens
gagacaggggtctca

SEQ ID NO: 320139 - DNA, 15 bp, Homo sapiens
agagacaggggtctc

SEQ ID NO: 320140 - DNA, 15 bp, Homo sapiens
tagagacaggggtct

SEQ ID NO: 320141 - DNA, 15 bp, Homo sapiens
gtagagacaggggtc

SEQ ID NO: 320142 - DNA, 15 bp, Homo sapiens
tgtagagacaggggt

SEQ ID NO: 320143 - DNA, 15 bp, Homo sapiens
ttgtagagacagggg

SEQ ID NO: 320144 - DNA, 15 bp, Homo sapiens
tttgtagagacaggg

SEQ ID NO: 320145 - DNA, 15 bp, Homo sapiens
ttttgtagagacagg

SEQ ID NO: 320146 - DNA, 15 bp, Homo sapiens
tttttgtagagacag

SEQ ID NO: 320147 - DNA, 15 bp, Homo sapiens
ttttttgtagagaca

SEQ ID NO: 320148 - DNA, 15 bp, Homo sapiens
cttttttgtagagac

SEQ ID NO: 320149 - DNA, 15 bp, Homo sapiens
gcttttttgtagaga

SEQ ID NO: 320150 - DNA, 15 bp, Homo sapiens
tgcttttttgtagag

SEQ ID NO: 320151 - DNA, 15 bp, Homo sapiens
ttgcttttttgtaga

SEQ ID NO: 320152 - DNA, 15 bp, Homo sapiens
tttgcttttttgtag

SEQ ID NO: 320153 - DNA, 15 bp, Homo sapiens
ttttgcttttttgta

SEQ ID NO: 320154 - DNA, 15 bp, Homo sapiens
tttttgcttttttgt

SEQ ID NO: 320155 - DNA, 15 bp, Homo sapiens
atttttgcttttttg

SEQ ID NO: 320156 - DNA, 15 bp, Homo sapiens
aatttttgctttttt

SEQ ID NO: 320157 - DNA, 15 bp, Homo sapiens
taatttttgcttttt

SEQ ID NO: 320158 - DNA, 15 bp, Homo sapiens
gtaatttttgctttt

SEQ ID NO: 320159 - DNA, 15 bp, Homo sapiens
ggtaatttttgcttt

SEQ ID NO: 320160 - DNA, 15 bp, Homo sapiens
tggtaatttttgctt

SEQ ID NO: 320161 - DNA, 15 bp, Homo sapiens
ctggtaatttttgct

SEQ ID NO: 320162 - DNA, 15 bp, Homo sapiens
cctggtaatttttgc

SEQ ID NO: 320163 - DNA, 15 bp, Homo sapiens
gcctggtaatttttg

SEQ ID NO: 320164 - DNA, 15 bp, Homo sapiens
cgcctggtaattttt

SEQ ID NO: 320165 - DNA, 15 bp, Homo sapiens
acgcctggtaatttt

SEQ ID NO: 320166 - DNA, 15 bp, Homo sapiens
cacgcctggtaattt

SEQ ID NO: 320167 - DNA, 15 bp, Homo sapiens
ccacgcctggtaatt

SEQ ID NO: 320168 - DNA, 15 bp, Homo sapiens
accacgcctggtaat

SEQ ID NO: 320169 - DNA, 15 bp, Homo sapiens
caccacgcctggtaa

SEQ ID NO: 320170 - DNA, 15 bp, Homo sapiens
ccaccacgcctggta

SEQ ID NO: 320171 - DNA, 15 bp, Homo sapiens
gccaccacgcctggt

SEQ ID NO: 320172 - DNA, 15 bp, Homo sapiens
tgccaccacgcctgg

SEQ ID NO: 320173 - DNA, 15 bp, Homo sapiens
ttgccaccacgcctg

SEQ ID NO: 320174 - DNA, 15 bp, Homo sapiens
cttgccaccacgcct

SEQ ID NO: 320175 - DNA, 15 bp, Homo sapiens
acttgccaccacgcc

SEQ ID NO: 320176 - DNA, 15 bp, Homo sapiens
cacttgccaccacgc

SEQ ID NO: 320177 - DNA, 15 bp, Homo sapiens
gcacttgccaccacg

SEQ ID NO: 320178 - DNA, 15 bp, Homo sapiens
agcacttgccaccac

SEQ ID NO: 320179 - DNA, 15 bp, Homo sapiens
aagcacttgccacca

SEQ ID NO: 320180 - DNA, 15 bp, Homo sapiens
caagcacttgccacc

SEQ ID NO: 320181 - DNA, 15 bp, Homo sapiens
acaagcacttgccac

SEQ ID NO: 320182 - DNA, 15 bp, Homo sapiens
cacaagcacttgcca

SEQ ID NO: 320183 - DNA, 15 bp, Homo sapiens
ccacaagcacttgcc

SEQ ID NO: 320184 - DNA, 15 bp, Homo sapiens
accacaagcacttgc

SEQ ID NO: 320185 - DNA, 15 bp, Homo sapiens
taccacaagcacttg

SEQ ID NO: 320186 - DNA, 15 bp, Homo sapiens
gtaccacaagcactt

SEQ ID NO: 320187 - DNA, 15 bp, Homo sapiens
agtaccacaagcact

SEQ ID NO: 320188 - DNA, 15 bp, Homo sapiens
tagtaccacaagcac

SEQ ID NO: 320189 - DNA, 15 bp, Homo sapiens
gtagtaccacaagca

SEQ ID NO: 320190 - DNA, 15 bp, Homo sapiens
ggtagtaccacaagc

SEQ ID NO: 320191 - DNA, 15 bp, Homo sapiens
aggtagtaccacaag

SEQ ID NO: 320192 - DNA, 15 bp, Homo sapiens
taggtagtaccacaa

SEQ ID NO: 320193 - DNA, 15 bp, Homo sapiens
gtaggtagtaccaca

SEQ ID NO: 320194 - DNA, 15 bp, Homo sapiens
agtaggtagtaccac

SEQ ID NO: 320195 - DNA, 15 bp, Homo sapiens
aagtaggtagtacca

SEQ ID NO: 320196 - DNA, 15 bp, Homo sapiens
caagtaggtagtacc

SEQ ID NO: 320197 - DNA, 15 bp, Homo sapiens
ccaagtaggtagtac

SEQ ID NO: 320198 - DNA, 15 bp, Homo sapiens
cccaagtaggtagta

SEQ ID NO: 320199 - DNA, 15 bp, Homo sapiens
tcccaagtaggtagt

SEQ ID NO: 320200 - DNA, 15 bp, Homo sapiens
ttcccaagtaggtag

SEQ ID NO: 320201 - DNA, 15 bp, Homo sapiens
cttcccaagtaggta

SEQ ID NO: 320202 - DNA, 15 bp, Homo sapiens
gcttcccaagtaggt

SEQ ID NO: 320203 - DNA, 15 bp, Homo sapiens
agcttcccaagtagg

SEQ ID NO: 320204 - DNA, 15 bp, Homo sapiens
cagcttcccaagtag

SEQ ID NO: 320205 - DNA, 15 bp, Homo sapiens
tcagcttcccaagta

SEQ ID NO: 320206 - DNA, 15 bp, Homo sapiens
ctcagcttcccaagt

SEQ ID NO: 320207 - DNA, 15 bp, Homo sapiens
cctcagcttcccaag

SEQ ID NO: 320208 - DNA, 15 bp, Homo sapiens
acctcagcttcccaa

SEQ ID NO: 320209 - DNA, 15 bp, Homo sapiens
cacctcagcttccca

SEQ ID NO: 320210 - DNA, 15 bp, Homo sapiens
ccacctcagcttccc

SEQ ID NO: 320211 - DNA, 15 bp, Homo sapiens
cccacctcagcttcc

SEQ ID NO: 320212 - DNA, 15 bp, Homo sapiens
tcccacctcagcttc

SEQ ID NO: 320213 - DNA, 15 bp, Homo sapiens
ctcccacctcagctt

SEQ ID NO: 320214 - DNA, 15 bp, Homo sapiens
cctcccacctcagct

SEQ ID NO: 320215 - DNA, 15 bp, Homo sapiens
tcctcccacctcagc

SEQ ID NO: 320216 - DNA, 15 bp, Homo sapiens
atcctcccacctcag

SEQ ID NO: 320217 - DNA, 15 bp, Homo sapiens
gatcctcccacctca

SEQ ID NO: 320218 - DNA, 15 bp, Homo sapiens
tgatcctcccacctc

SEQ ID NO: 320219 - DNA, 15 bp, Homo sapiens
gtgatcctcccacct

SEQ ID NO: 320220 - DNA, 15 bp, Homo sapiens
agtgatcctcccacc

SEQ ID NO: 320221 - DNA, 15 bp, Homo sapiens
aagtgatcctcccac

SEQ ID NO: 320222 - DNA, 15 bp, Homo sapiens
caagtgatcctccca

SEQ ID NO: 320223 - DNA, 15 bp, Homo sapiens
tcaagtgatcctccc

SEQ ID NO: 320224 - DNA, 15 bp, Homo sapiens
ctcaagtgatcctcc

SEQ ID NO: 320225 - DNA, 15 bp, Homo sapiens
gctcaagtgatcctc

SEQ ID NO: 320226 - DNA, 15 bp, Homo sapiens
ggctcaagtgatcct

SEQ ID NO: 320227 - DNA, 15 bp, Homo sapiens
gggctcaagtgatcc

SEQ ID NO: 320228 - DNA, 15 bp, Homo sapiens
tgggctcaagtgatc

SEQ ID NO: 320229 - DNA, 15 bp, Homo sapiens
ctgggctcaagtgat

SEQ ID NO: 320230 - DNA, 15 bp, Homo sapiens
cctgggctcaagtga

SEQ ID NO: 320231 - DNA, 15 bp, Homo sapiens
tcctgggctcaagtg

SEQ ID NO: 320232 - DNA, 15 bp, Homo sapiens
ctcctgggctcaagt

SEQ ID NO: 320233 - DNA, 15 bp, Homo sapiens
tctcctgggctcaag

SEQ ID NO: 320234 - DNA, 15 bp, Homo sapiens
atctcctgggctcaa

SEQ ID NO: 320235 - DNA, 15 bp, Homo sapiens
aatctcctgggctca

SEQ ID NO: 320236 - DNA, 15 bp, Homo sapiens
taatctcctgggctc

SEQ ID NO: 320237 - DNA, 15 bp, Homo sapiens
ttaatctcctgggct

SEQ ID NO: 320238 - DNA, 15 bp, Homo sapiens
cttaatctcctgggc

SEQ ID NO: 320239 - DNA, 15 bp, Homo sapiens
tcttaatctcctggg

SEQ ID NO: 320240 - DNA, 15 bp, Homo sapiens
gtcttaatctcctgg

SEQ ID NO: 320241 - DNA, 15 bp, Homo sapiens
agtcttaatctcctg

SEQ ID NO: 320242 - DNA, 15 bp, Homo sapiens
cagtcttaatctcct

SEQ ID NO: 320243 - DNA, 15 bp, Homo sapiens
gcagtcttaatctcc

SEQ ID NO: 320244 - DNA, 15 bp, Homo sapiens
tgcagtcttaatctc

SEQ ID NO: 320245 - DNA, 15 bp, Homo sapiens
ctgcagtcttaatct

SEQ ID NO: 320246 - DNA, 15 bp, Homo sapiens
actgcagtcttaatc

SEQ ID NO: 320247 - DNA, 15 bp, Homo sapiens
cactgcagtcttaat

SEQ ID NO: 320248 - DNA, 15 bp, Homo sapiens
tcactgcagtcttaa

SEQ ID NO: 320249 - DNA, 15 bp, Homo sapiens
ctcactgcagtctta

SEQ ID NO: 320250 - DNA, 15 bp, Homo sapiens
cctcactgcagtctt

SEQ ID NO: 320251 - DNA, 15 bp, Homo sapiens
ccctcactgcagtct

SEQ ID NO: 320252 - DNA, 15 bp, Homo sapiens
cccctcactgcagtc

SEQ ID NO: 320253 - DNA, 15 bp, Homo sapiens
gcccctcactgcagt

SEQ ID NO: 320254 - DNA, 15 bp, Homo sapiens
ggcccctcactgcag

SEQ ID NO: 320255 - DNA, 15 bp, Homo sapiens
cggcccctcactgca

SEQ ID NO: 320256 - DNA, 15 bp, Homo sapiens
ccggcccctcactgc

SEQ ID NO: 320257 - DNA, 15 bp, Homo sapiens
cccggcccctcactg

SEQ ID NO: 320258 - DNA, 15 bp, Homo sapiens
gcccggcccctcact

SEQ ID NO: 320259 - DNA, 15 bp, Homo sapiens
cgcccggcccctcac

SEQ ID NO: 320260 - DNA, 15 bp, Homo sapiens
gcgcccggcccctca

SEQ ID NO: 320261 - DNA, 15 bp, Homo sapiens
cgcgcccggcccctc

SEQ ID NO: 320262 - DNA, 15 bp, Homo sapiens
ccgcgcccggcccct

SEQ ID NO: 320263 - DNA, 15 bp, Homo sapiens
accgcgcccggcccc

SEQ ID NO: 320264 - DNA, 15 bp, Homo sapiens
caccgcgcccggccc

SEQ ID NO: 320265 - DNA, 15 bp, Homo sapiens
cgcctcccaaagtgc

SEQ ID NO: 320266 - DNA, 15 bp, Homo sapiens
ccgcctcccaaagtg

SEQ ID NO: 320267 - DNA, 15 bp, Homo sapiens
tccgcctcccaaagt

SEQ ID NO: 320268 - DNA, 15 bp, Homo sapiens
ctccgcctcccaaag

SEQ ID NO: 320269 - DNA, 15 bp, Homo sapiens
cctccgcctcccaaa

SEQ ID NO: 320270 - DNA, 15 bp, Homo sapiens
acctccgcctcccaa

SEQ ID NO: 320271 - DNA, 15 bp, Homo sapiens
cacctccgcctccca

SEQ ID NO: 320272 - DNA, 15 bp, Homo sapiens
ccacctccgcctccc

SEQ ID NO: 320273 - DNA, 15 bp, Homo sapiens
cccacctccgcctcc

SEQ ID NO: 320274 - DNA, 15 bp, Homo sapiens
acccacctccgcctc

SEQ ID NO: 320275 - DNA, 15 bp, Homo sapiens
cacccacctccgcct

SEQ ID NO: 320276 - DNA, 15 bp, Homo sapiens
ccacccacctccgcc

SEQ ID NO: 320277 - DNA, 15 bp, Homo sapiens
tccacccacctccgc

SEQ ID NO: 320278 - DNA, 15 bp, Homo sapiens
atccacccacctccg

SEQ ID NO: 320279 - DNA, 15 bp, Homo sapiens
gatccacccacctcc

SEQ ID NO: 320280 - DNA, 15 bp, Homo sapiens
gtgatccacccacct

SEQ ID NO: 320281 - DNA, 15 bp, Homo sapiens
cgtgatccacccacc

SEQ ID NO: 320282 - DNA, 15 bp, Homo sapiens
tcgtgatccacccac

SEQ ID NO: 320283 - DNA, 15 bp, Homo sapiens
ctcgtgatccaccca

SEQ ID NO: 320284 - DNA, 15 bp, Homo sapiens
cctcgtgatccaccc

SEQ ID NO: 320285 - DNA, 15 bp, Homo sapiens
gatctcctgacctcg

SEQ ID NO: 320286 - DNA, 15 bp, Homo sapiens
cgatctcctgacctc

SEQ ID NO: 320287 - DNA, 15 bp, Homo sapiens
aggatggtctcgatc

SEQ ID NO: 320288 - DNA, 15 bp, Homo sapiens
caggatggtctcgat

SEQ ID NO: 320289 - DNA, 15 bp, Homo sapiens
ccaggatggtctcga

SEQ ID NO: 320290 - DNA, 15 bp, Homo sapiens
gccaggatggtctcg

SEQ ID NO: 320291 - DNA, 15 bp, Homo sapiens
atgttagccaggatg

SEQ ID NO: 320292 - DNA, 15 bp, Homo sapiens
catgttagccaggat

SEQ ID NO: 320293 - DNA, 15 bp, Homo sapiens
ccatgttagccagga

SEQ ID NO: 320294 - DNA, 15 bp, Homo sapiens
accatgttagccagg

SEQ ID NO: 320295 - DNA, 15 bp, Homo sapiens
caccatgttagccag

SEQ ID NO: 320296 - DNA, 15 bp, Homo sapiens
tcaccatgttagcca

SEQ ID NO: 320297 - DNA, 15 bp, Homo sapiens
ttcaccatgttagcc

SEQ ID NO: 320298 - DNA, 15 bp, Homo sapiens
tttcaccatgttagc

SEQ ID NO: 320299 - DNA, 15 bp, Homo sapiens
gtttcaccatgttag

SEQ ID NO: 320300 - DNA, 15 bp, Homo sapiens
ggtttcaccatgtta

SEQ ID NO: 320301 - DNA, 15 bp, Homo sapiens
acacccagctaattt

SEQ ID NO: 320302 - DNA, 15 bp, Homo sapiens
cacacccagctaatt

SEQ ID NO: 320303 - DNA, 15 bp, Homo sapiens
ccacacccagctaat

SEQ ID NO: 320304 - DNA, 15 bp, Homo sapiens
accacacccagctaa

SEQ ID NO: 320305 - DNA, 15 bp, Homo sapiens
caccacacccagcta

SEQ ID NO: 320306 - DNA, 15 bp, Homo sapiens
ccaccacacccagct

SEQ ID NO: 320307 - DNA, 15 bp, Homo sapiens
cccaccacacccagc

SEQ ID NO: 320308 - DNA, 15 bp, Homo sapiens
ccccaccacacccag

SEQ ID NO: 320309 - DNA, 15 bp, Homo sapiens
cccccaccacaccca

SEQ ID NO: 320310 - DNA, 15 bp, Homo sapiens
ccccccaccacaccc

SEQ ID NO: 320311 - DNA, 15 bp, Homo sapiens
gccccccaccacacc

SEQ ID NO: 320312 - DNA, 15 bp, Homo sapiens
cgccccccaccacac

SEQ ID NO: 320313 - DNA, 15 bp, Homo sapiens
gcgccccccaccaca

SEQ ID NO: 320314 - DNA, 15 bp, Homo sapiens
ggcgccccccaccac

SEQ ID NO: 320315 - DNA, 15 bp, Homo sapiens
aggcgccccccacca

SEQ ID NO: 320316 - DNA, 15 bp, Homo sapiens
caggcgccccccacc

SEQ ID NO: 320317 - DNA, 15 bp, Homo sapiens
acaggcgccccccac

SEQ ID NO: 320318 - DNA, 15 bp, Homo sapiens
tacaggcgcccccca

SEQ ID NO: 320319 - DNA, 15 bp, Homo sapiens
ctacaggcgcccccc

SEQ ID NO: 320320 - DNA, 15 bp, Homo sapiens
actacaggcgccccc

SEQ ID NO: 320321 - DNA, 15 bp, Homo sapiens
gactacaggcgcccc

SEQ ID NO: 320322 - DNA, 15 bp, Homo sapiens
ggactacaggcgccc

SEQ ID NO: 320323 - DNA, 15 bp, Homo sapiens
gggactacaggcgcc

SEQ ID NO: 320324 - DNA, 15 bp, Homo sapiens
cattctcctgcctca

SEQ ID NO: 320325 - DNA, 15 bp, Homo sapiens
ccattctcctgcctc

SEQ ID NO: 320326 - DNA, 15 bp, Homo sapiens
gccattctcctgcct

SEQ ID NO: 320327 - DNA, 15 bp, Homo sapiens
cgccattctcctgcc

SEQ ID NO: 320328 - DNA, 15 bp, Homo sapiens
acgccattctcctgc

SEQ ID NO: 320329 - DNA, 15 bp, Homo sapiens
cacgccattctcctg

SEQ ID NO: 320330 - DNA, 15 bp, Homo sapiens
tcacgccattctcct

SEQ ID NO: 320331 - DNA, 15 bp, Homo sapiens
ttcacgccattctcc

SEQ ID NO: 320332 - DNA, 15 bp, Homo sapiens
gttcacgccattctc

SEQ ID NO: 320333 - DNA, 15 bp, Homo sapiens
ggttcacgccattct

SEQ ID NO: 320334 - DNA, 15 bp, Homo sapiens
gggttcacgccattc

SEQ ID NO: 320335 - DNA, 15 bp, Homo sapiens
cgggttcacgccatt

SEQ ID NO: 320336 - DNA, 15 bp, Homo sapiens
ccgggttcacgccat

SEQ ID NO: 320337 - DNA, 15 bp, Homo sapiens
cccgggttcacgcca

SEQ ID NO: 320338 - DNA, 15 bp, Homo sapiens
tcccgggttcacgcc

SEQ ID NO: 320339 - DNA, 15 bp, Homo sapiens
ctcccgggttcacgc

SEQ ID NO: 320340 - DNA, 15 bp, Homo sapiens
cctcccgggttcacg

SEQ ID NO: 320341 - DNA, 15 bp, Homo sapiens
acctcccgggttcac

SEQ ID NO: 320342 - DNA, 15 bp, Homo sapiens
ctccacctcccgggt

SEQ ID NO: 320343 - DNA, 15 bp, Homo sapiens
cctccacctcccggg

SEQ ID NO: 320344 - DNA, 15 bp, Homo sapiens
acctccacctcccgg

SEQ ID NO: 320345 - DNA, 15 bp, Homo sapiens
aacctccacctcccg

SEQ ID NO: 320346 - DNA, 15 bp, Homo sapiens
caacctccacctccc

SEQ ID NO: 320347 - DNA, 15 bp, Homo sapiens
gcaacctccacctcc

SEQ ID NO: 320348 - DNA, 15 bp, Homo sapiens
tgcaacctccacctc

SEQ ID NO: 320349 - DNA, 15 bp, Homo sapiens
ctgcaacctccacct

SEQ ID NO: 320350 - DNA, 15 bp, Homo sapiens
actgcaacctccacc

SEQ ID NO: 320351 - DNA, 15 bp, Homo sapiens
cactgcaacctccac

SEQ ID NO: 320352 - DNA, 15 bp, Homo sapiens
tcactgcaacctcca

SEQ ID NO: 320353 - DNA, 15 bp, Homo sapiens
agctcactgcaacct

SEQ ID NO: 320354 - DNA, 15 bp, Homo sapiens
cagctcactgcaacc

SEQ ID NO: 320355 - DNA, 15 bp, Homo sapiens
tcagctcactgcaac

SEQ ID NO: 320356 - DNA, 15 bp, Homo sapiens
ctcagctcactgcaa

SEQ ID NO: 320357 - DNA, 15 bp, Homo sapiens
gctcagctcactgca

SEQ ID NO: 320358 - DNA, 15 bp, Homo sapiens
agctcagctcactgc

SEQ ID NO: 320359 - DNA, 15 bp, Homo sapiens
gagctcagctcactg

SEQ ID NO: 320360 - DNA, 15 bp, Homo sapiens
cgagctcagctcact

SEQ ID NO: 320361 - DNA, 15 bp, Homo sapiens
gcgagctcagctcac

SEQ ID NO: 320362 - DNA, 15 bp, Homo sapiens
tgcgagctcagctca

SEQ ID NO: 320363 - DNA, 15 bp, Homo sapiens
gtgcgagctcagctc

SEQ ID NO: 320364 - DNA, 15 bp, Homo sapiens
ggtgcgagctcagct

SEQ ID NO: 320365 - DNA, 15 bp, Homo sapiens
tggtgcgagctcagc

SEQ ID NO: 320366 - DNA, 15 bp, Homo sapiens
gtggtgcgagctcag

SEQ ID NO: 320367 - DNA, 15 bp, Homo sapiens
agtggtgcgagctca

SEQ ID NO: 320368 - DNA, 15 bp, Homo sapiens
cagtggtgcgagctc

SEQ ID NO: 320369 - DNA, 15 bp, Homo sapiens
gcagtggtgcgagct

SEQ ID NO: 320370 - DNA, 15 bp, Homo sapiens
tgcagtggtgcgagc

SEQ ID NO: 320371 - DNA, 15 bp, Homo sapiens
gtgcagtggtgcgag

SEQ ID NO: 320372 - DNA, 15 bp, Homo sapiens
agtgcagtggtgcga

SEQ ID NO: 320373 - DNA, 15 bp, Homo sapiens
gagtgcagtggtgcg

SEQ ID NO: 320374 - DNA, 15 bp, Homo sapiens
ggagtgcagtggtgc

SEQ ID NO: 320375 - DNA, 15 bp, Homo sapiens
tggagtgcagtggtg

SEQ ID NO: 320376 - DNA, 15 bp, Homo sapiens
ctggagtgcagtggt

SEQ ID NO: 320377 - DNA, 15 bp, Homo sapiens
actctgtcgcccagg

SEQ ID NO: 320378 - DNA, 15 bp, Homo sapiens
cactctgtcgcccag

SEQ ID NO: 320379 - DNA, 15 bp, Homo sapiens
tcactctgtcgccca

SEQ ID NO: 320380 - DNA, 15 bp, Homo sapiens
ctcactctgtcgccc

SEQ ID NO: 320381 - DNA, 15 bp, Homo sapiens
tctcactctgtcgcc

SEQ ID NO: 320382 - DNA, 15 bp, Homo sapiens
gtctcactctgtcgc

SEQ ID NO: 320383 - DNA, 15 bp, Homo sapiens
agtctcactctgtcg

SEQ ID NO: 320384 - DNA, 15 bp, Homo sapiens
tttttttttttgaga

SEQ ID NO: 320385 - DNA, 15 bp, Homo sapiens
ttttttttttttgag

SEQ ID NO: 320386 - DNA, 15 bp, Homo sapiens
tttttttttttttga

SEQ ID NO: 320387 - DNA, 15 bp, Homo sapiens
agggaggcagaggtt

SEQ ID NO: 320388 - DNA, 15 bp, Homo sapiens
cagggaggcagaggt

SEQ ID NO: 320389 - DNA, 15 bp, Homo sapiens
ccagggaggcagagg

SEQ ID NO: 320390 - DNA, 15 bp, Homo sapiens
accagggaggcagag

SEQ ID NO: 320391 - DNA, 15 bp, Homo sapiens
aaccagggaggcaga

SEQ ID NO: 320392 - DNA, 15 bp, Homo sapiens
gaaccagggaggcag

SEQ ID NO: 320393 - DNA, 15 bp, Homo sapiens
tgaaccagggaggca

SEQ ID NO: 320394 - DNA, 15 bp, Homo sapiens
ttgaaccagggaggc

SEQ ID NO: 320395 - DNA, 15 bp, Homo sapiens
cttgaaccagggagg

SEQ ID NO: 320396 - DNA, 15 bp, Homo sapiens
ccttgaaccagggag

SEQ ID NO: 320397 - DNA, 15 bp, Homo sapiens
tccttgaaccaggga

SEQ ID NO: 320398 - DNA, 15 bp, Homo sapiens
ttccttgaaccaggg

SEQ ID NO: 320399 - DNA, 15 bp, Homo sapiens
attccttgaaccagg

SEQ ID NO: 320400 - DNA, 15 bp, Homo sapiens
aattccttgaaccag

SEQ ID NO: 320401 - DNA, 15 bp, Homo sapiens
gaattccttgaacca

SEQ ID NO: 320402 - DNA, 15 bp, Homo sapiens
agaattccttgaacc

SEQ ID NO: 320403 - DNA, 15 bp, Homo sapiens
gagaattccttgaac

SEQ ID NO: 320404 - DNA, 15 bp, Homo sapiens
ggagaattccttgaa

SEQ ID NO: 320405 - DNA, 15 bp, Homo sapiens
aggagaattccttga

SEQ ID NO: 320406 - DNA, 15 bp, Homo sapiens
caggagaattccttg

SEQ ID NO: 320407 - DNA, 15 bp, Homo sapiens
gcaggagaattcctt

SEQ ID NO: 320408 - DNA, 15 bp, Homo sapiens
ggcaggagaattcct

SEQ ID NO: 320409 - DNA, 15 bp, Homo sapiens
aggcaggagaattcc

SEQ ID NO: 320410 - DNA, 15 bp, Homo sapiens
gaggcaggagaattc

SEQ ID NO: 320411 - DNA, 15 bp, Homo sapiens
tggaggctgaggcag

SEQ ID NO: 320412 - DNA, 15 bp, Homo sapiens
ctggaggctgaggca

SEQ ID NO: 320413 - DNA, 15 bp, Homo sapiens
tctggaggctgaggc

SEQ ID NO: 320414 - DNA, 15 bp, Homo sapiens
ctctggaggctgagg

SEQ ID NO: 320415 - DNA, 15 bp, Homo sapiens
actctggaggctgag

SEQ ID NO: 320416 - DNA, 15 bp, Homo sapiens
tactctggaggctga

SEQ ID NO: 320417 - DNA, 15 bp, Homo sapiens
ctactctggaggctg

SEQ ID NO: 320418 - DNA, 15 bp, Homo sapiens
gctactctggaggct

SEQ ID NO: 320419 - DNA, 15 bp, Homo sapiens
agctactctggaggc

SEQ ID NO: 320420 - DNA, 15 bp, Homo sapiens
cagctactctggagg

SEQ ID NO: 320421 - DNA, 15 bp, Homo sapiens
ccagctactctggag

SEQ ID NO: 320422 - DNA, 15 bp, Homo sapiens
cccagctactctgga

SEQ ID NO: 320423 - DNA, 15 bp, Homo sapiens
tcccagctactctgg

SEQ ID NO: 320424 - DNA, 15 bp, Homo sapiens
atcccagctactctg

SEQ ID NO: 320425 - DNA, 15 bp, Homo sapiens
aatcccagctactct

SEQ ID NO: 320426 - DNA, 15 bp, Homo sapiens
gtgcctgtaatccca

SEQ ID NO: 320427 - DNA, 15 bp, Homo sapiens
ggtgcctgtaatccc

SEQ ID NO: 320428 - DNA, 15 bp, Homo sapiens
aggtgcctgtaatcc

SEQ ID NO: 320429 - DNA, 15 bp, Homo sapiens
caggtgcctgtaatc

SEQ ID NO: 320430 - DNA, 15 bp, Homo sapiens
gcaggtgcctgtaat

SEQ ID NO: 320431 - DNA, 15 bp, Homo sapiens
ggcaggtgcctgtaa

SEQ ID NO: 320432 - DNA, 15 bp, Homo sapiens
tggcaggtgcctgta

SEQ ID NO: 320433 - DNA, 15 bp, Homo sapiens
atggcaggtgcctgt

SEQ ID NO: 320434 - DNA, 15 bp, Homo sapiens
gatggcaggtgcctg

SEQ ID NO: 320435 - DNA, 15 bp, Homo sapiens
tgatggcaggtgcct

SEQ ID NO: 320436 - DNA, 15 bp, Homo sapiens
atgatggcaggtgcc

SEQ ID NO: 320437 - DNA, 15 bp, Homo sapiens
catgatggcaggtgc

SEQ ID NO: 320438 - DNA, 15 bp, Homo sapiens
gcatgatggcaggtg

SEQ ID NO: 320439 - DNA, 15 bp, Homo sapiens
ggcatgatggcaggt

SEQ ID NO: 320440 - DNA, 15 bp, Homo sapiens
gggcatgatggcagg

SEQ ID NO: 320441 - DNA, 15 bp, Homo sapiens
tgggcatgatggcag

SEQ ID NO: 320442 - DNA, 15 bp, Homo sapiens
ctgggcatgatggca

SEQ ID NO: 320443 - DNA, 15 bp, Homo sapiens
gctgggcatgatggc

SEQ ID NO: 320444 - DNA, 15 bp, Homo sapiens
agctgggcatgatgg

SEQ ID NO: 320445 - DNA, 15 bp, Homo sapiens
tagctgggcatgatg

SEQ ID NO: 320446 - DNA, 15 bp, Homo sapiens
ttagctgggcatgat

SEQ ID NO: 320447 - DNA, 15 bp, Homo sapiens
attagctgggcatga

SEQ ID NO: 320448 - DNA, 15 bp, Homo sapiens
catggtgaaaccccg

SEQ ID NO: 320449 - DNA, 15 bp, Homo sapiens
gcaacatggtgaaac

SEQ ID NO: 320450 - DNA, 15 bp, Homo sapiens
ggcaacatggtgaaa

SEQ ID NO: 320451 - DNA, 15 bp, Homo sapiens
aggcaacatggtgaa

SEQ ID NO: 320452 - DNA, 15 bp, Homo sapiens
taggcaacatggtga

SEQ ID NO: 320453 - DNA, 15 bp, Homo sapiens
ctaggcaacatggtg

SEQ ID NO: 320454 - DNA, 15 bp, Homo sapiens
cctaggcaacatggt

SEQ ID NO: 320455 - DNA, 15 bp, Homo sapiens
gcctaggcaacatgg

SEQ ID NO: 320456 - DNA, 15 bp, Homo sapiens
agcctaggcaacatg

SEQ ID NO: 320457 - DNA, 15 bp, Homo sapiens
cagcctaggcaacat

SEQ ID NO: 320458 - DNA, 15 bp, Homo sapiens
ccagcctaggcaaca

SEQ ID NO: 320459 - DNA, 15 bp, Homo sapiens
accagcctaggcaac

SEQ ID NO: 320460 - DNA, 15 bp, Homo sapiens
gaccagcctaggcaa

SEQ ID NO: 320461 - DNA, 15 bp, Homo sapiens
agaccagcctaggca

SEQ ID NO: 320462 - DNA, 15 bp, Homo sapiens
gagaccagcctaggc

SEQ ID NO: 320463 - DNA, 15 bp, Homo sapiens
tgagaccagcctagg

SEQ ID NO: 320464 - DNA, 15 bp, Homo sapiens
ttgagaccagcctag

SEQ ID NO: 320465 - DNA, 15 bp, Homo sapiens
tttgagaccagccta

SEQ ID NO: 320466 - DNA, 15 bp, Homo sapiens
gtttgagaccagcct

SEQ ID NO: 320467 - DNA, 15 bp, Homo sapiens
agtttgagaccagcc

SEQ ID NO: 320468 - DNA, 15 bp, Homo sapiens
gagtttgagaccagc

SEQ ID NO: 320469 - DNA, 15 bp, Homo sapiens
ggagtttgagaccag

SEQ ID NO: 320470 - DNA, 15 bp, Homo sapiens
gggagtttgagacca

SEQ ID NO: 320471 - DNA, 15 bp, Homo sapiens
cgggagtttgagacc

SEQ ID NO: 320472 - DNA, 15 bp, Homo sapiens
ccgggagtttgagac

SEQ ID NO: 320473 - DNA, 15 bp, Homo sapiens
cccgggagtttgaga

SEQ ID NO: 320474 - DNA, 15 bp, Homo sapiens
gcccgggagtttgag

SEQ ID NO: 320475 - DNA, 15 bp, Homo sapiens
agcccgggagtttga

SEQ ID NO: 320476 - DNA, 15 bp, Homo sapiens
gagcccgggagtttg

SEQ ID NO: 320477 - DNA, 15 bp, Homo sapiens
tgagcccgggagttt

SEQ ID NO: 320478 - DNA, 15 bp, Homo sapiens
ttgagcccgggagtt

SEQ ID NO: 320479 - DNA, 15 bp, Homo sapiens
cttgagcccgggagt

SEQ ID NO: 320480 - DNA, 15 bp, Homo sapiens
gcttgagcccgggag

SEQ ID NO: 320481 - DNA, 15 bp, Homo sapiens
cgcttgagcccggga

SEQ ID NO: 320482 - DNA, 15 bp, Homo sapiens
tcgcttgagcccggg

SEQ ID NO: 320483 - DNA, 15 bp, Homo sapiens
atcgcttgagcccgg

SEQ ID NO: 320484 - DNA, 15 bp, Homo sapiens
gatcgcttgagcccg

SEQ ID NO: 320485 - DNA, 15 bp, Homo sapiens
ggatcgcttgagccc

SEQ ID NO: 320486 - DNA, 15 bp, Homo sapiens
tggatcgcttgagcc

SEQ ID NO: 320487 - DNA, 15 bp, Homo sapiens
gtggatcgcttgagc

SEQ ID NO: 320488 - DNA, 15 bp, Homo sapiens
ggtggatcgcttgag

SEQ ID NO: 320489 - DNA, 15 bp, Homo sapiens
gggtggatcgcttga

SEQ ID NO: 320490 - DNA, 15 bp, Homo sapiens
cgggtggatcgcttg

SEQ ID NO: 320491 - DNA, 15 bp, Homo sapiens
gcgggtggatcgctt

SEQ ID NO: 320492 - DNA, 15 bp, Homo sapiens
ggcgggtggatcgct

SEQ ID NO: 320493 - DNA, 15 bp, Homo sapiens
aggcgggtggatcgc

SEQ ID NO: 320494 - DNA, 15 bp, Homo sapiens
aaggcgggtggatcg

SEQ ID NO: 320495 - DNA, 15 bp, Homo sapiens
caaggcgggtggatc

SEQ ID NO: 320496 - DNA, 15 bp, Homo sapiens
ccaaggcgggtggat

SEQ ID NO: 320497 - DNA, 15 bp, Homo sapiens
gccaaggcgggtgga

SEQ ID NO: 320498 - DNA, 15 bp, Homo sapiens
ggccaaggcgggtgg

SEQ ID NO: 320499 - DNA, 15 bp, Homo sapiens
aggccaaggcgggtg

SEQ ID NO: 320500 - DNA, 15 bp, Homo sapiens
gaggccaaggcgggt

SEQ ID NO: 320501 - DNA, 15 bp, Homo sapiens
cgcctgtaatcccag

SEQ ID NO: 320502 - DNA, 15 bp, Homo sapiens
acgcctgtaatccca

SEQ ID NO: 320503 - DNA, 15 bp, Homo sapiens
cacgcctgtaatccc

SEQ ID NO: 320504 - DNA, 15 bp, Homo sapiens
tggctcacgcctgta

SEQ ID NO: 320505 - DNA, 15 bp, Homo sapiens
gtggctcacgcctgt

SEQ ID NO: 320506 - DNA, 15 bp, Homo sapiens
ggtggctcacgcctg

SEQ ID NO: 320507 - DNA, 15 bp, Homo sapiens
cggtggctcacgcct

SEQ ID NO: 320508 - DNA, 15 bp, Homo sapiens
gcggtggctcacgcc

SEQ ID NO: 320509 - DNA, 15 bp, Homo sapiens
cgcggtggctcacgc

SEQ ID NO: 320510 - DNA, 15 bp, Homo sapiens
gcgcggtggctcacg

SEQ ID NO: 320511 - DNA, 15 bp, Homo sapiens
ggcgcggtggctcac

SEQ ID NO: 320512 - DNA, 15 bp, Homo sapiens
aggcgcggtggctca

SEQ ID NO: 320513 - DNA, 15 bp, Homo sapiens
caggcgcggtggctc

SEQ ID NO: 320514 - DNA, 15 bp, Homo sapiens
ccaggcgcggtggct

SEQ ID NO: 320515 - DNA, 15 bp, Homo sapiens
gccaggcgcggtggc

SEQ ID NO: 320516 - DNA, 15 bp, Homo sapiens
ggccaggcgcggtgg

SEQ ID NO: 320517 - DNA, 15 bp, Homo sapiens
tggccaggcgcggtg

SEQ ID NO: 320518 - DNA, 15 bp, Homo sapiens
ctggccaggcgcggt

SEQ ID NO: 320519 - DNA, 15 bp, Homo sapiens
tctggccaggcgcgg

SEQ ID NO: 320520 - DNA, 15 bp, Homo sapiens
ttctggccaggcgcg

SEQ ID NO: 320521 - DNA, 15 bp, Homo sapiens
attctggccaggcgc

SEQ ID NO: 320522 - DNA, 15 bp, Homo sapiens
tattctggccaggcg

SEQ ID NO: 320523 - DNA, 15 bp, Homo sapiens
ttattctggccaggc

SEQ ID NO: 320524 - DNA, 15 bp, Homo sapiens
attattctggccagg

SEQ ID NO: 320525 - DNA, 15 bp, Homo sapiens
gattattctggccag

SEQ ID NO: 320526 - DNA, 15 bp, Homo sapiens
agattattctggcca

SEQ ID NO: 320527 - DNA, 15 bp, Homo sapiens
aagattattctggcc

SEQ ID NO: 320528 - DNA, 15 bp, Homo sapiens
taagattattctggc

SEQ ID NO: 320529 - DNA, 15 bp, Homo sapiens
ttaagattattctgg

SEQ ID NO: 320530 - DNA, 15 bp, Homo sapiens
cttaagattattctg

SEQ ID NO: 320531 - DNA, 15 bp, Homo sapiens
ccttaagattattct

SEQ ID NO: 320532 - DNA, 15 bp, Homo sapiens
cccttaagattattc

SEQ ID NO: 320533 - DNA, 15 bp, Homo sapiens
gcccttaagattatt

SEQ ID NO: 320534 - DNA, 15 bp, Homo sapiens
agcccttaagattat

SEQ ID NO: 320535 - DNA, 15 bp, Homo sapiens
tagcccttaagatta

SEQ ID NO: 320536 - DNA, 15 bp, Homo sapiens
atagcccttaagatt

SEQ ID NO: 320537 - DNA, 15 bp, Homo sapiens
catagcccttaagat

SEQ ID NO: 320538 - DNA, 15 bp, Homo sapiens
tcatagcccttaaga

SEQ ID NO: 320539 - DNA, 15 bp, Homo sapiens
atcatagcccttaag

SEQ ID NO: 320540 - DNA, 15 bp, Homo sapiens
catcatagcccttaa

SEQ ID NO: 320541 - DNA, 15 bp, Homo sapiens
ccatcatagccctta

SEQ ID NO: 320542 - DNA, 15 bp, Homo sapiens
cccatcatagccctt

SEQ ID NO: 320543 - DNA, 15 bp, Homo sapiens
tcccatcatagccct

SEQ ID NO: 320544 - DNA, 15 bp, Homo sapiens
ctcccatcatagccc

SEQ ID NO: 320545 - DNA, 15 bp, Homo sapiens
tctcccatcatagcc

SEQ ID NO: 320546 - DNA, 15 bp, Homo sapiens
ttctcccatcatagc

SEQ ID NO: 320547 - DNA, 15 bp, Homo sapiens
cttctcccatcatag

SEQ ID NO: 320548 - DNA, 15 bp, Homo sapiens
acttctcccatcata

SEQ ID NO: 320549 - DNA, 15 bp, Homo sapiens
tacttctcccatcat

SEQ ID NO: 320550 - DNA, 15 bp, Homo sapiens
gtacttctcccatca

SEQ ID NO: 320551 - DNA, 15 bp, Homo sapiens
tgtacttctcccatc

SEQ ID NO: 320552 - DNA, 15 bp, Homo sapiens
ctgtacttctcccat

SEQ ID NO: 320553 - DNA, 15 bp, Homo sapiens
cctgtacttctccca

SEQ ID NO: 320554 - DNA, 15 bp, Homo sapiens
ccctgtacttctccc

SEQ ID NO: 320555 - DNA, 15 bp, Homo sapiens
tccctgtacttctcc

SEQ ID NO: 320556 - DNA, 15 bp, Homo sapiens
gtccctgtacttctc

SEQ ID NO: 320557 - DNA, 15 bp, Homo sapiens
agtccctgtacttct

SEQ ID NO: 320558 - DNA, 15 bp, Homo sapiens
cagtccctgtacttc

SEQ ID NO: 320559 - DNA, 15 bp, Homo sapiens
ccagtccctgtactt

SEQ ID NO: 320560 - DNA, 15 bp, Homo sapiens
accagtccctgtact

SEQ ID NO: 320561 - DNA, 15 bp, Homo sapiens
taccagtccctgtac

SEQ ID NO: 320562 - DNA, 15 bp, Homo sapiens
gtaccagtccctgta

SEQ ID NO: 320563 - DNA, 15 bp, Homo sapiens
ggtaccagtccctgt

SEQ ID NO: 320564 - DNA, 15 bp, Homo sapiens
aggtaccagtccctg

SEQ ID NO: 320565 - DNA, 15 bp, Homo sapiens
gaggtaccagtccct

SEQ ID NO: 320566 - DNA, 15 bp, Homo sapiens
agaggtaccagtccc

SEQ ID NO: 320567 - DNA, 15 bp, Homo sapiens
gagaggtaccagtcc

SEQ ID NO: 320568 - DNA, 15 bp, Homo sapiens
tgagaggtaccagtc

SEQ ID NO: 320569 - DNA, 15 bp, Homo sapiens
gtgagaggtaccagt

SEQ ID NO: 320570 - DNA, 15 bp, Homo sapiens
agtgagaggtaccag

SEQ ID NO: 320571 - DNA, 15 bp, Homo sapiens
gagtgagaggtacca

SEQ ID NO: 320572 - DNA, 15 bp, Homo sapiens
ggagtgagaggtacc

SEQ ID NO: 320573 - DNA, 15 bp, Homo sapiens
gggagtgagaggtac

SEQ ID NO: 320574 - DNA, 15 bp, Homo sapiens
agggagtgagaggta

SEQ ID NO: 320575 - DNA, 15 bp, Homo sapiens
gagggagtgagaggt

SEQ ID NO: 320576 - DNA, 15 bp, Homo sapiens
tgagggagtgagagg

SEQ ID NO: 320577 - DNA, 15 bp, Homo sapiens
gtgagggagtgagag

SEQ ID NO: 320578 - DNA, 15 bp, Homo sapiens
agtgagggagtgaga

SEQ ID NO: 320579 - DNA, 15 bp, Homo sapiens
gagtgagggagtgag

SEQ ID NO: 320580 - DNA, 15 bp, Homo sapiens
ggagtgagggagtga

SEQ ID NO: 320581 - DNA, 15 bp, Homo sapiens
gggagtgagggagtg

SEQ ID NO: 320582 - DNA, 15 bp, Homo sapiens
tgggagtgagggagt

SEQ ID NO: 320583 - DNA, 15 bp, Homo sapiens
gtgggagtgagggag

SEQ ID NO: 320584 - DNA, 15 bp, Homo sapiens
ggtgggagtgaggga

SEQ ID NO: 320585 - DNA, 15 bp, Homo sapiens
aggtgggagtgaggg

SEQ ID NO: 320586 - DNA, 15 bp, Homo sapiens
aaggtgggagtgagg

SEQ ID NO: 320587 - DNA, 15 bp, Homo sapiens
gaaggtgggagtgag

SEQ ID NO: 320588 - DNA, 15 bp, Homo sapiens
ggaaggtgggagtga

SEQ ID NO: 320589 - DNA, 15 bp, Homo sapiens
tggaaggtgggagtg

SEQ ID NO: 320590 - DNA, 15 bp, Homo sapiens
ctggaaggtgggagt

SEQ ID NO: 320591 - DNA, 15 bp, Homo sapiens
cctggaaggtgggag

SEQ ID NO: 320592 - DNA, 15 bp, Homo sapiens
gcctggaaggtggga

SEQ ID NO: 320593 - DNA, 15 bp, Homo sapiens
ggcctggaaggtggg

SEQ ID NO: 320594 - DNA, 15 bp, Homo sapiens
aggcctggaaggtgg

SEQ ID NO: 320595 - DNA, 15 bp, Homo sapiens
caggcctggaaggtg

SEQ ID NO: 320596 - DNA, 15 bp, Homo sapiens
tcaggcctggaaggt

SEQ ID NO: 320597 - DNA, 15 bp, Homo sapiens
atcaggcctggaagg

SEQ ID NO: 320598 - DNA, 15 bp, Homo sapiens
catcaggcctggaag

SEQ ID NO: 320599 - DNA, 15 bp, Homo sapiens
gcatcaggcctggaa

SEQ ID NO: 320600 - DNA, 15 bp, Homo sapiens
ggcatcaggcctgga

SEQ ID NO: 320601 - DNA, 15 bp, Homo sapiens
aggcatcaggcctgg

SEQ ID NO: 320602 - DNA, 15 bp, Homo sapiens
aaggcatcaggcctg

SEQ ID NO: 320603 - DNA, 15 bp, Homo sapiens
aaaggcatcaggcct

SEQ ID NO: 320604 - DNA, 15 bp, Homo sapiens
taaaggcatcaggcc

SEQ ID NO: 320605 - DNA, 15 bp, Homo sapiens
ttaaaggcatcaggc

SEQ ID NO: 320606 - DNA, 15 bp, Homo sapiens
gttaaaggcatcagg

SEQ ID NO: 320607 - DNA, 15 bp, Homo sapiens
ggttaaaggcatcag

SEQ ID NO: 320608 - DNA, 15 bp, Homo sapiens
aggttaaaggcatca

SEQ ID NO: 320609 - DNA, 15 bp, Homo sapiens
taggttaaaggcatc

SEQ ID NO: 320610 - DNA, 15 bp, Homo sapiens
gtaggttaaaggcat

SEQ ID NO: 320611 - DNA, 15 bp, Homo sapiens
agtaggttaaaggca

SEQ ID NO: 320612 - DNA, 15 bp, Homo sapiens
aagtaggttaaaggc

SEQ ID NO: 320613 - DNA, 15 bp, Homo sapiens
gaagtaggttaaagg

SEQ ID NO: 320614 - DNA, 15 bp, Homo sapiens
tgaagtaggttaaag

SEQ ID NO: 320615 - DNA, 15 bp, Homo sapiens
ctgaagtaggttaaa

SEQ ID NO: 320616 - DNA, 15 bp, Homo sapiens
cctgaagtaggttaa

SEQ ID NO: 320617 - DNA, 15 bp, Homo sapiens
tcctgaagtaggtta

SEQ ID NO: 320618 - DNA, 15 bp, Homo sapiens
ttcctgaagtaggtt

SEQ ID NO: 320619 - DNA, 15 bp, Homo sapiens
tttcctgaagtaggt

SEQ ID NO: 320620 - DNA, 15 bp, Homo sapiens
ttttcctgaagtagg

SEQ ID NO: 320621 - DNA, 15 bp, Homo sapiens
attttcctgaagtag

SEQ ID NO: 320622 - DNA, 15 bp, Homo sapiens
gattttcctgaagta

SEQ ID NO: 320623 - DNA, 15 bp, Homo sapiens
agattttcctgaagt

SEQ ID NO: 320624 - DNA, 15 bp, Homo sapiens
gagattttcctgaag

SEQ ID NO: 320625 - DNA, 15 bp, Homo sapiens
agagattttcctgaa

SEQ ID NO: 320626 - DNA, 15 bp, Homo sapiens
tagagattttcctga

SEQ ID NO: 320627 - DNA, 15 bp, Homo sapiens
ttagagattttcctg

SEQ ID NO: 320628 - DNA, 15 bp, Homo sapiens
cttagagattttcct

SEQ ID NO: 320629 - DNA, 15 bp, Homo sapiens
ccttagagattttcc

SEQ ID NO: 320630 - DNA, 15 bp, Homo sapiens
tccttagagattttc

SEQ ID NO: 320631 - DNA, 15 bp, Homo sapiens
atccttagagatttt

SEQ ID NO: 320632 - DNA, 15 bp, Homo sapiens
catccttagagattt

SEQ ID NO: 320633 - DNA, 15 bp, Homo sapiens
tcatccttagagatt

SEQ ID NO: 320634 - DNA, 15 bp, Homo sapiens
ttcatccttagagat

SEQ ID NO: 320635 - DNA, 15 bp, Homo sapiens
tttcatccttagaga

SEQ ID NO: 320636 - DNA, 15 bp, Homo sapiens
ttttcatccttagag

SEQ ID NO: 320637 - DNA, 15 bp, Homo sapiens
attttcatccttaga

SEQ ID NO: 320638 - DNA, 15 bp, Homo sapiens
aattttcatccttag

SEQ ID NO: 320639 - DNA, 15 bp, Homo sapiens
gaattttcatcctta

SEQ ID NO: 320640 - DNA, 15 bp, Homo sapiens
ggaattttcatcctt

SEQ ID NO: 320641 - DNA, 15 bp, Homo sapiens
aggaattttcatcct

SEQ ID NO: 320642 - DNA, 15 bp, Homo sapiens
aaggaattttcatcc

SEQ ID NO: 320643 - DNA, 15 bp, Homo sapiens
caaggaattttcatc

SEQ ID NO: 320644 - DNA, 15 bp, Homo sapiens
ccaaggaattttcat

SEQ ID NO: 320645 - DNA, 15 bp, Homo sapiens
gccaaggaattttca

SEQ ID NO: 320646 - DNA, 15 bp, Homo sapiens
ggccaaggaattttc

SEQ ID NO: 320647 - DNA, 15 bp, Homo sapiens
tggccaaggaatttt

SEQ ID NO: 320648 - DNA, 15 bp, Homo sapiens
gtggccaaggaattt

SEQ ID NO: 320649 - DNA, 15 bp, Homo sapiens
ggtggccaaggaatt

SEQ ID NO: 320650 - DNA, 15 bp, Homo sapiens
aggtggccaaggaat

SEQ ID NO: 320651 - DNA, 15 bp, Homo sapiens
taggtggccaaggaa

SEQ ID NO: 320652 - DNA, 15 bp, Homo sapiens
ctaggtggccaagga

SEQ ID NO: 320653 - DNA, 15 bp, Homo sapiens
tctaggtggccaagg

SEQ ID NO: 320654 - DNA, 15 bp, Homo sapiens
atctaggtggccaag

SEQ ID NO: 320655 - DNA, 15 bp, Homo sapiens
aatctaggtggccaa

SEQ ID NO: 320656 - DNA, 15 bp, Homo sapiens
caatctaggtggcca

SEQ ID NO: 320657 - DNA, 15 bp, Homo sapiens
acaatctaggtggcc

SEQ ID NO: 320658 - DNA, 15 bp, Homo sapiens
gacaatctaggtggc

SEQ ID NO: 320659 - DNA, 15 bp, Homo sapiens
agacaatctaggtgg

SEQ ID NO: 320660 - DNA, 15 bp, Homo sapiens
aagacaatctaggtg

SEQ ID NO: 320661 - DNA, 15 bp, Homo sapiens
caagacaatctaggt

SEQ ID NO: 320662 - DNA, 15 bp, Homo sapiens
tcaagacaatctagg

SEQ ID NO: 320663 - DNA, 15 bp, Homo sapiens
ttcaagacaatctag

SEQ ID NO: 320664 - DNA, 15 bp, Homo sapiens
cttcaagacaatcta

SEQ ID NO: 320665 - DNA, 15 bp, Homo sapiens
tcttcaagacaatct

SEQ ID NO: 320666 - DNA, 15 bp, Homo sapiens
atcttcaagacaatc

SEQ ID NO: 320667 - DNA, 15 bp, Homo sapiens
gatcttcaagacaat

SEQ ID NO: 320668 - DNA, 15 bp, Homo sapiens
tgatcttcaagacaa

SEQ ID NO: 320669 - DNA, 15 bp, Homo sapiens
ctgatcttcaagaca

SEQ ID NO: 320670 - DNA, 15 bp, Homo sapiens
gctgatcttcaagac

SEQ ID NO: 320671 - DNA, 15 bp, Homo sapiens
ggctgatcttcaaga

SEQ ID NO: 320672 - DNA, 15 bp, Homo sapiens
aggctgatcttcaag

SEQ ID NO: 320673 - DNA, 15 bp, Homo sapiens
taggctgatcttcaa

SEQ ID NO: 320674 - DNA, 15 bp, Homo sapiens
gtaggctgatcttca

SEQ ID NO: 320675 - DNA, 15 bp, Homo sapiens
agtaggctgatcttc

SEQ ID NO: 320676 - DNA, 15 bp, Homo sapiens
aagtaggctgatctt

SEQ ID NO: 320677 - DNA, 15 bp, Homo sapiens
caagtaggctgatct

SEQ ID NO: 320678 - DNA, 15 bp, Homo sapiens
ccaagtaggctgatc

SEQ ID NO: 320679 - DNA, 15 bp, Homo sapiens
cccaagtaggctgat

SEQ ID NO: 320680 - DNA, 15 bp, Homo sapiens
gcccaagtaggctga

SEQ ID NO: 320681 - DNA, 15 bp, Homo sapiens
agcccaagtaggctg

SEQ ID NO: 320682 - DNA, 15 bp, Homo sapiens
gagcccaagtaggct

SEQ ID NO: 320683 - DNA, 15 bp, Homo sapiens
agagcccaagtaggc

SEQ ID NO: 320684 - DNA, 15 bp, Homo sapiens
gagagcccaagtagg

SEQ ID NO: 320685 - DNA, 15 bp, Homo sapiens
tgagagcccaagtag

SEQ ID NO: 320686 - DNA, 15 bp, Homo sapiens
ctgagagcccaagta

SEQ ID NO: 320687 - DNA, 15 bp, Homo sapiens
gctgagagcccaagt

SEQ ID NO: 320688 - DNA, 15 bp, Homo sapiens
tgctgagagcccaag

SEQ ID NO: 320689 - DNA, 15 bp, Homo sapiens
ctgctgagagcccaa

SEQ ID NO: 320690 - DNA, 15 bp, Homo sapiens
tctgctgagagccca

SEQ ID NO: 320691 - DNA, 15 bp, Homo sapiens
gtctgctgagagccc

SEQ ID NO: 320692 - DNA, 15 bp, Homo sapiens
tgtctgctgagagcc

SEQ ID NO: 320693 - DNA, 15 bp, Homo sapiens
ttgtctgctgagagc

SEQ ID NO: 320694 - DNA, 15 bp, Homo sapiens
tttgtctgctgagag

SEQ ID NO: 320695 - DNA, 15 bp, Homo sapiens
ttttgtctgctgaga

SEQ ID NO: 320696 - DNA, 15 bp, Homo sapiens
tttttgtctgctgag

SEQ ID NO: 320697 - DNA, 15 bp, Homo sapiens
ttttttgtctgctga

SEQ ID NO: 320698 - DNA, 15 bp, Homo sapiens
cttttttgtctgctg

SEQ ID NO: 320699 - DNA, 15 bp, Homo sapiens
tcttttttgtctgct

SEQ ID NO: 320700 - DNA, 15 bp, Homo sapiens
atcttttttgtctgc

SEQ ID NO: 320701 - DNA, 15 bp, Homo sapiens
catcttttttgtctg

SEQ ID NO: 320702 - DNA, 15 bp, Homo sapiens
tcatcttttttgtct

SEQ ID NO: 320703 - DNA, 15 bp, Homo sapiens
ctcatcttttttgtc

SEQ ID NO: 320704 - DNA, 15 bp, Homo sapiens
actcatcttttttgt

SEQ ID NO: 320705 - DNA, 15 bp, Homo sapiens
tactcatcttttttg

SEQ ID NO: 320706 - DNA, 15 bp, Homo sapiens
atactcatctttttt

SEQ ID NO: 320707 - DNA, 15 bp, Homo sapiens
tatactcatcttttt

SEQ ID NO: 320708 - DNA, 15 bp, Homo sapiens
ctatactcatctttt

SEQ ID NO: 320709 - DNA, 15 bp, Homo sapiens
actatactcatcttt

SEQ ID NO: 320710 - DNA, 15 bp, Homo sapiens
cactatactcatctt

SEQ ID NO: 320711 - DNA, 15 bp, Homo sapiens
acactatactcatct

SEQ ID NO: 320712 - DNA, 15 bp, Homo sapiens
gacactatactcatc

SEQ ID NO: 320713 - DNA, 15 bp, Homo sapiens
agacactatactcat

SEQ ID NO: 320714 - DNA, 15 bp, Homo sapiens
cagacactatactca

SEQ ID NO: 320715 - DNA, 15 bp, Homo sapiens
acagacactatactc

SEQ ID NO: 320716 - DNA, 15 bp, Homo sapiens
cacagacactatact

SEQ ID NO: 320717 - DNA, 15 bp, Homo sapiens
acacagacactatac

SEQ ID NO: 320718 - DNA, 15 bp, Homo sapiens
aacacagacactata

SEQ ID NO: 320719 - DNA, 15 bp, Homo sapiens
gaacacagacactat

SEQ ID NO: 320720 - DNA, 15 bp, Homo sapiens
agaacacagacacta

SEQ ID NO: 320721 - DNA, 15 bp, Homo sapiens
cagaacacagacact

SEQ ID NO: 320722 - DNA, 15 bp, Homo sapiens
ccagaacacagacac

SEQ ID NO: 320723 - DNA, 15 bp, Homo sapiens
cccagaacacagaca

SEQ ID NO: 320724 - DNA, 15 bp, Homo sapiens
tcccagaacacagac

SEQ ID NO: 320725 - DNA, 15 bp, Homo sapiens
ctcccagaacacaga

SEQ ID NO: 320726 - DNA, 15 bp, Homo sapiens
cctcccagaacacag

SEQ ID NO: 320727 - DNA, 15 bp, Homo sapiens
ccctcccagaacaca

SEQ ID NO: 320728 - DNA, 15 bp, Homo sapiens
cccctcccagaacac

SEQ ID NO: 320729 - DNA, 15 bp, Homo sapiens
ccccctcccagaaca

SEQ ID NO: 320730 - DNA, 15 bp, Homo sapiens
gccccctcccagaac

SEQ ID NO: 320731 - DNA, 15 bp, Homo sapiens
agccccctcccagaa

SEQ ID NO: 320732 - DNA, 15 bp, Homo sapiens
aagccccctcccaga

SEQ ID NO: 320733 - DNA, 15 bp, Homo sapiens
caagccccctcccag

SEQ ID NO: 320734 - DNA, 15 bp, Homo sapiens
tcaagccccctccca

SEQ ID NO: 320735 - DNA, 15 bp, Homo sapiens
atcaagccccctccc

SEQ ID NO: 320736 - DNA, 15 bp, Homo sapiens
aatcaagccccctcc

SEQ ID NO: 320737 - DNA, 15 bp, Homo sapiens
aaatcaagccccctc

SEQ ID NO: 320738 - DNA, 15 bp, Homo sapiens
caaatcaagccccct

SEQ ID NO: 320739 - DNA, 15 bp, Homo sapiens
ccaaatcaagccccc

SEQ ID NO: 320740 - DNA, 15 bp, Homo sapiens
cccaaatcaagcccc

SEQ ID NO: 320741 - DNA, 15 bp, Homo sapiens
ccccaaatcaagccc

SEQ ID NO: 320742 - DNA, 15 bp, Homo sapiens
gccccaaatcaagcc

SEQ ID NO: 320743 - DNA, 15 bp, Homo sapiens
ggccccaaatcaagc

SEQ ID NO: 320744 - DNA, 15 bp, Homo sapiens
gggccccaaatcaag

SEQ ID NO: 320745 - DNA, 15 bp, Homo sapiens
agggccccaaatcaa

SEQ ID NO: 320746 - DNA, 15 bp, Homo sapiens
cagggccccaaatca

SEQ ID NO: 320747 - DNA, 15 bp, Homo sapiens
ccagggccccaaatc

SEQ ID NO: 320748 - DNA, 15 bp, Homo sapiens
accagggccccaaat

SEQ ID NO: 320749 - DNA, 15 bp, Homo sapiens
caccagggccccaaa

SEQ ID NO: 320750 - DNA, 15 bp, Homo sapiens
acaccagggccccaa

SEQ ID NO: 320751 - DNA, 15 bp, Homo sapiens
cacaccagggcccca

SEQ ID NO: 320752 - DNA, 15 bp, Homo sapiens
gcacaccagggcccc

SEQ ID NO: 320753 - DNA, 15 bp, Homo sapiens
tgcacaccagggccc

SEQ ID NO: 320754 - DNA, 15 bp, Homo sapiens
ctgcacaccagggcc

SEQ ID NO: 320755 - DNA, 15 bp, Homo sapiens
actgcacaccagggc

SEQ ID NO: 320756 - DNA, 15 bp, Homo sapiens
aactgcacaccaggg

SEQ ID NO: 320757 - DNA, 15 bp, Homo sapiens
taactgcacaccagg

SEQ ID NO: 320758 - DNA, 15 bp, Homo sapiens
ataactgcacaccag

SEQ ID NO: 320759 - DNA, 15 bp, Homo sapiens
gataactgcacacca

SEQ ID NO: 320760 - DNA, 15 bp, Homo sapiens
tgataactgcacacc

SEQ ID NO: 320761 - DNA, 15 bp, Homo sapiens
ttgataactgcacac

SEQ ID NO: 320762 - DNA, 15 bp, Homo sapiens
gttgataactgcaca

SEQ ID NO: 320763 - DNA, 15 bp, Homo sapiens
cgttgataactgcac

SEQ ID NO: 320764 - DNA, 15 bp, Homo sapiens
acgttgataactgca

SEQ ID NO: 320765 - DNA, 15 bp, Homo sapiens
gacgttgataactgc

SEQ ID NO: 320766 - DNA, 15 bp, Homo sapiens
ggacgttgataactg

SEQ ID NO: 320767 - DNA, 15 bp, Homo sapiens
tggacgttgataact

SEQ ID NO: 320768 - DNA, 15 bp, Homo sapiens
gtggacgttgataac

SEQ ID NO: 320769 - DNA, 15 bp, Homo sapiens
tgtggacgttgataa

SEQ ID NO: 320770 - DNA, 15 bp, Homo sapiens
atgtggacgttgata

SEQ ID NO: 320771 - DNA, 15 bp, Homo sapiens
gatgtggacgttgat

SEQ ID NO: 320772 - DNA, 15 bp, Homo sapiens
ggatgtggacgttga

SEQ ID NO: 320773 - DNA, 15 bp, Homo sapiens
aggatgtggacgttg

SEQ ID NO: 320774 - DNA, 15 bp, Homo sapiens
aaggatgtggacgtt

SEQ ID NO: 320775 - DNA, 15 bp, Homo sapiens
caaggatgtggacgt

SEQ ID NO: 320776 - DNA, 15 bp, Homo sapiens
acaaggatgtggacg

SEQ ID NO: 320777 - DNA, 15 bp, Homo sapiens
gacaaggatgtggac

SEQ ID NO: 320778 - DNA, 15 bp, Homo sapiens
agacaaggatgtgga

SEQ ID NO: 320779 - DNA, 15 bp, Homo sapiens
gagacaaggatgtgg

SEQ ID NO: 320780 - DNA, 15 bp, Homo sapiens
agagacaaggatgtg

SEQ ID NO: 320781 - DNA, 15 bp, Homo sapiens
cagagacaaggatgt

SEQ ID NO: 320782 - DNA, 15 bp, Homo sapiens
ccagagacaaggatg

SEQ ID NO: 320783 - DNA, 15 bp, Homo sapiens
gccagagacaaggat

SEQ ID NO: 320784 - DNA, 15 bp, Homo sapiens
tgccagagacaagga

SEQ ID NO: 320785 - DNA, 15 bp, Homo sapiens
ctgccagagacaagg

SEQ ID NO: 320786 - DNA, 15 bp, Homo sapiens
cctgccagagacaag

SEQ ID NO: 320787 - DNA, 15 bp, Homo sapiens
tcctgccagagacaa

SEQ ID NO: 320788 - DNA, 15 bp, Homo sapiens
ctcctgccagagaca

SEQ ID NO: 320789 - DNA, 15 bp, Homo sapiens
gctcctgccagagac

SEQ ID NO: 320790 - DNA, 15 bp, Homo sapiens
cgctcctgccagaga

SEQ ID NO: 320791 - DNA, 15 bp, Homo sapiens
ccgctcctgccagag

SEQ ID NO: 320792 - DNA, 15 bp, Homo sapiens
tccgctcctgccaga

SEQ ID NO: 320793 - DNA, 15 bp, Homo sapiens
ctccgctcctgccag

SEQ ID NO: 320794 - DNA, 15 bp, Homo sapiens
gctccgctcctgcca

SEQ ID NO: 320795 - DNA, 15 bp, Homo sapiens
tgctccgctcctgcc

SEQ ID NO: 320796 - DNA, 15 bp, Homo sapiens
ctgctccgctcctgc

SEQ ID NO: 320797 - DNA, 15 bp, Homo sapiens
gctgctccgctcctg

SEQ ID NO: 320798 - DNA, 15 bp, Homo sapiens
cgctgctccgctcct

SEQ ID NO: 320799 - DNA, 15 bp, Homo sapiens
tcgctgctccgctcc

SEQ ID NO: 320800 - DNA, 15 bp, Homo sapiens
ttcgctgctccgctc

SEQ ID NO: 320801 - DNA, 15 bp, Homo sapiens
gttcgctgctccgct

SEQ ID NO: 320802 - DNA, 15 bp, Homo sapiens
tgttcgctgctccgc

SEQ ID NO: 320803 - DNA, 15 bp, Homo sapiens
ctgttcgctgctccg

SEQ ID NO: 320804 - DNA, 15 bp, Homo sapiens
tctgttcgctgctcc

SEQ ID NO: 320805 - DNA, 15 bp, Homo sapiens
ttctgttcgctgctc

SEQ ID NO: 320806 - DNA, 15 bp, Homo sapiens
attctgttcgctgct

SEQ ID NO: 320807 - DNA, 15 bp, Homo sapiens
gattctgttcgctgc

SEQ ID NO: 320808 - DNA, 15 bp, Homo sapiens
ggattctgttcgctg

SEQ ID NO: 320809 - DNA, 15 bp, Homo sapiens
tggattctgttcgct

SEQ ID NO: 320810 - DNA, 15 bp, Homo sapiens
atggattctgttcgc

SEQ ID NO: 320811 - DNA, 15 bp, Homo sapiens
gatggattctgttcg

SEQ ID NO: 320812 - DNA, 15 bp, Homo sapiens
tgatggattctgttc

SEQ ID NO: 320813 - DNA, 15 bp, Homo sapiens
atgatggattctgtt

SEQ ID NO: 320814 - DNA, 15 bp, Homo sapiens
aatgatggattctgt

SEQ ID NO: 320815 - DNA, 15 bp, Homo sapiens
gaatgatggattctg

SEQ ID NO: 320816 - DNA, 15 bp, Homo sapiens
tgaatgatggattct

SEQ ID NO: 320817 - DNA, 15 bp, Homo sapiens
gtgaatgatggattc

SEQ ID NO: 320818 - DNA, 15 bp, Homo sapiens
ggtgaatgatggatt

SEQ ID NO: 320819 - DNA, 15 bp, Homo sapiens
cggtgaatgatggat

SEQ ID NO: 320820 - DNA, 15 bp, Homo sapiens
ccggtgaatgatgga

SEQ ID NO: 320821 - DNA, 15 bp, Homo sapiens
cccggtgaatgatgg

SEQ ID NO: 320822 - DNA, 15 bp, Homo sapiens
gcccggtgaatgatg

SEQ ID NO: 320823 - DNA, 15 bp, Homo sapiens
agcccggtgaatgat

SEQ ID NO: 320824 - DNA, 15 bp, Homo sapiens
gagcccggtgaatga

SEQ ID NO: 320825 - DNA, 15 bp, Homo sapiens
agagcccggtgaatg

SEQ ID NO: 320826 - DNA, 15 bp, Homo sapiens
gagagcccggtgaat

SEQ ID NO: 320827 - DNA, 15 bp, Homo sapiens
agagagcccggtgaa

SEQ ID NO: 320828 - DNA, 15 bp, Homo sapiens
tagagagcccggtga

SEQ ID NO: 320829 - DNA, 15 bp, Homo sapiens
gtagagagcccggtg

SEQ ID NO: 320830 - DNA, 15 bp, Homo sapiens
agtagagagcccggt

SEQ ID NO: 320831 - DNA, 15 bp, Homo sapiens
tagtagagagcccgg

SEQ ID NO: 320832 - DNA, 15 bp, Homo sapiens
atagtagagagcccg

SEQ ID NO: 320833 - DNA, 15 bp, Homo sapiens
catagtagagagccc

SEQ ID NO: 320834 - DNA, 15 bp, Homo sapiens
tcatagtagagagcc

SEQ ID NO: 320835 - DNA, 15 bp, Homo sapiens
gtcatagtagagagc

SEQ ID NO: 320836 - DNA, 15 bp, Homo sapiens
agtcatagtagagag

SEQ ID NO: 320837 - DNA, 15 bp, Homo sapiens
aagtcatagtagaga

SEQ ID NO: 320838 - DNA, 15 bp, Homo sapiens
caagtcatagtagag

SEQ ID NO: 320839 - DNA, 15 bp, Homo sapiens
tcaagtcatagtaga

SEQ ID NO: 320840 - DNA, 15 bp, Homo sapiens
atcaagtcatagtag

SEQ ID NO: 320841 - DNA, 15 bp, Homo sapiens
gatcaagtcatagta

SEQ ID NO: 320842 - DNA, 15 bp, Homo sapiens
tgatcaagtcatagt

SEQ ID NO: 320843 - DNA, 15 bp, Homo sapiens
ctgatcaagtcatag

SEQ ID NO: 320844 - DNA, 15 bp, Homo sapiens
gctgatcaagtcata

SEQ ID NO: 320845 - DNA, 15 bp, Homo sapiens
tgctgatcaagtcat

SEQ ID NO: 320846 - DNA, 15 bp, Homo sapiens
ctgctgatcaagtca

SEQ ID NO: 320847 - DNA, 15 bp, Homo sapiens
gctgctgatcaagtc

SEQ ID NO: 320848 - DNA, 15 bp, Homo sapiens
ggctgctgatcaagt

SEQ ID NO: 320849 - DNA, 15 bp, Homo sapiens
gggctgctgatcaag

SEQ ID NO: 320850 - DNA, 15 bp, Homo sapiens
tgggctgctgatcaa

SEQ ID NO: 320851 - DNA, 15 bp, Homo sapiens
ctgggctgctgatca

SEQ ID NO: 320852 - DNA, 15 bp, Homo sapiens
tctgggctgctgatc

SEQ ID NO: 320853 - DNA, 15 bp, Homo sapiens
gtctgggctgctgat

SEQ ID NO: 320854 - DNA, 15 bp, Homo sapiens
tgtctgggctgctga

SEQ ID NO: 320855 - DNA, 15 bp, Homo sapiens
atgtctgggctgctg

SEQ ID NO: 320856 - DNA, 15 bp, Homo sapiens
gatgtctgggctgct

SEQ ID NO: 320857 - DNA, 15 bp, Homo sapiens
ggatgtctgggctgc

SEQ ID NO: 320858 - DNA, 15 bp, Homo sapiens
tggatgtctgggctg

SEQ ID NO: 320859 - DNA, 15 bp, Homo sapiens
atggatgtctgggct

SEQ ID NO: 320860 - DNA, 15 bp, Homo sapiens
catggatgtctgggc

SEQ ID NO: 320861 - DNA, 15 bp, Homo sapiens
ccatggatgtctggg

SEQ ID NO: 320862 - DNA, 15 bp, Homo sapiens
accatggatgtctgg

SEQ ID NO: 320863 - DNA, 15 bp, Homo sapiens
taccatggatgtctg

SEQ ID NO: 320864 - DNA, 15 bp, Homo sapiens
gtaccatggatgtct

SEQ ID NO: 320865 - DNA, 15 bp, Homo sapiens
ggtaccatggatgtc

SEQ ID NO: 320866 - DNA, 15 bp, Homo sapiens
aggtaccatggatgt

SEQ ID NO: 320867 - DNA, 15 bp, Homo sapiens
taggtaccatggatg

SEQ ID NO: 320868 - DNA, 15 bp, Homo sapiens
ataggtaccatggat

SEQ ID NO: 320869 - DNA, 15 bp, Homo sapiens
tataggtaccatgga

SEQ ID NO: 320870 - DNA, 15 bp, Homo sapiens
ttataggtaccatgg

SEQ ID NO: 320871 - DNA, 15 bp, Homo sapiens
cttataggtaccatg

SEQ ID NO: 320872 - DNA, 15 bp, Homo sapiens
ccttataggtaccat

SEQ ID NO: 320873 - DNA, 15 bp, Homo sapiens
tccttataggtacca

SEQ ID NO: 320874 - DNA, 15 bp, Homo sapiens
ctccttataggtacc

SEQ ID NO: 320875 - DNA, 15 bp, Homo sapiens
gctccttataggtac

SEQ ID NO: 320876 - DNA, 15 bp, Homo sapiens
agctccttataggta

SEQ ID NO: 320877 - DNA, 15 bp, Homo sapiens
gagctccttataggt

SEQ ID NO: 320878 - DNA, 15 bp, Homo sapiens
ggagctccttatagg

SEQ ID NO: 320879 - DNA, 15 bp, Homo sapiens
aggagctccttatag

SEQ ID NO: 320880 - DNA, 15 bp, Homo sapiens
aaggagctccttata

SEQ ID NO: 320881 - DNA, 15 bp, Homo sapiens
caaggagctccttat

SEQ ID NO: 320882 - DNA, 15 bp, Homo sapiens
tcaaggagctcctta

SEQ ID NO: 320883 - DNA, 15 bp, Homo sapiens
gtcaaggagctcctt

SEQ ID NO: 320884 - DNA, 15 bp, Homo sapiens
tgtcaaggagctcct

SEQ ID NO: 320885 - DNA, 15 bp, Homo sapiens
gtgtcaaggagctcc

SEQ ID NO: 320886 - DNA, 15 bp, Homo sapiens
cgtgtcaaggagctc

SEQ ID NO: 320887 - DNA, 15 bp, Homo sapiens
ccgtgtcaaggagct

SEQ ID NO: 320888 - DNA, 15 bp, Homo sapiens
accgtgtcaaggagc

SEQ ID NO: 320889 - DNA, 15 bp, Homo sapiens
gaccgtgtcaaggag

SEQ ID NO: 320890 - DNA, 15 bp, Homo sapiens
tgaccgtgtcaagga

SEQ ID NO: 320891 - DNA, 15 bp, Homo sapiens
gtgaccgtgtcaagg

SEQ ID NO: 320892 - DNA, 15 bp, Homo sapiens
agtgaccgtgtcaag

SEQ ID NO: 320893 - DNA, 15 bp, Homo sapiens
cagtgaccgtgtcaa

SEQ ID NO: 320894 - DNA, 15 bp, Homo sapiens
gcagtgaccgtgtca

SEQ ID NO: 320895 - DNA, 15 bp, Homo sapiens
ggcagtgaccgtgtc

SEQ ID NO: 320896 - DNA, 15 bp, Homo sapiens
gggcagtgaccgtgt

SEQ ID NO: 320897 - DNA, 15 bp, Homo sapiens
ggggcagtgaccgtg

SEQ ID NO: 320898 - DNA, 15 bp, Homo sapiens
gggggcagtgaccgt

SEQ ID NO: 320899 - DNA, 15 bp, Homo sapiens
ggggggcagtgaccg

SEQ ID NO: 320900 - DNA, 15 bp, Homo sapiens
tggggggcagtgacc

SEQ ID NO: 320901 - DNA, 15 bp, Homo sapiens
gcgcggtggctcaca

SEQ ID NO: 320902 - DNA, 15 bp, Homo sapiens
agcgcggtggctcac

SEQ ID NO: 320903 - DNA, 15 bp, Homo sapiens
gagcgcggtggctca

SEQ ID NO: 320904 - DNA, 15 bp, Homo sapiens
cgagcgcggtggctc

SEQ ID NO: 320905 - DNA, 15 bp, Homo sapiens
ccgagcgcggtggct

SEQ ID NO: 320906 - DNA, 15 bp, Homo sapiens
gccgagcgcggtggc

SEQ ID NO: 320907 - DNA, 15 bp, Homo sapiens
ggccgagcgcggtgg

SEQ ID NO: 320908 - DNA, 15 bp, Homo sapiens
gggccgagcgcggtg

SEQ ID NO: 320909 - DNA, 15 bp, Homo sapiens
cgggccgagcgcggt

SEQ ID NO: 320910 - DNA, 15 bp, Homo sapiens
acgggccgagcgcgg

SEQ ID NO: 320911 - DNA, 15 bp, Homo sapiens
aacgggccgagcgcg

SEQ ID NO: 320912 - DNA, 15 bp, Homo sapiens
aaacgggccgagcgc

SEQ ID NO: 320913 - DNA, 15 bp, Homo sapiens
gaaacgggccgagcg

SEQ ID NO: 320914 - DNA, 15 bp, Homo sapiens
agaaacgggccgagc

SEQ ID NO: 320915 - DNA, 15 bp, Homo sapiens
tagaaacgggccgag

SEQ ID NO: 320916 - DNA, 15 bp, Homo sapiens
ttagaaacgggccga

SEQ ID NO: 320917 - DNA, 15 bp, Homo sapiens
tttagaaacgggccg

SEQ ID NO: 320918 - DNA, 15 bp, Homo sapiens
gtttagaaacgggcc

SEQ ID NO: 320919 - DNA, 15 bp, Homo sapiens
tgtttagaaacgggc

SEQ ID NO: 320920 - DNA, 15 bp, Homo sapiens
ttgtttagaaacggg

SEQ ID NO: 320921 - DNA, 15 bp, Homo sapiens
attgtttagaaacgg

SEQ ID NO: 320922 - DNA, 15 bp, Homo sapiens
tattgtttagaaacg

SEQ ID NO: 320923 - DNA, 15 bp, Homo sapiens
ctattgtttagaaac

SEQ ID NO: 320924 - DNA, 15 bp, Homo sapiens
tctattgtttagaaa

SEQ ID NO: 320925 - DNA, 15 bp, Homo sapiens
atctattgtttagaa

SEQ ID NO: 320926 - DNA, 15 bp, Homo sapiens
gatctattgtttaga

SEQ ID NO: 320927 - DNA, 15 bp, Homo sapiens
tgatctattgtttag

SEQ ID NO: 320928 - DNA, 15 bp, Homo sapiens
atgatctattgttta

SEQ ID NO: 320929 - DNA, 15 bp, Homo sapiens
catgatctattgttt

SEQ ID NO: 320930 - DNA, 15 bp, Homo sapiens
acatgatctattgtt

SEQ ID NO: 320931 - DNA, 15 bp, Homo sapiens
cacatgatctattgt

SEQ ID NO: 320932 - DNA, 15 bp, Homo sapiens
acacatgatctattg

SEQ ID NO: 320933 - DNA, 15 bp, Homo sapiens
cacacatgatctatt

SEQ ID NO: 320934 - DNA, 15 bp, Homo sapiens
gcacacatgatctat

SEQ ID NO: 320935 - DNA, 15 bp, Homo sapiens
ggcacacatgatcta

SEQ ID NO: 320936 - DNA, 15 bp, Homo sapiens
gggcacacatgatct

SEQ ID NO: 320937 - DNA, 15 bp, Homo sapiens
tgggcacacatgatc

SEQ ID NO: 320938 - DNA, 15 bp, Homo sapiens
ctgggcacacatgat

SEQ ID NO: 320939 - DNA, 15 bp, Homo sapiens
cctgggcacacatga

SEQ ID NO: 320940 - DNA, 15 bp, Homo sapiens
gcctgggcacacatg

SEQ ID NO: 320941 - DNA, 15 bp, Homo sapiens
ggcctgggcacacat

SEQ ID NO: 320942 - DNA, 15 bp, Homo sapiens
aggcctgggcacaca

SEQ ID NO: 320943 - DNA, 15 bp, Homo sapiens
caggcctgggcacac

SEQ ID NO: 320944 - DNA, 15 bp, Homo sapiens
ccaggcctgggcaca

SEQ ID NO: 320945 - DNA, 15 bp, Homo sapiens
gccaggcctgggcac

SEQ ID NO: 320946 - DNA, 15 bp, Homo sapiens
ggccaggcctgggca

SEQ ID NO: 320947 - DNA, 15 bp, Homo sapiens
aggccaggcctgggc

SEQ ID NO: 320948 - DNA, 15 bp, Homo sapiens
caggccaggcctggg

SEQ ID NO: 320949 - DNA, 15 bp, Homo sapiens
ccaggccaggcctgg

SEQ ID NO: 320950 - DNA, 15 bp, Homo sapiens
gccaggccaggcctg

SEQ ID NO: 320951 - DNA, 15 bp, Homo sapiens
tgccaggccaggcct

SEQ ID NO: 320952 - DNA, 15 bp, Homo sapiens
gtgccaggccaggcc

SEQ ID NO: 320953 - DNA, 15 bp, Homo sapiens
agtgccaggccaggc

SEQ ID NO: 320954 - DNA, 15 bp, Homo sapiens
cagtgccaggccagg

SEQ ID NO: 320955 - DNA, 15 bp, Homo sapiens
ccagtgccaggccag

SEQ ID NO: 320956 - DNA, 15 bp, Homo sapiens
accagtgccaggcca

SEQ ID NO: 320957 - DNA, 15 bp, Homo sapiens
caccagtgccaggcc

SEQ ID NO: 320958 - DNA, 15 bp, Homo sapiens
acaccagtgccaggc

SEQ ID NO: 320959 - DNA, 15 bp, Homo sapiens
cacaccagtgccagg

SEQ ID NO: 320960 - DNA, 15 bp, Homo sapiens
ccacaccagtgccag

SEQ ID NO: 320961 - DNA, 15 bp, Homo sapiens
tccacaccagtgcca

SEQ ID NO: 320962 - DNA, 15 bp, Homo sapiens
ctccacaccagtgcc

SEQ ID NO: 320963 - DNA, 15 bp, Homo sapiens
cctccacaccagtgc

SEQ ID NO: 320964 - DNA, 15 bp, Homo sapiens
tcctccacaccagtg

SEQ ID NO: 320965 - DNA, 15 bp, Homo sapiens
ttcctccacaccagt

SEQ ID NO: 320966 - DNA, 15 bp, Homo sapiens
cttcctccacaccag

SEQ ID NO: 320967 - DNA, 15 bp, Homo sapiens
ccttcctccacacca

SEQ ID NO: 320968 - DNA, 15 bp, Homo sapiens
cccttcctccacacc

SEQ ID NO: 320969 - DNA, 15 bp, Homo sapiens
gcccttcctccacac

SEQ ID NO: 320970 - DNA, 15 bp, Homo sapiens
ggcccttcctccaca

SEQ ID NO: 320971 - DNA, 15 bp, Homo sapiens
gggcccttcctccac

SEQ ID NO: 320972 - DNA, 15 bp, Homo sapiens
cgggcccttcctcca

SEQ ID NO: 320973 - DNA, 15 bp, Homo sapiens
acgggcccttcctcc

SEQ ID NO: 320974 - DNA, 15 bp, Homo sapiens
cacgggcccttcctc

SEQ ID NO: 320975 - DNA, 15 bp, Homo sapiens
tcacgggcccttcct

SEQ ID NO: 320976 - DNA, 15 bp, Homo sapiens
ctcacgggcccttcc

SEQ ID NO: 320977 - DNA, 15 bp, Homo sapiens
gctcacgggcccttc

SEQ ID NO: 320978 - DNA, 15 bp, Homo sapiens
ggctcacgggccctt

SEQ ID NO: 320979 - DNA, 15 bp, Homo sapiens
gggctcacgggccct

SEQ ID NO: 320980 - DNA, 15 bp, Homo sapiens
tgggctcacgggccc

SEQ ID NO: 320981 - DNA, 15 bp, Homo sapiens
ttgggctcacgggcc

SEQ ID NO: 320982 - DNA, 15 bp, Homo sapiens
tttgggctcacgggc

SEQ ID NO: 320983 - DNA, 15 bp, Homo sapiens
ctttgggctcacggg

SEQ ID NO: 320984 - DNA, 15 bp, Homo sapiens
tctttgggctcacgg

SEQ ID NO: 320985 - DNA, 15 bp, Homo sapiens
ctctttgggctcacg

SEQ ID NO: 320986 - DNA, 15 bp, Homo sapiens
cctctttgggctcac

SEQ ID NO: 320987 - DNA, 15 bp, Homo sapiens
gcctctttgggctca

SEQ ID NO: 320988 - DNA, 15 bp, Homo sapiens
agcctctttgggctc

SEQ ID NO: 320989 - DNA, 15 bp, Homo sapiens
gagcctctttgggct

SEQ ID NO: 320990 - DNA, 15 bp, Homo sapiens
tgagcctctttgggc

SEQ ID NO: 320991 - DNA, 15 bp, Homo sapiens
ctgagcctctttggg

SEQ ID NO: 320992 - DNA, 15 bp, Homo sapiens
tctgagcctctttgg

SEQ ID NO: 320993 - DNA, 15 bp, Homo sapiens
ttctgagcctctttg

SEQ ID NO: 320994 - DNA, 15 bp, Homo sapiens
tttctgagcctcttt

SEQ ID NO: 320995 - DNA, 15 bp, Homo sapiens
ctttctgagcctctt

SEQ ID NO: 320996 - DNA, 15 bp, Homo sapiens
tctttctgagcctct

SEQ ID NO: 320997 - DNA, 15 bp, Homo sapiens
ctctttctgagcctc

SEQ ID NO: 320998 - DNA, 15 bp, Homo sapiens
cctctttctgagcct

SEQ ID NO: 320999 - DNA, 15 bp, Homo sapiens
tcctctttctgagcc

SEQ ID NO: 321000 - DNA, 15 bp, Homo sapiens
ttcctctttctgagc

SEQ ID NO: 321001 - DNA, 15 bp, Homo sapiens
cttcctctttctgag

SEQ ID NO: 321002 - DNA, 15 bp, Homo sapiens
acttcctctttctga

SEQ ID NO: 321003 - DNA, 15 bp, Homo sapiens
cacttcctctttctg

SEQ ID NO: 321004 - DNA, 15 bp, Homo sapiens
ccacttcctctttct

SEQ ID NO: 321005 - DNA, 15 bp, Homo sapiens
cccacttcctctttc

SEQ ID NO: 321006 - DNA, 15 bp, Homo sapiens
gcccacttcctcttt

SEQ ID NO: 321007 - DNA, 15 bp, Homo sapiens
agcccacttcctctt

SEQ ID NO: 321008 - DNA, 15 bp, Homo sapiens
cagcccacttcctct

SEQ ID NO: 321009 - DNA, 15 bp, Homo sapiens
gcagcccacttcctc

SEQ ID NO: 321010 - DNA, 15 bp, Homo sapiens
tgcagcccacttcct

SEQ ID NO: 321011 - DNA, 15 bp, Homo sapiens
ctgcagcccacttcc

SEQ ID NO: 321012 - DNA, 15 bp, Homo sapiens
cctgcagcccacttc

SEQ ID NO: 321013 - DNA, 15 bp, Homo sapiens
tcctgcagcccactt

SEQ ID NO: 321014 - DNA, 15 bp, Homo sapiens
ctcctgcagcccact

SEQ ID NO: 321015 - DNA, 15 bp, Homo sapiens
tctcctgcagcccac

SEQ ID NO: 321016 - DNA, 15 bp, Homo sapiens
gtctcctgcagccca

SEQ ID NO: 321017 - DNA, 15 bp, Homo sapiens
cgtctcctgcagccc

SEQ ID NO: 321018 - DNA, 15 bp, Homo sapiens
ccgtctcctgcagcc

SEQ ID NO: 321019 - DNA, 15 bp, Homo sapiens
accgtctcctgcagc

SEQ ID NO: 321020 - DNA, 15 bp, Homo sapiens
caccgtctcctgcag

SEQ ID NO: 321021 - DNA, 15 bp, Homo sapiens
ccaccgtctcctgca

SEQ ID NO: 321022 - DNA, 15 bp, Homo sapiens
cccaccgtctcctgc

SEQ ID NO: 321023 - DNA, 15 bp, Homo sapiens
tcccaccgtctcctg

SEQ ID NO: 321024 - DNA, 15 bp, Homo sapiens
ctcccaccgtctcct

SEQ ID NO: 321025 - DNA, 15 bp, Homo sapiens
cctcccaccgtctcc

SEQ ID NO: 321026 - DNA, 15 bp, Homo sapiens
ccctcccaccgtctc

SEQ ID NO: 321027 - DNA, 15 bp, Homo sapiens
cccctcccaccgtct

SEQ ID NO: 321028 - DNA, 15 bp, Homo sapiens
gcccctcccaccgtc

SEQ ID NO: 321029 - DNA, 15 bp, Homo sapiens
tgcccctcccaccgt

SEQ ID NO: 321030 - DNA, 15 bp, Homo sapiens
ctgcccctcccaccg

SEQ ID NO: 321031 - DNA, 15 bp, Homo sapiens
cctgcccctcccacc

SEQ ID NO: 321032 - DNA, 15 bp, Homo sapiens
ccctgcccctcccac

SEQ ID NO: 321033 - DNA, 15 bp, Homo sapiens
tccctgcccctccca

SEQ ID NO: 321034 - DNA, 15 bp, Homo sapiens
ctccctgcccctccc

SEQ ID NO: 321035 - DNA, 15 bp, Homo sapiens
cctccctgcccctcc

SEQ ID NO: 321036 - DNA, 15 bp, Homo sapiens
ccctccctgcccctc

SEQ ID NO: 321037 - DNA, 15 bp, Homo sapiens
gccctccctgcccct

SEQ ID NO: 321038 - DNA, 15 bp, Homo sapiens
tgccctccctgcccc

SEQ ID NO: 321039 - DNA, 15 bp, Homo sapiens
ctgccctccctgccc

SEQ ID NO: 321040 - DNA, 15 bp, Homo sapiens
actgccctccctgcc

SEQ ID NO: 321041 - DNA, 15 bp, Homo sapiens
cactgccctccctgc

SEQ ID NO: 321042 - DNA, 15 bp, Homo sapiens
ccactgccctccctg

SEQ ID NO: 321043 - DNA, 15 bp, Homo sapiens
gccactgccctccct

SEQ ID NO: 321044 - DNA, 15 bp, Homo sapiens
cgccactgccctccc

SEQ ID NO: 321045 - DNA, 15 bp, Homo sapiens
gcgccactgccctcc

SEQ ID NO: 321046 - DNA, 15 bp, Homo sapiens
cgcgccactgccctc

SEQ ID NO: 321047 - DNA, 15 bp, Homo sapiens
tcgcgccactgccct

SEQ ID NO: 321048 - DNA, 15 bp, Homo sapiens
atcgcgccactgccc

SEQ ID NO: 321049 - DNA, 15 bp, Homo sapiens
catcgcgccactgcc

SEQ ID NO: 321050 - DNA, 15 bp, Homo sapiens
acatcgcgccactgc

SEQ ID NO: 321051 - DNA, 15 bp, Homo sapiens
cacatcgcgccactg

SEQ ID NO: 321052 - DNA, 15 bp, Homo sapiens
ccacatcgcgccact

SEQ ID NO: 321053 - DNA, 15 bp, Homo sapiens
cccacatcgcgccac

SEQ ID NO: 321054 - DNA, 15 bp, Homo sapiens
ccccacatcgcgcca

SEQ ID NO: 321055 - DNA, 15 bp, Homo sapiens
tccccacatcgcgcc

SEQ ID NO: 321056 - DNA, 15 bp, Homo sapiens
ttccccacatcgcgc

SEQ ID NO: 321057 - DNA, 15 bp, Homo sapiens
tttccccacatcgcg

SEQ ID NO: 321058 - DNA, 15 bp, Homo sapiens
atttccccacatcgc

SEQ ID NO: 321059 - DNA, 15 bp, Homo sapiens
gatttccccacatcg

SEQ ID NO: 321060 - DNA, 15 bp, Homo sapiens
agatttccccacatc

SEQ ID NO: 321061 - DNA, 15 bp, Homo sapiens
cagatttccccacat

SEQ ID NO: 321062 - DNA, 15 bp, Homo sapiens
gcagatttccccaca

SEQ ID NO: 321063 - DNA, 15 bp, Homo sapiens
agcagatttccccac

SEQ ID NO: 321064 - DNA, 15 bp, Homo sapiens
cagcagatttcccca

SEQ ID NO: 321065 - DNA, 15 bp, Homo sapiens
gcagcagatttcccc

SEQ ID NO: 321066 - DNA, 15 bp, Homo sapiens
ggcagcagatttccc

SEQ ID NO: 321067 - DNA, 15 bp, Homo sapiens
gggcagcagatttcc

SEQ ID NO: 321068 - DNA, 15 bp, Homo sapiens
ggggcagcagatttc

SEQ ID NO: 321069 - DNA, 15 bp, Homo sapiens
gggggcagcagattt

SEQ ID NO: 321070 - DNA, 15 bp, Homo sapiens
ggggggcagcagatt

SEQ ID NO: 321071 - DNA, 15 bp, Homo sapiens
aggggggcagcagat

SEQ ID NO: 321072 - DNA, 15 bp, Homo sapiens
caggggggcagcaga

SEQ ID NO: 321073 - DNA, 15 bp, Homo sapiens
ccaggggggcagcag

SEQ ID NO: 321074 - DNA, 15 bp, Homo sapiens
gccaggggggcagca

SEQ ID NO: 321075 - DNA, 15 bp, Homo sapiens
ggccaggggggcagc

SEQ ID NO: 321076 - DNA, 15 bp, Homo sapiens
tggccaggggggcag

SEQ ID NO: 321077 - DNA, 15 bp, Homo sapiens
ctggccaggggggca

SEQ ID NO: 321078 - DNA, 15 bp, Homo sapiens
actggccaggggggc

SEQ ID NO: 321079 - DNA, 15 bp, Homo sapiens
cactggccagggggg

SEQ ID NO: 321080 - DNA, 15 bp, Homo sapiens
gcactggccaggggg

SEQ ID NO: 321081 - DNA, 15 bp, Homo sapiens
ggcactggccagggg

SEQ ID NO: 321082 - DNA, 15 bp, Homo sapiens
aggcactggccaggg

SEQ ID NO: 321083 - DNA, 15 bp, Homo sapiens
caggcactggccagg

SEQ ID NO: 321084 - DNA, 15 bp, Homo sapiens
ccaggcactggccag

SEQ ID NO: 321085 - DNA, 15 bp, Homo sapiens
cccaggcactggcca

SEQ ID NO: 321086 - DNA, 15 bp, Homo sapiens
ccccaggcactggcc

SEQ ID NO: 321087 - DNA, 15 bp, Homo sapiens
tccccaggcactggc

SEQ ID NO: 321088 - DNA, 15 bp, Homo sapiens
atccccaggcactgg

SEQ ID NO: 321089 - DNA, 15 bp, Homo sapiens
catccccaggcactg

SEQ ID NO: 321090 - DNA, 15 bp, Homo sapiens
gcatccccaggcact

SEQ ID NO: 321091 - DNA, 15 bp, Homo sapiens
ggcatccccaggcac

SEQ ID NO: 321092 - DNA, 15 bp, Homo sapiens
tggcatccccaggca

SEQ ID NO: 321093 - DNA, 15 bp, Homo sapiens
ctggcatccccaggc

SEQ ID NO: 321094 - DNA, 15 bp, Homo sapiens
gctggcatccccagg

SEQ ID NO: 321095 - DNA, 15 bp, Homo sapiens
tgctggcatccccag

SEQ ID NO: 321096 - DNA, 15 bp, Homo sapiens
ctgctggcatcccca

SEQ ID NO: 321097 - DNA, 15 bp, Homo sapiens
tctgctggcatcccc

SEQ ID NO: 321098 - DNA, 15 bp, Homo sapiens
ttctgctggcatccc

SEQ ID NO: 321099 - DNA, 15 bp, Homo sapiens
cttctgctggcatcc

SEQ ID NO: 321100 - DNA, 15 bp, Homo sapiens
acttctgctggcatc

SEQ ID NO: 321101 - DNA, 15 bp, Homo sapiens
gacttctgctggcat

SEQ ID NO: 321102 - DNA, 15 bp, Homo sapiens
ggacttctgctggca

SEQ ID NO: 321103 - DNA, 15 bp, Homo sapiens
aggacttctgctggc

SEQ ID NO: 321104 - DNA, 15 bp, Homo sapiens
caggacttctgctgg

SEQ ID NO: 321105 - DNA, 15 bp, Homo sapiens
ccaggacttctgctg

SEQ ID NO: 321106 - DNA, 15 bp, Homo sapiens
gccaggacttctgct

SEQ ID NO: 321107 - DNA, 15 bp, Homo sapiens
tgccaggacttctgc

SEQ ID NO: 321108 - DNA, 15 bp, Homo sapiens
ttgccaggacttctg

SEQ ID NO: 321109 - DNA, 15 bp, Homo sapiens
cttgccaggacttct

SEQ ID NO: 321110 - DNA, 15 bp, Homo sapiens
acttgccaggacttc

SEQ ID NO: 321111 - DNA, 15 bp, Homo sapiens
gacttgccaggactt

SEQ ID NO: 321112 - DNA, 15 bp, Homo sapiens
tgacttgccaggact

SEQ ID NO: 321113 - DNA, 15 bp, Homo sapiens
gtgacttgccaggac

SEQ ID NO: 321114 - DNA, 15 bp, Homo sapiens
tgtgacttgccagga

SEQ ID NO: 321115 - DNA, 15 bp, Homo sapiens
ctgtgacttgccagg

SEQ ID NO: 321116 - DNA, 15 bp, Homo sapiens
cctgtgacttgccag

SEQ ID NO: 321117 - DNA, 15 bp, Homo sapiens
tcctgtgacttgcca

SEQ ID NO: 321118 - DNA, 15 bp, Homo sapiens
ttcctgtgacttgcc

SEQ ID NO: 321119 - DNA, 15 bp, Homo sapiens
cttcctgtgacttgc

SEQ ID NO: 321120 - DNA, 15 bp, Homo sapiens
tcttcctgtgacttg

SEQ ID NO: 321121 - DNA, 15 bp, Homo sapiens
atcttcctgtgactt

SEQ ID NO: 321122 - DNA, 15 bp, Homo sapiens
catcttcctgtgact

SEQ ID NO: 321123 - DNA, 15 bp, Homo sapiens
gcatcttcctgtgac

SEQ ID NO: 321124 - DNA, 15 bp, Homo sapiens
agcatcttcctgtga

SEQ ID NO: 321125 - DNA, 15 bp, Homo sapiens
cagcatcttcctgtg

SEQ ID NO: 321126 - DNA, 15 bp, Homo sapiens
ccagcatcttcctgt

SEQ ID NO: 321127 - DNA, 15 bp, Homo sapiens
gccagcatcttcctg

SEQ ID NO: 321128 - DNA, 15 bp, Homo sapiens
agccagcatcttcct

SEQ ID NO: 321129 - DNA, 15 bp, Homo sapiens
cagccagcatcttcc

SEQ ID NO: 321130 - DNA, 15 bp, Homo sapiens
ccagccagcatcttc

SEQ ID NO: 321131 - DNA, 15 bp, Homo sapiens
cccagccagcatctt

SEQ ID NO: 321132 - DNA, 15 bp, Homo sapiens
tcccagccagcatct

SEQ ID NO: 321133 - DNA, 15 bp, Homo sapiens
ttcccagccagcatc

SEQ ID NO: 321134 - DNA, 15 bp, Homo sapiens
cttcccagccagcat

SEQ ID NO: 321135 - DNA, 15 bp, Homo sapiens
acttcccagccagca

SEQ ID NO: 321136 - DNA, 15 bp, Homo sapiens
gacttcccagccagc

SEQ ID NO: 321137 - DNA, 15 bp, Homo sapiens
tgacttcccagccag

SEQ ID NO: 321138 - DNA, 15 bp, Homo sapiens
ctgacttcccagcca

SEQ ID NO: 321139 - DNA, 15 bp, Homo sapiens
cctgacttcccagcc

SEQ ID NO: 321140 - DNA, 15 bp, Homo sapiens
ccctgacttcccagc

SEQ ID NO: 321141 - DNA, 15 bp, Homo sapiens
gccctgacttcccag

SEQ ID NO: 321142 - DNA, 15 bp, Homo sapiens
ggccctgacttccca

SEQ ID NO: 321143 - DNA, 15 bp, Homo sapiens
aggccctgacttccc

SEQ ID NO: 321144 - DNA, 15 bp, Homo sapiens
caggccctgacttcc

SEQ ID NO: 321145 - DNA, 15 bp, Homo sapiens
gcaggccctgacttc

SEQ ID NO: 321146 - DNA, 15 bp, Homo sapiens
agcaggccctgactt

SEQ ID NO: 321147 - DNA, 15 bp, Homo sapiens
cagcaggccctgact

SEQ ID NO: 321148 - DNA, 15 bp, Homo sapiens
tcagcaggccctgac

SEQ ID NO: 321149 - DNA, 15 bp, Homo sapiens
ctcagcaggccctga

SEQ ID NO: 321150 - DNA, 15 bp, Homo sapiens
gctcagcaggccctg

SEQ ID NO: 321151 - DNA, 15 bp, Homo sapiens
cgctcagcaggccct

SEQ ID NO: 321152 - DNA, 15 bp, Homo sapiens
gcgctcagcaggccc

SEQ ID NO: 321153 - DNA, 15 bp, Homo sapiens
agcgctcagcaggcc

SEQ ID NO: 321154 - DNA, 15 bp, Homo sapiens
tagcgctcagcaggc

SEQ ID NO: 321155 - DNA, 15 bp, Homo sapiens
ttagcgctcagcagg

SEQ ID NO: 321156 - DNA, 15 bp, Homo sapiens
tttagcgctcagcag

SEQ ID NO: 321157 - DNA, 15 bp, Homo sapiens
gtttagcgctcagca

SEQ ID NO: 321158 - DNA, 15 bp, Homo sapiens
ggtttagcgctcagc

SEQ ID NO: 321159 - DNA, 15 bp, Homo sapiens
tggtttagcgctcag

SEQ ID NO: 321160 - DNA, 15 bp, Homo sapiens
ctggtttagcgctca

SEQ ID NO: 321161 - DNA, 15 bp, Homo sapiens
tctggtttagcgctc

SEQ ID NO: 321162 - DNA, 15 bp, Homo sapiens
ttctggtttagcgct

SEQ ID NO: 321163 - DNA, 15 bp, Homo sapiens
gttctggtttagcgc

SEQ ID NO: 321164 - DNA, 15 bp, Homo sapiens
ggttctggtttagcg

SEQ ID NO: 321165 - DNA, 15 bp, Homo sapiens
gggttctggtttagc

SEQ ID NO: 321166 - DNA, 15 bp, Homo sapiens
cgggttctggtttag

SEQ ID NO: 321167 - DNA, 15 bp, Homo sapiens
tcgggttctggttta

SEQ ID NO: 321168 - DNA, 15 bp, Homo sapiens
ctcgggttctggttt

SEQ ID NO: 321169 - DNA, 15 bp, Homo sapiens
gctcgggttctggtt

SEQ ID NO: 321170 - DNA, 15 bp, Homo sapiens
ggctcgggttctggt

SEQ ID NO: 321171 - DNA, 15 bp, Homo sapiens
aggctcgggttctgg

SEQ ID NO: 321172 - DNA, 15 bp, Homo sapiens
caggctcgggttctg

SEQ ID NO: 321173 - DNA, 15 bp, Homo sapiens
ccaggctcgggttct

SEQ ID NO: 321174 - DNA, 15 bp, Homo sapiens
gccaggctcgggttc

SEQ ID NO: 321175 - DNA, 15 bp, Homo sapiens
tgccaggctcgggtt

SEQ ID NO: 321176 - DNA, 15 bp, Homo sapiens
ctgccaggctcgggt

SEQ ID NO: 321177 - DNA, 15 bp, Homo sapiens
cctgccaggctcggg

SEQ ID NO: 321178 - DNA, 15 bp, Homo sapiens
gcctgccaggctcgg

SEQ ID NO: 321179 - DNA, 15 bp, Homo sapiens
agcctgccaggctcg

SEQ ID NO: 321180 - DNA, 15 bp, Homo sapiens
gagcctgccaggctc

SEQ ID NO: 321181 - DNA, 15 bp, Homo sapiens
agagcctgccaggct

SEQ ID NO: 321182 - DNA, 15 bp, Homo sapiens
gagagcctgccaggc

SEQ ID NO: 321183 - DNA, 15 bp, Homo sapiens
tgagagcctgccagg

SEQ ID NO: 321184 - DNA, 15 bp, Homo sapiens
ttgagagcctgccag

SEQ ID NO: 321185 - DNA, 15 bp, Homo sapiens
tttgagagcctgcca

SEQ ID NO: 321186 - DNA, 15 bp, Homo sapiens
ctttgagagcctgcc

SEQ ID NO: 321187 - DNA, 15 bp, Homo sapiens
tctttgagagcctgc

SEQ ID NO: 321188 - DNA, 15 bp, Homo sapiens
gtctttgagagcctg

SEQ ID NO: 321189 - DNA, 15 bp, Homo sapiens
cgtctttgagagcct

SEQ ID NO: 321190 - DNA, 15 bp, Homo sapiens
ccgtctttgagagcc

SEQ ID NO: 321191 - DNA, 15 bp, Homo sapiens
cccgtctttgagagc

SEQ ID NO: 321192 - DNA, 15 bp, Homo sapiens
tcccgtctttgagag

SEQ ID NO: 321193 - DNA, 15 bp, Homo sapiens
atcccgtctttgaga

SEQ ID NO: 321194 - DNA, 15 bp, Homo sapiens
catcccgtctttgag

SEQ ID NO: 321195 - DNA, 15 bp, Homo sapiens
gcatcccgtctttga

SEQ ID NO: 321196 - DNA, 15 bp, Homo sapiens
agcatcccgtctttg

SEQ ID NO: 321197 - DNA, 15 bp, Homo sapiens
aagcatcccgtcttt

SEQ ID NO: 321198 - DNA, 15 bp, Homo sapiens
caagcatcccgtctt

SEQ ID NO: 321199 - DNA, 15 bp, Homo sapiens
acaagcatcccgtct

SEQ ID NO: 321200 - DNA, 15 bp, Homo sapiens
gacaagcatcccgtc

SEQ ID NO: 321201 - DNA, 15 bp, Homo sapiens
cgacaagcatcccgt

SEQ ID NO: 321202 - DNA, 15 bp, Homo sapiens
acgacaagcatcccg

SEQ ID NO: 321203 - DNA, 15 bp, Homo sapiens
gacgacaagcatccc

SEQ ID NO: 321204 - DNA, 15 bp, Homo sapiens
cgacgacaagcatcc

SEQ ID NO: 321205 - DNA, 15 bp, Homo sapiens
tcgacgacaagcatc

SEQ ID NO: 321206 - DNA, 15 bp, Homo sapiens
ctcgacgacaagcat

SEQ ID NO: 321207 - DNA, 15 bp, Homo sapiens
actcgacgacaagca

SEQ ID NO: 321208 - DNA, 15 bp, Homo sapiens
gactcgacgacaagc

SEQ ID NO: 321209 - DNA, 15 bp, Homo sapiens
agactcgacgacaag

SEQ ID NO: 321210 - DNA, 15 bp, Homo sapiens
gagactcgacgacaa

SEQ ID NO: 321211 - DNA, 15 bp, Homo sapiens
tgagactcgacgaca

SEQ ID NO: 321212 - DNA, 15 bp, Homo sapiens
atgagactcgacgac

SEQ ID NO: 321213 - DNA, 15 bp, Homo sapiens
tatgagactcgacga

SEQ ID NO: 321214 - DNA, 15 bp, Homo sapiens
gtatgagactcgacg

SEQ ID NO: 321215 - DNA, 15 bp, Homo sapiens
cgtatgagactcgac

SEQ ID NO: 321216 - DNA, 15 bp, Homo sapiens
gcgtatgagactcga

SEQ ID NO: 321217 - DNA, 15 bp, Homo sapiens
agcgtatgagactcg

SEQ ID NO: 321218 - DNA, 15 bp, Homo sapiens
tagcgtatgagactc

SEQ ID NO: 321219 - DNA, 15 bp, Homo sapiens
ttagcgtatgagact

SEQ ID NO: 321220 - DNA, 15 bp, Homo sapiens
gttagcgtatgagac

SEQ ID NO: 321221 - DNA, 15 bp, Homo sapiens
ggttagcgtatgaga

SEQ ID NO: 321222 - DNA, 15 bp, Homo sapiens
aggttagcgtatgag

SEQ ID NO: 321223 - DNA, 15 bp, Homo sapiens
gaggttagcgtatga

SEQ ID NO: 321224 - DNA, 15 bp, Homo sapiens
agaggttagcgtatg

SEQ ID NO: 321225 - DNA, 15 bp, Homo sapiens
cagaggttagcgtat

SEQ ID NO: 321226 - DNA, 15 bp, Homo sapiens
gcagaggttagcgta

SEQ ID NO: 321227 - DNA, 15 bp, Homo sapiens
agcagaggttagcgt

SEQ ID NO: 321228 - DNA, 15 bp, Homo sapiens
gagcagaggttagcg

SEQ ID NO: 321229 - DNA, 15 bp, Homo sapiens
ggagcagaggttagc

SEQ ID NO: 321230 - DNA, 15 bp, Homo sapiens
cggagcagaggttag

SEQ ID NO: 321231 - DNA, 15 bp, Homo sapiens
gcggagcagaggtta

SEQ ID NO: 321232 - DNA, 15 bp, Homo sapiens
ggcggagcagaggtt

SEQ ID NO: 321233 - DNA, 15 bp, Homo sapiens
aggcggagcagaggt

SEQ ID NO: 321234 - DNA, 15 bp, Homo sapiens
gaggcggagcagagg

SEQ ID NO: 321235 - DNA, 15 bp, Homo sapiens
agaggcggagcagag

SEQ ID NO: 321236 - DNA, 15 bp, Homo sapiens
aagaggcggagcaga

SEQ ID NO: 321237 - DNA, 15 bp, Homo sapiens
gaagaggcggagcag

SEQ ID NO: 321238 - DNA, 15 bp, Homo sapiens
agaagaggcggagca

SEQ ID NO: 321239 - DNA, 15 bp, Homo sapiens
gagaagaggcggagc

SEQ ID NO: 321240 - DNA, 15 bp, Homo sapiens
tgagaagaggcggag

SEQ ID NO: 321241 - DNA, 15 bp, Homo sapiens
ctgagaagaggcgga

SEQ ID NO: 321242 - DNA, 15 bp, Homo sapiens
tctgagaagaggcgg

SEQ ID NO: 321243 - DNA, 15 bp, Homo sapiens
ctctgagaagaggcg

SEQ ID NO: 321244 - DNA, 15 bp, Homo sapiens
gctctgagaagaggc

SEQ ID NO: 321245 - DNA, 15 bp, Homo sapiens
agctctgagaagagg

SEQ ID NO: 321246 - DNA, 15 bp, Homo sapiens
cagctctgagaagag

SEQ ID NO: 321247 - DNA, 15 bp, Homo sapiens
gcagctctgagaaga

SEQ ID NO: 321248 - DNA, 15 bp, Homo sapiens
cgcagctctgagaag

SEQ ID NO: 321249 - DNA, 15 bp, Homo sapiens
gcgcagctctgagaa

SEQ ID NO: 321250 - DNA, 15 bp, Homo sapiens
tgcgcagctctgaga

SEQ ID NO: 321251 - DNA, 15 bp, Homo sapiens
atgcgcagctctgag

SEQ ID NO: 321252 - DNA, 15 bp, Homo sapiens
tatgcgcagctctga

SEQ ID NO: 321253 - DNA, 15 bp, Homo sapiens
ttatgcgcagctctg

SEQ ID NO: 321254 - DNA, 15 bp, Homo sapiens
tttatgcgcagctct

SEQ ID NO: 321255 - DNA, 15 bp, Homo sapiens
ttttatgcgcagctc

SEQ ID NO: 321256 - DNA, 15 bp, Homo sapiens
attttatgcgcagct

SEQ ID NO: 321257 - DNA, 15 bp, Homo sapiens
gattttatgcgcagc

SEQ ID NO: 321258 - DNA, 15 bp, Homo sapiens
ggattttatgcgcag

SEQ ID NO: 321259 - DNA, 15 bp, Homo sapiens
tggattttatgcgca

SEQ ID NO: 321260 - DNA, 15 bp, Homo sapiens
ctggattttatgcgc

SEQ ID NO: 321261 - DNA, 15 bp, Homo sapiens
gctggattttatgcg

SEQ ID NO: 321262 - DNA, 15 bp, Homo sapiens
agctggattttatgc

SEQ ID NO: 321263 - DNA, 15 bp, Homo sapiens
aagctggattttatg

SEQ ID NO: 321264 - DNA, 15 bp, Homo sapiens
aaagctggattttat

SEQ ID NO: 321265 - DNA, 15 bp, Homo sapiens
caaagctggatttta

SEQ ID NO: 321266 - DNA, 15 bp, Homo sapiens
acaaagctggatttt

SEQ ID NO: 321267 - DNA, 15 bp, Homo sapiens
cacaaagctggattt

SEQ ID NO: 321268 - DNA, 15 bp, Homo sapiens
ccacaaagctggatt

SEQ ID NO: 321269 - DNA, 15 bp, Homo sapiens
gccacaaagctggat

SEQ ID NO: 321270 - DNA, 15 bp, Homo sapiens
tgccacaaagctgga

SEQ ID NO: 321271 - DNA, 15 bp, Homo sapiens
gtgccacaaagctgg

SEQ ID NO: 321272 - DNA, 15 bp, Homo sapiens
ggtgccacaaagctg

SEQ ID NO: 321273 - DNA, 15 bp, Homo sapiens
aggtgccacaaagct

SEQ ID NO: 321274 - DNA, 15 bp, Homo sapiens
gaggtgccacaaagc

SEQ ID NO: 321275 - DNA, 15 bp, Homo sapiens
agaggtgccacaaag

SEQ ID NO: 321276 - DNA, 15 bp, Homo sapiens
cagaggtgccacaaa

SEQ ID NO: 321277 - DNA, 15 bp, Homo sapiens
ccagaggtgccacaa

SEQ ID NO: 321278 - DNA, 15 bp, Homo sapiens
tccagaggtgccaca

SEQ ID NO: 321279 - DNA, 15 bp, Homo sapiens
ttccagaggtgccac

SEQ ID NO: 321280 - DNA, 15 bp, Homo sapiens
tttccagaggtgcca

SEQ ID NO: 321281 - DNA, 15 bp, Homo sapiens
ttttccagaggtgcc

SEQ ID NO: 321282 - DNA, 15 bp, Homo sapiens
cttttccagaggtgc

SEQ ID NO: 321283 - DNA, 15 bp, Homo sapiens
acttttccagaggtg

SEQ ID NO: 321284 - DNA, 15 bp, Homo sapiens
gacttttccagaggt

SEQ ID NO: 321285 - DNA, 15 bp, Homo sapiens
tgacttttccagagg

SEQ ID NO: 321286 - DNA, 15 bp, Homo sapiens
atgacttttccagag

SEQ ID NO: 321287 - DNA, 15 bp, Homo sapiens
tatgacttttccaga

SEQ ID NO: 321288 - DNA, 15 bp, Homo sapiens
atatgacttttccag

SEQ ID NO: 321289 - DNA, 15 bp, Homo sapiens
catatgacttttcca

SEQ ID NO: 321290 - DNA, 15 bp, Homo sapiens
ccatatgacttttcc

SEQ ID NO: 321291 - DNA, 15 bp, Homo sapiens
cccatatgacttttc

SEQ ID NO: 321292 - DNA, 15 bp, Homo sapiens
tcccatatgactttt

SEQ ID NO: 321293 - DNA, 15 bp, Homo sapiens
gtcccatatgacttt

SEQ ID NO: 321294 - DNA, 15 bp, Homo sapiens
ggtcccatatgactt

SEQ ID NO: 321295 - DNA, 15 bp, Homo sapiens
tggtcccatatgact

SEQ ID NO: 321296 - DNA, 15 bp, Homo sapiens
ctggtcccatatgac

SEQ ID NO: 321297 - DNA, 15 bp, Homo sapiens
cctggtcccatatga

SEQ ID NO: 321298 - DNA, 15 bp, Homo sapiens
gcctggtcccatatg

SEQ ID NO: 321299 - DNA, 15 bp, Homo sapiens
ggcctggtcccatat

SEQ ID NO: 321300 - DNA, 15 bp, Homo sapiens
gggcctggtcccata

SEQ ID NO: 321301 - DNA, 15 bp, Homo sapiens
tgggcctggtcccat

SEQ ID NO: 321302 - DNA, 15 bp, Homo sapiens
ctgggcctggtccca

SEQ ID NO: 321303 - DNA, 15 bp, Homo sapiens
tctgggcctggtccc

SEQ ID NO: 321304 - DNA, 15 bp, Homo sapiens
ctctgggcctggtcc

SEQ ID NO: 321305 - DNA, 15 bp, Homo sapiens
actctgggcctggtc

SEQ ID NO: 321306 - DNA, 15 bp, Homo sapiens
gactctgggcctggt

SEQ ID NO: 321307 - DNA, 15 bp, Homo sapiens
ggactctgggcctgg

SEQ ID NO: 321308 - DNA, 15 bp, Homo sapiens
aggactctgggcctg

SEQ ID NO: 321309 - DNA, 15 bp, Homo sapiens
caggactctgggcct

SEQ ID NO: 321310 - DNA, 15 bp, Homo sapiens
tcaggactctgggcc

SEQ ID NO: 321311 - DNA, 15 bp, Homo sapiens
gtcaggactctgggc

SEQ ID NO: 321312 - DNA, 15 bp, Homo sapiens
cgtcaggactctggg

SEQ ID NO: 321313 - DNA, 15 bp, Homo sapiens
ccgtcaggactctgg

SEQ ID NO: 321314 - DNA, 15 bp, Homo sapiens
cccgtcaggactctg

SEQ ID NO: 321315 - DNA, 15 bp, Homo sapiens
gcccgtcaggactct

SEQ ID NO: 321316 - DNA, 15 bp, Homo sapiens
tgcccgtcaggactc

SEQ ID NO: 321317 - DNA, 15 bp, Homo sapiens
ttgcccgtcaggact

SEQ ID NO: 321318 - DNA, 15 bp, Homo sapiens
gttgcccgtcaggac

SEQ ID NO: 321319 - DNA, 15 bp, Homo sapiens
ggttgcccgtcagga

SEQ ID NO: 321320 - DNA, 15 bp, Homo sapiens
gggttgcccgtcagg

SEQ ID NO: 321321 - DNA, 15 bp, Homo sapiens
agggttgcccgtcag

SEQ ID NO: 321322 - DNA, 15 bp, Homo sapiens
gagggttgcccgtca

SEQ ID NO: 321323 - DNA, 15 bp, Homo sapiens
cgagggttgcccgtc

SEQ ID NO: 321324 - DNA, 15 bp, Homo sapiens
gcgagggttgcccgt

SEQ ID NO: 321325 - DNA, 15 bp, Homo sapiens
agcgagggttgcccg

SEQ ID NO: 321326 - DNA, 15 bp, Homo sapiens
aagcgagggttgccc

SEQ ID NO: 321327 - DNA, 15 bp, Homo sapiens
caagcgagggttgcc

SEQ ID NO: 321328 - DNA, 15 bp, Homo sapiens
ccaagcgagggttgc

SEQ ID NO: 321329 - DNA, 15 bp, Homo sapiens
tccaagcgagggttg

SEQ ID NO: 321330 - DNA, 15 bp, Homo sapiens
gtccaagcgagggtt

SEQ ID NO: 321331 - DNA, 15 bp, Homo sapiens
ggtccaagcgagggt

SEQ ID NO: 321332 - DNA, 15 bp, Homo sapiens
ttcctttgtggacct

SEQ ID NO: 321333 - DNA, 15 bp, Homo sapiens
tttcctttgtggacc

SEQ ID NO: 321334 - DNA, 15 bp, Homo sapiens
atttcctttgtggac

SEQ ID NO: 321335 - DNA, 15 bp, Homo sapiens
aatttcctttgtgga

SEQ ID NO: 321336 - DNA, 15 bp, Homo sapiens
gaatttcctttgtgg

SEQ ID NO: 321337 - DNA, 15 bp, Homo sapiens
ggaatttcctttgtg

SEQ ID NO: 321338 - DNA, 15 bp, Homo sapiens
gggaatttcctttgt

SEQ ID NO: 321339 - DNA, 15 bp, Homo sapiens
cgggaatttcctttg

SEQ ID NO: 321340 - DNA, 15 bp, Homo sapiens
tcgggaatttccttt

SEQ ID NO: 321341 - DNA, 15 bp, Homo sapiens
atcgggaatttcctt

SEQ ID NO: 321342 - DNA, 15 bp, Homo sapiens
catcgggaatttcct

SEQ ID NO: 321343 - DNA, 15 bp, Homo sapiens
tcatcgggaatttcc

SEQ ID NO: 321344 - DNA, 15 bp, Homo sapiens
ctcatcgggaatttc

SEQ ID NO: 321345 - DNA, 15 bp, Homo sapiens
tctcatcgggaattt

SEQ ID NO: 321346 - DNA, 15 bp, Homo sapiens
atctcatcgggaatt

SEQ ID NO: 321347 - DNA, 15 bp, Homo sapiens
gatctcatcgggaat

SEQ ID NO: 321348 - DNA, 15 bp, Homo sapiens
tgatctcatcgggaa

SEQ ID NO: 321349 - DNA, 15 bp, Homo sapiens
ctgatctcatcggga

SEQ ID NO: 321350 - DNA, 15 bp, Homo sapiens
gctgatctcatcggg

SEQ ID NO: 321351 - DNA, 15 bp, Homo sapiens
tgctgatctcatcgg

SEQ ID NO: 321352 - DNA, 15 bp, Homo sapiens
atgctgatctcatcg

SEQ ID NO: 321353 - DNA, 15 bp, Homo sapiens
aatgctgatctcatc

SEQ ID NO: 321354 - DNA, 15 bp, Homo sapiens
gaatgctgatctcat

SEQ ID NO: 321355 - DNA, 15 bp, Homo sapiens
agaatgctgatctca

SEQ ID NO: 321356 - DNA, 15 bp, Homo sapiens
gagaatgctgatctc

SEQ ID NO: 321357 - DNA, 15 bp, Homo sapiens
ggagaatgctgatct

SEQ ID NO: 321358 - DNA, 15 bp, Homo sapiens
aggagaatgctgatc

SEQ ID NO: 321359 - DNA, 15 bp, Homo sapiens
aaggagaatgctgat

SEQ ID NO: 321360 - DNA, 15 bp, Homo sapiens
gaaggagaatgctga

SEQ ID NO: 321361 - DNA, 15 bp, Homo sapiens
agaaggagaatgctg

SEQ ID NO: 321362 - DNA, 15 bp, Homo sapiens
gagaaggagaatgct

SEQ ID NO: 321363 - DNA, 15 bp, Homo sapiens
cgagaaggagaatgc

SEQ ID NO: 321364 - DNA, 15 bp, Homo sapiens
ccgagaaggagaatg

SEQ ID NO: 321365 - DNA, 15 bp, Homo sapiens
accgagaaggagaat

SEQ ID NO: 321366 - DNA, 15 bp, Homo sapiens
caccgagaaggagaa

SEQ ID NO: 321367 - DNA, 15 bp, Homo sapiens
acaccgagaaggaga

SEQ ID NO: 321368 - DNA, 15 bp, Homo sapiens
cacaccgagaaggag

SEQ ID NO: 321369 - DNA, 15 bp, Homo sapiens
ccacaccgagaagga

SEQ ID NO: 321370 - DNA, 15 bp, Homo sapiens
gccacaccgagaagg

SEQ ID NO: 321371 - DNA, 15 bp, Homo sapiens
cgccacaccgagaag

SEQ ID NO: 321372 - DNA, 15 bp, Homo sapiens
gcgccacaccgagaa

SEQ ID NO: 321373 - DNA, 15 bp, Homo sapiens
tgcgccacaccgaga

SEQ ID NO: 321374 - DNA, 15 bp, Homo sapiens
gtgcgccacaccgag

SEQ ID NO: 321375 - DNA, 15 bp, Homo sapiens
agtgcgccacaccga

SEQ ID NO: 321376 - DNA, 15 bp, Homo sapiens
aagtgcgccacaccg

SEQ ID NO: 321377 - DNA, 15 bp, Homo sapiens
gaagtgcgccacacc

SEQ ID NO: 321378 - DNA, 15 bp, Homo sapiens
tgaagtgcgccacac

SEQ ID NO: 321379 - DNA, 15 bp, Homo sapiens
ttgaagtgcgccaca

SEQ ID NO: 321380 - DNA, 15 bp, Homo sapiens
cttgaagtgcgccac

SEQ ID NO: 321381 - DNA, 15 bp, Homo sapiens
ccttgaagtgcgcca

SEQ ID NO: 321382 - DNA, 15 bp, Homo sapiens
cccttgaagtgcgcc

SEQ ID NO: 321383 - DNA, 15 bp, Homo sapiens
acccttgaagtgcgc

SEQ ID NO: 321384 - DNA, 15 bp, Homo sapiens
cacccttgaagtgcg

SEQ ID NO: 321385 - DNA, 15 bp, Homo sapiens
tcacccttgaagtgc

SEQ ID NO: 321386 - DNA, 15 bp, Homo sapiens
ctcacccttgaagtg

SEQ ID NO: 321387 - DNA, 15 bp, Homo sapiens
gctcacccttgaagt

SEQ ID NO: 321388 - DNA, 15 bp, Homo sapiens
cgctcacccttgaag

SEQ ID NO: 321389 - DNA, 15 bp, Homo sapiens
gcgctcacccttgaa

SEQ ID NO: 321390 - DNA, 15 bp, Homo sapiens
cgcgctcacccttga

SEQ ID NO: 321391 - DNA, 15 bp, Homo sapiens
acgcgctcacccttg

SEQ ID NO: 321392 - DNA, 15 bp, Homo sapiens
gacgcgctcaccctt

SEQ ID NO: 321393 - DNA, 15 bp, Homo sapiens
agacgcgctcaccct

SEQ ID NO: 321394 - DNA, 15 bp, Homo sapiens
gagacgcgctcaccc

SEQ ID NO: 321395 - DNA, 15 bp, Homo sapiens
ggagacgcgctcacc

SEQ ID NO: 321396 - DNA, 15 bp, Homo sapiens
tggagacgcgctcac

SEQ ID NO: 321397 - DNA, 15 bp, Homo sapiens
ttggagacgcgctca

SEQ ID NO: 321398 - DNA, 15 bp, Homo sapiens
attggagacgcgctc

SEQ ID NO: 321399 - DNA, 15 bp, Homo sapiens
aattggagacgcgct

SEQ ID NO: 321400 - DNA, 15 bp, Homo sapiens
gaattggagacgcgc

SEQ ID NO: 321401 - DNA, 15 bp, Homo sapiens
agaattggagacgcg

SEQ ID NO: 321402 - DNA, 15 bp, Homo sapiens
aagaattggagacgc

SEQ ID NO: 321403 - DNA, 15 bp, Homo sapiens
aaagaattggagacg

SEQ ID NO: 321404 - DNA, 15 bp, Homo sapiens
aaaagaattggagac

SEQ ID NO: 321405 - DNA, 15 bp, Homo sapiens
aaaaagaattggaga

SEQ ID NO: 321406 - DNA, 15 bp, Homo sapiens
gaaaaagaattggag

SEQ ID NO: 321407 - DNA, 15 bp, Homo sapiens
tgaaaaagaattgga

SEQ ID NO: 321408 - DNA, 15 bp, Homo sapiens
atgaaaaagaattgg

SEQ ID NO: 321409 - DNA, 15 bp, Homo sapiens
aatgaaaaagaattg

SEQ ID NO: 321410 - DNA, 15 bp, Homo sapiens
aaatgaaaaagaatt

SEQ ID NO: 321411 - DNA, 15 bp, Homo sapiens
taaatgaaaaagaat

SEQ ID NO: 321412 - DNA, 15 bp, Homo sapiens
ataaatgaaaaagaa

SEQ ID NO: 321413 - DNA, 15 bp, Homo sapiens
aataaatgaaaaaga

SEQ ID NO: 321414 - DNA, 15 bp, Homo sapiens
aaataaatgaaaaag

SEQ ID NO: 321415 - DNA, 15 bp, Homo sapiens
aaaataaatgaaaaa

SEQ ID NO: 321416 - DNA, 15 bp, Homo sapiens
taaaataaatgaaaa

SEQ ID NO: 321417 - DNA, 15 bp, Homo sapiens
gtaaaataaatgaaa

SEQ ID NO: 321418 - DNA, 15 bp, Homo sapiens
agtaaaataaatgaa

SEQ ID NO: 321419 - DNA, 15 bp, Homo sapiens
cagtaaaataaatga

SEQ ID NO: 321420 - DNA, 15 bp, Homo sapiens
acagtaaaataaatg

SEQ ID NO: 321421 - DNA, 15 bp, Homo sapiens
tacagtaaaataaat

SEQ ID NO: 321422 - DNA, 15 bp, Homo sapiens
atacagtaaaataaa

SEQ ID NO: 321423 - DNA, 15 bp, Homo sapiens
aatacagtaaaataa

SEQ ID NO: 321424 - DNA, 15 bp, Homo sapiens
aaatacagtaaaata

SEQ ID NO: 321425 - DNA, 15 bp, Homo sapiens
aaaatacagtaaaat

SEQ ID NO: 321426 - DNA, 15 bp, Homo sapiens
taaaatacagtaaaa

SEQ ID NO: 321427 - DNA, 15 bp, Homo sapiens
ttaaaatacagtaaa

SEQ ID NO: 321428 - DNA, 15 bp, Homo sapiens
gttaaaatacagtaa

SEQ ID NO: 321429 - DNA, 15 bp, Homo sapiens
agttaaaatacagta

SEQ ID NO: 321430 - DNA, 15 bp, Homo sapiens
tagttaaaatacagt

SEQ ID NO: 321431 - DNA, 15 bp, Homo sapiens
ttagttaaaatacag

SEQ ID NO: 321432 - DNA, 15 bp, Homo sapiens
attagttaaaataca

SEQ ID NO: 321433 - DNA, 15 bp, Homo sapiens
aattagttaaaatac

SEQ ID NO: 321434 - DNA, 15 bp, Homo sapiens
taattagttaaaata

SEQ ID NO: 321435 - DNA, 15 bp, Homo sapiens
ttaattagttaaaat

SEQ ID NO: 321436 - DNA, 15 bp, Homo sapiens
attaattagttaaaa

SEQ ID NO: 321437 - DNA, 15 bp, Homo sapiens
aattaattagttaaa

SEQ ID NO: 321438 - DNA, 15 bp, Homo sapiens
taattaattagttaa

SEQ ID NO: 321439 - DNA, 15 bp, Homo sapiens
ttaattaattagtta

SEQ ID NO: 321440 - DNA, 15 bp, Homo sapiens
attaattaattagtt

SEQ ID NO: 321441 - DNA, 15 bp, Homo sapiens
aattaattaattagt

SEQ ID NO: 321442 - DNA, 15 bp, Homo sapiens
gaattaattaattag

SEQ ID NO: 321443 - DNA, 15 bp, Homo sapiens
cgaattaattaatta

SEQ ID NO: 321444 - DNA, 15 bp, Homo sapiens
tcgaattaattaatt

SEQ ID NO: 321445 - DNA, 15 bp, Homo sapiens
atcgaattaattaat

SEQ ID NO: 321446 - DNA, 15 bp, Homo sapiens
catcgaattaattaa

SEQ ID NO: 321447 - DNA, 15 bp, Homo sapiens
ccatcgaattaatta

SEQ ID NO: 321448 - DNA, 15 bp, Homo sapiens
tccatcgaattaatt

SEQ ID NO: 321449 - DNA, 15 bp, Homo sapiens
ctccatcgaattaat

SEQ ID NO: 321450 - DNA, 15 bp, Homo sapiens
actccatcgaattaa

SEQ ID NO: 321451 - DNA, 15 bp, Homo sapiens
gactccatcgaatta

SEQ ID NO: 321452 - DNA, 15 bp, Homo sapiens
agactccatcgaatt

SEQ ID NO: 321453 - DNA, 15 bp, Homo sapiens
aagactccatcgaat

SEQ ID NO: 321454 - DNA, 15 bp, Homo sapiens
taagactccatcgaa

SEQ ID NO: 321455 - DNA, 15 bp, Homo sapiens
gtaagactccatcga

SEQ ID NO: 321456 - DNA, 15 bp, Homo sapiens
agtaagactccatcg

SEQ ID NO: 321457 - DNA, 15 bp, Homo sapiens
gagtaagactccatc

SEQ ID NO: 321458 - DNA, 15 bp, Homo sapiens
agagtaagactccat

SEQ ID NO: 321459 - DNA, 15 bp, Homo sapiens
cagagtaagactcca

SEQ ID NO: 321460 - DNA, 15 bp, Homo sapiens
acagagtaagactcc

SEQ ID NO: 321461 - DNA, 15 bp, Homo sapiens
tacagagtaagactc

SEQ ID NO: 321462 - DNA, 15 bp, Homo sapiens
ctacagagtaagact

SEQ ID NO: 321463 - DNA, 15 bp, Homo sapiens
actacagagtaagac

SEQ ID NO: 321464 - DNA, 15 bp, Homo sapiens
gactacagagtaaga

SEQ ID NO: 321465 - DNA, 15 bp, Homo sapiens
ggactacagagtaag

SEQ ID NO: 321466 - DNA, 15 bp, Homo sapiens
aggactacagagtaa

SEQ ID NO: 321467 - DNA, 15 bp, Homo sapiens
taggactacagagta

SEQ ID NO: 321468 - DNA, 15 bp, Homo sapiens
ttaggactacagagt

SEQ ID NO: 321469 - DNA, 15 bp, Homo sapiens
gttaggactacagag

SEQ ID NO: 321470 - DNA, 15 bp, Homo sapiens
agttaggactacaga

SEQ ID NO: 321471 - DNA, 15 bp, Homo sapiens
cagttaggactacag

SEQ ID NO: 321472 - DNA, 15 bp, Homo sapiens
ccagttaggactaca

SEQ ID NO: 321473 - DNA, 15 bp, Homo sapiens
tccagttaggactac

SEQ ID NO: 321474 - DNA, 15 bp, Homo sapiens
ctccagttaggacta

SEQ ID NO: 321475 - DNA, 15 bp, Homo sapiens
actccagttaggact

SEQ ID NO: 321476 - DNA, 15 bp, Homo sapiens
cactccagttaggac

SEQ ID NO: 321477 - DNA, 15 bp, Homo sapiens
gcactccagttagga

SEQ ID NO: 321478 - DNA, 15 bp, Homo sapiens
tgcactccagttagg

SEQ ID NO: 321479 - DNA, 15 bp, Homo sapiens
ctgcactccagttag

SEQ ID NO: 321480 - DNA, 15 bp, Homo sapiens
actgcactccagtta

SEQ ID NO: 321481 - DNA, 15 bp, Homo sapiens
cactgcactccagtt

SEQ ID NO: 321482 - DNA, 15 bp, Homo sapiens
tgagatcgcaccact

SEQ ID NO: 321483 - DNA, 15 bp, Homo sapiens
ctgagatcgcaccac

SEQ ID NO: 321484 - DNA, 15 bp, Homo sapiens
gctgagatcgcacca

SEQ ID NO: 321485 - DNA, 15 bp, Homo sapiens
agctgagatcgcacc

SEQ ID NO: 321486 - DNA, 15 bp, Homo sapiens
gagctgagatcgcac

SEQ ID NO: 321487 - DNA, 15 bp, Homo sapiens
tgagctgagatcgca

SEQ ID NO: 321488 - DNA, 15 bp, Homo sapiens
ttgagctgagatcgc

SEQ ID NO: 321489 - DNA, 15 bp, Homo sapiens
attgagctgagatcg

SEQ ID NO: 321490 - DNA, 15 bp, Homo sapiens
cattgagctgagatc

SEQ ID NO: 321491 - DNA, 15 bp, Homo sapiens
gcattgagctgagat

SEQ ID NO: 321492 - DNA, 15 bp, Homo sapiens
tgcattgagctgaga

SEQ ID NO: 321493 - DNA, 15 bp, Homo sapiens
ttgcattgagctgag

SEQ ID NO: 321494 - DNA, 15 bp, Homo sapiens
gttgcattgagctga

SEQ ID NO: 321495 - DNA, 15 bp, Homo sapiens
ggttgcattgagctg

SEQ ID NO: 321496 - DNA, 15 bp, Homo sapiens
aggttgcattgagct

SEQ ID NO: 321497 - DNA, 15 bp, Homo sapiens
gaggttgcattgagc

SEQ ID NO: 321498 - DNA, 15 bp, Homo sapiens
ggaggttgcattgag

SEQ ID NO: 321499 - DNA, 15 bp, Homo sapiens
cggaggttgcattga

SEQ ID NO: 321500 - DNA, 15 bp, Homo sapiens
gcggaggttgcattg

SEQ ID NO: 321501 - DNA, 15 bp, Homo sapiens
ggcggaggttgcatt

SEQ ID NO: 321502 - DNA, 15 bp, Homo sapiens
aggcggaggttgcat

SEQ ID NO: 321503 - DNA, 15 bp, Homo sapiens
gaacctgggaggcgg

SEQ ID NO: 321504 - DNA, 15 bp, Homo sapiens
tgaacctgggaggcg

SEQ ID NO: 321505 - DNA, 15 bp, Homo sapiens
gcttgaacctgggag

SEQ ID NO: 321506 - DNA, 15 bp, Homo sapiens
tgcttgaacctggga

SEQ ID NO: 321507 - DNA, 15 bp, Homo sapiens
ttgcttgaacctggg

SEQ ID NO: 321508 - DNA, 15 bp, Homo sapiens
attgcttgaacctgg

SEQ ID NO: 321509 - DNA, 15 bp, Homo sapiens
aattgcttgaacctg

SEQ ID NO: 321510 - DNA, 15 bp, Homo sapiens
gaattgcttgaacct

SEQ ID NO: 321511 - DNA, 15 bp, Homo sapiens
aagaattgcttgaac

SEQ ID NO: 321512 - DNA, 15 bp, Homo sapiens
caagaattgcttgaa

SEQ ID NO: 321513 - DNA, 15 bp, Homo sapiens
acaagaattgcttga

SEQ ID NO: 321514 - DNA, 15 bp, Homo sapiens
cacaagaattgcttg

SEQ ID NO: 321515 - DNA, 15 bp, Homo sapiens
gcacaagaattgctt

SEQ ID NO: 321516 - DNA, 15 bp, Homo sapiens
ggcacaagaattgct

SEQ ID NO: 321517 - DNA, 15 bp, Homo sapiens
aggcacaagaattgc

SEQ ID NO: 321518 - DNA, 15 bp, Homo sapiens
gaggcacaagaattg

SEQ ID NO: 321519 - DNA, 15 bp, Homo sapiens
tgaggcacaagaatt

SEQ ID NO: 321520 - DNA, 15 bp, Homo sapiens
ctgaggcacaagaat

SEQ ID NO: 321521 - DNA, 15 bp, Homo sapiens
gctgaggcacaagaa

SEQ ID NO: 321522 - DNA, 15 bp, Homo sapiens
ggctgaggcacaaga

SEQ ID NO: 321523 - DNA, 15 bp, Homo sapiens
aggctgaggcacaag

SEQ ID NO: 321524 - DNA, 15 bp, Homo sapiens
gaggctgaggcacaa

SEQ ID NO: 321525 - DNA, 15 bp, Homo sapiens
ggaggctgaggcaca

SEQ ID NO: 321526 - DNA, 15 bp, Homo sapiens
gggaggctgaggcac

SEQ ID NO: 321527 - DNA, 15 bp, Homo sapiens
ccctgtaatcccagc

SEQ ID NO: 321528 - DNA, 15 bp, Homo sapiens
tccctgtaatcccag

SEQ ID NO: 321529 - DNA, 15 bp, Homo sapiens
atccctgtaatccca

SEQ ID NO: 321530 - DNA, 15 bp, Homo sapiens
catccctgtaatccc

SEQ ID NO: 321531 - DNA, 15 bp, Homo sapiens
acatccctgtaatcc

SEQ ID NO: 321532 - DNA, 15 bp, Homo sapiens
tacatccctgtaatc

SEQ ID NO: 321533 - DNA, 15 bp, Homo sapiens
gtacatccctgtaat

SEQ ID NO: 321534 - DNA, 15 bp, Homo sapiens
ggtacatccctgtaa

SEQ ID NO: 321535 - DNA, 15 bp, Homo sapiens
tggtacatccctgta

SEQ ID NO: 321536 - DNA, 15 bp, Homo sapiens
gtggtacatccctgt

SEQ ID NO: 321537 - DNA, 15 bp, Homo sapiens
ggtggtacatccctg

SEQ ID NO: 321538 - DNA, 15 bp, Homo sapiens
tggtggtacatccct

SEQ ID NO: 321539 - DNA, 15 bp, Homo sapiens
gtggtggtacatccc

SEQ ID NO: 321540 - DNA, 15 bp, Homo sapiens
agtggtggtacatcc

SEQ ID NO: 321541 - DNA, 15 bp, Homo sapiens
gagtggtggtacatc

SEQ ID NO: 321542 - DNA, 15 bp, Homo sapiens
ggagtggtggtacat

SEQ ID NO: 321543 - DNA, 15 bp, Homo sapiens
gggagtggtggtaca

SEQ ID NO: 321544 - DNA, 15 bp, Homo sapiens
cgggagtggtggtac

SEQ ID NO: 321545 - DNA, 15 bp, Homo sapiens
ccgggagtggtggta

SEQ ID NO: 321546 - DNA, 15 bp, Homo sapiens
gccgggagtggtggt

SEQ ID NO: 321547 - DNA, 15 bp, Homo sapiens
agccgggagtggtgg

SEQ ID NO: 321548 - DNA, 15 bp, Homo sapiens
tagccgggagtggtg

SEQ ID NO: 321549 - DNA, 15 bp, Homo sapiens
ttagccgggagtggt

SEQ ID NO: 321550 - DNA, 15 bp, Homo sapiens
attagccgggagtgg

SEQ ID NO: 321551 - DNA, 15 bp, Homo sapiens
aattagccgggagtg

SEQ ID NO: 321552 - DNA, 15 bp, Homo sapiens
aaattagccgggagt

SEQ ID NO: 321553 - DNA, 15 bp, Homo sapiens
aaaattagccgggag

SEQ ID NO: 321554 - DNA, 15 bp, Homo sapiens
aaaaattagccggga

SEQ ID NO: 321555 - DNA, 15 bp, Homo sapiens
aaaaaattagccggg

SEQ ID NO: 321556 - DNA, 15 bp, Homo sapiens
caaaaaattagccgg

SEQ ID NO: 321557 - DNA, 15 bp, Homo sapiens
acaaaaaattagccg

SEQ ID NO: 321558 - DNA, 15 bp, Homo sapiens
tacaaaaaattagcc

SEQ ID NO: 321559 - DNA, 15 bp, Homo sapiens
atacaaaaaattagc

SEQ ID NO: 321560 - DNA, 15 bp, Homo sapiens
aatacaaaaaattag

SEQ ID NO: 321561 - DNA, 15 bp, Homo sapiens
aaatacaaaaaatta

SEQ ID NO: 321562 - DNA, 15 bp, Homo sapiens
taaatacaaaaaatt

SEQ ID NO: 321563 - DNA, 15 bp, Homo sapiens
ttaaatacaaaaaat

SEQ ID NO: 321564 - DNA, 15 bp, Homo sapiens
attaaatacaaaaaa

SEQ ID NO: 321565 - DNA, 15 bp, Homo sapiens
tattaaatacaaaaa

SEQ ID NO: 321566 - DNA, 15 bp, Homo sapiens
ctattaaatacaaaa

SEQ ID NO: 321567 - DNA, 15 bp, Homo sapiens
tctattaaatacaaa

SEQ ID NO: 321568 - DNA, 15 bp, Homo sapiens
gtctattaaatacaa

SEQ ID NO: 321569 - DNA, 15 bp, Homo sapiens
tgtctattaaataca

SEQ ID NO: 321570 - DNA, 15 bp, Homo sapiens
atgtctattaaatac

SEQ ID NO: 321571 - DNA, 15 bp, Homo sapiens
catgtctattaaata

SEQ ID NO: 321572 - DNA, 15 bp, Homo sapiens
ccatgtctattaaat

SEQ ID NO: 321573 - DNA, 15 bp, Homo sapiens
cccatgtctattaaa

SEQ ID NO: 321574 - DNA, 15 bp, Homo sapiens
ccccatgtctattaa

SEQ ID NO: 321575 - DNA, 15 bp, Homo sapiens
accccatgtctatta

SEQ ID NO: 321576 - DNA, 15 bp, Homo sapiens
aaccccatgtctatt

SEQ ID NO: 321577 - DNA, 15 bp, Homo sapiens
aaaccccatgtctat

SEQ ID NO: 321578 - DNA, 15 bp, Homo sapiens
gaaaccccatgtcta

SEQ ID NO: 321579 - DNA, 15 bp, Homo sapiens
tgaaaccccatgtct

SEQ ID NO: 321580 - DNA, 15 bp, Homo sapiens
gtgaaaccccatgtc

SEQ ID NO: 321581 - DNA, 15 bp, Homo sapiens
ggtgaaaccccatgt

SEQ ID NO: 321582 - DNA, 15 bp, Homo sapiens
tggtgaaaccccatg

SEQ ID NO: 321583 - DNA, 15 bp, Homo sapiens
ctcaggagttcgaga

SEQ ID NO: 321584 - DNA, 15 bp, Homo sapiens
gctcaggagttcgag

SEQ ID NO: 321585 - DNA, 15 bp, Homo sapiens
agctcaggagttcga

SEQ ID NO: 321586 - DNA, 15 bp, Homo sapiens
gagctcaggagttcg

SEQ ID NO: 321587 - DNA, 15 bp, Homo sapiens
tgagctcaggagttc

SEQ ID NO: 321588 - DNA, 15 bp, Homo sapiens
ctgagctcaggagtt

SEQ ID NO: 321589 - DNA, 15 bp, Homo sapiens
cctgagctcaggagt

SEQ ID NO: 321590 - DNA, 15 bp, Homo sapiens
acctgagctcaggag

SEQ ID NO: 321591 - DNA, 15 bp, Homo sapiens
cacctgagctcagga

SEQ ID NO: 321592 - DNA, 15 bp, Homo sapiens
ccacctgagctcagg

SEQ ID NO: 321593 - DNA, 15 bp, Homo sapiens
accacctgagctcag

SEQ ID NO: 321594 - DNA, 15 bp, Homo sapiens
gaccacctgagctca

SEQ ID NO: 321595 - DNA, 15 bp, Homo sapiens
agaccacctgagctc

SEQ ID NO: 321596 - DNA, 15 bp, Homo sapiens
cagaccacctgagct

SEQ ID NO: 321597 - DNA, 15 bp, Homo sapiens
gcagaccacctgagc

SEQ ID NO: 321598 - DNA, 15 bp, Homo sapiens
ggcagaccacctgag

SEQ ID NO: 321599 - DNA, 15 bp, Homo sapiens
gggcagaccacctga

SEQ ID NO: 321600 - DNA, 15 bp, Homo sapiens
cgggcagaccacctg

SEQ ID NO: 321601 - DNA, 15 bp, Homo sapiens
gcgggcagaccacct

SEQ ID NO: 321602 - DNA, 15 bp, Homo sapiens
ggcgggcagaccacc

SEQ ID NO: 321603 - DNA, 15 bp, Homo sapiens
aggcgggcagaccac

SEQ ID NO: 321604 - DNA, 15 bp, Homo sapiens
gaggcgggcagacca

SEQ ID NO: 321605 - DNA, 15 bp, Homo sapiens
tgaggcgggcagacc

SEQ ID NO: 321606 - DNA, 15 bp, Homo sapiens
ctgaggcgggcagac

SEQ ID NO: 321607 - DNA, 15 bp, Homo sapiens
gctgaggcgggcaga

SEQ ID NO: 321608 - DNA, 15 bp, Homo sapiens
ggctgaggcgggcag

SEQ ID NO: 321609 - DNA, 15 bp, Homo sapiens
aggctgaggcgggca

SEQ ID NO: 321610 - DNA, 15 bp, Homo sapiens
gaggctgaggcgggc

SEQ ID NO: 321611 - DNA, 15 bp, Homo sapiens
ggaggctgaggcggg

SEQ ID NO: 321612 - DNA, 15 bp, Homo sapiens
gggaggctgaggcgg

SEQ ID NO: 321613 - DNA, 15 bp, Homo sapiens
tgggaggctgaggcg

SEQ ID NO: 321614 - DNA, 15 bp, Homo sapiens
ttgtaatcctagcac

SEQ ID NO: 321615 - DNA, 15 bp, Homo sapiens
cttgtaatcctagca

SEQ ID NO: 321616 - DNA, 15 bp, Homo sapiens
gcttgtaatcctagc

SEQ ID NO: 321617 - DNA, 15 bp, Homo sapiens
agcttgtaatcctag

SEQ ID NO: 321618 - DNA, 15 bp, Homo sapiens
aagcttgtaatccta

SEQ ID NO: 321619 - DNA, 15 bp, Homo sapiens
caagcttgtaatcct

SEQ ID NO: 321620 - DNA, 15 bp, Homo sapiens
tcaagcttgtaatcc

SEQ ID NO: 321621 - DNA, 15 bp, Homo sapiens
ctcaagcttgtaatc

SEQ ID NO: 321622 - DNA, 15 bp, Homo sapiens
gctcaagcttgtaat

SEQ ID NO: 321623 - DNA, 15 bp, Homo sapiens
ggctcaagcttgtaa

SEQ ID NO: 321624 - DNA, 15 bp, Homo sapiens
tggctcaagcttgta

SEQ ID NO: 321625 - DNA, 15 bp, Homo sapiens
gtggctcaagcttgt

SEQ ID NO: 321626 - DNA, 15 bp, Homo sapiens
ggtggctcaagcttg

SEQ ID NO: 321627 - DNA, 15 bp, Homo sapiens
tggtggctcaagctt

SEQ ID NO: 321628 - DNA, 15 bp, Homo sapiens
gtggtggctcaagct

SEQ ID NO: 321629 - DNA, 15 bp, Homo sapiens
cgtggtggctcaagc

SEQ ID NO: 321630 - DNA, 15 bp, Homo sapiens
gcgtggtggctcaag

SEQ ID NO: 321631 - DNA, 15 bp, Homo sapiens
ggcgtggtggctcaa

SEQ ID NO: 321632 - DNA, 15 bp, Homo sapiens
gggcgtggtggctca

SEQ ID NO: 321633 - DNA, 15 bp, Homo sapiens
tgggcgtggtggctc

SEQ ID NO: 321634 - DNA, 15 bp, Homo sapiens
ctgggcgtggtggct

SEQ ID NO: 321635 - DNA, 15 bp, Homo sapiens
gctgggcgtggtggc

SEQ ID NO: 321636 - DNA, 15 bp, Homo sapiens
ggctgggcgtggtgg

SEQ ID NO: 321637 - DNA, 15 bp, Homo sapiens
gggctgggcgtggtg

SEQ ID NO: 321638 - DNA, 15 bp, Homo sapiens
agggctgggcgtggt

SEQ ID NO: 321639 - DNA, 15 bp, Homo sapiens
aagggctgggcgtgg

SEQ ID NO: 321640 - DNA, 15 bp, Homo sapiens
aaagggctgggcgtg

SEQ ID NO: 321641 - DNA, 15 bp, Homo sapiens
aaaagggctgggcgt

SEQ ID NO: 321642 - DNA, 15 bp, Homo sapiens
aaaaagggctgggcg

SEQ ID NO: 321643 - DNA, 15 bp, Homo sapiens
taaaaagggctgggc

SEQ ID NO: 321644 - DNA, 15 bp, Homo sapiens
ataaaaagggctggg

SEQ ID NO: 321645 - DNA, 15 bp, Homo sapiens
aataaaaagggctgg

SEQ ID NO: 321646 - DNA, 15 bp, Homo sapiens
aaataaaaagggctg

SEQ ID NO: 321647 - DNA, 15 bp, Homo sapiens
aaaataaaaagggct

SEQ ID NO: 321648 - DNA, 15 bp, Homo sapiens
aaaaataaaaagggc

SEQ ID NO: 321649 - DNA, 15 bp, Homo sapiens
taaaaataaaaaggg

SEQ ID NO: 321650 - DNA, 15 bp, Homo sapiens
ttaaaaataaaaagg

SEQ ID NO: 321651 - DNA, 15 bp, Homo sapiens
tttaaaaataaaaag

SEQ ID NO: 321652 - DNA, 15 bp, Homo sapiens
atttaaaaataaaaa

SEQ ID NO: 321653 - DNA, 15 bp, Homo sapiens
aatttaaaaataaaa

SEQ ID NO: 321654 - DNA, 15 bp, Homo sapiens
taatttaaaaataaa

SEQ ID NO: 321655 - DNA, 15 bp, Homo sapiens
ttaatttaaaaataa

SEQ ID NO: 321656 - DNA, 15 bp, Homo sapiens
cttaatttaaaaata

SEQ ID NO: 321657 - DNA, 15 bp, Homo sapiens
tcttaatttaaaaat

SEQ ID NO: 321658 - DNA, 15 bp, Homo sapiens
ctcttaatttaaaaa

SEQ ID NO: 321659 - DNA, 15 bp, Homo sapiens
tctcttaatttaaaa

SEQ ID NO: 321660 - DNA, 15 bp, Homo sapiens
gtctcttaatttaaa

SEQ ID NO: 321661 - DNA, 15 bp, Homo sapiens
tgtctcttaatttaa

SEQ ID NO: 321662 - DNA, 15 bp, Homo sapiens
ttgtctcttaattta

SEQ ID NO: 321663 - DNA, 15 bp, Homo sapiens
cttgtctcttaattt

SEQ ID NO: 321664 - DNA, 15 bp, Homo sapiens
ccttgtctcttaatt

SEQ ID NO: 321665 - DNA, 15 bp, Homo sapiens
accttgtctcttaat

SEQ ID NO: 321666 - DNA, 15 bp, Homo sapiens
caccttgtctcttaa

SEQ ID NO: 321667 - DNA, 15 bp, Homo sapiens
acaccttgtctctta

SEQ ID NO: 321668 - DNA, 15 bp, Homo sapiens
aacaccttgtctctt

SEQ ID NO: 321669 - DNA, 15 bp, Homo sapiens
caacaccttgtctct

SEQ ID NO: 321670 - DNA, 15 bp, Homo sapiens
gcaacaccttgtctc

SEQ ID NO: 321671 - DNA, 15 bp, Homo sapiens
ggcaacaccttgtct

SEQ ID NO: 321672 - DNA, 15 bp, Homo sapiens
tggcaacaccttgtc

SEQ ID NO: 321673 - DNA, 15 bp, Homo sapiens
atggcaacaccttgt

SEQ ID NO: 321674 - DNA, 15 bp, Homo sapiens
catggcaacaccttg

SEQ ID NO: 321675 - DNA, 15 bp, Homo sapiens
tcatggcaacacctt

SEQ ID NO: 321676 - DNA, 15 bp, Homo sapiens
atcatggcaacacct

SEQ ID NO: 321677 - DNA, 15 bp, Homo sapiens
catcatggcaacacc

SEQ ID NO: 321678 - DNA, 15 bp, Homo sapiens
gcatcatggcaacac

SEQ ID NO: 321679 - DNA, 15 bp, Homo sapiens
ggcatcatggcaaca

SEQ ID NO: 321680 - DNA, 15 bp, Homo sapiens
gggcatcatggcaac

SEQ ID NO: 321681 - DNA, 15 bp, Homo sapiens
tgggcatcatggcaa

SEQ ID NO: 321682 - DNA, 15 bp, Homo sapiens
ctgggcatcatggca

SEQ ID NO: 321683 - DNA, 15 bp, Homo sapiens
cctgggcatcatggc

SEQ ID NO: 321684 - DNA, 15 bp, Homo sapiens
gcctgggcatcatgg

SEQ ID NO: 321685 - DNA, 15 bp, Homo sapiens
agcctgggcatcatg

SEQ ID NO: 321686 - DNA, 15 bp, Homo sapiens
cagcctgggcatcat

SEQ ID NO: 321687 - DNA, 15 bp, Homo sapiens
ccagcctgggcatca

SEQ ID NO: 321688 - DNA, 15 bp, Homo sapiens
accagcctgggcatc

SEQ ID NO: 321689 - DNA, 15 bp, Homo sapiens
gaccagcctgggcat

SEQ ID NO: 321690 - DNA, 15 bp, Homo sapiens
agaccagcctgggca

SEQ ID NO: 321691 - DNA, 15 bp, Homo sapiens
gagaccagcctgggc

SEQ ID NO: 321692 - DNA, 15 bp, Homo sapiens
cgagaccagcctggg

SEQ ID NO: 321693 - DNA, 15 bp, Homo sapiens
ccaggagttcgagac

SEQ ID NO: 321694 - DNA, 15 bp, Homo sapiens
cccaggagttcgaga

SEQ ID NO: 321695 - DNA, 15 bp, Homo sapiens
gcccaggagttcgag

SEQ ID NO: 321696 - DNA, 15 bp, Homo sapiens
agcccaggagttcga

SEQ ID NO: 321697 - DNA, 15 bp, Homo sapiens
gagcccaggagttcg

SEQ ID NO: 321698 - DNA, 15 bp, Homo sapiens
tgagcccaggagttc

SEQ ID NO: 321699 - DNA, 15 bp, Homo sapiens
tacttgagcccagga

SEQ ID NO: 321700 - DNA, 15 bp, Homo sapiens
ttacttgagcccagg

SEQ ID NO: 321701 - DNA, 15 bp, Homo sapiens
attacttgagcccag

SEQ ID NO: 321702 - DNA, 15 bp, Homo sapiens
gattacttgagccca

SEQ ID NO: 321703 - DNA, 15 bp, Homo sapiens
ggattacttgagccc

SEQ ID NO: 321704 - DNA, 15 bp, Homo sapiens
aggattacttgagcc

SEQ ID NO: 321705 - DNA, 15 bp, Homo sapiens
gaggattacttgagc

SEQ ID NO: 321706 - DNA, 15 bp, Homo sapiens
ggaggattacttgag

SEQ ID NO: 321707 - DNA, 15 bp, Homo sapiens
gggaggattacttga

SEQ ID NO: 321708 - DNA, 15 bp, Homo sapiens
tgggaggattacttg

SEQ ID NO: 321709 - DNA, 15 bp, Homo sapiens
gtgggaggattactt

SEQ ID NO: 321710 - DNA, 15 bp, Homo sapiens
ggtgggaggattact

SEQ ID NO: 321711 - DNA, 15 bp, Homo sapiens
aggtgggaggattac

SEQ ID NO: 321712 - DNA, 15 bp, Homo sapiens
aaggtgggaggatta

SEQ ID NO: 321713 - DNA, 15 bp, Homo sapiens
caaggtgggaggatt

SEQ ID NO: 321714 - DNA, 15 bp, Homo sapiens
ccaaggtgggaggat

SEQ ID NO: 321715 - DNA, 15 bp, Homo sapiens
gccaaggtgggagga

SEQ ID NO: 321716 - DNA, 15 bp, Homo sapiens
ggccaaggtgggagg

SEQ ID NO: 321717 - DNA, 15 bp, Homo sapiens
aggccaaggtgggag

SEQ ID NO: 321718 - DNA, 15 bp, Homo sapiens
gaggccaaggtggga

SEQ ID NO: 321719 - DNA, 15 bp, Homo sapiens
ggaggccaaggtggg

SEQ ID NO: 321720 - DNA, 15 bp, Homo sapiens
gggaggccaaggtgg

SEQ ID NO: 321721 - DNA, 15 bp, Homo sapiens
tgggaggccaaggtg

SEQ ID NO: 321722 - DNA, 15 bp, Homo sapiens
ttgggaggccaaggt

SEQ ID NO: 321723 - DNA, 15 bp, Homo sapiens
cgggcgcggtggctc

SEQ ID NO: 321724 - DNA, 15 bp, Homo sapiens
ccgggcgcggtggct

SEQ ID NO: 321725 - DNA, 15 bp, Homo sapiens
gccgggcgcggtggc

SEQ ID NO: 321726 - DNA, 15 bp, Homo sapiens
ggccgggcgcggtgg

SEQ ID NO: 321727 - DNA, 15 bp, Homo sapiens
gggccgggcgcggtg

SEQ ID NO: 321728 - DNA, 15 bp, Homo sapiens
agggccgggcgcggt

SEQ ID NO: 321729 - DNA, 15 bp, Homo sapiens
aagggccgggcgcgg

SEQ ID NO: 321730 - DNA, 15 bp, Homo sapiens
aaagggccgggcgcg

SEQ ID NO: 321731 - DNA, 15 bp, Homo sapiens
aaaagggccgggcgc

SEQ ID NO: 321732 - DNA, 15 bp, Homo sapiens
taaaagggccgggcg

SEQ ID NO: 321733 - DNA, 15 bp, Homo sapiens
gtaaaagggccgggc

SEQ ID NO: 321734 - DNA, 15 bp, Homo sapiens
tgtaaaagggccggg

SEQ ID NO: 321735 - DNA, 15 bp, Homo sapiens
atgtaaaagggccgg

SEQ ID NO: 321736 - DNA, 15 bp, Homo sapiens
aatgtaaaagggccg

SEQ ID NO: 321737 - DNA, 15 bp, Homo sapiens
aaatgtaaaagggcc

SEQ ID NO: 321738 - DNA, 15 bp, Homo sapiens
taaatgtaaaagggc

SEQ ID NO: 321739 - DNA, 15 bp, Homo sapiens
ataaatgtaaaaggg

SEQ ID NO: 321740 - DNA, 15 bp, Homo sapiens
aataaatgtaaaagg

SEQ ID NO: 321741 - DNA, 15 bp, Homo sapiens
aaataaatgtaaaag

SEQ ID NO: 321742 - DNA, 15 bp, Homo sapiens
taaataaatgtaaaa

SEQ ID NO: 321743 - DNA, 15 bp, Homo sapiens
ataaataaatgtaaa

SEQ ID NO: 321744 - DNA, 15 bp, Homo sapiens
aataaataaatgtaa

SEQ ID NO: 321745 - DNA, 15 bp, Homo sapiens
aaataaataaatgta

SEQ ID NO: 321746 - DNA, 15 bp, Homo sapiens
taaataaataaatgt

SEQ ID NO: 321747 - DNA, 15 bp, Homo sapiens
ataaataaataaatg

SEQ ID NO: 321748 - DNA, 15 bp, Homo sapiens
aataaataaataaat

SEQ ID NO: 321749 - DNA, 15 bp, Homo sapiens
aaaaaataaataaat

SEQ ID NO: 321750 - DNA, 15 bp, Homo sapiens
caaaaaataaataaa

SEQ ID NO: 321751 - DNA, 15 bp, Homo sapiens
tctgtctcaaaaaat

SEQ ID NO: 321752 - DNA, 15 bp, Homo sapiens
cgagatcgcgccact

SEQ ID NO: 321753 - DNA, 15 bp, Homo sapiens
ccgagatcgcgccac

SEQ ID NO: 321754 - DNA, 15 bp, Homo sapiens
gccgagatcgcgcca

SEQ ID NO: 321755 - DNA, 15 bp, Homo sapiens
agccgagatcgcgcc

SEQ ID NO: 321756 - DNA, 15 bp, Homo sapiens
gagccgagatcgcgc

SEQ ID NO: 321757 - DNA, 15 bp, Homo sapiens
tgagccgagatcgcg

SEQ ID NO: 321758 - DNA, 15 bp, Homo sapiens
cttgcagtgagccga

SEQ ID NO: 321759 - DNA, 15 bp, Homo sapiens
gcttgcagtgagccg

SEQ ID NO: 321760 - DNA, 15 bp, Homo sapiens
agcttgcagtgagcc

SEQ ID NO: 321761 - DNA, 15 bp, Homo sapiens
gagcttgcagtgagc

SEQ ID NO: 321762 - DNA, 15 bp, Homo sapiens
agagcttgcagtgag

SEQ ID NO: 321763 - DNA, 15 bp, Homo sapiens
cagagcttgcagtga

SEQ ID NO: 321764 - DNA, 15 bp, Homo sapiens
gcagagcttgcagtg

SEQ ID NO: 321765 - DNA, 15 bp, Homo sapiens
ggcagagcttgcagt

SEQ ID NO: 321766 - DNA, 15 bp, Homo sapiens
aggcagagcttgcag

SEQ ID NO: 321767 - DNA, 15 bp, Homo sapiens
aaggcagagcttgca

SEQ ID NO: 321768 - DNA, 15 bp, Homo sapiens
gaaggcagagcttgc

SEQ ID NO: 321769 - DNA, 15 bp, Homo sapiens
ggaaggcagagcttg

SEQ ID NO: 321770 - DNA, 15 bp, Homo sapiens
tggaaggcagagctt

SEQ ID NO: 321771 - DNA, 15 bp, Homo sapiens
ctggaaggcagagct

SEQ ID NO: 321772 - DNA, 15 bp, Homo sapiens
cctggaaggcagagc

SEQ ID NO: 321773 - DNA, 15 bp, Homo sapiens
acctggaaggcagag

SEQ ID NO: 321774 - DNA, 15 bp, Homo sapiens
aacctggaaggcaga

SEQ ID NO: 321775 - DNA, 15 bp, Homo sapiens
gaacctggaaggcag

SEQ ID NO: 321776 - DNA, 15 bp, Homo sapiens
tgaacctggaaggca

SEQ ID NO: 321777 - DNA, 15 bp, Homo sapiens
gtgaacctggaaggc

SEQ ID NO: 321778 - DNA, 15 bp, Homo sapiens
tgtgaacctggaagg

SEQ ID NO: 321779 - DNA, 15 bp, Homo sapiens
gtgtgaacctggaag

SEQ ID NO: 321780 - DNA, 15 bp, Homo sapiens
ggtgtgaacctggaa

SEQ ID NO: 321781 - DNA, 15 bp, Homo sapiens
tggtgtgaacctgga

SEQ ID NO: 321782 - DNA, 15 bp, Homo sapiens
atggtgtgaacctgg

SEQ ID NO: 321783 - DNA, 15 bp, Homo sapiens
aatggtgtgaacctg

SEQ ID NO: 321784 - DNA, 15 bp, Homo sapiens
gaatggtgtgaacct

SEQ ID NO: 321785 - DNA, 15 bp, Homo sapiens
agaatggtgtgaacc

SEQ ID NO: 321786 - DNA, 15 bp, Homo sapiens
gagaatggtgtgaac

SEQ ID NO: 321787 - DNA, 15 bp, Homo sapiens
ggagaatggtgtgaa

SEQ ID NO: 321788 - DNA, 15 bp, Homo sapiens
aggagaatggtgtga

SEQ ID NO: 321789 - DNA, 15 bp, Homo sapiens
caggagaatggtgtg

SEQ ID NO: 321790 - DNA, 15 bp, Homo sapiens
gcaggagaatggtgt

SEQ ID NO: 321791 - DNA, 15 bp, Homo sapiens
ggcaggagaatggtg

SEQ ID NO: 321792 - DNA, 15 bp, Homo sapiens
aggcaggagaatggt

SEQ ID NO: 321793 - DNA, 15 bp, Homo sapiens
cgaggcaggagaatg

SEQ ID NO: 321794 - DNA, 15 bp, Homo sapiens
tcgaggcaggagaat

SEQ ID NO: 321795 - DNA, 15 bp, Homo sapiens
gtcgaggcaggagaa

SEQ ID NO: 321796 - DNA, 15 bp, Homo sapiens
ggtcgaggcaggaga

SEQ ID NO: 321797 - DNA, 15 bp, Homo sapiens
aggtcgaggcaggag

SEQ ID NO: 321798 - DNA, 15 bp, Homo sapiens
gaggtcgaggcagga

SEQ ID NO: 321799 - DNA, 15 bp, Homo sapiens
ggaggtcgaggcagg

SEQ ID NO: 321800 - DNA, 15 bp, Homo sapiens
gggaggtcgaggcag

SEQ ID NO: 321801 - DNA, 15 bp, Homo sapiens
cgggaggtcgaggca

SEQ ID NO: 321802 - DNA, 15 bp, Homo sapiens
tcgggaggtcgaggc

SEQ ID NO: 321803 - DNA, 15 bp, Homo sapiens
ctcgggaggtcgagg

SEQ ID NO: 321804 - DNA, 15 bp, Homo sapiens
actcgggaggtcgag

SEQ ID NO: 321805 - DNA, 15 bp, Homo sapiens
tactcgggaggtcga

SEQ ID NO: 321806 - DNA, 15 bp, Homo sapiens
ctactcgggaggtcg

SEQ ID NO: 321807 - DNA, 15 bp, Homo sapiens
gctactcgggaggtc

SEQ ID NO: 321808 - DNA, 15 bp, Homo sapiens
agctactcgggaggt

SEQ ID NO: 321809 - DNA, 15 bp, Homo sapiens
tagtcccagctactc

SEQ ID NO: 321810 - DNA, 15 bp, Homo sapiens
gcctgtagtcccagc

SEQ ID NO: 321811 - DNA, 15 bp, Homo sapiens
cgcctgtagtcccag

SEQ ID NO: 321812 - DNA, 15 bp, Homo sapiens
gcgcctgtagtccca

SEQ ID NO: 321813 - DNA, 15 bp, Homo sapiens
ggcgcctgtagtccc

SEQ ID NO: 321814 - DNA, 15 bp, Homo sapiens
agtggcgggcgcctg

SEQ ID NO: 321815 - DNA, 15 bp, Homo sapiens
cagtggcgggcgcct

SEQ ID NO: 321816 - DNA, 15 bp, Homo sapiens
gcagtggcgggcgcc

SEQ ID NO: 321817 - DNA, 15 bp, Homo sapiens
cgcagtggcgggcgc

SEQ ID NO: 321818 - DNA, 15 bp, Homo sapiens
gcgcagtggcgggcg

SEQ ID NO: 321819 - DNA, 15 bp, Homo sapiens
ggcgcagtggcgggc

SEQ ID NO: 321820 - DNA, 15 bp, Homo sapiens
gggcgcagtggcggg

SEQ ID NO: 321821 - DNA, 15 bp, Homo sapiens
agggcgcagtggcgg

SEQ ID NO: 321822 - DNA, 15 bp, Homo sapiens
tagggcgcagtggcg

SEQ ID NO: 321823 - DNA, 15 bp, Homo sapiens
gtagggcgcagtggc

SEQ ID NO: 321824 - DNA, 15 bp, Homo sapiens
agtagggcgcagtgg

SEQ ID NO: 321825 - DNA, 15 bp, Homo sapiens
tagtagggcgcagtg

SEQ ID NO: 321826 - DNA, 15 bp, Homo sapiens
ttagtagggcgcagt

SEQ ID NO: 321827 - DNA, 15 bp, Homo sapiens
attagtagggcgcag

SEQ ID NO: 321828 - DNA, 15 bp, Homo sapiens
aattagtagggcgca

SEQ ID NO: 321829 - DNA, 15 bp, Homo sapiens
aaattagtagggcgc

SEQ ID NO: 321830 - DNA, 15 bp, Homo sapiens
aaaattagtagggcg

SEQ ID NO: 321831 - DNA, 15 bp, Homo sapiens
aaaaattagtagggc

SEQ ID NO: 321832 - DNA, 15 bp, Homo sapiens
aaaaaattagtaggg

SEQ ID NO: 321833 - DNA, 15 bp, Homo sapiens
caaaaaattagtagg

SEQ ID NO: 321834 - DNA, 15 bp, Homo sapiens
acaaaaaattagtag

SEQ ID NO: 321835 - DNA, 15 bp, Homo sapiens
tacaaaaaattagta

SEQ ID NO: 321836 - DNA, 15 bp, Homo sapiens
atacaaaaaattagt

SEQ ID NO: 321837 - DNA, 15 bp, Homo sapiens
aaaatacaaaaaatt

SEQ ID NO: 321838 - DNA, 15 bp, Homo sapiens
aaaaatacaaaaaat

SEQ ID NO: 321839 - DNA, 15 bp, Homo sapiens
ccacggtgaaacccc

SEQ ID NO: 321840 - DNA, 15 bp, Homo sapiens
accacggtgaaaccc

SEQ ID NO: 321841 - DNA, 15 bp, Homo sapiens
gaccacggtgaaacc

SEQ ID NO: 321842 - DNA, 15 bp, Homo sapiens
agaccacggtgaaac

SEQ ID NO: 321843 - DNA, 15 bp, Homo sapiens
gagaccacggtgaaa

SEQ ID NO: 321844 - DNA, 15 bp, Homo sapiens
cgagaccacggtgaa

SEQ ID NO: 321845 - DNA, 15 bp, Homo sapiens
tcgagaccacggtga

SEQ ID NO: 321846 - DNA, 15 bp, Homo sapiens
atcgagaccacggtg

SEQ ID NO: 321847 - DNA, 15 bp, Homo sapiens
gatcgagaccacggt

SEQ ID NO: 321848 - DNA, 15 bp, Homo sapiens
agatcgagaccacgg

SEQ ID NO: 321849 - DNA, 15 bp, Homo sapiens
gagatcgagaccacg

SEQ ID NO: 321850 - DNA, 15 bp, Homo sapiens
ggagatcgagaccac

SEQ ID NO: 321851 - DNA, 15 bp, Homo sapiens
tggatcacgaggtca

SEQ ID NO: 321852 - DNA, 15 bp, Homo sapiens
gtggatcacgaggtc

SEQ ID NO: 321853 - DNA, 15 bp, Homo sapiens
ggtggatcacgaggt

SEQ ID NO: 321854 - DNA, 15 bp, Homo sapiens
gggtggatcacgagg

SEQ ID NO: 321855 - DNA, 15 bp, Homo sapiens
cgggtggatcacgag

SEQ ID NO: 321856 - DNA, 15 bp, Homo sapiens
gcgggtggatcacga

SEQ ID NO: 321857 - DNA, 15 bp, Homo sapiens
ggcgggtggatcacg

SEQ ID NO: 321858 - DNA, 15 bp, Homo sapiens
aggcgggtggatcac

SEQ ID NO: 321859 - DNA, 15 bp, Homo sapiens
gaggcgggtggatca

SEQ ID NO: 321860 - DNA, 15 bp, Homo sapiens
tgaggcgggtggatc

SEQ ID NO: 321861 - DNA, 15 bp, Homo sapiens
ctgaggcgggtggat

SEQ ID NO: 321862 - DNA, 15 bp, Homo sapiens
gctgaggcgggtgga

SEQ ID NO: 321863 - DNA, 15 bp, Homo sapiens
ggctgaggcgggtgg

SEQ ID NO: 321864 - DNA, 15 bp, Homo sapiens
aggctgaggcgggtg

SEQ ID NO: 321865 - DNA, 15 bp, Homo sapiens
gaggctgaggcgggt

SEQ ID NO: 321866 - DNA, 15 bp, Homo sapiens
agtggctcacgcctg

SEQ ID NO: 321867 - DNA, 15 bp, Homo sapiens
cagtggctcacgcct

SEQ ID NO: 321868 - DNA, 15 bp, Homo sapiens
gcagtggctcacgcc

SEQ ID NO: 321869 - DNA, 15 bp, Homo sapiens
cgggcgcagtggctc

SEQ ID NO: 321870 - DNA, 15 bp, Homo sapiens
ccgggcgcagtggct

SEQ ID NO: 321871 - DNA, 15 bp, Homo sapiens
gccgggcgcagtggc

SEQ ID NO: 321872 - DNA, 15 bp, Homo sapiens
ggccgggcgcagtgg

SEQ ID NO: 321873 - DNA, 15 bp, Homo sapiens
gggccgggcgcagtg

SEQ ID NO: 321874 - DNA, 15 bp, Homo sapiens
agggccgggcgcagt

SEQ ID NO: 321875 - DNA, 15 bp, Homo sapiens
aagggccgggcgcag

SEQ ID NO: 321876 - DNA, 15 bp, Homo sapiens
aaagggccgggcgca

SEQ ID NO: 321877 - DNA, 15 bp, Homo sapiens
aaaataaatgtaaaa

SEQ ID NO: 321878 - DNA, 15 bp, Homo sapiens
aaaaataaatgtaaa

SEQ ID NO: 321879 - DNA, 15 bp, Homo sapiens
taaaaataaatgtaa

SEQ ID NO: 321880 - DNA, 15 bp, Homo sapiens
ttaaaaataaatgta

SEQ ID NO: 321881 - DNA, 15 bp, Homo sapiens
tttaaaaataaatgt

SEQ ID NO: 321882 - DNA, 15 bp, Homo sapiens
atttaaaaataaatg

SEQ ID NO: 321883 - DNA, 15 bp, Homo sapiens
aatttaaaaataaat

SEQ ID NO: 321884 - DNA, 15 bp, Homo sapiens
ctgtctcttaattta

SEQ ID NO: 321885 - DNA, 15 bp, Homo sapiens
cctgtctcttaattt

SEQ ID NO: 321886 - DNA, 15 bp, Homo sapiens
ccctgtctcttaatt

SEQ ID NO: 321887 - DNA, 15 bp, Homo sapiens
accctgtctcttaat

SEQ ID NO: 321888 - DNA, 15 bp, Homo sapiens
caccctgtctcttaa

SEQ ID NO: 321889 - DNA, 15 bp, Homo sapiens
acaccctgtctctta

SEQ ID NO: 321890 - DNA, 15 bp, Homo sapiens
gacaccctgtctctt

SEQ ID NO: 321891 - DNA, 15 bp, Homo sapiens
tgacaccctgtctct

SEQ ID NO: 321892 - DNA, 15 bp, Homo sapiens
gtgacaccctgtctc

SEQ ID NO: 321893 - DNA, 15 bp, Homo sapiens
agtgacaccctgtct

SEQ ID NO: 321894 - DNA, 15 bp, Homo sapiens
tagtgacaccctgtc

SEQ ID NO: 321895 - DNA, 15 bp, Homo sapiens
atagtgacaccctgt

SEQ ID NO: 321896 - DNA, 15 bp, Homo sapiens
catagtgacaccctg

SEQ ID NO: 321897 - DNA, 15 bp, Homo sapiens
tcatagtgacaccct

SEQ ID NO: 321898 - DNA, 15 bp, Homo sapiens
atcatagtgacaccc

SEQ ID NO: 321899 - DNA, 15 bp, Homo sapiens
catcatagtgacacc

SEQ ID NO: 321900 - DNA, 15 bp, Homo sapiens
gcatcatagtgacac

SEQ ID NO: 321901 - DNA, 15 bp, Homo sapiens
ggcatcatagtgaca

SEQ ID NO: 321902 - DNA, 15 bp, Homo sapiens
cggcatcatagtgac

SEQ ID NO: 321903 - DNA, 15 bp, Homo sapiens
tcggcatcatagtga

SEQ ID NO: 321904 - DNA, 15 bp, Homo sapiens
ctcggcatcatagtg

SEQ ID NO: 321905 - DNA, 15 bp, Homo sapiens
cctcggcatcatagt

SEQ ID NO: 321906 - DNA, 15 bp, Homo sapiens
gcctcggcatcatag

SEQ ID NO: 321907 - DNA, 15 bp, Homo sapiens
agcctcggcatcata

SEQ ID NO: 321908 - DNA, 15 bp, Homo sapiens
cagcctcggcatcat

SEQ ID NO: 321909 - DNA, 15 bp, Homo sapiens
ccagcctcggcatca

SEQ ID NO: 321910 - DNA, 15 bp, Homo sapiens
accagcctcggcatc

SEQ ID NO: 321911 - DNA, 15 bp, Homo sapiens
gaccagcctcggcat

SEQ ID NO: 321912 - DNA, 15 bp, Homo sapiens
agaccagcctcggca

SEQ ID NO: 321913 - DNA, 15 bp, Homo sapiens
gagaccagcctcggc

SEQ ID NO: 321914 - DNA, 15 bp, Homo sapiens
cgagaccagcctcgg

SEQ ID NO: 321915 - DNA, 15 bp, Homo sapiens
tcgagaccagcctcg

SEQ ID NO: 321916 - DNA, 15 bp, Homo sapiens
ttcgagaccagcctc

SEQ ID NO: 321917 - DNA, 15 bp, Homo sapiens
cagctcaggagttcg

SEQ ID NO: 321918 - DNA, 15 bp, Homo sapiens
tcagctcaggagttc

SEQ ID NO: 321919 - DNA, 15 bp, Homo sapiens
ttcagctcaggagtt

SEQ ID NO: 321920 - DNA, 15 bp, Homo sapiens
cttcagctcaggagt

SEQ ID NO: 321921 - DNA, 15 bp, Homo sapiens
acttcagctcaggag

SEQ ID NO: 321922 - DNA, 15 bp, Homo sapiens
cacttcagctcagga

SEQ ID NO: 321923 - DNA, 15 bp, Homo sapiens
tcacttcagctcagg

SEQ ID NO: 321924 - DNA, 15 bp, Homo sapiens
atcacttcagctcag

SEQ ID NO: 321925 - DNA, 15 bp, Homo sapiens
gatcacttcagctca

SEQ ID NO: 321926 - DNA, 15 bp, Homo sapiens
ggatcacttcagctc

SEQ ID NO: 321927 - DNA, 15 bp, Homo sapiens
aggatcacttcagct

SEQ ID NO: 321928 - DNA, 15 bp, Homo sapiens
gaggatcacttcagc

SEQ ID NO: 321929 - DNA, 15 bp, Homo sapiens
ggaggatcacttcag

SEQ ID NO: 321930 - DNA, 15 bp, Homo sapiens
gggaggatcacttca

SEQ ID NO: 321931 - DNA, 15 bp, Homo sapiens
tgggaggatcacttc

SEQ ID NO: 321932 - DNA, 15 bp, Homo sapiens
gtgggaggatcactt

SEQ ID NO: 321933 - DNA, 15 bp, Homo sapiens
ggtgggaggatcact

SEQ ID NO: 321934 - DNA, 15 bp, Homo sapiens
aggtgggaggatcac

SEQ ID NO: 321935 - DNA, 15 bp, Homo sapiens
gaggtgggaggatca

SEQ ID NO: 321936 - DNA, 15 bp, Homo sapiens
cgaggtgggaggatc

SEQ ID NO: 321937 - DNA, 15 bp, Homo sapiens
ccgaggtgggaggat

SEQ ID NO: 321938 - DNA, 15 bp, Homo sapiens
gccgaggtgggagga

SEQ ID NO: 321939 - DNA, 15 bp, Homo sapiens
ggccgaggtgggagg

SEQ ID NO: 321940 - DNA, 15 bp, Homo sapiens
aggccgaggtgggag

SEQ ID NO: 321941 - DNA, 15 bp, Homo sapiens
gaggccgaggtggga

SEQ ID NO: 321942 - DNA, 15 bp, Homo sapiens
ttttgggaggccgag

SEQ ID NO: 321943 - DNA, 15 bp, Homo sapiens
attttgggaggccga

SEQ ID NO: 321944 - DNA, 15 bp, Homo sapiens
cattttgggaggccg

SEQ ID NO: 321945 - DNA, 15 bp, Homo sapiens
gcattttgggaggcc

SEQ ID NO: 321946 - DNA, 15 bp, Homo sapiens
agcattttgggaggc

SEQ ID NO: 321947 - DNA, 15 bp, Homo sapiens
cagcattttgggagg

SEQ ID NO: 321948 - DNA, 15 bp, Homo sapiens
ccagcattttgggag

SEQ ID NO: 321949 - DNA, 15 bp, Homo sapiens
cccagcattttggga

SEQ ID NO: 321950 - DNA, 15 bp, Homo sapiens
tcccagcattttggg

SEQ ID NO: 321951 - DNA, 15 bp, Homo sapiens
atcccagcattttgg

SEQ ID NO: 321952 - DNA, 15 bp, Homo sapiens
aatcccagcattttg

SEQ ID NO: 321953 - DNA, 15 bp, Homo sapiens
taatcccagcatttt

SEQ ID NO: 321954 - DNA, 15 bp, Homo sapiens
gtaatcccagcattt

SEQ ID NO: 321955 - DNA, 15 bp, Homo sapiens
ggtaatcccagcatt

SEQ ID NO: 321956 - DNA, 15 bp, Homo sapiens
tggtaatcccagcat

SEQ ID NO: 321957 - DNA, 15 bp, Homo sapiens
atggtaatcccagca

SEQ ID NO: 321958 - DNA, 15 bp, Homo sapiens
catggtaatcccagc

SEQ ID NO: 321959 - DNA, 15 bp, Homo sapiens
acatggtaatcccag

SEQ ID NO: 321960 - DNA, 15 bp, Homo sapiens
gacatggtaatccca

SEQ ID NO: 321961 - DNA, 15 bp, Homo sapiens
ggacatggtaatccc

SEQ ID NO: 321962 - DNA, 15 bp, Homo sapiens
tggacatggtaatcc

SEQ ID NO: 321963 - DNA, 15 bp, Homo sapiens
ttggacatggtaatc

SEQ ID NO: 321964 - DNA, 15 bp, Homo sapiens
gttggacatggtaat

SEQ ID NO: 321965 - DNA, 15 bp, Homo sapiens
agttggacatggtaa

SEQ ID NO: 321966 - DNA, 15 bp, Homo sapiens
aagttggacatggta

SEQ ID NO: 321967 - DNA, 15 bp, Homo sapiens
aaagttggacatggt

SEQ ID NO: 321968 - DNA, 15 bp, Homo sapiens
gaaagttggacatgg

SEQ ID NO: 321969 - DNA, 15 bp, Homo sapiens
ggaaagttggacatg

SEQ ID NO: 321970 - DNA, 15 bp, Homo sapiens
tggaaagttggacat

SEQ ID NO: 321971 - DNA, 15 bp, Homo sapiens
gtggaaagttggaca

SEQ ID NO: 321972 - DNA, 15 bp, Homo sapiens
agtggaaagttggac

SEQ ID NO: 321973 - DNA, 15 bp, Homo sapiens
aagtggaaagttgga

SEQ ID NO: 321974 - DNA, 15 bp, Homo sapiens
gaagtggaaagttgg

SEQ ID NO: 321975 - DNA, 15 bp, Homo sapiens
agaagtggaaagttg

SEQ ID NO: 321976 - DNA, 15 bp, Homo sapiens
aagaagtggaaagtt

SEQ ID NO: 321977 - DNA, 15 bp, Homo sapiens
caagaagtggaaagt

SEQ ID NO: 321978 - DNA, 15 bp, Homo sapiens
acaagaagtggaaag

SEQ ID NO: 321979 - DNA, 15 bp, Homo sapiens
aacaagaagtggaaa

SEQ ID NO: 321980 - DNA, 15 bp, Homo sapiens
aaacaagaagtggaa

SEQ ID NO: 321981 - DNA, 15 bp, Homo sapiens
caaacaagaagtgga

SEQ ID NO: 321982 - DNA, 15 bp, Homo sapiens
tcaaacaagaagtgg

SEQ ID NO: 321983 - DNA, 15 bp, Homo sapiens
gtcaaacaagaagtg

SEQ ID NO: 321984 - DNA, 15 bp, Homo sapiens
ggtcaaacaagaagt

SEQ ID NO: 321985 - DNA, 15 bp, Homo sapiens
tggtcaaacaagaag

SEQ ID NO: 321986 - DNA, 15 bp, Homo sapiens
ttggtcaaacaagaa

SEQ ID NO: 321987 - DNA, 15 bp, Homo sapiens
cttggtcaaacaaga

SEQ ID NO: 321988 - DNA, 15 bp, Homo sapiens
ccttggtcaaacaag

SEQ ID NO: 321989 - DNA, 15 bp, Homo sapiens
tccttggtcaaacaa

SEQ ID NO: 321990 - DNA, 15 bp, Homo sapiens
atccttggtcaaaca

SEQ ID NO: 321991 - DNA, 15 bp, Homo sapiens
catccttggtcaaac

SEQ ID NO: 321992 - DNA, 15 bp, Homo sapiens
ccatccttggtcaaa

SEQ ID NO: 321993 - DNA, 15 bp, Homo sapiens
tccatccttggtcaa

SEQ ID NO: 321994 - DNA, 15 bp, Homo sapiens
atccatccttggtca

SEQ ID NO: 321995 - DNA, 15 bp, Homo sapiens
catccatccttggtc

SEQ ID NO: 321996 - DNA, 15 bp, Homo sapiens
ccatccatccttggt

SEQ ID NO: 321997 - DNA, 15 bp, Homo sapiens
gccatccatccttgg

SEQ ID NO: 321998 - DNA, 15 bp, Homo sapiens
tgccatccatccttg

SEQ ID NO: 321999 - DNA, 15 bp, Homo sapiens
ctgccatccatcctt

SEQ ID NO: 322000 - DNA, 15 bp, Homo sapiens
tctgccatccatcct

SEQ ID NO: 322001 - DNA, 15 bp, Homo sapiens
gtctgccatccatcc

SEQ ID NO: 322002 - DNA, 15 bp, Homo sapiens
tgtctgccatccatc

SEQ ID NO: 322003 - DNA, 15 bp, Homo sapiens
atgtctgccatccat

SEQ ID NO: 322004 - DNA, 15 bp, Homo sapiens
gatgtctgccatcca

SEQ ID NO: 322005 - DNA, 15 bp, Homo sapiens
tgatgtctgccatcc

SEQ ID NO: 322006 - DNA, 15 bp, Homo sapiens
ctgatgtctgccatc

SEQ ID NO: 322007 - DNA, 15 bp, Homo sapiens
tctgatgtctgccat

SEQ ID NO: 322008 - DNA, 15 bp, Homo sapiens
ttctgatgtctgcca

SEQ ID NO: 322009 - DNA, 15 bp, Homo sapiens
cttctgatgtctgcc

SEQ ID NO: 322010 - DNA, 15 bp, Homo sapiens
ccttctgatgtctgc

SEQ ID NO: 322011 - DNA, 15 bp, Homo sapiens
cccttctgatgtctg

SEQ ID NO: 322012 - DNA, 15 bp, Homo sapiens
ccccttctgatgtct

SEQ ID NO: 322013 - DNA, 15 bp, Homo sapiens
gccccttctgatgtc

SEQ ID NO: 322014 - DNA, 15 bp, Homo sapiens
agccccttctgatgt

SEQ ID NO: 322015 - DNA, 15 bp, Homo sapiens
aagccccttctgatg

SEQ ID NO: 322016 - DNA, 15 bp, Homo sapiens
caagccccttctgat

SEQ ID NO: 322017 - DNA, 15 bp, Homo sapiens
ccaagccccttctga

SEQ ID NO: 322018 - DNA, 15 bp, Homo sapiens
tccaagccccttctg

SEQ ID NO: 322019 - DNA, 15 bp, Homo sapiens
ttccaagccccttct

SEQ ID NO: 322020 - DNA, 15 bp, Homo sapiens
tttccaagccccttc

SEQ ID NO: 322021 - DNA, 15 bp, Homo sapiens
ctttccaagcccctt

SEQ ID NO: 322022 - DNA, 15 bp, Homo sapiens
cctttccaagcccct

SEQ ID NO: 322023 - DNA, 15 bp, Homo sapiens
ccctttccaagcccc

SEQ ID NO: 322024 - DNA, 15 bp, Homo sapiens
tccctttccaagccc

SEQ ID NO: 322025 - DNA, 15 bp, Homo sapiens
ctccctttccaagcc

SEQ ID NO: 322026 - DNA, 15 bp, Homo sapiens
cctccctttccaagc

SEQ ID NO: 322027 - DNA, 15 bp, Homo sapiens
acctccctttccaag

SEQ ID NO: 322028 - DNA, 15 bp, Homo sapiens
cacctccctttccaa

SEQ ID NO: 322029 - DNA, 15 bp, Homo sapiens
acacctccctttcca

SEQ ID NO: 322030 - DNA, 15 bp, Homo sapiens
gacacctccctttcc

SEQ ID NO: 322031 - DNA, 15 bp, Homo sapiens
tgacacctccctttc

SEQ ID NO: 322032 - DNA, 15 bp, Homo sapiens
ttgacacctcccttt

SEQ ID NO: 322033 - DNA, 15 bp, Homo sapiens
tttgacacctccctt

SEQ ID NO: 322034 - DNA, 15 bp, Homo sapiens
ctttgacacctccct

SEQ ID NO: 322035 - DNA, 15 bp, Homo sapiens
tctttgacacctccc

SEQ ID NO: 322036 - DNA, 15 bp, Homo sapiens
gtctttgacacctcc

SEQ ID NO: 322037 - DNA, 15 bp, Homo sapiens
ggtctttgacacctc

SEQ ID NO: 322038 - DNA, 15 bp, Homo sapiens
aggtctttgacacct

SEQ ID NO: 322039 - DNA, 15 bp, Homo sapiens
aaggtctttgacacc

SEQ ID NO: 322040 - DNA, 15 bp, Homo sapiens
caaggtctttgacac

SEQ ID NO: 322041 - DNA, 15 bp, Homo sapiens
gcaaggtctttgaca

SEQ ID NO: 322042 - DNA, 15 bp, Homo sapiens
ggcaaggtctttgac

SEQ ID NO: 322043 - DNA, 15 bp, Homo sapiens
gggcaaggtctttga

SEQ ID NO: 322044 - DNA, 15 bp, Homo sapiens
tgggcaaggtctttg

SEQ ID NO: 322045 - DNA, 15 bp, Homo sapiens
ctgggcaaggtcttt

SEQ ID NO: 322046 - DNA, 15 bp, Homo sapiens
gctgggcaaggtctt

SEQ ID NO: 322047 - DNA, 15 bp, Homo sapiens
tgctgggcaaggtct

SEQ ID NO: 322048 - DNA, 15 bp, Homo sapiens
atgctgggcaaggtc

SEQ ID NO: 322049 - DNA, 15 bp, Homo sapiens
catgctgggcaaggt

SEQ ID NO: 322050 - DNA, 15 bp, Homo sapiens
ccatgctgggcaagg

SEQ ID NO: 322051 - DNA, 15 bp, Homo sapiens
tccatgctgggcaag

SEQ ID NO: 322052 - DNA, 15 bp, Homo sapiens
ctccatgctgggcaa

SEQ ID NO: 322053 - DNA, 15 bp, Homo sapiens
actccatgctgggca

SEQ ID NO: 322054 - DNA, 15 bp, Homo sapiens
gactccatgctgggc

SEQ ID NO: 322055 - DNA, 15 bp, Homo sapiens
agactccatgctggg

SEQ ID NO: 322056 - DNA, 15 bp, Homo sapiens
cagactccatgctgg

SEQ ID NO: 322057 - DNA, 15 bp, Homo sapiens
ccagactccatgctg

SEQ ID NO: 322058 - DNA, 15 bp, Homo sapiens
cccagactccatgct

SEQ ID NO: 322059 - DNA, 15 bp, Homo sapiens
acccagactccatgc

SEQ ID NO: 322060 - DNA, 15 bp, Homo sapiens
gacccagactccatg

SEQ ID NO: 322061 - DNA, 15 bp, Homo sapiens
tgacccagactccat

SEQ ID NO: 322062 - DNA, 15 bp, Homo sapiens
gtgacccagactcca

SEQ ID NO: 322063 - DNA, 15 bp, Homo sapiens
tgtgacccagactcc

SEQ ID NO: 322064 - DNA, 15 bp, Homo sapiens
ctgtgacccagactc

SEQ ID NO: 322065 - DNA, 15 bp, Homo sapiens
gctgtgacccagact

SEQ ID NO: 322066 - DNA, 15 bp, Homo sapiens
agctgtgacccagac

SEQ ID NO: 322067 - DNA, 15 bp, Homo sapiens
cagctgtgacccaga

SEQ ID NO: 322068 - DNA, 15 bp, Homo sapiens
ccagctgtgacccag

SEQ ID NO: 322069 - DNA, 15 bp, Homo sapiens
cccagctgtgaccca

SEQ ID NO: 322070 - DNA, 15 bp, Homo sapiens
ccccagctgtgaccc

SEQ ID NO: 322071 - DNA, 15 bp, Homo sapiens
cccccagctgtgacc

SEQ ID NO: 322072 - DNA, 15 bp, Homo sapiens
tcccccagctgtgac

SEQ ID NO: 322073 - DNA, 15 bp, Homo sapiens
ctcccccagctgtga

SEQ ID NO: 322074 - DNA, 15 bp, Homo sapiens
cctcccccagctgtg

SEQ ID NO: 322075 - DNA, 15 bp, Homo sapiens
tcctcccccagctgt

SEQ ID NO: 322076 - DNA, 15 bp, Homo sapiens
atcctcccccagctg

SEQ ID NO: 322077 - DNA, 15 bp, Homo sapiens
gatcctcccccagct

SEQ ID NO: 322078 - DNA, 15 bp, Homo sapiens
agatcctcccccagc

SEQ ID NO: 322079 - DNA, 15 bp, Homo sapiens
cagatcctcccccag

SEQ ID NO: 322080 - DNA, 15 bp, Homo sapiens
ccagatcctccccca

SEQ ID NO: 322081 - DNA, 15 bp, Homo sapiens
cccagatcctccccc

SEQ ID NO: 322082 - DNA, 15 bp, Homo sapiens
tcccagatcctcccc

SEQ ID NO: 322083 - DNA, 15 bp, Homo sapiens
ttcccagatcctccc

SEQ ID NO: 322084 - DNA, 15 bp, Homo sapiens
gttcccagatcctcc

SEQ ID NO: 322085 - DNA, 15 bp, Homo sapiens
agttcccagatcctc

SEQ ID NO: 322086 - DNA, 15 bp, Homo sapiens
cagttcccagatcct

SEQ ID NO: 322087 - DNA, 15 bp, Homo sapiens
acagttcccagatcc

SEQ ID NO: 322088 - DNA, 15 bp, Homo sapiens
cacagttcccagatc

SEQ ID NO: 322089 - DNA, 15 bp, Homo sapiens
gcacagttcccagat

SEQ ID NO: 322090 - DNA, 15 bp, Homo sapiens
agcacagttcccaga

SEQ ID NO: 322091 - DNA, 15 bp, Homo sapiens
aagcacagttcccag

SEQ ID NO: 322092 - DNA, 15 bp, Homo sapiens
caagcacagttccca

SEQ ID NO: 322093 - DNA, 15 bp, Homo sapiens
gcaagcacagttccc

SEQ ID NO: 322094 - DNA, 15 bp, Homo sapiens
ggcaagcacagttcc

SEQ ID NO: 322095 - DNA, 15 bp, Homo sapiens
aggcaagcacagttc

SEQ ID NO: 322096 - DNA, 15 bp, Homo sapiens
caggcaagcacagtt

SEQ ID NO: 322097 - DNA, 15 bp, Homo sapiens
tcaggcaagcacagt

SEQ ID NO: 322098 - DNA, 15 bp, Homo sapiens
ttcaggcaagcacag

SEQ ID NO: 322099 - DNA, 15 bp, Homo sapiens
cttcaggcaagcaca

SEQ ID NO: 322100 - DNA, 15 bp, Homo sapiens
gcttcaggcaagcac

SEQ ID NO: 322101 - DNA, 15 bp, Homo sapiens
agcttcaggcaagca

SEQ ID NO: 322102 - DNA, 15 bp, Homo sapiens
aagcttcaggcaagc

SEQ ID NO: 322103 - DNA, 15 bp, Homo sapiens
taagcttcaggcaag

SEQ ID NO: 322104 - DNA, 15 bp, Homo sapiens
gtaagcttcaggcaa

SEQ ID NO: 322105 - DNA, 15 bp, Homo sapiens
ggtaagcttcaggca

SEQ ID NO: 322106 - DNA, 15 bp, Homo sapiens
aggtaagcttcaggc

SEQ ID NO: 322107 - DNA, 15 bp, Homo sapiens
caggtaagcttcagg

SEQ ID NO: 322108 - DNA, 15 bp, Homo sapiens
gcaggtaagcttcag

SEQ ID NO: 322109 - DNA, 15 bp, Homo sapiens
agcaggtaagcttca

SEQ ID NO: 322110 - DNA, 15 bp, Homo sapiens
aagcaggtaagcttc

SEQ ID NO: 322111 - DNA, 15 bp, Homo sapiens
caagcaggtaagctt

SEQ ID NO: 322112 - DNA, 15 bp, Homo sapiens
acaagcaggtaagct

SEQ ID NO: 322113 - DNA, 15 bp, Homo sapiens
gacaagcaggtaagc

SEQ ID NO: 322114 - DNA, 15 bp, Homo sapiens
tgacaagcaggtaag

SEQ ID NO: 322115 - DNA, 15 bp, Homo sapiens
atgacaagcaggtaa

SEQ ID NO: 322116 - DNA, 15 bp, Homo sapiens
gatgacaagcaggta

SEQ ID NO: 322117 - DNA, 15 bp, Homo sapiens
tgatgacaagcaggt

SEQ ID NO: 322118 - DNA, 15 bp, Homo sapiens
ttgatgacaagcagg

SEQ ID NO: 322119 - DNA, 15 bp, Homo sapiens
tttgatgacaagcag

SEQ ID NO: 322120 - DNA, 15 bp, Homo sapiens
atttgatgacaagca

SEQ ID NO: 322121 - DNA, 15 bp, Homo sapiens
gatttgatgacaagc

SEQ ID NO: 322122 - DNA, 15 bp, Homo sapiens
ggatttgatgacaag

SEQ ID NO: 322123 - DNA, 15 bp, Homo sapiens
tggatttgatgacaa

SEQ ID NO: 322124 - DNA, 15 bp, Homo sapiens
ttggatttgatgaca

SEQ ID NO: 322125 - DNA, 15 bp, Homo sapiens
cttggatttgatgac

SEQ ID NO: 322126 - DNA, 15 bp, Homo sapiens
ccttggatttgatga

SEQ ID NO: 322127 - DNA, 15 bp, Homo sapiens
gccttggatttgatg

SEQ ID NO: 322128 - DNA, 15 bp, Homo sapiens
tgccttggatttgat

SEQ ID NO: 322129 - DNA, 15 bp, Homo sapiens
ttgccttggatttga

SEQ ID NO: 322130 - DNA, 15 bp, Homo sapiens
cttgccttggatttg

SEQ ID NO: 322131 - DNA, 15 bp, Homo sapiens
ccttgccttggattt

SEQ ID NO: 322132 - DNA, 15 bp, Homo sapiens
gccttgccttggatt

SEQ ID NO: 322133 - DNA, 15 bp, Homo sapiens
cgccttgccttggat

SEQ ID NO: 322134 - DNA, 15 bp, Homo sapiens
acgccttgccttgga

SEQ ID NO: 322135 - DNA, 15 bp, Homo sapiens
cacgccttgccttgg

SEQ ID NO: 322136 - DNA, 15 bp, Homo sapiens
tcacgccttgccttg

SEQ ID NO: 322137 - DNA, 15 bp, Homo sapiens
ttcacgccttgcctt

SEQ ID NO: 322138 - DNA, 15 bp, Homo sapiens
attcacgccttgcct

SEQ ID NO: 322139 - DNA, 15 bp, Homo sapiens
cattcacgccttgcc

SEQ ID NO: 322140 - DNA, 15 bp, Homo sapiens
acattcacgccttgc

SEQ ID NO: 322141 - DNA, 15 bp, Homo sapiens
gacattcacgccttg

SEQ ID NO: 322142 - DNA, 15 bp, Homo sapiens
agacattcacgcctt

SEQ ID NO: 322143 - DNA, 15 bp, Homo sapiens
tagacattcacgcct

SEQ ID NO: 322144 - DNA, 15 bp, Homo sapiens
atagacattcacgcc

SEQ ID NO: 322145 - DNA, 15 bp, Homo sapiens
tatagacattcacgc

SEQ ID NO: 322146 - DNA, 15 bp, Homo sapiens
ctatagacattcacg

SEQ ID NO: 322147 - DNA, 15 bp, Homo sapiens
tctatagacattcac

SEQ ID NO: 322148 - DNA, 15 bp, Homo sapiens
ctctatagacattca

SEQ ID NO: 322149 - DNA, 15 bp, Homo sapiens
actctatagacattc

SEQ ID NO: 322150 - DNA, 15 bp, Homo sapiens
cactctatagacatt

SEQ ID NO: 322151 - DNA, 15 bp, Homo sapiens
tcactctatagacat

SEQ ID NO: 322152 - DNA, 15 bp, Homo sapiens
ctcactctatagaca

SEQ ID NO: 322153 - DNA, 15 bp, Homo sapiens
tctcactctatagac

SEQ ID NO: 322154 - DNA, 15 bp, Homo sapiens
ctctcactctataga

SEQ ID NO: 322155 - DNA, 15 bp, Homo sapiens
tctctcactctatag

SEQ ID NO: 322156 - DNA, 15 bp, Homo sapiens
gtctctcactctata

SEQ ID NO: 322157 - DNA, 15 bp, Homo sapiens
agtctctcactctat

SEQ ID NO: 322158 - DNA, 15 bp, Homo sapiens
aagtctctcactcta

SEQ ID NO: 322159 - DNA, 15 bp, Homo sapiens
caagtctctcactct

SEQ ID NO: 322160 - DNA, 15 bp, Homo sapiens
acaagtctctcactc

SEQ ID NO: 322161 - DNA, 15 bp, Homo sapiens
cacaagtctctcact

SEQ ID NO: 322162 - DNA, 15 bp, Homo sapiens
ccacaagtctctcac

SEQ ID NO: 322163 - DNA, 15 bp, Homo sapiens
tccacaagtctctca

SEQ ID NO: 322164 - DNA, 15 bp, Homo sapiens
ctccacaagtctctc

SEQ ID NO: 322165 - DNA, 15 bp, Homo sapiens
tctccacaagtctct

SEQ ID NO: 322166 - DNA, 15 bp, Homo sapiens
gtctccacaagtctc

SEQ ID NO: 322167 - DNA, 15 bp, Homo sapiens
tgtctccacaagtct

SEQ ID NO: 322168 - DNA, 15 bp, Homo sapiens
ctgtctccacaagtc

SEQ ID NO: 322169 - DNA, 15 bp, Homo sapiens
tctgtctccacaagt

SEQ ID NO: 322170 - DNA, 15 bp, Homo sapiens
ttctgtctccacaag

SEQ ID NO: 322171 - DNA, 15 bp, Homo sapiens
cttctgtctccacaa

SEQ ID NO: 322172 - DNA, 15 bp, Homo sapiens
tcttctgtctccaca

SEQ ID NO: 322173 - DNA, 15 bp, Homo sapiens
ctcttctgtctccac

SEQ ID NO: 322174 - DNA, 15 bp, Homo sapiens
gctcttctgtctcca

SEQ ID NO: 322175 - DNA, 15 bp, Homo sapiens
tgctcttctgtctcc

SEQ ID NO: 322176 - DNA, 15 bp, Homo sapiens
ctgctcttctgtctc

SEQ ID NO: 322177 - DNA, 15 bp, Homo sapiens
tctgctcttctgtct

SEQ ID NO: 322178 - DNA, 15 bp, Homo sapiens
ctctgctcttctgtc

SEQ ID NO: 322179 - DNA, 15 bp, Homo sapiens
tctctgctcttctgt

SEQ ID NO: 322180 - DNA, 15 bp, Homo sapiens
ctctctgctcttctg

SEQ ID NO: 322181 - DNA, 15 bp, Homo sapiens
cctctctgctcttct

SEQ ID NO: 322182 - DNA, 15 bp, Homo sapiens
ccctctctgctcttc

SEQ ID NO: 322183 - DNA, 15 bp, Homo sapiens
tccctctctgctctt

SEQ ID NO: 322184 - DNA, 15 bp, Homo sapiens
ctccctctctgctct

SEQ ID NO: 322185 - DNA, 15 bp, Homo sapiens
cctccctctctgctc

SEQ ID NO: 322186 - DNA, 15 bp, Homo sapiens
tcctccctctctgct

SEQ ID NO: 322187 - DNA, 15 bp, Homo sapiens
ttcctccctctctgc

SEQ ID NO: 322188 - DNA, 15 bp, Homo sapiens
cttcctccctctctg

SEQ ID NO: 322189 - DNA, 15 bp, Homo sapiens
tcttcctccctctct

SEQ ID NO: 322190 - DNA, 15 bp, Homo sapiens
ttcttcctccctctc

SEQ ID NO: 322191 - DNA, 15 bp, Homo sapiens
attcttcctccctct

SEQ ID NO: 322192 - DNA, 15 bp, Homo sapiens
cattcttcctccctc

SEQ ID NO: 322193 - DNA, 15 bp, Homo sapiens
tcattcttcctccct

SEQ ID NO: 322194 - DNA, 15 bp, Homo sapiens
ttcattcttcctccc

SEQ ID NO: 322195 - DNA, 15 bp, Homo sapiens
gttcattcttcctcc

SEQ ID NO: 322196 - DNA, 15 bp, Homo sapiens
tgttcattcttcctc

SEQ ID NO: 322197 - DNA, 15 bp, Homo sapiens
gtgttcattcttcct

SEQ ID NO: 322198 - DNA, 15 bp, Homo sapiens
agtgttcattcttcc

SEQ ID NO: 322199 - DNA, 15 bp, Homo sapiens
cagtgttcattcttc

SEQ ID NO: 322200 - DNA, 15 bp, Homo sapiens
ccagtgttcattctt

SEQ ID NO: 322201 - DNA, 15 bp, Homo sapiens
cccagtgttcattct

SEQ ID NO: 322202 - DNA, 15 bp, Homo sapiens
acccagtgttcattc

SEQ ID NO: 322203 - DNA, 15 bp, Homo sapiens
gacccagtgttcatt

SEQ ID NO: 322204 - DNA, 15 bp, Homo sapiens
agacccagtgttcat

SEQ ID NO: 322205 - DNA, 15 bp, Homo sapiens
cagacccagtgttca

SEQ ID NO: 322206 - DNA, 15 bp, Homo sapiens
acagacccagtgttc

SEQ ID NO: 322207 - DNA, 15 bp, Homo sapiens
aacagacccagtgtt

SEQ ID NO: 322208 - DNA, 15 bp, Homo sapiens
aaacagacccagtgt

SEQ ID NO: 322209 - DNA, 15 bp, Homo sapiens
caaacagacccagtg

SEQ ID NO: 322210 - DNA, 15 bp, Homo sapiens
ccaaacagacccagt

SEQ ID NO: 322211 - DNA, 15 bp, Homo sapiens
cccaaacagacccag

SEQ ID NO: 322212 - DNA, 15 bp, Homo sapiens
ccccaaacagaccca

SEQ ID NO: 322213 - DNA, 15 bp, Homo sapiens
gccccaaacagaccc

SEQ ID NO: 322214 - DNA, 15 bp, Homo sapiens
agccccaaacagacc

SEQ ID NO: 322215 - DNA, 15 bp, Homo sapiens
aagccccaaacagac

SEQ ID NO: 322216 - DNA, 15 bp, Homo sapiens
aaagccccaaacaga

SEQ ID NO: 322217 - DNA, 15 bp, Homo sapiens
gaaagccccaaacag

SEQ ID NO: 322218 - DNA, 15 bp, Homo sapiens
ggaaagccccaaaca

SEQ ID NO: 322219 - DNA, 15 bp, Homo sapiens
gggaaagccccaaac

SEQ ID NO: 322220 - DNA, 15 bp, Homo sapiens
tgggaaagccccaaa

SEQ ID NO: 322221 - DNA, 15 bp, Homo sapiens
ctgggaaagccccaa

SEQ ID NO: 322222 - DNA, 15 bp, Homo sapiens
gctgggaaagcccca

SEQ ID NO: 322223 - DNA, 15 bp, Homo sapiens
agctgggaaagcccc

SEQ ID NO: 322224 - DNA, 15 bp, Homo sapiens
aagctgggaaagccc

SEQ ID NO: 322225 - DNA, 15 bp, Homo sapiens
aaagctgggaaagcc

SEQ ID NO: 322226 - DNA, 15 bp, Homo sapiens
aaaagctgggaaagc

SEQ ID NO: 322227 - DNA, 15 bp, Homo sapiens
caaaagctgggaaag

SEQ ID NO: 322228 - DNA, 15 bp, Homo sapiens
tcaaaagctgggaaa

SEQ ID NO: 322229 - DNA, 15 bp, Homo sapiens
ctcaaaagctgggaa

SEQ ID NO: 322230 - DNA, 15 bp, Homo sapiens
actcaaaagctggga

SEQ ID NO: 322231 - DNA, 15 bp, Homo sapiens
gactcaaaagctggg

SEQ ID NO: 322232 - DNA, 15 bp, Homo sapiens
tgactcaaaagctgg

SEQ ID NO: 322233 - DNA, 15 bp, Homo sapiens
ctgactcaaaagctg

SEQ ID NO: 322234 - DNA, 15 bp, Homo sapiens
tctgactcaaaagct

SEQ ID NO: 322235 - DNA, 15 bp, Homo sapiens
gtctgactcaaaagc

SEQ ID NO: 322236 - DNA, 15 bp, Homo sapiens
tgtctgactcaaaag

SEQ ID NO: 322237 - DNA, 15 bp, Homo sapiens
ttgtctgactcaaaa

SEQ ID NO: 322238 - DNA, 15 bp, Homo sapiens
cttgtctgactcaaa

SEQ ID NO: 322239 - DNA, 15 bp, Homo sapiens
tcttgtctgactcaa

SEQ ID NO: 322240 - DNA, 15 bp, Homo sapiens
atcttgtctgactca

SEQ ID NO: 322241 - DNA, 15 bp, Homo sapiens
aatcttgtctgactc

SEQ ID NO: 322242 - DNA, 15 bp, Homo sapiens
aaatcttgtctgact

SEQ ID NO: 322243 - DNA, 15 bp, Homo sapiens
taaatcttgtctgac

SEQ ID NO: 322244 - DNA, 15 bp, Homo sapiens
ataaatcttgtctga

SEQ ID NO: 322245 - DNA, 15 bp, Homo sapiens
aataaatcttgtctg

SEQ ID NO: 322246 - DNA, 15 bp, Homo sapiens
aaataaatcttgtct

SEQ ID NO: 322247 - DNA, 15 bp, Homo sapiens
taaataaatcttgtc

SEQ ID NO: 322248 - DNA, 15 bp, Homo sapiens
ataaataaatcttgt

SEQ ID NO: 322249 - DNA, 15 bp, Homo sapiens
aataaataaatcttg

SEQ ID NO: 322250 - DNA, 15 bp, Homo sapiens
aaataaataaatctt

SEQ ID NO: 322251 - DNA, 15 bp, Homo sapiens
taaataaataaatct

SEQ ID NO: 322252 - DNA, 15 bp, Homo sapiens
ataaataaataaatc

SEQ ID NO: 322253 - DNA, 15 bp, Homo sapiens
taaataaataaataa

SEQ ID NO: 322254 - DNA, 15 bp, Homo sapiens
ttaaataaataaata

SEQ ID NO: 322255 - DNA, 15 bp, Homo sapiens
cttaaataaataaat

SEQ ID NO: 322256 - DNA, 15 bp, Homo sapiens
tcttaaataaataaa

SEQ ID NO: 322257 - DNA, 15 bp, Homo sapiens
atcttaaataaataa

SEQ ID NO: 322258 - DNA, 15 bp, Homo sapiens
catcttaaataaata

SEQ ID NO: 322259 - DNA, 15 bp, Homo sapiens
ccatcttaaataaat

SEQ ID NO: 322260 - DNA, 15 bp, Homo sapiens
tccatcttaaataaa

SEQ ID NO: 322261 - DNA, 15 bp, Homo sapiens
ctccatcttaaataa

SEQ ID NO: 322262 - DNA, 15 bp, Homo sapiens
actccatcttaaata

SEQ ID NO: 322263 - DNA, 15 bp, Homo sapiens
gactccatcttaaat

SEQ ID NO: 322264 - DNA, 15 bp, Homo sapiens
agactccatcttaaa

SEQ ID NO: 322265 - DNA, 15 bp, Homo sapiens
gagactccatcttaa

SEQ ID NO: 322266 - DNA, 15 bp, Homo sapiens
tgagactccatctta

SEQ ID NO: 322267 - DNA, 15 bp, Homo sapiens
atgagactccatctt

SEQ ID NO: 322268 - DNA, 15 bp, Homo sapiens
aatgagactccatct

SEQ ID NO: 322269 - DNA, 15 bp, Homo sapiens
gaatgagactccatc

SEQ ID NO: 322270 - DNA, 15 bp, Homo sapiens
agaatgagactccat

SEQ ID NO: 322271 - DNA, 15 bp, Homo sapiens
cagaatgagactcca

SEQ ID NO: 322272 - DNA, 15 bp, Homo sapiens
acagaatgagactcc

SEQ ID NO: 322273 - DNA, 15 bp, Homo sapiens
aacagaatgagactc

SEQ ID NO: 322274 - DNA, 15 bp, Homo sapiens
caacagaatgagact

SEQ ID NO: 322275 - DNA, 15 bp, Homo sapiens
gcaacagaatgagac

SEQ ID NO: 322276 - DNA, 15 bp, Homo sapiens
ggcaacagaatgaga

SEQ ID NO: 322277 - DNA, 15 bp, Homo sapiens
gggcaacagaatgag

SEQ ID NO: 322278 - DNA, 15 bp, Homo sapiens
tgggcaacagaatga

SEQ ID NO: 322279 - DNA, 15 bp, Homo sapiens
ctgggcaacagaatg

SEQ ID NO: 322280 - DNA, 15 bp, Homo sapiens
cctgggcaacagaat

SEQ ID NO: 322281 - DNA, 15 bp, Homo sapiens
gcctgggcaacagaa

SEQ ID NO: 322282 - DNA, 15 bp, Homo sapiens
ggcaccactgcactc

SEQ ID NO: 322283 - DNA, 15 bp, Homo sapiens
tggcaccactgcact

SEQ ID NO: 322284 - DNA, 15 bp, Homo sapiens
atggcaccactgcac

SEQ ID NO: 322285 - DNA, 15 bp, Homo sapiens
gatggcaccactgca

SEQ ID NO: 322286 - DNA, 15 bp, Homo sapiens
agatggcaccactgc

SEQ ID NO: 322287 - DNA, 15 bp, Homo sapiens
aagatggcaccactg

SEQ ID NO: 322288 - DNA, 15 bp, Homo sapiens
caagatggcaccact

SEQ ID NO: 322289 - DNA, 15 bp, Homo sapiens
ccaagatggcaccac

SEQ ID NO: 322290 - DNA, 15 bp, Homo sapiens
gccaagatggcacca

SEQ ID NO: 322291 - DNA, 15 bp, Homo sapiens
agccaagatggcacc

SEQ ID NO: 322292 - DNA, 15 bp, Homo sapiens
gagccaagatggcac

SEQ ID NO: 322293 - DNA, 15 bp, Homo sapiens
tgagccaagatggca

SEQ ID NO: 322294 - DNA, 15 bp, Homo sapiens
gtgagccaagatggc

SEQ ID NO: 322295 - DNA, 15 bp, Homo sapiens
agtgagccaagatgg

SEQ ID NO: 322296 - DNA, 15 bp, Homo sapiens
tagtgagccaagatg

SEQ ID NO: 322297 - DNA, 15 bp, Homo sapiens
gtagtgagccaagat

SEQ ID NO: 322298 - DNA, 15 bp, Homo sapiens
tgtagtgagccaaga

SEQ ID NO: 322299 - DNA, 15 bp, Homo sapiens
ctgtagtgagccaag

SEQ ID NO: 322300 - DNA, 15 bp, Homo sapiens
gctgtagtgagccaa

SEQ ID NO: 322301 - DNA, 15 bp, Homo sapiens
ggctgtagtgagcca

SEQ ID NO: 322302 - DNA, 15 bp, Homo sapiens
aggctgtagtgagcc

SEQ ID NO: 322303 - DNA, 15 bp, Homo sapiens
gaggctgtagtgagc

SEQ ID NO: 322304 - DNA, 15 bp, Homo sapiens
ggaggctgtagtgag

SEQ ID NO: 322305 - DNA, 15 bp, Homo sapiens
gggaggctgtagtga

SEQ ID NO: 322306 - DNA, 15 bp, Homo sapiens
ggggaggctgtagtg

SEQ ID NO: 322307 - DNA, 15 bp, Homo sapiens
tggggaggctgtagt

SEQ ID NO: 322308 - DNA, 15 bp, Homo sapiens
gtggggaggctgtag

SEQ ID NO: 322309 - DNA, 15 bp, Homo sapiens
ggtggggaggctgta

SEQ ID NO: 322310 - DNA, 15 bp, Homo sapiens
aggtggggaggctgt

SEQ ID NO: 322311 - DNA, 15 bp, Homo sapiens
gaggtggggaggctg

SEQ ID NO: 322312 - DNA, 15 bp, Homo sapiens
ggaggtggggaggct

SEQ ID NO: 322313 - DNA, 15 bp, Homo sapiens
gggaggtggggaggc

SEQ ID NO: 322314 - DNA, 15 bp, Homo sapiens
tgggaggtggggagg

SEQ ID NO: 322315 - DNA, 15 bp, Homo sapiens
ctgggaggtggggag

SEQ ID NO: 322316 - DNA, 15 bp, Homo sapiens
cctgggaggtgggga

SEQ ID NO: 322317 - DNA, 15 bp, Homo sapiens
acctgggaggtgggg

SEQ ID NO: 322318 - DNA, 15 bp, Homo sapiens
aacctgggaggtggg

SEQ ID NO: 322319 - DNA, 15 bp, Homo sapiens
gaacctgggaggtgg

SEQ ID NO: 322320 - DNA, 15 bp, Homo sapiens
tgaacctgggaggtg

SEQ ID NO: 322321 - DNA, 15 bp, Homo sapiens
ttgaacctgggaggt

SEQ ID NO: 322322 - DNA, 15 bp, Homo sapiens
gcacttgaacctggg

SEQ ID NO: 322323 - DNA, 15 bp, Homo sapiens
agcacttgaacctgg

SEQ ID NO: 322324 - DNA, 15 bp, Homo sapiens
aagcacttgaacctg

SEQ ID NO: 322325 - DNA, 15 bp, Homo sapiens
gaagcacttgaacct

SEQ ID NO: 322326 - DNA, 15 bp, Homo sapiens
agaagcacttgaacc

SEQ ID NO: 322327 - DNA, 15 bp, Homo sapiens
gagaagcacttgaac

SEQ ID NO: 322328 - DNA, 15 bp, Homo sapiens
ggagaagcacttgaa

SEQ ID NO: 322329 - DNA, 15 bp, Homo sapiens
aggagaagcacttga

SEQ ID NO: 322330 - DNA, 15 bp, Homo sapiens
caggagaagcacttg

SEQ ID NO: 322331 - DNA, 15 bp, Homo sapiens
gcaggagaagcactt

SEQ ID NO: 322332 - DNA, 15 bp, Homo sapiens
ggcaggagaagcact

SEQ ID NO: 322333 - DNA, 15 bp, Homo sapiens
aggcaggagaagcac

SEQ ID NO: 322334 - DNA, 15 bp, Homo sapiens
gaggcaggagaagca

SEQ ID NO: 322335 - DNA, 15 bp, Homo sapiens
tgaggcaggagaagc

SEQ ID NO: 322336 - DNA, 15 bp, Homo sapiens
ctgaggcaggagaag

SEQ ID NO: 322337 - DNA, 15 bp, Homo sapiens
actactcgggaggct

SEQ ID NO: 322338 - DNA, 15 bp, Homo sapiens
aactactcgggaggc

SEQ ID NO: 322339 - DNA, 15 bp, Homo sapiens
caactactcgggagg

SEQ ID NO: 322340 - DNA, 15 bp, Homo sapiens
ccaactactcgggag

SEQ ID NO: 322341 - DNA, 15 bp, Homo sapiens
cccaactactcggga

SEQ ID NO: 322342 - DNA, 15 bp, Homo sapiens
tcccaactactcggg

SEQ ID NO: 322343 - DNA, 15 bp, Homo sapiens
atcccaactactcgg

SEQ ID NO: 322344 - DNA, 15 bp, Homo sapiens
aatcccaactactcg

SEQ ID NO: 322345 - DNA, 15 bp, Homo sapiens
taatcccaactactc

SEQ ID NO: 322346 - DNA, 15 bp, Homo sapiens
gtaatcccaactact

SEQ ID NO: 322347 - DNA, 15 bp, Homo sapiens
tgtaatcccaactac

SEQ ID NO: 322348 - DNA, 15 bp, Homo sapiens
ctgtaatcccaacta

SEQ ID NO: 322349 - DNA, 15 bp, Homo sapiens
cctgtaatcccaact

SEQ ID NO: 322350 - DNA, 15 bp, Homo sapiens
gcctgtaatcccaac

SEQ ID NO: 322351 - DNA, 15 bp, Homo sapiens
cgcctgtaatcccaa

SEQ ID NO: 322352 - DNA, 15 bp, Homo sapiens
gcgcctgtaatccca

SEQ ID NO: 322353 - DNA, 15 bp, Homo sapiens
ggcgcctgtaatccc

SEQ ID NO: 322354 - DNA, 15 bp, Homo sapiens
gggcgcctgtaatcc

SEQ ID NO: 322355 - DNA, 15 bp, Homo sapiens
cgggcgcctgtaatc

SEQ ID NO: 322356 - DNA, 15 bp, Homo sapiens
gcgggcgcctgtaat

SEQ ID NO: 322357 - DNA, 15 bp, Homo sapiens
ggcgggcgcctgtaa

SEQ ID NO: 322358 - DNA, 15 bp, Homo sapiens
gtggtggcgggcgcc

SEQ ID NO: 322359 - DNA, 15 bp, Homo sapiens
tgtggtggcgggcgc

SEQ ID NO: 322360 - DNA, 15 bp, Homo sapiens
gtgtggtggcgggcg

SEQ ID NO: 322361 - DNA, 15 bp, Homo sapiens
ggtgtggtggcgggc

SEQ ID NO: 322362 - DNA, 15 bp, Homo sapiens
gggtgtggtggcggg

SEQ ID NO: 322363 - DNA, 15 bp, Homo sapiens
tgggtgtggtggcgg

SEQ ID NO: 322364 - DNA, 15 bp, Homo sapiens
ctgggtgtggtggcg

SEQ ID NO: 322365 - DNA, 15 bp, Homo sapiens
gctgggtgtggtggc

SEQ ID NO: 322366 - DNA, 15 bp, Homo sapiens
agctgggtgtggtgg

SEQ ID NO: 322367 - DNA, 15 bp, Homo sapiens
tagctgggtgtggtg

SEQ ID NO: 322368 - DNA, 15 bp, Homo sapiens
ttagctgggtgtggt

SEQ ID NO: 322369 - DNA, 15 bp, Homo sapiens
attagctgggtgtgg

SEQ ID NO: 322370 - DNA, 15 bp, Homo sapiens
aattagctgggtgtg

SEQ ID NO: 322371 - DNA, 15 bp, Homo sapiens
aaattagctgggtgt

SEQ ID NO: 322372 - DNA, 15 bp, Homo sapiens
aaaattagctgggtg

SEQ ID NO: 322373 - DNA, 15 bp, Homo sapiens
aaaaattagctgggt

SEQ ID NO: 322374 - DNA, 15 bp, Homo sapiens
gaaaatacaaaaatt

SEQ ID NO: 322375 - DNA, 15 bp, Homo sapiens
tgaaaatacaaaaat

SEQ ID NO: 322376 - DNA, 15 bp, Homo sapiens
ctgaaaatacaaaaa

SEQ ID NO: 322377 - DNA, 15 bp, Homo sapiens
actgaaaatacaaaa

SEQ ID NO: 322378 - DNA, 15 bp, Homo sapiens
tactgaaaatacaaa

SEQ ID NO: 322379 - DNA, 15 bp, Homo sapiens
ctactgaaaatacaa

SEQ ID NO: 322380 - DNA, 15 bp, Homo sapiens
tctactgaaaataca

SEQ ID NO: 322381 - DNA, 15 bp, Homo sapiens
ctctactgaaaatac

SEQ ID NO: 322382 - DNA, 15 bp, Homo sapiens
tctctactgaaaata

SEQ ID NO: 322383 - DNA, 15 bp, Homo sapiens
atctctactgaaaat

SEQ ID NO: 322384 - DNA, 15 bp, Homo sapiens
catctctactgaaaa

SEQ ID NO: 322385 - DNA, 15 bp, Homo sapiens
ccatctctactgaaa

SEQ ID NO: 322386 - DNA, 15 bp, Homo sapiens
cccatctctactgaa

SEQ ID NO: 322387 - DNA, 15 bp, Homo sapiens
ccccatctctactga

SEQ ID NO: 322388 - DNA, 15 bp, Homo sapiens
accccatctctactg

SEQ ID NO: 322389 - DNA, 15 bp, Homo sapiens
cgaaaccccatctct

SEQ ID NO: 322390 - DNA, 15 bp, Homo sapiens
gcgaaaccccatctc

SEQ ID NO: 322391 - DNA, 15 bp, Homo sapiens
ggcgaaaccccatct

SEQ ID NO: 322392 - DNA, 15 bp, Homo sapiens
tggcgaaaccccatc

SEQ ID NO: 322393 - DNA, 15 bp, Homo sapiens
atggcgaaaccccat

SEQ ID NO: 322394 - DNA, 15 bp, Homo sapiens
catggcgaaacccca

SEQ ID NO: 322395 - DNA, 15 bp, Homo sapiens
gcatggcgaaacccc

SEQ ID NO: 322396 - DNA, 15 bp, Homo sapiens
agcatggcgaaaccc

SEQ ID NO: 322397 - DNA, 15 bp, Homo sapiens
cagcatggcgaaacc

SEQ ID NO: 322398 - DNA, 15 bp, Homo sapiens
ccagcatggcgaaac

SEQ ID NO: 322399 - DNA, 15 bp, Homo sapiens
gccagcatggcgaaa

SEQ ID NO: 322400 - DNA, 15 bp, Homo sapiens
ggccagcatggcgaa

SEQ ID NO: 322401 - DNA, 15 bp, Homo sapiens
tggccagcatggcga

SEQ ID NO: 322402 - DNA, 15 bp, Homo sapiens
ctggccagcatggcg

SEQ ID NO: 322403 - DNA, 15 bp, Homo sapiens
cctggccagcatggc

SEQ ID NO: 322404 - DNA, 15 bp, Homo sapiens
gcctggccagcatgg

SEQ ID NO: 322405 - DNA, 15 bp, Homo sapiens
agcctggccagcatg

SEQ ID NO: 322406 - DNA, 15 bp, Homo sapiens
cagcctggccagcat

SEQ ID NO: 322407 - DNA, 15 bp, Homo sapiens
acagcctggccagca

SEQ ID NO: 322408 - DNA, 15 bp, Homo sapiens
aacagcctggccagc

SEQ ID NO: 322409 - DNA, 15 bp, Homo sapiens
gaacagcctggccag

SEQ ID NO: 322410 - DNA, 15 bp, Homo sapiens
agaacagcctggcca

SEQ ID NO: 322411 - DNA, 15 bp, Homo sapiens
gagaacagcctggcc

SEQ ID NO: 322412 - DNA, 15 bp, Homo sapiens
cgagaacagcctggc

SEQ ID NO: 322413 - DNA, 15 bp, Homo sapiens
tcgagaacagcctgg

SEQ ID NO: 322414 - DNA, 15 bp, Homo sapiens
ttcgagaacagcctg

SEQ ID NO: 322415 - DNA, 15 bp, Homo sapiens
tttcgagaacagcct

SEQ ID NO: 322416 - DNA, 15 bp, Homo sapiens
ttttcgagaacagcc

SEQ ID NO: 322417 - DNA, 15 bp, Homo sapiens
gttttcgagaacagc

SEQ ID NO: 322418 - DNA, 15 bp, Homo sapiens
agttttcgagaacag

SEQ ID NO: 322419 - DNA, 15 bp, Homo sapiens
gagttttcgagaaca

SEQ ID NO: 322420 - DNA, 15 bp, Homo sapiens
ggagttttcgagaac

SEQ ID NO: 322421 - DNA, 15 bp, Homo sapiens
aggagttttcgagaa

SEQ ID NO: 322422 - DNA, 15 bp, Homo sapiens
caggagttttcgaga

SEQ ID NO: 322423 - DNA, 15 bp, Homo sapiens
tcaggagttttcgag

SEQ ID NO: 322424 - DNA, 15 bp, Homo sapiens
gtcaggagttttcga

SEQ ID NO: 322425 - DNA, 15 bp, Homo sapiens
ggtcaggagttttcg

SEQ ID NO: 322426 - DNA, 15 bp, Homo sapiens
aggtcaggagttttc

SEQ ID NO: 322427 - DNA, 15 bp, Homo sapiens
gaggtcaggagtttt

SEQ ID NO: 322428 - DNA, 15 bp, Homo sapiens
tctgaggtcaggagt

SEQ ID NO: 322429 - DNA, 15 bp, Homo sapiens
atctgaggtcaggag

SEQ ID NO: 322430 - DNA, 15 bp, Homo sapiens
catctgaggtcagga

SEQ ID NO: 322431 - DNA, 15 bp, Homo sapiens
tcatctgaggtcagg

SEQ ID NO: 322432 - DNA, 15 bp, Homo sapiens
atcatctgaggtcag

SEQ ID NO: 322433 - DNA, 15 bp, Homo sapiens
gatcatctgaggtca

SEQ ID NO: 322434 - DNA, 15 bp, Homo sapiens
ggatcatctgaggtc

SEQ ID NO: 322435 - DNA, 15 bp, Homo sapiens
tggatcatctgaggt

SEQ ID NO: 322436 - DNA, 15 bp, Homo sapiens
gtggatcatctgagg

SEQ ID NO: 322437 - DNA, 15 bp, Homo sapiens
ggtggatcatctgag

SEQ ID NO: 322438 - DNA, 15 bp, Homo sapiens
gggtggatcatctga

SEQ ID NO: 322439 - DNA, 15 bp, Homo sapiens
cgggtggatcatctg

SEQ ID NO: 322440 - DNA, 15 bp, Homo sapiens
gcgggtggatcatct

SEQ ID NO: 322441 - DNA, 15 bp, Homo sapiens
ggcgggtggatcatc

SEQ ID NO: 322442 - DNA, 15 bp, Homo sapiens
aggcgggtggatcat

SEQ ID NO: 322443 - DNA, 15 bp, Homo sapiens
cgaggcgggtggatc

SEQ ID NO: 322444 - DNA, 15 bp, Homo sapiens
ccgaggcgggtggat

SEQ ID NO: 322445 - DNA, 15 bp, Homo sapiens
gccgaggcgggtgga

SEQ ID NO: 322446 - DNA, 15 bp, Homo sapiens
ggccgaggcgggtgg

SEQ ID NO: 322447 - DNA, 15 bp, Homo sapiens
aggccgaggcgggtg

SEQ ID NO: 322448 - DNA, 15 bp, Homo sapiens
gtgggaggccgaggc

SEQ ID NO: 322449 - DNA, 15 bp, Homo sapiens
tgtgggaggccgagg

SEQ ID NO: 322450 - DNA, 15 bp, Homo sapiens
ctgtgggaggccgag

SEQ ID NO: 322451 - DNA, 15 bp, Homo sapiens
actgtgggaggccga

SEQ ID NO: 322452 - DNA, 15 bp, Homo sapiens
cactgtgggaggccg

SEQ ID NO: 322453 - DNA, 15 bp, Homo sapiens
gcactgtgggaggcc

SEQ ID NO: 322454 - DNA, 15 bp, Homo sapiens
agcactgtgggaggc

SEQ ID NO: 322455 - DNA, 15 bp, Homo sapiens
cagcactgtgggagg

SEQ ID NO: 322456 - DNA, 15 bp, Homo sapiens
ccagcactgtgggag

SEQ ID NO: 322457 - DNA, 15 bp, Homo sapiens
cccagcactgtggga

SEQ ID NO: 322458 - DNA, 15 bp, Homo sapiens
tcccagcactgtggg

SEQ ID NO: 322459 - DNA, 15 bp, Homo sapiens
atcccagcactgtgg

SEQ ID NO: 322460 - DNA, 15 bp, Homo sapiens
aatcccagcactgtg

SEQ ID NO: 322461 - DNA, 15 bp, Homo sapiens
taatcccagcactgt

SEQ ID NO: 322462 - DNA, 15 bp, Homo sapiens
gtaatcccagcactg

SEQ ID NO: 322463 - DNA, 15 bp, Homo sapiens
agcgcagtggctcac

SEQ ID NO: 322464 - DNA, 15 bp, Homo sapiens
cagcgcagtggctca

SEQ ID NO: 322465 - DNA, 15 bp, Homo sapiens
ccagcgcagtggctc

SEQ ID NO: 322466 - DNA, 15 bp, Homo sapiens
gccagcgcagtggct

SEQ ID NO: 322467 - DNA, 15 bp, Homo sapiens
ggccagcgcagtggc

SEQ ID NO: 322468 - DNA, 15 bp, Homo sapiens
tggccagcgcagtgg

SEQ ID NO: 322469 - DNA, 15 bp, Homo sapiens
ttggccagcgcagtg

SEQ ID NO: 322470 - DNA, 15 bp, Homo sapiens
tttggccagcgcagt

SEQ ID NO: 322471 - DNA, 15 bp, Homo sapiens
atttggccagcgcag

SEQ ID NO: 322472 - DNA, 15 bp, Homo sapiens
gatttggccagcgca

SEQ ID NO: 322473 - DNA, 15 bp, Homo sapiens
tgatttggccagcgc

SEQ ID NO: 322474 - DNA, 15 bp, Homo sapiens
ctgatttggccagcg

SEQ ID NO: 322475 - DNA, 15 bp, Homo sapiens
tctgatttggccagc

SEQ ID NO: 322476 - DNA, 15 bp, Homo sapiens
gtctgatttggccag

SEQ ID NO: 322477 - DNA, 15 bp, Homo sapiens
tgtctgatttggcca

SEQ ID NO: 322478 - DNA, 15 bp, Homo sapiens
ttgtctgatttggcc

SEQ ID NO: 322479 - DNA, 15 bp, Homo sapiens
cttgtctgatttggc

SEQ ID NO: 322480 - DNA, 15 bp, Homo sapiens
ccttgtctgatttgg

SEQ ID NO: 322481 - DNA, 15 bp, Homo sapiens
accttgtctgatttg

SEQ ID NO: 322482 - DNA, 15 bp, Homo sapiens
aaccttgtctgattt

SEQ ID NO: 322483 - DNA, 15 bp, Homo sapiens
aaaccttgtctgatt

SEQ ID NO: 322484 - DNA, 15 bp, Homo sapiens
taaaccttgtctgat

SEQ ID NO: 322485 - DNA, 15 bp, Homo sapiens
ttaaaccttgtctga

SEQ ID NO: 322486 - DNA, 15 bp, Homo sapiens
tttaaaccttgtctg

SEQ ID NO: 322487 - DNA, 15 bp, Homo sapiens
atttaaaccttgtct

SEQ ID NO: 322488 - DNA, 15 bp, Homo sapiens
gatttaaaccttgtc

SEQ ID NO: 322489 - DNA, 15 bp, Homo sapiens
ggatttaaaccttgt

SEQ ID NO: 322490 - DNA, 15 bp, Homo sapiens
gggatttaaaccttg

SEQ ID NO: 322491 - DNA, 15 bp, Homo sapiens
tgggatttaaacctt

SEQ ID NO: 322492 - DNA, 15 bp, Homo sapiens
ctgggatttaaacct

SEQ ID NO: 322493 - DNA, 15 bp, Homo sapiens
gctgggatttaaacc

SEQ ID NO: 322494 - DNA, 15 bp, Homo sapiens
agctgggatttaaac

SEQ ID NO: 322495 - DNA, 15 bp, Homo sapiens
gagctgggatttaaa

SEQ ID NO: 322496 - DNA, 15 bp, Homo sapiens
agagctgggatttaa

SEQ ID NO: 322497 - DNA, 15 bp, Homo sapiens
cagagctgggattta

SEQ ID NO: 322498 - DNA, 15 bp, Homo sapiens
gcagagctgggattt

SEQ ID NO: 322499 - DNA, 15 bp, Homo sapiens
ggcagagctgggatt

SEQ ID NO: 322500 - DNA, 15 bp, Homo sapiens
aggcagagctgggat

SEQ ID NO: 322501 - DNA, 15 bp, Homo sapiens
caggcagagctggga

SEQ ID NO: 322502 - DNA, 15 bp, Homo sapiens
acaggcagagctggg

SEQ ID NO: 322503 - DNA, 15 bp, Homo sapiens
tacaggcagagctgg

SEQ ID NO: 322504 - DNA, 15 bp, Homo sapiens
gtacaggcagagctg

SEQ ID NO: 322505 - DNA, 15 bp, Homo sapiens
agtacaggcagagct

SEQ ID NO: 322506 - DNA, 15 bp, Homo sapiens
tagtacaggcagagc

SEQ ID NO: 322507 - DNA, 15 bp, Homo sapiens
ctagtacaggcagag

SEQ ID NO: 322508 - DNA, 15 bp, Homo sapiens
gctagtacaggcaga

SEQ ID NO: 322509 - DNA, 15 bp, Homo sapiens
agctagtacaggcag

SEQ ID NO: 322510 - DNA, 15 bp, Homo sapiens
cagctagtacaggca

SEQ ID NO: 322511 - DNA, 15 bp, Homo sapiens
tcagctagtacaggc

SEQ ID NO: 322512 - DNA, 15 bp, Homo sapiens
ctcagctagtacagg

SEQ ID NO: 322513 - DNA, 15 bp, Homo sapiens
cctcagctagtacag

SEQ ID NO: 322514 - DNA, 15 bp, Homo sapiens
tcctcagctagtaca

SEQ ID NO: 322515 - DNA, 15 bp, Homo sapiens
ttcctcagctagtac

SEQ ID NO: 322516 - DNA, 15 bp, Homo sapiens
gttcctcagctagta

SEQ ID NO: 322517 - DNA, 15 bp, Homo sapiens
agttcctcagctagt

SEQ ID NO: 322518 - DNA, 15 bp, Homo sapiens
gagttcctcagctag

SEQ ID NO: 322519 - DNA, 15 bp, Homo sapiens
agagttcctcagcta

SEQ ID NO: 322520 - DNA, 15 bp, Homo sapiens
cagagttcctcagct

SEQ ID NO: 322521 - DNA, 15 bp, Homo sapiens
gcagagttcctcagc

SEQ ID NO: 322522 - DNA, 15 bp, Homo sapiens
tgcagagttcctcag

SEQ ID NO: 322523 - DNA, 15 bp, Homo sapiens
gtgcagagttcctca

SEQ ID NO: 322524 - DNA, 15 bp, Homo sapiens
tgtgcagagttcctc

SEQ ID NO: 322525 - DNA, 15 bp, Homo sapiens
gtgtgcagagttcct

SEQ ID NO: 322526 - DNA, 15 bp, Homo sapiens
tgtgtgcagagttcc

SEQ ID NO: 322527 - DNA, 15 bp, Homo sapiens
atgtgtgcagagttc

SEQ ID NO: 322528 - DNA, 15 bp, Homo sapiens
aatgtgtgcagagtt

SEQ ID NO: 322529 - DNA, 15 bp, Homo sapiens
aaatgtgtgcagagt

SEQ ID NO: 322530 - DNA, 15 bp, Homo sapiens
gaaatgtgtgcagag

SEQ ID NO: 322531 - DNA, 15 bp, Homo sapiens
tgaaatgtgtgcaga

SEQ ID NO: 322532 - DNA, 15 bp, Homo sapiens
atgaaatgtgtgcag

SEQ ID NO: 322533 - DNA, 15 bp, Homo sapiens
tatgaaatgtgtgca

SEQ ID NO: 322534 - DNA, 15 bp, Homo sapiens
ttatgaaatgtgtgc

SEQ ID NO: 322535 - DNA, 15 bp, Homo sapiens
gttatgaaatgtgtg

SEQ ID NO: 322536 - DNA, 15 bp, Homo sapiens
ggttatgaaatgtgt

SEQ ID NO: 322537 - DNA, 15 bp, Homo sapiens
aggttatgaaatgtg

SEQ ID NO: 322538 - DNA, 15 bp, Homo sapiens
aaggttatgaaatgt

SEQ ID NO: 322539 - DNA, 15 bp, Homo sapiens
aaaggttatgaaatg

SEQ ID NO: 322540 - DNA, 15 bp, Homo sapiens
gaaaggttatgaaat

SEQ ID NO: 322541 - DNA, 15 bp, Homo sapiens
agaaaggttatgaaa

SEQ ID NO: 322542 - DNA, 15 bp, Homo sapiens
cagaaaggttatgaa

SEQ ID NO: 322543 - DNA, 15 bp, Homo sapiens
ccagaaaggttatga

SEQ ID NO: 322544 - DNA, 15 bp, Homo sapiens
cccagaaaggttatg

SEQ ID NO: 322545 - DNA, 15 bp, Homo sapiens
gcccagaaaggttat

SEQ ID NO: 322546 - DNA, 15 bp, Homo sapiens
ggcccagaaaggtta

SEQ ID NO: 322547 - DNA, 15 bp, Homo sapiens
aggcccagaaaggtt

SEQ ID NO: 322548 - DNA, 15 bp, Homo sapiens
taggcccagaaaggt

SEQ ID NO: 322549 - DNA, 15 bp, Homo sapiens
gtaggcccagaaagg

SEQ ID NO: 322550 - DNA, 15 bp, Homo sapiens
cgtaggcccagaaag

SEQ ID NO: 322551 - DNA, 15 bp, Homo sapiens
acgtaggcccagaaa

SEQ ID NO: 322552 - DNA, 15 bp, Homo sapiens
aacgtaggcccagaa

SEQ ID NO: 322553 - DNA, 15 bp, Homo sapiens
gaacgtaggcccaga

SEQ ID NO: 322554 - DNA, 15 bp, Homo sapiens
agaacgtaggcccag

SEQ ID NO: 322555 - DNA, 15 bp, Homo sapiens
gagaacgtaggccca

SEQ ID NO: 322556 - DNA, 15 bp, Homo sapiens
tgagaacgtaggccc

SEQ ID NO: 322557 - DNA, 15 bp, Homo sapiens
gtgagaacgtaggcc

SEQ ID NO: 322558 - DNA, 15 bp, Homo sapiens
ggtgagaacgtaggc

SEQ ID NO: 322559 - DNA, 15 bp, Homo sapiens
aggtgagaacgtagg

SEQ ID NO: 322560 - DNA, 15 bp, Homo sapiens
aaggtgagaacgtag

SEQ ID NO: 322561 - DNA, 15 bp, Homo sapiens
aaaggtgagaacgta

SEQ ID NO: 322562 - DNA, 15 bp, Homo sapiens
taaaggtgagaacgt

SEQ ID NO: 322563 - DNA, 15 bp, Homo sapiens
ttaaaggtgagaacg

SEQ ID NO: 322564 - DNA, 15 bp, Homo sapiens
gttaaaggtgagaac

SEQ ID NO: 322565 - DNA, 15 bp, Homo sapiens
cgttaaaggtgagaa

SEQ ID NO: 322566 - DNA, 15 bp, Homo sapiens
acgttaaaggtgaga

SEQ ID NO: 322567 - DNA, 15 bp, Homo sapiens
cacgttaaaggtgag

SEQ ID NO: 322568 - DNA, 15 bp, Homo sapiens
tcacgttaaaggtga

SEQ ID NO: 322569 - DNA, 15 bp, Homo sapiens
ctcacgttaaaggtg

SEQ ID NO: 322570 - DNA, 15 bp, Homo sapiens
cctcacgttaaaggt

SEQ ID NO: 322571 - DNA, 15 bp, Homo sapiens
tcctcacgttaaagg

SEQ ID NO: 322572 - DNA, 15 bp, Homo sapiens
atcctcacgttaaag

SEQ ID NO: 322573 - DNA, 15 bp, Homo sapiens
tatcctcacgttaaa

SEQ ID NO: 322574 - DNA, 15 bp, Homo sapiens
ttatcctcacgttaa

SEQ ID NO: 322575 - DNA, 15 bp, Homo sapiens
attatcctcacgtta

SEQ ID NO: 322576 - DNA, 15 bp, Homo sapiens
tattatcctcacgtt

SEQ ID NO: 322577 - DNA, 15 bp, Homo sapiens
atattatcctcacgt

SEQ ID NO: 322578 - DNA, 15 bp, Homo sapiens
tatattatcctcacg

SEQ ID NO: 322579 - DNA, 15 bp, Homo sapiens
atatattatcctcac

SEQ ID NO: 322580 - DNA, 15 bp, Homo sapiens
gatatattatcctca

SEQ ID NO: 322581 - DNA, 15 bp, Homo sapiens
agatatattatcctc

SEQ ID NO: 322582 - DNA, 15 bp, Homo sapiens
tagatatattatcct

SEQ ID NO: 322583 - DNA, 15 bp, Homo sapiens
gtagatatattatcc

SEQ ID NO: 322584 - DNA, 15 bp, Homo sapiens
agtagatatattatc

SEQ ID NO: 322585 - DNA, 15 bp, Homo sapiens
aagtagatatattat

SEQ ID NO: 322586 - DNA, 15 bp, Homo sapiens
gaagtagatatatta

SEQ ID NO: 322587 - DNA, 15 bp, Homo sapiens
tgaagtagatatatt

SEQ ID NO: 322588 - DNA, 15 bp, Homo sapiens
atgaagtagatatat

SEQ ID NO: 322589 - DNA, 15 bp, Homo sapiens
tatgaagtagatata

SEQ ID NO: 322590 - DNA, 15 bp, Homo sapiens
ctatgaagtagatat

SEQ ID NO: 322591 - DNA, 15 bp, Homo sapiens
tctatgaagtagata

SEQ ID NO: 322592 - DNA, 15 bp, Homo sapiens
gtctatgaagtagat

SEQ ID NO: 322593 - DNA, 15 bp, Homo sapiens
tgtctatgaagtaga

SEQ ID NO: 322594 - DNA, 15 bp, Homo sapiens
gtgtctatgaagtag

SEQ ID NO: 322595 - DNA, 15 bp, Homo sapiens
ggtgtctatgaagta

SEQ ID NO: 322596 - DNA, 15 bp, Homo sapiens
aggtgtctatgaagt

SEQ ID NO: 322597 - DNA, 15 bp, Homo sapiens
aaggtgtctatgaag

SEQ ID NO: 322598 - DNA, 15 bp, Homo sapiens
aaaggtgtctatgaa

SEQ ID NO: 322599 - DNA, 15 bp, Homo sapiens
aaaaggtgtctatga

SEQ ID NO: 322600 - DNA, 15 bp, Homo sapiens
aaaaaggtgtctatg

SEQ ID NO: 322601 - DNA, 15 bp, Homo sapiens
taaaaaggtgtctat

SEQ ID NO: 322602 - DNA, 15 bp, Homo sapiens
ataaaaaggtgtcta

SEQ ID NO: 322603 - DNA, 15 bp, Homo sapiens
cataaaaaggtgtct

SEQ ID NO: 322604 - DNA, 15 bp, Homo sapiens
acataaaaaggtgtc

SEQ ID NO: 322605 - DNA, 15 bp, Homo sapiens
aacataaaaaggtgt

SEQ ID NO: 322606 - DNA, 15 bp, Homo sapiens
caacataaaaaggtg

SEQ ID NO: 322607 - DNA, 15 bp, Homo sapiens
acaacataaaaaggt

SEQ ID NO: 322608 - DNA, 15 bp, Homo sapiens
gacaacataaaaagg

SEQ ID NO: 322609 - DNA, 15 bp, Homo sapiens
agacaacataaaaag

SEQ ID NO: 322610 - DNA, 15 bp, Homo sapiens
gagacaacataaaaa

SEQ ID NO: 322611 - DNA, 15 bp, Homo sapiens
ggagacaacataaaa

SEQ ID NO: 322612 - DNA, 15 bp, Homo sapiens
tggagacaacataaa

SEQ ID NO: 322613 - DNA, 15 bp, Homo sapiens
ttggagacaacataa

SEQ ID NO: 322614 - DNA, 15 bp, Homo sapiens
cttggagacaacata

SEQ ID NO: 322615 - DNA, 15 bp, Homo sapiens
acttggagacaacat

SEQ ID NO: 322616 - DNA, 15 bp, Homo sapiens
aacttggagacaaca

SEQ ID NO: 322617 - DNA, 15 bp, Homo sapiens
aaacttggagacaac

SEQ ID NO: 322618 - DNA, 15 bp, Homo sapiens
aaaacttggagacaa

SEQ ID NO: 322619 - DNA, 15 bp, Homo sapiens
gaaaacttggagaca

SEQ ID NO: 322620 - DNA, 15 bp, Homo sapiens
agaaaacttggagac

SEQ ID NO: 322621 - DNA, 15 bp, Homo sapiens
tagaaaacttggaga

SEQ ID NO: 322622 - DNA, 15 bp, Homo sapiens
ttagaaaacttggag

SEQ ID NO: 322623 - DNA, 15 bp, Homo sapiens
gttagaaaacttgga

SEQ ID NO: 322624 - DNA, 15 bp, Homo sapiens
tgttagaaaacttgg

SEQ ID NO: 322625 - DNA, 15 bp, Homo sapiens
ctgttagaaaacttg

SEQ ID NO: 322626 - DNA, 15 bp, Homo sapiens
gctgttagaaaactt

SEQ ID NO: 322627 - DNA, 15 bp, Homo sapiens
agctgttagaaaact

SEQ ID NO: 322628 - DNA, 15 bp, Homo sapiens
gagctgttagaaaac

SEQ ID NO: 322629 - DNA, 15 bp, Homo sapiens
agagctgttagaaaa

SEQ ID NO: 322630 - DNA, 15 bp, Homo sapiens
tagagctgttagaaa

SEQ ID NO: 322631 - DNA, 15 bp, Homo sapiens
ctagagctgttagaa

SEQ ID NO: 322632 - DNA, 15 bp, Homo sapiens
actagagctgttaga

SEQ ID NO: 322633 - DNA, 15 bp, Homo sapiens
aactagagctgttag

SEQ ID NO: 322634 - DNA, 15 bp, Homo sapiens
gaactagagctgtta

SEQ ID NO: 322635 - DNA, 15 bp, Homo sapiens
agaactagagctgtt

SEQ ID NO: 322636 - DNA, 15 bp, Homo sapiens
cagaactagagctgt

SEQ ID NO: 322637 - DNA, 15 bp, Homo sapiens
acagaactagagctg

SEQ ID NO: 322638 - DNA, 15 bp, Homo sapiens
tacagaactagagct

SEQ ID NO: 322639 - DNA, 15 bp, Homo sapiens
gtacagaactagagc

SEQ ID NO: 322640 - DNA, 15 bp, Homo sapiens
ggtacagaactagag

SEQ ID NO: 322641 - DNA, 15 bp, Homo sapiens
gggtacagaactaga

SEQ ID NO: 322642 - DNA, 15 bp, Homo sapiens
tgggtacagaactag

SEQ ID NO: 322643 - DNA, 15 bp, Homo sapiens
ttgggtacagaacta

SEQ ID NO: 322644 - DNA, 15 bp, Homo sapiens
cttgggtacagaact

SEQ ID NO: 322645 - DNA, 15 bp, Homo sapiens
tcttgggtacagaac

SEQ ID NO: 322646 - DNA, 15 bp, Homo sapiens
gtcttgggtacagaa

SEQ ID NO: 322647 - DNA, 15 bp, Homo sapiens
tgtcttgggtacaga

SEQ ID NO: 322648 - DNA, 15 bp, Homo sapiens
atgtcttgggtacag

SEQ ID NO: 322649 - DNA, 15 bp, Homo sapiens
catgtcttgggtaca

SEQ ID NO: 322650 - DNA, 15 bp, Homo sapiens
ccatgtcttgggtac

SEQ ID NO: 322651 - DNA, 15 bp, Homo sapiens
gccatgtcttgggta

SEQ ID NO: 322652 - DNA, 15 bp, Homo sapiens
tgccatgtcttgggt

SEQ ID NO: 322653 - DNA, 15 bp, Homo sapiens
ctgccatgtcttggg

SEQ ID NO: 322654 - DNA, 15 bp, Homo sapiens
cctgccatgtcttgg

SEQ ID NO: 322655 - DNA, 15 bp, Homo sapiens
acctgccatgtcttg

SEQ ID NO: 322656 - DNA, 15 bp, Homo sapiens
cacctgccatgtctt

SEQ ID NO: 322657 - DNA, 15 bp, Homo sapiens
ccacctgccatgtct

SEQ ID NO: 322658 - DNA, 15 bp, Homo sapiens
gccacctgccatgtc

SEQ ID NO: 322659 - DNA, 15 bp, Homo sapiens
ggccacctgccatgt

SEQ ID NO: 322660 - DNA, 15 bp, Homo sapiens
tggccacctgccatg

SEQ ID NO: 322661 - DNA, 15 bp, Homo sapiens
ttggccacctgccat

SEQ ID NO: 322662 - DNA, 15 bp, Homo sapiens
gttggccacctgcca

SEQ ID NO: 322663 - DNA, 15 bp, Homo sapiens
cgttggccacctgcc

SEQ ID NO: 322664 - DNA, 15 bp, Homo sapiens
tcgttggccacctgc

SEQ ID NO: 322665 - DNA, 15 bp, Homo sapiens
gtcgttggccacctg

SEQ ID NO: 322666 - DNA, 15 bp, Homo sapiens
tgtcgttggccacct

SEQ ID NO: 322667 - DNA, 15 bp, Homo sapiens
atgtcgttggccacc

SEQ ID NO: 322668 - DNA, 15 bp, Homo sapiens
gatgtcgttggccac

SEQ ID NO: 322669 - DNA, 15 bp, Homo sapiens
ggatgtcgttggcca

SEQ ID NO: 322670 - DNA, 15 bp, Homo sapiens
aggatgtcgttggcc

SEQ ID NO: 322671 - DNA, 15 bp, Homo sapiens
aaggatgtcgttggc

SEQ ID NO: 322672 - DNA, 15 bp, Homo sapiens
gaaggatgtcgttgg

SEQ ID NO: 322673 - DNA, 15 bp, Homo sapiens
agaaggatgtcgttg

SEQ ID NO: 322674 - DNA, 15 bp, Homo sapiens
tagaaggatgtcgtt

SEQ ID NO: 322675 - DNA, 15 bp, Homo sapiens
ctagaaggatgtcgt

SEQ ID NO: 322676 - DNA, 15 bp, Homo sapiens
cctagaaggatgtcg

SEQ ID NO: 322677 - DNA, 15 bp, Homo sapiens
gcctagaaggatgtc

SEQ ID NO: 322678 - DNA, 15 bp, Homo sapiens
agcctagaaggatgt

SEQ ID NO: 322679 - DNA, 15 bp, Homo sapiens
cagcctagaaggatg

SEQ ID NO: 322680 - DNA, 15 bp, Homo sapiens
acagcctagaaggat

SEQ ID NO: 322681 - DNA, 15 bp, Homo sapiens
cacagcctagaagga

SEQ ID NO: 322682 - DNA, 15 bp, Homo sapiens
ccacagcctagaagg

SEQ ID NO: 322683 - DNA, 15 bp, Homo sapiens
accacagcctagaag

SEQ ID NO: 322684 - DNA, 15 bp, Homo sapiens
caccacagcctagaa

SEQ ID NO: 322685 - DNA, 15 bp, Homo sapiens
tcaccacagcctaga

SEQ ID NO: 322686 - DNA, 15 bp, Homo sapiens
atcaccacagcctag

SEQ ID NO: 322687 - DNA, 15 bp, Homo sapiens
catcaccacagccta

SEQ ID NO: 322688 - DNA, 15 bp, Homo sapiens
acatcaccacagcct

SEQ ID NO: 322689 - DNA, 15 bp, Homo sapiens
cacatcaccacagcc

SEQ ID NO: 322690 - DNA, 15 bp, Homo sapiens
acacatcaccacagc

SEQ ID NO: 322691 - DNA, 15 bp, Homo sapiens
aacacatcaccacag

SEQ ID NO: 322692 - DNA, 15 bp, Homo sapiens
aaacacatcaccaca

SEQ ID NO: 322693 - DNA, 15 bp, Homo sapiens
caaacacatcaccac

SEQ ID NO: 322694 - DNA, 15 bp, Homo sapiens
ccaaacacatcacca

SEQ ID NO: 322695 - DNA, 15 bp, Homo sapiens
tccaaacacatcacc

SEQ ID NO: 322696 - DNA, 15 bp, Homo sapiens
ctccaaacacatcac

SEQ ID NO: 322697 - DNA, 15 bp, Homo sapiens
gctccaaacacatca

SEQ ID NO: 322698 - DNA, 15 bp, Homo sapiens
agctccaaacacatc

SEQ ID NO: 322699 - DNA, 15 bp, Homo sapiens
aagctccaaacacat

SEQ ID NO: 322700 - DNA, 15 bp, Homo sapiens
caagctccaaacaca

SEQ ID NO: 322701 - DNA, 15 bp, Homo sapiens
acaagctccaaacac

SEQ ID NO: 322702 - DNA, 15 bp, Homo sapiens
aacaagctccaaaca

SEQ ID NO: 322703 - DNA, 15 bp, Homo sapiens
gaacaagctccaaac

SEQ ID NO: 322704 - DNA, 15 bp, Homo sapiens
ggaacaagctccaaa

SEQ ID NO: 322705 - DNA, 15 bp, Homo sapiens
tggaacaagctccaa

SEQ ID NO: 322706 - DNA, 15 bp, Homo sapiens
gtggaacaagctcca

SEQ ID NO: 322707 - DNA, 15 bp, Homo sapiens
cgtggaacaagctcc

SEQ ID NO: 322708 - DNA, 15 bp, Homo sapiens
ccgtggaacaagctc

SEQ ID NO: 322709 - DNA, 15 bp, Homo sapiens
cccgtggaacaagct

SEQ ID NO: 322710 - DNA, 15 bp, Homo sapiens
acccgtggaacaagc

SEQ ID NO: 322711 - DNA, 15 bp, Homo sapiens
gacccgtggaacaag

SEQ ID NO: 322712 - DNA, 15 bp, Homo sapiens
agacccgtggaacaa

SEQ ID NO: 322713 - DNA, 15 bp, Homo sapiens
aagacccgtggaaca

SEQ ID NO: 322714 - DNA, 15 bp, Homo sapiens
caagacccgtggaac

SEQ ID NO: 322715 - DNA, 15 bp, Homo sapiens
acaagacccgtggaa

SEQ ID NO: 322716 - DNA, 15 bp, Homo sapiens
cacaagacccgtgga

SEQ ID NO: 322717 - DNA, 15 bp, Homo sapiens
acacaagacccgtgg

SEQ ID NO: 322718 - DNA, 15 bp, Homo sapiens
cacacaagacccgtg

SEQ ID NO: 322719 - DNA, 15 bp, Homo sapiens
ccacacaagacccgt

SEQ ID NO: 322720 - DNA, 15 bp, Homo sapiens
cccacacaagacccg

SEQ ID NO: 322721 - DNA, 15 bp, Homo sapiens
ccccacacaagaccc

SEQ ID NO: 322722 - DNA, 15 bp, Homo sapiens
gccccacacaagacc

SEQ ID NO: 322723 - DNA, 15 bp, Homo sapiens
ggccccacacaagac

SEQ ID NO: 322724 - DNA, 15 bp, Homo sapiens
tggccccacacaaga

SEQ ID NO: 322725 - DNA, 15 bp, Homo sapiens
ctggccccacacaag

SEQ ID NO: 322726 - DNA, 15 bp, Homo sapiens
gctggccccacacaa

SEQ ID NO: 322727 - DNA, 15 bp, Homo sapiens
ggctggccccacaca

SEQ ID NO: 322728 - DNA, 15 bp, Homo sapiens
gggctggccccacac

SEQ ID NO: 322729 - DNA, 15 bp, Homo sapiens
agggctggccccaca

SEQ ID NO: 322730 - DNA, 15 bp, Homo sapiens
cagggctggccccac

SEQ ID NO: 322731 - DNA, 15 bp, Homo sapiens
acagggctggcccca

SEQ ID NO: 322732 - DNA, 15 bp, Homo sapiens
aacagggctggcccc

SEQ ID NO: 322733 - DNA, 15 bp, Homo sapiens
gaacagggctggccc

SEQ ID NO: 322734 - DNA, 15 bp, Homo sapiens
tgaacagggctggcc

SEQ ID NO: 322735 - DNA, 15 bp, Homo sapiens
ctgaacagggctggc

SEQ ID NO: 322736 - DNA, 15 bp, Homo sapiens
tctgaacagggctgg

SEQ ID NO: 322737 - DNA, 15 bp, Homo sapiens
atctgaacagggctg

SEQ ID NO: 322738 - DNA, 15 bp, Homo sapiens
tatctgaacagggct

SEQ ID NO: 322739 - DNA, 15 bp, Homo sapiens
ttatctgaacagggc

SEQ ID NO: 322740 - DNA, 15 bp, Homo sapiens
cttatctgaacaggg

SEQ ID NO: 322741 - DNA, 15 bp, Homo sapiens
ccttatctgaacagg

SEQ ID NO: 322742 - DNA, 15 bp, Homo sapiens
gccttatctgaacag

SEQ ID NO: 322743 - DNA, 15 bp, Homo sapiens
ggccttatctgaaca

SEQ ID NO: 322744 - DNA, 15 bp, Homo sapiens
aggccttatctgaac

SEQ ID NO: 322745 - DNA, 15 bp, Homo sapiens
aaggccttatctgaa

SEQ ID NO: 322746 - DNA, 15 bp, Homo sapiens
caaggccttatctga

SEQ ID NO: 322747 - DNA, 15 bp, Homo sapiens
acaaggccttatctg

SEQ ID NO: 322748 - DNA, 15 bp, Homo sapiens
cacaaggccttatct

SEQ ID NO: 322749 - DNA, 15 bp, Homo sapiens
ccacaaggccttatc

SEQ ID NO: 322750 - DNA, 15 bp, Homo sapiens
cccacaaggccttat

SEQ ID NO: 322751 - DNA, 15 bp, Homo sapiens
ccccacaaggcctta

SEQ ID NO: 322752 - DNA, 15 bp, Homo sapiens
accccacaaggcctt

SEQ ID NO: 322753 - DNA, 15 bp, Homo sapiens
caccccacaaggcct

SEQ ID NO: 322754 - DNA, 15 bp, Homo sapiens
ccaccccacaaggcc

SEQ ID NO: 322755 - DNA, 15 bp, Homo sapiens
gccaccccacaaggc

SEQ ID NO: 322756 - DNA, 15 bp, Homo sapiens
ggccaccccacaagg

SEQ ID NO: 322757 - DNA, 15 bp, Homo sapiens
aggccaccccacaag

SEQ ID NO: 322758 - DNA, 15 bp, Homo sapiens
caggccaccccacaa

SEQ ID NO: 322759 - DNA, 15 bp, Homo sapiens
ccaggccaccccaca

SEQ ID NO: 322760 - DNA, 15 bp, Homo sapiens
cccaggccaccccac

SEQ ID NO: 322761 - DNA, 15 bp, Homo sapiens
ccccaggccacccca

SEQ ID NO: 322762 - DNA, 15 bp, Homo sapiens
accccaggccacccc

SEQ ID NO: 322763 - DNA, 15 bp, Homo sapiens
taccccaggccaccc

SEQ ID NO: 322764 - DNA, 15 bp, Homo sapiens
ctaccccaggccacc

SEQ ID NO: 322765 - DNA, 15 bp, Homo sapiens
cctaccccaggccac

SEQ ID NO: 322766 - DNA, 15 bp, Homo sapiens
ccctaccccaggcca

SEQ ID NO: 322767 - DNA, 15 bp, Homo sapiens
cccctaccccaggcc

SEQ ID NO: 322768 - DNA, 15 bp, Homo sapiens
ccccctaccccaggc

SEQ ID NO: 322769 - DNA, 15 bp, Homo sapiens
tccccctaccccagg

SEQ ID NO: 322770 - DNA, 15 bp, Homo sapiens
ctccccctaccccag

SEQ ID NO: 322771 - DNA, 15 bp, Homo sapiens
cctccccctacccca

SEQ ID NO: 322772 - DNA, 15 bp, Homo sapiens
ccctccccctacccc

SEQ ID NO: 322773 - DNA, 15 bp, Homo sapiens
cccctccccctaccc

SEQ ID NO: 322774 - DNA, 15 bp, Homo sapiens
acccctccccctacc

SEQ ID NO: 322775 - DNA, 15 bp, Homo sapiens
aacccctccccctac

SEQ ID NO: 322776 - DNA, 15 bp, Homo sapiens
caacccctcccccta

SEQ ID NO: 322777 - DNA, 15 bp, Homo sapiens
ccaacccctccccct

SEQ ID NO: 322778 - DNA, 15 bp, Homo sapiens
cccaacccctccccc

SEQ ID NO: 322779 - DNA, 15 bp, Homo sapiens
gcccaacccctcccc

SEQ ID NO: 322780 - DNA, 15 bp, Homo sapiens
tgcccaacccctccc

SEQ ID NO: 322781 - DNA, 15 bp, Homo sapiens
ttgcccaacccctcc

SEQ ID NO: 322782 - DNA, 15 bp, Homo sapiens
tttgcccaacccctc

SEQ ID NO: 322783 - DNA, 15 bp, Homo sapiens
gtttgcccaacccct

SEQ ID NO: 322784 - DNA, 15 bp, Homo sapiens
agtttgcccaacccc

SEQ ID NO: 322785 - DNA, 15 bp, Homo sapiens
gagtttgcccaaccc

SEQ ID NO: 322786 - DNA, 15 bp, Homo sapiens
agagtttgcccaacc

SEQ ID NO: 322787 - DNA, 15 bp, Homo sapiens
gagagtttgcccaac

SEQ ID NO: 322788 - DNA, 15 bp, Homo sapiens
ggagagtttgcccaa

SEQ ID NO: 322789 - DNA, 15 bp, Homo sapiens
gggagagtttgccca

SEQ ID NO: 322790 - DNA, 15 bp, Homo sapiens
agggagagtttgccc

SEQ ID NO: 322791 - DNA, 15 bp, Homo sapiens
aagggagagtttgcc

SEQ ID NO: 322792 - DNA, 15 bp, Homo sapiens
taagggagagtttgc

SEQ ID NO: 322793 - DNA, 15 bp, Homo sapiens
ttaagggagagtttg

SEQ ID NO: 322794 - DNA, 15 bp, Homo sapiens
tttaagggagagttt

SEQ ID NO: 322795 - DNA, 15 bp, Homo sapiens
ttttaagggagagtt

SEQ ID NO: 322796 - DNA, 15 bp, Homo sapiens
gttttaagggagagt

SEQ ID NO: 322797 - DNA, 15 bp, Homo sapiens
cgttttaagggagag

SEQ ID NO: 322798 - DNA, 15 bp, Homo sapiens
gcgttttaagggaga

SEQ ID NO: 322799 - DNA, 15 bp, Homo sapiens
agcgttttaagggag

SEQ ID NO: 322800 - DNA, 15 bp, Homo sapiens
aagcgttttaaggga

SEQ ID NO: 322801 - DNA, 15 bp, Homo sapiens
aaagcgttttaaggg

SEQ ID NO: 322802 - DNA, 15 bp, Homo sapiens
caaagcgttttaagg

SEQ ID NO: 322803 - DNA, 15 bp, Homo sapiens
acaaagcgttttaag

SEQ ID NO: 322804 - DNA, 15 bp, Homo sapiens
tacaaagcgttttaa

SEQ ID NO: 322805 - DNA, 15 bp, Homo sapiens
ttacaaagcgtttta

SEQ ID NO: 322806 - DNA, 15 bp, Homo sapiens
gttacaaagcgtttt

SEQ ID NO: 322807 - DNA, 15 bp, Homo sapiens
ggttacaaagcgttt

SEQ ID NO: 322808 - DNA, 15 bp, Homo sapiens
tggttacaaagcgtt

SEQ ID NO: 322809 - DNA, 15 bp, Homo sapiens
atggttacaaagcgt

SEQ ID NO: 322810 - DNA, 15 bp, Homo sapiens
gatggttacaaagcg

SEQ ID NO: 322811 - DNA, 15 bp, Homo sapiens
agatggttacaaagc

SEQ ID NO: 322812 - DNA, 15 bp, Homo sapiens
cagatggttacaaag

SEQ ID NO: 322813 - DNA, 15 bp, Homo sapiens
tcagatggttacaaa

SEQ ID NO: 322814 - DNA, 15 bp, Homo sapiens
ctcagatggttacaa

SEQ ID NO: 322815 - DNA, 15 bp, Homo sapiens
cctcagatggttaca

SEQ ID NO: 322816 - DNA, 15 bp, Homo sapiens
gcctcagatggttac

SEQ ID NO: 322817 - DNA, 15 bp, Homo sapiens
tgcctcagatggtta

SEQ ID NO: 322818 - DNA, 15 bp, Homo sapiens
gtgcctcagatggtt

SEQ ID NO: 322819 - DNA, 15 bp, Homo sapiens
ggtgcctcagatggt

SEQ ID NO: 322820 - DNA, 15 bp, Homo sapiens
tggtgcctcagatgg

SEQ ID NO: 322821 - DNA, 15 bp, Homo sapiens
ctggtgcctcagatg

SEQ ID NO: 322822 - DNA, 15 bp, Homo sapiens
gctggtgcctcagat

SEQ ID NO: 322823 - DNA, 15 bp, Homo sapiens
tgctggtgcctcaga

SEQ ID NO: 322824 - DNA, 15 bp, Homo sapiens
ttgctggtgcctcag

SEQ ID NO: 322825 - DNA, 15 bp, Homo sapiens
cttgctggtgcctca

SEQ ID NO: 322826 - DNA, 15 bp, Homo sapiens
tcttgctggtgcctc

SEQ ID NO: 322827 - DNA, 15 bp, Homo sapiens
ctcttgctggtgcct

SEQ ID NO: 322828 - DNA, 15 bp, Homo sapiens
gctcttgctggtgcc

SEQ ID NO: 322829 - DNA, 15 bp, Homo sapiens
cgctcttgctggtgc

SEQ ID NO: 322830 - DNA, 15 bp, Homo sapiens
ccgctcttgctggtg

SEQ ID NO: 322831 - DNA, 15 bp, Homo sapiens
gccgctcttgctggt

SEQ ID NO: 322832 - DNA, 15 bp, Homo sapiens
ggccgctcttgctgg

SEQ ID NO: 322833 - DNA, 15 bp, Homo sapiens
gggccgctcttgctg

SEQ ID NO: 322834 - DNA, 15 bp, Homo sapiens
ggggccgctcttgct

SEQ ID NO: 322835 - DNA, 15 bp, Homo sapiens
gggggccgctcttgc

SEQ ID NO: 322836 - DNA, 15 bp, Homo sapiens
cgggggccgctcttg

SEQ ID NO: 322837 - DNA, 15 bp, Homo sapiens
tcgggggccgctctt

SEQ ID NO: 322838 - DNA, 15 bp, Homo sapiens
ctcgggggccgctct

SEQ ID NO: 322839 - DNA, 15 bp, Homo sapiens
gctcgggggccgctc

SEQ ID NO: 322840 - DNA, 15 bp, Homo sapiens
ggctcgggggccgct

SEQ ID NO: 322841 - DNA, 15 bp, Homo sapiens
aggctcgggggccgc

SEQ ID NO: 322842 - DNA, 15 bp, Homo sapiens
caggctcgggggccg

SEQ ID NO: 322843 - DNA, 15 bp, Homo sapiens
ccaggctcgggggcc

SEQ ID NO: 322844 - DNA, 15 bp, Homo sapiens
tccaggctcgggggc

SEQ ID NO: 322845 - DNA, 15 bp, Homo sapiens
gtccaggctcggggg

SEQ ID NO: 322846 - DNA, 15 bp, Homo sapiens
tgtccaggctcgggg

SEQ ID NO: 322847 - DNA, 15 bp, Homo sapiens
ttgtccaggctcggg

SEQ ID NO: 322848 - DNA, 15 bp, Homo sapiens
tttgtccaggctcgg

SEQ ID NO: 322849 - DNA, 15 bp, Homo sapiens
ttttgtccaggctcg

SEQ ID NO: 322850 - DNA, 15 bp, Homo sapiens
attttgtccaggctc

SEQ ID NO: 322851 - DNA, 15 bp, Homo sapiens
gattttgtccaggct

SEQ ID NO: 322852 - DNA, 15 bp, Homo sapiens
ggattttgtccaggc

SEQ ID NO: 322853 - DNA, 15 bp, Homo sapiens
tggattttgtccagg

SEQ ID NO: 322854 - DNA, 15 bp, Homo sapiens
ttggattttgtccag

SEQ ID NO: 322855 - DNA, 15 bp, Homo sapiens
tttggattttgtcca

SEQ ID NO: 322856 - DNA, 15 bp, Homo sapiens
gtttggattttgtcc

SEQ ID NO: 322857 - DNA, 15 bp, Homo sapiens
cgtttggattttgtc

SEQ ID NO: 322858 - DNA, 15 bp, Homo sapiens
ccgtttggattttgt

SEQ ID NO: 322859 - DNA, 15 bp, Homo sapiens
gccgtttggattttg

SEQ ID NO: 322860 - DNA, 15 bp, Homo sapiens
agccgtttggatttt

SEQ ID NO: 322861 - DNA, 15 bp, Homo sapiens
aagccgtttggattt

SEQ ID NO: 322862 - DNA, 15 bp, Homo sapiens
gaagccgtttggatt

SEQ ID NO: 322863 - DNA, 15 bp, Homo sapiens
ggaagccgtttggat

SEQ ID NO: 322864 - DNA, 15 bp, Homo sapiens
aggaagccgtttgga

SEQ ID NO: 322865 - DNA, 15 bp, Homo sapiens
taggaagccgtttgg

SEQ ID NO: 322866 - DNA, 15 bp, Homo sapiens
gtaggaagccgtttg

SEQ ID NO: 322867 - DNA, 15 bp, Homo sapiens
agtaggaagccgttt

SEQ ID NO: 322868 - DNA, 15 bp, Homo sapiens
aagtaggaagccgtt

SEQ ID NO: 322869 - DNA, 15 bp, Homo sapiens
gaagtaggaagccgt

SEQ ID NO: 322870 - DNA, 15 bp, Homo sapiens
tgaagtaggaagccg

SEQ ID NO: 322871 - DNA, 15 bp, Homo sapiens
ttgaagtaggaagcc

SEQ ID NO: 322872 - DNA, 15 bp, Homo sapiens
cttgaagtaggaagc

SEQ ID NO: 322873 - DNA, 15 bp, Homo sapiens
gcttgaagtaggaag

SEQ ID NO: 322874 - DNA, 15 bp, Homo sapiens
tgcttgaagtaggaa

SEQ ID NO: 322875 - DNA, 15 bp, Homo sapiens
gtgcttgaagtagga

SEQ ID NO: 322876 - DNA, 15 bp, Homo sapiens
agtgcttgaagtagg

SEQ ID NO: 322877 - DNA, 15 bp, Homo sapiens
cagtgcttgaagtag

SEQ ID NO: 322878 - DNA, 15 bp, Homo sapiens
tcagtgcttgaagta

SEQ ID NO: 322879 - DNA, 15 bp, Homo sapiens
atcagtgcttgaagt

SEQ ID NO: 322880 - DNA, 15 bp, Homo sapiens
catcagtgcttgaag

SEQ ID NO: 322881 - DNA, 15 bp, Homo sapiens
acatcagtgcttgaa

SEQ ID NO: 322882 - DNA, 15 bp, Homo sapiens
gacatcagtgcttga

SEQ ID NO: 322883 - DNA, 15 bp, Homo sapiens
agacatcagtgcttg

SEQ ID NO: 322884 - DNA, 15 bp, Homo sapiens
tagacatcagtgctt

SEQ ID NO: 322885 - DNA, 15 bp, Homo sapiens
ctagacatcagtgct

SEQ ID NO: 322886 - DNA, 15 bp, Homo sapiens
actagacatcagtgc

SEQ ID NO: 322887 - DNA, 15 bp, Homo sapiens
cactagacatcagtg

SEQ ID NO: 322888 - DNA, 15 bp, Homo sapiens
tcactagacatcagt

SEQ ID NO: 322889 - DNA, 15 bp, Homo sapiens
ctcactagacatcag

SEQ ID NO: 322890 - DNA, 15 bp, Homo sapiens
actcactagacatca

SEQ ID NO: 322891 - DNA, 15 bp, Homo sapiens
cactcactagacatc

SEQ ID NO: 322892 - DNA, 15 bp, Homo sapiens
tcactcactagacat

SEQ ID NO: 322893 - DNA, 15 bp, Homo sapiens
ttcactcactagaca

SEQ ID NO: 322894 - DNA, 15 bp, Homo sapiens
cttcactcactagac

SEQ ID NO: 322895 - DNA, 15 bp, Homo sapiens
ccttcactcactaga

SEQ ID NO: 322896 - DNA, 15 bp, Homo sapiens
tccttcactcactag

SEQ ID NO: 322897 - DNA, 15 bp, Homo sapiens
ttccttcactcacta

SEQ ID NO: 322898 - DNA, 15 bp, Homo sapiens
gttccttcactcact

SEQ ID NO: 322899 - DNA, 15 bp, Homo sapiens
tgttccttcactcac

SEQ ID NO: 322900 - DNA, 15 bp, Homo sapiens
ctgttccttcactca

SEQ ID NO: 322901 - DNA, 15 bp, Homo sapiens
gctgttccttcactc

SEQ ID NO: 322902 - DNA, 15 bp, Homo sapiens
agctgttccttcact

SEQ ID NO: 322903 - DNA, 15 bp, Homo sapiens
gagctgttccttcac

SEQ ID NO: 322904 - DNA, 15 bp, Homo sapiens
agagctgttccttca

SEQ ID NO: 322905 - DNA, 15 bp, Homo sapiens
cagagctgttccttc

SEQ ID NO: 322906 - DNA, 15 bp, Homo sapiens
ccagagctgttcctt

SEQ ID NO: 322907 - DNA, 15 bp, Homo sapiens
cccagagctgttcct

SEQ ID NO: 322908 - DNA, 15 bp, Homo sapiens
acccagagctgttcc

SEQ ID NO: 322909 - DNA, 15 bp, Homo sapiens
gacccagagctgttc

SEQ ID NO: 322910 - DNA, 15 bp, Homo sapiens
ggacccagagctgtt

SEQ ID NO: 322911 - DNA, 15 bp, Homo sapiens
tggacccagagctgt

SEQ ID NO: 322912 - DNA, 15 bp, Homo sapiens
ctggacccagagctg

SEQ ID NO: 322913 - DNA, 15 bp, Homo sapiens
cctggacccagagct

SEQ ID NO: 322914 - DNA, 15 bp, Homo sapiens
tcctggacccagagc

SEQ ID NO: 322915 - DNA, 15 bp, Homo sapiens
atcctggacccagag

SEQ ID NO: 322916 - DNA, 15 bp, Homo sapiens
tatcctggacccaga

SEQ ID NO: 322917 - DNA, 15 bp, Homo sapiens
atatcctggacccag

SEQ ID NO: 322918 - DNA, 15 bp, Homo sapiens
aatatcctggaccca

SEQ ID NO: 322919 - DNA, 15 bp, Homo sapiens
taatatcctggaccc

SEQ ID NO: 322920 - DNA, 15 bp, Homo sapiens
ataatatcctggacc

SEQ ID NO: 322921 - DNA, 15 bp, Homo sapiens
tataatatcctggac

SEQ ID NO: 322922 - DNA, 15 bp, Homo sapiens
ctataatatcctgga

SEQ ID NO: 322923 - DNA, 15 bp, Homo sapiens
cctataatatcctgg

SEQ ID NO: 322924 - DNA, 15 bp, Homo sapiens
acctataatatcctg

SEQ ID NO: 322925 - DNA, 15 bp, Homo sapiens
gacctataatatcct

SEQ ID NO: 322926 - DNA, 15 bp, Homo sapiens
tgacctataatatcc

SEQ ID NO: 322927 - DNA, 15 bp, Homo sapiens
gtgacctataatatc

SEQ ID NO: 322928 - DNA, 15 bp, Homo sapiens
tgtgacctataatat

SEQ ID NO: 322929 - DNA, 15 bp, Homo sapiens
atgtgacctataata

SEQ ID NO: 322930 - DNA, 15 bp, Homo sapiens
aatgtgacctataat

SEQ ID NO: 322931 - DNA, 15 bp, Homo sapiens
taatgtgacctataa

SEQ ID NO: 322932 - DNA, 15 bp, Homo sapiens
ttaatgtgacctata

SEQ ID NO: 322933 - DNA, 15 bp, Homo sapiens
tttaatgtgacctat

SEQ ID NO: 322934 - DNA, 15 bp, Homo sapiens
gtttaatgtgaccta

SEQ ID NO: 322935 - DNA, 15 bp, Homo sapiens
agtttaatgtgacct

SEQ ID NO: 322936 - DNA, 15 bp, Homo sapiens
tagtttaatgtgacc

SEQ ID NO: 322937 - DNA, 15 bp, Homo sapiens
ttagtttaatgtgac

SEQ ID NO: 322938 - DNA, 15 bp, Homo sapiens
tttagtttaatgtga

SEQ ID NO: 322939 - DNA, 15 bp, Homo sapiens
ctttagtttaatgtg

SEQ ID NO: 322940 - DNA, 15 bp, Homo sapiens
cctttagtttaatgt

SEQ ID NO: 322941 - DNA, 15 bp, Homo sapiens
ccctttagtttaatg

SEQ ID NO: 322942 - DNA, 15 bp, Homo sapiens
cccctttagtttaat

SEQ ID NO: 322943 - DNA, 15 bp, Homo sapiens
gcccctttagtttaa

SEQ ID NO: 322944 - DNA, 15 bp, Homo sapiens
agcccctttagttta

SEQ ID NO: 322945 - DNA, 15 bp, Homo sapiens
aagcccctttagttt

SEQ ID NO: 322946 - DNA, 15 bp, Homo sapiens
caagcccctttagtt

SEQ ID NO: 322947 - DNA, 15 bp, Homo sapiens
ccaagcccctttagt

SEQ ID NO: 322948 - DNA, 15 bp, Homo sapiens
gccaagcccctttag

SEQ ID NO: 322949 - DNA, 15 bp, Homo sapiens
ggccaagccccttta

SEQ ID NO: 322950 - DNA, 15 bp, Homo sapiens
tggccaagccccttt

SEQ ID NO: 322951 - DNA, 15 bp, Homo sapiens
atggccaagcccctt

SEQ ID NO: 322952 - DNA, 15 bp, Homo sapiens
gatggccaagcccct

SEQ ID NO: 322953 - DNA, 15 bp, Homo sapiens
tgatggccaagcccc

SEQ ID NO: 322954 - DNA, 15 bp, Homo sapiens
ctgatggccaagccc

SEQ ID NO: 322955 - DNA, 15 bp, Homo sapiens
gctgatggccaagcc

SEQ ID NO: 322956 - DNA, 15 bp, Homo sapiens
agctgatggccaagc

SEQ ID NO: 322957 - DNA, 15 bp, Homo sapiens
cagctgatggccaag

SEQ ID NO: 322958 - DNA, 15 bp, Homo sapiens
ccagctgatggccaa

SEQ ID NO: 322959 - DNA, 15 bp, Homo sapiens
gccagctgatggcca

SEQ ID NO: 322960 - DNA, 15 bp, Homo sapiens
agccagctgatggcc

SEQ ID NO: 322961 - DNA, 15 bp, Homo sapiens
aagccagctgatggc

SEQ ID NO: 322962 - DNA, 15 bp, Homo sapiens
gaagccagctgatgg

SEQ ID NO: 322963 - DNA, 15 bp, Homo sapiens
ggaagccagctgatg

SEQ ID NO: 322964 - DNA, 15 bp, Homo sapiens
tggaagccagctgat

SEQ ID NO: 322965 - DNA, 15 bp, Homo sapiens
ctggaagccagctga

SEQ ID NO: 322966 - DNA, 15 bp, Homo sapiens
tctggaagccagctg

SEQ ID NO: 322967 - DNA, 15 bp, Homo sapiens
ctctggaagccagct

SEQ ID NO: 322968 - DNA, 15 bp, Homo sapiens
gctctggaagccagc

SEQ ID NO: 322969 - DNA, 15 bp, Homo sapiens
cgctctggaagccag

SEQ ID NO: 322970 - DNA, 15 bp, Homo sapiens
acgctctggaagcca

SEQ ID NO: 322971 - DNA, 15 bp, Homo sapiens
gacgctctggaagcc

SEQ ID NO: 322972 - DNA, 15 bp, Homo sapiens
tgacgctctggaagc

SEQ ID NO: 322973 - DNA, 15 bp, Homo sapiens
ctgacgctctggaag

SEQ ID NO: 322974 - DNA, 15 bp, Homo sapiens
gctgacgctctggaa

SEQ ID NO: 322975 - DNA, 15 bp, Homo sapiens
ggctgacgctctgga

SEQ ID NO: 322976 - DNA, 15 bp, Homo sapiens
tggctgacgctctgg

SEQ ID NO: 322977 - DNA, 15 bp, Homo sapiens
ctggctgacgctctg

SEQ ID NO: 322978 - DNA, 15 bp, Homo sapiens
actggctgacgctct

SEQ ID NO: 322979 - DNA, 15 bp, Homo sapiens
aactggctgacgctc

SEQ ID NO: 322980 - DNA, 15 bp, Homo sapiens
taactggctgacgct

SEQ ID NO: 322981 - DNA, 15 bp, Homo sapiens
gtaactggctgacgc

SEQ ID NO: 322982 - DNA, 15 bp, Homo sapiens
agtaactggctgacg

SEQ ID NO: 322983 - DNA, 15 bp, Homo sapiens
aagtaactggctgac

SEQ ID NO: 322984 - DNA, 15 bp, Homo sapiens
gaagtaactggctga

SEQ ID NO: 322985 - DNA, 15 bp, Homo sapiens
tgaagtaactggctg

SEQ ID NO: 322986 - DNA, 15 bp, Homo sapiens
gtgaagtaactggct

SEQ ID NO: 322987 - DNA, 15 bp, Homo sapiens
ggtgaagtaactggc

SEQ ID NO: 322988 - DNA, 15 bp, Homo sapiens
aggtgaagtaactgg

SEQ ID NO: 322989 - DNA, 15 bp, Homo sapiens
gaggtgaagtaactg

SEQ ID NO: 322990 - DNA, 15 bp, Homo sapiens
agaggtgaagtaact

SEQ ID NO: 322991 - DNA, 15 bp, Homo sapiens
aagaggtgaagtaac

SEQ ID NO: 322992 - DNA, 15 bp, Homo sapiens
aaagaggtgaagtaa

SEQ ID NO: 322993 - DNA, 15 bp, Homo sapiens
caaagaggtgaagta

SEQ ID NO: 322994 - DNA, 15 bp, Homo sapiens
ccaaagaggtgaagt

SEQ ID NO: 322995 - DNA, 15 bp, Homo sapiens
gccaaagaggtgaag

SEQ ID NO: 322996 - DNA, 15 bp, Homo sapiens
agccaaagaggtgaa

SEQ ID NO: 322997 - DNA, 15 bp, Homo sapiens
aagccaaagaggtga

SEQ ID NO: 322998 - DNA, 15 bp, Homo sapiens
aaagccaaagaggtg

SEQ ID NO: 322999 - DNA, 15 bp, Homo sapiens
caaagccaaagaggt

SEQ ID NO: 323000 - DNA, 15 bp, Homo sapiens
ccaaagccaaagagg

SEQ ID NO: 323001 - DNA, 15 bp, Homo sapiens
gccaaagccaaagag

SEQ ID NO: 323002 - DNA, 15 bp, Homo sapiens
ggccaaagccaaaga

SEQ ID NO: 323003 - DNA, 15 bp, Homo sapiens
aggccaaagccaaag

SEQ ID NO: 323004 - DNA, 15 bp, Homo sapiens
caggccaaagccaaa

SEQ ID NO: 323005 - DNA, 15 bp, Homo sapiens
acaggccaaagccaa

SEQ ID NO: 323006 - DNA, 15 bp, Homo sapiens
aacaggccaaagcca

SEQ ID NO: 323007 - DNA, 15 bp, Homo sapiens
aaacaggccaaagcc

SEQ ID NO: 323008 - DNA, 15 bp, Homo sapiens
aaaacaggccaaagc

SEQ ID NO: 323009 - DNA, 15 bp, Homo sapiens
gaaaacaggccaaag

SEQ ID NO: 323010 - DNA, 15 bp, Homo sapiens
tgaaaacaggccaaa

SEQ ID NO: 323011 - DNA, 15 bp, Homo sapiens
ctgaaaacaggccaa

SEQ ID NO: 323012 - DNA, 15 bp, Homo sapiens
gctgaaaacaggcca

SEQ ID NO: 323013 - DNA, 15 bp, Homo sapiens
agctgaaaacaggcc

SEQ ID NO: 323014 - DNA, 15 bp, Homo sapiens
tagctgaaaacaggc

SEQ ID NO: 323015 - DNA, 15 bp, Homo sapiens
gtagctgaaaacagg

SEQ ID NO: 323016 - DNA, 15 bp, Homo sapiens
tgtagctgaaaacag

SEQ ID NO: 323017 - DNA, 15 bp, Homo sapiens
ttgtagctgaaaaca

SEQ ID NO: 323018 - DNA, 15 bp, Homo sapiens
cttgtagctgaaaac

SEQ ID NO: 323019 - DNA, 15 bp, Homo sapiens
tcttgtagctgaaaa

SEQ ID NO: 323020 - DNA, 15 bp, Homo sapiens
ctcttgtagctgaaa

SEQ ID NO: 323021 - DNA, 15 bp, Homo sapiens
cctcttgtagctgaa

SEQ ID NO: 323022 - DNA, 15 bp, Homo sapiens
tcctcttgtagctga

SEQ ID NO: 323023 - DNA, 15 bp, Homo sapiens
gtcctcttgtagctg

SEQ ID NO: 323024 - DNA, 15 bp, Homo sapiens
agtcctcttgtagct

SEQ ID NO: 323025 - DNA, 15 bp, Homo sapiens
aagtcctcttgtagc

SEQ ID NO: 323026 - DNA, 15 bp, Homo sapiens
taagtcctcttgtag

SEQ ID NO: 323027 - DNA, 15 bp, Homo sapiens
ttaagtcctcttgta

SEQ ID NO: 323028 - DNA, 15 bp, Homo sapiens
attaagtcctcttgt

SEQ ID NO: 323029 - DNA, 15 bp, Homo sapiens
gattaagtcctcttg

SEQ ID NO: 323030 - DNA, 15 bp, Homo sapiens
ggattaagtcctctt

SEQ ID NO: 323031 - DNA, 15 bp, Homo sapiens
tggattaagtcctct

SEQ ID NO: 323032 - DNA, 15 bp, Homo sapiens
ctggattaagtcctc

SEQ ID NO: 323033 - DNA, 15 bp, Homo sapiens
tctggattaagtcct

SEQ ID NO: 323034 - DNA, 15 bp, Homo sapiens
ctctggattaagtcc

SEQ ID NO: 323035 - DNA, 15 bp, Homo sapiens
cctctggattaagtc

SEQ ID NO: 323036 - DNA, 15 bp, Homo sapiens
tcctctggattaagt

SEQ ID NO: 323037 - DNA, 15 bp, Homo sapiens
gtcctctggattaag

SEQ ID NO: 323038 - DNA, 15 bp, Homo sapiens
ggtcctctggattaa

SEQ ID NO: 323039 - DNA, 15 bp, Homo sapiens
aggtcctctggatta

SEQ ID NO: 323040 - DNA, 15 bp, Homo sapiens
gaggtcctctggatt

SEQ ID NO: 323041 - DNA, 15 bp, Homo sapiens
tgaggtcctctggat

SEQ ID NO: 323042 - DNA, 15 bp, Homo sapiens
ctgaggtcctctgga

SEQ ID NO: 323043 - DNA, 15 bp, Homo sapiens
tctgaggtcctctgg

SEQ ID NO: 323044 - DNA, 15 bp, Homo sapiens
ctctgaggtcctctg

SEQ ID NO: 323045 - DNA, 15 bp, Homo sapiens
cctctgaggtcctct

SEQ ID NO: 323046 - DNA, 15 bp, Homo sapiens
acctctgaggtcctc

SEQ ID NO: 323047 - DNA, 15 bp, Homo sapiens
gacctctgaggtcct

SEQ ID NO: 323048 - DNA, 15 bp, Homo sapiens
ggacctctgaggtcc

SEQ ID NO: 323049 - DNA, 15 bp, Homo sapiens
aggacctctgaggtc

SEQ ID NO: 323050 - DNA, 15 bp, Homo sapiens
aaggacctctgaggt

SEQ ID NO: 323051 - DNA, 15 bp, Homo sapiens
gaaggacctctgagg

SEQ ID NO: 323052 - DNA, 15 bp, Homo sapiens
ggaaggacctctgag

SEQ ID NO: 323053 - DNA, 15 bp, Homo sapiens
gggaaggacctctga

SEQ ID NO: 323054 - DNA, 15 bp, Homo sapiens
tgggaaggacctctg

SEQ ID NO: 323055 - DNA, 15 bp, Homo sapiens
ctgggaaggacctct

SEQ ID NO: 323056 - DNA, 15 bp, Homo sapiens
gctgggaaggacctc

SEQ ID NO: 323057 - DNA, 15 bp, Homo sapiens
agctgggaaggacct

SEQ ID NO: 323058 - DNA, 15 bp, Homo sapiens
gagctgggaaggacc

SEQ ID NO: 323059 - DNA, 15 bp, Homo sapiens
tgagctgggaaggac

SEQ ID NO: 323060 - DNA, 15 bp, Homo sapiens
ctgagctgggaagga

SEQ ID NO: 323061 - DNA, 15 bp, Homo sapiens
tctgagctgggaagg

SEQ ID NO: 323062 - DNA, 15 bp, Homo sapiens
gtctgagctgggaag

SEQ ID NO: 323063 - DNA, 15 bp, Homo sapiens
ggtctgagctgggaa

SEQ ID NO: 323064 - DNA, 15 bp, Homo sapiens
aggtctgagctggga

SEQ ID NO: 323065 - DNA, 15 bp, Homo sapiens
aaggtctgagctggg

SEQ ID NO: 323066 - DNA, 15 bp, Homo sapiens
gaaggtctgagctgg

SEQ ID NO: 323067 - DNA, 15 bp, Homo sapiens
agaaggtctgagctg

SEQ ID NO: 323068 - DNA, 15 bp, Homo sapiens
aagaaggtctgagct

SEQ ID NO: 323069 - DNA, 15 bp, Homo sapiens
aaagaaggtctgagc

SEQ ID NO: 323070 - DNA, 15 bp, Homo sapiens
caaagaaggtctgag

SEQ ID NO: 323071 - DNA, 15 bp, Homo sapiens
tcaaagaaggtctga

SEQ ID NO: 323072 - DNA, 15 bp, Homo sapiens
gtcaaagaaggtctg

SEQ ID NO: 323073 - DNA, 15 bp, Homo sapiens
agtcaaagaaggtct

SEQ ID NO: 323074 - DNA, 15 bp, Homo sapiens
cagtcaaagaaggtc

SEQ ID NO: 323075 - DNA, 15 bp, Homo sapiens
acagtcaaagaaggt

SEQ ID NO: 323076 - DNA, 15 bp, Homo sapiens
gacagtcaaagaagg

SEQ ID NO: 323077 - DNA, 15 bp, Homo sapiens
agacagtcaaagaag

SEQ ID NO: 323078 - DNA, 15 bp, Homo sapiens
gagacagtcaaagaa

SEQ ID NO: 323079 - DNA, 15 bp, Homo sapiens
ggagacagtcaaaga

SEQ ID NO: 323080 - DNA, 15 bp, Homo sapiens
gggagacagtcaaag

SEQ ID NO: 323081 - DNA, 15 bp, Homo sapiens
tgggagacagtcaaa

SEQ ID NO: 323082 - DNA, 15 bp, Homo sapiens
ctgggagacagtcaa

SEQ ID NO: 323083 - DNA, 15 bp, Homo sapiens
tctgggagacagtca

SEQ ID NO: 323084 - DNA, 15 bp, Homo sapiens
ctctgggagacagtc

SEQ ID NO: 323085 - DNA, 15 bp, Homo sapiens
tctctgggagacagt

SEQ ID NO: 323086 - DNA, 15 bp, Homo sapiens
gtctctgggagacag

SEQ ID NO: 323087 - DNA, 15 bp, Homo sapiens
tgtctctgggagaca

SEQ ID NO: 323088 - DNA, 15 bp, Homo sapiens
gtgtctctgggagac

SEQ ID NO: 323089 - DNA, 15 bp, Homo sapiens
agtgtctctgggaga

SEQ ID NO: 323090 - DNA, 15 bp, Homo sapiens
cagtgtctctgggag

SEQ ID NO: 323091 - DNA, 15 bp, Homo sapiens
gcagtgtctctggga

SEQ ID NO: 323092 - DNA, 15 bp, Homo sapiens
agcagtgtctctggg

SEQ ID NO: 323093 - DNA, 15 bp, Homo sapiens
cagcagtgtctctgg

SEQ ID NO: 323094 - DNA, 15 bp, Homo sapiens
acagcagtgtctctg

SEQ ID NO: 323095 - DNA, 15 bp, Homo sapiens
tacagcagtgtctct

SEQ ID NO: 323096 - DNA, 15 bp, Homo sapiens
ctacagcagtgtctc

SEQ ID NO: 323097 - DNA, 15 bp, Homo sapiens
cctacagcagtgtct

SEQ ID NO: 323098 - DNA, 15 bp, Homo sapiens
tcctacagcagtgtc

SEQ ID NO: 323099 - DNA, 15 bp, Homo sapiens
ctcctacagcagtgt

SEQ ID NO: 323100 - DNA, 15 bp, Homo sapiens
actcctacagcagtg

SEQ ID NO: 323101 - DNA, 15 bp, Homo sapiens
cactcctacagcagt

SEQ ID NO: 323102 - DNA, 15 bp, Homo sapiens
gcactcctacagcag

SEQ ID NO: 323103 - DNA, 15 bp, Homo sapiens
tgcactcctacagca

SEQ ID NO: 323104 - DNA, 15 bp, Homo sapiens
gtgcactcctacagc

SEQ ID NO: 323105 - DNA, 15 bp, Homo sapiens
tgtgcactcctacag

SEQ ID NO: 323106 - DNA, 15 bp, Homo sapiens
gtgtgcactcctaca

SEQ ID NO: 323107 - DNA, 15 bp, Homo sapiens
ggtgtgcactcctac

SEQ ID NO: 323108 - DNA, 15 bp, Homo sapiens
tggtgtgcactccta

SEQ ID NO: 323109 - DNA, 15 bp, Homo sapiens
ctggtgtgcactcct

SEQ ID NO: 323110 - DNA, 15 bp, Homo sapiens
actggtgtgcactcc

SEQ ID NO: 323111 - DNA, 15 bp, Homo sapiens
aactggtgtgcactc

SEQ ID NO: 323112 - DNA, 15 bp, Homo sapiens
aaactggtgtgcact

SEQ ID NO: 323113 - DNA, 15 bp, Homo sapiens
taaactggtgtgcac

SEQ ID NO: 323114 - DNA, 15 bp, Homo sapiens
gtaaactggtgtgca

SEQ ID NO: 323115 - DNA, 15 bp, Homo sapiens
agtaaactggtgtgc

SEQ ID NO: 323116 - DNA, 15 bp, Homo sapiens
aagtaaactggtgtg

SEQ ID NO: 323117 - DNA, 15 bp, Homo sapiens
aaagtaaactggtgt

SEQ ID NO: 323118 - DNA, 15 bp, Homo sapiens
aaaagtaaactggtg

SEQ ID NO: 323119 - DNA, 15 bp, Homo sapiens
gaaaagtaaactggt

SEQ ID NO: 323120 - DNA, 15 bp, Homo sapiens
agaaaagtaaactgg

SEQ ID NO: 323121 - DNA, 15 bp, Homo sapiens
aagaaaagtaaactg

SEQ ID NO: 323122 - DNA, 15 bp, Homo sapiens
aaagaaaagtaaact

SEQ ID NO: 323123 - DNA, 15 bp, Homo sapiens
gaaagaaaagtaaac

SEQ ID NO: 323124 - DNA, 15 bp, Homo sapiens
agaaagaaaagtaaa

SEQ ID NO: 323125 - DNA, 15 bp, Homo sapiens
aagaaagaaaagtaa

SEQ ID NO: 323126 - DNA, 15 bp, Homo sapiens
aaagaaagaaaagta

SEQ ID NO: 323127 - DNA, 15 bp, Homo sapiens
aaaagaaagaaaagt

SEQ ID NO: 323128 - DNA, 15 bp, Homo sapiens
caaaagaaagaaaag

SEQ ID NO: 323129 - DNA, 15 bp, Homo sapiens
acaaaagaaagaaaa

SEQ ID NO: 323130 - DNA, 15 bp, Homo sapiens
aacaaaagaaagaaa

SEQ ID NO: 323131 - DNA, 15 bp, Homo sapiens
aaacaaaagaaagaa

SEQ ID NO: 323132 - DNA, 15 bp, Homo sapiens
aaaacaaaagaaaga

SEQ ID NO: 323133 - DNA, 15 bp, Homo sapiens
aaaaacaaaagaaag

SEQ ID NO: 323134 - DNA, 15 bp, Homo sapiens
caaaaacaaaagaaa

SEQ ID NO: 323135 - DNA, 15 bp, Homo sapiens
tcaaaaacaaaagaa

SEQ ID NO: 323136 - DNA, 15 bp, Homo sapiens
ctcaaaaacaaaaga

SEQ ID NO: 323137 - DNA, 15 bp, Homo sapiens
tctcaaaaacaaaag

SEQ ID NO: 323138 - DNA, 15 bp, Homo sapiens
atctcaaaaacaaaa

SEQ ID NO: 323139 - DNA, 15 bp, Homo sapiens
catctcaaaaacaaa

SEQ ID NO: 323140 - DNA, 15 bp, Homo sapiens
ccatctcaaaaacaa

SEQ ID NO: 323141 - DNA, 15 bp, Homo sapiens
tccatctcaaaaaca

SEQ ID NO: 323142 - DNA, 15 bp, Homo sapiens
ctccatctcaaaaac

SEQ ID NO: 323143 - DNA, 15 bp, Homo sapiens
gaaactccatctcaa

SEQ ID NO: 323144 - DNA, 15 bp, Homo sapiens
cgaaactccatctca

SEQ ID NO: 323145 - DNA, 15 bp, Homo sapiens
gcgaaactccatctc

SEQ ID NO: 323146 - DNA, 15 bp, Homo sapiens
agcgaaactccatct

SEQ ID NO: 323147 - DNA, 15 bp, Homo sapiens
gagcgaaactccatc

SEQ ID NO: 323148 - DNA, 15 bp, Homo sapiens
agagcgaaactccat

SEQ ID NO: 323149 - DNA, 15 bp, Homo sapiens
aagagcgaaactcca

SEQ ID NO: 323150 - DNA, 15 bp, Homo sapiens
aaagagcgaaactcc

SEQ ID NO: 323151 - DNA, 15 bp, Homo sapiens
aaaagagcgaaactc

SEQ ID NO: 323152 - DNA, 15 bp, Homo sapiens
aaaaagagcgaaact

SEQ ID NO: 323153 - DNA, 15 bp, Homo sapiens
caaaaagagcgaaac

SEQ ID NO: 323154 - DNA, 15 bp, Homo sapiens
gcaaaaagagcgaaa

SEQ ID NO: 323155 - DNA, 15 bp, Homo sapiens
ggcaaaaagagcgaa

SEQ ID NO: 323156 - DNA, 15 bp, Homo sapiens
aggcaaaaagagcga

SEQ ID NO: 323157 - DNA, 15 bp, Homo sapiens
taggcaaaaagagcg

SEQ ID NO: 323158 - DNA, 15 bp, Homo sapiens
ctaggcaaaaagagc

SEQ ID NO: 323159 - DNA, 15 bp, Homo sapiens
cctaggcaaaaagag

SEQ ID NO: 323160 - DNA, 15 bp, Homo sapiens
gcctaggcaaaaaga

SEQ ID NO: 323161 - DNA, 15 bp, Homo sapiens
agcctaggcaaaaag

SEQ ID NO: 323162 - DNA, 15 bp, Homo sapiens
cagcctaggcaaaaa

SEQ ID NO: 323163 - DNA, 15 bp, Homo sapiens
ccagcctaggcaaaa

SEQ ID NO: 323164 - DNA, 15 bp, Homo sapiens
tccagcctaggcaaa

SEQ ID NO: 323165 - DNA, 15 bp, Homo sapiens
ctccagcctaggcaa

SEQ ID NO: 323166 - DNA, 15 bp, Homo sapiens
actccagcctaggca

SEQ ID NO: 323167 - DNA, 15 bp, Homo sapiens
cactccagcctaggc

SEQ ID NO: 323168 - DNA, 15 bp, Homo sapiens
gcactccagcctagg

SEQ ID NO: 323169 - DNA, 15 bp, Homo sapiens
agcactccagcctag

SEQ ID NO: 323170 - DNA, 15 bp, Homo sapiens
cagcactccagccta

SEQ ID NO: 323171 - DNA, 15 bp, Homo sapiens
acagcactccagcct

SEQ ID NO: 323172 - DNA, 15 bp, Homo sapiens
cacagcactccagcc

SEQ ID NO: 323173 - DNA, 15 bp, Homo sapiens
ccacagcactccagc

SEQ ID NO: 323174 - DNA, 15 bp, Homo sapiens
accacagcactccag

SEQ ID NO: 323175 - DNA, 15 bp, Homo sapiens
caccacagcactcca

SEQ ID NO: 323176 - DNA, 15 bp, Homo sapiens
acaccacagcactcc

SEQ ID NO: 323177 - DNA, 15 bp, Homo sapiens
cacaccacagcactc

SEQ ID NO: 323178 - DNA, 15 bp, Homo sapiens
tcacaccacagcact

SEQ ID NO: 323179 - DNA, 15 bp, Homo sapiens
atcacaccacagcac

SEQ ID NO: 323180 - DNA, 15 bp, Homo sapiens
gatcacaccacagca

SEQ ID NO: 323181 - DNA, 15 bp, Homo sapiens
agatcacaccacagc

SEQ ID NO: 323182 - DNA, 15 bp, Homo sapiens
gagatcacaccacag

SEQ ID NO: 323183 - DNA, 15 bp, Homo sapiens
tgagatcacaccaca

SEQ ID NO: 323184 - DNA, 15 bp, Homo sapiens
ccagaggttgcagtg

SEQ ID NO: 323185 - DNA, 15 bp, Homo sapiens
gccagaggttgcagt

SEQ ID NO: 323186 - DNA, 15 bp, Homo sapiens
agccagaggttgcag

SEQ ID NO: 323187 - DNA, 15 bp, Homo sapiens
gagccagaggttgca

SEQ ID NO: 323188 - DNA, 15 bp, Homo sapiens
ggagccagaggttgc

SEQ ID NO: 323189 - DNA, 15 bp, Homo sapiens
gggagccagaggttg

SEQ ID NO: 323190 - DNA, 15 bp, Homo sapiens
tgggagccagaggtt

SEQ ID NO: 323191 - DNA, 15 bp, Homo sapiens
ctgggagccagaggt

SEQ ID NO: 323192 - DNA, 15 bp, Homo sapiens
cctgggagccagagg

SEQ ID NO: 323193 - DNA, 15 bp, Homo sapiens
acctgggagccagag

SEQ ID NO: 323194 - DNA, 15 bp, Homo sapiens
aacctgggagccaga

SEQ ID NO: 323195 - DNA, 15 bp, Homo sapiens
gaacctgggagccag

SEQ ID NO: 323196 - DNA, 15 bp, Homo sapiens
tgaacctgggagcca

SEQ ID NO: 323197 - DNA, 15 bp, Homo sapiens
ttgaacctgggagcc

SEQ ID NO: 323198 - DNA, 15 bp, Homo sapiens
cttgaacctgggagc

SEQ ID NO: 323199 - DNA, 15 bp, Homo sapiens
acaggagaatcactt

SEQ ID NO: 323200 - DNA, 15 bp, Homo sapiens
gacaggagaatcact

SEQ ID NO: 323201 - DNA, 15 bp, Homo sapiens
agacaggagaatcac

SEQ ID NO: 323202 - DNA, 15 bp, Homo sapiens
gagacaggagaatca

SEQ ID NO: 323203 - DNA, 15 bp, Homo sapiens
agagacaggagaatc

SEQ ID NO: 323204 - DNA, 15 bp, Homo sapiens
cagagacaggagaat

SEQ ID NO: 323205 - DNA, 15 bp, Homo sapiens
gcagagacaggagaa

SEQ ID NO: 323206 - DNA, 15 bp, Homo sapiens
ggcagagacaggaga

SEQ ID NO: 323207 - DNA, 15 bp, Homo sapiens
aggcagagacaggag

SEQ ID NO: 323208 - DNA, 15 bp, Homo sapiens
gaggcagagacagga

SEQ ID NO: 323209 - DNA, 15 bp, Homo sapiens
ggaggcagagacagg

SEQ ID NO: 323210 - DNA, 15 bp, Homo sapiens
gggaggcagagacag

SEQ ID NO: 323211 - DNA, 15 bp, Homo sapiens
cgggaggcagagaca

SEQ ID NO: 323212 - DNA, 15 bp, Homo sapiens
tcgggaggcagagac

SEQ ID NO: 323213 - DNA, 15 bp, Homo sapiens
ctcgggaggcagaga

SEQ ID NO: 323214 - DNA, 15 bp, Homo sapiens
actcgggaggcagag

SEQ ID NO: 323215 - DNA, 15 bp, Homo sapiens
tactcgggaggcaga

SEQ ID NO: 323216 - DNA, 15 bp, Homo sapiens
ctactcgggaggcag

SEQ ID NO: 323217 - DNA, 15 bp, Homo sapiens
gctactcgggaggca

SEQ ID NO: 323218 - DNA, 15 bp, Homo sapiens
tctgtaatcccagct

SEQ ID NO: 323219 - DNA, 15 bp, Homo sapiens
gtctgtaatcccagc

SEQ ID NO: 323220 - DNA, 15 bp, Homo sapiens
tgtctgtaatcccag

SEQ ID NO: 323221 - DNA, 15 bp, Homo sapiens
gtgtctgtaatccca

SEQ ID NO: 323222 - DNA, 15 bp, Homo sapiens
ggtgtctgtaatccc

SEQ ID NO: 323223 - DNA, 15 bp, Homo sapiens
gggtgtctgtaatcc

SEQ ID NO: 323224 - DNA, 15 bp, Homo sapiens
tgggtgtctgtaatc

SEQ ID NO: 323225 - DNA, 15 bp, Homo sapiens
gtgggtgtctgtaat

SEQ ID NO: 323226 - DNA, 15 bp, Homo sapiens
ggtgggtgtctgtaa

SEQ ID NO: 323227 - DNA, 15 bp, Homo sapiens
tggtgggtgtctgta

SEQ ID NO: 323228 - DNA, 15 bp, Homo sapiens
gtggtgggtgtctgt

SEQ ID NO: 323229 - DNA, 15 bp, Homo sapiens
agtggtgggtgtctg

SEQ ID NO: 323230 - DNA, 15 bp, Homo sapiens
cagtggtgggtgtct

SEQ ID NO: 323231 - DNA, 15 bp, Homo sapiens
gcagtggtgggtgtc

SEQ ID NO: 323232 - DNA, 15 bp, Homo sapiens
tgcagtggtgggtgt

SEQ ID NO: 323233 - DNA, 15 bp, Homo sapiens
gtgcagtggtgggtg

SEQ ID NO: 323234 - DNA, 15 bp, Homo sapiens
ggtgcagtggtgggt

SEQ ID NO: 323235 - DNA, 15 bp, Homo sapiens
gggtgcagtggtggg

SEQ ID NO: 323236 - DNA, 15 bp, Homo sapiens
cgggtgcagtggtgg

SEQ ID NO: 323237 - DNA, 15 bp, Homo sapiens
ccgggtgcagtggtg

SEQ ID NO: 323238 - DNA, 15 bp, Homo sapiens
gccgggtgcagtggt

SEQ ID NO: 323239 - DNA, 15 bp, Homo sapiens
agccgggtgcagtgg

SEQ ID NO: 323240 - DNA, 15 bp, Homo sapiens
tagccgggtgcagtg

SEQ ID NO: 323241 - DNA, 15 bp, Homo sapiens
ctagccgggtgcagt

SEQ ID NO: 323242 - DNA, 15 bp, Homo sapiens
actagccgggtgcag

SEQ ID NO: 323243 - DNA, 15 bp, Homo sapiens
aactagccgggtgca

SEQ ID NO: 323244 - DNA, 15 bp, Homo sapiens
aaactagccgggtgc

SEQ ID NO: 323245 - DNA, 15 bp, Homo sapiens
aaaactagccgggtg

SEQ ID NO: 323246 - DNA, 15 bp, Homo sapiens
aaaaactagccgggt

SEQ ID NO: 323247 - DNA, 15 bp, Homo sapiens
caaaaactagccggg

SEQ ID NO: 323248 - DNA, 15 bp, Homo sapiens
acaaaaactagccgg

SEQ ID NO: 323249 - DNA, 15 bp, Homo sapiens
tacaaaaactagccg

SEQ ID NO: 323250 - DNA, 15 bp, Homo sapiens
atacaaaaactagcc

SEQ ID NO: 323251 - DNA, 15 bp, Homo sapiens
aatacaaaaactagc

SEQ ID NO: 323252 - DNA, 15 bp, Homo sapiens
aaatacaaaaactag

SEQ ID NO: 323253 - DNA, 15 bp, Homo sapiens
aaaatacaaaaacta

SEQ ID NO: 323254 - DNA, 15 bp, Homo sapiens
gaaaatacaaaaact

SEQ ID NO: 323255 - DNA, 15 bp, Homo sapiens
tgaaaatacaaaaac

SEQ ID NO: 323256 - DNA, 15 bp, Homo sapiens
atggatcatctgagg

SEQ ID NO: 323257 - DNA, 15 bp, Homo sapiens
gatggatcatctgag

SEQ ID NO: 323258 - DNA, 15 bp, Homo sapiens
ggatggatcatctga

SEQ ID NO: 323259 - DNA, 15 bp, Homo sapiens
cggatggatcatctg

SEQ ID NO: 323260 - DNA, 15 bp, Homo sapiens
gcggatggatcatct

SEQ ID NO: 323261 - DNA, 15 bp, Homo sapiens
ggcggatggatcatc

SEQ ID NO: 323262 - DNA, 15 bp, Homo sapiens
aggcggatggatcat

SEQ ID NO: 323263 - DNA, 15 bp, Homo sapiens
aaggcggatggatca

SEQ ID NO: 323264 - DNA, 15 bp, Homo sapiens
caaggcggatggatc

SEQ ID NO: 323265 - DNA, 15 bp, Homo sapiens
ccaaggcggatggat

SEQ ID NO: 323266 - DNA, 15 bp, Homo sapiens
gccaaggcggatgga

SEQ ID NO: 323267 - DNA, 15 bp, Homo sapiens
ggccaaggcggatgg

SEQ ID NO: 323268 - DNA, 15 bp, Homo sapiens
aggccaaggcggatg

SEQ ID NO: 323269 - DNA, 15 bp, Homo sapiens
gaggccaaggcggat

SEQ ID NO: 323270 - DNA, 15 bp, Homo sapiens
ggaggccaaggcgga

SEQ ID NO: 323271 - DNA, 15 bp, Homo sapiens
tcagcactttgggag

SEQ ID NO: 323272 - DNA, 15 bp, Homo sapiens
ctcagcactttggga

SEQ ID NO: 323273 - DNA, 15 bp, Homo sapiens
tctcagcactttggg

SEQ ID NO: 323274 - DNA, 15 bp, Homo sapiens
atctcagcactttgg

SEQ ID NO: 323275 - DNA, 15 bp, Homo sapiens
aatctcagcactttg

SEQ ID NO: 323276 - DNA, 15 bp, Homo sapiens
taatctcagcacttt

SEQ ID NO: 323277 - DNA, 15 bp, Homo sapiens
gtaatctcagcactt

SEQ ID NO: 323278 - DNA, 15 bp, Homo sapiens
tgtaatctcagcact

SEQ ID NO: 323279 - DNA, 15 bp, Homo sapiens
ctgtaatctcagcac

SEQ ID NO: 323280 - DNA, 15 bp, Homo sapiens
tctgtaatctcagca

SEQ ID NO: 323281 - DNA, 15 bp, Homo sapiens
atctgtaatctcagc

SEQ ID NO: 323282 - DNA, 15 bp, Homo sapiens
catctgtaatctcag

SEQ ID NO: 323283 - DNA, 15 bp, Homo sapiens
acatctgtaatctca

SEQ ID NO: 323284 - DNA, 15 bp, Homo sapiens
cacatctgtaatctc

SEQ ID NO: 323285 - DNA, 15 bp, Homo sapiens
tcacatctgtaatct

SEQ ID NO: 323286 - DNA, 15 bp, Homo sapiens
ctcacatctgtaatc

SEQ ID NO: 323287 - DNA, 15 bp, Homo sapiens
cctcacatctgtaat

SEQ ID NO: 323288 - DNA, 15 bp, Homo sapiens
gcctcacatctgtaa

SEQ ID NO: 323289 - DNA, 15 bp, Homo sapiens
tgcctcacatctgta

SEQ ID NO: 323290 - DNA, 15 bp, Homo sapiens
gtgcctcacatctgt

SEQ ID NO: 323291 - DNA, 15 bp, Homo sapiens
ggtgcctcacatctg

SEQ ID NO: 323292 - DNA, 15 bp, Homo sapiens
tggtgcctcacatct

SEQ ID NO: 323293 - DNA, 15 bp, Homo sapiens
gtggtgcctcacatc

SEQ ID NO: 323294 - DNA, 15 bp, Homo sapiens
tgtggtgcctcacat

SEQ ID NO: 323295 - DNA, 15 bp, Homo sapiens
gtgtggtgcctcaca

SEQ ID NO: 323296 - DNA, 15 bp, Homo sapiens
ggtgtggtgcctcac

SEQ ID NO: 323297 - DNA, 15 bp, Homo sapiens
gggtgtggtgcctca

SEQ ID NO: 323298 - DNA, 15 bp, Homo sapiens
cgggtgtggtgcctc

SEQ ID NO: 323299 - DNA, 15 bp, Homo sapiens
ccgggtgtggtgcct

SEQ ID NO: 323300 - DNA, 15 bp, Homo sapiens
gccgggtgtggtgcc

SEQ ID NO: 323301 - DNA, 15 bp, Homo sapiens
ggccgggtgtggtgc

SEQ ID NO: 323302 - DNA, 15 bp, Homo sapiens
tggccgggtgtggtg

SEQ ID NO: 323303 - DNA, 15 bp, Homo sapiens
atggccgggtgtggt

SEQ ID NO: 323304 - DNA, 15 bp, Homo sapiens
aatggccgggtgtgg

SEQ ID NO: 323305 - DNA, 15 bp, Homo sapiens
aaatggccgggtgtg

SEQ ID NO: 323306 - DNA, 15 bp, Homo sapiens
aaaatggccgggtgt

SEQ ID NO: 323307 - DNA, 15 bp, Homo sapiens
aaaaatggccgggtg

SEQ ID NO: 323308 - DNA, 15 bp, Homo sapiens
caaaaatggccgggt

SEQ ID NO: 323309 - DNA, 15 bp, Homo sapiens
acaaaaatggccggg

SEQ ID NO: 323310 - DNA, 15 bp, Homo sapiens
tacaaaaatggccgg

SEQ ID NO: 323311 - DNA, 15 bp, Homo sapiens
atacaaaaatggccg

SEQ ID NO: 323312 - DNA, 15 bp, Homo sapiens
aatacaaaaatggcc

SEQ ID NO: 323313 - DNA, 15 bp, Homo sapiens
aaatacaaaaatggc

SEQ ID NO: 323314 - DNA, 15 bp, Homo sapiens
aaaatacaaaaatgg

SEQ ID NO: 323315 - DNA, 15 bp, Homo sapiens
aaaaccccgtctcta

SEQ ID NO: 323316 - DNA, 15 bp, Homo sapiens
caaaaccccgtctct

SEQ ID NO: 323317 - DNA, 15 bp, Homo sapiens
gcaaaaccccgtctc

SEQ ID NO: 323318 - DNA, 15 bp, Homo sapiens
ggcaaaaccccgtct

SEQ ID NO: 323319 - DNA, 15 bp, Homo sapiens
tggcaaaaccccgtc

SEQ ID NO: 323320 - DNA, 15 bp, Homo sapiens
atggcaaaaccccgt

SEQ ID NO: 323321 - DNA, 15 bp, Homo sapiens
catggcaaaaccccg

SEQ ID NO: 323322 - DNA, 15 bp, Homo sapiens
acatggcaaaacccc

SEQ ID NO: 323323 - DNA, 15 bp, Homo sapiens
gccaacatggcaaaa

SEQ ID NO: 323324 - DNA, 15 bp, Homo sapiens
ggccaacatggcaaa

SEQ ID NO: 323325 - DNA, 15 bp, Homo sapiens
tggccaacatggcaa

SEQ ID NO: 323326 - DNA, 15 bp, Homo sapiens
gtggccaacatggca

SEQ ID NO: 323327 - DNA, 15 bp, Homo sapiens
cgtggccaacatggc

SEQ ID NO: 323328 - DNA, 15 bp, Homo sapiens
gcgtggccaacatgg

SEQ ID NO: 323329 - DNA, 15 bp, Homo sapiens
agcgtggccaacatg

SEQ ID NO: 323330 - DNA, 15 bp, Homo sapiens
cagcgtggccaacat

SEQ ID NO: 323331 - DNA, 15 bp, Homo sapiens
ccagcgtggccaaca

SEQ ID NO: 323332 - DNA, 15 bp, Homo sapiens
accagcgtggccaac

SEQ ID NO: 323333 - DNA, 15 bp, Homo sapiens
gaccagcgtggccaa

SEQ ID NO: 323334 - DNA, 15 bp, Homo sapiens
agaccagcgtggcca

SEQ ID NO: 323335 - DNA, 15 bp, Homo sapiens
gagaccagcgtggcc

SEQ ID NO: 323336 - DNA, 15 bp, Homo sapiens
tgagaccagcgtggc

SEQ ID NO: 323337 - DNA, 15 bp, Homo sapiens
ttgagaccagcgtgg

SEQ ID NO: 323338 - DNA, 15 bp, Homo sapiens
tttgagaccagcgtg

SEQ ID NO: 323339 - DNA, 15 bp, Homo sapiens
gtttgagaccagcgt

SEQ ID NO: 323340 - DNA, 15 bp, Homo sapiens
agtttgagaccagcg

SEQ ID NO: 323341 - DNA, 15 bp, Homo sapiens
agatcacttgaggtc

SEQ ID NO: 323342 - DNA, 15 bp, Homo sapiens
cagatcacttgaggt

SEQ ID NO: 323343 - DNA, 15 bp, Homo sapiens
gcagatcacttgagg

SEQ ID NO: 323344 - DNA, 15 bp, Homo sapiens
ggcagatcacttgag

SEQ ID NO: 323345 - DNA, 15 bp, Homo sapiens
gggcagatcacttga

SEQ ID NO: 323346 - DNA, 15 bp, Homo sapiens
tgggcagatcacttg

SEQ ID NO: 323347 - DNA, 15 bp, Homo sapiens
gtgggcagatcactt

SEQ ID NO: 323348 - DNA, 15 bp, Homo sapiens
ggtgggcagatcact

SEQ ID NO: 323349 - DNA, 15 bp, Homo sapiens
aggtgggcagatcac

SEQ ID NO: 323350 - DNA, 15 bp, Homo sapiens
aaggtgggcagatca

SEQ ID NO: 323351 - DNA, 15 bp, Homo sapiens
caaggtgggcagatc

SEQ ID NO: 323352 - DNA, 15 bp, Homo sapiens
ccaaggtgggcagat

SEQ ID NO: 323353 - DNA, 15 bp, Homo sapiens
gccaaggtgggcaga

SEQ ID NO: 323354 - DNA, 15 bp, Homo sapiens
ggccaaggtgggcag

SEQ ID NO: 323355 - DNA, 15 bp, Homo sapiens
aggccaaggtgggca

SEQ ID NO: 323356 - DNA, 15 bp, Homo sapiens
gaggccaaggtgggc

SEQ ID NO: 323357 - DNA, 15 bp, Homo sapiens
aggaggccaaggtgg

SEQ ID NO: 323358 - DNA, 15 bp, Homo sapiens
caggaggccaaggtg

SEQ ID NO: 323359 - DNA, 15 bp, Homo sapiens
tcaggaggccaaggt

SEQ ID NO: 323360 - DNA, 15 bp, Homo sapiens
ttcaggaggccaagg

SEQ ID NO: 323361 - DNA, 15 bp, Homo sapiens
cttcaggaggccaag

SEQ ID NO: 323362 - DNA, 15 bp, Homo sapiens
ccttcaggaggccaa

SEQ ID NO: 323363 - DNA, 15 bp, Homo sapiens
cccttcaggaggcca

SEQ ID NO: 323364 - DNA, 15 bp, Homo sapiens
gcccttcaggaggcc

SEQ ID NO: 323365 - DNA, 15 bp, Homo sapiens
agcccttcaggaggc

SEQ ID NO: 323366 - DNA, 15 bp, Homo sapiens
cagcccttcaggagg

SEQ ID NO: 323367 - DNA, 15 bp, Homo sapiens
ccagcccttcaggag

SEQ ID NO: 323368 - DNA, 15 bp, Homo sapiens
cccagcccttcagga

SEQ ID NO: 323369 - DNA, 15 bp, Homo sapiens
tcccagcccttcagg

SEQ ID NO: 323370 - DNA, 15 bp, Homo sapiens
gtcccagcccttcag

SEQ ID NO: 323371 - DNA, 15 bp, Homo sapiens
agtcccagcccttca

SEQ ID NO: 323372 - DNA, 15 bp, Homo sapiens
tagtcccagcccttc

SEQ ID NO: 323373 - DNA, 15 bp, Homo sapiens
gtagtcccagccctt

SEQ ID NO: 323374 - DNA, 15 bp, Homo sapiens
tgtagtcccagccct

SEQ ID NO: 323375 - DNA, 15 bp, Homo sapiens
ctgtagtcccagccc

SEQ ID NO: 323376 - DNA, 15 bp, Homo sapiens
cctgtagtcccagcc

SEQ ID NO: 323377 - DNA, 15 bp, Homo sapiens
acgcctgtagtccca

SEQ ID NO: 323378 - DNA, 15 bp, Homo sapiens
cacgcctgtagtccc

SEQ ID NO: 323379 - DNA, 15 bp, Homo sapiens
tcacgcctgtagtcc

SEQ ID NO: 323380 - DNA, 15 bp, Homo sapiens
ctcacgcctgtagtc

SEQ ID NO: 323381 - DNA, 15 bp, Homo sapiens
actcacgcctgtagt

SEQ ID NO: 323382 - DNA, 15 bp, Homo sapiens
gactcacgcctgtag

SEQ ID NO: 323383 - DNA, 15 bp, Homo sapiens
tgactcacgcctgta

SEQ ID NO: 323384 - DNA, 15 bp, Homo sapiens
gtgactcacgcctgt

SEQ ID NO: 323385 - DNA, 15 bp, Homo sapiens
ggtgactcacgcctg

SEQ ID NO: 323386 - DNA, 15 bp, Homo sapiens
cggtgactcacgcct

SEQ ID NO: 323387 - DNA, 15 bp, Homo sapiens
acggtgactcacgcc

SEQ ID NO: 323388 - DNA, 15 bp, Homo sapiens
cacggtgactcacgc

SEQ ID NO: 323389 - DNA, 15 bp, Homo sapiens
gcacggtgactcacg

SEQ ID NO: 323390 - DNA, 15 bp, Homo sapiens
ggcacggtgactcac

SEQ ID NO: 323391 - DNA, 15 bp, Homo sapiens
gggcacggtgactca

SEQ ID NO: 323392 - DNA, 15 bp, Homo sapiens
cgggcacggtgactc

SEQ ID NO: 323393 - DNA, 15 bp, Homo sapiens
ccgggcacggtgact

SEQ ID NO: 323394 - DNA, 15 bp, Homo sapiens
gccgggcacggtgac

SEQ ID NO: 323395 - DNA, 15 bp, Homo sapiens
ggccgggcacggtga

SEQ ID NO: 323396 - DNA, 15 bp, Homo sapiens
atggccgggcacggt

SEQ ID NO: 323397 - DNA, 15 bp, Homo sapiens
aatggccgggcacgg

SEQ ID NO: 323398 - DNA, 15 bp, Homo sapiens
aaatggccgggcacg

SEQ ID NO: 323399 - DNA, 15 bp, Homo sapiens
aaaatggccgggcac

SEQ ID NO: 323400 - DNA, 15 bp, Homo sapiens
aaaaatggccgggca

SEQ ID NO: 323401 - DNA, 15 bp, Homo sapiens
caaaaatggccgggc

SEQ ID NO: 323402 - DNA, 15 bp, Homo sapiens
cctaaaaatacaaaa

SEQ ID NO: 323403 - DNA, 15 bp, Homo sapiens
tcctaaaaatacaaa

SEQ ID NO: 323404 - DNA, 15 bp, Homo sapiens
gtcctaaaaatacaa

SEQ ID NO: 323405 - DNA, 15 bp, Homo sapiens
tgtcctaaaaataca

SEQ ID NO: 323406 - DNA, 15 bp, Homo sapiens
ctgtcctaaaaatac

SEQ ID NO: 323407 - DNA, 15 bp, Homo sapiens
gctgtcctaaaaata

SEQ ID NO: 323408 - DNA, 15 bp, Homo sapiens
cgctgtcctaaaaat

SEQ ID NO: 323409 - DNA, 15 bp, Homo sapiens
acgctgtcctaaaaa

SEQ ID NO: 323410 - DNA, 15 bp, Homo sapiens
aacgctgtcctaaaa

SEQ ID NO: 323411 - DNA, 15 bp, Homo sapiens
aaacgctgtcctaaa

SEQ ID NO: 323412 - DNA, 15 bp, Homo sapiens
aaaacgctgtcctaa

SEQ ID NO: 323413 - DNA, 15 bp, Homo sapiens
aaaaacgctgtccta

SEQ ID NO: 323414 - DNA, 15 bp, Homo sapiens
aaaaaacgctgtcct

SEQ ID NO: 323415 - DNA, 15 bp, Homo sapiens
gaaaaaacgctgtcc

SEQ ID NO: 323416 - DNA, 15 bp, Homo sapiens
tgaaaaaacgctgtc

SEQ ID NO: 323417 - DNA, 15 bp, Homo sapiens
atgaaaaaacgctgt

SEQ ID NO: 323418 - DNA, 15 bp, Homo sapiens
catgaaaaaacgctg

SEQ ID NO: 323419 - DNA, 15 bp, Homo sapiens
acatgaaaaaacgct

SEQ ID NO: 323420 - DNA, 15 bp, Homo sapiens
aacatgaaaaaacgc

SEQ ID NO: 323421 - DNA, 15 bp, Homo sapiens
caacatgaaaaaacg

SEQ ID NO: 323422 - DNA, 15 bp, Homo sapiens
ccaacatgaaaaaac

SEQ ID NO: 323423 - DNA, 15 bp, Homo sapiens
gccaacatgaaaaaa

SEQ ID NO: 323424 - DNA, 15 bp, Homo sapiens
ggccaacatgaaaaa

SEQ ID NO: 323425 - DNA, 15 bp, Homo sapiens
tggccaacatgaaaa

SEQ ID NO: 323426 - DNA, 15 bp, Homo sapiens
ctggccaacatgaaa

SEQ ID NO: 323427 - DNA, 15 bp, Homo sapiens
cctggccaacatgaa

SEQ ID NO: 323428 - DNA, 15 bp, Homo sapiens
gcctggccaacatga

SEQ ID NO: 323429 - DNA, 15 bp, Homo sapiens
tgagaccagcctggc

SEQ ID NO: 323430 - DNA, 15 bp, Homo sapiens
ttgagaccagcctgg

SEQ ID NO: 323431 - DNA, 15 bp, Homo sapiens
tttgagaccagcctg

SEQ ID NO: 323432 - DNA, 15 bp, Homo sapiens
tggatcacttgaggt

SEQ ID NO: 323433 - DNA, 15 bp, Homo sapiens
gtggatcacttgagg

SEQ ID NO: 323434 - DNA, 15 bp, Homo sapiens
ggtggatcacttgag

SEQ ID NO: 323435 - DNA, 15 bp, Homo sapiens
gggtggatcacttga

SEQ ID NO: 323436 - DNA, 15 bp, Homo sapiens
tgggtggatcacttg

SEQ ID NO: 323437 - DNA, 15 bp, Homo sapiens
gtgggtggatcactt

SEQ ID NO: 323438 - DNA, 15 bp, Homo sapiens
ggtgggtggatcact

SEQ ID NO: 323439 - DNA, 15 bp, Homo sapiens
gggtgggtggatcac

SEQ ID NO: 323440 - DNA, 15 bp, Homo sapiens
ggggtgggtggatca

SEQ ID NO: 323441 - DNA, 15 bp, Homo sapiens
cggggtgggtggatc

SEQ ID NO: 323442 - DNA, 15 bp, Homo sapiens
ccggggtgggtggat

SEQ ID NO: 323443 - DNA, 15 bp, Homo sapiens
gccggggtgggtgga

SEQ ID NO: 323444 - DNA, 15 bp, Homo sapiens
ggccggggtgggtgg

SEQ ID NO: 323445 - DNA, 15 bp, Homo sapiens
aggccggggtgggtg

SEQ ID NO: 323446 - DNA, 15 bp, Homo sapiens
gaggccggggtgggt

SEQ ID NO: 323447 - DNA, 15 bp, Homo sapiens
ggaggccggggtggg

SEQ ID NO: 323448 - DNA, 15 bp, Homo sapiens
gggaggccggggtgg

SEQ ID NO: 323449 - DNA, 15 bp, Homo sapiens
tgggaggccggggtg

SEQ ID NO: 323450 - DNA, 15 bp, Homo sapiens
ttgggaggccggggt

SEQ ID NO: 323451 - DNA, 15 bp, Homo sapiens
attgggaggccgggg

SEQ ID NO: 323452 - DNA, 15 bp, Homo sapiens
tattgggaggccggg

SEQ ID NO: 323453 - DNA, 15 bp, Homo sapiens
atattgggaggccgg

SEQ ID NO: 323454 - DNA, 15 bp, Homo sapiens
catattgggaggccg

SEQ ID NO: 323455 - DNA, 15 bp, Homo sapiens
gcatattgggaggcc

SEQ ID NO: 323456 - DNA, 15 bp, Homo sapiens
agcatattgggaggc

SEQ ID NO: 323457 - DNA, 15 bp, Homo sapiens
cagcatattgggagg

SEQ ID NO: 323458 - DNA, 15 bp, Homo sapiens
ccagcatattgggag

SEQ ID NO: 323459 - DNA, 15 bp, Homo sapiens
cccagcatattggga

SEQ ID NO: 323460 - DNA, 15 bp, Homo sapiens
tcccagcatattggg

SEQ ID NO: 323461 - DNA, 15 bp, Homo sapiens
atcccagcatattgg

SEQ ID NO: 323462 - DNA, 15 bp, Homo sapiens
aatcccagcatattg

SEQ ID NO: 323463 - DNA, 15 bp, Homo sapiens
gaatcccagcatatt

SEQ ID NO: 323464 - DNA, 15 bp, Homo sapiens
ggaatcccagcatat

SEQ ID NO: 323465 - DNA, 15 bp, Homo sapiens
tggaatcccagcata

SEQ ID NO: 323466 - DNA, 15 bp, Homo sapiens
ctggaatcccagcat

SEQ ID NO: 323467 - DNA, 15 bp, Homo sapiens
cctggaatcccagca

SEQ ID NO: 323468 - DNA, 15 bp, Homo sapiens
acctggaatcccagc

SEQ ID NO: 323469 - DNA, 15 bp, Homo sapiens
cacctggaatcccag

SEQ ID NO: 323470 - DNA, 15 bp, Homo sapiens
acacctggaatccca

SEQ ID NO: 323471 - DNA, 15 bp, Homo sapiens
cacacctggaatccc

SEQ ID NO: 323472 - DNA, 15 bp, Homo sapiens
tcacacctggaatcc

SEQ ID NO: 323473 - DNA, 15 bp, Homo sapiens
ctcacacctggaatc

SEQ ID NO: 323474 - DNA, 15 bp, Homo sapiens
actcacacctggaat

SEQ ID NO: 323475 - DNA, 15 bp, Homo sapiens
aactcacacctggaa

SEQ ID NO: 323476 - DNA, 15 bp, Homo sapiens
taactcacacctgga

SEQ ID NO: 323477 - DNA, 15 bp, Homo sapiens
gtaactcacacctgg

SEQ ID NO: 323478 - DNA, 15 bp, Homo sapiens
ggtaactcacacctg

SEQ ID NO: 323479 - DNA, 15 bp, Homo sapiens
tggtaactcacacct

SEQ ID NO: 323480 - DNA, 15 bp, Homo sapiens
atggtaactcacacc

SEQ ID NO: 323481 - DNA, 15 bp, Homo sapiens
catggtaactcacac

SEQ ID NO: 323482 - DNA, 15 bp, Homo sapiens
gcatggtaactcaca

SEQ ID NO: 323483 - DNA, 15 bp, Homo sapiens
ggcatggtaactcac

SEQ ID NO: 323484 - DNA, 15 bp, Homo sapiens
gggcatggtaactca

SEQ ID NO: 323485 - DNA, 15 bp, Homo sapiens
cgggcatggtaactc

SEQ ID NO: 323486 - DNA, 15 bp, Homo sapiens
ccgggcatggtaact

SEQ ID NO: 323487 - DNA, 15 bp, Homo sapiens
gccgggcatggtaac

SEQ ID NO: 323488 - DNA, 15 bp, Homo sapiens
agccgggcatggtaa

SEQ ID NO: 323489 - DNA, 15 bp, Homo sapiens
tagccgggcatggta

SEQ ID NO: 323490 - DNA, 15 bp, Homo sapiens
gtagccgggcatggt

SEQ ID NO: 323491 - DNA, 15 bp, Homo sapiens
ggtagccgggcatgg

SEQ ID NO: 323492 - DNA, 15 bp, Homo sapiens
tggtagccgggcatg

SEQ ID NO: 323493 - DNA, 15 bp, Homo sapiens
gtggtagccgggcat

SEQ ID NO: 323494 - DNA, 15 bp, Homo sapiens
agtggtagccgggca

SEQ ID NO: 323495 - DNA, 15 bp, Homo sapiens
aagtggtagccgggc

SEQ ID NO: 323496 - DNA, 15 bp, Homo sapiens
aaagtggtagccggg

SEQ ID NO: 323497 - DNA, 15 bp, Homo sapiens
taaagtggtagccgg

SEQ ID NO: 323498 - DNA, 15 bp, Homo sapiens
gtaaagtggtagccg

SEQ ID NO: 323499 - DNA, 15 bp, Homo sapiens
agtaaagtggtagcc

SEQ ID NO: 323500 - DNA, 15 bp, Homo sapiens
aagtaaagtggtagc

SEQ ID NO: 323501 - DNA, 15 bp, Homo sapiens
aaagtaaagtggtag

SEQ ID NO: 323502 - DNA, 15 bp, Homo sapiens
aaaagtaaagtggta

SEQ ID NO: 323503 - DNA, 15 bp, Homo sapiens
gaaaagtaaagtggt

SEQ ID NO: 323504 - DNA, 15 bp, Homo sapiens
ggaaaagtaaagtgg

SEQ ID NO: 323505 - DNA, 15 bp, Homo sapiens
aggaaaagtaaagtg

SEQ ID NO: 323506 - DNA, 15 bp, Homo sapiens
caggaaaagtaaagt

SEQ ID NO: 323507 - DNA, 15 bp, Homo sapiens
gcaggaaaagtaaag

SEQ ID NO: 323508 - DNA, 15 bp, Homo sapiens
tgcaggaaaagtaaa

SEQ ID NO: 323509 - DNA, 15 bp, Homo sapiens
ctgcaggaaaagtaa

SEQ ID NO: 323510 - DNA, 15 bp, Homo sapiens
cctgcaggaaaagta

SEQ ID NO: 323511 - DNA, 15 bp, Homo sapiens
gcctgcaggaaaagt

SEQ ID NO: 323512 - DNA, 15 bp, Homo sapiens
agcctgcaggaaaag

SEQ ID NO: 323513 - DNA, 15 bp, Homo sapiens
tagcctgcaggaaaa

SEQ ID NO: 323514 - DNA, 15 bp, Homo sapiens
atagcctgcaggaaa

SEQ ID NO: 323515 - DNA, 15 bp, Homo sapiens
gatagcctgcaggaa

SEQ ID NO: 323516 - DNA, 15 bp, Homo sapiens
tgatagcctgcagga

SEQ ID NO: 323517 - DNA, 15 bp, Homo sapiens
gtgatagcctgcagg

SEQ ID NO: 323518 - DNA, 15 bp, Homo sapiens
tgtgatagcctgcag

SEQ ID NO: 323519 - DNA, 15 bp, Homo sapiens
ctgtgatagcctgca

SEQ ID NO: 323520 - DNA, 15 bp, Homo sapiens
tctgtgatagcctgc

SEQ ID NO: 323521 - DNA, 15 bp, Homo sapiens
ttctgtgatagcctg

SEQ ID NO: 323522 - DNA, 15 bp, Homo sapiens
gttctgtgatagcct

SEQ ID NO: 323523 - DNA, 15 bp, Homo sapiens
cgttctgtgatagcc

SEQ ID NO: 323524 - DNA, 15 bp, Homo sapiens
acgttctgtgatagc

SEQ ID NO: 323525 - DNA, 15 bp, Homo sapiens
cacgttctgtgatag

SEQ ID NO: 323526 - DNA, 15 bp, Homo sapiens
acacgttctgtgata

SEQ ID NO: 323527 - DNA, 15 bp, Homo sapiens
tacacgttctgtgat

SEQ ID NO: 323528 - DNA, 15 bp, Homo sapiens
gtacacgttctgtga

SEQ ID NO: 323529 - DNA, 15 bp, Homo sapiens
tgtacacgttctgtg

SEQ ID NO: 323530 - DNA, 15 bp, Homo sapiens
ttgtacacgttctgt

SEQ ID NO: 323531 - DNA, 15 bp, Homo sapiens
attgtacacgttctg

SEQ ID NO: 323532 - DNA, 15 bp, Homo sapiens
gattgtacacgttct

SEQ ID NO: 323533 - DNA, 15 bp, Homo sapiens
agattgtacacgttc

SEQ ID NO: 323534 - DNA, 15 bp, Homo sapiens
tagattgtacacgtt

SEQ ID NO: 323535 - DNA, 15 bp, Homo sapiens
ctagattgtacacgt

SEQ ID NO: 323536 - DNA, 15 bp, Homo sapiens
tctagattgtacacg

SEQ ID NO: 323537 - DNA, 15 bp, Homo sapiens
gtctagattgtacac

SEQ ID NO: 323538 - DNA, 15 bp, Homo sapiens
agtctagattgtaca

SEQ ID NO: 323539 - DNA, 15 bp, Homo sapiens
gagtctagattgtac

SEQ ID NO: 323540 - DNA, 15 bp, Homo sapiens
agagtctagattgta

SEQ ID NO: 323541 - DNA, 15 bp, Homo sapiens
tagagtctagattgt

SEQ ID NO: 323542 - DNA, 15 bp, Homo sapiens
ttagagtctagattg

SEQ ID NO: 323543 - DNA, 15 bp, Homo sapiens
attagagtctagatt

SEQ ID NO: 323544 - DNA, 15 bp, Homo sapiens
gattagagtctagat

SEQ ID NO: 323545 - DNA, 15 bp, Homo sapiens
tgattagagtctaga

SEQ ID NO: 323546 - DNA, 15 bp, Homo sapiens
ttgattagagtctag

SEQ ID NO: 323547 - DNA, 15 bp, Homo sapiens
gttgattagagtcta

SEQ ID NO: 323548 - DNA, 15 bp, Homo sapiens
ggttgattagagtct

SEQ ID NO: 323549 - DNA, 15 bp, Homo sapiens
tggttgattagagtc

SEQ ID NO: 323550 - DNA, 15 bp, Homo sapiens
ttggttgattagagt

SEQ ID NO: 323551 - DNA, 15 bp, Homo sapiens
tttggttgattagag

SEQ ID NO: 323552 - DNA, 15 bp, Homo sapiens
atttggttgattaga

SEQ ID NO: 323553 - DNA, 15 bp, Homo sapiens
gatttggttgattag

SEQ ID NO: 323554 - DNA, 15 bp, Homo sapiens
tgatttggttgatta

SEQ ID NO: 323555 - DNA, 15 bp, Homo sapiens
ttgatttggttgatt

SEQ ID NO: 323556 - DNA, 15 bp, Homo sapiens
gttgatttggttgat

SEQ ID NO: 323557 - DNA, 15 bp, Homo sapiens
cgttgatttggttga

SEQ ID NO: 323558 - DNA, 15 bp, Homo sapiens
acgttgatttggttg

SEQ ID NO: 323559 - DNA, 15 bp, Homo sapiens
gacgttgatttggtt

SEQ ID NO: 323560 - DNA, 15 bp, Homo sapiens
agacgttgatttggt

SEQ ID NO: 323561 - DNA, 15 bp, Homo sapiens
aagacgttgatttgg

SEQ ID NO: 323562 - DNA, 15 bp, Homo sapiens
caagacgttgatttg

SEQ ID NO: 323563 - DNA, 15 bp, Homo sapiens
gcaagacgttgattt

SEQ ID NO: 323564 - DNA, 15 bp, Homo sapiens
ggcaagacgttgatt

SEQ ID NO: 323565 - DNA, 15 bp, Homo sapiens
tggcaagacgttgat

SEQ ID NO: 323566 - DNA, 15 bp, Homo sapiens
atggcaagacgttga

SEQ ID NO: 323567 - DNA, 15 bp, Homo sapiens
gatggcaagacgttg

SEQ ID NO: 323568 - DNA, 15 bp, Homo sapiens
cgatggcaagacgtt

SEQ ID NO: 323569 - DNA, 15 bp, Homo sapiens
ccgatggcaagacgt

SEQ ID NO: 323570 - DNA, 15 bp, Homo sapiens
tccgatggcaagacg

SEQ ID NO: 323571 - DNA, 15 bp, Homo sapiens
ctccgatggcaagac

SEQ ID NO: 323572 - DNA, 15 bp, Homo sapiens
actccgatggcaaga

SEQ ID NO: 323573 - DNA, 15 bp, Homo sapiens
aactccgatggcaag

SEQ ID NO: 323574 - DNA, 15 bp, Homo sapiens
aaactccgatggcaa

SEQ ID NO: 323575 - DNA, 15 bp, Homo sapiens
caaactccgatggca

SEQ ID NO: 323576 - DNA, 15 bp, Homo sapiens
gcaaactccgatggc

SEQ ID NO: 323577 - DNA, 15 bp, Homo sapiens
agcaaactccgatgg

SEQ ID NO: 323578 - DNA, 15 bp, Homo sapiens
cagcaaactccgatg

SEQ ID NO: 323579 - DNA, 15 bp, Homo sapiens
ccagcaaactccgat

SEQ ID NO: 323580 - DNA, 15 bp, Homo sapiens
accagcaaactccga

SEQ ID NO: 323581 - DNA, 15 bp, Homo sapiens
caccagcaaactccg

SEQ ID NO: 323582 - DNA, 15 bp, Homo sapiens
tcaccagcaaactcc

SEQ ID NO: 323583 - DNA, 15 bp, Homo sapiens
ttcaccagcaaactc

SEQ ID NO: 323584 - DNA, 15 bp, Homo sapiens
cttcaccagcaaact

SEQ ID NO: 323585 - DNA, 15 bp, Homo sapiens
ccttcaccagcaaac

SEQ ID NO: 323586 - DNA, 15 bp, Homo sapiens
cccttcaccagcaaa

SEQ ID NO: 323587 - DNA, 15 bp, Homo sapiens
gcccttcaccagcaa

SEQ ID NO: 323588 - DNA, 15 bp, Homo sapiens
tgcccttcaccagca

SEQ ID NO: 323589 - DNA, 15 bp, Homo sapiens
gtgcccttcaccagc

SEQ ID NO: 323590 - DNA, 15 bp, Homo sapiens
agtgcccttcaccag

SEQ ID NO: 323591 - DNA, 15 bp, Homo sapiens
aagtgcccttcacca

SEQ ID NO: 323592 - DNA, 15 bp, Homo sapiens
caagtgcccttcacc

SEQ ID NO: 323593 - DNA, 15 bp, Homo sapiens
ccaagtgcccttcac

SEQ ID NO: 323594 - DNA, 15 bp, Homo sapiens
cccaagtgcccttca

SEQ ID NO: 323595 - DNA, 15 bp, Homo sapiens
ccccaagtgcccttc

SEQ ID NO: 323596 - DNA, 15 bp, Homo sapiens
accccaagtgccctt

SEQ ID NO: 323597 - DNA, 15 bp, Homo sapiens
gaccccaagtgccct

SEQ ID NO: 323598 - DNA, 15 bp, Homo sapiens
ggaccccaagtgccc

SEQ ID NO: 323599 - DNA, 15 bp, Homo sapiens
aggaccccaagtgcc

SEQ ID NO: 323600 - DNA, 15 bp, Homo sapiens
caggaccccaagtgc

SEQ ID NO: 323601 - DNA, 15 bp, Homo sapiens
ccaggaccccaagtg

SEQ ID NO: 323602 - DNA, 15 bp, Homo sapiens
tccaggaccccaagt

SEQ ID NO: 323603 - DNA, 15 bp, Homo sapiens
ttccaggaccccaag

SEQ ID NO: 323604 - DNA, 15 bp, Homo sapiens
tttccaggaccccaa

SEQ ID NO: 323605 - DNA, 15 bp, Homo sapiens
atttccaggacccca

SEQ ID NO: 323606 - DNA, 15 bp, Homo sapiens
tatttccaggacccc

SEQ ID NO: 323607 - DNA, 15 bp, Homo sapiens
ttatttccaggaccc

SEQ ID NO: 323608 - DNA, 15 bp, Homo sapiens
gttatttccaggacc

SEQ ID NO: 323609 - DNA, 15 bp, Homo sapiens
agttatttccaggac

SEQ ID NO: 323610 - DNA, 15 bp, Homo sapiens
cagttatttccagga

SEQ ID NO: 323611 - DNA, 15 bp, Homo sapiens
acagttatttccagg

SEQ ID NO: 323612 - DNA, 15 bp, Homo sapiens
tacagttatttccag

SEQ ID NO: 323613 - DNA, 15 bp, Homo sapiens
ctacagttatttcca

SEQ ID NO: 323614 - DNA, 15 bp, Homo sapiens
cctacagttatttcc

SEQ ID NO: 323615 - DNA, 15 bp, Homo sapiens
gcctacagttatttc

SEQ ID NO: 323616 - DNA, 15 bp, Homo sapiens
agcctacagttattt

SEQ ID NO: 323617 - DNA, 15 bp, Homo sapiens
gagcctacagttatt

SEQ ID NO: 323618 - DNA, 15 bp, Homo sapiens
ggagcctacagttat

SEQ ID NO: 323619 - DNA, 15 bp, Homo sapiens
tggagcctacagtta

SEQ ID NO: 323620 - DNA, 15 bp, Homo sapiens
ttggagcctacagtt

SEQ ID NO: 323621 - DNA, 15 bp, Homo sapiens
cttggagcctacagt

SEQ ID NO: 323622 - DNA, 15 bp, Homo sapiens
gcttggagcctacag

SEQ ID NO: 323623 - DNA, 15 bp, Homo sapiens
ggcttggagcctaca

SEQ ID NO: 323624 - DNA, 15 bp, Homo sapiens
tggcttggagcctac

SEQ ID NO: 323625 - DNA, 15 bp, Homo sapiens
gtggcttggagccta

SEQ ID NO: 323626 - DNA, 15 bp, Homo sapiens
tgtggcttggagcct

SEQ ID NO: 323627 - DNA, 15 bp, Homo sapiens
gtgtggcttggagcc

SEQ ID NO: 323628 - DNA, 15 bp, Homo sapiens
tgtgtggcttggagc

SEQ ID NO: 323629 - DNA, 15 bp, Homo sapiens
gtgtgtggcttggag

SEQ ID NO: 323630 - DNA, 15 bp, Homo sapiens
tgtgtgtggcttgga

SEQ ID NO: 323631 - DNA, 15 bp, Homo sapiens
gtgtgtgtggcttgg

SEQ ID NO: 323632 - DNA, 15 bp, Homo sapiens
agtgtgtgtggcttg

SEQ ID NO: 323633 - DNA, 15 bp, Homo sapiens
cagtgtgtgtggctt

SEQ ID NO: 323634 - DNA, 15 bp, Homo sapiens
tcagtgtgtgtggct

SEQ ID NO: 323635 - DNA, 15 bp, Homo sapiens
ctcagtgtgtgtggc

SEQ ID NO: 323636 - DNA, 15 bp, Homo sapiens
tctcagtgtgtgtgg

SEQ ID NO: 323637 - DNA, 15 bp, Homo sapiens
atctcagtgtgtgtg

SEQ ID NO: 323638 - DNA, 15 bp, Homo sapiens
tatctcagtgtgtgt

SEQ ID NO: 323639 - DNA, 15 bp, Homo sapiens
ctatctcagtgtgtg

SEQ ID NO: 323640 - DNA, 15 bp, Homo sapiens
cctatctcagtgtgt

SEQ ID NO: 323641 - DNA, 15 bp, Homo sapiens
gcctatctcagtgtg

SEQ ID NO: 323642 - DNA, 15 bp, Homo sapiens
ggcctatctcagtgt

SEQ ID NO: 323643 - DNA, 15 bp, Homo sapiens
aggcctatctcagtg

SEQ ID NO: 323644 - DNA, 15 bp, Homo sapiens
taggcctatctcagt

SEQ ID NO: 323645 - DNA, 15 bp, Homo sapiens
ataggcctatctcag

SEQ ID NO: 323646 - DNA, 15 bp, Homo sapiens
aataggcctatctca

SEQ ID NO: 323647 - DNA, 15 bp, Homo sapiens
gaataggcctatctc

SEQ ID NO: 323648 - DNA, 15 bp, Homo sapiens
ggaataggcctatct

SEQ ID NO: 323649 - DNA, 15 bp, Homo sapiens
gggaataggcctatc

SEQ ID NO: 323650 - DNA, 15 bp, Homo sapiens
agggaataggcctat

SEQ ID NO: 323651 - DNA, 15 bp, Homo sapiens
cagggaataggccta

SEQ ID NO: 323652 - DNA, 15 bp, Homo sapiens
tcagggaataggcct

SEQ ID NO: 323653 - DNA, 15 bp, Homo sapiens
ctcagggaataggcc

SEQ ID NO: 323654 - DNA, 15 bp, Homo sapiens
cctcagggaataggc

SEQ ID NO: 323655 - DNA, 15 bp, Homo sapiens
gcctcagggaatagg

SEQ ID NO: 323656 - DNA, 15 bp, Homo sapiens
ggcctcagggaatag

SEQ ID NO: 323657 - DNA, 15 bp, Homo sapiens
aggcctcagggaata

SEQ ID NO: 323658 - DNA, 15 bp, Homo sapiens
gaggcctcagggaat

SEQ ID NO: 323659 - DNA, 15 bp, Homo sapiens
tgaggcctcagggaa

SEQ ID NO: 323660 - DNA, 15 bp, Homo sapiens
ctgaggcctcaggga

SEQ ID NO: 323661 - DNA, 15 bp, Homo sapiens
tctgaggcctcaggg

SEQ ID NO: 323662 - DNA, 15 bp, Homo sapiens
ctctgaggcctcagg

SEQ ID NO: 323663 - DNA, 15 bp, Homo sapiens
gctctgaggcctcag

SEQ ID NO: 323664 - DNA, 15 bp, Homo sapiens
ggctctgaggcctca

SEQ ID NO: 323665 - DNA, 15 bp, Homo sapiens
gggctctgaggcctc

SEQ ID NO: 323666 - DNA, 15 bp, Homo sapiens
ggggctctgaggcct

SEQ ID NO: 323667 - DNA, 15 bp, Homo sapiens
aggggctctgaggcc

SEQ ID NO: 323668 - DNA, 15 bp, Homo sapiens
caggggctctgaggc

SEQ ID NO: 323669 - DNA, 15 bp, Homo sapiens
tcaggggctctgagg

SEQ ID NO: 323670 - DNA, 15 bp, Homo sapiens
gtcaggggctctgag

SEQ ID NO: 323671 - DNA, 15 bp, Homo sapiens
tgtcaggggctctga

SEQ ID NO: 323672 - DNA, 15 bp, Homo sapiens
ctgtcaggggctctg

SEQ ID NO: 323673 - DNA, 15 bp, Homo sapiens
gctgtcaggggctct

SEQ ID NO: 323674 - DNA, 15 bp, Homo sapiens
agctgtcaggggctc

SEQ ID NO: 323675 - DNA, 15 bp, Homo sapiens
tagctgtcaggggct

SEQ ID NO: 323676 - DNA, 15 bp, Homo sapiens
ttagctgtcaggggc

SEQ ID NO: 323677 - DNA, 15 bp, Homo sapiens
cttagctgtcagggg

SEQ ID NO: 323678 - DNA, 15 bp, Homo sapiens
gcttagctgtcaggg

SEQ ID NO: 323679 - DNA, 15 bp, Homo sapiens
agcttagctgtcagg

SEQ ID NO: 323680 - DNA, 15 bp, Homo sapiens
gagcttagctgtcag

SEQ ID NO: 323681 - DNA, 15 bp, Homo sapiens
ggagcttagctgtca

SEQ ID NO: 323682 - DNA, 15 bp, Homo sapiens
gggagcttagctgtc

SEQ ID NO: 323683 - DNA, 15 bp, Homo sapiens
agggagcttagctgt

SEQ ID NO: 323684 - DNA, 15 bp, Homo sapiens
aagggagcttagctg

SEQ ID NO: 323685 - DNA, 15 bp, Homo sapiens
caagggagcttagct

SEQ ID NO: 323686 - DNA, 15 bp, Homo sapiens
tcaagggagcttagc

SEQ ID NO: 323687 - DNA, 15 bp, Homo sapiens
ctcaagggagcttag

SEQ ID NO: 323688 - DNA, 15 bp, Homo sapiens
actcaagggagctta

SEQ ID NO: 323689 - DNA, 15 bp, Homo sapiens
cactcaagggagctt

SEQ ID NO: 323690 - DNA, 15 bp, Homo sapiens
ccactcaagggagct

SEQ ID NO: 323691 - DNA, 15 bp, Homo sapiens
cccactcaagggagc

SEQ ID NO: 323692 - DNA, 15 bp, Homo sapiens
ccccactcaagggag

SEQ ID NO: 323693 - DNA, 15 bp, Homo sapiens
gccccactcaaggga

SEQ ID NO: 323694 - DNA, 15 bp, Homo sapiens
tgccccactcaaggg

SEQ ID NO: 323695 - DNA, 15 bp, Homo sapiens
ttgccccactcaagg

SEQ ID NO: 323696 - DNA, 15 bp, Homo sapiens
attgccccactcaag

SEQ ID NO: 323697 - DNA, 15 bp, Homo sapiens
aattgccccactcaa

SEQ ID NO: 323698 - DNA, 15 bp, Homo sapiens
aaattgccccactca

SEQ ID NO: 323699 - DNA, 15 bp, Homo sapiens
aaaattgccccactc

SEQ ID NO: 323700 - DNA, 15 bp, Homo sapiens
gaaaattgccccact

SEQ ID NO: 323701 - DNA, 15 bp, Homo sapiens
tgaaaattgccccac

SEQ ID NO: 323702 - DNA, 15 bp, Homo sapiens
ttgaaaattgcccca

SEQ ID NO: 323703 - DNA, 15 bp, Homo sapiens
gttgaaaattgcccc

SEQ ID NO: 323704 - DNA, 15 bp, Homo sapiens
tgttgaaaattgccc

SEQ ID NO: 323705 - DNA, 15 bp, Homo sapiens
ttgttgaaaattgcc

SEQ ID NO: 323706 - DNA, 15 bp, Homo sapiens
gttgttgaaaattgc

SEQ ID NO: 323707 - DNA, 15 bp, Homo sapiens
cgttgttgaaaattg

SEQ ID NO: 323708 - DNA, 15 bp, Homo sapiens
acgttgttgaaaatt

SEQ ID NO: 323709 - DNA, 15 bp, Homo sapiens
cacgttgttgaaaat

SEQ ID NO: 323710 - DNA, 15 bp, Homo sapiens
gcacgttgttgaaaa

SEQ ID NO: 323711 - DNA, 15 bp, Homo sapiens
agcacgttgttgaaa

SEQ ID NO: 323712 - DNA, 15 bp, Homo sapiens
gagcacgttgttgaa

SEQ ID NO: 323713 - DNA, 15 bp, Homo sapiens
agagcacgttgttga

SEQ ID NO: 323714 - DNA, 15 bp, Homo sapiens
cagagcacgttgttg

SEQ ID NO: 323715 - DNA, 15 bp, Homo sapiens
ccagagcacgttgtt

SEQ ID NO: 323716 - DNA, 15 bp, Homo sapiens
cccagagcacgttgt

SEQ ID NO: 323717 - DNA, 15 bp, Homo sapiens
ccccagagcacgttg

SEQ ID NO: 323718 - DNA, 15 bp, Homo sapiens
tccccagagcacgtt

SEQ ID NO: 323719 - DNA, 15 bp, Homo sapiens
gtccccagagcacgt

SEQ ID NO: 323720 - DNA, 15 bp, Homo sapiens
tgtccccagagcacg

SEQ ID NO: 323721 - DNA, 15 bp, Homo sapiens
gtgtccccagagcac

SEQ ID NO: 323722 - DNA, 15 bp, Homo sapiens
tgtgtccccagagca

SEQ ID NO: 323723 - DNA, 15 bp, Homo sapiens
ctgtgtccccagagc

SEQ ID NO: 323724 - DNA, 15 bp, Homo sapiens
gctgtgtccccagag

SEQ ID NO: 323725 - DNA, 15 bp, Homo sapiens
tgctgtgtccccaga

SEQ ID NO: 323726 - DNA, 15 bp, Homo sapiens
atgctgtgtccccag

SEQ ID NO: 323727 - DNA, 15 bp, Homo sapiens
catgctgtgtcccca

SEQ ID NO: 323728 - DNA, 15 bp, Homo sapiens
ccatgctgtgtcccc

SEQ ID NO: 323729 - DNA, 15 bp, Homo sapiens
gccatgctgtgtccc

SEQ ID NO: 323730 - DNA, 15 bp, Homo sapiens
cgccatgctgtgtcc

SEQ ID NO: 323731 - DNA, 15 bp, Homo sapiens
gcgccatgctgtgtc

SEQ ID NO: 323732 - DNA, 15 bp, Homo sapiens
ggcgccatgctgtgt

SEQ ID NO: 323733 - DNA, 15 bp, Homo sapiens
tggcgccatgctgtg

SEQ ID NO: 323734 - DNA, 15 bp, Homo sapiens
gtggcgccatgctgt

SEQ ID NO: 323735 - DNA, 15 bp, Homo sapiens
agtggcgccatgctg

SEQ ID NO: 323736 - DNA, 15 bp, Homo sapiens
cagtggcgccatgct

SEQ ID NO: 323737 - DNA, 15 bp, Homo sapiens
acagtggcgccatgc

SEQ ID NO: 323738 - DNA, 15 bp, Homo sapiens
gacagtggcgccatg

SEQ ID NO: 323739 - DNA, 15 bp, Homo sapiens
agacagtggcgccat

SEQ ID NO: 323740 - DNA, 15 bp, Homo sapiens
aagacagtggcgcca

SEQ ID NO: 323741 - DNA, 15 bp, Homo sapiens
aaagacagtggcgcc

SEQ ID NO: 323742 - DNA, 15 bp, Homo sapiens
gaaagacagtggcgc

SEQ ID NO: 323743 - DNA, 15 bp, Homo sapiens
agaaagacagtggcg

SEQ ID NO: 323744 - DNA, 15 bp, Homo sapiens
cagaaagacagtggc

SEQ ID NO: 323745 - DNA, 15 bp, Homo sapiens
ccagaaagacagtgg

SEQ ID NO: 323746 - DNA, 15 bp, Homo sapiens
accagaaagacagtg

SEQ ID NO: 323747 - DNA, 15 bp, Homo sapiens
gaccagaaagacagt

SEQ ID NO: 323748 - DNA, 15 bp, Homo sapiens
agaccagaaagacag

SEQ ID NO: 323749 - DNA, 15 bp, Homo sapiens
gagaccagaaagaca

SEQ ID NO: 323750 - DNA, 15 bp, Homo sapiens
ggagaccagaaagac

SEQ ID NO: 323751 - DNA, 15 bp, Homo sapiens
aggagaccagaaaga

SEQ ID NO: 323752 - DNA, 15 bp, Homo sapiens
caggagaccagaaag

SEQ ID NO: 323753 - DNA, 15 bp, Homo sapiens
ccaggagaccagaaa

SEQ ID NO: 323754 - DNA, 15 bp, Homo sapiens
cccaggagaccagaa

SEQ ID NO: 323755 - DNA, 15 bp, Homo sapiens
ccccaggagaccaga

SEQ ID NO: 323756 - DNA, 15 bp, Homo sapiens
gccccaggagaccag

SEQ ID NO: 323757 - DNA, 15 bp, Homo sapiens
agccccaggagacca

SEQ ID NO: 323758 - DNA, 15 bp, Homo sapiens
gagccccaggagacc

SEQ ID NO: 323759 - DNA, 15 bp, Homo sapiens
tgagccccaggagac

SEQ ID NO: 323760 - DNA, 15 bp, Homo sapiens
ctgagccccaggaga

SEQ ID NO: 323761 - DNA, 15 bp, Homo sapiens
tctgagccccaggag

SEQ ID NO: 323762 - DNA, 15 bp, Homo sapiens
gtctgagccccagga

SEQ ID NO: 323763 - DNA, 15 bp, Homo sapiens
agtctgagccccagg

SEQ ID NO: 323764 - DNA, 15 bp, Homo sapiens
tagtctgagccccag

SEQ ID NO: 323765 - DNA, 15 bp, Homo sapiens
atagtctgagcccca

SEQ ID NO: 323766 - DNA, 15 bp, Homo sapiens
catagtctgagcccc

SEQ ID NO: 323767 - DNA, 15 bp, Homo sapiens
acatagtctgagccc

SEQ ID NO: 323768 - DNA, 15 bp, Homo sapiens
gacatagtctgagcc

SEQ ID NO: 323769 - DNA, 15 bp, Homo sapiens
tgacatagtctgagc

SEQ ID NO: 323770 - DNA, 15 bp, Homo sapiens
atgacatagtctgag

SEQ ID NO: 323771 - DNA, 15 bp, Homo sapiens
tatgacatagtctga

SEQ ID NO: 323772 - DNA, 15 bp, Homo sapiens
gtatgacatagtctg

SEQ ID NO: 323773 - DNA, 15 bp, Homo sapiens
tgtatgacatagtct

SEQ ID NO: 323774 - DNA, 15 bp, Homo sapiens
gtgtatgacatagtc

SEQ ID NO: 323775 - DNA, 15 bp, Homo sapiens
agtgtatgacatagt

SEQ ID NO: 323776 - DNA, 15 bp, Homo sapiens
aagtgtatgacatag

SEQ ID NO: 323777 - DNA, 15 bp, Homo sapiens
gaagtgtatgacata

SEQ ID NO: 323778 - DNA, 15 bp, Homo sapiens
agaagtgtatgacat

SEQ ID NO: 323779 - DNA, 15 bp, Homo sapiens
aagaagtgtatgaca

SEQ ID NO: 323780 - DNA, 15 bp, Homo sapiens
aaagaagtgtatgac

SEQ ID NO: 323781 - DNA, 15 bp, Homo sapiens
gaaagaagtgtatga

SEQ ID NO: 323782 - DNA, 15 bp, Homo sapiens
ggaaagaagtgtatg

SEQ ID NO: 323783 - DNA, 15 bp, Homo sapiens
tggaaagaagtgtat

SEQ ID NO: 323784 - DNA, 15 bp, Homo sapiens
ctggaaagaagtgta

SEQ ID NO: 323785 - DNA, 15 bp, Homo sapiens
cctggaaagaagtgt

SEQ ID NO: 323786 - DNA, 15 bp, Homo sapiens
ccctggaaagaagtg

SEQ ID NO: 323787 - DNA, 15 bp, Homo sapiens
gccctggaaagaagt

SEQ ID NO: 323788 - DNA, 15 bp, Homo sapiens
tgccctggaaagaag

SEQ ID NO: 323789 - DNA, 15 bp, Homo sapiens
ctgccctggaaagaa

SEQ ID NO: 323790 - DNA, 15 bp, Homo sapiens
actgccctggaaaga

SEQ ID NO: 323791 - DNA, 15 bp, Homo sapiens
cactgccctggaaag

SEQ ID NO: 323792 - DNA, 15 bp, Homo sapiens
ccactgccctggaaa

SEQ ID NO: 323793 - DNA, 15 bp, Homo sapiens
cccactgccctggaa

SEQ ID NO: 323794 - DNA, 15 bp, Homo sapiens
acccactgccctgga

SEQ ID NO: 323795 - DNA, 15 bp, Homo sapiens
tacccactgccctgg

SEQ ID NO: 323796 - DNA, 15 bp, Homo sapiens
ttacccactgccctg

SEQ ID NO: 323797 - DNA, 15 bp, Homo sapiens
gttacccactgccct

SEQ ID NO: 323798 - DNA, 15 bp, Homo sapiens
tgttacccactgccc

SEQ ID NO: 323799 - DNA, 15 bp, Homo sapiens
ttgttacccactgcc

SEQ ID NO: 323800 - DNA, 15 bp, Homo sapiens
tttgttacccactgc

SEQ ID NO: 323801 - DNA, 15 bp, Homo sapiens
ctttgttacccactg

SEQ ID NO: 323802 - DNA, 15 bp, Homo sapiens
actttgttacccact

SEQ ID NO: 323803 - DNA, 15 bp, Homo sapiens
aactttgttacccac

SEQ ID NO: 323804 - DNA, 15 bp, Homo sapiens
aaactttgttaccca

SEQ ID NO: 323805 - DNA, 15 bp, Homo sapiens
caaactttgttaccc

SEQ ID NO: 323806 - DNA, 15 bp, Homo sapiens
tcaaactttgttacc

SEQ ID NO: 323807 - DNA, 15 bp, Homo sapiens
gtcaaactttgttac

SEQ ID NO: 323808 - DNA, 15 bp, Homo sapiens
agtcaaactttgtta

SEQ ID NO: 323809 - DNA, 15 bp, Homo sapiens
gagtcaaactttgtt

SEQ ID NO: 323810 - DNA, 15 bp, Homo sapiens
ggagtcaaactttgt

SEQ ID NO: 323811 - DNA, 15 bp, Homo sapiens
tggagtcaaactttg

SEQ ID NO: 323812 - DNA, 15 bp, Homo sapiens
ctggagtcaaacttt

SEQ ID NO: 323813 - DNA, 15 bp, Homo sapiens
tctggagtcaaactt

SEQ ID NO: 323814 - DNA, 15 bp, Homo sapiens
ttctggagtcaaact

SEQ ID NO: 323815 - DNA, 15 bp, Homo sapiens
tttctggagtcaaac

SEQ ID NO: 323816 - DNA, 15 bp, Homo sapiens
ctttctggagtcaaa

SEQ ID NO: 323817 - DNA, 15 bp, Homo sapiens
tctttctggagtcaa

SEQ ID NO: 323818 - DNA, 15 bp, Homo sapiens
gtctttctggagtca

SEQ ID NO: 323819 - DNA, 15 bp, Homo sapiens
agtctttctggagtc

SEQ ID NO: 323820 - DNA, 15 bp, Homo sapiens
aagtctttctggagt

SEQ ID NO: 323821 - DNA, 15 bp, Homo sapiens
gaagtctttctggag

SEQ ID NO: 323822 - DNA, 15 bp, Homo sapiens
ggaagtctttctgga

SEQ ID NO: 323823 - DNA, 15 bp, Homo sapiens
gggaagtctttctgg

SEQ ID NO: 323824 - DNA, 15 bp, Homo sapiens
agggaagtctttctg

SEQ ID NO: 323825 - DNA, 15 bp, Homo sapiens
gagggaagtctttct

SEQ ID NO: 323826 - DNA, 15 bp, Homo sapiens
cgagggaagtctttc

SEQ ID NO: 323827 - DNA, 15 bp, Homo sapiens
tcgagggaagtcttt

SEQ ID NO: 323828 - DNA, 15 bp, Homo sapiens
ctcgagggaagtctt

SEQ ID NO: 323829 - DNA, 15 bp, Homo sapiens
cctcgagggaagtct

SEQ ID NO: 323830 - DNA, 15 bp, Homo sapiens
tcctcgagggaagtc

SEQ ID NO: 323831 - DNA, 15 bp, Homo sapiens
atcctcgagggaagt

SEQ ID NO: 323832 - DNA, 15 bp, Homo sapiens
aatcctcgagggaag

SEQ ID NO: 323833 - DNA, 15 bp, Homo sapiens
aaatcctcgagggaa

SEQ ID NO: 323834 - DNA, 15 bp, Homo sapiens
gaaatcctcgaggga

SEQ ID NO: 323835 - DNA, 15 bp, Homo sapiens
agaaatcctcgaggg

SEQ ID NO: 323836 - DNA, 15 bp, Homo sapiens
tagaaatcctcgagg

SEQ ID NO: 323837 - DNA, 15 bp, Homo sapiens
gtagaaatcctcgag

SEQ ID NO: 323838 - DNA, 15 bp, Homo sapiens
agtagaaatcctcga

SEQ ID NO: 323839 - DNA, 15 bp, Homo sapiens
aagtagaaatcctcg

SEQ ID NO: 323840 - DNA, 15 bp, Homo sapiens
caagtagaaatcctc

SEQ ID NO: 323841 - DNA, 15 bp, Homo sapiens
ccaagtagaaatcct

SEQ ID NO: 323842 - DNA, 15 bp, Homo sapiens
tccaagtagaaatcc

SEQ ID NO: 323843 - DNA, 15 bp, Homo sapiens
atccaagtagaaatc

SEQ ID NO: 323844 - DNA, 15 bp, Homo sapiens
catccaagtagaaat

SEQ ID NO: 323845 - DNA, 15 bp, Homo sapiens
tcatccaagtagaaa

SEQ ID NO: 323846 - DNA, 15 bp, Homo sapiens
ttcatccaagtagaa

SEQ ID NO: 323847 - DNA, 15 bp, Homo sapiens
cttcatccaagtaga

SEQ ID NO: 323848 - DNA, 15 bp, Homo sapiens
tcttcatccaagtag

SEQ ID NO: 323849 - DNA, 15 bp, Homo sapiens
ctcttcatccaagta

SEQ ID NO: 323850 - DNA, 15 bp, Homo sapiens
tctcttcatccaagt

SEQ ID NO: 323851 - DNA, 15 bp, Homo sapiens
ctctcttcatccaag

SEQ ID NO: 323852 - DNA, 15 bp, Homo sapiens
cctctcttcatccaa

SEQ ID NO: 323853 - DNA, 15 bp, Homo sapiens
tcctctcttcatcca

SEQ ID NO: 323854 - DNA, 15 bp, Homo sapiens
acagccttagggtcc

SEQ ID NO: 323855 - DNA, 15 bp, Homo sapiens
aacagccttagggtc

SEQ ID NO: 323856 - DNA, 15 bp, Homo sapiens
aaacagccttagggt

SEQ ID NO: 323857 - DNA, 15 bp, Homo sapiens
aaaacagccttaggg

SEQ ID NO: 323858 - DNA, 15 bp, Homo sapiens
taaaacagccttagg

SEQ ID NO: 323859 - DNA, 15 bp, Homo sapiens
gtaaaacagccttag

SEQ ID NO: 323860 - DNA, 15 bp, Homo sapiens
cgtaaaacagcctta

SEQ ID NO: 323861 - DNA, 15 bp, Homo sapiens
gcgtaaaacagcctt

SEQ ID NO: 323862 - DNA, 15 bp, Homo sapiens
agcgtaaaacagcct

SEQ ID NO: 323863 - DNA, 15 bp, Homo sapiens
tagcgtaaaacagcc

SEQ ID NO: 323864 - DNA, 15 bp, Homo sapiens
atagcgtaaaacagc

SEQ ID NO: 323865 - DNA, 15 bp, Homo sapiens
catagcgtaaaacag

SEQ ID NO: 323866 - DNA, 15 bp, Homo sapiens
ccatagcgtaaaaca

SEQ ID NO: 323867 - DNA, 15 bp, Homo sapiens
gccatagcgtaaaac

SEQ ID NO: 323868 - DNA, 15 bp, Homo sapiens
agccatagcgtaaaa

SEQ ID NO: 323869 - DNA, 15 bp, Homo sapiens
aagccatagcgtaaa

SEQ ID NO: 323870 - DNA, 15 bp, Homo sapiens
caagccatagcgtaa

SEQ ID NO: 323871 - DNA, 15 bp, Homo sapiens
ccaagccatagcgta

SEQ ID NO: 323872 - DNA, 15 bp, Homo sapiens
tccaagccatagcgt

SEQ ID NO: 323873 - DNA, 15 bp, Homo sapiens
atccaagccatagcg

SEQ ID NO: 323874 - DNA, 15 bp, Homo sapiens
aatccaagccatagc

SEQ ID NO: 323875 - DNA, 15 bp, Homo sapiens
gaatccaagccatag

SEQ ID NO: 323876 - DNA, 15 bp, Homo sapiens
tgaatccaagccata

SEQ ID NO: 323877 - DNA, 15 bp, Homo sapiens
ctgaatccaagccat

SEQ ID NO: 323878 - DNA, 15 bp, Homo sapiens
tctgaatccaagcca

SEQ ID NO: 323879 - DNA, 15 bp, Homo sapiens
atctgaatccaagcc

SEQ ID NO: 323880 - DNA, 15 bp, Homo sapiens
gatctgaatccaagc

SEQ ID NO: 323881 - DNA, 15 bp, Homo sapiens
agatctgaatccaag

SEQ ID NO: 323882 - DNA, 15 bp, Homo sapiens
gagatctgaatccaa

SEQ ID NO: 323883 - DNA, 15 bp, Homo sapiens
tgagatctgaatcca

SEQ ID NO: 323884 - DNA, 15 bp, Homo sapiens
ctgagatctgaatcc

SEQ ID NO: 323885 - DNA, 15 bp, Homo sapiens
gctgagatctgaatc

SEQ ID NO: 323886 - DNA, 15 bp, Homo sapiens
agctgagatctgaat

SEQ ID NO: 323887 - DNA, 15 bp, Homo sapiens
cagctgagatctgaa

SEQ ID NO: 323888 - DNA, 15 bp, Homo sapiens
gcagctgagatctga

SEQ ID NO: 323889 - DNA, 15 bp, Homo sapiens
tgcagctgagatctg

SEQ ID NO: 323890 - DNA, 15 bp, Homo sapiens
ttgcagctgagatct

SEQ ID NO: 323891 - DNA, 15 bp, Homo sapiens
cttgcagctgagatc

SEQ ID NO: 323892 - DNA, 15 bp, Homo sapiens
ccttgcagctgagat

SEQ ID NO: 323893 - DNA, 15 bp, Homo sapiens
accttgcagctgaga

SEQ ID NO: 323894 - DNA, 15 bp, Homo sapiens
gaccttgcagctgag

SEQ ID NO: 323895 - DNA, 15 bp, Homo sapiens
agaccttgcagctga

SEQ ID NO: 323896 - DNA, 15 bp, Homo sapiens
cagaccttgcagctg

SEQ ID NO: 323897 - DNA, 15 bp, Homo sapiens
acagaccttgcagct

SEQ ID NO: 323898 - DNA, 15 bp, Homo sapiens
tacagaccttgcagc

SEQ ID NO: 323899 - DNA, 15 bp, Homo sapiens
ctacagaccttgcag

SEQ ID NO: 323900 - DNA, 15 bp, Homo sapiens
cctacagaccttgca

SEQ ID NO: 323901 - DNA, 15 bp, Homo sapiens
ccctacagaccttgc

SEQ ID NO: 323902 - DNA, 15 bp, Homo sapiens
tccctacagaccttg

SEQ ID NO: 323903 - DNA, 15 bp, Homo sapiens
atccctacagacctt

SEQ ID NO: 323904 - DNA, 15 bp, Homo sapiens
tatccctacagacct

SEQ ID NO: 323905 - DNA, 15 bp, Homo sapiens
ctatccctacagacc

SEQ ID NO: 323906 - DNA, 15 bp, Homo sapiens
cctatccctacagac

SEQ ID NO: 323907 - DNA, 15 bp, Homo sapiens
ccctatccctacaga

SEQ ID NO: 323908 - DNA, 15 bp, Homo sapiens
cccctatccctacag

SEQ ID NO: 323909 - DNA, 15 bp, Homo sapiens
gcccctatccctaca

SEQ ID NO: 323910 - DNA, 15 bp, Homo sapiens
tgcccctatccctac

SEQ ID NO: 323911 - DNA, 15 bp, Homo sapiens
ctgcccctatcccta

SEQ ID NO: 323912 - DNA, 15 bp, Homo sapiens
cctgcccctatccct

SEQ ID NO: 323913 - DNA, 15 bp, Homo sapiens
ccctgcccctatccc

SEQ ID NO: 323914 - DNA, 15 bp, Homo sapiens
accctgcccctatcc

SEQ ID NO: 323915 - DNA, 15 bp, Homo sapiens
caccctgcccctatc

SEQ ID NO: 323916 - DNA, 15 bp, Homo sapiens
ccaccctgcccctat

SEQ ID NO: 323917 - DNA, 15 bp, Homo sapiens
cccaccctgccccta

SEQ ID NO: 323918 - DNA, 15 bp, Homo sapiens
ccccaccctgcccct

SEQ ID NO: 323919 - DNA, 15 bp, Homo sapiens
cccccaccctgcccc

SEQ ID NO: 323920 - DNA, 15 bp, Homo sapiens
ccccccaccctgccc

SEQ ID NO: 323921 - DNA, 15 bp, Homo sapiens
accccccaccctgcc

SEQ ID NO: 323922 - DNA, 15 bp, Homo sapiens
caccccccaccctgc

SEQ ID NO: 323923 - DNA, 15 bp, Homo sapiens
ccaccccccaccctg

SEQ ID NO: 323924 - DNA, 15 bp, Homo sapiens
tccaccccccaccct

SEQ ID NO: 323925 - DNA, 15 bp, Homo sapiens
atccaccccccaccc

SEQ ID NO: 323926 - DNA, 15 bp, Homo sapiens
catccaccccccacc

SEQ ID NO: 323927 - DNA, 15 bp, Homo sapiens
ccatccaccccccac

SEQ ID NO: 323928 - DNA, 15 bp, Homo sapiens
tccatccacccccca

SEQ ID NO: 323929 - DNA, 15 bp, Homo sapiens
ctccatccacccccc

SEQ ID NO: 323930 - DNA, 15 bp, Homo sapiens
cctccatccaccccc

SEQ ID NO: 323931 - DNA, 15 bp, Homo sapiens
ccctccatccacccc

SEQ ID NO: 323932 - DNA, 15 bp, Homo sapiens
tccctccatccaccc

SEQ ID NO: 323933 - DNA, 15 bp, Homo sapiens
ctccctccatccacc

SEQ ID NO: 323934 - DNA, 15 bp, Homo sapiens
tctccctccatccac

SEQ ID NO: 323935 - DNA, 15 bp, Homo sapiens
ctctccctccatcca

SEQ ID NO: 323936 - DNA, 15 bp, Homo sapiens
cctctccctccatcc

SEQ ID NO: 323937 - DNA, 15 bp, Homo sapiens
tcctctccctccatc

SEQ ID NO: 323938 - DNA, 15 bp, Homo sapiens
atcctctccctccat

SEQ ID NO: 323939 - DNA, 15 bp, Homo sapiens
tatcctctccctcca

SEQ ID NO: 323940 - DNA, 15 bp, Homo sapiens
ctatcctctccctcc

SEQ ID NO: 323941 - DNA, 15 bp, Homo sapiens
tctatcctctccctc

SEQ ID NO: 323942 - DNA, 15 bp, Homo sapiens
ctctatcctctccct

SEQ ID NO: 323943 - DNA, 15 bp, Homo sapiens
tctctatcctctccc

SEQ ID NO: 323944 - DNA, 15 bp, Homo sapiens
ttctctatcctctcc

SEQ ID NO: 323945 - DNA, 15 bp, Homo sapiens
cttctctatcctctc

SEQ ID NO: 323946 - DNA, 15 bp, Homo sapiens
gcttctctatcctct

SEQ ID NO: 323947 - DNA, 15 bp, Homo sapiens
tgcttctctatcctc

SEQ ID NO: 323948 - DNA, 15 bp, Homo sapiens
ttgcttctctatcct

SEQ ID NO: 323949 - DNA, 15 bp, Homo sapiens
tttgcttctctatcc

SEQ ID NO: 323950 - DNA, 15 bp, Homo sapiens
ttttgcttctctatc

SEQ ID NO: 323951 - DNA, 15 bp, Homo sapiens
gttttgcttctctat

SEQ ID NO: 323952 - DNA, 15 bp, Homo sapiens
tgttttgcttctcta

SEQ ID NO: 323953 - DNA, 15 bp, Homo sapiens
ctgttttgcttctct

SEQ ID NO: 323954 - DNA, 15 bp, Homo sapiens
cctgttttgcttctc

SEQ ID NO: 323955 - DNA, 15 bp, Homo sapiens
ccctgttttgcttct

SEQ ID NO: 323956 - DNA, 15 bp, Homo sapiens
accctgttttgcttc

SEQ ID NO: 323957 - DNA, 15 bp, Homo sapiens
taccctgttttgctt

SEQ ID NO: 323958 - DNA, 15 bp, Homo sapiens
ctaccctgttttgct

SEQ ID NO: 323959 - DNA, 15 bp, Homo sapiens
actaccctgttttgc

SEQ ID NO: 323960 - DNA, 15 bp, Homo sapiens
cactaccctgttttg

SEQ ID NO: 323961 - DNA, 15 bp, Homo sapiens
ccactaccctgtttt

SEQ ID NO: 323962 - DNA, 15 bp, Homo sapiens
cccactaccctgttt

SEQ ID NO: 323963 - DNA, 15 bp, Homo sapiens
tcccactaccctgtt

SEQ ID NO: 323964 - DNA, 15 bp, Homo sapiens
ttcccactaccctgt

SEQ ID NO: 323965 - DNA, 15 bp, Homo sapiens
attcccactaccctg

SEQ ID NO: 323966 - DNA, 15 bp, Homo sapiens
tattcccactaccct

SEQ ID NO: 323967 - DNA, 15 bp, Homo sapiens
ttattcccactaccc

SEQ ID NO: 323968 - DNA, 15 bp, Homo sapiens
tttattcccactacc

SEQ ID NO: 323969 - DNA, 15 bp, Homo sapiens
ttttattcccactac

SEQ ID NO: 323970 - DNA, 15 bp, Homo sapiens
attttattcccacta

SEQ ID NO: 323971 - DNA, 15 bp, Homo sapiens
cattttattcccact

SEQ ID NO: 323972 - DNA, 15 bp, Homo sapiens
tcattttattcccac

SEQ ID NO: 323973 - DNA, 15 bp, Homo sapiens
gtcattttattccca

SEQ ID NO: 323974 - DNA, 15 bp, Homo sapiens
ggtcattttattccc

SEQ ID NO: 323975 - DNA, 15 bp, Homo sapiens
aggtcattttattcc

SEQ ID NO: 323976 - DNA, 15 bp, Homo sapiens
aaggtcattttattc

SEQ ID NO: 323977 - DNA, 15 bp, Homo sapiens
aaaggtcattttatt

SEQ ID NO: 323978 - DNA, 15 bp, Homo sapiens
caaaggtcattttat

SEQ ID NO: 323979 - DNA, 15 bp, Homo sapiens
tcaaaggtcatttta

SEQ ID NO: 323980 - DNA, 15 bp, Homo sapiens
ctcaaaggtcatttt

SEQ ID NO: 323981 - DNA, 15 bp, Homo sapiens
tctcaaaggtcattt

SEQ ID NO: 323982 - DNA, 15 bp, Homo sapiens
atctcaaaggtcatt

SEQ ID NO: 323983 - DNA, 15 bp, Homo sapiens
gatctcaaaggtcat

SEQ ID NO: 323984 - DNA, 15 bp, Homo sapiens
ggatctcaaaggtca

SEQ ID NO: 323985 - DNA, 15 bp, Homo sapiens
cggatctcaaaggtc

SEQ ID NO: 323986 - DNA, 15 bp, Homo sapiens
tcggatctcaaaggt

SEQ ID NO: 323987 - DNA, 15 bp, Homo sapiens
gtcggatctcaaagg

SEQ ID NO: 323988 - DNA, 15 bp, Homo sapiens
tgtcggatctcaaag

SEQ ID NO: 323989 - DNA, 15 bp, Homo sapiens
ctgtcggatctcaaa

SEQ ID NO: 323990 - DNA, 15 bp, Homo sapiens
gctgtcggatctcaa

SEQ ID NO: 323991 - DNA, 15 bp, Homo sapiens
agctgtcggatctca

SEQ ID NO: 323992 - DNA, 15 bp, Homo sapiens
cagctgtcggatctc

SEQ ID NO: 323993 - DNA, 15 bp, Homo sapiens
acagctgtcggatct

SEQ ID NO: 323994 - DNA, 15 bp, Homo sapiens
gacagctgtcggatc

SEQ ID NO: 323995 - DNA, 15 bp, Homo sapiens
agacagctgtcggat

SEQ ID NO: 323996 - DNA, 15 bp, Homo sapiens
tagacagctgtcgga

SEQ ID NO: 323997 - DNA, 15 bp, Homo sapiens
gtagacagctgtcgg

SEQ ID NO: 323998 - DNA, 15 bp, Homo sapiens
tgtagacagctgtcg

SEQ ID NO: 323999 - DNA, 15 bp, Homo sapiens
atgtagacagctgtc

SEQ ID NO: 324000 - DNA, 15 bp, Homo sapiens
catgtagacagctgt

SEQ ID NO: 324001 - DNA, 15 bp, Homo sapiens
acatgtagacagctg

SEQ ID NO: 324002 - DNA, 15 bp, Homo sapiens
gacatgtagacagct

SEQ ID NO: 324003 - DNA, 15 bp, Homo sapiens
cgacatgtagacagc

SEQ ID NO: 324004 - DNA, 15 bp, Homo sapiens
gcgacatgtagacag

SEQ ID NO: 324005 - DNA, 15 bp, Homo sapiens
ggcgacatgtagaca

SEQ ID NO: 324006 - DNA, 15 bp, Homo sapiens
aggcgacatgtagac

SEQ ID NO: 324007 - DNA, 15 bp, Homo sapiens
caggcgacatgtaga

SEQ ID NO: 324008 - DNA, 15 bp, Homo sapiens
gcaggcgacatgtag

SEQ ID NO: 324009 - DNA, 15 bp, Homo sapiens
agcaggcgacatgta

SEQ ID NO: 324010 - DNA, 15 bp, Homo sapiens
cagcaggcgacatgt

SEQ ID NO: 324011 - DNA, 15 bp, Homo sapiens
acagcaggcgacatg

SEQ ID NO: 324012 - DNA, 15 bp, Homo sapiens
cacagcaggcgacat

SEQ ID NO: 324013 - DNA, 15 bp, Homo sapiens
acacagcaggcgaca

SEQ ID NO: 324014 - DNA, 15 bp, Homo sapiens
cacacagcaggcgac

SEQ ID NO: 324015 - DNA, 15 bp, Homo sapiens
tcacacagcaggcga

SEQ ID NO: 324016 - DNA, 15 bp, Homo sapiens
gtcacacagcaggcg

SEQ ID NO: 324017 - DNA, 15 bp, Homo sapiens
agtcacacagcaggc

SEQ ID NO: 324018 - DNA, 15 bp, Homo sapiens
aagtcacacagcagg

SEQ ID NO: 324019 - DNA, 15 bp, Homo sapiens
aaagtcacacagcag

SEQ ID NO: 324020 - DNA, 15 bp, Homo sapiens
caaagtcacacagca

SEQ ID NO: 324021 - DNA, 15 bp, Homo sapiens
tcaaagtcacacagc

SEQ ID NO: 324022 - DNA, 15 bp, Homo sapiens
ctcaaagtcacacag

SEQ ID NO: 324023 - DNA, 15 bp, Homo sapiens
gctcaaagtcacaca

SEQ ID NO: 324024 - DNA, 15 bp, Homo sapiens
tgctcaaagtcacac

SEQ ID NO: 324025 - DNA, 15 bp, Homo sapiens
ctgctcaaagtcaca

SEQ ID NO: 324026 - DNA, 15 bp, Homo sapiens
cctgctcaaagtcac

SEQ ID NO: 324027 - DNA, 15 bp, Homo sapiens
acctgctcaaagtca

SEQ ID NO: 324028 - DNA, 15 bp, Homo sapiens
aacctgctcaaagtc

SEQ ID NO: 324029 - DNA, 15 bp, Homo sapiens
taacctgctcaaagt

SEQ ID NO: 324030 - DNA, 15 bp, Homo sapiens
ttaacctgctcaaag

SEQ ID NO: 324031 - DNA, 15 bp, Homo sapiens
attaacctgctcaaa

SEQ ID NO: 324032 - DNA, 15 bp, Homo sapiens
tattaacctgctcaa

SEQ ID NO: 324033 - DNA, 15 bp, Homo sapiens
ttattaacctgctca

SEQ ID NO: 324034 - DNA, 15 bp, Homo sapiens
gttattaacctgctc

SEQ ID NO: 324035 - DNA, 15 bp, Homo sapiens
tgttattaacctgct

SEQ ID NO: 324036 - DNA, 15 bp, Homo sapiens
atgttattaacctgc

SEQ ID NO: 324037 - DNA, 15 bp, Homo sapiens
catgttattaacctg

SEQ ID NO: 324038 - DNA, 15 bp, Homo sapiens
acatgttattaacct

SEQ ID NO: 324039 - DNA, 15 bp, Homo sapiens
gacatgttattaacc

SEQ ID NO: 324040 - DNA, 15 bp, Homo sapiens
agacatgttattaac

SEQ ID NO: 324041 - DNA, 15 bp, Homo sapiens
cagacatgttattaa

SEQ ID NO: 324042 - DNA, 15 bp, Homo sapiens
tcagacatgttatta

SEQ ID NO: 324043 - DNA, 15 bp, Homo sapiens
ctcagacatgttatt

SEQ ID NO: 324044 - DNA, 15 bp, Homo sapiens
gctcagacatgttat

SEQ ID NO: 324045 - DNA, 15 bp, Homo sapiens
agctcagacatgtta

SEQ ID NO: 324046 - DNA, 15 bp, Homo sapiens
aagctcagacatgtt

SEQ ID NO: 324047 - DNA, 15 bp, Homo sapiens
aaagctcagacatgt

SEQ ID NO: 324048 - DNA, 15 bp, Homo sapiens
gaaagctcagacatg

SEQ ID NO: 324049 - DNA, 15 bp, Homo sapiens
ggaaagctcagacat

SEQ ID NO: 324050 - DNA, 15 bp, Homo sapiens
aggaaagctcagaca

SEQ ID NO: 324051 - DNA, 15 bp, Homo sapiens
gaggaaagctcagac

SEQ ID NO: 324052 - DNA, 15 bp, Homo sapiens
ggaggaaagctcaga

SEQ ID NO: 324053 - DNA, 15 bp, Homo sapiens
aggaggaaagctcag

SEQ ID NO: 324054 - DNA, 15 bp, Homo sapiens
gaggaggaaagctca

SEQ ID NO: 324055 - DNA, 15 bp, Homo sapiens
agaggaggaaagctc

SEQ ID NO: 324056 - DNA, 15 bp, Homo sapiens
aagaggaggaaagct

SEQ ID NO: 324057 - DNA, 15 bp, Homo sapiens
taagaggaggaaagc

SEQ ID NO: 324058 - DNA, 15 bp, Homo sapiens
ttaagaggaggaaag

SEQ ID NO: 324059 - DNA, 15 bp, Homo sapiens
cttaagaggaggaaa

SEQ ID NO: 324060 - DNA, 15 bp, Homo sapiens
tcttaagaggaggaa

SEQ ID NO: 324061 - DNA, 15 bp, Homo sapiens
atcttaagaggagga

SEQ ID NO: 324062 - DNA, 15 bp, Homo sapiens
catcttaagaggagg

SEQ ID NO: 324063 - DNA, 15 bp, Homo sapiens
ccatcttaagaggag

SEQ ID NO: 324064 - DNA, 15 bp, Homo sapiens
cccatcttaagagga

SEQ ID NO: 324065 - DNA, 15 bp, Homo sapiens
ccccatcttaagagg

SEQ ID NO: 324066 - DNA, 15 bp, Homo sapiens
gccccatcttaagag

SEQ ID NO: 324067 - DNA, 15 bp, Homo sapiens
tgccccatcttaaga

SEQ ID NO: 324068 - DNA, 15 bp, Homo sapiens
ctgccccatcttaag

SEQ ID NO: 324069 - DNA, 15 bp, Homo sapiens
cctgccccatcttaa

SEQ ID NO: 324070 - DNA, 15 bp, Homo sapiens
ccctgccccatctta

SEQ ID NO: 324071 - DNA, 15 bp, Homo sapiens
cccctgccccatctt

SEQ ID NO: 324072 - DNA, 15 bp, Homo sapiens
tcccctgccccatct

SEQ ID NO: 324073 - DNA, 15 bp, Homo sapiens
atcccctgccccatc

SEQ ID NO: 324074 - DNA, 15 bp, Homo sapiens
gatcccctgccccat

SEQ ID NO: 324075 - DNA, 15 bp, Homo sapiens
cgatcccctgcccca

SEQ ID NO: 324076 - DNA, 15 bp, Homo sapiens
acgatcccctgcccc

SEQ ID NO: 324077 - DNA, 15 bp, Homo sapiens
aacgatcccctgccc

SEQ ID NO: 324078 - DNA, 15 bp, Homo sapiens
taacgatcccctgcc

SEQ ID NO: 324079 - DNA, 15 bp, Homo sapiens
gtaacgatcccctgc

SEQ ID NO: 324080 - DNA, 15 bp, Homo sapiens
ggtaacgatcccctg

SEQ ID NO: 324081 - DNA, 15 bp, Homo sapiens
tggtaacgatcccct

SEQ ID NO: 324082 - DNA, 15 bp, Homo sapiens
ttggtaacgatcccc

SEQ ID NO: 324083 - DNA, 15 bp, Homo sapiens
gttggtaacgatccc

SEQ ID NO: 324084 - DNA, 15 bp, Homo sapiens
tgttggtaacgatcc

SEQ ID NO: 324085 - DNA, 15 bp, Homo sapiens
gtgttggtaacgatc

SEQ ID NO: 324086 - DNA, 15 bp, Homo sapiens
agtgttggtaacgat

SEQ ID NO: 324087 - DNA, 15 bp, Homo sapiens
aagtgttggtaacga

SEQ ID NO: 324088 - DNA, 15 bp, Homo sapiens
taagtgttggtaacg

SEQ ID NO: 324089 - DNA, 15 bp, Homo sapiens
gtaagtgttggtaac

SEQ ID NO: 324090 - DNA, 15 bp, Homo sapiens
ggtaagtgttggtaa

SEQ ID NO: 324091 - DNA, 15 bp, Homo sapiens
gggtaagtgttggta

SEQ ID NO: 324092 - DNA, 15 bp, Homo sapiens
agggtaagtgttggt

SEQ ID NO: 324093 - DNA, 15 bp, Homo sapiens
gagggtaagtgttgg

SEQ ID NO: 324094 - DNA, 15 bp, Homo sapiens
ggagggtaagtgttg

SEQ ID NO: 324095 - DNA, 15 bp, Homo sapiens
gggagggtaagtgtt

SEQ ID NO: 324096 - DNA, 15 bp, Homo sapiens
tgggagggtaagtgt

SEQ ID NO: 324097 - DNA, 15 bp, Homo sapiens
ctgggagggtaagtg

SEQ ID NO: 324098 - DNA, 15 bp, Homo sapiens
cctgggagggtaagt

SEQ ID NO: 324099 - DNA, 15 bp, Homo sapiens
ccctgggagggtaag

SEQ ID NO: 324100 - DNA, 15 bp, Homo sapiens
accctgggagggtaa

SEQ ID NO: 324101 - DNA, 15 bp, Homo sapiens
aaccctgggagggta

SEQ ID NO: 324102 - DNA, 15 bp, Homo sapiens
aaaccctgggagggt

SEQ ID NO: 324103 - DNA, 15 bp, Homo sapiens
caaaccctgggaggg

SEQ ID NO: 324104 - DNA, 15 bp, Homo sapiens
acaaaccctgggagg

SEQ ID NO: 324105 - DNA, 15 bp, Homo sapiens
aacaaaccctgggag

SEQ ID NO: 324106 - DNA, 15 bp, Homo sapiens
caacaaaccctggga

SEQ ID NO: 324107 - DNA, 15 bp, Homo sapiens
acaacaaaccctggg

SEQ ID NO: 324108 - DNA, 15 bp, Homo sapiens
tacaacaaaccctgg

SEQ ID NO: 324109 - DNA, 15 bp, Homo sapiens
ttacaacaaaccctg

SEQ ID NO: 324110 - DNA, 15 bp, Homo sapiens
cttacaacaaaccct

SEQ ID NO: 324111 - DNA, 15 bp, Homo sapiens
ccttacaacaaaccc

SEQ ID NO: 324112 - DNA, 15 bp, Homo sapiens
tccttacaacaaacc

SEQ ID NO: 324113 - DNA, 15 bp, Homo sapiens
gtccttacaacaaac

SEQ ID NO: 324114 - DNA, 15 bp, Homo sapiens
cgtccttacaacaaa

SEQ ID NO: 324115 - DNA, 15 bp, Homo sapiens
tcgtccttacaacaa

SEQ ID NO: 324116 - DNA, 15 bp, Homo sapiens
ttcgtccttacaaca

SEQ ID NO: 324117 - DNA, 15 bp, Homo sapiens
attcgtccttacaac

SEQ ID NO: 324118 - DNA, 15 bp, Homo sapiens
tattcgtccttacaa

SEQ ID NO: 324119 - DNA, 15 bp, Homo sapiens
ttattcgtccttaca

SEQ ID NO: 324120 - DNA, 15 bp, Homo sapiens
cttattcgtccttac

SEQ ID NO: 324121 - DNA, 15 bp, Homo sapiens
ccttattcgtcctta

SEQ ID NO: 324122 - DNA, 15 bp, Homo sapiens
accttattcgtcctt

SEQ ID NO: 324123 - DNA, 15 bp, Homo sapiens
taccttattcgtcct

SEQ ID NO: 324124 - DNA, 15 bp, Homo sapiens
ttaccttattcgtcc

SEQ ID NO: 324125 - DNA, 15 bp, Homo sapiens
attaccttattcgtc

SEQ ID NO: 324126 - DNA, 15 bp, Homo sapiens
tattaccttattcgt

SEQ ID NO: 324127 - DNA, 15 bp, Homo sapiens
ctattaccttattcg

SEQ ID NO: 324128 - DNA, 15 bp, Homo sapiens
cctattaccttattc

SEQ ID NO: 324129 - DNA, 15 bp, Homo sapiens
tcctattaccttatt

SEQ ID NO: 324130 - DNA, 15 bp, Homo sapiens
ttcctattaccttat

SEQ ID NO: 324131 - DNA, 15 bp, Homo sapiens
tttcctattacctta

SEQ ID NO: 324132 - DNA, 15 bp, Homo sapiens
atttcctattacctt

SEQ ID NO: 324133 - DNA, 15 bp, Homo sapiens
catttcctattacct

SEQ ID NO: 324134 - DNA, 15 bp, Homo sapiens
ccatttcctattacc

SEQ ID NO: 324135 - DNA, 15 bp, Homo sapiens
cccatttcctattac

SEQ ID NO: 324136 - DNA, 15 bp, Homo sapiens
gcccatttcctatta

SEQ ID NO: 324137 - DNA, 15 bp, Homo sapiens
ggcccatttcctatt

SEQ ID NO: 324138 - DNA, 15 bp, Homo sapiens
gggcccatttcctat

SEQ ID NO: 324139 - DNA, 15 bp, Homo sapiens
agggcccatttccta

SEQ ID NO: 324140 - DNA, 15 bp, Homo sapiens
gagggcccatttcct

SEQ ID NO: 324141 - DNA, 15 bp, Homo sapiens
tgagggcccatttcc

SEQ ID NO: 324142 - DNA, 15 bp, Homo sapiens
ctgagggcccatttc

SEQ ID NO: 324143 - DNA, 15 bp, Homo sapiens
tctgagggcccattt

SEQ ID NO: 324144 - DNA, 15 bp, Homo sapiens
gtctgagggcccatt

SEQ ID NO: 324145 - DNA, 15 bp, Homo sapiens
agtctgagggcccat

SEQ ID NO: 324146 - DNA, 15 bp, Homo sapiens
cagtctgagggccca

SEQ ID NO: 324147 - DNA, 15 bp, Homo sapiens
ccagtctgagggccc

SEQ ID NO: 324148 - DNA, 15 bp, Homo sapiens
cccagtctgagggcc

SEQ ID NO: 324149 - DNA, 15 bp, Homo sapiens
gcccagtctgagggc

SEQ ID NO: 324150 - DNA, 15 bp, Homo sapiens
tgcccagtctgaggg

SEQ ID NO: 324151 - DNA, 15 bp, Homo sapiens
gtgcccagtctgagg

SEQ ID NO: 324152 - DNA, 15 bp, Homo sapiens
ggtgcccagtctgag

SEQ ID NO: 324153 - DNA, 15 bp, Homo sapiens
gggtgcccagtctga

SEQ ID NO: 324154 - DNA, 15 bp, Homo sapiens
tgggtgcccagtctg

SEQ ID NO: 324155 - DNA, 15 bp, Homo sapiens
gtgggtgcccagtct

SEQ ID NO: 324156 - DNA, 15 bp, Homo sapiens
tgtgggtgcccagtc

SEQ ID NO: 324157 - DNA, 15 bp, Homo sapiens
atgtgggtgcccagt

SEQ ID NO: 324158 - DNA, 15 bp, Homo sapiens
catgtgggtgcccag

SEQ ID NO: 324159 - DNA, 15 bp, Homo sapiens
acatgtgggtgccca

SEQ ID NO: 324160 - DNA, 15 bp, Homo sapiens
aacatgtgggtgccc

SEQ ID NO: 324161 - DNA, 15 bp, Homo sapiens
aaacatgtgggtgcc

SEQ ID NO: 324162 - DNA, 15 bp, Homo sapiens
caaacatgtgggtgc

SEQ ID NO: 324163 - DNA, 15 bp, Homo sapiens
acaaacatgtgggtg

SEQ ID NO: 324164 - DNA, 15 bp, Homo sapiens
aacaaacatgtgggt

SEQ ID NO: 324165 - DNA, 15 bp, Homo sapiens
gaacaaacatgtggg

SEQ ID NO: 324166 - DNA, 15 bp, Homo sapiens
agaacaaacatgtgg

SEQ ID NO: 324167 - DNA, 15 bp, Homo sapiens
gagaacaaacatgtg

SEQ ID NO: 324168 - DNA, 15 bp, Homo sapiens
agagaacaaacatgt

SEQ ID NO: 324169 - DNA, 15 bp, Homo sapiens
aagagaacaaacatg

SEQ ID NO: 324170 - DNA, 15 bp, Homo sapiens
caagagaacaaacat

SEQ ID NO: 324171 - DNA, 15 bp, Homo sapiens
tcaagagaacaaaca

SEQ ID NO: 324172 - DNA, 15 bp, Homo sapiens
ctcaagagaacaaac

SEQ ID NO: 324173 - DNA, 15 bp, Homo sapiens
tctcaagagaacaaa

SEQ ID NO: 324174 - DNA, 15 bp, Homo sapiens
gtctcaagagaacaa

SEQ ID NO: 324175 - DNA, 15 bp, Homo sapiens
agtctcaagagaaca

SEQ ID NO: 324176 - DNA, 15 bp, Homo sapiens
gagtctcaagagaac

SEQ ID NO: 324177 - DNA, 15 bp, Homo sapiens
ggagtctcaagagaa

SEQ ID NO: 324178 - DNA, 15 bp, Homo sapiens
aggagtctcaagaga

SEQ ID NO: 324179 - DNA, 15 bp, Homo sapiens
taggagtctcaagag

SEQ ID NO: 324180 - DNA, 15 bp, Homo sapiens
ataggagtctcaaga

SEQ ID NO: 324181 - DNA, 15 bp, Homo sapiens
aataggagtctcaag

SEQ ID NO: 324182 - DNA, 15 bp, Homo sapiens
aaataggagtctcaa

SEQ ID NO: 324183 - DNA, 15 bp, Homo sapiens
gaaataggagtctca

SEQ ID NO: 324184 - DNA, 15 bp, Homo sapiens
agaaataggagtctc

SEQ ID NO: 324185 - DNA, 15 bp, Homo sapiens
tagaaataggagtct

SEQ ID NO: 324186 - DNA, 15 bp, Homo sapiens
ctagaaataggagtc

SEQ ID NO: 324187 - DNA, 15 bp, Homo sapiens
tctagaaataggagt

SEQ ID NO: 324188 - DNA, 15 bp, Homo sapiens
ttctagaaataggag

SEQ ID NO: 324189 - DNA, 15 bp, Homo sapiens
attctagaaatagga

SEQ ID NO: 324190 - DNA, 15 bp, Homo sapiens
aattctagaaatagg

SEQ ID NO: 324191 - DNA, 15 bp, Homo sapiens
aaattctagaaatag

SEQ ID NO: 324192 - DNA, 15 bp, Homo sapiens
taaattctagaaata

SEQ ID NO: 324193 - DNA, 15 bp, Homo sapiens
ttaaattctagaaat

SEQ ID NO: 324194 - DNA, 15 bp, Homo sapiens
tttaaattctagaaa

SEQ ID NO: 324195 - DNA, 15 bp, Homo sapiens
ctttaaattctagaa

SEQ ID NO: 324196 - DNA, 15 bp, Homo sapiens
gctttaaattctaga

SEQ ID NO: 324197 - DNA, 15 bp, Homo sapiens
ggctttaaattctag

SEQ ID NO: 324198 - DNA, 15 bp, Homo sapiens
tggctttaaattcta

SEQ ID NO: 324199 - DNA, 15 bp, Homo sapiens
ttggctttaaattct

SEQ ID NO: 324200 - DNA, 15 bp, Homo sapiens
tttggctttaaattc

SEQ ID NO: 324201 - DNA, 15 bp, Homo sapiens
gtttggctttaaatt

SEQ ID NO: 324202 - DNA, 15 bp, Homo sapiens
agtttggctttaaat

SEQ ID NO: 324203 - DNA, 15 bp, Homo sapiens
aagtttggctttaaa

SEQ ID NO: 324204 - DNA, 15 bp, Homo sapiens
aaagtttggctttaa

SEQ ID NO: 324205 - DNA, 15 bp, Homo sapiens
caaagtttggcttta

SEQ ID NO: 324206 - DNA, 15 bp, Homo sapiens
tcaaagtttggcttt

SEQ ID NO: 324207 - DNA, 15 bp, Homo sapiens
ttcaaagtttggctt

SEQ ID NO: 324208 - DNA, 15 bp, Homo sapiens
tttcaaagtttggct

SEQ ID NO: 324209 - DNA, 15 bp, Homo sapiens
ttttcaaagtttggc

SEQ ID NO: 324210 - DNA, 15 bp, Homo sapiens
tttttcaaagtttgg

SEQ ID NO: 324211 - DNA, 15 bp, Homo sapiens
atttttcaaagtttg

SEQ ID NO: 324212 - DNA, 15 bp, Homo sapiens
tatttttcaaagttt

SEQ ID NO: 324213 - DNA, 15 bp, Homo sapiens
ttatttttcaaagtt

SEQ ID NO: 324214 - DNA, 15 bp, Homo sapiens
attatttttcaaagt

SEQ ID NO: 324215 - DNA, 15 bp, Homo sapiens
cattatttttcaaag

SEQ ID NO: 324216 - DNA, 15 bp, Homo sapiens
tcattatttttcaaa

SEQ ID NO: 324217 - DNA, 15 bp, Homo sapiens
gtcattatttttcaa

SEQ ID NO: 324218 - DNA, 15 bp, Homo sapiens
tgtcattatttttca

SEQ ID NO: 324219 - DNA, 15 bp, Homo sapiens
ttgtcattatttttc

SEQ ID NO: 324220 - DNA, 15 bp, Homo sapiens
tttgtcattattttt

SEQ ID NO: 324221 - DNA, 15 bp, Homo sapiens
gtttgtcattatttt

SEQ ID NO: 324222 - DNA, 15 bp, Homo sapiens
agtttgtcattattt

SEQ ID NO: 324223 - DNA, 15 bp, Homo sapiens
gagtttgtcattatt

SEQ ID NO: 324224 - DNA, 15 bp, Homo sapiens
ggagtttgtcattat

SEQ ID NO: 324225 - DNA, 15 bp, Homo sapiens
tggagtttgtcatta

SEQ ID NO: 324226 - DNA, 15 bp, Homo sapiens
ttggagtttgtcatt

SEQ ID NO: 324227 - DNA, 15 bp, Homo sapiens
tttggagtttgtcat

SEQ ID NO: 324228 - DNA, 15 bp, Homo sapiens
atttggagtttgtca

SEQ ID NO: 324229 - DNA, 15 bp, Homo sapiens
gatttggagtttgtc

SEQ ID NO: 324230 - DNA, 15 bp, Homo sapiens
cgatttggagtttgt

SEQ ID NO: 324231 - DNA, 15 bp, Homo sapiens
acgatttggagtttg

SEQ ID NO: 324232 - DNA, 15 bp, Homo sapiens
aacgatttggagttt

SEQ ID NO: 324233 - DNA, 15 bp, Homo sapiens
caacgatttggagtt

SEQ ID NO: 324234 - DNA, 15 bp, Homo sapiens
ccaacgatttggagt

SEQ ID NO: 324235 - DNA, 15 bp, Homo sapiens
gccaacgatttggag

SEQ ID NO: 324236 - DNA, 15 bp, Homo sapiens
tgccaacgatttgga

SEQ ID NO: 324237 - DNA, 15 bp, Homo sapiens
atgccaacgatttgg

SEQ ID NO: 324238 - DNA, 15 bp, Homo sapiens
gatgccaacgatttg

SEQ ID NO: 324239 - DNA, 15 bp, Homo sapiens
agatgccaacgattt

SEQ ID NO: 324240 - DNA, 15 bp, Homo sapiens
aagatgccaacgatt

SEQ ID NO: 324241 - DNA, 15 bp, Homo sapiens
aaagatgccaacgat

SEQ ID NO: 324242 - DNA, 15 bp, Homo sapiens
aaaagatgccaacga

SEQ ID NO: 324243 - DNA, 15 bp, Homo sapiens
aaaaagatgccaacg

SEQ ID NO: 324244 - DNA, 15 bp, Homo sapiens
aaaaaagatgccaac

SEQ ID NO: 324245 - DNA, 15 bp, Homo sapiens
aaaaaaagatgccaa

SEQ ID NO: 324246 - DNA, 15 bp, Homo sapiens
aaaaaaaagatgcca

SEQ ID NO: 324247 - DNA, 15 bp, Homo sapiens
aaaaaaaaagatgcc

SEQ ID NO: 324248 - DNA, 15 bp, Homo sapiens
aaaaaaaaaagatgc

SEQ ID NO: 324249 - DNA, 15 bp, Homo sapiens
aaaaaaaaaaagatg

SEQ ID NO: 324250 - DNA, 15 bp, Homo sapiens
aaaaaaaaaaaagat

SEQ ID NO: 324251 - DNA, 15 bp, Homo sapiens
actgtctcaaaaaaa

SEQ ID NO: 324252 - DNA, 15 bp, Homo sapiens
gactgtctcaaaaaa

SEQ ID NO: 324253 - DNA, 15 bp, Homo sapiens
agactgtctcaaaaa

SEQ ID NO: 324254 - DNA, 15 bp, Homo sapiens
gagactgtctcaaaa

SEQ ID NO: 324255 - DNA, 15 bp, Homo sapiens
cgagactgtctcaaa

SEQ ID NO: 324256 - DNA, 15 bp, Homo sapiens
gcgagactgtctcaa

SEQ ID NO: 324257 - DNA, 15 bp, Homo sapiens
agcgagactgtctca

SEQ ID NO: 324258 - DNA, 15 bp, Homo sapiens
gagcgagactgtctc

SEQ ID NO: 324259 - DNA, 15 bp, Homo sapiens
agagcgagactgtct

SEQ ID NO: 324260 - DNA, 15 bp, Homo sapiens
cagagcgagactgtc

SEQ ID NO: 324261 - DNA, 15 bp, Homo sapiens
acagagcgagactgt

SEQ ID NO: 324262 - DNA, 15 bp, Homo sapiens
gacagagcgagactg

SEQ ID NO: 324263 - DNA, 15 bp, Homo sapiens
cgacagagcgagact

SEQ ID NO: 324264 - DNA, 15 bp, Homo sapiens
ccgacagagcgagac

SEQ ID NO: 324265 - DNA, 15 bp, Homo sapiens
gccgacagagcgaga

SEQ ID NO: 324266 - DNA, 15 bp, Homo sapiens
ggccgacagagcgag

SEQ ID NO: 324267 - DNA, 15 bp, Homo sapiens
tggccgacagagcga

SEQ ID NO: 324268 - DNA, 15 bp, Homo sapiens
ctggccgacagagcg

SEQ ID NO: 324269 - DNA, 15 bp, Homo sapiens
cctggccgacagagc

SEQ ID NO: 324270 - DNA, 15 bp, Homo sapiens
gcctggccgacagag

SEQ ID NO: 324271 - DNA, 15 bp, Homo sapiens
agcctggccgacaga

SEQ ID NO: 324272 - DNA, 15 bp, Homo sapiens
cagcctggccgacag

SEQ ID NO: 324273 - DNA, 15 bp, Homo sapiens
ccagcctggccgaca

SEQ ID NO: 324274 - DNA, 15 bp, Homo sapiens
tccagcctggccgac

SEQ ID NO: 324275 - DNA, 15 bp, Homo sapiens
ctccagcctggccga

SEQ ID NO: 324276 - DNA, 15 bp, Homo sapiens
actccagcctggccg

SEQ ID NO: 324277 - DNA, 15 bp, Homo sapiens
cactccagcctggcc

SEQ ID NO: 324278 - DNA, 15 bp, Homo sapiens
gcactccagcctggc

SEQ ID NO: 324279 - DNA, 15 bp, Homo sapiens
ggtgagccgagatcg

SEQ ID NO: 324280 - DNA, 15 bp, Homo sapiens
tggtgagccgagatc

SEQ ID NO: 324281 - DNA, 15 bp, Homo sapiens
gtggtgagccgagat

SEQ ID NO: 324282 - DNA, 15 bp, Homo sapiens
tgtggtgagccgaga

SEQ ID NO: 324283 - DNA, 15 bp, Homo sapiens
ttgtggtgagccgag

SEQ ID NO: 324284 - DNA, 15 bp, Homo sapiens
gttgtggtgagccga

SEQ ID NO: 324285 - DNA, 15 bp, Homo sapiens
ggttgtggtgagccg

SEQ ID NO: 324286 - DNA, 15 bp, Homo sapiens
aggttgtggtgagcc

SEQ ID NO: 324287 - DNA, 15 bp, Homo sapiens
gaggttgtggtgagc

SEQ ID NO: 324288 - DNA, 15 bp, Homo sapiens
ggaggttgtggtgag

SEQ ID NO: 324289 - DNA, 15 bp, Homo sapiens
cggaggttgtggtga

SEQ ID NO: 324290 - DNA, 15 bp, Homo sapiens
gcggaggttgtggtg

SEQ ID NO: 324291 - DNA, 15 bp, Homo sapiens
ggcggaggttgtggt

SEQ ID NO: 324292 - DNA, 15 bp, Homo sapiens
gggcggaggttgtgg

SEQ ID NO: 324293 - DNA, 15 bp, Homo sapiens
ggggcggaggttgtg

SEQ ID NO: 324294 - DNA, 15 bp, Homo sapiens
cggggcggaggttgt

SEQ ID NO: 324295 - DNA, 15 bp, Homo sapiens
gcggggcggaggttg

SEQ ID NO: 324296 - DNA, 15 bp, Homo sapiens
agcggggcggaggtt

SEQ ID NO: 324297 - DNA, 15 bp, Homo sapiens
cagcggggcggaggt

SEQ ID NO: 324298 - DNA, 15 bp, Homo sapiens
ccagcggggcggagg

SEQ ID NO: 324299 - DNA, 15 bp, Homo sapiens
cccagcggggcggag

SEQ ID NO: 324300 - DNA, 15 bp, Homo sapiens
acccagcggggcgga

SEQ ID NO: 324301 - DNA, 15 bp, Homo sapiens
aacccagcggggcgg

SEQ ID NO: 324302 - DNA, 15 bp, Homo sapiens
taacccagcggggcg

SEQ ID NO: 324303 - DNA, 15 bp, Homo sapiens
ttaacccagcggggc

SEQ ID NO: 324304 - DNA, 15 bp, Homo sapiens
tttaacccagcgggg

SEQ ID NO: 324305 - DNA, 15 bp, Homo sapiens
ctttaacccagcggg

SEQ ID NO: 324306 - DNA, 15 bp, Homo sapiens
gctttaacccagcgg

SEQ ID NO: 324307 - DNA, 15 bp, Homo sapiens
cgctttaacccagcg

SEQ ID NO: 324308 - DNA, 15 bp, Homo sapiens
tcgctttaacccagc

SEQ ID NO: 324309 - DNA, 15 bp, Homo sapiens
atcgctttaacccag

SEQ ID NO: 324310 - DNA, 15 bp, Homo sapiens
aatcgctttaaccca

SEQ ID NO: 324311 - DNA, 15 bp, Homo sapiens
gaatcgctttaaccc

SEQ ID NO: 324312 - DNA, 15 bp, Homo sapiens
agaatcgctttaacc

SEQ ID NO: 324313 - DNA, 15 bp, Homo sapiens
gagaatcgctttaac

SEQ ID NO: 324314 - DNA, 15 bp, Homo sapiens
agagaatcgctttaa

SEQ ID NO: 324315 - DNA, 15 bp, Homo sapiens
aagagaatcgcttta

SEQ ID NO: 324316 - DNA, 15 bp, Homo sapiens
caagagaatcgcttt

SEQ ID NO: 324317 - DNA, 15 bp, Homo sapiens
gcaagagaatcgctt

SEQ ID NO: 324318 - DNA, 15 bp, Homo sapiens
ggcaagagaatcgct

SEQ ID NO: 324319 - DNA, 15 bp, Homo sapiens
aggcaagagaatcgc

SEQ ID NO: 324320 - DNA, 15 bp, Homo sapiens
gaggcaagagaatcg

SEQ ID NO: 324321 - DNA, 15 bp, Homo sapiens
tgaggcaagagaatc

SEQ ID NO: 324322 - DNA, 15 bp, Homo sapiens
ctgaggcaagagaat

SEQ ID NO: 324323 - DNA, 15 bp, Homo sapiens
gctgaggcaagagaa

SEQ ID NO: 324324 - DNA, 15 bp, Homo sapiens
ggctgaggcaagaga

SEQ ID NO: 324325 - DNA, 15 bp, Homo sapiens
aggctgaggcaagag

SEQ ID NO: 324326 - DNA, 15 bp, Homo sapiens
gaggctgaggcaaga

SEQ ID NO: 324327 - DNA, 15 bp, Homo sapiens
ggaggctgaggcaag

SEQ ID NO: 324328 - DNA, 15 bp, Homo sapiens
aggaggctgaggcaa

SEQ ID NO: 324329 - DNA, 15 bp, Homo sapiens
acacgcctgtaatcc

SEQ ID NO: 324330 - DNA, 15 bp, Homo sapiens
cacacgcctgtaatc

SEQ ID NO: 324331 - DNA, 15 bp, Homo sapiens
gcacacgcctgtaat

SEQ ID NO: 324332 - DNA, 15 bp, Homo sapiens
ggcacacgcctgtaa

SEQ ID NO: 324333 - DNA, 15 bp, Homo sapiens
tggcacacgcctgta

SEQ ID NO: 324334 - DNA, 15 bp, Homo sapiens
gtggcacacgcctgt

SEQ ID NO: 324335 - DNA, 15 bp, Homo sapiens
ggtggcacacgcctg

SEQ ID NO: 324336 - DNA, 15 bp, Homo sapiens
tggtggcacacgcct

SEQ ID NO: 324337 - DNA, 15 bp, Homo sapiens
atggtggcacacgcc

SEQ ID NO: 324338 - DNA, 15 bp, Homo sapiens
catggtggcacacgc

SEQ ID NO: 324339 - DNA, 15 bp, Homo sapiens
gcatggtggcacacg

SEQ ID NO: 324340 - DNA, 15 bp, Homo sapiens
ttagccaggcatggt

SEQ ID NO: 324341 - DNA, 15 bp, Homo sapiens
attagccaggcatgg

SEQ ID NO: 324342 - DNA, 15 bp, Homo sapiens
aattagccaggcatg

SEQ ID NO: 324343 - DNA, 15 bp, Homo sapiens
aaattagccaggcat

SEQ ID NO: 324344 - DNA, 15 bp, Homo sapiens
aaaattagccaggca

SEQ ID NO: 324345 - DNA, 15 bp, Homo sapiens
taaaattagccaggc

SEQ ID NO: 324346 - DNA, 15 bp, Homo sapiens
ataaaattagccagg

SEQ ID NO: 324347 - DNA, 15 bp, Homo sapiens
tataaaattagccag

SEQ ID NO: 324348 - DNA, 15 bp, Homo sapiens
gtataaaattagcca

SEQ ID NO: 324349 - DNA, 15 bp, Homo sapiens
tgtataaaattagcc

SEQ ID NO: 324350 - DNA, 15 bp, Homo sapiens
ctgtataaaattagc

SEQ ID NO: 324351 - DNA, 15 bp, Homo sapiens
tctgtataaaattag

SEQ ID NO: 324352 - DNA, 15 bp, Homo sapiens
gtctgtataaaatta

SEQ ID NO: 324353 - DNA, 15 bp, Homo sapiens
cgtctgtataaaatt

SEQ ID NO: 324354 - DNA, 15 bp, Homo sapiens
ccgtctgtataaaat

SEQ ID NO: 324355 - DNA, 15 bp, Homo sapiens
cccgtctgtataaaa

SEQ ID NO: 324356 - DNA, 15 bp, Homo sapiens
ccccgtctgtataaa

SEQ ID NO: 324357 - DNA, 15 bp, Homo sapiens
accccgtctgtataa

SEQ ID NO: 324358 - DNA, 15 bp, Homo sapiens
aaccccgtctgtata

SEQ ID NO: 324359 - DNA, 15 bp, Homo sapiens
aaaccccgtctgtat

SEQ ID NO: 324360 - DNA, 15 bp, Homo sapiens
gaaaccccgtctgta

SEQ ID NO: 324361 - DNA, 15 bp, Homo sapiens
agaaaccccgtctgt

SEQ ID NO: 324362 - DNA, 15 bp, Homo sapiens
gagaaaccccgtctg

SEQ ID NO: 324363 - DNA, 15 bp, Homo sapiens
tgagaccagcctgac

SEQ ID NO: 324364 - DNA, 15 bp, Homo sapiens
ttgagaccagcctga

SEQ ID NO: 324365 - DNA, 15 bp, Homo sapiens
tgggagtttgagacc

SEQ ID NO: 324366 - DNA, 15 bp, Homo sapiens
ttgggagtttgagac

SEQ ID NO: 324367 - DNA, 15 bp, Homo sapiens
tttgggagtttgaga

SEQ ID NO: 324368 - DNA, 15 bp, Homo sapiens
gtttgggagtttgag

SEQ ID NO: 324369 - DNA, 15 bp, Homo sapiens
agtttgggagtttga

SEQ ID NO: 324370 - DNA, 15 bp, Homo sapiens
gagtttgggagtttg

SEQ ID NO: 324371 - DNA, 15 bp, Homo sapiens
tgagtttgggagttt

SEQ ID NO: 324372 - DNA, 15 bp, Homo sapiens
ctgagtttgggagtt

SEQ ID NO: 324373 - DNA, 15 bp, Homo sapiens
cctgagtttgggagt

SEQ ID NO: 324374 - DNA, 15 bp, Homo sapiens
acctgagtttgggag

SEQ ID NO: 324375 - DNA, 15 bp, Homo sapiens
cacctgagtttggga

SEQ ID NO: 324376 - DNA, 15 bp, Homo sapiens
tcacctgagtttggg

SEQ ID NO: 324377 - DNA, 15 bp, Homo sapiens
atcacctgagtttgg

SEQ ID NO: 324378 - DNA, 15 bp, Homo sapiens
gatcacctgagtttg

SEQ ID NO: 324379 - DNA, 15 bp, Homo sapiens
ggatcacctgagttt

SEQ ID NO: 324380 - DNA, 15 bp, Homo sapiens
cggatcacctgagtt

SEQ ID NO: 324381 - DNA, 15 bp, Homo sapiens
gcggatcacctgagt

SEQ ID NO: 324382 - DNA, 15 bp, Homo sapiens
aggcggatcacctga

SEQ ID NO: 324383 - DNA, 15 bp, Homo sapiens
caggcggatcacctg

SEQ ID NO: 324384 - DNA, 15 bp, Homo sapiens
gcaggcggatcacct

SEQ ID NO: 324385 - DNA, 15 bp, Homo sapiens
ggcaggcggatcacc

SEQ ID NO: 324386 - DNA, 15 bp, Homo sapiens
cgaggcaggcggatc

SEQ ID NO: 324387 - DNA, 15 bp, Homo sapiens
ccgaggcaggcggat

SEQ ID NO: 324388 - DNA, 15 bp, Homo sapiens
accgaggcaggcgga

SEQ ID NO: 324389 - DNA, 15 bp, Homo sapiens
gaccgaggcaggcgg

SEQ ID NO: 324390 - DNA, 15 bp, Homo sapiens
agaccgaggcaggcg

SEQ ID NO: 324391 - DNA, 15 bp, Homo sapiens
gagaccgaggcaggc

SEQ ID NO: 324392 - DNA, 15 bp, Homo sapiens
ggagaccgaggcagg

SEQ ID NO: 324393 - DNA, 15 bp, Homo sapiens
gggagaccgaggcag

SEQ ID NO: 324394 - DNA, 15 bp, Homo sapiens
tgggagaccgaggca

SEQ ID NO: 324395 - DNA, 15 bp, Homo sapiens
ttttgggagaccgag

SEQ ID NO: 324396 - DNA, 15 bp, Homo sapiens
gttttgggagaccga

SEQ ID NO: 324397 - DNA, 15 bp, Homo sapiens
tgttttgggagaccg

SEQ ID NO: 324398 - DNA, 15 bp, Homo sapiens
gtgttttgggagacc

SEQ ID NO: 324399 - DNA, 15 bp, Homo sapiens
tgtgttttgggagac

SEQ ID NO: 324400 - DNA, 15 bp, Homo sapiens
ctgtgttttgggaga

SEQ ID NO: 324401 - DNA, 15 bp, Homo sapiens
cctgtgttttgggag

SEQ ID NO: 324402 - DNA, 15 bp, Homo sapiens
ccctgtgttttggga

SEQ ID NO: 324403 - DNA, 15 bp, Homo sapiens
tccctgtgttttggg

SEQ ID NO: 324404 - DNA, 15 bp, Homo sapiens
atccctgtgttttgg

SEQ ID NO: 324405 - DNA, 15 bp, Homo sapiens
aatccctgtgttttg

SEQ ID NO: 324406 - DNA, 15 bp, Homo sapiens
gaatccctgtgtttt

SEQ ID NO: 324407 - DNA, 15 bp, Homo sapiens
ggaatccctgtgttt

SEQ ID NO: 324408 - DNA, 15 bp, Homo sapiens
tggaatccctgtgtt

SEQ ID NO: 324409 - DNA, 15 bp, Homo sapiens
ctggaatccctgtgt

SEQ ID NO: 324410 - DNA, 15 bp, Homo sapiens
cctggaatccctgtg

SEQ ID NO: 324411 - DNA, 15 bp, Homo sapiens
gcctggaatccctgt

SEQ ID NO: 324412 - DNA, 15 bp, Homo sapiens
tgcctggaatccctg

SEQ ID NO: 324413 - DNA, 15 bp, Homo sapiens
atgcctggaatccct

SEQ ID NO: 324414 - DNA, 15 bp, Homo sapiens
catgcctggaatccc

SEQ ID NO: 324415 - DNA, 15 bp, Homo sapiens
tcatgcctggaatcc

SEQ ID NO: 324416 - DNA, 15 bp, Homo sapiens
ctcatgcctggaatc

SEQ ID NO: 324417 - DNA, 15 bp, Homo sapiens
gctcatgcctggaat

SEQ ID NO: 324418 - DNA, 15 bp, Homo sapiens
ggctcatgcctggaa

SEQ ID NO: 324419 - DNA, 15 bp, Homo sapiens
tggctcatgcctgga

SEQ ID NO: 324420 - DNA, 15 bp, Homo sapiens
gtggctcatgcctgg

SEQ ID NO: 324421 - DNA, 15 bp, Homo sapiens
cgtggtggctcatgc

SEQ ID NO: 324422 - DNA, 15 bp, Homo sapiens
gcgtggtggctcatg

SEQ ID NO: 324423 - DNA, 15 bp, Homo sapiens
agcgtggtggctcat

SEQ ID NO: 324424 - DNA, 15 bp, Homo sapiens
aagcgtggtggctca

SEQ ID NO: 324425 - DNA, 15 bp, Homo sapiens
caagcgtggtggctc

SEQ ID NO: 324426 - DNA, 15 bp, Homo sapiens
ccaagcgtggtggct

SEQ ID NO: 324427 - DNA, 15 bp, Homo sapiens
gccaagcgtggtggc

SEQ ID NO: 324428 - DNA, 15 bp, Homo sapiens
ggccaagcgtggtgg

SEQ ID NO: 324429 - DNA, 15 bp, Homo sapiens
tggccaagcgtggtg

SEQ ID NO: 324430 - DNA, 15 bp, Homo sapiens
ttggccaagcgtggt

SEQ ID NO: 324431 - DNA, 15 bp, Homo sapiens
attggccaagcgtgg

SEQ ID NO: 324432 - DNA, 15 bp, Homo sapiens
gattggccaagcgtg

SEQ ID NO: 324433 - DNA, 15 bp, Homo sapiens
cgattggccaagcgt

SEQ ID NO: 324434 - DNA, 15 bp, Homo sapiens
acgattggccaagcg

SEQ ID NO: 324435 - DNA, 15 bp, Homo sapiens
aacgattggccaagc

SEQ ID NO: 324436 - DNA, 15 bp, Homo sapiens
caacgattggccaag

SEQ ID NO: 324437 - DNA, 15 bp, Homo sapiens
ccaacgattggccaa

SEQ ID NO: 324438 - DNA, 15 bp, Homo sapiens
gccaacgattggcca

SEQ ID NO: 324439 - DNA, 15 bp, Homo sapiens
tgccaacgattggcc

SEQ ID NO: 324440 - DNA, 15 bp, Homo sapiens
atgccaacgattggc

SEQ ID NO: 324441 - DNA, 15 bp, Homo sapiens
aatgccaacgattgg

SEQ ID NO: 324442 - DNA, 15 bp, Homo sapiens
gaatgccaacgattg

SEQ ID NO: 324443 - DNA, 15 bp, Homo sapiens
agaatgccaacgatt

SEQ ID NO: 324444 - DNA, 15 bp, Homo sapiens
tagaatgccaacgat

SEQ ID NO: 324445 - DNA, 15 bp, Homo sapiens
ttagaatgccaacga

SEQ ID NO: 324446 - DNA, 15 bp, Homo sapiens
cttagaatgccaacg

SEQ ID NO: 324447 - DNA, 15 bp, Homo sapiens
ccttagaatgccaac

SEQ ID NO: 324448 - DNA, 15 bp, Homo sapiens
gccttagaatgccaa

SEQ ID NO: 324449 - DNA, 15 bp, Homo sapiens
agccttagaatgcca

SEQ ID NO: 324450 - DNA, 15 bp, Homo sapiens
aagccttagaatgcc

SEQ ID NO: 324451 - DNA, 15 bp, Homo sapiens
aaagccttagaatgc

SEQ ID NO: 324452 - DNA, 15 bp, Homo sapiens
gaaagccttagaatg

SEQ ID NO: 324453 - DNA, 15 bp, Homo sapiens
tgaaagccttagaat

SEQ ID NO: 324454 - DNA, 15 bp, Homo sapiens
ctgaaagccttagaa

SEQ ID NO: 324455 - DNA, 15 bp, Homo sapiens
actgaaagccttaga

SEQ ID NO: 324456 - DNA, 15 bp, Homo sapiens
cactgaaagccttag

SEQ ID NO: 324457 - DNA, 15 bp, Homo sapiens
acactgaaagcctta

SEQ ID NO: 324458 - DNA, 15 bp, Homo sapiens
tacactgaaagcctt

SEQ ID NO: 324459 - DNA, 15 bp, Homo sapiens
gtacactgaaagcct

SEQ ID NO: 324460 - DNA, 15 bp, Homo sapiens
ggtacactgaaagcc

SEQ ID NO: 324461 - DNA, 15 bp, Homo sapiens
aggtacactgaaagc

SEQ ID NO: 324462 - DNA, 15 bp, Homo sapiens
caggtacactgaaag

SEQ ID NO: 324463 - DNA, 15 bp, Homo sapiens
tcaggtacactgaaa

SEQ ID NO: 324464 - DNA, 15 bp, Homo sapiens
gtcaggtacactgaa

SEQ ID NO: 324465 - DNA, 15 bp, Homo sapiens
agtcaggtacactga

SEQ ID NO: 324466 - DNA, 15 bp, Homo sapiens
aagtcaggtacactg

SEQ ID NO: 324467 - DNA, 15 bp, Homo sapiens
gaagtcaggtacact

SEQ ID NO: 324468 - DNA, 15 bp, Homo sapiens
agaagtcaggtacac

SEQ ID NO: 324469 - DNA, 15 bp, Homo sapiens
aagaagtcaggtaca

SEQ ID NO: 324470 - DNA, 15 bp, Homo sapiens
aaagaagtcaggtac

SEQ ID NO: 324471 - DNA, 15 bp, Homo sapiens
aaaagaagtcaggta

SEQ ID NO: 324472 - DNA, 15 bp, Homo sapiens
taaaagaagtcaggt

SEQ ID NO: 324473 - DNA, 15 bp, Homo sapiens
ctaaaagaagtcagg

SEQ ID NO: 324474 - DNA, 15 bp, Homo sapiens
actaaaagaagtcag

SEQ ID NO: 324475 - DNA, 15 bp, Homo sapiens
aactaaaagaagtca

SEQ ID NO: 324476 - DNA, 15 bp, Homo sapiens
gaactaaaagaagtc

SEQ ID NO: 324477 - DNA, 15 bp, Homo sapiens
agaactaaaagaagt

SEQ ID NO: 324478 - DNA, 15 bp, Homo sapiens
tagaactaaaagaag

SEQ ID NO: 324479 - DNA, 15 bp, Homo sapiens
ttagaactaaaagaa

SEQ ID NO: 324480 - DNA, 15 bp, Homo sapiens
cttagaactaaaaga

SEQ ID NO: 324481 - DNA, 15 bp, Homo sapiens
acttagaactaaaag

SEQ ID NO: 324482 - DNA, 15 bp, Homo sapiens
gacttagaactaaaa

SEQ ID NO: 324483 - DNA, 15 bp, Homo sapiens
agacttagaactaaa

SEQ ID NO: 324484 - DNA, 15 bp, Homo sapiens
cagacttagaactaa

SEQ ID NO: 324485 - DNA, 15 bp, Homo sapiens
acagacttagaacta

SEQ ID NO: 324486 - DNA, 15 bp, Homo sapiens
tacagacttagaact

SEQ ID NO: 324487 - DNA, 15 bp, Homo sapiens
ttacagacttagaac

SEQ ID NO: 324488 - DNA, 15 bp, Homo sapiens
gttacagacttagaa

SEQ ID NO: 324489 - DNA, 15 bp, Homo sapiens
agttacagacttaga

SEQ ID NO: 324490 - DNA, 15 bp, Homo sapiens
cagttacagacttag

SEQ ID NO: 324491 - DNA, 15 bp, Homo sapiens
acagttacagactta

SEQ ID NO: 324492 - DNA, 15 bp, Homo sapiens
aacagttacagactt

SEQ ID NO: 324493 - DNA, 15 bp, Homo sapiens
taacagttacagact

SEQ ID NO: 324494 - DNA, 15 bp, Homo sapiens
ttaacagttacagac

SEQ ID NO: 324495 - DNA, 15 bp, Homo sapiens
gttaacagttacaga

SEQ ID NO: 324496 - DNA, 15 bp, Homo sapiens
ggttaacagttacag

SEQ ID NO: 324497 - DNA, 15 bp, Homo sapiens
aggttaacagttaca

SEQ ID NO: 324498 - DNA, 15 bp, Homo sapiens
aaggttaacagttac

SEQ ID NO: 324499 - DNA, 15 bp, Homo sapiens
aaaggttaacagtta

SEQ ID NO: 324500 - DNA, 15 bp, Homo sapiens
gaaaggttaacagtt

SEQ ID NO: 324501 - DNA, 15 bp, Homo sapiens
agaaaggttaacagt

SEQ ID NO: 324502 - DNA, 15 bp, Homo sapiens
aagaaaggttaacag

SEQ ID NO: 324503 - DNA, 15 bp, Homo sapiens
caagaaaggttaaca

SEQ ID NO: 324504 - DNA, 15 bp, Homo sapiens
ccaagaaaggttaac

SEQ ID NO: 324505 - DNA, 15 bp, Homo sapiens
cccaagaaaggttaa

SEQ ID NO: 324506 - DNA, 15 bp, Homo sapiens
gcccaagaaaggtta

SEQ ID NO: 324507 - DNA, 15 bp, Homo sapiens
ggcccaagaaaggtt

SEQ ID NO: 324508 - DNA, 15 bp, Homo sapiens
tggcccaagaaaggt

SEQ ID NO: 324509 - DNA, 15 bp, Homo sapiens
gtggcccaagaaagg

SEQ ID NO: 324510 - DNA, 15 bp, Homo sapiens
cgtggcccaagaaag

SEQ ID NO: 324511 - DNA, 15 bp, Homo sapiens
ccgtggcccaagaaa

SEQ ID NO: 324512 - DNA, 15 bp, Homo sapiens
gccgtggcccaagaa

SEQ ID NO: 324513 - DNA, 15 bp, Homo sapiens
agccgtggcccaaga

SEQ ID NO: 324514 - DNA, 15 bp, Homo sapiens
tagccgtggcccaag

SEQ ID NO: 324515 - DNA, 15 bp, Homo sapiens
atagccgtggcccaa

SEQ ID NO: 324516 - DNA, 15 bp, Homo sapiens
gatagccgtggccca

SEQ ID NO: 324517 - DNA, 15 bp, Homo sapiens
tgatagccgtggccc

SEQ ID NO: 324518 - DNA, 15 bp, Homo sapiens
gtgatagccgtggcc

SEQ ID NO: 324519 - DNA, 15 bp, Homo sapiens
tgtgatagccgtggc

SEQ ID NO: 324520 - DNA, 15 bp, Homo sapiens
gtgtgatagccgtgg

SEQ ID NO: 324521 - DNA, 15 bp, Homo sapiens
cgtgtgatagccgtg

SEQ ID NO: 324522 - DNA, 15 bp, Homo sapiens
ccgtgtgatagccgt

SEQ ID NO: 324523 - DNA, 15 bp, Homo sapiens
tccgtgtgatagccg

SEQ ID NO: 324524 - DNA, 15 bp, Homo sapiens
atccgtgtgatagcc

SEQ ID NO: 324525 - DNA, 15 bp, Homo sapiens
gatccgtgtgatagc

SEQ ID NO: 324526 - DNA, 15 bp, Homo sapiens
agatccgtgtgatag

SEQ ID NO: 324527 - DNA, 15 bp, Homo sapiens
gagatccgtgtgata

SEQ ID NO: 324528 - DNA, 15 bp, Homo sapiens
agagatccgtgtgat

SEQ ID NO: 324529 - DNA, 15 bp, Homo sapiens
gagagatccgtgtga

SEQ ID NO: 324530 - DNA, 15 bp, Homo sapiens
agagagatccgtgtg

SEQ ID NO: 324531 - DNA, 15 bp, Homo sapiens
cagagagatccgtgt

SEQ ID NO: 324532 - DNA, 15 bp, Homo sapiens
ccagagagatccgtg

SEQ ID NO: 324533 - DNA, 15 bp, Homo sapiens
cccagagagatccgt

SEQ ID NO: 324534 - DNA, 15 bp, Homo sapiens
tcccagagagatccg

SEQ ID NO: 324535 - DNA, 15 bp, Homo sapiens
ttcccagagagatcc

SEQ ID NO: 324536 - DNA, 15 bp, Homo sapiens
attcccagagagatc

SEQ ID NO: 324537 - DNA, 15 bp, Homo sapiens
gattcccagagagat

SEQ ID NO: 324538 - DNA, 15 bp, Homo sapiens
agattcccagagaga

SEQ ID NO: 324539 - DNA, 15 bp, Homo sapiens
cagattcccagagag

SEQ ID NO: 324540 - DNA, 15 bp, Homo sapiens
tcagattcccagaga

SEQ ID NO: 324541 - DNA, 15 bp, Homo sapiens
gtcagattcccagag

SEQ ID NO: 324542 - DNA, 15 bp, Homo sapiens
cgtcagattcccaga

SEQ ID NO: 324543 - DNA, 15 bp, Homo sapiens
tcgtcagattcccag

SEQ ID NO: 324544 - DNA, 15 bp, Homo sapiens
gtcgtcagattccca

SEQ ID NO: 324545 - DNA, 15 bp, Homo sapiens
tgtcgtcagattccc

SEQ ID NO: 324546 - DNA, 15 bp, Homo sapiens
ctgtcgtcagattcc

SEQ ID NO: 324547 - DNA, 15 bp, Homo sapiens
actgtcgtcagattc

SEQ ID NO: 324548 - DNA, 15 bp, Homo sapiens
cactgtcgtcagatt

SEQ ID NO: 324549 - DNA, 15 bp, Homo sapiens
gcactgtcgtcagat

SEQ ID NO: 324550 - DNA, 15 bp, Homo sapiens
ggcactgtcgtcaga

SEQ ID NO: 324551 - DNA, 15 bp, Homo sapiens
aggcactgtcgtcag

SEQ ID NO: 324552 - DNA, 15 bp, Homo sapiens
gaggcactgtcgtca

SEQ ID NO: 324553 - DNA, 15 bp, Homo sapiens
tgaggcactgtcgtc

SEQ ID NO: 324554 - DNA, 15 bp, Homo sapiens
ttgaggcactgtcgt

SEQ ID NO: 324555 - DNA, 15 bp, Homo sapiens
tttgaggcactgtcg

SEQ ID NO: 324556 - DNA, 15 bp, Homo sapiens
gtttgaggcactgtc

SEQ ID NO: 324557 - DNA, 15 bp, Homo sapiens
ggtttgaggcactgt

SEQ ID NO: 324558 - DNA, 15 bp, Homo sapiens
gggtttgaggcactg

SEQ ID NO: 324559 - DNA, 15 bp, Homo sapiens
cgggtttgaggcact

SEQ ID NO: 324560 - DNA, 15 bp, Homo sapiens
tcgggtttgaggcac

SEQ ID NO: 324561 - DNA, 15 bp, Homo sapiens
ctcgggtttgaggca

SEQ ID NO: 324562 - DNA, 15 bp, Homo sapiens
cctcgggtttgaggc

SEQ ID NO: 324563 - DNA, 15 bp, Homo sapiens
ccctcgggtttgagg

SEQ ID NO: 324564 - DNA, 15 bp, Homo sapiens
tccctcgggtttgag

SEQ ID NO: 324565 - DNA, 15 bp, Homo sapiens
ctccctcgggtttga

SEQ ID NO: 324566 - DNA, 15 bp, Homo sapiens
gctccctcgggtttg

SEQ ID NO: 324567 - DNA, 15 bp, Homo sapiens
tgctccctcgggttt

SEQ ID NO: 324568 - DNA, 15 bp, Homo sapiens
gtgctccctcgggtt

SEQ ID NO: 324569 - DNA, 15 bp, Homo sapiens
ggtgctccctcgggt

SEQ ID NO: 324570 - DNA, 15 bp, Homo sapiens
cggtgctccctcggg

SEQ ID NO: 324571 - DNA, 15 bp, Homo sapiens
gcggtgctccctcgg

SEQ ID NO: 324572 - DNA, 15 bp, Homo sapiens
ggcggtgctccctcg

SEQ ID NO: 324573 - DNA, 15 bp, Homo sapiens
tggcggtgctccctc

SEQ ID NO: 324574 - DNA, 15 bp, Homo sapiens
ctggcggtgctccct

SEQ ID NO: 324575 - DNA, 15 bp, Homo sapiens
cctggcggtgctccc

SEQ ID NO: 324576 - DNA, 15 bp, Homo sapiens
acctggcggtgctcc

SEQ ID NO: 324577 - DNA, 15 bp, Homo sapiens
cacctggcggtgctc

SEQ ID NO: 324578 - DNA, 15 bp, Homo sapiens
acacctggcggtgct

SEQ ID NO: 324579 - DNA, 15 bp, Homo sapiens
cacacctggcggtgc

SEQ ID NO: 324580 - DNA, 15 bp, Homo sapiens
gcacacctggcggtg

SEQ ID NO: 324581 - DNA, 15 bp, Homo sapiens
tgcacacctggcggt

SEQ ID NO: 324582 - DNA, 15 bp, Homo sapiens
gtgcacacctggcgg

SEQ ID NO: 324583 - DNA, 15 bp, Homo sapiens
tgtgcacacctggcg

SEQ ID NO: 324584 - DNA, 15 bp, Homo sapiens
gtgtgcacacctggc

SEQ ID NO: 324585 - DNA, 15 bp, Homo sapiens
tgtgtgcacacctgg

SEQ ID NO: 324586 - DNA, 15 bp, Homo sapiens
gtgtgtgcacacctg

SEQ ID NO: 324587 - DNA, 15 bp, Homo sapiens
cgtgtgtgcacacct

SEQ ID NO: 324588 - DNA, 15 bp, Homo sapiens
acgtgtgtgcacacc

SEQ ID NO: 324589 - DNA, 15 bp, Homo sapiens
aacgtgtgtgcacac

SEQ ID NO: 324590 - DNA, 15 bp, Homo sapiens
aaacgtgtgtgcaca

SEQ ID NO: 324591 - DNA, 15 bp, Homo sapiens
gaaacgtgtgtgcac

SEQ ID NO: 324592 - DNA, 15 bp, Homo sapiens
agaaacgtgtgtgca

SEQ ID NO: 324593 - DNA, 15 bp, Homo sapiens
cagaaacgtgtgtgc

SEQ ID NO: 324594 - DNA, 15 bp, Homo sapiens
acagaaacgtgtgtg

SEQ ID NO: 324595 - DNA, 15 bp, Homo sapiens
gacagaaacgtgtgt

SEQ ID NO: 324596 - DNA, 15 bp, Homo sapiens
tgacagaaacgtgtg

SEQ ID NO: 324597 - DNA, 15 bp, Homo sapiens
ttgacagaaacgtgt

SEQ ID NO: 324598 - DNA, 15 bp, Homo sapiens
gttgacagaaacgtg

SEQ ID NO: 324599 - DNA, 15 bp, Homo sapiens
cgttgacagaaacgt

SEQ ID NO: 324600 - DNA, 15 bp, Homo sapiens
tcgttgacagaaacg

SEQ ID NO: 324601 - DNA, 15 bp, Homo sapiens
atcgttgacagaaac

SEQ ID NO: 324602 - DNA, 15 bp, Homo sapiens
aatcgttgacagaaa

SEQ ID NO: 324603 - DNA, 15 bp, Homo sapiens
aaatcgttgacagaa

SEQ ID NO: 324604 - DNA, 15 bp, Homo sapiens
gaaatcgttgacaga

SEQ ID NO: 324605 - DNA, 15 bp, Homo sapiens
cgaaatcgttgacag

SEQ ID NO: 324606 - DNA, 15 bp, Homo sapiens
ccgaaatcgttgaca

SEQ ID NO: 324607 - DNA, 15 bp, Homo sapiens
tccgaaatcgttgac

SEQ ID NO: 324608 - DNA, 15 bp, Homo sapiens
ctccgaaatcgttga

SEQ ID NO: 324609 - DNA, 15 bp, Homo sapiens
tctccgaaatcgttg

SEQ ID NO: 324610 - DNA, 15 bp, Homo sapiens
gtctccgaaatcgtt

SEQ ID NO: 324611 - DNA, 15 bp, Homo sapiens
agtctccgaaatcgt

SEQ ID NO: 324612 - DNA, 15 bp, Homo sapiens
gagtctccgaaatcg

SEQ ID NO: 324613 - DNA, 15 bp, Homo sapiens
agagtctccgaaatc

SEQ ID NO: 324614 - DNA, 15 bp, Homo sapiens
aagagtctccgaaat

SEQ ID NO: 324615 - DNA, 15 bp, Homo sapiens
caagagtctccgaaa

SEQ ID NO: 324616 - DNA, 15 bp, Homo sapiens
ccaagagtctccgaa

SEQ ID NO: 324617 - DNA, 15 bp, Homo sapiens
cccaagagtctccga

SEQ ID NO: 324618 - DNA, 15 bp, Homo sapiens
tcccaagagtctccg

SEQ ID NO: 324619 - DNA, 15 bp, Homo sapiens
atcccaagagtctcc

SEQ ID NO: 324620 - DNA, 15 bp, Homo sapiens
gatcccaagagtctc

SEQ ID NO: 324621 - DNA, 15 bp, Homo sapiens
ggatcccaagagtct

SEQ ID NO: 324622 - DNA, 15 bp, Homo sapiens
gggatcccaagagtc

SEQ ID NO: 324623 - DNA, 15 bp, Homo sapiens
agggatcccaagagt

SEQ ID NO: 324624 - DNA, 15 bp, Homo sapiens
cagggatcccaagag

SEQ ID NO: 324625 - DNA, 15 bp, Homo sapiens
tcagggatcccaaga

SEQ ID NO: 324626 - DNA, 15 bp, Homo sapiens
gtcagggatcccaag

SEQ ID NO: 324627 - DNA, 15 bp, Homo sapiens
tgtcagggatcccaa

SEQ ID NO: 324628 - DNA, 15 bp, Homo sapiens
gtgtcagggatccca

SEQ ID NO: 324629 - DNA, 15 bp, Homo sapiens
ggtgtcagggatccc

SEQ ID NO: 324630 - DNA, 15 bp, Homo sapiens
tggtgtcagggatcc

SEQ ID NO: 324631 - DNA, 15 bp, Homo sapiens
atggtgtcagggatc

SEQ ID NO: 324632 - DNA, 15 bp, Homo sapiens
gatggtgtcagggat

SEQ ID NO: 324633 - DNA, 15 bp, Homo sapiens
agatggtgtcaggga

SEQ ID NO: 324634 - DNA, 15 bp, Homo sapiens
cagatggtgtcaggg

SEQ ID NO: 324635 - DNA, 15 bp, Homo sapiens
acagatggtgtcagg

SEQ ID NO: 324636 - DNA, 15 bp, Homo sapiens
aacagatggtgtcag

SEQ ID NO: 324637 - DNA, 15 bp, Homo sapiens
gaacagatggtgtca

SEQ ID NO: 324638 - DNA, 15 bp, Homo sapiens
ggaacagatggtgtc

SEQ ID NO: 324639 - DNA, 15 bp, Homo sapiens
tggaacagatggtgt

SEQ ID NO: 324640 - DNA, 15 bp, Homo sapiens
atggaacagatggtg

SEQ ID NO: 324641 - DNA, 15 bp, Homo sapiens
catggaacagatggt

SEQ ID NO: 324642 - DNA, 15 bp, Homo sapiens
ccatggaacagatgg

SEQ ID NO: 324643 - DNA, 15 bp, Homo sapiens
tccatggaacagatg

SEQ ID NO: 324644 - DNA, 15 bp, Homo sapiens
gtccatggaacagat

SEQ ID NO: 324645 - DNA, 15 bp, Homo sapiens
ggtccatggaacaga

SEQ ID NO: 324646 - DNA, 15 bp, Homo sapiens
aggtccatggaacag

SEQ ID NO: 324647 - DNA, 15 bp, Homo sapiens
aaggtccatggaaca

SEQ ID NO: 324648 - DNA, 15 bp, Homo sapiens
taaggtccatggaac

SEQ ID NO: 324649 - DNA, 15 bp, Homo sapiens
ctaaggtccatggaa

SEQ ID NO: 324650 - DNA, 15 bp, Homo sapiens
cctaaggtccatgga

SEQ ID NO: 324651 - DNA, 15 bp, Homo sapiens
acctaaggtccatgg

SEQ ID NO: 324652 - DNA, 15 bp, Homo sapiens
aacctaaggtccatg

SEQ ID NO: 324653 - DNA, 15 bp, Homo sapiens
taacctaaggtccat

SEQ ID NO: 324654 - DNA, 15 bp, Homo sapiens
ttaacctaaggtcca

SEQ ID NO: 324655 - DNA, 15 bp, Homo sapiens
cttaacctaaggtcc

SEQ ID NO: 324656 - DNA, 15 bp, Homo sapiens
tcttaacctaaggtc

SEQ ID NO: 324657 - DNA, 15 bp, Homo sapiens
ctcttaacctaaggt

SEQ ID NO: 324658 - DNA, 15 bp, Homo sapiens
gctcttaacctaagg

SEQ ID NO: 324659 - DNA, 15 bp, Homo sapiens
ggctcttaacctaag

SEQ ID NO: 324660 - DNA, 15 bp, Homo sapiens
aggctcttaacctaa

SEQ ID NO: 324661 - DNA, 15 bp, Homo sapiens
gaggctcttaaccta

SEQ ID NO: 324662 - DNA, 15 bp, Homo sapiens
agaggctcttaacct

SEQ ID NO: 324663 - DNA, 15 bp, Homo sapiens
cagaggctcttaacc

SEQ ID NO: 324664 - DNA, 15 bp, Homo sapiens
acagaggctcttaac

SEQ ID NO: 324665 - DNA, 15 bp, Homo sapiens
aacagaggctcttaa

SEQ ID NO: 324666 - DNA, 15 bp, Homo sapiens
gaacagaggctctta

SEQ ID NO: 324667 - DNA, 15 bp, Homo sapiens
tgaacagaggctctt

SEQ ID NO: 324668 - DNA, 15 bp, Homo sapiens
ttgaacagaggctct

SEQ ID NO: 324669 - DNA, 15 bp, Homo sapiens
tttgaacagaggctc

SEQ ID NO: 324670 - DNA, 15 bp, Homo sapiens
ctttgaacagaggct

SEQ ID NO: 324671 - DNA, 15 bp, Homo sapiens
cctttgaacagaggc

SEQ ID NO: 324672 - DNA, 15 bp, Homo sapiens
tcctttgaacagagg

SEQ ID NO: 324673 - DNA, 15 bp, Homo sapiens
ctcctttgaacagag

SEQ ID NO: 324674 - DNA, 15 bp, Homo sapiens
cctcctttgaacaga

SEQ ID NO: 324675 - DNA, 15 bp, Homo sapiens
gcctcctttgaacag

SEQ ID NO: 324676 - DNA, 15 bp, Homo sapiens
agcctcctttgaaca

SEQ ID NO: 324677 - DNA, 15 bp, Homo sapiens
aagcctcctttgaac

SEQ ID NO: 324678 - DNA, 15 bp, Homo sapiens
aaagcctcctttgaa

SEQ ID NO: 324679 - DNA, 15 bp, Homo sapiens
aaaagcctcctttga

SEQ ID NO: 324680 - DNA, 15 bp, Homo sapiens
caaaagcctcctttg

SEQ ID NO: 324681 - DNA, 15 bp, Homo sapiens
gcaaaagcctccttt

SEQ ID NO: 324682 - DNA, 15 bp, Homo sapiens
agcaaaagcctcctt

SEQ ID NO: 324683 - DNA, 15 bp, Homo sapiens
gagcaaaagcctcct

SEQ ID NO: 324684 - DNA, 15 bp, Homo sapiens
agagcaaaagcctcc

SEQ ID NO: 324685 - DNA, 15 bp, Homo sapiens
aagagcaaaagcctc

SEQ ID NO: 324686 - DNA, 15 bp, Homo sapiens
caagagcaaaagcct

SEQ ID NO: 324687 - DNA, 15 bp, Homo sapiens
ccaagagcaaaagcc

SEQ ID NO: 324688 - DNA, 15 bp, Homo sapiens
accaagagcaaaagc

SEQ ID NO: 324689 - DNA, 15 bp, Homo sapiens
caccaagagcaaaag

SEQ ID NO: 324690 - DNA, 15 bp, Homo sapiens
ccaccaagagcaaaa

SEQ ID NO: 324691 - DNA, 15 bp, Homo sapiens
cccaccaagagcaaa

SEQ ID NO: 324692 - DNA, 15 bp, Homo sapiens
acccaccaagagcaa

SEQ ID NO: 324693 - DNA, 15 bp, Homo sapiens
cacccaccaagagca

SEQ ID NO: 324694 - DNA, 15 bp, Homo sapiens
ccacccaccaagagc

SEQ ID NO: 324695 - DNA, 15 bp, Homo sapiens
tccacccaccaagag

SEQ ID NO: 324696 - DNA, 15 bp, Homo sapiens
atccacccaccaaga

SEQ ID NO: 324697 - DNA, 15 bp, Homo sapiens
catccacccaccaag

SEQ ID NO: 324698 - DNA, 15 bp, Homo sapiens
ccatccacccaccaa

SEQ ID NO: 324699 - DNA, 15 bp, Homo sapiens
cccatccacccacca

SEQ ID NO: 324700 - DNA, 15 bp, Homo sapiens
ccccatccacccacc

SEQ ID NO: 324701 - DNA, 15 bp, Homo sapiens
accccatccacccac

SEQ ID NO: 324702 - DNA, 15 bp, Homo sapiens
caccccatccaccca

SEQ ID NO: 324703 - DNA, 15 bp, Homo sapiens
tcaccccatccaccc

SEQ ID NO: 324704 - DNA, 15 bp, Homo sapiens
ttcaccccatccacc

SEQ ID NO: 324705 - DNA, 15 bp, Homo sapiens
cttcaccccatccac

SEQ ID NO: 324706 - DNA, 15 bp, Homo sapiens
acttcaccccatcca

SEQ ID NO: 324707 - DNA, 15 bp, Homo sapiens
gacttcaccccatcc

SEQ ID NO: 324708 - DNA, 15 bp, Homo sapiens
agacttcaccccatc

SEQ ID NO: 324709 - DNA, 15 bp, Homo sapiens
gagacttcaccccat

SEQ ID NO: 324710 - DNA, 15 bp, Homo sapiens
ggagacttcacccca

SEQ ID NO: 324711 - DNA, 15 bp, Homo sapiens
tggagacttcacccc

SEQ ID NO: 324712 - DNA, 15 bp, Homo sapiens
ttggagacttcaccc

SEQ ID NO: 324713 - DNA, 15 bp, Homo sapiens
cttggagacttcacc

SEQ ID NO: 324714 - DNA, 15 bp, Homo sapiens
gcttggagacttcac

SEQ ID NO: 324715 - DNA, 15 bp, Homo sapiens
ggcttggagacttca

SEQ ID NO: 324716 - DNA, 15 bp, Homo sapiens
gggcttggagacttc

SEQ ID NO: 324717 - DNA, 15 bp, Homo sapiens
agggcttggagactt

SEQ ID NO: 324718 - DNA, 15 bp, Homo sapiens
gagggcttggagact

SEQ ID NO: 324719 - DNA, 15 bp, Homo sapiens
agagggcttggagac

SEQ ID NO: 324720 - DNA, 15 bp, Homo sapiens
aagagggcttggaga

SEQ ID NO: 324721 - DNA, 15 bp, Homo sapiens
taagagggcttggag

SEQ ID NO: 324722 - DNA, 15 bp, Homo sapiens
gtaagagggcttgga

SEQ ID NO: 324723 - DNA, 15 bp, Homo sapiens
cgtaagagggcttgg

SEQ ID NO: 324724 - DNA, 15 bp, Homo sapiens
ccgtaagagggcttg

SEQ ID NO: 324725 - DNA, 15 bp, Homo sapiens
gccgtaagagggctt

SEQ ID NO: 324726 - DNA, 15 bp, Homo sapiens
ggccgtaagagggct

SEQ ID NO: 324727 - DNA, 15 bp, Homo sapiens
gggccgtaagagggc

SEQ ID NO: 324728 - DNA, 15 bp, Homo sapiens
ggggccgtaagaggg

SEQ ID NO: 324729 - DNA, 15 bp, Homo sapiens
aggggccgtaagagg

SEQ ID NO: 324730 - DNA, 15 bp, Homo sapiens
aaggggccgtaagag

SEQ ID NO: 324731 - DNA, 15 bp, Homo sapiens
gaaggggccgtaaga

SEQ ID NO: 324732 - DNA, 15 bp, Homo sapiens
cgaaggggccgtaag

SEQ ID NO: 324733 - DNA, 15 bp, Homo sapiens
ccgaaggggccgtaa

SEQ ID NO: 324734 - DNA, 15 bp, Homo sapiens
accgaaggggccgta

SEQ ID NO: 324735 - DNA, 15 bp, Homo sapiens
taccgaaggggccgt

SEQ ID NO: 324736 - DNA, 15 bp, Homo sapiens
ataccgaaggggccg

SEQ ID NO: 324737 - DNA, 15 bp, Homo sapiens
aataccgaaggggcc

SEQ ID NO: 324738 - DNA, 15 bp, Homo sapiens
gaataccgaaggggc

SEQ ID NO: 324739 - DNA, 15 bp, Homo sapiens
ggaataccgaagggg

SEQ ID NO: 324740 - DNA, 15 bp, Homo sapiens
aggaataccgaaggg

SEQ ID NO: 324741 - DNA, 15 bp, Homo sapiens
taggaataccgaagg

SEQ ID NO: 324742 - DNA, 15 bp, Homo sapiens
ataggaataccgaag

SEQ ID NO: 324743 - DNA, 15 bp, Homo sapiens
gataggaataccgaa

SEQ ID NO: 324744 - DNA, 15 bp, Homo sapiens
ggataggaataccga

SEQ ID NO: 324745 - DNA, 15 bp, Homo sapiens
gggataggaataccg

SEQ ID NO: 324746 - DNA, 15 bp, Homo sapiens
ggggataggaatacc

SEQ ID NO: 324747 - DNA, 15 bp, Homo sapiens
cggggataggaatac

SEQ ID NO: 324748 - DNA, 15 bp, Homo sapiens
ccggggataggaata

SEQ ID NO: 324749 - DNA, 15 bp, Homo sapiens
accggggataggaat

SEQ ID NO: 324750 - DNA, 15 bp, Homo sapiens
aaccggggataggaa

SEQ ID NO: 324751 - DNA, 15 bp, Homo sapiens
gaaccggggatagga

SEQ ID NO: 324752 - DNA, 15 bp, Homo sapiens
agaaccggggatagg

SEQ ID NO: 324753 - DNA, 15 bp, Homo sapiens
gagaaccggggatag

SEQ ID NO: 324754 - DNA, 15 bp, Homo sapiens
ggagaaccggggata

SEQ ID NO: 324755 - DNA, 15 bp, Homo sapiens
gggagaaccggggat

SEQ ID NO: 324756 - DNA, 15 bp, Homo sapiens
agggagaaccgggga

SEQ ID NO: 324757 - DNA, 15 bp, Homo sapiens
cagggagaaccgggg

SEQ ID NO: 324758 - DNA, 15 bp, Homo sapiens
acagggagaaccggg

SEQ ID NO: 324759 - DNA, 15 bp, Homo sapiens
gacagggagaaccgg

SEQ ID NO: 324760 - DNA, 15 bp, Homo sapiens
agacagggagaaccg

SEQ ID NO: 324761 - DNA, 15 bp, Homo sapiens
aagacagggagaacc

SEQ ID NO: 324762 - DNA, 15 bp, Homo sapiens
taagacagggagaac

SEQ ID NO: 324763 - DNA, 15 bp, Homo sapiens
ctaagacagggagaa

SEQ ID NO: 324764 - DNA, 15 bp, Homo sapiens
actaagacagggaga

SEQ ID NO: 324765 - DNA, 15 bp, Homo sapiens
gactaagacagggag

SEQ ID NO: 324766 - DNA, 15 bp, Homo sapiens
ggactaagacaggga

SEQ ID NO: 324767 - DNA, 15 bp, Homo sapiens
tggactaagacaggg

SEQ ID NO: 324768 - DNA, 15 bp, Homo sapiens
ctggactaagacagg

SEQ ID NO: 324769 - DNA, 15 bp, Homo sapiens
actggactaagacag

SEQ ID NO: 324770 - DNA, 15 bp, Homo sapiens
cactggactaagaca

SEQ ID NO: 324771 - DNA, 15 bp, Homo sapiens
gcactggactaagac

SEQ ID NO: 324772 - DNA, 15 bp, Homo sapiens
agcactggactaaga

SEQ ID NO: 324773 - DNA, 15 bp, Homo sapiens
gagcactggactaag

SEQ ID NO: 324774 - DNA, 15 bp, Homo sapiens
agagcactggactaa

SEQ ID NO: 324775 - DNA, 15 bp, Homo sapiens
gagagcactggacta

SEQ ID NO: 324776 - DNA, 15 bp, Homo sapiens
agagagcactggact

SEQ ID NO: 324777 - DNA, 15 bp, Homo sapiens
tagagagcactggac

SEQ ID NO: 324778 - DNA, 15 bp, Homo sapiens
atagagagcactgga

SEQ ID NO: 324779 - DNA, 15 bp, Homo sapiens
aatagagagcactgg

SEQ ID NO: 324780 - DNA, 15 bp, Homo sapiens
aaatagagagcactg

SEQ ID NO: 324781 - DNA, 15 bp, Homo sapiens
taaatagagagcact

SEQ ID NO: 324782 - DNA, 15 bp, Homo sapiens
ttaaatagagagcac

SEQ ID NO: 324783 - DNA, 15 bp, Homo sapiens
gttaaatagagagca

SEQ ID NO: 324784 - DNA, 15 bp, Homo sapiens
tgttaaatagagagc

SEQ ID NO: 324785 - DNA, 15 bp, Homo sapiens
ttgttaaatagagag

SEQ ID NO: 324786 - DNA, 15 bp, Homo sapiens
tttgttaaatagaga

SEQ ID NO: 324787 - DNA, 15 bp, Homo sapiens
atttgttaaatagag

SEQ ID NO: 324788 - DNA, 15 bp, Homo sapiens
catttgttaaataga

SEQ ID NO: 324789 - DNA, 15 bp, Homo sapiens
tcatttgttaaatag

SEQ ID NO: 324790 - DNA, 15 bp, Homo sapiens
ctcatttgttaaata

SEQ ID NO: 324791 - DNA, 15 bp, Homo sapiens
gctcatttgttaaat

SEQ ID NO: 324792 - DNA, 15 bp, Homo sapiens
tgctcatttgttaaa

SEQ ID NO: 324793 - DNA, 15 bp, Homo sapiens
ctgctcatttgttaa

SEQ ID NO: 324794 - DNA, 15 bp, Homo sapiens
actgctcatttgtta

SEQ ID NO: 324795 - DNA, 15 bp, Homo sapiens
tactgctcatttgtt

SEQ ID NO: 324796 - DNA, 15 bp, Homo sapiens
ttactgctcatttgt

SEQ ID NO: 324797 - DNA, 15 bp, Homo sapiens
tttactgctcatttg

SEQ ID NO: 324798 - DNA, 15 bp, Homo sapiens
atttactgctcattt

SEQ ID NO: 324799 - DNA, 15 bp, Homo sapiens
catttactgctcatt

SEQ ID NO: 324800 - DNA, 15 bp, Homo sapiens
acatttactgctcat

SEQ ID NO: 324801 - DNA, 15 bp, Homo sapiens
aacatttactgctca

SEQ ID NO: 324802 - DNA, 15 bp, Homo sapiens
caacatttactgctc

SEQ ID NO: 324803 - DNA, 15 bp, Homo sapiens
ccaacatttactgct

SEQ ID NO: 324804 - DNA, 15 bp, Homo sapiens
gccaacatttactgc

SEQ ID NO: 324805 - DNA, 15 bp, Homo sapiens
ggccaacatttactg

SEQ ID NO: 324806 - DNA, 15 bp, Homo sapiens
cggccaacatttact

SEQ ID NO: 324807 - DNA, 15 bp, Homo sapiens
tcggccaacatttac

SEQ ID NO: 324808 - DNA, 15 bp, Homo sapiens
atcggccaacattta

SEQ ID NO: 324809 - DNA, 15 bp, Homo sapiens
catcggccaacattt

SEQ ID NO: 324810 - DNA, 15 bp, Homo sapiens
ccatcggccaacatt

SEQ ID NO: 324811 - DNA, 15 bp, Homo sapiens
tccatcggccaacat

SEQ ID NO: 324812 - DNA, 15 bp, Homo sapiens
gtccatcggccaaca

SEQ ID NO: 324813 - DNA, 15 bp, Homo sapiens
agtccatcggccaac

SEQ ID NO: 324814 - DNA, 15 bp, Homo sapiens
aagtccatcggccaa

SEQ ID NO: 324815 - DNA, 15 bp, Homo sapiens
aaagtccatcggcca

SEQ ID NO: 324816 - DNA, 15 bp, Homo sapiens
caaagtccatcggcc

SEQ ID NO: 324817 - DNA, 15 bp, Homo sapiens
ccaaagtccatcggc

SEQ ID NO: 324818 - DNA, 15 bp, Homo sapiens
cccaaagtccatcgg

SEQ ID NO: 324819 - DNA, 15 bp, Homo sapiens
tcccaaagtccatcg

SEQ ID NO: 324820 - DNA, 15 bp, Homo sapiens
ctcccaaagtccatc

SEQ ID NO: 324821 - DNA, 15 bp, Homo sapiens
tctcccaaagtccat

SEQ ID NO: 324822 - DNA, 15 bp, Homo sapiens
ttctcccaaagtcca

SEQ ID NO: 324823 - DNA, 15 bp, Homo sapiens
tttctcccaaagtcc

SEQ ID NO: 324824 - DNA, 15 bp, Homo sapiens
ttttctcccaaagtc

SEQ ID NO: 324825 - DNA, 15 bp, Homo sapiens
attttctcccaaagt

SEQ ID NO: 324826 - DNA, 15 bp, Homo sapiens
tattttctcccaaag

SEQ ID NO: 324827 - DNA, 15 bp, Homo sapiens
ttattttctcccaaa

SEQ ID NO: 324828 - DNA, 15 bp, Homo sapiens
tttattttctcccaa

SEQ ID NO: 324829 - DNA, 15 bp, Homo sapiens
ctttattttctccca

SEQ ID NO: 324830 - DNA, 15 bp, Homo sapiens
tctttattttctccc

SEQ ID NO: 324831 - DNA, 15 bp, Homo sapiens
gtctttattttctcc

SEQ ID NO: 324832 - DNA, 15 bp, Homo sapiens
ggtctttattttctc

SEQ ID NO: 324833 - DNA, 15 bp, Homo sapiens
aggtctttattttct

SEQ ID NO: 324834 - DNA, 15 bp, Homo sapiens
caggtctttattttc

SEQ ID NO: 324835 - DNA, 15 bp, Homo sapiens
tcaggtctttatttt

SEQ ID NO: 324836 - DNA, 15 bp, Homo sapiens
ttcaggtctttattt

SEQ ID NO: 324837 - DNA, 15 bp, Homo sapiens
tttcaggtctttatt

SEQ ID NO: 324838 - DNA, 15 bp, Homo sapiens
atttcaggtctttat

SEQ ID NO: 324839 - DNA, 15 bp, Homo sapiens
aatttcaggtcttta

SEQ ID NO: 324840 - DNA, 15 bp, Homo sapiens
gaatttcaggtcttt

SEQ ID NO: 324841 - DNA, 15 bp, Homo sapiens
tgaatttcaggtctt

SEQ ID NO: 324842 - DNA, 15 bp, Homo sapiens
ttgaatttcaggtct

SEQ ID NO: 324843 - DNA, 15 bp, Homo sapiens
attgaatttcaggtc

SEQ ID NO: 324844 - DNA, 15 bp, Homo sapiens
aattgaatttcaggt

SEQ ID NO: 324845 - DNA, 15 bp, Homo sapiens
gaattgaatttcagg

SEQ ID NO: 324846 - DNA, 15 bp, Homo sapiens
agaattgaatttcag

SEQ ID NO: 324847 - DNA, 15 bp, Homo sapiens
tagaattgaatttca

SEQ ID NO: 324848 - DNA, 15 bp, Homo sapiens
ctagaattgaatttc

SEQ ID NO: 324849 - DNA, 15 bp, Homo sapiens
gctagaattgaattt

SEQ ID NO: 324850 - DNA, 15 bp, Homo sapiens
agctagaattgaatt

SEQ ID NO: 324851 - DNA, 15 bp, Homo sapiens
gagctagaattgaat

SEQ ID NO: 324852 - DNA, 15 bp, Homo sapiens
ggagctagaattgaa

SEQ ID NO: 324853 - DNA, 15 bp, Homo sapiens
aggagctagaattga

SEQ ID NO: 324854 - DNA, 15 bp, Homo sapiens
aaggagctagaattg

SEQ ID NO: 324855 - DNA, 15 bp, Homo sapiens
taaggagctagaatt

SEQ ID NO: 324856 - DNA, 15 bp, Homo sapiens
ttaaggagctagaat

SEQ ID NO: 324857 - DNA, 15 bp, Homo sapiens
tttaaggagctagaa

SEQ ID NO: 324858 - DNA, 15 bp, Homo sapiens
gtttaaggagctaga

SEQ ID NO: 324859 - DNA, 15 bp, Homo sapiens
ggtttaaggagctag

SEQ ID NO: 324860 - DNA, 15 bp, Homo sapiens
tggtttaaggagcta

SEQ ID NO: 324861 - DNA, 15 bp, Homo sapiens
gtggtttaaggagct

SEQ ID NO: 324862 - DNA, 15 bp, Homo sapiens
tgtggtttaaggagc

SEQ ID NO: 324863 - DNA, 15 bp, Homo sapiens
ctgtggtttaaggag

SEQ ID NO: 324864 - DNA, 15 bp, Homo sapiens
cctgtggtttaagga

SEQ ID NO: 324865 - DNA, 15 bp, Homo sapiens
tcctgtggtttaagg

SEQ ID NO: 324866 - DNA, 15 bp, Homo sapiens
ctcctgtggtttaag

SEQ ID NO: 324867 - DNA, 15 bp, Homo sapiens
tctcctgtggtttaa

SEQ ID NO: 324868 - DNA, 15 bp, Homo sapiens
ttctcctgtggttta

SEQ ID NO: 324869 - DNA, 15 bp, Homo sapiens
gttctcctgtggttt

SEQ ID NO: 324870 - DNA, 15 bp, Homo sapiens
tgttctcctgtggtt

SEQ ID NO: 324871 - DNA, 15 bp, Homo sapiens
atgttctcctgtggt

SEQ ID NO: 324872 - DNA, 15 bp, Homo sapiens
aatgttctcctgtgg

SEQ ID NO: 324873 - DNA, 15 bp, Homo sapiens
gaatgttctcctgtg

SEQ ID NO: 324874 - DNA, 15 bp, Homo sapiens
agaatgttctcctgt

SEQ ID NO: 324875 - DNA, 15 bp, Homo sapiens
aagaatgttctcctg

SEQ ID NO: 324876 - DNA, 15 bp, Homo sapiens
aaagaatgttctcct

SEQ ID NO: 324877 - DNA, 15 bp, Homo sapiens
gaaagaatgttctcc

SEQ ID NO: 324878 - DNA, 15 bp, Homo sapiens
tgaaagaatgttctc

SEQ ID NO: 324879 - DNA, 15 bp, Homo sapiens
ctgaaagaatgttct

SEQ ID NO: 324880 - DNA, 15 bp, Homo sapiens
gctgaaagaatgttc

SEQ ID NO: 324881 - DNA, 15 bp, Homo sapiens
tgctgaaagaatgtt

SEQ ID NO: 324882 - DNA, 15 bp, Homo sapiens
ctgctgaaagaatgt

SEQ ID NO: 324883 - DNA, 15 bp, Homo sapiens
tctgctgaaagaatg

SEQ ID NO: 324884 - DNA, 15 bp, Homo sapiens
gtctgctgaaagaat

SEQ ID NO: 324885 - DNA, 15 bp, Homo sapiens
tgtctgctgaaagaa

SEQ ID NO: 324886 - DNA, 15 bp, Homo sapiens
ttgtctgctgaaaga

SEQ ID NO: 324887 - DNA, 15 bp, Homo sapiens
gttgtctgctgaaag

SEQ ID NO: 324888 - DNA, 15 bp, Homo sapiens
agttgtctgctgaaa

SEQ ID NO: 324889 - DNA, 15 bp, Homo sapiens
aagttgtctgctgaa

SEQ ID NO: 324890 - DNA, 15 bp, Homo sapiens
gaagttgtctgctga

SEQ ID NO: 324891 - DNA, 15 bp, Homo sapiens
tgaagttgtctgctg

SEQ ID NO: 324892 - DNA, 15 bp, Homo sapiens
ctgaagttgtctgct

SEQ ID NO: 324893 - DNA, 15 bp, Homo sapiens
actgaagttgtctgc

SEQ ID NO: 324894 - DNA, 15 bp, Homo sapiens
aactgaagttgtctg

SEQ ID NO: 324895 - DNA, 15 bp, Homo sapiens
caactgaagttgtct

SEQ ID NO: 324896 - DNA, 15 bp, Homo sapiens
ccaactgaagttgtc

SEQ ID NO: 324897 - DNA, 15 bp, Homo sapiens
accaactgaagttgt

SEQ ID NO: 324898 - DNA, 15 bp, Homo sapiens
taccaactgaagttg

SEQ ID NO: 324899 - DNA, 15 bp, Homo sapiens
ataccaactgaagtt

SEQ ID NO: 324900 - DNA, 15 bp, Homo sapiens
aataccaactgaagt

SEQ ID NO: 324901 - DNA, 15 bp, Homo sapiens
taataccaactgaag

SEQ ID NO: 324902 - DNA, 15 bp, Homo sapiens
ctaataccaactgaa

SEQ ID NO: 324903 - DNA, 15 bp, Homo sapiens
cctaataccaactga

SEQ ID NO: 324904 - DNA, 15 bp, Homo sapiens
gcctaataccaactg

SEQ ID NO: 324905 - DNA, 15 bp, Homo sapiens
ggcctaataccaact

SEQ ID NO: 324906 - DNA, 15 bp, Homo sapiens
tggcctaataccaac

SEQ ID NO: 324907 - DNA, 15 bp, Homo sapiens
ttggcctaataccaa

SEQ ID NO: 324908 - DNA, 15 bp, Homo sapiens
cttggcctaatacca

SEQ ID NO: 324909 - DNA, 15 bp, Homo sapiens
ccttggcctaatacc

SEQ ID NO: 324910 - DNA, 15 bp, Homo sapiens
accttggcctaatac

SEQ ID NO: 324911 - DNA, 15 bp, Homo sapiens
taccttggcctaata

SEQ ID NO: 324912 - DNA, 15 bp, Homo sapiens
ttaccttggcctaat

SEQ ID NO: 324913 - DNA, 15 bp, Homo sapiens
cttaccttggcctaa

SEQ ID NO: 324914 - DNA, 15 bp, Homo sapiens
tcttaccttggccta

SEQ ID NO: 324915 - DNA, 15 bp, Homo sapiens
ttcttaccttggcct

SEQ ID NO: 324916 - DNA, 15 bp, Homo sapiens
tttcttaccttggcc

SEQ ID NO: 324917 - DNA, 15 bp, Homo sapiens
ctttcttaccttggc

SEQ ID NO: 324918 - DNA, 15 bp, Homo sapiens
cctttcttaccttgg

SEQ ID NO: 324919 - DNA, 15 bp, Homo sapiens
gcctttcttaccttg

SEQ ID NO: 324920 - DNA, 15 bp, Homo sapiens
ggcctttcttacctt

SEQ ID NO: 324921 - DNA, 15 bp, Homo sapiens
tggcctttcttacct

SEQ ID NO: 324922 - DNA, 15 bp, Homo sapiens
ttggcctttcttacc

SEQ ID NO: 324923 - DNA, 15 bp, Homo sapiens
gttggcctttcttac

SEQ ID NO: 324924 - DNA, 15 bp, Homo sapiens
tgttggcctttctta

SEQ ID NO: 324925 - DNA, 15 bp, Homo sapiens
ctgttggcctttctt

SEQ ID NO: 324926 - DNA, 15 bp, Homo sapiens
gctgttggcctttct

SEQ ID NO: 324927 - DNA, 15 bp, Homo sapiens
tgctgttggcctttc

SEQ ID NO: 324928 - DNA, 15 bp, Homo sapiens
atgctgttggccttt

SEQ ID NO: 324929 - DNA, 15 bp, Homo sapiens
gatgctgttggcctt

SEQ ID NO: 324930 - DNA, 15 bp, Homo sapiens
ggatgctgttggcct

SEQ ID NO: 324931 - DNA, 15 bp, Homo sapiens
aggatgctgttggcc

SEQ ID NO: 324932 - DNA, 15 bp, Homo sapiens
aaggatgctgttggc

SEQ ID NO: 324933 - DNA, 15 bp, Homo sapiens
aaaggatgctgttgg

SEQ ID NO: 324934 - DNA, 15 bp, Homo sapiens
gaaaggatgctgttg

SEQ ID NO: 324935 - DNA, 15 bp, Homo sapiens
agaaaggatgctgtt

SEQ ID NO: 324936 - DNA, 15 bp, Homo sapiens
cagaaaggatgctgt

SEQ ID NO: 324937 - DNA, 15 bp, Homo sapiens
tcagaaaggatgctg

SEQ ID NO: 324938 - DNA, 15 bp, Homo sapiens
ttcagaaaggatgct

SEQ ID NO: 324939 - DNA, 15 bp, Homo sapiens
cttcagaaaggatgc

SEQ ID NO: 324940 - DNA, 15 bp, Homo sapiens
tcttcagaaaggatg

SEQ ID NO: 324941 - DNA, 15 bp, Homo sapiens
ttcttcagaaaggat

SEQ ID NO: 324942 - DNA, 15 bp, Homo sapiens
tttcttcagaaagga

SEQ ID NO: 324943 - DNA, 15 bp, Homo sapiens
gtttcttcagaaagg

SEQ ID NO: 324944 - DNA, 15 bp, Homo sapiens
ggtttcttcagaaag

SEQ ID NO: 324945 - DNA, 15 bp, Homo sapiens
aggtttcttcagaaa

SEQ ID NO: 324946 - DNA, 15 bp, Homo sapiens
gaggtttcttcagaa

SEQ ID NO: 324947 - DNA, 15 bp, Homo sapiens
tgaggtttcttcaga

SEQ ID NO: 324948 - DNA, 15 bp, Homo sapiens
ctgaggtttcttcag

SEQ ID NO: 324949 - DNA, 15 bp, Homo sapiens
cctgaggtttcttca

SEQ ID NO: 324950 - DNA, 15 bp, Homo sapiens
tcctgaggtttcttc

SEQ ID NO: 324951 - DNA, 15 bp, Homo sapiens
ctcctgaggtttctt

SEQ ID NO: 324952 - DNA, 15 bp, Homo sapiens
tctcctgaggtttct

SEQ ID NO: 324953 - DNA, 15 bp, Homo sapiens
atctcctgaggtttc

SEQ ID NO: 324954 - DNA, 15 bp, Homo sapiens
catctcctgaggttt

SEQ ID NO: 324955 - DNA, 15 bp, Homo sapiens
ccatctcctgaggtt

SEQ ID NO: 324956 - DNA, 15 bp, Homo sapiens
gccatctcctgaggt

SEQ ID NO: 324957 - DNA, 15 bp, Homo sapiens
agccatctcctgagg

SEQ ID NO: 324958 - DNA, 15 bp, Homo sapiens
gagccatctcctgag

SEQ ID NO: 324959 - DNA, 15 bp, Homo sapiens
tgagccatctcctga

SEQ ID NO: 324960 - DNA, 15 bp, Homo sapiens
gtgagccatctcctg

SEQ ID NO: 324961 - DNA, 15 bp, Homo sapiens
agtgagccatctcct

SEQ ID NO: 324962 - DNA, 15 bp, Homo sapiens
cagtgagccatctcc

SEQ ID NO: 324963 - DNA, 15 bp, Homo sapiens
gcagtgagccatctc

SEQ ID NO: 324964 - DNA, 15 bp, Homo sapiens
ggcagtgagccatct

SEQ ID NO: 324965 - DNA, 15 bp, Homo sapiens
tggcagtgagccatc

SEQ ID NO: 324966 - DNA, 15 bp, Homo sapiens
ctggcagtgagccat

SEQ ID NO: 324967 - DNA, 15 bp, Homo sapiens
tctggcagtgagcca

SEQ ID NO: 324968 - DNA, 15 bp, Homo sapiens
ttctggcagtgagcc

SEQ ID NO: 324969 - DNA, 15 bp, Homo sapiens
tttctggcagtgagc

SEQ ID NO: 324970 - DNA, 15 bp, Homo sapiens
ctttctggcagtgag

SEQ ID NO: 324971 - DNA, 15 bp, Homo sapiens
gctttctggcagtga

SEQ ID NO: 324972 - DNA, 15 bp, Homo sapiens
agctttctggcagtg

SEQ ID NO: 324973 - DNA, 15 bp, Homo sapiens
tagctttctggcagt

SEQ ID NO: 324974 - DNA, 15 bp, Homo sapiens
atagctttctggcag

SEQ ID NO: 324975 - DNA, 15 bp, Homo sapiens
tatagctttctggca

SEQ ID NO: 324976 - DNA, 15 bp, Homo sapiens
ttatagctttctggc

SEQ ID NO: 324977 - DNA, 15 bp, Homo sapiens
gttatagctttctgg

SEQ ID NO: 324978 - DNA, 15 bp, Homo sapiens
ggttatagctttctg

SEQ ID NO: 324979 - DNA, 15 bp, Homo sapiens
aggttatagctttct

SEQ ID NO: 324980 - DNA, 15 bp, Homo sapiens
caggttatagctttc

SEQ ID NO: 324981 - DNA, 15 bp, Homo sapiens
ccaggttatagcttt

SEQ ID NO: 324982 - DNA, 15 bp, Homo sapiens
tccaggttatagctt

SEQ ID NO: 324983 - DNA, 15 bp, Homo sapiens
ttccaggttatagct

SEQ ID NO: 324984 - DNA, 15 bp, Homo sapiens
cttccaggttatagc

SEQ ID NO: 324985 - DNA, 15 bp, Homo sapiens
ccttccaggttatag

SEQ ID NO: 324986 - DNA, 15 bp, Homo sapiens
cccttccaggttata

SEQ ID NO: 324987 - DNA, 15 bp, Homo sapiens
ccccttccaggttat

SEQ ID NO: 324988 - DNA, 15 bp, Homo sapiens
tccccttccaggtta

SEQ ID NO: 324989 - DNA, 15 bp, Homo sapiens
ttccccttccaggtt

SEQ ID NO: 324990 - DNA, 15 bp, Homo sapiens
attccccttccaggt

SEQ ID NO: 324991 - DNA, 15 bp, Homo sapiens
aattccccttccagg

SEQ ID NO: 324992 - DNA, 15 bp, Homo sapiens
caattccccttccag

SEQ ID NO: 324993 - DNA, 15 bp, Homo sapiens
acaattccccttcca

SEQ ID NO: 324994 - DNA, 15 bp, Homo sapiens
aacaattccccttcc

SEQ ID NO: 324995 - DNA, 15 bp, Homo sapiens
taacaattccccttc

SEQ ID NO: 324996 - DNA, 15 bp, Homo sapiens
ttaacaattcccctt

SEQ ID NO: 324997 - DNA, 15 bp, Homo sapiens
tttaacaattcccct

SEQ ID NO: 324998 - DNA, 15 bp, Homo sapiens
atttaacaattcccc

SEQ ID NO: 324999 - DNA, 15 bp, Homo sapiens
tatttaacaattccc

SEQ ID NO: 325000 - DNA, 15 bp, Homo sapiens
ctatttaacaattcc

SEQ ID NO: 325001 - DNA, 15 bp, Homo sapiens
tctatttaacaattc

SEQ ID NO: 325002 - DNA, 15 bp, Homo sapiens
atctatttaacaatt

SEQ ID NO: 325003 - DNA, 15 bp, Homo sapiens
catctatttaacaat

SEQ ID NO: 325004 - DNA, 15 bp, Homo sapiens
tcatctatttaacaa

SEQ ID NO: 325005 - DNA, 15 bp, Homo sapiens
ctcatctatttaaca

SEQ ID NO: 325006 - DNA, 15 bp, Homo sapiens
cctcatctatttaac

SEQ ID NO: 325007 - DNA, 15 bp, Homo sapiens
ccctcatctatttaa

SEQ ID NO: 325008 - DNA, 15 bp, Homo sapiens
cccctcatctattta

SEQ ID NO: 325009 - DNA, 15 bp, Homo sapiens
gcccctcatctattt

SEQ ID NO: 325010 - DNA, 15 bp, Homo sapiens
agcccctcatctatt

SEQ ID NO: 325011 - DNA, 15 bp, Homo sapiens
cagcccctcatctat

SEQ ID NO: 325012 - DNA, 15 bp, Homo sapiens
ccagcccctcatcta

SEQ ID NO: 325013 - DNA, 15 bp, Homo sapiens
tccagcccctcatct

SEQ ID NO: 325014 - DNA, 15 bp, Homo sapiens
atccagcccctcatc

SEQ ID NO: 325015 - DNA, 15 bp, Homo sapiens
catccagcccctcat

SEQ ID NO: 325016 - DNA, 15 bp, Homo sapiens
tcatccagcccctca

SEQ ID NO: 325017 - DNA, 15 bp, Homo sapiens
ttcatccagcccctc

SEQ ID NO: 325018 - DNA, 15 bp, Homo sapiens
cttcatccagcccct

SEQ ID NO: 325019 - DNA, 15 bp, Homo sapiens
ccttcatccagcccc

SEQ ID NO: 325020 - DNA, 15 bp, Homo sapiens
tccttcatccagccc

SEQ ID NO: 325021 - DNA, 15 bp, Homo sapiens
gtccttcatccagcc

SEQ ID NO: 325022 - DNA, 15 bp, Homo sapiens
cgtccttcatccagc

SEQ ID NO: 325023 - DNA, 15 bp, Homo sapiens
tcgtccttcatccag

SEQ ID NO: 325024 - DNA, 15 bp, Homo sapiens
ctcgtccttcatcca

SEQ ID NO: 325025 - DNA, 15 bp, Homo sapiens
tctcgtccttcatcc

SEQ ID NO: 325026 - DNA, 15 bp, Homo sapiens
gtctcgtccttcatc

SEQ ID NO: 325027 - DNA, 15 bp, Homo sapiens
ggtctcgtccttcat

SEQ ID NO: 325028 - DNA, 15 bp, Homo sapiens
tggtctcgtccttca

SEQ ID NO: 325029 - DNA, 15 bp, Homo sapiens
ctggtctcgtccttc

SEQ ID NO: 325030 - DNA, 15 bp, Homo sapiens
cctggtctcgtcctt

SEQ ID NO: 325031 - DNA, 15 bp, Homo sapiens
ccctggtctcgtcct

SEQ ID NO: 325032 - DNA, 15 bp, Homo sapiens
gccctggtctcgtcc

SEQ ID NO: 325033 - DNA, 15 bp, Homo sapiens
ggccctggtctcgtc

SEQ ID NO: 325034 - DNA, 15 bp, Homo sapiens
gggccctggtctcgt

SEQ ID NO: 325035 - DNA, 15 bp, Homo sapiens
ggggccctggtctcg

SEQ ID NO: 325036 - DNA, 15 bp, Homo sapiens
cggggccctggtctc

SEQ ID NO: 325037 - DNA, 15 bp, Homo sapiens
acggggccctggtct

SEQ ID NO: 325038 - DNA, 15 bp, Homo sapiens
gacggggccctggtc

SEQ ID NO: 325039 - DNA, 15 bp, Homo sapiens
tgacggggccctggt

SEQ ID NO: 325040 - DNA, 15 bp, Homo sapiens
gtgacggggccctgg

SEQ ID NO: 325041 - DNA, 15 bp, Homo sapiens
cgtgacggggccctg

SEQ ID NO: 325042 - DNA, 15 bp, Homo sapiens
ccgtgacggggccct

SEQ ID NO: 325043 - DNA, 15 bp, Homo sapiens
cccgtgacggggccc

SEQ ID NO: 325044 - DNA, 15 bp, Homo sapiens
tcccgtgacggggcc

SEQ ID NO: 325045 - DNA, 15 bp, Homo sapiens
ctcccgtgacggggc

SEQ ID NO: 325046 - DNA, 15 bp, Homo sapiens
tctcccgtgacgggg

SEQ ID NO: 325047 - DNA, 15 bp, Homo sapiens
ctctcccgtgacggg

SEQ ID NO: 325048 - DNA, 15 bp, Homo sapiens
cctctcccgtgacgg

SEQ ID NO: 325049 - DNA, 15 bp, Homo sapiens
ccctctcccgtgacg

SEQ ID NO: 325050 - DNA, 15 bp, Homo sapiens
tccctctcccgtgac

SEQ ID NO: 325051 - DNA, 15 bp, Homo sapiens
ttccctctcccgtga

SEQ ID NO: 325052 - DNA, 15 bp, Homo sapiens
cttccctctcccgtg

SEQ ID NO: 325053 - DNA, 15 bp, Homo sapiens
ccttccctctcccgt

SEQ ID NO: 325054 - DNA, 15 bp, Homo sapiens
gccttccctctcccg

SEQ ID NO: 325055 - DNA, 15 bp, Homo sapiens
tgccttccctctccc

SEQ ID NO: 325056 - DNA, 15 bp, Homo sapiens
ctgccttccctctcc

SEQ ID NO: 325057 - DNA, 15 bp, Homo sapiens
gctgccttccctctc

SEQ ID NO: 325058 - DNA, 15 bp, Homo sapiens
agctgccttccctct

SEQ ID NO: 325059 - DNA, 15 bp, Homo sapiens
gagctgccttccctc

SEQ ID NO: 325060 - DNA, 15 bp, Homo sapiens
ggagctgccttccct

SEQ ID NO: 325061 - DNA, 15 bp, Homo sapiens
aggagctgccttccc

SEQ ID NO: 325062 - DNA, 15 bp, Homo sapiens
caggagctgccttcc

SEQ ID NO: 325063 - DNA, 15 bp, Homo sapiens
ccaggagctgccttc

SEQ ID NO: 325064 - DNA, 15 bp, Homo sapiens
gccaggagctgcctt

SEQ ID NO: 325065 - DNA, 15 bp, Homo sapiens
agccaggagctgcct

SEQ ID NO: 325066 - DNA, 15 bp, Homo sapiens
cagccaggagctgcc

SEQ ID NO: 325067 - DNA, 15 bp, Homo sapiens
acagccaggagctgc

SEQ ID NO: 325068 - DNA, 15 bp, Homo sapiens
cacagccaggagctg

SEQ ID NO: 325069 - DNA, 15 bp, Homo sapiens
acacagccaggagct

SEQ ID NO: 325070 - DNA, 15 bp, Homo sapiens
gacacagccaggagc

SEQ ID NO: 325071 - DNA, 15 bp, Homo sapiens
agacacagccaggag

SEQ ID NO: 325072 - DNA, 15 bp, Homo sapiens
cagacacagccagga

SEQ ID NO: 325073 - DNA, 15 bp, Homo sapiens
acagacacagccagg

SEQ ID NO: 325074 - DNA, 15 bp, Homo sapiens
gacagacacagccag

SEQ ID NO: 325075 - DNA, 15 bp, Homo sapiens
ggacagacacagcca

SEQ ID NO: 325076 - DNA, 15 bp, Homo sapiens
gggacagacacagcc

SEQ ID NO: 325077 - DNA, 15 bp, Homo sapiens
ggggacagacacagc

SEQ ID NO: 325078 - DNA, 15 bp, Homo sapiens
cggggacagacacag

SEQ ID NO: 325079 - DNA, 15 bp, Homo sapiens
ccggggacagacaca

SEQ ID NO: 325080 - DNA, 15 bp, Homo sapiens
gccggggacagacac

SEQ ID NO: 325081 - DNA, 15 bp, Homo sapiens
agccggggacagaca

SEQ ID NO: 325082 - DNA, 15 bp, Homo sapiens
aagccggggacagac

SEQ ID NO: 325083 - DNA, 15 bp, Homo sapiens
aaagccggggacaga

SEQ ID NO: 325084 - DNA, 15 bp, Homo sapiens
aaaagccggggacag

SEQ ID NO: 325085 - DNA, 15 bp, Homo sapiens
caaaagccggggaca

SEQ ID NO: 325086 - DNA, 15 bp, Homo sapiens
ccaaaagccggggac

SEQ ID NO: 325087 - DNA, 15 bp, Homo sapiens
cccaaaagccgggga

SEQ ID NO: 325088 - DNA, 15 bp, Homo sapiens
gcccaaaagccgggg

SEQ ID NO: 325089 - DNA, 15 bp, Homo sapiens
agcccaaaagccggg

SEQ ID NO: 325090 - DNA, 15 bp, Homo sapiens
gagcccaaaagccgg

SEQ ID NO: 325091 - DNA, 15 bp, Homo sapiens
agagcccaaaagccg

SEQ ID NO: 325092 - DNA, 15 bp, Homo sapiens
cagagcccaaaagcc

SEQ ID NO: 325093 - DNA, 15 bp, Homo sapiens
tcagagcccaaaagc

SEQ ID NO: 325094 - DNA, 15 bp, Homo sapiens
ttcagagcccaaaag

SEQ ID NO: 325095 - DNA, 15 bp, Homo sapiens
cttcagagcccaaaa

SEQ ID NO: 325096 - DNA, 15 bp, Homo sapiens
ccttcagagcccaaa

SEQ ID NO: 325097 - DNA, 15 bp, Homo sapiens
tccttcagagcccaa

SEQ ID NO: 325098 - DNA, 15 bp, Homo sapiens
gtccttcagagccca

SEQ ID NO: 325099 - DNA, 15 bp, Homo sapiens
agtccttcagagccc

SEQ ID NO: 325100 - DNA, 15 bp, Homo sapiens
tagtccttcagagcc

SEQ ID NO: 325101 - DNA, 15 bp, Homo sapiens
ttagtccttcagagc

SEQ ID NO: 325102 - DNA, 15 bp, Homo sapiens
gttagtccttcagag

SEQ ID NO: 325103 - DNA, 15 bp, Homo sapiens
ggttagtccttcaga

SEQ ID NO: 325104 - DNA, 15 bp, Homo sapiens
tggttagtccttcag

SEQ ID NO: 325105 - DNA, 15 bp, Homo sapiens
gtggttagtccttca

SEQ ID NO: 325106 - DNA, 15 bp, Homo sapiens
tgtggttagtccttc

SEQ ID NO: 325107 - DNA, 15 bp, Homo sapiens
atgtggttagtcctt

SEQ ID NO: 325108 - DNA, 15 bp, Homo sapiens
catgtggttagtcct

SEQ ID NO: 325109 - DNA, 15 bp, Homo sapiens
gcatgtggttagtcc

SEQ ID NO: 325110 - DNA, 15 bp, Homo sapiens
agcatgtggttagtc

SEQ ID NO: 325111 - DNA, 15 bp, Homo sapiens
aagcatgtggttagt

SEQ ID NO: 325112 - DNA, 15 bp, Homo sapiens
aaagcatgtggttag

SEQ ID NO: 325113 - DNA, 15 bp, Homo sapiens
gaaagcatgtggtta

SEQ ID NO: 325114 - DNA, 15 bp, Homo sapiens
agaaagcatgtggtt

SEQ ID NO: 325115 - DNA, 15 bp, Homo sapiens
gagaaagcatgtggt

SEQ ID NO: 325116 - DNA, 15 bp, Homo sapiens
tgagaaagcatgtgg

SEQ ID NO: 325117 - DNA, 15 bp, Homo sapiens
gtgagaaagcatgtg

SEQ ID NO: 325118 - DNA, 15 bp, Homo sapiens
agtgagaaagcatgt

SEQ ID NO: 325119 - DNA, 15 bp, Homo sapiens
aagtgagaaagcatg

SEQ ID NO: 325120 - DNA, 15 bp, Homo sapiens
caagtgagaaagcat

SEQ ID NO: 325121 - DNA, 15 bp, Homo sapiens
acaagtgagaaagca

SEQ ID NO: 325122 - DNA, 15 bp, Homo sapiens
gacaagtgagaaagc

SEQ ID NO: 325123 - DNA, 15 bp, Homo sapiens
agacaagtgagaaag

SEQ ID NO: 325124 - DNA, 15 bp, Homo sapiens
gagacaagtgagaaa

SEQ ID NO: 325125 - DNA, 15 bp, Homo sapiens
tgagacaagtgagaa

SEQ ID NO: 325126 - DNA, 15 bp, Homo sapiens
ctgagacaagtgaga

SEQ ID NO: 325127 - DNA, 15 bp, Homo sapiens
tctgagacaagtgag

SEQ ID NO: 325128 - DNA, 15 bp, Homo sapiens
atctgagacaagtga

SEQ ID NO: 325129 - DNA, 15 bp, Homo sapiens
aatctgagacaagtg

SEQ ID NO: 325130 - DNA, 15 bp, Homo sapiens
caatctgagacaagt

SEQ ID NO: 325131 - DNA, 15 bp, Homo sapiens
gcaatctgagacaag

SEQ ID NO: 325132 - DNA, 15 bp, Homo sapiens
ggcaatctgagacaa

SEQ ID NO: 325133 - DNA, 15 bp, Homo sapiens
gggcaatctgagaca

SEQ ID NO: 325134 - DNA, 15 bp, Homo sapiens
tgggcaatctgagac

SEQ ID NO: 325135 - DNA, 15 bp, Homo sapiens
ctgggcaatctgaga

SEQ ID NO: 325136 - DNA, 15 bp, Homo sapiens
gctgggcaatctgag

SEQ ID NO: 325137 - DNA, 15 bp, Homo sapiens
agctgggcaatctga

SEQ ID NO: 325138 - DNA, 15 bp, Homo sapiens
cagctgggcaatctg

SEQ ID NO: 325139 - DNA, 15 bp, Homo sapiens
gcagctgggcaatct

SEQ ID NO: 325140 - DNA, 15 bp, Homo sapiens
ggcagctgggcaatc

SEQ ID NO: 325141 - DNA, 15 bp, Homo sapiens
gggcagctgggcaat

SEQ ID NO: 325142 - DNA, 15 bp, Homo sapiens
agggcagctgggcaa

SEQ ID NO: 325143 - DNA, 15 bp, Homo sapiens
aagggcagctgggca

SEQ ID NO: 325144 - DNA, 15 bp, Homo sapiens
caagggcagctgggc

SEQ ID NO: 325145 - DNA, 15 bp, Homo sapiens
tcaagggcagctggg

SEQ ID NO: 325146 - DNA, 15 bp, Homo sapiens
gtcaagggcagctgg

SEQ ID NO: 325147 - DNA, 15 bp, Homo sapiens
ggtcaagggcagctg

SEQ ID NO: 325148 - DNA, 15 bp, Homo sapiens
cggtcaagggcagct

SEQ ID NO: 325149 - DNA, 15 bp, Homo sapiens
ccggtcaagggcagc

SEQ ID NO: 325150 - DNA, 15 bp, Homo sapiens
tccggtcaagggcag

SEQ ID NO: 325151 - DNA, 15 bp, Homo sapiens
ttccggtcaagggca

SEQ ID NO: 325152 - DNA, 15 bp, Homo sapiens
cttccggtcaagggc

SEQ ID NO: 325153 - DNA, 15 bp, Homo sapiens
gcttccggtcaaggg

SEQ ID NO: 325154 - DNA, 15 bp, Homo sapiens
tgcttccggtcaagg

SEQ ID NO: 325155 - DNA, 15 bp, Homo sapiens
atgcttccggtcaag

SEQ ID NO: 325156 - DNA, 15 bp, Homo sapiens
catgcttccggtcaa

SEQ ID NO: 325157 - DNA, 15 bp, Homo sapiens
tcatgcttccggtca

SEQ ID NO: 325158 - DNA, 15 bp, Homo sapiens
ctcatgcttccggtc

SEQ ID NO: 325159 - DNA, 15 bp, Homo sapiens
actcatgcttccggt

SEQ ID NO: 325160 - DNA, 15 bp, Homo sapiens
tactcatgcttccgg

SEQ ID NO: 325161 - DNA, 15 bp, Homo sapiens
atactcatgcttccg

SEQ ID NO: 325162 - DNA, 15 bp, Homo sapiens
gatactcatgcttcc

SEQ ID NO: 325163 - DNA, 15 bp, Homo sapiens
tgatactcatgcttc

SEQ ID NO: 325164 - DNA, 15 bp, Homo sapiens
atgatactcatgctt

SEQ ID NO: 325165 - DNA, 15 bp, Homo sapiens
gatgatactcatgct

SEQ ID NO: 325166 - DNA, 15 bp, Homo sapiens
agatgatactcatgc

SEQ ID NO: 325167 - DNA, 15 bp, Homo sapiens
aagatgatactcatg

SEQ ID NO: 325168 - DNA, 15 bp, Homo sapiens
gaagatgatactcat

SEQ ID NO: 325169 - DNA, 15 bp, Homo sapiens
agaagatgatactca

SEQ ID NO: 325170 - DNA, 15 bp, Homo sapiens
aagaagatgatactc

SEQ ID NO: 325171 - DNA, 15 bp, Homo sapiens
gaagaagatgatact

SEQ ID NO: 325172 - DNA, 15 bp, Homo sapiens
ggaagaagatgatac

SEQ ID NO: 325173 - DNA, 15 bp, Homo sapiens
aggaagaagatgata

SEQ ID NO: 325174 - DNA, 15 bp, Homo sapiens
caggaagaagatgat

SEQ ID NO: 325175 - DNA, 15 bp, Homo sapiens
gcaggaagaagatga

SEQ ID NO: 325176 - DNA, 15 bp, Homo sapiens
ggcaggaagaagatg

SEQ ID NO: 325177 - DNA, 15 bp, Homo sapiens
gggcaggaagaagat

SEQ ID NO: 325178 - DNA, 15 bp, Homo sapiens
ggggcaggaagaaga

SEQ ID NO: 325179 - DNA, 15 bp, Homo sapiens
aggggcaggaagaag

SEQ ID NO: 325180 - DNA, 15 bp, Homo sapiens
caggggcaggaagaa

SEQ ID NO: 325181 - DNA, 15 bp, Homo sapiens
tcaggggcaggaaga

SEQ ID NO: 325182 - DNA, 15 bp, Homo sapiens
ttcaggggcaggaag

SEQ ID NO: 325183 - DNA, 15 bp, Homo sapiens
tttcaggggcaggaa

SEQ ID NO: 325184 - DNA, 15 bp, Homo sapiens
ctttcaggggcagga

SEQ ID NO: 325185 - DNA, 15 bp, Homo sapiens
actttcaggggcagg

SEQ ID NO: 325186 - DNA, 15 bp, Homo sapiens
cactttcaggggcag

SEQ ID NO: 325187 - DNA, 15 bp, Homo sapiens
tcactttcaggggca

SEQ ID NO: 325188 - DNA, 15 bp, Homo sapiens
gtcactttcaggggc

SEQ ID NO: 325189 - DNA, 15 bp, Homo sapiens
ggtcactttcagggg

SEQ ID NO: 325190 - DNA, 15 bp, Homo sapiens
gggtcactttcaggg

SEQ ID NO: 325191 - DNA, 15 bp, Homo sapiens
tgggtcactttcagg

SEQ ID NO: 325192 - DNA, 15 bp, Homo sapiens
ctgggtcactttcag

SEQ ID NO: 325193 - DNA, 15 bp, Homo sapiens
tctgggtcactttca

SEQ ID NO: 325194 - DNA, 15 bp, Homo sapiens
ttctgggtcactttc

SEQ ID NO: 325195 - DNA, 15 bp, Homo sapiens
attctgggtcacttt

SEQ ID NO: 325196 - DNA, 15 bp, Homo sapiens
aattctgggtcactt

SEQ ID NO: 325197 - DNA, 15 bp, Homo sapiens
aaattctgggtcact

SEQ ID NO: 325198 - DNA, 15 bp, Homo sapiens
caaattctgggtcac

SEQ ID NO: 325199 - DNA, 15 bp, Homo sapiens
tcaaattctgggtca

SEQ ID NO: 325200 - DNA, 15 bp, Homo sapiens
gtcaaattctgggtc

SEQ ID NO: 325201 - DNA, 15 bp, Homo sapiens
ggtcaaattctgggt

SEQ ID NO: 325202 - DNA, 15 bp, Homo sapiens
aggtcaaattctggg

SEQ ID NO: 325203 - DNA, 15 bp, Homo sapiens
aaggtcaaattctgg

SEQ ID NO: 325204 - DNA, 15 bp, Homo sapiens
caaggtcaaattctg

SEQ ID NO: 325205 - DNA, 15 bp, Homo sapiens
tcaaggtcaaattct

SEQ ID NO: 325206 - DNA, 15 bp, Homo sapiens
atcaaggtcaaattc

SEQ ID NO: 325207 - DNA, 15 bp, Homo sapiens
tatcaaggtcaaatt

SEQ ID NO: 325208 - DNA, 15 bp, Homo sapiens
ctatcaaggtcaaat

SEQ ID NO: 325209 - DNA, 15 bp, Homo sapiens
tctatcaaggtcaaa

SEQ ID NO: 325210 - DNA, 15 bp, Homo sapiens
ctctatcaaggtcaa

SEQ ID NO: 325211 - DNA, 15 bp, Homo sapiens
cctctatcaaggtca

SEQ ID NO: 325212 - DNA, 15 bp, Homo sapiens
tcctctatcaaggtc

SEQ ID NO: 325213 - DNA, 15 bp, Homo sapiens
ctcctctatcaaggt

SEQ ID NO: 325214 - DNA, 15 bp, Homo sapiens
tctcctctatcaagg

SEQ ID NO: 325215 - DNA, 15 bp, Homo sapiens
ctctcctctatcaag

SEQ ID NO: 325216 - DNA, 15 bp, Homo sapiens
gctctcctctatcaa

SEQ ID NO: 325217 - DNA, 15 bp, Homo sapiens
ggctctcctctatca

SEQ ID NO: 325218 - DNA, 15 bp, Homo sapiens
aggctctcctctatc

SEQ ID NO: 325219 - DNA, 15 bp, Homo sapiens
gaggctctcctctat

SEQ ID NO: 325220 - DNA, 15 bp, Homo sapiens
tgaggctctcctcta

SEQ ID NO: 325221 - DNA, 15 bp, Homo sapiens
gtgaggctctcctct

SEQ ID NO: 325222 - DNA, 15 bp, Homo sapiens
ggtgaggctctcctc

SEQ ID NO: 325223 - DNA, 15 bp, Homo sapiens
aggtgaggctctcct

SEQ ID NO: 325224 - DNA, 15 bp, Homo sapiens
gaggtgaggctctcc

SEQ ID NO: 325225 - DNA, 15 bp, Homo sapiens
ggaggtgaggctctc

SEQ ID NO: 325226 - DNA, 15 bp, Homo sapiens
cggaggtgaggctct

SEQ ID NO: 325227 - DNA, 15 bp, Homo sapiens
tcggaggtgaggctc

SEQ ID NO: 325228 - DNA, 15 bp, Homo sapiens
ctcggaggtgaggct

SEQ ID NO: 325229 - DNA, 15 bp, Homo sapiens
actcggaggtgaggc

SEQ ID NO: 325230 - DNA, 15 bp, Homo sapiens
aactcggaggtgagg

SEQ ID NO: 325231 - DNA, 15 bp, Homo sapiens
gaactcggaggtgag

SEQ ID NO: 325232 - DNA, 15 bp, Homo sapiens
tgaactcggaggtga

SEQ ID NO: 325233 - DNA, 15 bp, Homo sapiens
atgaactcggaggtg

SEQ ID NO: 325234 - DNA, 15 bp, Homo sapiens
aatgaactcggaggt

SEQ ID NO: 325235 - DNA, 15 bp, Homo sapiens
gaatgaactcggagg

SEQ ID NO: 325236 - DNA, 15 bp, Homo sapiens
tgaatgaactcggag

SEQ ID NO: 325237 - DNA, 15 bp, Homo sapiens
atgaatgaactcgga

SEQ ID NO: 325238 - DNA, 15 bp, Homo sapiens
catgaatgaactcgg

SEQ ID NO: 325239 - DNA, 15 bp, Homo sapiens
tcatgaatgaactcg

SEQ ID NO: 325240 - DNA, 15 bp, Homo sapiens
gtcatgaatgaactc

SEQ ID NO: 325241 - DNA, 15 bp, Homo sapiens
tgtcatgaatgaact

SEQ ID NO: 325242 - DNA, 15 bp, Homo sapiens
atgtcatgaatgaac

SEQ ID NO: 325243 - DNA, 15 bp, Homo sapiens
tatgtcatgaatgaa

SEQ ID NO: 325244 - DNA, 15 bp, Homo sapiens
ctatgtcatgaatga

SEQ ID NO: 325245 - DNA, 15 bp, Homo sapiens
tctatgtcatgaatg

SEQ ID NO: 325246 - DNA, 15 bp, Homo sapiens
gtctatgtcatgaat

SEQ ID NO: 325247 - DNA, 15 bp, Homo sapiens
ggtctatgtcatgaa

SEQ ID NO: 325248 - DNA, 15 bp, Homo sapiens
cggtctatgtcatga

SEQ ID NO: 325249 - DNA, 15 bp, Homo sapiens
tcggtctatgtcatg

SEQ ID NO: 325250 - DNA, 15 bp, Homo sapiens
ctcggtctatgtcat

SEQ ID NO: 325251 - DNA, 15 bp, Homo sapiens
tctcggtctatgtca

SEQ ID NO: 325252 - DNA, 15 bp, Homo sapiens
ttctcggtctatgtc

SEQ ID NO: 325253 - DNA, 15 bp, Homo sapiens
gttctcggtctatgt

SEQ ID NO: 325254 - DNA, 15 bp, Homo sapiens
agttctcggtctatg

SEQ ID NO: 325255 - DNA, 15 bp, Homo sapiens
cagttctcggtctat

SEQ ID NO: 325256 - DNA, 15 bp, Homo sapiens
tcagttctcggtcta

SEQ ID NO: 325257 - DNA, 15 bp, Homo sapiens
ttcagttctcggtct

SEQ ID NO: 325258 - DNA, 15 bp, Homo sapiens
cttcagttctcggtc

SEQ ID NO: 325259 - DNA, 15 bp, Homo sapiens
tcttcagttctcggt

SEQ ID NO: 325260 - DNA, 15 bp, Homo sapiens
gtcttcagttctcgg

SEQ ID NO: 325261 - DNA, 15 bp, Homo sapiens
ggtcttcagttctcg

SEQ ID NO: 325262 - DNA, 15 bp, Homo sapiens
cggtcttcagttctc

SEQ ID NO: 325263 - DNA, 15 bp, Homo sapiens
acggtcttcagttct

SEQ ID NO: 325264 - DNA, 15 bp, Homo sapiens
cacggtcttcagttc

SEQ ID NO: 325265 - DNA, 15 bp, Homo sapiens
gcacggtcttcagtt

SEQ ID NO: 325266 - DNA, 15 bp, Homo sapiens
tgcacggtcttcagt

SEQ ID NO: 325267 - DNA, 15 bp, Homo sapiens
ctgcacggtcttcag

SEQ ID NO: 325268 - DNA, 15 bp, Homo sapiens
cctgcacggtcttca

SEQ ID NO: 325269 - DNA, 15 bp, Homo sapiens
gcctgcacggtcttc

SEQ ID NO: 325270 - DNA, 15 bp, Homo sapiens
cgcctgcacggtctt

SEQ ID NO: 325271 - DNA, 15 bp, Homo sapiens
ccgcctgcacggtct

SEQ ID NO: 325272 - DNA, 15 bp, Homo sapiens
accgcctgcacggtc

SEQ ID NO: 325273 - DNA, 15 bp, Homo sapiens
gaccgcctgcacggt

SEQ ID NO: 325274 - DNA, 15 bp, Homo sapiens
ggaccgcctgcacgg

SEQ ID NO: 325275 - DNA, 15 bp, Homo sapiens
aggaccgcctgcacg

SEQ ID NO: 325276 - DNA, 15 bp, Homo sapiens
gaggaccgcctgcac

SEQ ID NO: 325277 - DNA, 15 bp, Homo sapiens
tgaggaccgcctgca

SEQ ID NO: 325278 - DNA, 15 bp, Homo sapiens
gtgaggaccgcctgc

SEQ ID NO: 325279 - DNA, 15 bp, Homo sapiens
agtgaggaccgcctg

SEQ ID NO: 325280 - DNA, 15 bp, Homo sapiens
cagtgaggaccgcct

SEQ ID NO: 325281 - DNA, 15 bp, Homo sapiens
acagtgaggaccgcc

SEQ ID NO: 325282 - DNA, 15 bp, Homo sapiens
gacagtgaggaccgc

SEQ ID NO: 325283 - DNA, 15 bp, Homo sapiens
ggacagtgaggaccg

SEQ ID NO: 325284 - DNA, 15 bp, Homo sapiens
gggacagtgaggacc

SEQ ID NO: 325285 - DNA, 15 bp, Homo sapiens
ggggacagtgaggac

SEQ ID NO: 325286 - DNA, 15 bp, Homo sapiens
tggggacagtgagga

SEQ ID NO: 325287 - DNA, 15 bp, Homo sapiens
ttggggacagtgagg

SEQ ID NO: 325288 - DNA, 15 bp, Homo sapiens
cttggggacagtgag

SEQ ID NO: 325289 - DNA, 15 bp, Homo sapiens
gcttggggacagtga

SEQ ID NO: 325290 - DNA, 15 bp, Homo sapiens
agcttggggacagtg

SEQ ID NO: 325291 - DNA, 15 bp, Homo sapiens
cagcttggggacagt

SEQ ID NO: 325292 - DNA, 15 bp, Homo sapiens
tcagcttggggacag

SEQ ID NO: 325293 - DNA, 15 bp, Homo sapiens
ttcagcttggggaca

SEQ ID NO: 325294 - DNA, 15 bp, Homo sapiens
cttcagcttggggac

SEQ ID NO: 325295 - DNA, 15 bp, Homo sapiens
gcttcagcttgggga

SEQ ID NO: 325296 - DNA, 15 bp, Homo sapiens
agcttcagcttgggg

SEQ ID NO: 325297 - DNA, 15 bp, Homo sapiens
cagcttcagcttggg

SEQ ID NO: 325298 - DNA, 15 bp, Homo sapiens
tcagcttcagcttgg

SEQ ID NO: 325299 - DNA, 15 bp, Homo sapiens
ctcagcttcagcttg

SEQ ID NO: 325300 - DNA, 15 bp, Homo sapiens
actcagcttcagctt

SEQ ID NO: 325301 - DNA, 15 bp, Homo sapiens
aactcagcttcagct

SEQ ID NO: 325302 - DNA, 15 bp, Homo sapiens
taactcagcttcagc

SEQ ID NO: 325303 - DNA, 15 bp, Homo sapiens
ataactcagcttcag

SEQ ID NO: 325304 - DNA, 15 bp, Homo sapiens
cataactcagcttca

SEQ ID NO: 325305 - DNA, 15 bp, Homo sapiens
tcataactcagcttc

SEQ ID NO: 325306 - DNA, 15 bp, Homo sapiens
ttcataactcagctt

SEQ ID NO: 325307 - DNA, 15 bp, Homo sapiens
cttcataactcagct

SEQ ID NO: 325308 - DNA, 15 bp, Homo sapiens
ccttcataactcagc

SEQ ID NO: 325309 - DNA, 15 bp, Homo sapiens
gccttcataactcag

SEQ ID NO: 325310 - DNA, 15 bp, Homo sapiens
cgccttcataactca

SEQ ID NO: 325311 - DNA, 15 bp, Homo sapiens
tcgccttcataactc

SEQ ID NO: 325312 - DNA, 15 bp, Homo sapiens
ttcgccttcataact

SEQ ID NO: 325313 - DNA, 15 bp, Homo sapiens
cttcgccttcataac

SEQ ID NO: 325314 - DNA, 15 bp, Homo sapiens
acttcgccttcataa

SEQ ID NO: 325315 - DNA, 15 bp, Homo sapiens
gacttcgccttcata

SEQ ID NO: 325316 - DNA, 15 bp, Homo sapiens
tgacttcgccttcat

SEQ ID NO: 325317 - DNA, 15 bp, Homo sapiens
gtgacttcgccttca

SEQ ID NO: 325318 - DNA, 15 bp, Homo sapiens
ggtgacttcgccttc

SEQ ID NO: 325319 - DNA, 15 bp, Homo sapiens
tggtgacttcgcctt

SEQ ID NO: 325320 - DNA, 15 bp, Homo sapiens
ttggtgacttcgcct

SEQ ID NO: 325321 - DNA, 15 bp, Homo sapiens
cttggtgacttcgcc

SEQ ID NO: 325322 - DNA, 15 bp, Homo sapiens
acttggtgacttcgc

SEQ ID NO: 325323 - DNA, 15 bp, Homo sapiens
gacttggtgacttcg

SEQ ID NO: 325324 - DNA, 15 bp, Homo sapiens
ggacttggtgacttc

SEQ ID NO: 325325 - DNA, 15 bp, Homo sapiens
gggacttggtgactt

SEQ ID NO: 325326 - DNA, 15 bp, Homo sapiens
agggacttggtgact

SEQ ID NO: 325327 - DNA, 15 bp, Homo sapiens
cagggacttggtgac

SEQ ID NO: 325328 - DNA, 15 bp, Homo sapiens
gcagggacttggtga

SEQ ID NO: 325329 - DNA, 15 bp, Homo sapiens
tgcagggacttggtg

SEQ ID NO: 325330 - DNA, 15 bp, Homo sapiens
ctgcagggacttggt

SEQ ID NO: 325331 - DNA, 15 bp, Homo sapiens
cctgcagggacttgg

SEQ ID NO: 325332 - DNA, 15 bp, Homo sapiens
tcctgcagggacttg

SEQ ID NO: 325333 - DNA, 15 bp, Homo sapiens
ctcctgcagggactt

SEQ ID NO: 325334 - DNA, 15 bp, Homo sapiens
tctcctgcagggact

SEQ ID NO: 325335 - DNA, 15 bp, Homo sapiens
atctcctgcagggac

SEQ ID NO: 325336 - DNA, 15 bp, Homo sapiens
catctcctgcaggga

SEQ ID NO: 325337 - DNA, 15 bp, Homo sapiens
tcatctcctgcaggg

SEQ ID NO: 325338 - DNA, 15 bp, Homo sapiens
ctcatctcctgcagg

SEQ ID NO: 325339 - DNA, 15 bp, Homo sapiens
actcatctcctgcag

SEQ ID NO: 325340 - DNA, 15 bp, Homo sapiens
tactcatctcctgca

SEQ ID NO: 325341 - DNA, 15 bp, Homo sapiens
atactcatctcctgc

SEQ ID NO: 325342 - DNA, 15 bp, Homo sapiens
catactcatctcctg

SEQ ID NO: 325343 - DNA, 15 bp, Homo sapiens
acatactcatctcct

SEQ ID NO: 325344 - DNA, 15 bp, Homo sapiens
gacatactcatctcc

SEQ ID NO: 325345 - DNA, 15 bp, Homo sapiens
agacatactcatctc

SEQ ID NO: 325346 - DNA, 15 bp, Homo sapiens
cagacatactcatct

SEQ ID NO: 325347 - DNA, 15 bp, Homo sapiens
tcagacatactcatc

SEQ ID NO: 325348 - DNA, 15 bp, Homo sapiens
ttcagacatactcat

SEQ ID NO: 325349 - DNA, 15 bp, Homo sapiens
cttcagacatactca

SEQ ID NO: 325350 - DNA, 15 bp, Homo sapiens
tcttcagacatactc

SEQ ID NO: 325351 - DNA, 15 bp, Homo sapiens
gtcttcagacatact

SEQ ID NO: 325352 - DNA, 15 bp, Homo sapiens
ggtcttcagacatac

SEQ ID NO: 325353 - DNA, 15 bp, Homo sapiens
gggtcttcagacata

SEQ ID NO: 325354 - DNA, 15 bp, Homo sapiens
agggtcttcagacat

SEQ ID NO: 325355 - DNA, 15 bp, Homo sapiens
aagggtcttcagaca

SEQ ID NO: 325356 - DNA, 15 bp, Homo sapiens
aaagggtcttcagac

SEQ ID NO: 325357 - DNA, 15 bp, Homo sapiens
gaaagggtcttcaga

SEQ ID NO: 325358 - DNA, 15 bp, Homo sapiens
cgaaagggtcttcag

SEQ ID NO: 325359 - DNA, 15 bp, Homo sapiens
gcgaaagggtcttca

SEQ ID NO: 325360 - DNA, 15 bp, Homo sapiens
agcgaaagggtcttc

SEQ ID NO: 325361 - DNA, 15 bp, Homo sapiens
gagcgaaagggtctt

SEQ ID NO: 325362 - DNA, 15 bp, Homo sapiens
agagcgaaagggtct

SEQ ID NO: 325363 - DNA, 15 bp, Homo sapiens
aagagcgaaagggtc

SEQ ID NO: 325364 - DNA, 15 bp, Homo sapiens
caagagcgaaagggt

SEQ ID NO: 325365 - DNA, 15 bp, Homo sapiens
ccaagagcgaaaggg

SEQ ID NO: 325366 - DNA, 15 bp, Homo sapiens
accaagagcgaaagg

SEQ ID NO: 325367 - DNA, 15 bp, Homo sapiens
caccaagagcgaaag

SEQ ID NO: 325368 - DNA, 15 bp, Homo sapiens
ccaccaagagcgaaa

SEQ ID NO: 325369 - DNA, 15 bp, Homo sapiens
cccaccaagagcgaa

SEQ ID NO: 325370 - DNA, 15 bp, Homo sapiens
acccaccaagagcga

SEQ ID NO: 325371 - DNA, 15 bp, Homo sapiens
cacccaccaagagcg

SEQ ID NO: 325372 - DNA, 15 bp, Homo sapiens
ccaccccatccaccc

SEQ ID NO: 325373 - DNA, 15 bp, Homo sapiens
cccaccccatccacc

SEQ ID NO: 325374 - DNA, 15 bp, Homo sapiens
ccccaccccatccac

SEQ ID NO: 325375 - DNA, 15 bp, Homo sapiens
gccccaccccatcca

SEQ ID NO: 325376 - DNA, 15 bp, Homo sapiens
tgccccaccccatcc

SEQ ID NO: 325377 - DNA, 15 bp, Homo sapiens
ctgccccaccccatc

SEQ ID NO: 325378 - DNA, 15 bp, Homo sapiens
cctgccccaccccat

SEQ ID NO: 325379 - DNA, 15 bp, Homo sapiens
ccctgccccacccca

SEQ ID NO: 325380 - DNA, 15 bp, Homo sapiens
accctgccccacccc

SEQ ID NO: 325381 - DNA, 15 bp, Homo sapiens
gaccctgccccaccc

SEQ ID NO: 325382 - DNA, 15 bp, Homo sapiens
agaccctgccccacc

SEQ ID NO: 325383 - DNA, 15 bp, Homo sapiens
aagaccctgccccac

SEQ ID NO: 325384 - DNA, 15 bp, Homo sapiens
aaagaccctgcccca

SEQ ID NO: 325385 - DNA, 15 bp, Homo sapiens
caaagaccctgcccc

SEQ ID NO: 325386 - DNA, 15 bp, Homo sapiens
ccaaagaccctgccc

SEQ ID NO: 325387 - DNA, 15 bp, Homo sapiens
cccaaagaccctgcc

SEQ ID NO: 325388 - DNA, 15 bp, Homo sapiens
gcccaaagaccctgc

SEQ ID NO: 325389 - DNA, 15 bp, Homo sapiens
ggcccaaagaccctg

SEQ ID NO: 325390 - DNA, 15 bp, Homo sapiens
aggcccaaagaccct

SEQ ID NO: 325391 - DNA, 15 bp, Homo sapiens
aaggcccaaagaccc

SEQ ID NO: 325392 - DNA, 15 bp, Homo sapiens
gaaggcccaaagacc

SEQ ID NO: 325393 - DNA, 15 bp, Homo sapiens
ggaaggcccaaagac

SEQ ID NO: 325394 - DNA, 15 bp, Homo sapiens
tggaaggcccaaaga

SEQ ID NO: 325395 - DNA, 15 bp, Homo sapiens
gtggaaggcccaaag

SEQ ID NO: 325396 - DNA, 15 bp, Homo sapiens
agtggaaggcccaaa

SEQ ID NO: 325397 - DNA, 15 bp, Homo sapiens
cagtggaaggcccaa

SEQ ID NO: 325398 - DNA, 15 bp, Homo sapiens
acagtggaaggccca

SEQ ID NO: 325399 - DNA, 15 bp, Homo sapiens
cacagtggaaggccc

SEQ ID NO: 325400 - DNA, 15 bp, Homo sapiens
gcacagtggaaggcc

SEQ ID NO: 325401 - DNA, 15 bp, Homo sapiens
agcacagtggaaggc

SEQ ID NO: 325402 - DNA, 15 bp, Homo sapiens
tagcacagtggaagg

SEQ ID NO: 325403 - DNA, 15 bp, Homo sapiens
ttagcacagtggaag

SEQ ID NO: 325404 - DNA, 15 bp, Homo sapiens
cttagcacagtggaa

SEQ ID NO: 325405 - DNA, 15 bp, Homo sapiens
gcttagcacagtgga

SEQ ID NO: 325406 - DNA, 15 bp, Homo sapiens
tgcttagcacagtgg

SEQ ID NO: 325407 - DNA, 15 bp, Homo sapiens
ctgcttagcacagtg

SEQ ID NO: 325408 - DNA, 15 bp, Homo sapiens
tctgcttagcacagt

SEQ ID NO: 325409 - DNA, 15 bp, Homo sapiens
ttctgcttagcacag

SEQ ID NO: 325410 - DNA, 15 bp, Homo sapiens
gttctgcttagcaca

SEQ ID NO: 325411 - DNA, 15 bp, Homo sapiens
cgttctgcttagcac

SEQ ID NO: 325412 - DNA, 15 bp, Homo sapiens
gcgttctgcttagca

SEQ ID NO: 325413 - DNA, 15 bp, Homo sapiens
tgcgttctgcttagc

SEQ ID NO: 325414 - DNA, 15 bp, Homo sapiens
ttgcgttctgcttag

SEQ ID NO: 325415 - DNA, 15 bp, Homo sapiens
cttgcgttctgctta

SEQ ID NO: 325416 - DNA, 15 bp, Homo sapiens
ccttgcgttctgctt

SEQ ID NO: 325417 - DNA, 15 bp, Homo sapiens
cccttgcgttctgct

SEQ ID NO: 325418 - DNA, 15 bp, Homo sapiens
gcccttgcgttctgc

SEQ ID NO: 325419 - DNA, 15 bp, Homo sapiens
agcccttgcgttctg

SEQ ID NO: 325420 - DNA, 15 bp, Homo sapiens
gagcccttgcgttct

SEQ ID NO: 325421 - DNA, 15 bp, Homo sapiens
ggagcccttgcgttc

SEQ ID NO: 325422 - DNA, 15 bp, Homo sapiens
tggagcccttgcgtt

SEQ ID NO: 325423 - DNA, 15 bp, Homo sapiens
gtggagcccttgcgt

SEQ ID NO: 325424 - DNA, 15 bp, Homo sapiens
tgtggagcccttgcg

SEQ ID NO: 325425 - DNA, 15 bp, Homo sapiens
ctgtggagcccttgc

SEQ ID NO: 325426 - DNA, 15 bp, Homo sapiens
cctgtggagcccttg

SEQ ID NO: 325427 - DNA, 15 bp, Homo sapiens
gcctgtggagccctt

SEQ ID NO: 325428 - DNA, 15 bp, Homo sapiens
agcctgtggagccct

SEQ ID NO: 325429 - DNA, 15 bp, Homo sapiens
aagcctgtggagccc

SEQ ID NO: 325430 - DNA, 15 bp, Homo sapiens
caagcctgtggagcc

SEQ ID NO: 325431 - DNA, 15 bp, Homo sapiens
acaagcctgtggagc

SEQ ID NO: 325432 - DNA, 15 bp, Homo sapiens
tacaagcctgtggag

SEQ ID NO: 325433 - DNA, 15 bp, Homo sapiens
ctacaagcctgtgga

SEQ ID NO: 325434 - DNA, 15 bp, Homo sapiens
cctacaagcctgtgg

SEQ ID NO: 325435 - DNA, 15 bp, Homo sapiens
ccctacaagcctgtg

SEQ ID NO: 325436 - DNA, 15 bp, Homo sapiens
cccctacaagcctgt

SEQ ID NO: 325437 - DNA, 15 bp, Homo sapiens
ccccctacaagcctg

SEQ ID NO: 325438 - DNA, 15 bp, Homo sapiens
cccccctacaagcct

SEQ ID NO: 325439 - DNA, 15 bp, Homo sapiens
gcccccctacaagcc

SEQ ID NO: 325440 - DNA, 15 bp, Homo sapiens
ggcccccctacaagc

SEQ ID NO: 325441 - DNA, 15 bp, Homo sapiens
cggcccccctacaag

SEQ ID NO: 325442 - DNA, 15 bp, Homo sapiens
acggcccccctacaa

SEQ ID NO: 325443 - DNA, 15 bp, Homo sapiens
cacggcccccctaca

SEQ ID NO: 325444 - DNA, 15 bp, Homo sapiens
ccacggcccccctac

SEQ ID NO: 325445 - DNA, 15 bp, Homo sapiens
tccacggccccccta

SEQ ID NO: 325446 - DNA, 15 bp, Homo sapiens
atccacggcccccct

SEQ ID NO: 325447 - DNA, 15 bp, Homo sapiens
catccacggcccccc

SEQ ID NO: 325448 - DNA, 15 bp, Homo sapiens
tcatccacggccccc

SEQ ID NO: 325449 - DNA, 15 bp, Homo sapiens
ctcatccacggcccc

SEQ ID NO: 325450 - DNA, 15 bp, Homo sapiens
actcatccacggccc

SEQ ID NO: 325451 - DNA, 15 bp, Homo sapiens
gactcatccacggcc

SEQ ID NO: 325452 - DNA, 15 bp, Homo sapiens
ggactcatccacggc

SEQ ID NO: 325453 - DNA, 15 bp, Homo sapiens
aggactcatccacgg

SEQ ID NO: 325454 - DNA, 15 bp, Homo sapiens
aaggactcatccacg

SEQ ID NO: 325455 - DNA, 15 bp, Homo sapiens
taaggactcatccac

SEQ ID NO: 325456 - DNA, 15 bp, Homo sapiens
ttaaggactcatcca

SEQ ID NO: 325457 - DNA, 15 bp, Homo sapiens
attaaggactcatcc

SEQ ID NO: 325458 - DNA, 15 bp, Homo sapiens
gattaaggactcatc

SEQ ID NO: 325459 - DNA, 15 bp, Homo sapiens
ggattaaggactcat

SEQ ID NO: 325460 - DNA, 15 bp, Homo sapiens
aggattaaggactca

SEQ ID NO: 325461 - DNA, 15 bp, Homo sapiens
gaggattaaggactc

SEQ ID NO: 325462 - DNA, 15 bp, Homo sapiens
tgaggattaaggact

SEQ ID NO: 325463 - DNA, 15 bp, Homo sapiens
atgaggattaaggac

SEQ ID NO: 325464 - DNA, 15 bp, Homo sapiens
gatgaggattaagga

SEQ ID NO: 325465 - DNA, 15 bp, Homo sapiens
cgatgaggattaagg

SEQ ID NO: 325466 - DNA, 15 bp, Homo sapiens
acgatgaggattaag

SEQ ID NO: 325467 - DNA, 15 bp, Homo sapiens
cacgatgaggattaa

SEQ ID NO: 325468 - DNA, 15 bp, Homo sapiens
gcacgatgaggatta

SEQ ID NO: 325469 - DNA, 15 bp, Homo sapiens
ggcacgatgaggatt

SEQ ID NO: 325470 - DNA, 15 bp, Homo sapiens
tggcacgatgaggat

SEQ ID NO: 325471 - DNA, 15 bp, Homo sapiens
ctggcacgatgagga

SEQ ID NO: 325472 - DNA, 15 bp, Homo sapiens
tctggcacgatgagg

SEQ ID NO: 325473 - DNA, 15 bp, Homo sapiens
ttctggcacgatgag

SEQ ID NO: 325474 - DNA, 15 bp, Homo sapiens
cttctggcacgatga

SEQ ID NO: 325475 - DNA, 15 bp, Homo sapiens
ccttctggcacgatg

SEQ ID NO: 325476 - DNA, 15 bp, Homo sapiens
cccttctggcacgat

SEQ ID NO: 325477 - DNA, 15 bp, Homo sapiens
tcccttctggcacga

SEQ ID NO: 325478 - DNA, 15 bp, Homo sapiens
ttcccttctggcacg

SEQ ID NO: 325479 - DNA, 15 bp, Homo sapiens
cttcccttctggcac

SEQ ID NO: 325480 - DNA, 15 bp, Homo sapiens
ccttcccttctggca

SEQ ID NO: 325481 - DNA, 15 bp, Homo sapiens
gccttcccttctggc

SEQ ID NO: 325482 - DNA, 15 bp, Homo sapiens
agccttcccttctgg

SEQ ID NO: 325483 - DNA, 15 bp, Homo sapiens
cagccttcccttctg

SEQ ID NO: 325484 - DNA, 15 bp, Homo sapiens
tcagccttcccttct

SEQ ID NO: 325485 - DNA, 15 bp, Homo sapiens
ttcagccttcccttc

SEQ ID NO: 325486 - DNA, 15 bp, Homo sapiens
gttcagccttccctt

SEQ ID NO: 325487 - DNA, 15 bp, Homo sapiens
agttcagccttccct

SEQ ID NO: 325488 - DNA, 15 bp, Homo sapiens
cagttcagccttccc

SEQ ID NO: 325489 - DNA, 15 bp, Homo sapiens
gcagttcagccttcc

SEQ ID NO: 325490 - DNA, 15 bp, Homo sapiens
ggcagttcagccttc

SEQ ID NO: 325491 - DNA, 15 bp, Homo sapiens
aggcagttcagcctt

SEQ ID NO: 325492 - DNA, 15 bp, Homo sapiens
aaggcagttcagcct

SEQ ID NO: 325493 - DNA, 15 bp, Homo sapiens
gaaggcagttcagcc

SEQ ID NO: 325494 - DNA, 15 bp, Homo sapiens
agaaggcagttcagc

SEQ ID NO: 325495 - DNA, 15 bp, Homo sapiens
gagaaggcagttcag

SEQ ID NO: 325496 - DNA, 15 bp, Homo sapiens
agagaaggcagttca

SEQ ID NO: 325497 - DNA, 15 bp, Homo sapiens
gagagaaggcagttc

SEQ ID NO: 325498 - DNA, 15 bp, Homo sapiens
tgagagaaggcagtt

SEQ ID NO: 325499 - DNA, 15 bp, Homo sapiens
atgagagaaggcagt

SEQ ID NO: 325500 - DNA, 15 bp, Homo sapiens
gatgagagaaggcag

SEQ ID NO: 325501 - DNA, 15 bp, Homo sapiens
tgatgagagaaggca

SEQ ID NO: 325502 - DNA, 15 bp, Homo sapiens
ctgatgagagaaggc

SEQ ID NO: 325503 - DNA, 15 bp, Homo sapiens
tctgatgagagaagg

SEQ ID NO: 325504 - DNA, 15 bp, Homo sapiens
gtctgatgagagaag

SEQ ID NO: 325505 - DNA, 15 bp, Homo sapiens
agtctgatgagagaa

SEQ ID NO: 325506 - DNA, 15 bp, Homo sapiens
gagtctgatgagaga

SEQ ID NO: 325507 - DNA, 15 bp, Homo sapiens
tgagtctgatgagag

SEQ ID NO: 325508 - DNA, 15 bp, Homo sapiens
atgagtctgatgaga

SEQ ID NO: 325509 - DNA, 15 bp, Homo sapiens
aatgagtctgatgag

SEQ ID NO: 325510 - DNA, 15 bp, Homo sapiens
gaatgagtctgatga

SEQ ID NO: 325511 - DNA, 15 bp, Homo sapiens
ggaatgagtctgatg

SEQ ID NO: 325512 - DNA, 15 bp, Homo sapiens
aggaatgagtctgat

SEQ ID NO: 325513 - DNA, 15 bp, Homo sapiens
gaggaatgagtctga

SEQ ID NO: 325514 - DNA, 15 bp, Homo sapiens
tgaggaatgagtctg

SEQ ID NO: 325515 - DNA, 15 bp, Homo sapiens
ctgaggaatgagtct

SEQ ID NO: 325516 - DNA, 15 bp, Homo sapiens
gctgaggaatgagtc

SEQ ID NO: 325517 - DNA, 15 bp, Homo sapiens
ggctgaggaatgagt

SEQ ID NO: 325518 - DNA, 15 bp, Homo sapiens
aggctgaggaatgag

SEQ ID NO: 325519 - DNA, 15 bp, Homo sapiens
gaggctgaggaatga

SEQ ID NO: 325520 - DNA, 15 bp, Homo sapiens
tgaggctgaggaatg

SEQ ID NO: 325521 - DNA, 15 bp, Homo sapiens
gtgaggctgaggaat

SEQ ID NO: 325522 - DNA, 15 bp, Homo sapiens
cgtgaggctgaggaa

SEQ ID NO: 325523 - DNA, 15 bp, Homo sapiens
tcgtgaggctgagga

SEQ ID NO: 325524 - DNA, 15 bp, Homo sapiens
ctcgtgaggctgagg

SEQ ID NO: 325525 - DNA, 15 bp, Homo sapiens
gctcgtgaggctgag

SEQ ID NO: 325526 - DNA, 15 bp, Homo sapiens
tgctcgtgaggctga

SEQ ID NO: 325527 - DNA, 15 bp, Homo sapiens
ctgctcgtgaggctg

SEQ ID NO: 325528 - DNA, 15 bp, Homo sapiens
tctgctcgtgaggct

SEQ ID NO: 325529 - DNA, 15 bp, Homo sapiens
gtctgctcgtgaggc

SEQ ID NO: 325530 - DNA, 15 bp, Homo sapiens
ggtctgctcgtgagg

SEQ ID NO: 325531 - DNA, 15 bp, Homo sapiens
aggtctgctcgtgag

SEQ ID NO: 325532 - DNA, 15 bp, Homo sapiens
gaggtctgctcgtga

SEQ ID NO: 325533 - DNA, 15 bp, Homo sapiens
ggaggtctgctcgtg

SEQ ID NO: 325534 - DNA, 15 bp, Homo sapiens
gggaggtctgctcgt

SEQ ID NO: 325535 - DNA, 15 bp, Homo sapiens
agggaggtctgctcg

SEQ ID NO: 325536 - DNA, 15 bp, Homo sapiens
cagggaggtctgctc

SEQ ID NO: 325537 - DNA, 15 bp, Homo sapiens
tcagggaggtctgct

SEQ ID NO: 325538 - DNA, 15 bp, Homo sapiens
gtcagggaggtctgc

SEQ ID NO: 325539 - DNA, 15 bp, Homo sapiens
tgtcagggaggtctg

SEQ ID NO: 325540 - DNA, 15 bp, Homo sapiens
ctgtcagggaggtct

SEQ ID NO: 325541 - DNA, 15 bp, Homo sapiens
cctgtcagggaggtc

SEQ ID NO: 325542 - DNA, 15 bp, Homo sapiens
gcctgtcagggaggt

SEQ ID NO: 325543 - DNA, 15 bp, Homo sapiens
cgcctgtcagggagg

SEQ ID NO: 325544 - DNA, 15 bp, Homo sapiens
gcgcctgtcagggag

SEQ ID NO: 325545 - DNA, 15 bp, Homo sapiens
agcgcctgtcaggga

SEQ ID NO: 325546 - DNA, 15 bp, Homo sapiens
gagcgcctgtcaggg

SEQ ID NO: 325547 - DNA, 15 bp, Homo sapiens
tgagcgcctgtcagg

SEQ ID NO: 325548 - DNA, 15 bp, Homo sapiens
gtgagcgcctgtcag

SEQ ID NO: 325549 - DNA, 15 bp, Homo sapiens
tgtgagcgcctgtca

SEQ ID NO: 325550 - DNA, 15 bp, Homo sapiens
ttgtgagcgcctgtc

SEQ ID NO: 325551 - DNA, 15 bp, Homo sapiens
gttgtgagcgcctgt

SEQ ID NO: 325552 - DNA, 15 bp, Homo sapiens
tgttgtgagcgcctg

SEQ ID NO: 325553 - DNA, 15 bp, Homo sapiens
gtgttgtgagcgcct

SEQ ID NO: 325554 - DNA, 15 bp, Homo sapiens
agtgttgtgagcgcc

SEQ ID NO: 325555 - DNA, 15 bp, Homo sapiens
cagtgttgtgagcgc

SEQ ID NO: 325556 - DNA, 15 bp, Homo sapiens
gcagtgttgtgagcg

SEQ ID NO: 325557 - DNA, 15 bp, Homo sapiens
ggcagtgttgtgagc

SEQ ID NO: 325558 - DNA, 15 bp, Homo sapiens
aggcagtgttgtgag

SEQ ID NO: 325559 - DNA, 15 bp, Homo sapiens
gaggcagtgttgtga

SEQ ID NO: 325560 - DNA, 15 bp, Homo sapiens
agaggcagtgttgtg

SEQ ID NO: 325561 - DNA, 15 bp, Homo sapiens
gagaggcagtgttgt

SEQ ID NO: 325562 - DNA, 15 bp, Homo sapiens
tgagaggcagtgttg

SEQ ID NO: 325563 - DNA, 15 bp, Homo sapiens
ttgagaggcagtgtt

SEQ ID NO: 325564 - DNA, 15 bp, Homo sapiens
cttgagaggcagtgt

SEQ ID NO: 325565 - DNA, 15 bp, Homo sapiens
tcttgagaggcagtg

SEQ ID NO: 325566 - DNA, 15 bp, Homo sapiens
gtcttgagaggcagt

SEQ ID NO: 325567 - DNA, 15 bp, Homo sapiens
cgtcttgagaggcag

SEQ ID NO: 325568 - DNA, 15 bp, Homo sapiens
tcgtcttgagaggca

SEQ ID NO: 325569 - DNA, 15 bp, Homo sapiens
ctcgtcttgagaggc

SEQ ID NO: 325570 - DNA, 15 bp, Homo sapiens
actcgtcttgagagg

SEQ ID NO: 325571 - DNA, 15 bp, Homo sapiens
gactcgtcttgagag

SEQ ID NO: 325572 - DNA, 15 bp, Homo sapiens
agactcgtcttgaga

SEQ ID NO: 325573 - DNA, 15 bp, Homo sapiens
cagactcgtcttgag

SEQ ID NO: 325574 - DNA, 15 bp, Homo sapiens
acagactcgtcttga

SEQ ID NO: 325575 - DNA, 15 bp, Homo sapiens
gacagactcgtcttg

SEQ ID NO: 325576 - DNA, 15 bp, Homo sapiens
agacagactcgtctt

SEQ ID NO: 325577 - DNA, 15 bp, Homo sapiens
cagacagactcgtct

SEQ ID NO: 325578 - DNA, 15 bp, Homo sapiens
tcagacagactcgtc

SEQ ID NO: 325579 - DNA, 15 bp, Homo sapiens
gtcagacagactcgt

SEQ ID NO: 325580 - DNA, 15 bp, Homo sapiens
ggtcagacagactcg

SEQ ID NO: 325581 - DNA, 15 bp, Homo sapiens
aggtcagacagactc

SEQ ID NO: 325582 - DNA, 15 bp, Homo sapiens
caggtcagacagact

SEQ ID NO: 325583 - DNA, 15 bp, Homo sapiens
acaggtcagacagac

SEQ ID NO: 325584 - DNA, 15 bp, Homo sapiens
aacaggtcagacaga

SEQ ID NO: 325585 - DNA, 15 bp, Homo sapiens
aaacaggtcagacag

SEQ ID NO: 325586 - DNA, 15 bp, Homo sapiens
aaaacaggtcagaca

SEQ ID NO: 325587 - DNA, 15 bp, Homo sapiens
gaaaacaggtcagac

SEQ ID NO: 325588 - DNA, 15 bp, Homo sapiens
agaaaacaggtcaga

SEQ ID NO: 325589 - DNA, 15 bp, Homo sapiens
gagaaaacaggtcag

SEQ ID NO: 325590 - DNA, 15 bp, Homo sapiens
tgagaaaacaggtca

SEQ ID NO: 325591 - DNA, 15 bp, Homo sapiens
atgagaaaacaggtc

SEQ ID NO: 325592 - DNA, 15 bp, Homo sapiens
gatgagaaaacaggt

SEQ ID NO: 325593 - DNA, 15 bp, Homo sapiens
agatgagaaaacagg

SEQ ID NO: 325594 - DNA, 15 bp, Homo sapiens
aagatgagaaaacag

SEQ ID NO: 325595 - DNA, 15 bp, Homo sapiens
caagatgagaaaaca

SEQ ID NO: 325596 - DNA, 15 bp, Homo sapiens
tcaagatgagaaaac

SEQ ID NO: 325597 - DNA, 15 bp, Homo sapiens
gtcaagatgagaaaa

SEQ ID NO: 325598 - DNA, 15 bp, Homo sapiens
ggtcaagatgagaaa

SEQ ID NO: 325599 - DNA, 15 bp, Homo sapiens
aggtcaagatgagaa

SEQ ID NO: 325600 - DNA, 15 bp, Homo sapiens
taggtcaagatgaga

SEQ ID NO: 325601 - DNA, 15 bp, Homo sapiens
ttaggtcaagatgag

SEQ ID NO: 325602 - DNA, 15 bp, Homo sapiens
gttaggtcaagatga

SEQ ID NO: 325603 - DNA, 15 bp, Homo sapiens
agttaggtcaagatg

SEQ ID NO: 325604 - DNA, 15 bp, Homo sapiens
aagttaggtcaagat

SEQ ID NO: 325605 - DNA, 15 bp, Homo sapiens
caagttaggtcaaga

SEQ ID NO: 325606 - DNA, 15 bp, Homo sapiens
gcaagttaggtcaag

SEQ ID NO: 325607 - DNA, 15 bp, Homo sapiens
agcaagttaggtcaa

SEQ ID NO: 325608 - DNA, 15 bp, Homo sapiens
tagcaagttaggtca

SEQ ID NO: 325609 - DNA, 15 bp, Homo sapiens
ttagcaagttaggtc

SEQ ID NO: 325610 - DNA, 15 bp, Homo sapiens
tttagcaagttaggt

SEQ ID NO: 325611 - DNA, 15 bp, Homo sapiens
atttagcaagttagg

SEQ ID NO: 325612 - DNA, 15 bp, Homo sapiens
catttagcaagttag

SEQ ID NO: 325613 - DNA, 15 bp, Homo sapiens
gcatttagcaagtta

SEQ ID NO: 325614 - DNA, 15 bp, Homo sapiens
agcatttagcaagtt

SEQ ID NO: 325615 - DNA, 15 bp, Homo sapiens
gagcatttagcaagt

SEQ ID NO: 325616 - DNA, 15 bp, Homo sapiens
ggagcatttagcaag

SEQ ID NO: 325617 - DNA, 15 bp, Homo sapiens
aggagcatttagcaa

SEQ ID NO: 325618 - DNA, 15 bp, Homo sapiens
caggagcatttagca

SEQ ID NO: 325619 - DNA, 15 bp, Homo sapiens
ccaggagcatttagc

SEQ ID NO: 325620 - DNA, 15 bp, Homo sapiens
cccaggagcatttag

SEQ ID NO: 325621 - DNA, 15 bp, Homo sapiens
gcccaggagcattta

SEQ ID NO: 325622 - DNA, 15 bp, Homo sapiens
tgcccaggagcattt

SEQ ID NO: 325623 - DNA, 15 bp, Homo sapiens
ttgcccaggagcatt

SEQ ID NO: 325624 - DNA, 15 bp, Homo sapiens
cttgcccaggagcat

SEQ ID NO: 325625 - DNA, 15 bp, Homo sapiens
acttgcccaggagca

SEQ ID NO: 325626 - DNA, 15 bp, Homo sapiens
gacttgcccaggagc

SEQ ID NO: 325627 - DNA, 15 bp, Homo sapiens
tgacttgcccaggag

SEQ ID NO: 325628 - DNA, 15 bp, Homo sapiens
gtgacttgcccagga

SEQ ID NO: 325629 - DNA, 15 bp, Homo sapiens
agtgacttgcccagg

SEQ ID NO: 325630 - DNA, 15 bp, Homo sapiens
gagtgacttgcccag

SEQ ID NO: 325631 - DNA, 15 bp, Homo sapiens
ggagtgacttgccca

SEQ ID NO: 325632 - DNA, 15 bp, Homo sapiens
tggagtgacttgccc

SEQ ID NO: 325633 - DNA, 15 bp, Homo sapiens
gtggagtgacttgcc

SEQ ID NO: 325634 - DNA, 15 bp, Homo sapiens
ggtggagtgacttgc

SEQ ID NO: 325635 - DNA, 15 bp, Homo sapiens
gggtggagtgacttg

SEQ ID NO: 325636 - DNA, 15 bp, Homo sapiens
agggtggagtgactt

SEQ ID NO: 325637 - DNA, 15 bp, Homo sapiens
gagggtggagtgact

SEQ ID NO: 325638 - DNA, 15 bp, Homo sapiens
cgagggtggagtgac

SEQ ID NO: 325639 - DNA, 15 bp, Homo sapiens
ccgagggtggagtga

SEQ ID NO: 325640 - DNA, 15 bp, Homo sapiens
accgagggtggagtg

SEQ ID NO: 325641 - DNA, 15 bp, Homo sapiens
gaccgagggtggagt

SEQ ID NO: 325642 - DNA, 15 bp, Homo sapiens
tgaccgagggtggag

SEQ ID NO: 325643 - DNA, 15 bp, Homo sapiens
ctgaccgagggtgga

SEQ ID NO: 325644 - DNA, 15 bp, Homo sapiens
gctgaccgagggtgg

SEQ ID NO: 325645 - DNA, 15 bp, Homo sapiens
agctgaccgagggtg

SEQ ID NO: 325646 - DNA, 15 bp, Homo sapiens
gagctgaccgagggt

SEQ ID NO: 325647 - DNA, 15 bp, Homo sapiens
tgagctgaccgaggg

SEQ ID NO: 325648 - DNA, 15 bp, Homo sapiens
ctgagctgaccgagg

SEQ ID NO: 325649 - DNA, 15 bp, Homo sapiens
tctgagctgaccgag

SEQ ID NO: 325650 - DNA, 15 bp, Homo sapiens
gtctgagctgaccga

SEQ ID NO: 325651 - DNA, 15 bp, Homo sapiens
ggtctgagctgaccg

SEQ ID NO: 325652 - DNA, 15 bp, Homo sapiens
aggtctgagctgacc

SEQ ID NO: 325653 - DNA, 15 bp, Homo sapiens
gaggtctgagctgac

SEQ ID NO: 325654 - DNA, 15 bp, Homo sapiens
agaggtctgagctga

SEQ ID NO: 325655 - DNA, 15 bp, Homo sapiens
aagaggtctgagctg

SEQ ID NO: 325656 - DNA, 15 bp, Homo sapiens
gaagaggtctgagct

SEQ ID NO: 325657 - DNA, 15 bp, Homo sapiens
tgaagaggtctgagc

SEQ ID NO: 325658 - DNA, 15 bp, Homo sapiens
ctgaagaggtctgag

SEQ ID NO: 325659 - DNA, 15 bp, Homo sapiens
cctgaagaggtctga

SEQ ID NO: 325660 - DNA, 15 bp, Homo sapiens
gcctgaagaggtctg

SEQ ID NO: 325661 - DNA, 15 bp, Homo sapiens
ggcctgaagaggtct

SEQ ID NO: 325662 - DNA, 15 bp, Homo sapiens
aggcctgaagaggtc

SEQ ID NO: 325663 - DNA, 15 bp, Homo sapiens
gaggcctgaagaggt

SEQ ID NO: 325664 - DNA, 15 bp, Homo sapiens
tgaggcctgaagagg

SEQ ID NO: 325665 - DNA, 15 bp, Homo sapiens
ctgaggcctgaagag

SEQ ID NO: 325666 - DNA, 15 bp, Homo sapiens
tctgaggcctgaaga

SEQ ID NO: 325667 - DNA, 15 bp, Homo sapiens
ctctgaggcctgaag

SEQ ID NO: 325668 - DNA, 15 bp, Homo sapiens
tctctgaggcctgaa

SEQ ID NO: 325669 - DNA, 15 bp, Homo sapiens
ttctctgaggcctga

SEQ ID NO: 325670 - DNA, 15 bp, Homo sapiens
tttctctgaggcctg

SEQ ID NO: 325671 - DNA, 15 bp, Homo sapiens
ctttctctgaggcct

SEQ ID NO: 325672 - DNA, 15 bp, Homo sapiens
actttctctgaggcc

SEQ ID NO: 325673 - DNA, 15 bp, Homo sapiens
gactttctctgaggc

SEQ ID NO: 325674 - DNA, 15 bp, Homo sapiens
tgactttctctgagg

SEQ ID NO: 325675 - DNA, 15 bp, Homo sapiens
ttgactttctctgag

SEQ ID NO: 325676 - DNA, 15 bp, Homo sapiens
gttgactttctctga

SEQ ID NO: 325677 - DNA, 15 bp, Homo sapiens
tgttgactttctctg

SEQ ID NO: 325678 - DNA, 15 bp, Homo sapiens
ctgttgactttctct

SEQ ID NO: 325679 - DNA, 15 bp, Homo sapiens
actgttgactttctc

SEQ ID NO: 325680 - DNA, 15 bp, Homo sapiens
cactgttgactttct

SEQ ID NO: 325681 - DNA, 15 bp, Homo sapiens
gcactgttgactttc

SEQ ID NO: 325682 - DNA, 15 bp, Homo sapiens
agcactgttgacttt

SEQ ID NO: 325683 - DNA, 15 bp, Homo sapiens
cagcactgttgactt

SEQ ID NO: 325684 - DNA, 15 bp, Homo sapiens
gcagcactgttgact

SEQ ID NO: 325685 - DNA, 15 bp, Homo sapiens
cgcagcactgttgac

SEQ ID NO: 325686 - DNA, 15 bp, Homo sapiens
gcgcagcactgttga

SEQ ID NO: 325687 - DNA, 15 bp, Homo sapiens
ggcgcagcactgttg

SEQ ID NO: 325688 - DNA, 15 bp, Homo sapiens
tggcgcagcactgtt

SEQ ID NO: 325689 - DNA, 15 bp, Homo sapiens
atggcgcagcactgt

SEQ ID NO: 325690 - DNA, 15 bp, Homo sapiens
gatggcgcagcactg

SEQ ID NO: 325691 - DNA, 15 bp, Homo sapiens
ggatggcgcagcact

SEQ ID NO: 325692 - DNA, 15 bp, Homo sapiens
gggatggcgcagcac

SEQ ID NO: 325693 - DNA, 15 bp, Homo sapiens
tgggatggcgcagca

SEQ ID NO: 325694 - DNA, 15 bp, Homo sapiens
ctgggatggcgcagc

SEQ ID NO: 325695 - DNA, 15 bp, Homo sapiens
gctgggatggcgcag

SEQ ID NO: 325696 - DNA, 15 bp, Homo sapiens
agctgggatggcgca

SEQ ID NO: 325697 - DNA, 15 bp, Homo sapiens
aagctgggatggcgc

SEQ ID NO: 325698 - DNA, 15 bp, Homo sapiens
caagctgggatggcg

SEQ ID NO: 325699 - DNA, 15 bp, Homo sapiens
gcaagctgggatggc

SEQ ID NO: 325700 - DNA, 15 bp, Homo sapiens
agcaagctgggatgg

SEQ ID NO: 325701 - DNA, 15 bp, Homo sapiens
aagcaagctgggatg

SEQ ID NO: 325702 - DNA, 15 bp, Homo sapiens
caagcaagctgggat

SEQ ID NO: 325703 - DNA, 15 bp, Homo sapiens
gcaagcaagctggga

SEQ ID NO: 325704 - DNA, 15 bp, Homo sapiens
tgcaagcaagctggg

SEQ ID NO: 325705 - DNA, 15 bp, Homo sapiens
ttgcaagcaagctgg

SEQ ID NO: 325706 - DNA, 15 bp, Homo sapiens
tttgcaagcaagctg

SEQ ID NO: 325707 - DNA, 15 bp, Homo sapiens
ctttgcaagcaagct

SEQ ID NO: 325708 - DNA, 15 bp, Homo sapiens
cctttgcaagcaagc

SEQ ID NO: 325709 - DNA, 15 bp, Homo sapiens
ccctttgcaagcaag

SEQ ID NO: 325710 - DNA, 15 bp, Homo sapiens
tccctttgcaagcaa

SEQ ID NO: 325711 - DNA, 15 bp, Homo sapiens
atccctttgcaagca

SEQ ID NO: 325712 - DNA, 15 bp, Homo sapiens
gatccctttgcaagc

SEQ ID NO: 325713 - DNA, 15 bp, Homo sapiens
ggatccctttgcaag

SEQ ID NO: 325714 - DNA, 15 bp, Homo sapiens
gggatccctttgcaa

SEQ ID NO: 325715 - DNA, 15 bp, Homo sapiens
agggatccctttgca

SEQ ID NO: 325716 - DNA, 15 bp, Homo sapiens
aagggatccctttgc

SEQ ID NO: 325717 - DNA, 15 bp, Homo sapiens
caagggatccctttg

SEQ ID NO: 325718 - DNA, 15 bp, Homo sapiens
ccaagggatcccttt

SEQ ID NO: 325719 - DNA, 15 bp, Homo sapiens
accaagggatccctt

SEQ ID NO: 325720 - DNA, 15 bp, Homo sapiens
aaccaagggatccct

SEQ ID NO: 325721 - DNA, 15 bp, Homo sapiens
caaccaagggatccc

SEQ ID NO: 325722 - DNA, 15 bp, Homo sapiens
ccaaccaagggatcc

SEQ ID NO: 325723 - DNA, 15 bp, Homo sapiens
cccaaccaagggatc

SEQ ID NO: 325724 - DNA, 15 bp, Homo sapiens
ccccaaccaagggat

SEQ ID NO: 325725 - DNA, 15 bp, Homo sapiens
accccaaccaaggga

SEQ ID NO: 325726 - DNA, 15 bp, Homo sapiens
caccccaaccaaggg

SEQ ID NO: 325727 - DNA, 15 bp, Homo sapiens
acaccccaaccaagg

SEQ ID NO: 325728 - DNA, 15 bp, Homo sapiens
aacaccccaaccaag

SEQ ID NO: 325729 - DNA, 15 bp, Homo sapiens
caacaccccaaccaa

SEQ ID NO: 325730 - DNA, 15 bp, Homo sapiens
ccaacaccccaacca

SEQ ID NO: 325731 - DNA, 15 bp, Homo sapiens
cccaacaccccaacc

SEQ ID NO: 325732 - DNA, 15 bp, Homo sapiens
ccccaacaccccaac

SEQ ID NO: 325733 - DNA, 15 bp, Homo sapiens
tccccaacaccccaa

SEQ ID NO: 325734 - DNA, 15 bp, Homo sapiens
ttccccaacacccca

SEQ ID NO: 325735 - DNA, 15 bp, Homo sapiens
cttccccaacacccc

SEQ ID NO: 325736 - DNA, 15 bp, Homo sapiens
ccttccccaacaccc

SEQ ID NO: 325737 - DNA, 15 bp, Homo sapiens
gccttccccaacacc

SEQ ID NO: 325738 - DNA, 15 bp, Homo sapiens
tgccttccccaacac

SEQ ID NO: 325739 - DNA, 15 bp, Homo sapiens
ctgccttccccaaca

SEQ ID NO: 325740 - DNA, 15 bp, Homo sapiens
tgaatcaaacaagga

SEQ ID NO: 325741 - DNA, 15 bp, Homo sapiens
gtgaatcaaacaagg

SEQ ID NO: 325742 - DNA, 15 bp, Homo sapiens
ggtgaatcaaacaag

SEQ ID NO: 325743 - DNA, 15 bp, Homo sapiens
tggtgaatcaaacaa

SEQ ID NO: 325744 - DNA, 15 bp, Homo sapiens
ctggtgaatcaaaca

SEQ ID NO: 325745 - DNA, 15 bp, Homo sapiens
tctggtgaatcaaac

SEQ ID NO: 325746 - DNA, 15 bp, Homo sapiens
gtctggtgaatcaaa

SEQ ID NO: 325747 - DNA, 15 bp, Homo sapiens
agtctggtgaatcaa

SEQ ID NO: 325748 - DNA, 15 bp, Homo sapiens
aagtctggtgaatca

SEQ ID NO: 325749 - DNA, 15 bp, Homo sapiens
aaagtctggtgaatc

SEQ ID NO: 325750 - DNA, 15 bp, Homo sapiens
taaagtctggtgaat

SEQ ID NO: 325751 - DNA, 15 bp, Homo sapiens
ctaaagtctggtgaa

SEQ ID NO: 325752 - DNA, 15 bp, Homo sapiens
gctaaagtctggtga

SEQ ID NO: 325753 - DNA, 15 bp, Homo sapiens
tgctaaagtctggtg

SEQ ID NO: 325754 - DNA, 15 bp, Homo sapiens
ttgctaaagtctggt

SEQ ID NO: 325755 - DNA, 15 bp, Homo sapiens
cttgctaaagtctgg

SEQ ID NO: 325756 - DNA, 15 bp, Homo sapiens
tcttgctaaagtctg

SEQ ID NO: 325757 - DNA, 15 bp, Homo sapiens
atcttgctaaagtct

SEQ ID NO: 325758 - DNA, 15 bp, Homo sapiens
gatcttgctaaagtc

SEQ ID NO: 325759 - DNA, 15 bp, Homo sapiens
tgatcttgctaaagt

SEQ ID NO: 325760 - DNA, 15 bp, Homo sapiens
gtgatcttgctaaag

SEQ ID NO: 325761 - DNA, 15 bp, Homo sapiens
tgtgatcttgctaaa

SEQ ID NO: 325762 - DNA, 15 bp, Homo sapiens
ctgtgatcttgctaa

SEQ ID NO: 325763 - DNA, 15 bp, Homo sapiens
cctgtgatcttgcta

SEQ ID NO: 325764 - DNA, 15 bp, Homo sapiens
gcctgtgatcttgct

SEQ ID NO: 325765 - DNA, 15 bp, Homo sapiens
tgcctgtgatcttgc

SEQ ID NO: 325766 - DNA, 15 bp, Homo sapiens
ttgcctgtgatcttg

SEQ ID NO: 325767 - DNA, 15 bp, Homo sapiens
tttgcctgtgatctt

SEQ ID NO: 325768 - DNA, 15 bp, Homo sapiens
gtttgcctgtgatct

SEQ ID NO: 325769 - DNA, 15 bp, Homo sapiens
ggtttgcctgtgatc

SEQ ID NO: 325770 - DNA, 15 bp, Homo sapiens
gggtttgcctgtgat

SEQ ID NO: 325771 - DNA, 15 bp, Homo sapiens
tgggtttgcctgtga

SEQ ID NO: 325772 - DNA, 15 bp, Homo sapiens
atgggtttgcctgtg

SEQ ID NO: 325773 - DNA, 15 bp, Homo sapiens
gatgggtttgcctgt

SEQ ID NO: 325774 - DNA, 15 bp, Homo sapiens
tgatgggtttgcctg

SEQ ID NO: 325775 - DNA, 15 bp, Homo sapiens
ttgatgggtttgcct

SEQ ID NO: 325776 - DNA, 15 bp, Homo sapiens
cttgatgggtttgcc

SEQ ID NO: 325777 - DNA, 15 bp, Homo sapiens
gcttgatgggtttgc

SEQ ID NO: 325778 - DNA, 15 bp, Homo sapiens
agcttgatgggtttg

SEQ ID NO: 325779 - DNA, 15 bp, Homo sapiens
cagcttgatgggttt

SEQ ID NO: 325780 - DNA, 15 bp, Homo sapiens
tcagcttgatgggtt

SEQ ID NO: 325781 - DNA, 15 bp, Homo sapiens
gtcagcttgatgggt

SEQ ID NO: 325782 - DNA, 15 bp, Homo sapiens
agtcagcttgatggg

SEQ ID NO: 325783 - DNA, 15 bp, Homo sapiens
gagtcagcttgatgg

SEQ ID NO: 325784 - DNA, 15 bp, Homo sapiens
tgagtcagcttgatg

SEQ ID NO: 325785 - DNA, 15 bp, Homo sapiens
ctgagtcagcttgat

SEQ ID NO: 325786 - DNA, 15 bp, Homo sapiens
cctgagtcagcttga

SEQ ID NO: 325787 - DNA, 15 bp, Homo sapiens
acctgagtcagcttg

SEQ ID NO: 325788 - DNA, 15 bp, Homo sapiens
cacctgagtcagctt

SEQ ID NO: 325789 - DNA, 15 bp, Homo sapiens
ccacctgagtcagct

SEQ ID NO: 325790 - DNA, 15 bp, Homo sapiens
tccacctgagtcagc

SEQ ID NO: 325791 - DNA, 15 bp, Homo sapiens
ttccacctgagtcag

SEQ ID NO: 325792 - DNA, 15 bp, Homo sapiens
gttccacctgagtca

SEQ ID NO: 325793 - DNA, 15 bp, Homo sapiens
tgttccacctgagtc

SEQ ID NO: 325794 - DNA, 15 bp, Homo sapiens
gtgttccacctgagt

SEQ ID NO: 325795 - DNA, 15 bp, Homo sapiens
ggtgttccacctgag

SEQ ID NO: 325796 - DNA, 15 bp, Homo sapiens
cggtgttccacctga

SEQ ID NO: 325797 - DNA, 15 bp, Homo sapiens
ccggtgttccacctg

SEQ ID NO: 325798 - DNA, 15 bp, Homo sapiens
cccggtgttccacct

SEQ ID NO: 325799 - DNA, 15 bp, Homo sapiens
gcccggtgttccacc

SEQ ID NO: 325800 - DNA, 15 bp, Homo sapiens
agcccggtgttccac

SEQ ID NO: 325801 - DNA, 15 bp, Homo sapiens
cagcccggtgttcca

SEQ ID NO: 325802 - DNA, 15 bp, Homo sapiens
ccagcccggtgttcc

SEQ ID NO: 325803 - DNA, 15 bp, Homo sapiens
gccagcccggtgttc

SEQ ID NO: 325804 - DNA, 15 bp, Homo sapiens
agccagcccggtgtt

SEQ ID NO: 325805 - DNA, 15 bp, Homo sapiens
aagccagcccggtgt

SEQ ID NO: 325806 - DNA, 15 bp, Homo sapiens
aaagccagcccggtg

SEQ ID NO: 325807 - DNA, 15 bp, Homo sapiens
caaagccagcccggt

SEQ ID NO: 325808 - DNA, 15 bp, Homo sapiens
tcaaagccagcccgg

SEQ ID NO: 325809 - DNA, 15 bp, Homo sapiens
ctcaaagccagcccg

SEQ ID NO: 325810 - DNA, 15 bp, Homo sapiens
actcaaagccagccc

SEQ ID NO: 325811 - DNA, 15 bp, Homo sapiens
cactcaaagccagcc

SEQ ID NO: 325812 - DNA, 15 bp, Homo sapiens
ccactcaaagccagc

SEQ ID NO: 325813 - DNA, 15 bp, Homo sapiens
tccactcaaagccag

SEQ ID NO: 325814 - DNA, 15 bp, Homo sapiens
ttccactcaaagcca

SEQ ID NO: 325815 - DNA, 15 bp, Homo sapiens
gttccactcaaagcc

SEQ ID NO: 325816 - DNA, 15 bp, Homo sapiens
cgttccactcaaagc

SEQ ID NO: 325817 - DNA, 15 bp, Homo sapiens
tcgttccactcaaag

SEQ ID NO: 325818 - DNA, 15 bp, Homo sapiens
ctcgttccactcaaa

SEQ ID NO: 325819 - DNA, 15 bp, Homo sapiens
cctcgttccactcaa

SEQ ID NO: 325820 - DNA, 15 bp, Homo sapiens
tcctcgttccactca

SEQ ID NO: 325821 - DNA, 15 bp, Homo sapiens
atcctcgttccactc

SEQ ID NO: 325822 - DNA, 15 bp, Homo sapiens
catcctcgttccact

SEQ ID NO: 325823 - DNA, 15 bp, Homo sapiens
ccatcctcgttccac

SEQ ID NO: 325824 - DNA, 15 bp, Homo sapiens
cccatcctcgttcca

SEQ ID NO: 325825 - DNA, 15 bp, Homo sapiens
ccccatcctcgttcc

SEQ ID NO: 325826 - DNA, 15 bp, Homo sapiens
gccccatcctcgttc

SEQ ID NO: 325827 - DNA, 15 bp, Homo sapiens
cgccccatcctcgtt

SEQ ID NO: 325828 - DNA, 15 bp, Homo sapiens
ccgccccatcctcgt

SEQ ID NO: 325829 - DNA, 15 bp, Homo sapiens
cccgccccatcctcg

SEQ ID NO: 325830 - DNA, 15 bp, Homo sapiens
tcccgccccatcctc

SEQ ID NO: 325831 - DNA, 15 bp, Homo sapiens
ttcccgccccatcct

SEQ ID NO: 325832 - DNA, 15 bp, Homo sapiens
gttcccgccccatcc

SEQ ID NO: 325833 - DNA, 15 bp, Homo sapiens
ggttcccgccccatc

SEQ ID NO: 325834 - DNA, 15 bp, Homo sapiens
tggttcccgccccat

SEQ ID NO: 325835 - DNA, 15 bp, Homo sapiens
gtggttcccgcccca

SEQ ID NO: 325836 - DNA, 15 bp, Homo sapiens
ggtggttcccgcccc

SEQ ID NO: 325837 - DNA, 15 bp, Homo sapiens
gggtggttcccgccc

SEQ ID NO: 325838 - DNA, 15 bp, Homo sapiens
ggggtggttcccgcc

SEQ ID NO: 325839 - DNA, 15 bp, Homo sapiens
gggggtggttcccgc

SEQ ID NO: 325840 - DNA, 15 bp, Homo sapiens
tgggggtggttcccg

SEQ ID NO: 325841 - DNA, 15 bp, Homo sapiens
ctgggggtggttccc

SEQ ID NO: 325842 - DNA, 15 bp, Homo sapiens
gctgggggtggttcc

SEQ ID NO: 325843 - DNA, 15 bp, Homo sapiens
ggctgggggtggttc

SEQ ID NO: 325844 - DNA, 15 bp, Homo sapiens
gggctgggggtggtt

SEQ ID NO: 325845 - DNA, 15 bp, Homo sapiens
tgggctgggggtggt

SEQ ID NO: 325846 - DNA, 15 bp, Homo sapiens
ctgggctgggggtgg

SEQ ID NO: 325847 - DNA, 15 bp, Homo sapiens
cctgggctgggggtg

SEQ ID NO: 325848 - DNA, 15 bp, Homo sapiens
ccctgggctgggggt

SEQ ID NO: 325849 - DNA, 15 bp, Homo sapiens
gccctgggctggggg

SEQ ID NO: 325850 - DNA, 15 bp, Homo sapiens
agccctgggctgggg

SEQ ID NO: 325851 - DNA, 15 bp, Homo sapiens
cagccctgggctggg

SEQ ID NO: 325852 - DNA, 15 bp, Homo sapiens
gcagccctgggctgg

SEQ ID NO: 325853 - DNA, 15 bp, Homo sapiens
tgcagccctgggctg

SEQ ID NO: 325854 - DNA, 15 bp, Homo sapiens
ctgcagccctgggct

SEQ ID NO: 325855 - DNA, 15 bp, Homo sapiens
gctgcagccctgggc

SEQ ID NO: 325856 - DNA, 15 bp, Homo sapiens
ggctgcagccctggg

SEQ ID NO: 325857 - DNA, 15 bp, Homo sapiens
aggctgcagccctgg

SEQ ID NO: 325858 - DNA, 15 bp, Homo sapiens
caggctgcagccctg

SEQ ID NO: 325859 - DNA, 15 bp, Homo sapiens
gcaggctgcagccct

SEQ ID NO: 325860 - DNA, 15 bp, Homo sapiens
ggcaggctgcagccc

SEQ ID NO: 325861 - DNA, 15 bp, Homo sapiens
gggcaggctgcagcc

SEQ ID NO: 325862 - DNA, 15 bp, Homo sapiens
tgggcaggctgcagc

SEQ ID NO: 325863 - DNA, 15 bp, Homo sapiens
gtgggcaggctgcag

SEQ ID NO: 325864 - DNA, 15 bp, Homo sapiens
ggtgggcaggctgca

SEQ ID NO: 325865 - DNA, 15 bp, Homo sapiens
aggtgggcaggctgc

SEQ ID NO: 325866 - DNA, 15 bp, Homo sapiens
gaggtgggcaggctg

SEQ ID NO: 325867 - DNA, 15 bp, Homo sapiens
tgaggtgggcaggct

SEQ ID NO: 325868 - DNA, 15 bp, Homo sapiens
gtgaggtgggcaggc

SEQ ID NO: 325869 - DNA, 15 bp, Homo sapiens
ggtgaggtgggcagg

SEQ ID NO: 325870 - DNA, 15 bp, Homo sapiens
aggtgaggtgggcag

SEQ ID NO: 325871 - DNA, 15 bp, Homo sapiens
aaggtgaggtgggca

SEQ ID NO: 325872 - DNA, 15 bp, Homo sapiens
gaaggtgaggtgggc

SEQ ID NO: 325873 - DNA, 15 bp, Homo sapiens
ggaaggtgaggtggg

SEQ ID NO: 325874 - DNA, 15 bp, Homo sapiens
gggaaggtgaggtgg

SEQ ID NO: 325875 - DNA, 15 bp, Homo sapiens
cgggaaggtgaggtg

SEQ ID NO: 325876 - DNA, 15 bp, Homo sapiens
gcgggaaggtgaggt

SEQ ID NO: 325877 - DNA, 15 bp, Homo sapiens
agcgggaaggtgagg

SEQ ID NO: 325878 - DNA, 15 bp, Homo sapiens
cagcgggaaggtgag

SEQ ID NO: 325879 - DNA, 15 bp, Homo sapiens
ccagcgggaaggtga

SEQ ID NO: 325880 - DNA, 15 bp, Homo sapiens
tccagcgggaaggtg

SEQ ID NO: 325881 - DNA, 15 bp, Homo sapiens
gtccagcgggaaggt

SEQ ID NO: 325882 - DNA, 15 bp, Homo sapiens
agtccagcgggaagg

SEQ ID NO: 325883 - DNA, 15 bp, Homo sapiens
tagtccagcgggaag

SEQ ID NO: 325884 - DNA, 15 bp, Homo sapiens
atagtccagcgggaa

SEQ ID NO: 325885 - DNA, 15 bp, Homo sapiens
gatagtccagcggga

SEQ ID NO: 325886 - DNA, 15 bp, Homo sapiens
tgatagtccagcggg

SEQ ID NO: 325887 - DNA, 15 bp, Homo sapiens
gtgatagtccagcgg

SEQ ID NO: 325888 - DNA, 15 bp, Homo sapiens
ggtgatagtccagcg

SEQ ID NO: 325889 - DNA, 15 bp, Homo sapiens
aggtgatagtccagc

SEQ ID NO: 325890 - DNA, 15 bp, Homo sapiens
aaggtgatagtccag

SEQ ID NO: 325891 - DNA, 15 bp, Homo sapiens
taaggtgatagtcca

SEQ ID NO: 325892 - DNA, 15 bp, Homo sapiens
ttaaggtgatagtcc

SEQ ID NO: 325893 - DNA, 15 bp, Homo sapiens
gttaaggtgatagtc

SEQ ID NO: 325894 - DNA, 15 bp, Homo sapiens
ggttaaggtgatagt

SEQ ID NO: 325895 - DNA, 15 bp, Homo sapiens
tggttaaggtgatag

SEQ ID NO: 325896 - DNA, 15 bp, Homo sapiens
ctggttaaggtgata

SEQ ID NO: 325897 - DNA, 15 bp, Homo sapiens
gctggttaaggtgat

SEQ ID NO: 325898 - DNA, 15 bp, Homo sapiens
ggctggttaaggtga

SEQ ID NO: 325899 - DNA, 15 bp, Homo sapiens
aggctggttaaggtg

SEQ ID NO: 325900 - DNA, 15 bp, Homo sapiens
aaggctggttaaggt

SEQ ID NO: 325901 - DNA, 15 bp, Homo sapiens
aaaggctggttaagg

SEQ ID NO: 325902 - DNA, 15 bp, Homo sapiens
gaaaggctggttaag

SEQ ID NO: 325903 - DNA, 15 bp, Homo sapiens
tgaaaggctggttaa

SEQ ID NO: 325904 - DNA, 15 bp, Homo sapiens
atgaaaggctggtta

SEQ ID NO: 325905 - DNA, 15 bp, Homo sapiens
gatgaaaggctggtt

SEQ ID NO: 325906 - DNA, 15 bp, Homo sapiens
agatgaaaggctggt

SEQ ID NO: 325907 - DNA, 15 bp, Homo sapiens
aagatgaaaggctgg

SEQ ID NO: 325908 - DNA, 15 bp, Homo sapiens
gaagatgaaaggctg

SEQ ID NO: 325909 - DNA, 15 bp, Homo sapiens
cgaagatgaaaggct

SEQ ID NO: 325910 - DNA, 15 bp, Homo sapiens
acgaagatgaaaggc

SEQ ID NO: 325911 - DNA, 15 bp, Homo sapiens
tacgaagatgaaagg

SEQ ID NO: 325912 - DNA, 15 bp, Homo sapiens
gtacgaagatgaaag

SEQ ID NO: 325913 - DNA, 15 bp, Homo sapiens
agtacgaagatgaaa

SEQ ID NO: 325914 - DNA, 15 bp, Homo sapiens
cagtacgaagatgaa

SEQ ID NO: 325915 - DNA, 15 bp, Homo sapiens
tcagtacgaagatga

SEQ ID NO: 325916 - DNA, 15 bp, Homo sapiens
ctcagtacgaagatg

SEQ ID NO: 325917 - DNA, 15 bp, Homo sapiens
cctcagtacgaagat

SEQ ID NO: 325918 - DNA, 15 bp, Homo sapiens
ccctcagtacgaaga

SEQ ID NO: 325919 - DNA, 15 bp, Homo sapiens
tccctcagtacgaag

SEQ ID NO: 325920 - DNA, 15 bp, Homo sapiens
gtccctcagtacgaa

SEQ ID NO: 325921 - DNA, 15 bp, Homo sapiens
tgtccctcagtacga

SEQ ID NO: 325922 - DNA, 15 bp, Homo sapiens
gtgtccctcagtacg

SEQ ID NO: 325923 - DNA, 15 bp, Homo sapiens
tgtgtccctcagtac

SEQ ID NO: 325924 - DNA, 15 bp, Homo sapiens
ctgtgtccctcagta

SEQ ID NO: 325925 - DNA, 15 bp, Homo sapiens
tctgtgtccctcagt

SEQ ID NO: 325926 - DNA, 15 bp, Homo sapiens
gtctgtgtccctcag

SEQ ID NO: 325927 - DNA, 15 bp, Homo sapiens
tgtctgtgtccctca

SEQ ID NO: 325928 - DNA, 15 bp, Homo sapiens
gtgtctgtgtccctc

SEQ ID NO: 325929 - DNA, 15 bp, Homo sapiens
tgtgtctgtgtccct

SEQ ID NO: 325930 - DNA, 15 bp, Homo sapiens
ctgtgtctgtgtccc

SEQ ID NO: 325931 - DNA, 15 bp, Homo sapiens
cctgtgtctgtgtcc

SEQ ID NO: 325932 - DNA, 15 bp, Homo sapiens
ccctgtgtctgtgtc

SEQ ID NO: 325933 - DNA, 15 bp, Homo sapiens
cccctgtgtctgtgt

SEQ ID NO: 325934 - DNA, 15 bp, Homo sapiens
gcccctgtgtctgtg

SEQ ID NO: 325935 - DNA, 15 bp, Homo sapiens
ggcccctgtgtctgt

SEQ ID NO: 325936 - DNA, 15 bp, Homo sapiens
gggcccctgtgtctg

SEQ ID NO: 325937 - DNA, 15 bp, Homo sapiens
agggcccctgtgtct

SEQ ID NO: 325938 - DNA, 15 bp, Homo sapiens
aagggcccctgtgtc

SEQ ID NO: 325939 - DNA, 15 bp, Homo sapiens
gaagggcccctgtgt

SEQ ID NO: 325940 - DNA, 15 bp, Homo sapiens
agaagggcccctgtg

SEQ ID NO: 325941 - DNA, 15 bp, Homo sapiens
gagaagggcccctgt

SEQ ID NO: 325942 - DNA, 15 bp, Homo sapiens
agagaagggcccctg

SEQ ID NO: 325943 - DNA, 15 bp, Homo sapiens
aagagaagggcccct

SEQ ID NO: 325944 - DNA, 15 bp, Homo sapiens
gaagagaagggcccc

SEQ ID NO: 325945 - DNA, 15 bp, Homo sapiens
tgaagagaagggccc

SEQ ID NO: 325946 - DNA, 15 bp, Homo sapiens
atgaagagaagggcc

SEQ ID NO: 325947 - DNA, 15 bp, Homo sapiens
aatgaagagaagggc

SEQ ID NO: 325948 - DNA, 15 bp, Homo sapiens
caatgaagagaaggg

SEQ ID NO: 325949 - DNA, 15 bp, Homo sapiens
ccaatgaagagaagg

SEQ ID NO: 325950 - DNA, 15 bp, Homo sapiens
gccaatgaagagaag

SEQ ID NO: 325951 - DNA, 15 bp, Homo sapiens
tgccaatgaagagaa

SEQ ID NO: 325952 - DNA, 15 bp, Homo sapiens
ttgccaatgaagaga

SEQ ID NO: 325953 - DNA, 15 bp, Homo sapiens
cttgccaatgaagag

SEQ ID NO: 325954 - DNA, 15 bp, Homo sapiens
tcttgccaatgaaga

SEQ ID NO: 325955 - DNA, 15 bp, Homo sapiens
atcttgccaatgaag

SEQ ID NO: 325956 - DNA, 15 bp, Homo sapiens
aatcttgccaatgaa

SEQ ID NO: 325957 - DNA, 15 bp, Homo sapiens
gaatcttgccaatga

SEQ ID NO: 325958 - DNA, 15 bp, Homo sapiens
agaatcttgccaatg

SEQ ID NO: 325959 - DNA, 15 bp, Homo sapiens
cagaatcttgccaat

SEQ ID NO: 325960 - DNA, 15 bp, Homo sapiens
ccagaatcttgccaa

SEQ ID NO: 325961 - DNA, 15 bp, Homo sapiens
tccagaatcttgcca

SEQ ID NO: 325962 - DNA, 15 bp, Homo sapiens
gtccagaatcttgcc

SEQ ID NO: 325963 - DNA, 15 bp, Homo sapiens
ggtccagaatcttgc

SEQ ID NO: 325964 - DNA, 15 bp, Homo sapiens
gggtccagaatcttg

SEQ ID NO: 325965 - DNA, 15 bp, Homo sapiens
ggggtccagaatctt

SEQ ID NO: 325966 - DNA, 15 bp, Homo sapiens
tggggtccagaatct

SEQ ID NO: 325967 - DNA, 15 bp, Homo sapiens
ctggggtccagaatc

SEQ ID NO: 325968 - DNA, 15 bp, Homo sapiens
cctggggtccagaat

SEQ ID NO: 325969 - DNA, 15 bp, Homo sapiens
ccctggggtccagaa

SEQ ID NO: 325970 - DNA, 15 bp, Homo sapiens
cccctggggtccaga

SEQ ID NO: 325971 - DNA, 15 bp, Homo sapiens
gcccctggggtccag

SEQ ID NO: 325972 - DNA, 15 bp, Homo sapiens
ggcccctggggtcca

SEQ ID NO: 325973 - DNA, 15 bp, Homo sapiens
gggcccctggggtcc

SEQ ID NO: 325974 - DNA, 15 bp, Homo sapiens
ggggcccctggggtc

SEQ ID NO: 325975 - DNA, 15 bp, Homo sapiens
aggggcccctggggt

SEQ ID NO: 325976 - DNA, 15 bp, Homo sapiens
taggggcccctgggg

SEQ ID NO: 325977 - DNA, 15 bp, Homo sapiens
ttaggggcccctggg

SEQ ID NO: 325978 - DNA, 15 bp, Homo sapiens
attaggggcccctgg

SEQ ID NO: 325979 - DNA, 15 bp, Homo sapiens
tattaggggcccctg

SEQ ID NO: 325980 - DNA, 15 bp, Homo sapiens
atattaggggcccct

SEQ ID NO: 325981 - DNA, 15 bp, Homo sapiens
gatattaggggcccc

SEQ ID NO: 325982 - DNA, 15 bp, Homo sapiens
ggatattaggggccc

SEQ ID NO: 325983 - DNA, 15 bp, Homo sapiens
gggatattaggggcc

SEQ ID NO: 325984 - DNA, 15 bp, Homo sapiens
tgggatattaggggc

SEQ ID NO: 325985 - DNA, 15 bp, Homo sapiens
ctgggatattagggg

SEQ ID NO: 325986 - DNA, 15 bp, Homo sapiens
actgggatattaggg

SEQ ID NO: 325987 - DNA, 15 bp, Homo sapiens
aactgggatattagg

SEQ ID NO: 325988 - DNA, 15 bp, Homo sapiens
aaactgggatattag

SEQ ID NO: 325989 - DNA, 15 bp, Homo sapiens
taaactgggatatta

SEQ ID NO: 325990 - DNA, 15 bp, Homo sapiens
ttaaactgggatatt

SEQ ID NO: 325991 - DNA, 15 bp, Homo sapiens
attaaactgggatat

SEQ ID NO: 325992 - DNA, 15 bp, Homo sapiens
tattaaactgggata

SEQ ID NO: 325993 - DNA, 15 bp, Homo sapiens
atattaaactgggat

SEQ ID NO: 325994 - DNA, 15 bp, Homo sapiens
aatattaaactggga

SEQ ID NO: 325995 - DNA, 15 bp, Homo sapiens
gaatattaaactggg

SEQ ID NO: 325996 - DNA, 15 bp, Homo sapiens
ggaatattaaactgg

SEQ ID NO: 325997 - DNA, 15 bp, Homo sapiens
tggaatattaaactg

SEQ ID NO: 325998 - DNA, 15 bp, Homo sapiens
ttggaatattaaact

SEQ ID NO: 325999 - DNA, 15 bp, Homo sapiens
attggaatattaaac

SEQ ID NO: 326000 - DNA, 15 bp, Homo sapiens
tattggaatattaaa

SEQ ID NO: 326001 - DNA, 15 bp, Homo sapiens
gtattggaatattaa

SEQ ID NO: 326002 - DNA, 15 bp, Homo sapiens
ggtattggaatatta

SEQ ID NO: 326003 - DNA, 15 bp, Homo sapiens
gggtattggaatatt

SEQ ID NO: 326004 - DNA, 15 bp, Homo sapiens
agggtattggaatat

SEQ ID NO: 326005 - DNA, 15 bp, Homo sapiens
tagggtattggaata

SEQ ID NO: 326006 - DNA, 15 bp, Homo sapiens
ctagggtattggaat

SEQ ID NO: 326007 - DNA, 15 bp, Homo sapiens
tctagggtattggaa

SEQ ID NO: 326008 - DNA, 15 bp, Homo sapiens
ttctagggtattgga

SEQ ID NO: 326009 - DNA, 15 bp, Homo sapiens
cttctagggtattgg

SEQ ID NO: 326010 - DNA, 15 bp, Homo sapiens
tcttctagggtattg

SEQ ID NO: 326011 - DNA, 15 bp, Homo sapiens
ttcttctagggtatt

SEQ ID NO: 326012 - DNA, 15 bp, Homo sapiens
tttcttctagggtat

SEQ ID NO: 326013 - DNA, 15 bp, Homo sapiens
ttttcttctagggta

SEQ ID NO: 326014 - DNA, 15 bp, Homo sapiens
gttttcttctagggt

SEQ ID NO: 326015 - DNA, 15 bp, Homo sapiens
ggttttcttctaggg

SEQ ID NO: 326016 - DNA, 15 bp, Homo sapiens
gggttttcttctagg

SEQ ID NO: 326017 - DNA, 15 bp, Homo sapiens
cgggttttcttctag

SEQ ID NO: 326018 - DNA, 15 bp, Homo sapiens
tcgggttttcttcta

SEQ ID NO: 326019 - DNA, 15 bp, Homo sapiens
ctcgggttttcttct

SEQ ID NO: 326020 - DNA, 15 bp, Homo sapiens
cctcgggttttcttc

SEQ ID NO: 326021 - DNA, 15 bp, Homo sapiens
ccctcgggttttctt

SEQ ID NO: 326022 - DNA, 15 bp, Homo sapiens
tccctcgggttttct

SEQ ID NO: 326023 - DNA, 15 bp, Homo sapiens
gtccctcgggttttc

SEQ ID NO: 326024 - DNA, 15 bp, Homo sapiens
tgtccctcgggtttt

SEQ ID NO: 326025 - DNA, 15 bp, Homo sapiens
ctgtccctcgggttt

SEQ ID NO: 326026 - DNA, 15 bp, Homo sapiens
gctgtccctcgggtt

SEQ ID NO: 326027 - DNA, 15 bp, Homo sapiens
tgctgtccctcgggt

SEQ ID NO: 326028 - DNA, 15 bp, Homo sapiens
ctgctgtccctcggg

SEQ ID NO: 326029 - DNA, 15 bp, Homo sapiens
tctgctgtccctcgg

SEQ ID NO: 326030 - DNA, 15 bp, Homo sapiens
atctgctgtccctcg

SEQ ID NO: 326031 - DNA, 15 bp, Homo sapiens
aatctgctgtccctc

SEQ ID NO: 326032 - DNA, 15 bp, Homo sapiens
gaatctgctgtccct

SEQ ID NO: 326033 - DNA, 15 bp, Homo sapiens
ggaatctgctgtccc

SEQ ID NO: 326034 - DNA, 15 bp, Homo sapiens
tggaatctgctgtcc

SEQ ID NO: 326035 - DNA, 15 bp, Homo sapiens
gtggaatctgctgtc

SEQ ID NO: 326036 - DNA, 15 bp, Homo sapiens
tgtggaatctgctgt

SEQ ID NO: 326037 - DNA, 15 bp, Homo sapiens
ctgtggaatctgctg

SEQ ID NO: 326038 - DNA, 15 bp, Homo sapiens
cctgtggaatctgct

SEQ ID NO: 326039 - DNA, 15 bp, Homo sapiens
tcctgtggaatctgc

SEQ ID NO: 326040 - DNA, 15 bp, Homo sapiens
gtcctgtggaatctg

SEQ ID NO: 326041 - DNA, 15 bp, Homo sapiens
tgtcctgtggaatct

SEQ ID NO: 326042 - DNA, 15 bp, Homo sapiens
gtgtcctgtggaatc

SEQ ID NO: 326043 - DNA, 15 bp, Homo sapiens
cgtgtcctgtggaat

SEQ ID NO: 326044 - DNA, 15 bp, Homo sapiens
tcgtgtcctgtggaa

SEQ ID NO: 326045 - DNA, 15 bp, Homo sapiens
ttcgtgtcctgtgga

SEQ ID NO: 326046 - DNA, 15 bp, Homo sapiens
cttcgtgtcctgtgg

SEQ ID NO: 326047 - DNA, 15 bp, Homo sapiens
ccttcgtgtcctgtg

SEQ ID NO: 326048 - DNA, 15 bp, Homo sapiens
gccttcgtgtcctgt

SEQ ID NO: 326049 - DNA, 15 bp, Homo sapiens
agccttcgtgtcctg

SEQ ID NO: 326050 - DNA, 15 bp, Homo sapiens
cagccttcgtgtcct

SEQ ID NO: 326051 - DNA, 15 bp, Homo sapiens
gcagccttcgtgtcc

SEQ ID NO: 326052 - DNA, 15 bp, Homo sapiens
ggcagccttcgtgtc

SEQ ID NO: 326053 - DNA, 15 bp, Homo sapiens
gggcagccttcgtgt

SEQ ID NO: 326054 - DNA, 15 bp, Homo sapiens
ggggcagccttcgtg

SEQ ID NO: 326055 - DNA, 15 bp, Homo sapiens
aggggcagccttcgt

SEQ ID NO: 326056 - DNA, 15 bp, Homo sapiens
caggggcagccttcg

SEQ ID NO: 326057 - DNA, 15 bp, Homo sapiens
acaggggcagccttc

SEQ ID NO: 326058 - DNA, 15 bp, Homo sapiens
tacaggggcagcctt

SEQ ID NO: 326059 - DNA, 15 bp, Homo sapiens
ttacaggggcagcct

SEQ ID NO: 326060 - DNA, 15 bp, Homo sapiens
cttacaggggcagcc

SEQ ID NO: 326061 - DNA, 15 bp, Homo sapiens
ccttacaggggcagc

SEQ ID NO: 326062 - DNA, 15 bp, Homo sapiens
accttacaggggcag

SEQ ID NO: 326063 - DNA, 15 bp, Homo sapiens
aaccttacaggggca

SEQ ID NO: 326064 - DNA, 15 bp, Homo sapiens
aaaccttacaggggc

SEQ ID NO: 326065 - DNA, 15 bp, Homo sapiens
gaaaccttacagggg

SEQ ID NO: 326066 - DNA, 15 bp, Homo sapiens
tgaaaccttacaggg

SEQ ID NO: 326067 - DNA, 15 bp, Homo sapiens
ttgaaaccttacagg

SEQ ID NO: 326068 - DNA, 15 bp, Homo sapiens
attgaaaccttacag

SEQ ID NO: 326069 - DNA, 15 bp, Homo sapiens
cattgaaaccttaca

SEQ ID NO: 326070 - DNA, 15 bp, Homo sapiens
gcattgaaaccttac

SEQ ID NO: 326071 - DNA, 15 bp, Homo sapiens
tgcattgaaacctta

SEQ ID NO: 326072 - DNA, 15 bp, Homo sapiens
atgcattgaaacctt

SEQ ID NO: 326073 - DNA, 15 bp, Homo sapiens
tatgcattgaaacct

SEQ ID NO: 326074 - DNA, 15 bp, Homo sapiens
gtatgcattgaaacc

SEQ ID NO: 326075 - DNA, 15 bp, Homo sapiens
tgtatgcattgaaac

SEQ ID NO: 326076 - DNA, 15 bp, Homo sapiens
ttgtatgcattgaaa

SEQ ID NO: 326077 - DNA, 15 bp, Homo sapiens
attgtatgcattgaa

SEQ ID NO: 326078 - DNA, 15 bp, Homo sapiens
tattgtatgcattga

SEQ ID NO: 326079 - DNA, 15 bp, Homo sapiens
ttattgtatgcattg

SEQ ID NO: 326080 - DNA, 15 bp, Homo sapiens
tttattgtatgcatt

SEQ ID NO: 326081 - DNA, 15 bp, Homo sapiens
ttttattgtatgcat

SEQ ID NO: 326082 - DNA, 15 bp, Homo sapiens
cttttattgtatgca

SEQ ID NO: 326083 - DNA, 15 bp, Homo sapiens
tcttttattgtatgc

SEQ ID NO: 326084 - DNA, 15 bp, Homo sapiens
ctcttttattgtatg

SEQ ID NO: 326085 - DNA, 15 bp, Homo sapiens
gctcttttattgtat

SEQ ID NO: 326086 - DNA, 15 bp, Homo sapiens
agctcttttattgta

SEQ ID NO: 326087 - DNA, 15 bp, Homo sapiens
aagctcttttattgt

SEQ ID NO: 326088 - DNA, 15 bp, Homo sapiens
aaagctcttttattg

SEQ ID NO: 326089 - DNA, 15 bp, Homo sapiens
taaagctcttttatt

SEQ ID NO: 326090 - DNA, 15 bp, Homo sapiens
ataaagctcttttat

SEQ ID NO: 326091 - DNA, 15 bp, Homo sapiens
gataaagctctttta

SEQ ID NO: 326092 - DNA, 15 bp, Homo sapiens
ggataaagctctttt

SEQ ID NO: 326093 - DNA, 15 bp, Homo sapiens
gggataaagctcttt

SEQ ID NO: 326094 - DNA, 15 bp, Homo sapiens
agggataaagctctt

SEQ ID NO: 326095 - DNA, 15 bp, Homo sapiens
tagggataaagctct

SEQ ID NO: 326096 - DNA, 15 bp, Homo sapiens
ttagggataaagctc

SEQ ID NO: 326097 - DNA, 15 bp, Homo sapiens
gttagggataaagct

SEQ ID NO: 326098 - DNA, 15 bp, Homo sapiens
agttagggataaagc

SEQ ID NO: 326099 - DNA, 15 bp, Homo sapiens
aagttagggataaag

SEQ ID NO: 326100 - DNA, 15 bp, Homo sapiens
gaagttagggataaa

SEQ ID NO: 326101 - DNA, 15 bp, Homo sapiens
agaagttagggataa

SEQ ID NO: 326102 - DNA, 15 bp, Homo sapiens
cagaagttagggata

SEQ ID NO: 326103 - DNA, 15 bp, Homo sapiens
acagaagttagggat

SEQ ID NO: 326104 - DNA, 15 bp, Homo sapiens
aacagaagttaggga

SEQ ID NO: 326105 - DNA, 15 bp, Homo sapiens
taacagaagttaggg

SEQ ID NO: 326106 - DNA, 15 bp, Homo sapiens
gtaacagaagttagg

SEQ ID NO: 326107 - DNA, 15 bp, Homo sapiens
agtaacagaagttag

SEQ ID NO: 326108 - DNA, 15 bp, Homo sapiens
aagtaacagaagtta

SEQ ID NO: 326109 - DNA, 15 bp, Homo sapiens
gaagtaacagaagtt

SEQ ID NO: 326110 - DNA, 15 bp, Homo sapiens
cgaagtaacagaagt

SEQ ID NO: 326111 - DNA, 15 bp, Homo sapiens
acgaagtaacagaag

SEQ ID NO: 326112 - DNA, 15 bp, Homo sapiens
aacgaagtaacagaa

SEQ ID NO: 326113 - DNA, 15 bp, Homo sapiens
gaacgaagtaacaga

SEQ ID NO: 326114 - DNA, 15 bp, Homo sapiens
ggaacgaagtaacag

SEQ ID NO: 326115 - DNA, 15 bp, Homo sapiens
aggaacgaagtaaca

SEQ ID NO: 326116 - DNA, 15 bp, Homo sapiens
gaggaacgaagtaac

SEQ ID NO: 326117 - DNA, 15 bp, Homo sapiens
ggaggaacgaagtaa

SEQ ID NO: 326118 - DNA, 15 bp, Homo sapiens
aggaggaacgaagta

SEQ ID NO: 326119 - DNA, 15 bp, Homo sapiens
gaggaggaacgaagt

SEQ ID NO: 326120 - DNA, 15 bp, Homo sapiens
ggaggaggaacgaag

SEQ ID NO: 326121 - DNA, 15 bp, Homo sapiens
aggaggaggaacgaa

SEQ ID NO: 326122 - DNA, 15 bp, Homo sapiens
taggaggaggaacga

SEQ ID NO: 326123 - DNA, 15 bp, Homo sapiens
ataggaggaggaacg

SEQ ID NO: 326124 - DNA, 15 bp, Homo sapiens
aataggaggaggaac

SEQ ID NO: 326125 - DNA, 15 bp, Homo sapiens
aaataggaggaggaa

SEQ ID NO: 326126 - DNA, 15 bp, Homo sapiens
aaaataggaggagga

SEQ ID NO: 326127 - DNA, 15 bp, Homo sapiens
caaaataggaggagg

SEQ ID NO: 326128 - DNA, 15 bp, Homo sapiens
tcaaaataggaggag

SEQ ID NO: 326129 - DNA, 15 bp, Homo sapiens
ctcaaaataggagga

SEQ ID NO: 326130 - DNA, 15 bp, Homo sapiens
gctcaaaataggagg

SEQ ID NO: 326131 - DNA, 15 bp, Homo sapiens
agctcaaaataggag

SEQ ID NO: 326132 - DNA, 15 bp, Homo sapiens
tagctcaaaatagga

SEQ ID NO: 326133 - DNA, 15 bp, Homo sapiens
atagctcaaaatagg

SEQ ID NO: 326134 - DNA, 15 bp, Homo sapiens
catagctcaaaatag

SEQ ID NO: 326135 - DNA, 15 bp, Homo sapiens
gcatagctcaaaata

SEQ ID NO: 326136 - DNA, 15 bp, Homo sapiens
cgcatagctcaaaat

SEQ ID NO: 326137 - DNA, 15 bp, Homo sapiens
tcgcatagctcaaaa

SEQ ID NO: 326138 - DNA, 15 bp, Homo sapiens
ttcgcatagctcaaa

SEQ ID NO: 326139 - DNA, 15 bp, Homo sapiens
tttcgcatagctcaa

SEQ ID NO: 326140 - DNA, 15 bp, Homo sapiens
atttcgcatagctca

SEQ ID NO: 326141 - DNA, 15 bp, Homo sapiens
tatttcgcatagctc

SEQ ID NO: 326142 - DNA, 15 bp, Homo sapiens
atatttcgcatagct

SEQ ID NO: 326143 - DNA, 15 bp, Homo sapiens
gatatttcgcatagc

SEQ ID NO: 326144 - DNA, 15 bp, Homo sapiens
tgatatttcgcatag

SEQ ID NO: 326145 - DNA, 15 bp, Homo sapiens
atgatatttcgcata

SEQ ID NO: 326146 - DNA, 15 bp, Homo sapiens
tatgatatttcgcat

SEQ ID NO: 326147 - DNA, 15 bp, Homo sapiens
atatgatatttcgca

SEQ ID NO: 326148 - DNA, 15 bp, Homo sapiens
catatgatatttcgc

SEQ ID NO: 326149 - DNA, 15 bp, Homo sapiens
tcatatgatatttcg

SEQ ID NO: 326150 - DNA, 15 bp, Homo sapiens
ttcatatgatatttc

SEQ ID NO: 326151 - DNA, 15 bp, Homo sapiens
cttcatatgatattt

SEQ ID NO: 326152 - DNA, 15 bp, Homo sapiens
tcttcatatgatatt

SEQ ID NO: 326153 - DNA, 15 bp, Homo sapiens
ctcttcatatgatat

SEQ ID NO: 326154 - DNA, 15 bp, Homo sapiens
tctcttcatatgata

SEQ ID NO: 326155 - DNA, 15 bp, Homo sapiens
ttctcttcatatgat

SEQ ID NO: 326156 - DNA, 15 bp, Homo sapiens
tttctcttcatatga

SEQ ID NO: 326157 - DNA, 15 bp, Homo sapiens
gtttctcttcatatg

SEQ ID NO: 326158 - DNA, 15 bp, Homo sapiens
tgtttctcttcatat

SEQ ID NO: 326159 - DNA, 15 bp, Homo sapiens
ctgtttctcttcata

SEQ ID NO: 326160 - DNA, 15 bp, Homo sapiens
gctgtttctcttcat

SEQ ID NO: 326161 - DNA, 15 bp, Homo sapiens
agctgtttctcttca

SEQ ID NO: 326162 - DNA, 15 bp, Homo sapiens
gagctgtttctcttc

SEQ ID NO: 326163 - DNA, 15 bp, Homo sapiens
agagctgtttctctt

SEQ ID NO: 326164 - DNA, 15 bp, Homo sapiens
aagagctgtttctct

SEQ ID NO: 326165 - DNA, 15 bp, Homo sapiens
caagagctgtttctc

SEQ ID NO: 326166 - DNA, 15 bp, Homo sapiens
tcaagagctgtttct

SEQ ID NO: 326167 - DNA, 15 bp, Homo sapiens
ctcaagagctgtttc

SEQ ID NO: 326168 - DNA, 15 bp, Homo sapiens
cctcaagagctgttt

SEQ ID NO: 326169 - DNA, 15 bp, Homo sapiens
tcctcaagagctgtt

SEQ ID NO: 326170 - DNA, 15 bp, Homo sapiens
ttcctcaagagctgt

SEQ ID NO: 326171 - DNA, 15 bp, Homo sapiens
attcctcaagagctg

SEQ ID NO: 326172 - DNA, 15 bp, Homo sapiens
aattcctcaagagct

SEQ ID NO: 326173 - DNA, 15 bp, Homo sapiens
aaattcctcaagagc

SEQ ID NO: 326174 - DNA, 15 bp, Homo sapiens
caaattcctcaagag

SEQ ID NO: 326175 - DNA, 15 bp, Homo sapiens
ccaaattcctcaaga

SEQ ID NO: 326176 - DNA, 15 bp, Homo sapiens
accaaattcctcaag

SEQ ID NO: 326177 - DNA, 15 bp, Homo sapiens
caccaaattcctcaa

SEQ ID NO: 326178 - DNA, 15 bp, Homo sapiens
ccaccaaattcctca

SEQ ID NO: 326179 - DNA, 15 bp, Homo sapiens
accaccaaattcctc

SEQ ID NO: 326180 - DNA, 15 bp, Homo sapiens
gaccaccaaattcct

SEQ ID NO: 326181 - DNA, 15 bp, Homo sapiens
ggaccaccaaattcc

SEQ ID NO: 326182 - DNA, 15 bp, Homo sapiens
aggaccaccaaattc

SEQ ID NO: 326183 - DNA, 15 bp, Homo sapiens
gaggaccaccaaatt

SEQ ID NO: 326184 - DNA, 15 bp, Homo sapiens
agaggaccaccaaat

SEQ ID NO: 326185 - DNA, 15 bp, Homo sapiens
tagaggaccaccaaa

SEQ ID NO: 326186 - DNA, 15 bp, Homo sapiens
gtagaggaccaccaa

SEQ ID NO: 326187 - DNA, 15 bp, Homo sapiens
agtagaggaccacca

SEQ ID NO: 326188 - DNA, 15 bp, Homo sapiens
aagtagaggaccacc

SEQ ID NO: 326189 - DNA, 15 bp, Homo sapiens
gaagtagaggaccac

SEQ ID NO: 326190 - DNA, 15 bp, Homo sapiens
agaagtagaggacca

SEQ ID NO: 326191 - DNA, 15 bp, Homo sapiens
tagaagtagaggacc

SEQ ID NO: 326192 - DNA, 15 bp, Homo sapiens
ctagaagtagaggac

SEQ ID NO: 326193 - DNA, 15 bp, Homo sapiens
gctagaagtagagga

SEQ ID NO: 326194 - DNA, 15 bp, Homo sapiens
ggctagaagtagagg

SEQ ID NO: 326195 - DNA, 15 bp, Homo sapiens
aggctagaagtagag

SEQ ID NO: 326196 - DNA, 15 bp, Homo sapiens
caggctagaagtaga

SEQ ID NO: 326197 - DNA, 15 bp, Homo sapiens
ccaggctagaagtag

SEQ ID NO: 326198 - DNA, 15 bp, Homo sapiens
accaggctagaagta

SEQ ID NO: 326199 - DNA, 15 bp, Homo sapiens
aaccaggctagaagt

SEQ ID NO: 326200 - DNA, 15 bp, Homo sapiens
aaaccaggctagaag

SEQ ID NO: 326201 - DNA, 15 bp, Homo sapiens
aaaaccaggctagaa

SEQ ID NO: 326202 - DNA, 15 bp, Homo sapiens
taaaaccaggctaga

SEQ ID NO: 326203 - DNA, 15 bp, Homo sapiens
ataaaaccaggctag

SEQ ID NO: 326204 - DNA, 15 bp, Homo sapiens
gataaaaccaggcta

SEQ ID NO: 326205 - DNA, 15 bp, Homo sapiens
agataaaaccaggct

SEQ ID NO: 326206 - DNA, 15 bp, Homo sapiens
tagataaaaccaggc

SEQ ID NO: 326207 - DNA, 15 bp, Homo sapiens
ttagataaaaccagg

SEQ ID NO: 326208 - DNA, 15 bp, Homo sapiens
tttagataaaaccag

SEQ ID NO: 326209 - DNA, 15 bp, Homo sapiens
gtttagataaaacca

SEQ ID NO: 326210 - DNA, 15 bp, Homo sapiens
tgtttagataaaacc

SEQ ID NO: 326211 - DNA, 15 bp, Homo sapiens
gtgtttagataaaac

SEQ ID NO: 326212 - DNA, 15 bp, Homo sapiens
agtgtttagataaaa

SEQ ID NO: 326213 - DNA, 15 bp, Homo sapiens
cagtgtttagataaa

SEQ ID NO: 326214 - DNA, 15 bp, Homo sapiens
gcagtgtttagataa

SEQ ID NO: 326215 - DNA, 15 bp, Homo sapiens
tgcagtgtttagata

SEQ ID NO: 326216 - DNA, 15 bp, Homo sapiens
ctgcagtgtttagat

SEQ ID NO: 326217 - DNA, 15 bp, Homo sapiens
cctgcagtgtttaga

SEQ ID NO: 326218 - DNA, 15 bp, Homo sapiens
tcctgcagtgtttag

SEQ ID NO: 326219 - DNA, 15 bp, Homo sapiens
ttcctgcagtgttta

SEQ ID NO: 326220 - DNA, 15 bp, Homo sapiens
cttcctgcagtgttt

SEQ ID NO: 326221 - DNA, 15 bp, Homo sapiens
acttcctgcagtgtt

SEQ ID NO: 326222 - DNA, 15 bp, Homo sapiens
gacttcctgcagtgt

SEQ ID NO: 326223 - DNA, 15 bp, Homo sapiens
tgacttcctgcagtg

SEQ ID NO: 326224 - DNA, 15 bp, Homo sapiens
gtgacttcctgcagt

SEQ ID NO: 326225 - DNA, 15 bp, Homo sapiens
ggtgacttcctgcag

SEQ ID NO: 326226 - DNA, 15 bp, Homo sapiens
cggtgacttcctgca

SEQ ID NO: 326227 - DNA, 15 bp, Homo sapiens
acggtgacttcctgc

SEQ ID NO: 326228 - DNA, 15 bp, Homo sapiens
aacggtgacttcctg

SEQ ID NO: 326229 - DNA, 15 bp, Homo sapiens
gaacggtgacttcct

SEQ ID NO: 326230 - DNA, 15 bp, Homo sapiens
tgaacggtgacttcc

SEQ ID NO: 326231 - DNA, 15 bp, Homo sapiens
atgaacggtgacttc

SEQ ID NO: 326232 - DNA, 15 bp, Homo sapiens
tatgaacggtgactt

SEQ ID NO: 326233 - DNA, 15 bp, Homo sapiens
ttatgaacggtgact

SEQ ID NO: 326234 - DNA, 15 bp, Homo sapiens
cttatgaacggtgac

SEQ ID NO: 326235 - DNA, 15 bp, Homo sapiens
tcttatgaacggtga

SEQ ID NO: 326236 - DNA, 15 bp, Homo sapiens
ttcttatgaacggtg

SEQ ID NO: 326237 - DNA, 15 bp, Homo sapiens
gttcttatgaacggt

SEQ ID NO: 326238 - DNA, 15 bp, Homo sapiens
agttcttatgaacgg

SEQ ID NO: 326239 - DNA, 15 bp, Homo sapiens
gagttcttatgaacg

SEQ ID NO: 326240 - DNA, 15 bp, Homo sapiens
agagttcttatgaac

SEQ ID NO: 326241 - DNA, 15 bp, Homo sapiens
aagagttcttatgaa

SEQ ID NO: 326242 - DNA, 15 bp, Homo sapiens
taagagttcttatga

SEQ ID NO: 326243 - DNA, 15 bp, Homo sapiens
ctaagagttcttatg

SEQ ID NO: 326244 - DNA, 15 bp, Homo sapiens
actaagagttcttat

SEQ ID NO: 326245 - DNA, 15 bp, Homo sapiens
aactaagagttctta

SEQ ID NO: 326246 - DNA, 15 bp, Homo sapiens
taactaagagttctt

SEQ ID NO: 326247 - DNA, 15 bp, Homo sapiens
gtaactaagagttct

SEQ ID NO: 326248 - DNA, 15 bp, Homo sapiens
ggtaactaagagttc

SEQ ID NO: 326249 - DNA, 15 bp, Homo sapiens
aggtaactaagagtt

SEQ ID NO: 326250 - DNA, 15 bp, Homo sapiens
caggtaactaagagt

SEQ ID NO: 326251 - DNA, 15 bp, Homo sapiens
acaggtaactaagag

SEQ ID NO: 326252 - DNA, 15 bp, Homo sapiens
cacaggtaactaaga

SEQ ID NO: 326253 - DNA, 15 bp, Homo sapiens
acacaggtaactaag

SEQ ID NO: 326254 - DNA, 15 bp, Homo sapiens
aacacaggtaactaa

SEQ ID NO: 326255 - DNA, 15 bp, Homo sapiens
caacacaggtaacta

SEQ ID NO: 326256 - DNA, 15 bp, Homo sapiens
ccaacacaggtaact

SEQ ID NO: 326257 - DNA, 15 bp, Homo sapiens
tccaacacaggtaac

SEQ ID NO: 326258 - DNA, 15 bp, Homo sapiens
atccaacacaggtaa

SEQ ID NO: 326259 - DNA, 15 bp, Homo sapiens
tatccaacacaggta

SEQ ID NO: 326260 - DNA, 15 bp, Homo sapiens
ttatccaacacaggt

SEQ ID NO: 326261 - DNA, 15 bp, Homo sapiens
cttatccaacacagg

SEQ ID NO: 326262 - DNA, 15 bp, Homo sapiens
ccttatccaacacag

SEQ ID NO: 326263 - DNA, 15 bp, Homo sapiens
gccttatccaacaca

SEQ ID NO: 326264 - DNA, 15 bp, Homo sapiens
tgccttatccaacac

SEQ ID NO: 326265 - DNA, 15 bp, Homo sapiens
gtgccttatccaaca

SEQ ID NO: 326266 - DNA, 15 bp, Homo sapiens
cgtgccttatccaac

SEQ ID NO: 326267 - DNA, 15 bp, Homo sapiens
ccgtgccttatccaa

SEQ ID NO: 326268 - DNA, 15 bp, Homo sapiens
tccgtgccttatcca

SEQ ID NO: 326269 - DNA, 15 bp, Homo sapiens
gtccgtgccttatcc

SEQ ID NO: 326270 - DNA, 15 bp, Homo sapiens
tgtccgtgccttatc

SEQ ID NO: 326271 - DNA, 15 bp, Homo sapiens
ctgtccgtgccttat

SEQ ID NO: 326272 - DNA, 15 bp, Homo sapiens
gctgtccgtgcctta

SEQ ID NO: 326273 - DNA, 15 bp, Homo sapiens
agctgtccgtgcctt

SEQ ID NO: 326274 - DNA, 15 bp, Homo sapiens
aagctgtccgtgcct

SEQ ID NO: 326275 - DNA, 15 bp, Homo sapiens
gaagctgtccgtgcc

SEQ ID NO: 326276 - DNA, 15 bp, Homo sapiens
agaagctgtccgtgc

SEQ ID NO: 326277 - DNA, 15 bp, Homo sapiens
gagaagctgtccgtg

SEQ ID NO: 326278 - DNA, 15 bp, Homo sapiens
agagaagctgtccgt

SEQ ID NO: 326279 - DNA, 15 bp, Homo sapiens
cagagaagctgtccg

SEQ ID NO: 326280 - DNA, 15 bp, Homo sapiens
gcagagaagctgtcc

SEQ ID NO: 326281 - DNA, 15 bp, Homo sapiens
agcagagaagctgtc

SEQ ID NO: 326282 - DNA, 15 bp, Homo sapiens
gagcagagaagctgt

SEQ ID NO: 326283 - DNA, 15 bp, Homo sapiens
agagcagagaagctg

SEQ ID NO: 326284 - DNA, 15 bp, Homo sapiens
cagagcagagaagct

SEQ ID NO: 326285 - DNA, 15 bp, Homo sapiens
ccagagcagagaagc

SEQ ID NO: 326286 - DNA, 15 bp, Homo sapiens
cccagagcagagaag

SEQ ID NO: 326287 - DNA, 15 bp, Homo sapiens
ccccagagcagagaa

SEQ ID NO: 326288 - DNA, 15 bp, Homo sapiens
cccccagagcagaga

SEQ ID NO: 326289 - DNA, 15 bp, Homo sapiens
acccccagagcagag

SEQ ID NO: 326290 - DNA, 15 bp, Homo sapiens
tacccccagagcaga

SEQ ID NO: 326291 - DNA, 15 bp, Homo sapiens
atacccccagagcag

SEQ ID NO: 326292 - DNA, 15 bp, Homo sapiens
aatacccccagagca

SEQ ID NO: 326293 - DNA, 15 bp, Homo sapiens
aaatacccccagagc

SEQ ID NO: 326294 - DNA, 15 bp, Homo sapiens
gaaatacccccagag

SEQ ID NO: 326295 - DNA, 15 bp, Homo sapiens
agaaatacccccaga

SEQ ID NO: 326296 - DNA, 15 bp, Homo sapiens
cagaaatacccccag

SEQ ID NO: 326297 - DNA, 15 bp, Homo sapiens
acagaaataccccca

SEQ ID NO: 326298 - DNA, 15 bp, Homo sapiens
tacagaaataccccc

SEQ ID NO: 326299 - DNA, 15 bp, Homo sapiens
gtacagaaatacccc

SEQ ID NO: 326300 - DNA, 15 bp, Homo sapiens
agtacagaaataccc

SEQ ID NO: 326301 - DNA, 15 bp, Homo sapiens
tagtacagaaatacc

SEQ ID NO: 326302 - DNA, 15 bp, Homo sapiens
ctagtacagaaatac

SEQ ID NO: 326303 - DNA, 15 bp, Homo sapiens
cctagtacagaaata

SEQ ID NO: 326304 - DNA, 15 bp, Homo sapiens
tcctagtacagaaat

SEQ ID NO: 326305 - DNA, 15 bp, Homo sapiens
atcctagtacagaaa

SEQ ID NO: 326306 - DNA, 15 bp, Homo sapiens
gatcctagtacagaa

SEQ ID NO: 326307 - DNA, 15 bp, Homo sapiens
tgatcctagtacaga

SEQ ID NO: 326308 - DNA, 15 bp, Homo sapiens
ctgatcctagtacag

SEQ ID NO: 326309 - DNA, 15 bp, Homo sapiens
actgatcctagtaca

SEQ ID NO: 326310 - DNA, 15 bp, Homo sapiens
cactgatcctagtac

SEQ ID NO: 326311 - DNA, 15 bp, Homo sapiens
tcactgatcctagta

SEQ ID NO: 326312 - DNA, 15 bp, Homo sapiens
atcactgatcctagt

SEQ ID NO: 326313 - DNA, 15 bp, Homo sapiens
gatcactgatcctag

SEQ ID NO: 326314 - DNA, 15 bp, Homo sapiens
ggatcactgatccta

SEQ ID NO: 326315 - DNA, 15 bp, Homo sapiens
aggatcactgatcct

SEQ ID NO: 326316 - DNA, 15 bp, Homo sapiens
gaggatcactgatcc

SEQ ID NO: 326317 - DNA, 15 bp, Homo sapiens
ggaggatcactgatc

SEQ ID NO: 326318 - DNA, 15 bp, Homo sapiens
gggaggatcactgat

SEQ ID NO: 326319 - DNA, 15 bp, Homo sapiens
cgggaggatcactga

SEQ ID NO: 326320 - DNA, 15 bp, Homo sapiens
ccgggaggatcactg

SEQ ID NO: 326321 - DNA, 15 bp, Homo sapiens
cccgggaggatcact

SEQ ID NO: 326322 - DNA, 15 bp, Homo sapiens
tcccgggaggatcac

SEQ ID NO: 326323 - DNA, 15 bp, Homo sapiens
ctcccgggaggatca

SEQ ID NO: 326324 - DNA, 15 bp, Homo sapiens
cctcccgggaggatc

SEQ ID NO: 326325 - DNA, 15 bp, Homo sapiens
gcctcccgggaggat

SEQ ID NO: 326326 - DNA, 15 bp, Homo sapiens
ggcctcccgggagga

SEQ ID NO: 326327 - DNA, 15 bp, Homo sapiens
tggcctcccgggagg

SEQ ID NO: 326328 - DNA, 15 bp, Homo sapiens
atggcctcccgggag

SEQ ID NO: 326329 - DNA, 15 bp, Homo sapiens
aatggcctcccggga

SEQ ID NO: 326330 - DNA, 15 bp, Homo sapiens
aaatggcctcccggg

SEQ ID NO: 326331 - DNA, 15 bp, Homo sapiens
gaaatggcctcccgg

SEQ ID NO: 326332 - DNA, 15 bp, Homo sapiens
ggaaatggcctcccg

SEQ ID NO: 326333 - DNA, 15 bp, Homo sapiens
aggaaatggcctccc

SEQ ID NO: 326334 - DNA, 15 bp, Homo sapiens
caggaaatggcctcc

SEQ ID NO: 326335 - DNA, 15 bp, Homo sapiens
gcaggaaatggcctc

SEQ ID NO: 326336 - DNA, 15 bp, Homo sapiens
ggcaggaaatggcct

SEQ ID NO: 326337 - DNA, 15 bp, Homo sapiens
gggcaggaaatggcc

SEQ ID NO: 326338 - DNA, 15 bp, Homo sapiens
ggggcaggaaatggc

SEQ ID NO: 326339 - DNA, 15 bp, Homo sapiens
gggggcaggaaatgg

SEQ ID NO: 326340 - DNA, 15 bp, Homo sapiens
tgggggcaggaaatg

SEQ ID NO: 326341 - DNA, 15 bp, Homo sapiens
atgggggcaggaaat

SEQ ID NO: 326342 - DNA, 15 bp, Homo sapiens
tatgggggcaggaaa

SEQ ID NO: 326343 - DNA, 15 bp, Homo sapiens
ttatgggggcaggaa

SEQ ID NO: 326344 - DNA, 15 bp, Homo sapiens
attatgggggcagga

SEQ ID NO: 326345 - DNA, 15 bp, Homo sapiens
gattatgggggcagg

SEQ ID NO: 326346 - DNA, 15 bp, Homo sapiens
tgattatgggggcag

SEQ ID NO: 326347 - DNA, 15 bp, Homo sapiens
ctgattatgggggca

SEQ ID NO: 326348 - DNA, 15 bp, Homo sapiens
cctgattatgggggc

SEQ ID NO: 326349 - DNA, 15 bp, Homo sapiens
ccctgattatggggg

SEQ ID NO: 326350 - DNA, 15 bp, Homo sapiens
tccctgattatgggg

SEQ ID NO: 326351 - DNA, 15 bp, Homo sapiens
ttccctgattatggg

SEQ ID NO: 326352 - DNA, 15 bp, Homo sapiens
cttccctgattatgg

SEQ ID NO: 326353 - DNA, 15 bp, Homo sapiens
gcttccctgattatg

SEQ ID NO: 326354 - DNA, 15 bp, Homo sapiens
ggcttccctgattat

SEQ ID NO: 326355 - DNA, 15 bp, Homo sapiens
aggcttccctgatta

SEQ ID NO: 326356 - DNA, 15 bp, Homo sapiens
caggcttccctgatt

SEQ ID NO: 326357 - DNA, 15 bp, Homo sapiens
gcaggcttccctgat

SEQ ID NO: 326358 - DNA, 15 bp, Homo sapiens
agcaggcttccctga

SEQ ID NO: 326359 - DNA, 15 bp, Homo sapiens
gagcaggcttccctg

SEQ ID NO: 326360 - DNA, 15 bp, Homo sapiens
cgagcaggcttccct

SEQ ID NO: 326361 - DNA, 15 bp, Homo sapiens
acgagcaggcttccc

SEQ ID NO: 326362 - DNA, 15 bp, Homo sapiens
tacgagcaggcttcc

SEQ ID NO: 326363 - DNA, 15 bp, Homo sapiens
ttacgagcaggcttc

SEQ ID NO: 326364 - DNA, 15 bp, Homo sapiens
tttacgagcaggctt

SEQ ID NO: 326365 - DNA, 15 bp, Homo sapiens
gtttacgagcaggct

SEQ ID NO: 326366 - DNA, 15 bp, Homo sapiens
tgtttacgagcaggc

SEQ ID NO: 326367 - DNA, 15 bp, Homo sapiens
ttgtttacgagcagg

SEQ ID NO: 326368 - DNA, 15 bp, Homo sapiens
gttgtttacgagcag

SEQ ID NO: 326369 - DNA, 15 bp, Homo sapiens
tgttgtttacgagca

SEQ ID NO: 326370 - DNA, 15 bp, Homo sapiens
gtgttgtttacgagc

SEQ ID NO: 326371 - DNA, 15 bp, Homo sapiens
tgtgttgtttacgag

SEQ ID NO: 326372 - DNA, 15 bp, Homo sapiens
atgtgttgtttacga

SEQ ID NO: 326373 - DNA, 15 bp, Homo sapiens
catgtgttgtttacg

SEQ ID NO: 326374 - DNA, 15 bp, Homo sapiens
ccatgtgttgtttac

SEQ ID NO: 326375 - DNA, 15 bp, Homo sapiens
tccatgtgttgttta

SEQ ID NO: 326376 - DNA, 15 bp, Homo sapiens
gtccatgtgttgttt

SEQ ID NO: 326377 - DNA, 15 bp, Homo sapiens
tgtccatgtgttgtt

SEQ ID NO: 326378 - DNA, 15 bp, Homo sapiens
ctgtccatgtgttgt

SEQ ID NO: 326379 - DNA, 15 bp, Homo sapiens
tctgtccatgtgttg

SEQ ID NO: 326380 - DNA, 15 bp, Homo sapiens
atctgtccatgtgtt

SEQ ID NO: 326381 - DNA, 15 bp, Homo sapiens
tatctgtccatgtgt

SEQ ID NO: 326382 - DNA, 15 bp, Homo sapiens
ctatctgtccatgtg

SEQ ID NO: 326383 - DNA, 15 bp, Homo sapiens
cctatctgtccatgt

SEQ ID NO: 326384 - DNA, 15 bp, Homo sapiens
tcctatctgtccatg

SEQ ID NO: 326385 - DNA, 15 bp, Homo sapiens
ctcctatctgtccat

SEQ ID NO: 326386 - DNA, 15 bp, Homo sapiens
tctcctatctgtcca

SEQ ID NO: 326387 - DNA, 15 bp, Homo sapiens
ctctcctatctgtcc

SEQ ID NO: 326388 - DNA, 15 bp, Homo sapiens
cctctcctatctgtc

SEQ ID NO: 326389 - DNA, 15 bp, Homo sapiens
gcctctcctatctgt

SEQ ID NO: 326390 - DNA, 15 bp, Homo sapiens
ggcctctcctatctg

SEQ ID NO: 326391 - DNA, 15 bp, Homo sapiens
tggcctctcctatct

SEQ ID NO: 326392 - DNA, 15 bp, Homo sapiens
atggcctctcctatc

SEQ ID NO: 326393 - DNA, 15 bp, Homo sapiens
aatggcctctcctat

SEQ ID NO: 326394 - DNA, 15 bp, Homo sapiens
aaatggcctctccta

SEQ ID NO: 326395 - DNA, 15 bp, Homo sapiens
caaatggcctctcct

SEQ ID NO: 326396 - DNA, 15 bp, Homo sapiens
acaaatggcctctcc

SEQ ID NO: 326397 - DNA, 15 bp, Homo sapiens
tacaaatggcctctc

SEQ ID NO: 326398 - DNA, 15 bp, Homo sapiens
ttacaaatggcctct

SEQ ID NO: 326399 - DNA, 15 bp, Homo sapiens
gttacaaatggcctc

SEQ ID NO: 326400 - DNA, 15 bp, Homo sapiens
agttacaaatggcct

SEQ ID NO: 326401 - DNA, 15 bp, Homo sapiens
aagttacaaatggcc

SEQ ID NO: 326402 - DNA, 15 bp, Homo sapiens
taagttacaaatggc

SEQ ID NO: 326403 - DNA, 15 bp, Homo sapiens
ttaagttacaaatgg

SEQ ID NO: 326404 - DNA, 15 bp, Homo sapiens
cttaagttacaaatg

SEQ ID NO: 326405 - DNA, 15 bp, Homo sapiens
ccttaagttacaaat

SEQ ID NO: 326406 - DNA, 15 bp, Homo sapiens
tccttaagttacaaa

SEQ ID NO: 326407 - DNA, 15 bp, Homo sapiens
ttccttaagttacaa

SEQ ID NO: 326408 - DNA, 15 bp, Homo sapiens
tttccttaagttaca

SEQ ID NO: 326409 - DNA, 15 bp, Homo sapiens
atttccttaagttac

SEQ ID NO: 326410 - DNA, 15 bp, Homo sapiens
catttccttaagtta

SEQ ID NO: 326411 - DNA, 15 bp, Homo sapiens
ccatttccttaagtt

SEQ ID NO: 326412 - DNA, 15 bp, Homo sapiens
tccatttccttaagt

SEQ ID NO: 326413 - DNA, 15 bp, Homo sapiens
gtccatttccttaag

SEQ ID NO: 326414 - DNA, 15 bp, Homo sapiens
ggtccatttccttaa

SEQ ID NO: 326415 - DNA, 15 bp, Homo sapiens
gggtccatttcctta

SEQ ID NO: 326416 - DNA, 15 bp, Homo sapiens
cgggtccatttcctt

SEQ ID NO: 326417 - DNA, 15 bp, Homo sapiens
tcgggtccatttcct

SEQ ID NO: 326418 - DNA, 15 bp, Homo sapiens
atcgggtccatttcc

SEQ ID NO: 326419 - DNA, 15 bp, Homo sapiens
tatcgggtccatttc

SEQ ID NO: 326420 - DNA, 15 bp, Homo sapiens
gtatcgggtccattt

SEQ ID NO: 326421 - DNA, 15 bp, Homo sapiens
cgtatcgggtccatt

SEQ ID NO: 326422 - DNA, 15 bp, Homo sapiens
acgtatcgggtccat

SEQ ID NO: 326423 - DNA, 15 bp, Homo sapiens
tacgtatcgggtcca

SEQ ID NO: 326424 - DNA, 15 bp, Homo sapiens
ttacgtatcgggtcc

SEQ ID NO: 326425 - DNA, 15 bp, Homo sapiens
tttacgtatcgggtc

SEQ ID NO: 326426 - DNA, 15 bp, Homo sapiens
ctttacgtatcgggt

SEQ ID NO: 326427 - DNA, 15 bp, Homo sapiens
tctttacgtatcggg

SEQ ID NO: 326428 - DNA, 15 bp, Homo sapiens
atctttacgtatcgg

SEQ ID NO: 326429 - DNA, 15 bp, Homo sapiens
aatctttacgtatcg

SEQ ID NO: 326430 - DNA, 15 bp, Homo sapiens
gaatctttacgtatc

SEQ ID NO: 326431 - DNA, 15 bp, Homo sapiens
agaatctttacgtat

SEQ ID NO: 326432 - DNA, 15 bp, Homo sapiens
cagaatctttacgta

SEQ ID NO: 326433 - DNA, 15 bp, Homo sapiens
tcagaatctttacgt

SEQ ID NO: 326434 - DNA, 15 bp, Homo sapiens
ttcagaatctttacg

SEQ ID NO: 326435 - DNA, 15 bp, Homo sapiens
gttcagaatctttac

SEQ ID NO: 326436 - DNA, 15 bp, Homo sapiens
tgttcagaatcttta

SEQ ID NO: 326437 - DNA, 15 bp, Homo sapiens
atgttcagaatcttt

SEQ ID NO: 326438 - DNA, 15 bp, Homo sapiens
tatgttcagaatctt

SEQ ID NO: 326439 - DNA, 15 bp, Homo sapiens
atatgttcagaatct

SEQ ID NO: 326440 - DNA, 15 bp, Homo sapiens
aatatgttcagaatc

SEQ ID NO: 326441 - DNA, 15 bp, Homo sapiens
gaatatgttcagaat

SEQ ID NO: 326442 - DNA, 15 bp, Homo sapiens
agaatatgttcagaa

SEQ ID NO: 326443 - DNA, 15 bp, Homo sapiens
aagaatatgttcaga

SEQ ID NO: 326444 - DNA, 15 bp, Homo sapiens
aaagaatatgttcag

SEQ ID NO: 326445 - DNA, 15 bp, Homo sapiens
caaagaatatgttca

SEQ ID NO: 326446 - DNA, 15 bp, Homo sapiens
acaaagaatatgttc

SEQ ID NO: 326447 - DNA, 15 bp, Homo sapiens
tacaaagaatatgtt

SEQ ID NO: 326448 - DNA, 15 bp, Homo sapiens
ttacaaagaatatgt

SEQ ID NO: 326449 - DNA, 15 bp, Homo sapiens
cttacaaagaatatg

SEQ ID NO: 326450 - DNA, 15 bp, Homo sapiens
ccttacaaagaatat

SEQ ID NO: 326451 - DNA, 15 bp, Homo sapiens
tccttacaaagaata

SEQ ID NO: 326452 - DNA, 15 bp, Homo sapiens
ctccttacaaagaat

SEQ ID NO: 326453 - DNA, 15 bp, Homo sapiens
cctccttacaaagaa

SEQ ID NO: 326454 - DNA, 15 bp, Homo sapiens
acctccttacaaaga

SEQ ID NO: 326455 - DNA, 15 bp, Homo sapiens
tacctccttacaaag

SEQ ID NO: 326456 - DNA, 15 bp, Homo sapiens
atacctccttacaaa

SEQ ID NO: 326457 - DNA, 15 bp, Homo sapiens
catacctccttacaa

SEQ ID NO: 326458 - DNA, 15 bp, Homo sapiens
gcatacctccttaca

SEQ ID NO: 326459 - DNA, 15 bp, Homo sapiens
ggcatacctccttac

SEQ ID NO: 326460 - DNA, 15 bp, Homo sapiens
aggcatacctcctta

SEQ ID NO: 326461 - DNA, 15 bp, Homo sapiens
taggcatacctcctt

SEQ ID NO: 326462 - DNA, 15 bp, Homo sapiens
ataggcatacctcct

SEQ ID NO: 326463 - DNA, 15 bp, Homo sapiens
aataggcatacctcc

SEQ ID NO: 326464 - DNA, 15 bp, Homo sapiens
aaataggcatacctc

SEQ ID NO: 326465 - DNA, 15 bp, Homo sapiens
aaaataggcatacct

SEQ ID NO: 326466 - DNA, 15 bp, Homo sapiens
taaaataggcatacc

SEQ ID NO: 326467 - DNA, 15 bp, Homo sapiens
ataaaataggcatac

SEQ ID NO: 326468 - DNA, 15 bp, Homo sapiens
tataaaataggcata

SEQ ID NO: 326469 - DNA, 15 bp, Homo sapiens
ttataaaataggcat

SEQ ID NO: 326470 - DNA, 15 bp, Homo sapiens
tttataaaataggca

SEQ ID NO: 326471 - DNA, 15 bp, Homo sapiens
ctttataaaataggc

SEQ ID NO: 326472 - DNA, 15 bp, Homo sapiens
actttataaaatagg

SEQ ID NO: 326473 - DNA, 15 bp, Homo sapiens
tactttataaaatag

SEQ ID NO: 326474 - DNA, 15 bp, Homo sapiens
gtactttataaaata

SEQ ID NO: 326475 - DNA, 15 bp, Homo sapiens
tgtactttataaaat

SEQ ID NO: 326476 - DNA, 15 bp, Homo sapiens
ctgtactttataaaa

SEQ ID NO: 326477 - DNA, 15 bp, Homo sapiens
gctgtactttataaa

SEQ ID NO: 326478 - DNA, 15 bp, Homo sapiens
ggctgtactttataa

SEQ ID NO: 326479 - DNA, 15 bp, Homo sapiens
cggctgtactttata

SEQ ID NO: 326480 - DNA, 15 bp, Homo sapiens
ccggctgtactttat

SEQ ID NO: 326481 - DNA, 15 bp, Homo sapiens
cccggctgtacttta

SEQ ID NO: 326482 - DNA, 15 bp, Homo sapiens
acccggctgtacttt

SEQ ID NO: 326483 - DNA, 15 bp, Homo sapiens
cacccggctgtactt

SEQ ID NO: 326484 - DNA, 15 bp, Homo sapiens
acacccggctgtact

SEQ ID NO: 326485 - DNA, 15 bp, Homo sapiens
cacacccggctgtac

SEQ ID NO: 326486 - DNA, 15 bp, Homo sapiens
ccacacccggctgta

SEQ ID NO: 326487 - DNA, 15 bp, Homo sapiens
accacacccggctgt

SEQ ID NO: 326488 - DNA, 15 bp, Homo sapiens
caccacacccggctg

SEQ ID NO: 326489 - DNA, 15 bp, Homo sapiens
ccaccacacccggct

SEQ ID NO: 326490 - DNA, 15 bp, Homo sapiens
gccaccacacccggc

SEQ ID NO: 326491 - DNA, 15 bp, Homo sapiens
agccaccacacccgg

SEQ ID NO: 326492 - DNA, 15 bp, Homo sapiens
gagccaccacacccg

SEQ ID NO: 326493 - DNA, 15 bp, Homo sapiens
tgagccaccacaccc

SEQ ID NO: 326494 - DNA, 15 bp, Homo sapiens
atgagccaccacacc

SEQ ID NO: 326495 - DNA, 15 bp, Homo sapiens
catgagccaccacac

SEQ ID NO: 326496 - DNA, 15 bp, Homo sapiens
ccatgagccaccaca

SEQ ID NO: 326497 - DNA, 15 bp, Homo sapiens
gccatgagccaccac

SEQ ID NO: 326498 - DNA, 15 bp, Homo sapiens
agccatgagccacca

SEQ ID NO: 326499 - DNA, 15 bp, Homo sapiens
tagccatgagccacc

SEQ ID NO: 326500 - DNA, 15 bp, Homo sapiens
atagccatgagccac

SEQ ID NO: 326501 - DNA, 15 bp, Homo sapiens
tatagccatgagcca

SEQ ID NO: 326502 - DNA, 15 bp, Homo sapiens
ttatagccatgagcc

SEQ ID NO: 326503 - DNA, 15 bp, Homo sapiens
attatagccatgagc

SEQ ID NO: 326504 - DNA, 15 bp, Homo sapiens
gattatagccatgag

SEQ ID NO: 326505 - DNA, 15 bp, Homo sapiens
ggattatagccatga

SEQ ID NO: 326506 - DNA, 15 bp, Homo sapiens
gggattatagccatg

SEQ ID NO: 326507 - DNA, 15 bp, Homo sapiens
tgggattatagccat

SEQ ID NO: 326508 - DNA, 15 bp, Homo sapiens
ctgggattatagcca

SEQ ID NO: 326509 - DNA, 15 bp, Homo sapiens
gctgggattatagcc

SEQ ID NO: 326510 - DNA, 15 bp, Homo sapiens
tgctgggattatagc

SEQ ID NO: 326511 - DNA, 15 bp, Homo sapiens
cgcctcggcctccca

SEQ ID NO: 326512 - DNA, 15 bp, Homo sapiens
ccgcctcggcctccc

SEQ ID NO: 326513 - DNA, 15 bp, Homo sapiens
cccgcctcggcctcc

SEQ ID NO: 326514 - DNA, 15 bp, Homo sapiens
gcccgcctcggcctc

SEQ ID NO: 326515 - DNA, 15 bp, Homo sapiens
cgcccgcctcggcct

SEQ ID NO: 326516 - DNA, 15 bp, Homo sapiens
ccgcccgcctcggcc

SEQ ID NO: 326517 - DNA, 15 bp, Homo sapiens
tccgcccgcctcggc

SEQ ID NO: 326518 - DNA, 15 bp, Homo sapiens
atccgcccgcctcgg

SEQ ID NO: 326519 - DNA, 15 bp, Homo sapiens
gatccgcccgcctcg

SEQ ID NO: 326520 - DNA, 15 bp, Homo sapiens
tgatccgcccgcctc

SEQ ID NO: 326521 - DNA, 15 bp, Homo sapiens
gtgatccgcccgcct

SEQ ID NO: 326522 - DNA, 15 bp, Homo sapiens
ggtgatccgcccgcc

SEQ ID NO: 326523 - DNA, 15 bp, Homo sapiens
aggtgatccgcccgc

SEQ ID NO: 326524 - DNA, 15 bp, Homo sapiens
caggtgatccgcccg

SEQ ID NO: 326525 - DNA, 15 bp, Homo sapiens
tcaggtgatccgccc

SEQ ID NO: 326526 - DNA, 15 bp, Homo sapiens
ctcaggtgatccgcc

SEQ ID NO: 326527 - DNA, 15 bp, Homo sapiens
tctcaggtgatccgc

SEQ ID NO: 326528 - DNA, 15 bp, Homo sapiens
atctcaggtgatccg

SEQ ID NO: 326529 - DNA, 15 bp, Homo sapiens
ctcctgatctcaggt

SEQ ID NO: 326530 - DNA, 15 bp, Homo sapiens
actcctgatctcagg

SEQ ID NO: 326531 - DNA, 15 bp, Homo sapiens
aactcctgatctcag

SEQ ID NO: 326532 - DNA, 15 bp, Homo sapiens
aaactcctgatctca

SEQ ID NO: 326533 - DNA, 15 bp, Homo sapiens
caaactcctgatctc

SEQ ID NO: 326534 - DNA, 15 bp, Homo sapiens
tcaaactcctgatct

SEQ ID NO: 326535 - DNA, 15 bp, Homo sapiens
ctcaaactcctgatc

SEQ ID NO: 326536 - DNA, 15 bp, Homo sapiens
tctcaaactcctgat

SEQ ID NO: 326537 - DNA, 15 bp, Homo sapiens
tcaggctggtctcaa

SEQ ID NO: 326538 - DNA, 15 bp, Homo sapiens
gtcaggctggtctca

SEQ ID NO: 326539 - DNA, 15 bp, Homo sapiens
ggtcaggctggtctc

SEQ ID NO: 326540 - DNA, 15 bp, Homo sapiens
tggtcaggctggtct

SEQ ID NO: 326541 - DNA, 15 bp, Homo sapiens
ttggtcaggctggtc

SEQ ID NO: 326542 - DNA, 15 bp, Homo sapiens
gttggtcaggctggt

SEQ ID NO: 326543 - DNA, 15 bp, Homo sapiens
tgttggtcaggctgg

SEQ ID NO: 326544 - DNA, 15 bp, Homo sapiens
gtgttggtcaggctg

SEQ ID NO: 326545 - DNA, 15 bp, Homo sapiens
cgtgttggtcaggct

SEQ ID NO: 326546 - DNA, 15 bp, Homo sapiens
ccgtgttggtcaggc

SEQ ID NO: 326547 - DNA, 15 bp, Homo sapiens
tccgtgttggtcagg

SEQ ID NO: 326548 - DNA, 15 bp, Homo sapiens
ctccgtgttggtcag

SEQ ID NO: 326549 - DNA, 15 bp, Homo sapiens
tctccgtgttggtca

SEQ ID NO: 326550 - DNA, 15 bp, Homo sapiens
ttctccgtgttggtc

SEQ ID NO: 326551 - DNA, 15 bp, Homo sapiens
tttctccgtgttggt

SEQ ID NO: 326552 - DNA, 15 bp, Homo sapiens
gtttctccgtgttgg

SEQ ID NO: 326553 - DNA, 15 bp, Homo sapiens
ggtttctccgtgttg

SEQ ID NO: 326554 - DNA, 15 bp, Homo sapiens
gggtttctccgtgtt

SEQ ID NO: 326555 - DNA, 15 bp, Homo sapiens
ggggtttctccgtgt

SEQ ID NO: 326556 - DNA, 15 bp, Homo sapiens
cggggtttctccgtg

SEQ ID NO: 326557 - DNA, 15 bp, Homo sapiens
acggggtttctccgt

SEQ ID NO: 326558 - DNA, 15 bp, Homo sapiens
gacggggtttctccg

SEQ ID NO: 326559 - DNA, 15 bp, Homo sapiens
agacggggtttctcc

SEQ ID NO: 326560 - DNA, 15 bp, Homo sapiens
cagacggggtttctc

SEQ ID NO: 326561 - DNA, 15 bp, Homo sapiens
acagacggggtttct

SEQ ID NO: 326562 - DNA, 15 bp, Homo sapiens
tacagacggggtttc

SEQ ID NO: 326563 - DNA, 15 bp, Homo sapiens
gtacagacggggttt

SEQ ID NO: 326564 - DNA, 15 bp, Homo sapiens
agtacagacggggtt

SEQ ID NO: 326565 - DNA, 15 bp, Homo sapiens
tagtacagacggggt

SEQ ID NO: 326566 - DNA, 15 bp, Homo sapiens
ttagtacagacgggg

SEQ ID NO: 326567 - DNA, 15 bp, Homo sapiens
tttagtacagacggg

SEQ ID NO: 326568 - DNA, 15 bp, Homo sapiens
ttttagtacagacgg

SEQ ID NO: 326569 - DNA, 15 bp, Homo sapiens
tttttagtacagacg

SEQ ID NO: 326570 - DNA, 15 bp, Homo sapiens
atttttagtacagac

SEQ ID NO: 326571 - DNA, 15 bp, Homo sapiens
tatttttagtacaga

SEQ ID NO: 326572 - DNA, 15 bp, Homo sapiens
gtatttttagtacag

SEQ ID NO: 326573 - DNA, 15 bp, Homo sapiens
tgtatttttagtaca

SEQ ID NO: 326574 - DNA, 15 bp, Homo sapiens
ttgtatttttagtac

SEQ ID NO: 326575 - DNA, 15 bp, Homo sapiens
attttgtatttttag

SEQ ID NO: 326576 - DNA, 15 bp, Homo sapiens
aattttgtattttta

SEQ ID NO: 326577 - DNA, 15 bp, Homo sapiens
taattttgtattttt

SEQ ID NO: 326578 - DNA, 15 bp, Homo sapiens
ctaattttgtatttt

SEQ ID NO: 326579 - DNA, 15 bp, Homo sapiens
gctaattttgtattt

SEQ ID NO: 326580 - DNA, 15 bp, Homo sapiens
tgctaattttgtatt

SEQ ID NO: 326581 - DNA, 15 bp, Homo sapiens
ctgctaattttgtat

SEQ ID NO: 326582 - DNA, 15 bp, Homo sapiens
cctgctaattttgta

SEQ ID NO: 326583 - DNA, 15 bp, Homo sapiens
ccctgctaattttgt

SEQ ID NO: 326584 - DNA, 15 bp, Homo sapiens
accctgctaattttg

SEQ ID NO: 326585 - DNA, 15 bp, Homo sapiens
caccctgctaatttt

SEQ ID NO: 326586 - DNA, 15 bp, Homo sapiens
acaccctgctaattt

SEQ ID NO: 326587 - DNA, 15 bp, Homo sapiens
cacaccctgctaatt

SEQ ID NO: 326588 - DNA, 15 bp, Homo sapiens
ccacaccctgctaat

SEQ ID NO: 326589 - DNA, 15 bp, Homo sapiens
accacaccctgctaa

SEQ ID NO: 326590 - DNA, 15 bp, Homo sapiens
caccacaccctgcta

SEQ ID NO: 326591 - DNA, 15 bp, Homo sapiens
ccaccacaccctgct

SEQ ID NO: 326592 - DNA, 15 bp, Homo sapiens
accaccacaccctgc

SEQ ID NO: 326593 - DNA, 15 bp, Homo sapiens
taccaccacaccctg

SEQ ID NO: 326594 - DNA, 15 bp, Homo sapiens
gtaccaccacaccct

SEQ ID NO: 326595 - DNA, 15 bp, Homo sapiens
tgtaccaccacaccc

SEQ ID NO: 326596 - DNA, 15 bp, Homo sapiens
atgtaccaccacacc

SEQ ID NO: 326597 - DNA, 15 bp, Homo sapiens
catgtaccaccacac

SEQ ID NO: 326598 - DNA, 15 bp, Homo sapiens
gcatgtaccaccaca

SEQ ID NO: 326599 - DNA, 15 bp, Homo sapiens
ggcatgtaccaccac

SEQ ID NO: 326600 - DNA, 15 bp, Homo sapiens
aggcatgtaccacca

SEQ ID NO: 326601 - DNA, 15 bp, Homo sapiens
caggcatgtaccacc

SEQ ID NO: 326602 - DNA, 15 bp, Homo sapiens
acaggcatgtaccac

SEQ ID NO: 326603 - DNA, 15 bp, Homo sapiens
tacaggcatgtacca

SEQ ID NO: 326604 - DNA, 15 bp, Homo sapiens
ttacaggcatgtacc

SEQ ID NO: 326605 - DNA, 15 bp, Homo sapiens
attacaggcatgtac

SEQ ID NO: 326606 - DNA, 15 bp, Homo sapiens
gattacaggcatgta

SEQ ID NO: 326607 - DNA, 15 bp, Homo sapiens
ggattacaggcatgt

SEQ ID NO: 326608 - DNA, 15 bp, Homo sapiens
cagtagctgggatta

SEQ ID NO: 326609 - DNA, 15 bp, Homo sapiens
ccagtagctgggatt

SEQ ID NO: 326610 - DNA, 15 bp, Homo sapiens
cccagtagctgggat

SEQ ID NO: 326611 - DNA, 15 bp, Homo sapiens
ccccagtagctggga

SEQ ID NO: 326612 - DNA, 15 bp, Homo sapiens
tccccagtagctggg

SEQ ID NO: 326613 - DNA, 15 bp, Homo sapiens
ctccccagtagctgg

SEQ ID NO: 326614 - DNA, 15 bp, Homo sapiens
cctccccagtagctg

SEQ ID NO: 326615 - DNA, 15 bp, Homo sapiens
gcctccccagtagct

SEQ ID NO: 326616 - DNA, 15 bp, Homo sapiens
agcctccccagtagc

SEQ ID NO: 326617 - DNA, 15 bp, Homo sapiens
cagcctccccagtag

SEQ ID NO: 326618 - DNA, 15 bp, Homo sapiens
tcagcctccccagta

SEQ ID NO: 326619 - DNA, 15 bp, Homo sapiens
ctcagcctccccagt

SEQ ID NO: 326620 - DNA, 15 bp, Homo sapiens
cctcagcctccccag

SEQ ID NO: 326621 - DNA, 15 bp, Homo sapiens
gcctcagcctcccca

SEQ ID NO: 326622 - DNA, 15 bp, Homo sapiens
tgcctcagcctcccc

SEQ ID NO: 326623 - DNA, 15 bp, Homo sapiens
tcccgggttcaagtg

SEQ ID NO: 326624 - DNA, 15 bp, Homo sapiens
ctcccgggttcaagt

SEQ ID NO: 326625 - DNA, 15 bp, Homo sapiens
gcctcccgggttcaa

SEQ ID NO: 326626 - DNA, 15 bp, Homo sapiens
cctccgcctcccggg

SEQ ID NO: 326627 - DNA, 15 bp, Homo sapiens
acctccgcctcccgg

SEQ ID NO: 326628 - DNA, 15 bp, Homo sapiens
aacctccgcctcccg

SEQ ID NO: 326629 - DNA, 15 bp, Homo sapiens
caacctccgcctccc

SEQ ID NO: 326630 - DNA, 15 bp, Homo sapiens
atggcgtgatctcgg

SEQ ID NO: 326631 - DNA, 15 bp, Homo sapiens
aatggcgtgatctcg

SEQ ID NO: 326632 - DNA, 15 bp, Homo sapiens
caatggcgtgatctc

SEQ ID NO: 326633 - DNA, 15 bp, Homo sapiens
gcaatggcgtgatct

SEQ ID NO: 326634 - DNA, 15 bp, Homo sapiens
tgcaatggcgtgatc

SEQ ID NO: 326635 - DNA, 15 bp, Homo sapiens
gtgcaatggcgtgat

SEQ ID NO: 326636 - DNA, 15 bp, Homo sapiens
agtgcaatggcgtga

SEQ ID NO: 326637 - DNA, 15 bp, Homo sapiens
gagtgcaatggcgtg

SEQ ID NO: 326638 - DNA, 15 bp, Homo sapiens
ggagtgcaatggcgt

SEQ ID NO: 326639 - DNA, 15 bp, Homo sapiens
tggagtgcaatggcg

SEQ ID NO: 326640 - DNA, 15 bp, Homo sapiens
ttggagtgcaatggc

SEQ ID NO: 326641 - DNA, 15 bp, Homo sapiens
attggagtgcaatgg

SEQ ID NO: 326642 - DNA, 15 bp, Homo sapiens
gattggagtgcaatg

SEQ ID NO: 326643 - DNA, 15 bp, Homo sapiens
agattggagtgcaat

SEQ ID NO: 326644 - DNA, 15 bp, Homo sapiens
tagattggagtgcaa

SEQ ID NO: 326645 - DNA, 15 bp, Homo sapiens
ctagattggagtgca

SEQ ID NO: 326646 - DNA, 15 bp, Homo sapiens
cctagattggagtgc

SEQ ID NO: 326647 - DNA, 15 bp, Homo sapiens
gcctagattggagtg

SEQ ID NO: 326648 - DNA, 15 bp, Homo sapiens
tgcctagattggagt

SEQ ID NO: 326649 - DNA, 15 bp, Homo sapiens
ttgcctagattggag

SEQ ID NO: 326650 - DNA, 15 bp, Homo sapiens
attgcctagattgga

SEQ ID NO: 326651 - DNA, 15 bp, Homo sapiens
tattgcctagattgg

SEQ ID NO: 326652 - DNA, 15 bp, Homo sapiens
ttattgcctagattg

SEQ ID NO: 326653 - DNA, 15 bp, Homo sapiens
cttattgcctagatt

SEQ ID NO: 326654 - DNA, 15 bp, Homo sapiens
tcttattgcctagat

SEQ ID NO: 326655 - DNA, 15 bp, Homo sapiens
ctcttattgcctaga

SEQ ID NO: 326656 - DNA, 15 bp, Homo sapiens
gctcttattgcctag

SEQ ID NO: 326657 - DNA, 15 bp, Homo sapiens
tgctcttattgccta

SEQ ID NO: 326658 - DNA, 15 bp, Homo sapiens
ttgctcttattgcct

SEQ ID NO: 326659 - DNA, 15 bp, Homo sapiens
tttgctcttattgcc

SEQ ID NO: 326660 - DNA, 15 bp, Homo sapiens
ttttgctcttattgc

SEQ ID NO: 326661 - DNA, 15 bp, Homo sapiens
gttttgctcttattg

SEQ ID NO: 326662 - DNA, 15 bp, Homo sapiens
agttttgctcttatt

SEQ ID NO: 326663 - DNA, 15 bp, Homo sapiens
gagttttgctcttat

SEQ ID NO: 326664 - DNA, 15 bp, Homo sapiens
ggagttttgctctta

SEQ ID NO: 326665 - DNA, 15 bp, Homo sapiens
cggagttttgctctt

SEQ ID NO: 326666 - DNA, 15 bp, Homo sapiens
acggagttttgctct

SEQ ID NO: 326667 - DNA, 15 bp, Homo sapiens
gacggagttttgctc

SEQ ID NO: 326668 - DNA, 15 bp, Homo sapiens
agacggagttttgct

SEQ ID NO: 326669 - DNA, 15 bp, Homo sapiens
gagacggagttttgc

SEQ ID NO: 326670 - DNA, 15 bp, Homo sapiens
tgagacggagttttg

SEQ ID NO: 326671 - DNA, 15 bp, Homo sapiens
ttgagacggagtttt

SEQ ID NO: 326672 - DNA, 15 bp, Homo sapiens
tttgagacggagttt

SEQ ID NO: 326673 - DNA, 15 bp, Homo sapiens
gtttgagacggagtt

SEQ ID NO: 326674 - DNA, 15 bp, Homo sapiens
tgtttgagacggagt

SEQ ID NO: 326675 - DNA, 15 bp, Homo sapiens
ttgtttgagacggag

SEQ ID NO: 326676 - DNA, 15 bp, Homo sapiens
gttgtttgagacgga

SEQ ID NO: 326677 - DNA, 15 bp, Homo sapiens
tgttgtttgagacgg

SEQ ID NO: 326678 - DNA, 15 bp, Homo sapiens
ttgttgtttgagacg

SEQ ID NO: 326679 - DNA, 15 bp, Homo sapiens
tttgttgtttgagac

SEQ ID NO: 326680 - DNA, 15 bp, Homo sapiens
ttttgttgtttgaga

SEQ ID NO: 326681 - DNA, 15 bp, Homo sapiens
tttttgttgtttgag

SEQ ID NO: 326682 - DNA, 15 bp, Homo sapiens
ttttttgttgtttga

SEQ ID NO: 326683 - DNA, 15 bp, Homo sapiens
gttttttgttgtttg

SEQ ID NO: 326684 - DNA, 15 bp, Homo sapiens
ggttttttgttgttt

SEQ ID NO: 326685 - DNA, 15 bp, Homo sapiens
tggttttttgttgtt

SEQ ID NO: 326686 - DNA, 15 bp, Homo sapiens
ttggttttttgttgt

SEQ ID NO: 326687 - DNA, 15 bp, Homo sapiens
tttggttttttgttg

SEQ ID NO: 326688 - DNA, 15 bp, Homo sapiens
ctttggttttttgtt

SEQ ID NO: 326689 - DNA, 15 bp, Homo sapiens
actttggttttttgt

SEQ ID NO: 326690 - DNA, 15 bp, Homo sapiens
tactttggttttttg

SEQ ID NO: 326691 - DNA, 15 bp, Homo sapiens
atactttggtttttt

SEQ ID NO: 326692 - DNA, 15 bp, Homo sapiens
tatactttggttttt

SEQ ID NO: 326693 - DNA, 15 bp, Homo sapiens
ttatactttggtttt

SEQ ID NO: 326694 - DNA, 15 bp, Homo sapiens
gttatactttggttt

SEQ ID NO: 326695 - DNA, 15 bp, Homo sapiens
agttatactttggtt

SEQ ID NO: 326696 - DNA, 15 bp, Homo sapiens
cagttatactttggt

SEQ ID NO: 326697 - DNA, 15 bp, Homo sapiens
ccagttatactttgg

SEQ ID NO: 326698 - DNA, 15 bp, Homo sapiens
cccagttatactttg

SEQ ID NO: 326699 - DNA, 15 bp, Homo sapiens
gcccagttatacttt

SEQ ID NO: 326700 - DNA, 15 bp, Homo sapiens
agcccagttatactt

SEQ ID NO: 326701 - DNA, 15 bp, Homo sapiens
aagcccagttatact

SEQ ID NO: 326702 - DNA, 15 bp, Homo sapiens
aaagcccagttatac

SEQ ID NO: 326703 - DNA, 15 bp, Homo sapiens
aaaagcccagttata

SEQ ID NO: 326704 - DNA, 15 bp, Homo sapiens
aaaaagcccagttat

SEQ ID NO: 326705 - DNA, 15 bp, Homo sapiens
caaaaagcccagtta

SEQ ID NO: 326706 - DNA, 15 bp, Homo sapiens
tcaaaaagcccagtt

SEQ ID NO: 326707 - DNA, 15 bp, Homo sapiens
ttcaaaaagcccagt

SEQ ID NO: 326708 - DNA, 15 bp, Homo sapiens
cttcaaaaagcccag

SEQ ID NO: 326709 - DNA, 15 bp, Homo sapiens
tcttcaaaaagccca

SEQ ID NO: 326710 - DNA, 15 bp, Homo sapiens
ttcttcaaaaagccc

SEQ ID NO: 326711 - DNA, 15 bp, Homo sapiens
gttcttcaaaaagcc

SEQ ID NO: 326712 - DNA, 15 bp, Homo sapiens
tgttcttcaaaaagc

SEQ ID NO: 326713 - DNA, 15 bp, Homo sapiens
atgttcttcaaaaag

SEQ ID NO: 326714 - DNA, 15 bp, Homo sapiens
catgttcttcaaaaa

SEQ ID NO: 326715 - DNA, 15 bp, Homo sapiens
tcatgttcttcaaaa

SEQ ID NO: 326716 - DNA, 15 bp, Homo sapiens
ttcatgttcttcaaa

SEQ ID NO: 326717 - DNA, 15 bp, Homo sapiens
tttcatgttcttcaa

SEQ ID NO: 326718 - DNA, 15 bp, Homo sapiens
gtttcatgttcttca

SEQ ID NO: 326719 - DNA, 15 bp, Homo sapiens
tgtttcatgttcttc

SEQ ID NO: 326720 - DNA, 15 bp, Homo sapiens
atgtttcatgttctt

SEQ ID NO: 326721 - DNA, 15 bp, Homo sapiens
catgtttcatgttct

SEQ ID NO: 326722 - DNA, 15 bp, Homo sapiens
gcatgtttcatgttc

SEQ ID NO: 326723 - DNA, 15 bp, Homo sapiens
ggcatgtttcatgtt

SEQ ID NO: 326724 - DNA, 15 bp, Homo sapiens
gggcatgtttcatgt

SEQ ID NO: 326725 - DNA, 15 bp, Homo sapiens
tgggcatgtttcatg

SEQ ID NO: 326726 - DNA, 15 bp, Homo sapiens
ctgggcatgtttcat

SEQ ID NO: 326727 - DNA, 15 bp, Homo sapiens
actgggcatgtttca

SEQ ID NO: 326728 - DNA, 15 bp, Homo sapiens
cactgggcatgtttc

SEQ ID NO: 326729 - DNA, 15 bp, Homo sapiens
acactgggcatgttt

SEQ ID NO: 326730 - DNA, 15 bp, Homo sapiens
gacactgggcatgtt

SEQ ID NO: 326731 - DNA, 15 bp, Homo sapiens
agacactgggcatgt

SEQ ID NO: 326732 - DNA, 15 bp, Homo sapiens
cagacactgggcatg

SEQ ID NO: 326733 - DNA, 15 bp, Homo sapiens
tcagacactgggcat

SEQ ID NO: 326734 - DNA, 15 bp, Homo sapiens
ttcagacactgggca

SEQ ID NO: 326735 - DNA, 15 bp, Homo sapiens
cttcagacactgggc

SEQ ID NO: 326736 - DNA, 15 bp, Homo sapiens
acttcagacactggg

SEQ ID NO: 326737 - DNA, 15 bp, Homo sapiens
tacttcagacactgg

SEQ ID NO: 326738 - DNA, 15 bp, Homo sapiens
ctacttcagacactg

SEQ ID NO: 326739 - DNA, 15 bp, Homo sapiens
tctacttcagacact

SEQ ID NO: 326740 - DNA, 15 bp, Homo sapiens
ttctacttcagacac

SEQ ID NO: 326741 - DNA, 15 bp, Homo sapiens
attctacttcagaca

SEQ ID NO: 326742 - DNA, 15 bp, Homo sapiens
tattctacttcagac

SEQ ID NO: 326743 - DNA, 15 bp, Homo sapiens
ttattctacttcaga

SEQ ID NO: 326744 - DNA, 15 bp, Homo sapiens
gttattctacttcag

SEQ ID NO: 326745 - DNA, 15 bp, Homo sapiens
agttattctacttca

SEQ ID NO: 326746 - DNA, 15 bp, Homo sapiens
tagttattctacttc

SEQ ID NO: 326747 - DNA, 15 bp, Homo sapiens
gtagttattctactt

SEQ ID NO: 326748 - DNA, 15 bp, Homo sapiens
ggtagttattctact

SEQ ID NO: 326749 - DNA, 15 bp, Homo sapiens
cggtagttattctac

SEQ ID NO: 326750 - DNA, 15 bp, Homo sapiens
tcggtagttattcta

SEQ ID NO: 326751 - DNA, 15 bp, Homo sapiens
ttcggtagttattct

SEQ ID NO: 326752 - DNA, 15 bp, Homo sapiens
gttcggtagttattc

SEQ ID NO: 326753 - DNA, 15 bp, Homo sapiens
agttcggtagttatt

SEQ ID NO: 326754 - DNA, 15 bp, Homo sapiens
cagttcggtagttat

SEQ ID NO: 326755 - DNA, 15 bp, Homo sapiens
acagttcggtagtta

SEQ ID NO: 326756 - DNA, 15 bp, Homo sapiens
gacagttcggtagtt

SEQ ID NO: 326757 - DNA, 15 bp, Homo sapiens
ggacagttcggtagt

SEQ ID NO: 326758 - DNA, 15 bp, Homo sapiens
cggacagttcggtag

SEQ ID NO: 326759 - DNA, 15 bp, Homo sapiens
acggacagttcggta

SEQ ID NO: 326760 - DNA, 15 bp, Homo sapiens
tacggacagttcggt

SEQ ID NO: 326761 - DNA, 15 bp, Homo sapiens
ctacggacagttcgg

SEQ ID NO: 326762 - DNA, 15 bp, Homo sapiens
cctacggacagttcg

SEQ ID NO: 326763 - DNA, 15 bp, Homo sapiens
tcctacggacagttc

SEQ ID NO: 326764 - DNA, 15 bp, Homo sapiens
gtcctacggacagtt

SEQ ID NO: 326765 - DNA, 15 bp, Homo sapiens
agtcctacggacagt

SEQ ID NO: 326766 - DNA, 15 bp, Homo sapiens
tagtcctacggacag

SEQ ID NO: 326767 - DNA, 15 bp, Homo sapiens
ttagtcctacggaca

SEQ ID NO: 326768 - DNA, 15 bp, Homo sapiens
tttagtcctacggac

SEQ ID NO: 326769 - DNA, 15 bp, Homo sapiens
gtttagtcctacgga

SEQ ID NO: 326770 - DNA, 15 bp, Homo sapiens
agtttagtcctacgg

SEQ ID NO: 326771 - DNA, 15 bp, Homo sapiens
aagtttagtcctacg

SEQ ID NO: 326772 - DNA, 15 bp, Homo sapiens
aaagtttagtcctac

SEQ ID NO: 326773 - DNA, 15 bp, Homo sapiens
aaaagtttagtccta

SEQ ID NO: 326774 - DNA, 15 bp, Homo sapiens
aaaaagtttagtcct

SEQ ID NO: 326775 - DNA, 15 bp, Homo sapiens
gaaaaagtttagtcc

SEQ ID NO: 326776 - DNA, 15 bp, Homo sapiens
agaaaaagtttagtc

SEQ ID NO: 326777 - DNA, 15 bp, Homo sapiens
aagaaaaagtttagt

SEQ ID NO: 326778 - DNA, 15 bp, Homo sapiens
caagaaaaagtttag

SEQ ID NO: 326779 - DNA, 15 bp, Homo sapiens
tcaagaaaaagttta

SEQ ID NO: 326780 - DNA, 15 bp, Homo sapiens
ttcaagaaaaagttt

SEQ ID NO: 326781 - DNA, 15 bp, Homo sapiens
tttcaagaaaaagtt

SEQ ID NO: 326782 - DNA, 15 bp, Homo sapiens
ttttcaagaaaaagt

SEQ ID NO: 326783 - DNA, 15 bp, Homo sapiens
tttttcaagaaaaag

SEQ ID NO: 326784 - DNA, 15 bp, Homo sapiens
ctttttcaagaaaaa

SEQ ID NO: 326785 - DNA, 15 bp, Homo sapiens
gctttttcaagaaaa

SEQ ID NO: 326786 - DNA, 15 bp, Homo sapiens
agctttttcaagaaa

SEQ ID NO: 326787 - DNA, 15 bp, Homo sapiens
gagctttttcaagaa

SEQ ID NO: 326788 - DNA, 15 bp, Homo sapiens
agagctttttcaaga

SEQ ID NO: 326789 - DNA, 15 bp, Homo sapiens
tagagctttttcaag

SEQ ID NO: 326790 - DNA, 15 bp, Homo sapiens
gtagagctttttcaa

SEQ ID NO: 326791 - DNA, 15 bp, Homo sapiens
ggtagagctttttca

SEQ ID NO: 326792 - DNA, 15 bp, Homo sapiens
tggtagagctttttc

SEQ ID NO: 326793 - DNA, 15 bp, Homo sapiens
ttggtagagcttttt

SEQ ID NO: 326794 - DNA, 15 bp, Homo sapiens
tttggtagagctttt

SEQ ID NO: 326795 - DNA, 15 bp, Homo sapiens
ttttggtagagcttt

SEQ ID NO: 326796 - DNA, 15 bp, Homo sapiens
tttttggtagagctt

SEQ ID NO: 326797 - DNA, 15 bp, Homo sapiens
ttttttggtagagct

SEQ ID NO: 326798 - DNA, 15 bp, Homo sapiens
tttttttggtagagc

SEQ ID NO: 326799 - DNA, 15 bp, Homo sapiens
ctttttttggtagag

SEQ ID NO: 326800 - DNA, 15 bp, Homo sapiens
actttttttggtaga

SEQ ID NO: 326801 - DNA, 15 bp, Homo sapiens
gactttttttggtag

SEQ ID NO: 326802 - DNA, 15 bp, Homo sapiens
tgactttttttggta

SEQ ID NO: 326803 - DNA, 15 bp, Homo sapiens
gtgactttttttggt

SEQ ID NO: 326804 - DNA, 15 bp, Homo sapiens
ggtgactttttttgg

SEQ ID NO: 326805 - DNA, 15 bp, Homo sapiens
cggtgactttttttg

SEQ ID NO: 326806 - DNA, 15 bp, Homo sapiens
ccggtgacttttttt

SEQ ID NO: 326807 - DNA, 15 bp, Homo sapiens
gccggtgactttttt

SEQ ID NO: 326808 - DNA, 15 bp, Homo sapiens
ggccggtgacttttt

SEQ ID NO: 326809 - DNA, 15 bp, Homo sapiens
tggccggtgactttt

SEQ ID NO: 326810 - DNA, 15 bp, Homo sapiens
gtggccggtgacttt

SEQ ID NO: 326811 - DNA, 15 bp, Homo sapiens
agtggccggtgactt

SEQ ID NO: 326812 - DNA, 15 bp, Homo sapiens
gagtggccggtgact

SEQ ID NO: 326813 - DNA, 15 bp, Homo sapiens
ggagtggccggtgac

SEQ ID NO: 326814 - DNA, 15 bp, Homo sapiens
gggagtggccggtga

SEQ ID NO: 326815 - DNA, 15 bp, Homo sapiens
agggagtggccggtg

SEQ ID NO: 326816 - DNA, 15 bp, Homo sapiens
aagggagtggccggt

SEQ ID NO: 326817 - DNA, 15 bp, Homo sapiens
caagggagtggccgg

SEQ ID NO: 326818 - DNA, 15 bp, Homo sapiens
acaagggagtggccg

SEQ ID NO: 326819 - DNA, 15 bp, Homo sapiens
gacaagggagtggcc

SEQ ID NO: 326820 - DNA, 15 bp, Homo sapiens
tgacaagggagtggc

SEQ ID NO: 326821 - DNA, 15 bp, Homo sapiens
gtgacaagggagtgg

SEQ ID NO: 326822 - DNA, 15 bp, Homo sapiens
tgtgacaagggagtg

SEQ ID NO: 326823 - DNA, 15 bp, Homo sapiens
ctgtgacaagggagt

SEQ ID NO: 326824 - DNA, 15 bp, Homo sapiens
actgtgacaagggag

SEQ ID NO: 326825 - DNA, 15 bp, Homo sapiens
aactgtgacaaggga

SEQ ID NO: 326826 - DNA, 15 bp, Homo sapiens
taactgtgacaaggg

SEQ ID NO: 326827 - DNA, 15 bp, Homo sapiens
ataactgtgacaagg

SEQ ID NO: 326828 - DNA, 15 bp, Homo sapiens
aataactgtgacaag

SEQ ID NO: 326829 - DNA, 15 bp, Homo sapiens
taataactgtgacaa

SEQ ID NO: 326830 - DNA, 15 bp, Homo sapiens
ctaataactgtgaca

SEQ ID NO: 326831 - DNA, 15 bp, Homo sapiens
tctaataactgtgac

SEQ ID NO: 326832 - DNA, 15 bp, Homo sapiens
gtctaataactgtga

SEQ ID NO: 326833 - DNA, 15 bp, Homo sapiens
tgtctaataactgtg

SEQ ID NO: 326834 - DNA, 15 bp, Homo sapiens
ctgtctaataactgt

SEQ ID NO: 326835 - DNA, 15 bp, Homo sapiens
cctgtctaataactg

SEQ ID NO: 326836 - DNA, 15 bp, Homo sapiens
tcctgtctaataact

SEQ ID NO: 326837 - DNA, 15 bp, Homo sapiens
ctcctgtctaataac

SEQ ID NO: 326838 - DNA, 15 bp, Homo sapiens
cctcctgtctaataa

SEQ ID NO: 326839 - DNA, 15 bp, Homo sapiens
tcctcctgtctaata

SEQ ID NO: 326840 - DNA, 15 bp, Homo sapiens
ctcctcctgtctaat

SEQ ID NO: 326841 - DNA, 15 bp, Homo sapiens
tctcctcctgtctaa

SEQ ID NO: 326842 - DNA, 15 bp, Homo sapiens
ttctcctcctgtcta

SEQ ID NO: 326843 - DNA, 15 bp, Homo sapiens
tttctcctcctgtct

SEQ ID NO: 326844 - DNA, 15 bp, Homo sapiens
atttctcctcctgtc

SEQ ID NO: 326845 - DNA, 15 bp, Homo sapiens
catttctcctcctgt

SEQ ID NO: 326846 - DNA, 15 bp, Homo sapiens
tcatttctcctcctg

SEQ ID NO: 326847 - DNA, 15 bp, Homo sapiens
atcatttctcctcct

SEQ ID NO: 326848 - DNA, 15 bp, Homo sapiens
tatcatttctcctcc

SEQ ID NO: 326849 - DNA, 15 bp, Homo sapiens
ttatcatttctcctc

SEQ ID NO: 326850 - DNA, 15 bp, Homo sapiens
attatcatttctcct

SEQ ID NO: 326851 - DNA, 15 bp, Homo sapiens
aattatcatttctcc

SEQ ID NO: 326852 - DNA, 15 bp, Homo sapiens
gaattatcatttctc

SEQ ID NO: 326853 - DNA, 15 bp, Homo sapiens
agaattatcatttct

SEQ ID NO: 326854 - DNA, 15 bp, Homo sapiens
tagaattatcatttc

SEQ ID NO: 326855 - DNA, 15 bp, Homo sapiens
gtagaattatcattt

SEQ ID NO: 326856 - DNA, 15 bp, Homo sapiens
agtagaattatcatt

SEQ ID NO: 326857 - DNA, 15 bp, Homo sapiens
cagtagaattatcat

SEQ ID NO: 326858 - DNA, 15 bp, Homo sapiens
gcagtagaattatca

SEQ ID NO: 326859 - DNA, 15 bp, Homo sapiens
ggcagtagaattatc

SEQ ID NO: 326860 - DNA, 15 bp, Homo sapiens
gggcagtagaattat

SEQ ID NO: 326861 - DNA, 15 bp, Homo sapiens
agggcagtagaatta

SEQ ID NO: 326862 - DNA, 15 bp, Homo sapiens
aagggcagtagaatt

SEQ ID NO: 326863 - DNA, 15 bp, Homo sapiens
gaagggcagtagaat

SEQ ID NO: 326864 - DNA, 15 bp, Homo sapiens
tgaagggcagtagaa

SEQ ID NO: 326865 - DNA, 15 bp, Homo sapiens
atgaagggcagtaga

SEQ ID NO: 326866 - DNA, 15 bp, Homo sapiens
aatgaagggcagtag

SEQ ID NO: 326867 - DNA, 15 bp, Homo sapiens
gaatgaagggcagta

SEQ ID NO: 326868 - DNA, 15 bp, Homo sapiens
agaatgaagggcagt

SEQ ID NO: 326869 - DNA, 15 bp, Homo sapiens
tagaatgaagggcag

SEQ ID NO: 326870 - DNA, 15 bp, Homo sapiens
gtagaatgaagggca

SEQ ID NO: 326871 - DNA, 15 bp, Homo sapiens
tgtagaatgaagggc

SEQ ID NO: 326872 - DNA, 15 bp, Homo sapiens
ttgtagaatgaaggg

SEQ ID NO: 326873 - DNA, 15 bp, Homo sapiens
tttgtagaatgaagg

SEQ ID NO: 326874 - DNA, 15 bp, Homo sapiens
atttgtagaatgaag

SEQ ID NO: 326875 - DNA, 15 bp, Homo sapiens
catttgtagaatgaa

SEQ ID NO: 326876 - DNA, 15 bp, Homo sapiens
acatttgtagaatga

SEQ ID NO: 326877 - DNA, 15 bp, Homo sapiens
aacatttgtagaatg

SEQ ID NO: 326878 - DNA, 15 bp, Homo sapiens
aaacatttgtagaat

SEQ ID NO: 326879 - DNA, 15 bp, Homo sapiens
caaacatttgtagaa

SEQ ID NO: 326880 - DNA, 15 bp, Homo sapiens
tcaaacatttgtaga

SEQ ID NO: 326881 - DNA, 15 bp, Homo sapiens
ctcaaacatttgtag

SEQ ID NO: 326882 - DNA, 15 bp, Homo sapiens
actcaaacatttgta

SEQ ID NO: 326883 - DNA, 15 bp, Homo sapiens
cactcaaacatttgt

SEQ ID NO: 326884 - DNA, 15 bp, Homo sapiens
gcactcaaacatttg

SEQ ID NO: 326885 - DNA, 15 bp, Homo sapiens
agcactcaaacattt

SEQ ID NO: 326886 - DNA, 15 bp, Homo sapiens
tagcactcaaacatt

SEQ ID NO: 326887 - DNA, 15 bp, Homo sapiens
ttagcactcaaacat

SEQ ID NO: 326888 - DNA, 15 bp, Homo sapiens
gttagcactcaaaca

SEQ ID NO: 326889 - DNA, 15 bp, Homo sapiens
agttagcactcaaac

SEQ ID NO: 326890 - DNA, 15 bp, Homo sapiens
cagttagcactcaaa

SEQ ID NO: 326891 - DNA, 15 bp, Homo sapiens
acagttagcactcaa

SEQ ID NO: 326892 - DNA, 15 bp, Homo sapiens
tacagttagcactca

SEQ ID NO: 326893 - DNA, 15 bp, Homo sapiens
atacagttagcactc

SEQ ID NO: 326894 - DNA, 15 bp, Homo sapiens
aatacagttagcact

SEQ ID NO: 326895 - DNA, 15 bp, Homo sapiens
gaatacagttagcac

SEQ ID NO: 326896 - DNA, 15 bp, Homo sapiens
ggaatacagttagca

SEQ ID NO: 326897 - DNA, 15 bp, Homo sapiens
tggaatacagttagc

SEQ ID NO: 326898 - DNA, 15 bp, Homo sapiens
ctggaatacagttag

SEQ ID NO: 326899 - DNA, 15 bp, Homo sapiens
tctggaatacagtta

SEQ ID NO: 326900 - DNA, 15 bp, Homo sapiens
atctggaatacagtt

SEQ ID NO: 326901 - DNA, 15 bp, Homo sapiens
aatctggaatacagt

SEQ ID NO: 326902 - DNA, 15 bp, Homo sapiens
gaatctggaatacag

SEQ ID NO: 326903 - DNA, 15 bp, Homo sapiens
agaatctggaataca

SEQ ID NO: 326904 - DNA, 15 bp, Homo sapiens
gagaatctggaatac

SEQ ID NO: 326905 - DNA, 15 bp, Homo sapiens
tgagaatctggaata

SEQ ID NO: 326906 - DNA, 15 bp, Homo sapiens
ttgagaatctggaat

SEQ ID NO: 326907 - DNA, 15 bp, Homo sapiens
tttgagaatctggaa

SEQ ID NO: 326908 - DNA, 15 bp, Homo sapiens
ttttgagaatctgga

SEQ ID NO: 326909 - DNA, 15 bp, Homo sapiens
tttttgagaatctgg

SEQ ID NO: 326910 - DNA, 15 bp, Homo sapiens
ctttttgagaatctg

SEQ ID NO: 326911 - DNA, 15 bp, Homo sapiens
gctttttgagaatct

SEQ ID NO: 326912 - DNA, 15 bp, Homo sapiens
agctttttgagaatc

SEQ ID NO: 326913 - DNA, 15 bp, Homo sapiens
tagctttttgagaat

SEQ ID NO: 326914 - DNA, 15 bp, Homo sapiens
atagctttttgagaa

SEQ ID NO: 326915 - DNA, 15 bp, Homo sapiens
aatagctttttgaga

SEQ ID NO: 326916 - DNA, 15 bp, Homo sapiens
caatagctttttgag

SEQ ID NO: 326917 - DNA, 15 bp, Homo sapiens
gcaatagctttttga

SEQ ID NO: 326918 - DNA, 15 bp, Homo sapiens
ggcaatagctttttg

SEQ ID NO: 326919 - DNA, 15 bp, Homo sapiens
tggcaatagcttttt

SEQ ID NO: 326920 - DNA, 15 bp, Homo sapiens
ctggcaatagctttt

SEQ ID NO: 326921 - DNA, 15 bp, Homo sapiens
cctggcaatagcttt

SEQ ID NO: 326922 - DNA, 15 bp, Homo sapiens
acctggcaatagctt

SEQ ID NO: 326923 - DNA, 15 bp, Homo sapiens
tacctggcaatagct

SEQ ID NO: 326924 - DNA, 15 bp, Homo sapiens
atacctggcaatagc

SEQ ID NO: 326925 - DNA, 15 bp, Homo sapiens
gatacctggcaatag

SEQ ID NO: 326926 - DNA, 15 bp, Homo sapiens
agatacctggcaata

SEQ ID NO: 326927 - DNA, 15 bp, Homo sapiens
gagatacctggcaat

SEQ ID NO: 326928 - DNA, 15 bp, Homo sapiens
agagatacctggcaa

SEQ ID NO: 326929 - DNA, 15 bp, Homo sapiens
cagagatacctggca

SEQ ID NO: 326930 - DNA, 15 bp, Homo sapiens
ccagagatacctggc

SEQ ID NO: 326931 - DNA, 15 bp, Homo sapiens
cccagagatacctgg

SEQ ID NO: 326932 - DNA, 15 bp, Homo sapiens
ccccagagatacctg

SEQ ID NO: 326933 - DNA, 15 bp, Homo sapiens
gccccagagatacct

SEQ ID NO: 326934 - DNA, 15 bp, Homo sapiens
agccccagagatacc

SEQ ID NO: 326935 - DNA, 15 bp, Homo sapiens
tagccccagagatac

SEQ ID NO: 326936 - DNA, 15 bp, Homo sapiens
gtagccccagagata

SEQ ID NO: 326937 - DNA, 15 bp, Homo sapiens
agtagccccagagat

SEQ ID NO: 326938 - DNA, 15 bp, Homo sapiens
cagtagccccagaga

SEQ ID NO: 326939 - DNA, 15 bp, Homo sapiens
tcagtagccccagag

SEQ ID NO: 326940 - DNA, 15 bp, Homo sapiens
atcagtagccccaga

SEQ ID NO: 326941 - DNA, 15 bp, Homo sapiens
aatcagtagccccag

SEQ ID NO: 326942 - DNA, 15 bp, Homo sapiens
aaatcagtagcccca

SEQ ID NO: 326943 - DNA, 15 bp, Homo sapiens
gaaatcagtagcccc

SEQ ID NO: 326944 - DNA, 15 bp, Homo sapiens
ggaaatcagtagccc

SEQ ID NO: 326945 - DNA, 15 bp, Homo sapiens
aggaaatcagtagcc

SEQ ID NO: 326946 - DNA, 15 bp, Homo sapiens
caggaaatcagtagc

SEQ ID NO: 326947 - DNA, 15 bp, Homo sapiens
tcaggaaatcagtag

SEQ ID NO: 326948 - DNA, 15 bp, Homo sapiens
atcaggaaatcagta

SEQ ID NO: 326949 - DNA, 15 bp, Homo sapiens
gatcaggaaatcagt

SEQ ID NO: 326950 - DNA, 15 bp, Homo sapiens
tgatcaggaaatcag

SEQ ID NO: 326951 - DNA, 15 bp, Homo sapiens
atgatcaggaaatca

SEQ ID NO: 326952 - DNA, 15 bp, Homo sapiens
tatgatcaggaaatc

SEQ ID NO: 326953 - DNA, 15 bp, Homo sapiens
ttatgatcaggaaat

SEQ ID NO: 326954 - DNA, 15 bp, Homo sapiens
attatgatcaggaaa

SEQ ID NO: 326955 - DNA, 15 bp, Homo sapiens
cattatgatcaggaa

SEQ ID NO: 326956 - DNA, 15 bp, Homo sapiens
gcattatgatcagga

SEQ ID NO: 326957 - DNA, 15 bp, Homo sapiens
tgcattatgatcagg

SEQ ID NO: 326958 - DNA, 15 bp, Homo sapiens
ttgcattatgatcag

SEQ ID NO: 326959 - DNA, 15 bp, Homo sapiens
attgcattatgatca

SEQ ID NO: 326960 - DNA, 15 bp, Homo sapiens
cattgcattatgatc

SEQ ID NO: 326961 - DNA, 15 bp, Homo sapiens
ccattgcattatgat

SEQ ID NO: 326962 - DNA, 15 bp, Homo sapiens
gccattgcattatga

SEQ ID NO: 326963 - DNA, 15 bp, Homo sapiens
tgccattgcattatg

SEQ ID NO: 326964 - DNA, 15 bp, Homo sapiens
ttgccattgcattat

SEQ ID NO: 326965 - DNA, 15 bp, Homo sapiens
gttgccattgcatta

SEQ ID NO: 326966 - DNA, 15 bp, Homo sapiens
ggttgccattgcatt

SEQ ID NO: 326967 - DNA, 15 bp, Homo sapiens
tggttgccattgcat

SEQ ID NO: 326968 - DNA, 15 bp, Homo sapiens
ttggttgccattgca

SEQ ID NO: 326969 - DNA, 15 bp, Homo sapiens
gttggttgccattgc

SEQ ID NO: 326970 - DNA, 15 bp, Homo sapiens
cgttggttgccattg

SEQ ID NO: 326971 - DNA, 15 bp, Homo sapiens
ccgttggttgccatt

SEQ ID NO: 326972 - DNA, 15 bp, Homo sapiens
cccgttggttgccat

SEQ ID NO: 326973 - DNA, 15 bp, Homo sapiens
gcccgttggttgcca

SEQ ID NO: 326974 - DNA, 15 bp, Homo sapiens
tgcccgttggttgcc

SEQ ID NO: 326975 - DNA, 15 bp, Homo sapiens
gtgcccgttggttgc

SEQ ID NO: 326976 - DNA, 15 bp, Homo sapiens
agtgcccgttggttg

SEQ ID NO: 326977 - DNA, 15 bp, Homo sapiens
aagtgcccgttggtt

SEQ ID NO: 326978 - DNA, 15 bp, Homo sapiens
caagtgcccgttggt

SEQ ID NO: 326979 - DNA, 15 bp, Homo sapiens
ccaagtgcccgttgg

SEQ ID NO: 326980 - DNA, 15 bp, Homo sapiens
cccaagtgcccgttg

SEQ ID NO: 326981 - DNA, 15 bp, Homo sapiens
gcccaagtgcccgtt

SEQ ID NO: 326982 - DNA, 15 bp, Homo sapiens
tgcccaagtgcccgt

SEQ ID NO: 326983 - DNA, 15 bp, Homo sapiens
atgcccaagtgcccg

SEQ ID NO: 326984 - DNA, 15 bp, Homo sapiens
catgcccaagtgccc

SEQ ID NO: 326985 - DNA, 15 bp, Homo sapiens
ccatgcccaagtgcc

SEQ ID NO: 326986 - DNA, 15 bp, Homo sapiens
accatgcccaagtgc

SEQ ID NO: 326987 - DNA, 15 bp, Homo sapiens
caccatgcccaagtg

SEQ ID NO: 326988 - DNA, 15 bp, Homo sapiens
tcaccatgcccaagt

SEQ ID NO: 326989 - DNA, 15 bp, Homo sapiens
ctcaccatgcccaag

SEQ ID NO: 326990 - DNA, 15 bp, Homo sapiens
cctcaccatgcccaa

SEQ ID NO: 326991 - DNA, 15 bp, Homo sapiens
ccctcaccatgccca

SEQ ID NO: 326992 - DNA, 15 bp, Homo sapiens
accctcaccatgccc

SEQ ID NO: 326993 - DNA, 15 bp, Homo sapiens
caccctcaccatgcc

SEQ ID NO: 326994 - DNA, 15 bp, Homo sapiens
ccaccctcaccatgc

SEQ ID NO: 326995 - DNA, 15 bp, Homo sapiens
cccaccctcaccatg

SEQ ID NO: 326996 - DNA, 15 bp, Homo sapiens
gcccaccctcaccat

SEQ ID NO: 326997 - DNA, 15 bp, Homo sapiens
tgcccaccctcacca

SEQ ID NO: 326998 - DNA, 15 bp, Homo sapiens
ttgcccaccctcacc

SEQ ID NO: 326999 - DNA, 15 bp, Homo sapiens
cttgcccaccctcac

SEQ ID NO: 327000 - DNA, 15 bp, Homo sapiens
gcttgcccaccctca

SEQ ID NO: 327001 - DNA, 15 bp, Homo sapiens
agcttgcccaccctc

SEQ ID NO: 327002 - DNA, 15 bp, Homo sapiens
aagcttgcccaccct

SEQ ID NO: 327003 - DNA, 15 bp, Homo sapiens
aaagcttgcccaccc

SEQ ID NO: 327004 - DNA, 15 bp, Homo sapiens
gaaagcttgcccacc

SEQ ID NO: 327005 - DNA, 15 bp, Homo sapiens
tgaaagcttgcccac

SEQ ID NO: 327006 - DNA, 15 bp, Homo sapiens
ttgaaagcttgccca

SEQ ID NO: 327007 - DNA, 15 bp, Homo sapiens
tttgaaagcttgccc

SEQ ID NO: 327008 - DNA, 15 bp, Homo sapiens
ttttgaaagcttgcc

SEQ ID NO: 327009 - DNA, 15 bp, Homo sapiens
cttttgaaagcttgc

SEQ ID NO: 327010 - DNA, 15 bp, Homo sapiens
gcttttgaaagcttg

SEQ ID NO: 327011 - DNA, 15 bp, Homo sapiens
tgcttttgaaagctt

SEQ ID NO: 327012 - DNA, 15 bp, Homo sapiens
ctgcttttgaaagct

SEQ ID NO: 327013 - DNA, 15 bp, Homo sapiens
gctgcttttgaaagc

SEQ ID NO: 327014 - DNA, 15 bp, Homo sapiens
cgctgcttttgaaag

SEQ ID NO: 327015 - DNA, 15 bp, Homo sapiens
acgctgcttttgaaa

SEQ ID NO: 327016 - DNA, 15 bp, Homo sapiens
cacgctgcttttgaa

SEQ ID NO: 327017 - DNA, 15 bp, Homo sapiens
ccacgctgcttttga

SEQ ID NO: 327018 - DNA, 15 bp, Homo sapiens
tccacgctgcttttg

SEQ ID NO: 327019 - DNA, 15 bp, Homo sapiens
atccacgctgctttt

SEQ ID NO: 327020 - DNA, 15 bp, Homo sapiens
gatccacgctgcttt

SEQ ID NO: 327021 - DNA, 15 bp, Homo sapiens
agatccacgctgctt

SEQ ID NO: 327022 - DNA, 15 bp, Homo sapiens
cagatccacgctgct

SEQ ID NO: 327023 - DNA, 15 bp, Homo sapiens
ccagatccacgctgc

SEQ ID NO: 327024 - DNA, 15 bp, Homo sapiens
gccagatccacgctg

SEQ ID NO: 327025 - DNA, 15 bp, Homo sapiens
tgccagatccacgct

SEQ ID NO: 327026 - DNA, 15 bp, Homo sapiens
atgccagatccacgc

SEQ ID NO: 327027 - DNA, 15 bp, Homo sapiens
aatgccagatccacg

SEQ ID NO: 327028 - DNA, 15 bp, Homo sapiens
gaatgccagatccac

SEQ ID NO: 327029 - DNA, 15 bp, Homo sapiens
agaatgccagatcca

SEQ ID NO: 327030 - DNA, 15 bp, Homo sapiens
aagaatgccagatcc

SEQ ID NO: 327031 - DNA, 15 bp, Homo sapiens
aaagaatgccagatc

SEQ ID NO: 327032 - DNA, 15 bp, Homo sapiens
aaaagaatgccagat

SEQ ID NO: 327033 - DNA, 15 bp, Homo sapiens
gaaaagaatgccaga

SEQ ID NO: 327034 - DNA, 15 bp, Homo sapiens
ggaaaagaatgccag

SEQ ID NO: 327035 - DNA, 15 bp, Homo sapiens
tggaaaagaatgcca

SEQ ID NO: 327036 - DNA, 15 bp, Homo sapiens
gtggaaaagaatgcc

SEQ ID NO: 327037 - DNA, 15 bp, Homo sapiens
cgtggaaaagaatgc

SEQ ID NO: 327038 - DNA, 15 bp, Homo sapiens
tcgtggaaaagaatg

SEQ ID NO: 327039 - DNA, 15 bp, Homo sapiens
ttcgtggaaaagaat

SEQ ID NO: 327040 - DNA, 15 bp, Homo sapiens
attcgtggaaaagaa

SEQ ID NO: 327041 - DNA, 15 bp, Homo sapiens
cattcgtggaaaaga

SEQ ID NO: 327042 - DNA, 15 bp, Homo sapiens
gcattcgtggaaaag

SEQ ID NO: 327043 - DNA, 15 bp, Homo sapiens
tgcattcgtggaaaa

SEQ ID NO: 327044 - DNA, 15 bp, Homo sapiens
gtgcattcgtggaaa

SEQ ID NO: 327045 - DNA, 15 bp, Homo sapiens
ggtgcattcgtggaa

SEQ ID NO: 327046 - DNA, 15 bp, Homo sapiens
aggtgcattcgtgga

SEQ ID NO: 327047 - DNA, 15 bp, Homo sapiens
gaggtgcattcgtgg

SEQ ID NO: 327048 - DNA, 15 bp, Homo sapiens
tgaggtgcattcgtg

SEQ ID NO: 327049 - DNA, 15 bp, Homo sapiens
ttgaggtgcattcgt

SEQ ID NO: 327050 - DNA, 15 bp, Homo sapiens
gttgaggtgcattcg

SEQ ID NO: 327051 - DNA, 15 bp, Homo sapiens
agttgaggtgcattc

SEQ ID NO: 327052 - DNA, 15 bp, Homo sapiens
tagttgaggtgcatt

SEQ ID NO: 327053 - DNA, 15 bp, Homo sapiens
gtagttgaggtgcat

SEQ ID NO: 327054 - DNA, 15 bp, Homo sapiens
agtagttgaggtgca

SEQ ID NO: 327055 - DNA, 15 bp, Homo sapiens
aagtagttgaggtgc

SEQ ID NO: 327056 - DNA, 15 bp, Homo sapiens
caagtagttgaggtg

SEQ ID NO: 327057 - DNA, 15 bp, Homo sapiens
ccaagtagttgaggt

SEQ ID NO: 327058 - DNA, 15 bp, Homo sapiens
gccaagtagttgagg

SEQ ID NO: 327059 - DNA, 15 bp, Homo sapiens
tgccaagtagttgag

SEQ ID NO: 327060 - DNA, 15 bp, Homo sapiens
gtgccaagtagttga

SEQ ID NO: 327061 - DNA, 15 bp, Homo sapiens
ggtgccaagtagttg

SEQ ID NO: 327062 - DNA, 15 bp, Homo sapiens
tggtgccaagtagtt

SEQ ID NO: 327063 - DNA, 15 bp, Homo sapiens
ctggtgccaagtagt

SEQ ID NO: 327064 - DNA, 15 bp, Homo sapiens
actggtgccaagtag

SEQ ID NO: 327065 - DNA, 15 bp, Homo sapiens
cactggtgccaagta

SEQ ID NO: 327066 - DNA, 15 bp, Homo sapiens
ccactggtgccaagt

SEQ ID NO: 327067 - DNA, 15 bp, Homo sapiens
accactggtgccaag

SEQ ID NO: 327068 - DNA, 15 bp, Homo sapiens
taccactggtgccaa

SEQ ID NO: 327069 - DNA, 15 bp, Homo sapiens
ttaccactggtgcca

SEQ ID NO: 327070 - DNA, 15 bp, Homo sapiens
gttaccactggtgcc

SEQ ID NO: 327071 - DNA, 15 bp, Homo sapiens
tgttaccactggtgc

SEQ ID NO: 327072 - DNA, 15 bp, Homo sapiens
gtgttaccactggtg

SEQ ID NO: 327073 - DNA, 15 bp, Homo sapiens
tgtgttaccactggt

SEQ ID NO: 327074 - DNA, 15 bp, Homo sapiens
ctgtgttaccactgg

SEQ ID NO: 327075 - DNA, 15 bp, Homo sapiens
gctgtgttaccactg

SEQ ID NO: 327076 - DNA, 15 bp, Homo sapiens
tgctgtgttaccact

SEQ ID NO: 327077 - DNA, 15 bp, Homo sapiens
ttgctgtgttaccac

SEQ ID NO: 327078 - DNA, 15 bp, Homo sapiens
gttgctgtgttacca

SEQ ID NO: 327079 - DNA, 15 bp, Homo sapiens
ggttgctgtgttacc

SEQ ID NO: 327080 - DNA, 15 bp, Homo sapiens
tggttgctgtgttac

SEQ ID NO: 327081 - DNA, 15 bp, Homo sapiens
ctggttgctgtgtta

SEQ ID NO: 327082 - DNA, 15 bp, Homo sapiens
cctggttgctgtgtt

SEQ ID NO: 327083 - DNA, 15 bp, Homo sapiens
ccctggttgctgtgt

SEQ ID NO: 327084 - DNA, 15 bp, Homo sapiens
accctggttgctgtg

SEQ ID NO: 327085 - DNA, 15 bp, Homo sapiens
aaccctggttgctgt

SEQ ID NO: 327086 - DNA, 15 bp, Homo sapiens
gaaccctggttgctg

SEQ ID NO: 327087 - DNA, 15 bp, Homo sapiens
ggaaccctggttgct

SEQ ID NO: 327088 - DNA, 15 bp, Homo sapiens
cggaaccctggttgc

SEQ ID NO: 327089 - DNA, 15 bp, Homo sapiens
tcggaaccctggttg

SEQ ID NO: 327090 - DNA, 15 bp, Homo sapiens
gtcggaaccctggtt

SEQ ID NO: 327091 - DNA, 15 bp, Homo sapiens
ggtcggaaccctggt

SEQ ID NO: 327092 - DNA, 15 bp, Homo sapiens
aggtcggaaccctgg

SEQ ID NO: 327093 - DNA, 15 bp, Homo sapiens
taggtcggaaccctg

SEQ ID NO: 327094 - DNA, 15 bp, Homo sapiens
ctaggtcggaaccct

SEQ ID NO: 327095 - DNA, 15 bp, Homo sapiens
tctaggtcggaaccc

SEQ ID NO: 327096 - DNA, 15 bp, Homo sapiens
ctctaggtcggaacc

SEQ ID NO: 327097 - DNA, 15 bp, Homo sapiens
tctctaggtcggaac

SEQ ID NO: 327098 - DNA, 15 bp, Homo sapiens
ttctctaggtcggaa

SEQ ID NO: 327099 - DNA, 15 bp, Homo sapiens
attctctaggtcgga

SEQ ID NO: 327100 - DNA, 15 bp, Homo sapiens
gattctctaggtcgg

SEQ ID NO: 327101 - DNA, 15 bp, Homo sapiens
ggattctctaggtcg

SEQ ID NO: 327102 - DNA, 15 bp, Homo sapiens
gggattctctaggtc

SEQ ID NO: 327103 - DNA, 15 bp, Homo sapiens
cgggattctctaggt

SEQ ID NO: 327104 - DNA, 15 bp, Homo sapiens
acgggattctctagg

SEQ ID NO: 327105 - DNA, 15 bp, Homo sapiens
tacgggattctctag

SEQ ID NO: 327106 - DNA, 15 bp, Homo sapiens
ttacgggattctcta

SEQ ID NO: 327107 - DNA, 15 bp, Homo sapiens
gttacgggattctct

SEQ ID NO: 327108 - DNA, 15 bp, Homo sapiens
ggttacgggattctc

SEQ ID NO: 327109 - DNA, 15 bp, Homo sapiens
aggttacgggattct

SEQ ID NO: 327110 - DNA, 15 bp, Homo sapiens
aaggttacgggattc

SEQ ID NO: 327111 - DNA, 15 bp, Homo sapiens
gaaggttacgggatt

SEQ ID NO: 327112 - DNA, 15 bp, Homo sapiens
agaaggttacgggat

SEQ ID NO: 327113 - DNA, 15 bp, Homo sapiens
cagaaggttacggga

SEQ ID NO: 327114 - DNA, 15 bp, Homo sapiens
tcagaaggttacggg

SEQ ID NO: 327115 - DNA, 15 bp, Homo sapiens
gtcagaaggttacgg

SEQ ID NO: 327116 - DNA, 15 bp, Homo sapiens
agtcagaaggttacg

SEQ ID NO: 327117 - DNA, 15 bp, Homo sapiens
cagtcagaaggttac

SEQ ID NO: 327118 - DNA, 15 bp, Homo sapiens
ccagtcagaaggtta

SEQ ID NO: 327119 - DNA, 15 bp, Homo sapiens
tccagtcagaaggtt

SEQ ID NO: 327120 - DNA, 15 bp, Homo sapiens
ttccagtcagaaggt

SEQ ID NO: 327121 - DNA, 15 bp, Homo sapiens
gttccagtcagaagg

SEQ ID NO: 327122 - DNA, 15 bp, Homo sapiens
cgttccagtcagaag

SEQ ID NO: 327123 - DNA, 15 bp, Homo sapiens
ccgttccagtcagaa

SEQ ID NO: 327124 - DNA, 15 bp, Homo sapiens
cccgttccagtcaga

SEQ ID NO: 327125 - DNA, 15 bp, Homo sapiens
ccccgttccagtcag

SEQ ID NO: 327126 - DNA, 15 bp, Homo sapiens
accccgttccagtca

SEQ ID NO: 327127 - DNA, 15 bp, Homo sapiens
gaccccgttccagtc

SEQ ID NO: 327128 - DNA, 15 bp, Homo sapiens
agaccccgttccagt

SEQ ID NO: 327129 - DNA, 15 bp, Homo sapiens
cagaccccgttccag

SEQ ID NO: 327130 - DNA, 15 bp, Homo sapiens
ccagaccccgttcca

SEQ ID NO: 327131 - DNA, 15 bp, Homo sapiens
cccagaccccgttcc

SEQ ID NO: 327132 - DNA, 15 bp, Homo sapiens
gcccagaccccgttc

SEQ ID NO: 327133 - DNA, 15 bp, Homo sapiens
agcccagaccccgtt

SEQ ID NO: 327134 - DNA, 15 bp, Homo sapiens
cagcccagaccccgt

SEQ ID NO: 327135 - DNA, 15 bp, Homo sapiens
acagcccagaccccg

SEQ ID NO: 327136 - DNA, 15 bp, Homo sapiens
gacagcccagacccc

SEQ ID NO: 327137 - DNA, 15 bp, Homo sapiens
cgacagcccagaccc

SEQ ID NO: 327138 - DNA, 15 bp, Homo sapiens
gcgacagcccagacc

SEQ ID NO: 327139 - DNA, 15 bp, Homo sapiens
agcgacagcccagac

SEQ ID NO: 327140 - DNA, 15 bp, Homo sapiens
tagcgacagcccaga

SEQ ID NO: 327141 - DNA, 15 bp, Homo sapiens
gtagcgacagcccag

SEQ ID NO: 327142 - DNA, 15 bp, Homo sapiens
tgtagcgacagccca

SEQ ID NO: 327143 - DNA, 15 bp, Homo sapiens
gtgtagcgacagccc

SEQ ID NO: 327144 - DNA, 15 bp, Homo sapiens
tgtgtagcgacagcc

SEQ ID NO: 327145 - DNA, 15 bp, Homo sapiens
atgtgtagcgacagc

SEQ ID NO: 327146 - DNA, 15 bp, Homo sapiens
gatgtgtagcgacag

SEQ ID NO: 327147 - DNA, 15 bp, Homo sapiens
ggatgtgtagcgaca

SEQ ID NO: 327148 - DNA, 15 bp, Homo sapiens
aggatgtgtagcgac

SEQ ID NO: 327149 - DNA, 15 bp, Homo sapiens
caggatgtgtagcga

SEQ ID NO: 327150 - DNA, 15 bp, Homo sapiens
ccaggatgtgtagcg

SEQ ID NO: 327151 - DNA, 15 bp, Homo sapiens
accaggatgtgtagc

SEQ ID NO: 327152 - DNA, 15 bp, Homo sapiens
caccaggatgtgtag

SEQ ID NO: 327153 - DNA, 15 bp, Homo sapiens
ccaccaggatgtgta

SEQ ID NO: 327154 - DNA, 15 bp, Homo sapiens
tccaccaggatgtgt

SEQ ID NO: 327155 - DNA, 15 bp, Homo sapiens
ttccaccaggatgtg

SEQ ID NO: 327156 - DNA, 15 bp, Homo sapiens
cttccaccaggatgt

SEQ ID NO: 327157 - DNA, 15 bp, Homo sapiens
ccttccaccaggatg

SEQ ID NO: 327158 - DNA, 15 bp, Homo sapiens
gccttccaccaggat

SEQ ID NO: 327159 - DNA, 15 bp, Homo sapiens
tgccttccaccagga

SEQ ID NO: 327160 - DNA, 15 bp, Homo sapiens
ctgccttccaccagg

SEQ ID NO: 327161 - DNA, 15 bp, Homo sapiens
gctgccttccaccag

SEQ ID NO: 327162 - DNA, 15 bp, Homo sapiens
agctgccttccacca

SEQ ID NO: 327163 - DNA, 15 bp, Homo sapiens
tagctgccttccacc

SEQ ID NO: 327164 - DNA, 15 bp, Homo sapiens
atagctgccttccac

SEQ ID NO: 327165 - DNA, 15 bp, Homo sapiens
gatagctgccttcca

SEQ ID NO: 327166 - DNA, 15 bp, Homo sapiens
tgatagctgccttcc

SEQ ID NO: 327167 - DNA, 15 bp, Homo sapiens
atgatagctgccttc

SEQ ID NO: 327168 - DNA, 15 bp, Homo sapiens
gatgatagctgcctt

SEQ ID NO: 327169 - DNA, 15 bp, Homo sapiens
ggatgatagctgcct

SEQ ID NO: 327170 - DNA, 15 bp, Homo sapiens
gggatgatagctgcc

SEQ ID NO: 327171 - DNA, 15 bp, Homo sapiens
agggatgatagctgc

SEQ ID NO: 327172 - DNA, 15 bp, Homo sapiens
tagggatgatagctg

SEQ ID NO: 327173 - DNA, 15 bp, Homo sapiens
gtagggatgatagct

SEQ ID NO: 327174 - DNA, 15 bp, Homo sapiens
ggtagggatgatagc

SEQ ID NO: 327175 - DNA, 15 bp, Homo sapiens
aggtagggatgatag

SEQ ID NO: 327176 - DNA, 15 bp, Homo sapiens
aaggtagggatgata

SEQ ID NO: 327177 - DNA, 15 bp, Homo sapiens
gaaggtagggatgat

SEQ ID NO: 327178 - DNA, 15 bp, Homo sapiens
agaaggtagggatga

SEQ ID NO: 327179 - DNA, 15 bp, Homo sapiens
cagaaggtagggatg

SEQ ID NO: 327180 - DNA, 15 bp, Homo sapiens
gcagaaggtagggat

SEQ ID NO: 327181 - DNA, 15 bp, Homo sapiens
ggcagaaggtaggga

SEQ ID NO: 327182 - DNA, 15 bp, Homo sapiens
aggcagaaggtaggg

SEQ ID NO: 327183 - DNA, 15 bp, Homo sapiens
aaggcagaaggtagg

SEQ ID NO: 327184 - DNA, 15 bp, Homo sapiens
gaaggcagaaggtag

SEQ ID NO: 327185 - DNA, 15 bp, Homo sapiens
agaaggcagaaggta

SEQ ID NO: 327186 - DNA, 15 bp, Homo sapiens
cagaaggcagaaggt

SEQ ID NO: 327187 - DNA, 15 bp, Homo sapiens
acagaaggcagaagg

SEQ ID NO: 327188 - DNA, 15 bp, Homo sapiens
gacagaaggcagaag

SEQ ID NO: 327189 - DNA, 15 bp, Homo sapiens
agacagaaggcagaa

SEQ ID NO: 327190 - DNA, 15 bp, Homo sapiens
gagacagaaggcaga

SEQ ID NO: 327191 - DNA, 15 bp, Homo sapiens
agagacagaaggcag

SEQ ID NO: 327192 - DNA, 15 bp, Homo sapiens
aagagacagaaggca

SEQ ID NO: 327193 - DNA, 15 bp, Homo sapiens
taagagacagaaggc

SEQ ID NO: 327194 - DNA, 15 bp, Homo sapiens
ttaagagacagaagg

SEQ ID NO: 327195 - DNA, 15 bp, Homo sapiens
tttaagagacagaag

SEQ ID NO: 327196 - DNA, 15 bp, Homo sapiens
atttaagagacagaa

SEQ ID NO: 327197 - DNA, 15 bp, Homo sapiens
gatttaagagacaga

SEQ ID NO: 327198 - DNA, 15 bp, Homo sapiens
agatttaagagacag

SEQ ID NO: 327199 - DNA, 15 bp, Homo sapiens
cagatttaagagaca

SEQ ID NO: 327200 - DNA, 15 bp, Homo sapiens
tcagatttaagagac

SEQ ID NO: 327201 - DNA, 15 bp, Homo sapiens
ttcagatttaagaga

SEQ ID NO: 327202 - DNA, 15 bp, Homo sapiens
gttcagatttaagag

SEQ ID NO: 327203 - DNA, 15 bp, Homo sapiens
ggttcagatttaaga

SEQ ID NO: 327204 - DNA, 15 bp, Homo sapiens
tggttcagatttaag

SEQ ID NO: 327205 - DNA, 15 bp, Homo sapiens
gtggttcagatttaa

SEQ ID NO: 327206 - DNA, 15 bp, Homo sapiens
tgtggttcagattta

SEQ ID NO: 327207 - DNA, 15 bp, Homo sapiens
ttgtggttcagattt

SEQ ID NO: 327208 - DNA, 15 bp, Homo sapiens
tttgtggttcagatt

SEQ ID NO: 327209 - DNA, 15 bp, Homo sapiens
gtttgtggttcagat

SEQ ID NO: 327210 - DNA, 15 bp, Homo sapiens
tgtttgtggttcaga

SEQ ID NO: 327211 - DNA, 15 bp, Homo sapiens
ctgtttgtggttcag

SEQ ID NO: 327212 - DNA, 15 bp, Homo sapiens
gctgtttgtggttca

SEQ ID NO: 327213 - DNA, 15 bp, Homo sapiens
tgctgtttgtggttc

SEQ ID NO: 327214 - DNA, 15 bp, Homo sapiens
ttgctgtttgtggtt

SEQ ID NO: 327215 - DNA, 15 bp, Homo sapiens
gttgctgtttgtggt

SEQ ID NO: 327216 - DNA, 15 bp, Homo sapiens
cgttgctgtttgtgg

SEQ ID NO: 327217 - DNA, 15 bp, Homo sapiens
acgttgctgtttgtg

SEQ ID NO: 327218 - DNA, 15 bp, Homo sapiens
gacgttgctgtttgt

SEQ ID NO: 327219 - DNA, 15 bp, Homo sapiens
ggacgttgctgtttg

SEQ ID NO: 327220 - DNA, 15 bp, Homo sapiens
tggacgttgctgttt

SEQ ID NO: 327221 - DNA, 15 bp, Homo sapiens
atggacgttgctgtt

SEQ ID NO: 327222 - DNA, 15 bp, Homo sapiens
tatggacgttgctgt

SEQ ID NO: 327223 - DNA, 15 bp, Homo sapiens
gtatggacgttgctg

SEQ ID NO: 327224 - DNA, 15 bp, Homo sapiens
ggtatggacgttgct

SEQ ID NO: 327225 - DNA, 15 bp, Homo sapiens
gggtatggacgttgc

SEQ ID NO: 327226 - DNA, 15 bp, Homo sapiens
agggtatggacgttg

SEQ ID NO: 327227 - DNA, 15 bp, Homo sapiens
gagggtatggacgtt

SEQ ID NO: 327228 - DNA, 15 bp, Homo sapiens
tgagggtatggacgt

SEQ ID NO: 327229 - DNA, 15 bp, Homo sapiens
ctgagggtatggacg

SEQ ID NO: 327230 - DNA, 15 bp, Homo sapiens
gctgagggtatggac

SEQ ID NO: 327231 - DNA, 15 bp, Homo sapiens
tgctgagggtatgga

SEQ ID NO: 327232 - DNA, 15 bp, Homo sapiens
atgctgagggtatgg

SEQ ID NO: 327233 - DNA, 15 bp, Homo sapiens
aatgctgagggtatg

SEQ ID NO: 327234 - DNA, 15 bp, Homo sapiens
caatgctgagggtat

SEQ ID NO: 327235 - DNA, 15 bp, Homo sapiens
acaatgctgagggta

SEQ ID NO: 327236 - DNA, 15 bp, Homo sapiens
aacaatgctgagggt

SEQ ID NO: 327237 - DNA, 15 bp, Homo sapiens
taacaatgctgaggg

SEQ ID NO: 327238 - DNA, 15 bp, Homo sapiens
ctaacaatgctgagg

SEQ ID NO: 327239 - DNA, 15 bp, Homo sapiens
tctaacaatgctgag

SEQ ID NO: 327240 - DNA, 15 bp, Homo sapiens
ttctaacaatgctga

SEQ ID NO: 327241 - DNA, 15 bp, Homo sapiens
attctaacaatgctg

SEQ ID NO: 327242 - DNA, 15 bp, Homo sapiens
gattctaacaatgct

SEQ ID NO: 327243 - DNA, 15 bp, Homo sapiens
ggattctaacaatgc

SEQ ID NO: 327244 - DNA, 15 bp, Homo sapiens
gggattctaacaatg

SEQ ID NO: 327245 - DNA, 15 bp, Homo sapiens
ggggattctaacaat

SEQ ID NO: 327246 - DNA, 15 bp, Homo sapiens
aggggattctaacaa

SEQ ID NO: 327247 - DNA, 15 bp, Homo sapiens
caggggattctaaca

SEQ ID NO: 327248 - DNA, 15 bp, Homo sapiens
gcaggggattctaac

SEQ ID NO: 327249 - DNA, 15 bp, Homo sapiens
tgcaggggattctaa

SEQ ID NO: 327250 - DNA, 15 bp, Homo sapiens
ctgcaggggattcta

SEQ ID NO: 327251 - DNA, 15 bp, Homo sapiens
gctgcaggggattct

SEQ ID NO: 327252 - DNA, 15 bp, Homo sapiens
ggctgcaggggattc

SEQ ID NO: 327253 - DNA, 15 bp, Homo sapiens
aggctgcaggggatt

SEQ ID NO: 327254 - DNA, 15 bp, Homo sapiens
gaggctgcaggggat

SEQ ID NO: 327255 - DNA, 15 bp, Homo sapiens
ggaggctgcagggga

SEQ ID NO: 327256 - DNA, 15 bp, Homo sapiens
tggaggctgcagggg

SEQ ID NO: 327257 - DNA, 15 bp, Homo sapiens
ctggaggctgcaggg

SEQ ID NO: 327258 - DNA, 15 bp, Homo sapiens
actggaggctgcagg

SEQ ID NO: 327259 - DNA, 15 bp, Homo sapiens
aactggaggctgcag

SEQ ID NO: 327260 - DNA, 15 bp, Homo sapiens
gaactggaggctgca

SEQ ID NO: 327261 - DNA, 15 bp, Homo sapiens
agaactggaggctgc

SEQ ID NO: 327262 - DNA, 15 bp, Homo sapiens
gagaactggaggctg

SEQ ID NO: 327263 - DNA, 15 bp, Homo sapiens
tgagaactggaggct

SEQ ID NO: 327264 - DNA, 15 bp, Homo sapiens
atgagaactggaggc

SEQ ID NO: 327265 - DNA, 15 bp, Homo sapiens
tatgagaactggagg

SEQ ID NO: 327266 - DNA, 15 bp, Homo sapiens
gtatgagaactggag

SEQ ID NO: 327267 - DNA, 15 bp, Homo sapiens
agtatgagaactgga

SEQ ID NO: 327268 - DNA, 15 bp, Homo sapiens
cagtatgagaactgg

SEQ ID NO: 327269 - DNA, 15 bp, Homo sapiens
acagtatgagaactg

SEQ ID NO: 327270 - DNA, 15 bp, Homo sapiens
gacagtatgagaact

SEQ ID NO: 327271 - DNA, 15 bp, Homo sapiens
agacagtatgagaac

SEQ ID NO: 327272 - DNA, 15 bp, Homo sapiens
cagacagtatgagaa

SEQ ID NO: 327273 - DNA, 15 bp, Homo sapiens
acagacagtatgaga

SEQ ID NO: 327274 - DNA, 15 bp, Homo sapiens
tacagacagtatgag

SEQ ID NO: 327275 - DNA, 15 bp, Homo sapiens
atacagacagtatga

SEQ ID NO: 327276 - DNA, 15 bp, Homo sapiens
aatacagacagtatg

SEQ ID NO: 327277 - DNA, 15 bp, Homo sapiens
gaatacagacagtat

SEQ ID NO: 327278 - DNA, 15 bp, Homo sapiens
agaatacagacagta

SEQ ID NO: 327279 - DNA, 15 bp, Homo sapiens
tagaatacagacagt

SEQ ID NO: 327280 - DNA, 15 bp, Homo sapiens
gtagaatacagacag

SEQ ID NO: 327281 - DNA, 15 bp, Homo sapiens
agtagaatacagaca

SEQ ID NO: 327282 - DNA, 15 bp, Homo sapiens
tgctgctaagcatcc

SEQ ID NO: 327283 - DNA, 15 bp, Homo sapiens
gtgctgctaagcatc

SEQ ID NO: 327284 - DNA, 15 bp, Homo sapiens
ggtgctgctaagcat

SEQ ID NO: 327285 - DNA, 15 bp, Homo sapiens
aggtgctgctaagca

SEQ ID NO: 327286 - DNA, 15 bp, Homo sapiens
gaggtgctgctaagc

SEQ ID NO: 327287 - DNA, 15 bp, Homo sapiens
agaggtgctgctaag

SEQ ID NO: 327288 - DNA, 15 bp, Homo sapiens
cagaggtgctgctaa

SEQ ID NO: 327289 - DNA, 15 bp, Homo sapiens
ccagaggtgctgcta

SEQ ID NO: 327290 - DNA, 15 bp, Homo sapiens
gccagaggtgctgct

SEQ ID NO: 327291 - DNA, 15 bp, Homo sapiens
ggccagaggtgctgc

SEQ ID NO: 327292 - DNA, 15 bp, Homo sapiens
aggccagaggtgctg

SEQ ID NO: 327293 - DNA, 15 bp, Homo sapiens
gaggccagaggtgct

SEQ ID NO: 327294 - DNA, 15 bp, Homo sapiens
agaggccagaggtgc

SEQ ID NO: 327295 - DNA, 15 bp, Homo sapiens
aagaggccagaggtg

SEQ ID NO: 327296 - DNA, 15 bp, Homo sapiens
aaagaggccagaggt

SEQ ID NO: 327297 - DNA, 15 bp, Homo sapiens
gaaagaggccagagg

SEQ ID NO: 327298 - DNA, 15 bp, Homo sapiens
cgaaagaggccagag

SEQ ID NO: 327299 - DNA, 15 bp, Homo sapiens
tcgaaagaggccaga

SEQ ID NO: 327300 - DNA, 15 bp, Homo sapiens
ttcgaaagaggccag

SEQ ID NO: 327301 - DNA, 15 bp, Homo sapiens
attcgaaagaggcca

SEQ ID NO: 327302 - DNA, 15 bp, Homo sapiens
tattcgaaagaggcc

SEQ ID NO: 327303 - DNA, 15 bp, Homo sapiens
ctattcgaaagaggc

SEQ ID NO: 327304 - DNA, 15 bp, Homo sapiens
tctattcgaaagagg

SEQ ID NO: 327305 - DNA, 15 bp, Homo sapiens
atctattcgaaagag

SEQ ID NO: 327306 - DNA, 15 bp, Homo sapiens
catctattcgaaaga

SEQ ID NO: 327307 - DNA, 15 bp, Homo sapiens
gcatctattcgaaag

SEQ ID NO: 327308 - DNA, 15 bp, Homo sapiens
ggcatctattcgaaa

SEQ ID NO: 327309 - DNA, 15 bp, Homo sapiens
tggcatctattcgaa

SEQ ID NO: 327310 - DNA, 15 bp, Homo sapiens
ctggcatctattcga

SEQ ID NO: 327311 - DNA, 15 bp, Homo sapiens
gctggcatctattcg

SEQ ID NO: 327312 - DNA, 15 bp, Homo sapiens
tgctggcatctattc

SEQ ID NO: 327313 - DNA, 15 bp, Homo sapiens
ctgctggcatctatt

SEQ ID NO: 327314 - DNA, 15 bp, Homo sapiens
gctgctggcatctat

SEQ ID NO: 327315 - DNA, 15 bp, Homo sapiens
tgctgctggcatcta

SEQ ID NO: 327316 - DNA, 15 bp, Homo sapiens
gtgctgctggcatct

SEQ ID NO: 327317 - DNA, 15 bp, Homo sapiens
ggtgctgctggcatc

SEQ ID NO: 327318 - DNA, 15 bp, Homo sapiens
gggtgctgctggcat

SEQ ID NO: 327319 - DNA, 15 bp, Homo sapiens
ggggtgctgctggca

SEQ ID NO: 327320 - DNA, 15 bp, Homo sapiens
gggggtgctgctggc

SEQ ID NO: 327321 - DNA, 15 bp, Homo sapiens
ggggggtgctgctgg

SEQ ID NO: 327322 - DNA, 15 bp, Homo sapiens
aggggggtgctgctg

SEQ ID NO: 327323 - DNA, 15 bp, Homo sapiens
aaggggggtgctgct

SEQ ID NO: 327324 - DNA, 15 bp, Homo sapiens
gaaggggggtgctgc

SEQ ID NO: 327325 - DNA, 15 bp, Homo sapiens
ggaaggggggtgctg

SEQ ID NO: 327326 - DNA, 15 bp, Homo sapiens
tggaaggggggtgct

SEQ ID NO: 327327 - DNA, 15 bp, Homo sapiens
ttggaaggggggtgc

SEQ ID NO: 327328 - DNA, 15 bp, Homo sapiens
cttggaaggggggtg

SEQ ID NO: 327329 - DNA, 15 bp, Homo sapiens
acttggaaggggggt

SEQ ID NO: 327330 - DNA, 15 bp, Homo sapiens
gacttggaagggggg

SEQ ID NO: 327331 - DNA, 15 bp, Homo sapiens
tgacttggaaggggg

SEQ ID NO: 327332 - DNA, 15 bp, Homo sapiens
atgacttggaagggg

SEQ ID NO: 327333 - DNA, 15 bp, Homo sapiens
catgacttggaaggg

SEQ ID NO: 327334 - DNA, 15 bp, Homo sapiens
tcatgacttggaagg

SEQ ID NO: 327335 - DNA, 15 bp, Homo sapiens
gtcatgacttggaag

SEQ ID NO: 327336 - DNA, 15 bp, Homo sapiens
tgtcatgacttggaa

SEQ ID NO: 327337 - DNA, 15 bp, Homo sapiens
ttgtcatgacttgga

SEQ ID NO: 327338 - DNA, 15 bp, Homo sapiens
attgtcatgacttgg

SEQ ID NO: 327339 - DNA, 15 bp, Homo sapiens
gattgtcatgacttg

SEQ ID NO: 327340 - DNA, 15 bp, Homo sapiens
ggattgtcatgactt

SEQ ID NO: 327341 - DNA, 15 bp, Homo sapiens
tggattgtcatgact

SEQ ID NO: 327342 - DNA, 15 bp, Homo sapiens
ttggattgtcatgac

SEQ ID NO: 327343 - DNA, 15 bp, Homo sapiens
tttggattgtcatga

SEQ ID NO: 327344 - DNA, 15 bp, Homo sapiens
ttttggattgtcatg

SEQ ID NO: 327345 - DNA, 15 bp, Homo sapiens
attttggattgtcat

SEQ ID NO: 327346 - DNA, 15 bp, Homo sapiens
cattttggattgtca

SEQ ID NO: 327347 - DNA, 15 bp, Homo sapiens
acattttggattgtc

SEQ ID NO: 327348 - DNA, 15 bp, Homo sapiens
gacattttggattgt

SEQ ID NO: 327349 - DNA, 15 bp, Homo sapiens
agacattttggattg

SEQ ID NO: 327350 - DNA, 15 bp, Homo sapiens
gagacattttggatt

SEQ ID NO: 327351 - DNA, 15 bp, Homo sapiens
ggagacattttggat

SEQ ID NO: 327352 - DNA, 15 bp, Homo sapiens
tggagacattttgga

SEQ ID NO: 327353 - DNA, 15 bp, Homo sapiens
ctggagacattttgg

SEQ ID NO: 327354 - DNA, 15 bp, Homo sapiens
tctggagacattttg

SEQ ID NO: 327355 - DNA, 15 bp, Homo sapiens
ctctggagacatttt

SEQ ID NO: 327356 - DNA, 15 bp, Homo sapiens
tctctggagacattt

SEQ ID NO: 327357 - DNA, 15 bp, Homo sapiens
atctctggagacatt

SEQ ID NO: 327358 - DNA, 15 bp, Homo sapiens
gatctctggagacat

SEQ ID NO: 327359 - DNA, 15 bp, Homo sapiens
cgatctctggagaca

SEQ ID NO: 327360 - DNA, 15 bp, Homo sapiens
gcgatctctggagac

SEQ ID NO: 327361 - DNA, 15 bp, Homo sapiens
agcgatctctggaga

SEQ ID NO: 327362 - DNA, 15 bp, Homo sapiens
aagcgatctctggag

SEQ ID NO: 327363 - DNA, 15 bp, Homo sapiens
caagcgatctctgga

SEQ ID NO: 327364 - DNA, 15 bp, Homo sapiens
tcaagcgatctctgg

SEQ ID NO: 327365 - DNA, 15 bp, Homo sapiens
ctcaagcgatctctg

SEQ ID NO: 327366 - DNA, 15 bp, Homo sapiens
gctcaagcgatctct

SEQ ID NO: 327367 - DNA, 15 bp, Homo sapiens
ggctcaagcgatctc

SEQ ID NO: 327368 - DNA, 15 bp, Homo sapiens
gggctcaagcgatct

SEQ ID NO: 327369 - DNA, 15 bp, Homo sapiens
tgggctcaagcgatc

SEQ ID NO: 327370 - DNA, 15 bp, Homo sapiens
ctgggctcaagcgat

SEQ ID NO: 327371 - DNA, 15 bp, Homo sapiens
cctgggctcaagcga

SEQ ID NO: 327372 - DNA, 15 bp, Homo sapiens
tcctgggctcaagcg

SEQ ID NO: 327373 - DNA, 15 bp, Homo sapiens
ctcctgggctcaagc

SEQ ID NO: 327374 - DNA, 15 bp, Homo sapiens
actcctgggctcaag

SEQ ID NO: 327375 - DNA, 15 bp, Homo sapiens
aactcctgggctcaa

SEQ ID NO: 327376 - DNA, 15 bp, Homo sapiens
caactcctgggctca

SEQ ID NO: 327377 - DNA, 15 bp, Homo sapiens
gcaactcctgggctc

SEQ ID NO: 327378 - DNA, 15 bp, Homo sapiens
tgcaactcctgggct

SEQ ID NO: 327379 - DNA, 15 bp, Homo sapiens
ctgcaactcctgggc

SEQ ID NO: 327380 - DNA, 15 bp, Homo sapiens
cctgcaactcctggg

SEQ ID NO: 327381 - DNA, 15 bp, Homo sapiens
tcctgcaactcctgg

SEQ ID NO: 327382 - DNA, 15 bp, Homo sapiens
ttcctgcaactcctg

SEQ ID NO: 327383 - DNA, 15 bp, Homo sapiens
cttcctgcaactcct

SEQ ID NO: 327384 - DNA, 15 bp, Homo sapiens
gcttcctgcaactcc

SEQ ID NO: 327385 - DNA, 15 bp, Homo sapiens
tgcttcctgcaactc

SEQ ID NO: 327386 - DNA, 15 bp, Homo sapiens
ctgcttcctgcaact

SEQ ID NO: 327387 - DNA, 15 bp, Homo sapiens
actgcttcctgcaac

SEQ ID NO: 327388 - DNA, 15 bp, Homo sapiens
cactgcttcctgcaa

SEQ ID NO: 327389 - DNA, 15 bp, Homo sapiens
tcactgcttcctgca

SEQ ID NO: 327390 - DNA, 15 bp, Homo sapiens
ctcactgcttcctgc

SEQ ID NO: 327391 - DNA, 15 bp, Homo sapiens
gctcactgcttcctg

SEQ ID NO: 327392 - DNA, 15 bp, Homo sapiens
agctcactgcttcct

SEQ ID NO: 327393 - DNA, 15 bp, Homo sapiens
cagctcactgcttcc

SEQ ID NO: 327394 - DNA, 15 bp, Homo sapiens
acagctcactgcttc

SEQ ID NO: 327395 - DNA, 15 bp, Homo sapiens
cacagctcactgctt

SEQ ID NO: 327396 - DNA, 15 bp, Homo sapiens
tcacagctcactgct

SEQ ID NO: 327397 - DNA, 15 bp, Homo sapiens
gtcacagctcactgc

SEQ ID NO: 327398 - DNA, 15 bp, Homo sapiens
ggtcacagctcactg

SEQ ID NO: 327399 - DNA, 15 bp, Homo sapiens
cggtcacagctcact

SEQ ID NO: 327400 - DNA, 15 bp, Homo sapiens
tcggtcacagctcac

SEQ ID NO: 327401 - DNA, 15 bp, Homo sapiens
ctcggtcacagctca

SEQ ID NO: 327402 - DNA, 15 bp, Homo sapiens
gctcggtcacagctc

SEQ ID NO: 327403 - DNA, 15 bp, Homo sapiens
ggctcggtcacagct

SEQ ID NO: 327404 - DNA, 15 bp, Homo sapiens
tggctcggtcacagc

SEQ ID NO: 327405 - DNA, 15 bp, Homo sapiens
gtggctcggtcacag

SEQ ID NO: 327406 - DNA, 15 bp, Homo sapiens
agtggctcggtcaca

SEQ ID NO: 327407 - DNA, 15 bp, Homo sapiens
cagtggctcggtcac

SEQ ID NO: 327408 - DNA, 15 bp, Homo sapiens
acagtggctcggtca

SEQ ID NO: 327409 - DNA, 15 bp, Homo sapiens
tacagtggctcggtc

SEQ ID NO: 327410 - DNA, 15 bp, Homo sapiens
gtacagtggctcggt

SEQ ID NO: 327411 - DNA, 15 bp, Homo sapiens
agtacagtggctcgg

SEQ ID NO: 327412 - DNA, 15 bp, Homo sapiens
gagtacagtggctcg

SEQ ID NO: 327413 - DNA, 15 bp, Homo sapiens
ggagtacagtggctc

SEQ ID NO: 327414 - DNA, 15 bp, Homo sapiens
tggagtacagtggct

SEQ ID NO: 327415 - DNA, 15 bp, Homo sapiens
cttgcccaggctgga

SEQ ID NO: 327416 - DNA, 15 bp, Homo sapiens
tcttgcccaggctgg

SEQ ID NO: 327417 - DNA, 15 bp, Homo sapiens
gtcttgcccaggctg

SEQ ID NO: 327418 - DNA, 15 bp, Homo sapiens
tgtcttgcccaggct

SEQ ID NO: 327419 - DNA, 15 bp, Homo sapiens
ctgtcttgcccaggc

SEQ ID NO: 327420 - DNA, 15 bp, Homo sapiens
gctgtcttgcccagg

SEQ ID NO: 327421 - DNA, 15 bp, Homo sapiens
tgctgtcttgcccag

SEQ ID NO: 327422 - DNA, 15 bp, Homo sapiens
ttgctgtcttgccca

SEQ ID NO: 327423 - DNA, 15 bp, Homo sapiens
cttgctgtcttgccc

SEQ ID NO: 327424 - DNA, 15 bp, Homo sapiens
tcttgctgtcttgcc

SEQ ID NO: 327425 - DNA, 15 bp, Homo sapiens
gtcttgctgtcttgc

SEQ ID NO: 327426 - DNA, 15 bp, Homo sapiens
ggtcttgctgtcttg

SEQ ID NO: 327427 - DNA, 15 bp, Homo sapiens
gggtcttgctgtctt

SEQ ID NO: 327428 - DNA, 15 bp, Homo sapiens
ggggtcttgctgtct

SEQ ID NO: 327429 - DNA, 15 bp, Homo sapiens
aggggtcttgctgtc

SEQ ID NO: 327430 - DNA, 15 bp, Homo sapiens
aaggggtcttgctgt

SEQ ID NO: 327431 - DNA, 15 bp, Homo sapiens
gaaggggtcttgctg

SEQ ID NO: 327432 - DNA, 15 bp, Homo sapiens
agaaggggtcttgct

SEQ ID NO: 327433 - DNA, 15 bp, Homo sapiens
gagaaggggtcttgc

SEQ ID NO: 327434 - DNA, 15 bp, Homo sapiens
tgagaaggggtcttg

SEQ ID NO: 327435 - DNA, 15 bp, Homo sapiens
ttgagaaggggtctt

SEQ ID NO: 327436 - DNA, 15 bp, Homo sapiens
tttgagaaggggtct

SEQ ID NO: 327437 - DNA, 15 bp, Homo sapiens
ttttgagaaggggtc

SEQ ID NO: 327438 - DNA, 15 bp, Homo sapiens
tttttgagaaggggt

SEQ ID NO: 327439 - DNA, 15 bp, Homo sapiens
ttttttgagaagggg

SEQ ID NO: 327440 - DNA, 15 bp, Homo sapiens
tttttttgagaaggg

SEQ ID NO: 327441 - DNA, 15 bp, Homo sapiens
ttttttttgagaagg

SEQ ID NO: 327442 - DNA, 15 bp, Homo sapiens
tttttttttgagaag

SEQ ID NO: 327443 - DNA, 15 bp, Homo sapiens
ttttttttttgagaa

SEQ ID NO: 327444 - DNA, 15 bp, Homo sapiens
gactttttttttttt

SEQ ID NO: 327445 - DNA, 15 bp, Homo sapiens
agacttttttttttt

SEQ ID NO: 327446 - DNA, 15 bp, Homo sapiens
gagactttttttttt

SEQ ID NO: 327447 - DNA, 15 bp, Homo sapiens
ggagacttttttttt

SEQ ID NO: 327448 - DNA, 15 bp, Homo sapiens
tggagactttttttt

SEQ ID NO: 327449 - DNA, 15 bp, Homo sapiens
ctggagacttttttt

SEQ ID NO: 327450 - DNA, 15 bp, Homo sapiens
cctggagactttttt

SEQ ID NO: 327451 - DNA, 15 bp, Homo sapiens
gcctggagacttttt

SEQ ID NO: 327452 - DNA, 15 bp, Homo sapiens
tgcctggagactttt

SEQ ID NO: 327453 - DNA, 15 bp, Homo sapiens
ttgcctggagacttt

SEQ ID NO: 327454 - DNA, 15 bp, Homo sapiens
attgcctggagactt

SEQ ID NO: 327455 - DNA, 15 bp, Homo sapiens
cattgcctggagact

SEQ ID NO: 327456 - DNA, 15 bp, Homo sapiens
gcattgcctggagac

SEQ ID NO: 327457 - DNA, 15 bp, Homo sapiens
ggcattgcctggaga

SEQ ID NO: 327458 - DNA, 15 bp, Homo sapiens
tggcattgcctggag

SEQ ID NO: 327459 - DNA, 15 bp, Homo sapiens
gtggcattgcctgga

SEQ ID NO: 327460 - DNA, 15 bp, Homo sapiens
tgtggcattgcctgg

SEQ ID NO: 327461 - DNA, 15 bp, Homo sapiens
atgtggcattgcctg

SEQ ID NO: 327462 - DNA, 15 bp, Homo sapiens
catgtggcattgcct

SEQ ID NO: 327463 - DNA, 15 bp, Homo sapiens
acatgtggcattgcc

SEQ ID NO: 327464 - DNA, 15 bp, Homo sapiens
aacatgtggcattgc

SEQ ID NO: 327465 - DNA, 15 bp, Homo sapiens
caacatgtggcattg

SEQ ID NO: 327466 - DNA, 15 bp, Homo sapiens
acaacatgtggcatt

SEQ ID NO: 327467 - DNA, 15 bp, Homo sapiens
gacaacatgtggcat

SEQ ID NO: 327468 - DNA, 15 bp, Homo sapiens
agacaacatgtggca

SEQ ID NO: 327469 - DNA, 15 bp, Homo sapiens
cagacaacatgtggc

SEQ ID NO: 327470 - DNA, 15 bp, Homo sapiens
ccagacaacatgtgg

SEQ ID NO: 327471 - DNA, 15 bp, Homo sapiens
cccagacaacatgtg

SEQ ID NO: 327472 - DNA, 15 bp, Homo sapiens
ccccagacaacatgt

SEQ ID NO: 327473 - DNA, 15 bp, Homo sapiens
cccccagacaacatg

SEQ ID NO: 327474 - DNA, 15 bp, Homo sapiens
acccccagacaacat

SEQ ID NO: 327475 - DNA, 15 bp, Homo sapiens
tacccccagacaaca

SEQ ID NO: 327476 - DNA, 15 bp, Homo sapiens
ttacccccagacaac

SEQ ID NO: 327477 - DNA, 15 bp, Homo sapiens
tttacccccagacaa

SEQ ID NO: 327478 - DNA, 15 bp, Homo sapiens
ttttacccccagaca

SEQ ID NO: 327479 - DNA, 15 bp, Homo sapiens
attttacccccagac

SEQ ID NO: 327480 - DNA, 15 bp, Homo sapiens
gattttacccccaga

SEQ ID NO: 327481 - DNA, 15 bp, Homo sapiens
tgattttacccccag

SEQ ID NO: 327482 - DNA, 15 bp, Homo sapiens
ctgattttaccccca

SEQ ID NO: 327483 - DNA, 15 bp, Homo sapiens
gctgattttaccccc

SEQ ID NO: 327484 - DNA, 15 bp, Homo sapiens
ggctgattttacccc

SEQ ID NO: 327485 - DNA, 15 bp, Homo sapiens
gggctgattttaccc

SEQ ID NO: 327486 - DNA, 15 bp, Homo sapiens
agggctgattttacc

SEQ ID NO: 327487 - DNA, 15 bp, Homo sapiens
cagggctgattttac

SEQ ID NO: 327488 - DNA, 15 bp, Homo sapiens
ccagggctgatttta

SEQ ID NO: 327489 - DNA, 15 bp, Homo sapiens
accagggctgatttt

SEQ ID NO: 327490 - DNA, 15 bp, Homo sapiens
aaccagggctgattt

SEQ ID NO: 327491 - DNA, 15 bp, Homo sapiens
gaaccagggctgatt

SEQ ID NO: 327492 - DNA, 15 bp, Homo sapiens
tgaaccagggctgat

SEQ ID NO: 327493 - DNA, 15 bp, Homo sapiens
ttgaaccagggctga

SEQ ID NO: 327494 - DNA, 15 bp, Homo sapiens
cttgaaccagggctg

SEQ ID NO: 327495 - DNA, 15 bp, Homo sapiens
gcttgaaccagggct

SEQ ID NO: 327496 - DNA, 15 bp, Homo sapiens
tgcttgaaccagggc

SEQ ID NO: 327497 - DNA, 15 bp, Homo sapiens
ttgcttgaaccaggg

SEQ ID NO: 327498 - DNA, 15 bp, Homo sapiens
tttgcttgaaccagg

SEQ ID NO: 327499 - DNA, 15 bp, Homo sapiens
gtttgcttgaaccag

SEQ ID NO: 327500 - DNA, 15 bp, Homo sapiens
cgtttgcttgaacca

SEQ ID NO: 327501 - DNA, 15 bp, Homo sapiens
gcgtttgcttgaacc

SEQ ID NO: 327502 - DNA, 15 bp, Homo sapiens
agcgtttgcttgaac

SEQ ID NO: 327503 - DNA, 15 bp, Homo sapiens
aagcgtttgcttgaa

SEQ ID NO: 327504 - DNA, 15 bp, Homo sapiens
aaagcgtttgcttga

SEQ ID NO: 327505 - DNA, 15 bp, Homo sapiens
taaagcgtttgcttg

SEQ ID NO: 327506 - DNA, 15 bp, Homo sapiens
ttaaagcgtttgctt

SEQ ID NO: 327507 - DNA, 15 bp, Homo sapiens
tttaaagcgtttgct

SEQ ID NO: 327508 - DNA, 15 bp, Homo sapiens
ttttaaagcgtttgc

SEQ ID NO: 327509 - DNA, 15 bp, Homo sapiens
cttttaaagcgtttg

SEQ ID NO: 327510 - DNA, 15 bp, Homo sapiens
ccttttaaagcgttt

SEQ ID NO: 327511 - DNA, 15 bp, Homo sapiens
tccttttaaagcgtt

SEQ ID NO: 327512 - DNA, 15 bp, Homo sapiens
ttccttttaaagcgt

SEQ ID NO: 327513 - DNA, 15 bp, Homo sapiens
cttccttttaaagcg

SEQ ID NO: 327514 - DNA, 15 bp, Homo sapiens
tcttccttttaaagc

SEQ ID NO: 327515 - DNA, 15 bp, Homo sapiens
ctcttccttttaaag

SEQ ID NO: 327516 - DNA, 15 bp, Homo sapiens
cctcttccttttaaa

SEQ ID NO: 327517 - DNA, 15 bp, Homo sapiens
tcctcttccttttaa

SEQ ID NO: 327518 - DNA, 15 bp, Homo sapiens
atcctcttcctttta

SEQ ID NO: 327519 - DNA, 15 bp, Homo sapiens
catcctcttcctttt

SEQ ID NO: 327520 - DNA, 15 bp, Homo sapiens
gcatcctcttccttt

SEQ ID NO: 327521 - DNA, 15 bp, Homo sapiens
tgcatcctcttcctt

SEQ ID NO: 327522 - DNA, 15 bp, Homo sapiens
ctgcatcctcttcct

SEQ ID NO: 327523 - DNA, 15 bp, Homo sapiens
tctgcatcctcttcc

SEQ ID NO: 327524 - DNA, 15 bp, Homo sapiens
ctctgcatcctcttc

SEQ ID NO: 327525 - DNA, 15 bp, Homo sapiens
actctgcatcctctt

SEQ ID NO: 327526 - DNA, 15 bp, Homo sapiens
tactctgcatcctct

SEQ ID NO: 327527 - DNA, 15 bp, Homo sapiens
ctactctgcatcctc

SEQ ID NO: 327528 - DNA, 15 bp, Homo sapiens
cctactctgcatcct

SEQ ID NO: 327529 - DNA, 15 bp, Homo sapiens
ccctactctgcatcc

SEQ ID NO: 327530 - DNA, 15 bp, Homo sapiens
tccctactctgcatc

SEQ ID NO: 327531 - DNA, 15 bp, Homo sapiens
ctccctactctgcat

SEQ ID NO: 327532 - DNA, 15 bp, Homo sapiens
tctccctactctgca

SEQ ID NO: 327533 - DNA, 15 bp, Homo sapiens
ttctccctactctgc

SEQ ID NO: 327534 - DNA, 15 bp, Homo sapiens
cttctccctactctg

SEQ ID NO: 327535 - DNA, 15 bp, Homo sapiens
ccttctccctactct

SEQ ID NO: 327536 - DNA, 15 bp, Homo sapiens
gccttctccctactc

SEQ ID NO: 327537 - DNA, 15 bp, Homo sapiens
tgccttctccctact

SEQ ID NO: 327538 - DNA, 15 bp, Homo sapiens
ctgccttctccctac

SEQ ID NO: 327539 - DNA, 15 bp, Homo sapiens
tctgccttctcccta

SEQ ID NO: 327540 - DNA, 15 bp, Homo sapiens
ctctgccttctccct

SEQ ID NO: 327541 - DNA, 15 bp, Homo sapiens
tctctgccttctccc

SEQ ID NO: 327542 - DNA, 15 bp, Homo sapiens
ctctctgccttctcc

SEQ ID NO: 327543 - DNA, 15 bp, Homo sapiens
gctctctgccttctc

SEQ ID NO: 327544 - DNA, 15 bp, Homo sapiens
ggctctctgccttct

SEQ ID NO: 327545 - DNA, 15 bp, Homo sapiens
aggctctctgccttc

SEQ ID NO: 327546 - DNA, 15 bp, Homo sapiens
caggctctctgcctt

SEQ ID NO: 327547 - DNA, 15 bp, Homo sapiens
ccaggctctctgcct

SEQ ID NO: 327548 - DNA, 15 bp, Homo sapiens
tccaggctctctgcc

SEQ ID NO: 327549 - DNA, 15 bp, Homo sapiens
ctccaggctctctgc

SEQ ID NO: 327550 - DNA, 15 bp, Homo sapiens
gctccaggctctctg

SEQ ID NO: 327551 - DNA, 15 bp, Homo sapiens
agctccaggctctct

SEQ ID NO: 327552 - DNA, 15 bp, Homo sapiens
cagctccaggctctc

SEQ ID NO: 327553 - DNA, 15 bp, Homo sapiens
tcagctccaggctct

SEQ ID NO: 327554 - DNA, 15 bp, Homo sapiens
ctcagctccaggctc

SEQ ID NO: 327555 - DNA, 15 bp, Homo sapiens
tctcagctccaggct

SEQ ID NO: 327556 - DNA, 15 bp, Homo sapiens
ctctcagctccaggc

SEQ ID NO: 327557 - DNA, 15 bp, Homo sapiens
actctcagctccagg

SEQ ID NO: 327558 - DNA, 15 bp, Homo sapiens
cactctcagctccag

SEQ ID NO: 327559 - DNA, 15 bp, Homo sapiens
gcactctcagctcca

SEQ ID NO: 327560 - DNA, 15 bp, Homo sapiens
agcactctcagctcc

SEQ ID NO: 327561 - DNA, 15 bp, Homo sapiens
cagcactctcagctc

SEQ ID NO: 327562 - DNA, 15 bp, Homo sapiens
ccagcactctcagct

SEQ ID NO: 327563 - DNA, 15 bp, Homo sapiens
cccagcactctcagc

SEQ ID NO: 327564 - DNA, 15 bp, Homo sapiens
tcccagcactctcag

SEQ ID NO: 327565 - DNA, 15 bp, Homo sapiens
ttcccagcactctca

SEQ ID NO: 327566 - DNA, 15 bp, Homo sapiens
attcccagcactctc

SEQ ID NO: 327567 - DNA, 15 bp, Homo sapiens
cattcccagcactct

SEQ ID NO: 327568 - DNA, 15 bp, Homo sapiens
tcattcccagcactc

SEQ ID NO: 327569 - DNA, 15 bp, Homo sapiens
ctcattcccagcact

SEQ ID NO: 327570 - DNA, 15 bp, Homo sapiens
tctcattcccagcac

SEQ ID NO: 327571 - DNA, 15 bp, Homo sapiens
gtctcattcccagca

SEQ ID NO: 327572 - DNA, 15 bp, Homo sapiens
tgtctcattcccagc

SEQ ID NO: 327573 - DNA, 15 bp, Homo sapiens
ctgtctcattcccag

SEQ ID NO: 327574 - DNA, 15 bp, Homo sapiens
gctgtctcattccca

SEQ ID NO: 327575 - DNA, 15 bp, Homo sapiens
ggctgtctcattccc

SEQ ID NO: 327576 - DNA, 15 bp, Homo sapiens
tggctgtctcattcc

SEQ ID NO: 327577 - DNA, 15 bp, Homo sapiens
ttggctgtctcattc

SEQ ID NO: 327578 - DNA, 15 bp, Homo sapiens
tttggctgtctcatt

SEQ ID NO: 327579 - DNA, 15 bp, Homo sapiens
ctttggctgtctcat

SEQ ID NO: 327580 - DNA, 15 bp, Homo sapiens
cctttggctgtctca

SEQ ID NO: 327581 - DNA, 15 bp, Homo sapiens
ccctttggctgtctc

SEQ ID NO: 327582 - DNA, 15 bp, Homo sapiens
cccctttggctgtct

SEQ ID NO: 327583 - DNA, 15 bp, Homo sapiens
gcccctttggctgtc

SEQ ID NO: 327584 - DNA, 15 bp, Homo sapiens
agcccctttggctgt

SEQ ID NO: 327585 - DNA, 15 bp, Homo sapiens
cagcccctttggctg

SEQ ID NO: 327586 - DNA, 15 bp, Homo sapiens
acagcccctttggct

SEQ ID NO: 327587 - DNA, 15 bp, Homo sapiens
cacagcccctttggc

SEQ ID NO: 327588 - DNA, 15 bp, Homo sapiens
tcacagcccctttgg

SEQ ID NO: 327589 - DNA, 15 bp, Homo sapiens
gtcacagcccctttg

SEQ ID NO: 327590 - DNA, 15 bp, Homo sapiens
cgtcacagccccttt

SEQ ID NO: 327591 - DNA, 15 bp, Homo sapiens
tcgtcacagcccctt

SEQ ID NO: 327592 - DNA, 15 bp, Homo sapiens
ttcgtcacagcccct

SEQ ID NO: 327593 - DNA, 15 bp, Homo sapiens
gttcgtcacagcccc

SEQ ID NO: 327594 - DNA, 15 bp, Homo sapiens
ggttcgtcacagccc

SEQ ID NO: 327595 - DNA, 15 bp, Homo sapiens
tggttcgtcacagcc

SEQ ID NO: 327596 - DNA, 15 bp, Homo sapiens
ctggttcgtcacagc

SEQ ID NO: 327597 - DNA, 15 bp, Homo sapiens
tctggttcgtcacag

SEQ ID NO: 327598 - DNA, 15 bp, Homo sapiens
ctctggttcgtcaca

SEQ ID NO: 327599 - DNA, 15 bp, Homo sapiens
tctctggttcgtcac

SEQ ID NO: 327600 - DNA, 15 bp, Homo sapiens
ttctctggttcgtca

SEQ ID NO: 327601 - DNA, 15 bp, Homo sapiens
gttctctggttcgtc

SEQ ID NO: 327602 - DNA, 15 bp, Homo sapiens
tgttctctggttcgt

SEQ ID NO: 327603 - DNA, 15 bp, Homo sapiens
ttgttctctggttcg

SEQ ID NO: 327604 - DNA, 15 bp, Homo sapiens
gttgttctctggttc

SEQ ID NO: 327605 - DNA, 15 bp, Homo sapiens
ggttgttctctggtt

SEQ ID NO: 327606 - DNA, 15 bp, Homo sapiens
tggttgttctctggt

SEQ ID NO: 327607 - DNA, 15 bp, Homo sapiens
ctggttgttctctgg

SEQ ID NO: 327608 - DNA, 15 bp, Homo sapiens
tctggttgttctctg

SEQ ID NO: 327609 - DNA, 15 bp, Homo sapiens
ttctggttgttctct

SEQ ID NO: 327610 - DNA, 15 bp, Homo sapiens
cttctggttgttctc

SEQ ID NO: 327611 - DNA, 15 bp, Homo sapiens
ccttctggttgttct

SEQ ID NO: 327612 - DNA, 15 bp, Homo sapiens
tccttctggttgttc

SEQ ID NO: 327613 - DNA, 15 bp, Homo sapiens
ctccttctggttgtt

SEQ ID NO: 327614 - DNA, 15 bp, Homo sapiens
tctccttctggttgt

SEQ ID NO: 327615 - DNA, 15 bp, Homo sapiens
ctctccttctggttg

SEQ ID NO: 327616 - DNA, 15 bp, Homo sapiens
gctctccttctggtt

SEQ ID NO: 327617 - DNA, 15 bp, Homo sapiens
agctctccttctggt

SEQ ID NO: 327618 - DNA, 15 bp, Homo sapiens
tagctctccttctgg

SEQ ID NO: 327619 - DNA, 15 bp, Homo sapiens
atagctctccttctg

SEQ ID NO: 327620 - DNA, 15 bp, Homo sapiens
tatagctctccttct

SEQ ID NO: 327621 - DNA, 15 bp, Homo sapiens
gtatagctctccttc

SEQ ID NO: 327622 - DNA, 15 bp, Homo sapiens
agtatagctctcctt

SEQ ID NO: 327623 - DNA, 15 bp, Homo sapiens
cagtatagctctcct

SEQ ID NO: 327624 - DNA, 15 bp, Homo sapiens
ccagtatagctctcc

SEQ ID NO: 327625 - DNA, 15 bp, Homo sapiens
tccagtatagctctc

SEQ ID NO: 327626 - DNA, 15 bp, Homo sapiens
ctccagtatagctct

SEQ ID NO: 327627 - DNA, 15 bp, Homo sapiens
cctccagtatagctc

SEQ ID NO: 327628 - DNA, 15 bp, Homo sapiens
ccctccagtatagct

SEQ ID NO: 327629 - DNA, 15 bp, Homo sapiens
accctccagtatagc

SEQ ID NO: 327630 - DNA, 15 bp, Homo sapiens
caccctccagtatag

SEQ ID NO: 327631 - DNA, 15 bp, Homo sapiens
ccaccctccagtata

SEQ ID NO: 327632 - DNA, 15 bp, Homo sapiens
cccaccctccagtat

SEQ ID NO: 327633 - DNA, 15 bp, Homo sapiens
acccaccctccagta

SEQ ID NO: 327634 - DNA, 15 bp, Homo sapiens
cacccaccctccagt

SEQ ID NO: 327635 - DNA, 15 bp, Homo sapiens
ccacccaccctccag

SEQ ID NO: 327636 - DNA, 15 bp, Homo sapiens
cccacccaccctcca

SEQ ID NO: 327637 - DNA, 15 bp, Homo sapiens
ccccacccaccctcc

SEQ ID NO: 327638 - DNA, 15 bp, Homo sapiens
gccccacccaccctc

SEQ ID NO: 327639 - DNA, 15 bp, Homo sapiens
agccccacccaccct

SEQ ID NO: 327640 - DNA, 15 bp, Homo sapiens
cagccccacccaccc

SEQ ID NO: 327641 - DNA, 15 bp, Homo sapiens
gcagccccacccacc

SEQ ID NO: 327642 - DNA, 15 bp, Homo sapiens
ggcagccccacccac

SEQ ID NO: 327643 - DNA, 15 bp, Homo sapiens
aggcagccccaccca

SEQ ID NO: 327644 - DNA, 15 bp, Homo sapiens
caggcagccccaccc

SEQ ID NO: 327645 - DNA, 15 bp, Homo sapiens
ccaggcagccccacc

SEQ ID NO: 327646 - DNA, 15 bp, Homo sapiens
gccaggcagccccac

SEQ ID NO: 327647 - DNA, 15 bp, Homo sapiens
ggccaggcagcccca

SEQ ID NO: 327648 - DNA, 15 bp, Homo sapiens
tggccaggcagcccc

SEQ ID NO: 327649 - DNA, 15 bp, Homo sapiens
ttggccaggcagccc

SEQ ID NO: 327650 - DNA, 15 bp, Homo sapiens
cttggccaggcagcc

SEQ ID NO: 327651 - DNA, 15 bp, Homo sapiens
acttggccaggcagc

SEQ ID NO: 327652 - DNA, 15 bp, Homo sapiens
aacttggccaggcag

SEQ ID NO: 327653 - DNA, 15 bp, Homo sapiens
gaacttggccaggca

SEQ ID NO: 327654 - DNA, 15 bp, Homo sapiens
agaacttggccaggc

SEQ ID NO: 327655 - DNA, 15 bp, Homo sapiens
gagaacttggccagg

SEQ ID NO: 327656 - DNA, 15 bp, Homo sapiens
agagaacttggccag

SEQ ID NO: 327657 - DNA, 15 bp, Homo sapiens
gagagaacttggcca

SEQ ID NO: 327658 - DNA, 15 bp, Homo sapiens
agagagaacttggcc

SEQ ID NO: 327659 - DNA, 15 bp, Homo sapiens
cagagagaacttggc

SEQ ID NO: 327660 - DNA, 15 bp, Homo sapiens
ccagagagaacttgg

SEQ ID NO: 327661 - DNA, 15 bp, Homo sapiens
cccagagagaacttg

SEQ ID NO: 327662 - DNA, 15 bp, Homo sapiens
tcccagagagaactt

SEQ ID NO: 327663 - DNA, 15 bp, Homo sapiens
ttcccagagagaact

SEQ ID NO: 327664 - DNA, 15 bp, Homo sapiens
tttcccagagagaac

SEQ ID NO: 327665 - DNA, 15 bp, Homo sapiens
gtttcccagagagaa

SEQ ID NO: 327666 - DNA, 15 bp, Homo sapiens
agtttcccagagaga

SEQ ID NO: 327667 - DNA, 15 bp, Homo sapiens
gagtttcccagagag

SEQ ID NO: 327668 - DNA, 15 bp, Homo sapiens
tgagtttcccagaga

SEQ ID NO: 327669 - DNA, 15 bp, Homo sapiens
gtgagtttcccagag

SEQ ID NO: 327670 - DNA, 15 bp, Homo sapiens
agtgagtttcccaga

SEQ ID NO: 327671 - DNA, 15 bp, Homo sapiens
aagtgagtttcccag

SEQ ID NO: 327672 - DNA, 15 bp, Homo sapiens
caagtgagtttccca

SEQ ID NO: 327673 - DNA, 15 bp, Homo sapiens
tcaagtgagtttccc

SEQ ID NO: 327674 - DNA, 15 bp, Homo sapiens
ctcaagtgagtttcc

SEQ ID NO: 327675 - DNA, 15 bp, Homo sapiens
tctcaagtgagtttc

SEQ ID NO: 327676 - DNA, 15 bp, Homo sapiens
atctcaagtgagttt

SEQ ID NO: 327677 - DNA, 15 bp, Homo sapiens
gatctcaagtgagtt

SEQ ID NO: 327678 - DNA, 15 bp, Homo sapiens
agatctcaagtgagt

SEQ ID NO: 327679 - DNA, 15 bp, Homo sapiens
tagatctcaagtgag

SEQ ID NO: 327680 - DNA, 15 bp, Homo sapiens
ttagatctcaagtga

SEQ ID NO: 327681 - DNA, 15 bp, Homo sapiens
tttagatctcaagtg

SEQ ID NO: 327682 - DNA, 15 bp, Homo sapiens
ttttagatctcaagt

SEQ ID NO: 327683 - DNA, 15 bp, Homo sapiens
cttttagatctcaag

SEQ ID NO: 327684 - DNA, 15 bp, Homo sapiens
gcttttagatctcaa

SEQ ID NO: 327685 - DNA, 15 bp, Homo sapiens
agcttttagatctca

SEQ ID NO: 327686 - DNA, 15 bp, Homo sapiens
aagcttttagatctc

SEQ ID NO: 327687 - DNA, 15 bp, Homo sapiens
aaagcttttagatct

SEQ ID NO: 327688 - DNA, 15 bp, Homo sapiens
gaaagcttttagatc

SEQ ID NO: 327689 - DNA, 15 bp, Homo sapiens
ggaaagcttttagat

SEQ ID NO: 327690 - DNA, 15 bp, Homo sapiens
gggaaagcttttaga

SEQ ID NO: 327691 - DNA, 15 bp, Homo sapiens
ggggaaagcttttag

SEQ ID NO: 327692 - DNA, 15 bp, Homo sapiens
tggggaaagctttta

SEQ ID NO: 327693 - DNA, 15 bp, Homo sapiens
atggggaaagctttt

SEQ ID NO: 327694 - DNA, 15 bp, Homo sapiens
tatggggaaagcttt

SEQ ID NO: 327695 - DNA, 15 bp, Homo sapiens
atatggggaaagctt

SEQ ID NO: 327696 - DNA, 15 bp, Homo sapiens
gatatggggaaagct

SEQ ID NO: 327697 - DNA, 15 bp, Homo sapiens
agatatggggaaagc

SEQ ID NO: 327698 - DNA, 15 bp, Homo sapiens
gagatatggggaaag

SEQ ID NO: 327699 - DNA, 15 bp, Homo sapiens
ggagatatggggaaa

SEQ ID NO: 327700 - DNA, 15 bp, Homo sapiens
gggagatatggggaa

SEQ ID NO: 327701 - DNA, 15 bp, Homo sapiens
tgggagatatgggga

SEQ ID NO: 327702 - DNA, 15 bp, Homo sapiens
ctgggagatatgggg

SEQ ID NO: 327703 - DNA, 15 bp, Homo sapiens
cctgggagatatggg

SEQ ID NO: 327704 - DNA, 15 bp, Homo sapiens
tcctgggagatatgg

SEQ ID NO: 327705 - DNA, 15 bp, Homo sapiens
ctcctgggagatatg

SEQ ID NO: 327706 - DNA, 15 bp, Homo sapiens
cctcctgggagatat

SEQ ID NO: 327707 - DNA, 15 bp, Homo sapiens
tcctcctgggagata

SEQ ID NO: 327708 - DNA, 15 bp, Homo sapiens
ttcctcctgggagat

SEQ ID NO: 327709 - DNA, 15 bp, Homo sapiens
tttcctcctgggaga

SEQ ID NO: 327710 - DNA, 15 bp, Homo sapiens
atttcctcctgggag

SEQ ID NO: 327711 - DNA, 15 bp, Homo sapiens
aatttcctcctggga

SEQ ID NO: 327712 - DNA, 15 bp, Homo sapiens
gaatttcctcctggg

SEQ ID NO: 327713 - DNA, 15 bp, Homo sapiens
agaatttcctcctgg

SEQ ID NO: 327714 - DNA, 15 bp, Homo sapiens
aagaatttcctcctg

SEQ ID NO: 327715 - DNA, 15 bp, Homo sapiens
aaagaatttcctcct

SEQ ID NO: 327716 - DNA, 15 bp, Homo sapiens
aaaagaatttcctcc

SEQ ID NO: 327717 - DNA, 15 bp, Homo sapiens
aaaaagaatttcctc

SEQ ID NO: 327718 - DNA, 15 bp, Homo sapiens
aaaaaagaatttcct

SEQ ID NO: 327719 - DNA, 15 bp, Homo sapiens
aaaaaaagaatttcc

SEQ ID NO: 327720 - DNA, 15 bp, Homo sapiens
aaaaaaaagaatttc

SEQ ID NO: 327721 - DNA, 15 bp, Homo sapiens
aaaaaaaaagaattt

SEQ ID NO: 327722 - DNA, 15 bp, Homo sapiens
aaaaaaaaaagaatt

SEQ ID NO: 327723 - DNA, 15 bp, Homo sapiens
aaaaaaaaaaagaat

SEQ ID NO: 327724 - DNA, 15 bp, Homo sapiens
cgagactccatctca

SEQ ID NO: 327725 - DNA, 15 bp, Homo sapiens
gcgagactccatctc

SEQ ID NO: 327726 - DNA, 15 bp, Homo sapiens
agcgagactccatct

SEQ ID NO: 327727 - DNA, 15 bp, Homo sapiens
gagcgagactccatc

SEQ ID NO: 327728 - DNA, 15 bp, Homo sapiens
agagcgagactccat

SEQ ID NO: 327729 - DNA, 15 bp, Homo sapiens
cagagcgagactcca

SEQ ID NO: 327730 - DNA, 15 bp, Homo sapiens
gacagagcgagactc

SEQ ID NO: 327731 - DNA, 15 bp, Homo sapiens
tagcctgggcgacag

SEQ ID NO: 327732 - DNA, 15 bp, Homo sapiens
gtagcctgggcgaca

SEQ ID NO: 327733 - DNA, 15 bp, Homo sapiens
tgtagcctgggcgac

SEQ ID NO: 327734 - DNA, 15 bp, Homo sapiens
ctgtagcctgggcga

SEQ ID NO: 327735 - DNA, 15 bp, Homo sapiens
actgtagcctgggcg

SEQ ID NO: 327736 - DNA, 15 bp, Homo sapiens
cactgtagcctgggc

SEQ ID NO: 327737 - DNA, 15 bp, Homo sapiens
gcactgtagcctggg

SEQ ID NO: 327738 - DNA, 15 bp, Homo sapiens
tgcactgtagcctgg

SEQ ID NO: 327739 - DNA, 15 bp, Homo sapiens
ctgcactgtagcctg

SEQ ID NO: 327740 - DNA, 15 bp, Homo sapiens
actgcactgtagcct

SEQ ID NO: 327741 - DNA, 15 bp, Homo sapiens
cactgcactgtagcc

SEQ ID NO: 327742 - DNA, 15 bp, Homo sapiens
ccactgcactgtagc

SEQ ID NO: 327743 - DNA, 15 bp, Homo sapiens
gccactgcactgtag

SEQ ID NO: 327744 - DNA, 15 bp, Homo sapiens
cgccactgcactgta

SEQ ID NO: 327745 - DNA, 15 bp, Homo sapiens
gcgccactgcactgt

SEQ ID NO: 327746 - DNA, 15 bp, Homo sapiens
cgcgccactgcactg

SEQ ID NO: 327747 - DNA, 15 bp, Homo sapiens
aagatcgcgccactg

SEQ ID NO: 327748 - DNA, 15 bp, Homo sapiens
caagatcgcgccact

SEQ ID NO: 327749 - DNA, 15 bp, Homo sapiens
ccaagatcgcgccac

SEQ ID NO: 327750 - DNA, 15 bp, Homo sapiens
gccaagatcgcgcca

SEQ ID NO: 327751 - DNA, 15 bp, Homo sapiens
agccaagatcgcgcc

SEQ ID NO: 327752 - DNA, 15 bp, Homo sapiens
gagccaagatcgcgc

SEQ ID NO: 327753 - DNA, 15 bp, Homo sapiens
tgagccaagatcgcg

SEQ ID NO: 327754 - DNA, 15 bp, Homo sapiens
cttgcagtgagccaa

SEQ ID NO: 327755 - DNA, 15 bp, Homo sapiens
gcttgcagtgagcca

SEQ ID NO: 327756 - DNA, 15 bp, Homo sapiens
ggagcttgcagtgag

SEQ ID NO: 327757 - DNA, 15 bp, Homo sapiens
cggagcttgcagtga

SEQ ID NO: 327758 - DNA, 15 bp, Homo sapiens
gcggagcttgcagtg

SEQ ID NO: 327759 - DNA, 15 bp, Homo sapiens
ggcggagcttgcagt

SEQ ID NO: 327760 - DNA, 15 bp, Homo sapiens
aggcggagcttgcag

SEQ ID NO: 327761 - DNA, 15 bp, Homo sapiens
gaggcggagcttgca

SEQ ID NO: 327762 - DNA, 15 bp, Homo sapiens
ggaggcggagcttgc

SEQ ID NO: 327763 - DNA, 15 bp, Homo sapiens
gggaggcggagcttg

SEQ ID NO: 327764 - DNA, 15 bp, Homo sapiens
tgggaggcggagctt

SEQ ID NO: 327765 - DNA, 15 bp, Homo sapiens
ctgggaggcggagct

SEQ ID NO: 327766 - DNA, 15 bp, Homo sapiens
cctgggaggcggagc

SEQ ID NO: 327767 - DNA, 15 bp, Homo sapiens
tcctgggaggcggag

SEQ ID NO: 327768 - DNA, 15 bp, Homo sapiens
ctcctgggaggcgga

SEQ ID NO: 327769 - DNA, 15 bp, Homo sapiens
cctcctgggaggcgg

SEQ ID NO: 327770 - DNA, 15 bp, Homo sapiens
tcctcctgggaggcg

SEQ ID NO: 327771 - DNA, 15 bp, Homo sapiens
ttcctcctgggaggc

SEQ ID NO: 327772 - DNA, 15 bp, Homo sapiens
tttcctcctgggagg

SEQ ID NO: 327773 - DNA, 15 bp, Homo sapiens
tagaatttcctcctg

SEQ ID NO: 327774 - DNA, 15 bp, Homo sapiens
ttagaatttcctcct

SEQ ID NO: 327775 - DNA, 15 bp, Homo sapiens
tttagaatttcctcc

SEQ ID NO: 327776 - DNA, 15 bp, Homo sapiens
ctttagaatttcctc

SEQ ID NO: 327777 - DNA, 15 bp, Homo sapiens
gctttagaatttcct

SEQ ID NO: 327778 - DNA, 15 bp, Homo sapiens
cgctttagaatttcc

SEQ ID NO: 327779 - DNA, 15 bp, Homo sapiens
acgctttagaatttc

SEQ ID NO: 327780 - DNA, 15 bp, Homo sapiens
aacgctttagaattt

SEQ ID NO: 327781 - DNA, 15 bp, Homo sapiens
taacgctttagaatt

SEQ ID NO: 327782 - DNA, 15 bp, Homo sapiens
ataacgctttagaat

SEQ ID NO: 327783 - DNA, 15 bp, Homo sapiens
cataacgctttagaa

SEQ ID NO: 327784 - DNA, 15 bp, Homo sapiens
acataacgctttaga

SEQ ID NO: 327785 - DNA, 15 bp, Homo sapiens
aacataacgctttag

SEQ ID NO: 327786 - DNA, 15 bp, Homo sapiens
aaacataacgcttta

SEQ ID NO: 327787 - DNA, 15 bp, Homo sapiens
caaacataacgcttt

SEQ ID NO: 327788 - DNA, 15 bp, Homo sapiens
acaaacataacgctt

SEQ ID NO: 327789 - DNA, 15 bp, Homo sapiens
aacaaacataacgct

SEQ ID NO: 327790 - DNA, 15 bp, Homo sapiens
taacaaacataacgc

SEQ ID NO: 327791 - DNA, 15 bp, Homo sapiens
ctaacaaacataacg

SEQ ID NO: 327792 - DNA, 15 bp, Homo sapiens
gctaacaaacataac

SEQ ID NO: 327793 - DNA, 15 bp, Homo sapiens
tgctaacaaacataa

SEQ ID NO: 327794 - DNA, 15 bp, Homo sapiens
ttgctaacaaacata

SEQ ID NO: 327795 - DNA, 15 bp, Homo sapiens
tttgctaacaaacat

SEQ ID NO: 327796 - DNA, 15 bp, Homo sapiens
ttttgctaacaaaca

SEQ ID NO: 327797 - DNA, 15 bp, Homo sapiens
gttttgctaacaaac

SEQ ID NO: 327798 - DNA, 15 bp, Homo sapiens
tgttttgctaacaaa

SEQ ID NO: 327799 - DNA, 15 bp, Homo sapiens
ctgttttgctaacaa

SEQ ID NO: 327800 - DNA, 15 bp, Homo sapiens
tctgttttgctaaca

SEQ ID NO: 327801 - DNA, 15 bp, Homo sapiens
ttctgttttgctaac

SEQ ID NO: 327802 - DNA, 15 bp, Homo sapiens
cttctgttttgctaa

SEQ ID NO: 327803 - DNA, 15 bp, Homo sapiens
ccttctgttttgcta

SEQ ID NO: 327804 - DNA, 15 bp, Homo sapiens
gccttctgttttgct

SEQ ID NO: 327805 - DNA, 15 bp, Homo sapiens
tgccttctgttttgc

SEQ ID NO: 327806 - DNA, 15 bp, Homo sapiens
ttgccttctgttttg

SEQ ID NO: 327807 - DNA, 15 bp, Homo sapiens
tttgccttctgtttt

SEQ ID NO: 327808 - DNA, 15 bp, Homo sapiens
ctttgccttctgttt

SEQ ID NO: 327809 - DNA, 15 bp, Homo sapiens
tctttgccttctgtt

SEQ ID NO: 327810 - DNA, 15 bp, Homo sapiens
atctttgccttctgt

SEQ ID NO: 327811 - DNA, 15 bp, Homo sapiens
gatctttgccttctg

SEQ ID NO: 327812 - DNA, 15 bp, Homo sapiens
agatctttgccttct

SEQ ID NO: 327813 - DNA, 15 bp, Homo sapiens
gagatctttgccttc

SEQ ID NO: 327814 - DNA, 15 bp, Homo sapiens
agagatctttgcctt

SEQ ID NO: 327815 - DNA, 15 bp, Homo sapiens
gagagatctttgcct

SEQ ID NO: 327816 - DNA, 15 bp, Homo sapiens
ggagagatctttgcc

SEQ ID NO: 327817 - DNA, 15 bp, Homo sapiens
aggagagatctttgc

SEQ ID NO: 327818 - DNA, 15 bp, Homo sapiens
taggagagatctttg

SEQ ID NO: 327819 - DNA, 15 bp, Homo sapiens
ttaggagagatcttt

SEQ ID NO: 327820 - DNA, 15 bp, Homo sapiens
tttaggagagatctt

SEQ ID NO: 327821 - DNA, 15 bp, Homo sapiens
ctttaggagagatct

SEQ ID NO: 327822 - DNA, 15 bp, Homo sapiens
tctttaggagagatc

SEQ ID NO: 327823 - DNA, 15 bp, Homo sapiens
ctctttaggagagat

SEQ ID NO: 327824 - DNA, 15 bp, Homo sapiens
cctctttaggagaga

SEQ ID NO: 327825 - DNA, 15 bp, Homo sapiens
tcctctttaggagag

SEQ ID NO: 327826 - DNA, 15 bp, Homo sapiens
ttcctctttaggaga

SEQ ID NO: 327827 - DNA, 15 bp, Homo sapiens
tttcctctttaggag

SEQ ID NO: 327828 - DNA, 15 bp, Homo sapiens
atttcctctttagga

SEQ ID NO: 327829 - DNA, 15 bp, Homo sapiens
tatttcctctttagg

SEQ ID NO: 327830 - DNA, 15 bp, Homo sapiens
ttatttcctctttag

SEQ ID NO: 327831 - DNA, 15 bp, Homo sapiens
tttatttcctcttta

SEQ ID NO: 327832 - DNA, 15 bp, Homo sapiens
ctttatttcctcttt

SEQ ID NO: 327833 - DNA, 15 bp, Homo sapiens
tctttatttcctctt

SEQ ID NO: 327834 - DNA, 15 bp, Homo sapiens
ttctttatttcctct

SEQ ID NO: 327835 - DNA, 15 bp, Homo sapiens
cttctttatttcctc

SEQ ID NO: 327836 - DNA, 15 bp, Homo sapiens
acttctttatttcct

SEQ ID NO: 327837 - DNA, 15 bp, Homo sapiens
aacttctttatttcc

SEQ ID NO: 327838 - DNA, 15 bp, Homo sapiens
aaacttctttatttc

SEQ ID NO: 327839 - DNA, 15 bp, Homo sapiens
gaaacttctttattt

SEQ ID NO: 327840 - DNA, 15 bp, Homo sapiens
tgaaacttctttatt

SEQ ID NO: 327841 - DNA, 15 bp, Homo sapiens
ttgaaacttctttat

SEQ ID NO: 327842 - DNA, 15 bp, Homo sapiens
gttgaaacttcttta

SEQ ID NO: 327843 - DNA, 15 bp, Homo sapiens
tgttgaaacttcttt

SEQ ID NO: 327844 - DNA, 15 bp, Homo sapiens
atgttgaaacttctt

SEQ ID NO: 327845 - DNA, 15 bp, Homo sapiens
catgttgaaacttct

SEQ ID NO: 327846 - DNA, 15 bp, Homo sapiens
gcatgttgaaacttc

SEQ ID NO: 327847 - DNA, 15 bp, Homo sapiens
agcatgttgaaactt

SEQ ID NO: 327848 - DNA, 15 bp, Homo sapiens
aagcatgttgaaact

SEQ ID NO: 327849 - DNA, 15 bp, Homo sapiens
aaagcatgttgaaac

SEQ ID NO: 327850 - DNA, 15 bp, Homo sapiens
aaaagcatgttgaaa

SEQ ID NO: 327851 - DNA, 15 bp, Homo sapiens
taaaagcatgttgaa

SEQ ID NO: 327852 - DNA, 15 bp, Homo sapiens
ttaaaagcatgttga

SEQ ID NO: 327853 - DNA, 15 bp, Homo sapiens
tttaaaagcatgttg

SEQ ID NO: 327854 - DNA, 15 bp, Homo sapiens
ttttaaaagcatgtt

SEQ ID NO: 327855 - DNA, 15 bp, Homo sapiens
tttttaaaagcatgt

SEQ ID NO: 327856 - DNA, 15 bp, Homo sapiens
gtttttaaaagcatg

SEQ ID NO: 327857 - DNA, 15 bp, Homo sapiens
tgtttttaaaagcat

SEQ ID NO: 327858 - DNA, 15 bp, Homo sapiens
gtgtttttaaaagca

SEQ ID NO: 327859 - DNA, 15 bp, Homo sapiens
ggtgtttttaaaagc

SEQ ID NO: 327860 - DNA, 15 bp, Homo sapiens
tggtgtttttaaaag

SEQ ID NO: 327861 - DNA, 15 bp, Homo sapiens
atggtgtttttaaaa

SEQ ID NO: 327862 - DNA, 15 bp, Homo sapiens
tatggtgtttttaaa

SEQ ID NO: 327863 - DNA, 15 bp, Homo sapiens
ctatggtgtttttaa

SEQ ID NO: 327864 - DNA, 15 bp, Homo sapiens
tctatggtgttttta

SEQ ID NO: 327865 - DNA, 15 bp, Homo sapiens
ttctatggtgttttt

SEQ ID NO: 327866 - DNA, 15 bp, Homo sapiens
tttctatggtgtttt

SEQ ID NO: 327867 - DNA, 15 bp, Homo sapiens
ttttctatggtgttt

SEQ ID NO: 327868 - DNA, 15 bp, Homo sapiens
tttttctatggtgtt

SEQ ID NO: 327869 - DNA, 15 bp, Homo sapiens
ttttttctatggtgt

SEQ ID NO: 327870 - DNA, 15 bp, Homo sapiens
tttttttctatggtg

SEQ ID NO: 327871 - DNA, 15 bp, Homo sapiens
ctttttttctatggt

SEQ ID NO: 327872 - DNA, 15 bp, Homo sapiens
actttttttctatgg

SEQ ID NO: 327873 - DNA, 15 bp, Homo sapiens
tactttttttctatg

SEQ ID NO: 327874 - DNA, 15 bp, Homo sapiens
ttactttttttctat

SEQ ID NO: 327875 - DNA, 15 bp, Homo sapiens
attactttttttcta

SEQ ID NO: 327876 - DNA, 15 bp, Homo sapiens
tattactttttttct

SEQ ID NO: 327877 - DNA, 15 bp, Homo sapiens
gtattactttttttc

SEQ ID NO: 327878 - DNA, 15 bp, Homo sapiens
ggtattacttttttt

SEQ ID NO: 327879 - DNA, 15 bp, Homo sapiens
gggtattactttttt

SEQ ID NO: 327880 - DNA, 15 bp, Homo sapiens
tgggtattacttttt

SEQ ID NO: 327881 - DNA, 15 bp, Homo sapiens
ctgggtattactttt

SEQ ID NO: 327882 - DNA, 15 bp, Homo sapiens
tctgggtattacttt

SEQ ID NO: 327883 - DNA, 15 bp, Homo sapiens
ttctgggtattactt

SEQ ID NO: 327884 - DNA, 15 bp, Homo sapiens
cttctgggtattact

SEQ ID NO: 327885 - DNA, 15 bp, Homo sapiens
tcttctgggtattac

SEQ ID NO: 327886 - DNA, 15 bp, Homo sapiens
ctcttctgggtatta

SEQ ID NO: 327887 - DNA, 15 bp, Homo sapiens
gctcttctgggtatt

SEQ ID NO: 327888 - DNA, 15 bp, Homo sapiens
ggctcttctgggtat

SEQ ID NO: 327889 - DNA, 15 bp, Homo sapiens
aggctcttctgggta

SEQ ID NO: 327890 - DNA, 15 bp, Homo sapiens
taggctcttctgggt

SEQ ID NO: 327891 - DNA, 15 bp, Homo sapiens
ctaggctcttctggg

SEQ ID NO: 327892 - DNA, 15 bp, Homo sapiens
cctaggctcttctgg

SEQ ID NO: 327893 - DNA, 15 bp, Homo sapiens
tcctaggctcttctg

SEQ ID NO: 327894 - DNA, 15 bp, Homo sapiens
ttcctaggctcttct

SEQ ID NO: 327895 - DNA, 15 bp, Homo sapiens
tttcctaggctcttc

SEQ ID NO: 327896 - DNA, 15 bp, Homo sapiens
ctttcctaggctctt

SEQ ID NO: 327897 - DNA, 15 bp, Homo sapiens
cctttcctaggctct

SEQ ID NO: 327898 - DNA, 15 bp, Homo sapiens
tcctttcctaggctc

SEQ ID NO: 327899 - DNA, 15 bp, Homo sapiens
ttcctttcctaggct

SEQ ID NO: 327900 - DNA, 15 bp, Homo sapiens
gttcctttcctaggc

SEQ ID NO: 327901 - DNA, 15 bp, Homo sapiens
tgttcctttcctagg

SEQ ID NO: 327902 - DNA, 15 bp, Homo sapiens
ctgttcctttcctag

SEQ ID NO: 327903 - DNA, 15 bp, Homo sapiens
actgttcctttccta

SEQ ID NO: 327904 - DNA, 15 bp, Homo sapiens
cactgttcctttcct

SEQ ID NO: 327905 - DNA, 15 bp, Homo sapiens
acactgttcctttcc

SEQ ID NO: 327906 - DNA, 15 bp, Homo sapiens
cacactgttcctttc

SEQ ID NO: 327907 - DNA, 15 bp, Homo sapiens
acacactgttccttt

SEQ ID NO: 327908 - DNA, 15 bp, Homo sapiens
cacacactgttcctt

SEQ ID NO: 327909 - DNA, 15 bp, Homo sapiens
gcacacactgttcct

SEQ ID NO: 327910 - DNA, 15 bp, Homo sapiens
ggcacacactgttcc

SEQ ID NO: 327911 - DNA, 15 bp, Homo sapiens
gggcacacactgttc

SEQ ID NO: 327912 - DNA, 15 bp, Homo sapiens
agggcacacactgtt

SEQ ID NO: 327913 - DNA, 15 bp, Homo sapiens
cagggcacacactgt

SEQ ID NO: 327914 - DNA, 15 bp, Homo sapiens
acagggcacacactg

SEQ ID NO: 327915 - DNA, 15 bp, Homo sapiens
cacagggcacacact

SEQ ID NO: 327916 - DNA, 15 bp, Homo sapiens
tcacagggcacacac

SEQ ID NO: 327917 - DNA, 15 bp, Homo sapiens
ttcacagggcacaca

SEQ ID NO: 327918 - DNA, 15 bp, Homo sapiens
cttcacagggcacac

SEQ ID NO: 327919 - DNA, 15 bp, Homo sapiens
acttcacagggcaca

SEQ ID NO: 327920 - DNA, 15 bp, Homo sapiens
cacttcacagggcac

SEQ ID NO: 327921 - DNA, 15 bp, Homo sapiens
ccacttcacagggca

SEQ ID NO: 327922 - DNA, 15 bp, Homo sapiens
cccacttcacagggc

SEQ ID NO: 327923 - DNA, 15 bp, Homo sapiens
tcccacttcacaggg

SEQ ID NO: 327924 - DNA, 15 bp, Homo sapiens
ttcccacttcacagg

SEQ ID NO: 327925 - DNA, 15 bp, Homo sapiens
tttcccacttcacag

SEQ ID NO: 327926 - DNA, 15 bp, Homo sapiens
ctttcccacttcaca

SEQ ID NO: 327927 - DNA, 15 bp, Homo sapiens
cctttcccacttcac

SEQ ID NO: 327928 - DNA, 15 bp, Homo sapiens
ccctttcccacttca

SEQ ID NO: 327929 - DNA, 15 bp, Homo sapiens
tccctttcccacttc

SEQ ID NO: 327930 - DNA, 15 bp, Homo sapiens
gtccctttcccactt

SEQ ID NO: 327931 - DNA, 15 bp, Homo sapiens
agtccctttcccact

SEQ ID NO: 327932 - DNA, 15 bp, Homo sapiens
gagtccctttcccac

SEQ ID NO: 327933 - DNA, 15 bp, Homo sapiens
tgagtccctttccca

SEQ ID NO: 327934 - DNA, 15 bp, Homo sapiens
gtgagtccctttccc

SEQ ID NO: 327935 - DNA, 15 bp, Homo sapiens
ggtgagtccctttcc

SEQ ID NO: 327936 - DNA, 15 bp, Homo sapiens
gggtgagtccctttc

SEQ ID NO: 327937 - DNA, 15 bp, Homo sapiens
cgggtgagtcccttt

SEQ ID NO: 327938 - DNA, 15 bp, Homo sapiens
acgggtgagtccctt

SEQ ID NO: 327939 - DNA, 15 bp, Homo sapiens
aacgggtgagtccct

SEQ ID NO: 327940 - DNA, 15 bp, Homo sapiens
caacgggtgagtccc

SEQ ID NO: 327941 - DNA, 15 bp, Homo sapiens
tcaacgggtgagtcc

SEQ ID NO: 327942 - DNA, 15 bp, Homo sapiens
ttcaacgggtgagtc

SEQ ID NO: 327943 - DNA, 15 bp, Homo sapiens
tttcaacgggtgagt

SEQ ID NO: 327944 - DNA, 15 bp, Homo sapiens
ttttcaacgggtgag

SEQ ID NO: 327945 - DNA, 15 bp, Homo sapiens
tttttcaacgggtga

SEQ ID NO: 327946 - DNA, 15 bp, Homo sapiens
ctttttcaacgggtg

SEQ ID NO: 327947 - DNA, 15 bp, Homo sapiens
tctttttcaacgggt

SEQ ID NO: 327948 - DNA, 15 bp, Homo sapiens
atctttttcaacggg

SEQ ID NO: 327949 - DNA, 15 bp, Homo sapiens
gatctttttcaacgg

SEQ ID NO: 327950 - DNA, 15 bp, Homo sapiens
agatctttttcaacg

SEQ ID NO: 327951 - DNA, 15 bp, Homo sapiens
cagatctttttcaac

SEQ ID NO: 327952 - DNA, 15 bp, Homo sapiens
ccagatctttttcaa

SEQ ID NO: 327953 - DNA, 15 bp, Homo sapiens
cccagatctttttca

SEQ ID NO: 327954 - DNA, 15 bp, Homo sapiens
gcccagatctttttc

SEQ ID NO: 327955 - DNA, 15 bp, Homo sapiens
ggcccagatcttttt

SEQ ID NO: 327956 - DNA, 15 bp, Homo sapiens
tggcccagatctttt

SEQ ID NO: 327957 - DNA, 15 bp, Homo sapiens
ttggcccagatcttt

SEQ ID NO: 327958 - DNA, 15 bp, Homo sapiens
attggcccagatctt

SEQ ID NO: 327959 - DNA, 15 bp, Homo sapiens
aattggcccagatct

SEQ ID NO: 327960 - DNA, 15 bp, Homo sapiens
aaattggcccagatc

SEQ ID NO: 327961 - DNA, 15 bp, Homo sapiens
caaattggcccagat

SEQ ID NO: 327962 - DNA, 15 bp, Homo sapiens
tcaaattggcccaga

SEQ ID NO: 327963 - DNA, 15 bp, Homo sapiens
ttcaaattggcccag

SEQ ID NO: 327964 - DNA, 15 bp, Homo sapiens
cttcaaattggccca

SEQ ID NO: 327965 - DNA, 15 bp, Homo sapiens
tcttcaaattggccc

SEQ ID NO: 327966 - DNA, 15 bp, Homo sapiens
ctcttcaaattggcc

SEQ ID NO: 327967 - DNA, 15 bp, Homo sapiens
gctcttcaaattggc

SEQ ID NO: 327968 - DNA, 15 bp, Homo sapiens
agctcttcaaattgg

SEQ ID NO: 327969 - DNA, 15 bp, Homo sapiens
gagctcttcaaattg

SEQ ID NO: 327970 - DNA, 15 bp, Homo sapiens
tgagctcttcaaatt

SEQ ID NO: 327971 - DNA, 15 bp, Homo sapiens
atgagctcttcaaat

SEQ ID NO: 327972 - DNA, 15 bp, Homo sapiens
catgagctcttcaaa

SEQ ID NO: 327973 - DNA, 15 bp, Homo sapiens
ccatgagctcttcaa

SEQ ID NO: 327974 - DNA, 15 bp, Homo sapiens
gccatgagctcttca

SEQ ID NO: 327975 - DNA, 15 bp, Homo sapiens
ggccatgagctcttc

SEQ ID NO: 327976 - DNA, 15 bp, Homo sapiens
gggccatgagctctt

SEQ ID NO: 327977 - DNA, 15 bp, Homo sapiens
tgggccatgagctct

SEQ ID NO: 327978 - DNA, 15 bp, Homo sapiens
atgggccatgagctc

SEQ ID NO: 327979 - DNA, 15 bp, Homo sapiens
aatgggccatgagct

SEQ ID NO: 327980 - DNA, 15 bp, Homo sapiens
aaatgggccatgagc

SEQ ID NO: 327981 - DNA, 15 bp, Homo sapiens
gaaatgggccatgag

SEQ ID NO: 327982 - DNA, 15 bp, Homo sapiens
tgaaatgggccatga

SEQ ID NO: 327983 - DNA, 15 bp, Homo sapiens
ttgaaatgggccatg

SEQ ID NO: 327984 - DNA, 15 bp, Homo sapiens
gttgaaatgggccat

SEQ ID NO: 327985 - DNA, 15 bp, Homo sapiens
tgttgaaatgggcca

SEQ ID NO: 327986 - DNA, 15 bp, Homo sapiens
gtgttgaaatgggcc

SEQ ID NO: 327987 - DNA, 15 bp, Homo sapiens
agtgttgaaatgggc

SEQ ID NO: 327988 - DNA, 15 bp, Homo sapiens
cagtgttgaaatggg

SEQ ID NO: 327989 - DNA, 15 bp, Homo sapiens
ccagtgttgaaatgg

SEQ ID NO: 327990 - DNA, 15 bp, Homo sapiens
tccagtgttgaaatg

SEQ ID NO: 327991 - DNA, 15 bp, Homo sapiens
gtccagtgttgaaat

SEQ ID NO: 327992 - DNA, 15 bp, Homo sapiens
cgtccagtgttgaaa

SEQ ID NO: 327993 - DNA, 15 bp, Homo sapiens
ccgtccagtgttgaa

SEQ ID NO: 327994 - DNA, 15 bp, Homo sapiens
gccgtccagtgttga

SEQ ID NO: 327995 - DNA, 15 bp, Homo sapiens
ggccgtccagtgttg

SEQ ID NO: 327996 - DNA, 15 bp, Homo sapiens
gggccgtccagtgtt

SEQ ID NO: 327997 - DNA, 15 bp, Homo sapiens
cgggccgtccagtgt

SEQ ID NO: 327998 - DNA, 15 bp, Homo sapiens
acgggccgtccagtg

SEQ ID NO: 327999 - DNA, 15 bp, Homo sapiens
cacgggccgtccagt

SEQ ID NO: 328000 - DNA, 15 bp, Homo sapiens
ccacgggccgtccag

SEQ ID NO: 328001 - DNA, 15 bp, Homo sapiens
gccacgggccgtcca

SEQ ID NO: 328002 - DNA, 15 bp, Homo sapiens
cgccacgggccgtcc

SEQ ID NO: 328003 - DNA, 15 bp, Homo sapiens
tcgccacgggccgtc

SEQ ID NO: 328004 - DNA, 15 bp, Homo sapiens
ttcgccacgggccgt

SEQ ID NO: 328005 - DNA, 15 bp, Homo sapiens
gttcgccacgggccg

SEQ ID NO: 328006 - DNA, 15 bp, Homo sapiens
ggttcgccacgggcc

SEQ ID NO: 328007 - DNA, 15 bp, Homo sapiens
aggttcgccacgggc

SEQ ID NO: 328008 - DNA, 15 bp, Homo sapiens
gaggttcgccacggg

SEQ ID NO: 328009 - DNA, 15 bp, Homo sapiens
ggaggttcgccacgg

SEQ ID NO: 328010 - DNA, 15 bp, Homo sapiens
tggaggttcgccacg

SEQ ID NO: 328011 - DNA, 15 bp, Homo sapiens
gtggaggttcgccac

SEQ ID NO: 328012 - DNA, 15 bp, Homo sapiens
ggtggaggttcgcca

SEQ ID NO: 328013 - DNA, 15 bp, Homo sapiens
tggtggaggttcgcc

SEQ ID NO: 328014 - DNA, 15 bp, Homo sapiens
gtggtggaggttcgc

SEQ ID NO: 328015 - DNA, 15 bp, Homo sapiens
cgtggtggaggttcg

SEQ ID NO: 328016 - DNA, 15 bp, Homo sapiens
acgtggtggaggttc

SEQ ID NO: 328017 - DNA, 15 bp, Homo sapiens
tacgtggtggaggtt

SEQ ID NO: 328018 - DNA, 15 bp, Homo sapiens
ctacgtggtggaggt

SEQ ID NO: 328019 - DNA, 15 bp, Homo sapiens
tctacgtggtggagg

SEQ ID NO: 328020 - DNA, 15 bp, Homo sapiens
ctctacgtggtggag

SEQ ID NO: 328021 - DNA, 15 bp, Homo sapiens
tctctacgtggtgga

SEQ ID NO: 328022 - DNA, 15 bp, Homo sapiens
gtctctacgtggtgg

SEQ ID NO: 328023 - DNA, 15 bp, Homo sapiens
agtctctacgtggtg

SEQ ID NO: 328024 - DNA, 15 bp, Homo sapiens
gagtctctacgtggt

SEQ ID NO: 328025 - DNA, 15 bp, Homo sapiens
ggagtctctacgtgg

SEQ ID NO: 328026 - DNA, 15 bp, Homo sapiens
aggagtctctacgtg

SEQ ID NO: 328027 - DNA, 15 bp, Homo sapiens
gaggagtctctacgt

SEQ ID NO: 328028 - DNA, 15 bp, Homo sapiens
agaggagtctctacg

SEQ ID NO: 328029 - DNA, 15 bp, Homo sapiens
cagaggagtctctac

SEQ ID NO: 328030 - DNA, 15 bp, Homo sapiens
acagaggagtctcta

SEQ ID NO: 328031 - DNA, 15 bp, Homo sapiens
tacagaggagtctct

SEQ ID NO: 328032 - DNA, 15 bp, Homo sapiens
ctacagaggagtctc

SEQ ID NO: 328033 - DNA, 15 bp, Homo sapiens
tctacagaggagtct

SEQ ID NO: 328034 - DNA, 15 bp, Homo sapiens
atctacagaggagtc

SEQ ID NO: 328035 - DNA, 15 bp, Homo sapiens
catctacagaggagt

SEQ ID NO: 328036 - DNA, 15 bp, Homo sapiens
ccatctacagaggag

SEQ ID NO: 328037 - DNA, 15 bp, Homo sapiens
cccatctacagagga

SEQ ID NO: 328038 - DNA, 15 bp, Homo sapiens
acccatctacagagg

SEQ ID NO: 328039 - DNA, 15 bp, Homo sapiens
cacccatctacagag

SEQ ID NO: 328040 - DNA, 15 bp, Homo sapiens
ccacccatctacaga

SEQ ID NO: 328041 - DNA, 15 bp, Homo sapiens
gccacccatctacag

SEQ ID NO: 328042 - DNA, 15 bp, Homo sapiens
agccacccatctaca

SEQ ID NO: 328043 - DNA, 15 bp, Homo sapiens
cagccacccatctac

SEQ ID NO: 328044 - DNA, 15 bp, Homo sapiens
tcagccacccatcta

SEQ ID NO: 328045 - DNA, 15 bp, Homo sapiens
gtcagccacccatct

SEQ ID NO: 328046 - DNA, 15 bp, Homo sapiens
agtcagccacccatc

SEQ ID NO: 328047 - DNA, 15 bp, Homo sapiens
aagtcagccacccat

SEQ ID NO: 328048 - DNA, 15 bp, Homo sapiens
aaagtcagccaccca

SEQ ID NO: 328049 - DNA, 15 bp, Homo sapiens
aaaagtcagccaccc

SEQ ID NO: 328050 - DNA, 15 bp, Homo sapiens
caaaagtcagccacc

SEQ ID NO: 328051 - DNA, 15 bp, Homo sapiens
gcaaaagtcagccac

SEQ ID NO: 328052 - DNA, 15 bp, Homo sapiens
ggcaaaagtcagcca

SEQ ID NO: 328053 - DNA, 15 bp, Homo sapiens
tggcaaaagtcagcc

SEQ ID NO: 328054 - DNA, 15 bp, Homo sapiens
ctggcaaaagtcagc

SEQ ID NO: 328055 - DNA, 15 bp, Homo sapiens
actggcaaaagtcag

SEQ ID NO: 328056 - DNA, 15 bp, Homo sapiens
gactggcaaaagtca

SEQ ID NO: 328057 - DNA, 15 bp, Homo sapiens
agactggcaaaagtc

SEQ ID NO: 328058 - DNA, 15 bp, Homo sapiens
gagactggcaaaagt

SEQ ID NO: 328059 - DNA, 15 bp, Homo sapiens
ggagactggcaaaag

SEQ ID NO: 328060 - DNA, 15 bp, Homo sapiens
aggagactggcaaaa

SEQ ID NO: 328061 - DNA, 15 bp, Homo sapiens
caggagactggcaaa

SEQ ID NO: 328062 - DNA, 15 bp, Homo sapiens
acaggagactggcaa

SEQ ID NO: 328063 - DNA, 15 bp, Homo sapiens
cacaggagactggca

SEQ ID NO: 328064 - DNA, 15 bp, Homo sapiens
tcacaggagactggc

SEQ ID NO: 328065 - DNA, 15 bp, Homo sapiens
ctcacaggagactgg

SEQ ID NO: 328066 - DNA, 15 bp, Homo sapiens
tctcacaggagactg

SEQ ID NO: 328067 - DNA, 15 bp, Homo sapiens
ttctcacaggagact

SEQ ID NO: 328068 - DNA, 15 bp, Homo sapiens
cttctcacaggagac

SEQ ID NO: 328069 - DNA, 15 bp, Homo sapiens
tcttctcacaggaga

SEQ ID NO: 328070 - DNA, 15 bp, Homo sapiens
ctcttctcacaggag

SEQ ID NO: 328071 - DNA, 15 bp, Homo sapiens
tctcttctcacagga

SEQ ID NO: 328072 - DNA, 15 bp, Homo sapiens
ttctcttctcacagg

SEQ ID NO: 328073 - DNA, 15 bp, Homo sapiens
tttctcttctcacag

SEQ ID NO: 328074 - DNA, 15 bp, Homo sapiens
ttttctcttctcaca

SEQ ID NO: 328075 - DNA, 15 bp, Homo sapiens
tttttctcttctcac

SEQ ID NO: 328076 - DNA, 15 bp, Homo sapiens
atttttctcttctca

SEQ ID NO: 328077 - DNA, 15 bp, Homo sapiens
gatttttctcttctc

SEQ ID NO: 328078 - DNA, 15 bp, Homo sapiens
agatttttctcttct

SEQ ID NO: 328079 - DNA, 15 bp, Homo sapiens
aagatttttctcttc

SEQ ID NO: 328080 - DNA, 15 bp, Homo sapiens
caagatttttctctt

SEQ ID NO: 328081 - DNA, 15 bp, Homo sapiens
acaagatttttctct

SEQ ID NO: 328082 - DNA, 15 bp, Homo sapiens
aacaagatttttctc

SEQ ID NO: 328083 - DNA, 15 bp, Homo sapiens
gaacaagatttttct

SEQ ID NO: 328084 - DNA, 15 bp, Homo sapiens
ggaacaagatttttc

SEQ ID NO: 328085 - DNA, 15 bp, Homo sapiens
tggaacaagattttt

SEQ ID NO: 328086 - DNA, 15 bp, Homo sapiens
ctggaacaagatttt

SEQ ID NO: 328087 - DNA, 15 bp, Homo sapiens
tctggaacaagattt

SEQ ID NO: 328088 - DNA, 15 bp, Homo sapiens
ttctggaacaagatt

SEQ ID NO: 328089 - DNA, 15 bp, Homo sapiens
tttctggaacaagat

SEQ ID NO: 328090 - DNA, 15 bp, Homo sapiens
ttttctggaacaaga

SEQ ID NO: 328091 - DNA, 15 bp, Homo sapiens
cttttctggaacaag

SEQ ID NO: 328092 - DNA, 15 bp, Homo sapiens
tcttttctggaacaa

SEQ ID NO: 328093 - DNA, 15 bp, Homo sapiens
ttcttttctggaaca

SEQ ID NO: 328094 - DNA, 15 bp, Homo sapiens
gttcttttctggaac

SEQ ID NO: 328095 - DNA, 15 bp, Homo sapiens
ggttcttttctggaa

SEQ ID NO: 328096 - DNA, 15 bp, Homo sapiens
tggttcttttctgga

SEQ ID NO: 328097 - DNA, 15 bp, Homo sapiens
gtggttcttttctgg

SEQ ID NO: 328098 - DNA, 15 bp, Homo sapiens
agtggttcttttctg

SEQ ID NO: 328099 - DNA, 15 bp, Homo sapiens
cagtggttcttttct

SEQ ID NO: 328100 - DNA, 15 bp, Homo sapiens
acagtggttcttttc

SEQ ID NO: 328101 - DNA, 15 bp, Homo sapiens
gacagtggttctttt

SEQ ID NO: 328102 - DNA, 15 bp, Homo sapiens
tgacagtggttcttt

SEQ ID NO: 328103 - DNA, 15 bp, Homo sapiens
ttgacagtggttctt

SEQ ID NO: 328104 - DNA, 15 bp, Homo sapiens
gttgacagtggttct

SEQ ID NO: 328105 - DNA, 15 bp, Homo sapiens
agttgacagtggttc

SEQ ID NO: 328106 - DNA, 15 bp, Homo sapiens
cagttgacagtggtt

SEQ ID NO: 328107 - DNA, 15 bp, Homo sapiens
acagttgacagtggt

SEQ ID NO: 328108 - DNA, 15 bp, Homo sapiens
cacagttgacagtgg

SEQ ID NO: 328109 - DNA, 15 bp, Homo sapiens
ccacagttgacagtg

SEQ ID NO: 328110 - DNA, 15 bp, Homo sapiens
tccacagttgacagt

SEQ ID NO: 328111 - DNA, 15 bp, Homo sapiens
atccacagttgacag

SEQ ID NO: 328112 - DNA, 15 bp, Homo sapiens
catccacagttgaca

SEQ ID NO: 328113 - DNA, 15 bp, Homo sapiens
gcatccacagttgac

SEQ ID NO: 328114 - DNA, 15 bp, Homo sapiens
tgcatccacagttga

SEQ ID NO: 328115 - DNA, 15 bp, Homo sapiens
atgcatccacagttg

SEQ ID NO: 328116 - DNA, 15 bp, Homo sapiens
tatgcatccacagtt

SEQ ID NO: 328117 - DNA, 15 bp, Homo sapiens
atatgcatccacagt

SEQ ID NO: 328118 - DNA, 15 bp, Homo sapiens
aatatgcatccacag

SEQ ID NO: 328119 - DNA, 15 bp, Homo sapiens
aaatatgcatccaca

SEQ ID NO: 328120 - DNA, 15 bp, Homo sapiens
aaaatatgcatccac

SEQ ID NO: 328121 - DNA, 15 bp, Homo sapiens
gaaaatatgcatcca

SEQ ID NO: 328122 - DNA, 15 bp, Homo sapiens
tgaaaatatgcatcc

SEQ ID NO: 328123 - DNA, 15 bp, Homo sapiens
ctgaaaatatgcatc

SEQ ID NO: 328124 - DNA, 15 bp, Homo sapiens
cctgaaaatatgcat

SEQ ID NO: 328125 - DNA, 15 bp, Homo sapiens
ccctgaaaatatgca

SEQ ID NO: 328126 - DNA, 15 bp, Homo sapiens
cccctgaaaatatgc

SEQ ID NO: 328127 - DNA, 15 bp, Homo sapiens
ccccctgaaaatatg

SEQ ID NO: 328128 - DNA, 15 bp, Homo sapiens
tccccctgaaaatat

SEQ ID NO: 328129 - DNA, 15 bp, Homo sapiens
ctccccctgaaaata

SEQ ID NO: 328130 - DNA, 15 bp, Homo sapiens
cctccccctgaaaat

SEQ ID NO: 328131 - DNA, 15 bp, Homo sapiens
tcctccccctgaaaa

SEQ ID NO: 328132 - DNA, 15 bp, Homo sapiens
ttcctccccctgaaa

SEQ ID NO: 328133 - DNA, 15 bp, Homo sapiens
tttcctccccctgaa

SEQ ID NO: 328134 - DNA, 15 bp, Homo sapiens
atttcctccccctga

SEQ ID NO: 328135 - DNA, 15 bp, Homo sapiens
catttcctccccctg

SEQ ID NO: 328136 - DNA, 15 bp, Homo sapiens
ccatttcctccccct

SEQ ID NO: 328137 - DNA, 15 bp, Homo sapiens
tccatttcctccccc

SEQ ID NO: 328138 - DNA, 15 bp, Homo sapiens
ttccatttcctcccc

SEQ ID NO: 328139 - DNA, 15 bp, Homo sapiens
gttccatttcctccc

SEQ ID NO: 328140 - DNA, 15 bp, Homo sapiens
cgttccatttcctcc

SEQ ID NO: 328141 - DNA, 15 bp, Homo sapiens
tcgttccatttcctc

SEQ ID NO: 328142 - DNA, 15 bp, Homo sapiens
ctcgttccatttcct

SEQ ID NO: 328143 - DNA, 15 bp, Homo sapiens
tctcgttccatttcc

SEQ ID NO: 328144 - DNA, 15 bp, Homo sapiens
ctctcgttccatttc

SEQ ID NO: 328145 - DNA, 15 bp, Homo sapiens
cctctcgttccattt

SEQ ID NO: 328146 - DNA, 15 bp, Homo sapiens
ccctctcgttccatt

SEQ ID NO: 328147 - DNA, 15 bp, Homo sapiens
cccctctcgttccat

SEQ ID NO: 328148 - DNA, 15 bp, Homo sapiens
ccccctctcgttcca

SEQ ID NO: 328149 - DNA, 15 bp, Homo sapiens
tccccctctcgttcc

SEQ ID NO: 328150 - DNA, 15 bp, Homo sapiens
ctccccctctcgttc

SEQ ID NO: 328151 - DNA, 15 bp, Homo sapiens
gctccccctctcgtt

SEQ ID NO: 328152 - DNA, 15 bp, Homo sapiens
tgctccccctctcgt

SEQ ID NO: 328153 - DNA, 15 bp, Homo sapiens
gtgctccccctctcg

SEQ ID NO: 328154 - DNA, 15 bp, Homo sapiens
ggtgctccccctctc

SEQ ID NO: 328155 - DNA, 15 bp, Homo sapiens
gggtgctccccctct

SEQ ID NO: 328156 - DNA, 15 bp, Homo sapiens
agggtgctccccctc

SEQ ID NO: 328157 - DNA, 15 bp, Homo sapiens
gagggtgctccccct

SEQ ID NO: 328158 - DNA, 15 bp, Homo sapiens
tgagggtgctccccc

SEQ ID NO: 328159 - DNA, 15 bp, Homo sapiens
ctgagggtgctcccc

SEQ ID NO: 328160 - DNA, 15 bp, Homo sapiens
actgagggtgctccc

SEQ ID NO: 328161 - DNA, 15 bp, Homo sapiens
aactgagggtgctcc

SEQ ID NO: 328162 - DNA, 15 bp, Homo sapiens
aaactgagggtgctc

SEQ ID NO: 328163 - DNA, 15 bp, Homo sapiens
taaactgagggtgct

SEQ ID NO: 328164 - DNA, 15 bp, Homo sapiens
gtaaactgagggtgc

SEQ ID NO: 328165 - DNA, 15 bp, Homo sapiens
tgtaaactgagggtg

SEQ ID NO: 328166 - DNA, 15 bp, Homo sapiens
ctgtaaactgagggt

SEQ ID NO: 328167 - DNA, 15 bp, Homo sapiens
tctgtaaactgaggg

SEQ ID NO: 328168 - DNA, 15 bp, Homo sapiens
ctctgtaaactgagg

SEQ ID NO: 328169 - DNA, 15 bp, Homo sapiens
gctctgtaaactgag

SEQ ID NO: 328170 - DNA, 15 bp, Homo sapiens
cgctctgtaaactga

SEQ ID NO: 328171 - DNA, 15 bp, Homo sapiens
ccgctctgtaaactg

SEQ ID NO: 328172 - DNA, 15 bp, Homo sapiens
cccgctctgtaaact

SEQ ID NO: 328173 - DNA, 15 bp, Homo sapiens
ccccgctctgtaaac

SEQ ID NO: 328174 - DNA, 15 bp, Homo sapiens
cccccgctctgtaaa

SEQ ID NO: 328175 - DNA, 15 bp, Homo sapiens
ccccccgctctgtaa

SEQ ID NO: 328176 - DNA, 15 bp, Homo sapiens
accccccgctctgta

SEQ ID NO: 328177 - DNA, 15 bp, Homo sapiens
taccccccgctctgt

SEQ ID NO: 328178 - DNA, 15 bp, Homo sapiens
ttaccccccgctctg

SEQ ID NO: 328179 - DNA, 15 bp, Homo sapiens
gttaccccccgctct

SEQ ID NO: 328180 - DNA, 15 bp, Homo sapiens
ggttaccccccgctc

SEQ ID NO: 328181 - DNA, 15 bp, Homo sapiens
tggttaccccccgct

SEQ ID NO: 328182 - DNA, 15 bp, Homo sapiens
ctggttaccccccgc

SEQ ID NO: 328183 - DNA, 15 bp, Homo sapiens
cctggttaccccccg

SEQ ID NO: 328184 - DNA, 15 bp, Homo sapiens
gcctggttacccccc

SEQ ID NO: 328185 - DNA, 15 bp, Homo sapiens
tgcctggttaccccc

SEQ ID NO: 328186 - DNA, 15 bp, Homo sapiens
ctgcctggttacccc

SEQ ID NO: 328187 - DNA, 15 bp, Homo sapiens
tctgcctggttaccc

SEQ ID NO: 328188 - DNA, 15 bp, Homo sapiens
gtctgcctggttacc

SEQ ID NO: 328189 - DNA, 15 bp, Homo sapiens
tgtctgcctggttac

SEQ ID NO: 328190 - DNA, 15 bp, Homo sapiens
ttgtctgcctggtta

SEQ ID NO: 328191 - DNA, 15 bp, Homo sapiens
cttgtctgcctggtt

SEQ ID NO: 328192 - DNA, 15 bp, Homo sapiens
ccttgtctgcctggt

SEQ ID NO: 328193 - DNA, 15 bp, Homo sapiens
gccttgtctgcctgg

SEQ ID NO: 328194 - DNA, 15 bp, Homo sapiens
ggccttgtctgcctg

SEQ ID NO: 328195 - DNA, 15 bp, Homo sapiens
cggccttgtctgcct

SEQ ID NO: 328196 - DNA, 15 bp, Homo sapiens
ccggccttgtctgcc

SEQ ID NO: 328197 - DNA, 15 bp, Homo sapiens
cccggccttgtctgc

SEQ ID NO: 328198 - DNA, 15 bp, Homo sapiens
ccccggccttgtctg

SEQ ID NO: 328199 - DNA, 15 bp, Homo sapiens
gccccggccttgtct

SEQ ID NO: 328200 - DNA, 15 bp, Homo sapiens
ggccccggccttgtc

SEQ ID NO: 328201 - DNA, 15 bp, Homo sapiens
tggccccggccttgt

SEQ ID NO: 328202 - DNA, 15 bp, Homo sapiens
gtggccccggccttg

SEQ ID NO: 328203 - DNA, 15 bp, Homo sapiens
cgtggccccggcctt

SEQ ID NO: 328204 - DNA, 15 bp, Homo sapiens
ccgtggccccggcct

SEQ ID NO: 328205 - DNA, 15 bp, Homo sapiens
gccgtggccccggcc

SEQ ID NO: 328206 - DNA, 15 bp, Homo sapiens
cgccgtggccccggc

SEQ ID NO: 328207 - DNA, 15 bp, Homo sapiens
tcgccgtggccccgg

SEQ ID NO: 328208 - DNA, 15 bp, Homo sapiens
ttcgccgtggccccg

SEQ ID NO: 328209 - DNA, 15 bp, Homo sapiens
cttcgccgtggcccc

SEQ ID NO: 328210 - DNA, 15 bp, Homo sapiens
acttcgccgtggccc

SEQ ID NO: 328211 - DNA, 15 bp, Homo sapiens
gtgagccaccacgcc

SEQ ID NO: 328212 - DNA, 15 bp, Homo sapiens
cgtgagccaccacgc

SEQ ID NO: 328213 - DNA, 15 bp, Homo sapiens
gcgtgagccaccacg

SEQ ID NO: 328214 - DNA, 15 bp, Homo sapiens
ggcgtgagccaccac

SEQ ID NO: 328215 - DNA, 15 bp, Homo sapiens
cgctgggattacagg

SEQ ID NO: 328216 - DNA, 15 bp, Homo sapiens
gcgctgggattacag

SEQ ID NO: 328217 - DNA, 15 bp, Homo sapiens
agcgctgggattaca

SEQ ID NO: 328218 - DNA, 15 bp, Homo sapiens
aagcgctgggattac

SEQ ID NO: 328219 - DNA, 15 bp, Homo sapiens
aaagcgctgggatta

SEQ ID NO: 328220 - DNA, 15 bp, Homo sapiens
caaagcgctgggatt

SEQ ID NO: 328221 - DNA, 15 bp, Homo sapiens
ccaaagcgctgggat

SEQ ID NO: 328222 - DNA, 15 bp, Homo sapiens
cccaaagcgctggga

SEQ ID NO: 328223 - DNA, 15 bp, Homo sapiens
acccaaagcgctggg

SEQ ID NO: 328224 - DNA, 15 bp, Homo sapiens
cacccaaagcgctgg

SEQ ID NO: 328225 - DNA, 15 bp, Homo sapiens
ccacccaaagcgctg

SEQ ID NO: 328226 - DNA, 15 bp, Homo sapiens
accacccaaagcgct

SEQ ID NO: 328227 - DNA, 15 bp, Homo sapiens
gaccacccaaagcgc

SEQ ID NO: 328228 - DNA, 15 bp, Homo sapiens
cgaccacccaaagcg

SEQ ID NO: 328229 - DNA, 15 bp, Homo sapiens
tcgaccacccaaagc

SEQ ID NO: 328230 - DNA, 15 bp, Homo sapiens
ctcgaccacccaaag

SEQ ID NO: 328231 - DNA, 15 bp, Homo sapiens
cctcgaccacccaaa

SEQ ID NO: 328232 - DNA, 15 bp, Homo sapiens
gcctcgaccacccaa

SEQ ID NO: 328233 - DNA, 15 bp, Homo sapiens
tgcctcgaccaccca

SEQ ID NO: 328234 - DNA, 15 bp, Homo sapiens
ctgcctcgaccaccc

SEQ ID NO: 328235 - DNA, 15 bp, Homo sapiens
cctgcctcgaccacc

SEQ ID NO: 328236 - DNA, 15 bp, Homo sapiens
acctgcctcgaccac

SEQ ID NO: 328237 - DNA, 15 bp, Homo sapiens
tacctgcctcgacca

SEQ ID NO: 328238 - DNA, 15 bp, Homo sapiens
ctacctgcctcgacc

SEQ ID NO: 328239 - DNA, 15 bp, Homo sapiens
cctacctgcctcgac

SEQ ID NO: 328240 - DNA, 15 bp, Homo sapiens
acctacctgcctcga

SEQ ID NO: 328241 - DNA, 15 bp, Homo sapiens
gacctacctgcctcg

SEQ ID NO: 328242 - DNA, 15 bp, Homo sapiens
cgacctacctgcctc

SEQ ID NO: 328243 - DNA, 15 bp, Homo sapiens
gcgacctacctgcct

SEQ ID NO: 328244 - DNA, 15 bp, Homo sapiens
agcgacctacctgcc

SEQ ID NO: 328245 - DNA, 15 bp, Homo sapiens
aagcgacctacctgc

SEQ ID NO: 328246 - DNA, 15 bp, Homo sapiens
caagcgacctacctg

SEQ ID NO: 328247 - DNA, 15 bp, Homo sapiens
tcaagcgacctacct

SEQ ID NO: 328248 - DNA, 15 bp, Homo sapiens
ctcaagcgacctacc

SEQ ID NO: 328249 - DNA, 15 bp, Homo sapiens
cctcaagcgacctac

SEQ ID NO: 328250 - DNA, 15 bp, Homo sapiens
gcctcaagcgaccta

SEQ ID NO: 328251 - DNA, 15 bp, Homo sapiens
ggcctcaagcgacct

SEQ ID NO: 328252 - DNA, 15 bp, Homo sapiens
tggcctcaagcgacc

SEQ ID NO: 328253 - DNA, 15 bp, Homo sapiens
ctggcctcaagcgac

SEQ ID NO: 328254 - DNA, 15 bp, Homo sapiens
cctggcctcaagcga

SEQ ID NO: 328255 - DNA, 15 bp, Homo sapiens
tcctggcctcaagcg

SEQ ID NO: 328256 - DNA, 15 bp, Homo sapiens
ctcctggcctcaagc

SEQ ID NO: 328257 - DNA, 15 bp, Homo sapiens
tctcctggcctcaag

SEQ ID NO: 328258 - DNA, 15 bp, Homo sapiens
atctcctggcctcaa

SEQ ID NO: 328259 - DNA, 15 bp, Homo sapiens
gatctcctggcctca

SEQ ID NO: 328260 - DNA, 15 bp, Homo sapiens
cgatctcctggcctc

SEQ ID NO: 328261 - DNA, 15 bp, Homo sapiens
tcgatctcctggcct

SEQ ID NO: 328262 - DNA, 15 bp, Homo sapiens
ctcgatctcctggcc

SEQ ID NO: 328263 - DNA, 15 bp, Homo sapiens
tctcgatctcctggc

SEQ ID NO: 328264 - DNA, 15 bp, Homo sapiens
gtctcgatctcctgg

SEQ ID NO: 328265 - DNA, 15 bp, Homo sapiens
ctggtctcgatctcc

SEQ ID NO: 328266 - DNA, 15 bp, Homo sapiens
gctggtctcgatctc

SEQ ID NO: 328267 - DNA, 15 bp, Homo sapiens
ggctggtctcgatct

SEQ ID NO: 328268 - DNA, 15 bp, Homo sapiens
aggctggtctcgatc

SEQ ID NO: 328269 - DNA, 15 bp, Homo sapiens
caggctggtctcgat

SEQ ID NO: 328270 - DNA, 15 bp, Homo sapiens
gttctccatgttggc

SEQ ID NO: 328271 - DNA, 15 bp, Homo sapiens
tgttctccatgttgg

SEQ ID NO: 328272 - DNA, 15 bp, Homo sapiens
atgttctccatgttg

SEQ ID NO: 328273 - DNA, 15 bp, Homo sapiens
catgttctccatgtt

SEQ ID NO: 328274 - DNA, 15 bp, Homo sapiens
ccatgttctccatgt

SEQ ID NO: 328275 - DNA, 15 bp, Homo sapiens
gccatgttctccatg

SEQ ID NO: 328276 - DNA, 15 bp, Homo sapiens
ggccatgttctccat

SEQ ID NO: 328277 - DNA, 15 bp, Homo sapiens
tggccatgttctcca

SEQ ID NO: 328278 - DNA, 15 bp, Homo sapiens
ttggccatgttctcc

SEQ ID NO: 328279 - DNA, 15 bp, Homo sapiens
gttggccatgttctc

SEQ ID NO: 328280 - DNA, 15 bp, Homo sapiens
agttggccatgttct

SEQ ID NO: 328281 - DNA, 15 bp, Homo sapiens
gagttggccatgttc

SEQ ID NO: 328282 - DNA, 15 bp, Homo sapiens
cgagttggccatgtt

SEQ ID NO: 328283 - DNA, 15 bp, Homo sapiens
acgagttggccatgt

SEQ ID NO: 328284 - DNA, 15 bp, Homo sapiens
gacgagttggccatg

SEQ ID NO: 328285 - DNA, 15 bp, Homo sapiens
agacgagttggccat

SEQ ID NO: 328286 - DNA, 15 bp, Homo sapiens
gagacgagttggcca

SEQ ID NO: 328287 - DNA, 15 bp, Homo sapiens
agagacgagttggcc

SEQ ID NO: 328288 - DNA, 15 bp, Homo sapiens
tagagacgagttggc

SEQ ID NO: 328289 - DNA, 15 bp, Homo sapiens
gtagagacgagttgg

SEQ ID NO: 328290 - DNA, 15 bp, Homo sapiens
agtagagacgagttg

SEQ ID NO: 328291 - DNA, 15 bp, Homo sapiens
tagtagagacgagtt

SEQ ID NO: 328292 - DNA, 15 bp, Homo sapiens
ttagtagagacgagt

SEQ ID NO: 328293 - DNA, 15 bp, Homo sapiens
tttagtagagacgag

SEQ ID NO: 328294 - DNA, 15 bp, Homo sapiens
ttttagtagagacga

SEQ ID NO: 328295 - DNA, 15 bp, Homo sapiens
ctttgtatttttagt

SEQ ID NO: 328296 - DNA, 15 bp, Homo sapiens
tctttgtatttttag

SEQ ID NO: 328297 - DNA, 15 bp, Homo sapiens
atctttgtattttta

SEQ ID NO: 328298 - DNA, 15 bp, Homo sapiens
aatctttgtattttt

SEQ ID NO: 328299 - DNA, 15 bp, Homo sapiens
taatctttgtatttt

SEQ ID NO: 328300 - DNA, 15 bp, Homo sapiens
ctaatctttgtattt

SEQ ID NO: 328301 - DNA, 15 bp, Homo sapiens
gctaatctttgtatt

SEQ ID NO: 328302 - DNA, 15 bp, Homo sapiens
agctaatctttgtat

SEQ ID NO: 328303 - DNA, 15 bp, Homo sapiens
cagctaatctttgta

SEQ ID NO: 328304 - DNA, 15 bp, Homo sapiens
ccagctaatctttgt

SEQ ID NO: 328305 - DNA, 15 bp, Homo sapiens
cccagctaatctttg

SEQ ID NO: 328306 - DNA, 15 bp, Homo sapiens
gcccagctaatcttt

SEQ ID NO: 328307 - DNA, 15 bp, Homo sapiens
tgcccagctaatctt

SEQ ID NO: 328308 - DNA, 15 bp, Homo sapiens
atgcccagctaatct

SEQ ID NO: 328309 - DNA, 15 bp, Homo sapiens
catgcccagctaatc

SEQ ID NO: 328310 - DNA, 15 bp, Homo sapiens
ccatgcccagctaat

SEQ ID NO: 328311 - DNA, 15 bp, Homo sapiens
accatgcccagctaa

SEQ ID NO: 328312 - DNA, 15 bp, Homo sapiens
caccatgcccagcta

SEQ ID NO: 328313 - DNA, 15 bp, Homo sapiens
ccaccatgcccagct

SEQ ID NO: 328314 - DNA, 15 bp, Homo sapiens
accaccatgcccagc

SEQ ID NO: 328315 - DNA, 15 bp, Homo sapiens
caccaccatgcccag

SEQ ID NO: 328316 - DNA, 15 bp, Homo sapiens
gcaccaccatgccca

SEQ ID NO: 328317 - DNA, 15 bp, Homo sapiens
tgcaccaccatgccc

SEQ ID NO: 328318 - DNA, 15 bp, Homo sapiens
atgcaccaccatgcc

SEQ ID NO: 328319 - DNA, 15 bp, Homo sapiens
catgcaccaccatgc

SEQ ID NO: 328320 - DNA, 15 bp, Homo sapiens
gcatgcaccaccatg

SEQ ID NO: 328321 - DNA, 15 bp, Homo sapiens
ggcatgcaccaccat

SEQ ID NO: 328322 - DNA, 15 bp, Homo sapiens
aggcatgcaccacca

SEQ ID NO: 328323 - DNA, 15 bp, Homo sapiens
caggcatgcaccacc

SEQ ID NO: 328324 - DNA, 15 bp, Homo sapiens
acaggcatgcaccac

SEQ ID NO: 328325 - DNA, 15 bp, Homo sapiens
tacaggcatgcacca

SEQ ID NO: 328326 - DNA, 15 bp, Homo sapiens
ttacaggcatgcacc

SEQ ID NO: 328327 - DNA, 15 bp, Homo sapiens
attacaggcatgcac

SEQ ID NO: 328328 - DNA, 15 bp, Homo sapiens
gattacaggcatgca

SEQ ID NO: 328329 - DNA, 15 bp, Homo sapiens
ctcaagcaattctcc

SEQ ID NO: 328330 - DNA, 15 bp, Homo sapiens
actcaagcaattctc

SEQ ID NO: 328331 - DNA, 15 bp, Homo sapiens
gactcaagcaattct

SEQ ID NO: 328332 - DNA, 15 bp, Homo sapiens
agactcaagcaattc

SEQ ID NO: 328333 - DNA, 15 bp, Homo sapiens
cagactcaagcaatt

SEQ ID NO: 328334 - DNA, 15 bp, Homo sapiens
ccagactcaagcaat

SEQ ID NO: 328335 - DNA, 15 bp, Homo sapiens
cccagactcaagcaa

SEQ ID NO: 328336 - DNA, 15 bp, Homo sapiens
tcccagactcaagca

SEQ ID NO: 328337 - DNA, 15 bp, Homo sapiens
ctcccagactcaagc

SEQ ID NO: 328338 - DNA, 15 bp, Homo sapiens
cctcccagactcaag

SEQ ID NO: 328339 - DNA, 15 bp, Homo sapiens
acctcccagactcaa

SEQ ID NO: 328340 - DNA, 15 bp, Homo sapiens
aacctcccagactca

SEQ ID NO: 328341 - DNA, 15 bp, Homo sapiens
caacctcccagactc

SEQ ID NO: 328342 - DNA, 15 bp, Homo sapiens
tcaacctcccagact

SEQ ID NO: 328343 - DNA, 15 bp, Homo sapiens
ctcaacctcccagac

SEQ ID NO: 328344 - DNA, 15 bp, Homo sapiens
cctcaacctcccaga

SEQ ID NO: 328345 - DNA, 15 bp, Homo sapiens
gcctcaacctcccag

SEQ ID NO: 328346 - DNA, 15 bp, Homo sapiens
agcctcaacctccca

SEQ ID NO: 328347 - DNA, 15 bp, Homo sapiens
cagcctcaacctccc

SEQ ID NO: 328348 - DNA, 15 bp, Homo sapiens
acagcctcaacctcc

SEQ ID NO: 328349 - DNA, 15 bp, Homo sapiens
cacagcctcaacctc

SEQ ID NO: 328350 - DNA, 15 bp, Homo sapiens
ccacagcctcaacct

SEQ ID NO: 328351 - DNA, 15 bp, Homo sapiens
accacagcctcaacc

SEQ ID NO: 328352 - DNA, 15 bp, Homo sapiens
taccacagcctcaac

SEQ ID NO: 328353 - DNA, 15 bp, Homo sapiens
ttaccacagcctcaa

SEQ ID NO: 328354 - DNA, 15 bp, Homo sapiens
cttaccacagcctca

SEQ ID NO: 328355 - DNA, 15 bp, Homo sapiens
gcttaccacagcctc

SEQ ID NO: 328356 - DNA, 15 bp, Homo sapiens
tgcttaccacagcct

SEQ ID NO: 328357 - DNA, 15 bp, Homo sapiens
ctgcttaccacagcc

SEQ ID NO: 328358 - DNA, 15 bp, Homo sapiens
tctgcttaccacagc

SEQ ID NO: 328359 - DNA, 15 bp, Homo sapiens
ctctgcttaccacag

SEQ ID NO: 328360 - DNA, 15 bp, Homo sapiens
tctctgcttaccaca

SEQ ID NO: 328361 - DNA, 15 bp, Homo sapiens
atctctgcttaccac

SEQ ID NO: 328362 - DNA, 15 bp, Homo sapiens
gatctctgcttacca

SEQ ID NO: 328363 - DNA, 15 bp, Homo sapiens
cgatctctgcttacc

SEQ ID NO: 328364 - DNA, 15 bp, Homo sapiens
acgatctctgcttac

SEQ ID NO: 328365 - DNA, 15 bp, Homo sapiens
cacgatctctgctta

SEQ ID NO: 328366 - DNA, 15 bp, Homo sapiens
gcacgatctctgctt

SEQ ID NO: 328367 - DNA, 15 bp, Homo sapiens
ggcacgatctctgct

SEQ ID NO: 328368 - DNA, 15 bp, Homo sapiens
tggcacgatctctgc

SEQ ID NO: 328369 - DNA, 15 bp, Homo sapiens
gtggcacgatctctg

SEQ ID NO: 328370 - DNA, 15 bp, Homo sapiens
agtggcacgatctct

SEQ ID NO: 328371 - DNA, 15 bp, Homo sapiens
cagtggcacgatctc

SEQ ID NO: 328372 - DNA, 15 bp, Homo sapiens
gcagtggcacgatct

SEQ ID NO: 328373 - DNA, 15 bp, Homo sapiens
tgcagtggcacgatc

SEQ ID NO: 328374 - DNA, 15 bp, Homo sapiens
gtgcagtggcacgat

SEQ ID NO: 328375 - DNA, 15 bp, Homo sapiens
agtgcagtggcacga

SEQ ID NO: 328376 - DNA, 15 bp, Homo sapiens
gagtgcagtggcacg

SEQ ID NO: 328377 - DNA, 15 bp, Homo sapiens
tgagtgcagtggcac

SEQ ID NO: 328378 - DNA, 15 bp, Homo sapiens
gtgagtgcagtggca

SEQ ID NO: 328379 - DNA, 15 bp, Homo sapiens
agtgagtgcagtggc

SEQ ID NO: 328380 - DNA, 15 bp, Homo sapiens
aagtgagtgcagtgg

SEQ ID NO: 328381 - DNA, 15 bp, Homo sapiens
gaagtgagtgcagtg

SEQ ID NO: 328382 - DNA, 15 bp, Homo sapiens
tgaagtgagtgcagt

SEQ ID NO: 328383 - DNA, 15 bp, Homo sapiens
ctgaagtgagtgcag

SEQ ID NO: 328384 - DNA, 15 bp, Homo sapiens
gctgaagtgagtgca

SEQ ID NO: 328385 - DNA, 15 bp, Homo sapiens
ggctgaagtgagtgc

SEQ ID NO: 328386 - DNA, 15 bp, Homo sapiens
aggctgaagtgagtg

SEQ ID NO: 328387 - DNA, 15 bp, Homo sapiens
caggctgaagtgagt

SEQ ID NO: 328388 - DNA, 15 bp, Homo sapiens
ccaggctgaagtgag

SEQ ID NO: 328389 - DNA, 15 bp, Homo sapiens
tccaggctgaagtga

SEQ ID NO: 328390 - DNA, 15 bp, Homo sapiens
atccaggctgaagtg

SEQ ID NO: 328391 - DNA, 15 bp, Homo sapiens
catccaggctgaagt

SEQ ID NO: 328392 - DNA, 15 bp, Homo sapiens
tcatccaggctgaag

SEQ ID NO: 328393 - DNA, 15 bp, Homo sapiens
gtcatccaggctgaa

SEQ ID NO: 328394 - DNA, 15 bp, Homo sapiens
tgtcatccaggctga

SEQ ID NO: 328395 - DNA, 15 bp, Homo sapiens
cctgtcatccaggct

SEQ ID NO: 328396 - DNA, 15 bp, Homo sapiens
ccctgtcatccaggc

SEQ ID NO: 328397 - DNA, 15 bp, Homo sapiens
gccctgtcatccagg

SEQ ID NO: 328398 - DNA, 15 bp, Homo sapiens
tgccctgtcatccag

SEQ ID NO: 328399 - DNA, 15 bp, Homo sapiens
ttgccctgtcatcca

SEQ ID NO: 328400 - DNA, 15 bp, Homo sapiens
cttgccctgtcatcc

SEQ ID NO: 328401 - DNA, 15 bp, Homo sapiens
tcttgccctgtcatc

SEQ ID NO: 328402 - DNA, 15 bp, Homo sapiens
gtcttgccctgtcat

SEQ ID NO: 328403 - DNA, 15 bp, Homo sapiens
ggtcttgccctgtca

SEQ ID NO: 328404 - DNA, 15 bp, Homo sapiens
gggtcttgccctgtc

SEQ ID NO: 328405 - DNA, 15 bp, Homo sapiens
ggggtcttgccctgt

SEQ ID NO: 328406 - DNA, 15 bp, Homo sapiens
tggggtcttgccctg

SEQ ID NO: 328407 - DNA, 15 bp, Homo sapiens
atggggtcttgccct

SEQ ID NO: 328408 - DNA, 15 bp, Homo sapiens
gatggggtcttgccc

SEQ ID NO: 328409 - DNA, 15 bp, Homo sapiens
agatggggtcttgcc

SEQ ID NO: 328410 - DNA, 15 bp, Homo sapiens
gagatggggtcttgc

SEQ ID NO: 328411 - DNA, 15 bp, Homo sapiens
tgagatggggtcttg

SEQ ID NO: 328412 - DNA, 15 bp, Homo sapiens
ttgagatggggtctt

SEQ ID NO: 328413 - DNA, 15 bp, Homo sapiens
tttgagatggggtct

SEQ ID NO: 328414 - DNA, 15 bp, Homo sapiens
ttttgagatggggtc

SEQ ID NO: 328415 - DNA, 15 bp, Homo sapiens
tttttgagatggggt

SEQ ID NO: 328416 - DNA, 15 bp, Homo sapiens
ttttttgagatgggg

SEQ ID NO: 328417 - DNA, 15 bp, Homo sapiens
tttttttgagatggg

SEQ ID NO: 328418 - DNA, 15 bp, Homo sapiens
ttttttttttgagat

SEQ ID NO: 328419 - DNA, 15 bp, Homo sapiens
cttttttttttttga

SEQ ID NO: 328420 - DNA, 15 bp, Homo sapiens
tcttttttttttttg

SEQ ID NO: 328421 - DNA, 15 bp, Homo sapiens
tttttcttttttttt

SEQ ID NO: 328422 - DNA, 15 bp, Homo sapiens
ttttttctttttttt

SEQ ID NO: 328423 - DNA, 15 bp, Homo sapiens
gtttttttttttttc

SEQ ID NO: 328424 - DNA, 15 bp, Homo sapiens
agttttttttttttt

SEQ ID NO: 328425 - DNA, 15 bp, Homo sapiens
tagtttttttttttt

SEQ ID NO: 328426 - DNA, 15 bp, Homo sapiens
ttagttttttttttt

SEQ ID NO: 328427 - DNA, 15 bp, Homo sapiens
attagtttttttttt

SEQ ID NO: 328428 - DNA, 15 bp, Homo sapiens
tattagttttttttt

SEQ ID NO: 328429 - DNA, 15 bp, Homo sapiens
ctattagtttttttt

SEQ ID NO: 328430 - DNA, 15 bp, Homo sapiens
tctattagttttttt

SEQ ID NO: 328431 - DNA, 15 bp, Homo sapiens
ttctattagtttttt

SEQ ID NO: 328432 - DNA, 15 bp, Homo sapiens
tttctattagttttt

SEQ ID NO: 328433 - DNA, 15 bp, Homo sapiens
ttttctattagtttt

SEQ ID NO: 328434 - DNA, 15 bp, Homo sapiens
tttttctattagttt

SEQ ID NO: 328435 - DNA, 15 bp, Homo sapiens
ctttttctattagtt

SEQ ID NO: 328436 - DNA, 15 bp, Homo sapiens
cctttttctattagt

SEQ ID NO: 328437 - DNA, 15 bp, Homo sapiens
acctttttctattag

SEQ ID NO: 328438 - DNA, 15 bp, Homo sapiens
cacctttttctatta

SEQ ID NO: 328439 - DNA, 15 bp, Homo sapiens
gcacctttttctatt

SEQ ID NO: 328440 - DNA, 15 bp, Homo sapiens
agcacctttttctat

SEQ ID NO: 328441 - DNA, 15 bp, Homo sapiens
tagcacctttttcta

SEQ ID NO: 328442 - DNA, 15 bp, Homo sapiens
ctagcacctttttct

SEQ ID NO: 328443 - DNA, 15 bp, Homo sapiens
cctagcacctttttc

SEQ ID NO: 328444 - DNA, 15 bp, Homo sapiens
acctagcaccttttt

SEQ ID NO: 328445 - DNA, 15 bp, Homo sapiens
cacctagcacctttt

SEQ ID NO: 328446 - DNA, 15 bp, Homo sapiens
gcacctagcaccttt

SEQ ID NO: 328447 - DNA, 15 bp, Homo sapiens
cgcacctagcacctt

SEQ ID NO: 328448 - DNA, 15 bp, Homo sapiens
tcgcacctagcacct

SEQ ID NO: 328449 - DNA, 15 bp, Homo sapiens
atcgcacctagcacc

SEQ ID NO: 328450 - DNA, 15 bp, Homo sapiens
gatcgcacctagcac

SEQ ID NO: 328451 - DNA, 15 bp, Homo sapiens
cgatcgcacctagca

SEQ ID NO: 328452 - DNA, 15 bp, Homo sapiens
acgatcgcacctagc

SEQ ID NO: 328453 - DNA, 15 bp, Homo sapiens
gacgatcgcacctag

SEQ ID NO: 328454 - DNA, 15 bp, Homo sapiens
ggacgatcgcaccta

SEQ ID NO: 328455 - DNA, 15 bp, Homo sapiens
aggacgatcgcacct

SEQ ID NO: 328456 - DNA, 15 bp, Homo sapiens
taggacgatcgcacc

SEQ ID NO: 328457 - DNA, 15 bp, Homo sapiens
gtaggacgatcgcac

SEQ ID NO: 328458 - DNA, 15 bp, Homo sapiens
tgtaggacgatcgca

SEQ ID NO: 328459 - DNA, 15 bp, Homo sapiens
atgtaggacgatcgc

SEQ ID NO: 328460 - DNA, 15 bp, Homo sapiens
aatgtaggacgatcg

SEQ ID NO: 328461 - DNA, 15 bp, Homo sapiens
aaatgtaggacgatc

SEQ ID NO: 328462 - DNA, 15 bp, Homo sapiens
caaatgtaggacgat

SEQ ID NO: 328463 - DNA, 15 bp, Homo sapiens
tcaaatgtaggacga

SEQ ID NO: 328464 - DNA, 15 bp, Homo sapiens
gtcaaatgtaggacg

SEQ ID NO: 328465 - DNA, 15 bp, Homo sapiens
ggtcaaatgtaggac

SEQ ID NO: 328466 - DNA, 15 bp, Homo sapiens
aggtcaaatgtagga

SEQ ID NO: 328467 - DNA, 15 bp, Homo sapiens
aaggtcaaatgtagg

SEQ ID NO: 328468 - DNA, 15 bp, Homo sapiens
caaggtcaaatgtag

SEQ ID NO: 328469 - DNA, 15 bp, Homo sapiens
ccaaggtcaaatgta

SEQ ID NO: 328470 - DNA, 15 bp, Homo sapiens
cccaaggtcaaatgt

SEQ ID NO: 328471 - DNA, 15 bp, Homo sapiens
acccaaggtcaaatg

SEQ ID NO: 328472 - DNA, 15 bp, Homo sapiens
gacccaaggtcaaat

SEQ ID NO: 328473 - DNA, 15 bp, Homo sapiens
agacccaaggtcaaa

SEQ ID NO: 328474 - DNA, 15 bp, Homo sapiens
gagacccaaggtcaa

SEQ ID NO: 328475 - DNA, 15 bp, Homo sapiens
ggagacccaaggtca

SEQ ID NO: 328476 - DNA, 15 bp, Homo sapiens
tggagacccaaggtc

SEQ ID NO: 328477 - DNA, 15 bp, Homo sapiens
ttggagacccaaggt

SEQ ID NO: 328478 - DNA, 15 bp, Homo sapiens
cttggagacccaagg

SEQ ID NO: 328479 - DNA, 15 bp, Homo sapiens
acttggagacccaag

SEQ ID NO: 328480 - DNA, 15 bp, Homo sapiens
aacttggagacccaa

SEQ ID NO: 328481 - DNA, 15 bp, Homo sapiens
aaacttggagaccca

SEQ ID NO: 328482 - DNA, 15 bp, Homo sapiens
taaacttggagaccc

SEQ ID NO: 328483 - DNA, 15 bp, Homo sapiens
ctaaacttggagacc

SEQ ID NO: 328484 - DNA, 15 bp, Homo sapiens
gctaaacttggagac

SEQ ID NO: 328485 - DNA, 15 bp, Homo sapiens
agctaaacttggaga

SEQ ID NO: 328486 - DNA, 15 bp, Homo sapiens
aagctaaacttggag

SEQ ID NO: 328487 - DNA, 15 bp, Homo sapiens
aaagctaaacttgga

SEQ ID NO: 328488 - DNA, 15 bp, Homo sapiens
gaaagctaaacttgg

SEQ ID NO: 328489 - DNA, 15 bp, Homo sapiens
agaaagctaaacttg

SEQ ID NO: 328490 - DNA, 15 bp, Homo sapiens
tagaaagctaaactt

SEQ ID NO: 328491 - DNA, 15 bp, Homo sapiens
ttagaaagctaaact

SEQ ID NO: 328492 - DNA, 15 bp, Homo sapiens
gttagaaagctaaac

SEQ ID NO: 328493 - DNA, 15 bp, Homo sapiens
tgttagaaagctaaa

SEQ ID NO: 328494 - DNA, 15 bp, Homo sapiens
gtgttagaaagctaa

SEQ ID NO: 328495 - DNA, 15 bp, Homo sapiens
tgtgttagaaagcta

SEQ ID NO: 328496 - DNA, 15 bp, Homo sapiens
ttgtgttagaaagct

SEQ ID NO: 328497 - DNA, 15 bp, Homo sapiens
gttgtgttagaaagc

SEQ ID NO: 328498 - DNA, 15 bp, Homo sapiens
ggttgtgttagaaag

SEQ ID NO: 328499 - DNA, 15 bp, Homo sapiens
cggttgtgttagaaa

SEQ ID NO: 328500 - DNA, 15 bp, Homo sapiens
ccggttgtgttagaa

SEQ ID NO: 328501 - DNA, 15 bp, Homo sapiens
gccggttgtgttaga

SEQ ID NO: 328502 - DNA, 15 bp, Homo sapiens
agccggttgtgttag

SEQ ID NO: 328503 - DNA, 15 bp, Homo sapiens
gagccggttgtgtta

SEQ ID NO: 328504 - DNA, 15 bp, Homo sapiens
agagccggttgtgtt

SEQ ID NO: 328505 - DNA, 15 bp, Homo sapiens
cagagccggttgtgt

SEQ ID NO: 328506 - DNA, 15 bp, Homo sapiens
gcagagccggttgtg

SEQ ID NO: 328507 - DNA, 15 bp, Homo sapiens
ggcagagccggttgt

SEQ ID NO: 328508 - DNA, 15 bp, Homo sapiens
aggcagagccggttg

SEQ ID NO: 328509 - DNA, 15 bp, Homo sapiens
aaggcagagccggtt

SEQ ID NO: 328510 - DNA, 15 bp, Homo sapiens
aaaggcagagccggt

SEQ ID NO: 328511 - DNA, 15 bp, Homo sapiens
gaaaggcagagccgg

SEQ ID NO: 328512 - DNA, 15 bp, Homo sapiens
tgaaaggcagagccg

SEQ ID NO: 328513 - DNA, 15 bp, Homo sapiens
gtgaaaggcagagcc

SEQ ID NO: 328514 - DNA, 15 bp, Homo sapiens
agtgaaaggcagagc

SEQ ID NO: 328515 - DNA, 15 bp, Homo sapiens
gagtgaaaggcagag

SEQ ID NO: 328516 - DNA, 15 bp, Homo sapiens
tgagtgaaaggcaga

SEQ ID NO: 328517 - DNA, 15 bp, Homo sapiens
atgagtgaaaggcag

SEQ ID NO: 328518 - DNA, 15 bp, Homo sapiens
catgagtgaaaggca

SEQ ID NO: 328519 - DNA, 15 bp, Homo sapiens
tcatgagtgaaaggc

SEQ ID NO: 328520 - DNA, 15 bp, Homo sapiens
gtcatgagtgaaagg

SEQ ID NO: 328521 - DNA, 15 bp, Homo sapiens
agtcatgagtgaaag

SEQ ID NO: 328522 - DNA, 15 bp, Homo sapiens
gagtcatgagtgaaa

SEQ ID NO: 328523 - DNA, 15 bp, Homo sapiens
ggagtcatgagtgaa

SEQ ID NO: 328524 - DNA, 15 bp, Homo sapiens
gggagtcatgagtga

SEQ ID NO: 328525 - DNA, 15 bp, Homo sapiens
ggggagtcatgagtg

SEQ ID NO: 328526 - DNA, 15 bp, Homo sapiens
aggggagtcatgagt

SEQ ID NO: 328527 - DNA, 15 bp, Homo sapiens
taggggagtcatgag

SEQ ID NO: 328528 - DNA, 15 bp, Homo sapiens
ttaggggagtcatga

SEQ ID NO: 328529 - DNA, 15 bp, Homo sapiens
cttaggggagtcatg

SEQ ID NO: 328530 - DNA, 15 bp, Homo sapiens
tcttaggggagtcat

SEQ ID NO: 328531 - DNA, 15 bp, Homo sapiens
ttcttaggggagtca

SEQ ID NO: 328532 - DNA, 15 bp, Homo sapiens
cttcttaggggagtc

SEQ ID NO: 328533 - DNA, 15 bp, Homo sapiens
tcttcttaggggagt

SEQ ID NO: 328534 - DNA, 15 bp, Homo sapiens
ttcttcttaggggag

SEQ ID NO: 328535 - DNA, 15 bp, Homo sapiens
attcttcttagggga

SEQ ID NO: 328536 - DNA, 15 bp, Homo sapiens
tattcttcttagggg

SEQ ID NO: 328537 - DNA, 15 bp, Homo sapiens
gtattcttcttaggg

SEQ ID NO: 328538 - DNA, 15 bp, Homo sapiens
cgtattcttcttagg

SEQ ID NO: 328539 - DNA, 15 bp, Homo sapiens
ccgtattcttcttag

SEQ ID NO: 328540 - DNA, 15 bp, Homo sapiens
gccgtattcttctta

SEQ ID NO: 328541 - DNA, 15 bp, Homo sapiens
tgccgtattcttctt

SEQ ID NO: 328542 - DNA, 15 bp, Homo sapiens
gtgccgtattcttct

SEQ ID NO: 328543 - DNA, 15 bp, Homo sapiens
agtgccgtattcttc

SEQ ID NO: 328544 - DNA, 15 bp, Homo sapiens
aagtgccgtattctt

SEQ ID NO: 328545 - DNA, 15 bp, Homo sapiens
caagtgccgtattct

SEQ ID NO: 328546 - DNA, 15 bp, Homo sapiens
acaagtgccgtattc

SEQ ID NO: 328547 - DNA, 15 bp, Homo sapiens
cacaagtgccgtatt

SEQ ID NO: 328548 - DNA, 15 bp, Homo sapiens
ccacaagtgccgtat

SEQ ID NO: 328549 - DNA, 15 bp, Homo sapiens
gccacaagtgccgta

SEQ ID NO: 328550 - DNA, 15 bp, Homo sapiens
tgccacaagtgccgt

SEQ ID NO: 328551 - DNA, 15 bp, Homo sapiens
ctgccacaagtgccg

SEQ ID NO: 328552 - DNA, 15 bp, Homo sapiens
tctgccacaagtgcc

SEQ ID NO: 328553 - DNA, 15 bp, Homo sapiens
ctctgccacaagtgc

SEQ ID NO: 328554 - DNA, 15 bp, Homo sapiens
cctctgccacaagtg

SEQ ID NO: 328555 - DNA, 15 bp, Homo sapiens
ccctctgccacaagt

SEQ ID NO: 328556 - DNA, 15 bp, Homo sapiens
cccctctgccacaag

SEQ ID NO: 328557 - DNA, 15 bp, Homo sapiens
tcccctctgccacaa

SEQ ID NO: 328558 - DNA, 15 bp, Homo sapiens
ttcccctctgccaca

SEQ ID NO: 328559 - DNA, 15 bp, Homo sapiens
tttcccctctgccac

SEQ ID NO: 328560 - DNA, 15 bp, Homo sapiens
gtttcccctctgcca

SEQ ID NO: 328561 - DNA, 15 bp, Homo sapiens
ggtttcccctctgcc

SEQ ID NO: 328562 - DNA, 15 bp, Homo sapiens
aggtttcccctctgc

SEQ ID NO: 328563 - DNA, 15 bp, Homo sapiens
gaggtttcccctctg

SEQ ID NO: 328564 - DNA, 15 bp, Homo sapiens
ggaggtttcccctct

SEQ ID NO: 328565 - DNA, 15 bp, Homo sapiens
cggaggtttcccctc

SEQ ID NO: 328566 - DNA, 15 bp, Homo sapiens
tcggaggtttcccct

SEQ ID NO: 328567 - DNA, 15 bp, Homo sapiens
ctcggaggtttcccc

SEQ ID NO: 328568 - DNA, 15 bp, Homo sapiens
cctcggaggtttccc

SEQ ID NO: 328569 - DNA, 15 bp, Homo sapiens
acctcggaggtttcc

SEQ ID NO: 328570 - DNA, 15 bp, Homo sapiens
cacctcggaggtttc

SEQ ID NO: 328571 - DNA, 15 bp, Homo sapiens
ccacctcggaggttt

SEQ ID NO: 328572 - DNA, 15 bp, Homo sapiens
tccacctcggaggtt

SEQ ID NO: 328573 - DNA, 15 bp, Homo sapiens
gtccacctcggaggt

SEQ ID NO: 328574 - DNA, 15 bp, Homo sapiens
tgtccacctcggagg

SEQ ID NO: 328575 - DNA, 15 bp, Homo sapiens
atgtccacctcggag

SEQ ID NO: 328576 - DNA, 15 bp, Homo sapiens
gatgtccacctcgga

SEQ ID NO: 328577 - DNA, 15 bp, Homo sapiens
agatgtccacctcgg

SEQ ID NO: 328578 - DNA, 15 bp, Homo sapiens
cagatgtccacctcg

SEQ ID NO: 328579 - DNA, 15 bp, Homo sapiens
gcagatgtccacctc

SEQ ID NO: 328580 - DNA, 15 bp, Homo sapiens
agcagatgtccacct

SEQ ID NO: 328581 - DNA, 15 bp, Homo sapiens
cagcagatgtccacc

SEQ ID NO: 328582 - DNA, 15 bp, Homo sapiens
acagcagatgtccac

SEQ ID NO: 328583 - DNA, 15 bp, Homo sapiens
cacagcagatgtcca

SEQ ID NO: 328584 - DNA, 15 bp, Homo sapiens
acacagcagatgtcc

SEQ ID NO: 328585 - DNA, 15 bp, Homo sapiens
aacacagcagatgtc

SEQ ID NO: 328586 - DNA, 15 bp, Homo sapiens
aaacacagcagatgt

SEQ ID NO: 328587 - DNA, 15 bp, Homo sapiens
gaaacacagcagatg

SEQ ID NO: 328588 - DNA, 15 bp, Homo sapiens
tgaaacacagcagat

SEQ ID NO: 328589 - DNA, 15 bp, Homo sapiens
ttgaaacacagcaga

SEQ ID NO: 328590 - DNA, 15 bp, Homo sapiens
tttgaaacacagcag

SEQ ID NO: 328591 - DNA, 15 bp, Homo sapiens
ctttgaaacacagca

SEQ ID NO: 328592 - DNA, 15 bp, Homo sapiens
cctttgaaacacagc

SEQ ID NO: 328593 - DNA, 15 bp, Homo sapiens
gcctttgaaacacag

SEQ ID NO: 328594 - DNA, 15 bp, Homo sapiens
ggcctttgaaacaca

SEQ ID NO: 328595 - DNA, 15 bp, Homo sapiens
cggcctttgaaacac

SEQ ID NO: 328596 - DNA, 15 bp, Homo sapiens
tcggcctttgaaaca

SEQ ID NO: 328597 - DNA, 15 bp, Homo sapiens
atcggcctttgaaac

SEQ ID NO: 328598 - DNA, 15 bp, Homo sapiens
tatcggcctttgaaa

SEQ ID NO: 328599 - DNA, 15 bp, Homo sapiens
atatcggcctttgaa

SEQ ID NO: 328600 - DNA, 15 bp, Homo sapiens
gatatcggcctttga

SEQ ID NO: 328601 - DNA, 15 bp, Homo sapiens
agatatcggcctttg

SEQ ID NO: 328602 - DNA, 15 bp, Homo sapiens
tagatatcggccttt

SEQ ID NO: 328603 - DNA, 15 bp, Homo sapiens
atagatatcggcctt

SEQ ID NO: 328604 - DNA, 15 bp, Homo sapiens
aatagatatcggcct

SEQ ID NO: 328605 - DNA, 15 bp, Homo sapiens
aaatagatatcggcc

SEQ ID NO: 328606 - DNA, 15 bp, Homo sapiens
aaaatagatatcggc

SEQ ID NO: 328607 - DNA, 15 bp, Homo sapiens
gaaaatagatatcgg

SEQ ID NO: 328608 - DNA, 15 bp, Homo sapiens
agaaaatagatatcg

SEQ ID NO: 328609 - DNA, 15 bp, Homo sapiens
gagaaaatagatatc

SEQ ID NO: 328610 - DNA, 15 bp, Homo sapiens
tgagaaaatagatat

SEQ ID NO: 328611 - DNA, 15 bp, Homo sapiens
atgagaaaatagata

SEQ ID NO: 328612 - DNA, 15 bp, Homo sapiens
aatgagaaaatagat

SEQ ID NO: 328613 - DNA, 15 bp, Homo sapiens
aaatgagaaaataga

SEQ ID NO: 328614 - DNA, 15 bp, Homo sapiens
caaatgagaaaatag

SEQ ID NO: 328615 - DNA, 15 bp, Homo sapiens
ccaaatgagaaaata

SEQ ID NO: 328616 - DNA, 15 bp, Homo sapiens
gccaaatgagaaaat

SEQ ID NO: 328617 - DNA, 15 bp, Homo sapiens
tgccaaatgagaaaa

SEQ ID NO: 328618 - DNA, 15 bp, Homo sapiens
ttgccaaatgagaaa

SEQ ID NO: 328619 - DNA, 15 bp, Homo sapiens
gttgccaaatgagaa

SEQ ID NO: 328620 - DNA, 15 bp, Homo sapiens
tgttgccaaatgaga

SEQ ID NO: 328621 - DNA, 15 bp, Homo sapiens
ctgttgccaaatgag

SEQ ID NO: 328622 - DNA, 15 bp, Homo sapiens
gctgttgccaaatga

SEQ ID NO: 328623 - DNA, 15 bp, Homo sapiens
tgctgttgccaaatg

SEQ ID NO: 328624 - DNA, 15 bp, Homo sapiens
ttgctgttgccaaat

SEQ ID NO: 328625 - DNA, 15 bp, Homo sapiens
gttgctgttgccaaa

SEQ ID NO: 328626 - DNA, 15 bp, Homo sapiens
ggttgctgttgccaa

SEQ ID NO: 328627 - DNA, 15 bp, Homo sapiens
gggttgctgttgcca

SEQ ID NO: 328628 - DNA, 15 bp, Homo sapiens
tgggttgctgttgcc

SEQ ID NO: 328629 - DNA, 15 bp, Homo sapiens
ttgggttgctgttgc

SEQ ID NO: 328630 - DNA, 15 bp, Homo sapiens
gttgggttgctgttg

SEQ ID NO: 328631 - DNA, 15 bp, Homo sapiens
ggttgggttgctgtt

SEQ ID NO: 328632 - DNA, 15 bp, Homo sapiens
gggttgggttgctgt

SEQ ID NO: 328633 - DNA, 15 bp, Homo sapiens
tgggttgggttgctg

SEQ ID NO: 328634 - DNA, 15 bp, Homo sapiens
ctgggttgggttgct

SEQ ID NO: 328635 - DNA, 15 bp, Homo sapiens
actgggttgggttgc

SEQ ID NO: 328636 - DNA, 15 bp, Homo sapiens
aactgggttgggttg

SEQ ID NO: 328637 - DNA, 15 bp, Homo sapiens
aaactgggttgggtt

SEQ ID NO: 328638 - DNA, 15 bp, Homo sapiens
gaaactgggttgggt

SEQ ID NO: 328639 - DNA, 15 bp, Homo sapiens
agaaactgggttggg

SEQ ID NO: 328640 - DNA, 15 bp, Homo sapiens
gagaaactgggttgg

SEQ ID NO: 328641 - DNA, 15 bp, Homo sapiens
tgagaaactgggttg

SEQ ID NO: 328642 - DNA, 15 bp, Homo sapiens
atgagaaactgggtt

SEQ ID NO: 328643 - DNA, 15 bp, Homo sapiens
tatgagaaactgggt

SEQ ID NO: 328644 - DNA, 15 bp, Homo sapiens
ttatgagaaactggg

SEQ ID NO: 328645 - DNA, 15 bp, Homo sapiens
cttatgagaaactgg

SEQ ID NO: 328646 - DNA, 15 bp, Homo sapiens
ccttatgagaaactg

SEQ ID NO: 328647 - DNA, 15 bp, Homo sapiens
tccttatgagaaact

SEQ ID NO: 328648 - DNA, 15 bp, Homo sapiens
atccttatgagaaac

SEQ ID NO: 328649 - DNA, 15 bp, Homo sapiens
gatccttatgagaaa

SEQ ID NO: 328650 - DNA, 15 bp, Homo sapiens
ggatccttatgagaa

SEQ ID NO: 328651 - DNA, 15 bp, Homo sapiens
gggatccttatgaga

SEQ ID NO: 328652 - DNA, 15 bp, Homo sapiens
agggatccttatgag

SEQ ID NO: 328653 - DNA, 15 bp, Homo sapiens
gagggatccttatga

SEQ ID NO: 328654 - DNA, 15 bp, Homo sapiens
agagggatccttatg

SEQ ID NO: 328655 - DNA, 15 bp, Homo sapiens
gagagggatccttat

SEQ ID NO: 328656 - DNA, 15 bp, Homo sapiens
tgagagggatcctta

SEQ ID NO: 328657 - DNA, 15 bp, Homo sapiens
gtgagagggatcctt

SEQ ID NO: 328658 - DNA, 15 bp, Homo sapiens
ggtgagagggatcct

SEQ ID NO: 328659 - DNA, 15 bp, Homo sapiens
gggtgagagggatcc

SEQ ID NO: 328660 - DNA, 15 bp, Homo sapiens
agggtgagagggatc

SEQ ID NO: 328661 - DNA, 15 bp, Homo sapiens
gagggtgagagggat

SEQ ID NO: 328662 - DNA, 15 bp, Homo sapiens
tgagggtgagaggga

SEQ ID NO: 328663 - DNA, 15 bp, Homo sapiens
ctgagggtgagaggg

SEQ ID NO: 328664 - DNA, 15 bp, Homo sapiens
actgagggtgagagg

SEQ ID NO: 328665 - DNA, 15 bp, Homo sapiens
gactgagggtgagag

SEQ ID NO: 328666 - DNA, 15 bp, Homo sapiens
ggactgagggtgaga

SEQ ID NO: 328667 - DNA, 15 bp, Homo sapiens
gggactgagggtgag

SEQ ID NO: 328668 - DNA, 15 bp, Homo sapiens
tgggactgagggtga

SEQ ID NO: 328669 - DNA, 15 bp, Homo sapiens
atgggactgagggtg

SEQ ID NO: 328670 - DNA, 15 bp, Homo sapiens
catgggactgagggt

SEQ ID NO: 328671 - DNA, 15 bp, Homo sapiens
ccatgggactgaggg

SEQ ID NO: 328672 - DNA, 15 bp, Homo sapiens
gccatgggactgagg

SEQ ID NO: 328673 - DNA, 15 bp, Homo sapiens
ggccatgggactgag

SEQ ID NO: 328674 - DNA, 15 bp, Homo sapiens
gggccatgggactga

SEQ ID NO: 328675 - DNA, 15 bp, Homo sapiens
agggccatgggactg

SEQ ID NO: 328676 - DNA, 15 bp, Homo sapiens
aagggccatgggact

SEQ ID NO: 328677 - DNA, 15 bp, Homo sapiens
caagggccatgggac

SEQ ID NO: 328678 - DNA, 15 bp, Homo sapiens
gcaagggccatggga

SEQ ID NO: 328679 - DNA, 15 bp, Homo sapiens
ggcaagggccatggg

SEQ ID NO: 328680 - DNA, 15 bp, Homo sapiens
gggcaagggccatgg

SEQ ID NO: 328681 - DNA, 15 bp, Homo sapiens
agggcaagggccatg

SEQ ID NO: 328682 - DNA, 15 bp, Homo sapiens
tagggcaagggccat

SEQ ID NO: 328683 - DNA, 15 bp, Homo sapiens
gtagggcaagggcca

SEQ ID NO: 328684 - DNA, 15 bp, Homo sapiens
tgtagggcaagggcc

SEQ ID NO: 328685 - DNA, 15 bp, Homo sapiens
ctgtagggcaagggc

SEQ ID NO: 328686 - DNA, 15 bp, Homo sapiens
gctgtagggcaaggg

SEQ ID NO: 328687 - DNA, 15 bp, Homo sapiens
agctgtagggcaagg

SEQ ID NO: 328688 - DNA, 15 bp, Homo sapiens
cagctgtagggcaag

SEQ ID NO: 328689 - DNA, 15 bp, Homo sapiens
tcagctgtagggcaa

SEQ ID NO: 328690 - DNA, 15 bp, Homo sapiens
ctcagctgtagggca

SEQ ID NO: 328691 - DNA, 15 bp, Homo sapiens
cctcagctgtagggc

SEQ ID NO: 328692 - DNA, 15 bp, Homo sapiens
ccctcagctgtaggg

SEQ ID NO: 328693 - DNA, 15 bp, Homo sapiens
accctcagctgtagg

SEQ ID NO: 328694 - DNA, 15 bp, Homo sapiens
caccctcagctgtag

SEQ ID NO: 328695 - DNA, 15 bp, Homo sapiens
acaccctcagctgta

SEQ ID NO: 328696 - DNA, 15 bp, Homo sapiens
cacaccctcagctgt

SEQ ID NO: 328697 - DNA, 15 bp, Homo sapiens
ccacaccctcagctg

SEQ ID NO: 328698 - DNA, 15 bp, Homo sapiens
gccacaccctcagct

SEQ ID NO: 328699 - DNA, 15 bp, Homo sapiens
tgccacaccctcagc

SEQ ID NO: 328700 - DNA, 15 bp, Homo sapiens
atgccacaccctcag

SEQ ID NO: 328701 - DNA, 15 bp, Homo sapiens
catgccacaccctca

SEQ ID NO: 328702 - DNA, 15 bp, Homo sapiens
acatgccacaccctc

SEQ ID NO: 328703 - DNA, 15 bp, Homo sapiens
cacatgccacaccct

SEQ ID NO: 328704 - DNA, 15 bp, Homo sapiens
ccacatgccacaccc

SEQ ID NO: 328705 - DNA, 15 bp, Homo sapiens
gccacatgccacacc

SEQ ID NO: 328706 - DNA, 15 bp, Homo sapiens
agccacatgccacac

SEQ ID NO: 328707 - DNA, 15 bp, Homo sapiens
gagccacatgccaca

SEQ ID NO: 328708 - DNA, 15 bp, Homo sapiens
tgagccacatgccac

SEQ ID NO: 328709 - DNA, 15 bp, Homo sapiens
gtgagccacatgcca

SEQ ID NO: 328710 - DNA, 15 bp, Homo sapiens
tgtgagccacatgcc

SEQ ID NO: 328711 - DNA, 15 bp, Homo sapiens
atgtgagccacatgc

SEQ ID NO: 328712 - DNA, 15 bp, Homo sapiens
tatgtgagccacatg

SEQ ID NO: 328713 - DNA, 15 bp, Homo sapiens
atatgtgagccacat

SEQ ID NO: 328714 - DNA, 15 bp, Homo sapiens
catatgtgagccaca

SEQ ID NO: 328715 - DNA, 15 bp, Homo sapiens
ccatatgtgagccac

SEQ ID NO: 328716 - DNA, 15 bp, Homo sapiens
gccatatgtgagcca

SEQ ID NO: 328717 - DNA, 15 bp, Homo sapiens
agccatatgtgagcc

SEQ ID NO: 328718 - DNA, 15 bp, Homo sapiens
gagccatatgtgagc

SEQ ID NO: 328719 - DNA, 15 bp, Homo sapiens
ggagccatatgtgag

SEQ ID NO: 328720 - DNA, 15 bp, Homo sapiens
aggagccatatgtga

SEQ ID NO: 328721 - DNA, 15 bp, Homo sapiens
aaggagccatatgtg

SEQ ID NO: 328722 - DNA, 15 bp, Homo sapiens
gaaggagccatatgt

SEQ ID NO: 328723 - DNA, 15 bp, Homo sapiens
ggaaggagccatatg

SEQ ID NO: 328724 - DNA, 15 bp, Homo sapiens
aggaaggagccatat

SEQ ID NO: 328725 - DNA, 15 bp, Homo sapiens
gaggaaggagccata

SEQ ID NO: 328726 - DNA, 15 bp, Homo sapiens
agaggaaggagccat

SEQ ID NO: 328727 - DNA, 15 bp, Homo sapiens
cagaggaaggagcca

SEQ ID NO: 328728 - DNA, 15 bp, Homo sapiens
ccagaggaaggagcc

SEQ ID NO: 328729 - DNA, 15 bp, Homo sapiens
gccagaggaaggagc

SEQ ID NO: 328730 - DNA, 15 bp, Homo sapiens
ggccagaggaaggag

SEQ ID NO: 328731 - DNA, 15 bp, Homo sapiens
gggccagaggaagga

SEQ ID NO: 328732 - DNA, 15 bp, Homo sapiens
tgggccagaggaagg

SEQ ID NO: 328733 - DNA, 15 bp, Homo sapiens
ttgggccagaggaag

SEQ ID NO: 328734 - DNA, 15 bp, Homo sapiens
tttgggccagaggaa

SEQ ID NO: 328735 - DNA, 15 bp, Homo sapiens
atttgggccagagga

SEQ ID NO: 328736 - DNA, 15 bp, Homo sapiens
catttgggccagagg

SEQ ID NO: 328737 - DNA, 15 bp, Homo sapiens
ccatttgggccagag

SEQ ID NO: 328738 - DNA, 15 bp, Homo sapiens
gccatttgggccaga

SEQ ID NO: 328739 - DNA, 15 bp, Homo sapiens
agccatttgggccag

SEQ ID NO: 328740 - DNA, 15 bp, Homo sapiens
cagccatttgggcca

SEQ ID NO: 328741 - DNA, 15 bp, Homo sapiens
ccagccatttgggcc

SEQ ID NO: 328742 - DNA, 15 bp, Homo sapiens
tccagccatttgggc

SEQ ID NO: 328743 - DNA, 15 bp, Homo sapiens
ctccagccatttggg

SEQ ID NO: 328744 - DNA, 15 bp, Homo sapiens
cctccagccatttgg

SEQ ID NO: 328745 - DNA, 15 bp, Homo sapiens
tcctccagccatttg

SEQ ID NO: 328746 - DNA, 15 bp, Homo sapiens
ttcctccagccattt

SEQ ID NO: 328747 - DNA, 15 bp, Homo sapiens
tttcctccagccatt

SEQ ID NO: 328748 - DNA, 15 bp, Homo sapiens
ttttcctccagccat

SEQ ID NO: 328749 - DNA, 15 bp, Homo sapiens
gttttcctccagcca

SEQ ID NO: 328750 - DNA, 15 bp, Homo sapiens
agttttcctccagcc

SEQ ID NO: 328751 - DNA, 15 bp, Homo sapiens
tagttttcctccagc

SEQ ID NO: 328752 - DNA, 15 bp, Homo sapiens
atagttttcctccag

SEQ ID NO: 328753 - DNA, 15 bp, Homo sapiens
catagttttcctcca

SEQ ID NO: 328754 - DNA, 15 bp, Homo sapiens
acatagttttcctcc

SEQ ID NO: 328755 - DNA, 15 bp, Homo sapiens
gacatagttttcctc

SEQ ID NO: 328756 - DNA, 15 bp, Homo sapiens
agacatagttttcct

SEQ ID NO: 328757 - DNA, 15 bp, Homo sapiens
tagacatagttttcc

SEQ ID NO: 328758 - DNA, 15 bp, Homo sapiens
ttagacatagttttc

SEQ ID NO: 328759 - DNA, 15 bp, Homo sapiens
attagacatagtttt

SEQ ID NO: 328760 - DNA, 15 bp, Homo sapiens
aattagacatagttt

SEQ ID NO: 328761 - DNA, 15 bp, Homo sapiens
aaattagacatagtt

SEQ ID NO: 328762 - DNA, 15 bp, Homo sapiens
aaaattagacatagt

SEQ ID NO: 328763 - DNA, 15 bp, Homo sapiens
gaaaattagacatag

SEQ ID NO: 328764 - DNA, 15 bp, Homo sapiens
ggaaaattagacata

SEQ ID NO: 328765 - DNA, 15 bp, Homo sapiens
aggaaaattagacat

SEQ ID NO: 328766 - DNA, 15 bp, Homo sapiens
gaggaaaattagaca

SEQ ID NO: 328767 - DNA, 15 bp, Homo sapiens
ggaggaaaattagac

SEQ ID NO: 328768 - DNA, 15 bp, Homo sapiens
tggaggaaaattaga

SEQ ID NO: 328769 - DNA, 15 bp, Homo sapiens
ctggaggaaaattag

SEQ ID NO: 328770 - DNA, 15 bp, Homo sapiens
gctggaggaaaatta

SEQ ID NO: 328771 - DNA, 15 bp, Homo sapiens
ggctggaggaaaatt

SEQ ID NO: 328772 - DNA, 15 bp, Homo sapiens
tggctggaggaaaat

SEQ ID NO: 328773 - DNA, 15 bp, Homo sapiens
gtggctggaggaaaa

SEQ ID NO: 328774 - DNA, 15 bp, Homo sapiens
tgtggctggaggaaa

SEQ ID NO: 328775 - DNA, 15 bp, Homo sapiens
ctgtggctggaggaa

SEQ ID NO: 328776 - DNA, 15 bp, Homo sapiens
actgtggctggagga

SEQ ID NO: 328777 - DNA, 15 bp, Homo sapiens
aactgtggctggagg

SEQ ID NO: 328778 - DNA, 15 bp, Homo sapiens
gaactgtggctggag

SEQ ID NO: 328779 - DNA, 15 bp, Homo sapiens
agaactgtggctgga

SEQ ID NO: 328780 - DNA, 15 bp, Homo sapiens
gagaactgtggctgg

SEQ ID NO: 328781 - DNA, 15 bp, Homo sapiens
tgagaactgtggctg

SEQ ID NO: 328782 - DNA, 15 bp, Homo sapiens
ctgagaactgtggct

SEQ ID NO: 328783 - DNA, 15 bp, Homo sapiens
cctgagaactgtggc

SEQ ID NO: 328784 - DNA, 15 bp, Homo sapiens
acctgagaactgtgg

SEQ ID NO: 328785 - DNA, 15 bp, Homo sapiens
gacctgagaactgtg

SEQ ID NO: 328786 - DNA, 15 bp, Homo sapiens
tgacctgagaactgt

SEQ ID NO: 328787 - DNA, 15 bp, Homo sapiens
ttgacctgagaactg

SEQ ID NO: 328788 - DNA, 15 bp, Homo sapiens
attgacctgagaact

SEQ ID NO: 328789 - DNA, 15 bp, Homo sapiens
cattgacctgagaac

SEQ ID NO: 328790 - DNA, 15 bp, Homo sapiens
tcattgacctgagaa

SEQ ID NO: 328791 - DNA, 15 bp, Homo sapiens
ttcattgacctgaga

SEQ ID NO: 328792 - DNA, 15 bp, Homo sapiens
tttcattgacctgag

SEQ ID NO: 328793 - DNA, 15 bp, Homo sapiens
gtttcattgacctga

SEQ ID NO: 328794 - DNA, 15 bp, Homo sapiens
tgtttcattgacctg

SEQ ID NO: 328795 - DNA, 15 bp, Homo sapiens
gtgtttcattgacct

SEQ ID NO: 328796 - DNA, 15 bp, Homo sapiens
tgtgtttcattgacc

SEQ ID NO: 328797 - DNA, 15 bp, Homo sapiens
ctgtgtttcattgac

SEQ ID NO: 328798 - DNA, 15 bp, Homo sapiens
actgtgtttcattga

SEQ ID NO: 328799 - DNA, 15 bp, Homo sapiens
tactgtgtttcattg

SEQ ID NO: 328800 - DNA, 15 bp, Homo sapiens
ttactgtgtttcatt

SEQ ID NO: 328801 - DNA, 15 bp, Homo sapiens
gttactgtgtttcat

SEQ ID NO: 328802 - DNA, 15 bp, Homo sapiens
tgttactgtgtttca

SEQ ID NO: 328803 - DNA, 15 bp, Homo sapiens
atgttactgtgtttc

SEQ ID NO: 328804 - DNA, 15 bp, Homo sapiens
gatgttactgtgttt

SEQ ID NO: 328805 - DNA, 15 bp, Homo sapiens
agatgttactgtgtt

SEQ ID NO: 328806 - DNA, 15 bp, Homo sapiens
gagatgttactgtgt

SEQ ID NO: 328807 - DNA, 15 bp, Homo sapiens
agagatgttactgtg

SEQ ID NO: 328808 - DNA, 15 bp, Homo sapiens
cagagatgttactgt

SEQ ID NO: 328809 - DNA, 15 bp, Homo sapiens
gcagagatgttactg

SEQ ID NO: 328810 - DNA, 15 bp, Homo sapiens
ggcagagatgttact

SEQ ID NO: 328811 - DNA, 15 bp, Homo sapiens
gggcagagatgttac

SEQ ID NO: 328812 - DNA, 15 bp, Homo sapiens
tgggcagagatgtta

SEQ ID NO: 328813 - DNA, 15 bp, Homo sapiens
ctgggcagagatgtt

SEQ ID NO: 328814 - DNA, 15 bp, Homo sapiens
cctgggcagagatgt

SEQ ID NO: 328815 - DNA, 15 bp, Homo sapiens
gcctgggcagagatg

SEQ ID NO: 328816 - DNA, 15 bp, Homo sapiens
agcctgggcagagat

SEQ ID NO: 328817 - DNA, 15 bp, Homo sapiens
cagcctgggcagaga

SEQ ID NO: 328818 - DNA, 15 bp, Homo sapiens
gcagcctgggcagag

SEQ ID NO: 328819 - DNA, 15 bp, Homo sapiens
agcagcctgggcaga

SEQ ID NO: 328820 - DNA, 15 bp, Homo sapiens
cagcagcctgggcag

SEQ ID NO: 328821 - DNA, 15 bp, Homo sapiens
acagcagcctgggca

SEQ ID NO: 328822 - DNA, 15 bp, Homo sapiens
aacagcagcctgggc

SEQ ID NO: 328823 - DNA, 15 bp, Homo sapiens
aaacagcagcctggg

SEQ ID NO: 328824 - DNA, 15 bp, Homo sapiens
caaacagcagcctgg

SEQ ID NO: 328825 - DNA, 15 bp, Homo sapiens
tcaaacagcagcctg

SEQ ID NO: 328826 - DNA, 15 bp, Homo sapiens
ctcaaacagcagcct

SEQ ID NO: 328827 - DNA, 15 bp, Homo sapiens
actcaaacagcagcc

SEQ ID NO: 328828 - DNA, 15 bp, Homo sapiens
cactcaaacagcagc

SEQ ID NO: 328829 - DNA, 15 bp, Homo sapiens
ccactcaaacagcag

SEQ ID NO: 328830 - DNA, 15 bp, Homo sapiens
gccactcaaacagca

SEQ ID NO: 328831 - DNA, 15 bp, Homo sapiens
tgccactcaaacagc

SEQ ID NO: 328832 - DNA, 15 bp, Homo sapiens
atgccactcaaacag

SEQ ID NO: 328833 - DNA, 15 bp, Homo sapiens
catgccactcaaaca

SEQ ID NO: 328834 - DNA, 15 bp, Homo sapiens
acatgccactcaaac

SEQ ID NO: 328835 - DNA, 15 bp, Homo sapiens
cacatgccactcaaa

SEQ ID NO: 328836 - DNA, 15 bp, Homo sapiens
gcacatgccactcaa

SEQ ID NO: 328837 - DNA, 15 bp, Homo sapiens
agcacatgccactca

SEQ ID NO: 328838 - DNA, 15 bp, Homo sapiens
gagcacatgccactc

SEQ ID NO: 328839 - DNA, 15 bp, Homo sapiens
agagcacatgccact

SEQ ID NO: 328840 - DNA, 15 bp, Homo sapiens
aagagcacatgccac

SEQ ID NO: 328841 - DNA, 15 bp, Homo sapiens
taagagcacatgcca

SEQ ID NO: 328842 - DNA, 15 bp, Homo sapiens
ataagagcacatgcc

SEQ ID NO: 328843 - DNA, 15 bp, Homo sapiens
gataagagcacatgc

SEQ ID NO: 328844 - DNA, 15 bp, Homo sapiens
ggataagagcacatg

SEQ ID NO: 328845 - DNA, 15 bp, Homo sapiens
aggataagagcacat

SEQ ID NO: 328846 - DNA, 15 bp, Homo sapiens
gaggataagagcaca

SEQ ID NO: 328847 - DNA, 15 bp, Homo sapiens
ggaggataagagcac

SEQ ID NO: 328848 - DNA, 15 bp, Homo sapiens
aggaggataagagca

SEQ ID NO: 328849 - DNA, 15 bp, Homo sapiens
aaggaggataagagc

SEQ ID NO: 328850 - DNA, 15 bp, Homo sapiens
caaggaggataagag

SEQ ID NO: 328851 - DNA, 15 bp, Homo sapiens
ccaaggaggataaga

SEQ ID NO: 328852 - DNA, 15 bp, Homo sapiens
gccaaggaggataag

SEQ ID NO: 328853 - DNA, 15 bp, Homo sapiens
tgccaaggaggataa

SEQ ID NO: 328854 - DNA, 15 bp, Homo sapiens
ctgccaaggaggata

SEQ ID NO: 328855 - DNA, 15 bp, Homo sapiens
cctgccaaggaggat

SEQ ID NO: 328856 - DNA, 15 bp, Homo sapiens
tcctgccaaggagga

SEQ ID NO: 328857 - DNA, 15 bp, Homo sapiens
ttcctgccaaggagg

SEQ ID NO: 328858 - DNA, 15 bp, Homo sapiens
tttcctgccaaggag

SEQ ID NO: 328859 - DNA, 15 bp, Homo sapiens
atttcctgccaagga

SEQ ID NO: 328860 - DNA, 15 bp, Homo sapiens
gatttcctgccaagg

SEQ ID NO: 328861 - DNA, 15 bp, Homo sapiens
ggatttcctgccaag

SEQ ID NO: 328862 - DNA, 15 bp, Homo sapiens
cggatttcctgccaa

SEQ ID NO: 328863 - DNA, 15 bp, Homo sapiens
gcggatttcctgcca

SEQ ID NO: 328864 - DNA, 15 bp, Homo sapiens
tgcggatttcctgcc

SEQ ID NO: 328865 - DNA, 15 bp, Homo sapiens
ctgcggatttcctgc

SEQ ID NO: 328866 - DNA, 15 bp, Homo sapiens
cctgcggatttcctg

SEQ ID NO: 328867 - DNA, 15 bp, Homo sapiens
gcctgcggatttcct

SEQ ID NO: 328868 - DNA, 15 bp, Homo sapiens
agcctgcggatttcc

SEQ ID NO: 328869 - DNA, 15 bp, Homo sapiens
cagcctgcggatttc

SEQ ID NO: 328870 - DNA, 15 bp, Homo sapiens
ccagcctgcggattt

SEQ ID NO: 328871 - DNA, 15 bp, Homo sapiens
cccagcctgcggatt

SEQ ID NO: 328872 - DNA, 15 bp, Homo sapiens
gcccagcctgcggat

SEQ ID NO: 328873 - DNA, 15 bp, Homo sapiens
agcccagcctgcgga

SEQ ID NO: 328874 - DNA, 15 bp, Homo sapiens
cagcccagcctgcgg

SEQ ID NO: 328875 - DNA, 15 bp, Homo sapiens
gcagcccagcctgcg

SEQ ID NO: 328876 - DNA, 15 bp, Homo sapiens
agcagcccagcctgc

SEQ ID NO: 328877 - DNA, 15 bp, Homo sapiens
cagcagcccagcctg

SEQ ID NO: 328878 - DNA, 15 bp, Homo sapiens
ccagcagcccagcct

SEQ ID NO: 328879 - DNA, 15 bp, Homo sapiens
gccagcagcccagcc

SEQ ID NO: 328880 - DNA, 15 bp, Homo sapiens
tgccagcagcccagc

SEQ ID NO: 328881 - DNA, 15 bp, Homo sapiens
ctgccagcagcccag

SEQ ID NO: 328882 - DNA, 15 bp, Homo sapiens
gctgccagcagccca

SEQ ID NO: 328883 - DNA, 15 bp, Homo sapiens
ggctgccagcagccc

SEQ ID NO: 328884 - DNA, 15 bp, Homo sapiens
tggctgccagcagcc

SEQ ID NO: 328885 - DNA, 15 bp, Homo sapiens
atggctgccagcagc

SEQ ID NO: 328886 - DNA, 15 bp, Homo sapiens
gatggctgccagcag

SEQ ID NO: 328887 - DNA, 15 bp, Homo sapiens
ggatggctgccagca

SEQ ID NO: 328888 - DNA, 15 bp, Homo sapiens
aggatggctgccagc

SEQ ID NO: 328889 - DNA, 15 bp, Homo sapiens
caggatggctgccag

SEQ ID NO: 328890 - DNA, 15 bp, Homo sapiens
gcaggatggctgcca

SEQ ID NO: 328891 - DNA, 15 bp, Homo sapiens
tgcaggatggctgcc

SEQ ID NO: 328892 - DNA, 15 bp, Homo sapiens
atgcaggatggctgc

SEQ ID NO: 328893 - DNA, 15 bp, Homo sapiens
gatgcaggatggctg

SEQ ID NO: 328894 - DNA, 15 bp, Homo sapiens
cgatgcaggatggct

SEQ ID NO: 328895 - DNA, 15 bp, Homo sapiens
acgatgcaggatggc

SEQ ID NO: 328896 - DNA, 15 bp, Homo sapiens
tacgatgcaggatgg

SEQ ID NO: 328897 - DNA, 15 bp, Homo sapiens
ttacgatgcaggatg

SEQ ID NO: 328898 - DNA, 15 bp, Homo sapiens
cttacgatgcaggat

SEQ ID NO: 328899 - DNA, 15 bp, Homo sapiens
tcttacgatgcagga

SEQ ID NO: 328900 - DNA, 15 bp, Homo sapiens
ctcttacgatgcagg

SEQ ID NO: 328901 - DNA, 15 bp, Homo sapiens
cctcttacgatgcag

SEQ ID NO: 328902 - DNA, 15 bp, Homo sapiens
ccctcttacgatgca

SEQ ID NO: 328903 - DNA, 15 bp, Homo sapiens
tccctcttacgatgc

SEQ ID NO: 328904 - DNA, 15 bp, Homo sapiens
ttccctcttacgatg

SEQ ID NO: 328905 - DNA, 15 bp, Homo sapiens
cttccctcttacgat

SEQ ID NO: 328906 - DNA, 15 bp, Homo sapiens
acttccctcttacga

SEQ ID NO: 328907 - DNA, 15 bp, Homo sapiens
gacttccctcttacg

SEQ ID NO: 328908 - DNA, 15 bp, Homo sapiens
agacttccctcttac

SEQ ID NO: 328909 - DNA, 15 bp, Homo sapiens
tagacttccctctta

SEQ ID NO: 328910 - DNA, 15 bp, Homo sapiens
atagacttccctctt

SEQ ID NO: 328911 - DNA, 15 bp, Homo sapiens
gatagacttccctct

SEQ ID NO: 328912 - DNA, 15 bp, Homo sapiens
agatagacttccctc

SEQ ID NO: 328913 - DNA, 15 bp, Homo sapiens
cagatagacttccct

SEQ ID NO: 328914 - DNA, 15 bp, Homo sapiens
tcagatagacttccc

SEQ ID NO: 328915 - DNA, 15 bp, Homo sapiens
ctcagatagacttcc

SEQ ID NO: 328916 - DNA, 15 bp, Homo sapiens
cctcagatagacttc

SEQ ID NO: 328917 - DNA, 15 bp, Homo sapiens
tcctcagatagactt

SEQ ID NO: 328918 - DNA, 15 bp, Homo sapiens
atcctcagatagact

SEQ ID NO: 328919 - DNA, 15 bp, Homo sapiens
catcctcagatagac

SEQ ID NO: 328920 - DNA, 15 bp, Homo sapiens
ccatcctcagataga

SEQ ID NO: 328921 - DNA, 15 bp, Homo sapiens
cccatcctcagatag

SEQ ID NO: 328922 - DNA, 15 bp, Homo sapiens
gcccatcctcagata

SEQ ID NO: 328923 - DNA, 15 bp, Homo sapiens
agcccatcctcagat

SEQ ID NO: 328924 - DNA, 15 bp, Homo sapiens
tagcccatcctcaga

SEQ ID NO: 328925 - DNA, 15 bp, Homo sapiens
ttagcccatcctcag

SEQ ID NO: 328926 - DNA, 15 bp, Homo sapiens
gttagcccatcctca

SEQ ID NO: 328927 - DNA, 15 bp, Homo sapiens
tgttagcccatcctc

SEQ ID NO: 328928 - DNA, 15 bp, Homo sapiens
gtgttagcccatcct

SEQ ID NO: 328929 - DNA, 15 bp, Homo sapiens
tgtgttagcccatcc

SEQ ID NO: 328930 - DNA, 15 bp, Homo sapiens
ctgtgttagcccatc

SEQ ID NO: 328931 - DNA, 15 bp, Homo sapiens
tctgtgttagcccat

SEQ ID NO: 328932 - DNA, 15 bp, Homo sapiens
ctctgtgttagccca

SEQ ID NO: 328933 - DNA, 15 bp, Homo sapiens
tctctgtgttagccc

SEQ ID NO: 328934 - DNA, 15 bp, Homo sapiens
ttctctgtgttagcc

SEQ ID NO: 328935 - DNA, 15 bp, Homo sapiens
tttctctgtgttagc

SEQ ID NO: 328936 - DNA, 15 bp, Homo sapiens
ttttctctgtgttag

SEQ ID NO: 328937 - DNA, 15 bp, Homo sapiens
attttctctgtgtta

SEQ ID NO: 328938 - DNA, 15 bp, Homo sapiens
cattttctctgtgtt

SEQ ID NO: 328939 - DNA, 15 bp, Homo sapiens
tcattttctctgtgt

SEQ ID NO: 328940 - DNA, 15 bp, Homo sapiens
ttcattttctctgtg

SEQ ID NO: 328941 - DNA, 15 bp, Homo sapiens
cttcattttctctgt

SEQ ID NO: 328942 - DNA, 15 bp, Homo sapiens
gcttcattttctctg

SEQ ID NO: 328943 - DNA, 15 bp, Homo sapiens
agcttcattttctct

SEQ ID NO: 328944 - DNA, 15 bp, Homo sapiens
cagcttcattttctc

SEQ ID NO: 328945 - DNA, 15 bp, Homo sapiens
tcagcttcattttct

SEQ ID NO: 328946 - DNA, 15 bp, Homo sapiens
ctcagcttcattttc

SEQ ID NO: 328947 - DNA, 15 bp, Homo sapiens
tctcagcttcatttt

SEQ ID NO: 328948 - DNA, 15 bp, Homo sapiens
ctctcagcttcattt

SEQ ID NO: 328949 - DNA, 15 bp, Homo sapiens
cctctcagcttcatt

SEQ ID NO: 328950 - DNA, 15 bp, Homo sapiens
ccctctcagcttcat

SEQ ID NO: 328951 - DNA, 15 bp, Homo sapiens
cccctctcagcttca

SEQ ID NO: 328952 - DNA, 15 bp, Homo sapiens
acccctctcagcttc

SEQ ID NO: 328953 - DNA, 15 bp, Homo sapiens
cacccctctcagctt

SEQ ID NO: 328954 - DNA, 15 bp, Homo sapiens
ccacccctctcagct

SEQ ID NO: 328955 - DNA, 15 bp, Homo sapiens
tccacccctctcagc

SEQ ID NO: 328956 - DNA, 15 bp, Homo sapiens
gtccacccctctcag

SEQ ID NO: 328957 - DNA, 15 bp, Homo sapiens
tgtccacccctctca

SEQ ID NO: 328958 - DNA, 15 bp, Homo sapiens
ctgtccacccctctc

SEQ ID NO: 328959 - DNA, 15 bp, Homo sapiens
tctgtccacccctct

SEQ ID NO: 328960 - DNA, 15 bp, Homo sapiens
ttctgtccacccctc

SEQ ID NO: 328961 - DNA, 15 bp, Homo sapiens
tttctgtccacccct

SEQ ID NO: 328962 - DNA, 15 bp, Homo sapiens
ctttctgtccacccc

SEQ ID NO: 328963 - DNA, 15 bp, Homo sapiens
gctttctgtccaccc

SEQ ID NO: 328964 - DNA, 15 bp, Homo sapiens
ggctttctgtccacc

SEQ ID NO: 328965 - DNA, 15 bp, Homo sapiens
gggctttctgtccac

SEQ ID NO: 328966 - DNA, 15 bp, Homo sapiens
ggggctttctgtcca

SEQ ID NO: 328967 - DNA, 15 bp, Homo sapiens
aggggctttctgtcc

SEQ ID NO: 328968 - DNA, 15 bp, Homo sapiens
caggggctttctgtc

SEQ ID NO: 328969 - DNA, 15 bp, Homo sapiens
ccaggggctttctgt

SEQ ID NO: 328970 - DNA, 15 bp, Homo sapiens
tccaggggctttctg

SEQ ID NO: 328971 - DNA, 15 bp, Homo sapiens
atccaggggctttct

SEQ ID NO: 328972 - DNA, 15 bp, Homo sapiens
gatccaggggctttc

SEQ ID NO: 328973 - DNA, 15 bp, Homo sapiens
tgatccaggggcttt

SEQ ID NO: 328974 - DNA, 15 bp, Homo sapiens
ttgatccaggggctt

SEQ ID NO: 328975 - DNA, 15 bp, Homo sapiens
cttgatccaggggct

SEQ ID NO: 328976 - DNA, 15 bp, Homo sapiens
gcttgatccaggggc

SEQ ID NO: 328977 - DNA, 15 bp, Homo sapiens
agcttgatccagggg

SEQ ID NO: 328978 - DNA, 15 bp, Homo sapiens
cagcttgatccaggg

SEQ ID NO: 328979 - DNA, 15 bp, Homo sapiens
acagcttgatccagg

SEQ ID NO: 328980 - DNA, 15 bp, Homo sapiens
tacagcttgatccag

SEQ ID NO: 328981 - DNA, 15 bp, Homo sapiens
atacagcttgatcca

SEQ ID NO: 328982 - DNA, 15 bp, Homo sapiens
gatacagcttgatcc

SEQ ID NO: 328983 - DNA, 15 bp, Homo sapiens
agatacagcttgatc

SEQ ID NO: 328984 - DNA, 15 bp, Homo sapiens
aagatacagcttgat

SEQ ID NO: 328985 - DNA, 15 bp, Homo sapiens
taagatacagcttga

SEQ ID NO: 328986 - DNA, 15 bp, Homo sapiens
ttaagatacagcttg

SEQ ID NO: 328987 - DNA, 15 bp, Homo sapiens
cttaagatacagctt

SEQ ID NO: 328988 - DNA, 15 bp, Homo sapiens
gcttaagatacagct

SEQ ID NO: 328989 - DNA, 15 bp, Homo sapiens
tgcttaagatacagc

SEQ ID NO: 328990 - DNA, 15 bp, Homo sapiens
ctgcttaagatacag

SEQ ID NO: 328991 - DNA, 15 bp, Homo sapiens
gctgcttaagataca

SEQ ID NO: 328992 - DNA, 15 bp, Homo sapiens
ggctgcttaagatac

SEQ ID NO: 328993 - DNA, 15 bp, Homo sapiens
aggctgcttaagata

SEQ ID NO: 328994 - DNA, 15 bp, Homo sapiens
aaggctgcttaagat

SEQ ID NO: 328995 - DNA, 15 bp, Homo sapiens
taaggctgcttaaga

SEQ ID NO: 328996 - DNA, 15 bp, Homo sapiens
ataaggctgcttaag

SEQ ID NO: 328997 - DNA, 15 bp, Homo sapiens
gataaggctgcttaa

SEQ ID NO: 328998 - DNA, 15 bp, Homo sapiens
ggataaggctgctta

SEQ ID NO: 328999 - DNA, 15 bp, Homo sapiens
aggataaggctgctt

SEQ ID NO: 329000 - DNA, 15 bp, Homo sapiens
caggataaggctgct

SEQ ID NO: 329001 - DNA, 15 bp, Homo sapiens
ccaggataaggctgc

SEQ ID NO: 329002 - DNA, 15 bp, Homo sapiens
tccaggataaggctg

SEQ ID NO: 329003 - DNA, 15 bp, Homo sapiens
ttccaggataaggct

SEQ ID NO: 329004 - DNA, 15 bp, Homo sapiens
attccaggataaggc

SEQ ID NO: 329005 - DNA, 15 bp, Homo sapiens
aattccaggataagg

SEQ ID NO: 329006 - DNA, 15 bp, Homo sapiens
aaattccaggataag

SEQ ID NO: 329007 - DNA, 15 bp, Homo sapiens
aaaattccaggataa

SEQ ID NO: 329008 - DNA, 15 bp, Homo sapiens
aaaaattccaggata

SEQ ID NO: 329009 - DNA, 15 bp, Homo sapiens
gaaaaattccaggat

SEQ ID NO: 329010 - DNA, 15 bp, Homo sapiens
agaaaaattccagga

SEQ ID NO: 329011 - DNA, 15 bp, Homo sapiens
gagaaaaattccagg

SEQ ID NO: 329012 - DNA, 15 bp, Homo sapiens
tgagaaaaattccag

SEQ ID NO: 329013 - DNA, 15 bp, Homo sapiens
atgagaaaaattcca

SEQ ID NO: 329014 - DNA, 15 bp, Homo sapiens
tatgagaaaaattcc

SEQ ID NO: 329015 - DNA, 15 bp, Homo sapiens
ttatgagaaaaattc

SEQ ID NO: 329016 - DNA, 15 bp, Homo sapiens
gttatgagaaaaatt

SEQ ID NO: 329017 - DNA, 15 bp, Homo sapiens
tgttatgagaaaaat

SEQ ID NO: 329018 - DNA, 15 bp, Homo sapiens
atgttatgagaaaaa

SEQ ID NO: 329019 - DNA, 15 bp, Homo sapiens
aatgttatgagaaaa

SEQ ID NO: 329020 - DNA, 15 bp, Homo sapiens
aaatgttatgagaaa

SEQ ID NO: 329021 - DNA, 15 bp, Homo sapiens
aaaatgttatgagaa

SEQ ID NO: 329022 - DNA, 15 bp, Homo sapiens
aaaaatgttatgaga

SEQ ID NO: 329023 - DNA, 15 bp, Homo sapiens
aaaaaatgttatgag

SEQ ID NO: 329024 - DNA, 15 bp, Homo sapiens
aaaaaaatgttatga

SEQ ID NO: 329025 - DNA, 15 bp, Homo sapiens
aaaaaaaatgttatg

SEQ ID NO: 329026 - DNA, 15 bp, Homo sapiens
caaaaaaaatgttat

SEQ ID NO: 329027 - DNA, 15 bp, Homo sapiens
ccaaaaaaaatgtta

SEQ ID NO: 329028 - DNA, 15 bp, Homo sapiens
accaaaaaaaatgtt

SEQ ID NO: 329029 - DNA, 15 bp, Homo sapiens
taccaaaaaaaatgt

SEQ ID NO: 329030 - DNA, 15 bp, Homo sapiens
ctaccaaaaaaaatg

SEQ ID NO: 329031 - DNA, 15 bp, Homo sapiens
tctaccaaaaaaaat

SEQ ID NO: 329032 - DNA, 15 bp, Homo sapiens
ctctaccaaaaaaaa

SEQ ID NO: 329033 - DNA, 15 bp, Homo sapiens
tctctaccaaaaaaa

SEQ ID NO: 329034 - DNA, 15 bp, Homo sapiens
gtctctaccaaaaaa

SEQ ID NO: 329035 - DNA, 15 bp, Homo sapiens
tgtctctaccaaaaa

SEQ ID NO: 329036 - DNA, 15 bp, Homo sapiens
ctgtctctaccaaaa

SEQ ID NO: 329037 - DNA, 15 bp, Homo sapiens
cctgtctctaccaaa

SEQ ID NO: 329038 - DNA, 15 bp, Homo sapiens
ccctgtctctaccaa

SEQ ID NO: 329039 - DNA, 15 bp, Homo sapiens
accctgtctctacca

SEQ ID NO: 329040 - DNA, 15 bp, Homo sapiens
gaccctgtctctacc

SEQ ID NO: 329041 - DNA, 15 bp, Homo sapiens
agaccctgtctctac

SEQ ID NO: 329042 - DNA, 15 bp, Homo sapiens
aagaccctgtctcta

SEQ ID NO: 329043 - DNA, 15 bp, Homo sapiens
caagaccctgtctct

SEQ ID NO: 329044 - DNA, 15 bp, Homo sapiens
gcaagaccctgtctc

SEQ ID NO: 329045 - DNA, 15 bp, Homo sapiens
agcaagaccctgtct

SEQ ID NO: 329046 - DNA, 15 bp, Homo sapiens
tagcaagaccctgtc

SEQ ID NO: 329047 - DNA, 15 bp, Homo sapiens
atagcaagaccctgt

SEQ ID NO: 329048 - DNA, 15 bp, Homo sapiens
catagcaagaccctg

SEQ ID NO: 329049 - DNA, 15 bp, Homo sapiens
acatagcaagaccct

SEQ ID NO: 329050 - DNA, 15 bp, Homo sapiens
aacatagcaagaccc

SEQ ID NO: 329051 - DNA, 15 bp, Homo sapiens
caacatagcaagacc

SEQ ID NO: 329052 - DNA, 15 bp, Homo sapiens
gcaacatagcaagac

SEQ ID NO: 329053 - DNA, 15 bp, Homo sapiens
ggcaacatagcaaga

SEQ ID NO: 329054 - DNA, 15 bp, Homo sapiens
gggcaacatagcaag

SEQ ID NO: 329055 - DNA, 15 bp, Homo sapiens
tgggcaacatagcaa

SEQ ID NO: 329056 - DNA, 15 bp, Homo sapiens
ctgggcaacatagca

SEQ ID NO: 329057 - DNA, 15 bp, Homo sapiens
cctgggcaacatagc

SEQ ID NO: 329058 - DNA, 15 bp, Homo sapiens
gcctgggcaacatag

SEQ ID NO: 329059 - DNA, 15 bp, Homo sapiens
agcctgggcaacata

SEQ ID NO: 329060 - DNA, 15 bp, Homo sapiens
cagcctgggcaacat

SEQ ID NO: 329061 - DNA, 15 bp, Homo sapiens
accagcctgggcaac

SEQ ID NO: 329062 - DNA, 15 bp, Homo sapiens
gaccagcctgggcaa

SEQ ID NO: 329063 - DNA, 15 bp, Homo sapiens
aagaccagcctgggc

SEQ ID NO: 329064 - DNA, 15 bp, Homo sapiens
caagaccagcctggg

SEQ ID NO: 329065 - DNA, 15 bp, Homo sapiens
ggttcaagaccagcc

SEQ ID NO: 329066 - DNA, 15 bp, Homo sapiens
gggttcaagaccagc

SEQ ID NO: 329067 - DNA, 15 bp, Homo sapiens
ggggttcaagaccag

SEQ ID NO: 329068 - DNA, 15 bp, Homo sapiens
aggggttcaagacca

SEQ ID NO: 329069 - DNA, 15 bp, Homo sapiens
caggggttcaagacc

SEQ ID NO: 329070 - DNA, 15 bp, Homo sapiens
ccaggggttcaagac

SEQ ID NO: 329071 - DNA, 15 bp, Homo sapiens
gccaggggttcaaga

SEQ ID NO: 329072 - DNA, 15 bp, Homo sapiens
ggccaggggttcaag

SEQ ID NO: 329073 - DNA, 15 bp, Homo sapiens
aggccaggggttcaa

SEQ ID NO: 329074 - DNA, 15 bp, Homo sapiens
gaggccaggggttca

SEQ ID NO: 329075 - DNA, 15 bp, Homo sapiens
ggaggccaggggttc

SEQ ID NO: 329076 - DNA, 15 bp, Homo sapiens
tggaggccaggggtt

SEQ ID NO: 329077 - DNA, 15 bp, Homo sapiens
ttggaggccaggggt

SEQ ID NO: 329078 - DNA, 15 bp, Homo sapiens
cttggaggccagggg

SEQ ID NO: 329079 - DNA, 15 bp, Homo sapiens
acttggaggccaggg

SEQ ID NO: 329080 - DNA, 15 bp, Homo sapiens
cacttggaggccagg

SEQ ID NO: 329081 - DNA, 15 bp, Homo sapiens
tcacttggaggccag

SEQ ID NO: 329082 - DNA, 15 bp, Homo sapiens
atcacttggaggcca

SEQ ID NO: 329083 - DNA, 15 bp, Homo sapiens
gatcacttggaggcc

SEQ ID NO: 329084 - DNA, 15 bp, Homo sapiens
agatcacttggaggc

SEQ ID NO: 329085 - DNA, 15 bp, Homo sapiens
cagatcacttggagg

SEQ ID NO: 329086 - DNA, 15 bp, Homo sapiens
acagatcacttggag

SEQ ID NO: 329087 - DNA, 15 bp, Homo sapiens
gacagatcacttgga

SEQ ID NO: 329088 - DNA, 15 bp, Homo sapiens
ggacagatcacttgg

SEQ ID NO: 329089 - DNA, 15 bp, Homo sapiens
tggacagatcacttg

SEQ ID NO: 329090 - DNA, 15 bp, Homo sapiens
gtggacagatcactt

SEQ ID NO: 329091 - DNA, 15 bp, Homo sapiens
ggtggacagatcact

SEQ ID NO: 329092 - DNA, 15 bp, Homo sapiens
aggtggacagatcac

SEQ ID NO: 329093 - DNA, 15 bp, Homo sapiens
gaggtggacagatca

SEQ ID NO: 329094 - DNA, 15 bp, Homo sapiens
tgaggtggacagatc

SEQ ID NO: 329095 - DNA, 15 bp, Homo sapiens
ctgaggtggacagat

SEQ ID NO: 329096 - DNA, 15 bp, Homo sapiens
gctgaggtggacaga

SEQ ID NO: 329097 - DNA, 15 bp, Homo sapiens
ggctgaggtggacag

SEQ ID NO: 329098 - DNA, 15 bp, Homo sapiens
aggctgaggtggaca

SEQ ID NO: 329099 - DNA, 15 bp, Homo sapiens
gaggctgaggtggac

SEQ ID NO: 329100 - DNA, 15 bp, Homo sapiens
ggaggctgaggtgga

SEQ ID NO: 329101 - DNA, 15 bp, Homo sapiens
attatcccagcactt

SEQ ID NO: 329102 - DNA, 15 bp, Homo sapiens
tattatcccagcact

SEQ ID NO: 329103 - DNA, 15 bp, Homo sapiens
ctattatcccagcac

SEQ ID NO: 329104 - DNA, 15 bp, Homo sapiens
cctattatcccagca

SEQ ID NO: 329105 - DNA, 15 bp, Homo sapiens
gcctattatcccagc

SEQ ID NO: 329106 - DNA, 15 bp, Homo sapiens
tgcctattatcccag

SEQ ID NO: 329107 - DNA, 15 bp, Homo sapiens
atgcctattatccca

SEQ ID NO: 329108 - DNA, 15 bp, Homo sapiens
catgcctattatccc

SEQ ID NO: 329109 - DNA, 15 bp, Homo sapiens
acatgcctattatcc

SEQ ID NO: 329110 - DNA, 15 bp, Homo sapiens
cacatgcctattatc

SEQ ID NO: 329111 - DNA, 15 bp, Homo sapiens
acacatgcctattat

SEQ ID NO: 329112 - DNA, 15 bp, Homo sapiens
gacacatgcctatta

SEQ ID NO: 329113 - DNA, 15 bp, Homo sapiens
tgacacatgcctatt

SEQ ID NO: 329114 - DNA, 15 bp, Homo sapiens
gtgacacatgcctat

SEQ ID NO: 329115 - DNA, 15 bp, Homo sapiens
agtgacacatgccta

SEQ ID NO: 329116 - DNA, 15 bp, Homo sapiens
cagtgacacatgcct

SEQ ID NO: 329117 - DNA, 15 bp, Homo sapiens
acagtgacacatgcc

SEQ ID NO: 329118 - DNA, 15 bp, Homo sapiens
cacagtgacacatgc

SEQ ID NO: 329119 - DNA, 15 bp, Homo sapiens
gcacagtgacacatg

SEQ ID NO: 329120 - DNA, 15 bp, Homo sapiens
ggcacagtgacacat

SEQ ID NO: 329121 - DNA, 15 bp, Homo sapiens
gggcacagtgacaca

SEQ ID NO: 329122 - DNA, 15 bp, Homo sapiens
tgggcacagtgacac

SEQ ID NO: 329123 - DNA, 15 bp, Homo sapiens
ctgggcacagtgaca

SEQ ID NO: 329124 - DNA, 15 bp, Homo sapiens
gctgggcacagtgac

SEQ ID NO: 329125 - DNA, 15 bp, Homo sapiens
ggctgggcacagtga

SEQ ID NO: 329126 - DNA, 15 bp, Homo sapiens
aggctgggcacagtg

SEQ ID NO: 329127 - DNA, 15 bp, Homo sapiens
taggctgggcacagt

SEQ ID NO: 329128 - DNA, 15 bp, Homo sapiens
ataggctgggcacag

SEQ ID NO: 329129 - DNA, 15 bp, Homo sapiens
gataggctgggcaca

SEQ ID NO: 329130 - DNA, 15 bp, Homo sapiens
ggataggctgggcac

SEQ ID NO: 329131 - DNA, 15 bp, Homo sapiens
aggataggctgggca

SEQ ID NO: 329132 - DNA, 15 bp, Homo sapiens
caggataggctgggc

SEQ ID NO: 329133 - DNA, 15 bp, Homo sapiens
ccaggataggctggg

SEQ ID NO: 329134 - DNA, 15 bp, Homo sapiens
cccaggataggctgg

SEQ ID NO: 329135 - DNA, 15 bp, Homo sapiens
tcccaggataggctg

SEQ ID NO: 329136 - DNA, 15 bp, Homo sapiens
gtcccaggataggct

SEQ ID NO: 329137 - DNA, 15 bp, Homo sapiens
agtcccaggataggc

SEQ ID NO: 329138 - DNA, 15 bp, Homo sapiens
aagtcccaggatagg

SEQ ID NO: 329139 - DNA, 15 bp, Homo sapiens
aaagtcccaggatag

SEQ ID NO: 329140 - DNA, 15 bp, Homo sapiens
aaaagtcccaggata

SEQ ID NO: 329141 - DNA, 15 bp, Homo sapiens
gaaaagtcccaggat

SEQ ID NO: 329142 - DNA, 15 bp, Homo sapiens
tgaaaagtcccagga

SEQ ID NO: 329143 - DNA, 15 bp, Homo sapiens
ttgaaaagtcccagg

SEQ ID NO: 329144 - DNA, 15 bp, Homo sapiens
attgaaaagtcccag

SEQ ID NO: 329145 - DNA, 15 bp, Homo sapiens
cattgaaaagtccca

SEQ ID NO: 329146 - DNA, 15 bp, Homo sapiens
tcattgaaaagtccc

SEQ ID NO: 329147 - DNA, 15 bp, Homo sapiens
gtcattgaaaagtcc

SEQ ID NO: 329148 - DNA, 15 bp, Homo sapiens
agtcattgaaaagtc

SEQ ID NO: 329149 - DNA, 15 bp, Homo sapiens
cagtcattgaaaagt

SEQ ID NO: 329150 - DNA, 15 bp, Homo sapiens
tcagtcattgaaaag

SEQ ID NO: 329151 - DNA, 15 bp, Homo sapiens
gtcagtcattgaaaa

SEQ ID NO: 329152 - DNA, 15 bp, Homo sapiens
agtcagtcattgaaa

SEQ ID NO: 329153 - DNA, 15 bp, Homo sapiens
aagtcagtcattgaa

SEQ ID NO: 329154 - DNA, 15 bp, Homo sapiens
gaagtcagtcattga

SEQ ID NO: 329155 - DNA, 15 bp, Homo sapiens
tgaagtcagtcattg

SEQ ID NO: 329156 - DNA, 15 bp, Homo sapiens
ctgaagtcagtcatt

SEQ ID NO: 329157 - DNA, 15 bp, Homo sapiens
gctgaagtcagtcat

SEQ ID NO: 329158 - DNA, 15 bp, Homo sapiens
tgctgaagtcagtca

SEQ ID NO: 329159 - DNA, 15 bp, Homo sapiens
ttgctgaagtcagtc

SEQ ID NO: 329160 - DNA, 15 bp, Homo sapiens
tttgctgaagtcagt

SEQ ID NO: 329161 - DNA, 15 bp, Homo sapiens
atttgctgaagtcag

SEQ ID NO: 329162 - DNA, 15 bp, Homo sapiens
tatttgctgaagtca

SEQ ID NO: 329163 - DNA, 15 bp, Homo sapiens
ttatttgctgaagtc

SEQ ID NO: 329164 - DNA, 15 bp, Homo sapiens
tttatttgctgaagt

SEQ ID NO: 329165 - DNA, 15 bp, Homo sapiens
atttatttgctgaag

SEQ ID NO: 329166 - DNA, 15 bp, Homo sapiens
aatttatttgctgaa

SEQ ID NO: 329167 - DNA, 15 bp, Homo sapiens
gaatttatttgctga

SEQ ID NO: 329168 - DNA, 15 bp, Homo sapiens
ggaatttatttgctg

SEQ ID NO: 329169 - DNA, 15 bp, Homo sapiens
gggaatttatttgct

SEQ ID NO: 329170 - DNA, 15 bp, Homo sapiens
tgggaatttatttgc

SEQ ID NO: 329171 - DNA, 15 bp, Homo sapiens
ctgggaatttatttg

SEQ ID NO: 329172 - DNA, 15 bp, Homo sapiens
actgggaatttattt

SEQ ID NO: 329173 - DNA, 15 bp, Homo sapiens
gactgggaatttatt

SEQ ID NO: 329174 - DNA, 15 bp, Homo sapiens
agactgggaatttat

SEQ ID NO: 329175 - DNA, 15 bp, Homo sapiens
gagactgggaattta

SEQ ID NO: 329176 - DNA, 15 bp, Homo sapiens
ggagactgggaattt

SEQ ID NO: 329177 - DNA, 15 bp, Homo sapiens
gggagactgggaatt

SEQ ID NO: 329178 - DNA, 15 bp, Homo sapiens
ggggagactgggaat

SEQ ID NO: 329179 - DNA, 15 bp, Homo sapiens
gggggagactgggaa

SEQ ID NO: 329180 - DNA, 15 bp, Homo sapiens
tgggggagactggga

SEQ ID NO: 329181 - DNA, 15 bp, Homo sapiens
ctgggggagactggg

SEQ ID NO: 329182 - DNA, 15 bp, Homo sapiens
tctgggggagactgg

SEQ ID NO: 329183 - DNA, 15 bp, Homo sapiens
atctgggggagactg

SEQ ID NO: 329184 - DNA, 15 bp, Homo sapiens
gatctgggggagact

SEQ ID NO: 329185 - DNA, 15 bp, Homo sapiens
ggatctgggggagac

SEQ ID NO: 329186 - DNA, 15 bp, Homo sapiens
gggatctgggggaga

SEQ ID NO: 329187 - DNA, 15 bp, Homo sapiens
tgggatctgggggag

SEQ ID NO: 329188 - DNA, 15 bp, Homo sapiens
ttgggatctggggga

SEQ ID NO: 329189 - DNA, 15 bp, Homo sapiens
tttgggatctggggg

SEQ ID NO: 329190 - DNA, 15 bp, Homo sapiens
gtttgggatctgggg

SEQ ID NO: 329191 - DNA, 15 bp, Homo sapiens
ggtttgggatctggg

SEQ ID NO: 329192 - DNA, 15 bp, Homo sapiens
tggtttgggatctgg

SEQ ID NO: 329193 - DNA, 15 bp, Homo sapiens
ctggtttgggatctg

SEQ ID NO: 329194 - DNA, 15 bp, Homo sapiens
actggtttgggatct

SEQ ID NO: 329195 - DNA, 15 bp, Homo sapiens
aactggtttgggatc

SEQ ID NO: 329196 - DNA, 15 bp, Homo sapiens
gaactggtttgggat

SEQ ID NO: 329197 - DNA, 15 bp, Homo sapiens
tgaactggtttggga

SEQ ID NO: 329198 - DNA, 15 bp, Homo sapiens
ctgaactggtttggg

SEQ ID NO: 329199 - DNA, 15 bp, Homo sapiens
tctgaactggtttgg

SEQ ID NO: 329200 - DNA, 15 bp, Homo sapiens
atctgaactggtttg

SEQ ID NO: 329201 - DNA, 15 bp, Homo sapiens
catctgaactggttt

SEQ ID NO: 329202 - DNA, 15 bp, Homo sapiens
ccatctgaactggtt

SEQ ID NO: 329203 - DNA, 15 bp, Homo sapiens
cccatctgaactggt

SEQ ID NO: 329204 - DNA, 15 bp, Homo sapiens
tcccatctgaactgg

SEQ ID NO: 329205 - DNA, 15 bp, Homo sapiens
atcccatctgaactg

SEQ ID NO: 329206 - DNA, 15 bp, Homo sapiens
gatcccatctgaact

SEQ ID NO: 329207 - DNA, 15 bp, Homo sapiens
agatcccatctgaac

SEQ ID NO: 329208 - DNA, 15 bp, Homo sapiens
aagatcccatctgaa

SEQ ID NO: 329209 - DNA, 15 bp, Homo sapiens
gaagatcccatctga

SEQ ID NO: 329210 - DNA, 15 bp, Homo sapiens
agaagatcccatctg

SEQ ID NO: 329211 - DNA, 15 bp, Homo sapiens
cagaagatcccatct

SEQ ID NO: 329212 - DNA, 15 bp, Homo sapiens
acagaagatcccatc

SEQ ID NO: 329213 - DNA, 15 bp, Homo sapiens
gacagaagatcccat

SEQ ID NO: 329214 - DNA, 15 bp, Homo sapiens
ggacagaagatccca

SEQ ID NO: 329215 - DNA, 15 bp, Homo sapiens
aggacagaagatccc

SEQ ID NO: 329216 - DNA, 15 bp, Homo sapiens
aaggacagaagatcc

SEQ ID NO: 329217 - DNA, 15 bp, Homo sapiens
aaaggacagaagatc

SEQ ID NO: 329218 - DNA, 15 bp, Homo sapiens
taaaggacagaagat

SEQ ID NO: 329219 - DNA, 15 bp, Homo sapiens
ataaaggacagaaga

SEQ ID NO: 329220 - DNA, 15 bp, Homo sapiens
tataaaggacagaag

SEQ ID NO: 329221 - DNA, 15 bp, Homo sapiens
ttataaaggacagaa

SEQ ID NO: 329222 - DNA, 15 bp, Homo sapiens
tttataaaggacaga

SEQ ID NO: 329223 - DNA, 15 bp, Homo sapiens
ctttataaaggacag

SEQ ID NO: 329224 - DNA, 15 bp, Homo sapiens
cctttataaaggaca

SEQ ID NO: 329225 - DNA, 15 bp, Homo sapiens
tcctttataaaggac

SEQ ID NO: 329226 - DNA, 15 bp, Homo sapiens
ttcctttataaagga

SEQ ID NO: 329227 - DNA, 15 bp, Homo sapiens
tttcctttataaagg

SEQ ID NO: 329228 - DNA, 15 bp, Homo sapiens
gtttcctttataaag

SEQ ID NO: 329229 - DNA, 15 bp, Homo sapiens
tgtttcctttataaa

SEQ ID NO: 329230 - DNA, 15 bp, Homo sapiens
atgtttcctttataa

SEQ ID NO: 329231 - DNA, 15 bp, Homo sapiens
aatgtttcctttata

SEQ ID NO: 329232 - DNA, 15 bp, Homo sapiens
taatgtttcctttat

SEQ ID NO: 329233 - DNA, 15 bp, Homo sapiens
gtaatgtttccttta

SEQ ID NO: 329234 - DNA, 15 bp, Homo sapiens
agtaatgtttccttt

SEQ ID NO: 329235 - DNA, 15 bp, Homo sapiens
tagtaatgtttcctt

SEQ ID NO: 329236 - DNA, 15 bp, Homo sapiens
ttagtaatgtttcct

SEQ ID NO: 329237 - DNA, 15 bp, Homo sapiens
tttagtaatgtttcc

SEQ ID NO: 329238 - DNA, 15 bp, Homo sapiens
atttagtaatgtttc

SEQ ID NO: 329239 - DNA, 15 bp, Homo sapiens
aatttagtaatgttt

SEQ ID NO: 329240 - DNA, 15 bp, Homo sapiens
caatttagtaatgtt

SEQ ID NO: 329241 - DNA, 15 bp, Homo sapiens
tcaatttagtaatgt

SEQ ID NO: 329242 - DNA, 15 bp, Homo sapiens
ttcaatttagtaatg

SEQ ID NO: 329243 - DNA, 15 bp, Homo sapiens
gttcaatttagtaat

SEQ ID NO: 329244 - DNA, 15 bp, Homo sapiens
ggttcaatttagtaa

SEQ ID NO: 329245 - DNA, 15 bp, Homo sapiens
aggttcaatttagta

SEQ ID NO: 329246 - DNA, 15 bp, Homo sapiens
aaggttcaatttagt

SEQ ID NO: 329247 - DNA, 15 bp, Homo sapiens
aaaggttcaatttag

SEQ ID NO: 329248 - DNA, 15 bp, Homo sapiens
gaaaggttcaattta

SEQ ID NO: 329249 - DNA, 15 bp, Homo sapiens
ggaaaggttcaattt

SEQ ID NO: 329250 - DNA, 15 bp, Homo sapiens
gggaaaggttcaatt

SEQ ID NO: 329251 - DNA, 15 bp, Homo sapiens
agggaaaggttcaat

SEQ ID NO: 329252 - DNA, 15 bp, Homo sapiens
cagggaaaggttcaa

SEQ ID NO: 329253 - DNA, 15 bp, Homo sapiens
acagggaaaggttca

SEQ ID NO: 329254 - DNA, 15 bp, Homo sapiens
cacagggaaaggttc

SEQ ID NO: 329255 - DNA, 15 bp, Homo sapiens
ccacagggaaaggtt

SEQ ID NO: 329256 - DNA, 15 bp, Homo sapiens
accacagggaaaggt

SEQ ID NO: 329257 - DNA, 15 bp, Homo sapiens
aaccacagggaaagg

SEQ ID NO: 329258 - DNA, 15 bp, Homo sapiens
aaaccacagggaaag

SEQ ID NO: 329259 - DNA, 15 bp, Homo sapiens
gaaaccacagggaaa

SEQ ID NO: 329260 - DNA, 15 bp, Homo sapiens
agaaaccacagggaa

SEQ ID NO: 329261 - DNA, 15 bp, Homo sapiens
gagaaaccacaggga

SEQ ID NO: 329262 - DNA, 15 bp, Homo sapiens
agagaaaccacaggg

SEQ ID NO: 329263 - DNA, 15 bp, Homo sapiens
cagagaaaccacagg

SEQ ID NO: 329264 - DNA, 15 bp, Homo sapiens
ccagagaaaccacag

SEQ ID NO: 329265 - DNA, 15 bp, Homo sapiens
tccagagaaaccaca

SEQ ID NO: 329266 - DNA, 15 bp, Homo sapiens
ctccagagaaaccac

SEQ ID NO: 329267 - DNA, 15 bp, Homo sapiens
cctccagagaaacca

SEQ ID NO: 329268 - DNA, 15 bp, Homo sapiens
ccctccagagaaacc

SEQ ID NO: 329269 - DNA, 15 bp, Homo sapiens
cccctccagagaaac

SEQ ID NO: 329270 - DNA, 15 bp, Homo sapiens
tcccctccagagaaa

SEQ ID NO: 329271 - DNA, 15 bp, Homo sapiens
ttcccctccagagaa

SEQ ID NO: 329272 - DNA, 15 bp, Homo sapiens
gttcccctccagaga

SEQ ID NO: 329273 - DNA, 15 bp, Homo sapiens
agttcccctccagag

SEQ ID NO: 329274 - DNA, 15 bp, Homo sapiens
tagttcccctccaga

SEQ ID NO: 329275 - DNA, 15 bp, Homo sapiens
ctagttcccctccag

SEQ ID NO: 329276 - DNA, 15 bp, Homo sapiens
actagttcccctcca

SEQ ID NO: 329277 - DNA, 15 bp, Homo sapiens
cactagttcccctcc

SEQ ID NO: 329278 - DNA, 15 bp, Homo sapiens
acactagttcccctc

SEQ ID NO: 329279 - DNA, 15 bp, Homo sapiens
tacactagttcccct

SEQ ID NO: 329280 - DNA, 15 bp, Homo sapiens
atacactagttcccc

SEQ ID NO: 329281 - DNA, 15 bp, Homo sapiens
catacactagttccc

SEQ ID NO: 329282 - DNA, 15 bp, Homo sapiens
ccatacactagttcc

SEQ ID NO: 329283 - DNA, 15 bp, Homo sapiens
cccatacactagttc

SEQ ID NO: 329284 - DNA, 15 bp, Homo sapiens
ccccatacactagtt

SEQ ID NO: 329285 - DNA, 15 bp, Homo sapiens
tccccatacactagt

SEQ ID NO: 329286 - DNA, 15 bp, Homo sapiens
atccccatacactag

SEQ ID NO: 329287 - DNA, 15 bp, Homo sapiens
catccccatacacta

SEQ ID NO: 329288 - DNA, 15 bp, Homo sapiens
tcatccccatacact

SEQ ID NO: 329289 - DNA, 15 bp, Homo sapiens
gtcatccccatacac

SEQ ID NO: 329290 - DNA, 15 bp, Homo sapiens
agtcatccccataca

SEQ ID NO: 329291 - DNA, 15 bp, Homo sapiens
cagtcatccccatac

SEQ ID NO: 329292 - DNA, 15 bp, Homo sapiens
ccagtcatccccata

SEQ ID NO: 329293 - DNA, 15 bp, Homo sapiens
gccagtcatccccat

SEQ ID NO: 329294 - DNA, 15 bp, Homo sapiens
agccagtcatcccca

SEQ ID NO: 329295 - DNA, 15 bp, Homo sapiens
tagccagtcatcccc

SEQ ID NO: 329296 - DNA, 15 bp, Homo sapiens
ttagccagtcatccc

SEQ ID NO: 329297 - DNA, 15 bp, Homo sapiens
tttagccagtcatcc

SEQ ID NO: 329298 - DNA, 15 bp, Homo sapiens
ttttagccagtcatc

SEQ ID NO: 329299 - DNA, 15 bp, Homo sapiens
attttagccagtcat

SEQ ID NO: 329300 - DNA, 15 bp, Homo sapiens
cattttagccagtca

SEQ ID NO: 329301 - DNA, 15 bp, Homo sapiens
ccattttagccagtc

SEQ ID NO: 329302 - DNA, 15 bp, Homo sapiens
tccattttagccagt

SEQ ID NO: 329303 - DNA, 15 bp, Homo sapiens
ctccattttagccag

SEQ ID NO: 329304 - DNA, 15 bp, Homo sapiens
cctccattttagcca

SEQ ID NO: 329305 - DNA, 15 bp, Homo sapiens
acctccattttagcc

SEQ ID NO: 329306 - DNA, 15 bp, Homo sapiens
cacctccattttagc

SEQ ID NO: 329307 - DNA, 15 bp, Homo sapiens
tcacctccattttag

SEQ ID NO: 329308 - DNA, 15 bp, Homo sapiens
atcacctccatttta

SEQ ID NO: 329309 - DNA, 15 bp, Homo sapiens
tatcacctccatttt

SEQ ID NO: 329310 - DNA, 15 bp, Homo sapiens
atatcacctccattt

SEQ ID NO: 329311 - DNA, 15 bp, Homo sapiens
aatatcacctccatt

SEQ ID NO: 329312 - DNA, 15 bp, Homo sapiens
taatatcacctccat

SEQ ID NO: 329313 - DNA, 15 bp, Homo sapiens
gtaatatcacctcca

SEQ ID NO: 329314 - DNA, 15 bp, Homo sapiens
agtaatatcacctcc

SEQ ID NO: 329315 - DNA, 15 bp, Homo sapiens
cagtaatatcacctc

SEQ ID NO: 329316 - DNA, 15 bp, Homo sapiens
ccagtaatatcacct

SEQ ID NO: 329317 - DNA, 15 bp, Homo sapiens
accagtaatatcacc

SEQ ID NO: 329318 - DNA, 15 bp, Homo sapiens
gaccagtaatatcac

SEQ ID NO: 329319 - DNA, 15 bp, Homo sapiens
agaccagtaatatca

SEQ ID NO: 329320 - DNA, 15 bp, Homo sapiens
gagaccagtaatatc

SEQ ID NO: 329321 - DNA, 15 bp, Homo sapiens
tgagaccagtaatat

SEQ ID NO: 329322 - DNA, 15 bp, Homo sapiens
ctgagaccagtaata

SEQ ID NO: 329323 - DNA, 15 bp, Homo sapiens
gctgagaccagtaat

SEQ ID NO: 329324 - DNA, 15 bp, Homo sapiens
tgctgagaccagtaa

SEQ ID NO: 329325 - DNA, 15 bp, Homo sapiens
gtgctgagaccagta

SEQ ID NO: 329326 - DNA, 15 bp, Homo sapiens
agtgctgagaccagt

SEQ ID NO: 329327 - DNA, 15 bp, Homo sapiens
aagtgctgagaccag

SEQ ID NO: 329328 - DNA, 15 bp, Homo sapiens
taagtgctgagacca

SEQ ID NO: 329329 - DNA, 15 bp, Homo sapiens
gtaagtgctgagacc

SEQ ID NO: 329330 - DNA, 15 bp, Homo sapiens
tgtaagtgctgagac

SEQ ID NO: 329331 - DNA, 15 bp, Homo sapiens
ttgtaagtgctgaga

SEQ ID NO: 329332 - DNA, 15 bp, Homo sapiens
cttgtaagtgctgag

SEQ ID NO: 329333 - DNA, 15 bp, Homo sapiens
acttgtaagtgctga

SEQ ID NO: 329334 - DNA, 15 bp, Homo sapiens
gacttgtaagtgctg

SEQ ID NO: 329335 - DNA, 15 bp, Homo sapiens
ggacttgtaagtgct

SEQ ID NO: 329336 - DNA, 15 bp, Homo sapiens
gggacttgtaagtgc

SEQ ID NO: 329337 - DNA, 15 bp, Homo sapiens
agggacttgtaagtg

SEQ ID NO: 329338 - DNA, 15 bp, Homo sapiens
cagggacttgtaagt

SEQ ID NO: 329339 - DNA, 15 bp, Homo sapiens
tcagggacttgtaag

SEQ ID NO: 329340 - DNA, 15 bp, Homo sapiens
atcagggacttgtaa

SEQ ID NO: 329341 - DNA, 15 bp, Homo sapiens
catcagggacttgta

SEQ ID NO: 329342 - DNA, 15 bp, Homo sapiens
ccatcagggacttgt

SEQ ID NO: 329343 - DNA, 15 bp, Homo sapiens
gccatcagggacttg

SEQ ID NO: 329344 - DNA, 15 bp, Homo sapiens
agccatcagggactt

SEQ ID NO: 329345 - DNA, 15 bp, Homo sapiens
aagccatcagggact

SEQ ID NO: 329346 - DNA, 15 bp, Homo sapiens
gaagccatcagggac

SEQ ID NO: 329347 - DNA, 15 bp, Homo sapiens
ggaagccatcaggga

SEQ ID NO: 329348 - DNA, 15 bp, Homo sapiens
aggaagccatcaggg

SEQ ID NO: 329349 - DNA, 15 bp, Homo sapiens
gaggaagccatcagg

SEQ ID NO: 329350 - DNA, 15 bp, Homo sapiens
ggaggaagccatcag

SEQ ID NO: 329351 - DNA, 15 bp, Homo sapiens
aggaggaagccatca

SEQ ID NO: 329352 - DNA, 15 bp, Homo sapiens
taggaggaagccatc

SEQ ID NO: 329353 - DNA, 15 bp, Homo sapiens
ttaggaggaagccat

SEQ ID NO: 329354 - DNA, 15 bp, Homo sapiens
tttaggaggaagcca

SEQ ID NO: 329355 - DNA, 15 bp, Homo sapiens
gtttaggaggaagcc

SEQ ID NO: 329356 - DNA, 15 bp, Homo sapiens
tgtttaggaggaagc

SEQ ID NO: 329357 - DNA, 15 bp, Homo sapiens
gtgtttaggaggaag

SEQ ID NO: 329358 - DNA, 15 bp, Homo sapiens
agtgtttaggaggaa

SEQ ID NO: 329359 - DNA, 15 bp, Homo sapiens
cagtgtttaggagga

SEQ ID NO: 329360 - DNA, 15 bp, Homo sapiens
tcagtgtttaggagg

SEQ ID NO: 329361 - DNA, 15 bp, Homo sapiens
atcagtgtttaggag

SEQ ID NO: 329362 - DNA, 15 bp, Homo sapiens
gatcagtgtttagga

SEQ ID NO: 329363 - DNA, 15 bp, Homo sapiens
tgatcagtgtttagg

SEQ ID NO: 329364 - DNA, 15 bp, Homo sapiens
gtgatcagtgtttag

SEQ ID NO: 329365 - DNA, 15 bp, Homo sapiens
ggtgatcagtgttta

SEQ ID NO: 329366 - DNA, 15 bp, Homo sapiens
gggtgatcagtgttt

SEQ ID NO: 329367 - DNA, 15 bp, Homo sapiens
agggtgatcagtgtt

SEQ ID NO: 329368 - DNA, 15 bp, Homo sapiens
aagggtgatcagtgt

SEQ ID NO: 329369 - DNA, 15 bp, Homo sapiens
caagggtgatcagtg

SEQ ID NO: 329370 - DNA, 15 bp, Homo sapiens
ccaagggtgatcagt

SEQ ID NO: 329371 - DNA, 15 bp, Homo sapiens
cccaagggtgatcag

SEQ ID NO: 329372 - DNA, 15 bp, Homo sapiens
ccccaagggtgatca

SEQ ID NO: 329373 - DNA, 15 bp, Homo sapiens
accccaagggtgatc

SEQ ID NO: 329374 - DNA, 15 bp, Homo sapiens
caccccaagggtgat

SEQ ID NO: 329375 - DNA, 15 bp, Homo sapiens
ccaccccaagggtga

SEQ ID NO: 329376 - DNA, 15 bp, Homo sapiens
tccaccccaagggtg

SEQ ID NO: 329377 - DNA, 15 bp, Homo sapiens
ttccaccccaagggt

SEQ ID NO: 329378 - DNA, 15 bp, Homo sapiens
tttccaccccaaggg

SEQ ID NO: 329379 - DNA, 15 bp, Homo sapiens
ttttccaccccaagg

SEQ ID NO: 329380 - DNA, 15 bp, Homo sapiens
gttttccaccccaag

SEQ ID NO: 329381 - DNA, 15 bp, Homo sapiens
agttttccaccccaa

SEQ ID NO: 329382 - DNA, 15 bp, Homo sapiens
cagttttccacccca

SEQ ID NO: 329383 - DNA, 15 bp, Homo sapiens
tcagttttccacccc

SEQ ID NO: 329384 - DNA, 15 bp, Homo sapiens
gtcagttttccaccc

SEQ ID NO: 329385 - DNA, 15 bp, Homo sapiens
ggtcagttttccacc

SEQ ID NO: 329386 - DNA, 15 bp, Homo sapiens
aggtcagttttccac

SEQ ID NO: 329387 - DNA, 15 bp, Homo sapiens
gaggtcagttttcca

SEQ ID NO: 329388 - DNA, 15 bp, Homo sapiens
ggaggtcagttttcc

SEQ ID NO: 329389 - DNA, 15 bp, Homo sapiens
tggaggtcagttttc

SEQ ID NO: 329390 - DNA, 15 bp, Homo sapiens
ctggaggtcagtttt

SEQ ID NO: 329391 - DNA, 15 bp, Homo sapiens
cctggaggtcagttt

SEQ ID NO: 329392 - DNA, 15 bp, Homo sapiens
tcctggaggtcagtt

SEQ ID NO: 329393 - DNA, 15 bp, Homo sapiens
ttcctggaggtcagt

SEQ ID NO: 329394 - DNA, 15 bp, Homo sapiens
tttcctggaggtcag

SEQ ID NO: 329395 - DNA, 15 bp, Homo sapiens
ttttcctggaggtca

SEQ ID NO: 329396 - DNA, 15 bp, Homo sapiens
cttttcctggaggtc

SEQ ID NO: 329397 - DNA, 15 bp, Homo sapiens
acttttcctggaggt

SEQ ID NO: 329398 - DNA, 15 bp, Homo sapiens
cacttttcctggagg

SEQ ID NO: 329399 - DNA, 15 bp, Homo sapiens
ccacttttcctggag

SEQ ID NO: 329400 - DNA, 15 bp, Homo sapiens
tccacttttcctgga

SEQ ID NO: 329401 - DNA, 15 bp, Homo sapiens
ctccacttttcctgg

SEQ ID NO: 329402 - DNA, 15 bp, Homo sapiens
cctccacttttcctg

SEQ ID NO: 329403 - DNA, 15 bp, Homo sapiens
tcctccacttttcct

SEQ ID NO: 329404 - DNA, 15 bp, Homo sapiens
ctcctccacttttcc

SEQ ID NO: 329405 - DNA, 15 bp, Homo sapiens
tctcctccacttttc

SEQ ID NO: 329406 - DNA, 15 bp, Homo sapiens
gtctcctccactttt

SEQ ID NO: 329407 - DNA, 15 bp, Homo sapiens
tgtctcctccacttt

SEQ ID NO: 329408 - DNA, 15 bp, Homo sapiens
ctgtctcctccactt

SEQ ID NO: 329409 - DNA, 15 bp, Homo sapiens
tctgtctcctccact

SEQ ID NO: 329410 - DNA, 15 bp, Homo sapiens
ttctgtctcctccac

SEQ ID NO: 329411 - DNA, 15 bp, Homo sapiens
cttctgtctcctcca

SEQ ID NO: 329412 - DNA, 15 bp, Homo sapiens
tcttctgtctcctcc

SEQ ID NO: 329413 - DNA, 15 bp, Homo sapiens
ctcttctgtctcctc

SEQ ID NO: 329414 - DNA, 15 bp, Homo sapiens
tctcttctgtctcct

SEQ ID NO: 329415 - DNA, 15 bp, Homo sapiens
ctctcttctgtctcc

SEQ ID NO: 329416 - DNA, 15 bp, Homo sapiens
tctctcttctgtctc

SEQ ID NO: 329417 - DNA, 15 bp, Homo sapiens
ttctctcttctgtct

SEQ ID NO: 329418 - DNA, 15 bp, Homo sapiens
attctctcttctgtc

SEQ ID NO: 329419 - DNA, 15 bp, Homo sapiens
aattctctcttctgt

SEQ ID NO: 329420 - DNA, 15 bp, Homo sapiens
taattctctcttctg

SEQ ID NO: 329421 - DNA, 15 bp, Homo sapiens
gtaattctctcttct

SEQ ID NO: 329422 - DNA, 15 bp, Homo sapiens
ggtaattctctcttc

SEQ ID NO: 329423 - DNA, 15 bp, Homo sapiens
aggtaattctctctt

SEQ ID NO: 329424 - DNA, 15 bp, Homo sapiens
caggtaattctctct

SEQ ID NO: 329425 - DNA, 15 bp, Homo sapiens
gcaggtaattctctc

SEQ ID NO: 329426 - DNA, 15 bp, Homo sapiens
tgcaggtaattctct

SEQ ID NO: 329427 - DNA, 15 bp, Homo sapiens
atgcaggtaattctc

SEQ ID NO: 329428 - DNA, 15 bp, Homo sapiens
catgcaggtaattct

SEQ ID NO: 329429 - DNA, 15 bp, Homo sapiens
ccatgcaggtaattc

SEQ ID NO: 329430 - DNA, 15 bp, Homo sapiens
cccatgcaggtaatt

SEQ ID NO: 329431 - DNA, 15 bp, Homo sapiens
gcccatgcaggtaat

SEQ ID NO: 329432 - DNA, 15 bp, Homo sapiens
cgcccatgcaggtaa

SEQ ID NO: 329433 - DNA, 15 bp, Homo sapiens
gcgcccatgcaggta

SEQ ID NO: 329434 - DNA, 15 bp, Homo sapiens
agcgcccatgcaggt

SEQ ID NO: 329435 - DNA, 15 bp, Homo sapiens
gagcgcccatgcagg

SEQ ID NO: 329436 - DNA, 15 bp, Homo sapiens
ggagcgcccatgcag

SEQ ID NO: 329437 - DNA, 15 bp, Homo sapiens
cggagcgcccatgca

SEQ ID NO: 329438 - DNA, 15 bp, Homo sapiens
gcggagcgcccatgc

SEQ ID NO: 329439 - DNA, 15 bp, Homo sapiens
tgcggagcgcccatg

SEQ ID NO: 329440 - DNA, 15 bp, Homo sapiens
ttgcggagcgcccat

SEQ ID NO: 329441 - DNA, 15 bp, Homo sapiens
gttgcggagcgccca

SEQ ID NO: 329442 - DNA, 15 bp, Homo sapiens
agttgcggagcgccc

SEQ ID NO: 329443 - DNA, 15 bp, Homo sapiens
cagttgcggagcgcc

SEQ ID NO: 329444 - DNA, 15 bp, Homo sapiens
acagttgcggagcgc

SEQ ID NO: 329445 - DNA, 15 bp, Homo sapiens
aacagttgcggagcg

SEQ ID NO: 329446 - DNA, 15 bp, Homo sapiens
caacagttgcggagc

SEQ ID NO: 329447 - DNA, 15 bp, Homo sapiens
gcaacagttgcggag

SEQ ID NO: 329448 - DNA, 15 bp, Homo sapiens
tgcaacagttgcgga

SEQ ID NO: 329449 - DNA, 15 bp, Homo sapiens
ttgcaacagttgcgg

SEQ ID NO: 329450 - DNA, 15 bp, Homo sapiens
gttgcaacagttgcg

SEQ ID NO: 329451 - DNA, 15 bp, Homo sapiens
tgttgcaacagttgc

SEQ ID NO: 329452 - DNA, 15 bp, Homo sapiens
ctgttgcaacagttg

SEQ ID NO: 329453 - DNA, 15 bp, Homo sapiens
tctgttgcaacagtt

SEQ ID NO: 329454 - DNA, 15 bp, Homo sapiens
ttctgttgcaacagt

SEQ ID NO: 329455 - DNA, 15 bp, Homo sapiens
attctgttgcaacag

SEQ ID NO: 329456 - DNA, 15 bp, Homo sapiens
cattctgttgcaaca

SEQ ID NO: 329457 - DNA, 15 bp, Homo sapiens
gcattctgttgcaac

SEQ ID NO: 329458 - DNA, 15 bp, Homo sapiens
agcattctgttgcaa

SEQ ID NO: 329459 - DNA, 15 bp, Homo sapiens
aagcattctgttgca

SEQ ID NO: 329460 - DNA, 15 bp, Homo sapiens
gaagcattctgttgc

SEQ ID NO: 329461 - DNA, 15 bp, Homo sapiens
ggaagcattctgttg

SEQ ID NO: 329462 - DNA, 15 bp, Homo sapiens
gggaagcattctgtt

SEQ ID NO: 329463 - DNA, 15 bp, Homo sapiens
tgggaagcattctgt

SEQ ID NO: 329464 - DNA, 15 bp, Homo sapiens
gtgggaagcattctg

SEQ ID NO: 329465 - DNA, 15 bp, Homo sapiens
ggtgggaagcattct

SEQ ID NO: 329466 - DNA, 15 bp, Homo sapiens
aggtgggaagcattc

SEQ ID NO: 329467 - DNA, 15 bp, Homo sapiens
caggtgggaagcatt

SEQ ID NO: 329468 - DNA, 15 bp, Homo sapiens
ccaggtgggaagcat

SEQ ID NO: 329469 - DNA, 15 bp, Homo sapiens
cccaggtgggaagca

SEQ ID NO: 329470 - DNA, 15 bp, Homo sapiens
gcccaggtgggaagc

SEQ ID NO: 329471 - DNA, 15 bp, Homo sapiens
ggcccaggtgggaag

SEQ ID NO: 329472 - DNA, 15 bp, Homo sapiens
gggcccaggtgggaa

SEQ ID NO: 329473 - DNA, 15 bp, Homo sapiens
agggcccaggtggga

SEQ ID NO: 329474 - DNA, 15 bp, Homo sapiens
cagggcccaggtggg

SEQ ID NO: 329475 - DNA, 15 bp, Homo sapiens
gcagggcccaggtgg

SEQ ID NO: 329476 - DNA, 15 bp, Homo sapiens
tgcagggcccaggtg

SEQ ID NO: 329477 - DNA, 15 bp, Homo sapiens
ctgcagggcccaggt

SEQ ID NO: 329478 - DNA, 15 bp, Homo sapiens
gctgcagggcccagg

SEQ ID NO: 329479 - DNA, 15 bp, Homo sapiens
ggctgcagggcccag

SEQ ID NO: 329480 - DNA, 15 bp, Homo sapiens
tggctgcagggccca

SEQ ID NO: 329481 - DNA, 15 bp, Homo sapiens
atggctgcagggccc

SEQ ID NO: 329482 - DNA, 15 bp, Homo sapiens
gatggctgcagggcc

SEQ ID NO: 329483 - DNA, 15 bp, Homo sapiens
ggatggctgcagggc

SEQ ID NO: 329484 - DNA, 15 bp, Homo sapiens
aggatggctgcaggg

SEQ ID NO: 329485 - DNA, 15 bp, Homo sapiens
caggatggctgcagg

SEQ ID NO: 329486 - DNA, 15 bp, Homo sapiens
acaggatggctgcag

SEQ ID NO: 329487 - DNA, 15 bp, Homo sapiens
cacaggatggctgca

SEQ ID NO: 329488 - DNA, 15 bp, Homo sapiens
acacaggatggctgc

SEQ ID NO: 329489 - DNA, 15 bp, Homo sapiens
cacacaggatggctg

SEQ ID NO: 329490 - DNA, 15 bp, Homo sapiens
gcacacaggatggct

SEQ ID NO: 329491 - DNA, 15 bp, Homo sapiens
ggcacacaggatggc

SEQ ID NO: 329492 - DNA, 15 bp, Homo sapiens
aggcacacaggatgg

SEQ ID NO: 329493 - DNA, 15 bp, Homo sapiens
gaggcacacaggatg

SEQ ID NO: 329494 - DNA, 15 bp, Homo sapiens
tgaggcacacaggat

SEQ ID NO: 329495 - DNA, 15 bp, Homo sapiens
ctgaggcacacagga

SEQ ID NO: 329496 - DNA, 15 bp, Homo sapiens
actgaggcacacagg

SEQ ID NO: 329497 - DNA, 15 bp, Homo sapiens
aactgaggcacacag

SEQ ID NO: 329498 - DNA, 15 bp, Homo sapiens
aaactgaggcacaca

SEQ ID NO: 329499 - DNA, 15 bp, Homo sapiens
caaactgaggcacac

SEQ ID NO: 329500 - DNA, 15 bp, Homo sapiens
tcaaactgaggcaca

SEQ ID NO: 329501 - DNA, 15 bp, Homo sapiens
gtcaaactgaggcac

SEQ ID NO: 329502 - DNA, 15 bp, Homo sapiens
tgtcaaactgaggca

SEQ ID NO: 329503 - DNA, 15 bp, Homo sapiens
ttgtcaaactgaggc

SEQ ID NO: 329504 - DNA, 15 bp, Homo sapiens
cttgtcaaactgagg

SEQ ID NO: 329505 - DNA, 15 bp, Homo sapiens
gcttgtcaaactgag

SEQ ID NO: 329506 - DNA, 15 bp, Homo sapiens
agcttgtcaaactga

SEQ ID NO: 329507 - DNA, 15 bp, Homo sapiens
cagcttgtcaaactg

SEQ ID NO: 329508 - DNA, 15 bp, Homo sapiens
ccagcttgtcaaact

SEQ ID NO: 329509 - DNA, 15 bp, Homo sapiens
tccagcttgtcaaac

SEQ ID NO: 329510 - DNA, 15 bp, Homo sapiens
gtccagcttgtcaaa

SEQ ID NO: 329511 - DNA, 15 bp, Homo sapiens
tgtccagcttgtcaa

SEQ ID NO: 329512 - DNA, 15 bp, Homo sapiens
ctgtccagcttgtca

SEQ ID NO: 329513 - DNA, 15 bp, Homo sapiens
cctgtccagcttgtc

SEQ ID NO: 329514 - DNA, 15 bp, Homo sapiens
gcctgtccagcttgt

SEQ ID NO: 329515 - DNA, 15 bp, Homo sapiens
cgcctgtccagcttg

SEQ ID NO: 329516 - DNA, 15 bp, Homo sapiens
gcgcctgtccagctt

SEQ ID NO: 329517 - DNA, 15 bp, Homo sapiens
tgcgcctgtccagct

SEQ ID NO: 329518 - DNA, 15 bp, Homo sapiens
ctgcgcctgtccagc

SEQ ID NO: 329519 - DNA, 15 bp, Homo sapiens
actgcgcctgtccag

SEQ ID NO: 329520 - DNA, 15 bp, Homo sapiens
gactgcgcctgtcca

SEQ ID NO: 329521 - DNA, 15 bp, Homo sapiens
tgactgcgcctgtcc

SEQ ID NO: 329522 - DNA, 15 bp, Homo sapiens
ttgactgcgcctgtc

SEQ ID NO: 329523 - DNA, 15 bp, Homo sapiens
tttgactgcgcctgt

SEQ ID NO: 329524 - DNA, 15 bp, Homo sapiens
ctttgactgcgcctg

SEQ ID NO: 329525 - DNA, 15 bp, Homo sapiens
tctttgactgcgcct

SEQ ID NO: 329526 - DNA, 15 bp, Homo sapiens
ttctttgactgcgcc

SEQ ID NO: 329527 - DNA, 15 bp, Homo sapiens
tttctttgactgcgc

SEQ ID NO: 329528 - DNA, 15 bp, Homo sapiens
atttctttgactgcg

SEQ ID NO: 329529 - DNA, 15 bp, Homo sapiens
tatttctttgactgc

SEQ ID NO: 329530 - DNA, 15 bp, Homo sapiens
gtatttctttgactg

SEQ ID NO: 329531 - DNA, 15 bp, Homo sapiens
agtatttctttgact

SEQ ID NO: 329532 - DNA, 15 bp, Homo sapiens
cagtatttctttgac

SEQ ID NO: 329533 - DNA, 15 bp, Homo sapiens
tcagtatttctttga

SEQ ID NO: 329534 - DNA, 15 bp, Homo sapiens
ctcagtatttctttg

SEQ ID NO: 329535 - DNA, 15 bp, Homo sapiens
tctcagtatttcttt

SEQ ID NO: 329536 - DNA, 15 bp, Homo sapiens
gtctcagtatttctt

SEQ ID NO: 329537 - DNA, 15 bp, Homo sapiens
ggtctcagtatttct

SEQ ID NO: 329538 - DNA, 15 bp, Homo sapiens
aggtctcagtatttc

SEQ ID NO: 329539 - DNA, 15 bp, Homo sapiens
gaggtctcagtattt

SEQ ID NO: 329540 - DNA, 15 bp, Homo sapiens
tgaggtctcagtatt

SEQ ID NO: 329541 - DNA, 15 bp, Homo sapiens
ctgaggtctcagtat

SEQ ID NO: 329542 - DNA, 15 bp, Homo sapiens
gctgaggtctcagta

SEQ ID NO: 329543 - DNA, 15 bp, Homo sapiens
agctgaggtctcagt

SEQ ID NO: 329544 - DNA, 15 bp, Homo sapiens
aagctgaggtctcag

SEQ ID NO: 329545 - DNA, 15 bp, Homo sapiens
gaagctgaggtctca

SEQ ID NO: 329546 - DNA, 15 bp, Homo sapiens
agaagctgaggtctc

SEQ ID NO: 329547 - DNA, 15 bp, Homo sapiens
cagaagctgaggtct

SEQ ID NO: 329548 - DNA, 15 bp, Homo sapiens
gcagaagctgaggtc

SEQ ID NO: 329549 - DNA, 15 bp, Homo sapiens
agcagaagctgaggt

SEQ ID NO: 329550 - DNA, 15 bp, Homo sapiens
cagcagaagctgagg

SEQ ID NO: 329551 - DNA, 15 bp, Homo sapiens
gcagcagaagctgag

SEQ ID NO: 329552 - DNA, 15 bp, Homo sapiens
ggcagcagaagctga

SEQ ID NO: 329553 - DNA, 15 bp, Homo sapiens
aggcagcagaagctg

SEQ ID NO: 329554 - DNA, 15 bp, Homo sapiens
aaggcagcagaagct

SEQ ID NO: 329555 - DNA, 15 bp, Homo sapiens
aaaggcagcagaagc

SEQ ID NO: 329556 - DNA, 15 bp, Homo sapiens
gaaaggcagcagaag

SEQ ID NO: 329557 - DNA, 15 bp, Homo sapiens
cgaaaggcagcagaa

SEQ ID NO: 329558 - DNA, 15 bp, Homo sapiens
ccgaaaggcagcaga

SEQ ID NO: 329559 - DNA, 15 bp, Homo sapiens
gccgaaaggcagcag

SEQ ID NO: 329560 - DNA, 15 bp, Homo sapiens
tgccgaaaggcagca

SEQ ID NO: 329561 - DNA, 15 bp, Homo sapiens
ttgccgaaaggcagc

SEQ ID NO: 329562 - DNA, 15 bp, Homo sapiens
gttgccgaaaggcag

SEQ ID NO: 329563 - DNA, 15 bp, Homo sapiens
ggttgccgaaaggca

SEQ ID NO: 329564 - DNA, 15 bp, Homo sapiens
gggttgccgaaaggc

SEQ ID NO: 329565 - DNA, 15 bp, Homo sapiens
ggggttgccgaaagg

SEQ ID NO: 329566 - DNA, 15 bp, Homo sapiens
gggggttgccgaaag

SEQ ID NO: 329567 - DNA, 15 bp, Homo sapiens
tgggggttgccgaaa

SEQ ID NO: 329568 - DNA, 15 bp, Homo sapiens
atgggggttgccgaa

SEQ ID NO: 329569 - DNA, 15 bp, Homo sapiens
gatgggggttgccga

SEQ ID NO: 329570 - DNA, 15 bp, Homo sapiens
ggatgggggttgccg

SEQ ID NO: 329571 - DNA, 15 bp, Homo sapiens
cggatgggggttgcc

SEQ ID NO: 329572 - DNA, 15 bp, Homo sapiens
ccggatgggggttgc

SEQ ID NO: 329573 - DNA, 15 bp, Homo sapiens
gccggatgggggttg

SEQ ID NO: 329574 - DNA, 15 bp, Homo sapiens
agccggatgggggtt

SEQ ID NO: 329575 - DNA, 15 bp, Homo sapiens
gagccggatgggggt

SEQ ID NO: 329576 - DNA, 15 bp, Homo sapiens
agagccggatggggg

SEQ ID NO: 329577 - DNA, 15 bp, Homo sapiens
aagagccggatgggg

SEQ ID NO: 329578 - DNA, 15 bp, Homo sapiens
caagagccggatggg

SEQ ID NO: 329579 - DNA, 15 bp, Homo sapiens
acaagagccggatgg

SEQ ID NO: 329580 - DNA, 15 bp, Homo sapiens
cacaagagccggatg

SEQ ID NO: 329581 - DNA, 15 bp, Homo sapiens
tcacaagagccggat

SEQ ID NO: 329582 - DNA, 15 bp, Homo sapiens
ctcacaagagccgga

SEQ ID NO: 329583 - DNA, 15 bp, Homo sapiens
cctcacaagagccgg

SEQ ID NO: 329584 - DNA, 15 bp, Homo sapiens
gcctcacaagagccg

SEQ ID NO: 329585 - DNA, 15 bp, Homo sapiens
ggcctcacaagagcc

SEQ ID NO: 329586 - DNA, 15 bp, Homo sapiens
gggcctcacaagagc

SEQ ID NO: 329587 - DNA, 15 bp, Homo sapiens
agggcctcacaagag

SEQ ID NO: 329588 - DNA, 15 bp, Homo sapiens
cagggcctcacaaga

SEQ ID NO: 329589 - DNA, 15 bp, Homo sapiens
ccagggcctcacaag

SEQ ID NO: 329590 - DNA, 15 bp, Homo sapiens
tccagggcctcacaa

SEQ ID NO: 329591 - DNA, 15 bp, Homo sapiens
ctccagggcctcaca

SEQ ID NO: 329592 - DNA, 15 bp, Homo sapiens
cctccagggcctcac

SEQ ID NO: 329593 - DNA, 15 bp, Homo sapiens
ccctccagggcctca

SEQ ID NO: 329594 - DNA, 15 bp, Homo sapiens
tccctccagggcctc

SEQ ID NO: 329595 - DNA, 15 bp, Homo sapiens
ctccctccagggcct

SEQ ID NO: 329596 - DNA, 15 bp, Homo sapiens
tctccctccagggcc

SEQ ID NO: 329597 - DNA, 15 bp, Homo sapiens
atctccctccagggc

SEQ ID NO: 329598 - DNA, 15 bp, Homo sapiens
gatctccctccaggg

SEQ ID NO: 329599 - DNA, 15 bp, Homo sapiens
tgatctccctccagg

SEQ ID NO: 329600 - DNA, 15 bp, Homo sapiens
gtgatctccctccag

SEQ ID NO: 329601 - DNA, 15 bp, Homo sapiens
ggtgatctccctcca

SEQ ID NO: 329602 - DNA, 15 bp, Homo sapiens
cggtgatctccctcc

SEQ ID NO: 329603 - DNA, 15 bp, Homo sapiens
acggtgatctccctc

SEQ ID NO: 329604 - DNA, 15 bp, Homo sapiens
gacggtgatctccct

SEQ ID NO: 329605 - DNA, 15 bp, Homo sapiens
tgacggtgatctccc

SEQ ID NO: 329606 - DNA, 15 bp, Homo sapiens
ctgacggtgatctcc

SEQ ID NO: 329607 - DNA, 15 bp, Homo sapiens
gctgacggtgatctc

SEQ ID NO: 329608 - DNA, 15 bp, Homo sapiens
ggctgacggtgatct

SEQ ID NO: 329609 - DNA, 15 bp, Homo sapiens
tggctgacggtgatc

SEQ ID NO: 329610 - DNA, 15 bp, Homo sapiens
ttggctgacggtgat

SEQ ID NO: 329611 - DNA, 15 bp, Homo sapiens
attggctgacggtga

SEQ ID NO: 329612 - DNA, 15 bp, Homo sapiens
tattggctgacggtg

SEQ ID NO: 329613 - DNA, 15 bp, Homo sapiens
atattggctgacggt

SEQ ID NO: 329614 - DNA, 15 bp, Homo sapiens
aatattggctgacgg

SEQ ID NO: 329615 - DNA, 15 bp, Homo sapiens
caatattggctgacg

SEQ ID NO: 329616 - DNA, 15 bp, Homo sapiens
tcaatattggctgac

SEQ ID NO: 329617 - DNA, 15 bp, Homo sapiens
ttcaatattggctga

SEQ ID NO: 329618 - DNA, 15 bp, Homo sapiens
tttcaatattggctg

SEQ ID NO: 329619 - DNA, 15 bp, Homo sapiens
ctttcaatattggct

SEQ ID NO: 329620 - DNA, 15 bp, Homo sapiens
gctttcaatattggc

SEQ ID NO: 329621 - DNA, 15 bp, Homo sapiens
tgctttcaatattgg

SEQ ID NO: 329622 - DNA, 15 bp, Homo sapiens
ttgctttcaatattg

SEQ ID NO: 329623 - DNA, 15 bp, Homo sapiens
cttgctttcaatatt

SEQ ID NO: 329624 - DNA, 15 bp, Homo sapiens
tcttgctttcaatat

SEQ ID NO: 329625 - DNA, 15 bp, Homo sapiens
ctcttgctttcaata

SEQ ID NO: 329626 - DNA, 15 bp, Homo sapiens
tctcttgctttcaat

SEQ ID NO: 329627 - DNA, 15 bp, Homo sapiens
ctctcttgctttcaa

SEQ ID NO: 329628 - DNA, 15 bp, Homo sapiens
tctctcttgctttca

SEQ ID NO: 329629 - DNA, 15 bp, Homo sapiens
ctctctcttgctttc

SEQ ID NO: 329630 - DNA, 15 bp, Homo sapiens
actctctcttgcttt

SEQ ID NO: 329631 - DNA, 15 bp, Homo sapiens
gactctctcttgctt

SEQ ID NO: 329632 - DNA, 15 bp, Homo sapiens
tgactctctcttgct

SEQ ID NO: 329633 - DNA, 15 bp, Homo sapiens
ttgactctctcttgc

SEQ ID NO: 329634 - DNA, 15 bp, Homo sapiens
tttgactctctcttg

SEQ ID NO: 329635 - DNA, 15 bp, Homo sapiens
gtttgactctctctt

SEQ ID NO: 329636 - DNA, 15 bp, Homo sapiens
tgtttgactctctct

SEQ ID NO: 329637 - DNA, 15 bp, Homo sapiens
gtgtttgactctctc

SEQ ID NO: 329638 - DNA, 15 bp, Homo sapiens
agtgtttgactctct

SEQ ID NO: 329639 - DNA, 15 bp, Homo sapiens
tagtgtttgactctc

SEQ ID NO: 329640 - DNA, 15 bp, Homo sapiens
gtagtgtttgactct

SEQ ID NO: 329641 - DNA, 15 bp, Homo sapiens
cgtagtgtttgactc

SEQ ID NO: 329642 - DNA, 15 bp, Homo sapiens
acgtagtgtttgact

SEQ ID NO: 329643 - DNA, 15 bp, Homo sapiens
tacgtagtgtttgac

SEQ ID NO: 329644 - DNA, 15 bp, Homo sapiens
ttacgtagtgtttga

SEQ ID NO: 329645 - DNA, 15 bp, Homo sapiens
tttacgtagtgtttg

SEQ ID NO: 329646 - DNA, 15 bp, Homo sapiens
ttttacgtagtgttt

SEQ ID NO: 329647 - DNA, 15 bp, Homo sapiens
tttttacgtagtgtt

SEQ ID NO: 329648 - DNA, 15 bp, Homo sapiens
gtttttacgtagtgt

SEQ ID NO: 329649 - DNA, 15 bp, Homo sapiens
ggtttttacgtagtg

SEQ ID NO: 329650 - DNA, 15 bp, Homo sapiens
aggtttttacgtagt

SEQ ID NO: 329651 - DNA, 15 bp, Homo sapiens
aaggtttttacgtag

SEQ ID NO: 329652 - DNA, 15 bp, Homo sapiens
gaaggtttttacgta

SEQ ID NO: 329653 - DNA, 15 bp, Homo sapiens
tgaaggtttttacgt

SEQ ID NO: 329654 - DNA, 15 bp, Homo sapiens
ctgaaggtttttacg

SEQ ID NO: 329655 - DNA, 15 bp, Homo sapiens
gctgaaggtttttac

SEQ ID NO: 329656 - DNA, 15 bp, Homo sapiens
agctgaaggttttta

SEQ ID NO: 329657 - DNA, 15 bp, Homo sapiens
aagctgaaggttttt

SEQ ID NO: 329658 - DNA, 15 bp, Homo sapiens
taagctgaaggtttt

SEQ ID NO: 329659 - DNA, 15 bp, Homo sapiens
ctaagctgaaggttt

SEQ ID NO: 329660 - DNA, 15 bp, Homo sapiens
gctaagctgaaggtt

SEQ ID NO: 329661 - DNA, 15 bp, Homo sapiens
tgctaagctgaaggt

SEQ ID NO: 329662 - DNA, 15 bp, Homo sapiens
ctgctaagctgaagg

SEQ ID NO: 329663 - DNA, 15 bp, Homo sapiens
tctgctaagctgaag

SEQ ID NO: 329664 - DNA, 15 bp, Homo sapiens
ctctgctaagctgaa

SEQ ID NO: 329665 - DNA, 15 bp, Homo sapiens
cctctgctaagctga

SEQ ID NO: 329666 - DNA, 15 bp, Homo sapiens
ccctctgctaagctg

SEQ ID NO: 329667 - DNA, 15 bp, Homo sapiens
accctctgctaagct

SEQ ID NO: 329668 - DNA, 15 bp, Homo sapiens
gaccctctgctaagc

SEQ ID NO: 329669 - DNA, 15 bp, Homo sapiens
agaccctctgctaag

SEQ ID NO: 329670 - DNA, 15 bp, Homo sapiens
cagaccctctgctaa

SEQ ID NO: 329671 - DNA, 15 bp, Homo sapiens
ccagaccctctgcta

SEQ ID NO: 329672 - DNA, 15 bp, Homo sapiens
tccagaccctctgct

SEQ ID NO: 329673 - DNA, 15 bp, Homo sapiens
gtccagaccctctgc

SEQ ID NO: 329674 - DNA, 15 bp, Homo sapiens
tgtccagaccctctg

SEQ ID NO: 329675 - DNA, 15 bp, Homo sapiens
ttgtccagaccctct

SEQ ID NO: 329676 - DNA, 15 bp, Homo sapiens
attgtccagaccctc

SEQ ID NO: 329677 - DNA, 15 bp, Homo sapiens
aattgtccagaccct

SEQ ID NO: 329678 - DNA, 15 bp, Homo sapiens
taattgtccagaccc

SEQ ID NO: 329679 - DNA, 15 bp, Homo sapiens
gtaattgtccagacc

SEQ ID NO: 329680 - DNA, 15 bp, Homo sapiens
ggtaattgtccagac

SEQ ID NO: 329681 - DNA, 15 bp, Homo sapiens
aggtaattgtccaga

SEQ ID NO: 329682 - DNA, 15 bp, Homo sapiens
taggtaattgtccag

SEQ ID NO: 329683 - DNA, 15 bp, Homo sapiens
ataggtaattgtcca

SEQ ID NO: 329684 - DNA, 15 bp, Homo sapiens
gataggtaattgtcc

SEQ ID NO: 329685 - DNA, 15 bp, Homo sapiens
tgataggtaattgtc

SEQ ID NO: 329686 - DNA, 15 bp, Homo sapiens
atgataggtaattgt

SEQ ID NO: 329687 - DNA, 15 bp, Homo sapiens
catgataggtaattg

SEQ ID NO: 329688 - DNA, 15 bp, Homo sapiens
acatgataggtaatt

SEQ ID NO: 329689 - DNA, 15 bp, Homo sapiens
cacatgataggtaat

SEQ ID NO: 329690 - DNA, 15 bp, Homo sapiens
tcacatgataggtaa

SEQ ID NO: 329691 - DNA, 15 bp, Homo sapiens
gtcacatgataggta

SEQ ID NO: 329692 - DNA, 15 bp, Homo sapiens
tgtcacatgataggt

SEQ ID NO: 329693 - DNA, 15 bp, Homo sapiens
ctgtcacatgatagg

SEQ ID NO: 329694 - DNA, 15 bp, Homo sapiens
gctgtcacatgatag

SEQ ID NO: 329695 - DNA, 15 bp, Homo sapiens
agctgtcacatgata

SEQ ID NO: 329696 - DNA, 15 bp, Homo sapiens
tagctgtcacatgat

SEQ ID NO: 329697 - DNA, 15 bp, Homo sapiens
ttagctgtcacatga

SEQ ID NO: 329698 - DNA, 15 bp, Homo sapiens
gttagctgtcacatg

SEQ ID NO: 329699 - DNA, 15 bp, Homo sapiens
ggttagctgtcacat

SEQ ID NO: 329700 - DNA, 15 bp, Homo sapiens
aggttagctgtcaca

SEQ ID NO: 329701 - DNA, 15 bp, Homo sapiens
aaggttagctgtcac

SEQ ID NO: 329702 - DNA, 15 bp, Homo sapiens
aaaggttagctgtca

SEQ ID NO: 329703 - DNA, 15 bp, Homo sapiens
taaaggttagctgtc

SEQ ID NO: 329704 - DNA, 15 bp, Homo sapiens
gtaaaggttagctgt

SEQ ID NO: 329705 - DNA, 15 bp, Homo sapiens
ggtaaaggttagctg

SEQ ID NO: 329706 - DNA, 15 bp, Homo sapiens
gggtaaaggttagct

SEQ ID NO: 329707 - DNA, 15 bp, Homo sapiens
tgggtaaaggttagc

SEQ ID NO: 329708 - DNA, 15 bp, Homo sapiens
ttgggtaaaggttag

SEQ ID NO: 329709 - DNA, 15 bp, Homo sapiens
tttgggtaaaggtta

SEQ ID NO: 329710 - DNA, 15 bp, Homo sapiens
atttgggtaaaggtt

SEQ ID NO: 329711 - DNA, 15 bp, Homo sapiens
tatttgggtaaaggt

SEQ ID NO: 329712 - DNA, 15 bp, Homo sapiens
atatttgggtaaagg

SEQ ID NO: 329713 - DNA, 15 bp, Homo sapiens
aatatttgggtaaag

SEQ ID NO: 329714 - DNA, 15 bp, Homo sapiens
aaatatttgggtaaa

SEQ ID NO: 329715 - DNA, 15 bp, Homo sapiens
caaatatttgggtaa

SEQ ID NO: 329716 - DNA, 15 bp, Homo sapiens
acaaatatttgggta

SEQ ID NO: 329717 - DNA, 15 bp, Homo sapiens
cacaaatatttgggt

SEQ ID NO: 329718 - DNA, 15 bp, Homo sapiens
ccacaaatatttggg

SEQ ID NO: 329719 - DNA, 15 bp, Homo sapiens
tccacaaatatttgg

SEQ ID NO: 329720 - DNA, 15 bp, Homo sapiens
ttccacaaatatttg

SEQ ID NO: 329721 - DNA, 15 bp, Homo sapiens
gttccacaaatattt

SEQ ID NO: 329722 - DNA, 15 bp, Homo sapiens
agttccacaaatatt

SEQ ID NO: 329723 - DNA, 15 bp, Homo sapiens
cagttccacaaatat

SEQ ID NO: 329724 - DNA, 15 bp, Homo sapiens
ccagttccacaaata

SEQ ID NO: 329725 - DNA, 15 bp, Homo sapiens
tccagttccacaaat

SEQ ID NO: 329726 - DNA, 15 bp, Homo sapiens
atccagttccacaaa

SEQ ID NO: 329727 - DNA, 15 bp, Homo sapiens
tatccagttccacaa

SEQ ID NO: 329728 - DNA, 15 bp, Homo sapiens
gtatccagttccaca

SEQ ID NO: 329729 - DNA, 15 bp, Homo sapiens
agtatccagttccac

SEQ ID NO: 329730 - DNA, 15 bp, Homo sapiens
tagtatccagttcca

SEQ ID NO: 329731 - DNA, 15 bp, Homo sapiens
ttagtatccagttcc

SEQ ID NO: 329732 - DNA, 15 bp, Homo sapiens
tttagtatccagttc

SEQ ID NO: 329733 - DNA, 15 bp, Homo sapiens
ttttagtatccagtt

SEQ ID NO: 329734 - DNA, 15 bp, Homo sapiens
attttagtatccagt

SEQ ID NO: 329735 - DNA, 15 bp, Homo sapiens
tattttagtatccag

SEQ ID NO: 329736 - DNA, 15 bp, Homo sapiens
ttattttagtatcca

SEQ ID NO: 329737 - DNA, 15 bp, Homo sapiens
cttattttagtatcc

SEQ ID NO: 329738 - DNA, 15 bp, Homo sapiens
gcttattttagtatc

SEQ ID NO: 329739 - DNA, 15 bp, Homo sapiens
agcttattttagtat

SEQ ID NO: 329740 - DNA, 15 bp, Homo sapiens
aagcttattttagta

SEQ ID NO: 329741 - DNA, 15 bp, Homo sapiens
gaagcttattttagt

SEQ ID NO: 329742 - DNA, 15 bp, Homo sapiens
ggaagcttattttag

SEQ ID NO: 329743 - DNA, 15 bp, Homo sapiens
tggaagcttatttta

SEQ ID NO: 329744 - DNA, 15 bp, Homo sapiens
ttggaagcttatttt

SEQ ID NO: 329745 - DNA, 15 bp, Homo sapiens
cttggaagcttattt

SEQ ID NO: 329746 - DNA, 15 bp, Homo sapiens
acttggaagcttatt

SEQ ID NO: 329747 - DNA, 15 bp, Homo sapiens
aacttggaagcttat

SEQ ID NO: 329748 - DNA, 15 bp, Homo sapiens
caacttggaagctta

SEQ ID NO: 329749 - DNA, 15 bp, Homo sapiens
gcaacttggaagctt

SEQ ID NO: 329750 - DNA, 15 bp, Homo sapiens
agcaacttggaagct

SEQ ID NO: 329751 - DNA, 15 bp, Homo sapiens
cagcaacttggaagc

SEQ ID NO: 329752 - DNA, 15 bp, Homo sapiens
tcagcaacttggaag

SEQ ID NO: 329753 - DNA, 15 bp, Homo sapiens
ctcagcaacttggaa

SEQ ID NO: 329754 - DNA, 15 bp, Homo sapiens
tctcagcaacttgga

SEQ ID NO: 329755 - DNA, 15 bp, Homo sapiens
gtctcagcaacttgg

SEQ ID NO: 329756 - DNA, 15 bp, Homo sapiens
tgtctcagcaacttg

SEQ ID NO: 329757 - DNA, 15 bp, Homo sapiens
ctgtctcagcaactt

SEQ ID NO: 329758 - DNA, 15 bp, Homo sapiens
cctgtctcagcaact

SEQ ID NO: 329759 - DNA, 15 bp, Homo sapiens
tcctgtctcagcaac

SEQ ID NO: 329760 - DNA, 15 bp, Homo sapiens
ttcctgtctcagcaa

SEQ ID NO: 329761 - DNA, 15 bp, Homo sapiens
cttcctgtctcagca

SEQ ID NO: 329762 - DNA, 15 bp, Homo sapiens
tcttcctgtctcagc

SEQ ID NO: 329763 - DNA, 15 bp, Homo sapiens
ttcttcctgtctcag

SEQ ID NO: 329764 - DNA, 15 bp, Homo sapiens
tttcttcctgtctca

SEQ ID NO: 329765 - DNA, 15 bp, Homo sapiens
ctttcttcctgtctc

SEQ ID NO: 329766 - DNA, 15 bp, Homo sapiens
tctttcttcctgtct

SEQ ID NO: 329767 - DNA, 15 bp, Homo sapiens
ctctttcttcctgtc

SEQ ID NO: 329768 - DNA, 15 bp, Homo sapiens
tctctttcttcctgt

SEQ ID NO: 329769 - DNA, 15 bp, Homo sapiens
ttctctttcttcctg

SEQ ID NO: 329770 - DNA, 15 bp, Homo sapiens
cttctctttcttcct

SEQ ID NO: 329771 - DNA, 15 bp, Homo sapiens
gcttctctttcttcc

SEQ ID NO: 329772 - DNA, 15 bp, Homo sapiens
ggcttctctttcttc

SEQ ID NO: 329773 - DNA, 15 bp, Homo sapiens
tggcttctctttctt

SEQ ID NO: 329774 - DNA, 15 bp, Homo sapiens
ttggcttctctttct

SEQ ID NO: 329775 - DNA, 15 bp, Homo sapiens
cttggcttctctttc

SEQ ID NO: 329776 - DNA, 15 bp, Homo sapiens
tcttggcttctcttt

SEQ ID NO: 329777 - DNA, 15 bp, Homo sapiens
ttcttggcttctctt

SEQ ID NO: 329778 - DNA, 15 bp, Homo sapiens
cttcttggcttctct

SEQ ID NO: 329779 - DNA, 15 bp, Homo sapiens
acttcttggcttctc

SEQ ID NO: 329780 - DNA, 15 bp, Homo sapiens
aacttcttggcttct

SEQ ID NO: 329781 - DNA, 15 bp, Homo sapiens
caacttcttggcttc

SEQ ID NO: 329782 - DNA, 15 bp, Homo sapiens
acaacttcttggctt

SEQ ID NO: 329783 - DNA, 15 bp, Homo sapiens
aacaacttcttggct

SEQ ID NO: 329784 - DNA, 15 bp, Homo sapiens
gaacaacttcttggc

SEQ ID NO: 329785 - DNA, 15 bp, Homo sapiens
ggaacaacttcttgg

SEQ ID NO: 329786 - DNA, 15 bp, Homo sapiens
aggaacaacttcttg

SEQ ID NO: 329787 - DNA, 15 bp, Homo sapiens
taggaacaacttctt

SEQ ID NO: 329788 - DNA, 15 bp, Homo sapiens
ctaggaacaacttct

SEQ ID NO: 329789 - DNA, 15 bp, Homo sapiens
gctaggaacaacttc

SEQ ID NO: 329790 - DNA, 15 bp, Homo sapiens
ggctaggaacaactt

SEQ ID NO: 329791 - DNA, 15 bp, Homo sapiens
gggctaggaacaact

SEQ ID NO: 329792 - DNA, 15 bp, Homo sapiens
tgggctaggaacaac

SEQ ID NO: 329793 - DNA, 15 bp, Homo sapiens
atgggctaggaacaa

SEQ ID NO: 329794 - DNA, 15 bp, Homo sapiens
aatgggctaggaaca

SEQ ID NO: 329795 - DNA, 15 bp, Homo sapiens
aaatgggctaggaac

SEQ ID NO: 329796 - DNA, 15 bp, Homo sapiens
aaaatgggctaggaa

SEQ ID NO: 329797 - DNA, 15 bp, Homo sapiens
gaaaatgggctagga

SEQ ID NO: 329798 - DNA, 15 bp, Homo sapiens
tgaaaatgggctagg

SEQ ID NO: 329799 - DNA, 15 bp, Homo sapiens
ctgaaaatgggctag

SEQ ID NO: 329800 - DNA, 15 bp, Homo sapiens
tctgaaaatgggcta

SEQ ID NO: 329801 - DNA, 15 bp, Homo sapiens
ttctgaaaatgggct

SEQ ID NO: 329802 - DNA, 15 bp, Homo sapiens
attctgaaaatgggc

SEQ ID NO: 329803 - DNA, 15 bp, Homo sapiens
tattctgaaaatggg

SEQ ID NO: 329804 - DNA, 15 bp, Homo sapiens
ctattctgaaaatgg

SEQ ID NO: 329805 - DNA, 15 bp, Homo sapiens
cctattctgaaaatg

SEQ ID NO: 329806 - DNA, 15 bp, Homo sapiens
tcctattctgaaaat

SEQ ID NO: 329807 - DNA, 15 bp, Homo sapiens
ttcctattctgaaaa

SEQ ID NO: 329808 - DNA, 15 bp, Homo sapiens
cttcctattctgaaa

SEQ ID NO: 329809 - DNA, 15 bp, Homo sapiens
acttcctattctgaa

SEQ ID NO: 329810 - DNA, 15 bp, Homo sapiens
aacttcctattctga

SEQ ID NO: 329811 - DNA, 15 bp, Homo sapiens
aaacttcctattctg

SEQ ID NO: 329812 - DNA, 15 bp, Homo sapiens
taaacttcctattct

SEQ ID NO: 329813 - DNA, 15 bp, Homo sapiens
ataaacttcctattc

SEQ ID NO: 329814 - DNA, 15 bp, Homo sapiens
tataaacttcctatt

SEQ ID NO: 329815 - DNA, 15 bp, Homo sapiens
ctataaacttcctat

SEQ ID NO: 329816 - DNA, 15 bp, Homo sapiens
actataaacttccta

SEQ ID NO: 329817 - DNA, 15 bp, Homo sapiens
cactataaacttcct

SEQ ID NO: 329818 - DNA, 15 bp, Homo sapiens
tcactataaacttcc

SEQ ID NO: 329819 - DNA, 15 bp, Homo sapiens
atcactataaacttc

SEQ ID NO: 329820 - DNA, 15 bp, Homo sapiens
aatcactataaactt

SEQ ID NO: 329821 - DNA, 15 bp, Homo sapiens
taatcactataaact

SEQ ID NO: 329822 - DNA, 15 bp, Homo sapiens
ttaatcactataaac

SEQ ID NO: 329823 - DNA, 15 bp, Homo sapiens
tttaatcactataaa

SEQ ID NO: 329824 - DNA, 15 bp, Homo sapiens
gtttaatcactataa

SEQ ID NO: 329825 - DNA, 15 bp, Homo sapiens
tgtttaatcactata

SEQ ID NO: 329826 - DNA, 15 bp, Homo sapiens
ctgtttaatcactat

SEQ ID NO: 329827 - DNA, 15 bp, Homo sapiens
gctgtttaatcacta

SEQ ID NO: 329828 - DNA, 15 bp, Homo sapiens
cgctgtttaatcact

SEQ ID NO: 329829 - DNA, 15 bp, Homo sapiens
tcgctgtttaatcac

SEQ ID NO: 329830 - DNA, 15 bp, Homo sapiens
ctcgctgtttaatca

SEQ ID NO: 329831 - DNA, 15 bp, Homo sapiens
tctcgctgtttaatc

SEQ ID NO: 329832 - DNA, 15 bp, Homo sapiens
gtctcgctgtttaat

SEQ ID NO: 329833 - DNA, 15 bp, Homo sapiens
tgtctcgctgtttaa

SEQ ID NO: 329834 - DNA, 15 bp, Homo sapiens
atgtctcgctgttta

SEQ ID NO: 329835 - DNA, 15 bp, Homo sapiens
tatgtctcgctgttt

SEQ ID NO: 329836 - DNA, 15 bp, Homo sapiens
ctatgtctcgctgtt

SEQ ID NO: 329837 - DNA, 15 bp, Homo sapiens
actatgtctcgctgt

SEQ ID NO: 329838 - DNA, 15 bp, Homo sapiens
aactatgtctcgctg

SEQ ID NO: 329839 - DNA, 15 bp, Homo sapiens
aaactatgtctcgct

SEQ ID NO: 329840 - DNA, 15 bp, Homo sapiens
taaactatgtctcgc

SEQ ID NO: 329841 - DNA, 15 bp, Homo sapiens
ctaaactatgtctcg

SEQ ID NO: 329842 - DNA, 15 bp, Homo sapiens
gctaaactatgtctc

SEQ ID NO: 329843 - DNA, 15 bp, Homo sapiens
ggctaaactatgtct

SEQ ID NO: 329844 - DNA, 15 bp, Homo sapiens
cggctaaactatgtc

SEQ ID NO: 329845 - DNA, 15 bp, Homo sapiens
gcggctaaactatgt

SEQ ID NO: 329846 - DNA, 15 bp, Homo sapiens
tgcggctaaactatg

SEQ ID NO: 329847 - DNA, 15 bp, Homo sapiens
ttgcggctaaactat

SEQ ID NO: 329848 - DNA, 15 bp, Homo sapiens
attgcggctaaacta

SEQ ID NO: 329849 - DNA, 15 bp, Homo sapiens
tattgcggctaaact

SEQ ID NO: 329850 - DNA, 15 bp, Homo sapiens
ctattgcggctaaac

SEQ ID NO: 329851 - DNA, 15 bp, Homo sapiens
cctattgcggctaaa

SEQ ID NO: 329852 - DNA, 15 bp, Homo sapiens
ccctattgcggctaa

SEQ ID NO: 329853 - DNA, 15 bp, Homo sapiens
gccctattgcggcta

SEQ ID NO: 329854 - DNA, 15 bp, Homo sapiens
ggccctattgcggct

SEQ ID NO: 329855 - DNA, 15 bp, Homo sapiens
gggccctattgcggc

SEQ ID NO: 329856 - DNA, 15 bp, Homo sapiens
agggccctattgcgg

SEQ ID NO: 329857 - DNA, 15 bp, Homo sapiens
tagggccctattgcg

SEQ ID NO: 329858 - DNA, 15 bp, Homo sapiens
ctagggccctattgc

SEQ ID NO: 329859 - DNA, 15 bp, Homo sapiens
gctagggccctattg

SEQ ID NO: 329860 - DNA, 15 bp, Homo sapiens
tgctagggccctatt

SEQ ID NO: 329861 - DNA, 15 bp, Homo sapiens
gtgctagggccctat

SEQ ID NO: 329862 - DNA, 15 bp, Homo sapiens
cgtgctagggcccta

SEQ ID NO: 329863 - DNA, 15 bp, Homo sapiens
tcgtgctagggccct

SEQ ID NO: 329864 - DNA, 15 bp, Homo sapiens
ttcgtgctagggccc

SEQ ID NO: 329865 - DNA, 15 bp, Homo sapiens
cttcgtgctagggcc

SEQ ID NO: 329866 - DNA, 15 bp, Homo sapiens
ccttcgtgctagggc

SEQ ID NO: 329867 - DNA, 15 bp, Homo sapiens
gccttcgtgctaggg

SEQ ID NO: 329868 - DNA, 15 bp, Homo sapiens
ggccttcgtgctagg

SEQ ID NO: 329869 - DNA, 15 bp, Homo sapiens
tggccttcgtgctag

SEQ ID NO: 329870 - DNA, 15 bp, Homo sapiens
atggccttcgtgcta

SEQ ID NO: 329871 - DNA, 15 bp, Homo sapiens
aatggccttcgtgct

SEQ ID NO: 329872 - DNA, 15 bp, Homo sapiens
gaatggccttcgtgc

SEQ ID NO: 329873 - DNA, 15 bp, Homo sapiens
ggaatggccttcgtg

SEQ ID NO: 329874 - DNA, 15 bp, Homo sapiens
aggaatggccttcgt

SEQ ID NO: 329875 - DNA, 15 bp, Homo sapiens
aaggaatggccttcg

SEQ ID NO: 329876 - DNA, 15 bp, Homo sapiens
gaaggaatggccttc

SEQ ID NO: 329877 - DNA, 15 bp, Homo sapiens
ggaaggaatggcctt

SEQ ID NO: 329878 - DNA, 15 bp, Homo sapiens
tggaaggaatggcct

SEQ ID NO: 329879 - DNA, 15 bp, Homo sapiens
atggaaggaatggcc

SEQ ID NO: 329880 - DNA, 15 bp, Homo sapiens
gatggaaggaatggc

SEQ ID NO: 329881 - DNA, 15 bp, Homo sapiens
ggatggaaggaatgg

SEQ ID NO: 329882 - DNA, 15 bp, Homo sapiens
aggatggaaggaatg

SEQ ID NO: 329883 - DNA, 15 bp, Homo sapiens
gaggatggaaggaat

SEQ ID NO: 329884 - DNA, 15 bp, Homo sapiens
ggaggatggaaggaa

SEQ ID NO: 329885 - DNA, 15 bp, Homo sapiens
gggaggatggaagga

SEQ ID NO: 329886 - DNA, 15 bp, Homo sapiens
agggaggatggaagg

SEQ ID NO: 329887 - DNA, 15 bp, Homo sapiens
aagggaggatggaag

SEQ ID NO: 329888 - DNA, 15 bp, Homo sapiens
gaagggaggatggaa

SEQ ID NO: 329889 - DNA, 15 bp, Homo sapiens
ggaagggaggatgga

SEQ ID NO: 329890 - DNA, 15 bp, Homo sapiens
aggaagggaggatgg

SEQ ID NO: 329891 - DNA, 15 bp, Homo sapiens
aaggaagggaggatg

SEQ ID NO: 329892 - DNA, 15 bp, Homo sapiens
caaggaagggaggat

SEQ ID NO: 329893 - DNA, 15 bp, Homo sapiens
acaaggaagggagga

SEQ ID NO: 329894 - DNA, 15 bp, Homo sapiens
aacaaggaagggagg

SEQ ID NO: 329895 - DNA, 15 bp, Homo sapiens
aaacaaggaagggag

SEQ ID NO: 329896 - DNA, 15 bp, Homo sapiens
aaaacaaggaaggga

SEQ ID NO: 329897 - DNA, 15 bp, Homo sapiens
aaaaacaaggaaggg

SEQ ID NO: 329898 - DNA, 15 bp, Homo sapiens
caaaaacaaggaagg

SEQ ID NO: 329899 - DNA, 15 bp, Homo sapiens
ccaaaaacaaggaag

SEQ ID NO: 329900 - DNA, 15 bp, Homo sapiens
gccaaaaacaaggaa

SEQ ID NO: 329901 - DNA, 15 bp, Homo sapiens
ggccaaaaacaagga

SEQ ID NO: 329902 - DNA, 15 bp, Homo sapiens
aggccaaaaacaagg

SEQ ID NO: 329903 - DNA, 15 bp, Homo sapiens
taggccaaaaacaag

SEQ ID NO: 329904 - DNA, 15 bp, Homo sapiens
ttaggccaaaaacaa

SEQ ID NO: 329905 - DNA, 15 bp, Homo sapiens
cttaggccaaaaaca

SEQ ID NO: 329906 - DNA, 15 bp, Homo sapiens
acttaggccaaaaac

SEQ ID NO: 329907 - DNA, 15 bp, Homo sapiens
cacttaggccaaaaa

SEQ ID NO: 329908 - DNA, 15 bp, Homo sapiens
acacttaggccaaaa

SEQ ID NO: 329909 - DNA, 15 bp, Homo sapiens
aacacttaggccaaa

SEQ ID NO: 329910 - DNA, 15 bp, Homo sapiens
gaacacttaggccaa

SEQ ID NO: 329911 - DNA, 15 bp, Homo sapiens
tgaacacttaggcca

SEQ ID NO: 329912 - DNA, 15 bp, Homo sapiens
gtgaacacttaggcc

SEQ ID NO: 329913 - DNA, 15 bp, Homo sapiens
agtgaacacttaggc

SEQ ID NO: 329914 - DNA, 15 bp, Homo sapiens
cagtgaacacttagg

SEQ ID NO: 329915 - DNA, 15 bp, Homo sapiens
gcagtgaacacttag

SEQ ID NO: 329916 - DNA, 15 bp, Homo sapiens
ggcagtgaacactta

SEQ ID NO: 329917 - DNA, 15 bp, Homo sapiens
aggcagtgaacactt

SEQ ID NO: 329918 - DNA, 15 bp, Homo sapiens
gaggcagtgaacact

SEQ ID NO: 329919 - DNA, 15 bp, Homo sapiens
agaggcagtgaacac

SEQ ID NO: 329920 - DNA, 15 bp, Homo sapiens
aagaggcagtgaaca

SEQ ID NO: 329921 - DNA, 15 bp, Homo sapiens
gaagaggcagtgaac

SEQ ID NO: 329922 - DNA, 15 bp, Homo sapiens
ggaagaggcagtgaa

SEQ ID NO: 329923 - DNA, 15 bp, Homo sapiens
tggaagaggcagtga

SEQ ID NO: 329924 - DNA, 15 bp, Homo sapiens
ctggaagaggcagtg

SEQ ID NO: 329925 - DNA, 15 bp, Homo sapiens
cctggaagaggcagt

SEQ ID NO: 329926 - DNA, 15 bp, Homo sapiens
tcctggaagaggcag

SEQ ID NO: 329927 - DNA, 15 bp, Homo sapiens
ttcctggaagaggca

SEQ ID NO: 329928 - DNA, 15 bp, Homo sapiens
cttcctggaagaggc

SEQ ID NO: 329929 - DNA, 15 bp, Homo sapiens
gcttcctggaagagg

SEQ ID NO: 329930 - DNA, 15 bp, Homo sapiens
tgcttcctggaagag

SEQ ID NO: 329931 - DNA, 15 bp, Homo sapiens
ctgcttcctggaaga

SEQ ID NO: 329932 - DNA, 15 bp, Homo sapiens
tctgcttcctggaag

SEQ ID NO: 329933 - DNA, 15 bp, Homo sapiens
gtctgcttcctggaa

SEQ ID NO: 329934 - DNA, 15 bp, Homo sapiens
tgtctgcttcctgga

SEQ ID NO: 329935 - DNA, 15 bp, Homo sapiens
ctgtctgcttcctgg

SEQ ID NO: 329936 - DNA, 15 bp, Homo sapiens
actgtctgcttcctg

SEQ ID NO: 329937 - DNA, 15 bp, Homo sapiens
tactgtctgcttcct

SEQ ID NO: 329938 - DNA, 15 bp, Homo sapiens
ctactgtctgcttcc

SEQ ID NO: 329939 - DNA, 15 bp, Homo sapiens
tctactgtctgcttc

SEQ ID NO: 329940 - DNA, 15 bp, Homo sapiens
gtctactgtctgctt

SEQ ID NO: 329941 - DNA, 15 bp, Homo sapiens
tgtctactgtctgct

SEQ ID NO: 329942 - DNA, 15 bp, Homo sapiens
ctgtctactgtctgc

SEQ ID NO: 329943 - DNA, 15 bp, Homo sapiens
cctgtctactgtctg

SEQ ID NO: 329944 - DNA, 15 bp, Homo sapiens
acctgtctactgtct

SEQ ID NO: 329945 - DNA, 15 bp, Homo sapiens
cacctgtctactgtc

SEQ ID NO: 329946 - DNA, 15 bp, Homo sapiens
tcacctgtctactgt

SEQ ID NO: 329947 - DNA, 15 bp, Homo sapiens
ttcacctgtctactg

SEQ ID NO: 329948 - DNA, 15 bp, Homo sapiens
cttcacctgtctact

SEQ ID NO: 329949 - DNA, 15 bp, Homo sapiens
acttcacctgtctac

SEQ ID NO: 329950 - DNA, 15 bp, Homo sapiens
gacttcacctgtcta

SEQ ID NO: 329951 - DNA, 15 bp, Homo sapiens
tgacttcacctgtct

SEQ ID NO: 329952 - DNA, 15 bp, Homo sapiens
gtgacttcacctgtc

SEQ ID NO: 329953 - DNA, 15 bp, Homo sapiens
tgtgacttcacctgt

SEQ ID NO: 329954 - DNA, 15 bp, Homo sapiens
atgtgacttcacctg

SEQ ID NO: 329955 - DNA, 15 bp, Homo sapiens
catgtgacttcacct

SEQ ID NO: 329956 - DNA, 15 bp, Homo sapiens
gcatgtgacttcacc

SEQ ID NO: 329957 - DNA, 15 bp, Homo sapiens
ggcatgtgacttcac

SEQ ID NO: 329958 - DNA, 15 bp, Homo sapiens
aggcatgtgacttca

SEQ ID NO: 329959 - DNA, 15 bp, Homo sapiens
caggcatgtgacttc

SEQ ID NO: 329960 - DNA, 15 bp, Homo sapiens
ccaggcatgtgactt

SEQ ID NO: 329961 - DNA, 15 bp, Homo sapiens
accaggcatgtgact

SEQ ID NO: 329962 - DNA, 15 bp, Homo sapiens
caccaggcatgtgac

SEQ ID NO: 329963 - DNA, 15 bp, Homo sapiens
ccaccaggcatgtga

SEQ ID NO: 329964 - DNA, 15 bp, Homo sapiens
gccaccaggcatgtg

SEQ ID NO: 329965 - DNA, 15 bp, Homo sapiens
agccaccaggcatgt

SEQ ID NO: 329966 - DNA, 15 bp, Homo sapiens
aagccaccaggcatg

SEQ ID NO: 329967 - DNA, 15 bp, Homo sapiens
caagccaccaggcat

SEQ ID NO: 329968 - DNA, 15 bp, Homo sapiens
gcaagccaccaggca

SEQ ID NO: 329969 - DNA, 15 bp, Homo sapiens
agcaagccaccaggc

SEQ ID NO: 329970 - DNA, 15 bp, Homo sapiens
cagcaagccaccagg

SEQ ID NO: 329971 - DNA, 15 bp, Homo sapiens
tcagcaagccaccag

SEQ ID NO: 329972 - DNA, 15 bp, Homo sapiens
gtcagcaagccacca

SEQ ID NO: 329973 - DNA, 15 bp, Homo sapiens
agtcagcaagccacc

SEQ ID NO: 329974 - DNA, 15 bp, Homo sapiens
aagtcagcaagccac

SEQ ID NO: 329975 - DNA, 15 bp, Homo sapiens
caagtcagcaagcca

SEQ ID NO: 329976 - DNA, 15 bp, Homo sapiens
gcaagtcagcaagcc

SEQ ID NO: 329977 - DNA, 15 bp, Homo sapiens
cgcaagtcagcaagc

SEQ ID NO: 329978 - DNA, 15 bp, Homo sapiens
acgcaagtcagcaag

SEQ ID NO: 329979 - DNA, 15 bp, Homo sapiens
gacgcaagtcagcaa

SEQ ID NO: 329980 - DNA, 15 bp, Homo sapiens
ggacgcaagtcagca

SEQ ID NO: 329981 - DNA, 15 bp, Homo sapiens
gggacgcaagtcagc

SEQ ID NO: 329982 - DNA, 15 bp, Homo sapiens
ggggacgcaagtcag

SEQ ID NO: 329983 - DNA, 15 bp, Homo sapiens
cggggacgcaagtca

SEQ ID NO: 329984 - DNA, 15 bp, Homo sapiens
acggggacgcaagtc

SEQ ID NO: 329985 - DNA, 15 bp, Homo sapiens
gacggggacgcaagt

SEQ ID NO: 329986 - DNA, 15 bp, Homo sapiens
ggacggggacgcaag

SEQ ID NO: 329987 - DNA, 15 bp, Homo sapiens
aggacggggacgcaa

SEQ ID NO: 329988 - DNA, 15 bp, Homo sapiens
aaggacggggacgca

SEQ ID NO: 329989 - DNA, 15 bp, Homo sapiens
aaaggacggggacgc

SEQ ID NO: 329990 - DNA, 15 bp, Homo sapiens
aaaaggacggggacg

SEQ ID NO: 329991 - DNA, 15 bp, Homo sapiens
gaaaaggacggggac

SEQ ID NO: 329992 - DNA, 15 bp, Homo sapiens
agaaaaggacgggga

SEQ ID NO: 329993 - DNA, 15 bp, Homo sapiens
cagaaaaggacgggg

SEQ ID NO: 329994 - DNA, 15 bp, Homo sapiens
acagaaaaggacggg

SEQ ID NO: 329995 - DNA, 15 bp, Homo sapiens
aacagaaaaggacgg

SEQ ID NO: 329996 - DNA, 15 bp, Homo sapiens
caacagaaaaggacg

SEQ ID NO: 329997 - DNA, 15 bp, Homo sapiens
ccaacagaaaaggac

SEQ ID NO: 329998 - DNA, 15 bp, Homo sapiens
tccaacagaaaagga

SEQ ID NO: 329999 - DNA, 15 bp, Homo sapiens
ctccaacagaaaagg

SEQ ID NO: 330000 - DNA, 15 bp, Homo sapiens
tctccaacagaaaag

SEQ ID NO: 330001 - DNA, 15 bp, Homo sapiens
ttctccaacagaaaa

SEQ ID NO: 330002 - DNA, 15 bp, Homo sapiens
cttctccaacagaaa

SEQ ID NO: 330003 - DNA, 15 bp, Homo sapiens
ccttctccaacagaa

SEQ ID NO: 330004 - DNA, 15 bp, Homo sapiens
cccttctccaacaga

SEQ ID NO: 330005 - DNA, 15 bp, Homo sapiens
gcccttctccaacag

SEQ ID NO: 330006 - DNA, 15 bp, Homo sapiens
tgcccttctccaaca

SEQ ID NO: 330007 - DNA, 15 bp, Homo sapiens
ctgcccttctccaac

SEQ ID NO: 330008 - DNA, 15 bp, Homo sapiens
cctgcccttctccaa

SEQ ID NO: 330009 - DNA, 15 bp, Homo sapiens
tcctgcccttctcca

SEQ ID NO: 330010 - DNA, 15 bp, Homo sapiens
atcctgcccttctcc

SEQ ID NO: 330011 - DNA, 15 bp, Homo sapiens
catcctgcccttctc

SEQ ID NO: 330012 - DNA, 15 bp, Homo sapiens
ccatcctgcccttct

SEQ ID NO: 330013 - DNA, 15 bp, Homo sapiens
gccatcctgcccttc

SEQ ID NO: 330014 - DNA, 15 bp, Homo sapiens
tgccatcctgccctt

SEQ ID NO: 330015 - DNA, 15 bp, Homo sapiens
ctgccatcctgccct

SEQ ID NO: 330016 - DNA, 15 bp, Homo sapiens
actgccatcctgccc

SEQ ID NO: 330017 - DNA, 15 bp, Homo sapiens
cactgccatcctgcc

SEQ ID NO: 330018 - DNA, 15 bp, Homo sapiens
gcactgccatcctgc

SEQ ID NO: 330019 - DNA, 15 bp, Homo sapiens
cgcactgccatcctg

SEQ ID NO: 330020 - DNA, 15 bp, Homo sapiens
ccgcactgccatcct

SEQ ID NO: 330021 - DNA, 15 bp, Homo sapiens
tccgcactgccatcc

SEQ ID NO: 330022 - DNA, 15 bp, Homo sapiens
ctccgcactgccatc

SEQ ID NO: 330023 - DNA, 15 bp, Homo sapiens
cctccgcactgccat

SEQ ID NO: 330024 - DNA, 15 bp, Homo sapiens
ccctccgcactgcca

SEQ ID NO: 330025 - DNA, 15 bp, Homo sapiens
tccctccgcactgcc

SEQ ID NO: 330026 - DNA, 15 bp, Homo sapiens
atccctccgcactgc

SEQ ID NO: 330027 - DNA, 15 bp, Homo sapiens
catccctccgcactg

SEQ ID NO: 330028 - DNA, 15 bp, Homo sapiens
ccatccctccgcact

SEQ ID NO: 330029 - DNA, 15 bp, Homo sapiens
gccatccctccgcac

SEQ ID NO: 330030 - DNA, 15 bp, Homo sapiens
agccatccctccgca

SEQ ID NO: 330031 - DNA, 15 bp, Homo sapiens
gagccatccctccgc

SEQ ID NO: 330032 - DNA, 15 bp, Homo sapiens
tgagccatccctccg

SEQ ID NO: 330033 - DNA, 15 bp, Homo sapiens
gtgagccatccctcc

SEQ ID NO: 330034 - DNA, 15 bp, Homo sapiens
ggtgagccatccctc

SEQ ID NO: 330035 - DNA, 15 bp, Homo sapiens
tggtgagccatccct

SEQ ID NO: 330036 - DNA, 15 bp, Homo sapiens
atggtgagccatccc

SEQ ID NO: 330037 - DNA, 15 bp, Homo sapiens
tatggtgagccatcc

SEQ ID NO: 330038 - DNA, 15 bp, Homo sapiens
ctatggtgagccatc

SEQ ID NO: 330039 - DNA, 15 bp, Homo sapiens
gctatggtgagccat

SEQ ID NO: 330040 - DNA, 15 bp, Homo sapiens
tgctatggtgagcca

SEQ ID NO: 330041 - DNA, 15 bp, Homo sapiens
ctgctatggtgagcc

SEQ ID NO: 330042 - DNA, 15 bp, Homo sapiens
actgctatggtgagc

SEQ ID NO: 330043 - DNA, 15 bp, Homo sapiens
cactgctatggtgag

SEQ ID NO: 330044 - DNA, 15 bp, Homo sapiens
ccactgctatggtga

SEQ ID NO: 330045 - DNA, 15 bp, Homo sapiens
tccactgctatggtg

SEQ ID NO: 330046 - DNA, 15 bp, Homo sapiens
ctccactgctatggt

SEQ ID NO: 330047 - DNA, 15 bp, Homo sapiens
tctccactgctatgg

SEQ ID NO: 330048 - DNA, 15 bp, Homo sapiens
ttctccactgctatg

SEQ ID NO: 330049 - DNA, 15 bp, Homo sapiens
attctccactgctat

SEQ ID NO: 330050 - DNA, 15 bp, Homo sapiens
gattctccactgcta

SEQ ID NO: 330051 - DNA, 15 bp, Homo sapiens
agattctccactgct

SEQ ID NO: 330052 - DNA, 15 bp, Homo sapiens
gagattctccactgc

SEQ ID NO: 330053 - DNA, 15 bp, Homo sapiens
agagattctccactg

SEQ ID NO: 330054 - DNA, 15 bp, Homo sapiens
aagagattctccact

SEQ ID NO: 330055 - DNA, 15 bp, Homo sapiens
caagagattctccac

SEQ ID NO: 330056 - DNA, 15 bp, Homo sapiens
gcaagagattctcca

SEQ ID NO: 330057 - DNA, 15 bp, Homo sapiens
ggcaagagattctcc

SEQ ID NO: 330058 - DNA, 15 bp, Homo sapiens
gggcaagagattctc

SEQ ID NO: 330059 - DNA, 15 bp, Homo sapiens
ggggcaagagattct

SEQ ID NO: 330060 - DNA, 15 bp, Homo sapiens
aggggcaagagattc

SEQ ID NO: 330061 - DNA, 15 bp, Homo sapiens
aaggggcaagagatt

SEQ ID NO: 330062 - DNA, 15 bp, Homo sapiens
aaaggggcaagagat

SEQ ID NO: 330063 - DNA, 15 bp, Homo sapiens
gaaaggggcaagaga

SEQ ID NO: 330064 - DNA, 15 bp, Homo sapiens
agaaaggggcaagag

SEQ ID NO: 330065 - DNA, 15 bp, Homo sapiens
tagaaaggggcaaga

SEQ ID NO: 330066 - DNA, 15 bp, Homo sapiens
ttagaaaggggcaag

SEQ ID NO: 330067 - DNA, 15 bp, Homo sapiens
attagaaaggggcaa

SEQ ID NO: 330068 - DNA, 15 bp, Homo sapiens
gattagaaaggggca

SEQ ID NO: 330069 - DNA, 15 bp, Homo sapiens
ggattagaaaggggc

SEQ ID NO: 330070 - DNA, 15 bp, Homo sapiens
cggattagaaagggg

SEQ ID NO: 330071 - DNA, 15 bp, Homo sapiens
gcggattagaaaggg

SEQ ID NO: 330072 - DNA, 15 bp, Homo sapiens
agcggattagaaagg

SEQ ID NO: 330073 - DNA, 15 bp, Homo sapiens
cagcggattagaaag

SEQ ID NO: 330074 - DNA, 15 bp, Homo sapiens
acagcggattagaaa

SEQ ID NO: 330075 - DNA, 15 bp, Homo sapiens
cacagcggattagaa

SEQ ID NO: 330076 - DNA, 15 bp, Homo sapiens
tcacagcggattaga

SEQ ID NO: 330077 - DNA, 15 bp, Homo sapiens
gtcacagcggattag

SEQ ID NO: 330078 - DNA, 15 bp, Homo sapiens
cgtcacagcggatta

SEQ ID NO: 330079 - DNA, 15 bp, Homo sapiens
gcgtcacagcggatt

SEQ ID NO: 330080 - DNA, 15 bp, Homo sapiens
ggcgtcacagcggat

SEQ ID NO: 330081 - DNA, 15 bp, Homo sapiens
gggcgtcacagcgga

SEQ ID NO: 330082 - DNA, 15 bp, Homo sapiens
cgggcgtcacagcgg

SEQ ID NO: 330083 - DNA, 15 bp, Homo sapiens
ccgggcgtcacagcg

SEQ ID NO: 330084 - DNA, 15 bp, Homo sapiens
tccgggcgtcacagc

SEQ ID NO: 330085 - DNA, 15 bp, Homo sapiens
atccgggcgtcacag

SEQ ID NO: 330086 - DNA, 15 bp, Homo sapiens
catccgggcgtcaca

SEQ ID NO: 330087 - DNA, 15 bp, Homo sapiens
ccatccgggcgtcac

SEQ ID NO: 330088 - DNA, 15 bp, Homo sapiens
accatccgggcgtca

SEQ ID NO: 330089 - DNA, 15 bp, Homo sapiens
caccatccgggcgtc

SEQ ID NO: 330090 - DNA, 15 bp, Homo sapiens
ccaccatccgggcgt

SEQ ID NO: 330091 - DNA, 15 bp, Homo sapiens
gccaccatccgggcg

SEQ ID NO: 330092 - DNA, 15 bp, Homo sapiens
cgccaccatccgggc

SEQ ID NO: 330093 - DNA, 15 bp, Homo sapiens
tcgccaccatccggg

SEQ ID NO: 330094 - DNA, 15 bp, Homo sapiens
gtcgccaccatccgg

SEQ ID NO: 330095 - DNA, 15 bp, Homo sapiens
tgtcgccaccatccg

SEQ ID NO: 330096 - DNA, 15 bp, Homo sapiens
ctgtcgccaccatcc

SEQ ID NO: 330097 - DNA, 15 bp, Homo sapiens
actgtcgccaccatc

SEQ ID NO: 330098 - DNA, 15 bp, Homo sapiens
cactgtcgccaccat

SEQ ID NO: 330099 - DNA, 15 bp, Homo sapiens
gcactgtcgccacca

SEQ ID NO: 330100 - DNA, 15 bp, Homo sapiens
agcactgtcgccacc

SEQ ID NO: 330101 - DNA, 15 bp, Homo sapiens
tagcactgtcgccac

SEQ ID NO: 330102 - DNA, 15 bp, Homo sapiens
ttagcactgtcgcca

SEQ ID NO: 330103 - DNA, 15 bp, Homo sapiens
attagcactgtcgcc

SEQ ID NO: 330104 - DNA, 15 bp, Homo sapiens
cattagcactgtcgc

SEQ ID NO: 330105 - DNA, 15 bp, Homo sapiens
tcattagcactgtcg

SEQ ID NO: 330106 - DNA, 15 bp, Homo sapiens
ttcattagcactgtc

SEQ ID NO: 330107 - DNA, 15 bp, Homo sapiens
cttcattagcactgt

SEQ ID NO: 330108 - DNA, 15 bp, Homo sapiens
ccttcattagcactg

SEQ ID NO: 330109 - DNA, 15 bp, Homo sapiens
tccttcattagcact

SEQ ID NO: 330110 - DNA, 15 bp, Homo sapiens
gtccttcattagcac

SEQ ID NO: 330111 - DNA, 15 bp, Homo sapiens
tgtccttcattagca

SEQ ID NO: 330112 - DNA, 15 bp, Homo sapiens
gtgtccttcattagc

SEQ ID NO: 330113 - DNA, 15 bp, Homo sapiens
cgtgtccttcattag

SEQ ID NO: 330114 - DNA, 15 bp, Homo sapiens
gcgtgtccttcatta

SEQ ID NO: 330115 - DNA, 15 bp, Homo sapiens
agcgtgtccttcatt

SEQ ID NO: 330116 - DNA, 15 bp, Homo sapiens
cagcgtgtccttcat

SEQ ID NO: 330117 - DNA, 15 bp, Homo sapiens
ccagcgtgtccttca

SEQ ID NO: 330118 - DNA, 15 bp, Homo sapiens
accagcgtgtccttc

SEQ ID NO: 330119 - DNA, 15 bp, Homo sapiens
caccagcgtgtcctt

SEQ ID NO: 330120 - DNA, 15 bp, Homo sapiens
acaccagcgtgtcct

SEQ ID NO: 330121 - DNA, 15 bp, Homo sapiens
aacaccagcgtgtcc

SEQ ID NO: 330122 - DNA, 15 bp, Homo sapiens
caacaccagcgtgtc

SEQ ID NO: 330123 - DNA, 15 bp, Homo sapiens
ccaacaccagcgtgt

SEQ ID NO: 330124 - DNA, 15 bp, Homo sapiens
cccaacaccagcgtg

SEQ ID NO: 330125 - DNA, 15 bp, Homo sapiens
ccccaacaccagcgt

SEQ ID NO: 330126 - DNA, 15 bp, Homo sapiens
gccccaacaccagcg

SEQ ID NO: 330127 - DNA, 15 bp, Homo sapiens
agccccaacaccagc

SEQ ID NO: 330128 - DNA, 15 bp, Homo sapiens
tagccccaacaccag

SEQ ID NO: 330129 - DNA, 15 bp, Homo sapiens
gtagccccaacacca

SEQ ID NO: 330130 - DNA, 15 bp, Homo sapiens
tgtagccccaacacc

SEQ ID NO: 330131 - DNA, 15 bp, Homo sapiens
ctgtagccccaacac

SEQ ID NO: 330132 - DNA, 15 bp, Homo sapiens
cctgtagccccaaca

SEQ ID NO: 330133 - DNA, 15 bp, Homo sapiens
tcctgtagccccaac

SEQ ID NO: 330134 - DNA, 15 bp, Homo sapiens
ctcctgtagccccaa

SEQ ID NO: 330135 - DNA, 15 bp, Homo sapiens
actcctgtagcccca

SEQ ID NO: 330136 - DNA, 15 bp, Homo sapiens
cactcctgtagcccc

SEQ ID NO: 330137 - DNA, 15 bp, Homo sapiens
ccactcctgtagccc

SEQ ID NO: 330138 - DNA, 15 bp, Homo sapiens
accactcctgtagcc

SEQ ID NO: 330139 - DNA, 15 bp, Homo sapiens
aaccactcctgtagc

SEQ ID NO: 330140 - DNA, 15 bp, Homo sapiens
gaaccactcctgtag

SEQ ID NO: 330141 - DNA, 15 bp, Homo sapiens
tgaaccactcctgta

SEQ ID NO: 330142 - DNA, 15 bp, Homo sapiens
ctgaaccactcctgt

SEQ ID NO: 330143 - DNA, 15 bp, Homo sapiens
cctgaaccactcctg

SEQ ID NO: 330144 - DNA, 15 bp, Homo sapiens
tcctgaaccactcct

SEQ ID NO: 330145 - DNA, 15 bp, Homo sapiens
ctcctgaaccactcc

SEQ ID NO: 330146 - DNA, 15 bp, Homo sapiens
cctcctgaaccactc

SEQ ID NO: 330147 - DNA, 15 bp, Homo sapiens
gcctcctgaaccact

SEQ ID NO: 330148 - DNA, 15 bp, Homo sapiens
agcctcctgaaccac

SEQ ID NO: 330149 - DNA, 15 bp, Homo sapiens
cagcctcctgaacca

SEQ ID NO: 330150 - DNA, 15 bp, Homo sapiens
tcagcctcctgaacc

SEQ ID NO: 330151 - DNA, 15 bp, Homo sapiens
atcagcctcctgaac

SEQ ID NO: 330152 - DNA, 15 bp, Homo sapiens
tatcagcctcctgaa

SEQ ID NO: 330153 - DNA, 15 bp, Homo sapiens
ttatcagcctcctga

SEQ ID NO: 330154 - DNA, 15 bp, Homo sapiens
gttatcagcctcctg

SEQ ID NO: 330155 - DNA, 15 bp, Homo sapiens
tgttatcagcctcct

SEQ ID NO: 330156 - DNA, 15 bp, Homo sapiens
ctgttatcagcctcc

SEQ ID NO: 330157 - DNA, 15 bp, Homo sapiens
cctgttatcagcctc

SEQ ID NO: 330158 - DNA, 15 bp, Homo sapiens
ccctgttatcagcct

SEQ ID NO: 330159 - DNA, 15 bp, Homo sapiens
tccctgttatcagcc

SEQ ID NO: 330160 - DNA, 15 bp, Homo sapiens
ttccctgttatcagc

SEQ ID NO: 330161 - DNA, 15 bp, Homo sapiens
cttccctgttatcag

SEQ ID NO: 330162 - DNA, 15 bp, Homo sapiens
tcttccctgttatca

SEQ ID NO: 330163 - DNA, 15 bp, Homo sapiens
atcttccctgttatc

SEQ ID NO: 330164 - DNA, 15 bp, Homo sapiens
catcttccctgttat

SEQ ID NO: 330165 - DNA, 15 bp, Homo sapiens
gcatcttccctgtta

SEQ ID NO: 330166 - DNA, 15 bp, Homo sapiens
ggcatcttccctgtt

SEQ ID NO: 330167 - DNA, 15 bp, Homo sapiens
aggcatcttccctgt

SEQ ID NO: 330168 - DNA, 15 bp, Homo sapiens
caggcatcttccctg

SEQ ID NO: 330169 - DNA, 15 bp, Homo sapiens
acaggcatcttccct

SEQ ID NO: 330170 - DNA, 15 bp, Homo sapiens
cacaggcatcttccc

SEQ ID NO: 330171 - DNA, 15 bp, Homo sapiens
ccacaggcatcttcc

SEQ ID NO: 330172 - DNA, 15 bp, Homo sapiens
gccacaggcatcttc

SEQ ID NO: 330173 - DNA, 15 bp, Homo sapiens
tgccacaggcatctt

SEQ ID NO: 330174 - DNA, 15 bp, Homo sapiens
ttgccacaggcatct

SEQ ID NO: 330175 - DNA, 15 bp, Homo sapiens
cttgccacaggcatc

SEQ ID NO: 330176 - DNA, 15 bp, Homo sapiens
ccttgccacaggcat

SEQ ID NO: 330177 - DNA, 15 bp, Homo sapiens
gccttgccacaggca

SEQ ID NO: 330178 - DNA, 15 bp, Homo sapiens
cgccttgccacaggc

SEQ ID NO: 330179 - DNA, 15 bp, Homo sapiens
gcgccttgccacagg

SEQ ID NO: 330180 - DNA, 15 bp, Homo sapiens
tgcgccttgccacag

SEQ ID NO: 330181 - DNA, 15 bp, Homo sapiens
gtgcgccttgccaca

SEQ ID NO: 330182 - DNA, 15 bp, Homo sapiens
ggtgcgccttgccac

SEQ ID NO: 330183 - DNA, 15 bp, Homo sapiens
aggtgcgccttgcca

SEQ ID NO: 330184 - DNA, 15 bp, Homo sapiens
caggtgcgccttgcc

SEQ ID NO: 330185 - DNA, 15 bp, Homo sapiens
gcaggtgcgccttgc

SEQ ID NO: 330186 - DNA, 15 bp, Homo sapiens
ggcaggtgcgccttg

SEQ ID NO: 330187 - DNA, 15 bp, Homo sapiens
aggcaggtgcgcctt

SEQ ID NO: 330188 - DNA, 15 bp, Homo sapiens
caggcaggtgcgcct

SEQ ID NO: 330189 - DNA, 15 bp, Homo sapiens
gcaggcaggtgcgcc

SEQ ID NO: 330190 - DNA, 15 bp, Homo sapiens
agcaggcaggtgcgc

SEQ ID NO: 330191 - DNA, 15 bp, Homo sapiens
cagcaggcaggtgcg

SEQ ID NO: 330192 - DNA, 15 bp, Homo sapiens
acagcaggcaggtgc

SEQ ID NO: 330193 - DNA, 15 bp, Homo sapiens
gacagcaggcaggtg

SEQ ID NO: 330194 - DNA, 15 bp, Homo sapiens
cgacagcaggcaggt

SEQ ID NO: 330195 - DNA, 15 bp, Homo sapiens
ccgacagcaggcagg

SEQ ID NO: 330196 - DNA, 15 bp, Homo sapiens
accgacagcaggcag

SEQ ID NO: 330197 - DNA, 15 bp, Homo sapiens
taccgacagcaggca

SEQ ID NO: 330198 - DNA, 15 bp, Homo sapiens
ttaccgacagcaggc

SEQ ID NO: 330199 - DNA, 15 bp, Homo sapiens
gttaccgacagcagg

SEQ ID NO: 330200 - DNA, 15 bp, Homo sapiens
cgttaccgacagcag

SEQ ID NO: 330201 - DNA, 15 bp, Homo sapiens
tcgttaccgacagca

SEQ ID NO: 330202 - DNA, 15 bp, Homo sapiens
atcgttaccgacagc

SEQ ID NO: 330203 - DNA, 15 bp, Homo sapiens
catcgttaccgacag

SEQ ID NO: 330204 - DNA, 15 bp, Homo sapiens
gcatcgttaccgaca

SEQ ID NO: 330205 - DNA, 15 bp, Homo sapiens
agcatcgttaccgac

SEQ ID NO: 330206 - DNA, 15 bp, Homo sapiens
gagcatcgttaccga

SEQ ID NO: 330207 - DNA, 15 bp, Homo sapiens
ggagcatcgttaccg

SEQ ID NO: 330208 - DNA, 15 bp, Homo sapiens
gggagcatcgttacc

SEQ ID NO: 330209 - DNA, 15 bp, Homo sapiens
agggagcatcgttac

SEQ ID NO: 330210 - DNA, 15 bp, Homo sapiens
aagggagcatcgtta

SEQ ID NO: 330211 - DNA, 15 bp, Homo sapiens
aaagggagcatcgtt

SEQ ID NO: 330212 - DNA, 15 bp, Homo sapiens
taaagggagcatcgt

SEQ ID NO: 330213 - DNA, 15 bp, Homo sapiens
ctaaagggagcatcg

SEQ ID NO: 330214 - DNA, 15 bp, Homo sapiens
cctaaagggagcatc

SEQ ID NO: 330215 - DNA, 15 bp, Homo sapiens
acctaaagggagcat

SEQ ID NO: 330216 - DNA, 15 bp, Homo sapiens
gacctaaagggagca

SEQ ID NO: 330217 - DNA, 15 bp, Homo sapiens
ggacctaaagggagc

SEQ ID NO: 330218 - DNA, 15 bp, Homo sapiens
aggacctaaagggag

SEQ ID NO: 330219 - DNA, 15 bp, Homo sapiens
caggacctaaaggga

SEQ ID NO: 330220 - DNA, 15 bp, Homo sapiens
tcaggacctaaaggg

SEQ ID NO: 330221 - DNA, 15 bp, Homo sapiens
ttcaggacctaaagg

SEQ ID NO: 330222 - DNA, 15 bp, Homo sapiens
tttcaggacctaaag

SEQ ID NO: 330223 - DNA, 15 bp, Homo sapiens
ctttcaggacctaaa

SEQ ID NO: 330224 - DNA, 15 bp, Homo sapiens
cctttcaggacctaa

SEQ ID NO: 330225 - DNA, 15 bp, Homo sapiens
ccctttcaggaccta

SEQ ID NO: 330226 - DNA, 15 bp, Homo sapiens
gccctttcaggacct

SEQ ID NO: 330227 - DNA, 15 bp, Homo sapiens
tgccctttcaggacc

SEQ ID NO: 330228 - DNA, 15 bp, Homo sapiens
ttgccctttcaggac

SEQ ID NO: 330229 - DNA, 15 bp, Homo sapiens
cttgccctttcagga

SEQ ID NO: 330230 - DNA, 15 bp, Homo sapiens
tcttgccctttcagg

SEQ ID NO: 330231 - DNA, 15 bp, Homo sapiens
ctcttgccctttcag

SEQ ID NO: 330232 - DNA, 15 bp, Homo sapiens
cctcttgccctttca

SEQ ID NO: 330233 - DNA, 15 bp, Homo sapiens
tcctcttgccctttc

SEQ ID NO: 330234 - DNA, 15 bp, Homo sapiens
ttcctcttgcccttt

SEQ ID NO: 330235 - DNA, 15 bp, Homo sapiens
tttcctcttgccctt

SEQ ID NO: 330236 - DNA, 15 bp, Homo sapiens
ctttcctcttgccct

SEQ ID NO: 330237 - DNA, 15 bp, Homo sapiens
tctttcctcttgccc

SEQ ID NO: 330238 - DNA, 15 bp, Homo sapiens
ttctttcctcttgcc

SEQ ID NO: 330239 - DNA, 15 bp, Homo sapiens
cttctttcctcttgc

SEQ ID NO: 330240 - DNA, 15 bp, Homo sapiens
ccttctttcctcttg

SEQ ID NO: 330241 - DNA, 15 bp, Homo sapiens
tccttctttcctctt

SEQ ID NO: 330242 - DNA, 15 bp, Homo sapiens
ttccttctttcctct

SEQ ID NO: 330243 - DNA, 15 bp, Homo sapiens
tttccttctttcctc

SEQ ID NO: 330244 - DNA, 15 bp, Homo sapiens
ttttccttctttcct

SEQ ID NO: 330245 - DNA, 15 bp, Homo sapiens
tttttccttctttcc

SEQ ID NO: 330246 - DNA, 15 bp, Homo sapiens
ctttttccttctttc

SEQ ID NO: 330247 - DNA, 15 bp, Homo sapiens
cctttttccttcttt

SEQ ID NO: 330248 - DNA, 15 bp, Homo sapiens
acctttttccttctt

SEQ ID NO: 330249 - DNA, 15 bp, Homo sapiens
cacctttttccttct

SEQ ID NO: 330250 - DNA, 15 bp, Homo sapiens
acacctttttccttc

SEQ ID NO: 330251 - DNA, 15 bp, Homo sapiens
gacacctttttcctt

SEQ ID NO: 330252 - DNA, 15 bp, Homo sapiens
tgacacctttttcct

SEQ ID NO: 330253 - DNA, 15 bp, Homo sapiens
ctgacacctttttcc

SEQ ID NO: 330254 - DNA, 15 bp, Homo sapiens
gctgacacctttttc

SEQ ID NO: 330255 - DNA, 15 bp, Homo sapiens
tgctgacaccttttt

SEQ ID NO: 330256 - DNA, 15 bp, Homo sapiens
gtgctgacacctttt

SEQ ID NO: 330257 - DNA, 15 bp, Homo sapiens
tgtgctgacaccttt

SEQ ID NO: 330258 - DNA, 15 bp, Homo sapiens
atgtgctgacacctt

SEQ ID NO: 330259 - DNA, 15 bp, Homo sapiens
catgtgctgacacct

SEQ ID NO: 330260 - DNA, 15 bp, Homo sapiens
tcatgtgctgacacc

SEQ ID NO: 330261 - DNA, 15 bp, Homo sapiens
ctcatgtgctgacac

SEQ ID NO: 330262 - DNA, 15 bp, Homo sapiens
gctcatgtgctgaca

SEQ ID NO: 330263 - DNA, 15 bp, Homo sapiens
ggctcatgtgctgac

SEQ ID NO: 330264 - DNA, 15 bp, Homo sapiens
gggctcatgtgctga

SEQ ID NO: 330265 - DNA, 15 bp, Homo sapiens
agggctcatgtgctg

SEQ ID NO: 330266 - DNA, 15 bp, Homo sapiens
cagggctcatgtgct

SEQ ID NO: 330267 - DNA, 15 bp, Homo sapiens
ccagggctcatgtgc

SEQ ID NO: 330268 - DNA, 15 bp, Homo sapiens
gccagggctcatgtg

SEQ ID NO: 330269 - DNA, 15 bp, Homo sapiens
ggccagggctcatgt

SEQ ID NO: 330270 - DNA, 15 bp, Homo sapiens
aggccagggctcatg

SEQ ID NO: 330271 - DNA, 15 bp, Homo sapiens
aaggccagggctcat

SEQ ID NO: 330272 - DNA, 15 bp, Homo sapiens
caaggccagggctca

SEQ ID NO: 330273 - DNA, 15 bp, Homo sapiens
gcaaggccagggctc

SEQ ID NO: 330274 - DNA, 15 bp, Homo sapiens
ggcaaggccagggct

SEQ ID NO: 330275 - DNA, 15 bp, Homo sapiens
gggcaaggccagggc

SEQ ID NO: 330276 - DNA, 15 bp, Homo sapiens
agggcaaggccaggg

SEQ ID NO: 330277 - DNA, 15 bp, Homo sapiens
gagggcaaggccagg

SEQ ID NO: 330278 - DNA, 15 bp, Homo sapiens
agagggcaaggccag

SEQ ID NO: 330279 - DNA, 15 bp, Homo sapiens
cagagggcaaggcca

SEQ ID NO: 330280 - DNA, 15 bp, Homo sapiens
acagagggcaaggcc

SEQ ID NO: 330281 - DNA, 15 bp, Homo sapiens
aacagagggcaaggc

SEQ ID NO: 330282 - DNA, 15 bp, Homo sapiens
gaacagagggcaagg

SEQ ID NO: 330283 - DNA, 15 bp, Homo sapiens
ggaacagagggcaag

SEQ ID NO: 330284 - DNA, 15 bp, Homo sapiens
aggaacagagggcaa

SEQ ID NO: 330285 - DNA, 15 bp, Homo sapiens
gaggaacagagggca

SEQ ID NO: 330286 - DNA, 15 bp, Homo sapiens
tgaggaacagagggc

SEQ ID NO: 330287 - DNA, 15 bp, Homo sapiens
ctgaggaacagaggg

SEQ ID NO: 330288 - DNA, 15 bp, Homo sapiens
tctgaggaacagagg

SEQ ID NO: 330289 - DNA, 15 bp, Homo sapiens
ttctgaggaacagag

SEQ ID NO: 330290 - DNA, 15 bp, Homo sapiens
cttctgaggaacaga

SEQ ID NO: 330291 - DNA, 15 bp, Homo sapiens
tcttctgaggaacag

SEQ ID NO: 330292 - DNA, 15 bp, Homo sapiens
atcttctgaggaaca

SEQ ID NO: 330293 - DNA, 15 bp, Homo sapiens
catcttctgaggaac

SEQ ID NO: 330294 - DNA, 15 bp, Homo sapiens
tcatcttctgaggaa

SEQ ID NO: 330295 - DNA, 15 bp, Homo sapiens
ctcatcttctgagga

SEQ ID NO: 330296 - DNA, 15 bp, Homo sapiens
gctcatcttctgagg

SEQ ID NO: 330297 - DNA, 15 bp, Homo sapiens
agctcatcttctgag

SEQ ID NO: 330298 - DNA, 15 bp, Homo sapiens
cagctcatcttctga

SEQ ID NO: 330299 - DNA, 15 bp, Homo sapiens
ccagctcatcttctg

SEQ ID NO: 330300 - DNA, 15 bp, Homo sapiens
cccagctcatcttct

SEQ ID NO: 330301 - DNA, 15 bp, Homo sapiens
gcccagctcatcttc

SEQ ID NO: 330302 - DNA, 15 bp, Homo sapiens
tgcccagctcatctt

SEQ ID NO: 330303 - DNA, 15 bp, Homo sapiens
ctgcccagctcatct

SEQ ID NO: 330304 - DNA, 15 bp, Homo sapiens
gctgcccagctcatc

SEQ ID NO: 330305 - DNA, 15 bp, Homo sapiens
agctgcccagctcat

SEQ ID NO: 330306 - DNA, 15 bp, Homo sapiens
tagctgcccagctca

SEQ ID NO: 330307 - DNA, 15 bp, Homo sapiens
ctagctgcccagctc

SEQ ID NO: 330308 - DNA, 15 bp, Homo sapiens
cctagctgcccagct

SEQ ID NO: 330309 - DNA, 15 bp, Homo sapiens
gcctagctgcccagc

SEQ ID NO: 330310 - DNA, 15 bp, Homo sapiens
ggcctagctgcccag

SEQ ID NO: 330311 - DNA, 15 bp, Homo sapiens
aggcctagctgccca

SEQ ID NO: 330312 - DNA, 15 bp, Homo sapiens
caggcctagctgccc

SEQ ID NO: 330313 - DNA, 15 bp, Homo sapiens
gcaggcctagctgcc

SEQ ID NO: 330314 - DNA, 15 bp, Homo sapiens
tgcaggcctagctgc

SEQ ID NO: 330315 - DNA, 15 bp, Homo sapiens
ctgcaggcctagctg

SEQ ID NO: 330316 - DNA, 15 bp, Homo sapiens
gctgcaggcctagct

SEQ ID NO: 330317 - DNA, 15 bp, Homo sapiens
ggctgcaggcctagc

SEQ ID NO: 330318 - DNA, 15 bp, Homo sapiens
gggctgcaggcctag

SEQ ID NO: 330319 - DNA, 15 bp, Homo sapiens
cgggctgcaggccta

SEQ ID NO: 330320 - DNA, 15 bp, Homo sapiens
acgggctgcaggcct

SEQ ID NO: 330321 - DNA, 15 bp, Homo sapiens
cacgggctgcaggcc

SEQ ID NO: 330322 - DNA, 15 bp, Homo sapiens
acacgggctgcaggc

SEQ ID NO: 330323 - DNA, 15 bp, Homo sapiens
cacacgggctgcagg

SEQ ID NO: 330324 - DNA, 15 bp, Homo sapiens
tcacacgggctgcag

SEQ ID NO: 330325 - DNA, 15 bp, Homo sapiens
ctcacacgggctgca

SEQ ID NO: 330326 - DNA, 15 bp, Homo sapiens
actcacacgggctgc

SEQ ID NO: 330327 - DNA, 15 bp, Homo sapiens
gactcacacgggctg

SEQ ID NO: 330328 - DNA, 15 bp, Homo sapiens
tgactcacacgggct

SEQ ID NO: 330329 - DNA, 15 bp, Homo sapiens
atgactcacacgggc

SEQ ID NO: 330330 - DNA, 15 bp, Homo sapiens
catgactcacacggg

SEQ ID NO: 330331 - DNA, 15 bp, Homo sapiens
ccatgactcacacgg

SEQ ID NO: 330332 - DNA, 15 bp, Homo sapiens
gccatgactcacacg

SEQ ID NO: 330333 - DNA, 15 bp, Homo sapiens
agccatgactcacac

SEQ ID NO: 330334 - DNA, 15 bp, Homo sapiens
gagccatgactcaca

SEQ ID NO: 330335 - DNA, 15 bp, Homo sapiens
ggagccatgactcac

SEQ ID NO: 330336 - DNA, 15 bp, Homo sapiens
tggagccatgactca

SEQ ID NO: 330337 - DNA, 15 bp, Homo sapiens
gtggagccatgactc

SEQ ID NO: 330338 - DNA, 15 bp, Homo sapiens
tgtggagccatgact

SEQ ID NO: 330339 - DNA, 15 bp, Homo sapiens
ctgtggagccatgac

SEQ ID NO: 330340 - DNA, 15 bp, Homo sapiens
gctgtggagccatga

SEQ ID NO: 330341 - DNA, 15 bp, Homo sapiens
ggctgtggagccatg

SEQ ID NO: 330342 - DNA, 15 bp, Homo sapiens
tggctgtggagccat

SEQ ID NO: 330343 - DNA, 15 bp, Homo sapiens
ctggctgtggagcca

SEQ ID NO: 330344 - DNA, 15 bp, Homo sapiens
tctggctgtggagcc

SEQ ID NO: 330345 - DNA, 15 bp, Homo sapiens
atctggctgtggagc

SEQ ID NO: 330346 - DNA, 15 bp, Homo sapiens
gatctggctgtggag

SEQ ID NO: 330347 - DNA, 15 bp, Homo sapiens
ggatctggctgtgga

SEQ ID NO: 330348 - DNA, 15 bp, Homo sapiens
tggatctggctgtgg

SEQ ID NO: 330349 - DNA, 15 bp, Homo sapiens
ttggatctggctgtg

SEQ ID NO: 330350 - DNA, 15 bp, Homo sapiens
attggatctggctgt

SEQ ID NO: 330351 - DNA, 15 bp, Homo sapiens
tattggatctggctg

SEQ ID NO: 330352 - DNA, 15 bp, Homo sapiens
atattggatctggct

SEQ ID NO: 330353 - DNA, 15 bp, Homo sapiens
tatattggatctggc

SEQ ID NO: 330354 - DNA, 15 bp, Homo sapiens
ttatattggatctgg

SEQ ID NO: 330355 - DNA, 15 bp, Homo sapiens
tttatattggatctg

SEQ ID NO: 330356 - DNA, 15 bp, Homo sapiens
atttatattggatct

SEQ ID NO: 330357 - DNA, 15 bp, Homo sapiens
gatttatattggatc

SEQ ID NO: 330358 - DNA, 15 bp, Homo sapiens
tgatttatattggat

SEQ ID NO: 330359 - DNA, 15 bp, Homo sapiens
ctgatttatattgga

SEQ ID NO: 330360 - DNA, 15 bp, Homo sapiens
tctgatttatattgg

SEQ ID NO: 330361 - DNA, 15 bp, Homo sapiens
atctgatttatattg

SEQ ID NO: 330362 - DNA, 15 bp, Homo sapiens
catctgatttatatt

SEQ ID NO: 330363 - DNA, 15 bp, Homo sapiens
ccatctgatttatat

SEQ ID NO: 330364 - DNA, 15 bp, Homo sapiens
cccatctgatttata

SEQ ID NO: 330365 - DNA, 15 bp, Homo sapiens
tcccatctgatttat

SEQ ID NO: 330366 - DNA, 15 bp, Homo sapiens
gtcccatctgattta

SEQ ID NO: 330367 - DNA, 15 bp, Homo sapiens
tgtcccatctgattt

SEQ ID NO: 330368 - DNA, 15 bp, Homo sapiens
atgtcccatctgatt

SEQ ID NO: 330369 - DNA, 15 bp, Homo sapiens
catgtcccatctgat

SEQ ID NO: 330370 - DNA, 15 bp, Homo sapiens
tcatgtcccatctga

SEQ ID NO: 330371 - DNA, 15 bp, Homo sapiens
gtcatgtcccatctg

SEQ ID NO: 330372 - DNA, 15 bp, Homo sapiens
agtcatgtcccatct

SEQ ID NO: 330373 - DNA, 15 bp, Homo sapiens
gagtcatgtcccatc

SEQ ID NO: 330374 - DNA, 15 bp, Homo sapiens
tgagtcatgtcccat

SEQ ID NO: 330375 - DNA, 15 bp, Homo sapiens
gtgagtcatgtccca

SEQ ID NO: 330376 - DNA, 15 bp, Homo sapiens
cgtgagtcatgtccc

SEQ ID NO: 330377 - DNA, 15 bp, Homo sapiens
ccgtgagtcatgtcc

SEQ ID NO: 330378 - DNA, 15 bp, Homo sapiens
gccgtgagtcatgtc

SEQ ID NO: 330379 - DNA, 15 bp, Homo sapiens
tgccgtgagtcatgt

SEQ ID NO: 330380 - DNA, 15 bp, Homo sapiens
ttgccgtgagtcatg

SEQ ID NO: 330381 - DNA, 15 bp, Homo sapiens
cttgccgtgagtcat

SEQ ID NO: 330382 - DNA, 15 bp, Homo sapiens
gcttgccgtgagtca

SEQ ID NO: 330383 - DNA, 15 bp, Homo sapiens
agcttgccgtgagtc

SEQ ID NO: 330384 - DNA, 15 bp, Homo sapiens
gagcttgccgtgagt

SEQ ID NO: 330385 - DNA, 15 bp, Homo sapiens
ggagcttgccgtgag

SEQ ID NO: 330386 - DNA, 15 bp, Homo sapiens
tggagcttgccgtga

SEQ ID NO: 330387 - DNA, 15 bp, Homo sapiens
ctggagcttgccgtg

SEQ ID NO: 330388 - DNA, 15 bp, Homo sapiens
actggagcttgccgt

SEQ ID NO: 330389 - DNA, 15 bp, Homo sapiens
gactggagcttgccg

SEQ ID NO: 330390 - DNA, 15 bp, Homo sapiens
ggactggagcttgcc

SEQ ID NO: 330391 - DNA, 15 bp, Homo sapiens
gggactggagcttgc

SEQ ID NO: 330392 - DNA, 15 bp, Homo sapiens
ggggactggagcttg

SEQ ID NO: 330393 - DNA, 15 bp, Homo sapiens
tggggactggagctt

SEQ ID NO: 330394 - DNA, 15 bp, Homo sapiens
ctggggactggagct

SEQ ID NO: 330395 - DNA, 15 bp, Homo sapiens
cctggggactggagc

SEQ ID NO: 330396 - DNA, 15 bp, Homo sapiens
tcctggggactggag

SEQ ID NO: 330397 - DNA, 15 bp, Homo sapiens
ttcctggggactgga

SEQ ID NO: 330398 - DNA, 15 bp, Homo sapiens
cttcctggggactgg

SEQ ID NO: 330399 - DNA, 15 bp, Homo sapiens
gcttcctggggactg

SEQ ID NO: 330400 - DNA, 15 bp, Homo sapiens
tgcttcctggggact

SEQ ID NO: 330401 - DNA, 15 bp, Homo sapiens
ttgcttcctggggac

SEQ ID NO: 330402 - DNA, 15 bp, Homo sapiens
tttgcttcctgggga

SEQ ID NO: 330403 - DNA, 15 bp, Homo sapiens
ctttgcttcctgggg

SEQ ID NO: 330404 - DNA, 15 bp, Homo sapiens
actttgcttcctggg

SEQ ID NO: 330405 - DNA, 15 bp, Homo sapiens
cactttgcttcctgg

SEQ ID NO: 330406 - DNA, 15 bp, Homo sapiens
ccactttgcttcctg

SEQ ID NO: 330407 - DNA, 15 bp, Homo sapiens
tccactttgcttcct

SEQ ID NO: 330408 - DNA, 15 bp, Homo sapiens
atccactttgcttcc

SEQ ID NO: 330409 - DNA, 15 bp, Homo sapiens
catccactttgcttc

SEQ ID NO: 330410 - DNA, 15 bp, Homo sapiens
tcatccactttgctt

SEQ ID NO: 330411 - DNA, 15 bp, Homo sapiens
ttcatccactttgct

SEQ ID NO: 330412 - DNA, 15 bp, Homo sapiens
gttcatccactttgc

SEQ ID NO: 330413 - DNA, 15 bp, Homo sapiens
cgttcatccactttg

SEQ ID NO: 330414 - DNA, 15 bp, Homo sapiens
gcgttcatccacttt

SEQ ID NO: 330415 - DNA, 15 bp, Homo sapiens
tgcgttcatccactt

SEQ ID NO: 330416 - DNA, 15 bp, Homo sapiens
gtgcgttcatccact

SEQ ID NO: 330417 - DNA, 15 bp, Homo sapiens
tgtgcgttcatccac

SEQ ID NO: 330418 - DNA, 15 bp, Homo sapiens
gtgtgcgttcatcca

SEQ ID NO: 330419 - DNA, 15 bp, Homo sapiens
tgtgtgcgttcatcc

SEQ ID NO: 330420 - DNA, 15 bp, Homo sapiens
ttgtgtgcgttcatc

SEQ ID NO: 330421 - DNA, 15 bp, Homo sapiens
tttgtgtgcgttcat

SEQ ID NO: 330422 - DNA, 15 bp, Homo sapiens
ctttgtgtgcgttca

SEQ ID NO: 330423 - DNA, 15 bp, Homo sapiens
actttgtgtgcgttc

SEQ ID NO: 330424 - DNA, 15 bp, Homo sapiens
gactttgtgtgcgtt

SEQ ID NO: 330425 - DNA, 15 bp, Homo sapiens
ggactttgtgtgcgt

SEQ ID NO: 330426 - DNA, 15 bp, Homo sapiens
tggactttgtgtgcg

SEQ ID NO: 330427 - DNA, 15 bp, Homo sapiens
gtggactttgtgtgc

SEQ ID NO: 330428 - DNA, 15 bp, Homo sapiens
agtggactttgtgtg

SEQ ID NO: 330429 - DNA, 15 bp, Homo sapiens
cagtggactttgtgt

SEQ ID NO: 330430 - DNA, 15 bp, Homo sapiens
ccagtggactttgtg

SEQ ID NO: 330431 - DNA, 15 bp, Homo sapiens
tccagtggactttgt

SEQ ID NO: 330432 - DNA, 15 bp, Homo sapiens
ctccagtggactttg

SEQ ID NO: 330433 - DNA, 15 bp, Homo sapiens
actccagtggacttt

SEQ ID NO: 330434 - DNA, 15 bp, Homo sapiens
gactccagtggactt

SEQ ID NO: 330435 - DNA, 15 bp, Homo sapiens
ggactccagtggact

SEQ ID NO: 330436 - DNA, 15 bp, Homo sapiens
aggactccagtggac

SEQ ID NO: 330437 - DNA, 15 bp, Homo sapiens
caggactccagtgga

SEQ ID NO: 330438 - DNA, 15 bp, Homo sapiens
ccaggactccagtgg

SEQ ID NO: 330439 - DNA, 15 bp, Homo sapiens
tccaggactccagtg

SEQ ID NO: 330440 - DNA, 15 bp, Homo sapiens
ttccaggactccagt

SEQ ID NO: 330441 - DNA, 15 bp, Homo sapiens
gttccaggactccag

SEQ ID NO: 330442 - DNA, 15 bp, Homo sapiens
ggttccaggactcca

SEQ ID NO: 330443 - DNA, 15 bp, Homo sapiens
aggttccaggactcc

SEQ ID NO: 330444 - DNA, 15 bp, Homo sapiens
taggttccaggactc

SEQ ID NO: 330445 - DNA, 15 bp, Homo sapiens
ttaggttccaggact

SEQ ID NO: 330446 - DNA, 15 bp, Homo sapiens
gttaggttccaggac

SEQ ID NO: 330447 - DNA, 15 bp, Homo sapiens
cgttaggttccagga

SEQ ID NO: 330448 - DNA, 15 bp, Homo sapiens
tcgttaggttccagg

SEQ ID NO: 330449 - DNA, 15 bp, Homo sapiens
gtcgttaggttccag

SEQ ID NO: 330450 - DNA, 15 bp, Homo sapiens
agtcgttaggttcca

SEQ ID NO: 330451 - DNA, 15 bp, Homo sapiens
cagtcgttaggttcc

SEQ ID NO: 330452 - DNA, 15 bp, Homo sapiens
acagtcgttaggttc

SEQ ID NO: 330453 - DNA, 15 bp, Homo sapiens
cacagtcgttaggtt

SEQ ID NO: 330454 - DNA, 15 bp, Homo sapiens
acacagtcgttaggt

SEQ ID NO: 330455 - DNA, 15 bp, Homo sapiens
gacacagtcgttagg

SEQ ID NO: 330456 - DNA, 15 bp, Homo sapiens
agacacagtcgttag

SEQ ID NO: 330457 - DNA, 15 bp, Homo sapiens
gagacacagtcgtta

SEQ ID NO: 330458 - DNA, 15 bp, Homo sapiens
agagacacagtcgtt

SEQ ID NO: 330459 - DNA, 15 bp, Homo sapiens
tagagacacagtcgt

SEQ ID NO: 330460 - DNA, 15 bp, Homo sapiens
gtagagacacagtcg

SEQ ID NO: 330461 - DNA, 15 bp, Homo sapiens
tgtagagacacagtc

SEQ ID NO: 330462 - DNA, 15 bp, Homo sapiens
gtgtagagacacagt

SEQ ID NO: 330463 - DNA, 15 bp, Homo sapiens
ggtgtagagacacag

SEQ ID NO: 330464 - DNA, 15 bp, Homo sapiens
tggtgtagagacaca

SEQ ID NO: 330465 - DNA, 15 bp, Homo sapiens
gtggtgtagagacac

SEQ ID NO: 330466 - DNA, 15 bp, Homo sapiens
cgtggtgtagagaca

SEQ ID NO: 330467 - DNA, 15 bp, Homo sapiens
tcgtggtgtagagac

SEQ ID NO: 330468 - DNA, 15 bp, Homo sapiens
ttcgtggtgtagaga

SEQ ID NO: 330469 - DNA, 15 bp, Homo sapiens
tttcgtggtgtagag

SEQ ID NO: 330470 - DNA, 15 bp, Homo sapiens
atttcgtggtgtaga

SEQ ID NO: 330471 - DNA, 15 bp, Homo sapiens
tatttcgtggtgtag

SEQ ID NO: 330472 - DNA, 15 bp, Homo sapiens
ctatttcgtggtgta

SEQ ID NO: 330473 - DNA, 15 bp, Homo sapiens
gctatttcgtggtgt

SEQ ID NO: 330474 - DNA, 15 bp, Homo sapiens
ggctatttcgtggtg

SEQ ID NO: 330475 - DNA, 15 bp, Homo sapiens
tggctatttcgtggt

SEQ ID NO: 330476 - DNA, 15 bp, Homo sapiens
ttggctatttcgtgg

SEQ ID NO: 330477 - DNA, 15 bp, Homo sapiens
tttggctatttcgtg

SEQ ID NO: 330478 - DNA, 15 bp, Homo sapiens
ctttggctatttcgt

SEQ ID NO: 330479 - DNA, 15 bp, Homo sapiens
tctttggctatttcg

SEQ ID NO: 330480 - DNA, 15 bp, Homo sapiens
atctttggctatttc

SEQ ID NO: 330481 - DNA, 15 bp, Homo sapiens
tatctttggctattt

SEQ ID NO: 330482 - DNA, 15 bp, Homo sapiens
ttatctttggctatt

SEQ ID NO: 330483 - DNA, 15 bp, Homo sapiens
cttatctttggctat

SEQ ID NO: 330484 - DNA, 15 bp, Homo sapiens
tcttatctttggcta

SEQ ID NO: 330485 - DNA, 15 bp, Homo sapiens
ttcttatctttggct

SEQ ID NO: 330486 - DNA, 15 bp, Homo sapiens
gttcttatctttggc

SEQ ID NO: 330487 - DNA, 15 bp, Homo sapiens
agttcttatctttgg

SEQ ID NO: 330488 - DNA, 15 bp, Homo sapiens
aagttcttatctttg

SEQ ID NO: 330489 - DNA, 15 bp, Homo sapiens
taagttcttatcttt

SEQ ID NO: 330490 - DNA, 15 bp, Homo sapiens
ataagttcttatctt

SEQ ID NO: 330491 - DNA, 15 bp, Homo sapiens
tataagttcttatct

SEQ ID NO: 330492 - DNA, 15 bp, Homo sapiens
ttataagttcttatc

SEQ ID NO: 330493 - DNA, 15 bp, Homo sapiens
tttataagttcttat

SEQ ID NO: 330494 - DNA, 15 bp, Homo sapiens
ctttataagttctta

SEQ ID NO: 330495 - DNA, 15 bp, Homo sapiens
tctttataagttctt

SEQ ID NO: 330496 - DNA, 15 bp, Homo sapiens
ttctttataagttct

SEQ ID NO: 330497 - DNA, 15 bp, Homo sapiens
cttctttataagttc

SEQ ID NO: 330498 - DNA, 15 bp, Homo sapiens
acttctttataagtt

SEQ ID NO: 330499 - DNA, 15 bp, Homo sapiens
tacttctttataagt

SEQ ID NO: 330500 - DNA, 15 bp, Homo sapiens
ttacttctttataag

SEQ ID NO: 330501 - DNA, 15 bp, Homo sapiens
attacttctttataa

SEQ ID NO: 330502 - DNA, 15 bp, Homo sapiens
tattacttctttata

SEQ ID NO: 330503 - DNA, 15 bp, Homo sapiens
ttattacttctttat

SEQ ID NO: 330504 - DNA, 15 bp, Homo sapiens
tttattacttcttta

SEQ ID NO: 330505 - DNA, 15 bp, Homo sapiens
ttttattacttcttt

SEQ ID NO: 330506 - DNA, 15 bp, Homo sapiens
tttttattacttctt

SEQ ID NO: 330507 - DNA, 15 bp, Homo sapiens
ttttttattacttct

SEQ ID NO: 330508 - DNA, 15 bp, Homo sapiens
cttttttattacttc

SEQ ID NO: 330509 - DNA, 15 bp, Homo sapiens
ccttttttattactt

SEQ ID NO: 330510 - DNA, 15 bp, Homo sapiens
cccttttttattact

SEQ ID NO: 330511 - DNA, 15 bp, Homo sapiens
tcccttttttattac

SEQ ID NO: 330512 - DNA, 15 bp, Homo sapiens
atcccttttttatta

SEQ ID NO: 330513 - DNA, 15 bp, Homo sapiens
catcccttttttatt

SEQ ID NO: 330514 - DNA, 15 bp, Homo sapiens
tcatcccttttttat

SEQ ID NO: 330515 - DNA, 15 bp, Homo sapiens
atcatccctttttta

SEQ ID NO: 330516 - DNA, 15 bp, Homo sapiens
tatcatccctttttt

SEQ ID NO: 330517 - DNA, 15 bp, Homo sapiens
ttatcatcccttttt

SEQ ID NO: 330518 - DNA, 15 bp, Homo sapiens
cttatcatccctttt

SEQ ID NO: 330519 - DNA, 15 bp, Homo sapiens
acttatcatcccttt

SEQ ID NO: 330520 - DNA, 15 bp, Homo sapiens
tacttatcatccctt

SEQ ID NO: 330521 - DNA, 15 bp, Homo sapiens
ctacttatcatccct

SEQ ID NO: 330522 - DNA, 15 bp, Homo sapiens
cctacttatcatccc

SEQ ID NO: 330523 - DNA, 15 bp, Homo sapiens
ccctacttatcatcc

SEQ ID NO: 330524 - DNA, 15 bp, Homo sapiens
tccctacttatcatc

SEQ ID NO: 330525 - DNA, 15 bp, Homo sapiens
ctccctacttatcat

SEQ ID NO: 330526 - DNA, 15 bp, Homo sapiens
gctccctacttatca

SEQ ID NO: 330527 - DNA, 15 bp, Homo sapiens
cgctccctacttatc

SEQ ID NO: 330528 - DNA, 15 bp, Homo sapiens
acgctccctacttat

SEQ ID NO: 330529 - DNA, 15 bp, Homo sapiens
aacgctccctactta

SEQ ID NO: 330530 - DNA, 15 bp, Homo sapiens
gaacgctccctactt

SEQ ID NO: 330531 - DNA, 15 bp, Homo sapiens
agaacgctccctact

SEQ ID NO: 330532 - DNA, 15 bp, Homo sapiens
tagaacgctccctac

SEQ ID NO: 330533 - DNA, 15 bp, Homo sapiens
ctagaacgctcccta

SEQ ID NO: 330534 - DNA, 15 bp, Homo sapiens
tctagaacgctccct

SEQ ID NO: 330535 - DNA, 15 bp, Homo sapiens
atctagaacgctccc

SEQ ID NO: 330536 - DNA, 15 bp, Homo sapiens
tatctagaacgctcc

SEQ ID NO: 330537 - DNA, 15 bp, Homo sapiens
ctatctagaacgctc

SEQ ID NO: 330538 - DNA, 15 bp, Homo sapiens
actatctagaacgct

SEQ ID NO: 330539 - DNA, 15 bp, Homo sapiens
aactatctagaacgc

SEQ ID NO: 330540 - DNA, 15 bp, Homo sapiens
aaactatctagaacg

SEQ ID NO: 330541 - DNA, 15 bp, Homo sapiens
gaaactatctagaac

SEQ ID NO: 330542 - DNA, 15 bp, Homo sapiens
tgaaactatctagaa

SEQ ID NO: 330543 - DNA, 15 bp, Homo sapiens
atgaaactatctaga

SEQ ID NO: 330544 - DNA, 15 bp, Homo sapiens
tatgaaactatctag

SEQ ID NO: 330545 - DNA, 15 bp, Homo sapiens
ttatgaaactatcta

SEQ ID NO: 330546 - DNA, 15 bp, Homo sapiens
attatgaaactatct

SEQ ID NO: 330547 - DNA, 15 bp, Homo sapiens
cattatgaaactatc

SEQ ID NO: 330548 - DNA, 15 bp, Homo sapiens
acattatgaaactat

SEQ ID NO: 330549 - DNA, 15 bp, Homo sapiens
aacattatgaaacta

SEQ ID NO: 330550 - DNA, 15 bp, Homo sapiens
gaacattatgaaact

SEQ ID NO: 330551 - DNA, 15 bp, Homo sapiens
agaacattatgaaac

SEQ ID NO: 330552 - DNA, 15 bp, Homo sapiens
gagaacattatgaaa

SEQ ID NO: 330553 - DNA, 15 bp, Homo sapiens
tgagaacattatgaa

SEQ ID NO: 330554 - DNA, 15 bp, Homo sapiens
gtgagaacattatga

SEQ ID NO: 330555 - DNA, 15 bp, Homo sapiens
tgtgagaacattatg

SEQ ID NO: 330556 - DNA, 15 bp, Homo sapiens
atgtgagaacattat

SEQ ID NO: 330557 - DNA, 15 bp, Homo sapiens
tatgtgagaacatta

SEQ ID NO: 330558 - DNA, 15 bp, Homo sapiens
ctatgtgagaacatt

SEQ ID NO: 330559 - DNA, 15 bp, Homo sapiens
tctatgtgagaacat

SEQ ID NO: 330560 - DNA, 15 bp, Homo sapiens
ttctatgtgagaaca

SEQ ID NO: 330561 - DNA, 15 bp, Homo sapiens
tttctatgtgagaac

SEQ ID NO: 330562 - DNA, 15 bp, Homo sapiens
gtttctatgtgagaa

SEQ ID NO: 330563 - DNA, 15 bp, Homo sapiens
ggtttctatgtgaga

SEQ ID NO: 330564 - DNA, 15 bp, Homo sapiens
tggtttctatgtgag

SEQ ID NO: 330565 - DNA, 15 bp, Homo sapiens
ctggtttctatgtga

SEQ ID NO: 330566 - DNA, 15 bp, Homo sapiens
tctggtttctatgtg

SEQ ID NO: 330567 - DNA, 15 bp, Homo sapiens
ctctggtttctatgt

SEQ ID NO: 330568 - DNA, 15 bp, Homo sapiens
gctctggtttctatg

SEQ ID NO: 330569 - DNA, 15 bp, Homo sapiens
ggctctggtttctat

SEQ ID NO: 330570 - DNA, 15 bp, Homo sapiens
gggctctggtttcta

SEQ ID NO: 330571 - DNA, 15 bp, Homo sapiens
ggggctctggtttct

SEQ ID NO: 330572 - DNA, 15 bp, Homo sapiens
aggggctctggtttc

SEQ ID NO: 330573 - DNA, 15 bp, Homo sapiens
caggggctctggttt

SEQ ID NO: 330574 - DNA, 15 bp, Homo sapiens
acaggggctctggtt

SEQ ID NO: 330575 - DNA, 15 bp, Homo sapiens
aacaggggctctggt

SEQ ID NO: 330576 - DNA, 15 bp, Homo sapiens
caacaggggctctgg

SEQ ID NO: 330577 - DNA, 15 bp, Homo sapiens
tcaacaggggctctg

SEQ ID NO: 330578 - DNA, 15 bp, Homo sapiens
ctcaacaggggctct

SEQ ID NO: 330579 - DNA, 15 bp, Homo sapiens
cctcaacaggggctc

SEQ ID NO: 330580 - DNA, 15 bp, Homo sapiens
acctcaacaggggct

SEQ ID NO: 330581 - DNA, 15 bp, Homo sapiens
cacctcaacaggggc

SEQ ID NO: 330582 - DNA, 15 bp, Homo sapiens
tcacctcaacagggg

SEQ ID NO: 330583 - DNA, 15 bp, Homo sapiens
gtcacctcaacaggg

SEQ ID NO: 330584 - DNA, 15 bp, Homo sapiens
agtcacctcaacagg

SEQ ID NO: 330585 - DNA, 15 bp, Homo sapiens
aagtcacctcaacag

SEQ ID NO: 330586 - DNA, 15 bp, Homo sapiens
gaagtcacctcaaca

SEQ ID NO: 330587 - DNA, 15 bp, Homo sapiens
ggaagtcacctcaac

SEQ ID NO: 330588 - DNA, 15 bp, Homo sapiens
gggaagtcacctcaa

SEQ ID NO: 330589 - DNA, 15 bp, Homo sapiens
tgggaagtcacctca

SEQ ID NO: 330590 - DNA, 15 bp, Homo sapiens
ttgggaagtcacctc

SEQ ID NO: 330591 - DNA, 15 bp, Homo sapiens
tttgggaagtcacct

SEQ ID NO: 330592 - DNA, 15 bp, Homo sapiens
ctttgggaagtcacc

SEQ ID NO: 330593 - DNA, 15 bp, Homo sapiens
tctttgggaagtcac

SEQ ID NO: 330594 - DNA, 15 bp, Homo sapiens
gtctttgggaagtca

SEQ ID NO: 330595 - DNA, 15 bp, Homo sapiens
agtctttgggaagtc

SEQ ID NO: 330596 - DNA, 15 bp, Homo sapiens
aagtctttgggaagt

SEQ ID NO: 330597 - DNA, 15 bp, Homo sapiens
aaagtctttgggaag

SEQ ID NO: 330598 - DNA, 15 bp, Homo sapiens
aaaagtctttgggaa

SEQ ID NO: 330599 - DNA, 15 bp, Homo sapiens
taaaagtctttggga

SEQ ID NO: 330600 - DNA, 15 bp, Homo sapiens
ctaaaagtctttggg

SEQ ID NO: 330601 - DNA, 15 bp, Homo sapiens
tctaaaagtctttgg

SEQ ID NO: 330602 - DNA, 15 bp, Homo sapiens
ctctaaaagtctttg

SEQ ID NO: 330603 - DNA, 15 bp, Homo sapiens
gctctaaaagtcttt

SEQ ID NO: 330604 - DNA, 15 bp, Homo sapiens
ggctctaaaagtctt

SEQ ID NO: 330605 - DNA, 15 bp, Homo sapiens
gggctctaaaagtct

SEQ ID NO: 330606 - DNA, 15 bp, Homo sapiens
tgggctctaaaagtc

SEQ ID NO: 330607 - DNA, 15 bp, Homo sapiens
ttgggctctaaaagt

SEQ ID NO: 330608 - DNA, 15 bp, Homo sapiens
cttgggctctaaaag

SEQ ID NO: 330609 - DNA, 15 bp, Homo sapiens
ccttgggctctaaaa

SEQ ID NO: 330610 - DNA, 15 bp, Homo sapiens
cccttgggctctaaa

SEQ ID NO: 330611 - DNA, 15 bp, Homo sapiens
gcccttgggctctaa

SEQ ID NO: 330612 - DNA, 15 bp, Homo sapiens
agcccttgggctcta

SEQ ID NO: 330613 - DNA, 15 bp, Homo sapiens
aagcccttgggctct

SEQ ID NO: 330614 - DNA, 15 bp, Homo sapiens
aaagcccttgggctc

SEQ ID NO: 330615 - DNA, 15 bp, Homo sapiens
aaaagcccttgggct

SEQ ID NO: 330616 - DNA, 15 bp, Homo sapiens
caaaagcccttgggc

SEQ ID NO: 330617 - DNA, 15 bp, Homo sapiens
acaaaagcccttggg

SEQ ID NO: 330618 - DNA, 15 bp, Homo sapiens
aacaaaagcccttgg

SEQ ID NO: 330619 - DNA, 15 bp, Homo sapiens
aaacaaaagcccttg

SEQ ID NO: 330620 - DNA, 15 bp, Homo sapiens
taaacaaaagccctt

SEQ ID NO: 330621 - DNA, 15 bp, Homo sapiens
ataaacaaaagccct

SEQ ID NO: 330622 - DNA, 15 bp, Homo sapiens
gataaacaaaagccc

SEQ ID NO: 330623 - DNA, 15 bp, Homo sapiens
agataaacaaaagcc

SEQ ID NO: 330624 - DNA, 15 bp, Homo sapiens
cagataaacaaaagc

SEQ ID NO: 330625 - DNA, 15 bp, Homo sapiens
ccagataaacaaaag

SEQ ID NO: 330626 - DNA, 15 bp, Homo sapiens
accagataaacaaaa

SEQ ID NO: 330627 - DNA, 15 bp, Homo sapiens
gaccagataaacaaa

SEQ ID NO: 330628 - DNA, 15 bp, Homo sapiens
agaccagataaacaa

SEQ ID NO: 330629 - DNA, 15 bp, Homo sapiens
aagaccagataaaca

SEQ ID NO: 330630 - DNA, 15 bp, Homo sapiens
aaagaccagataaac

SEQ ID NO: 330631 - DNA, 15 bp, Homo sapiens
caaagaccagataaa

SEQ ID NO: 330632 - DNA, 15 bp, Homo sapiens
ccaaagaccagataa

SEQ ID NO: 330633 - DNA, 15 bp, Homo sapiens
accaaagaccagata

SEQ ID NO: 330634 - DNA, 15 bp, Homo sapiens
aaccaaagaccagat

SEQ ID NO: 330635 - DNA, 15 bp, Homo sapiens
caaccaaagaccaga

SEQ ID NO: 330636 - DNA, 15 bp, Homo sapiens
ccaaccaaagaccag

SEQ ID NO: 330637 - DNA, 15 bp, Homo sapiens
accaaccaaagacca

SEQ ID NO: 330638 - DNA, 15 bp, Homo sapiens
aaccaaccaaagacc

SEQ ID NO: 330639 - DNA, 15 bp, Homo sapiens
taaccaaccaaagac

SEQ ID NO: 330640 - DNA, 15 bp, Homo sapiens
ttaaccaaccaaaga

SEQ ID NO: 330641 - DNA, 15 bp, Homo sapiens
gttaaccaaccaaag

SEQ ID NO: 330642 - DNA, 15 bp, Homo sapiens
tgttaaccaaccaaa

SEQ ID NO: 330643 - DNA, 15 bp, Homo sapiens
ctgttaaccaaccaa

SEQ ID NO: 330644 - DNA, 15 bp, Homo sapiens
tctgttaaccaacca

SEQ ID NO: 330645 - DNA, 15 bp, Homo sapiens
ttctgttaaccaacc

SEQ ID NO: 330646 - DNA, 15 bp, Homo sapiens
gttctgttaaccaac

SEQ ID NO: 330647 - DNA, 15 bp, Homo sapiens
tgttctgttaaccaa

SEQ ID NO: 330648 - DNA, 15 bp, Homo sapiens
ttgttctgttaacca

SEQ ID NO: 330649 - DNA, 15 bp, Homo sapiens
cttgttctgttaacc

SEQ ID NO: 330650 - DNA, 15 bp, Homo sapiens
gcttgttctgttaac

SEQ ID NO: 330651 - DNA, 15 bp, Homo sapiens
cgcttgttctgttaa

SEQ ID NO: 330652 - DNA, 15 bp, Homo sapiens
tcgcttgttctgtta

SEQ ID NO: 330653 - DNA, 15 bp, Homo sapiens
gtcgcttgttctgtt

SEQ ID NO: 330654 - DNA, 15 bp, Homo sapiens
ggtcgcttgttctgt

SEQ ID NO: 330655 - DNA, 15 bp, Homo sapiens
aggtcgcttgttctg

SEQ ID NO: 330656 - DNA, 15 bp, Homo sapiens
taggtcgcttgttct

SEQ ID NO: 330657 - DNA, 15 bp, Homo sapiens
ctaggtcgcttgttc

SEQ ID NO: 330658 - DNA, 15 bp, Homo sapiens
actaggtcgcttgtt

SEQ ID NO: 330659 - DNA, 15 bp, Homo sapiens
aactaggtcgcttgt

SEQ ID NO: 330660 - DNA, 15 bp, Homo sapiens
taactaggtcgcttg

SEQ ID NO: 330661 - DNA, 15 bp, Homo sapiens
gtaactaggtcgctt

SEQ ID NO: 330662 - DNA, 15 bp, Homo sapiens
agtaactaggtcgct

SEQ ID NO: 330663 - DNA, 15 bp, Homo sapiens
tagtaactaggtcgc

SEQ ID NO: 330664 - DNA, 15 bp, Homo sapiens
gtagtaactaggtcg

SEQ ID NO: 330665 - DNA, 15 bp, Homo sapiens
ggtagtaactaggtc

SEQ ID NO: 330666 - DNA, 15 bp, Homo sapiens
gggtagtaactaggt

SEQ ID NO: 330667 - DNA, 15 bp, Homo sapiens
ggggtagtaactagg

SEQ ID NO: 330668 - DNA, 15 bp, Homo sapiens
tggggtagtaactag

SEQ ID NO: 330669 - DNA, 15 bp, Homo sapiens
ttggggtagtaacta

SEQ ID NO: 330670 - DNA, 15 bp, Homo sapiens
tttggggtagtaact

SEQ ID NO: 330671 - DNA, 15 bp, Homo sapiens
gtttggggtagtaac

SEQ ID NO: 330672 - DNA, 15 bp, Homo sapiens
agtttggggtagtaa

SEQ ID NO: 330673 - DNA, 15 bp, Homo sapiens
aagtttggggtagta

SEQ ID NO: 330674 - DNA, 15 bp, Homo sapiens
aaagtttggggtagt

SEQ ID NO: 330675 - DNA, 15 bp, Homo sapiens
taaagtttggggtag

SEQ ID NO: 330676 - DNA, 15 bp, Homo sapiens
ataaagtttggggta

SEQ ID NO: 330677 - DNA, 15 bp, Homo sapiens
tataaagtttggggt

SEQ ID NO: 330678 - DNA, 15 bp, Homo sapiens
atataaagtttgggg

SEQ ID NO: 330679 - DNA, 15 bp, Homo sapiens
tatataaagtttggg

SEQ ID NO: 330680 - DNA, 15 bp, Homo sapiens
atatataaagtttgg

SEQ ID NO: 330681 - DNA, 15 bp, Homo sapiens
aatatataaagtttg

SEQ ID NO: 330682 - DNA, 15 bp, Homo sapiens
aaatatataaagttt

SEQ ID NO: 330683 - DNA, 15 bp, Homo sapiens
taaatatataaagtt

SEQ ID NO: 330684 - DNA, 15 bp, Homo sapiens
ttaaatatataaagt

SEQ ID NO: 330685 - DNA, 15 bp, Homo sapiens
cttaaatatataaag

SEQ ID NO: 330686 - DNA, 15 bp, Homo sapiens
gcttaaatatataaa

SEQ ID NO: 330687 - DNA, 15 bp, Homo sapiens
tgcttaaatatataa

SEQ ID NO: 330688 - DNA, 15 bp, Homo sapiens
ctgcttaaatatata

SEQ ID NO: 330689 - DNA, 15 bp, Homo sapiens
cctgcttaaatatat

SEQ ID NO: 330690 - DNA, 15 bp, Homo sapiens
gcctgcttaaatata

SEQ ID NO: 330691 - DNA, 15 bp, Homo sapiens
ggcctgcttaaatat

SEQ ID NO: 330692 - DNA, 15 bp, Homo sapiens
tggcctgcttaaata

SEQ ID NO: 330693 - DNA, 15 bp, Homo sapiens
ctggcctgcttaaat

SEQ ID NO: 330694 - DNA, 15 bp, Homo sapiens
cctggcctgcttaaa

SEQ ID NO: 330695 - DNA, 15 bp, Homo sapiens
gcctggcctgcttaa

SEQ ID NO: 330696 - DNA, 15 bp, Homo sapiens
tgcctggcctgctta

SEQ ID NO: 330697 - DNA, 15 bp, Homo sapiens
gtgcctggcctgctt

SEQ ID NO: 330698 - DNA, 15 bp, Homo sapiens
ggtgcctggcctgct

SEQ ID NO: 330699 - DNA, 15 bp, Homo sapiens
tggtgcctggcctgc

SEQ ID NO: 330700 - DNA, 15 bp, Homo sapiens
ctggtgcctggcctg

SEQ ID NO: 330701 - DNA, 15 bp, Homo sapiens
cctggtgcctggcct

SEQ ID NO: 330702 - DNA, 15 bp, Homo sapiens
ccctggtgcctggcc

SEQ ID NO: 330703 - DNA, 15 bp, Homo sapiens
gccctggtgcctggc

SEQ ID NO: 330704 - DNA, 15 bp, Homo sapiens
agccctggtgcctgg

SEQ ID NO: 330705 - DNA, 15 bp, Homo sapiens
gagccctggtgcctg

SEQ ID NO: 330706 - DNA, 15 bp, Homo sapiens
ggagccctggtgcct

SEQ ID NO: 330707 - DNA, 15 bp, Homo sapiens
aggagccctggtgcc

SEQ ID NO: 330708 - DNA, 15 bp, Homo sapiens
caggagccctggtgc

SEQ ID NO: 330709 - DNA, 15 bp, Homo sapiens
gcaggagccctggtg

SEQ ID NO: 330710 - DNA, 15 bp, Homo sapiens
ggcaggagccctggt

SEQ ID NO: 330711 - DNA, 15 bp, Homo sapiens
aggcaggagccctgg

SEQ ID NO: 330712 - DNA, 15 bp, Homo sapiens
caggcaggagccctg

SEQ ID NO: 330713 - DNA, 15 bp, Homo sapiens
tcaggcaggagccct

SEQ ID NO: 330714 - DNA, 15 bp, Homo sapiens
ttcaggcaggagccc

SEQ ID NO: 330715 - DNA, 15 bp, Homo sapiens
tttcaggcaggagcc

SEQ ID NO: 330716 - DNA, 15 bp, Homo sapiens
atttcaggcaggagc

SEQ ID NO: 330717 - DNA, 15 bp, Homo sapiens
gatttcaggcaggag

SEQ ID NO: 330718 - DNA, 15 bp, Homo sapiens
ggatttcaggcagga

SEQ ID NO: 330719 - DNA, 15 bp, Homo sapiens
gggatttcaggcagg

SEQ ID NO: 330720 - DNA, 15 bp, Homo sapiens
cgggatttcaggcag

SEQ ID NO: 330721 - DNA, 15 bp, Homo sapiens
tcgggatttcaggca

SEQ ID NO: 330722 - DNA, 15 bp, Homo sapiens
ctcgggatttcaggc

SEQ ID NO: 330723 - DNA, 15 bp, Homo sapiens
cctcgggatttcagg

SEQ ID NO: 330724 - DNA, 15 bp, Homo sapiens
gcctcgggatttcag

SEQ ID NO: 330725 - DNA, 15 bp, Homo sapiens
agcctcgggatttca

SEQ ID NO: 330726 - DNA, 15 bp, Homo sapiens
gagcctcgggatttc

SEQ ID NO: 330727 - DNA, 15 bp, Homo sapiens
tgagcctcgggattt

SEQ ID NO: 330728 - DNA, 15 bp, Homo sapiens
gtgagcctcgggatt

SEQ ID NO: 330729 - DNA, 15 bp, Homo sapiens
cgtgagcctcgggat

SEQ ID NO: 330730 - DNA, 15 bp, Homo sapiens
gcgtgagcctcggga

SEQ ID NO: 330731 - DNA, 15 bp, Homo sapiens
tgcgtgagcctcggg

SEQ ID NO: 330732 - DNA, 15 bp, Homo sapiens
ctgcgtgagcctcgg

SEQ ID NO: 330733 - DNA, 15 bp, Homo sapiens
tctgcgtgagcctcg

SEQ ID NO: 330734 - DNA, 15 bp, Homo sapiens
ttctgcgtgagcctc

SEQ ID NO: 330735 - DNA, 15 bp, Homo sapiens
cttctgcgtgagcct

SEQ ID NO: 330736 - DNA, 15 bp, Homo sapiens
tcttctgcgtgagcc

SEQ ID NO: 330737 - DNA, 15 bp, Homo sapiens
ttcttctgcgtgagc

SEQ ID NO: 330738 - DNA, 15 bp, Homo sapiens
attcttctgcgtgag

SEQ ID NO: 330739 - DNA, 15 bp, Homo sapiens
aattcttctgcgtga

SEQ ID NO: 330740 - DNA, 15 bp, Homo sapiens
caattcttctgcgtg

SEQ ID NO: 330741 - DNA, 15 bp, Homo sapiens
gcaattcttctgcgt

SEQ ID NO: 330742 - DNA, 15 bp, Homo sapiens
agcaattcttctgcg

SEQ ID NO: 330743 - DNA, 15 bp, Homo sapiens
aagcaattcttctgc

SEQ ID NO: 330744 - DNA, 15 bp, Homo sapiens
caagcaattcttctg

SEQ ID NO: 330745 - DNA, 15 bp, Homo sapiens
tcaagcaattcttct

SEQ ID NO: 330746 - DNA, 15 bp, Homo sapiens
ctcaagcaattcttc

SEQ ID NO: 330747 - DNA, 15 bp, Homo sapiens
gctcaagcaattctt

SEQ ID NO: 330748 - DNA, 15 bp, Homo sapiens
ggctcaagcaattct

SEQ ID NO: 330749 - DNA, 15 bp, Homo sapiens
gggctcaagcaattc

SEQ ID NO: 330750 - DNA, 15 bp, Homo sapiens
tgggctcaagcaatt

SEQ ID NO: 330751 - DNA, 15 bp, Homo sapiens
ctgggctcaagcaat

SEQ ID NO: 330752 - DNA, 15 bp, Homo sapiens
cctgggctcaagcaa

SEQ ID NO: 330753 - DNA, 15 bp, Homo sapiens
tcctgggctcaagca

SEQ ID NO: 330754 - DNA, 15 bp, Homo sapiens
gaactcctgggctca

SEQ ID NO: 330755 - DNA, 15 bp, Homo sapiens
tgaactcctgggctc

SEQ ID NO: 330756 - DNA, 15 bp, Homo sapiens
ttgaactcctgggct

SEQ ID NO: 330757 - DNA, 15 bp, Homo sapiens
cttgaactcctgggc

SEQ ID NO: 330758 - DNA, 15 bp, Homo sapiens
ccttgaactcctggg

SEQ ID NO: 330759 - DNA, 15 bp, Homo sapiens
gccttgaactcctgg

SEQ ID NO: 330760 - DNA, 15 bp, Homo sapiens
ggccttgaactcctg

SEQ ID NO: 330761 - DNA, 15 bp, Homo sapiens
tggccttgaactcct

SEQ ID NO: 330762 - DNA, 15 bp, Homo sapiens
ctggccttgaactcc

SEQ ID NO: 330763 - DNA, 15 bp, Homo sapiens
gctggccttgaactc

SEQ ID NO: 330764 - DNA, 15 bp, Homo sapiens
ggctggccttgaact

SEQ ID NO: 330765 - DNA, 15 bp, Homo sapiens
aggctggccttgaac

SEQ ID NO: 330766 - DNA, 15 bp, Homo sapiens
caggctggccttgaa

SEQ ID NO: 330767 - DNA, 15 bp, Homo sapiens
ccaggctggccttga

SEQ ID NO: 330768 - DNA, 15 bp, Homo sapiens
tccaggctggccttg

SEQ ID NO: 330769 - DNA, 15 bp, Homo sapiens
gtccaggctggcctt

SEQ ID NO: 330770 - DNA, 15 bp, Homo sapiens
tgtccaggctggcct

SEQ ID NO: 330771 - DNA, 15 bp, Homo sapiens
ttgtccaggctggcc

SEQ ID NO: 330772 - DNA, 15 bp, Homo sapiens
gttgtccaggctggc

SEQ ID NO: 330773 - DNA, 15 bp, Homo sapiens
tgttgtccaggctgg

SEQ ID NO: 330774 - DNA, 15 bp, Homo sapiens
gtgttgtccaggctg

SEQ ID NO: 330775 - DNA, 15 bp, Homo sapiens
tgtgttgtccaggct

SEQ ID NO: 330776 - DNA, 15 bp, Homo sapiens
ctgtgttgtccaggc

SEQ ID NO: 330777 - DNA, 15 bp, Homo sapiens
gctgtgttgtccagg

SEQ ID NO: 330778 - DNA, 15 bp, Homo sapiens
agctgtgttgtccag

SEQ ID NO: 330779 - DNA, 15 bp, Homo sapiens
tagctgtgttgtcca

SEQ ID NO: 330780 - DNA, 15 bp, Homo sapiens
ctagctgtgttgtcc

SEQ ID NO: 330781 - DNA, 15 bp, Homo sapiens
tctagctgtgttgtc

SEQ ID NO: 330782 - DNA, 15 bp, Homo sapiens
atctagctgtgttgt

SEQ ID NO: 330783 - DNA, 15 bp, Homo sapiens
aatctagctgtgttg

SEQ ID NO: 330784 - DNA, 15 bp, Homo sapiens
aaatctagctgtgtt

SEQ ID NO: 330785 - DNA, 15 bp, Homo sapiens
caaatctagctgtgt

SEQ ID NO: 330786 - DNA, 15 bp, Homo sapiens
ccaaatctagctgtg

SEQ ID NO: 330787 - DNA, 15 bp, Homo sapiens
accaaatctagctgt

SEQ ID NO: 330788 - DNA, 15 bp, Homo sapiens
gaccaaatctagctg

SEQ ID NO: 330789 - DNA, 15 bp, Homo sapiens
agaccaaatctagct

SEQ ID NO: 330790 - DNA, 15 bp, Homo sapiens
gagaccaaatctagc

SEQ ID NO: 330791 - DNA, 15 bp, Homo sapiens
agagaccaaatctag

SEQ ID NO: 330792 - DNA, 15 bp, Homo sapiens
tagagaccaaatcta

SEQ ID NO: 330793 - DNA, 15 bp, Homo sapiens
ttagagaccaaatct

SEQ ID NO: 330794 - DNA, 15 bp, Homo sapiens
tttagagaccaaatc

SEQ ID NO: 330795 - DNA, 15 bp, Homo sapiens
ttttagagaccaaat

SEQ ID NO: 330796 - DNA, 15 bp, Homo sapiens
tttttagagaccaaa

SEQ ID NO: 330797 - DNA, 15 bp, Homo sapiens
ttttttagagaccaa

SEQ ID NO: 330798 - DNA, 15 bp, Homo sapiens
tttttttagagacca

SEQ ID NO: 330799 - DNA, 15 bp, Homo sapiens
ttttttttagagacc

SEQ ID NO: 330800 - DNA, 15 bp, Homo sapiens
tttttttttagagac

SEQ ID NO: 330801 - DNA, 15 bp, Homo sapiens
ttttttttttagaga

SEQ ID NO: 330802 - DNA, 15 bp, Homo sapiens
tttttttttttagag

SEQ ID NO: 330803 - DNA, 15 bp, Homo sapiens
ttttttttttttaga

SEQ ID NO: 330804 - DNA, 15 bp, Homo sapiens
attttttttttttag

SEQ ID NO: 330805 - DNA, 15 bp, Homo sapiens
aatttttttttttta

SEQ ID NO: 330806 - DNA, 15 bp, Homo sapiens
taatttttttttttt

SEQ ID NO: 330807 - DNA, 15 bp, Homo sapiens
ttaattttttttttt

SEQ ID NO: 330808 - DNA, 15 bp, Homo sapiens
tttaatttttttttt

SEQ ID NO: 330809 - DNA, 15 bp, Homo sapiens
ttttaattttttttt

SEQ ID NO: 330810 - DNA, 15 bp, Homo sapiens
attttaatttttttt

SEQ ID NO: 330811 - DNA, 15 bp, Homo sapiens
tattttaattttttt

SEQ ID NO: 330812 - DNA, 15 bp, Homo sapiens
atattttaatttttt

SEQ ID NO: 330813 - DNA, 15 bp, Homo sapiens
aatattttaattttt

SEQ ID NO: 330814 - DNA, 15 bp, Homo sapiens
taatattttaatttt

SEQ ID NO: 330815 - DNA, 15 bp, Homo sapiens
ctaatattttaattt

SEQ ID NO: 330816 - DNA, 15 bp, Homo sapiens
gctaatattttaatt

SEQ ID NO: 330817 - DNA, 15 bp, Homo sapiens
ggctaatattttaat

SEQ ID NO: 330818 - DNA, 15 bp, Homo sapiens
tggctaatattttaa

SEQ ID NO: 330819 - DNA, 15 bp, Homo sapiens
ctggctaatatttta

SEQ ID NO: 330820 - DNA, 15 bp, Homo sapiens
gctggctaatatttt

SEQ ID NO: 330821 - DNA, 15 bp, Homo sapiens
agctggctaatattt

SEQ ID NO: 330822 - DNA, 15 bp, Homo sapiens
cagctggctaatatt

SEQ ID NO: 330823 - DNA, 15 bp, Homo sapiens
acagctggctaatat

SEQ ID NO: 330824 - DNA, 15 bp, Homo sapiens
cacagctggctaata

SEQ ID NO: 330825 - DNA, 15 bp, Homo sapiens
ccacagctggctaat

SEQ ID NO: 330826 - DNA, 15 bp, Homo sapiens
accacagctggctaa

SEQ ID NO: 330827 - DNA, 15 bp, Homo sapiens
caccacagctggcta

SEQ ID NO: 330828 - DNA, 15 bp, Homo sapiens
ccaccacagctggct

SEQ ID NO: 330829 - DNA, 15 bp, Homo sapiens
accaccacagctggc

SEQ ID NO: 330830 - DNA, 15 bp, Homo sapiens
caccaccacagctgg

SEQ ID NO: 330831 - DNA, 15 bp, Homo sapiens
gcaccaccacagctg

SEQ ID NO: 330832 - DNA, 15 bp, Homo sapiens
tgcaccaccacagct

SEQ ID NO: 330833 - DNA, 15 bp, Homo sapiens
gtgcaccaccacagc

SEQ ID NO: 330834 - DNA, 15 bp, Homo sapiens
tgtgcaccaccacag

SEQ ID NO: 330835 - DNA, 15 bp, Homo sapiens
gtgtgcaccaccaca

SEQ ID NO: 330836 - DNA, 15 bp, Homo sapiens
ggtgtgcaccaccac

SEQ ID NO: 330837 - DNA, 15 bp, Homo sapiens
aggtgtgcaccacca

SEQ ID NO: 330838 - DNA, 15 bp, Homo sapiens
caggtgtgcaccacc

SEQ ID NO: 330839 - DNA, 15 bp, Homo sapiens
acaggtgtgcaccac

SEQ ID NO: 330840 - DNA, 15 bp, Homo sapiens
tacaggtgtgcacca

SEQ ID NO: 330841 - DNA, 15 bp, Homo sapiens
ctacaggtgtgcacc

SEQ ID NO: 330842 - DNA, 15 bp, Homo sapiens
actacaggtgtgcac

SEQ ID NO: 330843 - DNA, 15 bp, Homo sapiens
gactacaggtgtgca

SEQ ID NO: 330844 - DNA, 15 bp, Homo sapiens
ggactacaggtgtgc

SEQ ID NO: 330845 - DNA, 15 bp, Homo sapiens
gggactacaggtgtg

SEQ ID NO: 330846 - DNA, 15 bp, Homo sapiens
tgggactacaggtgt

SEQ ID NO: 330847 - DNA, 15 bp, Homo sapiens
ctgggactacaggtg

SEQ ID NO: 330848 - DNA, 15 bp, Homo sapiens
gctgggactacaggt

SEQ ID NO: 330849 - DNA, 15 bp, Homo sapiens
acctcagcctcctga

SEQ ID NO: 330850 - DNA, 15 bp, Homo sapiens
cacctcagcctcctg

SEQ ID NO: 330851 - DNA, 15 bp, Homo sapiens
ccacctcagcctcct

SEQ ID NO: 330852 - DNA, 15 bp, Homo sapiens
cccacctcagcctcc

SEQ ID NO: 330853 - DNA, 15 bp, Homo sapiens
tcccacctcagcctc

SEQ ID NO: 330854 - DNA, 15 bp, Homo sapiens
ctcccacctcagcct

SEQ ID NO: 330855 - DNA, 15 bp, Homo sapiens
cctcccacctcagcc

SEQ ID NO: 330856 - DNA, 15 bp, Homo sapiens
ctgatcctcccacct

SEQ ID NO: 330857 - DNA, 15 bp, Homo sapiens
actgatcctcccacc

SEQ ID NO: 330858 - DNA, 15 bp, Homo sapiens
aactgatcctcccac

SEQ ID NO: 330859 - DNA, 15 bp, Homo sapiens
caactgatcctccca

SEQ ID NO: 330860 - DNA, 15 bp, Homo sapiens
tcaactgatcctccc

SEQ ID NO: 330861 - DNA, 15 bp, Homo sapiens
ctcaactgatcctcc

SEQ ID NO: 330862 - DNA, 15 bp, Homo sapiens
gctcaactgatcctc

SEQ ID NO: 330863 - DNA, 15 bp, Homo sapiens
ggctcaactgatcct

SEQ ID NO: 330864 - DNA, 15 bp, Homo sapiens
gggctcaactgatcc

SEQ ID NO: 330865 - DNA, 15 bp, Homo sapiens
agggctcaactgatc

SEQ ID NO: 330866 - DNA, 15 bp, Homo sapiens
tagggctcaactgat

SEQ ID NO: 330867 - DNA, 15 bp, Homo sapiens
ctagggctcaactga

SEQ ID NO: 330868 - DNA, 15 bp, Homo sapiens
tctagggctcaactg

SEQ ID NO: 330869 - DNA, 15 bp, Homo sapiens
ctctagggctcaact

SEQ ID NO: 330870 - DNA, 15 bp, Homo sapiens
tctctagggctcaac

SEQ ID NO: 330871 - DNA, 15 bp, Homo sapiens
ctctctagggctcaa

SEQ ID NO: 330872 - DNA, 15 bp, Homo sapiens
gctctctagggctca

SEQ ID NO: 330873 - DNA, 15 bp, Homo sapiens
cgctctctagggctc

SEQ ID NO: 330874 - DNA, 15 bp, Homo sapiens
tcgctctctagggct

SEQ ID NO: 330875 - DNA, 15 bp, Homo sapiens
ctcgctctctagggc

SEQ ID NO: 330876 - DNA, 15 bp, Homo sapiens
cctcgctctctaggg

SEQ ID NO: 330877 - DNA, 15 bp, Homo sapiens
gcctcgctctctagg

SEQ ID NO: 330878 - DNA, 15 bp, Homo sapiens
agcctcgctctctag

SEQ ID NO: 330879 - DNA, 15 bp, Homo sapiens
cagcctcgctctcta

SEQ ID NO: 330880 - DNA, 15 bp, Homo sapiens
gcagcctcgctctct

SEQ ID NO: 330881 - DNA, 15 bp, Homo sapiens
tgcagcctcgctctc

SEQ ID NO: 330882 - DNA, 15 bp, Homo sapiens
ctgcagcctcgctct

SEQ ID NO: 330883 - DNA, 15 bp, Homo sapiens
actgcagcctcgctc

SEQ ID NO: 330884 - DNA, 15 bp, Homo sapiens
cactgcagcctcgct

SEQ ID NO: 330885 - DNA, 15 bp, Homo sapiens
tcactgcagcctcgc

SEQ ID NO: 330886 - DNA, 15 bp, Homo sapiens
ctcactgcagcctcg

SEQ ID NO: 330887 - DNA, 15 bp, Homo sapiens
ctggctcactgcagc

SEQ ID NO: 330888 - DNA, 15 bp, Homo sapiens
cctggctcactgcag

SEQ ID NO: 330889 - DNA, 15 bp, Homo sapiens
tcctggctcactgca

SEQ ID NO: 330890 - DNA, 15 bp, Homo sapiens
atcctggctcactgc

SEQ ID NO: 330891 - DNA, 15 bp, Homo sapiens
aatcctggctcactg

SEQ ID NO: 330892 - DNA, 15 bp, Homo sapiens
caatcctggctcact

SEQ ID NO: 330893 - DNA, 15 bp, Homo sapiens
gcaatcctggctcac

SEQ ID NO: 330894 - DNA, 15 bp, Homo sapiens
tgcaatcctggctca

SEQ ID NO: 330895 - DNA, 15 bp, Homo sapiens
gtgcaatcctggctc

SEQ ID NO: 330896 - DNA, 15 bp, Homo sapiens
ggtgcaatcctggct

SEQ ID NO: 330897 - DNA, 15 bp, Homo sapiens
tggtgcaatcctggc

SEQ ID NO: 330898 - DNA, 15 bp, Homo sapiens
gtggtgcaatcctgg

SEQ ID NO: 330899 - DNA, 15 bp, Homo sapiens
agtggtgcaatcctg

SEQ ID NO: 330900 - DNA, 15 bp, Homo sapiens
cagtggtgcaatcct

SEQ ID NO: 330901 - DNA, 15 bp, Homo sapiens
gcagtggtgcaatcc

SEQ ID NO: 330902 - DNA, 15 bp, Homo sapiens
gctctgtcacccagg

SEQ ID NO: 330903 - DNA, 15 bp, Homo sapiens
tgctctgtcacccag

SEQ ID NO: 330904 - DNA, 15 bp, Homo sapiens
ctgctctgtcaccca

SEQ ID NO: 330905 - DNA, 15 bp, Homo sapiens
cctgctctgtcaccc

SEQ ID NO: 330906 - DNA, 15 bp, Homo sapiens
gcctgctctgtcacc

SEQ ID NO: 330907 - DNA, 15 bp, Homo sapiens
ggcctgctctgtcac

SEQ ID NO: 330908 - DNA, 15 bp, Homo sapiens
gggcctgctctgtca

SEQ ID NO: 330909 - DNA, 15 bp, Homo sapiens
agggcctgctctgtc

SEQ ID NO: 330910 - DNA, 15 bp, Homo sapiens
cagggcctgctctgt

SEQ ID NO: 330911 - DNA, 15 bp, Homo sapiens
acagggcctgctctg

SEQ ID NO: 330912 - DNA, 15 bp, Homo sapiens
gacagggcctgctct

SEQ ID NO: 330913 - DNA, 15 bp, Homo sapiens
agacagggcctgctc

SEQ ID NO: 330914 - DNA, 15 bp, Homo sapiens
cagacagggcctgct

SEQ ID NO: 330915 - DNA, 15 bp, Homo sapiens
tcagacagggcctgc

SEQ ID NO: 330916 - DNA, 15 bp, Homo sapiens
ttcagacagggcctg

SEQ ID NO: 330917 - DNA, 15 bp, Homo sapiens
cttcagacagggcct

SEQ ID NO: 330918 - DNA, 15 bp, Homo sapiens
tcttcagacagggcc

SEQ ID NO: 330919 - DNA, 15 bp, Homo sapiens
ttcttcagacagggc

SEQ ID NO: 330920 - DNA, 15 bp, Homo sapiens
tttcttcagacaggg

SEQ ID NO: 330921 - DNA, 15 bp, Homo sapiens
ttttcttcagacagg

SEQ ID NO: 330922 - DNA, 15 bp, Homo sapiens
tttttcttcagacag

SEQ ID NO: 330923 - DNA, 15 bp, Homo sapiens
atttttcttcagaca

SEQ ID NO: 330924 - DNA, 15 bp, Homo sapiens
tatttttcttcagac

SEQ ID NO: 330925 - DNA, 15 bp, Homo sapiens
ttatttttcttcaga

SEQ ID NO: 330926 - DNA, 15 bp, Homo sapiens
tttatttttcttcag

SEQ ID NO: 330927 - DNA, 15 bp, Homo sapiens
atttatttttcttca

SEQ ID NO: 330928 - DNA, 15 bp, Homo sapiens
tatttatttttcttc

SEQ ID NO: 330929 - DNA, 15 bp, Homo sapiens
ttatttatttttctt

SEQ ID NO: 330930 - DNA, 15 bp, Homo sapiens
tttatttatttttct

SEQ ID NO: 330931 - DNA, 15 bp, Homo sapiens
ttttatttatttttc

SEQ ID NO: 330932 - DNA, 15 bp, Homo sapiens
tttttatttattttt

SEQ ID NO: 330933 - DNA, 15 bp, Homo sapiens
atttttatttatttt

SEQ ID NO: 330934 - DNA, 15 bp, Homo sapiens
aatttttatttattt

SEQ ID NO: 330935 - DNA, 15 bp, Homo sapiens
aaatttttatttatt

SEQ ID NO: 330936 - DNA, 15 bp, Homo sapiens
taaatttttatttat

SEQ ID NO: 330937 - DNA, 15 bp, Homo sapiens
ttaaatttttattta

SEQ ID NO: 330938 - DNA, 15 bp, Homo sapiens
tttaaatttttattt

SEQ ID NO: 330939 - DNA, 15 bp, Homo sapiens
ttttaaatttttatt

SEQ ID NO: 330940 - DNA, 15 bp, Homo sapiens
tttttaaatttttat

SEQ ID NO: 330941 - DNA, 15 bp, Homo sapiens
ttttttaaattttta

SEQ ID NO: 330942 - DNA, 15 bp, Homo sapiens
tttttttaaattttt

SEQ ID NO: 330943 - DNA, 15 bp, Homo sapiens
ctttttttaaatttt

SEQ ID NO: 330944 - DNA, 15 bp, Homo sapiens
actttttttaaattt

SEQ ID NO: 330945 - DNA, 15 bp, Homo sapiens
aactttttttaaatt

SEQ ID NO: 330946 - DNA, 15 bp, Homo sapiens
aaactttttttaaat

SEQ ID NO: 330947 - DNA, 15 bp, Homo sapiens
aaaactttttttaaa

SEQ ID NO: 330948 - DNA, 15 bp, Homo sapiens
taaaactttttttaa

SEQ ID NO: 330949 - DNA, 15 bp, Homo sapiens
gtaaaacttttttta

SEQ ID NO: 330950 - DNA, 15 bp, Homo sapiens
agtaaaacttttttt

SEQ ID NO: 330951 - DNA, 15 bp, Homo sapiens
gagtaaaactttttt

SEQ ID NO: 330952 - DNA, 15 bp, Homo sapiens
agagtaaaacttttt

SEQ ID NO: 330953 - DNA, 15 bp, Homo sapiens
tagagtaaaactttt

SEQ ID NO: 330954 - DNA, 15 bp, Homo sapiens
ttagagtaaaacttt

SEQ ID NO: 330955 - DNA, 15 bp, Homo sapiens
attagagtaaaactt

SEQ ID NO: 330956 - DNA, 15 bp, Homo sapiens
aattagagtaaaact

SEQ ID NO: 330957 - DNA, 15 bp, Homo sapiens
caattagagtaaaac

SEQ ID NO: 330958 - DNA, 15 bp, Homo sapiens
acaattagagtaaaa

SEQ ID NO: 330959 - DNA, 15 bp, Homo sapiens
tacaattagagtaaa

SEQ ID NO: 330960 - DNA, 15 bp, Homo sapiens
ttacaattagagtaa

SEQ ID NO: 330961 - DNA, 15 bp, Homo sapiens
gttacaattagagta

SEQ ID NO: 330962 - DNA, 15 bp, Homo sapiens
tgttacaattagagt

SEQ ID NO: 330963 - DNA, 15 bp, Homo sapiens
atgttacaattagag

SEQ ID NO: 330964 - DNA, 15 bp, Homo sapiens
aatgttacaattaga

SEQ ID NO: 330965 - DNA, 15 bp, Homo sapiens
aaatgttacaattag

SEQ ID NO: 330966 - DNA, 15 bp, Homo sapiens
taaatgttacaatta

SEQ ID NO: 330967 - DNA, 15 bp, Homo sapiens
ataaatgttacaatt

SEQ ID NO: 330968 - DNA, 15 bp, Homo sapiens
aataaatgttacaat

SEQ ID NO: 330969 - DNA, 15 bp, Homo sapiens
taataaatgttacaa

SEQ ID NO: 330970 - DNA, 15 bp, Homo sapiens
ataataaatgttaca

SEQ ID NO: 330971 - DNA, 15 bp, Homo sapiens
aataataaatgttac

SEQ ID NO: 330972 - DNA, 15 bp, Homo sapiens
aaataataaatgtta

SEQ ID NO: 330973 - DNA, 15 bp, Homo sapiens
aaaataataaatgtt

SEQ ID NO: 330974 - DNA, 15 bp, Homo sapiens
aaaaataataaatgt

SEQ ID NO: 330975 - DNA, 15 bp, Homo sapiens
aaaaaataataaatg

SEQ ID NO: 330976 - DNA, 15 bp, Homo sapiens
aaaaaaataataaat

SEQ ID NO: 330977 - DNA, 15 bp, Homo sapiens
gaaaaaaataataaa

SEQ ID NO: 330978 - DNA, 15 bp, Homo sapiens
agaaaaaaataataa

SEQ ID NO: 330979 - DNA, 15 bp, Homo sapiens
aagaaaaaaataata

SEQ ID NO: 330980 - DNA, 15 bp, Homo sapiens
aaagaaaaaaataat

SEQ ID NO: 330981 - DNA, 15 bp, Homo sapiens
aaaagaaaaaaataa

SEQ ID NO: 330982 - DNA, 15 bp, Homo sapiens
aaaaagaaaaaaata

SEQ ID NO: 330983 - DNA, 15 bp, Homo sapiens
aaaaaagaaaaaaat

SEQ ID NO: 330984 - DNA, 15 bp, Homo sapiens
caaaaaagaaaaaaa

SEQ ID NO: 330985 - DNA, 15 bp, Homo sapiens
ccaaaaaagaaaaaa

SEQ ID NO: 330986 - DNA, 15 bp, Homo sapiens
accaaaaaagaaaaa

SEQ ID NO: 330987 - DNA, 15 bp, Homo sapiens
gaccaaaaaagaaaa

SEQ ID NO: 330988 - DNA, 15 bp, Homo sapiens
agaccaaaaaagaaa

SEQ ID NO: 330989 - DNA, 15 bp, Homo sapiens
aagaccaaaaaagaa

SEQ ID NO: 330990 - DNA, 15 bp, Homo sapiens
aaagaccaaaaaaga

SEQ ID NO: 330991 - DNA, 15 bp, Homo sapiens
aaaagaccaaaaaag

SEQ ID NO: 330992 - DNA, 15 bp, Homo sapiens
gaaaagaccaaaaaa

SEQ ID NO: 330993 - DNA, 15 bp, Homo sapiens
tgaaaagaccaaaaa

SEQ ID NO: 330994 - DNA, 15 bp, Homo sapiens
ctgaaaagaccaaaa

SEQ ID NO: 330995 - DNA, 15 bp, Homo sapiens
cctgaaaagaccaaa

SEQ ID NO: 330996 - DNA, 15 bp, Homo sapiens
gcctgaaaagaccaa

SEQ ID NO: 330997 - DNA, 15 bp, Homo sapiens
ggcctgaaaagacca

SEQ ID NO: 330998 - DNA, 15 bp, Homo sapiens
gggcctgaaaagacc

SEQ ID NO: 330999 - DNA, 15 bp, Homo sapiens
tgggcctgaaaagac

SEQ ID NO: 331000 - DNA, 15 bp, Homo sapiens
atgggcctgaaaaga

SEQ ID NO: 331001 - DNA, 15 bp, Homo sapiens
tatgggcctgaaaag

SEQ ID NO: 331002 - DNA, 15 bp, Homo sapiens
ctatgggcctgaaaa

SEQ ID NO: 331003 - DNA, 15 bp, Homo sapiens
actatgggcctgaaa

SEQ ID NO: 331004 - DNA, 15 bp, Homo sapiens
aactatgggcctgaa

SEQ ID NO: 331005 - DNA, 15 bp, Homo sapiens
aaactatgggcctga

SEQ ID NO: 331006 - DNA, 15 bp, Homo sapiens
taaactatgggcctg

SEQ ID NO: 331007 - DNA, 15 bp, Homo sapiens
gtaaactatgggcct

SEQ ID NO: 331008 - DNA, 15 bp, Homo sapiens
agtaaactatgggcc

SEQ ID NO: 331009 - DNA, 15 bp, Homo sapiens
aagtaaactatgggc

SEQ ID NO: 331010 - DNA, 15 bp, Homo sapiens
aaagtaaactatggg

SEQ ID NO: 331011 - DNA, 15 bp, Homo sapiens
taaagtaaactatgg

SEQ ID NO: 331012 - DNA, 15 bp, Homo sapiens
ttaaagtaaactatg

SEQ ID NO: 331013 - DNA, 15 bp, Homo sapiens
tttaaagtaaactat

SEQ ID NO: 331014 - DNA, 15 bp, Homo sapiens
ttttaaagtaaacta

SEQ ID NO: 331015 - DNA, 15 bp, Homo sapiens
attttaaagtaaact

SEQ ID NO: 331016 - DNA, 15 bp, Homo sapiens
aattttaaagtaaac

SEQ ID NO: 331017 - DNA, 15 bp, Homo sapiens
aaattttaaagtaaa

SEQ ID NO: 331018 - DNA, 15 bp, Homo sapiens
aaaattttaaagtaa

SEQ ID NO: 331019 - DNA, 15 bp, Homo sapiens
caaaattttaaagta

SEQ ID NO: 331020 - DNA, 15 bp, Homo sapiens
acaaaattttaaagt

SEQ ID NO: 331021 - DNA, 15 bp, Homo sapiens
aacaaaattttaaag

SEQ ID NO: 331022 - DNA, 15 bp, Homo sapiens
gaacaaaattttaaa

SEQ ID NO: 331023 - DNA, 15 bp, Homo sapiens
tgaacaaaattttaa

SEQ ID NO: 331024 - DNA, 15 bp, Homo sapiens
atgaacaaaatttta

SEQ ID NO: 331025 - DNA, 15 bp, Homo sapiens
aatgaacaaaatttt

SEQ ID NO: 331026 - DNA, 15 bp, Homo sapiens
aaatgaacaaaattt

SEQ ID NO: 331027 - DNA, 15 bp, Homo sapiens
aaaatgaacaaaatt

SEQ ID NO: 331028 - DNA, 15 bp, Homo sapiens
caaaatgaacaaaat

SEQ ID NO: 331029 - DNA, 15 bp, Homo sapiens
ccaaaatgaacaaaa

SEQ ID NO: 331030 - DNA, 15 bp, Homo sapiens
gccaaaatgaacaaa

SEQ ID NO: 331031 - DNA, 15 bp, Homo sapiens
ggccaaaatgaacaa

SEQ ID NO: 331032 - DNA, 15 bp, Homo sapiens
cggccaaaatgaaca

SEQ ID NO: 331033 - DNA, 15 bp, Homo sapiens
ccggccaaaatgaac

SEQ ID NO: 331034 - DNA, 15 bp, Homo sapiens
cccggccaaaatgaa

SEQ ID NO: 331035 - DNA, 15 bp, Homo sapiens
gcccggccaaaatga

SEQ ID NO: 331036 - DNA, 15 bp, Homo sapiens
cgcccggccaaaatg

SEQ ID NO: 331037 - DNA, 15 bp, Homo sapiens
gcgcccggccaaaat

SEQ ID NO: 331038 - DNA, 15 bp, Homo sapiens
cgcgcccggccaaaa

SEQ ID NO: 331039 - DNA, 15 bp, Homo sapiens
ccgcgcccggccaaa

SEQ ID NO: 331040 - DNA, 15 bp, Homo sapiens
accgcgcccggccaa

SEQ ID NO: 331041 - DNA, 15 bp, Homo sapiens
caccgcgcccggcca

SEQ ID NO: 331042 - DNA, 15 bp, Homo sapiens
actgggattacaggc

SEQ ID NO: 331043 - DNA, 15 bp, Homo sapiens
tactgggattacagg

SEQ ID NO: 331044 - DNA, 15 bp, Homo sapiens
gtactgggattacag

SEQ ID NO: 331045 - DNA, 15 bp, Homo sapiens
agtactgggattaca

SEQ ID NO: 331046 - DNA, 15 bp, Homo sapiens
aagtactgggattac

SEQ ID NO: 331047 - DNA, 15 bp, Homo sapiens
aaagtactgggatta

SEQ ID NO: 331048 - DNA, 15 bp, Homo sapiens
caaagtactgggatt

SEQ ID NO: 331049 - DNA, 15 bp, Homo sapiens
ccaaagtactgggat

SEQ ID NO: 331050 - DNA, 15 bp, Homo sapiens
cccaaagtactggga

SEQ ID NO: 331051 - DNA, 15 bp, Homo sapiens
tcccaaagtactggg

SEQ ID NO: 331052 - DNA, 15 bp, Homo sapiens
ctcccaaagtactgg

SEQ ID NO: 331053 - DNA, 15 bp, Homo sapiens
cctcccaaagtactg

SEQ ID NO: 331054 - DNA, 15 bp, Homo sapiens
gcctcccaaagtact

SEQ ID NO: 331055 - DNA, 15 bp, Homo sapiens
ggcctcccaaagtac

SEQ ID NO: 331056 - DNA, 15 bp, Homo sapiens
cggcctcccaaagta

SEQ ID NO: 331057 - DNA, 15 bp, Homo sapiens
tgcccgcctcggcct

SEQ ID NO: 331058 - DNA, 15 bp, Homo sapiens
ctgcccgcctcggcc

SEQ ID NO: 331059 - DNA, 15 bp, Homo sapiens
tctgcccgcctcggc

SEQ ID NO: 331060 - DNA, 15 bp, Homo sapiens
atctgcccgcctcgg

SEQ ID NO: 331061 - DNA, 15 bp, Homo sapiens
gatctgcccgcctcg

SEQ ID NO: 331062 - DNA, 15 bp, Homo sapiens
tgatctgcccgcctc

SEQ ID NO: 331063 - DNA, 15 bp, Homo sapiens
gtgatctgcccgcct

SEQ ID NO: 331064 - DNA, 15 bp, Homo sapiens
tgtgatctgcccgcc

SEQ ID NO: 331065 - DNA, 15 bp, Homo sapiens
ttgtgatctgcccgc

SEQ ID NO: 331066 - DNA, 15 bp, Homo sapiens
cttgtgatctgcccg

SEQ ID NO: 331067 - DNA, 15 bp, Homo sapiens
ccttgtgatctgccc

SEQ ID NO: 331068 - DNA, 15 bp, Homo sapiens
accttgtgatctgcc

SEQ ID NO: 331069 - DNA, 15 bp, Homo sapiens
gaccttgtgatctgc

SEQ ID NO: 331070 - DNA, 15 bp, Homo sapiens
tgaccttgtgatctg

SEQ ID NO: 331071 - DNA, 15 bp, Homo sapiens
ctgaccttgtgatct

SEQ ID NO: 331072 - DNA, 15 bp, Homo sapiens
tcaggatggtctcga

SEQ ID NO: 331073 - DNA, 15 bp, Homo sapiens
gtcaggatggtctcg

SEQ ID NO: 331074 - DNA, 15 bp, Homo sapiens
agtcaggatggtctc

SEQ ID NO: 331075 - DNA, 15 bp, Homo sapiens
tagtcaggatggtct

SEQ ID NO: 331076 - DNA, 15 bp, Homo sapiens
ttagtcaggatggtc

SEQ ID NO: 331077 - DNA, 15 bp, Homo sapiens
gttagtcaggatggt

SEQ ID NO: 331078 - DNA, 15 bp, Homo sapiens
tgttagtcaggatgg

SEQ ID NO: 331079 - DNA, 15 bp, Homo sapiens
gtgttagtcaggatg

SEQ ID NO: 331080 - DNA, 15 bp, Homo sapiens
cgtgttagtcaggat

SEQ ID NO: 331081 - DNA, 15 bp, Homo sapiens
ccgtgttagtcagga

SEQ ID NO: 331082 - DNA, 15 bp, Homo sapiens
accgtgttagtcagg

SEQ ID NO: 331083 - DNA, 15 bp, Homo sapiens
caccgtgttagtcag

SEQ ID NO: 331084 - DNA, 15 bp, Homo sapiens
tcaccgtgttagtca

SEQ ID NO: 331085 - DNA, 15 bp, Homo sapiens
ttcaccgtgttagtc

SEQ ID NO: 331086 - DNA, 15 bp, Homo sapiens
tttcaccgtgttagt

SEQ ID NO: 331087 - DNA, 15 bp, Homo sapiens
atttcaccgtgttag

SEQ ID NO: 331088 - DNA, 15 bp, Homo sapiens
gatttcaccgtgtta

SEQ ID NO: 331089 - DNA, 15 bp, Homo sapiens
ggatttcaccgtgtt

SEQ ID NO: 331090 - DNA, 15 bp, Homo sapiens
gggatttcaccgtgt

SEQ ID NO: 331091 - DNA, 15 bp, Homo sapiens
cgggatttcaccgtg

SEQ ID NO: 331092 - DNA, 15 bp, Homo sapiens
acgggatttcaccgt

SEQ ID NO: 331093 - DNA, 15 bp, Homo sapiens
gacgggatttcaccg

SEQ ID NO: 331094 - DNA, 15 bp, Homo sapiens
agacgggatttcacc

SEQ ID NO: 331095 - DNA, 15 bp, Homo sapiens
gtttttagtagagac

SEQ ID NO: 331096 - DNA, 15 bp, Homo sapiens
tgtttttagtagaga

SEQ ID NO: 331097 - DNA, 15 bp, Homo sapiens
gtgtttttagtagag

SEQ ID NO: 331098 - DNA, 15 bp, Homo sapiens
tgtgtttttagtaga

SEQ ID NO: 331099 - DNA, 15 bp, Homo sapiens
ttgtgtttttagtag

SEQ ID NO: 331100 - DNA, 15 bp, Homo sapiens
tttgtgtttttagta

SEQ ID NO: 331101 - DNA, 15 bp, Homo sapiens
ttttgtgtttttagt

SEQ ID NO: 331102 - DNA, 15 bp, Homo sapiens
tttttgtgtttttag

SEQ ID NO: 331103 - DNA, 15 bp, Homo sapiens
ttttttgtgttttta

SEQ ID NO: 331104 - DNA, 15 bp, Homo sapiens
attttttgtgttttt

SEQ ID NO: 331105 - DNA, 15 bp, Homo sapiens
aattttttgtgtttt

SEQ ID NO: 331106 - DNA, 15 bp, Homo sapiens
taattttttgtgttt

SEQ ID NO: 331107 - DNA, 15 bp, Homo sapiens
ctaattttttgtgtt

SEQ ID NO: 331108 - DNA, 15 bp, Homo sapiens
gctaattttttgtgt

SEQ ID NO: 331109 - DNA, 15 bp, Homo sapiens
agctaattttttgtg

SEQ ID NO: 331110 - DNA, 15 bp, Homo sapiens
accaccacacccagc

SEQ ID NO: 331111 - DNA, 15 bp, Homo sapiens
taccaccacacccag

SEQ ID NO: 331112 - DNA, 15 bp, Homo sapiens
gtaccaccacaccca

SEQ ID NO: 331113 - DNA, 15 bp, Homo sapiens
cgtaccaccacaccc

SEQ ID NO: 331114 - DNA, 15 bp, Homo sapiens
acgtaccaccacacc

SEQ ID NO: 331115 - DNA, 15 bp, Homo sapiens
cacgtaccaccacac

SEQ ID NO: 331116 - DNA, 15 bp, Homo sapiens
gcacgtaccaccaca

SEQ ID NO: 331117 - DNA, 15 bp, Homo sapiens
ggcacgtaccaccac

SEQ ID NO: 331118 - DNA, 15 bp, Homo sapiens
aggcacgtaccacca

SEQ ID NO: 331119 - DNA, 15 bp, Homo sapiens
caggcacgtaccacc

SEQ ID NO: 331120 - DNA, 15 bp, Homo sapiens
acaggcacgtaccac

SEQ ID NO: 331121 - DNA, 15 bp, Homo sapiens
tacaggcacgtacca

SEQ ID NO: 331122 - DNA, 15 bp, Homo sapiens
ctacaggcacgtacc

SEQ ID NO: 331123 - DNA, 15 bp, Homo sapiens
actacaggcacgtac

SEQ ID NO: 331124 - DNA, 15 bp, Homo sapiens
gactacaggcacgta

SEQ ID NO: 331125 - DNA, 15 bp, Homo sapiens
ggactacaggcacgt

SEQ ID NO: 331126 - DNA, 15 bp, Homo sapiens
gggactacaggcacg

SEQ ID NO: 331127 - DNA, 15 bp, Homo sapiens
tgggactacaggcac

SEQ ID NO: 331128 - DNA, 15 bp, Homo sapiens
ggggttcaagcgatt

SEQ ID NO: 331129 - DNA, 15 bp, Homo sapiens
aggggttcaagcgat

SEQ ID NO: 331130 - DNA, 15 bp, Homo sapiens
caggggttcaagcga

SEQ ID NO: 331131 - DNA, 15 bp, Homo sapiens
tcaggggttcaagcg

SEQ ID NO: 331132 - DNA, 15 bp, Homo sapiens
ctcaggggttcaagc

SEQ ID NO: 331133 - DNA, 15 bp, Homo sapiens
cctcaggggttcaag

SEQ ID NO: 331134 - DNA, 15 bp, Homo sapiens
tcctcaggggttcaa

SEQ ID NO: 331135 - DNA, 15 bp, Homo sapiens
gtcctcaggggttca

SEQ ID NO: 331136 - DNA, 15 bp, Homo sapiens
cgtcctcaggggttc

SEQ ID NO: 331137 - DNA, 15 bp, Homo sapiens
acgtcctcaggggtt

SEQ ID NO: 331138 - DNA, 15 bp, Homo sapiens
aacgtcctcaggggt

SEQ ID NO: 331139 - DNA, 15 bp, Homo sapiens
caacgtcctcagggg

SEQ ID NO: 331140 - DNA, 15 bp, Homo sapiens
gcaacgtcctcaggg

SEQ ID NO: 331141 - DNA, 15 bp, Homo sapiens
tgcaacgtcctcagg

SEQ ID NO: 331142 - DNA, 15 bp, Homo sapiens
ctgcaacgtcctcag

SEQ ID NO: 331143 - DNA, 15 bp, Homo sapiens
actgcaacgtcctca

SEQ ID NO: 331144 - DNA, 15 bp, Homo sapiens
cactgcaacgtcctc

SEQ ID NO: 331145 - DNA, 15 bp, Homo sapiens
tcactgcaacgtcct

SEQ ID NO: 331146 - DNA, 15 bp, Homo sapiens
ctcactgcaacgtcc

SEQ ID NO: 331147 - DNA, 15 bp, Homo sapiens
gctcactgcaacgtc

SEQ ID NO: 331148 - DNA, 15 bp, Homo sapiens
ggctcactgcaacgt

SEQ ID NO: 331149 - DNA, 15 bp, Homo sapiens
tggctcactgcaacg

SEQ ID NO: 331150 - DNA, 15 bp, Homo sapiens
acgatcttggctcac

SEQ ID NO: 331151 - DNA, 15 bp, Homo sapiens
cacgatcttggctca

SEQ ID NO: 331152 - DNA, 15 bp, Homo sapiens
gcacgatcttggctc

SEQ ID NO: 331153 - DNA, 15 bp, Homo sapiens
agcacgatcttggct

SEQ ID NO: 331154 - DNA, 15 bp, Homo sapiens
cagcacgatcttggc

SEQ ID NO: 331155 - DNA, 15 bp, Homo sapiens
gcagcacgatcttgg

SEQ ID NO: 331156 - DNA, 15 bp, Homo sapiens
agcagcacgatcttg

SEQ ID NO: 331157 - DNA, 15 bp, Homo sapiens
cagcagcacgatctt

SEQ ID NO: 331158 - DNA, 15 bp, Homo sapiens
gcagcagcacgatct

SEQ ID NO: 331159 - DNA, 15 bp, Homo sapiens
tgcagcagcacgatc

SEQ ID NO: 331160 - DNA, 15 bp, Homo sapiens
gtgcagcagcacgat

SEQ ID NO: 331161 - DNA, 15 bp, Homo sapiens
agtgcagcagcacga

SEQ ID NO: 331162 - DNA, 15 bp, Homo sapiens
gagtgcagcagcacg

SEQ ID NO: 331163 - DNA, 15 bp, Homo sapiens
ggagtgcagcagcac

SEQ ID NO: 331164 - DNA, 15 bp, Homo sapiens
tggagtgcagcagca

SEQ ID NO: 331165 - DNA, 15 bp, Homo sapiens
ctggagtgcagcagc

SEQ ID NO: 331166 - DNA, 15 bp, Homo sapiens
gctggagtgcagcag

SEQ ID NO: 331167 - DNA, 15 bp, Homo sapiens
ggctggagtgcagca

SEQ ID NO: 331168 - DNA, 15 bp, Homo sapiens
taggctggagtgcag

SEQ ID NO: 331169 - DNA, 15 bp, Homo sapiens
ctaggctggagtgca

SEQ ID NO: 331170 - DNA, 15 bp, Homo sapiens
tctaggctggagtgc

SEQ ID NO: 331171 - DNA, 15 bp, Homo sapiens
gtctaggctggagtg

SEQ ID NO: 331172 - DNA, 15 bp, Homo sapiens
tgtctaggctggagt

SEQ ID NO: 331173 - DNA, 15 bp, Homo sapiens
ttgtctaggctggag

SEQ ID NO: 331174 - DNA, 15 bp, Homo sapiens
gttgtctaggctgga

SEQ ID NO: 331175 - DNA, 15 bp, Homo sapiens
tgttgtctaggctgg

SEQ ID NO: 331176 - DNA, 15 bp, Homo sapiens
ttgttgtctaggctg

SEQ ID NO: 331177 - DNA, 15 bp, Homo sapiens
cttgttgtctaggct

SEQ ID NO: 331178 - DNA, 15 bp, Homo sapiens
tcttgttgtctaggc

SEQ ID NO: 331179 - DNA, 15 bp, Homo sapiens
ctcttgttgtctagg

SEQ ID NO: 331180 - DNA, 15 bp, Homo sapiens
actcttgttgtctag

SEQ ID NO: 331181 - DNA, 15 bp, Homo sapiens
cactcttgttgtcta

SEQ ID NO: 331182 - DNA, 15 bp, Homo sapiens
tcactcttgttgtct

SEQ ID NO: 331183 - DNA, 15 bp, Homo sapiens
ctcactcttgttgtc

SEQ ID NO: 331184 - DNA, 15 bp, Homo sapiens
tctcactcttgttgt

SEQ ID NO: 331185 - DNA, 15 bp, Homo sapiens
gtctcactcttgttg

SEQ ID NO: 331186 - DNA, 15 bp, Homo sapiens
ggtctcactcttgtt

SEQ ID NO: 331187 - DNA, 15 bp, Homo sapiens
gggtctcactcttgt

SEQ ID NO: 331188 - DNA, 15 bp, Homo sapiens
ggggtctcactcttg

SEQ ID NO: 331189 - DNA, 15 bp, Homo sapiens
cggggtctcactctt

SEQ ID NO: 331190 - DNA, 15 bp, Homo sapiens
gcggggtctcactct

SEQ ID NO: 331191 - DNA, 15 bp, Homo sapiens
ggcggggtctcactc

SEQ ID NO: 331192 - DNA, 15 bp, Homo sapiens
aggcggggtctcact

SEQ ID NO: 331193 - DNA, 15 bp, Homo sapiens
gaggcggggtctcac

SEQ ID NO: 331194 - DNA, 15 bp, Homo sapiens
ggaggcggggtctca

SEQ ID NO: 331195 - DNA, 15 bp, Homo sapiens
tggaggcggggtctc

SEQ ID NO: 331196 - DNA, 15 bp, Homo sapiens
ttggaggcggggtct

SEQ ID NO: 331197 - DNA, 15 bp, Homo sapiens
tttggaggcggggtc

SEQ ID NO: 331198 - DNA, 15 bp, Homo sapiens
ttttggaggcggggt

SEQ ID NO: 331199 - DNA, 15 bp, Homo sapiens
tttttggaggcgggg

SEQ ID NO: 331200 - DNA, 15 bp, Homo sapiens
ttttttggaggcggg

SEQ ID NO: 331201 - DNA, 15 bp, Homo sapiens
tttttttggaggcgg

SEQ ID NO: 331202 - DNA, 15 bp, Homo sapiens
ttttttttggaggcg

SEQ ID NO: 331203 - DNA, 15 bp, Homo sapiens
tttttttttggaggc

SEQ ID NO: 331204 - DNA, 15 bp, Homo sapiens
ttttttttttggagg

SEQ ID NO: 331205 - DNA, 15 bp, Homo sapiens
tttttttttttggag

SEQ ID NO: 331206 - DNA, 15 bp, Homo sapiens
ttttttttttttgga

SEQ ID NO: 331207 - DNA, 15 bp, Homo sapiens
atttttttttttttg

SEQ ID NO: 331208 - DNA, 15 bp, Homo sapiens
caaattttttttttt

SEQ ID NO: 331209 - DNA, 15 bp, Homo sapiens
acaaatttttttttt

SEQ ID NO: 331210 - DNA, 15 bp, Homo sapiens
aacaaattttttttt

SEQ ID NO: 331211 - DNA, 15 bp, Homo sapiens
gaacaaatttttttt

SEQ ID NO: 331212 - DNA, 15 bp, Homo sapiens
tgaacaaattttttt

SEQ ID NO: 331213 - DNA, 15 bp, Homo sapiens
atgaacaaatttttt

SEQ ID NO: 331214 - DNA, 15 bp, Homo sapiens
aatgaacaaattttt

SEQ ID NO: 331215 - DNA, 15 bp, Homo sapiens
aaatgaacaaatttt

SEQ ID NO: 331216 - DNA, 15 bp, Homo sapiens
gaaatgaacaaattt

SEQ ID NO: 331217 - DNA, 15 bp, Homo sapiens
tgaaatgaacaaatt

SEQ ID NO: 331218 - DNA, 15 bp, Homo sapiens
ctgaaatgaacaaat

SEQ ID NO: 331219 - DNA, 15 bp, Homo sapiens
tctgaaatgaacaaa

SEQ ID NO: 331220 - DNA, 15 bp, Homo sapiens
ttctgaaatgaacaa

SEQ ID NO: 331221 - DNA, 15 bp, Homo sapiens
tttctgaaatgaaca

SEQ ID NO: 331222 - DNA, 15 bp, Homo sapiens
ttttctgaaatgaac

SEQ ID NO: 331223 - DNA, 15 bp, Homo sapiens
cttttctgaaatgaa

SEQ ID NO: 331224 - DNA, 15 bp, Homo sapiens
tcttttctgaaatga

SEQ ID NO: 331225 - DNA, 15 bp, Homo sapiens
ttcttttctgaaatg

SEQ ID NO: 331226 - DNA, 15 bp, Homo sapiens
tttcttttctgaaat

SEQ ID NO: 331227 - DNA, 15 bp, Homo sapiens
ctttcttttctgaaa

SEQ ID NO: 331228 - DNA, 15 bp, Homo sapiens
gctttcttttctgaa

SEQ ID NO: 331229 - DNA, 15 bp, Homo sapiens
tgctttcttttctga

SEQ ID NO: 331230 - DNA, 15 bp, Homo sapiens
atgctttcttttctg

SEQ ID NO: 331231 - DNA, 15 bp, Homo sapiens
catgctttcttttct

SEQ ID NO: 331232 - DNA, 15 bp, Homo sapiens
ccatgctttcttttc

SEQ ID NO: 331233 - DNA, 15 bp, Homo sapiens
accatgctttctttt

SEQ ID NO: 331234 - DNA, 15 bp, Homo sapiens
caccatgctttcttt

SEQ ID NO: 331235 - DNA, 15 bp, Homo sapiens
ccaccatgctttctt

SEQ ID NO: 331236 - DNA, 15 bp, Homo sapiens
tccaccatgctttct

SEQ ID NO: 331237 - DNA, 15 bp, Homo sapiens
atccaccatgctttc

SEQ ID NO: 331238 - DNA, 15 bp, Homo sapiens
tatccaccatgcttt

SEQ ID NO: 331239 - DNA, 15 bp, Homo sapiens
ttatccaccatgctt

SEQ ID NO: 331240 - DNA, 15 bp, Homo sapiens
attatccaccatgct

SEQ ID NO: 331241 - DNA, 15 bp, Homo sapiens
aattatccaccatgc

SEQ ID NO: 331242 - DNA, 15 bp, Homo sapiens
taattatccaccatg

SEQ ID NO: 331243 - DNA, 15 bp, Homo sapiens
ctaattatccaccat

SEQ ID NO: 331244 - DNA, 15 bp, Homo sapiens
gctaattatccacca

SEQ ID NO: 331245 - DNA, 15 bp, Homo sapiens
tgctaattatccacc

SEQ ID NO: 331246 - DNA, 15 bp, Homo sapiens
gtgctaattatccac

SEQ ID NO: 331247 - DNA, 15 bp, Homo sapiens
agtgctaattatcca

SEQ ID NO: 331248 - DNA, 15 bp, Homo sapiens
aagtgctaattatcc

SEQ ID NO: 331249 - DNA, 15 bp, Homo sapiens
aaagtgctaattatc

SEQ ID NO: 331250 - DNA, 15 bp, Homo sapiens
taaagtgctaattat

SEQ ID NO: 331251 - DNA, 15 bp, Homo sapiens
ttaaagtgctaatta

SEQ ID NO: 331252 - DNA, 15 bp, Homo sapiens
tttaaagtgctaatt

SEQ ID NO: 331253 - DNA, 15 bp, Homo sapiens
ttttaaagtgctaat

SEQ ID NO: 331254 - DNA, 15 bp, Homo sapiens
cttttaaagtgctaa

SEQ ID NO: 331255 - DNA, 15 bp, Homo sapiens
acttttaaagtgcta

SEQ ID NO: 331256 - DNA, 15 bp, Homo sapiens
gacttttaaagtgct

SEQ ID NO: 331257 - DNA, 15 bp, Homo sapiens
ggacttttaaagtgc

SEQ ID NO: 331258 - DNA, 15 bp, Homo sapiens
tggacttttaaagtg

SEQ ID NO: 331259 - DNA, 15 bp, Homo sapiens
gtggacttttaaagt

SEQ ID NO: 331260 - DNA, 15 bp, Homo sapiens
ggtggacttttaaag

SEQ ID NO: 331261 - DNA, 15 bp, Homo sapiens
aggtggacttttaaa

SEQ ID NO: 331262 - DNA, 15 bp, Homo sapiens
caggtggacttttaa

SEQ ID NO: 331263 - DNA, 15 bp, Homo sapiens
acaggtggactttta

SEQ ID NO: 331264 - DNA, 15 bp, Homo sapiens
tacaggtggactttt

SEQ ID NO: 331265 - DNA, 15 bp, Homo sapiens
ttacaggtggacttt

SEQ ID NO: 331266 - DNA, 15 bp, Homo sapiens
gttacaggtggactt

SEQ ID NO: 331267 - DNA, 15 bp, Homo sapiens
tgttacaggtggact

SEQ ID NO: 331268 - DNA, 15 bp, Homo sapiens
gtgttacaggtggac

SEQ ID NO: 331269 - DNA, 15 bp, Homo sapiens
agtgttacaggtgga

SEQ ID NO: 331270 - DNA, 15 bp, Homo sapiens
aagtgttacaggtgg

SEQ ID NO: 331271 - DNA, 15 bp, Homo sapiens
gaagtgttacaggtg

SEQ ID NO: 331272 - DNA, 15 bp, Homo sapiens
tgaagtgttacaggt

SEQ ID NO: 331273 - DNA, 15 bp, Homo sapiens
gtgaagtgttacagg

SEQ ID NO: 331274 - DNA, 15 bp, Homo sapiens
agtgaagtgttacag

SEQ ID NO: 331275 - DNA, 15 bp, Homo sapiens
aagtgaagtgttaca

SEQ ID NO: 331276 - DNA, 15 bp, Homo sapiens
taagtgaagtgttac

SEQ ID NO: 331277 - DNA, 15 bp, Homo sapiens
ctaagtgaagtgtta

SEQ ID NO: 331278 - DNA, 15 bp, Homo sapiens
gctaagtgaagtgtt

SEQ ID NO: 331279 - DNA, 15 bp, Homo sapiens
ggctaagtgaagtgt

SEQ ID NO: 331280 - DNA, 15 bp, Homo sapiens
tggctaagtgaagtg

SEQ ID NO: 331281 - DNA, 15 bp, Homo sapiens
ctggctaagtgaagt

SEQ ID NO: 331282 - DNA, 15 bp, Homo sapiens
tctggctaagtgaag

SEQ ID NO: 331283 - DNA, 15 bp, Homo sapiens
ctctggctaagtgaa

SEQ ID NO: 331284 - DNA, 15 bp, Homo sapiens
cctctggctaagtga

SEQ ID NO: 331285 - DNA, 15 bp, Homo sapiens
gcctctggctaagtg

SEQ ID NO: 331286 - DNA, 15 bp, Homo sapiens
agcctctggctaagt

SEQ ID NO: 331287 - DNA, 15 bp, Homo sapiens
gagcctctggctaag

SEQ ID NO: 331288 - DNA, 15 bp, Homo sapiens
agagcctctggctaa

SEQ ID NO: 331289 - DNA, 15 bp, Homo sapiens
tagagcctctggcta

SEQ ID NO: 331290 - DNA, 15 bp, Homo sapiens
gtagagcctctggct

SEQ ID NO: 331291 - DNA, 15 bp, Homo sapiens
ggtagagcctctggc

SEQ ID NO: 331292 - DNA, 15 bp, Homo sapiens
aggtagagcctctgg

SEQ ID NO: 331293 - DNA, 15 bp, Homo sapiens
caggtagagcctctg

SEQ ID NO: 331294 - DNA, 15 bp, Homo sapiens
acaggtagagcctct

SEQ ID NO: 331295 - DNA, 15 bp, Homo sapiens
cacaggtagagcctc

SEQ ID NO: 331296 - DNA, 15 bp, Homo sapiens
gcacaggtagagcct

SEQ ID NO: 331297 - DNA, 15 bp, Homo sapiens
agcacaggtagagcc

SEQ ID NO: 331298 - DNA, 15 bp, Homo sapiens
cagcacaggtagagc

SEQ ID NO: 331299 - DNA, 15 bp, Homo sapiens
ccagcacaggtagag

SEQ ID NO: 331300 - DNA, 15 bp, Homo sapiens
gccagcacaggtaga

SEQ ID NO: 331301 - DNA, 15 bp, Homo sapiens
agccagcacaggtag

SEQ ID NO: 331302 - DNA, 15 bp, Homo sapiens
aagccagcacaggta

SEQ ID NO: 331303 - DNA, 15 bp, Homo sapiens
aaagccagcacaggt

SEQ ID NO: 331304 - DNA, 15 bp, Homo sapiens
aaaagccagcacagg

SEQ ID NO: 331305 - DNA, 15 bp, Homo sapiens
gaaaagccagcacag

SEQ ID NO: 331306 - DNA, 15 bp, Homo sapiens
agaaaagccagcaca

SEQ ID NO: 331307 - DNA, 15 bp, Homo sapiens
gagaaaagccagcac

SEQ ID NO: 331308 - DNA, 15 bp, Homo sapiens
tgagaaaagccagca

SEQ ID NO: 331309 - DNA, 15 bp, Homo sapiens
ttgagaaaagccagc

SEQ ID NO: 331310 - DNA, 15 bp, Homo sapiens
tttgagaaaagccag

SEQ ID NO: 331311 - DNA, 15 bp, Homo sapiens
ctttgagaaaagcca

SEQ ID NO: 331312 - DNA, 15 bp, Homo sapiens
gctttgagaaaagcc

SEQ ID NO: 331313 - DNA, 15 bp, Homo sapiens
ggctttgagaaaagc

SEQ ID NO: 331314 - DNA, 15 bp, Homo sapiens
tggctttgagaaaag

SEQ ID NO: 331315 - DNA, 15 bp, Homo sapiens
atggctttgagaaaa

SEQ ID NO: 331316 - DNA, 15 bp, Homo sapiens
gatggctttgagaaa

SEQ ID NO: 331317 - DNA, 15 bp, Homo sapiens
agatggctttgagaa

SEQ ID NO: 331318 - DNA, 15 bp, Homo sapiens
cagatggctttgaga

SEQ ID NO: 331319 - DNA, 15 bp, Homo sapiens
acagatggctttgag

SEQ ID NO: 331320 - DNA, 15 bp, Homo sapiens
gacagatggctttga

SEQ ID NO: 331321 - DNA, 15 bp, Homo sapiens
ggacagatggctttg

SEQ ID NO: 331322 - DNA, 15 bp, Homo sapiens
aggacagatggcttt

SEQ ID NO: 331323 - DNA, 15 bp, Homo sapiens
taggacagatggctt

SEQ ID NO: 331324 - DNA, 15 bp, Homo sapiens
ctaggacagatggct

SEQ ID NO: 331325 - DNA, 15 bp, Homo sapiens
cctaggacagatggc

SEQ ID NO: 331326 - DNA, 15 bp, Homo sapiens
tcctaggacagatgg

SEQ ID NO: 331327 - DNA, 15 bp, Homo sapiens
ctcctaggacagatg

SEQ ID NO: 331328 - DNA, 15 bp, Homo sapiens
actcctaggacagat

SEQ ID NO: 331329 - DNA, 15 bp, Homo sapiens
tactcctaggacaga

SEQ ID NO: 331330 - DNA, 15 bp, Homo sapiens
atactcctaggacag

SEQ ID NO: 331331 - DNA, 15 bp, Homo sapiens
catactcctaggaca

SEQ ID NO: 331332 - DNA, 15 bp, Homo sapiens
acatactcctaggac

SEQ ID NO: 331333 - DNA, 15 bp, Homo sapiens
tacatactcctagga

SEQ ID NO: 331334 - DNA, 15 bp, Homo sapiens
gtacatactcctagg

SEQ ID NO: 331335 - DNA, 15 bp, Homo sapiens
tgtacatactcctag

SEQ ID NO: 331336 - DNA, 15 bp, Homo sapiens
ctgtacatactccta

SEQ ID NO: 331337 - DNA, 15 bp, Homo sapiens
actgtacatactcct

SEQ ID NO: 331338 - DNA, 15 bp, Homo sapiens
tactgtacatactcc

SEQ ID NO: 331339 - DNA, 15 bp, Homo sapiens
ttactgtacatactc

SEQ ID NO: 331340 - DNA, 15 bp, Homo sapiens
tttactgtacatact

SEQ ID NO: 331341 - DNA, 15 bp, Homo sapiens
ctttactgtacatac

SEQ ID NO: 331342 - DNA, 15 bp, Homo sapiens
tctttactgtacata

SEQ ID NO: 331343 - DNA, 15 bp, Homo sapiens
atctttactgtacat

SEQ ID NO: 331344 - DNA, 15 bp, Homo sapiens
tatctttactgtaca

SEQ ID NO: 331345 - DNA, 15 bp, Homo sapiens
ttatctttactgtac

SEQ ID NO: 331346 - DNA, 15 bp, Homo sapiens
gttatctttactgta

SEQ ID NO: 331347 - DNA, 15 bp, Homo sapiens
ggttatctttactgt

SEQ ID NO: 331348 - DNA, 15 bp, Homo sapiens
aggttatctttactg

SEQ ID NO: 331349 - DNA, 15 bp, Homo sapiens
aaggttatctttact

SEQ ID NO: 331350 - DNA, 15 bp, Homo sapiens
caaggttatctttac

SEQ ID NO: 331351 - DNA, 15 bp, Homo sapiens
ccaaggttatcttta

SEQ ID NO: 331352 - DNA, 15 bp, Homo sapiens
cccaaggttatcttt

SEQ ID NO: 331353 - DNA, 15 bp, Homo sapiens
gcccaaggttatctt

SEQ ID NO: 331354 - DNA, 15 bp, Homo sapiens
tgcccaaggttatct

SEQ ID NO: 331355 - DNA, 15 bp, Homo sapiens
gtgcccaaggttatc

SEQ ID NO: 331356 - DNA, 15 bp, Homo sapiens
tgtgcccaaggttat

SEQ ID NO: 331357 - DNA, 15 bp, Homo sapiens
gtgtgcccaaggtta

SEQ ID NO: 331358 - DNA, 15 bp, Homo sapiens
tgtgtgcccaaggtt

SEQ ID NO: 331359 - DNA, 15 bp, Homo sapiens
ctgtgtgcccaaggt

SEQ ID NO: 331360 - DNA, 15 bp, Homo sapiens
tctgtgtgcccaagg

SEQ ID NO: 331361 - DNA, 15 bp, Homo sapiens
ttctgtgtgcccaag

SEQ ID NO: 331362 - DNA, 15 bp, Homo sapiens
tttctgtgtgcccaa

SEQ ID NO: 331363 - DNA, 15 bp, Homo sapiens
gtttctgtgtgccca

SEQ ID NO: 331364 - DNA, 15 bp, Homo sapiens
cgtttctgtgtgccc

SEQ ID NO: 331365 - DNA, 15 bp, Homo sapiens
gcgtttctgtgtgcc

SEQ ID NO: 331366 - DNA, 15 bp, Homo sapiens
agcgtttctgtgtgc

SEQ ID NO: 331367 - DNA, 15 bp, Homo sapiens
aagcgtttctgtgtg

SEQ ID NO: 331368 - DNA, 15 bp, Homo sapiens
taagcgtttctgtgt

SEQ ID NO: 331369 - DNA, 15 bp, Homo sapiens
ttaagcgtttctgtg

SEQ ID NO: 331370 - DNA, 15 bp, Homo sapiens
tttaagcgtttctgt

SEQ ID NO: 331371 - DNA, 15 bp, Homo sapiens
atttaagcgtttctg

SEQ ID NO: 331372 - DNA, 15 bp, Homo sapiens
aatttaagcgtttct

SEQ ID NO: 331373 - DNA, 15 bp, Homo sapiens
taatttaagcgtttc

SEQ ID NO: 331374 - DNA, 15 bp, Homo sapiens
ataatttaagcgttt

SEQ ID NO: 331375 - DNA, 15 bp, Homo sapiens
gataatttaagcgtt

SEQ ID NO: 331376 - DNA, 15 bp, Homo sapiens
agataatttaagcgt

SEQ ID NO: 331377 - DNA, 15 bp, Homo sapiens
aagataatttaagcg

SEQ ID NO: 331378 - DNA, 15 bp, Homo sapiens
gaagataatttaagc

SEQ ID NO: 331379 - DNA, 15 bp, Homo sapiens
tgaagataatttaag

SEQ ID NO: 331380 - DNA, 15 bp, Homo sapiens
ctgaagataatttaa

SEQ ID NO: 331381 - DNA, 15 bp, Homo sapiens
actgaagataattta

SEQ ID NO: 331382 - DNA, 15 bp, Homo sapiens
tactgaagataattt

SEQ ID NO: 331383 - DNA, 15 bp, Homo sapiens
ctactgaagataatt

SEQ ID NO: 331384 - DNA, 15 bp, Homo sapiens
actactgaagataat

SEQ ID NO: 331385 - DNA, 15 bp, Homo sapiens
gactactgaagataa

SEQ ID NO: 331386 - DNA, 15 bp, Homo sapiens
agactactgaagata

SEQ ID NO: 331387 - DNA, 15 bp, Homo sapiens
gagactactgaagat

SEQ ID NO: 331388 - DNA, 15 bp, Homo sapiens
tgagactactgaaga

SEQ ID NO: 331389 - DNA, 15 bp, Homo sapiens
ttgagactactgaag

SEQ ID NO: 331390 - DNA, 15 bp, Homo sapiens
attgagactactgaa

SEQ ID NO: 331391 - DNA, 15 bp, Homo sapiens
aattgagactactga

SEQ ID NO: 331392 - DNA, 15 bp, Homo sapiens
aaattgagactactg

SEQ ID NO: 331393 - DNA, 15 bp, Homo sapiens
taaattgagactact

SEQ ID NO: 331394 - DNA, 15 bp, Homo sapiens
ttaaattgagactac

SEQ ID NO: 331395 - DNA, 15 bp, Homo sapiens
cttaaattgagacta

SEQ ID NO: 331396 - DNA, 15 bp, Homo sapiens
gcttaaattgagact

SEQ ID NO: 331397 - DNA, 15 bp, Homo sapiens
tgcttaaattgagac

SEQ ID NO: 331398 - DNA, 15 bp, Homo sapiens
atgcttaaattgaga

SEQ ID NO: 331399 - DNA, 15 bp, Homo sapiens
catgcttaaattgag

SEQ ID NO: 331400 - DNA, 15 bp, Homo sapiens
tcatgcttaaattga

SEQ ID NO: 331401 - DNA, 15 bp, Homo sapiens
ctcatgcttaaattg

SEQ ID NO: 331402 - DNA, 15 bp, Homo sapiens
cctcatgcttaaatt

SEQ ID NO: 331403 - DNA, 15 bp, Homo sapiens
gcctcatgcttaaat

SEQ ID NO: 331404 - DNA, 15 bp, Homo sapiens
tgcctcatgcttaaa

SEQ ID NO: 331405 - DNA, 15 bp, Homo sapiens
ttgcctcatgcttaa

SEQ ID NO: 331406 - DNA, 15 bp, Homo sapiens
tttgcctcatgctta

SEQ ID NO: 331407 - DNA, 15 bp, Homo sapiens
atttgcctcatgctt

SEQ ID NO: 331408 - DNA, 15 bp, Homo sapiens
aatttgcctcatgct

SEQ ID NO: 331409 - DNA, 15 bp, Homo sapiens
caatttgcctcatgc

SEQ ID NO: 331410 - DNA, 15 bp, Homo sapiens
acaatttgcctcatg

SEQ ID NO: 331411 - DNA, 15 bp, Homo sapiens
cacaatttgcctcat

SEQ ID NO: 331412 - DNA, 15 bp, Homo sapiens
acacaatttgcctca

SEQ ID NO: 331413 - DNA, 15 bp, Homo sapiens
aacacaatttgcctc

SEQ ID NO: 331414 - DNA, 15 bp, Homo sapiens
aaacacaatttgcct

SEQ ID NO: 331415 - DNA, 15 bp, Homo sapiens
gaaacacaatttgcc

SEQ ID NO: 331416 - DNA, 15 bp, Homo sapiens
agaaacacaatttgc

SEQ ID NO: 331417 - DNA, 15 bp, Homo sapiens
tagaaacacaatttg

SEQ ID NO: 331418 - DNA, 15 bp, Homo sapiens
ttagaaacacaattt

SEQ ID NO: 331419 - DNA, 15 bp, Homo sapiens
gttagaaacacaatt

SEQ ID NO: 331420 - DNA, 15 bp, Homo sapiens
tgttagaaacacaat

SEQ ID NO: 331421 - DNA, 15 bp, Homo sapiens
ttgttagaaacacaa

SEQ ID NO: 331422 - DNA, 15 bp, Homo sapiens
tttgttagaaacaca

SEQ ID NO: 331423 - DNA, 15 bp, Homo sapiens
ttttgttagaaacac

SEQ ID NO: 331424 - DNA, 15 bp, Homo sapiens
gttttgttagaaaca

SEQ ID NO: 331425 - DNA, 15 bp, Homo sapiens
tgttttgttagaaac

SEQ ID NO: 331426 - DNA, 15 bp, Homo sapiens
ctgttttgttagaaa

SEQ ID NO: 331427 - DNA, 15 bp, Homo sapiens
cctgttttgttagaa

SEQ ID NO: 331428 - DNA, 15 bp, Homo sapiens
acctgttttgttaga

SEQ ID NO: 331429 - DNA, 15 bp, Homo sapiens
aacctgttttgttag

SEQ ID NO: 331430 - DNA, 15 bp, Homo sapiens
caacctgttttgtta

SEQ ID NO: 331431 - DNA, 15 bp, Homo sapiens
ccaacctgttttgtt

SEQ ID NO: 331432 - DNA, 15 bp, Homo sapiens
tccaacctgttttgt

SEQ ID NO: 331433 - DNA, 15 bp, Homo sapiens
ttccaacctgttttg

SEQ ID NO: 331434 - DNA, 15 bp, Homo sapiens
cttccaacctgtttt

SEQ ID NO: 331435 - DNA, 15 bp, Homo sapiens
tcttccaacctgttt

SEQ ID NO: 331436 - DNA, 15 bp, Homo sapiens
atcttccaacctgtt

SEQ ID NO: 331437 - DNA, 15 bp, Homo sapiens
tatcttccaacctgt

SEQ ID NO: 331438 - DNA, 15 bp, Homo sapiens
ttatcttccaacctg

SEQ ID NO: 331439 - DNA, 15 bp, Homo sapiens
tttatcttccaacct

SEQ ID NO: 331440 - DNA, 15 bp, Homo sapiens
ttttatcttccaacc

SEQ ID NO: 331441 - DNA, 15 bp, Homo sapiens
tttttatcttccaac

SEQ ID NO: 331442 - DNA, 15 bp, Homo sapiens
ttttttatcttccaa

SEQ ID NO: 331443 - DNA, 15 bp, Homo sapiens
attttttatcttcca

SEQ ID NO: 331444 - DNA, 15 bp, Homo sapiens
tattttttatcttcc

SEQ ID NO: 331445 - DNA, 15 bp, Homo sapiens
gtattttttatcttc

SEQ ID NO: 331446 - DNA, 15 bp, Homo sapiens
ggtattttttatctt

SEQ ID NO: 331447 - DNA, 15 bp, Homo sapiens
tggtattttttatct

SEQ ID NO: 331448 - DNA, 15 bp, Homo sapiens
ctggtattttttatc

SEQ ID NO: 331449 - DNA, 15 bp, Homo sapiens
actggtattttttat

SEQ ID NO: 331450 - DNA, 15 bp, Homo sapiens
tactggtatttttta

SEQ ID NO: 331451 - DNA, 15 bp, Homo sapiens
atactggtatttttt

SEQ ID NO: 331452 - DNA, 15 bp, Homo sapiens
aatactggtattttt

SEQ ID NO: 331453 - DNA, 15 bp, Homo sapiens
aaatactggtatttt

SEQ ID NO: 331454 - DNA, 15 bp, Homo sapiens
taaatactggtattt

SEQ ID NO: 331455 - DNA, 15 bp, Homo sapiens
ttaaatactggtatt

SEQ ID NO: 331456 - DNA, 15 bp, Homo sapiens
tttaaatactggtat

SEQ ID NO: 331457 - DNA, 15 bp, Homo sapiens
ttttaaatactggta

SEQ ID NO: 331458 - DNA, 15 bp, Homo sapiens
cttttaaatactggt

SEQ ID NO: 331459 - DNA, 15 bp, Homo sapiens
ccttttaaatactgg

SEQ ID NO: 331460 - DNA, 15 bp, Homo sapiens
tccttttaaatactg

SEQ ID NO: 331461 - DNA, 15 bp, Homo sapiens
ttccttttaaatact

SEQ ID NO: 331462 - DNA, 15 bp, Homo sapiens
tttccttttaaatac

SEQ ID NO: 331463 - DNA, 15 bp, Homo sapiens
gtttccttttaaata

SEQ ID NO: 331464 - DNA, 15 bp, Homo sapiens
tgtttccttttaaat

SEQ ID NO: 331465 - DNA, 15 bp, Homo sapiens
atgtttccttttaaa

SEQ ID NO: 331466 - DNA, 15 bp, Homo sapiens
aatgtttccttttaa

SEQ ID NO: 331467 - DNA, 15 bp, Homo sapiens
gaatgtttcctttta

SEQ ID NO: 331468 - DNA, 15 bp, Homo sapiens
tgaatgtttcctttt

SEQ ID NO: 331469 - DNA, 15 bp, Homo sapiens
ctgaatgtttccttt

SEQ ID NO: 331470 - DNA, 15 bp, Homo sapiens
actgaatgtttcctt

SEQ ID NO: 331471 - DNA, 15 bp, Homo sapiens
aactgaatgtttcct

SEQ ID NO: 331472 - DNA, 15 bp, Homo sapiens
aaactgaatgtttcc

SEQ ID NO: 331473 - DNA, 15 bp, Homo sapiens
aaaactgaatgtttc

SEQ ID NO: 331474 - DNA, 15 bp, Homo sapiens
gaaaactgaatgttt

SEQ ID NO: 331475 - DNA, 15 bp, Homo sapiens
agaaaactgaatgtt

SEQ ID NO: 331476 - DNA, 15 bp, Homo sapiens
cagaaaactgaatgt

SEQ ID NO: 331477 - DNA, 15 bp, Homo sapiens
ccagaaaactgaatg

SEQ ID NO: 331478 - DNA, 15 bp, Homo sapiens
tccagaaaactgaat

SEQ ID NO: 331479 - DNA, 15 bp, Homo sapiens
ttccagaaaactgaa

SEQ ID NO: 331480 - DNA, 15 bp, Homo sapiens
tttccagaaaactga

SEQ ID NO: 331481 - DNA, 15 bp, Homo sapiens
ttttccagaaaactg

SEQ ID NO: 331482 - DNA, 15 bp, Homo sapiens
gttttccagaaaact

SEQ ID NO: 331483 - DNA, 15 bp, Homo sapiens
agttttccagaaaac

SEQ ID NO: 331484 - DNA, 15 bp, Homo sapiens
cagttttccagaaaa

SEQ ID NO: 331485 - DNA, 15 bp, Homo sapiens
ccagttttccagaaa

SEQ ID NO: 331486 - DNA, 15 bp, Homo sapiens
tccagttttccagaa

SEQ ID NO: 331487 - DNA, 15 bp, Homo sapiens
ttccagttttccaga

SEQ ID NO: 331488 - DNA, 15 bp, Homo sapiens
tttccagttttccag

SEQ ID NO: 331489 - DNA, 15 bp, Homo sapiens
ttttccagttttcca

SEQ ID NO: 331490 - DNA, 15 bp, Homo sapiens
tttttccagttttcc

SEQ ID NO: 331491 - DNA, 15 bp, Homo sapiens
ttttttccagttttc

SEQ ID NO: 331492 - DNA, 15 bp, Homo sapiens
tttttttccagtttt

SEQ ID NO: 331493 - DNA, 15 bp, Homo sapiens
gtttttttccagttt

SEQ ID NO: 331494 - DNA, 15 bp, Homo sapiens
ggtttttttccagtt

SEQ ID NO: 331495 - DNA, 15 bp, Homo sapiens
tggtttttttccagt

SEQ ID NO: 331496 - DNA, 15 bp, Homo sapiens
atggtttttttccag

SEQ ID NO: 331497 - DNA, 15 bp, Homo sapiens
gatggtttttttcca

SEQ ID NO: 331498 - DNA, 15 bp, Homo sapiens
tgatggtttttttcc

SEQ ID NO: 331499 - DNA, 15 bp, Homo sapiens
ttgatggtttttttc

SEQ ID NO: 331500 - DNA, 15 bp, Homo sapiens
tttgatggttttttt

SEQ ID NO: 331501 - DNA, 15 bp, Homo sapiens
atttgatggtttttt

SEQ ID NO: 331502 - DNA, 15 bp, Homo sapiens
tatttgatggttttt

SEQ ID NO: 331503 - DNA, 15 bp, Homo sapiens
ttatttgatggtttt

SEQ ID NO: 331504 - DNA, 15 bp, Homo sapiens
gttatttgatggttt

SEQ ID NO: 331505 - DNA, 15 bp, Homo sapiens
agttatttgatggtt

SEQ ID NO: 331506 - DNA, 15 bp, Homo sapiens
cagttatttgatggt

SEQ ID NO: 331507 - DNA, 15 bp, Homo sapiens
acagttatttgatgg

SEQ ID NO: 331508 - DNA, 15 bp, Homo sapiens
cacagttatttgatg

SEQ ID NO: 331509 - DNA, 15 bp, Homo sapiens
tcacagttatttgat

SEQ ID NO: 331510 - DNA, 15 bp, Homo sapiens
atcacagttatttga

SEQ ID NO: 331511 - DNA, 15 bp, Homo sapiens
tatcacagttatttg

SEQ ID NO: 331512 - DNA, 15 bp, Homo sapiens
atatcacagttattt

SEQ ID NO: 331513 - DNA, 15 bp, Homo sapiens
gatatcacagttatt

SEQ ID NO: 331514 - DNA, 15 bp, Homo sapiens
tgatatcacagttat

SEQ ID NO: 331515 - DNA, 15 bp, Homo sapiens
gtgatatcacagtta

SEQ ID NO: 331516 - DNA, 15 bp, Homo sapiens
ggtgatatcacagtt

SEQ ID NO: 331517 - DNA, 15 bp, Homo sapiens
cggtgatatcacagt

SEQ ID NO: 331518 - DNA, 15 bp, Homo sapiens
tcggtgatatcacag

SEQ ID NO: 331519 - DNA, 15 bp, Homo sapiens
ttcggtgatatcaca

SEQ ID NO: 331520 - DNA, 15 bp, Homo sapiens
attcggtgatatcac

SEQ ID NO: 331521 - DNA, 15 bp, Homo sapiens
tattcggtgatatca

SEQ ID NO: 331522 - DNA, 15 bp, Homo sapiens
atattcggtgatatc

SEQ ID NO: 331523 - DNA, 15 bp, Homo sapiens
tatattcggtgatat

SEQ ID NO: 331524 - DNA, 15 bp, Homo sapiens
atatattcggtgata

SEQ ID NO: 331525 - DNA, 15 bp, Homo sapiens
catatattcggtgat

SEQ ID NO: 331526 - DNA, 15 bp, Homo sapiens
gcatatattcggtga

SEQ ID NO: 331527 - DNA, 15 bp, Homo sapiens
ggcatatattcggtg

SEQ ID NO: 331528 - DNA, 15 bp, Homo sapiens
tggcatatattcggt

SEQ ID NO: 331529 - DNA, 15 bp, Homo sapiens
ctggcatatattcgg

SEQ ID NO: 331530 - DNA, 15 bp, Homo sapiens
cctggcatatattcg

SEQ ID NO: 331531 - DNA, 15 bp, Homo sapiens
tcctggcatatattc

SEQ ID NO: 331532 - DNA, 15 bp, Homo sapiens
ttcctggcatatatt

SEQ ID NO: 331533 - DNA, 15 bp, Homo sapiens
attcctggcatatat

SEQ ID NO: 331534 - DNA, 15 bp, Homo sapiens
gattcctggcatata

SEQ ID NO: 331535 - DNA, 15 bp, Homo sapiens
agattcctggcatat

SEQ ID NO: 331536 - DNA, 15 bp, Homo sapiens
gagattcctggcata

SEQ ID NO: 331537 - DNA, 15 bp, Homo sapiens
tgagattcctggcat

SEQ ID NO: 331538 - DNA, 15 bp, Homo sapiens
ttgagattcctggca

SEQ ID NO: 331539 - DNA, 15 bp, Homo sapiens
tttgagattcctggc

SEQ ID NO: 331540 - DNA, 15 bp, Homo sapiens
ttttgagattcctgg

SEQ ID NO: 331541 - DNA, 15 bp, Homo sapiens
tttttgagattcctg

SEQ ID NO: 331542 - DNA, 15 bp, Homo sapiens
ttttttgagattcct

SEQ ID NO: 331543 - DNA, 15 bp, Homo sapiens
tttttttgagattcc

SEQ ID NO: 331544 - DNA, 15 bp, Homo sapiens
gtttttttgagattc

SEQ ID NO: 331545 - DNA, 15 bp, Homo sapiens
ggtttttttgagatt

SEQ ID NO: 331546 - DNA, 15 bp, Homo sapiens
tggtttttttgagat

SEQ ID NO: 331547 - DNA, 15 bp, Homo sapiens
gtggtttttttgaga

SEQ ID NO: 331548 - DNA, 15 bp, Homo sapiens
agtggtttttttgag

SEQ ID NO: 331549 - DNA, 15 bp, Homo sapiens
gagtggtttttttga

SEQ ID NO: 331550 - DNA, 15 bp, Homo sapiens
tgagtggtttttttg

SEQ ID NO: 331551 - DNA, 15 bp, Homo sapiens
gtgagtggttttttt

SEQ ID NO: 331552 - DNA, 15 bp, Homo sapiens
ggtgagtggtttttt

SEQ ID NO: 331553 - DNA, 15 bp, Homo sapiens
tggtgagtggttttt

SEQ ID NO: 331554 - DNA, 15 bp, Homo sapiens
ctggtgagtggtttt

SEQ ID NO: 331555 - DNA, 15 bp, Homo sapiens
cctggtgagtggttt

SEQ ID NO: 331556 - DNA, 15 bp, Homo sapiens
gcctggtgagtggtt

SEQ ID NO: 331557 - DNA, 15 bp, Homo sapiens
agcctggtgagtggt

SEQ ID NO: 331558 - DNA, 15 bp, Homo sapiens
cagcctggtgagtgg

SEQ ID NO: 331559 - DNA, 15 bp, Homo sapiens
ccagcctggtgagtg

SEQ ID NO: 331560 - DNA, 15 bp, Homo sapiens
cccagcctggtgagt

SEQ ID NO: 331561 - DNA, 15 bp, Homo sapiens
gcccagcctggtgag

SEQ ID NO: 331562 - DNA, 15 bp, Homo sapiens
tgcccagcctggtga

SEQ ID NO: 331563 - DNA, 15 bp, Homo sapiens
atgcccagcctggtg

SEQ ID NO: 331564 - DNA, 15 bp, Homo sapiens
catgcccagcctggt

SEQ ID NO: 331565 - DNA, 15 bp, Homo sapiens
ccatgcccagcctgg

SEQ ID NO: 331566 - DNA, 15 bp, Homo sapiens
accatgcccagcctg

SEQ ID NO: 331567 - DNA, 15 bp, Homo sapiens
caccatgcccagcct

SEQ ID NO: 331568 - DNA, 15 bp, Homo sapiens
ccaccatgcccagcc

SEQ ID NO: 331569 - DNA, 15 bp, Homo sapiens
gccaccatgcccagc

SEQ ID NO: 331570 - DNA, 15 bp, Homo sapiens
agccaccatgcccag

SEQ ID NO: 331571 - DNA, 15 bp, Homo sapiens
gagccaccatgccca

SEQ ID NO: 331572 - DNA, 15 bp, Homo sapiens
atgagccaccatgcc

SEQ ID NO: 331573 - DNA, 15 bp, Homo sapiens
catgagccaccatgc

SEQ ID NO: 331574 - DNA, 15 bp, Homo sapiens
gcatgagccaccatg

SEQ ID NO: 331575 - DNA, 15 bp, Homo sapiens
ggcatgagccaccat

SEQ ID NO: 331576 - DNA, 15 bp, Homo sapiens
aggcatgagccacca

SEQ ID NO: 331577 - DNA, 15 bp, Homo sapiens
acccgcctcggcctc

SEQ ID NO: 331578 - DNA, 15 bp, Homo sapiens
cacccgcctcggcct

SEQ ID NO: 331579 - DNA, 15 bp, Homo sapiens
ccacccgcctcggcc

SEQ ID NO: 331580 - DNA, 15 bp, Homo sapiens
tccacccgcctcggc

SEQ ID NO: 331581 - DNA, 15 bp, Homo sapiens
ggtgatccacccgcc

SEQ ID NO: 331582 - DNA, 15 bp, Homo sapiens
aggtgatccacccgc

SEQ ID NO: 331583 - DNA, 15 bp, Homo sapiens
caggtgatccacccg

SEQ ID NO: 331584 - DNA, 15 bp, Homo sapiens
tctgacctcaggtga

SEQ ID NO: 331585 - DNA, 15 bp, Homo sapiens
ttctgacctcaggtg

SEQ ID NO: 331586 - DNA, 15 bp, Homo sapiens
cttctgacctcaggt

SEQ ID NO: 331587 - DNA, 15 bp, Homo sapiens
acttctgacctcagg

SEQ ID NO: 331588 - DNA, 15 bp, Homo sapiens
aacttctgacctcag

SEQ ID NO: 331589 - DNA, 15 bp, Homo sapiens
gaacttctgacctca

SEQ ID NO: 331590 - DNA, 15 bp, Homo sapiens
cgaacttctgacctc

SEQ ID NO: 331591 - DNA, 15 bp, Homo sapiens
tcgaacttctgacct

SEQ ID NO: 331592 - DNA, 15 bp, Homo sapiens
ctcgaacttctgacc

SEQ ID NO: 331593 - DNA, 15 bp, Homo sapiens
tctcgaacttctgac

SEQ ID NO: 331594 - DNA, 15 bp, Homo sapiens
ctctcgaacttctga

SEQ ID NO: 331595 - DNA, 15 bp, Homo sapiens
actctcgaacttctg

SEQ ID NO: 331596 - DNA, 15 bp, Homo sapiens
tactctcgaacttct

SEQ ID NO: 331597 - DNA, 15 bp, Homo sapiens
ctactctcgaacttc

SEQ ID NO: 331598 - DNA, 15 bp, Homo sapiens
gctactctcgaactt

SEQ ID NO: 331599 - DNA, 15 bp, Homo sapiens
ggctactctcgaact

SEQ ID NO: 331600 - DNA, 15 bp, Homo sapiens
aggctactctcgaac

SEQ ID NO: 331601 - DNA, 15 bp, Homo sapiens
caggctactctcgaa

SEQ ID NO: 331602 - DNA, 15 bp, Homo sapiens
ccaggctactctcga

SEQ ID NO: 331603 - DNA, 15 bp, Homo sapiens
gccaggctactctcg

SEQ ID NO: 331604 - DNA, 15 bp, Homo sapiens
ggccaggctactctc

SEQ ID NO: 331605 - DNA, 15 bp, Homo sapiens
tggccaggctactct

SEQ ID NO: 331606 - DNA, 15 bp, Homo sapiens
ttggccaggctactc

SEQ ID NO: 331607 - DNA, 15 bp, Homo sapiens
tttggccaggctact

SEQ ID NO: 331608 - DNA, 15 bp, Homo sapiens
ttttggccaggctac

SEQ ID NO: 331609 - DNA, 15 bp, Homo sapiens
attttggccaggcta

SEQ ID NO: 331610 - DNA, 15 bp, Homo sapiens
gccattttggccagg

SEQ ID NO: 331611 - DNA, 15 bp, Homo sapiens
tgccattttggccag

SEQ ID NO: 331612 - DNA, 15 bp, Homo sapiens
ttgccattttggcca

SEQ ID NO: 331613 - DNA, 15 bp, Homo sapiens
tttgccattttggcc

SEQ ID NO: 331614 - DNA, 15 bp, Homo sapiens
ttttgccattttggc

SEQ ID NO: 331615 - DNA, 15 bp, Homo sapiens
gttttgccattttgg

SEQ ID NO: 331616 - DNA, 15 bp, Homo sapiens
ggttttgccattttg

SEQ ID NO: 331617 - DNA, 15 bp, Homo sapiens
gggttttgccatttt

SEQ ID NO: 331618 - DNA, 15 bp, Homo sapiens
agggttttgccattt

SEQ ID NO: 331619 - DNA, 15 bp, Homo sapiens
cagggttttgccatt

SEQ ID NO: 331620 - DNA, 15 bp, Homo sapiens
acagggttttgccat

SEQ ID NO: 331621 - DNA, 15 bp, Homo sapiens
gacagggttttgcca

SEQ ID NO: 331622 - DNA, 15 bp, Homo sapiens
agacagggttttgcc

SEQ ID NO: 331623 - DNA, 15 bp, Homo sapiens
gagacagggttttgc

SEQ ID NO: 331624 - DNA, 15 bp, Homo sapiens
agagacagggttttg

SEQ ID NO: 331625 - DNA, 15 bp, Homo sapiens
tagagacagggtttt

SEQ ID NO: 331626 - DNA, 15 bp, Homo sapiens
atttttgtgttttta

SEQ ID NO: 331627 - DNA, 15 bp, Homo sapiens
aatttttgtgttttt

SEQ ID NO: 331628 - DNA, 15 bp, Homo sapiens
taatttttgtgtttt

SEQ ID NO: 331629 - DNA, 15 bp, Homo sapiens
ctaatttttgtgttt

SEQ ID NO: 331630 - DNA, 15 bp, Homo sapiens
gctaatttttgtgtt

SEQ ID NO: 331631 - DNA, 15 bp, Homo sapiens
agctaatttttgtgt

SEQ ID NO: 331632 - DNA, 15 bp, Homo sapiens
cagctaatttttgtg

SEQ ID NO: 331633 - DNA, 15 bp, Homo sapiens
atgcccagctaattt

SEQ ID NO: 331634 - DNA, 15 bp, Homo sapiens
catgcccagctaatt

SEQ ID NO: 331635 - DNA, 15 bp, Homo sapiens
tgccaccatgcccag

SEQ ID NO: 331636 - DNA, 15 bp, Homo sapiens
atgccaccatgccca

SEQ ID NO: 331637 - DNA, 15 bp, Homo sapiens
catgccaccatgccc

SEQ ID NO: 331638 - DNA, 15 bp, Homo sapiens
gcatgccaccatgcc

SEQ ID NO: 331639 - DNA, 15 bp, Homo sapiens
cgcatgccaccatgc

SEQ ID NO: 331640 - DNA, 15 bp, Homo sapiens
gcgcatgccaccatg

SEQ ID NO: 331641 - DNA, 15 bp, Homo sapiens
ggcgcatgccaccat

SEQ ID NO: 331642 - DNA, 15 bp, Homo sapiens
aggcgcatgccacca

SEQ ID NO: 331643 - DNA, 15 bp, Homo sapiens
caggcgcatgccacc

SEQ ID NO: 331644 - DNA, 15 bp, Homo sapiens
acaggcgcatgccac

SEQ ID NO: 331645 - DNA, 15 bp, Homo sapiens
tacaggcgcatgcca

SEQ ID NO: 331646 - DNA, 15 bp, Homo sapiens
ctacaggcgcatgcc

SEQ ID NO: 331647 - DNA, 15 bp, Homo sapiens
actacaggcgcatgc

SEQ ID NO: 331648 - DNA, 15 bp, Homo sapiens
gactacaggcgcatg

SEQ ID NO: 331649 - DNA, 15 bp, Homo sapiens
ggactacaggcgcat

SEQ ID NO: 331650 - DNA, 15 bp, Homo sapiens
gggactacaggcgca

SEQ ID NO: 331651 - DNA, 15 bp, Homo sapiens
cgcctcccgagtagc

SEQ ID NO: 331652 - DNA, 15 bp, Homo sapiens
tcgcctcccgagtag

SEQ ID NO: 331653 - DNA, 15 bp, Homo sapiens
ctcgcctcccgagta

SEQ ID NO: 331654 - DNA, 15 bp, Homo sapiens
cctcgcctcccgagt

SEQ ID NO: 331655 - DNA, 15 bp, Homo sapiens
acctcgcctcccgag

SEQ ID NO: 331656 - DNA, 15 bp, Homo sapiens
tacctcgcctcccga

SEQ ID NO: 331657 - DNA, 15 bp, Homo sapiens
gtacctcgcctcccg

SEQ ID NO: 331658 - DNA, 15 bp, Homo sapiens
cgtacctcgcctccc

SEQ ID NO: 331659 - DNA, 15 bp, Homo sapiens
tcgtacctcgcctcc

SEQ ID NO: 331660 - DNA, 15 bp, Homo sapiens
ctcgtacctcgcctc

SEQ ID NO: 331661 - DNA, 15 bp, Homo sapiens
tctcgtacctcgcct

SEQ ID NO: 331662 - DNA, 15 bp, Homo sapiens
ttctcgtacctcgcc

SEQ ID NO: 331663 - DNA, 15 bp, Homo sapiens
attctcgtacctcgc

SEQ ID NO: 331664 - DNA, 15 bp, Homo sapiens
aattctcgtacctcg

SEQ ID NO: 331665 - DNA, 15 bp, Homo sapiens
caattctcgtacctc

SEQ ID NO: 331666 - DNA, 15 bp, Homo sapiens
gcaattctcgtacct

SEQ ID NO: 331667 - DNA, 15 bp, Homo sapiens
agcaattctcgtacc

SEQ ID NO: 331668 - DNA, 15 bp, Homo sapiens
aagcaattctcgtac

SEQ ID NO: 331669 - DNA, 15 bp, Homo sapiens
caagcaattctcgta

SEQ ID NO: 331670 - DNA, 15 bp, Homo sapiens
tcaagcaattctcgt

SEQ ID NO: 331671 - DNA, 15 bp, Homo sapiens
ttcaagcaattctcg

SEQ ID NO: 331672 - DNA, 15 bp, Homo sapiens
attcaagcaattctc

SEQ ID NO: 331673 - DNA, 15 bp, Homo sapiens
gattcaagcaattct

SEQ ID NO: 331674 - DNA, 15 bp, Homo sapiens
ggattcaagcaattc

SEQ ID NO: 331675 - DNA, 15 bp, Homo sapiens
tggattcaagcaatt

SEQ ID NO: 331676 - DNA, 15 bp, Homo sapiens
ctggattcaagcaat

SEQ ID NO: 331677 - DNA, 15 bp, Homo sapiens
cctggattcaagcaa

SEQ ID NO: 331678 - DNA, 15 bp, Homo sapiens
tcctggattcaagca

SEQ ID NO: 331679 - DNA, 15 bp, Homo sapiens
ctcctggattcaagc

SEQ ID NO: 331680 - DNA, 15 bp, Homo sapiens
cctcctggattcaag

SEQ ID NO: 331681 - DNA, 15 bp, Homo sapiens
tcctcctggattcaa

SEQ ID NO: 331682 - DNA, 15 bp, Homo sapiens
ctcctcctggattca

SEQ ID NO: 331683 - DNA, 15 bp, Homo sapiens
cctcctcctggattc

SEQ ID NO: 331684 - DNA, 15 bp, Homo sapiens
tcctcctcctggatt

SEQ ID NO: 331685 - DNA, 15 bp, Homo sapiens
ctcctcctcctggat

SEQ ID NO: 331686 - DNA, 15 bp, Homo sapiens
cctcctcctcctgga

SEQ ID NO: 331687 - DNA, 15 bp, Homo sapiens
acctcctcctcctgg

SEQ ID NO: 331688 - DNA, 15 bp, Homo sapiens
aacctcctcctcctg

SEQ ID NO: 331689 - DNA, 15 bp, Homo sapiens
caacctcctcctcct

SEQ ID NO: 331690 - DNA, 15 bp, Homo sapiens
gggctcactgcaacc

SEQ ID NO: 331691 - DNA, 15 bp, Homo sapiens
tgggctcactgcaac

SEQ ID NO: 331692 - DNA, 15 bp, Homo sapiens
ctgggctcactgcaa

SEQ ID NO: 331693 - DNA, 15 bp, Homo sapiens
tctgggctcactgca

SEQ ID NO: 331694 - DNA, 15 bp, Homo sapiens
atctgggctcactgc

SEQ ID NO: 331695 - DNA, 15 bp, Homo sapiens
gatctgggctcactg

SEQ ID NO: 331696 - DNA, 15 bp, Homo sapiens
tgatctgggctcact

SEQ ID NO: 331697 - DNA, 15 bp, Homo sapiens
gtgatctgggctcac

SEQ ID NO: 331698 - DNA, 15 bp, Homo sapiens
tgtgatctgggctca

SEQ ID NO: 331699 - DNA, 15 bp, Homo sapiens
gtgtgatctgggctc

SEQ ID NO: 331700 - DNA, 15 bp, Homo sapiens
agtgtgatctgggct

SEQ ID NO: 331701 - DNA, 15 bp, Homo sapiens
cagtgtgatctgggc

SEQ ID NO: 331702 - DNA, 15 bp, Homo sapiens
gcagtgtgatctggg

SEQ ID NO: 331703 - DNA, 15 bp, Homo sapiens
agcagtgtgatctgg

SEQ ID NO: 331704 - DNA, 15 bp, Homo sapiens
cagcagtgtgatctg

SEQ ID NO: 331705 - DNA, 15 bp, Homo sapiens
gcagcagtgtgatct

SEQ ID NO: 331706 - DNA, 15 bp, Homo sapiens
tgcagcagtgtgatc

SEQ ID NO: 331707 - DNA, 15 bp, Homo sapiens
gtgcagcagtgtgat

SEQ ID NO: 331708 - DNA, 15 bp, Homo sapiens
agtgcagcagtgtga

SEQ ID NO: 331709 - DNA, 15 bp, Homo sapiens
gagtgcagcagtgtg

SEQ ID NO: 331710 - DNA, 15 bp, Homo sapiens
ggagtgcagcagtgt

SEQ ID NO: 331711 - DNA, 15 bp, Homo sapiens
tggagtgcagcagtg

SEQ ID NO: 331712 - DNA, 15 bp, Homo sapiens
ctggagtgcagcagt

SEQ ID NO: 331713 - DNA, 15 bp, Homo sapiens
ttgctctgtcaccca

SEQ ID NO: 331714 - DNA, 15 bp, Homo sapiens
tttgctctgtcaccc

SEQ ID NO: 331715 - DNA, 15 bp, Homo sapiens
ttttgctctgtcacc

SEQ ID NO: 331716 - DNA, 15 bp, Homo sapiens
gttttgctctgtcac

SEQ ID NO: 331717 - DNA, 15 bp, Homo sapiens
agttttgctctgtca

SEQ ID NO: 331718 - DNA, 15 bp, Homo sapiens
cagttttgctctgtc

SEQ ID NO: 331719 - DNA, 15 bp, Homo sapiens
acagttttgctctgt

SEQ ID NO: 331720 - DNA, 15 bp, Homo sapiens
gacagttttgctctg

SEQ ID NO: 331721 - DNA, 15 bp, Homo sapiens
agacagttttgctct

SEQ ID NO: 331722 - DNA, 15 bp, Homo sapiens
gagacagttttgctc

SEQ ID NO: 331723 - DNA, 15 bp, Homo sapiens
cgagacagttttgct

SEQ ID NO: 331724 - DNA, 15 bp, Homo sapiens
gcgagacagttttgc

SEQ ID NO: 331725 - DNA, 15 bp, Homo sapiens
tgcgagacagttttg

SEQ ID NO: 331726 - DNA, 15 bp, Homo sapiens
ttgcgagacagtttt

SEQ ID NO: 331727 - DNA, 15 bp, Homo sapiens
tttgcgagacagttt

SEQ ID NO: 331728 - DNA, 15 bp, Homo sapiens
ttttgcgagacagtt

SEQ ID NO: 331729 - DNA, 15 bp, Homo sapiens
gttttgcgagacagt

SEQ ID NO: 331730 - DNA, 15 bp, Homo sapiens
tgttttgcgagacag

SEQ ID NO: 331731 - DNA, 15 bp, Homo sapiens
ttgttttgcgagaca

SEQ ID NO: 331732 - DNA, 15 bp, Homo sapiens
tttgttttgcgagac

SEQ ID NO: 331733 - DNA, 15 bp, Homo sapiens
ttttgttttgcgaga

SEQ ID NO: 331734 - DNA, 15 bp, Homo sapiens
tttttgttttgcgag

SEQ ID NO: 331735 - DNA, 15 bp, Homo sapiens
ttttttgttttgcga

SEQ ID NO: 331736 - DNA, 15 bp, Homo sapiens
tttttttgttttgcg

SEQ ID NO: 331737 - DNA, 15 bp, Homo sapiens
ttttttttgttttgc

SEQ ID NO: 331738 - DNA, 15 bp, Homo sapiens
gttttttttgttttg

SEQ ID NO: 331739 - DNA, 15 bp, Homo sapiens
tgttttttttgtttt

SEQ ID NO: 331740 - DNA, 15 bp, Homo sapiens
ttgttttttttgttt

SEQ ID NO: 331741 - DNA, 15 bp, Homo sapiens
tttgttttttttgtt

SEQ ID NO: 331742 - DNA, 15 bp, Homo sapiens
atttgttttttttgt

SEQ ID NO: 331743 - DNA, 15 bp, Homo sapiens
aatttgttttttttg

SEQ ID NO: 331744 - DNA, 15 bp, Homo sapiens
gaatttgtttttttt

SEQ ID NO: 331745 - DNA, 15 bp, Homo sapiens
tgaatttgttttttt

SEQ ID NO: 331746 - DNA, 15 bp, Homo sapiens
gtgaatttgtttttt

SEQ ID NO: 331747 - DNA, 15 bp, Homo sapiens
ggtgaatttgttttt

SEQ ID NO: 331748 - DNA, 15 bp, Homo sapiens
tggtgaatttgtttt

SEQ ID NO: 331749 - DNA, 15 bp, Homo sapiens
ttggtgaatttgttt

SEQ ID NO: 331750 - DNA, 15 bp, Homo sapiens
tttggtgaatttgtt

SEQ ID NO: 331751 - DNA, 15 bp, Homo sapiens
ctttggtgaatttgt

SEQ ID NO: 331752 - DNA, 15 bp, Homo sapiens
tctttggtgaatttg

SEQ ID NO: 331753 - DNA, 15 bp, Homo sapiens
ttctttggtgaattt

SEQ ID NO: 331754 - DNA, 15 bp, Homo sapiens
tttctttggtgaatt

SEQ ID NO: 331755 - DNA, 15 bp, Homo sapiens
atttctttggtgaat

SEQ ID NO: 331756 - DNA, 15 bp, Homo sapiens
tatttctttggtgaa

SEQ ID NO: 331757 - DNA, 15 bp, Homo sapiens
ctatttctttggtga

SEQ ID NO: 331758 - DNA, 15 bp, Homo sapiens
actatttctttggtg

SEQ ID NO: 331759 - DNA, 15 bp, Homo sapiens
gactatttctttggt

SEQ ID NO: 331760 - DNA, 15 bp, Homo sapiens
agactatttctttgg

SEQ ID NO: 331761 - DNA, 15 bp, Homo sapiens
tagactatttctttg

SEQ ID NO: 331762 - DNA, 15 bp, Homo sapiens
ctagactatttcttt

SEQ ID NO: 331763 - DNA, 15 bp, Homo sapiens
cctagactatttctt

SEQ ID NO: 331764 - DNA, 15 bp, Homo sapiens
acctagactatttct

SEQ ID NO: 331765 - DNA, 15 bp, Homo sapiens
tacctagactatttc

SEQ ID NO: 331766 - DNA, 15 bp, Homo sapiens
gtacctagactattt

SEQ ID NO: 331767 - DNA, 15 bp, Homo sapiens
tgtacctagactatt

SEQ ID NO: 331768 - DNA, 15 bp, Homo sapiens
ttgtacctagactat

SEQ ID NO: 331769 - DNA, 15 bp, Homo sapiens
tttgtacctagacta

SEQ ID NO: 331770 - DNA, 15 bp, Homo sapiens
atttgtacctagact

SEQ ID NO: 331771 - DNA, 15 bp, Homo sapiens
catttgtacctagac

SEQ ID NO: 331772 - DNA, 15 bp, Homo sapiens
acatttgtacctaga

SEQ ID NO: 331773 - DNA, 15 bp, Homo sapiens
tacatttgtacctag

SEQ ID NO: 331774 - DNA, 15 bp, Homo sapiens
ttacatttgtaccta

SEQ ID NO: 331775 - DNA, 15 bp, Homo sapiens
attacatttgtacct

SEQ ID NO: 331776 - DNA, 15 bp, Homo sapiens
cattacatttgtacc

SEQ ID NO: 331777 - DNA, 15 bp, Homo sapiens
ccattacatttgtac

SEQ ID NO: 331778 - DNA, 15 bp, Homo sapiens
tccattacatttgta

SEQ ID NO: 331779 - DNA, 15 bp, Homo sapiens
atccattacatttgt

SEQ ID NO: 331780 - DNA, 15 bp, Homo sapiens
tatccattacatttg

SEQ ID NO: 331781 - DNA, 15 bp, Homo sapiens
ttatccattacattt

SEQ ID NO: 331782 - DNA, 15 bp, Homo sapiens
tttatccattacatt

SEQ ID NO: 331783 - DNA, 15 bp, Homo sapiens
ctttatccattacat

SEQ ID NO: 331784 - DNA, 15 bp, Homo sapiens
tctttatccattaca

SEQ ID NO: 331785 - DNA, 15 bp, Homo sapiens
ttctttatccattac

SEQ ID NO: 331786 - DNA, 15 bp, Homo sapiens
tttctttatccatta

SEQ ID NO: 331787 - DNA, 15 bp, Homo sapiens
ttttctttatccatt

SEQ ID NO: 331788 - DNA, 15 bp, Homo sapiens
attttctttatccat

SEQ ID NO: 331789 - DNA, 15 bp, Homo sapiens
tattttctttatcca

SEQ ID NO: 331790 - DNA, 15 bp, Homo sapiens
atattttctttatcc

SEQ ID NO: 331791 - DNA, 15 bp, Homo sapiens
aatattttctttatc

SEQ ID NO: 331792 - DNA, 15 bp, Homo sapiens
taatattttctttat

SEQ ID NO: 331793 - DNA, 15 bp, Homo sapiens
ataatattttcttta

SEQ ID NO: 331794 - DNA, 15 bp, Homo sapiens
cataatattttcttt

SEQ ID NO: 331795 - DNA, 15 bp, Homo sapiens
tcataatattttctt

SEQ ID NO: 331796 - DNA, 15 bp, Homo sapiens
ttcataatattttct

SEQ ID NO: 331797 - DNA, 15 bp, Homo sapiens
gttcataatattttc

SEQ ID NO: 331798 - DNA, 15 bp, Homo sapiens
ggttcataatatttt

SEQ ID NO: 331799 - DNA, 15 bp, Homo sapiens
tggttcataatattt

SEQ ID NO: 331800 - DNA, 15 bp, Homo sapiens
atggttcataatatt

SEQ ID NO: 331801 - DNA, 15 bp, Homo sapiens
aatggttcataatat

SEQ ID NO: 331802 - DNA, 15 bp, Homo sapiens
taatggttcataata

SEQ ID NO: 331803 - DNA, 15 bp, Homo sapiens
ataatggttcataat

SEQ ID NO: 331804 - DNA, 15 bp, Homo sapiens
cataatggttcataa

SEQ ID NO: 331805 - DNA, 15 bp, Homo sapiens
acataatggttcata

SEQ ID NO: 331806 - DNA, 15 bp, Homo sapiens
cacataatggttcat

SEQ ID NO: 331807 - DNA, 15 bp, Homo sapiens
tcacataatggttca

SEQ ID NO: 331808 - DNA, 15 bp, Homo sapiens
ttcacataatggttc

SEQ ID NO: 331809 - DNA, 15 bp, Homo sapiens
tttcacataatggtt

SEQ ID NO: 331810 - DNA, 15 bp, Homo sapiens
ttttcacataatggt

SEQ ID NO: 331811 - DNA, 15 bp, Homo sapiens
attttcacataatgg

SEQ ID NO: 331812 - DNA, 15 bp, Homo sapiens
cattttcacataatg

SEQ ID NO: 331813 - DNA, 15 bp, Homo sapiens
acattttcacataat

SEQ ID NO: 331814 - DNA, 15 bp, Homo sapiens
aacattttcacataa

SEQ ID NO: 331815 - DNA, 15 bp, Homo sapiens
aaacattttcacata

SEQ ID NO: 331816 - DNA, 15 bp, Homo sapiens
aaaacattttcacat

SEQ ID NO: 331817 - DNA, 15 bp, Homo sapiens
taaaacattttcaca

SEQ ID NO: 331818 - DNA, 15 bp, Homo sapiens
ataaaacattttcac

SEQ ID NO: 331819 - DNA, 15 bp, Homo sapiens
tataaaacattttca

SEQ ID NO: 331820 - DNA, 15 bp, Homo sapiens
ctataaaacattttc

SEQ ID NO: 331821 - DNA, 15 bp, Homo sapiens
cctataaaacatttt

SEQ ID NO: 331822 - DNA, 15 bp, Homo sapiens
gcctataaaacattt

SEQ ID NO: 331823 - DNA, 15 bp, Homo sapiens
ggcctataaaacatt

SEQ ID NO: 331824 - DNA, 15 bp, Homo sapiens
tggcctataaaacat

SEQ ID NO: 331825 - DNA, 15 bp, Homo sapiens
ctggcctataaaaca

SEQ ID NO: 331826 - DNA, 15 bp, Homo sapiens
cctggcctataaaac

SEQ ID NO: 331827 - DNA, 15 bp, Homo sapiens
acctggcctataaaa

SEQ ID NO: 331828 - DNA, 15 bp, Homo sapiens
cacctggcctataaa

SEQ ID NO: 331829 - DNA, 15 bp, Homo sapiens
gcacctggcctataa

SEQ ID NO: 331830 - DNA, 15 bp, Homo sapiens
tgcacctggcctata

SEQ ID NO: 331831 - DNA, 15 bp, Homo sapiens
ctgcacctggcctat

SEQ ID NO: 331832 - DNA, 15 bp, Homo sapiens
tctgcacctggccta

SEQ ID NO: 331833 - DNA, 15 bp, Homo sapiens
ctctgcacctggcct

SEQ ID NO: 331834 - DNA, 15 bp, Homo sapiens
cctctgcacctggcc

SEQ ID NO: 331835 - DNA, 15 bp, Homo sapiens
gcctctgcacctggc

SEQ ID NO: 331836 - DNA, 15 bp, Homo sapiens
agcctctgcacctgg

SEQ ID NO: 331837 - DNA, 15 bp, Homo sapiens
gagcctctgcacctg

SEQ ID NO: 331838 - DNA, 15 bp, Homo sapiens
tgagcctctgcacct

SEQ ID NO: 331839 - DNA, 15 bp, Homo sapiens
gtgagcctctgcacc

SEQ ID NO: 331840 - DNA, 15 bp, Homo sapiens
cgtgagcctctgcac

SEQ ID NO: 331841 - DNA, 15 bp, Homo sapiens
gcgtgagcctctgca

SEQ ID NO: 331842 - DNA, 15 bp, Homo sapiens
ggcgtgagcctctgc

SEQ ID NO: 331843 - DNA, 15 bp, Homo sapiens
aggcgtgagcctctg

SEQ ID NO: 331844 - DNA, 15 bp, Homo sapiens
caggcgtgagcctct

SEQ ID NO: 331845 - DNA, 15 bp, Homo sapiens
acaggcgtgagcctc

SEQ ID NO: 331846 - DNA, 15 bp, Homo sapiens
tacaggcgtgagcct

SEQ ID NO: 331847 - DNA, 15 bp, Homo sapiens
cgccttggcctccca

SEQ ID NO: 331848 - DNA, 15 bp, Homo sapiens
ccgccttggcctccc

SEQ ID NO: 331849 - DNA, 15 bp, Homo sapiens
cccgccttggcctcc

SEQ ID NO: 331850 - DNA, 15 bp, Homo sapiens
gcccgccttggcctc

SEQ ID NO: 331851 - DNA, 15 bp, Homo sapiens
tgcccgccttggcct

SEQ ID NO: 331852 - DNA, 15 bp, Homo sapiens
ctgcccgccttggcc

SEQ ID NO: 331853 - DNA, 15 bp, Homo sapiens
tctgcccgccttggc

SEQ ID NO: 331854 - DNA, 15 bp, Homo sapiens
atctgcccgccttgg

SEQ ID NO: 331855 - DNA, 15 bp, Homo sapiens
gatctgcccgccttg

SEQ ID NO: 331856 - DNA, 15 bp, Homo sapiens
tgatctgcccgcctt

SEQ ID NO: 331857 - DNA, 15 bp, Homo sapiens
agtgatctgcccgcc

SEQ ID NO: 331858 - DNA, 15 bp, Homo sapiens
aagtgatctgcccgc

SEQ ID NO: 331859 - DNA, 15 bp, Homo sapiens
caagtgatctgcccg

SEQ ID NO: 331860 - DNA, 15 bp, Homo sapiens
agtgacctgagacag

SEQ ID NO: 331861 - DNA, 15 bp, Homo sapiens
cagtgacctgagaca

SEQ ID NO: 331862 - DNA, 15 bp, Homo sapiens
gcagtgacctgagac

SEQ ID NO: 331863 - DNA, 15 bp, Homo sapiens
tgcagtgacctgaga

SEQ ID NO: 331864 - DNA, 15 bp, Homo sapiens
ttgcagtgacctgag

SEQ ID NO: 331865 - DNA, 15 bp, Homo sapiens
gttgcagtgacctga

SEQ ID NO: 331866 - DNA, 15 bp, Homo sapiens
ggttgcagtgacctg

SEQ ID NO: 331867 - DNA, 15 bp, Homo sapiens
aggttgcagtgacct

SEQ ID NO: 331868 - DNA, 15 bp, Homo sapiens
aggaggtggaggttg

SEQ ID NO: 331869 - DNA, 15 bp, Homo sapiens
caggaggtggaggtt

SEQ ID NO: 331870 - DNA, 15 bp, Homo sapiens
tcaggaggtggaggt

SEQ ID NO: 331871 - DNA, 15 bp, Homo sapiens
ctcaggaggtggagg

SEQ ID NO: 331872 - DNA, 15 bp, Homo sapiens
actcaggaggtggag

SEQ ID NO: 331873 - DNA, 15 bp, Homo sapiens
aactcaggaggtgga

SEQ ID NO: 331874 - DNA, 15 bp, Homo sapiens
gaactcaggaggtgg

SEQ ID NO: 331875 - DNA, 15 bp, Homo sapiens
tgaactcaggaggtg

SEQ ID NO: 331876 - DNA, 15 bp, Homo sapiens
ttgaactcaggaggt

SEQ ID NO: 331877 - DNA, 15 bp, Homo sapiens
cttgaactcaggagg

SEQ ID NO: 331878 - DNA, 15 bp, Homo sapiens
gcttgaactcaggag

SEQ ID NO: 331879 - DNA, 15 bp, Homo sapiens
cgcttgaactcagga

SEQ ID NO: 331880 - DNA, 15 bp, Homo sapiens
tcgcttgaactcagg

SEQ ID NO: 331881 - DNA, 15 bp, Homo sapiens
atcgcttgaactcag

SEQ ID NO: 331882 - DNA, 15 bp, Homo sapiens
aatcgcttgaactca

SEQ ID NO: 331883 - DNA, 15 bp, Homo sapiens
gaatcgcttgaactc

SEQ ID NO: 331884 - DNA, 15 bp, Homo sapiens
agaatcgcttgaact

SEQ ID NO: 331885 - DNA, 15 bp, Homo sapiens
gggagaatcgcttga

SEQ ID NO: 331886 - DNA, 15 bp, Homo sapiens
cgggagaatcgcttg

SEQ ID NO: 331887 - DNA, 15 bp, Homo sapiens
acgggagaatcgctt

SEQ ID NO: 331888 - DNA, 15 bp, Homo sapiens
gacgggagaatcgct

SEQ ID NO: 331889 - DNA, 15 bp, Homo sapiens
agacgggagaatcgc

SEQ ID NO: 331890 - DNA, 15 bp, Homo sapiens
gagacgggagaatcg

SEQ ID NO: 331891 - DNA, 15 bp, Homo sapiens
tgagacgggagaatc

SEQ ID NO: 331892 - DNA, 15 bp, Homo sapiens
ctgagacgggagaat

SEQ ID NO: 331893 - DNA, 15 bp, Homo sapiens
gctgagacgggagaa

SEQ ID NO: 331894 - DNA, 15 bp, Homo sapiens
ggctgagacgggaga

SEQ ID NO: 331895 - DNA, 15 bp, Homo sapiens
aggctgagacgggag

SEQ ID NO: 331896 - DNA, 15 bp, Homo sapiens
gaggctgagacggga

SEQ ID NO: 331897 - DNA, 15 bp, Homo sapiens
ggaggctgagacggg

SEQ ID NO: 331898 - DNA, 15 bp, Homo sapiens
gggaggctgagacgg

SEQ ID NO: 331899 - DNA, 15 bp, Homo sapiens
cgggaggctgagacg

SEQ ID NO: 331900 - DNA, 15 bp, Homo sapiens
tcgggaggctgagac

SEQ ID NO: 331901 - DNA, 15 bp, Homo sapiens
ctcgggaggctgaga

SEQ ID NO: 331902 - DNA, 15 bp, Homo sapiens
atcccagctactcgg

SEQ ID NO: 331903 - DNA, 15 bp, Homo sapiens
aatcccagctactcg

SEQ ID NO: 331904 - DNA, 15 bp, Homo sapiens
gcgcctgtaatccca

SEQ ID NO: 331905 - DNA, 15 bp, Homo sapiens
tgcgcctgtaatccc

SEQ ID NO: 331906 - DNA, 15 bp, Homo sapiens
atgcgcctgtaatcc

SEQ ID NO: 331907 - DNA, 15 bp, Homo sapiens
catgcgcctgtaatc

SEQ ID NO: 331908 - DNA, 15 bp, Homo sapiens
gcatgcgcctgtaat

SEQ ID NO: 331909 - DNA, 15 bp, Homo sapiens
ggcatgcgcctgtaa

SEQ ID NO: 331910 - DNA, 15 bp, Homo sapiens
tggcatgcgcctgta

SEQ ID NO: 331911 - DNA, 15 bp, Homo sapiens
gtggcatgcgcctgt

SEQ ID NO: 331912 - DNA, 15 bp, Homo sapiens
ggtggcatgcgcctg

SEQ ID NO: 331913 - DNA, 15 bp, Homo sapiens
tggtggcatgcgcct

SEQ ID NO: 331914 - DNA, 15 bp, Homo sapiens
gtggtggcatgcgcc

SEQ ID NO: 331915 - DNA, 15 bp, Homo sapiens
agtggtggcatgcgc

SEQ ID NO: 331916 - DNA, 15 bp, Homo sapiens
gagtggtggcatgcg

SEQ ID NO: 331917 - DNA, 15 bp, Homo sapiens
agagtggtggcatgc

SEQ ID NO: 331918 - DNA, 15 bp, Homo sapiens
cagagtggtggcatg

SEQ ID NO: 331919 - DNA, 15 bp, Homo sapiens
ccagagtggtggcat

SEQ ID NO: 331920 - DNA, 15 bp, Homo sapiens
cccagagtggtggca

SEQ ID NO: 331921 - DNA, 15 bp, Homo sapiens
gcccagagtggtggc

SEQ ID NO: 331922 - DNA, 15 bp, Homo sapiens
agcccagagtggtgg

SEQ ID NO: 331923 - DNA, 15 bp, Homo sapiens
tagcccagagtggtg

SEQ ID NO: 331924 - DNA, 15 bp, Homo sapiens
ttagcccagagtggt

SEQ ID NO: 331925 - DNA, 15 bp, Homo sapiens
attagcccagagtgg

SEQ ID NO: 331926 - DNA, 15 bp, Homo sapiens
aattagcccagagtg

SEQ ID NO: 331927 - DNA, 15 bp, Homo sapiens
aaattagcccagagt

SEQ ID NO: 331928 - DNA, 15 bp, Homo sapiens
aaaattagcccagag

SEQ ID NO: 331929 - DNA, 15 bp, Homo sapiens
aaaaattagcccaga

SEQ ID NO: 331930 - DNA, 15 bp, Homo sapiens
caaaaattagcccag

SEQ ID NO: 331931 - DNA, 15 bp, Homo sapiens
acaaaaattagccca

SEQ ID NO: 331932 - DNA, 15 bp, Homo sapiens
tacaaaaattagccc

SEQ ID NO: 331933 - DNA, 15 bp, Homo sapiens
taaccccgtctccac

SEQ ID NO: 331934 - DNA, 15 bp, Homo sapiens
gtaaccccgtctcca

SEQ ID NO: 331935 - DNA, 15 bp, Homo sapiens
tgtaaccccgtctcc

SEQ ID NO: 331936 - DNA, 15 bp, Homo sapiens
atgtaaccccgtctc

SEQ ID NO: 331937 - DNA, 15 bp, Homo sapiens
gatgtaaccccgtct

SEQ ID NO: 331938 - DNA, 15 bp, Homo sapiens
tgatgtaaccccgtc

SEQ ID NO: 331939 - DNA, 15 bp, Homo sapiens
atgatgtaaccccgt

SEQ ID NO: 331940 - DNA, 15 bp, Homo sapiens
tatgatgtaaccccg

SEQ ID NO: 331941 - DNA, 15 bp, Homo sapiens
gtatgatgtaacccc

SEQ ID NO: 331942 - DNA, 15 bp, Homo sapiens
agtatgatgtaaccc

SEQ ID NO: 331943 - DNA, 15 bp, Homo sapiens
cagtatgatgtaacc

SEQ ID NO: 331944 - DNA, 15 bp, Homo sapiens
ccagtatgatgtaac

SEQ ID NO: 331945 - DNA, 15 bp, Homo sapiens
accagtatgatgtaa

SEQ ID NO: 331946 - DNA, 15 bp, Homo sapiens
gaccagtatgatgta

SEQ ID NO: 331947 - DNA, 15 bp, Homo sapiens
tgaccagtatgatgt

SEQ ID NO: 331948 - DNA, 15 bp, Homo sapiens
ctgaccagtatgatg

SEQ ID NO: 331949 - DNA, 15 bp, Homo sapiens
cctgaccagtatgat

SEQ ID NO: 331950 - DNA, 15 bp, Homo sapiens
gcctgaccagtatga

SEQ ID NO: 331951 - DNA, 15 bp, Homo sapiens
agcctgaccagtatg

SEQ ID NO: 331952 - DNA, 15 bp, Homo sapiens
cagcctgaccagtat

SEQ ID NO: 331953 - DNA, 15 bp, Homo sapiens
ccagcctgaccagta

SEQ ID NO: 331954 - DNA, 15 bp, Homo sapiens
accagcctgaccagt

SEQ ID NO: 331955 - DNA, 15 bp, Homo sapiens
gaccagcctgaccag

SEQ ID NO: 331956 - DNA, 15 bp, Homo sapiens
agaccagcctgacca

SEQ ID NO: 331957 - DNA, 15 bp, Homo sapiens
gagaccagcctgacc

SEQ ID NO: 331958 - DNA, 15 bp, Homo sapiens
cgagaccagcctgac

SEQ ID NO: 331959 - DNA, 15 bp, Homo sapiens
tcgagaccagcctga

SEQ ID NO: 331960 - DNA, 15 bp, Homo sapiens
tgtcaggagttcgag

SEQ ID NO: 331961 - DNA, 15 bp, Homo sapiens
atgtcaggagttcga

SEQ ID NO: 331962 - DNA, 15 bp, Homo sapiens
gatgtcaggagttcg

SEQ ID NO: 331963 - DNA, 15 bp, Homo sapiens
tgatgtcaggagttc

SEQ ID NO: 331964 - DNA, 15 bp, Homo sapiens
ctgatgtcaggagtt

SEQ ID NO: 331965 - DNA, 15 bp, Homo sapiens
cctgatgtcaggagt

SEQ ID NO: 331966 - DNA, 15 bp, Homo sapiens
acctgatgtcaggag

SEQ ID NO: 331967 - DNA, 15 bp, Homo sapiens
cacctgatgtcagga

SEQ ID NO: 331968 - DNA, 15 bp, Homo sapiens
tcacctgatgtcagg

SEQ ID NO: 331969 - DNA, 15 bp, Homo sapiens
atcacctgatgtcag

SEQ ID NO: 331970 - DNA, 15 bp, Homo sapiens
gatcacctgatgtca

SEQ ID NO: 331971 - DNA, 15 bp, Homo sapiens
ggatcacctgatgtc

SEQ ID NO: 331972 - DNA, 15 bp, Homo sapiens
cggatcacctgatgt

SEQ ID NO: 331973 - DNA, 15 bp, Homo sapiens
gcggatcacctgatg

SEQ ID NO: 331974 - DNA, 15 bp, Homo sapiens
ggcggatcacctgat

SEQ ID NO: 331975 - DNA, 15 bp, Homo sapiens
gggcggatcacctga

SEQ ID NO: 331976 - DNA, 15 bp, Homo sapiens
cgggcggatcacctg

SEQ ID NO: 331977 - DNA, 15 bp, Homo sapiens
gcgggcggatcacct

SEQ ID NO: 331978 - DNA, 15 bp, Homo sapiens
ggcgggcggatcacc

SEQ ID NO: 331979 - DNA, 15 bp, Homo sapiens
aggcgggcggatcac

SEQ ID NO: 331980 - DNA, 15 bp, Homo sapiens
aaggcgggcggatca

SEQ ID NO: 331981 - DNA, 15 bp, Homo sapiens
caaggcgggcggatc

SEQ ID NO: 331982 - DNA, 15 bp, Homo sapiens
ccaaggcgggcggat

SEQ ID NO: 331983 - DNA, 15 bp, Homo sapiens
gccaaggcgggcgga

SEQ ID NO: 331984 - DNA, 15 bp, Homo sapiens
ggccaaggcgggcgg

SEQ ID NO: 331985 - DNA, 15 bp, Homo sapiens
aggccaaggcgggcg

SEQ ID NO: 331986 - DNA, 15 bp, Homo sapiens
gaggccaaggcgggc

SEQ ID NO: 331987 - DNA, 15 bp, Homo sapiens
ggaggccaaggcggg

SEQ ID NO: 331988 - DNA, 15 bp, Homo sapiens
gggaggccaaggcgg

SEQ ID NO: 331989 - DNA, 15 bp, Homo sapiens
tgggaggccaaggcg

SEQ ID NO: 331990 - DNA, 15 bp, Homo sapiens
aaatcccagcacttt

SEQ ID NO: 331991 - DNA, 15 bp, Homo sapiens
taaatcccagcactt

SEQ ID NO: 331992 - DNA, 15 bp, Homo sapiens
ataaatcccagcact

SEQ ID NO: 331993 - DNA, 15 bp, Homo sapiens
tataaatcccagcac

SEQ ID NO: 331994 - DNA, 15 bp, Homo sapiens
ctataaatcccagca

SEQ ID NO: 331995 - DNA, 15 bp, Homo sapiens
cctataaatcccagc

SEQ ID NO: 331996 - DNA, 15 bp, Homo sapiens
gcctataaatcccag

SEQ ID NO: 331997 - DNA, 15 bp, Homo sapiens
cgcctataaatccca

SEQ ID NO: 331998 - DNA, 15 bp, Homo sapiens
acgcctataaatccc

SEQ ID NO: 331999 - DNA, 15 bp, Homo sapiens
cacgcctataaatcc

SEQ ID NO: 332000 - DNA, 15 bp, Homo sapiens
tcacgcctataaatc

SEQ ID NO: 332001 - DNA, 15 bp, Homo sapiens
ctcacgcctataaat

SEQ ID NO: 332002 - DNA, 15 bp, Homo sapiens
gctcacgcctataaa

SEQ ID NO: 332003 - DNA, 15 bp, Homo sapiens
ggctcacgcctataa

SEQ ID NO: 332004 - DNA, 15 bp, Homo sapiens
tggctcacgcctata

SEQ ID NO: 332005 - DNA, 15 bp, Homo sapiens
gtggctcacgcctat

SEQ ID NO: 332006 - DNA, 15 bp, Homo sapiens
tgtggctcacgccta

SEQ ID NO: 332007 - DNA, 15 bp, Homo sapiens
aggcgctgtggctca

SEQ ID NO: 332008 - DNA, 15 bp, Homo sapiens
taggcgctgtggctc

SEQ ID NO: 332009 - DNA, 15 bp, Homo sapiens
ctaggcgctgtggct

SEQ ID NO: 332010 - DNA, 15 bp, Homo sapiens
gctaggcgctgtggc

SEQ ID NO: 332011 - DNA, 15 bp, Homo sapiens
ggctaggcgctgtgg

SEQ ID NO: 332012 - DNA, 15 bp, Homo sapiens
aggctaggcgctgtg

SEQ ID NO: 332013 - DNA, 15 bp, Homo sapiens
aaggctaggcgctgt

SEQ ID NO: 332014 - DNA, 15 bp, Homo sapiens
taaggctaggcgctg

SEQ ID NO: 332015 - DNA, 15 bp, Homo sapiens
ttaaggctaggcgct

SEQ ID NO: 332016 - DNA, 15 bp, Homo sapiens
attaaggctaggcgc

SEQ ID NO: 332017 - DNA, 15 bp, Homo sapiens
cattaaggctaggcg

SEQ ID NO: 332018 - DNA, 15 bp, Homo sapiens
acattaaggctaggc

SEQ ID NO: 332019 - DNA, 15 bp, Homo sapiens
aacattaaggctagg

SEQ ID NO: 332020 - DNA, 15 bp, Homo sapiens
taacattaaggctag

SEQ ID NO: 332021 - DNA, 15 bp, Homo sapiens
ctaacattaaggcta

SEQ ID NO: 332022 - DNA, 15 bp, Homo sapiens
actaacattaaggct

SEQ ID NO: 332023 - DNA, 15 bp, Homo sapiens
aactaacattaaggc

SEQ ID NO: 332024 - DNA, 15 bp, Homo sapiens
gaactaacattaagg

SEQ ID NO: 332025 - DNA, 15 bp, Homo sapiens
agaactaacattaag

SEQ ID NO: 332026 - DNA, 15 bp, Homo sapiens
aagaactaacattaa

SEQ ID NO: 332027 - DNA, 15 bp, Homo sapiens
taagaactaacatta

SEQ ID NO: 332028 - DNA, 15 bp, Homo sapiens
ttaagaactaacatt

SEQ ID NO: 332029 - DNA, 15 bp, Homo sapiens
gttaagaactaacat

SEQ ID NO: 332030 - DNA, 15 bp, Homo sapiens
ggttaagaactaaca

SEQ ID NO: 332031 - DNA, 15 bp, Homo sapiens
tggttaagaactaac

SEQ ID NO: 332032 - DNA, 15 bp, Homo sapiens
ctggttaagaactaa

SEQ ID NO: 332033 - DNA, 15 bp, Homo sapiens
actggttaagaacta

SEQ ID NO: 332034 - DNA, 15 bp, Homo sapiens
cactggttaagaact

SEQ ID NO: 332035 - DNA, 15 bp, Homo sapiens
ccactggttaagaac

SEQ ID NO: 332036 - DNA, 15 bp, Homo sapiens
accactggttaagaa

SEQ ID NO: 332037 - DNA, 15 bp, Homo sapiens
taccactggttaaga

SEQ ID NO: 332038 - DNA, 15 bp, Homo sapiens
ctaccactggttaag

SEQ ID NO: 332039 - DNA, 15 bp, Homo sapiens
tctaccactggttaa

SEQ ID NO: 332040 - DNA, 15 bp, Homo sapiens
gtctaccactggtta

SEQ ID NO: 332041 - DNA, 15 bp, Homo sapiens
ggtctaccactggtt

SEQ ID NO: 332042 - DNA, 15 bp, Homo sapiens
tggtctaccactggt

SEQ ID NO: 332043 - DNA, 15 bp, Homo sapiens
ctggtctaccactgg

SEQ ID NO: 332044 - DNA, 15 bp, Homo sapiens
tctggtctaccactg

SEQ ID NO: 332045 - DNA, 15 bp, Homo sapiens
ttctggtctaccact

SEQ ID NO: 332046 - DNA, 15 bp, Homo sapiens
cttctggtctaccac

SEQ ID NO: 332047 - DNA, 15 bp, Homo sapiens
acttctggtctacca

SEQ ID NO: 332048 - DNA, 15 bp, Homo sapiens
gacttctggtctacc

SEQ ID NO: 332049 - DNA, 15 bp, Homo sapiens
agacttctggtctac

SEQ ID NO: 332050 - DNA, 15 bp, Homo sapiens
tagacttctggtcta

SEQ ID NO: 332051 - DNA, 15 bp, Homo sapiens
ttagacttctggtct

SEQ ID NO: 332052 - DNA, 15 bp, Homo sapiens
attagacttctggtc

SEQ ID NO: 332053 - DNA, 15 bp, Homo sapiens
aattagacttctggt

SEQ ID NO: 332054 - DNA, 15 bp, Homo sapiens
caattagacttctgg

SEQ ID NO: 332055 - DNA, 15 bp, Homo sapiens
ccaattagacttctg

SEQ ID NO: 332056 - DNA, 15 bp, Homo sapiens
cccaattagacttct

SEQ ID NO: 332057 - DNA, 15 bp, Homo sapiens
tcccaattagacttc

SEQ ID NO: 332058 - DNA, 15 bp, Homo sapiens
atcccaattagactt

SEQ ID NO: 332059 - DNA, 15 bp, Homo sapiens
aatcccaattagact

SEQ ID NO: 332060 - DNA, 15 bp, Homo sapiens
aaatcccaattagac

SEQ ID NO: 332061 - DNA, 15 bp, Homo sapiens
aaaatcccaattaga

SEQ ID NO: 332062 - DNA, 15 bp, Homo sapiens
aaaaatcccaattag

SEQ ID NO: 332063 - DNA, 15 bp, Homo sapiens
aaaaaatcccaatta

SEQ ID NO: 332064 - DNA, 15 bp, Homo sapiens
caaaaaatcccaatt

SEQ ID NO: 332065 - DNA, 15 bp, Homo sapiens
acaaaaaatcccaat

SEQ ID NO: 332066 - DNA, 15 bp, Homo sapiens
aacaaaaaatcccaa

SEQ ID NO: 332067 - DNA, 15 bp, Homo sapiens
aaacaaaaaatccca

SEQ ID NO: 332068 - DNA, 15 bp, Homo sapiens
aaaacaaaaaatccc

SEQ ID NO: 332069 - DNA, 15 bp, Homo sapiens
aaaaacaaaaaatcc

SEQ ID NO: 332070 - DNA, 15 bp, Homo sapiens
caaaaacaaaaaatc

SEQ ID NO: 332071 - DNA, 15 bp, Homo sapiens
acaaaaacaaaaaat

SEQ ID NO: 332072 - DNA, 15 bp, Homo sapiens
cacaaaaacaaaaaa

SEQ ID NO: 332073 - DNA, 15 bp, Homo sapiens
acacaaaaacaaaaa

SEQ ID NO: 332074 - DNA, 15 bp, Homo sapiens
aacacaaaaacaaaa

SEQ ID NO: 332075 - DNA, 15 bp, Homo sapiens
aaacacaaaaacaaa

SEQ ID NO: 332076 - DNA, 15 bp, Homo sapiens
caaacacaaaaacaa

SEQ ID NO: 332077 - DNA, 15 bp, Homo sapiens
acaaacacaaaaaca

SEQ ID NO: 332078 - DNA, 15 bp, Homo sapiens
aacaaacacaaaaac

SEQ ID NO: 332079 - DNA, 15 bp, Homo sapiens
caacaaacacaaaaa

SEQ ID NO: 332080 - DNA, 15 bp, Homo sapiens
acaacaaacacaaaa

SEQ ID NO: 332081 - DNA, 15 bp, Homo sapiens
tacaacaaacacaaa

SEQ ID NO: 332082 - DNA, 15 bp, Homo sapiens
ttacaacaaacacaa

SEQ ID NO: 332083 - DNA, 15 bp, Homo sapiens
attacaacaaacaca

SEQ ID NO: 332084 - DNA, 15 bp, Homo sapiens
tattacaacaaacac

SEQ ID NO: 332085 - DNA, 15 bp, Homo sapiens
gtattacaacaaaca

SEQ ID NO: 332086 - DNA, 15 bp, Homo sapiens
tgtattacaacaaac

SEQ ID NO: 332087 - DNA, 15 bp, Homo sapiens
ttgtattacaacaaa

SEQ ID NO: 332088 - DNA, 15 bp, Homo sapiens
attgtattacaacaa

SEQ ID NO: 332089 - DNA, 15 bp, Homo sapiens
aattgtattacaaca

SEQ ID NO: 332090 - DNA, 15 bp, Homo sapiens
aaattgtattacaac

SEQ ID NO: 332091 - DNA, 15 bp, Homo sapiens
gaaattgtattacaa

SEQ ID NO: 332092 - DNA, 15 bp, Homo sapiens
agaaattgtattaca

SEQ ID NO: 332093 - DNA, 15 bp, Homo sapiens
cagaaattgtattac

SEQ ID NO: 332094 - DNA, 15 bp, Homo sapiens
acagaaattgtatta

SEQ ID NO: 332095 - DNA, 15 bp, Homo sapiens
aacagaaattgtatt

SEQ ID NO: 332096 - DNA, 15 bp, Homo sapiens
aaacagaaattgtat

SEQ ID NO: 332097 - DNA, 15 bp, Homo sapiens
gaaacagaaattgta

SEQ ID NO: 332098 - DNA, 15 bp, Homo sapiens
agaaacagaaattgt

SEQ ID NO: 332099 - DNA, 15 bp, Homo sapiens
gagaaacagaaattg

SEQ ID NO: 332100 - DNA, 15 bp, Homo sapiens
tgagaaacagaaatt

SEQ ID NO: 332101 - DNA, 15 bp, Homo sapiens
atgagaaacagaaat

SEQ ID NO: 332102 - DNA, 15 bp, Homo sapiens
aatgagaaacagaaa

SEQ ID NO: 332103 - DNA, 15 bp, Homo sapiens
aaatgagaaacagaa

SEQ ID NO: 332104 - DNA, 15 bp, Homo sapiens
taaatgagaaacaga

SEQ ID NO: 332105 - DNA, 15 bp, Homo sapiens
ataaatgagaaacag

SEQ ID NO: 332106 - DNA, 15 bp, Homo sapiens
gataaatgagaaaca

SEQ ID NO: 332107 - DNA, 15 bp, Homo sapiens
ggataaatgagaaac

SEQ ID NO: 332108 - DNA, 15 bp, Homo sapiens
aggataaatgagaaa

SEQ ID NO: 332109 - DNA, 15 bp, Homo sapiens
taggataaatgagaa

SEQ ID NO: 332110 - DNA, 15 bp, Homo sapiens
gtaggataaatgaga

SEQ ID NO: 332111 - DNA, 15 bp, Homo sapiens
ggtaggataaatgag

SEQ ID NO: 332112 - DNA, 15 bp, Homo sapiens
aggtaggataaatga

SEQ ID NO: 332113 - DNA, 15 bp, Homo sapiens
caggtaggataaatg

SEQ ID NO: 332114 - DNA, 15 bp, Homo sapiens
tcaggtaggataaat

SEQ ID NO: 332115 - DNA, 15 bp, Homo sapiens
ttcaggtaggataaa

SEQ ID NO: 332116 - DNA, 15 bp, Homo sapiens
tttcaggtaggataa

SEQ ID NO: 332117 - DNA, 15 bp, Homo sapiens
ttttcaggtaggata

SEQ ID NO: 332118 - DNA, 15 bp, Homo sapiens
cttttcaggtaggat

SEQ ID NO: 332119 - DNA, 15 bp, Homo sapiens
gcttttcaggtagga

SEQ ID NO: 332120 - DNA, 15 bp, Homo sapiens
tgcttttcaggtagg

SEQ ID NO: 332121 - DNA, 15 bp, Homo sapiens
atgcttttcaggtag

SEQ ID NO: 332122 - DNA, 15 bp, Homo sapiens
tatgcttttcaggta

SEQ ID NO: 332123 - DNA, 15 bp, Homo sapiens
gtatgcttttcaggt

SEQ ID NO: 332124 - DNA, 15 bp, Homo sapiens
agtatgcttttcagg

SEQ ID NO: 332125 - DNA, 15 bp, Homo sapiens
cagtatgcttttcag

SEQ ID NO: 332126 - DNA, 15 bp, Homo sapiens
gcagtatgcttttca

SEQ ID NO: 332127 - DNA, 15 bp, Homo sapiens
tgcagtatgcttttc

SEQ ID NO: 332128 - DNA, 15 bp, Homo sapiens
atgcagtatgctttt

SEQ ID NO: 332129 - DNA, 15 bp, Homo sapiens
gatgcagtatgcttt

SEQ ID NO: 332130 - DNA, 15 bp, Homo sapiens
agatgcagtatgctt

SEQ ID NO: 332131 - DNA, 15 bp, Homo sapiens
gagatgcagtatgct

SEQ ID NO: 332132 - DNA, 15 bp, Homo sapiens
agagatgcagtatgc

SEQ ID NO: 332133 - DNA, 15 bp, Homo sapiens
cagagatgcagtatg

SEQ ID NO: 332134 - DNA, 15 bp, Homo sapiens
tcagagatgcagtat

SEQ ID NO: 332135 - DNA, 15 bp, Homo sapiens
gtcagagatgcagta

SEQ ID NO: 332136 - DNA, 15 bp, Homo sapiens
ggtcagagatgcagt

SEQ ID NO: 332137 - DNA, 15 bp, Homo sapiens
aggtcagagatgcag

SEQ ID NO: 332138 - DNA, 15 bp, Homo sapiens
gaggtcagagatgca

SEQ ID NO: 332139 - DNA, 15 bp, Homo sapiens
agaggtcagagatgc

SEQ ID NO: 332140 - DNA, 15 bp, Homo sapiens
gagaggtcagagatg

SEQ ID NO: 332141 - DNA, 15 bp, Homo sapiens
tgagaggtcagagat

SEQ ID NO: 332142 - DNA, 15 bp, Homo sapiens
ctgagaggtcagaga

SEQ ID NO: 332143 - DNA, 15 bp, Homo sapiens
gctgagaggtcagag

SEQ ID NO: 332144 - DNA, 15 bp, Homo sapiens
tgctgagaggtcaga

SEQ ID NO: 332145 - DNA, 15 bp, Homo sapiens
atgctgagaggtcag

SEQ ID NO: 332146 - DNA, 15 bp, Homo sapiens
tatgctgagaggtca

SEQ ID NO: 332147 - DNA, 15 bp, Homo sapiens
gtatgctgagaggtc

SEQ ID NO: 332148 - DNA, 15 bp, Homo sapiens
agtatgctgagaggt

SEQ ID NO: 332149 - DNA, 15 bp, Homo sapiens
tagtatgctgagagg

SEQ ID NO: 332150 - DNA, 15 bp, Homo sapiens
ttagtatgctgagag

SEQ ID NO: 332151 - DNA, 15 bp, Homo sapiens
gttagtatgctgaga

SEQ ID NO: 332152 - DNA, 15 bp, Homo sapiens
tgttagtatgctgag

SEQ ID NO: 332153 - DNA, 15 bp, Homo sapiens
ttgttagtatgctga

SEQ ID NO: 332154 - DNA, 15 bp, Homo sapiens
attgttagtatgctg

SEQ ID NO: 332155 - DNA, 15 bp, Homo sapiens
tattgttagtatgct

SEQ ID NO: 332156 - DNA, 15 bp, Homo sapiens
ttattgttagtatgc

SEQ ID NO: 332157 - DNA, 15 bp, Homo sapiens
attattgttagtatg

SEQ ID NO: 332158 - DNA, 15 bp, Homo sapiens
tattattgttagtat

SEQ ID NO: 332159 - DNA, 15 bp, Homo sapiens
atattattgttagta

SEQ ID NO: 332160 - DNA, 15 bp, Homo sapiens
aatattattgttagt

SEQ ID NO: 332161 - DNA, 15 bp, Homo sapiens
caatattattgttag

SEQ ID NO: 332162 - DNA, 15 bp, Homo sapiens
tcaatattattgtta

SEQ ID NO: 332163 - DNA, 15 bp, Homo sapiens
atcaatattattgtt

SEQ ID NO: 332164 - DNA, 15 bp, Homo sapiens
gatcaatattattgt

SEQ ID NO: 332165 - DNA, 15 bp, Homo sapiens
tgatcaatattattg

SEQ ID NO: 332166 - DNA, 15 bp, Homo sapiens
gtgatcaatattatt

SEQ ID NO: 332167 - DNA, 15 bp, Homo sapiens
tgtgatcaatattat

SEQ ID NO: 332168 - DNA, 15 bp, Homo sapiens
atgtgatcaatatta

SEQ ID NO: 332169 - DNA, 15 bp, Homo sapiens
tatgtgatcaatatt

SEQ ID NO: 332170 - DNA, 15 bp, Homo sapiens
ctatgtgatcaatat

SEQ ID NO: 332171 - DNA, 15 bp, Homo sapiens
gctatgtgatcaata

SEQ ID NO: 332172 - DNA, 15 bp, Homo sapiens
tgctatgtgatcaat

SEQ ID NO: 332173 - DNA, 15 bp, Homo sapiens
atgctatgtgatcaa

SEQ ID NO: 332174 - DNA, 15 bp, Homo sapiens
aatgctatgtgatca

SEQ ID NO: 332175 - DNA, 15 bp, Homo sapiens
aaatgctatgtgatc

SEQ ID NO: 332176 - DNA, 15 bp, Homo sapiens
gaaatgctatgtgat

SEQ ID NO: 332177 - DNA, 15 bp, Homo sapiens
agaaatgctatgtga

SEQ ID NO: 332178 - DNA, 15 bp, Homo sapiens
aagaaatgctatgtg

SEQ ID NO: 332179 - DNA, 15 bp, Homo sapiens
caagaaatgctatgt

SEQ ID NO: 332180 - DNA, 15 bp, Homo sapiens
acaagaaatgctatg

SEQ ID NO: 332181 - DNA, 15 bp, Homo sapiens
tacaagaaatgctat

SEQ ID NO: 332182 - DNA, 15 bp, Homo sapiens
ctacaagaaatgcta

SEQ ID NO: 332183 - DNA, 15 bp, Homo sapiens
actacaagaaatgct

SEQ ID NO: 332184 - DNA, 15 bp, Homo sapiens
aactacaagaaatgc

SEQ ID NO: 332185 - DNA, 15 bp, Homo sapiens
gaactacaagaaatg

SEQ ID NO: 332186 - DNA, 15 bp, Homo sapiens
tgaactacaagaaat

SEQ ID NO: 332187 - DNA, 15 bp, Homo sapiens
atgaactacaagaaa

SEQ ID NO: 332188 - DNA, 15 bp, Homo sapiens
tatgaactacaagaa

SEQ ID NO: 332189 - DNA, 15 bp, Homo sapiens
ttatgaactacaaga

SEQ ID NO: 332190 - DNA, 15 bp, Homo sapiens
tttatgaactacaag

SEQ ID NO: 332191 - DNA, 15 bp, Homo sapiens
gtttatgaactacaa

SEQ ID NO: 332192 - DNA, 15 bp, Homo sapiens
agtttatgaactaca

SEQ ID NO: 332193 - DNA, 15 bp, Homo sapiens
aagtttatgaactac

SEQ ID NO: 332194 - DNA, 15 bp, Homo sapiens
gaagtttatgaacta

SEQ ID NO: 332195 - DNA, 15 bp, Homo sapiens
tgaagtttatgaact

SEQ ID NO: 332196 - DNA, 15 bp, Homo sapiens
gtgaagtttatgaac

SEQ ID NO: 332197 - DNA, 15 bp, Homo sapiens
cgtgaagtttatgaa

SEQ ID NO: 332198 - DNA, 15 bp, Homo sapiens
acgtgaagtttatga

SEQ ID NO: 332199 - DNA, 15 bp, Homo sapiens
cacgtgaagtttatg

SEQ ID NO: 332200 - DNA, 15 bp, Homo sapiens
acacgtgaagtttat

SEQ ID NO: 332201 - DNA, 15 bp, Homo sapiens
gacacgtgaagttta

SEQ ID NO: 332202 - DNA, 15 bp, Homo sapiens
tgacacgtgaagttt

SEQ ID NO: 332203 - DNA, 15 bp, Homo sapiens
ttgacacgtgaagtt

SEQ ID NO: 332204 - DNA, 15 bp, Homo sapiens
attgacacgtgaagt

SEQ ID NO: 332205 - DNA, 15 bp, Homo sapiens
tattgacacgtgaag

SEQ ID NO: 332206 - DNA, 15 bp, Homo sapiens
ttattgacacgtgaa

SEQ ID NO: 332207 - DNA, 15 bp, Homo sapiens
attattgacacgtga

SEQ ID NO: 332208 - DNA, 15 bp, Homo sapiens
tattattgacacgtg

SEQ ID NO: 332209 - DNA, 15 bp, Homo sapiens
atattattgacacgt

SEQ ID NO: 332210 - DNA, 15 bp, Homo sapiens
tatattattgacacg

SEQ ID NO: 332211 - DNA, 15 bp, Homo sapiens
gtatattattgacac

SEQ ID NO: 332212 - DNA, 15 bp, Homo sapiens
agtatattattgaca

SEQ ID NO: 332213 - DNA, 15 bp, Homo sapiens
tagtatattattgac

SEQ ID NO: 332214 - DNA, 15 bp, Homo sapiens
atagtatattattga

SEQ ID NO: 332215 - DNA, 15 bp, Homo sapiens
tatagtatattattg

SEQ ID NO: 332216 - DNA, 15 bp, Homo sapiens
ttatagtatattatt

SEQ ID NO: 332217 - DNA, 15 bp, Homo sapiens
tttatagtatattat

SEQ ID NO: 332218 - DNA, 15 bp, Homo sapiens
atttatagtatatta

SEQ ID NO: 332219 - DNA, 15 bp, Homo sapiens
tatttatagtatatt

SEQ ID NO: 332220 - DNA, 15 bp, Homo sapiens
atatttatagtatat

SEQ ID NO: 332221 - DNA, 15 bp, Homo sapiens
tatatttatagtata

SEQ ID NO: 332222 - DNA, 15 bp, Homo sapiens
ttatatttatagtat

SEQ ID NO: 332223 - DNA, 15 bp, Homo sapiens
tttatatttatagta

SEQ ID NO: 332224 - DNA, 15 bp, Homo sapiens
atttatatttatagt

SEQ ID NO: 332225 - DNA, 15 bp, Homo sapiens
catttatatttatag

SEQ ID NO: 332226 - DNA, 15 bp, Homo sapiens
tcatttatatttata

SEQ ID NO: 332227 - DNA, 15 bp, Homo sapiens
ttcatttatatttat

SEQ ID NO: 332228 - DNA, 15 bp, Homo sapiens
attcatttatattta

SEQ ID NO: 332229 - DNA, 15 bp, Homo sapiens
aattcatttatattt

SEQ ID NO: 332230 - DNA, 15 bp, Homo sapiens
taattcatttatatt

SEQ ID NO: 332231 - DNA, 15 bp, Homo sapiens
ttaattcatttatat

SEQ ID NO: 332232 - DNA, 15 bp, Homo sapiens
attaattcatttata

SEQ ID NO: 332233 - DNA, 15 bp, Homo sapiens
cattaattcatttat

SEQ ID NO: 332234 - DNA, 15 bp, Homo sapiens
tcattaattcattta

SEQ ID NO: 332235 - DNA, 15 bp, Homo sapiens
ttcattaattcattt

SEQ ID NO: 332236 - DNA, 15 bp, Homo sapiens
gttcattaattcatt

SEQ ID NO: 332237 - DNA, 15 bp, Homo sapiens
tgttcattaattcat

SEQ ID NO: 332238 - DNA, 15 bp, Homo sapiens
ttgttcattaattca

SEQ ID NO: 332239 - DNA, 15 bp, Homo sapiens
gttgttcattaattc

SEQ ID NO: 332240 - DNA, 15 bp, Homo sapiens
tgttgttcattaatt

SEQ ID NO: 332241 - DNA, 15 bp, Homo sapiens
ctgttgttcattaat

SEQ ID NO: 332242 - DNA, 15 bp, Homo sapiens
cctgttgttcattaa

SEQ ID NO: 332243 - DNA, 15 bp, Homo sapiens
tcctgttgttcatta

SEQ ID NO: 332244 - DNA, 15 bp, Homo sapiens
atcctgttgttcatt

SEQ ID NO: 332245 - DNA, 15 bp, Homo sapiens
catcctgttgttcat

SEQ ID NO: 332246 - DNA, 15 bp, Homo sapiens
gcatcctgttgttca

SEQ ID NO: 332247 - DNA, 15 bp, Homo sapiens
agcatcctgttgttc

SEQ ID NO: 332248 - DNA, 15 bp, Homo sapiens
gagcatcctgttgtt

SEQ ID NO: 332249 - DNA, 15 bp, Homo sapiens
tgagcatcctgttgt

SEQ ID NO: 332250 - DNA, 15 bp, Homo sapiens
atgagcatcctgttg

SEQ ID NO: 332251 - DNA, 15 bp, Homo sapiens
tatgagcatcctgtt

SEQ ID NO: 332252 - DNA, 15 bp, Homo sapiens
ttatgagcatcctgt

SEQ ID NO: 332253 - DNA, 15 bp, Homo sapiens
cttatgagcatcctg

SEQ ID NO: 332254 - DNA, 15 bp, Homo sapiens
gcttatgagcatcct

SEQ ID NO: 332255 - DNA, 15 bp, Homo sapiens
agcttatgagcatcc

SEQ ID NO: 332256 - DNA, 15 bp, Homo sapiens
aagcttatgagcatc

SEQ ID NO: 332257 - DNA, 15 bp, Homo sapiens
taagcttatgagcat

SEQ ID NO: 332258 - DNA, 15 bp, Homo sapiens
gtaagcttatgagca

SEQ ID NO: 332259 - DNA, 15 bp, Homo sapiens
tgtaagcttatgagc

SEQ ID NO: 332260 - DNA, 15 bp, Homo sapiens
ctgtaagcttatgag

SEQ ID NO: 332261 - DNA, 15 bp, Homo sapiens
tctgtaagcttatga

SEQ ID NO: 332262 - DNA, 15 bp, Homo sapiens
gtctgtaagcttatg

SEQ ID NO: 332263 - DNA, 15 bp, Homo sapiens
tgtctgtaagcttat

SEQ ID NO: 332264 - DNA, 15 bp, Homo sapiens
atgtctgtaagctta

SEQ ID NO: 332265 - DNA, 15 bp, Homo sapiens
gatgtctgtaagctt

SEQ ID NO: 332266 - DNA, 15 bp, Homo sapiens
agatgtctgtaagct

SEQ ID NO: 332267 - DNA, 15 bp, Homo sapiens
aagatgtctgtaagc

SEQ ID NO: 332268 - DNA, 15 bp, Homo sapiens
aaagatgtctgtaag

SEQ ID NO: 332269 - DNA, 15 bp, Homo sapiens
aaaagatgtctgtaa

SEQ ID NO: 332270 - DNA, 15 bp, Homo sapiens
aaaaagatgtctgta

SEQ ID NO: 332271 - DNA, 15 bp, Homo sapiens
gaaaaagatgtctgt

SEQ ID NO: 332272 - DNA, 15 bp, Homo sapiens
agaaaaagatgtctg

SEQ ID NO: 332273 - DNA, 15 bp, Homo sapiens
gagaaaaagatgtct

SEQ ID NO: 332274 - DNA, 15 bp, Homo sapiens
tgagaaaaagatgtc

SEQ ID NO: 332275 - DNA, 15 bp, Homo sapiens
ttgagaaaaagatgt

SEQ ID NO: 332276 - DNA, 15 bp, Homo sapiens
tttgagaaaaagatg

SEQ ID NO: 332277 - DNA, 15 bp, Homo sapiens
ttttgagaaaaagat

SEQ ID NO: 332278 - DNA, 15 bp, Homo sapiens
tttttgagaaaaaga

SEQ ID NO: 332279 - DNA, 15 bp, Homo sapiens
ttttttgagaaaaag

SEQ ID NO: 332280 - DNA, 15 bp, Homo sapiens
cttttttgagaaaaa

SEQ ID NO: 332281 - DNA, 15 bp, Homo sapiens
gcttttttgagaaaa

SEQ ID NO: 332282 - DNA, 15 bp, Homo sapiens
agcttttttgagaaa

SEQ ID NO: 332283 - DNA, 15 bp, Homo sapiens
cagcttttttgagaa

SEQ ID NO: 332284 - DNA, 15 bp, Homo sapiens
ccagcttttttgaga

SEQ ID NO: 332285 - DNA, 15 bp, Homo sapiens
cccagcttttttgag

SEQ ID NO: 332286 - DNA, 15 bp, Homo sapiens
tcccagcttttttga

SEQ ID NO: 332287 - DNA, 15 bp, Homo sapiens
ttcccagcttttttg

SEQ ID NO: 332288 - DNA, 15 bp, Homo sapiens
attcccagctttttt

SEQ ID NO: 332289 - DNA, 15 bp, Homo sapiens
aattcccagcttttt

SEQ ID NO: 332290 - DNA, 15 bp, Homo sapiens
aaattcccagctttt

SEQ ID NO: 332291 - DNA, 15 bp, Homo sapiens
aaaattcccagcttt

SEQ ID NO: 332292 - DNA, 15 bp, Homo sapiens
caaaattcccagctt

SEQ ID NO: 332293 - DNA, 15 bp, Homo sapiens
acaaaattcccagct

SEQ ID NO: 332294 - DNA, 15 bp, Homo sapiens
aacaaaattcccagc

SEQ ID NO: 332295 - DNA, 15 bp, Homo sapiens
aaacaaaattcccag

SEQ ID NO: 332296 - DNA, 15 bp, Homo sapiens
gaaacaaaattccca

SEQ ID NO: 332297 - DNA, 15 bp, Homo sapiens
agaaacaaaattccc

SEQ ID NO: 332298 - DNA, 15 bp, Homo sapiens
cagaaacaaaattcc

SEQ ID NO: 332299 - DNA, 15 bp, Homo sapiens
acagaaacaaaattc

SEQ ID NO: 332300 - DNA, 15 bp, Homo sapiens
aacagaaacaaaatt

SEQ ID NO: 332301 - DNA, 15 bp, Homo sapiens
aaacagaaacaaaat

SEQ ID NO: 332302 - DNA, 15 bp, Homo sapiens
aaaacagaaacaaaa

SEQ ID NO: 332303 - DNA, 15 bp, Homo sapiens
taaaacagaaacaaa

SEQ ID NO: 332304 - DNA, 15 bp, Homo sapiens
ataaaacagaaacaa

SEQ ID NO: 332305 - DNA, 15 bp, Homo sapiens
aataaaacagaaaca

SEQ ID NO: 332306 - DNA, 15 bp, Homo sapiens
caataaaacagaaac

SEQ ID NO: 332307 - DNA, 15 bp, Homo sapiens
ccaataaaacagaaa

SEQ ID NO: 332308 - DNA, 15 bp, Homo sapiens
cccaataaaacagaa

SEQ ID NO: 332309 - DNA, 15 bp, Homo sapiens
tcccaataaaacaga

SEQ ID NO: 332310 - DNA, 15 bp, Homo sapiens
atcccaataaaacag

SEQ ID NO: 332311 - DNA, 15 bp, Homo sapiens
tatcccaataaaaca

SEQ ID NO: 332312 - DNA, 15 bp, Homo sapiens
gtatcccaataaaac

SEQ ID NO: 332313 - DNA, 15 bp, Homo sapiens
agtatcccaataaaa

SEQ ID NO: 332314 - DNA, 15 bp, Homo sapiens
cagtatcccaataaa

SEQ ID NO: 332315 - DNA, 15 bp, Homo sapiens
tcagtatcccaataa

SEQ ID NO: 332316 - DNA, 15 bp, Homo sapiens
gtcagtatcccaata

SEQ ID NO: 332317 - DNA, 15 bp, Homo sapiens
agtcagtatcccaat

SEQ ID NO: 332318 - DNA, 15 bp, Homo sapiens
gagtcagtatcccaa

SEQ ID NO: 332319 - DNA, 15 bp, Homo sapiens
agagtcagtatccca

SEQ ID NO: 332320 - DNA, 15 bp, Homo sapiens
gagagtcagtatccc

SEQ ID NO: 332321 - DNA, 15 bp, Homo sapiens
tgagagtcagtatcc

SEQ ID NO: 332322 - DNA, 15 bp, Homo sapiens
ttgagagtcagtatc

SEQ ID NO: 332323 - DNA, 15 bp, Homo sapiens
gttgagagtcagtat

SEQ ID NO: 332324 - DNA, 15 bp, Homo sapiens
tgttgagagtcagta

SEQ ID NO: 332325 - DNA, 15 bp, Homo sapiens
atgttgagagtcagt

SEQ ID NO: 332326 - DNA, 15 bp, Homo sapiens
aatgttgagagtcag

SEQ ID NO: 332327 - DNA, 15 bp, Homo sapiens
aaatgttgagagtca

SEQ ID NO: 332328 - DNA, 15 bp, Homo sapiens
gaaatgttgagagtc

SEQ ID NO: 332329 - DNA, 15 bp, Homo sapiens
tgaaatgttgagagt

SEQ ID NO: 332330 - DNA, 15 bp, Homo sapiens
atgaaatgttgagag

SEQ ID NO: 332331 - DNA, 15 bp, Homo sapiens
tatgaaatgttgaga

SEQ ID NO: 332332 - DNA, 15 bp, Homo sapiens
atatgaaatgttgag

SEQ ID NO: 332333 - DNA, 15 bp, Homo sapiens
tatatgaaatgttga

SEQ ID NO: 332334 - DNA, 15 bp, Homo sapiens
atatatgaaatgttg

SEQ ID NO: 332335 - DNA, 15 bp, Homo sapiens
aatatatgaaatgtt

SEQ ID NO: 332336 - DNA, 15 bp, Homo sapiens
caatatatgaaatgt

SEQ ID NO: 332337 - DNA, 15 bp, Homo sapiens
gcaatatatgaaatg

SEQ ID NO: 332338 - DNA, 15 bp, Homo sapiens
tgcaatatatgaaat

SEQ ID NO: 332339 - DNA, 15 bp, Homo sapiens
atgcaatatatgaaa

SEQ ID NO: 332340 - DNA, 15 bp, Homo sapiens
aatgcaatatatgaa

SEQ ID NO: 332341 - DNA, 15 bp, Homo sapiens
gaatgcaatatatga

SEQ ID NO: 332342 - DNA, 15 bp, Homo sapiens
ggaatgcaatatatg

SEQ ID NO: 332343 - DNA, 15 bp, Homo sapiens
tggaatgcaatatat

SEQ ID NO: 332344 - DNA, 15 bp, Homo sapiens
gtggaatgcaatata

SEQ ID NO: 332345 - DNA, 15 bp, Homo sapiens
ggtggaatgcaatat

SEQ ID NO: 332346 - DNA, 15 bp, Homo sapiens
tggtggaatgcaata

SEQ ID NO: 332347 - DNA, 15 bp, Homo sapiens
ttggtggaatgcaat

SEQ ID NO: 332348 - DNA, 15 bp, Homo sapiens
gttggtggaatgcaa

SEQ ID NO: 332349 - DNA, 15 bp, Homo sapiens
cgttggtggaatgca

SEQ ID NO: 332350 - DNA, 15 bp, Homo sapiens
acgttggtggaatgc

SEQ ID NO: 332351 - DNA, 15 bp, Homo sapiens
tacgttggtggaatg

SEQ ID NO: 332352 - DNA, 15 bp, Homo sapiens
ctacgttggtggaat

SEQ ID NO: 332353 - DNA, 15 bp, Homo sapiens
gctacgttggtggaa

SEQ ID NO: 332354 - DNA, 15 bp, Homo sapiens
agctacgttggtgga

SEQ ID NO: 332355 - DNA, 15 bp, Homo sapiens
cagctacgttggtgg

SEQ ID NO: 332356 - DNA, 15 bp, Homo sapiens
tcagctacgttggtg

SEQ ID NO: 332357 - DNA, 15 bp, Homo sapiens
ctcagctacgttggt

SEQ ID NO: 332358 - DNA, 15 bp, Homo sapiens
tctcagctacgttgg

SEQ ID NO: 332359 - DNA, 15 bp, Homo sapiens
ctctcagctacgttg

SEQ ID NO: 332360 - DNA, 15 bp, Homo sapiens
actctcagctacgtt

SEQ ID NO: 332361 - DNA, 15 bp, Homo sapiens
gactctcagctacgt

SEQ ID NO: 332362 - DNA, 15 bp, Homo sapiens
tgactctcagctacg

SEQ ID NO: 332363 - DNA, 15 bp, Homo sapiens
ttgactctcagctac

SEQ ID NO: 332364 - DNA, 15 bp, Homo sapiens
attgactctcagcta

SEQ ID NO: 332365 - DNA, 15 bp, Homo sapiens
aattgactctcagct

SEQ ID NO: 332366 - DNA, 15 bp, Homo sapiens
aaattgactctcagc

SEQ ID NO: 332367 - DNA, 15 bp, Homo sapiens
taaattgactctcag

SEQ ID NO: 332368 - DNA, 15 bp, Homo sapiens
ataaattgactctca

SEQ ID NO: 332369 - DNA, 15 bp, Homo sapiens
cataaattgactctc

SEQ ID NO: 332370 - DNA, 15 bp, Homo sapiens
tcataaattgactct

SEQ ID NO: 332371 - DNA, 15 bp, Homo sapiens
ttcataaattgactc

SEQ ID NO: 332372 - DNA, 15 bp, Homo sapiens
tttcataaattgact

SEQ ID NO: 332373 - DNA, 15 bp, Homo sapiens
atttcataaattgac

SEQ ID NO: 332374 - DNA, 15 bp, Homo sapiens
tatttcataaattga

SEQ ID NO: 332375 - DNA, 15 bp, Homo sapiens
atatttcataaattg

SEQ ID NO: 332376 - DNA, 15 bp, Homo sapiens
aatatttcataaatt

SEQ ID NO: 332377 - DNA, 15 bp, Homo sapiens
aaatatttcataaat

SEQ ID NO: 332378 - DNA, 15 bp, Homo sapiens
aaaatatttcataaa

SEQ ID NO: 332379 - DNA, 15 bp, Homo sapiens
caaaatatttcataa

SEQ ID NO: 332380 - DNA, 15 bp, Homo sapiens
acaaaatatttcata

SEQ ID NO: 332381 - DNA, 15 bp, Homo sapiens
tacaaaatatttcat

SEQ ID NO: 332382 - DNA, 15 bp, Homo sapiens
ctacaaaatatttca

SEQ ID NO: 332383 - DNA, 15 bp, Homo sapiens
actacaaaatatttc

SEQ ID NO: 332384 - DNA, 15 bp, Homo sapiens
cactacaaaatattt

SEQ ID NO: 332385 - DNA, 15 bp, Homo sapiens
acactacaaaatatt

SEQ ID NO: 332386 - DNA, 15 bp, Homo sapiens
tacactacaaaatat

SEQ ID NO: 332387 - DNA, 15 bp, Homo sapiens
ttacactacaaaata

SEQ ID NO: 332388 - DNA, 15 bp, Homo sapiens
cttacactacaaaat

SEQ ID NO: 332389 - DNA, 15 bp, Homo sapiens
tcttacactacaaaa

SEQ ID NO: 332390 - DNA, 15 bp, Homo sapiens
gtcttacactacaaa

SEQ ID NO: 332391 - DNA, 15 bp, Homo sapiens
tgtcttacactacaa

SEQ ID NO: 332392 - DNA, 15 bp, Homo sapiens
ctgtcttacactaca

SEQ ID NO: 332393 - DNA, 15 bp, Homo sapiens
tctgtcttacactac

SEQ ID NO: 332394 - DNA, 15 bp, Homo sapiens
ttctgtcttacacta

SEQ ID NO: 332395 - DNA, 15 bp, Homo sapiens
tttctgtcttacact

SEQ ID NO: 332396 - DNA, 15 bp, Homo sapiens
ctttctgtcttacac

SEQ ID NO: 332397 - DNA, 15 bp, Homo sapiens
actttctgtcttaca

SEQ ID NO: 332398 - DNA, 15 bp, Homo sapiens
cactttctgtcttac

SEQ ID NO: 332399 - DNA, 15 bp, Homo sapiens
ccactttctgtctta

SEQ ID NO: 332400 - DNA, 15 bp, Homo sapiens
cccactttctgtctt

SEQ ID NO: 332401 - DNA, 15 bp, Homo sapiens
ccccactttctgtct

SEQ ID NO: 332402 - DNA, 15 bp, Homo sapiens
tccccactttctgtc

SEQ ID NO: 332403 - DNA, 15 bp, Homo sapiens
ctccccactttctgt

SEQ ID NO: 332404 - DNA, 15 bp, Homo sapiens
cctccccactttctg

SEQ ID NO: 332405 - DNA, 15 bp, Homo sapiens
tcctccccactttct

SEQ ID NO: 332406 - DNA, 15 bp, Homo sapiens
gtcctccccactttc

SEQ ID NO: 332407 - DNA, 15 bp, Homo sapiens
ggtcctccccacttt

SEQ ID NO: 332408 - DNA, 15 bp, Homo sapiens
tggtcctccccactt

SEQ ID NO: 332409 - DNA, 15 bp, Homo sapiens
ttggtcctccccact

SEQ ID NO: 332410 - DNA, 15 bp, Homo sapiens
cttggtcctccccac

SEQ ID NO: 332411 - DNA, 15 bp, Homo sapiens
acttggtcctcccca

SEQ ID NO: 332412 - DNA, 15 bp, Homo sapiens
tacttggtcctcccc

SEQ ID NO: 332413 - DNA, 15 bp, Homo sapiens
atacttggtcctccc

SEQ ID NO: 332414 - DNA, 15 bp, Homo sapiens
catacttggtcctcc

SEQ ID NO: 332415 - DNA, 15 bp, Homo sapiens
acatacttggtcctc

SEQ ID NO: 332416 - DNA, 15 bp, Homo sapiens
gacatacttggtcct

SEQ ID NO: 332417 - DNA, 15 bp, Homo sapiens
tgacatacttggtcc

SEQ ID NO: 332418 - DNA, 15 bp, Homo sapiens
ttgacatacttggtc

SEQ ID NO: 332419 - DNA, 15 bp, Homo sapiens
gttgacatacttggt

SEQ ID NO: 332420 - DNA, 15 bp, Homo sapiens
ggttgacatacttgg

SEQ ID NO: 332421 - DNA, 15 bp, Homo sapiens
tggttgacatacttg

SEQ ID NO: 332422 - DNA, 15 bp, Homo sapiens
gtggttgacatactt

SEQ ID NO: 332423 - DNA, 15 bp, Homo sapiens
agtggttgacatact

SEQ ID NO: 332424 - DNA, 15 bp, Homo sapiens
tagtggttgacatac

SEQ ID NO: 332425 - DNA, 15 bp, Homo sapiens
ctagtggttgacata

SEQ ID NO: 332426 - DNA, 15 bp, Homo sapiens
cctagtggttgacat

SEQ ID NO: 332427 - DNA, 15 bp, Homo sapiens
tcctagtggttgaca

SEQ ID NO: 332428 - DNA, 15 bp, Homo sapiens
ctcctagtggttgac

SEQ ID NO: 332429 - DNA, 15 bp, Homo sapiens
actcctagtggttga

SEQ ID NO: 332430 - DNA, 15 bp, Homo sapiens
cactcctagtggttg

SEQ ID NO: 332431 - DNA, 15 bp, Homo sapiens
acactcctagtggtt

SEQ ID NO: 332432 - DNA, 15 bp, Homo sapiens
cacactcctagtggt

SEQ ID NO: 332433 - DNA, 15 bp, Homo sapiens
ccacactcctagtgg

SEQ ID NO: 332434 - DNA, 15 bp, Homo sapiens
accacactcctagtg

SEQ ID NO: 332435 - DNA, 15 bp, Homo sapiens
caccacactcctagt

SEQ ID NO: 332436 - DNA, 15 bp, Homo sapiens
gcaccacactcctag

SEQ ID NO: 332437 - DNA, 15 bp, Homo sapiens
ggcaccacactccta

SEQ ID NO: 332438 - DNA, 15 bp, Homo sapiens
aggcaccacactcct

SEQ ID NO: 332439 - DNA, 15 bp, Homo sapiens
taggcaccacactcc

SEQ ID NO: 332440 - DNA, 15 bp, Homo sapiens
ctaggcaccacactc

SEQ ID NO: 332441 - DNA, 15 bp, Homo sapiens
actaggcaccacact

SEQ ID NO: 332442 - DNA, 15 bp, Homo sapiens
gactaggcaccacac

SEQ ID NO: 332443 - DNA, 15 bp, Homo sapiens
tgactaggcaccaca

SEQ ID NO: 332444 - DNA, 15 bp, Homo sapiens
ctgactaggcaccac

SEQ ID NO: 332445 - DNA, 15 bp, Homo sapiens
cctgactaggcacca

SEQ ID NO: 332446 - DNA, 15 bp, Homo sapiens
tcctgactaggcacc

SEQ ID NO: 332447 - DNA, 15 bp, Homo sapiens
ttcctgactaggcac

SEQ ID NO: 332448 - DNA, 15 bp, Homo sapiens
attcctgactaggca

SEQ ID NO: 332449 - DNA, 15 bp, Homo sapiens
aattcctgactaggc

SEQ ID NO: 332450 - DNA, 15 bp, Homo sapiens
caattcctgactagg

SEQ ID NO: 332451 - DNA, 15 bp, Homo sapiens
ccaattcctgactag

SEQ ID NO: 332452 - DNA, 15 bp, Homo sapiens
cccaattcctgacta

SEQ ID NO: 332453 - DNA, 15 bp, Homo sapiens
tcccaattcctgact

SEQ ID NO: 332454 - DNA, 15 bp, Homo sapiens
ctcccaattcctgac

SEQ ID NO: 332455 - DNA, 15 bp, Homo sapiens
cctcccaattcctga

SEQ ID NO: 332456 - DNA, 15 bp, Homo sapiens
tcctcccaattcctg

SEQ ID NO: 332457 - DNA, 15 bp, Homo sapiens
ctcctcccaattcct

SEQ ID NO: 332458 - DNA, 15 bp, Homo sapiens
actcctcccaattcc

SEQ ID NO: 332459 - DNA, 15 bp, Homo sapiens
cactcctcccaattc

SEQ ID NO: 332460 - DNA, 15 bp, Homo sapiens
acactcctcccaatt

SEQ ID NO: 332461 - DNA, 15 bp, Homo sapiens
tacactcctcccaat

SEQ ID NO: 332462 - DNA, 15 bp, Homo sapiens
ctacactcctcccaa

SEQ ID NO: 332463 - DNA, 15 bp, Homo sapiens
gctacactcctccca

SEQ ID NO: 332464 - DNA, 15 bp, Homo sapiens
tgctacactcctccc

SEQ ID NO: 332465 - DNA, 15 bp, Homo sapiens
ttgctacactcctcc

SEQ ID NO: 332466 - DNA, 15 bp, Homo sapiens
cttgctacactcctc

SEQ ID NO: 332467 - DNA, 15 bp, Homo sapiens
tcttgctacactcct

SEQ ID NO: 332468 - DNA, 15 bp, Homo sapiens
ttcttgctacactcc

SEQ ID NO: 332469 - DNA, 15 bp, Homo sapiens
tttcttgctacactc

SEQ ID NO: 332470 - DNA, 15 bp, Homo sapiens
ctttcttgctacact

SEQ ID NO: 332471 - DNA, 15 bp, Homo sapiens
cctttcttgctacac

SEQ ID NO: 332472 - DNA, 15 bp, Homo sapiens
tcctttcttgctaca

SEQ ID NO: 332473 - DNA, 15 bp, Homo sapiens
ttcctttcttgctac

SEQ ID NO: 332474 - DNA, 15 bp, Homo sapiens
cttcctttcttgcta

SEQ ID NO: 332475 - DNA, 15 bp, Homo sapiens
ccttcctttcttgct

SEQ ID NO: 332476 - DNA, 15 bp, Homo sapiens
tccttcctttcttgc

SEQ ID NO: 332477 - DNA, 15 bp, Homo sapiens
gtccttcctttcttg

SEQ ID NO: 332478 - DNA, 15 bp, Homo sapiens
tgtccttcctttctt

SEQ ID NO: 332479 - DNA, 15 bp, Homo sapiens
ttgtccttcctttct

SEQ ID NO: 332480 - DNA, 15 bp, Homo sapiens
gttgtccttcctttc

SEQ ID NO: 332481 - DNA, 15 bp, Homo sapiens
tgttgtccttccttt

SEQ ID NO: 332482 - DNA, 15 bp, Homo sapiens
ctgttgtccttcctt

SEQ ID NO: 332483 - DNA, 15 bp, Homo sapiens
cctgttgtccttcct

SEQ ID NO: 332484 - DNA, 15 bp, Homo sapiens
tcctgttgtccttcc

SEQ ID NO: 332485 - DNA, 15 bp, Homo sapiens
atcctgttgtccttc

SEQ ID NO: 332486 - DNA, 15 bp, Homo sapiens
aatcctgttgtcctt

SEQ ID NO: 332487 - DNA, 15 bp, Homo sapiens
aaatcctgttgtcct

SEQ ID NO: 332488 - DNA, 15 bp, Homo sapiens
caaatcctgttgtcc

SEQ ID NO: 332489 - DNA, 15 bp, Homo sapiens
ccaaatcctgttgtc

SEQ ID NO: 332490 - DNA, 15 bp, Homo sapiens
accaaatcctgttgt

SEQ ID NO: 332491 - DNA, 15 bp, Homo sapiens
gaccaaatcctgttg

SEQ ID NO: 332492 - DNA, 15 bp, Homo sapiens
tgaccaaatcctgtt

SEQ ID NO: 332493 - DNA, 15 bp, Homo sapiens
atgaccaaatcctgt

SEQ ID NO: 332494 - DNA, 15 bp, Homo sapiens
aatgaccaaatcctg

SEQ ID NO: 332495 - DNA, 15 bp, Homo sapiens
caatgaccaaatcct

SEQ ID NO: 332496 - DNA, 15 bp, Homo sapiens
tcaatgaccaaatcc

SEQ ID NO: 332497 - DNA, 15 bp, Homo sapiens
atcaatgaccaaatc

SEQ ID NO: 332498 - DNA, 15 bp, Homo sapiens
aatcaatgaccaaat

SEQ ID NO: 332499 - DNA, 15 bp, Homo sapiens
caatcaatgaccaaa

SEQ ID NO: 332500 - DNA, 15 bp, Homo sapiens
ccaatcaatgaccaa

SEQ ID NO: 332501 - DNA, 15 bp, Homo sapiens
accaatcaatgacca

SEQ ID NO: 332502 - DNA, 15 bp, Homo sapiens
gaccaatcaatgacc

SEQ ID NO: 332503 - DNA, 15 bp, Homo sapiens
tgaccaatcaatgac

SEQ ID NO: 332504 - DNA, 15 bp, Homo sapiens
ctgaccaatcaatga

SEQ ID NO: 332505 - DNA, 15 bp, Homo sapiens
tctgaccaatcaatg

SEQ ID NO: 332506 - DNA, 15 bp, Homo sapiens
atctgaccaatcaat

SEQ ID NO: 332507 - DNA, 15 bp, Homo sapiens
catctgaccaatcaa

SEQ ID NO: 332508 - DNA, 15 bp, Homo sapiens
ccatctgaccaatca

SEQ ID NO: 332509 - DNA, 15 bp, Homo sapiens
tccatctgaccaatc

SEQ ID NO: 332510 - DNA, 15 bp, Homo sapiens
atccatctgaccaat

SEQ ID NO: 332511 - DNA, 15 bp, Homo sapiens
aatccatctgaccaa

SEQ ID NO: 332512 - DNA, 15 bp, Homo sapiens
aaatccatctgacca

SEQ ID NO: 332513 - DNA, 15 bp, Homo sapiens
gaaatccatctgacc

SEQ ID NO: 332514 - DNA, 15 bp, Homo sapiens
tgaaatccatctgac

SEQ ID NO: 332515 - DNA, 15 bp, Homo sapiens
ctgaaatccatctga

SEQ ID NO: 332516 - DNA, 15 bp, Homo sapiens
tctgaaatccatctg

SEQ ID NO: 332517 - DNA, 15 bp, Homo sapiens
ctctgaaatccatct

SEQ ID NO: 332518 - DNA, 15 bp, Homo sapiens
cctctgaaatccatc

SEQ ID NO: 332519 - DNA, 15 bp, Homo sapiens
ccctctgaaatccat

SEQ ID NO: 332520 - DNA, 15 bp, Homo sapiens
tccctctgaaatcca

SEQ ID NO: 332521 - DNA, 15 bp, Homo sapiens
atccctctgaaatcc

SEQ ID NO: 332522 - DNA, 15 bp, Homo sapiens
aatccctctgaaatc

SEQ ID NO: 332523 - DNA, 15 bp, Homo sapiens
caatccctctgaaat

SEQ ID NO: 332524 - DNA, 15 bp, Homo sapiens
ccaatccctctgaaa

SEQ ID NO: 332525 - DNA, 15 bp, Homo sapiens
accaatccctctgaa

SEQ ID NO: 332526 - DNA, 15 bp, Homo sapiens
taccaatccctctga

SEQ ID NO: 332527 - DNA, 15 bp, Homo sapiens
ataccaatccctctg

SEQ ID NO: 332528 - DNA, 15 bp, Homo sapiens
cataccaatccctct

SEQ ID NO: 332529 - DNA, 15 bp, Homo sapiens
tcataccaatccctc

SEQ ID NO: 332530 - DNA, 15 bp, Homo sapiens
ttcataccaatccct

SEQ ID NO: 332531 - DNA, 15 bp, Homo sapiens
cttcataccaatccc

SEQ ID NO: 332532 - DNA, 15 bp, Homo sapiens
ccttcataccaatcc

SEQ ID NO: 332533 - DNA, 15 bp, Homo sapiens
tccttcataccaatc

SEQ ID NO: 332534 - DNA, 15 bp, Homo sapiens
ttccttcataccaat

SEQ ID NO: 332535 - DNA, 15 bp, Homo sapiens
gttccttcataccaa

SEQ ID NO: 332536 - DNA, 15 bp, Homo sapiens
cgttccttcatacca

SEQ ID NO: 332537 - DNA, 15 bp, Homo sapiens
gcgttccttcatacc

SEQ ID NO: 332538 - DNA, 15 bp, Homo sapiens
agcgttccttcatac

SEQ ID NO: 332539 - DNA, 15 bp, Homo sapiens
aagcgttccttcata

SEQ ID NO: 332540 - DNA, 15 bp, Homo sapiens
gaagcgttccttcat

SEQ ID NO: 332541 - DNA, 15 bp, Homo sapiens
tgaagcgttccttca

SEQ ID NO: 332542 - DNA, 15 bp, Homo sapiens
ttgaagcgttccttc

SEQ ID NO: 332543 - DNA, 15 bp, Homo sapiens
tttgaagcgttcctt

SEQ ID NO: 332544 - DNA, 15 bp, Homo sapiens
ctttgaagcgttcct

SEQ ID NO: 332545 - DNA, 15 bp, Homo sapiens
tctttgaagcgttcc

SEQ ID NO: 332546 - DNA, 15 bp, Homo sapiens
atctttgaagcgttc

SEQ ID NO: 332547 - DNA, 15 bp, Homo sapiens
aatctttgaagcgtt

SEQ ID NO: 332548 - DNA, 15 bp, Homo sapiens
aaatctttgaagcgt

SEQ ID NO: 332549 - DNA, 15 bp, Homo sapiens
aaaatctttgaagcg

SEQ ID NO: 332550 - DNA, 15 bp, Homo sapiens
aaaaatctttgaagc

SEQ ID NO: 332551 - DNA, 15 bp, Homo sapiens
aaaaaatctttgaag

SEQ ID NO: 332552 - DNA, 15 bp, Homo sapiens
aaaaaaatctttgaa

SEQ ID NO: 332553 - DNA, 15 bp, Homo sapiens
aaaaaaaatctttga

SEQ ID NO: 332554 - DNA, 15 bp, Homo sapiens
aaaaaaaaatctttg

SEQ ID NO: 332555 - DNA, 15 bp, Homo sapiens
aaaaaaaaaatcttt

SEQ ID NO: 332556 - DNA, 15 bp, Homo sapiens
taaaaaaaaaatctt

SEQ ID NO: 332557 - DNA, 15 bp, Homo sapiens
ttaaaaaaaaaatct

SEQ ID NO: 332558 - DNA, 15 bp, Homo sapiens
attaaaaaaaaaatc

SEQ ID NO: 332559 - DNA, 15 bp, Homo sapiens
aattaaaaaaaaaat

SEQ ID NO: 332560 - DNA, 15 bp, Homo sapiens
aaattaaaaaaaaaa

SEQ ID NO: 332561 - DNA, 15 bp, Homo sapiens
taaattaaaaaaaaa

SEQ ID NO: 332562 - DNA, 15 bp, Homo sapiens
ttaaattaaaaaaaa

SEQ ID NO: 332563 - DNA, 15 bp, Homo sapiens
cttaaattaaaaaaa

SEQ ID NO: 332564 - DNA, 15 bp, Homo sapiens
acttaaattaaaaaa

SEQ ID NO: 332565 - DNA, 15 bp, Homo sapiens
aacttaaattaaaaa

SEQ ID NO: 332566 - DNA, 15 bp, Homo sapiens
gaacttaaattaaaa

SEQ ID NO: 332567 - DNA, 15 bp, Homo sapiens
ggaacttaaattaaa

SEQ ID NO: 332568 - DNA, 15 bp, Homo sapiens
tggaacttaaattaa

SEQ ID NO: 332569 - DNA, 15 bp, Homo sapiens
ctggaacttaaatta

SEQ ID NO: 332570 - DNA, 15 bp, Homo sapiens
cctggaacttaaatt

SEQ ID NO: 332571 - DNA, 15 bp, Homo sapiens
tcctggaacttaaat

SEQ ID NO: 332572 - DNA, 15 bp, Homo sapiens
atcctggaacttaaa

SEQ ID NO: 332573 - DNA, 15 bp, Homo sapiens
tatcctggaacttaa

SEQ ID NO: 332574 - DNA, 15 bp, Homo sapiens
gtatcctggaactta

SEQ ID NO: 332575 - DNA, 15 bp, Homo sapiens
tgtatcctggaactt

SEQ ID NO: 332576 - DNA, 15 bp, Homo sapiens
ctgtatcctggaact

SEQ ID NO: 332577 - DNA, 15 bp, Homo sapiens
cctgtatcctggaac

SEQ ID NO: 332578 - DNA, 15 bp, Homo sapiens
acctgtatcctggaa

SEQ ID NO: 332579 - DNA, 15 bp, Homo sapiens
cacctgtatcctgga

SEQ ID NO: 332580 - DNA, 15 bp, Homo sapiens
gcacctgtatcctgg

SEQ ID NO: 332581 - DNA, 15 bp, Homo sapiens
tgcacctgtatcctg

SEQ ID NO: 332582 - DNA, 15 bp, Homo sapiens
ctgcacctgtatcct

SEQ ID NO: 332583 - DNA, 15 bp, Homo sapiens
tctgcacctgtatcc

SEQ ID NO: 332584 - DNA, 15 bp, Homo sapiens
ttctgcacctgtatc

SEQ ID NO: 332585 - DNA, 15 bp, Homo sapiens
attctgcacctgtat

SEQ ID NO: 332586 - DNA, 15 bp, Homo sapiens
cattctgcacctgta

SEQ ID NO: 332587 - DNA, 15 bp, Homo sapiens
acattctgcacctgt

SEQ ID NO: 332588 - DNA, 15 bp, Homo sapiens
cacattctgcacctg

SEQ ID NO: 332589 - DNA, 15 bp, Homo sapiens
acacattctgcacct

SEQ ID NO: 332590 - DNA, 15 bp, Homo sapiens
tacacattctgcacc

SEQ ID NO: 332591 - DNA, 15 bp, Homo sapiens
ctacacattctgcac

SEQ ID NO: 332592 - DNA, 15 bp, Homo sapiens
cctacacattctgca

SEQ ID NO: 332593 - DNA, 15 bp, Homo sapiens
acctacacattctgc

SEQ ID NO: 332594 - DNA, 15 bp, Homo sapiens
aacctacacattctg

SEQ ID NO: 332595 - DNA, 15 bp, Homo sapiens
aaacctacacattct

SEQ ID NO: 332596 - DNA, 15 bp, Homo sapiens
caaacctacacattc

SEQ ID NO: 332597 - DNA, 15 bp, Homo sapiens
acaaacctacacatt

SEQ ID NO: 332598 - DNA, 15 bp, Homo sapiens
aacaaacctacacat

SEQ ID NO: 332599 - DNA, 15 bp, Homo sapiens
taacaaacctacaca

SEQ ID NO: 332600 - DNA, 15 bp, Homo sapiens
gtaacaaacctacac

SEQ ID NO: 332601 - DNA, 15 bp, Homo sapiens
tgtaacaaacctaca

SEQ ID NO: 332602 - DNA, 15 bp, Homo sapiens
atgtaacaaacctac

SEQ ID NO: 332603 - DNA, 15 bp, Homo sapiens
tatgtaacaaaccta

SEQ ID NO: 332604 - DNA, 15 bp, Homo sapiens
gtatgtaacaaacct

SEQ ID NO: 332605 - DNA, 15 bp, Homo sapiens
agtatgtaacaaacc

SEQ ID NO: 332606 - DNA, 15 bp, Homo sapiens
aagtatgtaacaaac

SEQ ID NO: 332607 - DNA, 15 bp, Homo sapiens
taagtatgtaacaaa

SEQ ID NO: 332608 - DNA, 15 bp, Homo sapiens
ataagtatgtaacaa

SEQ ID NO: 332609 - DNA, 15 bp, Homo sapiens
tataagtatgtaaca

SEQ ID NO: 332610 - DNA, 15 bp, Homo sapiens
ctataagtatgtaac

SEQ ID NO: 332611 - DNA, 15 bp, Homo sapiens
cctataagtatgtaa

SEQ ID NO: 332612 - DNA, 15 bp, Homo sapiens
acctataagtatgta

SEQ ID NO: 332613 - DNA, 15 bp, Homo sapiens
cacctataagtatgt

SEQ ID NO: 332614 - DNA, 15 bp, Homo sapiens
tcacctataagtatg

SEQ ID NO: 332615 - DNA, 15 bp, Homo sapiens
ctcacctataagtat

SEQ ID NO: 332616 - DNA, 15 bp, Homo sapiens
gctcacctataagta

SEQ ID NO: 332617 - DNA, 15 bp, Homo sapiens
ggctcacctataagt

SEQ ID NO: 332618 - DNA, 15 bp, Homo sapiens
tggctcacctataag

SEQ ID NO: 332619 - DNA, 15 bp, Homo sapiens
atggctcacctataa

SEQ ID NO: 332620 - DNA, 15 bp, Homo sapiens
catggctcacctata

SEQ ID NO: 332621 - DNA, 15 bp, Homo sapiens
ccatggctcacctat

SEQ ID NO: 332622 - DNA, 15 bp, Homo sapiens
accatggctcaccta

SEQ ID NO: 332623 - DNA, 15 bp, Homo sapiens
caccatggctcacct

SEQ ID NO: 332624 - DNA, 15 bp, Homo sapiens
ccaccatggctcacc

SEQ ID NO: 332625 - DNA, 15 bp, Homo sapiens
accaccatggctcac

SEQ ID NO: 332626 - DNA, 15 bp, Homo sapiens
aaccaccatggctca

SEQ ID NO: 332627 - DNA, 15 bp, Homo sapiens
aaaccaccatggctc

SEQ ID NO: 332628 - DNA, 15 bp, Homo sapiens
caaaccaccatggct

SEQ ID NO: 332629 - DNA, 15 bp, Homo sapiens
gcaaaccaccatggc

SEQ ID NO: 332630 - DNA, 15 bp, Homo sapiens
agcaaaccaccatgg

SEQ ID NO: 332631 - DNA, 15 bp, Homo sapiens
cagcaaaccaccatg

SEQ ID NO: 332632 - DNA, 15 bp, Homo sapiens
gcagcaaaccaccat

SEQ ID NO: 332633 - DNA, 15 bp, Homo sapiens
tgcagcaaaccacca

SEQ ID NO: 332634 - DNA, 15 bp, Homo sapiens
gtgcagcaaaccacc

SEQ ID NO: 332635 - DNA, 15 bp, Homo sapiens
ggtgcagcaaaccac

SEQ ID NO: 332636 - DNA, 15 bp, Homo sapiens
tggtgcagcaaacca

SEQ ID NO: 332637 - DNA, 15 bp, Homo sapiens
ttggtgcagcaaacc

SEQ ID NO: 332638 - DNA, 15 bp, Homo sapiens
attggtgcagcaaac

SEQ ID NO: 332639 - DNA, 15 bp, Homo sapiens
gattggtgcagcaaa

SEQ ID NO: 332640 - DNA, 15 bp, Homo sapiens
tgattggtgcagcaa

SEQ ID NO: 332641 - DNA, 15 bp, Homo sapiens
ttgattggtgcagca

SEQ ID NO: 332642 - DNA, 15 bp, Homo sapiens
gttgattggtgcagc

SEQ ID NO: 332643 - DNA, 15 bp, Homo sapiens
ggttgattggtgcag

SEQ ID NO: 332644 - DNA, 15 bp, Homo sapiens
gggttgattggtgca

SEQ ID NO: 332645 - DNA, 15 bp, Homo sapiens
ggggttgattggtgc

SEQ ID NO: 332646 - DNA, 15 bp, Homo sapiens
aggggttgattggtg

SEQ ID NO: 332647 - DNA, 15 bp, Homo sapiens
gaggggttgattggt

SEQ ID NO: 332648 - DNA, 15 bp, Homo sapiens
tgaggggttgattgg

SEQ ID NO: 332649 - DNA, 15 bp, Homo sapiens
atgaggggttgattg

SEQ ID NO: 332650 - DNA, 15 bp, Homo sapiens
gatgaggggttgatt

SEQ ID NO: 332651 - DNA, 15 bp, Homo sapiens
agatgaggggttgat

SEQ ID NO: 332652 - DNA, 15 bp, Homo sapiens
tagatgaggggttga

SEQ ID NO: 332653 - DNA, 15 bp, Homo sapiens
ctagatgaggggttg

SEQ ID NO: 332654 - DNA, 15 bp, Homo sapiens
cctagatgaggggtt

SEQ ID NO: 332655 - DNA, 15 bp, Homo sapiens
acctagatgaggggt

SEQ ID NO: 332656 - DNA, 15 bp, Homo sapiens
aacctagatgagggg

SEQ ID NO: 332657 - DNA, 15 bp, Homo sapiens
aaacctagatgaggg

SEQ ID NO: 332658 - DNA, 15 bp, Homo sapiens
aaaacctagatgagg

SEQ ID NO: 332659 - DNA, 15 bp, Homo sapiens
taaaacctagatgag

SEQ ID NO: 332660 - DNA, 15 bp, Homo sapiens
ataaaacctagatga

SEQ ID NO: 332661 - DNA, 15 bp, Homo sapiens
aataaaacctagatg

SEQ ID NO: 332662 - DNA, 15 bp, Homo sapiens
aaataaaacctagat

SEQ ID NO: 332663 - DNA, 15 bp, Homo sapiens
taaataaaacctaga

SEQ ID NO: 332664 - DNA, 15 bp, Homo sapiens
ataaataaaacctag

SEQ ID NO: 332665 - DNA, 15 bp, Homo sapiens
tataaataaaaccta

SEQ ID NO: 332666 - DNA, 15 bp, Homo sapiens
atataaataaaacct

SEQ ID NO: 332667 - DNA, 15 bp, Homo sapiens
aatataaataaaacc

SEQ ID NO: 332668 - DNA, 15 bp, Homo sapiens
aaatataaataaaac

SEQ ID NO: 332669 - DNA, 15 bp, Homo sapiens
aaaatataaataaaa

SEQ ID NO: 332670 - DNA, 15 bp, Homo sapiens
aaaaatataaataaa

SEQ ID NO: 332671 - DNA, 15 bp, Homo sapiens
aaaaaatataaataa

SEQ ID NO: 332672 - DNA, 15 bp, Homo sapiens
aaaaaaatataaata

SEQ ID NO: 332673 - DNA, 15 bp, Homo sapiens
aaaaaaaatataaat

SEQ ID NO: 332674 - DNA, 15 bp, Homo sapiens
aaaaaaaaatataaa

SEQ ID NO: 332675 - DNA, 15 bp, Homo sapiens
caaaaaaaaatataa

SEQ ID NO: 332676 - DNA, 15 bp, Homo sapiens
tcaaaaaaaaatata

SEQ ID NO: 332677 - DNA, 15 bp, Homo sapiens
ctcaaaaaaaaatat

SEQ ID NO: 332678 - DNA, 15 bp, Homo sapiens
tctcaaaaaaaaata

SEQ ID NO: 332679 - DNA, 15 bp, Homo sapiens
gtctcaaaaaaaaat

SEQ ID NO: 332680 - DNA, 15 bp, Homo sapiens
cgtctcaaaaaaaaa

SEQ ID NO: 332681 - DNA, 15 bp, Homo sapiens
ccgtctcaaaaaaaa

SEQ ID NO: 332682 - DNA, 15 bp, Homo sapiens
tccgtctcaaaaaaa

SEQ ID NO: 332683 - DNA, 15 bp, Homo sapiens
ctccgtctcaaaaaa

SEQ ID NO: 332684 - DNA, 15 bp, Homo sapiens
aactccgtctcaaaa

SEQ ID NO: 332685 - DNA, 15 bp, Homo sapiens
aaactccgtctcaaa

SEQ ID NO: 332686 - DNA, 15 bp, Homo sapiens
gaaactccgtctcaa

SEQ ID NO: 332687 - DNA, 15 bp, Homo sapiens
cgaaactccgtctca

SEQ ID NO: 332688 - DNA, 15 bp, Homo sapiens
gcgaaactccgtctc

SEQ ID NO: 332689 - DNA, 15 bp, Homo sapiens
agcgaaactccgtct

SEQ ID NO: 332690 - DNA, 15 bp, Homo sapiens
gagcgaaactccgtc

SEQ ID NO: 332691 - DNA, 15 bp, Homo sapiens
agagcgaaactccgt

SEQ ID NO: 332692 - DNA, 15 bp, Homo sapiens
aagagcgaaactccg

SEQ ID NO: 332693 - DNA, 15 bp, Homo sapiens
caagagcgaaactcc

SEQ ID NO: 332694 - DNA, 15 bp, Homo sapiens
gcaagagcgaaactc

SEQ ID NO: 332695 - DNA, 15 bp, Homo sapiens
agcaagagcgaaact

SEQ ID NO: 332696 - DNA, 15 bp, Homo sapiens
cagcaagagcgaaac

SEQ ID NO: 332697 - DNA, 15 bp, Homo sapiens
gcagcaagagcgaaa

SEQ ID NO: 332698 - DNA, 15 bp, Homo sapiens
ggcagcaagagcgaa

SEQ ID NO: 332699 - DNA, 15 bp, Homo sapiens
gggcagcaagagcga

SEQ ID NO: 332700 - DNA, 15 bp, Homo sapiens
tgggcagcaagagcg

SEQ ID NO: 332701 - DNA, 15 bp, Homo sapiens
ctgggcagcaagagc

SEQ ID NO: 332702 - DNA, 15 bp, Homo sapiens
cctgggcagcaagag

SEQ ID NO: 332703 - DNA, 15 bp, Homo sapiens
gcctgggcagcaaga

SEQ ID NO: 332704 - DNA, 15 bp, Homo sapiens
agcctgggcagcaag

SEQ ID NO: 332705 - DNA, 15 bp, Homo sapiens
cagcctgggcagcaa

SEQ ID NO: 332706 - DNA, 15 bp, Homo sapiens
ccagcctgggcagca

SEQ ID NO: 332707 - DNA, 15 bp, Homo sapiens
accagcctgggcagc

SEQ ID NO: 332708 - DNA, 15 bp, Homo sapiens
caccagcctgggcag

SEQ ID NO: 332709 - DNA, 15 bp, Homo sapiens
acaccagcctgggca

SEQ ID NO: 332710 - DNA, 15 bp, Homo sapiens
cacaccagcctgggc

SEQ ID NO: 332711 - DNA, 15 bp, Homo sapiens
gcacaccagcctggg

SEQ ID NO: 332712 - DNA, 15 bp, Homo sapiens
tgcacaccagcctgg

SEQ ID NO: 332713 - DNA, 15 bp, Homo sapiens
ttgcacaccagcctg

SEQ ID NO: 332714 - DNA, 15 bp, Homo sapiens
attgcacaccagcct

SEQ ID NO: 332715 - DNA, 15 bp, Homo sapiens
cattgcacaccagcc

SEQ ID NO: 332716 - DNA, 15 bp, Homo sapiens
ccattgcacaccagc

SEQ ID NO: 332717 - DNA, 15 bp, Homo sapiens
accattgcacaccag

SEQ ID NO: 332718 - DNA, 15 bp, Homo sapiens
caccattgcacacca

SEQ ID NO: 332719 - DNA, 15 bp, Homo sapiens
gcaccattgcacacc

SEQ ID NO: 332720 - DNA, 15 bp, Homo sapiens
cgcaccattgcacac

SEQ ID NO: 332721 - DNA, 15 bp, Homo sapiens
tcgcaccattgcaca

SEQ ID NO: 332722 - DNA, 15 bp, Homo sapiens
atcgcaccattgcac

SEQ ID NO: 332723 - DNA, 15 bp, Homo sapiens
gatcgcaccattgca

SEQ ID NO: 332724 - DNA, 15 bp, Homo sapiens
agatcgcaccattgc

SEQ ID NO: 332725 - DNA, 15 bp, Homo sapiens
gagatcgcaccattg

SEQ ID NO: 332726 - DNA, 15 bp, Homo sapiens
cgagatcgcaccatt

SEQ ID NO: 332727 - DNA, 15 bp, Homo sapiens
ccgagatcgcaccat

SEQ ID NO: 332728 - DNA, 15 bp, Homo sapiens
ggtgagccgagatcg

SEQ ID NO: 332729 - DNA, 15 bp, Homo sapiens
cggtgagccgagatc

SEQ ID NO: 332730 - DNA, 15 bp, Homo sapiens
gcggtgagccgagat

SEQ ID NO: 332731 - DNA, 15 bp, Homo sapiens
tgcggtgagccgaga

SEQ ID NO: 332732 - DNA, 15 bp, Homo sapiens
ttgcggtgagccgag

SEQ ID NO: 332733 - DNA, 15 bp, Homo sapiens
gttgcggtgagccga

SEQ ID NO: 332734 - DNA, 15 bp, Homo sapiens
ggttgcggtgagccg

SEQ ID NO: 332735 - DNA, 15 bp, Homo sapiens
aggttgcggtgagcc

SEQ ID NO: 332736 - DNA, 15 bp, Homo sapiens
gaggttgcggtgagc

SEQ ID NO: 332737 - DNA, 15 bp, Homo sapiens
agaggttgcggtgag

SEQ ID NO: 332738 - DNA, 15 bp, Homo sapiens
cagaggttgcggtga

SEQ ID NO: 332739 - DNA, 15 bp, Homo sapiens
gcagaggttgcggtg

SEQ ID NO: 332740 - DNA, 15 bp, Homo sapiens
ggcagaggttgcggt

SEQ ID NO: 332741 - DNA, 15 bp, Homo sapiens
aggcagaggttgcgg

SEQ ID NO: 332742 - DNA, 15 bp, Homo sapiens
caggcagaggttgcg

SEQ ID NO: 332743 - DNA, 15 bp, Homo sapiens
gcaggcagaggttgc

SEQ ID NO: 332744 - DNA, 15 bp, Homo sapiens
agcaggcagaggttg

SEQ ID NO: 332745 - DNA, 15 bp, Homo sapiens
cagcaggcagaggtt

SEQ ID NO: 332746 - DNA, 15 bp, Homo sapiens
ccagcaggcagaggt

SEQ ID NO: 332747 - DNA, 15 bp, Homo sapiens
cccagcaggcagagg

SEQ ID NO: 332748 - DNA, 15 bp, Homo sapiens
acccagcaggcagag

SEQ ID NO: 332749 - DNA, 15 bp, Homo sapiens
aacccagcaggcaga

SEQ ID NO: 332750 - DNA, 15 bp, Homo sapiens
gaacccagcaggcag

SEQ ID NO: 332751 - DNA, 15 bp, Homo sapiens
tgaacccagcaggca

SEQ ID NO: 332752 - DNA, 15 bp, Homo sapiens
ttgaacccagcaggc

SEQ ID NO: 332753 - DNA, 15 bp, Homo sapiens
cttgaacccagcagg

SEQ ID NO: 332754 - DNA, 15 bp, Homo sapiens
gcttgaacccagcag

SEQ ID NO: 332755 - DNA, 15 bp, Homo sapiens
cgcttgaacccagca

SEQ ID NO: 332756 - DNA, 15 bp, Homo sapiens
tcgcttgaacccagc

SEQ ID NO: 332757 - DNA, 15 bp, Homo sapiens
atcgcttgaacccag

SEQ ID NO: 332758 - DNA, 15 bp, Homo sapiens
aatcgcttgaaccca

SEQ ID NO: 332759 - DNA, 15 bp, Homo sapiens
aaggctgaggcagga

SEQ ID NO: 332760 - DNA, 15 bp, Homo sapiens
gaaggctgaggcagg

SEQ ID NO: 332761 - DNA, 15 bp, Homo sapiens
agaaggctgaggcag

SEQ ID NO: 332762 - DNA, 15 bp, Homo sapiens
cagaaggctgaggca

SEQ ID NO: 332763 - DNA, 15 bp, Homo sapiens
tcagaaggctgaggc

SEQ ID NO: 332764 - DNA, 15 bp, Homo sapiens
ctcagaaggctgagg

SEQ ID NO: 332765 - DNA, 15 bp, Homo sapiens
actcagaaggctgag

SEQ ID NO: 332766 - DNA, 15 bp, Homo sapiens
tactcagaaggctga

SEQ ID NO: 332767 - DNA, 15 bp, Homo sapiens
ctactcagaaggctg

SEQ ID NO: 332768 - DNA, 15 bp, Homo sapiens
gctactcagaaggct

SEQ ID NO: 332769 - DNA, 15 bp, Homo sapiens
agctactcagaaggc

SEQ ID NO: 332770 - DNA, 15 bp, Homo sapiens
cagctactcagaagg

SEQ ID NO: 332771 - DNA, 15 bp, Homo sapiens
ccagctactcagaag

SEQ ID NO: 332772 - DNA, 15 bp, Homo sapiens
cccagctactcagaa

SEQ ID NO: 332773 - DNA, 15 bp, Homo sapiens
tcccagctactcaga

SEQ ID NO: 332774 - DNA, 15 bp, Homo sapiens
acatgcctgtaatcc

SEQ ID NO: 332775 - DNA, 15 bp, Homo sapiens
cacatgcctgtaatc

SEQ ID NO: 332776 - DNA, 15 bp, Homo sapiens
gcacatgcctgtaat

SEQ ID NO: 332777 - DNA, 15 bp, Homo sapiens
ggcacatgcctgtaa

SEQ ID NO: 332778 - DNA, 15 bp, Homo sapiens
tggcacatgcctgta

SEQ ID NO: 332779 - DNA, 15 bp, Homo sapiens
gtggcacatgcctgt

SEQ ID NO: 332780 - DNA, 15 bp, Homo sapiens
ggtggcacatgcctg

SEQ ID NO: 332781 - DNA, 15 bp, Homo sapiens
tggtggcacatgcct

SEQ ID NO: 332782 - DNA, 15 bp, Homo sapiens
gtggtggcacatgcc

SEQ ID NO: 332783 - DNA, 15 bp, Homo sapiens
cgtggtggcacatgc

SEQ ID NO: 332784 - DNA, 15 bp, Homo sapiens
gcgtggtggcacatg

SEQ ID NO: 332785 - DNA, 15 bp, Homo sapiens
ggcgtggtggcacat

SEQ ID NO: 332786 - DNA, 15 bp, Homo sapiens
gggcgtggtggcaca

SEQ ID NO: 332787 - DNA, 15 bp, Homo sapiens
cgggcgtggtggcac

SEQ ID NO: 332788 - DNA, 15 bp, Homo sapiens
ccgggcgtggtggca

SEQ ID NO: 332789 - DNA, 15 bp, Homo sapiens
gccgggcgtggtggc

SEQ ID NO: 332790 - DNA, 15 bp, Homo sapiens
caaaattagccgggc

SEQ ID NO: 332791 - DNA, 15 bp, Homo sapiens
acaaaattagccggg

SEQ ID NO: 332792 - DNA, 15 bp, Homo sapiens
tacaaaattagccgg

SEQ ID NO: 332793 - DNA, 15 bp, Homo sapiens
atacaaaattagccg

SEQ ID NO: 332794 - DNA, 15 bp, Homo sapiens
aatacaaaattagcc

SEQ ID NO: 332795 - DNA, 15 bp, Homo sapiens
aaatacaaaattagc

SEQ ID NO: 332796 - DNA, 15 bp, Homo sapiens
aaaatacaaaattag

SEQ ID NO: 332797 - DNA, 15 bp, Homo sapiens
aaaaatacaaaatta

SEQ ID NO: 332798 - DNA, 15 bp, Homo sapiens
taaaaatacaaaatt

SEQ ID NO: 332799 - DNA, 15 bp, Homo sapiens
ctaaaaatacaaaat

SEQ ID NO: 332800 - DNA, 15 bp, Homo sapiens
agaaaccccgtctct

SEQ ID NO: 332801 - DNA, 15 bp, Homo sapiens
gagaaaccccgtctc

SEQ ID NO: 332802 - DNA, 15 bp, Homo sapiens
ggagaaaccccgtct

SEQ ID NO: 332803 - DNA, 15 bp, Homo sapiens
tggagaaaccccgtc

SEQ ID NO: 332804 - DNA, 15 bp, Homo sapiens
atggagaaaccccgt

SEQ ID NO: 332805 - DNA, 15 bp, Homo sapiens
catggagaaaccccg

SEQ ID NO: 332806 - DNA, 15 bp, Homo sapiens
acatggagaaacccc

SEQ ID NO: 332807 - DNA, 15 bp, Homo sapiens
accaacatggagaaa

SEQ ID NO: 332808 - DNA, 15 bp, Homo sapiens
gaccaacatggagaa

SEQ ID NO: 332809 - DNA, 15 bp, Homo sapiens
tgaccaacatggaga

SEQ ID NO: 332810 - DNA, 15 bp, Homo sapiens
ctgaccaacatggag

SEQ ID NO: 332811 - DNA, 15 bp, Homo sapiens
cctgaccaacatgga

SEQ ID NO: 332812 - DNA, 15 bp, Homo sapiens
gcctgaccaacatgg

SEQ ID NO: 332813 - DNA, 15 bp, Homo sapiens
agcctgaccaacatg

SEQ ID NO: 332814 - DNA, 15 bp, Homo sapiens
cagcctgaccaacat

SEQ ID NO: 332815 - DNA, 15 bp, Homo sapiens
gaccagcctgaccaa

SEQ ID NO: 332816 - DNA, 15 bp, Homo sapiens
aagttcgagaccagc

SEQ ID NO: 332817 - DNA, 15 bp, Homo sapiens
gaagttcgagaccag

SEQ ID NO: 332818 - DNA, 15 bp, Homo sapiens
ggaagttcgagacca

SEQ ID NO: 332819 - DNA, 15 bp, Homo sapiens
cggaagttcgagacc

SEQ ID NO: 332820 - DNA, 15 bp, Homo sapiens
tcggaagttcgagac

SEQ ID NO: 332821 - DNA, 15 bp, Homo sapiens
gtcggaagttcgaga

SEQ ID NO: 332822 - DNA, 15 bp, Homo sapiens
agtcggaagttcgag

SEQ ID NO: 332823 - DNA, 15 bp, Homo sapiens
aagtcggaagttcga

SEQ ID NO: 332824 - DNA, 15 bp, Homo sapiens
gaagtcggaagttcg

SEQ ID NO: 332825 - DNA, 15 bp, Homo sapiens
tgaagtcggaagttc

SEQ ID NO: 332826 - DNA, 15 bp, Homo sapiens
ctgaagtcggaagtt

SEQ ID NO: 332827 - DNA, 15 bp, Homo sapiens
cctgaagtcggaagt

SEQ ID NO: 332828 - DNA, 15 bp, Homo sapiens
acctgaagtcggaag

SEQ ID NO: 332829 - DNA, 15 bp, Homo sapiens
cacctgaagtcggaa

SEQ ID NO: 332830 - DNA, 15 bp, Homo sapiens
tcacctgaagtcgga

SEQ ID NO: 332831 - DNA, 15 bp, Homo sapiens
acagatcacctgaag

SEQ ID NO: 332832 - DNA, 15 bp, Homo sapiens
gacagatcacctgaa

SEQ ID NO: 332833 - DNA, 15 bp, Homo sapiens
ggacagatcacctga

SEQ ID NO: 332834 - DNA, 15 bp, Homo sapiens
cggacagatcacctg

SEQ ID NO: 332835 - DNA, 15 bp, Homo sapiens
gcggacagatcacct

SEQ ID NO: 332836 - DNA, 15 bp, Homo sapiens
ggcggacagatcacc

SEQ ID NO: 332837 - DNA, 15 bp, Homo sapiens
aggcggacagatcac

SEQ ID NO: 332838 - DNA, 15 bp, Homo sapiens
gaggcggacagatca

SEQ ID NO: 332839 - DNA, 15 bp, Homo sapiens
cgaggcggacagatc

SEQ ID NO: 332840 - DNA, 15 bp, Homo sapiens
ccgaggcggacagat

SEQ ID NO: 332841 - DNA, 15 bp, Homo sapiens
gccgaggcggacaga

SEQ ID NO: 332842 - DNA, 15 bp, Homo sapiens
ggccgaggcggacag

SEQ ID NO: 332843 - DNA, 15 bp, Homo sapiens
aggccgaggcggaca

SEQ ID NO: 332844 - DNA, 15 bp, Homo sapiens
gaggccgaggcggac

SEQ ID NO: 332845 - DNA, 15 bp, Homo sapiens
ggaggccgaggcgga

SEQ ID NO: 332846 - DNA, 15 bp, Homo sapiens
gggaggccgaggcgg

SEQ ID NO: 332847 - DNA, 15 bp, Homo sapiens
ctttgggaggccgag

SEQ ID NO: 332848 - DNA, 15 bp, Homo sapiens
actttgggaggccga

SEQ ID NO: 332849 - DNA, 15 bp, Homo sapiens
cactttgggaggccg

SEQ ID NO: 332850 - DNA, 15 bp, Homo sapiens
ctgcctgtaatccca

SEQ ID NO: 332851 - DNA, 15 bp, Homo sapiens
gctgcctgtaatccc

SEQ ID NO: 332852 - DNA, 15 bp, Homo sapiens
tgctgcctgtaatcc

SEQ ID NO: 332853 - DNA, 15 bp, Homo sapiens
ctgctgcctgtaatc

SEQ ID NO: 332854 - DNA, 15 bp, Homo sapiens
gctgctgcctgtaat

SEQ ID NO: 332855 - DNA, 15 bp, Homo sapiens
ggctgctgcctgtaa

SEQ ID NO: 332856 - DNA, 15 bp, Homo sapiens
tggctgctgcctgta

SEQ ID NO: 332857 - DNA, 15 bp, Homo sapiens
gtggctgctgcctgt

SEQ ID NO: 332858 - DNA, 15 bp, Homo sapiens
ggtggctgctgcctg

SEQ ID NO: 332859 - DNA, 15 bp, Homo sapiens
cggtggctgctgcct

SEQ ID NO: 332860 - DNA, 15 bp, Homo sapiens
gcggtggctgctgcc

SEQ ID NO: 332861 - DNA, 15 bp, Homo sapiens
cgcggtggctgctgc

SEQ ID NO: 332862 - DNA, 15 bp, Homo sapiens
gcgcggtggctgctg

SEQ ID NO: 332863 - DNA, 15 bp, Homo sapiens
ggcgcggtggctgct

SEQ ID NO: 332864 - DNA, 15 bp, Homo sapiens
gggcgcggtggctgc

SEQ ID NO: 332865 - DNA, 15 bp, Homo sapiens
tgggcgcggtggctg

SEQ ID NO: 332866 - DNA, 15 bp, Homo sapiens
tggctgggcgcggtg

SEQ ID NO: 332867 - DNA, 15 bp, Homo sapiens
ctggctgggcgcggt

SEQ ID NO: 332868 - DNA, 15 bp, Homo sapiens
cctggctgggcgcgg

SEQ ID NO: 332869 - DNA, 15 bp, Homo sapiens
acctggctgggcgcg

SEQ ID NO: 332870 - DNA, 15 bp, Homo sapiens
aacctggctgggcgc

SEQ ID NO: 332871 - DNA, 15 bp, Homo sapiens
aaacctggctgggcg

SEQ ID NO: 332872 - DNA, 15 bp, Homo sapiens
aaaacctggctgggc

SEQ ID NO: 332873 - DNA, 15 bp, Homo sapiens
taaaacctggctggg

SEQ ID NO: 332874 - DNA, 15 bp, Homo sapiens
ttaaaacctggctgg

SEQ ID NO: 332875 - DNA, 15 bp, Homo sapiens
cttaaaacctggctg

SEQ ID NO: 332876 - DNA, 15 bp, Homo sapiens
acttaaaacctggct

SEQ ID NO: 332877 - DNA, 15 bp, Homo sapiens
gacttaaaacctggc

SEQ ID NO: 332878 - DNA, 15 bp, Homo sapiens
ggacttaaaacctgg

SEQ ID NO: 332879 - DNA, 15 bp, Homo sapiens
gggacttaaaacctg

SEQ ID NO: 332880 - DNA, 15 bp, Homo sapiens
cgggacttaaaacct

SEQ ID NO: 332881 - DNA, 15 bp, Homo sapiens
gcgggacttaaaacc

SEQ ID NO: 332882 - DNA, 15 bp, Homo sapiens
tgcgggacttaaaac

SEQ ID NO: 332883 - DNA, 15 bp, Homo sapiens
atgcgggacttaaaa

SEQ ID NO: 332884 - DNA, 15 bp, Homo sapiens
catgcgggacttaaa

SEQ ID NO: 332885 - DNA, 15 bp, Homo sapiens
gcatgcgggacttaa

SEQ ID NO: 332886 - DNA, 15 bp, Homo sapiens
tgcatgcgggactta

SEQ ID NO: 332887 - DNA, 15 bp, Homo sapiens
atgcatgcgggactt

SEQ ID NO: 332888 - DNA, 15 bp, Homo sapiens
aatgcatgcgggact

SEQ ID NO: 332889 - DNA, 15 bp, Homo sapiens
taatgcatgcgggac

SEQ ID NO: 332890 - DNA, 15 bp, Homo sapiens
ctaatgcatgcggga

SEQ ID NO: 332891 - DNA, 15 bp, Homo sapiens
gctaatgcatgcggg

SEQ ID NO: 332892 - DNA, 15 bp, Homo sapiens
agctaatgcatgcgg

SEQ ID NO: 332893 - DNA, 15 bp, Homo sapiens
tagctaatgcatgcg

SEQ ID NO: 332894 - DNA, 15 bp, Homo sapiens
atagctaatgcatgc

SEQ ID NO: 332895 - DNA, 15 bp, Homo sapiens
aatagctaatgcatg

SEQ ID NO: 332896 - DNA, 15 bp, Homo sapiens
aaatagctaatgcat

SEQ ID NO: 332897 - DNA, 15 bp, Homo sapiens
caaatagctaatgca

SEQ ID NO: 332898 - DNA, 15 bp, Homo sapiens
acaaatagctaatgc

SEQ ID NO: 332899 - DNA, 15 bp, Homo sapiens
gacaaatagctaatg

SEQ ID NO: 332900 - DNA, 15 bp, Homo sapiens
ggacaaatagctaat

SEQ ID NO: 332901 - DNA, 15 bp, Homo sapiens
aggacaaatagctaa

SEQ ID NO: 332902 - DNA, 15 bp, Homo sapiens
taggacaaatagcta

SEQ ID NO: 332903 - DNA, 15 bp, Homo sapiens
ttaggacaaatagct

SEQ ID NO: 332904 - DNA, 15 bp, Homo sapiens
attaggacaaatagc

SEQ ID NO: 332905 - DNA, 15 bp, Homo sapiens
cattaggacaaatag

SEQ ID NO: 332906 - DNA, 15 bp, Homo sapiens
gcattaggacaaata

SEQ ID NO: 332907 - DNA, 15 bp, Homo sapiens
agcattaggacaaat

SEQ ID NO: 332908 - DNA, 15 bp, Homo sapiens
gagcattaggacaaa

SEQ ID NO: 332909 - DNA, 15 bp, Homo sapiens
agagcattaggacaa

SEQ ID NO: 332910 - DNA, 15 bp, Homo sapiens
gagagcattaggaca

SEQ ID NO: 332911 - DNA, 15 bp, Homo sapiens
ggagagcattaggac

SEQ ID NO: 332912 - DNA, 15 bp, Homo sapiens
gggagagcattagga

SEQ ID NO: 332913 - DNA, 15 bp, Homo sapiens
agggagagcattagg

SEQ ID NO: 332914 - DNA, 15 bp, Homo sapiens
gagggagagcattag

SEQ ID NO: 332915 - DNA, 15 bp, Homo sapiens
ggagggagagcatta

SEQ ID NO: 332916 - DNA, 15 bp, Homo sapiens
gggagggagagcatt

SEQ ID NO: 332917 - DNA, 15 bp, Homo sapiens
ggggagggagagcat

SEQ ID NO: 332918 - DNA, 15 bp, Homo sapiens
aggggagggagagca

SEQ ID NO: 332919 - DNA, 15 bp, Homo sapiens
aaggggagggagagc

SEQ ID NO: 332920 - DNA, 15 bp, Homo sapiens
caaggggagggagag

SEQ ID NO: 332921 - DNA, 15 bp, Homo sapiens
tcaaggggagggaga

SEQ ID NO: 332922 - DNA, 15 bp, Homo sapiens
gtcaaggggagggag

SEQ ID NO: 332923 - DNA, 15 bp, Homo sapiens
ggtcaaggggaggga

SEQ ID NO: 332924 - DNA, 15 bp, Homo sapiens
gggtcaaggggaggg

SEQ ID NO: 332925 - DNA, 15 bp, Homo sapiens
ggggtcaaggggagg

SEQ ID NO: 332926 - DNA, 15 bp, Homo sapiens
gggggtcaaggggag

SEQ ID NO: 332927 - DNA, 15 bp, Homo sapiens
tgggggtcaagggga

SEQ ID NO: 332928 - DNA, 15 bp, Homo sapiens
gtgggggtcaagggg

SEQ ID NO: 332929 - DNA, 15 bp, Homo sapiens
cgtgggggtcaaggg

SEQ ID NO: 332930 - DNA, 15 bp, Homo sapiens
gcgtgggggtcaagg

SEQ ID NO: 332931 - DNA, 15 bp, Homo sapiens
tgcgtgggggtcaag

SEQ ID NO: 332932 - DNA, 15 bp, Homo sapiens
ttgcgtgggggtcaa

SEQ ID NO: 332933 - DNA, 15 bp, Homo sapiens
gttgcgtgggggtca

SEQ ID NO: 332934 - DNA, 15 bp, Homo sapiens
ggttgcgtgggggtc

SEQ ID NO: 332935 - DNA, 15 bp, Homo sapiens
tggttgcgtgggggt

SEQ ID NO: 332936 - DNA, 15 bp, Homo sapiens
ttggttgcgtggggg

SEQ ID NO: 332937 - DNA, 15 bp, Homo sapiens
tttggttgcgtgggg

SEQ ID NO: 332938 - DNA, 15 bp, Homo sapiens
ctttggttgcgtggg

SEQ ID NO: 332939 - DNA, 15 bp, Homo sapiens
tctttggttgcgtgg

SEQ ID NO: 332940 - DNA, 15 bp, Homo sapiens
atctttggttgcgtg

SEQ ID NO: 332941 - DNA, 15 bp, Homo sapiens
catctttggttgcgt

SEQ ID NO: 332942 - DNA, 15 bp, Homo sapiens
ccatctttggttgcg

SEQ ID NO: 332943 - DNA, 15 bp, Homo sapiens
accatctttggttgc

SEQ ID NO: 332944 - DNA, 15 bp, Homo sapiens
aaccatctttggttg

SEQ ID NO: 332945 - DNA, 15 bp, Homo sapiens
aaaccatctttggtt

SEQ ID NO: 332946 - DNA, 15 bp, Homo sapiens
aaaaccatctttggt

SEQ ID NO: 332947 - DNA, 15 bp, Homo sapiens
taaaaccatctttgg

SEQ ID NO: 332948 - DNA, 15 bp, Homo sapiens
ttaaaaccatctttg

SEQ ID NO: 332949 - DNA, 15 bp, Homo sapiens
cttaaaaccatcttt

SEQ ID NO: 332950 - DNA, 15 bp, Homo sapiens
ccttaaaaccatctt

SEQ ID NO: 332951 - DNA, 15 bp, Homo sapiens
gccttaaaaccatct

SEQ ID NO: 332952 - DNA, 15 bp, Homo sapiens
agccttaaaaccatc

SEQ ID NO: 332953 - DNA, 15 bp, Homo sapiens
aagccttaaaaccat

SEQ ID NO: 332954 - DNA, 15 bp, Homo sapiens
gaagccttaaaacca

SEQ ID NO: 332955 - DNA, 15 bp, Homo sapiens
agaagccttaaaacc

SEQ ID NO: 332956 - DNA, 15 bp, Homo sapiens
tagaagccttaaaac

SEQ ID NO: 332957 - DNA, 15 bp, Homo sapiens
ctagaagccttaaaa

SEQ ID NO: 332958 - DNA, 15 bp, Homo sapiens
cctagaagccttaaa

SEQ ID NO: 332959 - DNA, 15 bp, Homo sapiens
tcctagaagccttaa

SEQ ID NO: 332960 - DNA, 15 bp, Homo sapiens
gtcctagaagcctta

SEQ ID NO: 332961 - DNA, 15 bp, Homo sapiens
agtcctagaagcctt

SEQ ID NO: 332962 - DNA, 15 bp, Homo sapiens
cagtcctagaagcct

SEQ ID NO: 332963 - DNA, 15 bp, Homo sapiens
ccagtcctagaagcc

SEQ ID NO: 332964 - DNA, 15 bp, Homo sapiens
tccagtcctagaagc

SEQ ID NO: 332965 - DNA, 15 bp, Homo sapiens
ctccagtcctagaag

SEQ ID NO: 332966 - DNA, 15 bp, Homo sapiens
tctccagtcctagaa

SEQ ID NO: 332967 - DNA, 15 bp, Homo sapiens
atctccagtcctaga

SEQ ID NO: 332968 - DNA, 15 bp, Homo sapiens
catctccagtcctag

SEQ ID NO: 332969 - DNA, 15 bp, Homo sapiens
tcatctccagtccta

SEQ ID NO: 332970 - DNA, 15 bp, Homo sapiens
atcatctccagtcct

SEQ ID NO: 332971 - DNA, 15 bp, Homo sapiens
aatcatctccagtcc

SEQ ID NO: 332972 - DNA, 15 bp, Homo sapiens
taatcatctccagtc

SEQ ID NO: 332973 - DNA, 15 bp, Homo sapiens
gtaatcatctccagt

SEQ ID NO: 332974 - DNA, 15 bp, Homo sapiens
agtaatcatctccag

SEQ ID NO: 332975 - DNA, 15 bp, Homo sapiens
aagtaatcatctcca

SEQ ID NO: 332976 - DNA, 15 bp, Homo sapiens
aaagtaatcatctcc

SEQ ID NO: 332977 - DNA, 15 bp, Homo sapiens
gaaagtaatcatctc

SEQ ID NO: 332978 - DNA, 15 bp, Homo sapiens
tgaaagtaatcatct

SEQ ID NO: 332979 - DNA, 15 bp, Homo sapiens
ctgaaagtaatcatc

SEQ ID NO: 332980 - DNA, 15 bp, Homo sapiens
tctgaaagtaatcat

SEQ ID NO: 332981 - DNA, 15 bp, Homo sapiens
ttctgaaagtaatca

SEQ ID NO: 332982 - DNA, 15 bp, Homo sapiens
tttctgaaagtaatc

SEQ ID NO: 332983 - DNA, 15 bp, Homo sapiens
atttctgaaagtaat

SEQ ID NO: 332984 - DNA, 15 bp, Homo sapiens
catttctgaaagtaa

SEQ ID NO: 332985 - DNA, 15 bp, Homo sapiens
tcatttctgaaagta

SEQ ID NO: 332986 - DNA, 15 bp, Homo sapiens
ttcatttctgaaagt

SEQ ID NO: 332987 - DNA, 15 bp, Homo sapiens
attcatttctgaaag

SEQ ID NO: 332988 - DNA, 15 bp, Homo sapiens
tattcatttctgaaa

SEQ ID NO: 332989 - DNA, 15 bp, Homo sapiens
ctattcatttctgaa

SEQ ID NO: 332990 - DNA, 15 bp, Homo sapiens
actattcatttctga

SEQ ID NO: 332991 - DNA, 15 bp, Homo sapiens
cactattcatttctg

SEQ ID NO: 332992 - DNA, 15 bp, Homo sapiens
ccactattcatttct

SEQ ID NO: 332993 - DNA, 15 bp, Homo sapiens
accactattcatttc

SEQ ID NO: 332994 - DNA, 15 bp, Homo sapiens
caccactattcattt

SEQ ID NO: 332995 - DNA, 15 bp, Homo sapiens
tcaccactattcatt

SEQ ID NO: 332996 - DNA, 15 bp, Homo sapiens
gtcaccactattcat

SEQ ID NO: 332997 - DNA, 15 bp, Homo sapiens
ggtcaccactattca

SEQ ID NO: 332998 - DNA, 15 bp, Homo sapiens
tggtcaccactattc

SEQ ID NO: 332999 - DNA, 15 bp, Homo sapiens
ctggtcaccactatt

SEQ ID NO: 333000 - DNA, 15 bp, Homo sapiens
tctggtcaccactat

SEQ ID NO: 333001 - DNA, 15 bp, Homo sapiens
atctggtcaccacta

SEQ ID NO: 333002 - DNA, 15 bp, Homo sapiens
catctggtcaccact

SEQ ID NO: 333003 - DNA, 15 bp, Homo sapiens
tcatctggtcaccac

SEQ ID NO: 333004 - DNA, 15 bp, Homo sapiens
ttcatctggtcacca

SEQ ID NO: 333005 - DNA, 15 bp, Homo sapiens
tttcatctggtcacc

SEQ ID NO: 333006 - DNA, 15 bp, Homo sapiens
atttcatctggtcac

SEQ ID NO: 333007 - DNA, 15 bp, Homo sapiens
tatttcatctggtca

SEQ ID NO: 333008 - DNA, 15 bp, Homo sapiens
ttatttcatctggtc

SEQ ID NO: 333009 - DNA, 15 bp, Homo sapiens
cttatttcatctggt

SEQ ID NO: 333010 - DNA, 15 bp, Homo sapiens
tcttatttcatctgg

SEQ ID NO: 333011 - DNA, 15 bp, Homo sapiens
gtcttatttcatctg

SEQ ID NO: 333012 - DNA, 15 bp, Homo sapiens
agtcttatttcatct

SEQ ID NO: 333013 - DNA, 15 bp, Homo sapiens
aagtcttatttcatc

SEQ ID NO: 333014 - DNA, 15 bp, Homo sapiens
aaagtcttatttcat

SEQ ID NO: 333015 - DNA, 15 bp, Homo sapiens
aaaagtcttatttca

SEQ ID NO: 333016 - DNA, 15 bp, Homo sapiens
caaaagtcttatttc

SEQ ID NO: 333017 - DNA, 15 bp, Homo sapiens
ccaaaagtcttattt

SEQ ID NO: 333018 - DNA, 15 bp, Homo sapiens
tccaaaagtcttatt

SEQ ID NO: 333019 - DNA, 15 bp, Homo sapiens
atccaaaagtcttat

SEQ ID NO: 333020 - DNA, 15 bp, Homo sapiens
catccaaaagtctta

SEQ ID NO: 333021 - DNA, 15 bp, Homo sapiens
acatccaaaagtctt

SEQ ID NO: 333022 - DNA, 15 bp, Homo sapiens
tacatccaaaagtct

SEQ ID NO: 333023 - DNA, 15 bp, Homo sapiens
ctacatccaaaagtc

SEQ ID NO: 333024 - DNA, 15 bp, Homo sapiens
tctacatccaaaagt

SEQ ID NO: 333025 - DNA, 15 bp, Homo sapiens
atctacatccaaaag

SEQ ID NO: 333026 - DNA, 15 bp, Homo sapiens
tatctacatccaaaa

SEQ ID NO: 333027 - DNA, 15 bp, Homo sapiens
ctatctacatccaaa

SEQ ID NO: 333028 - DNA, 15 bp, Homo sapiens
cctatctacatccaa

SEQ ID NO: 333029 - DNA, 15 bp, Homo sapiens
tcctatctacatcca

SEQ ID NO: 333030 - DNA, 15 bp, Homo sapiens
gtcctatctacatcc

SEQ ID NO: 333031 - DNA, 15 bp, Homo sapiens
ggtcctatctacatc

SEQ ID NO: 333032 - DNA, 15 bp, Homo sapiens
aggtcctatctacat

SEQ ID NO: 333033 - DNA, 15 bp, Homo sapiens
aaggtcctatctaca

SEQ ID NO: 333034 - DNA, 15 bp, Homo sapiens
taaggtcctatctac

SEQ ID NO: 333035 - DNA, 15 bp, Homo sapiens
ctaaggtcctatcta

SEQ ID NO: 333036 - DNA, 15 bp, Homo sapiens
gctaaggtcctatct

SEQ ID NO: 333037 - DNA, 15 bp, Homo sapiens
cgctaaggtcctatc

SEQ ID NO: 333038 - DNA, 15 bp, Homo sapiens
tcgctaaggtcctat

SEQ ID NO: 333039 - DNA, 15 bp, Homo sapiens
atcgctaaggtccta

SEQ ID NO: 333040 - DNA, 15 bp, Homo sapiens
tatcgctaaggtcct

SEQ ID NO: 333041 - DNA, 15 bp, Homo sapiens
atatcgctaaggtcc

SEQ ID NO: 333042 - DNA, 15 bp, Homo sapiens
tatatcgctaaggtc

SEQ ID NO: 333043 - DNA, 15 bp, Homo sapiens
atatatcgctaaggt

SEQ ID NO: 333044 - DNA, 15 bp, Homo sapiens
aatatatcgctaagg

SEQ ID NO: 333045 - DNA, 15 bp, Homo sapiens
aaatatatcgctaag

SEQ ID NO: 333046 - DNA, 15 bp, Homo sapiens
gaaatatatcgctaa

SEQ ID NO: 333047 - DNA, 15 bp, Homo sapiens
ggaaatatatcgcta

SEQ ID NO: 333048 - DNA, 15 bp, Homo sapiens
tggaaatatatcgct

SEQ ID NO: 333049 - DNA, 15 bp, Homo sapiens
ctggaaatatatcgc

SEQ ID NO: 333050 - DNA, 15 bp, Homo sapiens
gctggaaatatatcg

SEQ ID NO: 333051 - DNA, 15 bp, Homo sapiens
agctggaaatatatc

SEQ ID NO: 333052 - DNA, 15 bp, Homo sapiens
aagctggaaatatat

SEQ ID NO: 333053 - DNA, 15 bp, Homo sapiens
aaagctggaaatata

SEQ ID NO: 333054 - DNA, 15 bp, Homo sapiens
aaaagctggaaatat

SEQ ID NO: 333055 - DNA, 15 bp, Homo sapiens
aaaaagctggaaata

SEQ ID NO: 333056 - DNA, 15 bp, Homo sapiens
taaaaagctggaaat

SEQ ID NO: 333057 - DNA, 15 bp, Homo sapiens
ataaaaagctggaaa

SEQ ID NO: 333058 - DNA, 15 bp, Homo sapiens
aataaaaagctggaa

SEQ ID NO: 333059 - DNA, 15 bp, Homo sapiens
aaataaaaagctgga

SEQ ID NO: 333060 - DNA, 15 bp, Homo sapiens
aaaataaaaagctgg

SEQ ID NO: 333061 - DNA, 15 bp, Homo sapiens
aaaaataaaaagctg

SEQ ID NO: 333062 - DNA, 15 bp, Homo sapiens
aaaaaataaaaagct

SEQ ID NO: 333063 - DNA, 15 bp, Homo sapiens
taaaaaataaaaagc

SEQ ID NO: 333064 - DNA, 15 bp, Homo sapiens
ataaaaaataaaaag

SEQ ID NO: 333065 - DNA, 15 bp, Homo sapiens
aataaaaaataaaaa

SEQ ID NO: 333066 - DNA, 15 bp, Homo sapiens
aaataaaaaataaaa

SEQ ID NO: 333067 - DNA, 15 bp, Homo sapiens
aaaataaaaaataaa

SEQ ID NO: 333068 - DNA, 15 bp, Homo sapiens
taaaataaaaaataa

SEQ ID NO: 333069 - DNA, 15 bp, Homo sapiens
ttaaaataaaaaata

SEQ ID NO: 333070 - DNA, 15 bp, Homo sapiens
cttaaaataaaaaat

SEQ ID NO: 333071 - DNA, 15 bp, Homo sapiens
ccttaaaataaaaaa

SEQ ID NO: 333072 - DNA, 15 bp, Homo sapiens
tccttaaaataaaaa

SEQ ID NO: 333073 - DNA, 15 bp, Homo sapiens
atccttaaaataaaa

SEQ ID NO: 333074 - DNA, 15 bp, Homo sapiens
catccttaaaataaa

SEQ ID NO: 333075 - DNA, 15 bp, Homo sapiens
tcatccttaaaataa

SEQ ID NO: 333076 - DNA, 15 bp, Homo sapiens
ttcatccttaaaata

SEQ ID NO: 333077 - DNA, 15 bp, Homo sapiens
cttcatccttaaaat

SEQ ID NO: 333078 - DNA, 15 bp, Homo sapiens
tcttcatccttaaaa

SEQ ID NO: 333079 - DNA, 15 bp, Homo sapiens
ttcttcatccttaaa

SEQ ID NO: 333080 - DNA, 15 bp, Homo sapiens
tttcttcatccttaa

SEQ ID NO: 333081 - DNA, 15 bp, Homo sapiens
gtttcttcatcctta

SEQ ID NO: 333082 - DNA, 15 bp, Homo sapiens
tgtttcttcatcctt

SEQ ID NO: 333083 - DNA, 15 bp, Homo sapiens
ctgtttcttcatcct

SEQ ID NO: 333084 - DNA, 15 bp, Homo sapiens
gctgtttcttcatcc

SEQ ID NO: 333085 - DNA, 15 bp, Homo sapiens
agctgtttcttcatc

SEQ ID NO: 333086 - DNA, 15 bp, Homo sapiens
aagctgtttcttcat

SEQ ID NO: 333087 - DNA, 15 bp, Homo sapiens
aaagctgtttcttca

SEQ ID NO: 333088 - DNA, 15 bp, Homo sapiens
taaagctgtttcttc

SEQ ID NO: 333089 - DNA, 15 bp, Homo sapiens
ttaaagctgtttctt

SEQ ID NO: 333090 - DNA, 15 bp, Homo sapiens
cttaaagctgtttct

SEQ ID NO: 333091 - DNA, 15 bp, Homo sapiens
acttaaagctgtttc

SEQ ID NO: 333092 - DNA, 15 bp, Homo sapiens
aacttaaagctgttt

SEQ ID NO: 333093 - DNA, 15 bp, Homo sapiens
caacttaaagctgtt

SEQ ID NO: 333094 - DNA, 15 bp, Homo sapiens
ccaacttaaagctgt

SEQ ID NO: 333095 - DNA, 15 bp, Homo sapiens
accaacttaaagctg

SEQ ID NO: 333096 - DNA, 15 bp, Homo sapiens
aaccaacttaaagct

SEQ ID NO: 333097 - DNA, 15 bp, Homo sapiens
caaccaacttaaagc

SEQ ID NO: 333098 - DNA, 15 bp, Homo sapiens
gcaaccaacttaaag

SEQ ID NO: 333099 - DNA, 15 bp, Homo sapiens
ggcaaccaacttaaa

SEQ ID NO: 333100 - DNA, 15 bp, Homo sapiens
aggcaaccaacttaa

SEQ ID NO: 333101 - DNA, 15 bp, Homo sapiens
taggcaaccaactta

SEQ ID NO: 333102 - DNA, 15 bp, Homo sapiens
ttaggcaaccaactt

SEQ ID NO: 333103 - DNA, 15 bp, Homo sapiens
tttaggcaaccaact

SEQ ID NO: 333104 - DNA, 15 bp, Homo sapiens
ctttaggcaaccaac

SEQ ID NO: 333105 - DNA, 15 bp, Homo sapiens
actttaggcaaccaa

SEQ ID NO: 333106 - DNA, 15 bp, Homo sapiens
gactttaggcaacca

SEQ ID NO: 333107 - DNA, 15 bp, Homo sapiens
tgactttaggcaacc

SEQ ID NO: 333108 - DNA, 15 bp, Homo sapiens
gtgactttaggcaac

SEQ ID NO: 333109 - DNA, 15 bp, Homo sapiens
cgtgactttaggcaa

SEQ ID NO: 333110 - DNA, 15 bp, Homo sapiens
gcgtgactttaggca

SEQ ID NO: 333111 - DNA, 15 bp, Homo sapiens
tgcgtgactttaggc

SEQ ID NO: 333112 - DNA, 15 bp, Homo sapiens
ctgcgtgactttagg

SEQ ID NO: 333113 - DNA, 15 bp, Homo sapiens
cctgcgtgactttag

SEQ ID NO: 333114 - DNA, 15 bp, Homo sapiens
acctgcgtgacttta

SEQ ID NO: 333115 - DNA, 15 bp, Homo sapiens
tacctgcgtgacttt

SEQ ID NO: 333116 - DNA, 15 bp, Homo sapiens
ttacctgcgtgactt

SEQ ID NO: 333117 - DNA, 15 bp, Homo sapiens
attacctgcgtgact

SEQ ID NO: 333118 - DNA, 15 bp, Homo sapiens
aattacctgcgtgac

SEQ ID NO: 333119 - DNA, 15 bp, Homo sapiens
caattacctgcgtga

SEQ ID NO: 333120 - DNA, 15 bp, Homo sapiens
tcaattacctgcgtg

SEQ ID NO: 333121 - DNA, 15 bp, Homo sapiens
atcaattacctgcgt

SEQ ID NO: 333122 - DNA, 15 bp, Homo sapiens
catcaattacctgcg

SEQ ID NO: 333123 - DNA, 15 bp, Homo sapiens
gcatcaattacctgc

SEQ ID NO: 333124 - DNA, 15 bp, Homo sapiens
tgcatcaattacctg

SEQ ID NO: 333125 - DNA, 15 bp, Homo sapiens
ctgcatcaattacct

SEQ ID NO: 333126 - DNA, 15 bp, Homo sapiens
actgcatcaattacc

SEQ ID NO: 333127 - DNA, 15 bp, Homo sapiens
tactgcatcaattac

SEQ ID NO: 333128 - DNA, 15 bp, Homo sapiens
atactgcatcaatta

SEQ ID NO: 333129 - DNA, 15 bp, Homo sapiens
catactgcatcaatt

SEQ ID NO: 333130 - DNA, 15 bp, Homo sapiens
ccatactgcatcaat

SEQ ID NO: 333131 - DNA, 15 bp, Homo sapiens
gccatactgcatcaa

SEQ ID NO: 333132 - DNA, 15 bp, Homo sapiens
ggccatactgcatca

SEQ ID NO: 333133 - DNA, 15 bp, Homo sapiens
tggccatactgcatc

SEQ ID NO: 333134 - DNA, 15 bp, Homo sapiens
ctggccatactgcat

SEQ ID NO: 333135 - DNA, 15 bp, Homo sapiens
tctggccatactgca

SEQ ID NO: 333136 - DNA, 15 bp, Homo sapiens
ttctggccatactgc

SEQ ID NO: 333137 - DNA, 15 bp, Homo sapiens
gttctggccatactg

SEQ ID NO: 333138 - DNA, 15 bp, Homo sapiens
ggttctggccatact

SEQ ID NO: 333139 - DNA, 15 bp, Homo sapiens
gggttctggccatac

SEQ ID NO: 333140 - DNA, 15 bp, Homo sapiens
tgggttctggccata

SEQ ID NO: 333141 - DNA, 15 bp, Homo sapiens
atgggttctggccat

SEQ ID NO: 333142 - DNA, 15 bp, Homo sapiens
tatgggttctggcca

SEQ ID NO: 333143 - DNA, 15 bp, Homo sapiens
gtatgggttctggcc

SEQ ID NO: 333144 - DNA, 15 bp, Homo sapiens
agtatgggttctggc

SEQ ID NO: 333145 - DNA, 15 bp, Homo sapiens
tagtatgggttctgg

SEQ ID NO: 333146 - DNA, 15 bp, Homo sapiens
ctagtatgggttctg

SEQ ID NO: 333147 - DNA, 15 bp, Homo sapiens
cctagtatgggttct

SEQ ID NO: 333148 - DNA, 15 bp, Homo sapiens
gcctagtatgggttc

SEQ ID NO: 333149 - DNA, 15 bp, Homo sapiens
agcctagtatgggtt

SEQ ID NO: 333150 - DNA, 15 bp, Homo sapiens
aagcctagtatgggt

SEQ ID NO: 333151 - DNA, 15 bp, Homo sapiens
taagcctagtatggg

SEQ ID NO: 333152 - DNA, 15 bp, Homo sapiens
ttaagcctagtatgg

SEQ ID NO: 333153 - DNA, 15 bp, Homo sapiens
cttaagcctagtatg

SEQ ID NO: 333154 - DNA, 15 bp, Homo sapiens
ccttaagcctagtat

SEQ ID NO: 333155 - DNA, 15 bp, Homo sapiens
cccttaagcctagta

SEQ ID NO: 333156 - DNA, 15 bp, Homo sapiens
tcccttaagcctagt

SEQ ID NO: 333157 - DNA, 15 bp, Homo sapiens
gtcccttaagcctag

SEQ ID NO: 333158 - DNA, 15 bp, Homo sapiens
tgtcccttaagccta

SEQ ID NO: 333159 - DNA, 15 bp, Homo sapiens
ctgtcccttaagcct

SEQ ID NO: 333160 - DNA, 15 bp, Homo sapiens
actgtcccttaagcc

SEQ ID NO: 333161 - DNA, 15 bp, Homo sapiens
cactgtcccttaagc

SEQ ID NO: 333162 - DNA, 15 bp, Homo sapiens
acactgtcccttaag

SEQ ID NO: 333163 - DNA, 15 bp, Homo sapiens
tacactgtcccttaa

SEQ ID NO: 333164 - DNA, 15 bp, Homo sapiens
gtacactgtccctta

SEQ ID NO: 333165 - DNA, 15 bp, Homo sapiens
ggtacactgtccctt

SEQ ID NO: 333166 - DNA, 15 bp, Homo sapiens
tggtacactgtccct

SEQ ID NO: 333167 - DNA, 15 bp, Homo sapiens
atggtacactgtccc

SEQ ID NO: 333168 - DNA, 15 bp, Homo sapiens
tatggtacactgtcc

SEQ ID NO: 333169 - DNA, 15 bp, Homo sapiens
ttatggtacactgtc

SEQ ID NO: 333170 - DNA, 15 bp, Homo sapiens
tttatggtacactgt

SEQ ID NO: 333171 - DNA, 15 bp, Homo sapiens
gtttatggtacactg

SEQ ID NO: 333172 - DNA, 15 bp, Homo sapiens
agtttatggtacact

SEQ ID NO: 333173 - DNA, 15 bp, Homo sapiens
gagtttatggtacac

SEQ ID NO: 333174 - DNA, 15 bp, Homo sapiens
cgagtttatggtaca

SEQ ID NO: 333175 - DNA, 15 bp, Homo sapiens
acgagtttatggtac

SEQ ID NO: 333176 - DNA, 15 bp, Homo sapiens
tacgagtttatggta

SEQ ID NO: 333177 - DNA, 15 bp, Homo sapiens
ctacgagtttatggt

SEQ ID NO: 333178 - DNA, 15 bp, Homo sapiens
tctacgagtttatgg

SEQ ID NO: 333179 - DNA, 15 bp, Homo sapiens
ctctacgagtttatg

SEQ ID NO: 333180 - DNA, 15 bp, Homo sapiens
cctctacgagtttat

SEQ ID NO: 333181 - DNA, 15 bp, Homo sapiens
acctctacgagttta

SEQ ID NO: 333182 - DNA, 15 bp, Homo sapiens
gacctctacgagttt

SEQ ID NO: 333183 - DNA, 15 bp, Homo sapiens
ggacctctacgagtt

SEQ ID NO: 333184 - DNA, 15 bp, Homo sapiens
aggacctctacgagt

SEQ ID NO: 333185 - DNA, 15 bp, Homo sapiens
aaggacctctacgag

SEQ ID NO: 333186 - DNA, 15 bp, Homo sapiens
aaaggacctctacga

SEQ ID NO: 333187 - DNA, 15 bp, Homo sapiens
taaaggacctctacg

SEQ ID NO: 333188 - DNA, 15 bp, Homo sapiens
ttaaaggacctctac

SEQ ID NO: 333189 - DNA, 15 bp, Homo sapiens
tttaaaggacctcta

SEQ ID NO: 333190 - DNA, 15 bp, Homo sapiens
gtttaaaggacctct

SEQ ID NO: 333191 - DNA, 15 bp, Homo sapiens
tgtttaaaggacctc

SEQ ID NO: 333192 - DNA, 15 bp, Homo sapiens
ctgtttaaaggacct

SEQ ID NO: 333193 - DNA, 15 bp, Homo sapiens
tctgtttaaaggacc

SEQ ID NO: 333194 - DNA, 15 bp, Homo sapiens
atctgtttaaaggac

SEQ ID NO: 333195 - DNA, 15 bp, Homo sapiens
tatctgtttaaagga

SEQ ID NO: 333196 - DNA, 15 bp, Homo sapiens
ctatctgtttaaagg

SEQ ID NO: 333197 - DNA, 15 bp, Homo sapiens
tctatctgtttaaag

SEQ ID NO: 333198 - DNA, 15 bp, Homo sapiens
ttctatctgtttaaa

SEQ ID NO: 333199 - DNA, 15 bp, Homo sapiens
tttctatctgtttaa

SEQ ID NO: 333200 - DNA, 15 bp, Homo sapiens
gtttctatctgttta

SEQ ID NO: 333201 - DNA, 15 bp, Homo sapiens
cgtttctatctgttt

SEQ ID NO: 333202 - DNA, 15 bp, Homo sapiens
gcgtttctatctgtt

SEQ ID NO: 333203 - DNA, 15 bp, Homo sapiens
agcgtttctatctgt

SEQ ID NO: 333204 - DNA, 15 bp, Homo sapiens
cagcgtttctatctg

SEQ ID NO: 333205 - DNA, 15 bp, Homo sapiens
acagcgtttctatct

SEQ ID NO: 333206 - DNA, 15 bp, Homo sapiens
cacagcgtttctatc

SEQ ID NO: 333207 - DNA, 15 bp, Homo sapiens
gcacagcgtttctat

SEQ ID NO: 333208 - DNA, 15 bp, Homo sapiens
agcacagcgtttcta

SEQ ID NO: 333209 - DNA, 15 bp, Homo sapiens
gagcacagcgtttct

SEQ ID NO: 333210 - DNA, 15 bp, Homo sapiens
ggagcacagcgtttc

SEQ ID NO: 333211 - DNA, 15 bp, Homo sapiens
tggagcacagcgttt

SEQ ID NO: 333212 - DNA, 15 bp, Homo sapiens
ctggagcacagcgtt

SEQ ID NO: 333213 - DNA, 15 bp, Homo sapiens
cctggagcacagcgt

SEQ ID NO: 333214 - DNA, 15 bp, Homo sapiens
gcctggagcacagcg

SEQ ID NO: 333215 - DNA, 15 bp, Homo sapiens
tgcctggagcacagc

SEQ ID NO: 333216 - DNA, 15 bp, Homo sapiens
ctgcctggagcacag

SEQ ID NO: 333217 - DNA, 15 bp, Homo sapiens
tctgcctggagcaca

SEQ ID NO: 333218 - DNA, 15 bp, Homo sapiens
atctgcctggagcac

SEQ ID NO: 333219 - DNA, 15 bp, Homo sapiens
catctgcctggagca

SEQ ID NO: 333220 - DNA, 15 bp, Homo sapiens
gcatctgcctggagc

SEQ ID NO: 333221 - DNA, 15 bp, Homo sapiens
ggcatctgcctggag

SEQ ID NO: 333222 - DNA, 15 bp, Homo sapiens
tggcatctgcctgga

SEQ ID NO: 333223 - DNA, 15 bp, Homo sapiens
atggcatctgcctgg

SEQ ID NO: 333224 - DNA, 15 bp, Homo sapiens
tatggcatctgcctg

SEQ ID NO: 333225 - DNA, 15 bp, Homo sapiens
ttatggcatctgcct

SEQ ID NO: 333226 - DNA, 15 bp, Homo sapiens
gttatggcatctgcc

SEQ ID NO: 333227 - DNA, 15 bp, Homo sapiens
tgttatggcatctgc

SEQ ID NO: 333228 - DNA, 15 bp, Homo sapiens
ttgttatggcatctg

SEQ ID NO: 333229 - DNA, 15 bp, Homo sapiens
tttgttatggcatct

SEQ ID NO: 333230 - DNA, 15 bp, Homo sapiens
gtttgttatggcatc

SEQ ID NO: 333231 - DNA, 15 bp, Homo sapiens
tgtttgttatggcat

SEQ ID NO: 333232 - DNA, 15 bp, Homo sapiens
gtgtttgttatggca

SEQ ID NO: 333233 - DNA, 15 bp, Homo sapiens
agtgtttgttatggc

SEQ ID NO: 333234 - DNA, 15 bp, Homo sapiens
cagtgtttgttatgg

SEQ ID NO: 333235 - DNA, 15 bp, Homo sapiens
ccagtgtttgttatg

SEQ ID NO: 333236 - DNA, 15 bp, Homo sapiens
gccagtgtttgttat

SEQ ID NO: 333237 - DNA, 15 bp, Homo sapiens
agccagtgtttgtta

SEQ ID NO: 333238 - DNA, 15 bp, Homo sapiens
gagccagtgtttgtt

SEQ ID NO: 333239 - DNA, 15 bp, Homo sapiens
agagccagtgtttgt

SEQ ID NO: 333240 - DNA, 15 bp, Homo sapiens
tagagccagtgtttg

SEQ ID NO: 333241 - DNA, 15 bp, Homo sapiens
ctagagccagtgttt

SEQ ID NO: 333242 - DNA, 15 bp, Homo sapiens
tctagagccagtgtt

SEQ ID NO: 333243 - DNA, 15 bp, Homo sapiens
atctagagccagtgt

SEQ ID NO: 333244 - DNA, 15 bp, Homo sapiens
gatctagagccagtg

SEQ ID NO: 333245 - DNA, 15 bp, Homo sapiens
agatctagagccagt

SEQ ID NO: 333246 - DNA, 15 bp, Homo sapiens
tagatctagagccag

SEQ ID NO: 333247 - DNA, 15 bp, Homo sapiens
gtagatctagagcca

SEQ ID NO: 333248 - DNA, 15 bp, Homo sapiens
ggtagatctagagcc

SEQ ID NO: 333249 - DNA, 15 bp, Homo sapiens
tggtagatctagagc

SEQ ID NO: 333250 - DNA, 15 bp, Homo sapiens
atggtagatctagag

SEQ ID NO: 333251 - DNA, 15 bp, Homo sapiens
catggtagatctaga

SEQ ID NO: 333252 - DNA, 15 bp, Homo sapiens
ccatggtagatctag

SEQ ID NO: 333253 - DNA, 15 bp, Homo sapiens
cccatggtagatcta

SEQ ID NO: 333254 - DNA, 15 bp, Homo sapiens
acccatggtagatct

SEQ ID NO: 333255 - DNA, 15 bp, Homo sapiens
aacccatggtagatc

SEQ ID NO: 333256 - DNA, 15 bp, Homo sapiens
taacccatggtagat

SEQ ID NO: 333257 - DNA, 15 bp, Homo sapiens
ataacccatggtaga

SEQ ID NO: 333258 - DNA, 15 bp, Homo sapiens
tataacccatggtag

SEQ ID NO: 333259 - DNA, 15 bp, Homo sapiens
atataacccatggta

SEQ ID NO: 333260 - DNA, 15 bp, Homo sapiens
catataacccatggt

SEQ ID NO: 333261 - DNA, 15 bp, Homo sapiens
ccatataacccatgg

SEQ ID NO: 333262 - DNA, 15 bp, Homo sapiens
cccatataacccatg

SEQ ID NO: 333263 - DNA, 15 bp, Homo sapiens
acccatataacccat

SEQ ID NO: 333264 - DNA, 15 bp, Homo sapiens
gacccatataaccca

SEQ ID NO: 333265 - DNA, 15 bp, Homo sapiens
ggacccatataaccc

SEQ ID NO: 333266 - DNA, 15 bp, Homo sapiens
aggacccatataacc

SEQ ID NO: 333267 - DNA, 15 bp, Homo sapiens
aaggacccatataac

SEQ ID NO: 333268 - DNA, 15 bp, Homo sapiens
taaggacccatataa

SEQ ID NO: 333269 - DNA, 15 bp, Homo sapiens
ctaaggacccatata

SEQ ID NO: 333270 - DNA, 15 bp, Homo sapiens
actaaggacccatat

SEQ ID NO: 333271 - DNA, 15 bp, Homo sapiens
aactaaggacccata

SEQ ID NO: 333272 - DNA, 15 bp, Homo sapiens
taactaaggacccat

SEQ ID NO: 333273 - DNA, 15 bp, Homo sapiens
ttaactaaggaccca

SEQ ID NO: 333274 - DNA, 15 bp, Homo sapiens
cttaactaaggaccc

SEQ ID NO: 333275 - DNA, 15 bp, Homo sapiens
tcttaactaaggacc

SEQ ID NO: 333276 - DNA, 15 bp, Homo sapiens
atcttaactaaggac

SEQ ID NO: 333277 - DNA, 15 bp, Homo sapiens
aatcttaactaagga

SEQ ID NO: 333278 - DNA, 15 bp, Homo sapiens
taatcttaactaagg

SEQ ID NO: 333279 - DNA, 15 bp, Homo sapiens
ctaatcttaactaag

SEQ ID NO: 333280 - DNA, 15 bp, Homo sapiens
tctaatcttaactaa

SEQ ID NO: 333281 - DNA, 15 bp, Homo sapiens
atctaatcttaacta

SEQ ID NO: 333282 - DNA, 15 bp, Homo sapiens
tatctaatcttaact

SEQ ID NO: 333283 - DNA, 15 bp, Homo sapiens
atatctaatcttaac

SEQ ID NO: 333284 - DNA, 15 bp, Homo sapiens
catatctaatcttaa

SEQ ID NO: 333285 - DNA, 15 bp, Homo sapiens
ccatatctaatctta

SEQ ID NO: 333286 - DNA, 15 bp, Homo sapiens
tccatatctaatctt

SEQ ID NO: 333287 - DNA, 15 bp, Homo sapiens
ctccatatctaatct

SEQ ID NO: 333288 - DNA, 15 bp, Homo sapiens
actccatatctaatc

SEQ ID NO: 333289 - DNA, 15 bp, Homo sapiens
gactccatatctaat

SEQ ID NO: 333290 - DNA, 15 bp, Homo sapiens
tgactccatatctaa

SEQ ID NO: 333291 - DNA, 15 bp, Homo sapiens
gtgactccatatcta

SEQ ID NO: 333292 - DNA, 15 bp, Homo sapiens
tgtgactccatatct

SEQ ID NO: 333293 - DNA, 15 bp, Homo sapiens
ctgtgactccatatc

SEQ ID NO: 333294 - DNA, 15 bp, Homo sapiens
actgtgactccatat

SEQ ID NO: 333295 - DNA, 15 bp, Homo sapiens
cactgtgactccata

SEQ ID NO: 333296 - DNA, 15 bp, Homo sapiens
acactgtgactccat

SEQ ID NO: 333297 - DNA, 15 bp, Homo sapiens
cacactgtgactcca

SEQ ID NO: 333298 - DNA, 15 bp, Homo sapiens
gcacactgtgactcc

SEQ ID NO: 333299 - DNA, 15 bp, Homo sapiens
ggcacactgtgactc

SEQ ID NO: 333300 - DNA, 15 bp, Homo sapiens
tggcacactgtgact

SEQ ID NO: 333301 - DNA, 15 bp, Homo sapiens
ctggcacactgtgac

SEQ ID NO: 333302 - DNA, 15 bp, Homo sapiens
tctggcacactgtga

SEQ ID NO: 333303 - DNA, 15 bp, Homo sapiens
ttctggcacactgtg

SEQ ID NO: 333304 - DNA, 15 bp, Homo sapiens
attctggcacactgt

SEQ ID NO: 333305 - DNA, 15 bp, Homo sapiens
aattctggcacactg

SEQ ID NO: 333306 - DNA, 15 bp, Homo sapiens
aaattctggcacact

SEQ ID NO: 333307 - DNA, 15 bp, Homo sapiens
gaaattctggcacac

SEQ ID NO: 333308 - DNA, 15 bp, Homo sapiens
tgaaattctggcaca

SEQ ID NO: 333309 - DNA, 15 bp, Homo sapiens
ctgaaattctggcac

SEQ ID NO: 333310 - DNA, 15 bp, Homo sapiens
cctgaaattctggca

SEQ ID NO: 333311 - DNA, 15 bp, Homo sapiens
ccctgaaattctggc

SEQ ID NO: 333312 - DNA, 15 bp, Homo sapiens
tccctgaaattctgg

SEQ ID NO: 333313 - DNA, 15 bp, Homo sapiens
ctccctgaaattctg

SEQ ID NO: 333314 - DNA, 15 bp, Homo sapiens
tctccctgaaattct

SEQ ID NO: 333315 - DNA, 15 bp, Homo sapiens
ctctccctgaaattc

SEQ ID NO: 333316 - DNA, 15 bp, Homo sapiens
tctctccctgaaatt

SEQ ID NO: 333317 - DNA, 15 bp, Homo sapiens
ctctctccctgaaat

SEQ ID NO: 333318 - DNA, 15 bp, Homo sapiens
cctctctccctgaaa

SEQ ID NO: 333319 - DNA, 15 bp, Homo sapiens
tcctctctccctgaa

SEQ ID NO: 333320 - DNA, 15 bp, Homo sapiens
ttcctctctccctga

SEQ ID NO: 333321 - DNA, 15 bp, Homo sapiens
tttcctctctccctg

SEQ ID NO: 333322 - DNA, 15 bp, Homo sapiens
ctttcctctctccct

SEQ ID NO: 333323 - DNA, 15 bp, Homo sapiens
actttcctctctccc

SEQ ID NO: 333324 - DNA, 15 bp, Homo sapiens
cactttcctctctcc

SEQ ID NO: 333325 - DNA, 15 bp, Homo sapiens
ccactttcctctctc

SEQ ID NO: 333326 - DNA, 15 bp, Homo sapiens
tccactttcctctct

SEQ ID NO: 333327 - DNA, 15 bp, Homo sapiens
ttccactttcctctc

SEQ ID NO: 333328 - DNA, 15 bp, Homo sapiens
cttccactttcctct

SEQ ID NO: 333329 - DNA, 15 bp, Homo sapiens
ccttccactttcctc

SEQ ID NO: 333330 - DNA, 15 bp, Homo sapiens
cccttccactttcct

SEQ ID NO: 333331 - DNA, 15 bp, Homo sapiens
gcccttccactttcc

SEQ ID NO: 333332 - DNA, 15 bp, Homo sapiens
agcccttccactttc

SEQ ID NO: 333333 - DNA, 15 bp, Homo sapiens
aagcccttccacttt

SEQ ID NO: 333334 - DNA, 15 bp, Homo sapiens
aaagcccttccactt

SEQ ID NO: 333335 - DNA, 15 bp, Homo sapiens
gaaagcccttccact

SEQ ID NO: 333336 - DNA, 15 bp, Homo sapiens
ggaaagcccttccac

SEQ ID NO: 333337 - DNA, 15 bp, Homo sapiens
tggaaagcccttcca

SEQ ID NO: 333338 - DNA, 15 bp, Homo sapiens
gtggaaagcccttcc

SEQ ID NO: 333339 - DNA, 15 bp, Homo sapiens
agtggaaagcccttc

SEQ ID NO: 333340 - DNA, 15 bp, Homo sapiens
tagtggaaagccctt

SEQ ID NO: 333341 - DNA, 15 bp, Homo sapiens
ttagtggaaagccct

SEQ ID NO: 333342 - DNA, 15 bp, Homo sapiens
cttagtggaaagccc

SEQ ID NO: 333343 - DNA, 15 bp, Homo sapiens
gcttagtggaaagcc

SEQ ID NO: 333344 - DNA, 15 bp, Homo sapiens
ggcttagtggaaagc

SEQ ID NO: 333345 - DNA, 15 bp, Homo sapiens
aggcttagtggaaag

SEQ ID NO: 333346 - DNA, 15 bp, Homo sapiens
aaggcttagtggaaa

SEQ ID NO: 333347 - DNA, 15 bp, Homo sapiens
aaaggcttagtggaa

SEQ ID NO: 333348 - DNA, 15 bp, Homo sapiens
aaaaggcttagtgga

SEQ ID NO: 333349 - DNA, 15 bp, Homo sapiens
caaaaggcttagtgg

SEQ ID NO: 333350 - DNA, 15 bp, Homo sapiens
tcaaaaggcttagtg

SEQ ID NO: 333351 - DNA, 15 bp, Homo sapiens
ttcaaaaggcttagt

SEQ ID NO: 333352 - DNA, 15 bp, Homo sapiens
gttcaaaaggcttag

SEQ ID NO: 333353 - DNA, 15 bp, Homo sapiens
agttcaaaaggctta

SEQ ID NO: 333354 - DNA, 15 bp, Homo sapiens
tagttcaaaaggctt

SEQ ID NO: 333355 - DNA, 15 bp, Homo sapiens
gtagttcaaaaggct

SEQ ID NO: 333356 - DNA, 15 bp, Homo sapiens
agtagttcaaaaggc

SEQ ID NO: 333357 - DNA, 15 bp, Homo sapiens
tagtagttcaaaagg

SEQ ID NO: 333358 - DNA, 15 bp, Homo sapiens
ctagtagttcaaaag

SEQ ID NO: 333359 - DNA, 15 bp, Homo sapiens
cctagtagttcaaaa

SEQ ID NO: 333360 - DNA, 15 bp, Homo sapiens
acctagtagttcaaa

SEQ ID NO: 333361 - DNA, 15 bp, Homo sapiens
tacctagtagttcaa

SEQ ID NO: 333362 - DNA, 15 bp, Homo sapiens
gtacctagtagttca

SEQ ID NO: 333363 - DNA, 15 bp, Homo sapiens
ggtacctagtagttc

SEQ ID NO: 333364 - DNA, 15 bp, Homo sapiens
gggtacctagtagtt

SEQ ID NO: 333365 - DNA, 15 bp, Homo sapiens
ggggtacctagtagt

SEQ ID NO: 333366 - DNA, 15 bp, Homo sapiens
aggggtacctagtag

SEQ ID NO: 333367 - DNA, 15 bp, Homo sapiens
gaggggtacctagta

SEQ ID NO: 333368 - DNA, 15 bp, Homo sapiens
cgaggggtacctagt

SEQ ID NO: 333369 - DNA, 15 bp, Homo sapiens
acgaggggtacctag

SEQ ID NO: 333370 - DNA, 15 bp, Homo sapiens
aacgaggggtaccta

SEQ ID NO: 333371 - DNA, 15 bp, Homo sapiens
aaacgaggggtacct

SEQ ID NO: 333372 - DNA, 15 bp, Homo sapiens
aaaacgaggggtacc

SEQ ID NO: 333373 - DNA, 15 bp, Homo sapiens
taaaacgaggggtac

SEQ ID NO: 333374 - DNA, 15 bp, Homo sapiens
gtaaaacgaggggta

SEQ ID NO: 333375 - DNA, 15 bp, Homo sapiens
tgtaaaacgaggggt

SEQ ID NO: 333376 - DNA, 15 bp, Homo sapiens
atgtaaaacgagggg

SEQ ID NO: 333377 - DNA, 15 bp, Homo sapiens
gatgtaaaacgaggg

SEQ ID NO: 333378 - DNA, 15 bp, Homo sapiens
agatgtaaaacgagg

SEQ ID NO: 333379 - DNA, 15 bp, Homo sapiens
cagatgtaaaacgag

SEQ ID NO: 333380 - DNA, 15 bp, Homo sapiens
ccagatgtaaaacga

SEQ ID NO: 333381 - DNA, 15 bp, Homo sapiens
accagatgtaaaacg

SEQ ID NO: 333382 - DNA, 15 bp, Homo sapiens
aaccagatgtaaaac

SEQ ID NO: 333383 - DNA, 15 bp, Homo sapiens
taaccagatgtaaaa

SEQ ID NO: 333384 - DNA, 15 bp, Homo sapiens
ataaccagatgtaaa

SEQ ID NO: 333385 - DNA, 15 bp, Homo sapiens
gataaccagatgtaa

SEQ ID NO: 333386 - DNA, 15 bp, Homo sapiens
agataaccagatgta

SEQ ID NO: 333387 - DNA, 15 bp, Homo sapiens
gagataaccagatgt

SEQ ID NO: 333388 - DNA, 15 bp, Homo sapiens
tgagataaccagatg

SEQ ID NO: 333389 - DNA, 15 bp, Homo sapiens
atgagataaccagat

SEQ ID NO: 333390 - DNA, 15 bp, Homo sapiens
aatgagataaccaga

SEQ ID NO: 333391 - DNA, 15 bp, Homo sapiens
aaatgagataaccag

SEQ ID NO: 333392 - DNA, 15 bp, Homo sapiens
taaatgagataacca

SEQ ID NO: 333393 - DNA, 15 bp, Homo sapiens
ttaaatgagataacc

SEQ ID NO: 333394 - DNA, 15 bp, Homo sapiens
tttaaatgagataac

SEQ ID NO: 333395 - DNA, 15 bp, Homo sapiens
atttaaatgagataa

SEQ ID NO: 333396 - DNA, 15 bp, Homo sapiens
gatttaaatgagata

SEQ ID NO: 333397 - DNA, 15 bp, Homo sapiens
agatttaaatgagat

SEQ ID NO: 333398 - DNA, 15 bp, Homo sapiens
tagatttaaatgaga

SEQ ID NO: 333399 - DNA, 15 bp, Homo sapiens
atagatttaaatgag

SEQ ID NO: 333400 - DNA, 15 bp, Homo sapiens
catagatttaaatga

SEQ ID NO: 333401 - DNA, 15 bp, Homo sapiens
tcatagatttaaatg

SEQ ID NO: 333402 - DNA, 15 bp, Homo sapiens
gtcatagatttaaat

SEQ ID NO: 333403 - DNA, 15 bp, Homo sapiens
cgtcatagatttaaa

SEQ ID NO: 333404 - DNA, 15 bp, Homo sapiens
acgtcatagatttaa

SEQ ID NO: 333405 - DNA, 15 bp, Homo sapiens
aacgtcatagattta

SEQ ID NO: 333406 - DNA, 15 bp, Homo sapiens
aaacgtcatagattt

SEQ ID NO: 333407 - DNA, 15 bp, Homo sapiens
aaaacgtcatagatt

SEQ ID NO: 333408 - DNA, 15 bp, Homo sapiens
taaaacgtcatagat

SEQ ID NO: 333409 - DNA, 15 bp, Homo sapiens
ttaaaacgtcataga

SEQ ID NO: 333410 - DNA, 15 bp, Homo sapiens
tttaaaacgtcatag

SEQ ID NO: 333411 - DNA, 15 bp, Homo sapiens
ttttaaaacgtcata

SEQ ID NO: 333412 - DNA, 15 bp, Homo sapiens
attttaaaacgtcat

SEQ ID NO: 333413 - DNA, 15 bp, Homo sapiens
tattttaaaacgtca

SEQ ID NO: 333414 - DNA, 15 bp, Homo sapiens
gtattttaaaacgtc

SEQ ID NO: 333415 - DNA, 15 bp, Homo sapiens
agtattttaaaacgt

SEQ ID NO: 333416 - DNA, 15 bp, Homo sapiens
aagtattttaaaacg

SEQ ID NO: 333417 - DNA, 15 bp, Homo sapiens
taagtattttaaaac

SEQ ID NO: 333418 - DNA, 15 bp, Homo sapiens
ataagtattttaaaa

SEQ ID NO: 333419 - DNA, 15 bp, Homo sapiens
aataagtattttaaa

SEQ ID NO: 333420 - DNA, 15 bp, Homo sapiens
taataagtattttaa

SEQ ID NO: 333421 - DNA, 15 bp, Homo sapiens
gtaataagtatttta

SEQ ID NO: 333422 - DNA, 15 bp, Homo sapiens
ggtaataagtatttt

SEQ ID NO: 333423 - DNA, 15 bp, Homo sapiens
tggtaataagtattt

SEQ ID NO: 333424 - DNA, 15 bp, Homo sapiens
atggtaataagtatt

SEQ ID NO: 333425 - DNA, 15 bp, Homo sapiens
aatggtaataagtat

SEQ ID NO: 333426 - DNA, 15 bp, Homo sapiens
aaatggtaataagta

SEQ ID NO: 333427 - DNA, 15 bp, Homo sapiens
taaatggtaataagt

SEQ ID NO: 333428 - DNA, 15 bp, Homo sapiens
ttaaatggtaataag

SEQ ID NO: 333429 - DNA, 15 bp, Homo sapiens
cttaaatggtaataa

SEQ ID NO: 333430 - DNA, 15 bp, Homo sapiens
tcttaaatggtaata

SEQ ID NO: 333431 - DNA, 15 bp, Homo sapiens
gtcttaaatggtaat

SEQ ID NO: 333432 - DNA, 15 bp, Homo sapiens
tgtcttaaatggtaa

SEQ ID NO: 333433 - DNA, 15 bp, Homo sapiens
atgtcttaaatggta

SEQ ID NO: 333434 - DNA, 15 bp, Homo sapiens
catgtcttaaatggt

SEQ ID NO: 333435 - DNA, 15 bp, Homo sapiens
tcatgtcttaaatgg

SEQ ID NO: 333436 - DNA, 15 bp, Homo sapiens
ctcatgtcttaaatg

SEQ ID NO: 333437 - DNA, 15 bp, Homo sapiens
tctcatgtcttaaat

SEQ ID NO: 333438 - DNA, 15 bp, Homo sapiens
ttctcatgtcttaaa

SEQ ID NO: 333439 - DNA, 15 bp, Homo sapiens
tttctcatgtcttaa

SEQ ID NO: 333440 - DNA, 15 bp, Homo sapiens
ttttctcatgtctta

SEQ ID NO: 333441 - DNA, 15 bp, Homo sapiens
tttttctcatgtctt

SEQ ID NO: 333442 - DNA, 15 bp, Homo sapiens
atttttctcatgtct

SEQ ID NO: 333443 - DNA, 15 bp, Homo sapiens
aatttttctcatgtc

SEQ ID NO: 333444 - DNA, 15 bp, Homo sapiens
taatttttctcatgt

SEQ ID NO: 333445 - DNA, 15 bp, Homo sapiens
ttaatttttctcatg

SEQ ID NO: 333446 - DNA, 15 bp, Homo sapiens
cttaatttttctcat

SEQ ID NO: 333447 - DNA, 15 bp, Homo sapiens
acttaatttttctca

SEQ ID NO: 333448 - DNA, 15 bp, Homo sapiens
aacttaatttttctc

SEQ ID NO: 333449 - DNA, 15 bp, Homo sapiens
aaacttaatttttct

SEQ ID NO: 333450 - DNA, 15 bp, Homo sapiens
taaacttaatttttc

SEQ ID NO: 333451 - DNA, 15 bp, Homo sapiens
ctaaacttaattttt

SEQ ID NO: 333452 - DNA, 15 bp, Homo sapiens
tctaaacttaatttt

SEQ ID NO: 333453 - DNA, 15 bp, Homo sapiens
ttctaaacttaattt

SEQ ID NO: 333454 - DNA, 15 bp, Homo sapiens
tttctaaacttaatt

SEQ ID NO: 333455 - DNA, 15 bp, Homo sapiens
gtttctaaacttaat

SEQ ID NO: 333456 - DNA, 15 bp, Homo sapiens
cgtttctaaacttaa

SEQ ID NO: 333457 - DNA, 15 bp, Homo sapiens
ccgtttctaaactta

SEQ ID NO: 333458 - DNA, 15 bp, Homo sapiens
gccgtttctaaactt

SEQ ID NO: 333459 - DNA, 15 bp, Homo sapiens
agccgtttctaaact

SEQ ID NO: 333460 - DNA, 15 bp, Homo sapiens
tagccgtttctaaac

SEQ ID NO: 333461 - DNA, 15 bp, Homo sapiens
ctagccgtttctaaa

SEQ ID NO: 333462 - DNA, 15 bp, Homo sapiens
tctagccgtttctaa

SEQ ID NO: 333463 - DNA, 15 bp, Homo sapiens
atctagccgtttcta

SEQ ID NO: 333464 - DNA, 15 bp, Homo sapiens
tatctagccgtttct

SEQ ID NO: 333465 - DNA, 15 bp, Homo sapiens
ctatctagccgtttc

SEQ ID NO: 333466 - DNA, 15 bp, Homo sapiens
gctatctagccgttt

SEQ ID NO: 333467 - DNA, 15 bp, Homo sapiens
agctatctagccgtt

SEQ ID NO: 333468 - DNA, 15 bp, Homo sapiens
gagctatctagccgt

SEQ ID NO: 333469 - DNA, 15 bp, Homo sapiens
tgagctatctagccg

SEQ ID NO: 333470 - DNA, 15 bp, Homo sapiens
gtgagctatctagcc

SEQ ID NO: 333471 - DNA, 15 bp, Homo sapiens
cgtgagctatctagc

SEQ ID NO: 333472 - DNA, 15 bp, Homo sapiens
gcgtgagctatctag

SEQ ID NO: 333473 - DNA, 15 bp, Homo sapiens
agcgtgagctatcta

SEQ ID NO: 333474 - DNA, 15 bp, Homo sapiens
tagcgtgagctatct

SEQ ID NO: 333475 - DNA, 15 bp, Homo sapiens
ctagcgtgagctatc

SEQ ID NO: 333476 - DNA, 15 bp, Homo sapiens
tctagcgtgagctat

SEQ ID NO: 333477 - DNA, 15 bp, Homo sapiens
ttctagcgtgagcta

SEQ ID NO: 333478 - DNA, 15 bp, Homo sapiens
tttctagcgtgagct

SEQ ID NO: 333479 - DNA, 15 bp, Homo sapiens
ctttctagcgtgagc

SEQ ID NO: 333480 - DNA, 15 bp, Homo sapiens
cctttctagcgtgag

SEQ ID NO: 333481 - DNA, 15 bp, Homo sapiens
tcctttctagcgtga

SEQ ID NO: 333482 - DNA, 15 bp, Homo sapiens
ttcctttctagcgtg

SEQ ID NO: 333483 - DNA, 15 bp, Homo sapiens
cttcctttctagcgt

SEQ ID NO: 333484 - DNA, 15 bp, Homo sapiens
ccttcctttctagcg

SEQ ID NO: 333485 - DNA, 15 bp, Homo sapiens
tccttcctttctagc

SEQ ID NO: 333486 - DNA, 15 bp, Homo sapiens
gtccttcctttctag

SEQ ID NO: 333487 - DNA, 15 bp, Homo sapiens
agtccttcctttcta

SEQ ID NO: 333488 - DNA, 15 bp, Homo sapiens
gagtccttcctttct

SEQ ID NO: 333489 - DNA, 15 bp, Homo sapiens
ggagtccttcctttc

SEQ ID NO: 333490 - DNA, 15 bp, Homo sapiens
tggagtccttccttt

SEQ ID NO: 333491 - DNA, 15 bp, Homo sapiens
ttggagtccttcctt

SEQ ID NO: 333492 - DNA, 15 bp, Homo sapiens
tttggagtccttcct

SEQ ID NO: 333493 - DNA, 15 bp, Homo sapiens
atttggagtccttcc

SEQ ID NO: 333494 - DNA, 15 bp, Homo sapiens
aatttggagtccttc

SEQ ID NO: 333495 - DNA, 15 bp, Homo sapiens
aaatttggagtcctt

SEQ ID NO: 333496 - DNA, 15 bp, Homo sapiens
aaaatttggagtcct

SEQ ID NO: 333497 - DNA, 15 bp, Homo sapiens
taaaatttggagtcc

SEQ ID NO: 333498 - DNA, 15 bp, Homo sapiens
ttaaaatttggagtc

SEQ ID NO: 333499 - DNA, 15 bp, Homo sapiens
gttaaaatttggagt

SEQ ID NO: 333500 - DNA, 15 bp, Homo sapiens
ggttaaaatttggag

SEQ ID NO: 333501 - DNA, 15 bp, Homo sapiens
tggttaaaatttgga

SEQ ID NO: 333502 - DNA, 15 bp, Homo sapiens
ttggttaaaatttgg

SEQ ID NO: 333503 - DNA, 15 bp, Homo sapiens
cttggttaaaatttg

SEQ ID NO: 333504 - DNA, 15 bp, Homo sapiens
ccttggttaaaattt

SEQ ID NO: 333505 - DNA, 15 bp, Homo sapiens
cccttggttaaaatt

SEQ ID NO: 333506 - DNA, 15 bp, Homo sapiens
gcccttggttaaaat

SEQ ID NO: 333507 - DNA, 15 bp, Homo sapiens
tgcccttggttaaaa

SEQ ID NO: 333508 - DNA, 15 bp, Homo sapiens
ctgcccttggttaaa

SEQ ID NO: 333509 - DNA, 15 bp, Homo sapiens
tctgcccttggttaa

SEQ ID NO: 333510 - DNA, 15 bp, Homo sapiens
atctgcccttggtta

SEQ ID NO: 333511 - DNA, 15 bp, Homo sapiens
catctgcccttggtt

SEQ ID NO: 333512 - DNA, 15 bp, Homo sapiens
acatctgcccttggt

SEQ ID NO: 333513 - DNA, 15 bp, Homo sapiens
cacatctgcccttgg

SEQ ID NO: 333514 - DNA, 15 bp, Homo sapiens
gcacatctgcccttg

SEQ ID NO: 333515 - DNA, 15 bp, Homo sapiens
tgcacatctgccctt

SEQ ID NO: 333516 - DNA, 15 bp, Homo sapiens
atgcacatctgccct

SEQ ID NO: 333517 - DNA, 15 bp, Homo sapiens
catgcacatctgccc

SEQ ID NO: 333518 - DNA, 15 bp, Homo sapiens
ccatgcacatctgcc

SEQ ID NO: 333519 - DNA, 15 bp, Homo sapiens
tccatgcacatctgc

SEQ ID NO: 333520 - DNA, 15 bp, Homo sapiens
ctccatgcacatctg

SEQ ID NO: 333521 - DNA, 15 bp, Homo sapiens
cctccatgcacatct

SEQ ID NO: 333522 - DNA, 15 bp, Homo sapiens
gcctccatgcacatc

SEQ ID NO: 333523 - DNA, 15 bp, Homo sapiens
ggcctccatgcacat

SEQ ID NO: 333524 - DNA, 15 bp, Homo sapiens
tggcctccatgcaca

SEQ ID NO: 333525 - DNA, 15 bp, Homo sapiens
ttggcctccatgcac

SEQ ID NO: 333526 - DNA, 15 bp, Homo sapiens
cttggcctccatgca

SEQ ID NO: 333527 - DNA, 15 bp, Homo sapiens
acttggcctccatgc

SEQ ID NO: 333528 - DNA, 15 bp, Homo sapiens
gacttggcctccatg

SEQ ID NO: 333529 - DNA, 15 bp, Homo sapiens
tgacttggcctccat

SEQ ID NO: 333530 - DNA, 15 bp, Homo sapiens
atgacttggcctcca

SEQ ID NO: 333531 - DNA, 15 bp, Homo sapiens
aatgacttggcctcc

SEQ ID NO: 333532 - DNA, 15 bp, Homo sapiens
aaatgacttggcctc

SEQ ID NO: 333533 - DNA, 15 bp, Homo sapiens
gaaatgacttggcct

SEQ ID NO: 333534 - DNA, 15 bp, Homo sapiens
ggaaatgacttggcc

SEQ ID NO: 333535 - DNA, 15 bp, Homo sapiens
aggaaatgacttggc

SEQ ID NO: 333536 - DNA, 15 bp, Homo sapiens
aaggaaatgacttgg

SEQ ID NO: 333537 - DNA, 15 bp, Homo sapiens
gaaggaaatgacttg

SEQ ID NO: 333538 - DNA, 15 bp, Homo sapiens
ggaaggaaatgactt

SEQ ID NO: 333539 - DNA, 15 bp, Homo sapiens
gggaaggaaatgact

SEQ ID NO: 333540 - DNA, 15 bp, Homo sapiens
tgggaaggaaatgac

SEQ ID NO: 333541 - DNA, 15 bp, Homo sapiens
atgggaaggaaatga

SEQ ID NO: 333542 - DNA, 15 bp, Homo sapiens
catgggaaggaaatg

SEQ ID NO: 333543 - DNA, 15 bp, Homo sapiens
gcatgggaaggaaat

SEQ ID NO: 333544 - DNA, 15 bp, Homo sapiens
agcatgggaaggaaa

SEQ ID NO: 333545 - DNA, 15 bp, Homo sapiens
gagcatgggaaggaa

SEQ ID NO: 333546 - DNA, 15 bp, Homo sapiens
agagcatgggaagga

SEQ ID NO: 333547 - DNA, 15 bp, Homo sapiens
gagagcatgggaagg

SEQ ID NO: 333548 - DNA, 15 bp, Homo sapiens
tgagagcatgggaag

SEQ ID NO: 333549 - DNA, 15 bp, Homo sapiens
atgagagcatgggaa

SEQ ID NO: 333550 - DNA, 15 bp, Homo sapiens
tatgagagcatggga

SEQ ID NO: 333551 - DNA, 15 bp, Homo sapiens
gtatgagagcatggg

SEQ ID NO: 333552 - DNA, 15 bp, Homo sapiens
agtatgagagcatgg

SEQ ID NO: 333553 - DNA, 15 bp, Homo sapiens
cagtatgagagcatg

SEQ ID NO: 333554 - DNA, 15 bp, Homo sapiens
tcagtatgagagcat

SEQ ID NO: 333555 - DNA, 15 bp, Homo sapiens
gtcagtatgagagca

SEQ ID NO: 333556 - DNA, 15 bp, Homo sapiens
ggtcagtatgagagc

SEQ ID NO: 333557 - DNA, 15 bp, Homo sapiens
gggtcagtatgagag

SEQ ID NO: 333558 - DNA, 15 bp, Homo sapiens
tgggtcagtatgaga

SEQ ID NO: 333559 - DNA, 15 bp, Homo sapiens
ttgggtcagtatgag

SEQ ID NO: 333560 - DNA, 15 bp, Homo sapiens
gttgggtcagtatga

SEQ ID NO: 333561 - DNA, 15 bp, Homo sapiens
tgttgggtcagtatg

SEQ ID NO: 333562 - DNA, 15 bp, Homo sapiens
ttgttgggtcagtat

SEQ ID NO: 333563 - DNA, 15 bp, Homo sapiens
tttgttgggtcagta

SEQ ID NO: 333564 - DNA, 15 bp, Homo sapiens
gtttgttgggtcagt

SEQ ID NO: 333565 - DNA, 15 bp, Homo sapiens
ggtttgttgggtcag

SEQ ID NO: 333566 - DNA, 15 bp, Homo sapiens
gggtttgttgggtca

SEQ ID NO: 333567 - DNA, 15 bp, Homo sapiens
tgggtttgttgggtc

SEQ ID NO: 333568 - DNA, 15 bp, Homo sapiens
atgggtttgttgggt

SEQ ID NO: 333569 - DNA, 15 bp, Homo sapiens
aatgggtttgttggg

SEQ ID NO: 333570 - DNA, 15 bp, Homo sapiens
gaatgggtttgttgg

SEQ ID NO: 333571 - DNA, 15 bp, Homo sapiens
agaatgggtttgttg

SEQ ID NO: 333572 - DNA, 15 bp, Homo sapiens
cagaatgggtttgtt

SEQ ID NO: 333573 - DNA, 15 bp, Homo sapiens
gcagaatgggtttgt

SEQ ID NO: 333574 - DNA, 15 bp, Homo sapiens
tgcagaatgggtttg

SEQ ID NO: 333575 - DNA, 15 bp, Homo sapiens
gtgcagaatgggttt

SEQ ID NO: 333576 - DNA, 15 bp, Homo sapiens
cgtgcagaatgggtt

SEQ ID NO: 333577 - DNA, 15 bp, Homo sapiens
acgtgcagaatgggt

SEQ ID NO: 333578 - DNA, 15 bp, Homo sapiens
cacgtgcagaatggg

SEQ ID NO: 333579 - DNA, 15 bp, Homo sapiens
tcacgtgcagaatgg

SEQ ID NO: 333580 - DNA, 15 bp, Homo sapiens
ctcacgtgcagaatg

SEQ ID NO: 333581 - DNA, 15 bp, Homo sapiens
tctcacgtgcagaat

SEQ ID NO: 333582 - DNA, 15 bp, Homo sapiens
ttctcacgtgcagaa

SEQ ID NO: 333583 - DNA, 15 bp, Homo sapiens
tttctcacgtgcaga

SEQ ID NO: 333584 - DNA, 15 bp, Homo sapiens
ttttctcacgtgcag

SEQ ID NO: 333585 - DNA, 15 bp, Homo sapiens
gttttctcacgtgca

SEQ ID NO: 333586 - DNA, 15 bp, Homo sapiens
agttttctcacgtgc

SEQ ID NO: 333587 - DNA, 15 bp, Homo sapiens
cagttttctcacgtg

SEQ ID NO: 333588 - DNA, 15 bp, Homo sapiens
tcagttttctcacgt

SEQ ID NO: 333589 - DNA, 15 bp, Homo sapiens
ctcagttttctcacg

SEQ ID NO: 333590 - DNA, 15 bp, Homo sapiens
cctcagttttctcac

SEQ ID NO: 333591 - DNA, 15 bp, Homo sapiens
gcctcagttttctca

SEQ ID NO: 333592 - DNA, 15 bp, Homo sapiens
ggcctcagttttctc

SEQ ID NO: 333593 - DNA, 15 bp, Homo sapiens
gggcctcagttttct

SEQ ID NO: 333594 - DNA, 15 bp, Homo sapiens
cgggcctcagttttc

SEQ ID NO: 333595 - DNA, 15 bp, Homo sapiens
ccgggcctcagtttt

SEQ ID NO: 333596 - DNA, 15 bp, Homo sapiens
tccgggcctcagttt

SEQ ID NO: 333597 - DNA, 15 bp, Homo sapiens
ctccgggcctcagtt

SEQ ID NO: 333598 - DNA, 15 bp, Homo sapiens
cctccgggcctcagt

SEQ ID NO: 333599 - DNA, 15 bp, Homo sapiens
tcctccgggcctcag

SEQ ID NO: 333600 - DNA, 15 bp, Homo sapiens
ctcctccgggcctca

SEQ ID NO: 333601 - DNA, 15 bp, Homo sapiens
cctcctccgggcctc

SEQ ID NO: 333602 - DNA, 15 bp, Homo sapiens
ccctcctccgggcct

SEQ ID NO: 333603 - DNA, 15 bp, Homo sapiens
tccctcctccgggcc

SEQ ID NO: 333604 - DNA, 15 bp, Homo sapiens
ttccctcctccgggc

SEQ ID NO: 333605 - DNA, 15 bp, Homo sapiens
attccctcctccggg

SEQ ID NO: 333606 - DNA, 15 bp, Homo sapiens
aattccctcctccgg

SEQ ID NO: 333607 - DNA, 15 bp, Homo sapiens
gaattccctcctccg

SEQ ID NO: 333608 - DNA, 15 bp, Homo sapiens
tgaattccctcctcc

SEQ ID NO: 333609 - DNA, 15 bp, Homo sapiens
gtgaattccctcctc

SEQ ID NO: 333610 - DNA, 15 bp, Homo sapiens
tgtgaattccctcct

SEQ ID NO: 333611 - DNA, 15 bp, Homo sapiens
gtgtgaattccctcc

SEQ ID NO: 333612 - DNA, 15 bp, Homo sapiens
tgtgtgaattccctc

SEQ ID NO: 333613 - DNA, 15 bp, Homo sapiens
gtgtgtgaattccct

SEQ ID NO: 333614 - DNA, 15 bp, Homo sapiens
cgtgtgtgaattccc

SEQ ID NO: 333615 - DNA, 15 bp, Homo sapiens
acgtgtgtgaattcc

SEQ ID NO: 333616 - DNA, 15 bp, Homo sapiens
aacgtgtgtgaattc

SEQ ID NO: 333617 - DNA, 15 bp, Homo sapiens
aaacgtgtgtgaatt

SEQ ID NO: 333618 - DNA, 15 bp, Homo sapiens
caaacgtgtgtgaat

SEQ ID NO: 333619 - DNA, 15 bp, Homo sapiens
tcaaacgtgtgtgaa

SEQ ID NO: 333620 - DNA, 15 bp, Homo sapiens
ttcaaacgtgtgtga

SEQ ID NO: 333621 - DNA, 15 bp, Homo sapiens
cttcaaacgtgtgtg

SEQ ID NO: 333622 - DNA, 15 bp, Homo sapiens
gcttcaaacgtgtgt

SEQ ID NO: 333623 - DNA, 15 bp, Homo sapiens
ggcttcaaacgtgtg

SEQ ID NO: 333624 - DNA, 15 bp, Homo sapiens
tggcttcaaacgtgt

SEQ ID NO: 333625 - DNA, 15 bp, Homo sapiens
ttggcttcaaacgtg

SEQ ID NO: 333626 - DNA, 15 bp, Homo sapiens
cttggcttcaaacgt

SEQ ID NO: 333627 - DNA, 15 bp, Homo sapiens
gcttggcttcaaacg

SEQ ID NO: 333628 - DNA, 15 bp, Homo sapiens
agcttggcttcaaac

SEQ ID NO: 333629 - DNA, 15 bp, Homo sapiens
cagcttggcttcaaa

SEQ ID NO: 333630 - DNA, 15 bp, Homo sapiens
ccagcttggcttcaa

SEQ ID NO: 333631 - DNA, 15 bp, Homo sapiens
cccagcttggcttca

SEQ ID NO: 333632 - DNA, 15 bp, Homo sapiens
ccccagcttggcttc

SEQ ID NO: 333633 - DNA, 15 bp, Homo sapiens
gccccagcttggctt

SEQ ID NO: 333634 - DNA, 15 bp, Homo sapiens
ggccccagcttggct

SEQ ID NO: 333635 - DNA, 15 bp, Homo sapiens
tggccccagcttggc

SEQ ID NO: 333636 - DNA, 15 bp, Homo sapiens
ctggccccagcttgg

SEQ ID NO: 333637 - DNA, 15 bp, Homo sapiens
tctggccccagcttg

SEQ ID NO: 333638 - DNA, 15 bp, Homo sapiens
ttctggccccagctt

SEQ ID NO: 333639 - DNA, 15 bp, Homo sapiens
tttctggccccagct

SEQ ID NO: 333640 - DNA, 15 bp, Homo sapiens
ctttctggccccagc

SEQ ID NO: 333641 - DNA, 15 bp, Homo sapiens
actttctggccccag

SEQ ID NO: 333642 - DNA, 15 bp, Homo sapiens
tactttctggcccca

SEQ ID NO: 333643 - DNA, 15 bp, Homo sapiens
ctactttctggcccc

SEQ ID NO: 333644 - DNA, 15 bp, Homo sapiens
tctactttctggccc

SEQ ID NO: 333645 - DNA, 15 bp, Homo sapiens
atctactttctggcc

SEQ ID NO: 333646 - DNA, 15 bp, Homo sapiens
gatctactttctggc

SEQ ID NO: 333647 - DNA, 15 bp, Homo sapiens
cgatctactttctgg

SEQ ID NO: 333648 - DNA, 15 bp, Homo sapiens
ccgatctactttctg

SEQ ID NO: 333649 - DNA, 15 bp, Homo sapiens
gccgatctactttct

SEQ ID NO: 333650 - DNA, 15 bp, Homo sapiens
agccgatctactttc

SEQ ID NO: 333651 - DNA, 15 bp, Homo sapiens
cagccgatctacttt

SEQ ID NO: 333652 - DNA, 15 bp, Homo sapiens
tcagccgatctactt

SEQ ID NO: 333653 - DNA, 15 bp, Homo sapiens
atcagccgatctact

SEQ ID NO: 333654 - DNA, 15 bp, Homo sapiens
gatcagccgatctac

SEQ ID NO: 333655 - DNA, 15 bp, Homo sapiens
agatcagccgatcta

SEQ ID NO: 333656 - DNA, 15 bp, Homo sapiens
gagatcagccgatct

SEQ ID NO: 333657 - DNA, 15 bp, Homo sapiens
ggagatcagccgatc

SEQ ID NO: 333658 - DNA, 15 bp, Homo sapiens
tggagatcagccgat

SEQ ID NO: 333659 - DNA, 15 bp, Homo sapiens
ttggagatcagccga

SEQ ID NO: 333660 - DNA, 15 bp, Homo sapiens
tttggagatcagccg

SEQ ID NO: 333661 - DNA, 15 bp, Homo sapiens
gtttggagatcagcc

SEQ ID NO: 333662 - DNA, 15 bp, Homo sapiens
ggtttggagatcagc

SEQ ID NO: 333663 - DNA, 15 bp, Homo sapiens
aggtttggagatcag

SEQ ID NO: 333664 - DNA, 15 bp, Homo sapiens
gaggtttggagatca

SEQ ID NO: 333665 - DNA, 15 bp, Homo sapiens
ggaggtttggagatc

SEQ ID NO: 333666 - DNA, 15 bp, Homo sapiens
tggaggtttggagat

SEQ ID NO: 333667 - DNA, 15 bp, Homo sapiens
gtggaggtttggaga

SEQ ID NO: 333668 - DNA, 15 bp, Homo sapiens
cgtggaggtttggag

SEQ ID NO: 333669 - DNA, 15 bp, Homo sapiens
acgtggaggtttgga

SEQ ID NO: 333670 - DNA, 15 bp, Homo sapiens
gacgtggaggtttgg

SEQ ID NO: 333671 - DNA, 15 bp, Homo sapiens
tgacgtggaggtttg

SEQ ID NO: 333672 - DNA, 15 bp, Homo sapiens
ttgacgtggaggttt

SEQ ID NO: 333673 - DNA, 15 bp, Homo sapiens
tttgacgtggaggtt

SEQ ID NO: 333674 - DNA, 15 bp, Homo sapiens
ctttgacgtggaggt

SEQ ID NO: 333675 - DNA, 15 bp, Homo sapiens
cctttgacgtggagg

SEQ ID NO: 333676 - DNA, 15 bp, Homo sapiens
acctttgacgtggag

SEQ ID NO: 333677 - DNA, 15 bp, Homo sapiens
gacctttgacgtgga

SEQ ID NO: 333678 - DNA, 15 bp, Homo sapiens
agacctttgacgtgg

SEQ ID NO: 333679 - DNA, 15 bp, Homo sapiens
aagacctttgacgtg

SEQ ID NO: 333680 - DNA, 15 bp, Homo sapiens
gaagacctttgacgt

SEQ ID NO: 333681 - DNA, 15 bp, Homo sapiens
ggaagacctttgacg

SEQ ID NO: 333682 - DNA, 15 bp, Homo sapiens
gggaagacctttgac

SEQ ID NO: 333683 - DNA, 15 bp, Homo sapiens
tgggaagacctttga

SEQ ID NO: 333684 - DNA, 15 bp, Homo sapiens
ctgggaagacctttg

SEQ ID NO: 333685 - DNA, 15 bp, Homo sapiens
cctgggaagaccttt

SEQ ID NO: 333686 - DNA, 15 bp, Homo sapiens
tcctgggaagacctt

SEQ ID NO: 333687 - DNA, 15 bp, Homo sapiens
ctcctgggaagacct

SEQ ID NO: 333688 - DNA, 15 bp, Homo sapiens
cctcctgggaagacc

SEQ ID NO: 333689 - DNA, 15 bp, Homo sapiens
tcctcctgggaagac

SEQ ID NO: 333690 - DNA, 15 bp, Homo sapiens
gtcctcctgggaaga

SEQ ID NO: 333691 - DNA, 15 bp, Homo sapiens
tgtcctcctgggaag

SEQ ID NO: 333692 - DNA, 15 bp, Homo sapiens
atgtcctcctgggaa

SEQ ID NO: 333693 - DNA, 15 bp, Homo sapiens
tatgtcctcctggga

SEQ ID NO: 333694 - DNA, 15 bp, Homo sapiens
atatgtcctcctggg

SEQ ID NO: 333695 - DNA, 15 bp, Homo sapiens
catatgtcctcctgg

SEQ ID NO: 333696 - DNA, 15 bp, Homo sapiens
gcatatgtcctcctg

SEQ ID NO: 333697 - DNA, 15 bp, Homo sapiens
ggcatatgtcctcct

SEQ ID NO: 333698 - DNA, 15 bp, Homo sapiens
aggcatatgtcctcc

SEQ ID NO: 333699 - DNA, 15 bp, Homo sapiens
aaggcatatgtcctc

SEQ ID NO: 333700 - DNA, 15 bp, Homo sapiens
gaaggcatatgtcct

SEQ ID NO: 333701 - DNA, 15 bp, Homo sapiens
tgaaggcatatgtcc

SEQ ID NO: 333702 - DNA, 15 bp, Homo sapiens
ttgaaggcatatgtc

SEQ ID NO: 333703 - DNA, 15 bp, Homo sapiens
cttgaaggcatatgt

SEQ ID NO: 333704 - DNA, 15 bp, Homo sapiens
ccttgaaggcatatg

SEQ ID NO: 333705 - DNA, 15 bp, Homo sapiens
tccttgaaggcatat

SEQ ID NO: 333706 - DNA, 15 bp, Homo sapiens
atccttgaaggcata

SEQ ID NO: 333707 - DNA, 15 bp, Homo sapiens
aatccttgaaggcat

SEQ ID NO: 333708 - DNA, 15 bp, Homo sapiens
aaatccttgaaggca

SEQ ID NO: 333709 - DNA, 15 bp, Homo sapiens
aaaatccttgaaggc

SEQ ID NO: 333710 - DNA, 15 bp, Homo sapiens
taaaatccttgaagg

SEQ ID NO: 333711 - DNA, 15 bp, Homo sapiens
gtaaaatccttgaag

SEQ ID NO: 333712 - DNA, 15 bp, Homo sapiens
tgtaaaatccttgaa

SEQ ID NO: 333713 - DNA, 15 bp, Homo sapiens
ttgtaaaatccttga

SEQ ID NO: 333714 - DNA, 15 bp, Homo sapiens
attgtaaaatccttg

SEQ ID NO: 333715 - DNA, 15 bp, Homo sapiens
cattgtaaaatcctt

SEQ ID NO: 333716 - DNA, 15 bp, Homo sapiens
acattgtaaaatcct

SEQ ID NO: 333717 - DNA, 15 bp, Homo sapiens
tacattgtaaaatcc

SEQ ID NO: 333718 - DNA, 15 bp, Homo sapiens
atacattgtaaaatc

SEQ ID NO: 333719 - DNA, 15 bp, Homo sapiens
tatacattgtaaaat

SEQ ID NO: 333720 - DNA, 15 bp, Homo sapiens
gtatacattgtaaaa

SEQ ID NO: 333721 - DNA, 15 bp, Homo sapiens
ggtatacattgtaaa

SEQ ID NO: 333722 - DNA, 15 bp, Homo sapiens
tggtatacattgtaa

SEQ ID NO: 333723 - DNA, 15 bp, Homo sapiens
gtggtatacattgta

SEQ ID NO: 333724 - DNA, 15 bp, Homo sapiens
ggtggtatacattgt

SEQ ID NO: 333725 - DNA, 15 bp, Homo sapiens
gggtggtatacattg

SEQ ID NO: 333726 - DNA, 15 bp, Homo sapiens
agggtggtatacatt

SEQ ID NO: 333727 - DNA, 15 bp, Homo sapiens
tagggtggtatacat

SEQ ID NO: 333728 - DNA, 15 bp, Homo sapiens
gtagggtggtataca

SEQ ID NO: 333729 - DNA, 15 bp, Homo sapiens
tgtagggtggtatac

SEQ ID NO: 333730 - DNA, 15 bp, Homo sapiens
ttgtagggtggtata

SEQ ID NO: 333731 - DNA, 15 bp, Homo sapiens
cttgtagggtggtat

SEQ ID NO: 333732 - DNA, 15 bp, Homo sapiens
acttgtagggtggta

SEQ ID NO: 333733 - DNA, 15 bp, Homo sapiens
cacttgtagggtggt

SEQ ID NO: 333734 - DNA, 15 bp, Homo sapiens
tcacttgtagggtgg

SEQ ID NO: 333735 - DNA, 15 bp, Homo sapiens
atcacttgtagggtg

SEQ ID NO: 333736 - DNA, 15 bp, Homo sapiens
catcacttgtagggt

SEQ ID NO: 333737 - DNA, 15 bp, Homo sapiens
ccatcacttgtaggg

SEQ ID NO: 333738 - DNA, 15 bp, Homo sapiens
cccatcacttgtagg

SEQ ID NO: 333739 - DNA, 15 bp, Homo sapiens
tcccatcacttgtag

SEQ ID NO: 333740 - DNA, 15 bp, Homo sapiens
ctcccatcacttgta

SEQ ID NO: 333741 - DNA, 15 bp, Homo sapiens
tctcccatcacttgt

SEQ ID NO: 333742 - DNA, 15 bp, Homo sapiens
ctctcccatcacttg

SEQ ID NO: 333743 - DNA, 15 bp, Homo sapiens
tctctcccatcactt

SEQ ID NO: 333744 - DNA, 15 bp, Homo sapiens
ctctctcccatcact

SEQ ID NO: 333745 - DNA, 15 bp, Homo sapiens
cctctctcccatcac

SEQ ID NO: 333746 - DNA, 15 bp, Homo sapiens
ccctctctcccatca

SEQ ID NO: 333747 - DNA, 15 bp, Homo sapiens
cccctctctcccatc

SEQ ID NO: 333748 - DNA, 15 bp, Homo sapiens
tcccctctctcccat

SEQ ID NO: 333749 - DNA, 15 bp, Homo sapiens
ttcccctctctccca

SEQ ID NO: 333750 - DNA, 15 bp, Homo sapiens
tttcccctctctccc

SEQ ID NO: 333751 - DNA, 15 bp, Homo sapiens
ttttcccctctctcc

SEQ ID NO: 333752 - DNA, 15 bp, Homo sapiens
tttttcccctctctc

SEQ ID NO: 333753 - DNA, 15 bp, Homo sapiens
ttttttcccctctct

SEQ ID NO: 333754 - DNA, 15 bp, Homo sapiens
cttttttcccctctc

SEQ ID NO: 333755 - DNA, 15 bp, Homo sapiens
gcttttttcccctct

SEQ ID NO: 333756 - DNA, 15 bp, Homo sapiens
tgcttttttcccctc

SEQ ID NO: 333757 - DNA, 15 bp, Homo sapiens
ttgcttttttcccct

SEQ ID NO: 333758 - DNA, 15 bp, Homo sapiens
gttgcttttttcccc

SEQ ID NO: 333759 - DNA, 15 bp, Homo sapiens
ggttgcttttttccc

SEQ ID NO: 333760 - DNA, 15 bp, Homo sapiens
cggttgcttttttcc

SEQ ID NO: 333761 - DNA, 15 bp, Homo sapiens
tcggttgcttttttc

SEQ ID NO: 333762 - DNA, 15 bp, Homo sapiens
gtcggttgctttttt

SEQ ID NO: 333763 - DNA, 15 bp, Homo sapiens
agtcggttgcttttt

SEQ ID NO: 333764 - DNA, 15 bp, Homo sapiens
tagtcggttgctttt

SEQ ID NO: 333765 - DNA, 15 bp, Homo sapiens
ttagtcggttgcttt

SEQ ID NO: 333766 - DNA, 15 bp, Homo sapiens
cttagtcggttgctt

SEQ ID NO: 333767 - DNA, 15 bp, Homo sapiens
ccttagtcggttgct

SEQ ID NO: 333768 - DNA, 15 bp, Homo sapiens
tccttagtcggttgc

SEQ ID NO: 333769 - DNA, 15 bp, Homo sapiens
ctccttagtcggttg

SEQ ID NO: 333770 - DNA, 15 bp, Homo sapiens
tctccttagtcggtt

SEQ ID NO: 333771 - DNA, 15 bp, Homo sapiens
ttctccttagtcggt

SEQ ID NO: 333772 - DNA, 15 bp, Homo sapiens
tttctccttagtcgg

SEQ ID NO: 333773 - DNA, 15 bp, Homo sapiens
ttttctccttagtcg

SEQ ID NO: 333774 - DNA, 15 bp, Homo sapiens
cttttctccttagtc

SEQ ID NO: 333775 - DNA, 15 bp, Homo sapiens
gcttttctccttagt

SEQ ID NO: 333776 - DNA, 15 bp, Homo sapiens
tgcttttctccttag

SEQ ID NO: 333777 - DNA, 15 bp, Homo sapiens
ttgcttttctcctta

SEQ ID NO: 333778 - DNA, 15 bp, Homo sapiens
cttgcttttctcctt

SEQ ID NO: 333779 - DNA, 15 bp, Homo sapiens
ccttgcttttctcct

SEQ ID NO: 333780 - DNA, 15 bp, Homo sapiens
tccttgcttttctcc

SEQ ID NO: 333781 - DNA, 15 bp, Homo sapiens
ctccttgcttttctc

SEQ ID NO: 333782 - DNA, 15 bp, Homo sapiens
gctccttgcttttct

SEQ ID NO: 333783 - DNA, 15 bp, Homo sapiens
tgctccttgcttttc

SEQ ID NO: 333784 - DNA, 15 bp, Homo sapiens
ctgctccttgctttt

SEQ ID NO: 333785 - DNA, 15 bp, Homo sapiens
tctgctccttgcttt

SEQ ID NO: 333786 - DNA, 15 bp, Homo sapiens
ttctgctccttgctt

SEQ ID NO: 333787 - DNA, 15 bp, Homo sapiens
tttctgctccttgct

SEQ ID NO: 333788 - DNA, 15 bp, Homo sapiens
ttttctgctccttgc

SEQ ID NO: 333789 - DNA, 15 bp, Homo sapiens
tttttctgctccttg

SEQ ID NO: 333790 - DNA, 15 bp, Homo sapiens
ctttttctgctcctt

SEQ ID NO: 333791 - DNA, 15 bp, Homo sapiens
cctttttctgctcct

SEQ ID NO: 333792 - DNA, 15 bp, Homo sapiens
tcctttttctgctcc

SEQ ID NO: 333793 - DNA, 15 bp, Homo sapiens
ctcctttttctgctc

SEQ ID NO: 333794 - DNA, 15 bp, Homo sapiens
gctcctttttctgct

SEQ ID NO: 333795 - DNA, 15 bp, Homo sapiens
tgctcctttttctgc

SEQ ID NO: 333796 - DNA, 15 bp, Homo sapiens
ttgctcctttttctg

SEQ ID NO: 333797 - DNA, 15 bp, Homo sapiens
tttgctcctttttct

SEQ ID NO: 333798 - DNA, 15 bp, Homo sapiens
ttttgctcctttttc

SEQ ID NO: 333799 - DNA, 15 bp, Homo sapiens
cttttgctccttttt

SEQ ID NO: 333800 - DNA, 15 bp, Homo sapiens
tcttttgctcctttt

SEQ ID NO: 333801 - DNA, 15 bp, Homo sapiens
ctcttttgctccttt

SEQ ID NO: 333802 - DNA, 15 bp, Homo sapiens
cctcttttgctcctt

SEQ ID NO: 333803 - DNA, 15 bp, Homo sapiens
tcctcttttgctcct

SEQ ID NO: 333804 - DNA, 15 bp, Homo sapiens
ctcctcttttgctcc

SEQ ID NO: 333805 - DNA, 15 bp, Homo sapiens
gctcctcttttgctc

SEQ ID NO: 333806 - DNA, 15 bp, Homo sapiens
agctcctcttttgct

SEQ ID NO: 333807 - DNA, 15 bp, Homo sapiens
cagctcctcttttgc

SEQ ID NO: 333808 - DNA, 15 bp, Homo sapiens
acagctcctcttttg

SEQ ID NO: 333809 - DNA, 15 bp, Homo sapiens
gacagctcctctttt

SEQ ID NO: 333810 - DNA, 15 bp, Homo sapiens
tgacagctcctcttt

SEQ ID NO: 333811 - DNA, 15 bp, Homo sapiens
ctgacagctcctctt

SEQ ID NO: 333812 - DNA, 15 bp, Homo sapiens
tctgacagctcctct

SEQ ID NO: 333813 - DNA, 15 bp, Homo sapiens
ttctgacagctcctc

SEQ ID NO: 333814 - DNA, 15 bp, Homo sapiens
gttctgacagctcct

SEQ ID NO: 333815 - DNA, 15 bp, Homo sapiens
cgttctgacagctcc

SEQ ID NO: 333816 - DNA, 15 bp, Homo sapiens
ccgttctgacagctc

SEQ ID NO: 333817 - DNA, 15 bp, Homo sapiens
accgttctgacagct

SEQ ID NO: 333818 - DNA, 15 bp, Homo sapiens
caccgttctgacagc

SEQ ID NO: 333819 - DNA, 15 bp, Homo sapiens
acaccgttctgacag

SEQ ID NO: 333820 - DNA, 15 bp, Homo sapiens
cacaccgttctgaca

SEQ ID NO: 333821 - DNA, 15 bp, Homo sapiens
tcacaccgttctgac

SEQ ID NO: 333822 - DNA, 15 bp, Homo sapiens
ctcacaccgttctga

SEQ ID NO: 333823 - DNA, 15 bp, Homo sapiens
cctcacaccgttctg

SEQ ID NO: 333824 - DNA, 15 bp, Homo sapiens
tcctcacaccgttct

SEQ ID NO: 333825 - DNA, 15 bp, Homo sapiens
ctcctcacaccgttc

SEQ ID NO: 333826 - DNA, 15 bp, Homo sapiens
tctcctcacaccgtt

SEQ ID NO: 333827 - DNA, 15 bp, Homo sapiens
ctctcctcacaccgt

SEQ ID NO: 333828 - DNA, 15 bp, Homo sapiens
actctcctcacaccg

SEQ ID NO: 333829 - DNA, 15 bp, Homo sapiens
cactctcctcacacc

SEQ ID NO: 333830 - DNA, 15 bp, Homo sapiens
ccactctcctcacac

SEQ ID NO: 333831 - DNA, 15 bp, Homo sapiens
cccactctcctcaca

SEQ ID NO: 333832 - DNA, 15 bp, Homo sapiens
tcccactctcctcac

SEQ ID NO: 333833 - DNA, 15 bp, Homo sapiens
ttcccactctcctca

SEQ ID NO: 333834 - DNA, 15 bp, Homo sapiens
tttcccactctcctc

SEQ ID NO: 333835 - DNA, 15 bp, Homo sapiens
ctttcccactctcct

SEQ ID NO: 333836 - DNA, 15 bp, Homo sapiens
cctttcccactctcc

SEQ ID NO: 333837 - DNA, 15 bp, Homo sapiens
tcctttcccactctc

SEQ ID NO: 333838 - DNA, 15 bp, Homo sapiens
ctcctttcccactct

SEQ ID NO: 333839 - DNA, 15 bp, Homo sapiens
gctcctttcccactc

SEQ ID NO: 333840 - DNA, 15 bp, Homo sapiens
ggctcctttcccact

SEQ ID NO: 333841 - DNA, 15 bp, Homo sapiens
cggctcctttcccac

SEQ ID NO: 333842 - DNA, 15 bp, Homo sapiens
gcggctcctttccca

SEQ ID NO: 333843 - DNA, 15 bp, Homo sapiens
ggcggctcctttccc

SEQ ID NO: 333844 - DNA, 15 bp, Homo sapiens
aggcggctcctttcc

SEQ ID NO: 333845 - DNA, 15 bp, Homo sapiens
gaggcggctcctttc

SEQ ID NO: 333846 - DNA, 15 bp, Homo sapiens
ggaggcggctccttt

SEQ ID NO: 333847 - DNA, 15 bp, Homo sapiens
aggaggcggctcctt

SEQ ID NO: 333848 - DNA, 15 bp, Homo sapiens
aaggaggcggctcct

SEQ ID NO: 333849 - DNA, 15 bp, Homo sapiens
aaaggaggcggctcc

SEQ ID NO: 333850 - DNA, 15 bp, Homo sapiens
aaaaggaggcggctc

SEQ ID NO: 333851 - DNA, 15 bp, Homo sapiens
caaaaggaggcggct

SEQ ID NO: 333852 - DNA, 15 bp, Homo sapiens
gcaaaaggaggcggc

SEQ ID NO: 333853 - DNA, 15 bp, Homo sapiens
ggcaaaaggaggcgg

SEQ ID NO: 333854 - DNA, 15 bp, Homo sapiens
aggcaaaaggaggcg

SEQ ID NO: 333855 - DNA, 15 bp, Homo sapiens
gaggcaaaaggaggc

SEQ ID NO: 333856 - DNA, 15 bp, Homo sapiens
agaggcaaaaggagg

SEQ ID NO: 333857 - DNA, 15 bp, Homo sapiens
gagaggcaaaaggag

SEQ ID NO: 333858 - DNA, 15 bp, Homo sapiens
agagaggcaaaagga

SEQ ID NO: 333859 - DNA, 15 bp, Homo sapiens
aagagaggcaaaagg

SEQ ID NO: 333860 - DNA, 15 bp, Homo sapiens
gaagagaggcaaaag

SEQ ID NO: 333861 - DNA, 15 bp, Homo sapiens
ggaagagaggcaaaa

SEQ ID NO: 333862 - DNA, 15 bp, Homo sapiens
aggaagagaggcaaa

SEQ ID NO: 333863 - DNA, 15 bp, Homo sapiens
taggaagagaggcaa

SEQ ID NO: 333864 - DNA, 15 bp, Homo sapiens
gtaggaagagaggca

SEQ ID NO: 333865 - DNA, 15 bp, Homo sapiens
agtaggaagagaggc

SEQ ID NO: 333866 - DNA, 15 bp, Homo sapiens
aagtaggaagagagg

SEQ ID NO: 333867 - DNA, 15 bp, Homo sapiens
taagtaggaagagag

SEQ ID NO: 333868 - DNA, 15 bp, Homo sapiens
ataagtaggaagaga

SEQ ID NO: 333869 - DNA, 15 bp, Homo sapiens
aataagtaggaagag

SEQ ID NO: 333870 - DNA, 15 bp, Homo sapiens
taataagtaggaaga

SEQ ID NO: 333871 - DNA, 15 bp, Homo sapiens
ttaataagtaggaag

SEQ ID NO: 333872 - DNA, 15 bp, Homo sapiens
gttaataagtaggaa

SEQ ID NO: 333873 - DNA, 15 bp, Homo sapiens
tgttaataagtagga

SEQ ID NO: 333874 - DNA, 15 bp, Homo sapiens
ttgttaataagtagg

SEQ ID NO: 333875 - DNA, 15 bp, Homo sapiens
tttgttaataagtag

SEQ ID NO: 333876 - DNA, 15 bp, Homo sapiens
ttttgttaataagta

SEQ ID NO: 333877 - DNA, 15 bp, Homo sapiens
gttttgttaataagt

SEQ ID NO: 333878 - DNA, 15 bp, Homo sapiens
tgttttgttaataag

SEQ ID NO: 333879 - DNA, 15 bp, Homo sapiens
ctgttttgttaataa

SEQ ID NO: 333880 - DNA, 15 bp, Homo sapiens
tctgttttgttaata

SEQ ID NO: 333881 - DNA, 15 bp, Homo sapiens
ttctgttttgttaat

SEQ ID NO: 333882 - DNA, 15 bp, Homo sapiens
gttctgttttgttaa

SEQ ID NO: 333883 - DNA, 15 bp, Homo sapiens
cgttctgttttgtta

SEQ ID NO: 333884 - DNA, 15 bp, Homo sapiens
tcgttctgttttgtt

SEQ ID NO: 333885 - DNA, 15 bp, Homo sapiens
gtcgttctgttttgt

SEQ ID NO: 333886 - DNA, 15 bp, Homo sapiens
agtcgttctgttttg

SEQ ID NO: 333887 - DNA, 15 bp, Homo sapiens
tagtcgttctgtttt

SEQ ID NO: 333888 - DNA, 15 bp, Homo sapiens
atagtcgttctgttt

SEQ ID NO: 333889 - DNA, 15 bp, Homo sapiens
gatagtcgttctgtt

SEQ ID NO: 333890 - DNA, 15 bp, Homo sapiens
ggatagtcgttctgt

SEQ ID NO: 333891 - DNA, 15 bp, Homo sapiens
tggatagtcgttctg

SEQ ID NO: 333892 - DNA, 15 bp, Homo sapiens
ttggatagtcgttct

SEQ ID NO: 333893 - DNA, 15 bp, Homo sapiens
gttggatagtcgttc

SEQ ID NO: 333894 - DNA, 15 bp, Homo sapiens
cgttggatagtcgtt

SEQ ID NO: 333895 - DNA, 15 bp, Homo sapiens
acgttggatagtcgt

SEQ ID NO: 333896 - DNA, 15 bp, Homo sapiens
tacgttggatagtcg

SEQ ID NO: 333897 - DNA, 15 bp, Homo sapiens
atacgttggatagtc

SEQ ID NO: 333898 - DNA, 15 bp, Homo sapiens
aatacgttggatagt

SEQ ID NO: 333899 - DNA, 15 bp, Homo sapiens
aaatacgttggatag

SEQ ID NO: 333900 - DNA, 15 bp, Homo sapiens
gaaatacgttggata

SEQ ID NO: 333901 - DNA, 15 bp, Homo sapiens
tgaaatacgttggat

SEQ ID NO: 333902 - DNA, 15 bp, Homo sapiens
ctgaaatacgttgga

SEQ ID NO: 333903 - DNA, 15 bp, Homo sapiens
cctgaaatacgttgg

SEQ ID NO: 333904 - DNA, 15 bp, Homo sapiens
ccctgaaatacgttg

SEQ ID NO: 333905 - DNA, 15 bp, Homo sapiens
tccctgaaatacgtt

SEQ ID NO: 333906 - DNA, 15 bp, Homo sapiens
ctccctgaaatacgt

SEQ ID NO: 333907 - DNA, 15 bp, Homo sapiens
gctccctgaaatacg

SEQ ID NO: 333908 - DNA, 15 bp, Homo sapiens
agctccctgaaatac

SEQ ID NO: 333909 - DNA, 15 bp, Homo sapiens
tagctccctgaaata

SEQ ID NO: 333910 - DNA, 15 bp, Homo sapiens
ttagctccctgaaat

SEQ ID NO: 333911 - DNA, 15 bp, Homo sapiens
cttagctccctgaaa

SEQ ID NO: 333912 - DNA, 15 bp, Homo sapiens
acttagctccctgaa

SEQ ID NO: 333913 - DNA, 15 bp, Homo sapiens
gacttagctccctga

SEQ ID NO: 333914 - DNA, 15 bp, Homo sapiens
agacttagctccctg

SEQ ID NO: 333915 - DNA, 15 bp, Homo sapiens
aagacttagctccct

SEQ ID NO: 333916 - DNA, 15 bp, Homo sapiens
taagacttagctccc

SEQ ID NO: 333917 - DNA, 15 bp, Homo sapiens
ctaagacttagctcc

SEQ ID NO: 333918 - DNA, 15 bp, Homo sapiens
gctaagacttagctc

SEQ ID NO: 333919 - DNA, 15 bp, Homo sapiens
ggctaagacttagct

SEQ ID NO: 333920 - DNA, 15 bp, Homo sapiens
tggctaagacttagc

SEQ ID NO: 333921 - DNA, 15 bp, Homo sapiens
ctggctaagacttag

SEQ ID NO: 333922 - DNA, 15 bp, Homo sapiens
gctggctaagactta

SEQ ID NO: 333923 - DNA, 15 bp, Homo sapiens
agctggctaagactt

SEQ ID NO: 333924 - DNA, 15 bp, Homo sapiens
aagctggctaagact

SEQ ID NO: 333925 - DNA, 15 bp, Homo sapiens
gaagctggctaagac

SEQ ID NO: 333926 - DNA, 15 bp, Homo sapiens
tgaagctggctaaga

SEQ ID NO: 333927 - DNA, 15 bp, Homo sapiens
ctgaagctggctaag

SEQ ID NO: 333928 - DNA, 15 bp, Homo sapiens
gctgaagctggctaa

SEQ ID NO: 333929 - DNA, 15 bp, Homo sapiens
agctgaagctggcta

SEQ ID NO: 333930 - DNA, 15 bp, Homo sapiens
cagctgaagctggct

SEQ ID NO: 333931 - DNA, 15 bp, Homo sapiens
acagctgaagctggc

SEQ ID NO: 333932 - DNA, 15 bp, Homo sapiens
cacagctgaagctgg

SEQ ID NO: 333933 - DNA, 15 bp, Homo sapiens
acacagctgaagctg

SEQ ID NO: 333934 - DNA, 15 bp, Homo sapiens
aacacagctgaagct

SEQ ID NO: 333935 - DNA, 15 bp, Homo sapiens
aaacacagctgaagc

SEQ ID NO: 333936 - DNA, 15 bp, Homo sapiens
aaaacacagctgaag

SEQ ID NO: 333937 - DNA, 15 bp, Homo sapiens
taaaacacagctgaa

SEQ ID NO: 333938 - DNA, 15 bp, Homo sapiens
ttaaaacacagctga

SEQ ID NO: 333939 - DNA, 15 bp, Homo sapiens
gttaaaacacagctg

SEQ ID NO: 333940 - DNA, 15 bp, Homo sapiens
ggttaaaacacagct

SEQ ID NO: 333941 - DNA, 15 bp, Homo sapiens
gggttaaaacacagc

SEQ ID NO: 333942 - DNA, 15 bp, Homo sapiens
agggttaaaacacag

SEQ ID NO: 333943 - DNA, 15 bp, Homo sapiens
aagggttaaaacaca

SEQ ID NO: 333944 - DNA, 15 bp, Homo sapiens
taagggttaaaacac

SEQ ID NO: 333945 - DNA, 15 bp, Homo sapiens
ctaagggttaaaaca

SEQ ID NO: 333946 - DNA, 15 bp, Homo sapiens
gctaagggttaaaac

SEQ ID NO: 333947 - DNA, 15 bp, Homo sapiens
agctaagggttaaaa

SEQ ID NO: 333948 - DNA, 15 bp, Homo sapiens
tagctaagggttaaa

SEQ ID NO: 333949 - DNA, 15 bp, Homo sapiens
ttagctaagggttaa

SEQ ID NO: 333950 - DNA, 15 bp, Homo sapiens
tttagctaagggtta

SEQ ID NO: 333951 - DNA, 15 bp, Homo sapiens
atttagctaagggtt

SEQ ID NO: 333952 - DNA, 15 bp, Homo sapiens
tatttagctaagggt

SEQ ID NO: 333953 - DNA, 15 bp, Homo sapiens
atatttagctaaggg

SEQ ID NO: 333954 - DNA, 15 bp, Homo sapiens
tatatttagctaagg

SEQ ID NO: 333955 - DNA, 15 bp, Homo sapiens
ctatatttagctaag

SEQ ID NO: 333956 - DNA, 15 bp, Homo sapiens
tctatatttagctaa

SEQ ID NO: 333957 - DNA, 15 bp, Homo sapiens
gtctatatttagcta

SEQ ID NO: 333958 - DNA, 15 bp, Homo sapiens
tgtctatatttagct

SEQ ID NO: 333959 - DNA, 15 bp, Homo sapiens
ttgtctatatttagc

SEQ ID NO: 333960 - DNA, 15 bp, Homo sapiens
cttgtctatatttag

SEQ ID NO: 333961 - DNA, 15 bp, Homo sapiens
ccttgtctatattta

SEQ ID NO: 333962 - DNA, 15 bp, Homo sapiens
gccttgtctatattt

SEQ ID NO: 333963 - DNA, 15 bp, Homo sapiens
agccttgtctatatt

SEQ ID NO: 333964 - DNA, 15 bp, Homo sapiens
tagccttgtctatat

SEQ ID NO: 333965 - DNA, 15 bp, Homo sapiens
ttagccttgtctata

SEQ ID NO: 333966 - DNA, 15 bp, Homo sapiens
cttagccttgtctat

SEQ ID NO: 333967 - DNA, 15 bp, Homo sapiens
ccttagccttgtcta

SEQ ID NO: 333968 - DNA, 15 bp, Homo sapiens
gccttagccttgtct

SEQ ID NO: 333969 - DNA, 15 bp, Homo sapiens
tgccttagccttgtc

SEQ ID NO: 333970 - DNA, 15 bp, Homo sapiens
ctgccttagccttgt

SEQ ID NO: 333971 - DNA, 15 bp, Homo sapiens
cctgccttagccttg

SEQ ID NO: 333972 - DNA, 15 bp, Homo sapiens
gcctgccttagcctt

SEQ ID NO: 333973 - DNA, 15 bp, Homo sapiens
ggcctgccttagcct

SEQ ID NO: 333974 - DNA, 15 bp, Homo sapiens
tcacgtgacccgccc

SEQ ID NO: 333975 - DNA, 15 bp, Homo sapiens
atcacgtgacccgcc

SEQ ID NO: 333976 - DNA, 15 bp, Homo sapiens
catcacgtgacccgc

SEQ ID NO: 333977 - DNA, 15 bp, Homo sapiens
ccatcacgtgacccg

SEQ ID NO: 333978 - DNA, 15 bp, Homo sapiens
cccatcacgtgaccc

SEQ ID NO: 333979 - DNA, 15 bp, Homo sapiens
ccccatcacgtgacc

SEQ ID NO: 333980 - DNA, 15 bp, Homo sapiens
accccatcacgtgac

SEQ ID NO: 333981 - DNA, 15 bp, Homo sapiens
aaccccatcacgtga

SEQ ID NO: 333982 - DNA, 15 bp, Homo sapiens
aaaccccatcacgtg

SEQ ID NO: 333983 - DNA, 15 bp, Homo sapiens
taaaccccatcacgt

SEQ ID NO: 333984 - DNA, 15 bp, Homo sapiens
ttaaaccccatcacg

SEQ ID NO: 333985 - DNA, 15 bp, Homo sapiens
tttaaaccccatcac

SEQ ID NO: 333986 - DNA, 15 bp, Homo sapiens
atttaaaccccatca

SEQ ID NO: 333987 - DNA, 15 bp, Homo sapiens
gatttaaaccccatc

SEQ ID NO: 333988 - DNA, 15 bp, Homo sapiens
agatttaaaccccat

SEQ ID NO: 333989 - DNA, 15 bp, Homo sapiens
gagatttaaacccca

SEQ ID NO: 333990 - DNA, 15 bp, Homo sapiens
ggagatttaaacccc

SEQ ID NO: 333991 - DNA, 15 bp, Homo sapiens
gggagatttaaaccc

SEQ ID NO: 333992 - DNA, 15 bp, Homo sapiens
cgggagatttaaacc

SEQ ID NO: 333993 - DNA, 15 bp, Homo sapiens
gcgggagatttaaac

SEQ ID NO: 333994 - DNA, 15 bp, Homo sapiens
tgcgggagatttaaa

SEQ ID NO: 333995 - DNA, 15 bp, Homo sapiens
ctgcgggagatttaa

SEQ ID NO: 333996 - DNA, 15 bp, Homo sapiens
gctgcgggagattta

SEQ ID NO: 333997 - DNA, 15 bp, Homo sapiens
ggctgcgggagattt

SEQ ID NO: 333998 - DNA, 15 bp, Homo sapiens
cggctgcgggagatt

SEQ ID NO: 333999 - DNA, 15 bp, Homo sapiens
ccggctgcgggagat

SEQ ID NO: 334000 - DNA, 15 bp, Homo sapiens
tccggctgcgggaga

SEQ ID NO: 334001 - DNA, 15 bp, Homo sapiens
ctccggctgcgggag

SEQ ID NO: 334002 - DNA, 15 bp, Homo sapiens
gctccggctgcggga

SEQ ID NO: 334003 - DNA, 15 bp, Homo sapiens
ggctccggctgcggg

SEQ ID NO: 334004 - DNA, 15 bp, Homo sapiens
cggctccggctgcgg

SEQ ID NO: 334005 - DNA, 15 bp, Homo sapiens
gcggctccggctgcg

SEQ ID NO: 334006 - DNA, 15 bp, Homo sapiens
cgcggctccggctgc

SEQ ID NO: 334007 - DNA, 15 bp, Homo sapiens
ccgcggctccggctg

SEQ ID NO: 334008 - DNA, 15 bp, Homo sapiens
cccgcggctccggct

SEQ ID NO: 334009 - DNA, 15 bp, Homo sapiens
ccccgcggctccggc

SEQ ID NO: 334010 - DNA, 15 bp, Homo sapiens
cccccgcggctccgg

SEQ ID NO: 334011 - DNA, 15 bp, Homo sapiens
gcccccgcggctccg

SEQ ID NO: 334012 - DNA, 15 bp, Homo sapiens
cgcccccgcggctcc

SEQ ID NO: 334013 - DNA, 15 bp, Homo sapiens
gcgcccccgcggctc

SEQ ID NO: 334014 - DNA, 15 bp, Homo sapiens
ggcgcccccgcggct

SEQ ID NO: 334015 - DNA, 15 bp, Homo sapiens
tggcgcccccgcggc

SEQ ID NO: 334016 - DNA, 15 bp, Homo sapiens
ctggcgcccccgcgg

SEQ ID NO: 334017 - DNA, 15 bp, Homo sapiens
actggcgcccccgcg

SEQ ID NO: 334018 - DNA, 15 bp, Homo sapiens
cactggcgcccccgc

SEQ ID NO: 334019 - DNA, 15 bp, Homo sapiens
gcactggcgcccccg

SEQ ID NO: 334020 - DNA, 15 bp, Homo sapiens
ggcactggcgccccc

SEQ ID NO: 334021 - DNA, 15 bp, Homo sapiens
cggcactggcgcccc

SEQ ID NO: 334022 - DNA, 15 bp, Homo sapiens
gcggcactggcgccc

SEQ ID NO: 334023 - DNA, 15 bp, Homo sapiens
cgcggcactggcgcc

SEQ ID NO: 334024 - DNA, 15 bp, Homo sapiens
gcgcggcactggcgc

SEQ ID NO: 334025 - DNA, 15 bp, Homo sapiens
cgcgcggcactggcg

SEQ ID NO: 334026 - DNA, 15 bp, Homo sapiens
acgcgcggcactggc

SEQ ID NO: 334027 - DNA, 15 bp, Homo sapiens
gacgcgcggcactgg

SEQ ID NO: 334028 - DNA, 15 bp, Homo sapiens
cgacgcgcggcactg

SEQ ID NO: 334029 - DNA, 15 bp, Homo sapiens
tcgacgcgcggcact

SEQ ID NO: 334030 - DNA, 15 bp, Homo sapiens
ctcgacgcgcggcac

SEQ ID NO: 334031 - DNA, 15 bp, Homo sapiens
gctcgacgcgcggca

SEQ ID NO: 334032 - DNA, 15 bp, Homo sapiens
cgctcgacgcgcggc

SEQ ID NO: 334033 - DNA, 15 bp, Homo sapiens
ccgctcgacgcgcgg

SEQ ID NO: 334034 - DNA, 15 bp, Homo sapiens
cccgctcgacgcgcg

SEQ ID NO: 334035 - DNA, 15 bp, Homo sapiens
tcccgctcgacgcgc

SEQ ID NO: 334036 - DNA, 15 bp, Homo sapiens
ctcccgctcgacgcg

SEQ ID NO: 334037 - DNA, 15 bp, Homo sapiens
gctcccgctcgacgc

SEQ ID NO: 334038 - DNA, 15 bp, Homo sapiens
tgctcccgctcgacg

SEQ ID NO: 334039 - DNA, 15 bp, Homo sapiens
ctgctcccgctcgac

SEQ ID NO: 334040 - DNA, 15 bp, Homo sapiens
tctgctcccgctcga

SEQ ID NO: 334041 - DNA, 15 bp, Homo sapiens
ctctgctcccgctcg

SEQ ID NO: 334042 - DNA, 15 bp, Homo sapiens
cctctgctcccgctc

SEQ ID NO: 334043 - DNA, 15 bp, Homo sapiens
tcctctgctcccgct

SEQ ID NO: 334044 - DNA, 15 bp, Homo sapiens
ctcctctgctcccgc

SEQ ID NO: 334045 - DNA, 15 bp, Homo sapiens
cctcctctgctcccg

SEQ ID NO: 334046 - DNA, 15 bp, Homo sapiens
gcctcctctgctccc

SEQ ID NO: 334047 - DNA, 15 bp, Homo sapiens
cgcctcctctgctcc

SEQ ID NO: 334048 - DNA, 15 bp, Homo sapiens
tcgcctcctctgctc

SEQ ID NO: 334049 - DNA, 15 bp, Homo sapiens
ctcgcctcctctgct

SEQ ID NO: 334050 - DNA, 15 bp, Homo sapiens
cctcgcctcctctgc

SEQ ID NO: 334051 - DNA, 15 bp, Homo sapiens
ccctcgcctcctctg

SEQ ID NO: 334052 - DNA, 15 bp, Homo sapiens
tccctcgcctcctct

SEQ ID NO: 334053 - DNA, 15 bp, Homo sapiens
ctccctcgcctcctc

SEQ ID NO: 334054 - DNA, 15 bp, Homo sapiens
cctccctcgcctcct

SEQ ID NO: 334055 - DNA, 15 bp, Homo sapiens
tcctccctcgcctcc

SEQ ID NO: 334056 - DNA, 15 bp, Homo sapiens
ctcctccctcgcctc

SEQ ID NO: 334057 - DNA, 15 bp, Homo sapiens
cctcctccctcgcct

SEQ ID NO: 334058 - DNA, 15 bp, Homo sapiens
ccctcctccctcgcc

SEQ ID NO: 334059 - DNA, 15 bp, Homo sapiens
gccctcctccctcgc

SEQ ID NO: 334060 - DNA, 15 bp, Homo sapiens
ggccctcctccctcg

SEQ ID NO: 334061 - DNA, 15 bp, Homo sapiens
tggccctcctccctc

SEQ ID NO: 334062 - DNA, 15 bp, Homo sapiens
ctggccctcctccct

SEQ ID NO: 334063 - DNA, 15 bp, Homo sapiens
tctggccctcctccc

SEQ ID NO: 334064 - DNA, 15 bp, Homo sapiens
ctctggccctcctcc

SEQ ID NO: 334065 - DNA, 15 bp, Homo sapiens
tctctggccctcctc

SEQ ID NO: 334066 - DNA, 15 bp, Homo sapiens
ctctctggccctcct

SEQ ID NO: 334067 - DNA, 15 bp, Homo sapiens
cctctctggccctcc

SEQ ID NO: 334068 - DNA, 15 bp, Homo sapiens
gcctctctggccctc

SEQ ID NO: 334069 - DNA, 15 bp, Homo sapiens
tgcctctctggccct

SEQ ID NO: 334070 - DNA, 15 bp, Homo sapiens
ctgcctctctggccc

SEQ ID NO: 334071 - DNA, 15 bp, Homo sapiens
actgcctctctggcc

SEQ ID NO: 334072 - DNA, 15 bp, Homo sapiens
aactgcctctctggc

SEQ ID NO: 334073 - DNA, 15 bp, Homo sapiens
caactgcctctctgg

SEQ ID NO: 334074 - DNA, 15 bp, Homo sapiens
ccaactgcctctctg

SEQ ID NO: 334075 - DNA, 15 bp, Homo sapiens
tccaactgcctctct

SEQ ID NO: 334076 - DNA, 15 bp, Homo sapiens
ttccaactgcctctc

SEQ ID NO: 334077 - DNA, 15 bp, Homo sapiens
cttccaactgcctct

SEQ ID NO: 334078 - DNA, 15 bp, Homo sapiens
tcttccaactgcctc

SEQ ID NO: 334079 - DNA, 15 bp, Homo sapiens
atcttccaactgcct

SEQ ID NO: 334080 - DNA, 15 bp, Homo sapiens
catcttccaactgcc

SEQ ID NO: 334081 - DNA, 15 bp, Homo sapiens
ccatcttccaactgc

SEQ ID NO: 334082 - DNA, 15 bp, Homo sapiens
gccatcttccaactg

SEQ ID NO: 334083 - DNA, 15 bp, Homo sapiens
cgccatcttccaact

SEQ ID NO: 334084 - DNA, 15 bp, Homo sapiens
ccgccatcttccaac

SEQ ID NO: 334085 - DNA, 15 bp, Homo sapiens
tccgccatcttccaa

SEQ ID NO: 334086 - DNA, 15 bp, Homo sapiens
gtccgccatcttcca

SEQ ID NO: 334087 - DNA, 15 bp, Homo sapiens
cgtccgccatcttcc

SEQ ID NO: 334088 - DNA, 15 bp, Homo sapiens
tcgtccgccatcttc

SEQ ID NO: 334089 - DNA, 15 bp, Homo sapiens
ctcgtccgccatctt

SEQ ID NO: 334090 - DNA, 15 bp, Homo sapiens
cctcgtccgccatct

SEQ ID NO: 334091 - DNA, 15 bp, Homo sapiens
gcctcgtccgccatc

SEQ ID NO: 334092 - DNA, 15 bp, Homo sapiens
cgcctcgtccgccat

SEQ ID NO: 334093 - DNA, 15 bp, Homo sapiens
ccgcctcgtccgcca

SEQ ID NO: 334094 - DNA, 15 bp, Homo sapiens
gccgcctcgtccgcc

SEQ ID NO: 334095 - DNA, 15 bp, Homo sapiens
ggccgcctcgtccgc

SEQ ID NO: 334096 - DNA, 15 bp, Homo sapiens
gggccgcctcgtccg

SEQ ID NO: 334097 - DNA, 15 bp, Homo sapiens
agggccgcctcgtcc

SEQ ID NO: 334098 - DNA, 15 bp, Homo sapiens
gagggccgcctcgtc

SEQ ID NO: 334099 - DNA, 15 bp, Homo sapiens
cgagggccgcctcgt

SEQ ID NO: 334100 - DNA, 15 bp, Homo sapiens
gcgagggccgcctcg

SEQ ID NO: 334101 - DNA, 15 bp, Homo sapiens
ggcgagggccgcctc

SEQ ID NO: 334102 - DNA, 15 bp, Homo sapiens
gggcgagggccgcct

SEQ ID NO: 334103 - DNA, 15 bp, Homo sapiens
agggcgagggccgcc

SEQ ID NO: 334104 - DNA, 15 bp, Homo sapiens
aagggcgagggccgc

SEQ ID NO: 334105 - DNA, 15 bp, Homo sapiens
gaagggcgagggccg

SEQ ID NO: 334106 - DNA, 15 bp, Homo sapiens
tgaagggcgagggcc

SEQ ID NO: 334107 - DNA, 15 bp, Homo sapiens
ctgaagggcgagggc

SEQ ID NO: 334108 - DNA, 15 bp, Homo sapiens
gctgaagggcgaggg

SEQ ID NO: 334109 - DNA, 15 bp, Homo sapiens
ggctgaagggcgagg

SEQ ID NO: 334110 - DNA, 15 bp, Homo sapiens
gggctgaagggcgag

SEQ ID NO: 334111 - DNA, 15 bp, Homo sapiens
cgggctgaagggcga

SEQ ID NO: 334112 - DNA, 15 bp, Homo sapiens
ccgggctgaagggcg

SEQ ID NO: 334113 - DNA, 15 bp, Homo sapiens
gccgggctgaagggc

SEQ ID NO: 334114 - DNA, 15 bp, Homo sapiens
cgccgggctgaaggg

SEQ ID NO: 334115 - DNA, 15 bp, Homo sapiens
ccgccgggctgaagg

SEQ ID NO: 334116 - DNA, 15 bp, Homo sapiens
gccgccgggctgaag

SEQ ID NO: 334117 - DNA, 15 bp, Homo sapiens
agccgccgggctgaa

SEQ ID NO: 334118 - DNA, 15 bp, Homo sapiens
gagccgccgggctga

SEQ ID NO: 334119 - DNA, 15 bp, Homo sapiens
ggagccgccgggctg

SEQ ID NO: 334120 - DNA, 15 bp, Homo sapiens
gggagccgccgggct

SEQ ID NO: 334121 - DNA, 15 bp, Homo sapiens
ggggagccgccgggc

SEQ ID NO: 334122 - DNA, 15 bp, Homo sapiens
gggggagccgccggg

SEQ ID NO: 334123 - DNA, 15 bp, Homo sapiens
agggggagccgccgg

SEQ ID NO: 334124 - DNA, 15 bp, Homo sapiens
gagggggagccgccg

SEQ ID NO: 334125 - DNA, 15 bp, Homo sapiens
cgagggggagccgcc

SEQ ID NO: 334126 - DNA, 15 bp, Homo sapiens
ccgagggggagccgc

SEQ ID NO: 334127 - DNA, 15 bp, Homo sapiens
gccgagggggagccg

SEQ ID NO: 334128 - DNA, 15 bp, Homo sapiens
cgccgagggggagcc

SEQ ID NO: 334129 - DNA, 15 bp, Homo sapiens
ccgccgagggggagc

SEQ ID NO: 334130 - DNA, 15 bp, Homo sapiens
gccgccgagggggag

SEQ ID NO: 334131 - DNA, 15 bp, Homo sapiens
cgccgccgaggggga

SEQ ID NO: 334132 - DNA, 15 bp, Homo sapiens
ccgccgccgaggggg

SEQ ID NO: 334133 - DNA, 15 bp, Homo sapiens
cccgccgccgagggg

SEQ ID NO: 334134 - DNA, 15 bp, Homo sapiens
ccccgccgccgaggg

SEQ ID NO: 334135 - DNA, 15 bp, Homo sapiens
cccccgccgccgagg

SEQ ID NO: 334136 - DNA, 15 bp, Homo sapiens
gcccccgccgccgag

SEQ ID NO: 334137 - DNA, 15 bp, Homo sapiens
ggcccccgccgccga

SEQ ID NO: 334138 - DNA, 15 bp, Homo sapiens
cggcccccgccgccg

SEQ ID NO: 334139 - DNA, 15 bp, Homo sapiens
tcggcccccgccgcc

SEQ ID NO: 334140 - DNA, 15 bp, Homo sapiens
gtcggcccccgccgc

SEQ ID NO: 334141 - DNA, 15 bp, Homo sapiens
tgtcggcccccgccg

SEQ ID NO: 334142 - DNA, 15 bp, Homo sapiens
ctgtcggcccccgcc

SEQ ID NO: 334143 - DNA, 15 bp, Homo sapiens
cctgtcggcccccgc

SEQ ID NO: 334144 - DNA, 15 bp, Homo sapiens
ccctgtcggcccccg

SEQ ID NO: 334145 - DNA, 15 bp, Homo sapiens
tccctgtcggccccc

SEQ ID NO: 334146 - DNA, 15 bp, Homo sapiens
ctccctgtcggcccc

SEQ ID NO: 334147 - DNA, 15 bp, Homo sapiens
cctccctgtcggccc

SEQ ID NO: 334148 - DNA, 15 bp, Homo sapiens
gcctccctgtcggcc

SEQ ID NO: 334149 - DNA, 15 bp, Homo sapiens
ggcctccctgtcggc

SEQ ID NO: 334150 - DNA, 15 bp, Homo sapiens
cggcctccctgtcgg

SEQ ID NO: 334151 - DNA, 15 bp, Homo sapiens
gcggcctccctgtcg

SEQ ID NO: 334152 - DNA, 15 bp, Homo sapiens
cgcggcctccctgtc

SEQ ID NO: 334153 - DNA, 15 bp, Homo sapiens
acgcggcctccctgt

SEQ ID NO: 334154 - DNA, 15 bp, Homo sapiens
gacgcggcctccctg

SEQ ID NO: 334155 - DNA, 15 bp, Homo sapiens
cgacgcggcctccct

SEQ ID NO: 334156 - DNA, 15 bp, Homo sapiens
acgacgcggcctccc

SEQ ID NO: 334157 - DNA, 15 bp, Homo sapiens
gacgacgcggcctcc

SEQ ID NO: 334158 - DNA, 15 bp, Homo sapiens
ggacgacgcggcctc

SEQ ID NO: 334159 - DNA, 15 bp, Homo sapiens
gggacgacgcggcct

SEQ ID NO: 334160 - DNA, 15 bp, Homo sapiens
ggggacgacgcggcc

SEQ ID NO: 334161 - DNA, 15 bp, Homo sapiens
gggggacgacgcggc

SEQ ID NO: 334162 - DNA, 15 bp, Homo sapiens
cgggggacgacgcgg

SEQ ID NO: 334163 - DNA, 15 bp, Homo sapiens
gcgggggacgacgcg

SEQ ID NO: 334164 - DNA, 15 bp, Homo sapiens
ggcgggggacgacgc

SEQ ID NO: 334165 - DNA, 15 bp, Homo sapiens
cggcgggggacgacg

SEQ ID NO: 334166 - DNA, 15 bp, Homo sapiens
ccggcgggggacgac

SEQ ID NO: 334167 - DNA, 15 bp, Homo sapiens
cccggcgggggacga

SEQ ID NO: 334168 - DNA, 15 bp, Homo sapiens
ccccggcgggggacg

SEQ ID NO: 334169 - DNA, 15 bp, Homo sapiens
tccccggcgggggac

SEQ ID NO: 334170 - DNA, 15 bp, Homo sapiens
ctccccggcggggga

SEQ ID NO: 334171 - DNA, 15 bp, Homo sapiens
gctccccggcggggg

SEQ ID NO: 334172 - DNA, 15 bp, Homo sapiens
ggctccccggcgggg

SEQ ID NO: 334173 - DNA, 15 bp, Homo sapiens
cggctccccggcggg

SEQ ID NO: 334174 - DNA, 15 bp, Homo sapiens
gcggctccccggcgg

SEQ ID NO: 334175 - DNA, 15 bp, Homo sapiens
agcggctccccggcg

SEQ ID NO: 334176 - DNA, 15 bp, Homo sapiens
gagcggctccccggc

SEQ ID NO: 334177 - DNA, 15 bp, Homo sapiens
ggagcggctccccgg

SEQ ID NO: 334178 - DNA, 15 bp, Homo sapiens
cggagcggctccccg

SEQ ID NO: 334179 - DNA, 15 bp, Homo sapiens
gcggagcggctcccc

SEQ ID NO: 334180 - DNA, 15 bp, Homo sapiens
tgcggagcggctccc

SEQ ID NO: 334181 - DNA, 15 bp, Homo sapiens
ttgcggagcggctcc

SEQ ID NO: 334182 - DNA, 15 bp, Homo sapiens
cttgcggagcggctc

SEQ ID NO: 334183 - DNA, 15 bp, Homo sapiens
tcttgcggagcggct

SEQ ID NO: 334184 - DNA, 15 bp, Homo sapiens
ctcttgcggagcggc

SEQ ID NO: 334185 - DNA, 15 bp, Homo sapiens
cctcttgcggagcgg

SEQ ID NO: 334186 - DNA, 15 bp, Homo sapiens
gcctcttgcggagcg

SEQ ID NO: 334187 - DNA, 15 bp, Homo sapiens
ggcctcttgcggagc

SEQ ID NO: 334188 - DNA, 15 bp, Homo sapiens
cggcctcttgcggag

SEQ ID NO: 334189 - DNA, 15 bp, Homo sapiens
gcggcctcttgcgga

SEQ ID NO: 334190 - DNA, 15 bp, Homo sapiens
cgcggcctcttgcgg

SEQ ID NO: 334191 - DNA, 15 bp, Homo sapiens
ccgcggcctcttgcg

SEQ ID NO: 334192 - DNA, 15 bp, Homo sapiens
tccgcggcctcttgc

SEQ ID NO: 334193 - DNA, 15 bp, Homo sapiens
ctccgcggcctcttg

SEQ ID NO: 334194 - DNA, 15 bp, Homo sapiens
tctccgcggcctctt

SEQ ID NO: 334195 - DNA, 15 bp, Homo sapiens
ctctccgcggcctct

SEQ ID NO: 334196 - DNA, 15 bp, Homo sapiens
tctctccgcggcctc

SEQ ID NO: 334197 - DNA, 15 bp, Homo sapiens
atctctccgcggcct

SEQ ID NO: 334198 - DNA, 15 bp, Homo sapiens
catctctccgcggcc

SEQ ID NO: 334199 - DNA, 15 bp, Homo sapiens
ccatctctccgcggc

SEQ ID NO: 334200 - DNA, 15 bp, Homo sapiens
accatctctccgcgg

SEQ ID NO: 334201 - DNA, 15 bp, Homo sapiens
gaccatctctccgcg

SEQ ID NO: 334202 - DNA, 15 bp, Homo sapiens
ggaccatctctccgc

SEQ ID NO: 334203 - DNA, 15 bp, Homo sapiens
gggaccatctctccg

SEQ ID NO: 334204 - DNA, 15 bp, Homo sapiens
cgggaccatctctcc

SEQ ID NO: 334205 - DNA, 15 bp, Homo sapiens
ccgggaccatctctc

SEQ ID NO: 334206 - DNA, 15 bp, Homo sapiens
gccgggaccatctct

SEQ ID NO: 334207 - DNA, 15 bp, Homo sapiens
ggccgggaccatctc

SEQ ID NO: 334208 - DNA, 15 bp, Homo sapiens
aggccgggaccatct

SEQ ID NO: 334209 - DNA, 15 bp, Homo sapiens
gaggccgggaccatc

SEQ ID NO: 334210 - DNA, 15 bp, Homo sapiens
cgaggccgggaccat

SEQ ID NO: 334211 - DNA, 15 bp, Homo sapiens
tcgaggccgggacca

SEQ ID NO: 334212 - DNA, 15 bp, Homo sapiens
ctcgaggccgggacc

SEQ ID NO: 334213 - DNA, 15 bp, Homo sapiens
gctcgaggccgggac

SEQ ID NO: 334214 - DNA, 15 bp, Homo sapiens
cgctcgaggccggga

SEQ ID NO: 334215 - DNA, 15 bp, Homo sapiens
ccgctcgaggccggg

SEQ ID NO: 334216 - DNA, 15 bp, Homo sapiens
tccgctcgaggccgg

SEQ ID NO: 334217 - DNA, 15 bp, Homo sapiens
ctccgctcgaggccg

SEQ ID NO: 334218 - DNA, 15 bp, Homo sapiens
gctccgctcgaggcc

SEQ ID NO: 334219 - DNA, 15 bp, Homo sapiens
ggctccgctcgaggc

SEQ ID NO: 334220 - DNA, 15 bp, Homo sapiens
gggctccgctcgagg

SEQ ID NO: 334221 - DNA, 15 bp, Homo sapiens
cgggctccgctcgag

SEQ ID NO: 334222 - DNA, 15 bp, Homo sapiens
ccgggctccgctcga

SEQ ID NO: 334223 - DNA, 15 bp, Homo sapiens
cccgggctccgctcg

SEQ ID NO: 334224 - DNA, 15 bp, Homo sapiens
gcccgggctccgctc

SEQ ID NO: 334225 - DNA, 15 bp, Homo sapiens
cgcccgggctccgct

SEQ ID NO: 334226 - DNA, 15 bp, Homo sapiens
tcgcccgggctccgc

SEQ ID NO: 334227 - DNA, 15 bp, Homo sapiens
ctcgcccgggctccg

SEQ ID NO: 334228 - DNA, 15 bp, Homo sapiens
gctcgcccgggctcc

SEQ ID NO: 334229 - DNA, 15 bp, Homo sapiens
ggctcgcccgggctc

SEQ ID NO: 334230 - DNA, 15 bp, Homo sapiens
gggctcgcccgggct

SEQ ID NO: 334231 - DNA, 15 bp, Homo sapiens
cgggctcgcccgggc

SEQ ID NO: 334232 - DNA, 15 bp, Homo sapiens
ccgggctcgcccggg

SEQ ID NO: 334233 - DNA, 15 bp, Homo sapiens
accgggctcgcccgg

SEQ ID NO: 334234 - DNA, 15 bp, Homo sapiens
caccgggctcgcccg

SEQ ID NO: 334235 - DNA, 15 bp, Homo sapiens
ccaccgggctcgccc

SEQ ID NO: 334236 - DNA, 15 bp, Homo sapiens
cccaccgggctcgcc

SEQ ID NO: 334237 - DNA, 15 bp, Homo sapiens
ccccaccgggctcgc

SEQ ID NO: 334238 - DNA, 15 bp, Homo sapiens
gccccaccgggctcg

SEQ ID NO: 334239 - DNA, 15 bp, Homo sapiens
cgccccaccgggctc

SEQ ID NO: 334240 - DNA, 15 bp, Homo sapiens
ccgccccaccgggct

SEQ ID NO: 334241 - DNA, 15 bp, Homo sapiens
gccgccccaccgggc

SEQ ID NO: 334242 - DNA, 15 bp, Homo sapiens
ggccgccccaccggg

SEQ ID NO: 334243 - DNA, 15 bp, Homo sapiens
gggccgccccaccgg

SEQ ID NO: 334244 - DNA, 15 bp, Homo sapiens
ggggccgccccaccg

SEQ ID NO: 334245 - DNA, 15 bp, Homo sapiens
tggggccgccccacc

SEQ ID NO: 334246 - DNA, 15 bp, Homo sapiens
ctggggccgccccac

SEQ ID NO: 334247 - DNA, 15 bp, Homo sapiens
tctggggccgcccca

SEQ ID NO: 334248 - DNA, 15 bp, Homo sapiens
ctctggggccgcccc

SEQ ID NO: 334249 - DNA, 15 bp, Homo sapiens
gctctggggccgccc

SEQ ID NO: 334250 - DNA, 15 bp, Homo sapiens
cgctctggggccgcc

SEQ ID NO: 334251 - DNA, 15 bp, Homo sapiens
acgctctggggccgc

SEQ ID NO: 334252 - DNA, 15 bp, Homo sapiens
cacgctctggggccg

SEQ ID NO: 334253 - DNA, 15 bp, Homo sapiens
tcacgctctggggcc

SEQ ID NO: 334254 - DNA, 15 bp, Homo sapiens
ctcacgctctggggc

SEQ ID NO: 334255 - DNA, 15 bp, Homo sapiens
cctcacgctctgggg

SEQ ID NO: 334256 - DNA, 15 bp, Homo sapiens
acctcacgctctggg

SEQ ID NO: 334257 - DNA, 15 bp, Homo sapiens
cacctcacgctctgg

SEQ ID NO: 334258 - DNA, 15 bp, Homo sapiens
gcacctcacgctctg

SEQ ID NO: 334259 - DNA, 15 bp, Homo sapiens
ggcacctcacgctct

SEQ ID NO: 334260 - DNA, 15 bp, Homo sapiens
cggcacctcacgctc

SEQ ID NO: 334261 - DNA, 15 bp, Homo sapiens
ccggcacctcacgct

SEQ ID NO: 334262 - DNA, 15 bp, Homo sapiens
gccggcacctcacgc

SEQ ID NO: 334263 - DNA, 15 bp, Homo sapiens
cgccggcacctcacg

SEQ ID NO: 334264 - DNA, 15 bp, Homo sapiens
ccgccggcacctcac

SEQ ID NO: 334265 - DNA, 15 bp, Homo sapiens
gccgccggcacctca

SEQ ID NO: 334266 - DNA, 15 bp, Homo sapiens
cgccgccggcacctc

SEQ ID NO: 334267 - DNA, 15 bp, Homo sapiens
ccgccgccggcacct

SEQ ID NO: 334268 - DNA, 15 bp, Homo sapiens
gccgccgccggcacc

SEQ ID NO: 334269 - DNA, 15 bp, Homo sapiens
ggccgccgccggcac

SEQ ID NO: 334270 - DNA, 15 bp, Homo sapiens
tggccgccgccggca

SEQ ID NO: 334271 - DNA, 15 bp, Homo sapiens
ctggccgccgccggc

SEQ ID NO: 334272 - DNA, 15 bp, Homo sapiens
cctggccgccgccgg

SEQ ID NO: 334273 - DNA, 15 bp, Homo sapiens
ccctggccgccgccg

SEQ ID NO: 334274 - DNA, 15 bp, Homo sapiens
cccctggccgccgcc

SEQ ID NO: 334275 - DNA, 15 bp, Homo sapiens
gcccctggccgccgc

SEQ ID NO: 334276 - DNA, 15 bp, Homo sapiens
agcccctggccgccg

SEQ ID NO: 334277 - DNA, 15 bp, Homo sapiens
cagcccctggccgcc

SEQ ID NO: 334278 - DNA, 15 bp, Homo sapiens
gcagcccctggccgc

SEQ ID NO: 334279 - DNA, 15 bp, Homo sapiens
ggcagcccctggccg

SEQ ID NO: 334280 - DNA, 15 bp, Homo sapiens
gggcagcccctggcc

SEQ ID NO: 334281 - DNA, 15 bp, Homo sapiens
cgggcagcccctggc

SEQ ID NO: 334282 - DNA, 15 bp, Homo sapiens
ccgggcagcccctgg

SEQ ID NO: 334283 - DNA, 15 bp, Homo sapiens
cccgggcagcccctg

SEQ ID NO: 334284 - DNA, 15 bp, Homo sapiens
acccgggcagcccct

SEQ ID NO: 334285 - DNA, 15 bp, Homo sapiens
cacccgggcagcccc

SEQ ID NO: 334286 - DNA, 15 bp, Homo sapiens
gcacccgggcagccc

SEQ ID NO: 334287 - DNA, 15 bp, Homo sapiens
cgcacccgggcagcc

SEQ ID NO: 334288 - DNA, 15 bp, Homo sapiens
ccgcacccgggcagc

SEQ ID NO: 334289 - DNA, 15 bp, Homo sapiens
gccgcacccgggcag

SEQ ID NO: 334290 - DNA, 15 bp, Homo sapiens
cgccgcacccgggca

SEQ ID NO: 334291 - DNA, 15 bp, Homo sapiens
ccgccgcacccgggc

SEQ ID NO: 334292 - DNA, 15 bp, Homo sapiens
gccgccgcacccggg

SEQ ID NO: 334293 - DNA, 15 bp, Homo sapiens
cgccgccgcacccgg

SEQ ID NO: 334294 - DNA, 15 bp, Homo sapiens
ccgccgccgcacccg

SEQ ID NO: 334295 - DNA, 15 bp, Homo sapiens
gccgccgccgcaccc

SEQ ID NO: 334296 - DNA, 15 bp, Homo sapiens
cgccgccgccgcacc

SEQ ID NO: 334297 - DNA, 15 bp, Homo sapiens
ccgccgccgccgcac

SEQ ID NO: 334298 - DNA, 15 bp, Homo sapiens
gccgccgccgccgca

SEQ ID NO: 334299 - DNA, 15 bp, Homo sapiens
cgccgccgccgccgc

SEQ ID NO: 334300 - DNA, 15 bp, Homo sapiens
gcgccgccgccgccg

SEQ ID NO: 334301 - DNA, 15 bp, Homo sapiens
agcgccgccgccgcc

SEQ ID NO: 334302 - DNA, 15 bp, Homo sapiens
cagcgccgccgccgc

SEQ ID NO: 334303 - DNA, 15 bp, Homo sapiens
acagcgccgccgccg

SEQ ID NO: 334304 - DNA, 15 bp, Homo sapiens
cacagcgccgccgcc

SEQ ID NO: 334305 - DNA, 15 bp, Homo sapiens
ccacagcgccgccgc

SEQ ID NO: 334306 - DNA, 15 bp, Homo sapiens
gccacagcgccgccg

SEQ ID NO: 334307 - DNA, 15 bp, Homo sapiens
cgccacagcgccgcc

SEQ ID NO: 334308 - DNA, 15 bp, Homo sapiens
ccgccacagcgccgc

SEQ ID NO: 334309 - DNA, 15 bp, Homo sapiens
cccgccacagcgccg

SEQ ID NO: 334310 - DNA, 15 bp, Homo sapiens
tcccgccacagcgcc

SEQ ID NO: 334311 - DNA, 15 bp, Homo sapiens
ctcccgccacagcgc

SEQ ID NO: 334312 - DNA, 15 bp, Homo sapiens
cctcccgccacagcg

SEQ ID NO: 334313 - DNA, 15 bp, Homo sapiens
gcctcccgccacagc

SEQ ID NO: 334314 - DNA, 15 bp, Homo sapiens
cgcctcccgccacag

SEQ ID NO: 334315 - DNA, 15 bp, Homo sapiens
ccgcctcccgccaca

SEQ ID NO: 334316 - DNA, 15 bp, Homo sapiens
tccgcctcccgccac

SEQ ID NO: 334317 - DNA, 15 bp, Homo sapiens
ctccgcctcccgcca

SEQ ID NO: 334318 - DNA, 15 bp, Homo sapiens
cctccgcctcccgcc

SEQ ID NO: 334319 - DNA, 15 bp, Homo sapiens
gcctccgcctcccgc

SEQ ID NO: 334320 - DNA, 15 bp, Homo sapiens
tgcctccgcctcccg

SEQ ID NO: 334321 - DNA, 15 bp, Homo sapiens
ctgcctccgcctccc

SEQ ID NO: 334322 - DNA, 15 bp, Homo sapiens
tctgcctccgcctcc

SEQ ID NO: 334323 - DNA, 15 bp, Homo sapiens
ctctgcctccgcctc

SEQ ID NO: 334324 - DNA, 15 bp, Homo sapiens
cctctgcctccgcct

SEQ ID NO: 334325 - DNA, 15 bp, Homo sapiens
gcctctgcctccgcc

SEQ ID NO: 334326 - DNA, 15 bp, Homo sapiens
cgcctctgcctccgc

SEQ ID NO: 334327 - DNA, 15 bp, Homo sapiens
ccgcctctgcctccg

SEQ ID NO: 334328 - DNA, 15 bp, Homo sapiens
gccgcctctgcctcc

SEQ ID NO: 334329 - DNA, 15 bp, Homo sapiens
cgccgcctctgcctc

SEQ ID NO: 334330 - DNA, 15 bp, Homo sapiens
ccgccgcctctgcct

SEQ ID NO: 334331 - DNA, 15 bp, Homo sapiens
gccgccgcctctgcc

SEQ ID NO: 334332 - DNA, 15 bp, Homo sapiens
cgccgccgcctctgc

SEQ ID NO: 334333 - DNA, 15 bp, Homo sapiens
ccgccgccgcctctg

SEQ ID NO: 334334 - DNA, 15 bp, Homo sapiens
gccgccgccgcctct

SEQ ID NO: 334335 - DNA, 15 bp, Homo sapiens
tgccgccgccgcctc

SEQ ID NO: 334336 - DNA, 15 bp, Homo sapiens
ctgccgccgccgcct

SEQ ID NO: 334337 - DNA, 15 bp, Homo sapiens
cctgccgccgccgcc

SEQ ID NO: 334338 - DNA, 15 bp, Homo sapiens
gcctgccgccgccgc

SEQ ID NO: 334339 - DNA, 15 bp, Homo sapiens
cgcctgccgccgccg

SEQ ID NO: 334340 - DNA, 15 bp, Homo sapiens
ccgcctgccgccgcc

SEQ ID NO: 334341 - DNA, 15 bp, Homo sapiens
cccgcctgccgccgc

SEQ ID NO: 334342 - DNA, 15 bp, Homo sapiens
ccccgcctgccgccg

SEQ ID NO: 334343 - DNA, 15 bp, Homo sapiens
tccccgcctgccgcc

SEQ ID NO: 334344 - DNA, 15 bp, Homo sapiens
ctccccgcctgccgc

SEQ ID NO: 334345 - DNA, 15 bp, Homo sapiens
gctccccgcctgccg

SEQ ID NO: 334346 - DNA, 15 bp, Homo sapiens
tgctccccgcctgcc

SEQ ID NO: 334347 - DNA, 15 bp, Homo sapiens
ttgctccccgcctgc

SEQ ID NO: 334348 - DNA, 15 bp, Homo sapiens
cttgctccccgcctg

SEQ ID NO: 334349 - DNA, 15 bp, Homo sapiens
tcttgctccccgcct

SEQ ID NO: 334350 - DNA, 15 bp, Homo sapiens
ctcttgctccccgcc

SEQ ID NO: 334351 - DNA, 15 bp, Homo sapiens
cctcttgctccccgc

SEQ ID NO: 334352 - DNA, 15 bp, Homo sapiens
gcctcttgctccccg

SEQ ID NO: 334353 - DNA, 15 bp, Homo sapiens
ggcctcttgctcccc

SEQ ID NO: 334354 - DNA, 15 bp, Homo sapiens
gggcctcttgctccc

SEQ ID NO: 334355 - DNA, 15 bp, Homo sapiens
tgggcctcttgctcc

SEQ ID NO: 334356 - DNA, 15 bp, Homo sapiens
ctgggcctcttgctc

SEQ ID NO: 334357 - DNA, 15 bp, Homo sapiens
cctgggcctcttgct

SEQ ID NO: 334358 - DNA, 15 bp, Homo sapiens
gcctgggcctcttgc

SEQ ID NO: 334359 - DNA, 15 bp, Homo sapiens
cgcctgggcctcttg

SEQ ID NO: 334360 - DNA, 15 bp, Homo sapiens
tcgcctgggcctctt

SEQ ID NO: 334361 - DNA, 15 bp, Homo sapiens
gtcgcctgggcctct

SEQ ID NO: 334362 - DNA, 15 bp, Homo sapiens
agtcgcctgggcctc

SEQ ID NO: 334363 - DNA, 15 bp, Homo sapiens
cagtcgcctgggcct

SEQ ID NO: 334364 - DNA, 15 bp, Homo sapiens
gcagtcgcctgggcc

SEQ ID NO: 334365 - DNA, 15 bp, Homo sapiens
cgcagtcgcctgggc

SEQ ID NO: 334366 - DNA, 15 bp, Homo sapiens
ccgcagtcgcctggg

SEQ ID NO: 334367 - DNA, 15 bp, Homo sapiens
gccgcagtcgcctgg

SEQ ID NO: 334368 - DNA, 15 bp, Homo sapiens
cgccgcagtcgcctg

SEQ ID NO: 334369 - DNA, 15 bp, Homo sapiens
ccgccgcagtcgcct

SEQ ID NO: 334370 - DNA, 15 bp, Homo sapiens
gccgccgcagtcgcc

SEQ ID NO: 334371 - DNA, 15 bp, Homo sapiens
agccgccgcagtcgc

SEQ ID NO: 334372 - DNA, 15 bp, Homo sapiens
cagccgccgcagtcg

SEQ ID NO: 334373 - DNA, 15 bp, Homo sapiens
ccagccgccgcagtc

SEQ ID NO: 334374 - DNA, 15 bp, Homo sapiens
cccagccgccgcagt

SEQ ID NO: 334375 - DNA, 15 bp, Homo sapiens
ccccagccgccgcag

SEQ ID NO: 334376 - DNA, 15 bp, Homo sapiens
tccccagccgccgca

SEQ ID NO: 334377 - DNA, 15 bp, Homo sapiens
ttccccagccgccgc

SEQ ID NO: 334378 - DNA, 15 bp, Homo sapiens
cttccccagccgccg

SEQ ID NO: 334379 - DNA, 15 bp, Homo sapiens
ccttccccagccgcc

SEQ ID NO: 334380 - DNA, 15 bp, Homo sapiens
tccttccccagccgc

SEQ ID NO: 334381 - DNA, 15 bp, Homo sapiens
ctccttccccagccg

SEQ ID NO: 334382 - DNA, 15 bp, Homo sapiens
tctccttccccagcc

SEQ ID NO: 334383 - DNA, 15 bp, Homo sapiens
gtctccttccccagc

SEQ ID NO: 334384 - DNA, 15 bp, Homo sapiens
tgtctccttccccag

SEQ ID NO: 334385 - DNA, 15 bp, Homo sapiens
ttgtctccttcccca

SEQ ID NO: 334386 - DNA, 15 bp, Homo sapiens
attgtctccttcccc

SEQ ID NO: 334387 - DNA, 15 bp, Homo sapiens
cattgtctccttccc

SEQ ID NO: 334388 - DNA, 15 bp, Homo sapiens
ccattgtctccttcc

SEQ ID NO: 334389 - DNA, 15 bp, Homo sapiens
cccattgtctccttc

SEQ ID NO: 334390 - DNA, 15 bp, Homo sapiens
gcccattgtctcctt

SEQ ID NO: 334391 - DNA, 15 bp, Homo sapiens
ggcccattgtctcct

SEQ ID NO: 334392 - DNA, 15 bp, Homo sapiens
cggcccattgtctcc

SEQ ID NO: 334393 - DNA, 15 bp, Homo sapiens
ccggcccattgtctc

SEQ ID NO: 334394 - DNA, 15 bp, Homo sapiens
cccggcccattgtct

SEQ ID NO: 334395 - DNA, 15 bp, Homo sapiens
gcccggcccattgtc

SEQ ID NO: 334396 - DNA, 15 bp, Homo sapiens
ggcccggcccattgt

SEQ ID NO: 334397 - DNA, 15 bp, Homo sapiens
aggcccggcccattg

SEQ ID NO: 334398 - DNA, 15 bp, Homo sapiens
caggcccggcccatt

SEQ ID NO: 334399 - DNA, 15 bp, Homo sapiens
gcaggcccggcccat

SEQ ID NO: 334400 - DNA, 15 bp, Homo sapiens
tgcaggcccggccca

SEQ ID NO: 334401 - DNA, 15 bp, Homo sapiens
ctgcaggcccggccc

SEQ ID NO: 334402 - DNA, 15 bp, Homo sapiens
cctgcaggcccggcc

SEQ ID NO: 334403 - DNA, 15 bp, Homo sapiens
ccctgcaggcccggc

SEQ ID NO: 334404 - DNA, 15 bp, Homo sapiens
gccctgcaggcccgg

SEQ ID NO: 334405 - DNA, 15 bp, Homo sapiens
ggccctgcaggcccg

SEQ ID NO: 334406 - DNA, 15 bp, Homo sapiens
gggccctgcaggccc

SEQ ID NO: 334407 - DNA, 15 bp, Homo sapiens
tgggccctgcaggcc

SEQ ID NO: 334408 - DNA, 15 bp, Homo sapiens
atgggccctgcaggc

SEQ ID NO: 334409 - DNA, 15 bp, Homo sapiens
gatgggccctgcagg

SEQ ID NO: 334410 - DNA, 15 bp, Homo sapiens
agatgggccctgcag

SEQ ID NO: 334411 - DNA, 15 bp, Homo sapiens
gagatgggccctgca

SEQ ID NO: 334412 - DNA, 15 bp, Homo sapiens
cgagatgggccctgc

SEQ ID NO: 334413 - DNA, 15 bp, Homo sapiens
ccgagatgggccctg

SEQ ID NO: 334414 - DNA, 15 bp, Homo sapiens
cccgagatgggccct

SEQ ID NO: 334415 - DNA, 15 bp, Homo sapiens
tcccgagatgggccc

SEQ ID NO: 334416 - DNA, 15 bp, Homo sapiens
ctcccgagatgggcc

SEQ ID NO: 334417 - DNA, 15 bp, Homo sapiens
gctcccgagatgggc

SEQ ID NO: 334418 - DNA, 15 bp, Homo sapiens
ggctcccgagatggg

SEQ ID NO: 334419 - DNA, 15 bp, Homo sapiens
tggctcccgagatgg

SEQ ID NO: 334420 - DNA, 15 bp, Homo sapiens
gtggctcccgagatg

SEQ ID NO: 334421 - DNA, 15 bp, Homo sapiens
ggtggctcccgagat

SEQ ID NO: 334422 - DNA, 15 bp, Homo sapiens
cggtggctcccgaga

SEQ ID NO: 334423 - DNA, 15 bp, Homo sapiens
gcggtggctcccgag

SEQ ID NO: 334424 - DNA, 15 bp, Homo sapiens
agcggtggctcccga

SEQ ID NO: 334425 - DNA, 15 bp, Homo sapiens
cagcggtggctcccg

SEQ ID NO: 334426 - DNA, 15 bp, Homo sapiens
ccagcggtggctccc

SEQ ID NO: 334427 - DNA, 15 bp, Homo sapiens
gccagcggtggctcc

SEQ ID NO: 334428 - DNA, 15 bp, Homo sapiens
ggccagcggtggctc

SEQ ID NO: 334429 - DNA, 15 bp, Homo sapiens
cggccagcggtggct

SEQ ID NO: 334430 - DNA, 15 bp, Homo sapiens
tcggccagcggtggc

SEQ ID NO: 334431 - DNA, 15 bp, Homo sapiens
gtcggccagcggtgg

SEQ ID NO: 334432 - DNA, 15 bp, Homo sapiens
tgtcggccagcggtg

SEQ ID NO: 334433 - DNA, 15 bp, Homo sapiens
ttgtcggccagcggt

SEQ ID NO: 334434 - DNA, 15 bp, Homo sapiens
gttgtcggccagcgg

SEQ ID NO: 334435 - DNA, 15 bp, Homo sapiens
agttgtcggccagcg

SEQ ID NO: 334436 - DNA, 15 bp, Homo sapiens
aagttgtcggccagc

SEQ ID NO: 334437 - DNA, 15 bp, Homo sapiens
caagttgtcggccag

SEQ ID NO: 334438 - DNA, 15 bp, Homo sapiens
acaagttgtcggcca

SEQ ID NO: 334439 - DNA, 15 bp, Homo sapiens
tacaagttgtcggcc

SEQ ID NO: 334440 - DNA, 15 bp, Homo sapiens
gtacaagttgtcggc

SEQ ID NO: 334441 - DNA, 15 bp, Homo sapiens
cgtacaagttgtcgg

SEQ ID NO: 334442 - DNA, 15 bp, Homo sapiens
tcgtacaagttgtcg

SEQ ID NO: 334443 - DNA, 15 bp, Homo sapiens
gtcgtacaagttgtc

SEQ ID NO: 334444 - DNA, 15 bp, Homo sapiens
cgtcgtacaagttgt

SEQ ID NO: 334445 - DNA, 15 bp, Homo sapiens
tcgtcgtacaagttg

SEQ ID NO: 334446 - DNA, 15 bp, Homo sapiens
ttcgtcgtacaagtt

SEQ ID NO: 334447 - DNA, 15 bp, Homo sapiens
cttcgtcgtacaagt

SEQ ID NO: 334448 - DNA, 15 bp, Homo sapiens
tcttcgtcgtacaag

SEQ ID NO: 334449 - DNA, 15 bp, Homo sapiens
gtcttcgtcgtacaa

SEQ ID NO: 334450 - DNA, 15 bp, Homo sapiens
cgtcttcgtcgtaca

SEQ ID NO: 334451 - DNA, 15 bp, Homo sapiens
tcgtcttcgtcgtac

SEQ ID NO: 334452 - DNA, 15 bp, Homo sapiens
gtcgtcttcgtcgta

SEQ ID NO: 334453 - DNA, 15 bp, Homo sapiens
cgtcgtcttcgtcgt

SEQ ID NO: 334454 - DNA, 15 bp, Homo sapiens
tcgtcgtcttcgtcg

SEQ ID NO: 334455 - DNA, 15 bp, Homo sapiens
gtcgtcgtcttcgtc

SEQ ID NO: 334456 - DNA, 15 bp, Homo sapiens
cgtcgtcgtcttcgt

SEQ ID NO: 334457 - DNA, 15 bp, Homo sapiens
tcgtcgtcgtcttcg

SEQ ID NO: 334458 - DNA, 15 bp, Homo sapiens
gtcgtcgtcgtcttc

SEQ ID NO: 334459 - DNA, 15 bp, Homo sapiens
cgtcgtcgtcgtctt

SEQ ID NO: 334460 - DNA, 15 bp, Homo sapiens
tcgtcgtcgtcgtct

SEQ ID NO: 334461 - DNA, 15 bp, Homo sapiens
ctcgtcgtcgtcgtc

SEQ ID NO: 334462 - DNA, 15 bp, Homo sapiens
cctcgtcgtcgtcgt

SEQ ID NO: 334463 - DNA, 15 bp, Homo sapiens
ccctcgtcgtcgtcg

SEQ ID NO: 334464 - DNA, 15 bp, Homo sapiens
gccctcgtcgtcgtc

SEQ ID NO: 334465 - DNA, 15 bp, Homo sapiens
cgccctcgtcgtcgt

SEQ ID NO: 334466 - DNA, 15 bp, Homo sapiens
tcgccctcgtcgtcg

SEQ ID NO: 334467 - DNA, 15 bp, Homo sapiens
ctcgccctcgtcgtc

SEQ ID NO: 334468 - DNA, 15 bp, Homo sapiens
cctcgccctcgtcgt

SEQ ID NO: 334469 - DNA, 15 bp, Homo sapiens
tcctcgccctcgtcg

SEQ ID NO: 334470 - DNA, 15 bp, Homo sapiens
ctcctcgccctcgtc

SEQ ID NO: 334471 - DNA, 15 bp, Homo sapiens
cctcctcgccctcgt

SEQ ID NO: 334472 - DNA, 15 bp, Homo sapiens
tcctcctcgccctcg

SEQ ID NO: 334473 - DNA, 15 bp, Homo sapiens
ctcctcctcgccctc

SEQ ID NO: 334474 - DNA, 15 bp, Homo sapiens
cctcctcctcgccct

SEQ ID NO: 334475 - DNA, 15 bp, Homo sapiens
tcctcctcctcgccc

SEQ ID NO: 334476 - DNA, 15 bp, Homo sapiens
ttcctcctcctcgcc

SEQ ID NO: 334477 - DNA, 15 bp, Homo sapiens
cttcctcctcctcgc

SEQ ID NO: 334478 - DNA, 15 bp, Homo sapiens
tcttcctcctcctcg

SEQ ID NO: 334479 - DNA, 15 bp, Homo sapiens
ctcttcctcctcctc

SEQ ID NO: 334480 - DNA, 15 bp, Homo sapiens
cctcttcctcctcct

SEQ ID NO: 334481 - DNA, 15 bp, Homo sapiens
gcctcttcctcctcc

SEQ ID NO: 334482 - DNA, 15 bp, Homo sapiens
cgcctcttcctcctc

SEQ ID NO: 334483 - DNA, 15 bp, Homo sapiens
ccgcctcttcctcct

SEQ ID NO: 334484 - DNA, 15 bp, Homo sapiens
gccgcctcttcctcc

SEQ ID NO: 334485 - DNA, 15 bp, Homo sapiens
cgccgcctcttcctc

SEQ ID NO: 334486 - DNA, 15 bp, Homo sapiens
ccgccgcctcttcct

SEQ ID NO: 334487 - DNA, 15 bp, Homo sapiens
gccgccgcctcttcc

SEQ ID NO: 334488 - DNA, 15 bp, Homo sapiens
cgccgccgcctcttc

SEQ ID NO: 334489 - DNA, 15 bp, Homo sapiens
ccgccgccgcctctt

SEQ ID NO: 334490 - DNA, 15 bp, Homo sapiens
cgccgccgccgcctc

SEQ ID NO: 334491 - DNA, 15 bp, Homo sapiens
ccgccgccgccgcct

SEQ ID NO: 334492 - DNA, 15 bp, Homo sapiens
gccgccgccgccgcc

SEQ ID NO: 334493 - DNA, 15 bp, Homo sapiens
tcgccgccgccgccg

SEQ ID NO: 334494 - DNA, 15 bp, Homo sapiens
atcgccgccgccgcc

SEQ ID NO: 334495 - DNA, 15 bp, Homo sapiens
aatcgccgccgccgc

SEQ ID NO: 334496 - DNA, 15 bp, Homo sapiens
caatcgccgccgccg

SEQ ID NO: 334497 - DNA, 15 bp, Homo sapiens
ccaatcgccgccgcc

SEQ ID NO: 334498 - DNA, 15 bp, Homo sapiens
cccaatcgccgccgc

SEQ ID NO: 334499 - DNA, 15 bp, Homo sapiens
acccaatcgccgccg

SEQ ID NO: 334500 - DNA, 15 bp, Homo sapiens
tacccaatcgccgcc

SEQ ID NO: 334501 - DNA, 15 bp, Homo sapiens
gtacccaatcgccgc

SEQ ID NO: 334502 - DNA, 15 bp, Homo sapiens
ggtacccaatcgccg

SEQ ID NO: 334503 - DNA, 15 bp, Homo sapiens
cggtacccaatcgcc

SEQ ID NO: 334504 - DNA, 15 bp, Homo sapiens
tcggtacccaatcgc

SEQ ID NO: 334505 - DNA, 15 bp, Homo sapiens
ctcggtacccaatcg

SEQ ID NO: 334506 - DNA, 15 bp, Homo sapiens
cctcggtacccaatc

SEQ ID NO: 334507 - DNA, 15 bp, Homo sapiens
acctcggtacccaat

SEQ ID NO: 334508 - DNA, 15 bp, Homo sapiens
cacctcggtacccaa

SEQ ID NO: 334509 - DNA, 15 bp, Homo sapiens
gcacctcggtaccca

SEQ ID NO: 334510 - DNA, 15 bp, Homo sapiens
cgcacctcggtaccc

SEQ ID NO: 334511 - DNA, 15 bp, Homo sapiens
gcgcacctcggtacc

SEQ ID NO: 334512 - DNA, 15 bp, Homo sapiens
tgcgcacctcggtac

SEQ ID NO: 334513 - DNA, 15 bp, Homo sapiens
ctgcgcacctcggta

SEQ ID NO: 334514 - DNA, 15 bp, Homo sapiens
cctgcgcacctcggt

SEQ ID NO: 334515 - DNA, 15 bp, Homo sapiens
ccctgcgcacctcgg

SEQ ID NO: 334516 - DNA, 15 bp, Homo sapiens
accctgcgcacctcg

SEQ ID NO: 334517 - DNA, 15 bp, Homo sapiens
caccctgcgcacctc

SEQ ID NO: 334518 - DNA, 15 bp, Homo sapiens
gcaccctgcgcacct

SEQ ID NO: 334519 - DNA, 15 bp, Homo sapiens
cgcaccctgcgcacc

SEQ ID NO: 334520 - DNA, 15 bp, Homo sapiens
ccgcaccctgcgcac

SEQ ID NO: 334521 - DNA, 15 bp, Homo sapiens
cccgcaccctgcgca

SEQ ID NO: 334522 - DNA, 15 bp, Homo sapiens
gcccgcaccctgcgc

SEQ ID NO: 334523 - DNA, 15 bp, Homo sapiens
cgcccgcaccctgcg

SEQ ID NO: 334524 - DNA, 15 bp, Homo sapiens
ccgcccgcaccctgc

SEQ ID NO: 334525 - DNA, 15 bp, Homo sapiens
gccgcccgcaccctg

SEQ ID NO: 334526 - DNA, 15 bp, Homo sapiens
ggccgcccgcaccct

SEQ ID NO: 334527 - DNA, 15 bp, Homo sapiens
cggccgcccgcaccc

SEQ ID NO: 334528 - DNA, 15 bp, Homo sapiens
ccggccgcccgcacc

SEQ ID NO: 334529 - DNA, 15 bp, Homo sapiens
tccggccgcccgcac

SEQ ID NO: 334530 - DNA, 15 bp, Homo sapiens
ttccggccgcccgca

SEQ ID NO: 334531 - DNA, 15 bp, Homo sapiens
gttccggccgcccgc

SEQ ID NO: 334532 - DNA, 15 bp, Homo sapiens
agttccggccgcccg

SEQ ID NO: 334533 - DNA, 15 bp, Homo sapiens
cagttccggccgccc

SEQ ID NO: 334534 - DNA, 15 bp, Homo sapiens
gcagttccggccgcc

SEQ ID NO: 334535 - DNA, 15 bp, Homo sapiens
cgcagttccggccgc

SEQ ID NO: 334536 - DNA, 15 bp, Homo sapiens
gcgcagttccggccg

SEQ ID NO: 334537 - DNA, 15 bp, Homo sapiens
tgcgcagttccggcc

SEQ ID NO: 334538 - DNA, 15 bp, Homo sapiens
atgcgcagttccggc

SEQ ID NO: 334539 - DNA, 15 bp, Homo sapiens
gatgcgcagttccgg

SEQ ID NO: 334540 - DNA, 15 bp, Homo sapiens
agatgcgcagttccg

SEQ ID NO: 334541 - DNA, 15 bp, Homo sapiens
gagatgcgcagttcc

SEQ ID NO: 334542 - DNA, 15 bp, Homo sapiens
ggagatgcgcagttc

SEQ ID NO: 334543 - DNA, 15 bp, Homo sapiens
aggagatgcgcagtt

SEQ ID NO: 334544 - DNA, 15 bp, Homo sapiens
gaggagatgcgcagt

SEQ ID NO: 334545 - DNA, 15 bp, Homo sapiens
ggaggagatgcgcag

SEQ ID NO: 334546 - DNA, 15 bp, Homo sapiens
aggaggagatgcgca

SEQ ID NO: 334547 - DNA, 15 bp, Homo sapiens
gaggaggagatgcgc

SEQ ID NO: 334548 - DNA, 15 bp, Homo sapiens
ggaggaggagatgcg

SEQ ID NO: 334549 - DNA, 15 bp, Homo sapiens
gggaggaggagatgc

SEQ ID NO: 334550 - DNA, 15 bp, Homo sapiens
agggaggaggagatg

SEQ ID NO: 334551 - DNA, 15 bp, Homo sapiens
gagggaggaggagat

SEQ ID NO: 334552 - DNA, 15 bp, Homo sapiens
agagggaggaggaga

SEQ ID NO: 334553 - DNA, 15 bp, Homo sapiens
gagagggaggaggag

SEQ ID NO: 334554 - DNA, 15 bp, Homo sapiens
ggagagggaggagga

SEQ ID NO: 334555 - DNA, 15 bp, Homo sapiens
gggagagggaggagg

SEQ ID NO: 334556 - DNA, 15 bp, Homo sapiens
ggggagagggaggag

SEQ ID NO: 334557 - DNA, 15 bp, Homo sapiens
cggggagagggagga

SEQ ID NO: 334558 - DNA, 15 bp, Homo sapiens
ccggggagagggagg

SEQ ID NO: 334559 - DNA, 15 bp, Homo sapiens
cccggggagagggag

SEQ ID NO: 334560 - DNA, 15 bp, Homo sapiens
gcccggggagaggga

SEQ ID NO: 334561 - DNA, 15 bp, Homo sapiens
agcccggggagaggg

SEQ ID NO: 334562 - DNA, 15 bp, Homo sapiens
gagcccggggagagg

SEQ ID NO: 334563 - DNA, 15 bp, Homo sapiens
ggagcccggggagag

SEQ ID NO: 334564 - DNA, 15 bp, Homo sapiens
aggagcccggggaga

SEQ ID NO: 334565 - DNA, 15 bp, Homo sapiens
taggagcccggggag

SEQ ID NO: 334566 - DNA, 15 bp, Homo sapiens
gtaggagcccgggga

SEQ ID NO: 334567 - DNA, 15 bp, Homo sapiens
agtaggagcccgggg

SEQ ID NO: 334568 - DNA, 15 bp, Homo sapiens
cagtaggagcccggg

SEQ ID NO: 334569 - DNA, 15 bp, Homo sapiens
ccagtaggagcccgg

SEQ ID NO: 334570 - DNA, 15 bp, Homo sapiens
gccagtaggagcccg

SEQ ID NO: 334571 - DNA, 15 bp, Homo sapiens
ggccagtaggagccc

SEQ ID NO: 334572 - DNA, 15 bp, Homo sapiens
aggccagtaggagcc

SEQ ID NO: 334573 - DNA, 15 bp, Homo sapiens
caggccagtaggagc

SEQ ID NO: 334574 - DNA, 15 bp, Homo sapiens
tcaggccagtaggag

SEQ ID NO: 334575 - DNA, 15 bp, Homo sapiens
ctcaggccagtagga

SEQ ID NO: 334576 - DNA, 15 bp, Homo sapiens
cctcaggccagtagg

SEQ ID NO: 334577 - DNA, 15 bp, Homo sapiens
acctcaggccagtag

SEQ ID NO: 334578 - DNA, 15 bp, Homo sapiens
aacctcaggccagta

SEQ ID NO: 334579 - DNA, 15 bp, Homo sapiens
caacctcaggccagt

SEQ ID NO: 334580 - DNA, 15 bp, Homo sapiens
tcaacctcaggccag

SEQ ID NO: 334581 - DNA, 15 bp, Homo sapiens
ctcaacctcaggcca

SEQ ID NO: 334582 - DNA, 15 bp, Homo sapiens
cctcaacctcaggcc

SEQ ID NO: 334583 - DNA, 15 bp, Homo sapiens
ccctcaacctcaggc

SEQ ID NO: 334584 - DNA, 15 bp, Homo sapiens
gccctcaacctcagg

SEQ ID NO: 334585 - DNA, 15 bp, Homo sapiens
cgccctcaacctcag

SEQ ID NO: 334586 - DNA, 15 bp, Homo sapiens
ccgccctcaacctca

SEQ ID NO: 334587 - DNA, 15 bp, Homo sapiens
gccgccctcaacctc

SEQ ID NO: 334588 - DNA, 15 bp, Homo sapiens
agccgccctcaacct

SEQ ID NO: 334589 - DNA, 15 bp, Homo sapiens
cagccgccctcaacc

SEQ ID NO: 334590 - DNA, 15 bp, Homo sapiens
ccagccgccctcaac

SEQ ID NO: 334591 - DNA, 15 bp, Homo sapiens
cccagccgccctcaa

SEQ ID NO: 334592 - DNA, 15 bp, Homo sapiens
ccccagccgccctca

SEQ ID NO: 334593 - DNA, 15 bp, Homo sapiens
cccccagccgccctc

SEQ ID NO: 334594 - DNA, 15 bp, Homo sapiens
gcccccagccgccct

SEQ ID NO: 334595 - DNA, 15 bp, Homo sapiens
agcccccagccgccc

SEQ ID NO: 334596 - DNA, 15 bp, Homo sapiens
gagcccccagccgcc

SEQ ID NO: 334597 - DNA, 15 bp, Homo sapiens
cgagcccccagccgc

SEQ ID NO: 334598 - DNA, 15 bp, Homo sapiens
ccgagcccccagccg

SEQ ID NO: 334599 - DNA, 15 bp, Homo sapiens
cccgagcccccagcc

SEQ ID NO: 334600 - DNA, 15 bp, Homo sapiens
ccccgagcccccagc

SEQ ID NO: 334601 - DNA, 15 bp, Homo sapiens
gccccgagcccccag

SEQ ID NO: 334602 - DNA, 15 bp, Homo sapiens
tgccccgagccccca

SEQ ID NO: 334603 - DNA, 15 bp, Homo sapiens
ctgccccgagccccc

SEQ ID NO: 334604 - DNA, 15 bp, Homo sapiens
cctgccccgagcccc

SEQ ID NO: 334605 - DNA, 15 bp, Homo sapiens
gcctgccccgagccc

SEQ ID NO: 334606 - DNA, 15 bp, Homo sapiens
agcctgccccgagcc

SEQ ID NO: 334607 - DNA, 15 bp, Homo sapiens
gagcctgccccgagc

SEQ ID NO: 334608 - DNA, 15 bp, Homo sapiens
ggagcctgccccgag

SEQ ID NO: 334609 - DNA, 15 bp, Homo sapiens
cggagcctgccccga

SEQ ID NO: 334610 - DNA, 15 bp, Homo sapiens
gcggagcctgccccg

SEQ ID NO: 334611 - DNA, 15 bp, Homo sapiens
cgcggagcctgcccc

SEQ ID NO: 334612 - DNA, 15 bp, Homo sapiens
ccgcggagcctgccc

SEQ ID NO: 334613 - DNA, 15 bp, Homo sapiens
gccgcggagcctgcc

SEQ ID NO: 334614 - DNA, 15 bp, Homo sapiens
cgccgcggagcctgc

SEQ ID NO: 334615 - DNA, 15 bp, Homo sapiens
acgccgcggagcctg

SEQ ID NO: 334616 - DNA, 15 bp, Homo sapiens
aacgccgcggagcct

SEQ ID NO: 334617 - DNA, 15 bp, Homo sapiens
gaacgccgcggagcc

SEQ ID NO: 334618 - DNA, 15 bp, Homo sapiens
ggaacgccgcggagc

SEQ ID NO: 334619 - DNA, 15 bp, Homo sapiens
gggaacgccgcggag

SEQ ID NO: 334620 - DNA, 15 bp, Homo sapiens
ggggaacgccgcgga

SEQ ID NO: 334621 - DNA, 15 bp, Homo sapiens
aggggaacgccgcgg

SEQ ID NO: 334622 - DNA, 15 bp, Homo sapiens
gaggggaacgccgcg

SEQ ID NO: 334623 - DNA, 15 bp, Homo sapiens
ggaggggaacgccgc

SEQ ID NO: 334624 - DNA, 15 bp, Homo sapiens
gggaggggaacgccg

SEQ ID NO: 334625 - DNA, 15 bp, Homo sapiens
ggggaggggaacgcc

SEQ ID NO: 334626 - DNA, 15 bp, Homo sapiens
tggggaggggaacgc

SEQ ID NO: 334627 - DNA, 15 bp, Homo sapiens
gtggggaggggaacg

SEQ ID NO: 334628 - DNA, 15 bp, Homo sapiens
ggtggggaggggaac

SEQ ID NO: 334629 - DNA, 15 bp, Homo sapiens
gggtggggaggggaa

SEQ ID NO: 334630 - DNA, 15 bp, Homo sapiens
ggggtggggagggga

SEQ ID NO: 334631 - DNA, 15 bp, Homo sapiens
cggggtggggagggg

SEQ ID NO: 334632 - DNA, 15 bp, Homo sapiens
ccggggtggggaggg

SEQ ID NO: 334633 - DNA, 15 bp, Homo sapiens
gccggggtggggagg

SEQ ID NO: 334634 - DNA, 15 bp, Homo sapiens
ggccggggtggggag

SEQ ID NO: 334635 - DNA, 15 bp, Homo sapiens
gggccggggtgggga

SEQ ID NO: 334636 - DNA, 15 bp, Homo sapiens
agggccggggtgggg

SEQ ID NO: 334637 - DNA, 15 bp, Homo sapiens
gagggccggggtggg

SEQ ID NO: 334638 - DNA, 15 bp, Homo sapiens
ggagggccggggtgg

SEQ ID NO: 334639 - DNA, 15 bp, Homo sapiens
cggagggccggggtg

SEQ ID NO: 334640 - DNA, 15 bp, Homo sapiens
acggagggccggggt

SEQ ID NO: 334641 - DNA, 15 bp, Homo sapiens
aacggagggccgggg

SEQ ID NO: 334642 - DNA, 15 bp, Homo sapiens
gaacggagggccggg

SEQ ID NO: 334643 - DNA, 15 bp, Homo sapiens
tgaacggagggccgg

SEQ ID NO: 334644 - DNA, 15 bp, Homo sapiens
ctgaacggagggccg

SEQ ID NO: 334645 - DNA, 15 bp, Homo sapiens
gctgaacggagggcc

SEQ ID NO: 334646 - DNA, 15 bp, Homo sapiens
ggctgaacggagggc

SEQ ID NO: 334647 - DNA, 15 bp, Homo sapiens
cggctgaacggaggg

SEQ ID NO: 334648 - DNA, 15 bp, Homo sapiens
gcggctgaacggagg

SEQ ID NO: 334649 - DNA, 15 bp, Homo sapiens
cgcggctgaacggag

SEQ ID NO: 334650 - DNA, 15 bp, Homo sapiens
gcgcggctgaacgga

SEQ ID NO: 334651 - DNA, 15 bp, Homo sapiens
agcgcggctgaacgg

SEQ ID NO: 334652 - DNA, 15 bp, Homo sapiens
gagcgcggctgaacg

SEQ ID NO: 334653 - DNA, 15 bp, Homo sapiens
ggagcgcggctgaac

SEQ ID NO: 334654 - DNA, 15 bp, Homo sapiens
aggagcgcggctgaa

SEQ ID NO: 334655 - DNA, 15 bp, Homo sapiens
gaggagcgcggctga

SEQ ID NO: 334656 - DNA, 15 bp, Homo sapiens
ggaggagcgcggctg

SEQ ID NO: 334657 - DNA, 15 bp, Homo sapiens
cggaggagcgcggct

SEQ ID NO: 334658 - DNA, 15 bp, Homo sapiens
ccggaggagcgcggc

SEQ ID NO: 334659 - DNA, 15 bp, Homo sapiens
cccggaggagcgcgg

SEQ ID NO: 334660 - DNA, 15 bp, Homo sapiens
ccccggaggagcgcg

SEQ ID NO: 334661 - DNA, 15 bp, Homo sapiens
gccccggaggagcgc

SEQ ID NO: 334662 - DNA, 15 bp, Homo sapiens
agccccggaggagcg

SEQ ID NO: 334663 - DNA, 15 bp, Homo sapiens
cagccccggaggagc

SEQ ID NO: 334664 - DNA, 15 bp, Homo sapiens
gcagccccggaggag

SEQ ID NO: 334665 - DNA, 15 bp, Homo sapiens
cgcagccccggagga

SEQ ID NO: 334666 - DNA, 15 bp, Homo sapiens
ccgcagccccggagg

SEQ ID NO: 334667 - DNA, 15 bp, Homo sapiens
accgcagccccggag

SEQ ID NO: 334668 - DNA, 15 bp, Homo sapiens
aaccgcagccccgga

SEQ ID NO: 334669 - DNA, 15 bp, Homo sapiens
gaaccgcagccccgg

SEQ ID NO: 334670 - DNA, 15 bp, Homo sapiens
ggaaccgcagccccg

SEQ ID NO: 334671 - DNA, 15 bp, Homo sapiens
aggaaccgcagcccc

SEQ ID NO: 334672 - DNA, 15 bp, Homo sapiens
taggaaccgcagccc

SEQ ID NO: 334673 - DNA, 15 bp, Homo sapiens
gtaggaaccgcagcc

SEQ ID NO: 334674 - DNA, 15 bp, Homo sapiens
agtaggaaccgcagc

SEQ ID NO: 334675 - DNA, 15 bp, Homo sapiens
cagtaggaaccgcag

SEQ ID NO: 334676 - DNA, 15 bp, Homo sapiens
gcagtaggaaccgca

SEQ ID NO: 334677 - DNA, 15 bp, Homo sapiens
cgcagtaggaaccgc

SEQ ID NO: 334678 - DNA, 15 bp, Homo sapiens
gcgcagtaggaaccg

SEQ ID NO: 334679 - DNA, 15 bp, Homo sapiens
cgcgcagtaggaacc

SEQ ID NO: 334680 - DNA, 15 bp, Homo sapiens
tcgcgcagtaggaac

SEQ ID NO: 334681 - DNA, 15 bp, Homo sapiens
ctcgcgcagtaggaa

SEQ ID NO: 334682 - DNA, 15 bp, Homo sapiens
gctcgcgcagtagga

SEQ ID NO: 334683 - DNA, 15 bp, Homo sapiens
agctcgcgcagtagg

SEQ ID NO: 334684 - DNA, 15 bp, Homo sapiens
cagctcgcgcagtag

SEQ ID NO: 334685 - DNA, 15 bp, Homo sapiens
gcagctcgcgcagta

SEQ ID NO: 334686 - DNA, 15 bp, Homo sapiens
ggcagctcgcgcagt

SEQ ID NO: 334687 - DNA, 15 bp, Homo sapiens
tggcagctcgcgcag

SEQ ID NO: 334688 - DNA, 15 bp, Homo sapiens
ctggcagctcgcgca

SEQ ID NO: 334689 - DNA, 15 bp, Homo sapiens
actggcagctcgcgc

SEQ ID NO: 334690 - DNA, 15 bp, Homo sapiens
cactggcagctcgcg

SEQ ID NO: 334691 - DNA, 15 bp, Homo sapiens
ccactggcagctcgc

SEQ ID NO: 334692 - DNA, 15 bp, Homo sapiens
tccactggcagctcg

SEQ ID NO: 334693 - DNA, 15 bp, Homo sapiens
atccactggcagctc

SEQ ID NO: 334694 - DNA, 15 bp, Homo sapiens
aatccactggcagct

SEQ ID NO: 334695 - DNA, 15 bp, Homo sapiens
gaatccactggcagc

SEQ ID NO: 334696 - DNA, 15 bp, Homo sapiens
cgaatccactggcag

SEQ ID NO: 334697 - DNA, 15 bp, Homo sapiens
gcgaatccactggca

SEQ ID NO: 334698 - DNA, 15 bp, Homo sapiens
agcgaatccactggc

SEQ ID NO: 334699 - DNA, 15 bp, Homo sapiens
gagcgaatccactgg

SEQ ID NO: 334700 - DNA, 15 bp, Homo sapiens
agagcgaatccactg

SEQ ID NO: 334701 - DNA, 15 bp, Homo sapiens
aagagcgaatccact

SEQ ID NO: 334702 - DNA, 15 bp, Homo sapiens
aaagagcgaatccac

SEQ ID NO: 334703 - DNA, 15 bp, Homo sapiens
aaaagagcgaatcca

SEQ ID NO: 334704 - DNA, 15 bp, Homo sapiens
gaaaagagcgaatcc

SEQ ID NO: 334705 - DNA, 15 bp, Homo sapiens
ggaaaagagcgaatc

SEQ ID NO: 334706 - DNA, 15 bp, Homo sapiens
aggaaaagagcgaat

SEQ ID NO: 334707 - DNA, 15 bp, Homo sapiens
gaggaaaagagcgaa

SEQ ID NO: 334708 - DNA, 15 bp, Homo sapiens
ggaggaaaagagcga

SEQ ID NO: 334709 - DNA, 15 bp, Homo sapiens
cggaggaaaagagcg

SEQ ID NO: 334710 - DNA, 15 bp, Homo sapiens
acggaggaaaagagc

SEQ ID NO: 334711 - DNA, 15 bp, Homo sapiens
gacggaggaaaagag

SEQ ID NO: 334712 - DNA, 15 bp, Homo sapiens
ggacggaggaaaaga

SEQ ID NO: 334713 - DNA, 15 bp, Homo sapiens
cggacggaggaaaag

SEQ ID NO: 334714 - DNA, 15 bp, Homo sapiens
acggacggaggaaaa

SEQ ID NO: 334715 - DNA, 15 bp, Homo sapiens
cacggacggaggaaa

SEQ ID NO: 334716 - DNA, 15 bp, Homo sapiens
ccacggacggaggaa

SEQ ID NO: 334717 - DNA, 15 bp, Homo sapiens
gccacggacggagga

SEQ ID NO: 334718 - DNA, 15 bp, Homo sapiens
ggccacggacggagg

SEQ ID NO: 334719 - DNA, 15 bp, Homo sapiens
gggccacggacggag

SEQ ID NO: 334720 - DNA, 15 bp, Homo sapiens
cgggccacggacgga

SEQ ID NO: 334721 - DNA, 15 bp, Homo sapiens
gcgggccacggacgg

SEQ ID NO: 334722 - DNA, 15 bp, Homo sapiens
ggcgggccacggacg

SEQ ID NO: 334723 - DNA, 15 bp, Homo sapiens
aggcgggccacggac

SEQ ID NO: 334724 - DNA, 15 bp, Homo sapiens
caggcgggccacgga

SEQ ID NO: 334725 - DNA, 15 bp, Homo sapiens
ccaggcgggccacgg

SEQ ID NO: 334726 - DNA, 15 bp, Homo sapiens
cccaggcgggccacg

SEQ ID NO: 334727 - DNA, 15 bp, Homo sapiens
gcccaggcgggccac

SEQ ID NO: 334728 - DNA, 15 bp, Homo sapiens
cgcccaggcgggcca

SEQ ID NO: 334729 - DNA, 15 bp, Homo sapiens
ccgcccaggcgggcc

SEQ ID NO: 334730 - DNA, 15 bp, Homo sapiens
gccgcccaggcgggc

SEQ ID NO: 334731 - DNA, 15 bp, Homo sapiens
ggccgcccaggcggg

SEQ ID NO: 334732 - DNA, 15 bp, Homo sapiens
aggccgcccaggcgg

SEQ ID NO: 334733 - DNA, 15 bp, Homo sapiens
aaggccgcccaggcg

SEQ ID NO: 334734 - DNA, 15 bp, Homo sapiens
caaggccgcccaggc

SEQ ID NO: 334735 - DNA, 15 bp, Homo sapiens
acaaggccgcccagg

SEQ ID NO: 334736 - DNA, 15 bp, Homo sapiens
aacaaggccgcccag

SEQ ID NO: 334737 - DNA, 15 bp, Homo sapiens
gaacaaggccgccca

SEQ ID NO: 334738 - DNA, 15 bp, Homo sapiens
agaacaaggccgccc

SEQ ID NO: 334739 - DNA, 15 bp, Homo sapiens
aagaacaaggccgcc

SEQ ID NO: 334740 - DNA, 15 bp, Homo sapiens
aaagaacaaggccgc

SEQ ID NO: 334741 - DNA, 15 bp, Homo sapiens
gaaagaacaaggccg

SEQ ID NO: 334742 - DNA, 15 bp, Homo sapiens
ggaaagaacaaggcc

SEQ ID NO: 334743 - DNA, 15 bp, Homo sapiens
cggaaagaacaaggc

SEQ ID NO: 334744 - DNA, 15 bp, Homo sapiens
gcggaaagaacaagg

SEQ ID NO: 334745 - DNA, 15 bp, Homo sapiens
tgcggaaagaacaag

SEQ ID NO: 334746 - DNA, 15 bp, Homo sapiens
ctgcggaaagaacaa

SEQ ID NO: 334747 - DNA, 15 bp, Homo sapiens
gctgcggaaagaaca

SEQ ID NO: 334748 - DNA, 15 bp, Homo sapiens
tgctgcggaaagaac

SEQ ID NO: 334749 - DNA, 15 bp, Homo sapiens
ctgctgcggaaagaa

SEQ ID NO: 334750 - DNA, 15 bp, Homo sapiens
gctgctgcggaaaga

SEQ ID NO: 334751 - DNA, 15 bp, Homo sapiens
ggctgctgcggaaag

SEQ ID NO: 334752 - DNA, 15 bp, Homo sapiens
tggctgctgcggaaa

SEQ ID NO: 334753 - DNA, 15 bp, Homo sapiens
ctggctgctgcggaa

SEQ ID NO: 334754 - DNA, 15 bp, Homo sapiens
cctggctgctgcgga

SEQ ID NO: 334755 - DNA, 15 bp, Homo sapiens
acctggctgctgcgg

SEQ ID NO: 334756 - DNA, 15 bp, Homo sapiens
gacctggctgctgcg

SEQ ID NO: 334757 - DNA, 15 bp, Homo sapiens
cgacctggctgctgc

SEQ ID NO: 334758 - DNA, 15 bp, Homo sapiens
ccgacctggctgctg

SEQ ID NO: 334759 - DNA, 15 bp, Homo sapiens
cccgacctggctgct

SEQ ID NO: 334760 - DNA, 15 bp, Homo sapiens
tcccgacctggctgc

SEQ ID NO: 334761 - DNA, 15 bp, Homo sapiens
ctcccgacctggctg

SEQ ID NO: 334762 - DNA, 15 bp, Homo sapiens
tctcccgacctggct

SEQ ID NO: 334763 - DNA, 15 bp, Homo sapiens
gtctcccgacctggc

SEQ ID NO: 334764 - DNA, 15 bp, Homo sapiens
agtctcccgacctgg

SEQ ID NO: 334765 - DNA, 15 bp, Homo sapiens
gagtctcccgacctg

SEQ ID NO: 334766 - DNA, 15 bp, Homo sapiens
agagtctcccgacct

SEQ ID NO: 334767 - DNA, 15 bp, Homo sapiens
gagagtctcccgacc

SEQ ID NO: 334768 - DNA, 15 bp, Homo sapiens
cgagagtctcccgac

SEQ ID NO: 334769 - DNA, 15 bp, Homo sapiens
gcgagagtctcccga

SEQ ID NO: 334770 - DNA, 15 bp, Homo sapiens
tgcgagagtctcccg

SEQ ID NO: 334771 - DNA, 15 bp, Homo sapiens
ctgcgagagtctccc

SEQ ID NO: 334772 - DNA, 15 bp, Homo sapiens
actgcgagagtctcc

SEQ ID NO: 334773 - DNA, 15 bp, Homo sapiens
gactgcgagagtctc

SEQ ID NO: 334774 - DNA, 15 bp, Homo sapiens
cgactgcgagagtct

SEQ ID NO: 334775 - DNA, 15 bp, Homo sapiens
gcgactgcgagagtc

SEQ ID NO: 334776 - DNA, 15 bp, Homo sapiens
agcgactgcgagagt

SEQ ID NO: 334777 - DNA, 15 bp, Homo sapiens
aagcgactgcgagag

SEQ ID NO: 334778 - DNA, 15 bp, Homo sapiens
aaagcgactgcgaga

SEQ ID NO: 334779 - DNA, 15 bp, Homo sapiens
taaagcgactgcgag

SEQ ID NO: 334780 - DNA, 15 bp, Homo sapiens
ttaaagcgactgcga

SEQ ID NO: 334781 - DNA, 15 bp, Homo sapiens
tttaaagcgactgcg

SEQ ID NO: 334782 - DNA, 15 bp, Homo sapiens
ttttaaagcgactgc

SEQ ID NO: 334783 - DNA, 15 bp, Homo sapiens
attttaaagcgactg

SEQ ID NO: 334784 - DNA, 15 bp, Homo sapiens
tattttaaagcgact

SEQ ID NO: 334785 - DNA, 15 bp, Homo sapiens
ttattttaaagcgac

SEQ ID NO: 334786 - DNA, 15 bp, Homo sapiens
cttattttaaagcga

SEQ ID NO: 334787 - DNA, 15 bp, Homo sapiens
acttattttaaagcg

SEQ ID NO: 334788 - DNA, 15 bp, Homo sapiens
aacttattttaaagc

SEQ ID NO: 334789 - DNA, 15 bp, Homo sapiens
aaacttattttaaag

SEQ ID NO: 334790 - DNA, 15 bp, Homo sapiens
gaaacttattttaaa

SEQ ID NO: 334791 - DNA, 15 bp, Homo sapiens
agaaacttattttaa

SEQ ID NO: 334792 - DNA, 15 bp, Homo sapiens
gagaaacttatttta

SEQ ID NO: 334793 - DNA, 15 bp, Homo sapiens
agagaaacttatttt

SEQ ID NO: 334794 - DNA, 15 bp, Homo sapiens
gagagaaacttattt

SEQ ID NO: 334795 - DNA, 15 bp, Homo sapiens
ggagagaaacttatt

SEQ ID NO: 334796 - DNA, 15 bp, Homo sapiens
gggagagaaacttat

SEQ ID NO: 334797 - DNA, 15 bp, Homo sapiens
ggggagagaaactta

SEQ ID NO: 334798 - DNA, 15 bp, Homo sapiens
gggggagagaaactt

SEQ ID NO: 334799 - DNA, 15 bp, Homo sapiens
agggggagagaaact

SEQ ID NO: 334800 - DNA, 15 bp, Homo sapiens
gagggggagagaaac

SEQ ID NO: 334801 - DNA, 15 bp, Homo sapiens
agagggggagagaaa

SEQ ID NO: 334802 - DNA, 15 bp, Homo sapiens
aagagggggagagaa

SEQ ID NO: 334803 - DNA, 15 bp, Homo sapiens
taagagggggagaga

SEQ ID NO: 334804 - DNA, 15 bp, Homo sapiens
gtaagagggggagag

SEQ ID NO: 334805 - DNA, 15 bp, Homo sapiens
agtaagagggggaga

SEQ ID NO: 334806 - DNA, 15 bp, Homo sapiens
gagtaagagggggag

SEQ ID NO: 334807 - DNA, 15 bp, Homo sapiens
agagtaagaggggga

SEQ ID NO: 334808 - DNA, 15 bp, Homo sapiens
aagagtaagaggggg

SEQ ID NO: 334809 - DNA, 15 bp, Homo sapiens
aaagagtaagagggg

SEQ ID NO: 334810 - DNA, 15 bp, Homo sapiens
aaaagagtaagaggg

SEQ ID NO: 334811 - DNA, 15 bp, Homo sapiens
taaaagagtaagagg

SEQ ID NO: 334812 - DNA, 15 bp, Homo sapiens
ctaaaagagtaagag

SEQ ID NO: 334813 - DNA, 15 bp, Homo sapiens
gctaaaagagtaaga

SEQ ID NO: 334814 - DNA, 15 bp, Homo sapiens
tgctaaaagagtaag

SEQ ID NO: 334815 - DNA, 15 bp, Homo sapiens
atgctaaaagagtaa

SEQ ID NO: 334816 - DNA, 15 bp, Homo sapiens
tatgctaaaagagta

SEQ ID NO: 334817 - DNA, 15 bp, Homo sapiens
atatgctaaaagagt

SEQ ID NO: 334818 - DNA, 15 bp, Homo sapiens
aatatgctaaaagag

SEQ ID NO: 334819 - DNA, 15 bp, Homo sapiens
caatatgctaaaaga

SEQ ID NO: 334820 - DNA, 15 bp, Homo sapiens
gcaatatgctaaaag

SEQ ID NO: 334821 - DNA, 15 bp, Homo sapiens
agcaatatgctaaaa

SEQ ID NO: 334822 - DNA, 15 bp, Homo sapiens
aagcaatatgctaaa

SEQ ID NO: 334823 - DNA, 15 bp, Homo sapiens
aaagcaatatgctaa

SEQ ID NO: 334824 - DNA, 15 bp, Homo sapiens
aaaagcaatatgcta

SEQ ID NO: 334825 - DNA, 15 bp, Homo sapiens
caaaagcaatatgct

SEQ ID NO: 334826 - DNA, 15 bp, Homo sapiens
acaaaagcaatatgc

SEQ ID NO: 334827 - DNA, 15 bp, Homo sapiens
aacaaaagcaatatg

SEQ ID NO: 334828 - DNA, 15 bp, Homo sapiens
taacaaaagcaatat

SEQ ID NO: 334829 - DNA, 15 bp, Homo sapiens
ctaacaaaagcaata

SEQ ID NO: 334830 - DNA, 15 bp, Homo sapiens
tctaacaaaagcaat

SEQ ID NO: 334831 - DNA, 15 bp, Homo sapiens
ctctaacaaaagcaa

SEQ ID NO: 334832 - DNA, 15 bp, Homo sapiens
gctctaacaaaagca

SEQ ID NO: 334833 - DNA, 15 bp, Homo sapiens
agctctaacaaaagc

SEQ ID NO: 334834 - DNA, 15 bp, Homo sapiens
aagctctaacaaaag

SEQ ID NO: 334835 - DNA, 15 bp, Homo sapiens
aaagctctaacaaaa

SEQ ID NO: 334836 - DNA, 15 bp, Homo sapiens
aaaagctctaacaaa

SEQ ID NO: 334837 - DNA, 15 bp, Homo sapiens
aaaaagctctaacaa

SEQ ID NO: 334838 - DNA, 15 bp, Homo sapiens
aaaaaagctctaaca

SEQ ID NO: 334839 - DNA, 15 bp, Homo sapiens
aaaaaaagctctaac

SEQ ID NO: 334840 - DNA, 15 bp, Homo sapiens
aaaaaaaagctctaa

SEQ ID NO: 334841 - DNA, 15 bp, Homo sapiens
aaaaaaaaagctcta

SEQ ID NO: 334842 - DNA, 15 bp, Homo sapiens
gaaaaaaaaagctct

SEQ ID NO: 334843 - DNA, 15 bp, Homo sapiens
agaaaaaaaaagctc

SEQ ID NO: 334844 - DNA, 15 bp, Homo sapiens
aagaaaaaaaaagct

SEQ ID NO: 334845 - DNA, 15 bp, Homo sapiens
aaagaaaaaaaaagc

SEQ ID NO: 334846 - DNA, 15 bp, Homo sapiens
aaaagaaaaaaaaag

SEQ ID NO: 334847 - DNA, 15 bp, Homo sapiens
aaaaagaaaaaaaaa

SEQ ID NO: 334848 - DNA, 15 bp, Homo sapiens
gaaaaagaaaaaaaa

SEQ ID NO: 334849 - DNA, 15 bp, Homo sapiens
agaaaaagaaaaaaa

SEQ ID NO: 334850 - DNA, 15 bp, Homo sapiens
taaagaaaaagaaaa

SEQ ID NO: 334851 - DNA, 15 bp, Homo sapiens
ataaagaaaaagaaa

SEQ ID NO: 334852 - DNA, 15 bp, Homo sapiens
aataaagaaaaagaa

SEQ ID NO: 334853 - DNA, 15 bp, Homo sapiens
aaataaagaaaaaga

SEQ ID NO: 334854 - DNA, 15 bp, Homo sapiens
aaaataaagaaaaag

SEQ ID NO: 334855 - DNA, 15 bp, Homo sapiens
aaaaataaagaaaaa

SEQ ID NO: 334856 - DNA, 15 bp, Homo sapiens
aaaaaataaagaaaa

SEQ ID NO: 334857 - DNA, 15 bp, Homo sapiens
taaaaaataaagaaa

SEQ ID NO: 334858 - DNA, 15 bp, Homo sapiens
ataaaaaataaagaa

SEQ ID NO: 334859 - DNA, 15 bp, Homo sapiens
aataaaaaataaaga

SEQ ID NO: 334860 - DNA, 15 bp, Homo sapiens
aaataaaaaataaag

SEQ ID NO: 334861 - DNA, 15 bp, Homo sapiens
gaaaataaaaaataa

SEQ ID NO: 334862 - DNA, 15 bp, Homo sapiens
tgaaaataaaaaata

SEQ ID NO: 334863 - DNA, 15 bp, Homo sapiens
atgaaaataaaaaat

SEQ ID NO: 334864 - DNA, 15 bp, Homo sapiens
aatgaaaataaaaaa

SEQ ID NO: 334865 - DNA, 15 bp, Homo sapiens
caatgaaaataaaaa

SEQ ID NO: 334866 - DNA, 15 bp, Homo sapiens
gcaatgaaaataaaa

SEQ ID NO: 334867 - DNA, 15 bp, Homo sapiens
agcaatgaaaataaa

SEQ ID NO: 334868 - DNA, 15 bp, Homo sapiens
aagcaatgaaaataa

SEQ ID NO: 334869 - DNA, 15 bp, Homo sapiens
aaagcaatgaaaata

SEQ ID NO: 334870 - DNA, 15 bp, Homo sapiens
aaaagcaatgaaaat

SEQ ID NO: 334871 - DNA, 15 bp, Homo sapiens
gaaaagcaatgaaaa

SEQ ID NO: 334872 - DNA, 15 bp, Homo sapiens
agaaaagcaatgaaa

SEQ ID NO: 334873 - DNA, 15 bp, Homo sapiens
gagaaaagcaatgaa

SEQ ID NO: 334874 - DNA, 15 bp, Homo sapiens
ggagaaaagcaatga

SEQ ID NO: 334875 - DNA, 15 bp, Homo sapiens
aggagaaaagcaatg

SEQ ID NO: 334876 - DNA, 15 bp, Homo sapiens
gaggagaaaagcaat

SEQ ID NO: 334877 - DNA, 15 bp, Homo sapiens
agaggagaaaagcaa

SEQ ID NO: 334878 - DNA, 15 bp, Homo sapiens
tagaggagaaaagca

SEQ ID NO: 334879 - DNA, 15 bp, Homo sapiens
gtagaggagaaaagc

SEQ ID NO: 334880 - DNA, 15 bp, Homo sapiens
ggtagaggagaaaag

SEQ ID NO: 334881 - DNA, 15 bp, Homo sapiens
gggtagaggagaaaa

SEQ ID NO: 334882 - DNA, 15 bp, Homo sapiens
ggggtagaggagaaa

SEQ ID NO: 334883 - DNA, 15 bp, Homo sapiens
gggggtagaggagaa

SEQ ID NO: 334884 - DNA, 15 bp, Homo sapiens
ggggggtagaggaga

SEQ ID NO: 334885 - DNA, 15 bp, Homo sapiens
tggggggtagaggag

SEQ ID NO: 334886 - DNA, 15 bp, Homo sapiens
ctggggggtagagga

SEQ ID NO: 334887 - DNA, 15 bp, Homo sapiens
gctggggggtagagg

SEQ ID NO: 334888 - DNA, 15 bp, Homo sapiens
tgctggggggtagag

SEQ ID NO: 334889 - DNA, 15 bp, Homo sapiens
gtgctggggggtaga

SEQ ID NO: 334890 - DNA, 15 bp, Homo sapiens
tgtgctggggggtag

SEQ ID NO: 334891 - DNA, 15 bp, Homo sapiens
gtgtgctggggggta

SEQ ID NO: 334892 - DNA, 15 bp, Homo sapiens
agtgtgctggggggt

SEQ ID NO: 334893 - DNA, 15 bp, Homo sapiens
aagtgtgctgggggg

SEQ ID NO: 334894 - DNA, 15 bp, Homo sapiens
taagtgtgctggggg

SEQ ID NO: 334895 - DNA, 15 bp, Homo sapiens
ttaagtgtgctgggg

SEQ ID NO: 334896 - DNA, 15 bp, Homo sapiens
cttaagtgtgctggg

SEQ ID NO: 334897 - DNA, 15 bp, Homo sapiens
acttaagtgtgctgg

SEQ ID NO: 334898 - DNA, 15 bp, Homo sapiens
gacttaagtgtgctg

SEQ ID NO: 334899 - DNA, 15 bp, Homo sapiens
agacttaagtgtgct

SEQ ID NO: 334900 - DNA, 15 bp, Homo sapiens
cagacttaagtgtgc

SEQ ID NO: 334901 - DNA, 15 bp, Homo sapiens
gcagacttaagtgtg

SEQ ID NO: 334902 - DNA, 15 bp, Homo sapiens
tgcagacttaagtgt

SEQ ID NO: 334903 - DNA, 15 bp, Homo sapiens
ttgcagacttaagtg

SEQ ID NO: 334904 - DNA, 15 bp, Homo sapiens
gttgcagacttaagt

SEQ ID NO: 334905 - DNA, 15 bp, Homo sapiens
agttgcagacttaag

SEQ ID NO: 334906 - DNA, 15 bp, Homo sapiens
aagttgcagacttaa

SEQ ID NO: 334907 - DNA, 15 bp, Homo sapiens
aaagttgcagactta

SEQ ID NO: 334908 - DNA, 15 bp, Homo sapiens
aaaagttgcagactt

SEQ ID NO: 334909 - DNA, 15 bp, Homo sapiens
aaaaagttgcagact

SEQ ID NO: 334910 - DNA, 15 bp, Homo sapiens
caaaaagttgcagac

SEQ ID NO: 334911 - DNA, 15 bp, Homo sapiens
ccaaaaagttgcaga

SEQ ID NO: 334912 - DNA, 15 bp, Homo sapiens
gccaaaaagttgcag

SEQ ID NO: 334913 - DNA, 15 bp, Homo sapiens
agccaaaaagttgca

SEQ ID NO: 334914 - DNA, 15 bp, Homo sapiens
cagccaaaaagttgc

SEQ ID NO: 334915 - DNA, 15 bp, Homo sapiens
acagccaaaaagttg

SEQ ID NO: 334916 - DNA, 15 bp, Homo sapiens
gacagccaaaaagtt

SEQ ID NO: 334917 - DNA, 15 bp, Homo sapiens
ggacagccaaaaagt

SEQ ID NO: 334918 - DNA, 15 bp, Homo sapiens
gggacagccaaaaag

SEQ ID NO: 334919 - DNA, 15 bp, Homo sapiens
cgggacagccaaaaa

SEQ ID NO: 334920 - DNA, 15 bp, Homo sapiens
acgggacagccaaaa

SEQ ID NO: 334921 - DNA, 15 bp, Homo sapiens
aacgggacagccaaa

SEQ ID NO: 334922 - DNA, 15 bp, Homo sapiens
caacgggacagccaa

SEQ ID NO: 334923 - DNA, 15 bp, Homo sapiens
ccaacgggacagcca

SEQ ID NO: 334924 - DNA, 15 bp, Homo sapiens
accaacgggacagcc

SEQ ID NO: 334925 - DNA, 15 bp, Homo sapiens
gaccaacgggacagc

SEQ ID NO: 334926 - DNA, 15 bp, Homo sapiens
agaccaacgggacag

SEQ ID NO: 334927 - DNA, 15 bp, Homo sapiens
cagaccaacgggaca

SEQ ID NO: 334928 - DNA, 15 bp, Homo sapiens
gcagaccaacgggac

SEQ ID NO: 334929 - DNA, 15 bp, Homo sapiens
cgcagaccaacggga

SEQ ID NO: 334930 - DNA, 15 bp, Homo sapiens
acgcagaccaacggg

SEQ ID NO: 334931 - DNA, 15 bp, Homo sapiens
aacgcagaccaacgg

SEQ ID NO: 334932 - DNA, 15 bp, Homo sapiens
aaacgcagaccaacg

SEQ ID NO: 334933 - DNA, 15 bp, Homo sapiens
aaaacgcagaccaac

SEQ ID NO: 334934 - DNA, 15 bp, Homo sapiens
gaaaacgcagaccaa

SEQ ID NO: 334935 - DNA, 15 bp, Homo sapiens
tgaaaacgcagacca

SEQ ID NO: 334936 - DNA, 15 bp, Homo sapiens
ttgaaaacgcagacc

SEQ ID NO: 334937 - DNA, 15 bp, Homo sapiens
attgaaaacgcagac

SEQ ID NO: 334938 - DNA, 15 bp, Homo sapiens
aattgaaaacgcaga

SEQ ID NO: 334939 - DNA, 15 bp, Homo sapiens
caattgaaaacgcag

SEQ ID NO: 334940 - DNA, 15 bp, Homo sapiens
gcaattgaaaacgca

SEQ ID NO: 334941 - DNA, 15 bp, Homo sapiens
agcaattgaaaacgc

SEQ ID NO: 334942 - DNA, 15 bp, Homo sapiens
aagcaattgaaaacg

SEQ ID NO: 334943 - DNA, 15 bp, Homo sapiens
aaagcaattgaaaac

SEQ ID NO: 334944 - DNA, 15 bp, Homo sapiens
aaaagcaattgaaaa

SEQ ID NO: 334945 - DNA, 15 bp, Homo sapiens
aaaaagcaattgaaa

SEQ ID NO: 334946 - DNA, 15 bp, Homo sapiens
caaaaagcaattgaa

SEQ ID NO: 334947 - DNA, 15 bp, Homo sapiens
gcaaaaagcaattga

SEQ ID NO: 334948 - DNA, 15 bp, Homo sapiens
tgcaaaaagcaattg

SEQ ID NO: 334949 - DNA, 15 bp, Homo sapiens
ttgcaaaaagcaatt

SEQ ID NO: 334950 - DNA, 15 bp, Homo sapiens
tttgcaaaaagcaat

SEQ ID NO: 334951 - DNA, 15 bp, Homo sapiens
gtttgcaaaaagcaa

SEQ ID NO: 334952 - DNA, 15 bp, Homo sapiens
agtttgcaaaaagca

SEQ ID NO: 334953 - DNA, 15 bp, Homo sapiens
aagtttgcaaaaagc

SEQ ID NO: 334954 - DNA, 15 bp, Homo sapiens
caagtttgcaaaaag

SEQ ID NO: 334955 - DNA, 15 bp, Homo sapiens
tcaagtttgcaaaaa

SEQ ID NO: 334956 - DNA, 15 bp, Homo sapiens
gtcaagtttgcaaaa

SEQ ID NO: 334957 - DNA, 15 bp, Homo sapiens
tgtcaagtttgcaaa

SEQ ID NO: 334958 - DNA, 15 bp, Homo sapiens
gtgtcaagtttgcaa

SEQ ID NO: 334959 - DNA, 15 bp, Homo sapiens
ggtgtcaagtttgca

SEQ ID NO: 334960 - DNA, 15 bp, Homo sapiens
aggtgtcaagtttgc

SEQ ID NO: 334961 - DNA, 15 bp, Homo sapiens
caggtgtcaagtttg

SEQ ID NO: 334962 - DNA, 15 bp, Homo sapiens
acaggtgtcaagttt

SEQ ID NO: 334963 - DNA, 15 bp, Homo sapiens
cacaggtgtcaagtt

SEQ ID NO: 334964 - DNA, 15 bp, Homo sapiens
gcacaggtgtcaagt

SEQ ID NO: 334965 - DNA, 15 bp, Homo sapiens
tgcacaggtgtcaag

SEQ ID NO: 334966 - DNA, 15 bp, Homo sapiens
ctgcacaggtgtcaa

SEQ ID NO: 334967 - DNA, 15 bp, Homo sapiens
actgcacaggtgtca

SEQ ID NO: 334968 - DNA, 15 bp, Homo sapiens
aactgcacaggtgtc

SEQ ID NO: 334969 - DNA, 15 bp, Homo sapiens
aaactgcacaggtgt

SEQ ID NO: 334970 - DNA, 15 bp, Homo sapiens
caaactgcacaggtg

SEQ ID NO: 334971 - DNA, 15 bp, Homo sapiens
gcaaactgcacaggt

SEQ ID NO: 334972 - DNA, 15 bp, Homo sapiens
agcaaactgcacagg

SEQ ID NO: 334973 - DNA, 15 bp, Homo sapiens
aagcaaactgcacag

SEQ ID NO: 334974 - DNA, 15 bp, Homo sapiens
aaagcaaactgcaca

SEQ ID NO: 334975 - DNA, 15 bp, Homo sapiens
aaaagcaaactgcac

SEQ ID NO: 334976 - DNA, 15 bp, Homo sapiens
aaaaagcaaactgca

SEQ ID NO: 334977 - DNA, 15 bp, Homo sapiens
aaaaaagcaaactgc

SEQ ID NO: 334978 - DNA, 15 bp, Homo sapiens
aaaaaaagcaaactg

SEQ ID NO: 334979 - DNA, 15 bp, Homo sapiens
caaaaaaagcaaact

SEQ ID NO: 334980 - DNA, 15 bp, Homo sapiens
ccaaaaaaagcaaac

SEQ ID NO: 334981 - DNA, 15 bp, Homo sapiens
accaaaaaaagcaaa

SEQ ID NO: 334982 - DNA, 15 bp, Homo sapiens
gaccaaaaaaagcaa

SEQ ID NO: 334983 - DNA, 15 bp, Homo sapiens
agaccaaaaaaagca

SEQ ID NO: 334984 - DNA, 15 bp, Homo sapiens
tagaccaaaaaaagc

SEQ ID NO: 334985 - DNA, 15 bp, Homo sapiens
atagaccaaaaaaag

SEQ ID NO: 334986 - DNA, 15 bp, Homo sapiens
tatagaccaaaaaaa

SEQ ID NO: 334987 - DNA, 15 bp, Homo sapiens
atatagaccaaaaaa

SEQ ID NO: 334988 - DNA, 15 bp, Homo sapiens
aatatagaccaaaaa

SEQ ID NO: 334989 - DNA, 15 bp, Homo sapiens
aaatatagaccaaaa

SEQ ID NO: 334990 - DNA, 15 bp, Homo sapiens
aaaatatagaccaaa

SEQ ID NO: 334991 - DNA, 15 bp, Homo sapiens
aaaaatatagaccaa

SEQ ID NO: 334992 - DNA, 15 bp, Homo sapiens
taaaaatatagacca

SEQ ID NO: 334993 - DNA, 15 bp, Homo sapiens
ataaaaatatagacc

SEQ ID NO: 334994 - DNA, 15 bp, Homo sapiens
cataaaaatatagac

SEQ ID NO: 334995 - DNA, 15 bp, Homo sapiens
tcataaaaatataga

SEQ ID NO: 334996 - DNA, 15 bp, Homo sapiens
gtcataaaaatatag

SEQ ID NO: 334997 - DNA, 15 bp, Homo sapiens
agtcataaaaatata

SEQ ID NO: 334998 - DNA, 15 bp, Homo sapiens
cagtcataaaaatat

SEQ ID NO: 334999 - DNA, 15 bp, Homo sapiens
tcagtcataaaaata

SEQ ID NO: 335000 - DNA, 15 bp, Homo sapiens
ttcagtcataaaaat

SEQ ID NO: 335001 - DNA, 15 bp, Homo sapiens
tttcagtcataaaaa

SEQ ID NO: 335002 - DNA, 15 bp, Homo sapiens
atttcagtcataaaa

SEQ ID NO: 335003 - DNA, 15 bp, Homo sapiens
aatttcagtcataaa

SEQ ID NO: 335004 - DNA, 15 bp, Homo sapiens
taatttcagtcataa

SEQ ID NO: 335005 - DNA, 15 bp, Homo sapiens
gtaatttcagtcata

SEQ ID NO: 335006 - DNA, 15 bp, Homo sapiens
tgtaatttcagtcat

SEQ ID NO: 335007 - DNA, 15 bp, Homo sapiens
ttgtaatttcagtca

SEQ ID NO: 335008 - DNA, 15 bp, Homo sapiens
attgtaatttcagtc

SEQ ID NO: 335009 - DNA, 15 bp, Homo sapiens
aattgtaatttcagt

SEQ ID NO: 335010 - DNA, 15 bp, Homo sapiens
aaattgtaatttcag

SEQ ID NO: 335011 - DNA, 15 bp, Homo sapiens
aaaattgtaatttca

SEQ ID NO: 335012 - DNA, 15 bp, Homo sapiens
aaaaattgtaatttc

SEQ ID NO: 335013 - DNA, 15 bp, Homo sapiens
caaaaattgtaattt

SEQ ID NO: 335014 - DNA, 15 bp, Homo sapiens
tcaaaaattgtaatt

SEQ ID NO: 335015 - DNA, 15 bp, Homo sapiens
ttcaaaaattgtaat

SEQ ID NO: 335016 - DNA, 15 bp, Homo sapiens
tttcaaaaattgtaa

SEQ ID NO: 335017 - DNA, 15 bp, Homo sapiens
ctttcaaaaattgta

SEQ ID NO: 335018 - DNA, 15 bp, Homo sapiens
tctttcaaaaattgt

SEQ ID NO: 335019 - DNA, 15 bp, Homo sapiens
ctctttcaaaaattg

SEQ ID NO: 335020 - DNA, 15 bp, Homo sapiens
cctctttcaaaaatt

SEQ ID NO: 335021 - DNA, 15 bp, Homo sapiens
tcctctttcaaaaat

SEQ ID NO: 335022 - DNA, 15 bp, Homo sapiens
ttcctctttcaaaaa

SEQ ID NO: 335023 - DNA, 15 bp, Homo sapiens
tttcctctttcaaaa

SEQ ID NO: 335024 - DNA, 15 bp, Homo sapiens
ctttcctctttcaaa

SEQ ID NO: 335025 - DNA, 15 bp, Homo sapiens
gctttcctctttcaa

SEQ ID NO: 335026 - DNA, 15 bp, Homo sapiens
agctttcctctttca

SEQ ID NO: 335027 - DNA, 15 bp, Homo sapiens
cagctttcctctttc

SEQ ID NO: 335028 - DNA, 15 bp, Homo sapiens
acagctttcctcttt

SEQ ID NO: 335029 - DNA, 15 bp, Homo sapiens
aacagctttcctctt

SEQ ID NO: 335030 - DNA, 15 bp, Homo sapiens
aaacagctttcctct

SEQ ID NO: 335031 - DNA, 15 bp, Homo sapiens
gaaacagctttcctc

SEQ ID NO: 335032 - DNA, 15 bp, Homo sapiens
agaaacagctttcct

SEQ ID NO: 335033 - DNA, 15 bp, Homo sapiens
tagaaacagctttcc

SEQ ID NO: 335034 - DNA, 15 bp, Homo sapiens
atagaaacagctttc

SEQ ID NO: 335035 - DNA, 15 bp, Homo sapiens
tatagaaacagcttt

SEQ ID NO: 335036 - DNA, 15 bp, Homo sapiens
ctatagaaacagctt

SEQ ID NO: 335037 - DNA, 15 bp, Homo sapiens
actatagaaacagct

SEQ ID NO: 335038 - DNA, 15 bp, Homo sapiens
gactatagaaacagc

SEQ ID NO: 335039 - DNA, 15 bp, Homo sapiens
tgactatagaaacag

SEQ ID NO: 335040 - DNA, 15 bp, Homo sapiens
gtgactatagaaaca

SEQ ID NO: 335041 - DNA, 15 bp, Homo sapiens
tgtgactatagaaac

SEQ ID NO: 335042 - DNA, 15 bp, Homo sapiens
ctgtgactatagaaa

SEQ ID NO: 335043 - DNA, 15 bp, Homo sapiens
gctgtgactatagaa

SEQ ID NO: 335044 - DNA, 15 bp, Homo sapiens
agctgtgactataga

SEQ ID NO: 335045 - DNA, 15 bp, Homo sapiens
aagctgtgactatag

SEQ ID NO: 335046 - DNA, 15 bp, Homo sapiens
caagctgtgactata

SEQ ID NO: 335047 - DNA, 15 bp, Homo sapiens
gcaagctgtgactat

SEQ ID NO: 335048 - DNA, 15 bp, Homo sapiens
tgcaagctgtgacta

SEQ ID NO: 335049 - DNA, 15 bp, Homo sapiens
ttgcaagctgtgact

SEQ ID NO: 335050 - DNA, 15 bp, Homo sapiens
tttgcaagctgtgac

SEQ ID NO: 335051 - DNA, 15 bp, Homo sapiens
ttttgcaagctgtga

SEQ ID NO: 335052 - DNA, 15 bp, Homo sapiens
attttgcaagctgtg

SEQ ID NO: 335053 - DNA, 15 bp, Homo sapiens
aattttgcaagctgt

SEQ ID NO: 335054 - DNA, 15 bp, Homo sapiens
aaattttgcaagctg

SEQ ID NO: 335055 - DNA, 15 bp, Homo sapiens
taaattttgcaagct

SEQ ID NO: 335056 - DNA, 15 bp, Homo sapiens
ttaaattttgcaagc

SEQ ID NO: 335057 - DNA, 15 bp, Homo sapiens
tttaaattttgcaag

SEQ ID NO: 335058 - DNA, 15 bp, Homo sapiens
ctttaaattttgcaa

SEQ ID NO: 335059 - DNA, 15 bp, Homo sapiens
tctttaaattttgca

SEQ ID NO: 335060 - DNA, 15 bp, Homo sapiens
ttctttaaattttgc

SEQ ID NO: 335061 - DNA, 15 bp, Homo sapiens
gttctttaaattttg

SEQ ID NO: 335062 - DNA, 15 bp, Homo sapiens
cgttctttaaatttt

SEQ ID NO: 335063 - DNA, 15 bp, Homo sapiens
acgttctttaaattt

SEQ ID NO: 335064 - DNA, 15 bp, Homo sapiens
cacgttctttaaatt

SEQ ID NO: 335065 - DNA, 15 bp, Homo sapiens
ccacgttctttaaat

SEQ ID NO: 335066 - DNA, 15 bp, Homo sapiens
gccacgttctttaaa

SEQ ID NO: 335067 - DNA, 15 bp, Homo sapiens
agccacgttctttaa

SEQ ID NO: 335068 - DNA, 15 bp, Homo sapiens
cagccacgttcttta

SEQ ID NO: 335069 - DNA, 15 bp, Homo sapiens
acagccacgttcttt

SEQ ID NO: 335070 - DNA, 15 bp, Homo sapiens
aacagccacgttctt

SEQ ID NO: 335071 - DNA, 15 bp, Homo sapiens
gaacagccacgttct

SEQ ID NO: 335072 - DNA, 15 bp, Homo sapiens
ggaacagccacgttc

SEQ ID NO: 335073 - DNA, 15 bp, Homo sapiens
aggaacagccacgtt

SEQ ID NO: 335074 - DNA, 15 bp, Homo sapiens
caggaacagccacgt

SEQ ID NO: 335075 - DNA, 15 bp, Homo sapiens
tcaggaacagccacg

SEQ ID NO: 335076 - DNA, 15 bp, Homo sapiens
ttcaggaacagccac

SEQ ID NO: 335077 - DNA, 15 bp, Homo sapiens
cttcaggaacagcca

SEQ ID NO: 335078 - DNA, 15 bp, Homo sapiens
tcttcaggaacagcc

SEQ ID NO: 335079 - DNA, 15 bp, Homo sapiens
gtcttcaggaacagc

SEQ ID NO: 335080 - DNA, 15 bp, Homo sapiens
tgtcttcaggaacag

SEQ ID NO: 335081 - DNA, 15 bp, Homo sapiens
atgtcttcaggaaca

SEQ ID NO: 335082 - DNA, 15 bp, Homo sapiens
aatgtcttcaggaac

SEQ ID NO: 335083 - DNA, 15 bp, Homo sapiens
taatgtcttcaggaa

SEQ ID NO: 335084 - DNA, 15 bp, Homo sapiens
gtaatgtcttcagga

SEQ ID NO: 335085 - DNA, 15 bp, Homo sapiens
ggtaatgtcttcagg

SEQ ID NO: 335086 - DNA, 15 bp, Homo sapiens
tggtaatgtcttcag

SEQ ID NO: 335087 - DNA, 15 bp, Homo sapiens
atggtaatgtcttca

SEQ ID NO: 335088 - DNA, 15 bp, Homo sapiens
aatggtaatgtcttc

SEQ ID NO: 335089 - DNA, 15 bp, Homo sapiens
gaatggtaatgtctt

SEQ ID NO: 335090 - DNA, 15 bp, Homo sapiens
agaatggtaatgtct

SEQ ID NO: 335091 - DNA, 15 bp, Homo sapiens
cagaatggtaatgtc

SEQ ID NO: 335092 - DNA, 15 bp, Homo sapiens
acagaatggtaatgt

SEQ ID NO: 335093 - DNA, 15 bp, Homo sapiens
tacagaatggtaatg

SEQ ID NO: 335094 - DNA, 15 bp, Homo sapiens
ttacagaatggtaat

SEQ ID NO: 335095 - DNA, 15 bp, Homo sapiens
attacagaatggtaa

SEQ ID NO: 335096 - DNA, 15 bp, Homo sapiens
cattacagaatggta

SEQ ID NO: 335097 - DNA, 15 bp, Homo sapiens
gcattacagaatggt

SEQ ID NO: 335098 - DNA, 15 bp, Homo sapiens
tgcattacagaatgg

SEQ ID NO: 335099 - DNA, 15 bp, Homo sapiens
ctgcattacagaatg

SEQ ID NO: 335100 - DNA, 15 bp, Homo sapiens
actgcattacagaat

SEQ ID NO: 335101 - DNA, 15 bp, Homo sapiens
aactgcattacagaa

SEQ ID NO: 335102 - DNA, 15 bp, Homo sapiens
taactgcattacaga

SEQ ID NO: 335103 - DNA, 15 bp, Homo sapiens
ctaactgcattacag

SEQ ID NO: 335104 - DNA, 15 bp, Homo sapiens
cctaactgcattaca

SEQ ID NO: 335105 - DNA, 15 bp, Homo sapiens
tcctaactgcattac

SEQ ID NO: 335106 - DNA, 15 bp, Homo sapiens
ctcctaactgcatta

SEQ ID NO: 335107 - DNA, 15 bp, Homo sapiens
actcctaactgcatt

SEQ ID NO: 335108 - DNA, 15 bp, Homo sapiens
cactcctaactgcat

SEQ ID NO: 335109 - DNA, 15 bp, Homo sapiens
ccactcctaactgca

SEQ ID NO: 335110 - DNA, 15 bp, Homo sapiens
cccactcctaactgc

SEQ ID NO: 335111 - DNA, 15 bp, Homo sapiens
acccactcctaactg

SEQ ID NO: 335112 - DNA, 15 bp, Homo sapiens
tacccactcctaact

SEQ ID NO: 335113 - DNA, 15 bp, Homo sapiens
atacccactcctaac

SEQ ID NO: 335114 - DNA, 15 bp, Homo sapiens
catacccactcctaa

SEQ ID NO: 335115 - DNA, 15 bp, Homo sapiens
ccatacccactccta

SEQ ID NO: 335116 - DNA, 15 bp, Homo sapiens
cccatacccactcct

SEQ ID NO: 335117 - DNA, 15 bp, Homo sapiens
tcccatacccactcc

SEQ ID NO: 335118 - DNA, 15 bp, Homo sapiens
ctcccatacccactc

SEQ ID NO: 335119 - DNA, 15 bp, Homo sapiens
tctcccatacccact

SEQ ID NO: 335120 - DNA, 15 bp, Homo sapiens
ctctcccatacccac

SEQ ID NO: 335121 - DNA, 15 bp, Homo sapiens
tctctcccataccca

SEQ ID NO: 335122 - DNA, 15 bp, Homo sapiens
ctctctcccataccc

SEQ ID NO: 335123 - DNA, 15 bp, Homo sapiens
tctctctcccatacc

SEQ ID NO: 335124 - DNA, 15 bp, Homo sapiens
ctctctctcccatac

SEQ ID NO: 335125 - DNA, 15 bp, Homo sapiens
actctctctcccata

SEQ ID NO: 335126 - DNA, 15 bp, Homo sapiens
tactctctctcccat

SEQ ID NO: 335127 - DNA, 15 bp, Homo sapiens
gtactctctctccca

SEQ ID NO: 335128 - DNA, 15 bp, Homo sapiens
agtactctctctccc

SEQ ID NO: 335129 - DNA, 15 bp, Homo sapiens
aagtactctctctcc

SEQ ID NO: 335130 - DNA, 15 bp, Homo sapiens
aaagtactctctctc

SEQ ID NO: 335131 - DNA, 15 bp, Homo sapiens
aaaagtactctctct

SEQ ID NO: 335132 - DNA, 15 bp, Homo sapiens
taaaagtactctctc

SEQ ID NO: 335133 - DNA, 15 bp, Homo sapiens
ctaaaagtactctct

SEQ ID NO: 335134 - DNA, 15 bp, Homo sapiens
tctaaaagtactctc

SEQ ID NO: 335135 - DNA, 15 bp, Homo sapiens
ctctaaaagtactct

SEQ ID NO: 335136 - DNA, 15 bp, Homo sapiens
gctctaaaagtactc

SEQ ID NO: 335137 - DNA, 15 bp, Homo sapiens
agctctaaaagtact

SEQ ID NO: 335138 - DNA, 15 bp, Homo sapiens
cagctctaaaagtac

SEQ ID NO: 335139 - DNA, 15 bp, Homo sapiens
acagctctaaaagta

SEQ ID NO: 335140 - DNA, 15 bp, Homo sapiens
aacagctctaaaagt

SEQ ID NO: 335141 - DNA, 15 bp, Homo sapiens
gaacagctctaaaag

SEQ ID NO: 335142 - DNA, 15 bp, Homo sapiens
tgaacagctctaaaa

SEQ ID NO: 335143 - DNA, 15 bp, Homo sapiens
atgaacagctctaaa

SEQ ID NO: 335144 - DNA, 15 bp, Homo sapiens
tatgaacagctctaa

SEQ ID NO: 335145 - DNA, 15 bp, Homo sapiens
atatgaacagctcta

SEQ ID NO: 335146 - DNA, 15 bp, Homo sapiens
aatatgaacagctct

SEQ ID NO: 335147 - DNA, 15 bp, Homo sapiens
taatatgaacagctc

SEQ ID NO: 335148 - DNA, 15 bp, Homo sapiens
gtaatatgaacagct

SEQ ID NO: 335149 - DNA, 15 bp, Homo sapiens
agtaatatgaacagc

SEQ ID NO: 335150 - DNA, 15 bp, Homo sapiens
aagtaatatgaacag

SEQ ID NO: 335151 - DNA, 15 bp, Homo sapiens
aaagtaatatgaaca

SEQ ID NO: 335152 - DNA, 15 bp, Homo sapiens
aaaagtaatatgaac

SEQ ID NO: 335153 - DNA, 15 bp, Homo sapiens
taaaagtaatatgaa

SEQ ID NO: 335154 - DNA, 15 bp, Homo sapiens
ataaaagtaatatga

SEQ ID NO: 335155 - DNA, 15 bp, Homo sapiens
aataaaagtaatatg

SEQ ID NO: 335156 - DNA, 15 bp, Homo sapiens
gaataaaagtaatat

SEQ ID NO: 335157 - DNA, 15 bp, Homo sapiens
agaataaaagtaata

SEQ ID NO: 335158 - DNA, 15 bp, Homo sapiens
tagaataaaagtaat

SEQ ID NO: 335159 - DNA, 15 bp, Homo sapiens
ttagaataaaagtaa

SEQ ID NO: 335160 - DNA, 15 bp, Homo sapiens
attagaataaaagta

SEQ ID NO: 335161 - DNA, 15 bp, Homo sapiens
gattagaataaaagt

SEQ ID NO: 335162 - DNA, 15 bp, Homo sapiens
agattagaataaaag

SEQ ID NO: 335163 - DNA, 15 bp, Homo sapiens
aagattagaataaaa

SEQ ID NO: 335164 - DNA, 15 bp, Homo sapiens
caagattagaataaa

SEQ ID NO: 335165 - DNA, 15 bp, Homo sapiens
gcaagattagaataa

SEQ ID NO: 335166 - DNA, 15 bp, Homo sapiens
agcaagattagaata

SEQ ID NO: 335167 - DNA, 15 bp, Homo sapiens
gagcaagattagaat

SEQ ID NO: 335168 - DNA, 15 bp, Homo sapiens
agagcaagattagaa

SEQ ID NO: 335169 - DNA, 15 bp, Homo sapiens
aagagcaagattaga

SEQ ID NO: 335170 - DNA, 15 bp, Homo sapiens
caagagcaagattag

SEQ ID NO: 335171 - DNA, 15 bp, Homo sapiens
acaagagcaagatta

SEQ ID NO: 335172 - DNA, 15 bp, Homo sapiens
cacaagagcaagatt

SEQ ID NO: 335173 - DNA, 15 bp, Homo sapiens
gcacaagagcaagat

SEQ ID NO: 335174 - DNA, 15 bp, Homo sapiens
cgcacaagagcaaga

SEQ ID NO: 335175 - DNA, 15 bp, Homo sapiens
ccgcacaagagcaag

SEQ ID NO: 335176 - DNA, 15 bp, Homo sapiens
accgcacaagagcaa

SEQ ID NO: 335177 - DNA, 15 bp, Homo sapiens
taccgcacaagagca

SEQ ID NO: 335178 - DNA, 15 bp, Homo sapiens
ttaccgcacaagagc

SEQ ID NO: 335179 - DNA, 15 bp, Homo sapiens
attaccgcacaagag

SEQ ID NO: 335180 - DNA, 15 bp, Homo sapiens
cattaccgcacaaga

SEQ ID NO: 335181 - DNA, 15 bp, Homo sapiens
ccattaccgcacaag

SEQ ID NO: 335182 - DNA, 15 bp, Homo sapiens
accattaccgcacaa

SEQ ID NO: 335183 - DNA, 15 bp, Homo sapiens
caccattaccgcaca

SEQ ID NO: 335184 - DNA, 15 bp, Homo sapiens
acaccattaccgcac

SEQ ID NO: 335185 - DNA, 15 bp, Homo sapiens
aacaccattaccgca

SEQ ID NO: 335186 - DNA, 15 bp, Homo sapiens
aaacaccattaccgc

SEQ ID NO: 335187 - DNA, 15 bp, Homo sapiens
caaacaccattaccg

SEQ ID NO: 335188 - DNA, 15 bp, Homo sapiens
ccaaacaccattacc

SEQ ID NO: 335189 - DNA, 15 bp, Homo sapiens
cccaaacaccattac

SEQ ID NO: 335190 - DNA, 15 bp, Homo sapiens
gcccaaacaccatta

SEQ ID NO: 335191 - DNA, 15 bp, Homo sapiens
agcccaaacaccatt

SEQ ID NO: 335192 - DNA, 15 bp, Homo sapiens
tagcccaaacaccat

SEQ ID NO: 335193 - DNA, 15 bp, Homo sapiens
ttagcccaaacacca

SEQ ID NO: 335194 - DNA, 15 bp, Homo sapiens
tttagcccaaacacc

SEQ ID NO: 335195 - DNA, 15 bp, Homo sapiens
gtttagcccaaacac

SEQ ID NO: 335196 - DNA, 15 bp, Homo sapiens
tgtttagcccaaaca

SEQ ID NO: 335197 - DNA, 15 bp, Homo sapiens
atgtttagcccaaac

SEQ ID NO: 335198 - DNA, 15 bp, Homo sapiens
catgtttagcccaaa

SEQ ID NO: 335199 - DNA, 15 bp, Homo sapiens
gcatgtttagcccaa

SEQ ID NO: 335200 - DNA, 15 bp, Homo sapiens
agcatgtttagccca

SEQ ID NO: 335201 - DNA, 15 bp, Homo sapiens
aagcatgtttagccc

SEQ ID NO: 335202 - DNA, 15 bp, Homo sapiens
aaagcatgtttagcc

SEQ ID NO: 335203 - DNA, 15 bp, Homo sapiens
aaaagcatgtttagc

SEQ ID NO: 335204 - DNA, 15 bp, Homo sapiens
aaaaagcatgtttag

SEQ ID NO: 335205 - DNA, 15 bp, Homo sapiens
aaaaaagcatgttta

SEQ ID NO: 335206 - DNA, 15 bp, Homo sapiens
aaaaaaagcatgttt

SEQ ID NO: 335207 - DNA, 15 bp, Homo sapiens
caaaaaaagcatgtt

SEQ ID NO: 335208 - DNA, 15 bp, Homo sapiens
acaaaaaaagcatgt

SEQ ID NO: 335209 - DNA, 15 bp, Homo sapiens
tacaaaaaaagcatg

SEQ ID NO: 335210 - DNA, 15 bp, Homo sapiens
atacaaaaaaagcat

SEQ ID NO: 335211 - DNA, 15 bp, Homo sapiens
catacaaaaaaagca

SEQ ID NO: 335212 - DNA, 15 bp, Homo sapiens
acatacaaaaaaagc

SEQ ID NO: 335213 - DNA, 15 bp, Homo sapiens
tacatacaaaaaaag

SEQ ID NO: 335214 - DNA, 15 bp, Homo sapiens
atacatacaaaaaaa

SEQ ID NO: 335215 - DNA, 15 bp, Homo sapiens
catacatacaaaaaa

SEQ ID NO: 335216 - DNA, 15 bp, Homo sapiens
acatacatacaaaaa

SEQ ID NO: 335217 - DNA, 15 bp, Homo sapiens
tacatacatacaaaa

SEQ ID NO: 335218 - DNA, 15 bp, Homo sapiens
ctacatacatacaaa

SEQ ID NO: 335219 - DNA, 15 bp, Homo sapiens
actacatacatacaa

SEQ ID NO: 335220 - DNA, 15 bp, Homo sapiens
tactacatacataca

SEQ ID NO: 335221 - DNA, 15 bp, Homo sapiens
atactacatacatac

SEQ ID NO: 335222 - DNA, 15 bp, Homo sapiens
aatactacatacata

SEQ ID NO: 335223 - DNA, 15 bp, Homo sapiens
caatactacatacat

SEQ ID NO: 335224 - DNA, 15 bp, Homo sapiens
tcaatactacataca

SEQ ID NO: 335225 - DNA, 15 bp, Homo sapiens
ctcaatactacatac

SEQ ID NO: 335226 - DNA, 15 bp, Homo sapiens
tctcaatactacata

SEQ ID NO: 335227 - DNA, 15 bp, Homo sapiens
gtctcaatactacat

SEQ ID NO: 335228 - DNA, 15 bp, Homo sapiens
tgtctcaatactaca

SEQ ID NO: 335229 - DNA, 15 bp, Homo sapiens
gtgtctcaatactac

SEQ ID NO: 335230 - DNA, 15 bp, Homo sapiens
tgtgtctcaatacta

SEQ ID NO: 335231 - DNA, 15 bp, Homo sapiens
ttgtgtctcaatact

SEQ ID NO: 335232 - DNA, 15 bp, Homo sapiens
tttgtgtctcaatac

SEQ ID NO: 335233 - DNA, 15 bp, Homo sapiens
gtttgtgtctcaata

SEQ ID NO: 335234 - DNA, 15 bp, Homo sapiens
agtttgtgtctcaat

SEQ ID NO: 335235 - DNA, 15 bp, Homo sapiens
aagtttgtgtctcaa

SEQ ID NO: 335236 - DNA, 15 bp, Homo sapiens
taagtttgtgtctca

SEQ ID NO: 335237 - DNA, 15 bp, Homo sapiens
ttaagtttgtgtctc

SEQ ID NO: 335238 - DNA, 15 bp, Homo sapiens
gttaagtttgtgtct

SEQ ID NO: 335239 - DNA, 15 bp, Homo sapiens
tgttaagtttgtgtc

SEQ ID NO: 335240 - DNA, 15 bp, Homo sapiens
gtgttaagtttgtgt

SEQ ID NO: 335241 - DNA, 15 bp, Homo sapiens
agtgttaagtttgtg

SEQ ID NO: 335242 - DNA, 15 bp, Homo sapiens
aagtgttaagtttgt

SEQ ID NO: 335243 - DNA, 15 bp, Homo sapiens
gaagtgttaagtttg

SEQ ID NO: 335244 - DNA, 15 bp, Homo sapiens
agaagtgttaagttt

SEQ ID NO: 335245 - DNA, 15 bp, Homo sapiens
tagaagtgttaagtt

SEQ ID NO: 335246 - DNA, 15 bp, Homo sapiens
ctagaagtgttaagt

SEQ ID NO: 335247 - DNA, 15 bp, Homo sapiens
gctagaagtgttaag

SEQ ID NO: 335248 - DNA, 15 bp, Homo sapiens
tgctagaagtgttaa

SEQ ID NO: 335249 - DNA, 15 bp, Homo sapiens
atgctagaagtgtta

SEQ ID NO: 335250 - DNA, 15 bp, Homo sapiens
tatgctagaagtgtt

SEQ ID NO: 335251 - DNA, 15 bp, Homo sapiens
ttatgctagaagtgt

SEQ ID NO: 335252 - DNA, 15 bp, Homo sapiens
attatgctagaagtg

SEQ ID NO: 335253 - DNA, 15 bp, Homo sapiens
cattatgctagaagt

SEQ ID NO: 335254 - DNA, 15 bp, Homo sapiens
tcattatgctagaag

SEQ ID NO: 335255 - DNA, 15 bp, Homo sapiens
ttcattatgctagaa

SEQ ID NO: 335256 - DNA, 15 bp, Homo sapiens
cttcattatgctaga

SEQ ID NO: 335257 - DNA, 15 bp, Homo sapiens
gcttcattatgctag

SEQ ID NO: 335258 - DNA, 15 bp, Homo sapiens
tgcttcattatgcta

SEQ ID NO: 335259 - DNA, 15 bp, Homo sapiens
ctgcttcattatgct

SEQ ID NO: 335260 - DNA, 15 bp, Homo sapiens
tctgcttcattatgc

SEQ ID NO: 335261 - DNA, 15 bp, Homo sapiens
atctgcttcattatg

SEQ ID NO: 335262 - DNA, 15 bp, Homo sapiens
tatctgcttcattat

SEQ ID NO: 335263 - DNA, 15 bp, Homo sapiens
atatctgcttcatta

SEQ ID NO: 335264 - DNA, 15 bp, Homo sapiens
catatctgcttcatt

SEQ ID NO: 335265 - DNA, 15 bp, Homo sapiens
acatatctgcttcat

SEQ ID NO: 335266 - DNA, 15 bp, Homo sapiens
aacatatctgcttca

SEQ ID NO: 335267 - DNA, 15 bp, Homo sapiens
caacatatctgcttc

SEQ ID NO: 335268 - DNA, 15 bp, Homo sapiens
gcaacatatctgctt

SEQ ID NO: 335269 - DNA, 15 bp, Homo sapiens
tgcaacatatctgct

SEQ ID NO: 335270 - DNA, 15 bp, Homo sapiens
ctgcaacatatctgc

SEQ ID NO: 335271 - DNA, 15 bp, Homo sapiens
actgcaacatatctg

SEQ ID NO: 335272 - DNA, 15 bp, Homo sapiens
aactgcaacatatct

SEQ ID NO: 335273 - DNA, 15 bp, Homo sapiens
caactgcaacatatc

SEQ ID NO: 335274 - DNA, 15 bp, Homo sapiens
acaactgcaacatat

SEQ ID NO: 335275 - DNA, 15 bp, Homo sapiens
gacaactgcaacata

SEQ ID NO: 335276 - DNA, 15 bp, Homo sapiens
tgacaactgcaacat

SEQ ID NO: 335277 - DNA, 15 bp, Homo sapiens
atgacaactgcaaca

SEQ ID NO: 335278 - DNA, 15 bp, Homo sapiens
catgacaactgcaac

SEQ ID NO: 335279 - DNA, 15 bp, Homo sapiens
acatgacaactgcaa

SEQ ID NO: 335280 - DNA, 15 bp, Homo sapiens
aacatgacaactgca

SEQ ID NO: 335281 - DNA, 15 bp, Homo sapiens
gaacatgacaactgc

SEQ ID NO: 335282 - DNA, 15 bp, Homo sapiens
agaacatgacaactg

SEQ ID NO: 335283 - DNA, 15 bp, Homo sapiens
aagaacatgacaact

SEQ ID NO: 335284 - DNA, 15 bp, Homo sapiens
caagaacatgacaac

SEQ ID NO: 335285 - DNA, 15 bp, Homo sapiens
tcaagaacatgacaa

SEQ ID NO: 335286 - DNA, 15 bp, Homo sapiens
ttcaagaacatgaca

SEQ ID NO: 335287 - DNA, 15 bp, Homo sapiens
cttcaagaacatgac

SEQ ID NO: 335288 - DNA, 15 bp, Homo sapiens
ccttcaagaacatga

SEQ ID NO: 335289 - DNA, 15 bp, Homo sapiens
accttcaagaacatg

SEQ ID NO: 335290 - DNA, 15 bp, Homo sapiens
aaccttcaagaacat

SEQ ID NO: 335291 - DNA, 15 bp, Homo sapiens
aaaccttcaagaaca

SEQ ID NO: 335292 - DNA, 15 bp, Homo sapiens
gaaaccttcaagaac

SEQ ID NO: 335293 - DNA, 15 bp, Homo sapiens
agaaaccttcaagaa

SEQ ID NO: 335294 - DNA, 15 bp, Homo sapiens
aagaaaccttcaaga

SEQ ID NO: 335295 - DNA, 15 bp, Homo sapiens
aaagaaaccttcaag

SEQ ID NO: 335296 - DNA, 15 bp, Homo sapiens
aaaagaaaccttcaa

SEQ ID NO: 335297 - DNA, 15 bp, Homo sapiens
aaaaagaaaccttca

SEQ ID NO: 335298 - DNA, 15 bp, Homo sapiens
aaaaaagaaaccttc

SEQ ID NO: 335299 - DNA, 15 bp, Homo sapiens
aaaaaaagaaacctt

SEQ ID NO: 335300 - DNA, 15 bp, Homo sapiens
aaaaaaaagaaacct

SEQ ID NO: 335301 - DNA, 15 bp, Homo sapiens
aaaaaaaaagaaacc

SEQ ID NO: 335302 - DNA, 15 bp, Homo sapiens
aaaaaaaaaagaaac

SEQ ID NO: 335303 - DNA, 15 bp, Homo sapiens
cgagactccgtctca

SEQ ID NO: 335304 - DNA, 15 bp, Homo sapiens
gcgagactccgtctc

SEQ ID NO: 335305 - DNA, 15 bp, Homo sapiens
agcgagactccgtct

SEQ ID NO: 335306 - DNA, 15 bp, Homo sapiens
gagcgagactccgtc

SEQ ID NO: 335307 - DNA, 15 bp, Homo sapiens
agagcgagactccgt

SEQ ID NO: 335308 - DNA, 15 bp, Homo sapiens
cagagcgagactccg

SEQ ID NO: 335309 - DNA, 15 bp, Homo sapiens
acagagcgagactcc

SEQ ID NO: 335310 - DNA, 15 bp, Homo sapiens
gacagagcgagactc

SEQ ID NO: 335311 - DNA, 15 bp, Homo sapiens
cgacagagcgagact

SEQ ID NO: 335312 - DNA, 15 bp, Homo sapiens
gcgacagagcgagac

SEQ ID NO: 335313 - DNA, 15 bp, Homo sapiens
agcgacagagcgaga

SEQ ID NO: 335314 - DNA, 15 bp, Homo sapiens
tagcgacagagcgag

SEQ ID NO: 335315 - DNA, 15 bp, Homo sapiens
ctagcgacagagcga

SEQ ID NO: 335316 - DNA, 15 bp, Homo sapiens
cctagcgacagagcg

SEQ ID NO: 335317 - DNA, 15 bp, Homo sapiens
gcctagcgacagagc

SEQ ID NO: 335318 - DNA, 15 bp, Homo sapiens
agcctagcgacagag

SEQ ID NO: 335319 - DNA, 15 bp, Homo sapiens
cagcctagcgacaga

SEQ ID NO: 335320 - DNA, 15 bp, Homo sapiens
ccagcctagcgacag

SEQ ID NO: 335321 - DNA, 15 bp, Homo sapiens
tccagcctagcgaca

SEQ ID NO: 335322 - DNA, 15 bp, Homo sapiens
ctccagcctagcgac

SEQ ID NO: 335323 - DNA, 15 bp, Homo sapiens
actccagcctagcga

SEQ ID NO: 335324 - DNA, 15 bp, Homo sapiens
cactccagcctagcg

SEQ ID NO: 335325 - DNA, 15 bp, Homo sapiens
gcactccagcctagc

SEQ ID NO: 335326 - DNA, 15 bp, Homo sapiens
gagatcgcgccactg

SEQ ID NO: 335327 - DNA, 15 bp, Homo sapiens
cgagatcgcgccact

SEQ ID NO: 335328 - DNA, 15 bp, Homo sapiens
ccgagatcgcgccac

SEQ ID NO: 335329 - DNA, 15 bp, Homo sapiens
gccgagatcgcgcca

SEQ ID NO: 335330 - DNA, 15 bp, Homo sapiens
agccgagatcgcgcc

SEQ ID NO: 335331 - DNA, 15 bp, Homo sapiens
gagccgagatcgcgc

SEQ ID NO: 335332 - DNA, 15 bp, Homo sapiens
tgagccgagatcgcg

SEQ ID NO: 335333 - DNA, 15 bp, Homo sapiens
ctgagccgagatcgc

SEQ ID NO: 335334 - DNA, 15 bp, Homo sapiens
actgagccgagatcg

SEQ ID NO: 335335 - DNA, 15 bp, Homo sapiens
cactgagccgagatc

SEQ ID NO: 335336 - DNA, 15 bp, Homo sapiens
gcactgagccgagat

SEQ ID NO: 335337 - DNA, 15 bp, Homo sapiens
tgcactgagccgaga

SEQ ID NO: 335338 - DNA, 15 bp, Homo sapiens
ttgcactgagccgag

SEQ ID NO: 335339 - DNA, 15 bp, Homo sapiens
gttgcactgagccga

SEQ ID NO: 335340 - DNA, 15 bp, Homo sapiens
ggttgcactgagccg

SEQ ID NO: 335341 - DNA, 15 bp, Homo sapiens
aggttgcactgagcc

SEQ ID NO: 335342 - DNA, 15 bp, Homo sapiens
gaggttgcactgagc

SEQ ID NO: 335343 - DNA, 15 bp, Homo sapiens
ggaggttgcactgag

SEQ ID NO: 335344 - DNA, 15 bp, Homo sapiens
cggaggttgcactga

SEQ ID NO: 335345 - DNA, 15 bp, Homo sapiens
gcggaggttgcactg

SEQ ID NO: 335346 - DNA, 15 bp, Homo sapiens
ggcggaggttgcact

SEQ ID NO: 335347 - DNA, 15 bp, Homo sapiens
aggcggaggttgcac

SEQ ID NO: 335348 - DNA, 15 bp, Homo sapiens
gcgggaggcggaggt

SEQ ID NO: 335349 - DNA, 15 bp, Homo sapiens
cgcgggaggcggagg

SEQ ID NO: 335350 - DNA, 15 bp, Homo sapiens
acgcgggaggcggag

SEQ ID NO: 335351 - DNA, 15 bp, Homo sapiens
aacgcgggaggcgga

SEQ ID NO: 335352 - DNA, 15 bp, Homo sapiens
gaacgcgggaggcgg

SEQ ID NO: 335353 - DNA, 15 bp, Homo sapiens
tgaacgcgggaggcg

SEQ ID NO: 335354 - DNA, 15 bp, Homo sapiens
ttgaacgcgggaggc

SEQ ID NO: 335355 - DNA, 15 bp, Homo sapiens
gttgaacgcgggagg

SEQ ID NO: 335356 - DNA, 15 bp, Homo sapiens
ggttgaacgcgggag

SEQ ID NO: 335357 - DNA, 15 bp, Homo sapiens
cggttgaacgcggga

SEQ ID NO: 335358 - DNA, 15 bp, Homo sapiens
tcggttgaacgcggg

SEQ ID NO: 335359 - DNA, 15 bp, Homo sapiens
atcggttgaacgcgg

SEQ ID NO: 335360 - DNA, 15 bp, Homo sapiens
aatcggttgaacgcg

SEQ ID NO: 335361 - DNA, 15 bp, Homo sapiens
gaatcggttgaacgc

SEQ ID NO: 335362 - DNA, 15 bp, Homo sapiens
agaatcggttgaacg

SEQ ID NO: 335363 - DNA, 15 bp, Homo sapiens
gagaatcggttgaac

SEQ ID NO: 335364 - DNA, 15 bp, Homo sapiens
ggagaatcggttgaa

SEQ ID NO: 335365 - DNA, 15 bp, Homo sapiens
aggagaatcggttga

SEQ ID NO: 335366 - DNA, 15 bp, Homo sapiens
aaggagaatcggttg

SEQ ID NO: 335367 - DNA, 15 bp, Homo sapiens
gaaggagaatcggtt

SEQ ID NO: 335368 - DNA, 15 bp, Homo sapiens
tgaaggagaatcggt

SEQ ID NO: 335369 - DNA, 15 bp, Homo sapiens
ctgaaggagaatcgg

SEQ ID NO: 335370 - DNA, 15 bp, Homo sapiens
gctgaaggagaatcg

SEQ ID NO: 335371 - DNA, 15 bp, Homo sapiens
ggctgaaggagaatc

SEQ ID NO: 335372 - DNA, 15 bp, Homo sapiens
aggctgaaggagaat

SEQ ID NO: 335373 - DNA, 15 bp, Homo sapiens
caggctgaaggagaa

SEQ ID NO: 335374 - DNA, 15 bp, Homo sapiens
gcaggctgaaggaga

SEQ ID NO: 335375 - DNA, 15 bp, Homo sapiens
ggcaggctgaaggag

SEQ ID NO: 335376 - DNA, 15 bp, Homo sapiens
cggcaggctgaagga

SEQ ID NO: 335377 - DNA, 15 bp, Homo sapiens
tcggcaggctgaagg

SEQ ID NO: 335378 - DNA, 15 bp, Homo sapiens
ctcggcaggctgaag

SEQ ID NO: 335379 - DNA, 15 bp, Homo sapiens
actcggcaggctgaa

SEQ ID NO: 335380 - DNA, 15 bp, Homo sapiens
tactcggcaggctga

SEQ ID NO: 335381 - DNA, 15 bp, Homo sapiens
ctactcggcaggctg

SEQ ID NO: 335382 - DNA, 15 bp, Homo sapiens
gctactcggcaggct

SEQ ID NO: 335383 - DNA, 15 bp, Homo sapiens
agctactcggcaggc

SEQ ID NO: 335384 - DNA, 15 bp, Homo sapiens
cagctactcggcagg

SEQ ID NO: 335385 - DNA, 15 bp, Homo sapiens
ccagctactcggcag

SEQ ID NO: 335386 - DNA, 15 bp, Homo sapiens
cccagctactcggca

SEQ ID NO: 335387 - DNA, 15 bp, Homo sapiens
tcccagctactcggc

SEQ ID NO: 335388 - DNA, 15 bp, Homo sapiens
tctgtagtcccagct

SEQ ID NO: 335389 - DNA, 15 bp, Homo sapiens
gtctgtagtcccagc

SEQ ID NO: 335390 - DNA, 15 bp, Homo sapiens
tgtctgtagtcccag

SEQ ID NO: 335391 - DNA, 15 bp, Homo sapiens
gtgtctgtagtccca

SEQ ID NO: 335392 - DNA, 15 bp, Homo sapiens
ggtgtctgtagtccc

SEQ ID NO: 335393 - DNA, 15 bp, Homo sapiens
gggtgtctgtagtcc

SEQ ID NO: 335394 - DNA, 15 bp, Homo sapiens
cgggtgtctgtagtc

SEQ ID NO: 335395 - DNA, 15 bp, Homo sapiens
gcgggtgtctgtagt

SEQ ID NO: 335396 - DNA, 15 bp, Homo sapiens
ggcgggtgtctgtag

SEQ ID NO: 335397 - DNA, 15 bp, Homo sapiens
tggcgggtgtctgta

SEQ ID NO: 335398 - DNA, 15 bp, Homo sapiens
gtggcgggtgtctgt

SEQ ID NO: 335399 - DNA, 15 bp, Homo sapiens
ggtggcgggtgtctg

SEQ ID NO: 335400 - DNA, 15 bp, Homo sapiens
tggtggcgggtgtct

SEQ ID NO: 335401 - DNA, 15 bp, Homo sapiens
gtggtggcgggtgtc

SEQ ID NO: 335402 - DNA, 15 bp, Homo sapiens
cgtggtggcgggtgt

SEQ ID NO: 335403 - DNA, 15 bp, Homo sapiens
gcgtggtggcgggtg

SEQ ID NO: 335404 - DNA, 15 bp, Homo sapiens
ggcgtggtggcgggt

SEQ ID NO: 335405 - DNA, 15 bp, Homo sapiens
gggcgtggtggcggg

SEQ ID NO: 335406 - DNA, 15 bp, Homo sapiens
tgggcgtggtggcgg

SEQ ID NO: 335407 - DNA, 15 bp, Homo sapiens
ctgggcgtggtggcg

SEQ ID NO: 335408 - DNA, 15 bp, Homo sapiens
gctgggcgtggtggc

SEQ ID NO: 335409 - DNA, 15 bp, Homo sapiens
agctgggcgtggtgg

SEQ ID NO: 335410 - DNA, 15 bp, Homo sapiens
tagctgggcgtggtg

SEQ ID NO: 335411 - DNA, 15 bp, Homo sapiens
ttagctgggcgtggt

SEQ ID NO: 335412 - DNA, 15 bp, Homo sapiens
attagctgggcgtgg

SEQ ID NO: 335413 - DNA, 15 bp, Homo sapiens
aattagctgggcgtg

SEQ ID NO: 335414 - DNA, 15 bp, Homo sapiens
aaattagctgggcgt

SEQ ID NO: 335415 - DNA, 15 bp, Homo sapiens
aaaattagctgggcg

SEQ ID NO: 335416 - DNA, 15 bp, Homo sapiens
cacaaaaattagctg

SEQ ID NO: 335417 - DNA, 15 bp, Homo sapiens
acacaaaaattagct

SEQ ID NO: 335418 - DNA, 15 bp, Homo sapiens
aacacaaaaattagc

SEQ ID NO: 335419 - DNA, 15 bp, Homo sapiens
aaacacaaaaattag

SEQ ID NO: 335420 - DNA, 15 bp, Homo sapiens
aaaacacaaaaatta

SEQ ID NO: 335421 - DNA, 15 bp, Homo sapiens
aaaaacacaaaaatt

SEQ ID NO: 335422 - DNA, 15 bp, Homo sapiens
taaaaacacaaaaat

SEQ ID NO: 335423 - DNA, 15 bp, Homo sapiens
ctaaaaacacaaaaa

SEQ ID NO: 335424 - DNA, 15 bp, Homo sapiens
gctaaaaacacaaaa

SEQ ID NO: 335425 - DNA, 15 bp, Homo sapiens
tgctaaaaacacaaa

SEQ ID NO: 335426 - DNA, 15 bp, Homo sapiens
ctgctaaaaacacaa

SEQ ID NO: 335427 - DNA, 15 bp, Homo sapiens
tctgctaaaaacaca

SEQ ID NO: 335428 - DNA, 15 bp, Homo sapiens
ctctgctaaaaacac

SEQ ID NO: 335429 - DNA, 15 bp, Homo sapiens
tctctgctaaaaaca

SEQ ID NO: 335430 - DNA, 15 bp, Homo sapiens
gtctctgctaaaaac

SEQ ID NO: 335431 - DNA, 15 bp, Homo sapiens
cgtctctgctaaaaa

SEQ ID NO: 335432 - DNA, 15 bp, Homo sapiens
ccgtctctgctaaaa

SEQ ID NO: 335433 - DNA, 15 bp, Homo sapiens
cccgtctctgctaaa

SEQ ID NO: 335434 - DNA, 15 bp, Homo sapiens
ccccgtctctgctaa

SEQ ID NO: 335435 - DNA, 15 bp, Homo sapiens
accccgtctctgcta

SEQ ID NO: 335436 - DNA, 15 bp, Homo sapiens
aaccccgtctctgct

SEQ ID NO: 335437 - DNA, 15 bp, Homo sapiens
aaaccccgtctctgc

SEQ ID NO: 335438 - DNA, 15 bp, Homo sapiens
gaaaccccgtctctg

SEQ ID NO: 335439 - DNA, 15 bp, Homo sapiens
caacatggtgaaacc

SEQ ID NO: 335440 - DNA, 15 bp, Homo sapiens
ccaacatggtgaaac

SEQ ID NO: 335441 - DNA, 15 bp, Homo sapiens
gccaacatggtgaaa

SEQ ID NO: 335442 - DNA, 15 bp, Homo sapiens
ggccaacatggtgaa

SEQ ID NO: 335443 - DNA, 15 bp, Homo sapiens
tggccaacatggtga

SEQ ID NO: 335444 - DNA, 15 bp, Homo sapiens
ctggccaacatggtg

SEQ ID NO: 335445 - DNA, 15 bp, Homo sapiens
cctggccaacatggt

SEQ ID NO: 335446 - DNA, 15 bp, Homo sapiens
aatcaagaccatcct

SEQ ID NO: 335447 - DNA, 15 bp, Homo sapiens
aaatcaagaccatcc

SEQ ID NO: 335448 - DNA, 15 bp, Homo sapiens
gaaatcaagaccatc

SEQ ID NO: 335449 - DNA, 15 bp, Homo sapiens
agaaatcaagaccat

SEQ ID NO: 335450 - DNA, 15 bp, Homo sapiens
aagaaatcaagacca

SEQ ID NO: 335451 - DNA, 15 bp, Homo sapiens
caagaaatcaagacc

SEQ ID NO: 335452 - DNA, 15 bp, Homo sapiens
tcaagaaatcaagac

SEQ ID NO: 335453 - DNA, 15 bp, Homo sapiens
gtcaagaaatcaaga

SEQ ID NO: 335454 - DNA, 15 bp, Homo sapiens
agtcaagaaatcaag

SEQ ID NO: 335455 - DNA, 15 bp, Homo sapiens
aagtcaagaaatcaa

SEQ ID NO: 335456 - DNA, 15 bp, Homo sapiens
gaagtcaagaaatca

SEQ ID NO: 335457 - DNA, 15 bp, Homo sapiens
cgaagtcaagaaatc

SEQ ID NO: 335458 - DNA, 15 bp, Homo sapiens
acgaagtcaagaaat

SEQ ID NO: 335459 - DNA, 15 bp, Homo sapiens
cacgaagtcaagaaa

SEQ ID NO: 335460 - DNA, 15 bp, Homo sapiens
tcacgaagtcaagaa

SEQ ID NO: 335461 - DNA, 15 bp, Homo sapiens
atcacgaagtcaaga

SEQ ID NO: 335462 - DNA, 15 bp, Homo sapiens
gatcacgaagtcaag

SEQ ID NO: 335463 - DNA, 15 bp, Homo sapiens
ggatcacgaagtcaa

SEQ ID NO: 335464 - DNA, 15 bp, Homo sapiens
cggatcacgaagtca

SEQ ID NO: 335465 - DNA, 15 bp, Homo sapiens
acggatcacgaagtc

SEQ ID NO: 335466 - DNA, 15 bp, Homo sapiens
gacggatcacgaagt

SEQ ID NO: 335467 - DNA, 15 bp, Homo sapiens
ggacggatcacgaag

SEQ ID NO: 335468 - DNA, 15 bp, Homo sapiens
cggacggatcacgaa

SEQ ID NO: 335469 - DNA, 15 bp, Homo sapiens
gcggacggatcacga

SEQ ID NO: 335470 - DNA, 15 bp, Homo sapiens
ggcggacggatcacg

SEQ ID NO: 335471 - DNA, 15 bp, Homo sapiens
aggcggacggatcac

SEQ ID NO: 335472 - DNA, 15 bp, Homo sapiens
gaggcggacggatca

SEQ ID NO: 335473 - DNA, 15 bp, Homo sapiens
cgaggcggacggatc

SEQ ID NO: 335474 - DNA, 15 bp, Homo sapiens
ccgaggcggacggat

SEQ ID NO: 335475 - DNA, 15 bp, Homo sapiens
gccgaggcggacgga

SEQ ID NO: 335476 - DNA, 15 bp, Homo sapiens
ggccgaggcggacgg

SEQ ID NO: 335477 - DNA, 15 bp, Homo sapiens
cggccgaggcggacg

SEQ ID NO: 335478 - DNA, 15 bp, Homo sapiens
gcggccgaggcggac

SEQ ID NO: 335479 - DNA, 15 bp, Homo sapiens
ggcggccgaggcgga

SEQ ID NO: 335480 - DNA, 15 bp, Homo sapiens
gggcggccgaggcgg

SEQ ID NO: 335481 - DNA, 15 bp, Homo sapiens
tgggcggccgaggcg

SEQ ID NO: 335482 - DNA, 15 bp, Homo sapiens
ttgggcggccgaggc

SEQ ID NO: 335483 - DNA, 15 bp, Homo sapiens
tttgggcggccgagg

SEQ ID NO: 335484 - DNA, 15 bp, Homo sapiens
ctttgggcggccgag

SEQ ID NO: 335485 - DNA, 15 bp, Homo sapiens
actttgggcggccga

SEQ ID NO: 335486 - DNA, 15 bp, Homo sapiens
cactttgggcggccg

SEQ ID NO: 335487 - DNA, 15 bp, Homo sapiens
gcactttgggcggcc

SEQ ID NO: 335488 - DNA, 15 bp, Homo sapiens
agcactttgggcggc

SEQ ID NO: 335489 - DNA, 15 bp, Homo sapiens
cagcactttgggcgg

SEQ ID NO: 335490 - DNA, 15 bp, Homo sapiens
ccagcactttgggcg

SEQ ID NO: 335491 - DNA, 15 bp, Homo sapiens
cccagcactttgggc

SEQ ID NO: 335492 - DNA, 15 bp, Homo sapiens
ggtggctcacgcctg

SEQ ID NO: 335493 - DNA, 15 bp, Homo sapiens
gcggtggctcacgcc

SEQ ID NO: 335494 - DNA, 15 bp, Homo sapiens
cgcggtggctcacgc

SEQ ID NO: 335495 - DNA, 15 bp, Homo sapiens
gcgcggtggctcacg

SEQ ID NO: 335496 - DNA, 15 bp, Homo sapiens
cgggcgcggtggctc

SEQ ID NO: 335497 - DNA, 15 bp, Homo sapiens
ccgggcgcggtggct

SEQ ID NO: 335498 - DNA, 15 bp, Homo sapiens
accgggcgcggtggc

SEQ ID NO: 335499 - DNA, 15 bp, Homo sapiens
gaccgggcgcggtgg

SEQ ID NO: 335500 - DNA, 15 bp, Homo sapiens
tgaccgggcgcggtg

SEQ ID NO: 335501 - DNA, 15 bp, Homo sapiens
ctgaccgggcgcggt

SEQ ID NO: 335502 - DNA, 15 bp, Homo sapiens
cctgaccgggcgcgg

SEQ ID NO: 335503 - DNA, 15 bp, Homo sapiens
acctgaccgggcgcg

SEQ ID NO: 335504 - DNA, 15 bp, Homo sapiens
aacctgaccgggcgc

SEQ ID NO: 335505 - DNA, 15 bp, Homo sapiens
aaacctgaccgggcg

SEQ ID NO: 335506 - DNA, 15 bp, Homo sapiens
gaaacctgaccgggc

SEQ ID NO: 335507 - DNA, 15 bp, Homo sapiens
agaaacctgaccggg

SEQ ID NO: 335508 - DNA, 15 bp, Homo sapiens
aagaaacctgaccgg

SEQ ID NO: 335509 - DNA, 15 bp, Homo sapiens
taagaaacctgaccg

SEQ ID NO: 335510 - DNA, 15 bp, Homo sapiens
ataagaaacctgacc

SEQ ID NO: 335511 - DNA, 15 bp, Homo sapiens
aataagaaacctgac

SEQ ID NO: 335512 - DNA, 15 bp, Homo sapiens
aaataagaaacctga

SEQ ID NO: 335513 - DNA, 15 bp, Homo sapiens
aaaataagaaacctg

SEQ ID NO: 335514 - DNA, 15 bp, Homo sapiens
aaaaataagaaacct

SEQ ID NO: 335515 - DNA, 15 bp, Homo sapiens
caaaaataagaaacc

SEQ ID NO: 335516 - DNA, 15 bp, Homo sapiens
tcaaaaataagaaac

SEQ ID NO: 335517 - DNA, 15 bp, Homo sapiens
atcaaaaataagaaa

SEQ ID NO: 335518 - DNA, 15 bp, Homo sapiens
gatcaaaaataagaa

SEQ ID NO: 335519 - DNA, 15 bp, Homo sapiens
agatcaaaaataaga

SEQ ID NO: 335520 - DNA, 15 bp, Homo sapiens
cagatcaaaaataag

SEQ ID NO: 335521 - DNA, 15 bp, Homo sapiens
tcagatcaaaaataa

SEQ ID NO: 335522 - DNA, 15 bp, Homo sapiens
ctcagatcaaaaata

SEQ ID NO: 335523 - DNA, 15 bp, Homo sapiens
cctcagatcaaaaat

SEQ ID NO: 335524 - DNA, 15 bp, Homo sapiens
tcctcagatcaaaaa

SEQ ID NO: 335525 - DNA, 15 bp, Homo sapiens
ctcctcagatcaaaa

SEQ ID NO: 335526 - DNA, 15 bp, Homo sapiens
actcctcagatcaaa

SEQ ID NO: 335527 - DNA, 15 bp, Homo sapiens
aactcctcagatcaa

SEQ ID NO: 335528 - DNA, 15 bp, Homo sapiens
aaactcctcagatca

SEQ ID NO: 335529 - DNA, 15 bp, Homo sapiens
gaaactcctcagatc

SEQ ID NO: 335530 - DNA, 15 bp, Homo sapiens
agaaactcctcagat

SEQ ID NO: 335531 - DNA, 15 bp, Homo sapiens
tagaaactcctcaga

SEQ ID NO: 335532 - DNA, 15 bp, Homo sapiens
atagaaactcctcag

SEQ ID NO: 335533 - DNA, 15 bp, Homo sapiens
gatagaaactcctca

SEQ ID NO: 335534 - DNA, 15 bp, Homo sapiens
ggatagaaactcctc

SEQ ID NO: 335535 - DNA, 15 bp, Homo sapiens
aggatagaaactcct

SEQ ID NO: 335536 - DNA, 15 bp, Homo sapiens
aaggatagaaactcc

SEQ ID NO: 335537 - DNA, 15 bp, Homo sapiens
caaggatagaaactc

SEQ ID NO: 335538 - DNA, 15 bp, Homo sapiens
tcaaggatagaaact

SEQ ID NO: 335539 - DNA, 15 bp, Homo sapiens
atcaaggatagaaac

SEQ ID NO: 335540 - DNA, 15 bp, Homo sapiens
tatcaaggatagaaa

SEQ ID NO: 335541 - DNA, 15 bp, Homo sapiens
ctatcaaggatagaa

SEQ ID NO: 335542 - DNA, 15 bp, Homo sapiens
cctatcaaggataga

SEQ ID NO: 335543 - DNA, 15 bp, Homo sapiens
acctatcaaggatag

SEQ ID NO: 335544 - DNA, 15 bp, Homo sapiens
cacctatcaaggata

SEQ ID NO: 335545 - DNA, 15 bp, Homo sapiens
acacctatcaaggat

SEQ ID NO: 335546 - DNA, 15 bp, Homo sapiens
aacacctatcaagga

SEQ ID NO: 335547 - DNA, 15 bp, Homo sapiens
gaacacctatcaagg

SEQ ID NO: 335548 - DNA, 15 bp, Homo sapiens
tgaacacctatcaag

SEQ ID NO: 335549 - DNA, 15 bp, Homo sapiens
atgaacacctatcaa

SEQ ID NO: 335550 - DNA, 15 bp, Homo sapiens
gatgaacacctatca

SEQ ID NO: 335551 - DNA, 15 bp, Homo sapiens
agatgaacacctatc

SEQ ID NO: 335552 - DNA, 15 bp, Homo sapiens
aagatgaacacctat

SEQ ID NO: 335553 - DNA, 15 bp, Homo sapiens
aaagatgaacaccta

SEQ ID NO: 335554 - DNA, 15 bp, Homo sapiens
taaagatgaacacct

SEQ ID NO: 335555 - DNA, 15 bp, Homo sapiens
ataaagatgaacacc

SEQ ID NO: 335556 - DNA, 15 bp, Homo sapiens
gataaagatgaacac

SEQ ID NO: 335557 - DNA, 15 bp, Homo sapiens
tgataaagatgaaca

SEQ ID NO: 335558 - DNA, 15 bp, Homo sapiens
ttgataaagatgaac

SEQ ID NO: 335559 - DNA, 15 bp, Homo sapiens
attgataaagatgaa

SEQ ID NO: 335560 - DNA, 15 bp, Homo sapiens
tattgataaagatga

SEQ ID NO: 335561 - DNA, 15 bp, Homo sapiens
atattgataaagatg

SEQ ID NO: 335562 - DNA, 15 bp, Homo sapiens
aatattgataaagat

SEQ ID NO: 335563 - DNA, 15 bp, Homo sapiens
aaatattgataaaga

SEQ ID NO: 335564 - DNA, 15 bp, Homo sapiens
caaatattgataaag

SEQ ID NO: 335565 - DNA, 15 bp, Homo sapiens
ccaaatattgataaa

SEQ ID NO: 335566 - DNA, 15 bp, Homo sapiens
cccaaatattgataa

SEQ ID NO: 335567 - DNA, 15 bp, Homo sapiens
acccaaatattgata

SEQ ID NO: 335568 - DNA, 15 bp, Homo sapiens
gacccaaatattgat

SEQ ID NO: 335569 - DNA, 15 bp, Homo sapiens
tgacccaaatattga

SEQ ID NO: 335570 - DNA, 15 bp, Homo sapiens
ctgacccaaatattg

SEQ ID NO: 335571 - DNA, 15 bp, Homo sapiens
cctgacccaaatatt

SEQ ID NO: 335572 - DNA, 15 bp, Homo sapiens
gcctgacccaaatat

SEQ ID NO: 335573 - DNA, 15 bp, Homo sapiens
ggcctgacccaaata

SEQ ID NO: 335574 - DNA, 15 bp, Homo sapiens
cggcctgacccaaat

SEQ ID NO: 335575 - DNA, 15 bp, Homo sapiens
ccggcctgacccaaa

SEQ ID NO: 335576 - DNA, 15 bp, Homo sapiens
cccggcctgacccaa

SEQ ID NO: 335577 - DNA, 15 bp, Homo sapiens
gcccggcctgaccca

SEQ ID NO: 335578 - DNA, 15 bp, Homo sapiens
cgcccggcctgaccc

SEQ ID NO: 335579 - DNA, 15 bp, Homo sapiens
gcgcccggcctgacc

SEQ ID NO: 335580 - DNA, 15 bp, Homo sapiens
cgcgcccggcctgac

SEQ ID NO: 335581 - DNA, 15 bp, Homo sapiens
ccgcgcccggcctga

SEQ ID NO: 335582 - DNA, 15 bp, Homo sapiens
accgcgcccggcctg

SEQ ID NO: 335583 - DNA, 15 bp, Homo sapiens
caccgcgcccggcct

SEQ ID NO: 335584 - DNA, 15 bp, Homo sapiens
ccaccgcgcccggcc

SEQ ID NO: 335585 - DNA, 15 bp, Homo sapiens
gccaccgcgcccggc

SEQ ID NO: 335586 - DNA, 15 bp, Homo sapiens
agagccaccgcgccc

SEQ ID NO: 335587 - DNA, 15 bp, Homo sapiens
aagagccaccgcgcc

SEQ ID NO: 335588 - DNA, 15 bp, Homo sapiens
aaagagccaccgcgc

SEQ ID NO: 335589 - DNA, 15 bp, Homo sapiens
gaaagagccaccgcg

SEQ ID NO: 335590 - DNA, 15 bp, Homo sapiens
cgaaagagccaccgc

SEQ ID NO: 335591 - DNA, 15 bp, Homo sapiens
acgaaagagccaccg

SEQ ID NO: 335592 - DNA, 15 bp, Homo sapiens
cacgaaagagccacc

SEQ ID NO: 335593 - DNA, 15 bp, Homo sapiens
acacgaaagagccac

SEQ ID NO: 335594 - DNA, 15 bp, Homo sapiens
tacacgaaagagcca

SEQ ID NO: 335595 - DNA, 15 bp, Homo sapiens
ttacacgaaagagcc

SEQ ID NO: 335596 - DNA, 15 bp, Homo sapiens
attacacgaaagagc

SEQ ID NO: 335597 - DNA, 15 bp, Homo sapiens
gattacacgaaagag

SEQ ID NO: 335598 - DNA, 15 bp, Homo sapiens
ggattacacgaaaga

SEQ ID NO: 335599 - DNA, 15 bp, Homo sapiens
aggattacacgaaag

SEQ ID NO: 335600 - DNA, 15 bp, Homo sapiens
taggattacacgaaa

SEQ ID NO: 335601 - DNA, 15 bp, Homo sapiens
ctaggattacacgaa

SEQ ID NO: 335602 - DNA, 15 bp, Homo sapiens
gctaggattacacga

SEQ ID NO: 335603 - DNA, 15 bp, Homo sapiens
tgctaggattacacg

SEQ ID NO: 335604 - DNA, 15 bp, Homo sapiens
gtgctaggattacac

SEQ ID NO: 335605 - DNA, 15 bp, Homo sapiens
agtgctaggattaca

SEQ ID NO: 335606 - DNA, 15 bp, Homo sapiens
aagtgctaggattac

SEQ ID NO: 335607 - DNA, 15 bp, Homo sapiens
aaagtgctaggatta

SEQ ID NO: 335608 - DNA, 15 bp, Homo sapiens
caaagtgctaggatt

SEQ ID NO: 335609 - DNA, 15 bp, Homo sapiens
ccaaagtgctaggat

SEQ ID NO: 335610 - DNA, 15 bp, Homo sapiens
cccaaagtgctagga

SEQ ID NO: 335611 - DNA, 15 bp, Homo sapiens
tcccaaagtgctagg

SEQ ID NO: 335612 - DNA, 15 bp, Homo sapiens
ctcccaaagtgctag

SEQ ID NO: 335613 - DNA, 15 bp, Homo sapiens
cctcccaaagtgcta

SEQ ID NO: 335614 - DNA, 15 bp, Homo sapiens
tttggcctcccaaag

SEQ ID NO: 335615 - DNA, 15 bp, Homo sapiens
ctttggcctcccaaa

SEQ ID NO: 335616 - DNA, 15 bp, Homo sapiens
gctttggcctcccaa

SEQ ID NO: 335617 - DNA, 15 bp, Homo sapiens
cgctttggcctccca

SEQ ID NO: 335618 - DNA, 15 bp, Homo sapiens
ccgctttggcctccc

SEQ ID NO: 335619 - DNA, 15 bp, Homo sapiens
cccgctttggcctcc

SEQ ID NO: 335620 - DNA, 15 bp, Homo sapiens
tcccgctttggcctc

SEQ ID NO: 335621 - DNA, 15 bp, Homo sapiens
ctcccgctttggcct

SEQ ID NO: 335622 - DNA, 15 bp, Homo sapiens
cctcccgctttggcc

SEQ ID NO: 335623 - DNA, 15 bp, Homo sapiens
tcctcccgctttggc

SEQ ID NO: 335624 - DNA, 15 bp, Homo sapiens
atcctcccgctttgg

SEQ ID NO: 335625 - DNA, 15 bp, Homo sapiens
gatcctcccgctttg

SEQ ID NO: 335626 - DNA, 15 bp, Homo sapiens
agatcctcccgcttt

SEQ ID NO: 335627 - DNA, 15 bp, Homo sapiens
gagatcctcccgctt

SEQ ID NO: 335628 - DNA, 15 bp, Homo sapiens
agagatcctcccgct

SEQ ID NO: 335629 - DNA, 15 bp, Homo sapiens
aagagatcctcccgc

SEQ ID NO: 335630 - DNA, 15 bp, Homo sapiens
caagagatcctcccg

SEQ ID NO: 335631 - DNA, 15 bp, Homo sapiens
tcaagagatcctccc

SEQ ID NO: 335632 - DNA, 15 bp, Homo sapiens
ctcaagagatcctcc

SEQ ID NO: 335633 - DNA, 15 bp, Homo sapiens
gctcaagagatcctc

SEQ ID NO: 335634 - DNA, 15 bp, Homo sapiens
ggctcaagagatcct

SEQ ID NO: 335635 - DNA, 15 bp, Homo sapiens
aggctcaagagatcc

SEQ ID NO: 335636 - DNA, 15 bp, Homo sapiens
taggctcaagagatc

SEQ ID NO: 335637 - DNA, 15 bp, Homo sapiens
ctaggctcaagagat

SEQ ID NO: 335638 - DNA, 15 bp, Homo sapiens
cctaggctcaagaga

SEQ ID NO: 335639 - DNA, 15 bp, Homo sapiens
tcctaggctcaagag

SEQ ID NO: 335640 - DNA, 15 bp, Homo sapiens
ctcctaggctcaaga

SEQ ID NO: 335641 - DNA, 15 bp, Homo sapiens
actcctaggctcaag

SEQ ID NO: 335642 - DNA, 15 bp, Homo sapiens
aactcctaggctcaa

SEQ ID NO: 335643 - DNA, 15 bp, Homo sapiens
aaactcctaggctca

SEQ ID NO: 335644 - DNA, 15 bp, Homo sapiens
gaaactcctaggctc

SEQ ID NO: 335645 - DNA, 15 bp, Homo sapiens
tgaaactcctaggct

SEQ ID NO: 335646 - DNA, 15 bp, Homo sapiens
ctgaaactcctaggc

SEQ ID NO: 335647 - DNA, 15 bp, Homo sapiens
cctgaaactcctagg

SEQ ID NO: 335648 - DNA, 15 bp, Homo sapiens
gcctgaaactcctag

SEQ ID NO: 335649 - DNA, 15 bp, Homo sapiens
ggcctgaaactccta

SEQ ID NO: 335650 - DNA, 15 bp, Homo sapiens
tggcctgaaactcct

SEQ ID NO: 335651 - DNA, 15 bp, Homo sapiens
ctggcctgaaactcc

SEQ ID NO: 335652 - DNA, 15 bp, Homo sapiens
gctggcctgaaactc

SEQ ID NO: 335653 - DNA, 15 bp, Homo sapiens
ggctggcctgaaact

SEQ ID NO: 335654 - DNA, 15 bp, Homo sapiens
aggctggcctgaaac

SEQ ID NO: 335655 - DNA, 15 bp, Homo sapiens
caggctggcctgaaa

SEQ ID NO: 335656 - DNA, 15 bp, Homo sapiens
ccaggctggcctgaa

SEQ ID NO: 335657 - DNA, 15 bp, Homo sapiens
cccaggctggcctga

SEQ ID NO: 335658 - DNA, 15 bp, Homo sapiens
gcccaggctggcctg

SEQ ID NO: 335659 - DNA, 15 bp, Homo sapiens
tgcccaggctggcct

SEQ ID NO: 335660 - DNA, 15 bp, Homo sapiens
ttgcccaggctggcc

SEQ ID NO: 335661 - DNA, 15 bp, Homo sapiens
gttgcccaggctggc

SEQ ID NO: 335662 - DNA, 15 bp, Homo sapiens
atgttgcccaggctg

SEQ ID NO: 335663 - DNA, 15 bp, Homo sapiens
tatgttgcccaggct

SEQ ID NO: 335664 - DNA, 15 bp, Homo sapiens
ctatgttgcccaggc

SEQ ID NO: 335665 - DNA, 15 bp, Homo sapiens
cgctatgttgcccag

SEQ ID NO: 335666 - DNA, 15 bp, Homo sapiens
tcgctatgttgccca

SEQ ID NO: 335667 - DNA, 15 bp, Homo sapiens
ctcgctatgttgccc

SEQ ID NO: 335668 - DNA, 15 bp, Homo sapiens
tctcgctatgttgcc

SEQ ID NO: 335669 - DNA, 15 bp, Homo sapiens
gtctcgctatgttgc

SEQ ID NO: 335670 - DNA, 15 bp, Homo sapiens
ggtctcgctatgttg

SEQ ID NO: 335671 - DNA, 15 bp, Homo sapiens
aggtctcgctatgtt

SEQ ID NO: 335672 - DNA, 15 bp, Homo sapiens
gaggtctcgctatgt

SEQ ID NO: 335673 - DNA, 15 bp, Homo sapiens
ggaggtctcgctatg

SEQ ID NO: 335674 - DNA, 15 bp, Homo sapiens
aggaggtctcgctat

SEQ ID NO: 335675 - DNA, 15 bp, Homo sapiens
gaggaggtctcgcta

SEQ ID NO: 335676 - DNA, 15 bp, Homo sapiens
agaggaggtctcgct

SEQ ID NO: 335677 - DNA, 15 bp, Homo sapiens
gagaggaggtctcgc

SEQ ID NO: 335678 - DNA, 15 bp, Homo sapiens
agagaggaggtctcg

SEQ ID NO: 335679 - DNA, 15 bp, Homo sapiens
tagagaggaggtctc

SEQ ID NO: 335680 - DNA, 15 bp, Homo sapiens
gtagagaggaggtct

SEQ ID NO: 335681 - DNA, 15 bp, Homo sapiens
agtagagaggaggtc

SEQ ID NO: 335682 - DNA, 15 bp, Homo sapiens
tagtagagaggaggt

SEQ ID NO: 335683 - DNA, 15 bp, Homo sapiens
ttagtagagaggagg

SEQ ID NO: 335684 - DNA, 15 bp, Homo sapiens
tttagtagagaggag

SEQ ID NO: 335685 - DNA, 15 bp, Homo sapiens
ttttagtagagagga

SEQ ID NO: 335686 - DNA, 15 bp, Homo sapiens
cttttagtagagagg

SEQ ID NO: 335687 - DNA, 15 bp, Homo sapiens
acttttagtagagag

SEQ ID NO: 335688 - DNA, 15 bp, Homo sapiens
tacttttagtagaga

SEQ ID NO: 335689 - DNA, 15 bp, Homo sapiens
ttacttttagtagag

SEQ ID NO: 335690 - DNA, 15 bp, Homo sapiens
tttacttttagtaga

SEQ ID NO: 335691 - DNA, 15 bp, Homo sapiens
ttttacttttagtag

SEQ ID NO: 335692 - DNA, 15 bp, Homo sapiens
tttttacttttagta

SEQ ID NO: 335693 - DNA, 15 bp, Homo sapiens
ttttttacttttagt

SEQ ID NO: 335694 - DNA, 15 bp, Homo sapiens
tttttttacttttag

SEQ ID NO: 335695 - DNA, 15 bp, Homo sapiens
ctttttttactttta

SEQ ID NO: 335696 - DNA, 15 bp, Homo sapiens
gctttttttactttt

SEQ ID NO: 335697 - DNA, 15 bp, Homo sapiens
cgctttttttacttt

SEQ ID NO: 335698 - DNA, 15 bp, Homo sapiens
ccgctttttttactt

SEQ ID NO: 335699 - DNA, 15 bp, Homo sapiens
cccgctttttttact

SEQ ID NO: 335700 - DNA, 15 bp, Homo sapiens
tcccgctttttttac

SEQ ID NO: 335701 - DNA, 15 bp, Homo sapiens
gtcccgcttttttta

SEQ ID NO: 335702 - DNA, 15 bp, Homo sapiens
cgtcccgcttttttt

SEQ ID NO: 335703 - DNA, 15 bp, Homo sapiens
acgtcccgctttttt

SEQ ID NO: 335704 - DNA, 15 bp, Homo sapiens
cacgtcccgcttttt

SEQ ID NO: 335705 - DNA, 15 bp, Homo sapiens
ccacgtcccgctttt

SEQ ID NO: 335706 - DNA, 15 bp, Homo sapiens
accacgtcccgcttt

SEQ ID NO: 335707 - DNA, 15 bp, Homo sapiens
caccacgtcccgctt

SEQ ID NO: 335708 - DNA, 15 bp, Homo sapiens
acaccacgtcccgct

SEQ ID NO: 335709 - DNA, 15 bp, Homo sapiens
gacaccacgtcccgc

SEQ ID NO: 335710 - DNA, 15 bp, Homo sapiens
cgacaccacgtcccg

SEQ ID NO: 335711 - DNA, 15 bp, Homo sapiens
gcgacaccacgtccc

SEQ ID NO: 335712 - DNA, 15 bp, Homo sapiens
tgcgacaccacgtcc

SEQ ID NO: 335713 - DNA, 15 bp, Homo sapiens
gtgcgacaccacgtc

SEQ ID NO: 335714 - DNA, 15 bp, Homo sapiens
tgtgcgacaccacgt

SEQ ID NO: 335715 - DNA, 15 bp, Homo sapiens
gtgtgcgacaccacg

SEQ ID NO: 335716 - DNA, 15 bp, Homo sapiens
ggtgtgcgacaccac

SEQ ID NO: 335717 - DNA, 15 bp, Homo sapiens
aggtgtgcgacacca

SEQ ID NO: 335718 - DNA, 15 bp, Homo sapiens
aaggtgtgcgacacc

SEQ ID NO: 335719 - DNA, 15 bp, Homo sapiens
aaaggtgtgcgacac

SEQ ID NO: 335720 - DNA, 15 bp, Homo sapiens
taaaggtgtgcgaca

SEQ ID NO: 335721 - DNA, 15 bp, Homo sapiens
ctaaaggtgtgcgac

SEQ ID NO: 335722 - DNA, 15 bp, Homo sapiens
actaaaggtgtgcga

SEQ ID NO: 335723 - DNA, 15 bp, Homo sapiens
gactaaaggtgtgcg

SEQ ID NO: 335724 - DNA, 15 bp, Homo sapiens
ggactaaaggtgtgc

SEQ ID NO: 335725 - DNA, 15 bp, Homo sapiens
gggactaaaggtgtg

SEQ ID NO: 335726 - DNA, 15 bp, Homo sapiens
tgggactaaaggtgt

SEQ ID NO: 335727 - DNA, 15 bp, Homo sapiens
ctgggactaaaggtg

SEQ ID NO: 335728 - DNA, 15 bp, Homo sapiens
cctgggactaaaggt

SEQ ID NO: 335729 - DNA, 15 bp, Homo sapiens
acctgggactaaagg

SEQ ID NO: 335730 - DNA, 15 bp, Homo sapiens
tacctgggactaaag

SEQ ID NO: 335731 - DNA, 15 bp, Homo sapiens
gtacctgggactaaa

SEQ ID NO: 335732 - DNA, 15 bp, Homo sapiens
agtacctgggactaa

SEQ ID NO: 335733 - DNA, 15 bp, Homo sapiens
tagtacctgggacta

SEQ ID NO: 335734 - DNA, 15 bp, Homo sapiens
ctagtacctgggact

SEQ ID NO: 335735 - DNA, 15 bp, Homo sapiens
tctagtacctgggac

SEQ ID NO: 335736 - DNA, 15 bp, Homo sapiens
ctctagtacctggga

SEQ ID NO: 335737 - DNA, 15 bp, Homo sapiens
actctagtacctggg

SEQ ID NO: 335738 - DNA, 15 bp, Homo sapiens
aactctagtacctgg

SEQ ID NO: 335739 - DNA, 15 bp, Homo sapiens
gaactctagtacctg

SEQ ID NO: 335740 - DNA, 15 bp, Homo sapiens
cgaactctagtacct

SEQ ID NO: 335741 - DNA, 15 bp, Homo sapiens
tcgaactctagtacc

SEQ ID NO: 335742 - DNA, 15 bp, Homo sapiens
ctcgaactctagtac

SEQ ID NO: 335743 - DNA, 15 bp, Homo sapiens
cctcgaactctagta

SEQ ID NO: 335744 - DNA, 15 bp, Homo sapiens
acctcgaactctagt

SEQ ID NO: 335745 - DNA, 15 bp, Homo sapiens
aacctcgaactctag

SEQ ID NO: 335746 - DNA, 15 bp, Homo sapiens
caacctcgaactcta

SEQ ID NO: 335747 - DNA, 15 bp, Homo sapiens
gcaacctcgaactct

SEQ ID NO: 335748 - DNA, 15 bp, Homo sapiens
tgcaacctcgaactc

SEQ ID NO: 335749 - DNA, 15 bp, Homo sapiens
ctgcaacctcgaact

SEQ ID NO: 335750 - DNA, 15 bp, Homo sapiens
actgcaacctcgaac

SEQ ID NO: 335751 - DNA, 15 bp, Homo sapiens
cactgcaacctcgaa

SEQ ID NO: 335752 - DNA, 15 bp, Homo sapiens
tcactgcaacctcga

SEQ ID NO: 335753 - DNA, 15 bp, Homo sapiens
ctcactgcaacctcg

SEQ ID NO: 335754 - DNA, 15 bp, Homo sapiens
agctcactgcaacct

SEQ ID NO: 335755 - DNA, 15 bp, Homo sapiens
cagctcactgcaacc

SEQ ID NO: 335756 - DNA, 15 bp, Homo sapiens
acagctcactgcaac

SEQ ID NO: 335757 - DNA, 15 bp, Homo sapiens
cacagctcactgcaa

SEQ ID NO: 335758 - DNA, 15 bp, Homo sapiens
tcacagctcactgca

SEQ ID NO: 335759 - DNA, 15 bp, Homo sapiens
atcacagctcactgc

SEQ ID NO: 335760 - DNA, 15 bp, Homo sapiens
gatcacagctcactg

SEQ ID NO: 335761 - DNA, 15 bp, Homo sapiens
ggatcacagctcact

SEQ ID NO: 335762 - DNA, 15 bp, Homo sapiens
aggatcacagctcac

SEQ ID NO: 335763 - DNA, 15 bp, Homo sapiens
caggatcacagctca

SEQ ID NO: 335764 - DNA, 15 bp, Homo sapiens
gcaggatcacagctc

SEQ ID NO: 335765 - DNA, 15 bp, Homo sapiens
ggcaggatcacagct

SEQ ID NO: 335766 - DNA, 15 bp, Homo sapiens
tggcaggatcacagc

SEQ ID NO: 335767 - DNA, 15 bp, Homo sapiens
gtggcaggatcacag

SEQ ID NO: 335768 - DNA, 15 bp, Homo sapiens
agtggcaggatcaca

SEQ ID NO: 335769 - DNA, 15 bp, Homo sapiens
cagtggcaggatcac

SEQ ID NO: 335770 - DNA, 15 bp, Homo sapiens
gcagtggcaggatca

SEQ ID NO: 335771 - DNA, 15 bp, Homo sapiens
tgcagtggcaggatc

SEQ ID NO: 335772 - DNA, 15 bp, Homo sapiens
gtgcagtggcaggat

SEQ ID NO: 335773 - DNA, 15 bp, Homo sapiens
agtgcagtggcagga

SEQ ID NO: 335774 - DNA, 15 bp, Homo sapiens
gagtgcagtggcagg

SEQ ID NO: 335775 - DNA, 15 bp, Homo sapiens
ggagtgcagtggcag

SEQ ID NO: 335776 - DNA, 15 bp, Homo sapiens
cctggagtgcagtgg

SEQ ID NO: 335777 - DNA, 15 bp, Homo sapiens
ccctggagtgcagtg

SEQ ID NO: 335778 - DNA, 15 bp, Homo sapiens
accctggagtgcagt

SEQ ID NO: 335779 - DNA, 15 bp, Homo sapiens
caccctggagtgcag

SEQ ID NO: 335780 - DNA, 15 bp, Homo sapiens
ccaccctggagtgca

SEQ ID NO: 335781 - DNA, 15 bp, Homo sapiens
cccaccctggagtgc

SEQ ID NO: 335782 - DNA, 15 bp, Homo sapiens
gcccaccctggagtg

SEQ ID NO: 335783 - DNA, 15 bp, Homo sapiens
tgcccaccctggagt

SEQ ID NO: 335784 - DNA, 15 bp, Homo sapiens
ttgcccaccctggag

SEQ ID NO: 335785 - DNA, 15 bp, Homo sapiens
gttgcccaccctgga

SEQ ID NO: 335786 - DNA, 15 bp, Homo sapiens
tgttgcccaccctgg

SEQ ID NO: 335787 - DNA, 15 bp, Homo sapiens
ctgttgcccaccctg

SEQ ID NO: 335788 - DNA, 15 bp, Homo sapiens
tctgttgcccaccct

SEQ ID NO: 335789 - DNA, 15 bp, Homo sapiens
ctctgttgcccaccc

SEQ ID NO: 335790 - DNA, 15 bp, Homo sapiens
actctgttgcccacc

SEQ ID NO: 335791 - DNA, 15 bp, Homo sapiens
cactctgttgcccac

SEQ ID NO: 335792 - DNA, 15 bp, Homo sapiens
tcactctgttgccca

SEQ ID NO: 335793 - DNA, 15 bp, Homo sapiens
ctcactctgttgccc

SEQ ID NO: 335794 - DNA, 15 bp, Homo sapiens
tctcactctgttgcc

SEQ ID NO: 335795 - DNA, 15 bp, Homo sapiens
gtctcactctgttgc

SEQ ID NO: 335796 - DNA, 15 bp, Homo sapiens
ggtctcactctgttg

SEQ ID NO: 335797 - DNA, 15 bp, Homo sapiens
gggtctcactctgtt

SEQ ID NO: 335798 - DNA, 15 bp, Homo sapiens
ggggtctcactctgt

SEQ ID NO: 335799 - DNA, 15 bp, Homo sapiens
cggggtctcactctg

SEQ ID NO: 335800 - DNA, 15 bp, Homo sapiens
acggggtctcactct

SEQ ID NO: 335801 - DNA, 15 bp, Homo sapiens
gacggggtctcactc

SEQ ID NO: 335802 - DNA, 15 bp, Homo sapiens
agacggggtctcact

SEQ ID NO: 335803 - DNA, 15 bp, Homo sapiens
gagacggggtctcac

SEQ ID NO: 335804 - DNA, 15 bp, Homo sapiens
tgagacggggtctca

SEQ ID NO: 335805 - DNA, 15 bp, Homo sapiens
ttgagacggggtctc

SEQ ID NO: 335806 - DNA, 15 bp, Homo sapiens
tttgagacggggtct

SEQ ID NO: 335807 - DNA, 15 bp, Homo sapiens
ttttgagacggggtc

SEQ ID NO: 335808 - DNA, 15 bp, Homo sapiens
tttttgagacggggt

SEQ ID NO: 335809 - DNA, 15 bp, Homo sapiens
ttttttgagacgggg

SEQ ID NO: 335810 - DNA, 15 bp, Homo sapiens
tttttttgagacggg

SEQ ID NO: 335811 - DNA, 15 bp, Homo sapiens
ttttttttgagacgg

SEQ ID NO: 335812 - DNA, 15 bp, Homo sapiens
tttttttttgagacg

SEQ ID NO: 335813 - DNA, 15 bp, Homo sapiens
acttttttttttttt

SEQ ID NO: 335814 - DNA, 15 bp, Homo sapiens
tactttttttttttt

SEQ ID NO: 335815 - DNA, 15 bp, Homo sapiens
ttacttttttttttt

SEQ ID NO: 335816 - DNA, 15 bp, Homo sapiens
attactttttttttt

SEQ ID NO: 335817 - DNA, 15 bp, Homo sapiens
tattacttttttttt

SEQ ID NO: 335818 - DNA, 15 bp, Homo sapiens
atattactttttttt

SEQ ID NO: 335819 - DNA, 15 bp, Homo sapiens
catattacttttttt

SEQ ID NO: 335820 - DNA, 15 bp, Homo sapiens
acatattactttttt

SEQ ID NO: 335821 - DNA, 15 bp, Homo sapiens
cacatattacttttt

SEQ ID NO: 335822 - DNA, 15 bp, Homo sapiens
acacatattactttt

SEQ ID NO: 335823 - DNA, 15 bp, Homo sapiens
aacacatattacttt

SEQ ID NO: 335824 - DNA, 15 bp, Homo sapiens
aaacacatattactt

SEQ ID NO: 335825 - DNA, 15 bp, Homo sapiens
aaaacacatattact

SEQ ID NO: 335826 - DNA, 15 bp, Homo sapiens
aaaaacacatattac

SEQ ID NO: 335827 - DNA, 15 bp, Homo sapiens
taaaaacacatatta

SEQ ID NO: 335828 - DNA, 15 bp, Homo sapiens
ctaaaaacacatatt

SEQ ID NO: 335829 - DNA, 15 bp, Homo sapiens
cctaaaaacacatat

SEQ ID NO: 335830 - DNA, 15 bp, Homo sapiens
ccctaaaaacacata

SEQ ID NO: 335831 - DNA, 15 bp, Homo sapiens
tccctaaaaacacat

SEQ ID NO: 335832 - DNA, 15 bp, Homo sapiens
gtccctaaaaacaca

SEQ ID NO: 335833 - DNA, 15 bp, Homo sapiens
agtccctaaaaacac

SEQ ID NO: 335834 - DNA, 15 bp, Homo sapiens
cagtccctaaaaaca

SEQ ID NO: 335835 - DNA, 15 bp, Homo sapiens
tcagtccctaaaaac

SEQ ID NO: 335836 - DNA, 15 bp, Homo sapiens
atcagtccctaaaaa

SEQ ID NO: 335837 - DNA, 15 bp, Homo sapiens
aatcagtccctaaaa

SEQ ID NO: 335838 - DNA, 15 bp, Homo sapiens
aaatcagtccctaaa

SEQ ID NO: 335839 - DNA, 15 bp, Homo sapiens
taaatcagtccctaa

SEQ ID NO: 335840 - DNA, 15 bp, Homo sapiens
ctaaatcagtcccta

SEQ ID NO: 335841 - DNA, 15 bp, Homo sapiens
actaaatcagtccct

SEQ ID NO: 335842 - DNA, 15 bp, Homo sapiens
tactaaatcagtccc

SEQ ID NO: 335843 - DNA, 15 bp, Homo sapiens
ttactaaatcagtcc

SEQ ID NO: 335844 - DNA, 15 bp, Homo sapiens
tttactaaatcagtc

SEQ ID NO: 335845 - DNA, 15 bp, Homo sapiens
ctttactaaatcagt

SEQ ID NO: 335846 - DNA, 15 bp, Homo sapiens
tctttactaaatcag

SEQ ID NO: 335847 - DNA, 15 bp, Homo sapiens
ctctttactaaatca

SEQ ID NO: 335848 - DNA, 15 bp, Homo sapiens
tctctttactaaatc

SEQ ID NO: 335849 - DNA, 15 bp, Homo sapiens
gtctctttactaaat

SEQ ID NO: 335850 - DNA, 15 bp, Homo sapiens
ggtctctttactaaa

SEQ ID NO: 335851 - DNA, 15 bp, Homo sapiens
gggtctctttactaa

SEQ ID NO: 335852 - DNA, 15 bp, Homo sapiens
agggtctctttacta

SEQ ID NO: 335853 - DNA, 15 bp, Homo sapiens
cagggtctctttact

SEQ ID NO: 335854 - DNA, 15 bp, Homo sapiens
tcagggtctctttac

SEQ ID NO: 335855 - DNA, 15 bp, Homo sapiens
atcagggtctcttta

SEQ ID NO: 335856 - DNA, 15 bp, Homo sapiens
aatcagggtctcttt

SEQ ID NO: 335857 - DNA, 15 bp, Homo sapiens
aaatcagggtctctt

SEQ ID NO: 335858 - DNA, 15 bp, Homo sapiens
gaaatcagggtctct

SEQ ID NO: 335859 - DNA, 15 bp, Homo sapiens
tgaaatcagggtctc

SEQ ID NO: 335860 - DNA, 15 bp, Homo sapiens
ttgaaatcagggtct

SEQ ID NO: 335861 - DNA, 15 bp, Homo sapiens
cttgaaatcagggtc

SEQ ID NO: 335862 - DNA, 15 bp, Homo sapiens
gcttgaaatcagggt

SEQ ID NO: 335863 - DNA, 15 bp, Homo sapiens
tgcttgaaatcaggg

SEQ ID NO: 335864 - DNA, 15 bp, Homo sapiens
ttgcttgaaatcagg

SEQ ID NO: 335865 - DNA, 15 bp, Homo sapiens
gttgcttgaaatcag

SEQ ID NO: 335866 - DNA, 15 bp, Homo sapiens
tgttgcttgaaatca

SEQ ID NO: 335867 - DNA, 15 bp, Homo sapiens
gtgttgcttgaaatc

SEQ ID NO: 335868 - DNA, 15 bp, Homo sapiens
tgtgttgcttgaaat

SEQ ID NO: 335869 - DNA, 15 bp, Homo sapiens
ctgtgttgcttgaaa

SEQ ID NO: 335870 - DNA, 15 bp, Homo sapiens
actgtgttgcttgaa

SEQ ID NO: 335871 - DNA, 15 bp, Homo sapiens
aactgtgttgcttga

SEQ ID NO: 335872 - DNA, 15 bp, Homo sapiens
caactgtgttgcttg

SEQ ID NO: 335873 - DNA, 15 bp, Homo sapiens
tcaactgtgttgctt

SEQ ID NO: 335874 - DNA, 15 bp, Homo sapiens
ctcaactgtgttgct

SEQ ID NO: 335875 - DNA, 15 bp, Homo sapiens
actcaactgtgttgc

SEQ ID NO: 335876 - DNA, 15 bp, Homo sapiens
tactcaactgtgttg

SEQ ID NO: 335877 - DNA, 15 bp, Homo sapiens
gtactcaactgtgtt

SEQ ID NO: 335878 - DNA, 15 bp, Homo sapiens
agtactcaactgtgt

SEQ ID NO: 335879 - DNA, 15 bp, Homo sapiens
tagtactcaactgtg

SEQ ID NO: 335880 - DNA, 15 bp, Homo sapiens
ttagtactcaactgt

SEQ ID NO: 335881 - DNA, 15 bp, Homo sapiens
attagtactcaactg

SEQ ID NO: 335882 - DNA, 15 bp, Homo sapiens
aattagtactcaact

SEQ ID NO: 335883 - DNA, 15 bp, Homo sapiens
aaattagtactcaac

SEQ ID NO: 335884 - DNA, 15 bp, Homo sapiens
taaattagtactcaa

SEQ ID NO: 335885 - DNA, 15 bp, Homo sapiens
ataaattagtactca

SEQ ID NO: 335886 - DNA, 15 bp, Homo sapiens
aataaattagtactc

SEQ ID NO: 335887 - DNA, 15 bp, Homo sapiens
taataaattagtact

SEQ ID NO: 335888 - DNA, 15 bp, Homo sapiens
ataataaattagtac

SEQ ID NO: 335889 - DNA, 15 bp, Homo sapiens
aataataaattagta

SEQ ID NO: 335890 - DNA, 15 bp, Homo sapiens
aaataataaattagt

SEQ ID NO: 335891 - DNA, 15 bp, Homo sapiens
taaataataaattag

SEQ ID NO: 335892 - DNA, 15 bp, Homo sapiens
gtaaataataaatta

SEQ ID NO: 335893 - DNA, 15 bp, Homo sapiens
ggtaaataataaatt

SEQ ID NO: 335894 - DNA, 15 bp, Homo sapiens
aggtaaataataaat

SEQ ID NO: 335895 - DNA, 15 bp, Homo sapiens
taggtaaataataaa

SEQ ID NO: 335896 - DNA, 15 bp, Homo sapiens
ttaggtaaataataa

SEQ ID NO: 335897 - DNA, 15 bp, Homo sapiens
attaggtaaataata

SEQ ID NO: 335898 - DNA, 15 bp, Homo sapiens
tattaggtaaataat

SEQ ID NO: 335899 - DNA, 15 bp, Homo sapiens
ttattaggtaaataa

SEQ ID NO: 335900 - DNA, 15 bp, Homo sapiens
attattaggtaaata

SEQ ID NO: 335901 - DNA, 15 bp, Homo sapiens
tattattaggtaaat

SEQ ID NO: 335902 - DNA, 15 bp, Homo sapiens
ttattattaggtaaa

SEQ ID NO: 335903 - DNA, 15 bp, Homo sapiens
attattattaggtaa

SEQ ID NO: 335904 - DNA, 15 bp, Homo sapiens
aattattattaggta

SEQ ID NO: 335905 - DNA, 15 bp, Homo sapiens
caattattattaggt

SEQ ID NO: 335906 - DNA, 15 bp, Homo sapiens
acaattattattagg

SEQ ID NO: 335907 - DNA, 15 bp, Homo sapiens
cacaattattattag

SEQ ID NO: 335908 - DNA, 15 bp, Homo sapiens
acacaattattatta

SEQ ID NO: 335909 - DNA, 15 bp, Homo sapiens
aacacaattattatt

SEQ ID NO: 335910 - DNA, 15 bp, Homo sapiens
taacacaattattat

SEQ ID NO: 335911 - DNA, 15 bp, Homo sapiens
ataacacaattatta

SEQ ID NO: 335912 - DNA, 15 bp, Homo sapiens
aataacacaattatt

SEQ ID NO: 335913 - DNA, 15 bp, Homo sapiens
taataacacaattat

SEQ ID NO: 335914 - DNA, 15 bp, Homo sapiens
ttaataacacaatta

SEQ ID NO: 335915 - DNA, 15 bp, Homo sapiens
attaataacacaatt

SEQ ID NO: 335916 - DNA, 15 bp, Homo sapiens
tattaataacacaat

SEQ ID NO: 335917 - DNA, 15 bp, Homo sapiens
gtattaataacacaa

SEQ ID NO: 335918 - DNA, 15 bp, Homo sapiens
agtattaataacaca

SEQ ID NO: 335919 - DNA, 15 bp, Homo sapiens
cagtattaataacac

SEQ ID NO: 335920 - DNA, 15 bp, Homo sapiens
acagtattaataaca

SEQ ID NO: 335921 - DNA, 15 bp, Homo sapiens
aacagtattaataac

SEQ ID NO: 335922 - DNA, 15 bp, Homo sapiens
aaacagtattaataa

SEQ ID NO: 335923 - DNA, 15 bp, Homo sapiens
taaacagtattaata

SEQ ID NO: 335924 - DNA, 15 bp, Homo sapiens
ataaacagtattaat

SEQ ID NO: 335925 - DNA, 15 bp, Homo sapiens
aataaacagtattaa

SEQ ID NO: 335926 - DNA, 15 bp, Homo sapiens
aaataaacagtatta

SEQ ID NO: 335927 - DNA, 15 bp, Homo sapiens
taaataaacagtatt

SEQ ID NO: 335928 - DNA, 15 bp, Homo sapiens
ttaaataaacagtat

SEQ ID NO: 335929 - DNA, 15 bp, Homo sapiens
attaaataaacagta

SEQ ID NO: 335930 - DNA, 15 bp, Homo sapiens
tattaaataaacagt

SEQ ID NO: 335931 - DNA, 15 bp, Homo sapiens
ctattaaataaacag

SEQ ID NO: 335932 - DNA, 15 bp, Homo sapiens
tctattaaataaaca

SEQ ID NO: 335933 - DNA, 15 bp, Homo sapiens
ctctattaaataaac

SEQ ID NO: 335934 - DNA, 15 bp, Homo sapiens
cctctattaaataaa

SEQ ID NO: 335935 - DNA, 15 bp, Homo sapiens
tcctctattaaataa

SEQ ID NO: 335936 - DNA, 15 bp, Homo sapiens
ttcctctattaaata

SEQ ID NO: 335937 - DNA, 15 bp, Homo sapiens
tttcctctattaaat

SEQ ID NO: 335938 - DNA, 15 bp, Homo sapiens
gtttcctctattaaa

SEQ ID NO: 335939 - DNA, 15 bp, Homo sapiens
tgtttcctctattaa

SEQ ID NO: 335940 - DNA, 15 bp, Homo sapiens
ttgtttcctctatta

SEQ ID NO: 335941 - DNA, 15 bp, Homo sapiens
attgtttcctctatt

SEQ ID NO: 335942 - DNA, 15 bp, Homo sapiens
cattgtttcctctat

SEQ ID NO: 335943 - DNA, 15 bp, Homo sapiens
gcattgtttcctcta

SEQ ID NO: 335944 - DNA, 15 bp, Homo sapiens
tgcattgtttcctct

SEQ ID NO: 335945 - DNA, 15 bp, Homo sapiens
ctgcattgtttcctc

SEQ ID NO: 335946 - DNA, 15 bp, Homo sapiens
tctgcattgtttcct

SEQ ID NO: 335947 - DNA, 15 bp, Homo sapiens
ctctgcattgtttcc

SEQ ID NO: 335948 - DNA, 15 bp, Homo sapiens
cctctgcattgtttc

SEQ ID NO: 335949 - DNA, 15 bp, Homo sapiens
acctctgcattgttt

SEQ ID NO: 335950 - DNA, 15 bp, Homo sapiens
tacctctgcattgtt

SEQ ID NO: 335951 - DNA, 15 bp, Homo sapiens
gtacctctgcattgt

SEQ ID NO: 335952 - DNA, 15 bp, Homo sapiens
agtacctctgcattg

SEQ ID NO: 335953 - DNA, 15 bp, Homo sapiens
aagtacctctgcatt

SEQ ID NO: 335954 - DNA, 15 bp, Homo sapiens
caagtacctctgcat

SEQ ID NO: 335955 - DNA, 15 bp, Homo sapiens
acaagtacctctgca

SEQ ID NO: 335956 - DNA, 15 bp, Homo sapiens
tacaagtacctctgc

SEQ ID NO: 335957 - DNA, 15 bp, Homo sapiens
ctacaagtacctctg

SEQ ID NO: 335958 - DNA, 15 bp, Homo sapiens
actacaagtacctct

SEQ ID NO: 335959 - DNA, 15 bp, Homo sapiens
tactacaagtacctc

SEQ ID NO: 335960 - DNA, 15 bp, Homo sapiens
atactacaagtacct

SEQ ID NO: 335961 - DNA, 15 bp, Homo sapiens
aatactacaagtacc

SEQ ID NO: 335962 - DNA, 15 bp, Homo sapiens
caatactacaagtac

SEQ ID NO: 335963 - DNA, 15 bp, Homo sapiens
acaatactacaagta

SEQ ID NO: 335964 - DNA, 15 bp, Homo sapiens
cacaatactacaagt

SEQ ID NO: 335965 - DNA, 15 bp, Homo sapiens
acacaatactacaag

SEQ ID NO: 335966 - DNA, 15 bp, Homo sapiens
tacacaatactacaa

SEQ ID NO: 335967 - DNA, 15 bp, Homo sapiens
ttacacaatactaca

SEQ ID NO: 335968 - DNA, 15 bp, Homo sapiens
cttacacaatactac

SEQ ID NO: 335969 - DNA, 15 bp, Homo sapiens
acttacacaatacta

SEQ ID NO: 335970 - DNA, 15 bp, Homo sapiens
aacttacacaatact

SEQ ID NO: 335971 - DNA, 15 bp, Homo sapiens
aaacttacacaatac

SEQ ID NO: 335972 - DNA, 15 bp, Homo sapiens
taaacttacacaata

SEQ ID NO: 335973 - DNA, 15 bp, Homo sapiens
ttaaacttacacaat

SEQ ID NO: 335974 - DNA, 15 bp, Homo sapiens
gttaaacttacacaa

SEQ ID NO: 335975 - DNA, 15 bp, Homo sapiens
cgttaaacttacaca

SEQ ID NO: 335976 - DNA, 15 bp, Homo sapiens
acgttaaacttacac

SEQ ID NO: 335977 - DNA, 15 bp, Homo sapiens
cacgttaaacttaca

SEQ ID NO: 335978 - DNA, 15 bp, Homo sapiens
gcacgttaaacttac

SEQ ID NO: 335979 - DNA, 15 bp, Homo sapiens
cgcacgttaaactta

SEQ ID NO: 335980 - DNA, 15 bp, Homo sapiens
gcgcacgttaaactt

SEQ ID NO: 335981 - DNA, 15 bp, Homo sapiens
tgcgcacgttaaact

SEQ ID NO: 335982 - DNA, 15 bp, Homo sapiens
atgcgcacgttaaac

SEQ ID NO: 335983 - DNA, 15 bp, Homo sapiens
aatgcgcacgttaaa

SEQ ID NO: 335984 - DNA, 15 bp, Homo sapiens
caatgcgcacgttaa

SEQ ID NO: 335985 - DNA, 15 bp, Homo sapiens
gcaatgcgcacgtta

SEQ ID NO: 335986 - DNA, 15 bp, Homo sapiens
ggcaatgcgcacgtt

SEQ ID NO: 335987 - DNA, 15 bp, Homo sapiens
tggcaatgcgcacgt

SEQ ID NO: 335988 - DNA, 15 bp, Homo sapiens
ttggcaatgcgcacg

SEQ ID NO: 335989 - DNA, 15 bp, Homo sapiens
cttggcaatgcgcac

SEQ ID NO: 335990 - DNA, 15 bp, Homo sapiens
ccttggcaatgcgca

SEQ ID NO: 335991 - DNA, 15 bp, Homo sapiens
accttggcaatgcgc

SEQ ID NO: 335992 - DNA, 15 bp, Homo sapiens
aaccttggcaatgcg

SEQ ID NO: 335993 - DNA, 15 bp, Homo sapiens
taaccttggcaatgc

SEQ ID NO: 335994 - DNA, 15 bp, Homo sapiens
ataaccttggcaatg

SEQ ID NO: 335995 - DNA, 15 bp, Homo sapiens
tataaccttggcaat

SEQ ID NO: 335996 - DNA, 15 bp, Homo sapiens
atataaccttggcaa

SEQ ID NO: 335997 - DNA, 15 bp, Homo sapiens
aatataaccttggca

SEQ ID NO: 335998 - DNA, 15 bp, Homo sapiens
aaatataaccttggc

SEQ ID NO: 335999 - DNA, 15 bp, Homo sapiens
caaatataaccttgg

SEQ ID NO: 336000 - DNA, 15 bp, Homo sapiens
tcaaatataaccttg

SEQ ID NO: 336001 - DNA, 15 bp, Homo sapiens
ttcaaatataacctt

SEQ ID NO: 336002 - DNA, 15 bp, Homo sapiens
attcaaatataacct

SEQ ID NO: 336003 - DNA, 15 bp, Homo sapiens
cattcaaatataacc

SEQ ID NO: 336004 - DNA, 15 bp, Homo sapiens
tcattcaaatataac

SEQ ID NO: 336005 - DNA, 15 bp, Homo sapiens
gtcattcaaatataa

SEQ ID NO: 336006 - DNA, 15 bp, Homo sapiens
cgtcattcaaatata

SEQ ID NO: 336007 - DNA, 15 bp, Homo sapiens
acgtcattcaaatat

SEQ ID NO: 336008 - DNA, 15 bp, Homo sapiens
aacgtcattcaaata

SEQ ID NO: 336009 - DNA, 15 bp, Homo sapiens
aaacgtcattcaaat

SEQ ID NO: 336010 - DNA, 15 bp, Homo sapiens
aaaacgtcattcaaa

SEQ ID NO: 336011 - DNA, 15 bp, Homo sapiens
aaaaacgtcattcaa

SEQ ID NO: 336012 - DNA, 15 bp, Homo sapiens
taaaaacgtcattca

SEQ ID NO: 336013 - DNA, 15 bp, Homo sapiens
ataaaaacgtcattc

SEQ ID NO: 336014 - DNA, 15 bp, Homo sapiens
cataaaaacgtcatt

SEQ ID NO: 336015 - DNA, 15 bp, Homo sapiens
acataaaaacgtcat

SEQ ID NO: 336016 - DNA, 15 bp, Homo sapiens
tacataaaaacgtca

SEQ ID NO: 336017 - DNA, 15 bp, Homo sapiens
ttacataaaaacgtc

SEQ ID NO: 336018 - DNA, 15 bp, Homo sapiens
tttacataaaaacgt

SEQ ID NO: 336019 - DNA, 15 bp, Homo sapiens
atttacataaaaacg

SEQ ID NO: 336020 - DNA, 15 bp, Homo sapiens
catttacataaaaac

SEQ ID NO: 336021 - DNA, 15 bp, Homo sapiens
acatttacataaaaa

SEQ ID NO: 336022 - DNA, 15 bp, Homo sapiens
gacatttacataaaa

SEQ ID NO: 336023 - DNA, 15 bp, Homo sapiens
ggacatttacataaa

SEQ ID NO: 336024 - DNA, 15 bp, Homo sapiens
tggacatttacataa

SEQ ID NO: 336025 - DNA, 15 bp, Homo sapiens
atggacatttacata

SEQ ID NO: 336026 - DNA, 15 bp, Homo sapiens
aatggacatttacat

SEQ ID NO: 336027 - DNA, 15 bp, Homo sapiens
aaatggacatttaca

SEQ ID NO: 336028 - DNA, 15 bp, Homo sapiens
taaatggacatttac

SEQ ID NO: 336029 - DNA, 15 bp, Homo sapiens
ataaatggacattta

SEQ ID NO: 336030 - DNA, 15 bp, Homo sapiens
aataaatggacattt

SEQ ID NO: 336031 - DNA, 15 bp, Homo sapiens
taataaatggacatt

SEQ ID NO: 336032 - DNA, 15 bp, Homo sapiens
gtaataaatggacat

SEQ ID NO: 336033 - DNA, 15 bp, Homo sapiens
tgtaataaatggaca

SEQ ID NO: 336034 - DNA, 15 bp, Homo sapiens
gtgtaataaatggac

SEQ ID NO: 336035 - DNA, 15 bp, Homo sapiens
cgtgtaataaatgga

SEQ ID NO: 336036 - DNA, 15 bp, Homo sapiens
acgtgtaataaatgg

SEQ ID NO: 336037 - DNA, 15 bp, Homo sapiens
aacgtgtaataaatg

SEQ ID NO: 336038 - DNA, 15 bp, Homo sapiens
aaacgtgtaataaat

SEQ ID NO: 336039 - DNA, 15 bp, Homo sapiens
gaaacgtgtaataaa

SEQ ID NO: 336040 - DNA, 15 bp, Homo sapiens
tgaaacgtgtaataa

SEQ ID NO: 336041 - DNA, 15 bp, Homo sapiens
gtgaaacgtgtaata

SEQ ID NO: 336042 - DNA, 15 bp, Homo sapiens
cgtgaaacgtgtaat

SEQ ID NO: 336043 - DNA, 15 bp, Homo sapiens
tcgtgaaacgtgtaa

SEQ ID NO: 336044 - DNA, 15 bp, Homo sapiens
ttcgtgaaacgtgta

SEQ ID NO: 336045 - DNA, 15 bp, Homo sapiens
gttcgtgaaacgtgt

SEQ ID NO: 336046 - DNA, 15 bp, Homo sapiens
cgttcgtgaaacgtg

SEQ ID NO: 336047 - DNA, 15 bp, Homo sapiens
gcgttcgtgaaacgt

SEQ ID NO: 336048 - DNA, 15 bp, Homo sapiens
agcgttcgtgaaacg

SEQ ID NO: 336049 - DNA, 15 bp, Homo sapiens
tagcgttcgtgaaac

SEQ ID NO: 336050 - DNA, 15 bp, Homo sapiens
atagcgttcgtgaaa

SEQ ID NO: 336051 - DNA, 15 bp, Homo sapiens
aatagcgttcgtgaa

SEQ ID NO: 336052 - DNA, 15 bp, Homo sapiens
caatagcgttcgtga

SEQ ID NO: 336053 - DNA, 15 bp, Homo sapiens
acaatagcgttcgtg

SEQ ID NO: 336054 - DNA, 15 bp, Homo sapiens
aacaatagcgttcgt

SEQ ID NO: 336055 - DNA, 15 bp, Homo sapiens
aaacaatagcgttcg

SEQ ID NO: 336056 - DNA, 15 bp, Homo sapiens
caaacaatagcgttc

SEQ ID NO: 336057 - DNA, 15 bp, Homo sapiens
acaaacaatagcgtt

SEQ ID NO: 336058 - DNA, 15 bp, Homo sapiens
cacaaacaatagcgt

SEQ ID NO: 336059 - DNA, 15 bp, Homo sapiens
tcacaaacaatagcg

SEQ ID NO: 336060 - DNA, 15 bp, Homo sapiens
atcacaaacaatagc

SEQ ID NO: 336061 - DNA, 15 bp, Homo sapiens
aatcacaaacaatag

SEQ ID NO: 336062 - DNA, 15 bp, Homo sapiens
caatcacaaacaata

SEQ ID NO: 336063 - DNA, 15 bp, Homo sapiens
acaatcacaaacaat

SEQ ID NO: 336064 - DNA, 15 bp, Homo sapiens
tacaatcacaaacaa

SEQ ID NO: 336065 - DNA, 15 bp, Homo sapiens
atacaatcacaaaca

SEQ ID NO: 336066 - DNA, 15 bp, Homo sapiens
catacaatcacaaac

SEQ ID NO: 336067 - DNA, 15 bp, Homo sapiens
tcatacaatcacaaa

SEQ ID NO: 336068 - DNA, 15 bp, Homo sapiens
atcatacaatcacaa

SEQ ID NO: 336069 - DNA, 15 bp, Homo sapiens
tatcatacaatcaca

SEQ ID NO: 336070 - DNA, 15 bp, Homo sapiens
gtatcatacaatcac

SEQ ID NO: 336071 - DNA, 15 bp, Homo sapiens
tgtatcatacaatca

SEQ ID NO: 336072 - DNA, 15 bp, Homo sapiens
atgtatcatacaatc

SEQ ID NO: 336073 - DNA, 15 bp, Homo sapiens
aatgtatcatacaat

SEQ ID NO: 336074 - DNA, 15 bp, Homo sapiens
gaatgtatcatacaa

SEQ ID NO: 336075 - DNA, 15 bp, Homo sapiens
agaatgtatcataca

SEQ ID NO: 336076 - DNA, 15 bp, Homo sapiens
tagaatgtatcatac

SEQ ID NO: 336077 - DNA, 15 bp, Homo sapiens
ctagaatgtatcata

SEQ ID NO: 336078 - DNA, 15 bp, Homo sapiens
gctagaatgtatcat

SEQ ID NO: 336079 - DNA, 15 bp, Homo sapiens
agctagaatgtatca

SEQ ID NO: 336080 - DNA, 15 bp, Homo sapiens
tagctagaatgtatc

SEQ ID NO: 336081 - DNA, 15 bp, Homo sapiens
ctagctagaatgtat

SEQ ID NO: 336082 - DNA, 15 bp, Homo sapiens
tctagctagaatgta

SEQ ID NO: 336083 - DNA, 15 bp, Homo sapiens
atctagctagaatgt

SEQ ID NO: 336084 - DNA, 15 bp, Homo sapiens
aatctagctagaatg

SEQ ID NO: 336085 - DNA, 15 bp, Homo sapiens
taatctagctagaat

SEQ ID NO: 336086 - DNA, 15 bp, Homo sapiens
ataatctagctagaa

SEQ ID NO: 336087 - DNA, 15 bp, Homo sapiens
aataatctagctaga

SEQ ID NO: 336088 - DNA, 15 bp, Homo sapiens
taataatctagctag

SEQ ID NO: 336089 - DNA, 15 bp, Homo sapiens
ataataatctagcta

SEQ ID NO: 336090 - DNA, 15 bp, Homo sapiens
gataataatctagct

SEQ ID NO: 336091 - DNA, 15 bp, Homo sapiens
agataataatctagc

SEQ ID NO: 336092 - DNA, 15 bp, Homo sapiens
aagataataatctag

SEQ ID NO: 336093 - DNA, 15 bp, Homo sapiens
aaagataataatcta

SEQ ID NO: 336094 - DNA, 15 bp, Homo sapiens
aaaagataataatct

SEQ ID NO: 336095 - DNA, 15 bp, Homo sapiens
gaaaagataataatc

SEQ ID NO: 336096 - DNA, 15 bp, Homo sapiens
agaaaagataataat

SEQ ID NO: 336097 - DNA, 15 bp, Homo sapiens
aagaaaagataataa

SEQ ID NO: 336098 - DNA, 15 bp, Homo sapiens
aaagaaaagataata

SEQ ID NO: 336099 - DNA, 15 bp, Homo sapiens
aaaagaaaagataat

SEQ ID NO: 336100 - DNA, 15 bp, Homo sapiens
aaaaagaaaagataa

SEQ ID NO: 336101 - DNA, 15 bp, Homo sapiens
aaaaaagaaaagata

SEQ ID NO: 336102 - DNA, 15 bp, Homo sapiens
aaaaaaagaaaagat

SEQ ID NO: 336103 - DNA, 15 bp, Homo sapiens
aaaaaaaagaaaaga

SEQ ID NO: 336104 - DNA, 15 bp, Homo sapiens
aaaaaaaaagaaaag

SEQ ID NO: 336105 - DNA, 15 bp, Homo sapiens
aaaaaaaaaagaaaa

SEQ ID NO: 336106 - DNA, 15 bp, Homo sapiens
gaaaaaaaaaaagaa

SEQ ID NO: 336107 - DNA, 15 bp, Homo sapiens
ggaaaaaaaaaaaga

SEQ ID NO: 336108 - DNA, 15 bp, Homo sapiens
aggaaaaaaaaaaag

SEQ ID NO: 336109 - DNA, 15 bp, Homo sapiens
aaggaaaaaaaaaaa

SEQ ID NO: 336110 - DNA, 15 bp, Homo sapiens
aaaggaaaaaaaaaa

SEQ ID NO: 336111 - DNA, 15 bp, Homo sapiens
gaaaaggaaaaaaaa

SEQ ID NO: 336112 - DNA, 15 bp, Homo sapiens
agaaaaggaaaaaaa

SEQ ID NO: 336113 - DNA, 15 bp, Homo sapiens
aagaaaaggaaaaaa

SEQ ID NO: 336114 - DNA, 15 bp, Homo sapiens
aaagaaaaggaaaaa

SEQ ID NO: 336115 - DNA, 15 bp, Homo sapiens
aaaagaaaaggaaaa

SEQ ID NO: 336116 - DNA, 15 bp, Homo sapiens
aaaaagaaaaggaaa

SEQ ID NO: 336117 - DNA, 15 bp, Homo sapiens
aaaaaagaaaaggaa

SEQ ID NO: 336118 - DNA, 15 bp, Homo sapiens
aaaaaaagaaaagga

SEQ ID NO: 336119 - DNA, 15 bp, Homo sapiens
aaaaaaaagaaaagg

SEQ ID NO: 336120 - DNA, 15 bp, Homo sapiens
taaaaaaaaagaaaa

SEQ ID NO: 336121 - DNA, 15 bp, Homo sapiens
ttaaaaaaaaagaaa

SEQ ID NO: 336122 - DNA, 15 bp, Homo sapiens
tttaaaaaaaaagaa

SEQ ID NO: 336123 - DNA, 15 bp, Homo sapiens
ttttaaaaaaaaaga

SEQ ID NO: 336124 - DNA, 15 bp, Homo sapiens
cttttaaaaaaaaag

SEQ ID NO: 336125 - DNA, 15 bp, Homo sapiens
ccttttaaaaaaaaa

SEQ ID NO: 336126 - DNA, 15 bp, Homo sapiens
accttttaaaaaaaa

SEQ ID NO: 336127 - DNA, 15 bp, Homo sapiens
caccttttaaaaaaa

SEQ ID NO: 336128 - DNA, 15 bp, Homo sapiens
ccaccttttaaaaaa

SEQ ID NO: 336129 - DNA, 15 bp, Homo sapiens
tccaccttttaaaaa

SEQ ID NO: 336130 - DNA, 15 bp, Homo sapiens
ctccaccttttaaaa

SEQ ID NO: 336131 - DNA, 15 bp, Homo sapiens
actccaccttttaaa

SEQ ID NO: 336132 - DNA, 15 bp, Homo sapiens
aactccaccttttaa

SEQ ID NO: 336133 - DNA, 15 bp, Homo sapiens
aaactccacctttta

SEQ ID NO: 336134 - DNA, 15 bp, Homo sapiens
gaaactccacctttt

SEQ ID NO: 336135 - DNA, 15 bp, Homo sapiens
cgaaactccaccttt

SEQ ID NO: 336136 - DNA, 15 bp, Homo sapiens
gcgaaactccacctt

SEQ ID NO: 336137 - DNA, 15 bp, Homo sapiens
agcgaaactccacct

SEQ ID NO: 336138 - DNA, 15 bp, Homo sapiens
gagcgaaactccacc

SEQ ID NO: 336139 - DNA, 15 bp, Homo sapiens
agagcgaaactccac

SEQ ID NO: 336140 - DNA, 15 bp, Homo sapiens
aagagcgaaactcca

SEQ ID NO: 336141 - DNA, 15 bp, Homo sapiens
acaagagcgaaactc

SEQ ID NO: 336142 - DNA, 15 bp, Homo sapiens
aacaagagcgaaact

SEQ ID NO: 336143 - DNA, 15 bp, Homo sapiens
taacaagagcgaaac

SEQ ID NO: 336144 - DNA, 15 bp, Homo sapiens
gtaacaagagcgaaa

SEQ ID NO: 336145 - DNA, 15 bp, Homo sapiens
ggtaacaagagcgaa

SEQ ID NO: 336146 - DNA, 15 bp, Homo sapiens
gggtaacaagagcga

SEQ ID NO: 336147 - DNA, 15 bp, Homo sapiens
tgggtaacaagagcg

SEQ ID NO: 336148 - DNA, 15 bp, Homo sapiens
ttgggtaacaagagc

SEQ ID NO: 336149 - DNA, 15 bp, Homo sapiens
cttgggtaacaagag

SEQ ID NO: 336150 - DNA, 15 bp, Homo sapiens
gcttgggtaacaaga

SEQ ID NO: 336151 - DNA, 15 bp, Homo sapiens
agcttgggtaacaag

SEQ ID NO: 336152 - DNA, 15 bp, Homo sapiens
cagcttgggtaacaa

SEQ ID NO: 336153 - DNA, 15 bp, Homo sapiens
ccagcttgggtaaca

SEQ ID NO: 336154 - DNA, 15 bp, Homo sapiens
tccagcttgggtaac

SEQ ID NO: 336155 - DNA, 15 bp, Homo sapiens
ctccagcttgggtaa

SEQ ID NO: 336156 - DNA, 15 bp, Homo sapiens
actccagcttgggta

SEQ ID NO: 336157 - DNA, 15 bp, Homo sapiens
cactccagcttgggt

SEQ ID NO: 336158 - DNA, 15 bp, Homo sapiens
gcactccagcttggg

SEQ ID NO: 336159 - DNA, 15 bp, Homo sapiens
tgcactccagcttgg

SEQ ID NO: 336160 - DNA, 15 bp, Homo sapiens
ttgcactccagcttg

SEQ ID NO: 336161 - DNA, 15 bp, Homo sapiens
attgcactccagctt

SEQ ID NO: 336162 - DNA, 15 bp, Homo sapiens
cattgcactccagct

SEQ ID NO: 336163 - DNA, 15 bp, Homo sapiens
cgccattgcactcca

SEQ ID NO: 336164 - DNA, 15 bp, Homo sapiens
acgccattgcactcc

SEQ ID NO: 336165 - DNA, 15 bp, Homo sapiens
cacgccattgcactc

SEQ ID NO: 336166 - DNA, 15 bp, Homo sapiens
tcacgccattgcact

SEQ ID NO: 336167 - DNA, 15 bp, Homo sapiens
atcacgccattgcac

SEQ ID NO: 336168 - DNA, 15 bp, Homo sapiens
gatcacgccattgca

SEQ ID NO: 336169 - DNA, 15 bp, Homo sapiens
agatcacgccattgc

SEQ ID NO: 336170 - DNA, 15 bp, Homo sapiens
gagatcacgccattg

SEQ ID NO: 336171 - DNA, 15 bp, Homo sapiens
cgagatcacgccatt

SEQ ID NO: 336172 - DNA, 15 bp, Homo sapiens
ccgagatcacgccat

SEQ ID NO: 336173 - DNA, 15 bp, Homo sapiens
gccgagatcacgcca

SEQ ID NO: 336174 - DNA, 15 bp, Homo sapiens
agccgagatcacgcc

SEQ ID NO: 336175 - DNA, 15 bp, Homo sapiens
gagccgagatcacgc

SEQ ID NO: 336176 - DNA, 15 bp, Homo sapiens
tgagccgagatcacg

SEQ ID NO: 336177 - DNA, 15 bp, Homo sapiens
gtgagccgagatcac

SEQ ID NO: 336178 - DNA, 15 bp, Homo sapiens
ggtgagccgagatca

SEQ ID NO: 336179 - DNA, 15 bp, Homo sapiens
ggaggttgcggtgag

SEQ ID NO: 336180 - DNA, 15 bp, Homo sapiens
cggaggttgcggtga

SEQ ID NO: 336181 - DNA, 15 bp, Homo sapiens
gcggaggttgcggtg

SEQ ID NO: 336182 - DNA, 15 bp, Homo sapiens
agcggaggttgcggt

SEQ ID NO: 336183 - DNA, 15 bp, Homo sapiens
aagcggaggttgcgg

SEQ ID NO: 336184 - DNA, 15 bp, Homo sapiens
gaagcggaggttgcg

SEQ ID NO: 336185 - DNA, 15 bp, Homo sapiens
ggaagcggaggttgc

SEQ ID NO: 336186 - DNA, 15 bp, Homo sapiens
gggaagcggaggttg

SEQ ID NO: 336187 - DNA, 15 bp, Homo sapiens
cgggaagcggaggtt

SEQ ID NO: 336188 - DNA, 15 bp, Homo sapiens
ccgggaagcggaggt

SEQ ID NO: 336189 - DNA, 15 bp, Homo sapiens
cccgggaagcggagg

SEQ ID NO: 336190 - DNA, 15 bp, Homo sapiens
acccgggaagcggag

SEQ ID NO: 336191 - DNA, 15 bp, Homo sapiens
aacccgggaagcgga

SEQ ID NO: 336192 - DNA, 15 bp, Homo sapiens
gaacccgggaagcgg

SEQ ID NO: 336193 - DNA, 15 bp, Homo sapiens
tgaacccgggaagcg

SEQ ID NO: 336194 - DNA, 15 bp, Homo sapiens
ttgaacccgggaagc

SEQ ID NO: 336195 - DNA, 15 bp, Homo sapiens
cttgaacccgggaag

SEQ ID NO: 336196 - DNA, 15 bp, Homo sapiens
gcttgaacccgggaa

SEQ ID NO: 336197 - DNA, 15 bp, Homo sapiens
ggcttgaacccggga

SEQ ID NO: 336198 - DNA, 15 bp, Homo sapiens
tggcttgaacccggg

SEQ ID NO: 336199 - DNA, 15 bp, Homo sapiens
atggcttgaacccgg

SEQ ID NO: 336200 - DNA, 15 bp, Homo sapiens
aatggcttgaacccg

SEQ ID NO: 336201 - DNA, 15 bp, Homo sapiens
gaatggcttgaaccc

SEQ ID NO: 336202 - DNA, 15 bp, Homo sapiens
agaatggcttgaacc

SEQ ID NO: 336203 - DNA, 15 bp, Homo sapiens
gagaatggcttgaac

SEQ ID NO: 336204 - DNA, 15 bp, Homo sapiens
cgagaatggcttgaa

SEQ ID NO: 336205 - DNA, 15 bp, Homo sapiens
acgagaatggcttga

SEQ ID NO: 336206 - DNA, 15 bp, Homo sapiens
cacgagaatggcttg

SEQ ID NO: 336207 - DNA, 15 bp, Homo sapiens
gcacgagaatggctt

SEQ ID NO: 336208 - DNA, 15 bp, Homo sapiens
ggcacgagaatggct

SEQ ID NO: 336209 - DNA, 15 bp, Homo sapiens
aggcacgagaatggc

SEQ ID NO: 336210 - DNA, 15 bp, Homo sapiens
gaggcacgagaatgg

SEQ ID NO: 336211 - DNA, 15 bp, Homo sapiens
tgaggcacgagaatg

SEQ ID NO: 336212 - DNA, 15 bp, Homo sapiens
ctgaggcacgagaat

SEQ ID NO: 336213 - DNA, 15 bp, Homo sapiens
gctgaggcacgagaa

SEQ ID NO: 336214 - DNA, 15 bp, Homo sapiens
ggctgaggcacgaga

SEQ ID NO: 336215 - DNA, 15 bp, Homo sapiens
aggctgaggcacgag

SEQ ID NO: 336216 - DNA, 15 bp, Homo sapiens
gaggctgaggcacga

SEQ ID NO: 336217 - DNA, 15 bp, Homo sapiens
ggaggctgaggcacg

SEQ ID NO: 336218 - DNA, 15 bp, Homo sapiens
aggaggctgaggcac

SEQ ID NO: 336219 - DNA, 15 bp, Homo sapiens
actactcaggaggct

SEQ ID NO: 336220 - DNA, 15 bp, Homo sapiens
aactactcaggaggc

SEQ ID NO: 336221 - DNA, 15 bp, Homo sapiens
caactactcaggagg

SEQ ID NO: 336222 - DNA, 15 bp, Homo sapiens
ccaactactcaggag

SEQ ID NO: 336223 - DNA, 15 bp, Homo sapiens
cccaactactcagga

SEQ ID NO: 336224 - DNA, 15 bp, Homo sapiens
tcccaactactcagg

SEQ ID NO: 336225 - DNA, 15 bp, Homo sapiens
atcccaactactcag

SEQ ID NO: 336226 - DNA, 15 bp, Homo sapiens
aatcccaactactca

SEQ ID NO: 336227 - DNA, 15 bp, Homo sapiens
taatcccaactactc

SEQ ID NO: 336228 - DNA, 15 bp, Homo sapiens
gcctgtaatcccaac

SEQ ID NO: 336229 - DNA, 15 bp, Homo sapiens
tgcctgtaatcccaa

SEQ ID NO: 336230 - DNA, 15 bp, Homo sapiens
cgcatgcctgtaatc

SEQ ID NO: 336231 - DNA, 15 bp, Homo sapiens
gcgcatgcctgtaat

SEQ ID NO: 336232 - DNA, 15 bp, Homo sapiens
ggcgcatgcctgtaa

SEQ ID NO: 336233 - DNA, 15 bp, Homo sapiens
taatacaaaaattag

SEQ ID NO: 336234 - DNA, 15 bp, Homo sapiens
ataatacaaaaatta

SEQ ID NO: 336235 - DNA, 15 bp, Homo sapiens
aataatacaaaaatt

SEQ ID NO: 336236 - DNA, 15 bp, Homo sapiens
taataatacaaaaat

SEQ ID NO: 336237 - DNA, 15 bp, Homo sapiens
ctaataatacaaaaa

SEQ ID NO: 336238 - DNA, 15 bp, Homo sapiens
actaataatacaaaa

SEQ ID NO: 336239 - DNA, 15 bp, Homo sapiens
tactaataatacaaa

SEQ ID NO: 336240 - DNA, 15 bp, Homo sapiens
ctactaataatacaa

SEQ ID NO: 336241 - DNA, 15 bp, Homo sapiens
tctactaataataca

SEQ ID NO: 336242 - DNA, 15 bp, Homo sapiens
ctctactaataatac

SEQ ID NO: 336243 - DNA, 15 bp, Homo sapiens
tctctactaataata

SEQ ID NO: 336244 - DNA, 15 bp, Homo sapiens
gtctctactaataat

SEQ ID NO: 336245 - DNA, 15 bp, Homo sapiens
cgtctctactaataa

SEQ ID NO: 336246 - DNA, 15 bp, Homo sapiens
tcgtctctactaata

SEQ ID NO: 336247 - DNA, 15 bp, Homo sapiens
ctcgtctctactaat

SEQ ID NO: 336248 - DNA, 15 bp, Homo sapiens
tctcgtctctactaa

SEQ ID NO: 336249 - DNA, 15 bp, Homo sapiens
atctcgtctctacta

SEQ ID NO: 336250 - DNA, 15 bp, Homo sapiens
aatctcgtctctact

SEQ ID NO: 336251 - DNA, 15 bp, Homo sapiens
aaatctcgtctctac

SEQ ID NO: 336252 - DNA, 15 bp, Homo sapiens
gaaatctcgtctcta

SEQ ID NO: 336253 - DNA, 15 bp, Homo sapiens
agaaatctcgtctct

SEQ ID NO: 336254 - DNA, 15 bp, Homo sapiens
gagaaatctcgtctc

SEQ ID NO: 336255 - DNA, 15 bp, Homo sapiens
ggagaaatctcgtct

SEQ ID NO: 336256 - DNA, 15 bp, Homo sapiens
tggagaaatctcgtc

SEQ ID NO: 336257 - DNA, 15 bp, Homo sapiens
atggagaaatctcgt

SEQ ID NO: 336258 - DNA, 15 bp, Homo sapiens
catggagaaatctcg

SEQ ID NO: 336259 - DNA, 15 bp, Homo sapiens
acatggagaaatctc

SEQ ID NO: 336260 - DNA, 15 bp, Homo sapiens
aacatggagaaatct

SEQ ID NO: 336261 - DNA, 15 bp, Homo sapiens
caacatggagaaatc

SEQ ID NO: 336262 - DNA, 15 bp, Homo sapiens
ccaacatggagaaat

SEQ ID NO: 336263 - DNA, 15 bp, Homo sapiens
attcgagaccagcct

SEQ ID NO: 336264 - DNA, 15 bp, Homo sapiens
aattcgagaccagcc

SEQ ID NO: 336265 - DNA, 15 bp, Homo sapiens
gaattcgagaccagc

SEQ ID NO: 336266 - DNA, 15 bp, Homo sapiens
agaattcgagaccag

SEQ ID NO: 336267 - DNA, 15 bp, Homo sapiens
gagaattcgagacca

SEQ ID NO: 336268 - DNA, 15 bp, Homo sapiens
tgagaattcgagacc

SEQ ID NO: 336269 - DNA, 15 bp, Homo sapiens
ttgagaattcgagac

SEQ ID NO: 336270 - DNA, 15 bp, Homo sapiens
gttgagaattcgaga

SEQ ID NO: 336271 - DNA, 15 bp, Homo sapiens
ggttgagaattcgag

SEQ ID NO: 336272 - DNA, 15 bp, Homo sapiens
aggttgagaattcga

SEQ ID NO: 336273 - DNA, 15 bp, Homo sapiens
gaggttgagaattcg

SEQ ID NO: 336274 - DNA, 15 bp, Homo sapiens
tgaggttgagaattc

SEQ ID NO: 336275 - DNA, 15 bp, Homo sapiens
ctgaggttgagaatt

SEQ ID NO: 336276 - DNA, 15 bp, Homo sapiens
cctgaggttgagaat

SEQ ID NO: 336277 - DNA, 15 bp, Homo sapiens
acctgaggttgagaa

SEQ ID NO: 336278 - DNA, 15 bp, Homo sapiens
cacctgaggttgaga

SEQ ID NO: 336279 - DNA, 15 bp, Homo sapiens
tcacctgaggttgag

SEQ ID NO: 336280 - DNA, 15 bp, Homo sapiens
atcacctgaggttga

SEQ ID NO: 336281 - DNA, 15 bp, Homo sapiens
gatcacctgaggttg

SEQ ID NO: 336282 - DNA, 15 bp, Homo sapiens
ggatcacctgaggtt

SEQ ID NO: 336283 - DNA, 15 bp, Homo sapiens
cggatcacctgaggt

SEQ ID NO: 336284 - DNA, 15 bp, Homo sapiens
gcggatcacctgagg

SEQ ID NO: 336285 - DNA, 15 bp, Homo sapiens
ggcggatcacctgag

SEQ ID NO: 336286 - DNA, 15 bp, Homo sapiens
aggcggatcacctga

SEQ ID NO: 336287 - DNA, 15 bp, Homo sapiens
caggcggatcacctg

SEQ ID NO: 336288 - DNA, 15 bp, Homo sapiens
gcaggcggatcacct

SEQ ID NO: 336289 - DNA, 15 bp, Homo sapiens
ggcaggcggatcacc

SEQ ID NO: 336290 - DNA, 15 bp, Homo sapiens
aggcaggcggatcac

SEQ ID NO: 336291 - DNA, 15 bp, Homo sapiens
gaggcaggcggatca

SEQ ID NO: 336292 - DNA, 15 bp, Homo sapiens
cgaggcaggcggatc

SEQ ID NO: 336293 - DNA, 15 bp, Homo sapiens
ccgaggcaggcggat

SEQ ID NO: 336294 - DNA, 15 bp, Homo sapiens
gccgaggcaggcgga

SEQ ID NO: 336295 - DNA, 15 bp, Homo sapiens
ggccgaggcaggcgg

SEQ ID NO: 336296 - DNA, 15 bp, Homo sapiens
aggccgaggcaggcg

SEQ ID NO: 336297 - DNA, 15 bp, Homo sapiens
gaggccgaggcaggc

SEQ ID NO: 336298 - DNA, 15 bp, Homo sapiens
ggaggccgaggcagg

SEQ ID NO: 336299 - DNA, 15 bp, Homo sapiens
gggaggccgaggcag

SEQ ID NO: 336300 - DNA, 15 bp, Homo sapiens
tgggaggccgaggca

SEQ ID NO: 336301 - DNA, 15 bp, Homo sapiens
gctttgggaggccga

SEQ ID NO: 336302 - DNA, 15 bp, Homo sapiens
agctttgggaggccg

SEQ ID NO: 336303 - DNA, 15 bp, Homo sapiens
gagctttgggaggcc

SEQ ID NO: 336304 - DNA, 15 bp, Homo sapiens
agagctttgggaggc

SEQ ID NO: 336305 - DNA, 15 bp, Homo sapiens
cagagctttgggagg

SEQ ID NO: 336306 - DNA, 15 bp, Homo sapiens
ccagagctttgggag

SEQ ID NO: 336307 - DNA, 15 bp, Homo sapiens
tccagagctttggga

SEQ ID NO: 336308 - DNA, 15 bp, Homo sapiens
ttccagagctttggg

SEQ ID NO: 336309 - DNA, 15 bp, Homo sapiens
attccagagctttgg

SEQ ID NO: 336310 - DNA, 15 bp, Homo sapiens
aattccagagctttg

SEQ ID NO: 336311 - DNA, 15 bp, Homo sapiens
taattccagagcttt

SEQ ID NO: 336312 - DNA, 15 bp, Homo sapiens
ctaattccagagctt

SEQ ID NO: 336313 - DNA, 15 bp, Homo sapiens
tctaattccagagct

SEQ ID NO: 336314 - DNA, 15 bp, Homo sapiens
ctctaattccagagc

SEQ ID NO: 336315 - DNA, 15 bp, Homo sapiens
cctctaattccagag

SEQ ID NO: 336316 - DNA, 15 bp, Homo sapiens
gcctctaattccaga

SEQ ID NO: 336317 - DNA, 15 bp, Homo sapiens
cgcctctaattccag

SEQ ID NO: 336318 - DNA, 15 bp, Homo sapiens
acgcctctaattcca

SEQ ID NO: 336319 - DNA, 15 bp, Homo sapiens
cacgcctctaattcc

SEQ ID NO: 336320 - DNA, 15 bp, Homo sapiens
tcacgcctctaattc

SEQ ID NO: 336321 - DNA, 15 bp, Homo sapiens
ctcacgcctctaatt

SEQ ID NO: 336322 - DNA, 15 bp, Homo sapiens
gctcacgcctctaat

SEQ ID NO: 336323 - DNA, 15 bp, Homo sapiens
ggctcacgcctctaa

SEQ ID NO: 336324 - DNA, 15 bp, Homo sapiens
tggctcacgcctcta

SEQ ID NO: 336325 - DNA, 15 bp, Homo sapiens
gtggctcacgcctct

SEQ ID NO: 336326 - DNA, 15 bp, Homo sapiens
ggtggctcacgcctc

SEQ ID NO: 336327 - DNA, 15 bp, Homo sapiens
agcggtggctcacgc

SEQ ID NO: 336328 - DNA, 15 bp, Homo sapiens
gagcggtggctcacg

SEQ ID NO: 336329 - DNA, 15 bp, Homo sapiens
ggagcggtggctcac

SEQ ID NO: 336330 - DNA, 15 bp, Homo sapiens
gggagcggtggctca

SEQ ID NO: 336331 - DNA, 15 bp, Homo sapiens
cgggagcggtggctc

SEQ ID NO: 336332 - DNA, 15 bp, Homo sapiens
ccgggagcggtggct

SEQ ID NO: 336333 - DNA, 15 bp, Homo sapiens
gccgggagcggtggc

SEQ ID NO: 336334 - DNA, 15 bp, Homo sapiens
agccgggagcggtgg

SEQ ID NO: 336335 - DNA, 15 bp, Homo sapiens
tagccgggagcggtg

SEQ ID NO: 336336 - DNA, 15 bp, Homo sapiens
atagccgggagcggt

SEQ ID NO: 336337 - DNA, 15 bp, Homo sapiens
gatagccgggagcgg

SEQ ID NO: 336338 - DNA, 15 bp, Homo sapiens
agatagccgggagcg

SEQ ID NO: 336339 - DNA, 15 bp, Homo sapiens
aagatagccgggagc

SEQ ID NO: 336340 - DNA, 15 bp, Homo sapiens
aaagatagccgggag

SEQ ID NO: 336341 - DNA, 15 bp, Homo sapiens
aaaagatagccggga

SEQ ID NO: 336342 - DNA, 15 bp, Homo sapiens
gaaaagatagccggg

SEQ ID NO: 336343 - DNA, 15 bp, Homo sapiens
agaaaagatagccgg

SEQ ID NO: 336344 - DNA, 15 bp, Homo sapiens
caggtggaggtattg

SEQ ID NO: 336345 - DNA, 15 bp, Homo sapiens
tcaggtggaggtatt

SEQ ID NO: 336346 - DNA, 15 bp, Homo sapiens
ctcaggtggaggtat

SEQ ID NO: 336347 - DNA, 15 bp, Homo sapiens
actcaggtggaggta

SEQ ID NO: 336348 - DNA, 15 bp, Homo sapiens
aactcaggtggaggt

SEQ ID NO: 336349 - DNA, 15 bp, Homo sapiens
caactcaggtggagg

SEQ ID NO: 336350 - DNA, 15 bp, Homo sapiens
ccaactcaggtggag

SEQ ID NO: 336351 - DNA, 15 bp, Homo sapiens
tccaactcaggtgga

SEQ ID NO: 336352 - DNA, 15 bp, Homo sapiens
atccaactcaggtgg

SEQ ID NO: 336353 - DNA, 15 bp, Homo sapiens
catccaactcaggtg

SEQ ID NO: 336354 - DNA, 15 bp, Homo sapiens
tcatccaactcaggt

SEQ ID NO: 336355 - DNA, 15 bp, Homo sapiens
atcatccaactcagg

SEQ ID NO: 336356 - DNA, 15 bp, Homo sapiens
tatcatccaactcag

SEQ ID NO: 336357 - DNA, 15 bp, Homo sapiens
atatcatccaactca

SEQ ID NO: 336358 - DNA, 15 bp, Homo sapiens
catatcatccaactc

SEQ ID NO: 336359 - DNA, 15 bp, Homo sapiens
tcatatcatccaact

SEQ ID NO: 336360 - DNA, 15 bp, Homo sapiens
gtcatatcatccaac

SEQ ID NO: 336361 - DNA, 15 bp, Homo sapiens
tgtcatatcatccaa

SEQ ID NO: 336362 - DNA, 15 bp, Homo sapiens
gtgtcatatcatcca

SEQ ID NO: 336363 - DNA, 15 bp, Homo sapiens
agtgtcatatcatcc

SEQ ID NO: 336364 - DNA, 15 bp, Homo sapiens
cagtgtcatatcatc

SEQ ID NO: 336365 - DNA, 15 bp, Homo sapiens
acagtgtcatatcat

SEQ ID NO: 336366 - DNA, 15 bp, Homo sapiens
cacagtgtcatatca

SEQ ID NO: 336367 - DNA, 15 bp, Homo sapiens
ccacagtgtcatatc

SEQ ID NO: 336368 - DNA, 15 bp, Homo sapiens
gccacagtgtcatat

SEQ ID NO: 336369 - DNA, 15 bp, Homo sapiens
tgccacagtgtcata

SEQ ID NO: 336370 - DNA, 15 bp, Homo sapiens
ctgccacagtgtcat

SEQ ID NO: 336371 - DNA, 15 bp, Homo sapiens
tctgccacagtgtca

SEQ ID NO: 336372 - DNA, 15 bp, Homo sapiens
atctgccacagtgtc

SEQ ID NO: 336373 - DNA, 15 bp, Homo sapiens
aatctgccacagtgt

SEQ ID NO: 336374 - DNA, 15 bp, Homo sapiens
caatctgccacagtg

SEQ ID NO: 336375 - DNA, 15 bp, Homo sapiens
acaatctgccacagt

SEQ ID NO: 336376 - DNA, 15 bp, Homo sapiens
aacaatctgccacag

SEQ ID NO: 336377 - DNA, 15 bp, Homo sapiens
taacaatctgccaca

SEQ ID NO: 336378 - DNA, 15 bp, Homo sapiens
ataacaatctgccac

SEQ ID NO: 336379 - DNA, 15 bp, Homo sapiens
aataacaatctgcca

SEQ ID NO: 336380 - DNA, 15 bp, Homo sapiens
taataacaatctgcc

SEQ ID NO: 336381 - DNA, 15 bp, Homo sapiens
ttaataacaatctgc

SEQ ID NO: 336382 - DNA, 15 bp, Homo sapiens
attaataacaatctg

SEQ ID NO: 336383 - DNA, 15 bp, Homo sapiens
tattaataacaatct

SEQ ID NO: 336384 - DNA, 15 bp, Homo sapiens
atattaataacaatc

SEQ ID NO: 336385 - DNA, 15 bp, Homo sapiens
gatattaataacaat

SEQ ID NO: 336386 - DNA, 15 bp, Homo sapiens
ggatattaataacaa

SEQ ID NO: 336387 - DNA, 15 bp, Homo sapiens
aggatattaataaca

SEQ ID NO: 336388 - DNA, 15 bp, Homo sapiens
aaggatattaataac

SEQ ID NO: 336389 - DNA, 15 bp, Homo sapiens
aaaggatattaataa

SEQ ID NO: 336390 - DNA, 15 bp, Homo sapiens
gaaaggatattaata

SEQ ID NO: 336391 - DNA, 15 bp, Homo sapiens
tgaaaggatattaat

SEQ ID NO: 336392 - DNA, 15 bp, Homo sapiens
ctgaaaggatattaa

SEQ ID NO: 336393 - DNA, 15 bp, Homo sapiens
tctgaaaggatatta

SEQ ID NO: 336394 - DNA, 15 bp, Homo sapiens
ttctgaaaggatatt

SEQ ID NO: 336395 - DNA, 15 bp, Homo sapiens
gttctgaaaggatat

SEQ ID NO: 336396 - DNA, 15 bp, Homo sapiens
ggttctgaaaggata

SEQ ID NO: 336397 - DNA, 15 bp, Homo sapiens
tggttctgaaaggat

SEQ ID NO: 336398 - DNA, 15 bp, Homo sapiens
gtggttctgaaagga

SEQ ID NO: 336399 - DNA, 15 bp, Homo sapiens
ggtggttctgaaagg

SEQ ID NO: 336400 - DNA, 15 bp, Homo sapiens
tggtggttctgaaag

SEQ ID NO: 336401 - DNA, 15 bp, Homo sapiens
ttggtggttctgaaa

SEQ ID NO: 336402 - DNA, 15 bp, Homo sapiens
tttggtggttctgaa

SEQ ID NO: 336403 - DNA, 15 bp, Homo sapiens
ttttggtggttctga

SEQ ID NO: 336404 - DNA, 15 bp, Homo sapiens
tttttggtggttctg

SEQ ID NO: 336405 - DNA, 15 bp, Homo sapiens
ctttttggtggttct

SEQ ID NO: 336406 - DNA, 15 bp, Homo sapiens
cctttttggtggttc

SEQ ID NO: 336407 - DNA, 15 bp, Homo sapiens
tcctttttggtggtt

SEQ ID NO: 336408 - DNA, 15 bp, Homo sapiens
ttcctttttggtggt

SEQ ID NO: 336409 - DNA, 15 bp, Homo sapiens
tttcctttttggtgg

SEQ ID NO: 336410 - DNA, 15 bp, Homo sapiens
ttttcctttttggtg

SEQ ID NO: 336411 - DNA, 15 bp, Homo sapiens
tttttcctttttggt

SEQ ID NO: 336412 - DNA, 15 bp, Homo sapiens
ttttttcctttttgg

SEQ ID NO: 336413 - DNA, 15 bp, Homo sapiens
tttttttcctttttg

SEQ ID NO: 336414 - DNA, 15 bp, Homo sapiens
ctttttttccttttt

SEQ ID NO: 336415 - DNA, 15 bp, Homo sapiens
tctttttttcctttt

SEQ ID NO: 336416 - DNA, 15 bp, Homo sapiens
ttctttttttccttt

SEQ ID NO: 336417 - DNA, 15 bp, Homo sapiens
tttctttttttcctt

SEQ ID NO: 336418 - DNA, 15 bp, Homo sapiens
ttttctttttttcct

SEQ ID NO: 336419 - DNA, 15 bp, Homo sapiens
cttttctttttttcc

SEQ ID NO: 336420 - DNA, 15 bp, Homo sapiens
tcttttctttttttc

SEQ ID NO: 336421 - DNA, 15 bp, Homo sapiens
atcttttcttttttt

SEQ ID NO: 336422 - DNA, 15 bp, Homo sapiens
tatcttttctttttt

SEQ ID NO: 336423 - DNA, 15 bp, Homo sapiens
atatcttttcttttt

SEQ ID NO: 336424 - DNA, 15 bp, Homo sapiens
aatatcttttctttt

SEQ ID NO: 336425 - DNA, 15 bp, Homo sapiens
taatatcttttcttt

SEQ ID NO: 336426 - DNA, 15 bp, Homo sapiens
ttaatatcttttctt

SEQ ID NO: 336427 - DNA, 15 bp, Homo sapiens
attaatatcttttct

SEQ ID NO: 336428 - DNA, 15 bp, Homo sapiens
tattaatatcttttc

SEQ ID NO: 336429 - DNA, 15 bp, Homo sapiens
gtattaatatctttt

SEQ ID NO: 336430 - DNA, 15 bp, Homo sapiens
tgtattaatatcttt

SEQ ID NO: 336431 - DNA, 15 bp, Homo sapiens
ttgtattaatatctt

SEQ ID NO: 336432 - DNA, 15 bp, Homo sapiens
attgtattaatatct

SEQ ID NO: 336433 - DNA, 15 bp, Homo sapiens
aattgtattaatatc

SEQ ID NO: 336434 - DNA, 15 bp, Homo sapiens
caattgtattaatat

SEQ ID NO: 336435 - DNA, 15 bp, Homo sapiens
tcaattgtattaata

SEQ ID NO: 336436 - DNA, 15 bp, Homo sapiens
ttcaattgtattaat

SEQ ID NO: 336437 - DNA, 15 bp, Homo sapiens
cttcaattgtattaa

SEQ ID NO: 336438 - DNA, 15 bp, Homo sapiens
tcttcaattgtatta

SEQ ID NO: 336439 - DNA, 15 bp, Homo sapiens
atcttcaattgtatt

SEQ ID NO: 336440 - DNA, 15 bp, Homo sapiens
catcttcaattgtat

SEQ ID NO: 336441 - DNA, 15 bp, Homo sapiens
gcatcttcaattgta

SEQ ID NO: 336442 - DNA, 15 bp, Homo sapiens
agcatcttcaattgt

SEQ ID NO: 336443 - DNA, 15 bp, Homo sapiens
cagcatcttcaattg

SEQ ID NO: 336444 - DNA, 15 bp, Homo sapiens
acagcatcttcaatt

SEQ ID NO: 336445 - DNA, 15 bp, Homo sapiens
cacagcatcttcaat

SEQ ID NO: 336446 - DNA, 15 bp, Homo sapiens
tcacagcatcttcaa

SEQ ID NO: 336447 - DNA, 15 bp, Homo sapiens
ttcacagcatcttca

SEQ ID NO: 336448 - DNA, 15 bp, Homo sapiens
tttcacagcatcttc

SEQ ID NO: 336449 - DNA, 15 bp, Homo sapiens
atttcacagcatctt

SEQ ID NO: 336450 - DNA, 15 bp, Homo sapiens
aatttcacagcatct

SEQ ID NO: 336451 - DNA, 15 bp, Homo sapiens
taatttcacagcatc

SEQ ID NO: 336452 - DNA, 15 bp, Homo sapiens
gtaatttcacagcat

SEQ ID NO: 336453 - DNA, 15 bp, Homo sapiens
agtaatttcacagca

SEQ ID NO: 336454 - DNA, 15 bp, Homo sapiens
cagtaatttcacagc

SEQ ID NO: 336455 - DNA, 15 bp, Homo sapiens
gcagtaatttcacag

SEQ ID NO: 336456 - DNA, 15 bp, Homo sapiens
tgcagtaatttcaca

SEQ ID NO: 336457 - DNA, 15 bp, Homo sapiens
ttgcagtaatttcac

SEQ ID NO: 336458 - DNA, 15 bp, Homo sapiens
cttgcagtaatttca

SEQ ID NO: 336459 - DNA, 15 bp, Homo sapiens
tcttgcagtaatttc

SEQ ID NO: 336460 - DNA, 15 bp, Homo sapiens
ctcttgcagtaattt

SEQ ID NO: 336461 - DNA, 15 bp, Homo sapiens
actcttgcagtaatt

SEQ ID NO: 336462 - DNA, 15 bp, Homo sapiens
cactcttgcagtaat

SEQ ID NO: 336463 - DNA, 15 bp, Homo sapiens
gcactcttgcagtaa

SEQ ID NO: 336464 - DNA, 15 bp, Homo sapiens
tgcactcttgcagta

SEQ ID NO: 336465 - DNA, 15 bp, Homo sapiens
ttgcactcttgcagt

SEQ ID NO: 336466 - DNA, 15 bp, Homo sapiens
tttgcactcttgcag

SEQ ID NO: 336467 - DNA, 15 bp, Homo sapiens
ttttgcactcttgca

SEQ ID NO: 336468 - DNA, 15 bp, Homo sapiens
tttttgcactcttgc

SEQ ID NO: 336469 - DNA, 15 bp, Homo sapiens
ttttttgcactcttg

SEQ ID NO: 336470 - DNA, 15 bp, Homo sapiens
tttttttgcactctt

SEQ ID NO: 336471 - DNA, 15 bp, Homo sapiens
atttttttgcactct

SEQ ID NO: 336472 - DNA, 15 bp, Homo sapiens
aatttttttgcactc

SEQ ID NO: 336473 - DNA, 15 bp, Homo sapiens
taatttttttgcact

SEQ ID NO: 336474 - DNA, 15 bp, Homo sapiens
ataatttttttgcac

SEQ ID NO: 336475 - DNA, 15 bp, Homo sapiens
tataatttttttgca

SEQ ID NO: 336476 - DNA, 15 bp, Homo sapiens
ctataatttttttgc

SEQ ID NO: 336477 - DNA, 15 bp, Homo sapiens
actataatttttttg

SEQ ID NO: 336478 - DNA, 15 bp, Homo sapiens
aactataattttttt

SEQ ID NO: 336479 - DNA, 15 bp, Homo sapiens
gaactataatttttt

SEQ ID NO: 336480 - DNA, 15 bp, Homo sapiens
agaactataattttt

SEQ ID NO: 336481 - DNA, 15 bp, Homo sapiens
tagaactataatttt

SEQ ID NO: 336482 - DNA, 15 bp, Homo sapiens
ttagaactataattt

SEQ ID NO: 336483 - DNA, 15 bp, Homo sapiens
gttagaactataatt

SEQ ID NO: 336484 - DNA, 15 bp, Homo sapiens
agttagaactataat

SEQ ID NO: 336485 - DNA, 15 bp, Homo sapiens
cagttagaactataa

SEQ ID NO: 336486 - DNA, 15 bp, Homo sapiens
ccagttagaactata

SEQ ID NO: 336487 - DNA, 15 bp, Homo sapiens
tccagttagaactat

SEQ ID NO: 336488 - DNA, 15 bp, Homo sapiens
ctccagttagaacta

SEQ ID NO: 336489 - DNA, 15 bp, Homo sapiens
gctccagttagaact

SEQ ID NO: 336490 - DNA, 15 bp, Homo sapiens
agctccagttagaac

SEQ ID NO: 336491 - DNA, 15 bp, Homo sapiens
cagctccagttagaa

SEQ ID NO: 336492 - DNA, 15 bp, Homo sapiens
ccagctccagttaga

SEQ ID NO: 336493 - DNA, 15 bp, Homo sapiens
cccagctccagttag

SEQ ID NO: 336494 - DNA, 15 bp, Homo sapiens
ccccagctccagtta

SEQ ID NO: 336495 - DNA, 15 bp, Homo sapiens
accccagctccagtt

SEQ ID NO: 336496 - DNA, 15 bp, Homo sapiens
taccccagctccagt

SEQ ID NO: 336497 - DNA, 15 bp, Homo sapiens
ataccccagctccag

SEQ ID NO: 336498 - DNA, 15 bp, Homo sapiens
cataccccagctcca

SEQ ID NO: 336499 - DNA, 15 bp, Homo sapiens
acataccccagctcc

SEQ ID NO: 336500 - DNA, 15 bp, Homo sapiens
tacataccccagctc

SEQ ID NO: 336501 - DNA, 15 bp, Homo sapiens
ttacataccccagct

SEQ ID NO: 336502 - DNA, 15 bp, Homo sapiens
cttacataccccagc

SEQ ID NO: 336503 - DNA, 15 bp, Homo sapiens
tcttacataccccag

SEQ ID NO: 336504 - DNA, 15 bp, Homo sapiens
gtcttacatacccca

SEQ ID NO: 336505 - DNA, 15 bp, Homo sapiens
agtcttacatacccc

SEQ ID NO: 336506 - DNA, 15 bp, Homo sapiens
tagtcttacataccc

SEQ ID NO: 336507 - DNA, 15 bp, Homo sapiens
ctagtcttacatacc

SEQ ID NO: 336508 - DNA, 15 bp, Homo sapiens
actagtcttacatac

SEQ ID NO: 336509 - DNA, 15 bp, Homo sapiens
tactagtcttacata

SEQ ID NO: 336510 - DNA, 15 bp, Homo sapiens
gtactagtcttacat

SEQ ID NO: 336511 - DNA, 15 bp, Homo sapiens
tgtactagtcttaca

SEQ ID NO: 336512 - DNA, 15 bp, Homo sapiens
atgtactagtcttac

SEQ ID NO: 336513 - DNA, 15 bp, Homo sapiens
catgtactagtctta

SEQ ID NO: 336514 - DNA, 15 bp, Homo sapiens
ccatgtactagtctt

SEQ ID NO: 336515 - DNA, 15 bp, Homo sapiens
cccatgtactagtct

SEQ ID NO: 336516 - DNA, 15 bp, Homo sapiens
ccccatgtactagtc

SEQ ID NO: 336517 - DNA, 15 bp, Homo sapiens
tccccatgtactagt

SEQ ID NO: 336518 - DNA, 15 bp, Homo sapiens
ctccccatgtactag

SEQ ID NO: 336519 - DNA, 15 bp, Homo sapiens
cctccccatgtacta

SEQ ID NO: 336520 - DNA, 15 bp, Homo sapiens
acctccccatgtact

SEQ ID NO: 336521 - DNA, 15 bp, Homo sapiens
gacctccccatgtac

SEQ ID NO: 336522 - DNA, 15 bp, Homo sapiens
cgacctccccatgta

SEQ ID NO: 336523 - DNA, 15 bp, Homo sapiens
acgacctccccatgt

SEQ ID NO: 336524 - DNA, 15 bp, Homo sapiens
tacgacctccccatg

SEQ ID NO: 336525 - DNA, 15 bp, Homo sapiens
atacgacctccccat

SEQ ID NO: 336526 - DNA, 15 bp, Homo sapiens
tatacgacctcccca

SEQ ID NO: 336527 - DNA, 15 bp, Homo sapiens
atatacgacctcccc

SEQ ID NO: 336528 - DNA, 15 bp, Homo sapiens
catatacgacctccc

SEQ ID NO: 336529 - DNA, 15 bp, Homo sapiens
acatatacgacctcc

SEQ ID NO: 336530 - DNA, 15 bp, Homo sapiens
tacatatacgacctc

SEQ ID NO: 336531 - DNA, 15 bp, Homo sapiens
atacatatacgacct

SEQ ID NO: 336532 - DNA, 15 bp, Homo sapiens
aatacatatacgacc

SEQ ID NO: 336533 - DNA, 15 bp, Homo sapiens
aaatacatatacgac

SEQ ID NO: 336534 - DNA, 15 bp, Homo sapiens
aaaatacatatacga

SEQ ID NO: 336535 - DNA, 15 bp, Homo sapiens
gaaaatacatatacg

SEQ ID NO: 336536 - DNA, 15 bp, Homo sapiens
agaaaatacatatac

SEQ ID NO: 336537 - DNA, 15 bp, Homo sapiens
aagaaaatacatata

SEQ ID NO: 336538 - DNA, 15 bp, Homo sapiens
taagaaaatacatat

SEQ ID NO: 336539 - DNA, 15 bp, Homo sapiens
ataagaaaatacata

SEQ ID NO: 336540 - DNA, 15 bp, Homo sapiens
cataagaaaatacat

SEQ ID NO: 336541 - DNA, 15 bp, Homo sapiens
gcataagaaaataca

SEQ ID NO: 336542 - DNA, 15 bp, Homo sapiens
ggcataagaaaatac

SEQ ID NO: 336543 - DNA, 15 bp, Homo sapiens
aggcataagaaaata

SEQ ID NO: 336544 - DNA, 15 bp, Homo sapiens
aaggcataagaaaat

SEQ ID NO: 336545 - DNA, 15 bp, Homo sapiens
aaaggcataagaaaa

SEQ ID NO: 336546 - DNA, 15 bp, Homo sapiens
aaaaggcataagaaa

SEQ ID NO: 336547 - DNA, 15 bp, Homo sapiens
gaaaaggcataagaa

SEQ ID NO: 336548 - DNA, 15 bp, Homo sapiens
ggaaaaggcataaga

SEQ ID NO: 336549 - DNA, 15 bp, Homo sapiens
tggaaaaggcataag

SEQ ID NO: 336550 - DNA, 15 bp, Homo sapiens
ttggaaaaggcataa

SEQ ID NO: 336551 - DNA, 15 bp, Homo sapiens
cttggaaaaggcata

SEQ ID NO: 336552 - DNA, 15 bp, Homo sapiens
acttggaaaaggcat

SEQ ID NO: 336553 - DNA, 15 bp, Homo sapiens
tacttggaaaaggca

SEQ ID NO: 336554 - DNA, 15 bp, Homo sapiens
ctacttggaaaaggc

SEQ ID NO: 336555 - DNA, 15 bp, Homo sapiens
cctacttggaaaagg

SEQ ID NO: 336556 - DNA, 15 bp, Homo sapiens
tcctacttggaaaag

SEQ ID NO: 336557 - DNA, 15 bp, Homo sapiens
ttcctacttggaaaa

SEQ ID NO: 336558 - DNA, 15 bp, Homo sapiens
tttcctacttggaaa

SEQ ID NO: 336559 - DNA, 15 bp, Homo sapiens
gtttcctacttggaa

SEQ ID NO: 336560 - DNA, 15 bp, Homo sapiens
tgtttcctacttgga

SEQ ID NO: 336561 - DNA, 15 bp, Homo sapiens
atgtttcctacttgg

SEQ ID NO: 336562 - DNA, 15 bp, Homo sapiens
aatgtttcctacttg

SEQ ID NO: 336563 - DNA, 15 bp, Homo sapiens
aaatgtttcctactt

SEQ ID NO: 336564 - DNA, 15 bp, Homo sapiens
aaaatgtttcctact

SEQ ID NO: 336565 - DNA, 15 bp, Homo sapiens
aaaaatgtttcctac

SEQ ID NO: 336566 - DNA, 15 bp, Homo sapiens
gaaaaatgtttccta

SEQ ID NO: 336567 - DNA, 15 bp, Homo sapiens
agaaaaatgtttcct

SEQ ID NO: 336568 - DNA, 15 bp, Homo sapiens
cagaaaaatgtttcc

SEQ ID NO: 336569 - DNA, 15 bp, Homo sapiens
ccagaaaaatgtttc

SEQ ID NO: 336570 - DNA, 15 bp, Homo sapiens
accagaaaaatgttt

SEQ ID NO: 336571 - DNA, 15 bp, Homo sapiens
aaccagaaaaatgtt

SEQ ID NO: 336572 - DNA, 15 bp, Homo sapiens
aaaccagaaaaatgt

SEQ ID NO: 336573 - DNA, 15 bp, Homo sapiens
taaaccagaaaaatg

SEQ ID NO: 336574 - DNA, 15 bp, Homo sapiens
ctaaaccagaaaaat

SEQ ID NO: 336575 - DNA, 15 bp, Homo sapiens
tctaaaccagaaaaa

SEQ ID NO: 336576 - DNA, 15 bp, Homo sapiens
ttctaaaccagaaaa

SEQ ID NO: 336577 - DNA, 15 bp, Homo sapiens
cttctaaaccagaaa

SEQ ID NO: 336578 - DNA, 15 bp, Homo sapiens
ccttctaaaccagaa

SEQ ID NO: 336579 - DNA, 15 bp, Homo sapiens
tccttctaaaccaga

SEQ ID NO: 336580 - DNA, 15 bp, Homo sapiens
atccttctaaaccag

SEQ ID NO: 336581 - DNA, 15 bp, Homo sapiens
aatccttctaaacca

SEQ ID NO: 336582 - DNA, 15 bp, Homo sapiens
aaatccttctaaacc

SEQ ID NO: 336583 - DNA, 15 bp, Homo sapiens
taaatccttctaaac

SEQ ID NO: 336584 - DNA, 15 bp, Homo sapiens
ataaatccttctaaa

SEQ ID NO: 336585 - DNA, 15 bp, Homo sapiens
gataaatccttctaa

SEQ ID NO: 336586 - DNA, 15 bp, Homo sapiens
ggataaatccttcta

SEQ ID NO: 336587 - DNA, 15 bp, Homo sapiens
aggataaatccttct

SEQ ID NO: 336588 - DNA, 15 bp, Homo sapiens
aaggataaatccttc

SEQ ID NO: 336589 - DNA, 15 bp, Homo sapiens
taaggataaatcctt

SEQ ID NO: 336590 - DNA, 15 bp, Homo sapiens
gtaaggataaatcct

SEQ ID NO: 336591 - DNA, 15 bp, Homo sapiens
tgtaaggataaatcc

SEQ ID NO: 336592 - DNA, 15 bp, Homo sapiens
atgtaaggataaatc

SEQ ID NO: 336593 - DNA, 15 bp, Homo sapiens
catgtaaggataaat

SEQ ID NO: 336594 - DNA, 15 bp, Homo sapiens
tcatgtaaggataaa

SEQ ID NO: 336595 - DNA, 15 bp, Homo sapiens
atcatgtaaggataa

SEQ ID NO: 336596 - DNA, 15 bp, Homo sapiens
tatcatgtaaggata

SEQ ID NO: 336597 - DNA, 15 bp, Homo sapiens
ttatcatgtaaggat

SEQ ID NO: 336598 - DNA, 15 bp, Homo sapiens
attatcatgtaagga

SEQ ID NO: 336599 - DNA, 15 bp, Homo sapiens
cattatcatgtaagg

SEQ ID NO: 336600 - DNA, 15 bp, Homo sapiens
ccattatcatgtaag

SEQ ID NO: 336601 - DNA, 15 bp, Homo sapiens
tccattatcatgtaa

SEQ ID NO: 336602 - DNA, 15 bp, Homo sapiens
atccattatcatgta

SEQ ID NO: 336603 - DNA, 15 bp, Homo sapiens
catccattatcatgt

SEQ ID NO: 336604 - DNA, 15 bp, Homo sapiens
acatccattatcatg

SEQ ID NO: 336605 - DNA, 15 bp, Homo sapiens
aacatccattatcat

SEQ ID NO: 336606 - DNA, 15 bp, Homo sapiens
aaacatccattatca

SEQ ID NO: 336607 - DNA, 15 bp, Homo sapiens
caaacatccattatc

SEQ ID NO: 336608 - DNA, 15 bp, Homo sapiens
ccaaacatccattat

SEQ ID NO: 336609 - DNA, 15 bp, Homo sapiens
cccaaacatccatta

SEQ ID NO: 336610 - DNA, 15 bp, Homo sapiens
tcccaaacatccatt

SEQ ID NO: 336611 - DNA, 15 bp, Homo sapiens
ttcccaaacatccat

SEQ ID NO: 336612 - DNA, 15 bp, Homo sapiens
gttcccaaacatcca

SEQ ID NO: 336613 - DNA, 15 bp, Homo sapiens
agttcccaaacatcc

SEQ ID NO: 336614 - DNA, 15 bp, Homo sapiens
cagttcccaaacatc

SEQ ID NO: 336615 - DNA, 15 bp, Homo sapiens
gcagttcccaaacat

SEQ ID NO: 336616 - DNA, 15 bp, Homo sapiens
ggcagttcccaaaca

SEQ ID NO: 336617 - DNA, 15 bp, Homo sapiens
tggcagttcccaaac

SEQ ID NO: 336618 - DNA, 15 bp, Homo sapiens
ttggcagttcccaaa

SEQ ID NO: 336619 - DNA, 15 bp, Homo sapiens
tttggcagttcccaa

SEQ ID NO: 336620 - DNA, 15 bp, Homo sapiens
ttttggcagttccca

SEQ ID NO: 336621 - DNA, 15 bp, Homo sapiens
tttttggcagttccc

SEQ ID NO: 336622 - DNA, 15 bp, Homo sapiens
gtttttggcagttcc

SEQ ID NO: 336623 - DNA, 15 bp, Homo sapiens
agtttttggcagttc

SEQ ID NO: 336624 - DNA, 15 bp, Homo sapiens
cagtttttggcagtt

SEQ ID NO: 336625 - DNA, 15 bp, Homo sapiens
tcagtttttggcagt

SEQ ID NO: 336626 - DNA, 15 bp, Homo sapiens
ctcagtttttggcag

SEQ ID NO: 336627 - DNA, 15 bp, Homo sapiens
actcagtttttggca

SEQ ID NO: 336628 - DNA, 15 bp, Homo sapiens
cactcagtttttggc

SEQ ID NO: 336629 - DNA, 15 bp, Homo sapiens
gcactcagtttttgg

SEQ ID NO: 336630 - DNA, 15 bp, Homo sapiens
tgcactcagtttttg

SEQ ID NO: 336631 - DNA, 15 bp, Homo sapiens
ctgcactcagttttt

SEQ ID NO: 336632 - DNA, 15 bp, Homo sapiens
gctgcactcagtttt

SEQ ID NO: 336633 - DNA, 15 bp, Homo sapiens
tgctgcactcagttt

SEQ ID NO: 336634 - DNA, 15 bp, Homo sapiens
ctgctgcactcagtt

SEQ ID NO: 336635 - DNA, 15 bp, Homo sapiens
gctgctgcactcagt

SEQ ID NO: 336636 - DNA, 15 bp, Homo sapiens
tgctgctgcactcag

SEQ ID NO: 336637 - DNA, 15 bp, Homo sapiens
ctgctgctgcactca

SEQ ID NO: 336638 - DNA, 15 bp, Homo sapiens
actgctgctgcactc

SEQ ID NO: 336639 - DNA, 15 bp, Homo sapiens
aactgctgctgcact

SEQ ID NO: 336640 - DNA, 15 bp, Homo sapiens
caactgctgctgcac

SEQ ID NO: 336641 - DNA, 15 bp, Homo sapiens
gcaactgctgctgca

SEQ ID NO: 336642 - DNA, 15 bp, Homo sapiens
agcaactgctgctgc

SEQ ID NO: 336643 - DNA, 15 bp, Homo sapiens
tagcaactgctgctg

SEQ ID NO: 336644 - DNA, 15 bp, Homo sapiens
ttagcaactgctgct

SEQ ID NO: 336645 - DNA, 15 bp, Homo sapiens
tttagcaactgctgc

SEQ ID NO: 336646 - DNA, 15 bp, Homo sapiens
atttagcaactgctg

SEQ ID NO: 336647 - DNA, 15 bp, Homo sapiens
aatttagcaactgct

SEQ ID NO: 336648 - DNA, 15 bp, Homo sapiens
taatttagcaactgc

SEQ ID NO: 336649 - DNA, 15 bp, Homo sapiens
ctaatttagcaactg

SEQ ID NO: 336650 - DNA, 15 bp, Homo sapiens
actaatttagcaact

SEQ ID NO: 336651 - DNA, 15 bp, Homo sapiens
aactaatttagcaac

SEQ ID NO: 336652 - DNA, 15 bp, Homo sapiens
gaactaatttagcaa

SEQ ID NO: 336653 - DNA, 15 bp, Homo sapiens
tgaactaatttagca

SEQ ID NO: 336654 - DNA, 15 bp, Homo sapiens
ctgaactaatttagc

SEQ ID NO: 336655 - DNA, 15 bp, Homo sapiens
tctgaactaatttag

SEQ ID NO: 336656 - DNA, 15 bp, Homo sapiens
atctgaactaattta

SEQ ID NO: 336657 - DNA, 15 bp, Homo sapiens
aatctgaactaattt

SEQ ID NO: 336658 - DNA, 15 bp, Homo sapiens
aaatctgaactaatt

SEQ ID NO: 336659 - DNA, 15 bp, Homo sapiens
aaaatctgaactaat

SEQ ID NO: 336660 - DNA, 15 bp, Homo sapiens
aaaaatctgaactaa

SEQ ID NO: 336661 - DNA, 15 bp, Homo sapiens
taaaaatctgaacta

SEQ ID NO: 336662 - DNA, 15 bp, Homo sapiens
ttaaaaatctgaact

SEQ ID NO: 336663 - DNA, 15 bp, Homo sapiens
tttaaaaatctgaac

SEQ ID NO: 336664 - DNA, 15 bp, Homo sapiens
ttttaaaaatctgaa

SEQ ID NO: 336665 - DNA, 15 bp, Homo sapiens
gttttaaaaatctga

SEQ ID NO: 336666 - DNA, 15 bp, Homo sapiens
ggttttaaaaatctg

SEQ ID NO: 336667 - DNA, 15 bp, Homo sapiens
aggttttaaaaatct

SEQ ID NO: 336668 - DNA, 15 bp, Homo sapiens
gaggttttaaaaatc

SEQ ID NO: 336669 - DNA, 15 bp, Homo sapiens
agaggttttaaaaat

SEQ ID NO: 336670 - DNA, 15 bp, Homo sapiens
gagaggttttaaaaa

SEQ ID NO: 336671 - DNA, 15 bp, Homo sapiens
ggagaggttttaaaa

SEQ ID NO: 336672 - DNA, 15 bp, Homo sapiens
tggagaggttttaaa

SEQ ID NO: 336673 - DNA, 15 bp, Homo sapiens
ctggagaggttttaa

SEQ ID NO: 336674 - DNA, 15 bp, Homo sapiens
gctggagaggtttta

SEQ ID NO: 336675 - DNA, 15 bp, Homo sapiens
ggctggagaggtttt

SEQ ID NO: 336676 - DNA, 15 bp, Homo sapiens
aggctggagaggttt

SEQ ID NO: 336677 - DNA, 15 bp, Homo sapiens
aaggctggagaggtt

SEQ ID NO: 336678 - DNA, 15 bp, Homo sapiens
taaggctggagaggt

SEQ ID NO: 336679 - DNA, 15 bp, Homo sapiens
ttaaggctggagagg

SEQ ID NO: 336680 - DNA, 15 bp, Homo sapiens
tttaaggctggagag

SEQ ID NO: 336681 - DNA, 15 bp, Homo sapiens
ttttaaggctggaga

SEQ ID NO: 336682 - DNA, 15 bp, Homo sapiens
tttttaaggctggag

SEQ ID NO: 336683 - DNA, 15 bp, Homo sapiens
ttttttaaggctgga

SEQ ID NO: 336684 - DNA, 15 bp, Homo sapiens
tttttttaaggctgg

SEQ ID NO: 336685 - DNA, 15 bp, Homo sapiens
atttttttaaggctg

SEQ ID NO: 336686 - DNA, 15 bp, Homo sapiens
tatttttttaaggct

SEQ ID NO: 336687 - DNA, 15 bp, Homo sapiens
atatttttttaaggc

SEQ ID NO: 336688 - DNA, 15 bp, Homo sapiens
aatatttttttaagg

SEQ ID NO: 336689 - DNA, 15 bp, Homo sapiens
aaatatttttttaag

SEQ ID NO: 336690 - DNA, 15 bp, Homo sapiens
caaatatttttttaa

SEQ ID NO: 336691 - DNA, 15 bp, Homo sapiens
gcaaatattttttta

SEQ ID NO: 336692 - DNA, 15 bp, Homo sapiens
agcaaatattttttt

SEQ ID NO: 336693 - DNA, 15 bp, Homo sapiens
aagcaaatatttttt

SEQ ID NO: 336694 - DNA, 15 bp, Homo sapiens
gaagcaaatattttt

SEQ ID NO: 336695 - DNA, 15 bp, Homo sapiens
agaagcaaatatttt

SEQ ID NO: 336696 - DNA, 15 bp, Homo sapiens
cagaagcaaatattt

SEQ ID NO: 336697 - DNA, 15 bp, Homo sapiens
gcagaagcaaatatt

SEQ ID NO: 336698 - DNA, 15 bp, Homo sapiens
agcagaagcaaatat

SEQ ID NO: 336699 - DNA, 15 bp, Homo sapiens
aagcagaagcaaata

SEQ ID NO: 336700 - DNA, 15 bp, Homo sapiens
taagcagaagcaaat

SEQ ID NO: 336701 - DNA, 15 bp, Homo sapiens
ataagcagaagcaaa

SEQ ID NO: 336702 - DNA, 15 bp, Homo sapiens
aataagcagaagcaa

SEQ ID NO: 336703 - DNA, 15 bp, Homo sapiens
aaataagcagaagca

SEQ ID NO: 336704 - DNA, 15 bp, Homo sapiens
taaataagcagaagc

SEQ ID NO: 336705 - DNA, 15 bp, Homo sapiens
ataaataagcagaag

SEQ ID NO: 336706 - DNA, 15 bp, Homo sapiens
tataaataagcagaa

SEQ ID NO: 336707 - DNA, 15 bp, Homo sapiens
ctataaataagcaga

SEQ ID NO: 336708 - DNA, 15 bp, Homo sapiens
gctataaataagcag

SEQ ID NO: 336709 - DNA, 15 bp, Homo sapiens
tgctataaataagca

SEQ ID NO: 336710 - DNA, 15 bp, Homo sapiens
gtgctataaataagc

SEQ ID NO: 336711 - DNA, 15 bp, Homo sapiens
tgtgctataaataag

SEQ ID NO: 336712 - DNA, 15 bp, Homo sapiens
ctgtgctataaataa

SEQ ID NO: 336713 - DNA, 15 bp, Homo sapiens
actgtgctataaata

SEQ ID NO: 336714 - DNA, 15 bp, Homo sapiens
cactgtgctataaat

SEQ ID NO: 336715 - DNA, 15 bp, Homo sapiens
ccactgtgctataaa

SEQ ID NO: 336716 - DNA, 15 bp, Homo sapiens
cccactgtgctataa

SEQ ID NO: 336717 - DNA, 15 bp, Homo sapiens
acccactgtgctata

SEQ ID NO: 336718 - DNA, 15 bp, Homo sapiens
tacccactgtgctat

SEQ ID NO: 336719 - DNA, 15 bp, Homo sapiens
ttacccactgtgcta

SEQ ID NO: 336720 - DNA, 15 bp, Homo sapiens
tttacccactgtgct

SEQ ID NO: 336721 - DNA, 15 bp, Homo sapiens
atttacccactgtgc

SEQ ID NO: 336722 - DNA, 15 bp, Homo sapiens
catttacccactgtg

SEQ ID NO: 336723 - DNA, 15 bp, Homo sapiens
ccatttacccactgt

SEQ ID NO: 336724 - DNA, 15 bp, Homo sapiens
tccatttacccactg

SEQ ID NO: 336725 - DNA, 15 bp, Homo sapiens
ctccatttacccact

SEQ ID NO: 336726 - DNA, 15 bp, Homo sapiens
actccatttacccac

SEQ ID NO: 336727 - DNA, 15 bp, Homo sapiens
aactccatttaccca

SEQ ID NO: 336728 - DNA, 15 bp, Homo sapiens
taactccatttaccc

SEQ ID NO: 336729 - DNA, 15 bp, Homo sapiens
ttaactccatttacc

SEQ ID NO: 336730 - DNA, 15 bp, Homo sapiens
cttaactccatttac

SEQ ID NO: 336731 - DNA, 15 bp, Homo sapiens
ccttaactccattta

SEQ ID NO: 336732 - DNA, 15 bp, Homo sapiens
gccttaactccattt

SEQ ID NO: 336733 - DNA, 15 bp, Homo sapiens
tgccttaactccatt

SEQ ID NO: 336734 - DNA, 15 bp, Homo sapiens
ttgccttaactccat

SEQ ID NO: 336735 - DNA, 15 bp, Homo sapiens
cttgccttaactcca

SEQ ID NO: 336736 - DNA, 15 bp, Homo sapiens
tcttgccttaactcc

SEQ ID NO: 336737 - DNA, 15 bp, Homo sapiens
atcttgccttaactc

SEQ ID NO: 336738 - DNA, 15 bp, Homo sapiens
aatcttgccttaact

SEQ ID NO: 336739 - DNA, 15 bp, Homo sapiens
aaatcttgccttaac

SEQ ID NO: 336740 - DNA, 15 bp, Homo sapiens
gaaatcttgccttaa

SEQ ID NO: 336741 - DNA, 15 bp, Homo sapiens
agaaatcttgcctta

SEQ ID NO: 336742 - DNA, 15 bp, Homo sapiens
tagaaatcttgcctt

SEQ ID NO: 336743 - DNA, 15 bp, Homo sapiens
gtagaaatcttgcct

SEQ ID NO: 336744 - DNA, 15 bp, Homo sapiens
ggtagaaatcttgcc

SEQ ID NO: 336745 - DNA, 15 bp, Homo sapiens
aggtagaaatcttgc

SEQ ID NO: 336746 - DNA, 15 bp, Homo sapiens
taggtagaaatcttg

SEQ ID NO: 336747 - DNA, 15 bp, Homo sapiens
gtaggtagaaatctt

SEQ ID NO: 336748 - DNA, 15 bp, Homo sapiens
tgtaggtagaaatct

SEQ ID NO: 336749 - DNA, 15 bp, Homo sapiens
atgtaggtagaaatc

SEQ ID NO: 336750 - DNA, 15 bp, Homo sapiens
aatgtaggtagaaat

SEQ ID NO: 336751 - DNA, 15 bp, Homo sapiens
taatgtaggtagaaa

SEQ ID NO: 336752 - DNA, 15 bp, Homo sapiens
ataatgtaggtagaa

SEQ ID NO: 336753 - DNA, 15 bp, Homo sapiens
tataatgtaggtaga

SEQ ID NO: 336754 - DNA, 15 bp, Homo sapiens
atataatgtaggtag

SEQ ID NO: 336755 - DNA, 15 bp, Homo sapiens
gatataatgtaggta

SEQ ID NO: 336756 - DNA, 15 bp, Homo sapiens
tgatataatgtaggt

SEQ ID NO: 336757 - DNA, 15 bp, Homo sapiens
atgatataatgtagg

SEQ ID NO: 336758 - DNA, 15 bp, Homo sapiens
tatgatataatgtag

SEQ ID NO: 336759 - DNA, 15 bp, Homo sapiens
ctatgatataatgta

SEQ ID NO: 336760 - DNA, 15 bp, Homo sapiens
gctatgatataatgt

SEQ ID NO: 336761 - DNA, 15 bp, Homo sapiens
agctatgatataatg

SEQ ID NO: 336762 - DNA, 15 bp, Homo sapiens
gagctatgatataat

SEQ ID NO: 336763 - DNA, 15 bp, Homo sapiens
ggagctatgatataa

SEQ ID NO: 336764 - DNA, 15 bp, Homo sapiens
aggagctatgatata

SEQ ID NO: 336765 - DNA, 15 bp, Homo sapiens
taggagctatgatat

SEQ ID NO: 336766 - DNA, 15 bp, Homo sapiens
ttaggagctatgata

SEQ ID NO: 336767 - DNA, 15 bp, Homo sapiens
tttaggagctatgat

SEQ ID NO: 336768 - DNA, 15 bp, Homo sapiens
ctttaggagctatga

SEQ ID NO: 336769 - DNA, 15 bp, Homo sapiens
cctttaggagctatg

SEQ ID NO: 336770 - DNA, 15 bp, Homo sapiens
tcctttaggagctat

SEQ ID NO: 336771 - DNA, 15 bp, Homo sapiens
ctcctttaggagcta

SEQ ID NO: 336772 - DNA, 15 bp, Homo sapiens
tctcctttaggagct

SEQ ID NO: 336773 - DNA, 15 bp, Homo sapiens
atctcctttaggagc

SEQ ID NO: 336774 - DNA, 15 bp, Homo sapiens
catctcctttaggag

SEQ ID NO: 336775 - DNA, 15 bp, Homo sapiens
gcatctcctttagga

SEQ ID NO: 336776 - DNA, 15 bp, Homo sapiens
tgcatctcctttagg

SEQ ID NO: 336777 - DNA, 15 bp, Homo sapiens
ctgcatctcctttag

SEQ ID NO: 336778 - DNA, 15 bp, Homo sapiens
cctgcatctccttta

SEQ ID NO: 336779 - DNA, 15 bp, Homo sapiens
ccctgcatctccttt

SEQ ID NO: 336780 - DNA, 15 bp, Homo sapiens
tccctgcatctcctt

SEQ ID NO: 336781 - DNA, 15 bp, Homo sapiens
ttccctgcatctcct

SEQ ID NO: 336782 - DNA, 15 bp, Homo sapiens
attccctgcatctcc

SEQ ID NO: 336783 - DNA, 15 bp, Homo sapiens
aattccctgcatctc

SEQ ID NO: 336784 - DNA, 15 bp, Homo sapiens
caattccctgcatct

SEQ ID NO: 336785 - DNA, 15 bp, Homo sapiens
tcaattccctgcatc

SEQ ID NO: 336786 - DNA, 15 bp, Homo sapiens
ttcaattccctgcat

SEQ ID NO: 336787 - DNA, 15 bp, Homo sapiens
tttcaattccctgca

SEQ ID NO: 336788 - DNA, 15 bp, Homo sapiens
gtttcaattccctgc

SEQ ID NO: 336789 - DNA, 15 bp, Homo sapiens
agtttcaattccctg

SEQ ID NO: 336790 - DNA, 15 bp, Homo sapiens
gagtttcaattccct

SEQ ID NO: 336791 - DNA, 15 bp, Homo sapiens
agagtttcaattccc

SEQ ID NO: 336792 - DNA, 15 bp, Homo sapiens
cagagtttcaattcc

SEQ ID NO: 336793 - DNA, 15 bp, Homo sapiens
gcagagtttcaattc

SEQ ID NO: 336794 - DNA, 15 bp, Homo sapiens
agcagagtttcaatt

SEQ ID NO: 336795 - DNA, 15 bp, Homo sapiens
aagcagagtttcaat

SEQ ID NO: 336796 - DNA, 15 bp, Homo sapiens
aaagcagagtttcaa

SEQ ID NO: 336797 - DNA, 15 bp, Homo sapiens
aaaagcagagtttca

SEQ ID NO: 336798 - DNA, 15 bp, Homo sapiens
caaaagcagagtttc

SEQ ID NO: 336799 - DNA, 15 bp, Homo sapiens
acaaaagcagagttt

SEQ ID NO: 336800 - DNA, 15 bp, Homo sapiens
aacaaaagcagagtt

SEQ ID NO: 336801 - DNA, 15 bp, Homo sapiens
taacaaaagcagagt

SEQ ID NO: 336802 - DNA, 15 bp, Homo sapiens
ttaacaaaagcagag

SEQ ID NO: 336803 - DNA, 15 bp, Homo sapiens
cttaacaaaagcaga

SEQ ID NO: 336804 - DNA, 15 bp, Homo sapiens
ccttaacaaaagcag

SEQ ID NO: 336805 - DNA, 15 bp, Homo sapiens
cccttaacaaaagca

SEQ ID NO: 336806 - DNA, 15 bp, Homo sapiens
tcccttaacaaaagc

SEQ ID NO: 336807 - DNA, 15 bp, Homo sapiens
atcccttaacaaaag

SEQ ID NO: 336808 - DNA, 15 bp, Homo sapiens
catcccttaacaaaa

SEQ ID NO: 336809 - DNA, 15 bp, Homo sapiens
acatcccttaacaaa

SEQ ID NO: 336810 - DNA, 15 bp, Homo sapiens
gacatcccttaacaa

SEQ ID NO: 336811 - DNA, 15 bp, Homo sapiens
tgacatcccttaaca

SEQ ID NO: 336812 - DNA, 15 bp, Homo sapiens
ctgacatcccttaac

SEQ ID NO: 336813 - DNA, 15 bp, Homo sapiens
actgacatcccttaa

SEQ ID NO: 336814 - DNA, 15 bp, Homo sapiens
gactgacatccctta

SEQ ID NO: 336815 - DNA, 15 bp, Homo sapiens
agactgacatccctt

SEQ ID NO: 336816 - DNA, 15 bp, Homo sapiens
cagactgacatccct

SEQ ID NO: 336817 - DNA, 15 bp, Homo sapiens
tcagactgacatccc

SEQ ID NO: 336818 - DNA, 15 bp, Homo sapiens
atcagactgacatcc

SEQ ID NO: 336819 - DNA, 15 bp, Homo sapiens
catcagactgacatc

SEQ ID NO: 336820 - DNA, 15 bp, Homo sapiens
ccatcagactgacat

SEQ ID NO: 336821 - DNA, 15 bp, Homo sapiens
tccatcagactgaca

SEQ ID NO: 336822 - DNA, 15 bp, Homo sapiens
ctccatcagactgac

SEQ ID NO: 336823 - DNA, 15 bp, Homo sapiens
tctccatcagactga

SEQ ID NO: 336824 - DNA, 15 bp, Homo sapiens
ttctccatcagactg

SEQ ID NO: 336825 - DNA, 15 bp, Homo sapiens
tttctccatcagact

SEQ ID NO: 336826 - DNA, 15 bp, Homo sapiens
atttctccatcagac

SEQ ID NO: 336827 - DNA, 15 bp, Homo sapiens
aatttctccatcaga

SEQ ID NO: 336828 - DNA, 15 bp, Homo sapiens
caatttctccatcag

SEQ ID NO: 336829 - DNA, 15 bp, Homo sapiens
ccaatttctccatca

SEQ ID NO: 336830 - DNA, 15 bp, Homo sapiens
cccaatttctccatc

SEQ ID NO: 336831 - DNA, 15 bp, Homo sapiens
acccaatttctccat

SEQ ID NO: 336832 - DNA, 15 bp, Homo sapiens
tacccaatttctcca

SEQ ID NO: 336833 - DNA, 15 bp, Homo sapiens
atacccaatttctcc

SEQ ID NO: 336834 - DNA, 15 bp, Homo sapiens
aatacccaatttctc

SEQ ID NO: 336835 - DNA, 15 bp, Homo sapiens
aaatacccaatttct

SEQ ID NO: 336836 - DNA, 15 bp, Homo sapiens
caaatacccaatttc

SEQ ID NO: 336837 - DNA, 15 bp, Homo sapiens
acaaatacccaattt

SEQ ID NO: 336838 - DNA, 15 bp, Homo sapiens
aacaaatacccaatt

SEQ ID NO: 336839 - DNA, 15 bp, Homo sapiens
taacaaatacccaat

SEQ ID NO: 336840 - DNA, 15 bp, Homo sapiens
ctaacaaatacccaa

SEQ ID NO: 336841 - DNA, 15 bp, Homo sapiens
tctaacaaataccca

SEQ ID NO: 336842 - DNA, 15 bp, Homo sapiens
atctaacaaataccc

SEQ ID NO: 336843 - DNA, 15 bp, Homo sapiens
gatctaacaaatacc

SEQ ID NO: 336844 - DNA, 15 bp, Homo sapiens
agatctaacaaatac

SEQ ID NO: 336845 - DNA, 15 bp, Homo sapiens
aagatctaacaaata

SEQ ID NO: 336846 - DNA, 15 bp, Homo sapiens
aaagatctaacaaat

SEQ ID NO: 336847 - DNA, 15 bp, Homo sapiens
taaagatctaacaaa

SEQ ID NO: 336848 - DNA, 15 bp, Homo sapiens
ataaagatctaacaa

SEQ ID NO: 336849 - DNA, 15 bp, Homo sapiens
cataaagatctaaca

SEQ ID NO: 336850 - DNA, 15 bp, Homo sapiens
tcataaagatctaac

SEQ ID NO: 336851 - DNA, 15 bp, Homo sapiens
ctcataaagatctaa

SEQ ID NO: 336852 - DNA, 15 bp, Homo sapiens
tctcataaagatcta

SEQ ID NO: 336853 - DNA, 15 bp, Homo sapiens
ttctcataaagatct

SEQ ID NO: 336854 - DNA, 15 bp, Homo sapiens
tttctcataaagatc

SEQ ID NO: 336855 - DNA, 15 bp, Homo sapiens
gtttctcataaagat

SEQ ID NO: 336856 - DNA, 15 bp, Homo sapiens
agtttctcataaaga

SEQ ID NO: 336857 - DNA, 15 bp, Homo sapiens
cagtttctcataaag

SEQ ID NO: 336858 - DNA, 15 bp, Homo sapiens
ccagtttctcataaa

SEQ ID NO: 336859 - DNA, 15 bp, Homo sapiens
tccagtttctcataa

SEQ ID NO: 336860 - DNA, 15 bp, Homo sapiens
ttccagtttctcata

SEQ ID NO: 336861 - DNA, 15 bp, Homo sapiens
tttccagtttctcat

SEQ ID NO: 336862 - DNA, 15 bp, Homo sapiens
gtttccagtttctca

SEQ ID NO: 336863 - DNA, 15 bp, Homo sapiens
ggtttccagtttctc

SEQ ID NO: 336864 - DNA, 15 bp, Homo sapiens
aggtttccagtttct

SEQ ID NO: 336865 - DNA, 15 bp, Homo sapiens
taggtttccagtttc

SEQ ID NO: 336866 - DNA, 15 bp, Homo sapiens
ttaggtttccagttt

SEQ ID NO: 336867 - DNA, 15 bp, Homo sapiens
attaggtttccagtt

SEQ ID NO: 336868 - DNA, 15 bp, Homo sapiens
aattaggtttccagt

SEQ ID NO: 336869 - DNA, 15 bp, Homo sapiens
caattaggtttccag

SEQ ID NO: 336870 - DNA, 15 bp, Homo sapiens
ccaattaggtttcca

SEQ ID NO: 336871 - DNA, 15 bp, Homo sapiens
accaattaggtttcc

SEQ ID NO: 336872 - DNA, 15 bp, Homo sapiens
taccaattaggtttc

SEQ ID NO: 336873 - DNA, 15 bp, Homo sapiens
ataccaattaggttt

SEQ ID NO: 336874 - DNA, 15 bp, Homo sapiens
aataccaattaggtt

SEQ ID NO: 336875 - DNA, 15 bp, Homo sapiens
gaataccaattaggt

SEQ ID NO: 336876 - DNA, 15 bp, Homo sapiens
tgaataccaattagg

SEQ ID NO: 336877 - DNA, 15 bp, Homo sapiens
gtgaataccaattag

SEQ ID NO: 336878 - DNA, 15 bp, Homo sapiens
tgtgaataccaatta

SEQ ID NO: 336879 - DNA, 15 bp, Homo sapiens
ttgtgaataccaatt

SEQ ID NO: 336880 - DNA, 15 bp, Homo sapiens
cttgtgaataccaat

SEQ ID NO: 336881 - DNA, 15 bp, Homo sapiens
acttgtgaataccaa

SEQ ID NO: 336882 - DNA, 15 bp, Homo sapiens
cacttgtgaatacca

SEQ ID NO: 336883 - DNA, 15 bp, Homo sapiens
tcacttgtgaatacc

SEQ ID NO: 336884 - DNA, 15 bp, Homo sapiens
ttcacttgtgaatac

SEQ ID NO: 336885 - DNA, 15 bp, Homo sapiens
tttcacttgtgaata

SEQ ID NO: 336886 - DNA, 15 bp, Homo sapiens
ttttcacttgtgaat

SEQ ID NO: 336887 - DNA, 15 bp, Homo sapiens
cttttcacttgtgaa

SEQ ID NO: 336888 - DNA, 15 bp, Homo sapiens
gcttttcacttgtga

SEQ ID NO: 336889 - DNA, 15 bp, Homo sapiens
agcttttcacttgtg

SEQ ID NO: 336890 - DNA, 15 bp, Homo sapiens
aagcttttcacttgt

SEQ ID NO: 336891 - DNA, 15 bp, Homo sapiens
taagcttttcacttg

SEQ ID NO: 336892 - DNA, 15 bp, Homo sapiens
ctaagcttttcactt

SEQ ID NO: 336893 - DNA, 15 bp, Homo sapiens
actaagcttttcact

SEQ ID NO: 336894 - DNA, 15 bp, Homo sapiens
cactaagcttttcac

SEQ ID NO: 336895 - DNA, 15 bp, Homo sapiens
acactaagcttttca

SEQ ID NO: 336896 - DNA, 15 bp, Homo sapiens
aacactaagcttttc

SEQ ID NO: 336897 - DNA, 15 bp, Homo sapiens
caacactaagctttt

SEQ ID NO: 336898 - DNA, 15 bp, Homo sapiens
ccaacactaagcttt

SEQ ID NO: 336899 - DNA, 15 bp, Homo sapiens
cccaacactaagctt

SEQ ID NO: 336900 - DNA, 15 bp, Homo sapiens
tcccaacactaagct

SEQ ID NO: 336901 - DNA, 15 bp, Homo sapiens
ttcccaacactaagc

SEQ ID NO: 336902 - DNA, 15 bp, Homo sapiens
cttcccaacactaag

SEQ ID NO: 336903 - DNA, 15 bp, Homo sapiens
tcttcccaacactaa

SEQ ID NO: 336904 - DNA, 15 bp, Homo sapiens
ctcttcccaacacta

SEQ ID NO: 336905 - DNA, 15 bp, Homo sapiens
actcttcccaacact

SEQ ID NO: 336906 - DNA, 15 bp, Homo sapiens
tactcttcccaacac

SEQ ID NO: 336907 - DNA, 15 bp, Homo sapiens
ttactcttcccaaca

SEQ ID NO: 336908 - DNA, 15 bp, Homo sapiens
gttactcttcccaac

SEQ ID NO: 336909 - DNA, 15 bp, Homo sapiens
tgttactcttcccaa

SEQ ID NO: 336910 - DNA, 15 bp, Homo sapiens
ctgttactcttccca

SEQ ID NO: 336911 - DNA, 15 bp, Homo sapiens
tctgttactcttccc

SEQ ID NO: 336912 - DNA, 15 bp, Homo sapiens
atctgttactcttcc

SEQ ID NO: 336913 - DNA, 15 bp, Homo sapiens
aatctgttactcttc

SEQ ID NO: 336914 - DNA, 15 bp, Homo sapiens
gaatctgttactctt

SEQ ID NO: 336915 - DNA, 15 bp, Homo sapiens
ggaatctgttactct

SEQ ID NO: 336916 - DNA, 15 bp, Homo sapiens
aggaatctgttactc

SEQ ID NO: 336917 - DNA, 15 bp, Homo sapiens
taggaatctgttact

SEQ ID NO: 336918 - DNA, 15 bp, Homo sapiens
gtaggaatctgttac

SEQ ID NO: 336919 - DNA, 15 bp, Homo sapiens
ggtaggaatctgtta

SEQ ID NO: 336920 - DNA, 15 bp, Homo sapiens
aggtaggaatctgtt

SEQ ID NO: 336921 - DNA, 15 bp, Homo sapiens
aaggtaggaatctgt

SEQ ID NO: 336922 - DNA, 15 bp, Homo sapiens
gaaggtaggaatctg

SEQ ID NO: 336923 - DNA, 15 bp, Homo sapiens
ggaaggtaggaatct

SEQ ID NO: 336924 - DNA, 15 bp, Homo sapiens
gggaaggtaggaatc

SEQ ID NO: 336925 - DNA, 15 bp, Homo sapiens
agggaaggtaggaat

SEQ ID NO: 336926 - DNA, 15 bp, Homo sapiens
gagggaaggtaggaa

SEQ ID NO: 336927 - DNA, 15 bp, Homo sapiens
ggagggaaggtagga

SEQ ID NO: 336928 - DNA, 15 bp, Homo sapiens
tggagggaaggtagg

SEQ ID NO: 336929 - DNA, 15 bp, Homo sapiens
atggagggaaggtag

SEQ ID NO: 336930 - DNA, 15 bp, Homo sapiens
tatggagggaaggta

SEQ ID NO: 336931 - DNA, 15 bp, Homo sapiens
atatggagggaaggt

SEQ ID NO: 336932 - DNA, 15 bp, Homo sapiens
aatatggagggaagg

SEQ ID NO: 336933 - DNA, 15 bp, Homo sapiens
taatatggagggaag

SEQ ID NO: 336934 - DNA, 15 bp, Homo sapiens
ttaatatggagggaa

SEQ ID NO: 336935 - DNA, 15 bp, Homo sapiens
attaatatggaggga

SEQ ID NO: 336936 - DNA, 15 bp, Homo sapiens
aattaatatggaggg

SEQ ID NO: 336937 - DNA, 15 bp, Homo sapiens
taattaatatggagg

SEQ ID NO: 336938 - DNA, 15 bp, Homo sapiens
ttaattaatatggag

SEQ ID NO: 336939 - DNA, 15 bp, Homo sapiens
cttaattaatatgga

SEQ ID NO: 336940 - DNA, 15 bp, Homo sapiens
tcttaattaatatgg

SEQ ID NO: 336941 - DNA, 15 bp, Homo sapiens
atcttaattaatatg

SEQ ID NO: 336942 - DNA, 15 bp, Homo sapiens
catcttaattaatat

SEQ ID NO: 336943 - DNA, 15 bp, Homo sapiens
tcatcttaattaata

SEQ ID NO: 336944 - DNA, 15 bp, Homo sapiens
atcatcttaattaat

SEQ ID NO: 336945 - DNA, 15 bp, Homo sapiens
catcatcttaattaa

SEQ ID NO: 336946 - DNA, 15 bp, Homo sapiens
acatcatcttaatta

SEQ ID NO: 336947 - DNA, 15 bp, Homo sapiens
cacatcatcttaatt

SEQ ID NO: 336948 - DNA, 15 bp, Homo sapiens
tcacatcatcttaat

SEQ ID NO: 336949 - DNA, 15 bp, Homo sapiens
atcacatcatcttaa

SEQ ID NO: 336950 - DNA, 15 bp, Homo sapiens
aatcacatcatctta

SEQ ID NO: 336951 - DNA, 15 bp, Homo sapiens
caatcacatcatctt

SEQ ID NO: 336952 - DNA, 15 bp, Homo sapiens
acaatcacatcatct

SEQ ID NO: 336953 - DNA, 15 bp, Homo sapiens
cacaatcacatcatc

SEQ ID NO: 336954 - DNA, 15 bp, Homo sapiens
ccacaatcacatcat

SEQ ID NO: 336955 - DNA, 15 bp, Homo sapiens
gccacaatcacatca

SEQ ID NO: 336956 - DNA, 15 bp, Homo sapiens
cgccacaatcacatc

SEQ ID NO: 336957 - DNA, 15 bp, Homo sapiens
tcgccacaatcacat

SEQ ID NO: 336958 - DNA, 15 bp, Homo sapiens
gtcgccacaatcaca

SEQ ID NO: 336959 - DNA, 15 bp, Homo sapiens
agtcgccacaatcac

SEQ ID NO: 336960 - DNA, 15 bp, Homo sapiens
aagtcgccacaatca

SEQ ID NO: 336961 - DNA, 15 bp, Homo sapiens
caagtcgccacaatc

SEQ ID NO: 336962 - DNA, 15 bp, Homo sapiens
tcaagtcgccacaat

SEQ ID NO: 336963 - DNA, 15 bp, Homo sapiens
gtcaagtcgccacaa

SEQ ID NO: 336964 - DNA, 15 bp, Homo sapiens
tgtcaagtcgccaca

SEQ ID NO: 336965 - DNA, 15 bp, Homo sapiens
atgtcaagtcgccac

SEQ ID NO: 336966 - DNA, 15 bp, Homo sapiens
aatgtcaagtcgcca

SEQ ID NO: 336967 - DNA, 15 bp, Homo sapiens
aaatgtcaagtcgcc

SEQ ID NO: 336968 - DNA, 15 bp, Homo sapiens
aaaatgtcaagtcgc

SEQ ID NO: 336969 - DNA, 15 bp, Homo sapiens
gaaaatgtcaagtcg

SEQ ID NO: 336970 - DNA, 15 bp, Homo sapiens
agaaaatgtcaagtc

SEQ ID NO: 336971 - DNA, 15 bp, Homo sapiens
tagaaaatgtcaagt

SEQ ID NO: 336972 - DNA, 15 bp, Homo sapiens
atagaaaatgtcaag

SEQ ID NO: 336973 - DNA, 15 bp, Homo sapiens
aatagaaaatgtcaa

SEQ ID NO: 336974 - DNA, 15 bp, Homo sapiens
aaatagaaaatgtca

SEQ ID NO: 336975 - DNA, 15 bp, Homo sapiens
caaatagaaaatgtc

SEQ ID NO: 336976 - DNA, 15 bp, Homo sapiens
tcaaatagaaaatgt

SEQ ID NO: 336977 - DNA, 15 bp, Homo sapiens
atcaaatagaaaatg

SEQ ID NO: 336978 - DNA, 15 bp, Homo sapiens
gatcaaatagaaaat

SEQ ID NO: 336979 - DNA, 15 bp, Homo sapiens
agatcaaatagaaaa

SEQ ID NO: 336980 - DNA, 15 bp, Homo sapiens
tagatcaaatagaaa

SEQ ID NO: 336981 - DNA, 15 bp, Homo sapiens
gtagatcaaatagaa

SEQ ID NO: 336982 - DNA, 15 bp, Homo sapiens
ggtagatcaaataga

SEQ ID NO: 336983 - DNA, 15 bp, Homo sapiens
aggtagatcaaatag

SEQ ID NO: 336984 - DNA, 15 bp, Homo sapiens
aaggtagatcaaata

SEQ ID NO: 336985 - DNA, 15 bp, Homo sapiens
taaggtagatcaaat

SEQ ID NO: 336986 - DNA, 15 bp, Homo sapiens
ctaaggtagatcaaa

SEQ ID NO: 336987 - DNA, 15 bp, Homo sapiens
cctaaggtagatcaa

SEQ ID NO: 336988 - DNA, 15 bp, Homo sapiens
ccctaaggtagatca

SEQ ID NO: 336989 - DNA, 15 bp, Homo sapiens
accctaaggtagatc

SEQ ID NO: 336990 - DNA, 15 bp, Homo sapiens
aaccctaaggtagat

SEQ ID NO: 336991 - DNA, 15 bp, Homo sapiens
caaccctaaggtaga

SEQ ID NO: 336992 - DNA, 15 bp, Homo sapiens
gcaaccctaaggtag

SEQ ID NO: 336993 - DNA, 15 bp, Homo sapiens
tgcaaccctaaggta

SEQ ID NO: 336994 - DNA, 15 bp, Homo sapiens
ctgcaaccctaaggt

SEQ ID NO: 336995 - DNA, 15 bp, Homo sapiens
gctgcaaccctaagg

SEQ ID NO: 336996 - DNA, 15 bp, Homo sapiens
agctgcaaccctaag

SEQ ID NO: 336997 - DNA, 15 bp, Homo sapiens
tagctgcaaccctaa

SEQ ID NO: 336998 - DNA, 15 bp, Homo sapiens
ttagctgcaacccta

SEQ ID NO: 336999 - DNA, 15 bp, Homo sapiens
attagctgcaaccct

SEQ ID NO: 337000 - DNA, 15 bp, Homo sapiens
aattagctgcaaccc

SEQ ID NO: 337001 - DNA, 15 bp, Homo sapiens
taattagctgcaacc

SEQ ID NO: 337002 - DNA, 15 bp, Homo sapiens
ctaattagctgcaac

SEQ ID NO: 337003 - DNA, 15 bp, Homo sapiens
actaattagctgcaa

SEQ ID NO: 337004 - DNA, 15 bp, Homo sapiens
aactaattagctgca

SEQ ID NO: 337005 - DNA, 15 bp, Homo sapiens
taactaattagctgc

SEQ ID NO: 337006 - DNA, 15 bp, Homo sapiens
gtaactaattagctg

SEQ ID NO: 337007 - DNA, 15 bp, Homo sapiens
ggtaactaattagct

SEQ ID NO: 337008 - DNA, 15 bp, Homo sapiens
aggtaactaattagc

SEQ ID NO: 337009 - DNA, 15 bp, Homo sapiens
taggtaactaattag

SEQ ID NO: 337010 - DNA, 15 bp, Homo sapiens
ttaggtaactaatta

SEQ ID NO: 337011 - DNA, 15 bp, Homo sapiens
cttaggtaactaatt

SEQ ID NO: 337012 - DNA, 15 bp, Homo sapiens
tcttaggtaactaat

SEQ ID NO: 337013 - DNA, 15 bp, Homo sapiens
gtcttaggtaactaa

SEQ ID NO: 337014 - DNA, 15 bp, Homo sapiens
agtcttaggtaacta

SEQ ID NO: 337015 - DNA, 15 bp, Homo sapiens
tagtcttaggtaact

SEQ ID NO: 337016 - DNA, 15 bp, Homo sapiens
atagtcttaggtaac

SEQ ID NO: 337017 - DNA, 15 bp, Homo sapiens
aatagtcttaggtaa

SEQ ID NO: 337018 - DNA, 15 bp, Homo sapiens
caatagtcttaggta

SEQ ID NO: 337019 - DNA, 15 bp, Homo sapiens
gcaatagtcttaggt

SEQ ID NO: 337020 - DNA, 15 bp, Homo sapiens
tgcaatagtcttagg

SEQ ID NO: 337021 - DNA, 15 bp, Homo sapiens
atgcaatagtcttag

SEQ ID NO: 337022 - DNA, 15 bp, Homo sapiens
tatgcaatagtctta

SEQ ID NO: 337023 - DNA, 15 bp, Homo sapiens
ctatgcaatagtctt

SEQ ID NO: 337024 - DNA, 15 bp, Homo sapiens
actatgcaatagtct

SEQ ID NO: 337025 - DNA, 15 bp, Homo sapiens
cactatgcaatagtc

SEQ ID NO: 337026 - DNA, 15 bp, Homo sapiens
acactatgcaatagt

SEQ ID NO: 337027 - DNA, 15 bp, Homo sapiens
cacactatgcaatag

SEQ ID NO: 337028 - DNA, 15 bp, Homo sapiens
acacactatgcaata

SEQ ID NO: 337029 - DNA, 15 bp, Homo sapiens
cacacactatgcaat

SEQ ID NO: 337030 - DNA, 15 bp, Homo sapiens
acacacactatgcaa

SEQ ID NO: 337031 - DNA, 15 bp, Homo sapiens
aacacacactatgca

SEQ ID NO: 337032 - DNA, 15 bp, Homo sapiens
aaacacacactatgc

SEQ ID NO: 337033 - DNA, 15 bp, Homo sapiens
aaaacacacactatg

SEQ ID NO: 337034 - DNA, 15 bp, Homo sapiens
taaaacacacactat

SEQ ID NO: 337035 - DNA, 15 bp, Homo sapiens
ataaaacacacacta

SEQ ID NO: 337036 - DNA, 15 bp, Homo sapiens
tataaaacacacact

SEQ ID NO: 337037 - DNA, 15 bp, Homo sapiens
gtataaaacacacac

SEQ ID NO: 337038 - DNA, 15 bp, Homo sapiens
tgtataaaacacaca

SEQ ID NO: 337039 - DNA, 15 bp, Homo sapiens
ctgtataaaacacac

SEQ ID NO: 337040 - DNA, 15 bp, Homo sapiens
tctgtataaaacaca

SEQ ID NO: 337041 - DNA, 15 bp, Homo sapiens
ctctgtataaaacac

SEQ ID NO: 337042 - DNA, 15 bp, Homo sapiens
actctgtataaaaca

SEQ ID NO: 337043 - DNA, 15 bp, Homo sapiens
tactctgtataaaac

SEQ ID NO: 337044 - DNA, 15 bp, Homo sapiens
atactctgtataaaa

SEQ ID NO: 337045 - DNA, 15 bp, Homo sapiens
tatactctgtataaa

SEQ ID NO: 337046 - DNA, 15 bp, Homo sapiens
atatactctgtataa

SEQ ID NO: 337047 - DNA, 15 bp, Homo sapiens
aatatactctgtata

SEQ ID NO: 337048 - DNA, 15 bp, Homo sapiens
taatatactctgtat

SEQ ID NO: 337049 - DNA, 15 bp, Homo sapiens
gtaatatactctgta

SEQ ID NO: 337050 - DNA, 15 bp, Homo sapiens
tgtaatatactctgt

SEQ ID NO: 337051 - DNA, 15 bp, Homo sapiens
atgtaatatactctg

SEQ ID NO: 337052 - DNA, 15 bp, Homo sapiens
catgtaatatactct

SEQ ID NO: 337053 - DNA, 15 bp, Homo sapiens
acatgtaatatactc

SEQ ID NO: 337054 - DNA, 15 bp, Homo sapiens
aacatgtaatatact

SEQ ID NO: 337055 - DNA, 15 bp, Homo sapiens
taacatgtaatatac

SEQ ID NO: 337056 - DNA, 15 bp, Homo sapiens
ctaacatgtaatata

SEQ ID NO: 337057 - DNA, 15 bp, Homo sapiens
gctaacatgtaatat

SEQ ID NO: 337058 - DNA, 15 bp, Homo sapiens
tgctaacatgtaata

SEQ ID NO: 337059 - DNA, 15 bp, Homo sapiens
ttgctaacatgtaat

SEQ ID NO: 337060 - DNA, 15 bp, Homo sapiens
gttgctaacatgtaa

SEQ ID NO: 337061 - DNA, 15 bp, Homo sapiens
ggttgctaacatgta

SEQ ID NO: 337062 - DNA, 15 bp, Homo sapiens
tggttgctaacatgt

SEQ ID NO: 337063 - DNA, 15 bp, Homo sapiens
ctggttgctaacatg

SEQ ID NO: 337064 - DNA, 15 bp, Homo sapiens
tctggttgctaacat

SEQ ID NO: 337065 - DNA, 15 bp, Homo sapiens
ctctggttgctaaca

SEQ ID NO: 337066 - DNA, 15 bp, Homo sapiens
gctctggttgctaac

SEQ ID NO: 337067 - DNA, 15 bp, Homo sapiens
tgctctggttgctaa

SEQ ID NO: 337068 - DNA, 15 bp, Homo sapiens
ttgctctggttgcta

SEQ ID NO: 337069 - DNA, 15 bp, Homo sapiens
gttgctctggttgct

SEQ ID NO: 337070 - DNA, 15 bp, Homo sapiens
agttgctctggttgc

SEQ ID NO: 337071 - DNA, 15 bp, Homo sapiens
cagttgctctggttg

SEQ ID NO: 337072 - DNA, 15 bp, Homo sapiens
gcagttgctctggtt

SEQ ID NO: 337073 - DNA, 15 bp, Homo sapiens
agcagttgctctggt

SEQ ID NO: 337074 - DNA, 15 bp, Homo sapiens
cagcagttgctctgg

SEQ ID NO: 337075 - DNA, 15 bp, Homo sapiens
acagcagttgctctg

SEQ ID NO: 337076 - DNA, 15 bp, Homo sapiens
tacagcagttgctct

SEQ ID NO: 337077 - DNA, 15 bp, Homo sapiens
ctacagcagttgctc

SEQ ID NO: 337078 - DNA, 15 bp, Homo sapiens
actacagcagttgct

SEQ ID NO: 337079 - DNA, 15 bp, Homo sapiens
tactacagcagttgc

SEQ ID NO: 337080 - DNA, 15 bp, Homo sapiens
ttactacagcagttg

SEQ ID NO: 337081 - DNA, 15 bp, Homo sapiens
tttactacagcagtt

SEQ ID NO: 337082 - DNA, 15 bp, Homo sapiens
ttttactacagcagt

SEQ ID NO: 337083 - DNA, 15 bp, Homo sapiens
attttactacagcag

SEQ ID NO: 337084 - DNA, 15 bp, Homo sapiens
aattttactacagca

SEQ ID NO: 337085 - DNA, 15 bp, Homo sapiens
aaattttactacagc

SEQ ID NO: 337086 - DNA, 15 bp, Homo sapiens
aaaattttactacag

SEQ ID NO: 337087 - DNA, 15 bp, Homo sapiens
caaaattttactaca

SEQ ID NO: 337088 - DNA, 15 bp, Homo sapiens
acaaaattttactac

SEQ ID NO: 337089 - DNA, 15 bp, Homo sapiens
gacaaaattttacta

SEQ ID NO: 337090 - DNA, 15 bp, Homo sapiens
ggacaaaattttact

SEQ ID NO: 337091 - DNA, 15 bp, Homo sapiens
aggacaaaattttac

SEQ ID NO: 337092 - DNA, 15 bp, Homo sapiens
caggacaaaatttta

SEQ ID NO: 337093 - DNA, 15 bp, Homo sapiens
acaggacaaaatttt

SEQ ID NO: 337094 - DNA, 15 bp, Homo sapiens
aacaggacaaaattt

SEQ ID NO: 337095 - DNA, 15 bp, Homo sapiens
aaacaggacaaaatt

SEQ ID NO: 337096 - DNA, 15 bp, Homo sapiens
aaaacaggacaaaat

SEQ ID NO: 337097 - DNA, 15 bp, Homo sapiens
gaaaacaggacaaaa

SEQ ID NO: 337098 - DNA, 15 bp, Homo sapiens
agaaaacaggacaaa

SEQ ID NO: 337099 - DNA, 15 bp, Homo sapiens
cagaaaacaggacaa

SEQ ID NO: 337100 - DNA, 15 bp, Homo sapiens
gcagaaaacaggaca

SEQ ID NO: 337101 - DNA, 15 bp, Homo sapiens
ggcagaaaacaggac

SEQ ID NO: 337102 - DNA, 15 bp, Homo sapiens
tggcagaaaacagga

SEQ ID NO: 337103 - DNA, 15 bp, Homo sapiens
atggcagaaaacagg

SEQ ID NO: 337104 - DNA, 15 bp, Homo sapiens
aatggcagaaaacag

SEQ ID NO: 337105 - DNA, 15 bp, Homo sapiens
aaatggcagaaaaca

SEQ ID NO: 337106 - DNA, 15 bp, Homo sapiens
gaaatggcagaaaac

SEQ ID NO: 337107 - DNA, 15 bp, Homo sapiens
cgaaatggcagaaaa

SEQ ID NO: 337108 - DNA, 15 bp, Homo sapiens
tcgaaatggcagaaa

SEQ ID NO: 337109 - DNA, 15 bp, Homo sapiens
ctcgaaatggcagaa

SEQ ID NO: 337110 - DNA, 15 bp, Homo sapiens
actcgaaatggcaga

SEQ ID NO: 337111 - DNA, 15 bp, Homo sapiens
aactcgaaatggcag

SEQ ID NO: 337112 - DNA, 15 bp, Homo sapiens
caactcgaaatggca

SEQ ID NO: 337113 - DNA, 15 bp, Homo sapiens
gcaactcgaaatggc

SEQ ID NO: 337114 - DNA, 15 bp, Homo sapiens
cgcaactcgaaatgg

SEQ ID NO: 337115 - DNA, 15 bp, Homo sapiens
tcgcaactcgaaatg

SEQ ID NO: 337116 - DNA, 15 bp, Homo sapiens
ttcgcaactcgaaat

SEQ ID NO: 337117 - DNA, 15 bp, Homo sapiens
tttcgcaactcgaaa

SEQ ID NO: 337118 - DNA, 15 bp, Homo sapiens
ctttcgcaactcgaa

SEQ ID NO: 337119 - DNA, 15 bp, Homo sapiens
cctttcgcaactcga

SEQ ID NO: 337120 - DNA, 15 bp, Homo sapiens
ccctttcgcaactcg

SEQ ID NO: 337121 - DNA, 15 bp, Homo sapiens
accctttcgcaactc

SEQ ID NO: 337122 - DNA, 15 bp, Homo sapiens
caccctttcgcaact

SEQ ID NO: 337123 - DNA, 15 bp, Homo sapiens
acaccctttcgcaac

SEQ ID NO: 337124 - DNA, 15 bp, Homo sapiens
aacaccctttcgcaa

SEQ ID NO: 337125 - DNA, 15 bp, Homo sapiens
taacaccctttcgca

SEQ ID NO: 337126 - DNA, 15 bp, Homo sapiens
gtaacaccctttcgc

SEQ ID NO: 337127 - DNA, 15 bp, Homo sapiens
tgtaacaccctttcg

SEQ ID NO: 337128 - DNA, 15 bp, Homo sapiens
atgtaacaccctttc

SEQ ID NO: 337129 - DNA, 15 bp, Homo sapiens
tatgtaacacccttt

SEQ ID NO: 337130 - DNA, 15 bp, Homo sapiens
ttatgtaacaccctt

SEQ ID NO: 337131 - DNA, 15 bp, Homo sapiens
attatgtaacaccct

SEQ ID NO: 337132 - DNA, 15 bp, Homo sapiens
gattatgtaacaccc

SEQ ID NO: 337133 - DNA, 15 bp, Homo sapiens
agattatgtaacacc

SEQ ID NO: 337134 - DNA, 15 bp, Homo sapiens
aagattatgtaacac

SEQ ID NO: 337135 - DNA, 15 bp, Homo sapiens
taagattatgtaaca

SEQ ID NO: 337136 - DNA, 15 bp, Homo sapiens
ctaagattatgtaac

SEQ ID NO: 337137 - DNA, 15 bp, Homo sapiens
tctaagattatgtaa

SEQ ID NO: 337138 - DNA, 15 bp, Homo sapiens
atctaagattatgta

SEQ ID NO: 337139 - DNA, 15 bp, Homo sapiens
catctaagattatgt

SEQ ID NO: 337140 - DNA, 15 bp, Homo sapiens
tcatctaagattatg

SEQ ID NO: 337141 - DNA, 15 bp, Homo sapiens
atcatctaagattat

SEQ ID NO: 337142 - DNA, 15 bp, Homo sapiens
gatcatctaagatta

SEQ ID NO: 337143 - DNA, 15 bp, Homo sapiens
tgatcatctaagatt

SEQ ID NO: 337144 - DNA, 15 bp, Homo sapiens
atgatcatctaagat

SEQ ID NO: 337145 - DNA, 15 bp, Homo sapiens
gatgatcatctaaga

SEQ ID NO: 337146 - DNA, 15 bp, Homo sapiens
tgatgatcatctaag

SEQ ID NO: 337147 - DNA, 15 bp, Homo sapiens
ctgatgatcatctaa

SEQ ID NO: 337148 - DNA, 15 bp, Homo sapiens
cctgatgatcatcta

SEQ ID NO: 337149 - DNA, 15 bp, Homo sapiens
tcctgatgatcatct

SEQ ID NO: 337150 - DNA, 15 bp, Homo sapiens
ctcctgatgatcatc

SEQ ID NO: 337151 - DNA, 15 bp, Homo sapiens
actcctgatgatcat

SEQ ID NO: 337152 - DNA, 15 bp, Homo sapiens
tactcctgatgatca

SEQ ID NO: 337153 - DNA, 15 bp, Homo sapiens
atactcctgatgatc

SEQ ID NO: 337154 - DNA, 15 bp, Homo sapiens
catactcctgatgat

SEQ ID NO: 337155 - DNA, 15 bp, Homo sapiens
acatactcctgatga

SEQ ID NO: 337156 - DNA, 15 bp, Homo sapiens
aacatactcctgatg

SEQ ID NO: 337157 - DNA, 15 bp, Homo sapiens
aaacatactcctgat

SEQ ID NO: 337158 - DNA, 15 bp, Homo sapiens
aaaacatactcctga

SEQ ID NO: 337159 - DNA, 15 bp, Homo sapiens
caaaacatactcctg

SEQ ID NO: 337160 - DNA, 15 bp, Homo sapiens
gcaaaacatactcct

SEQ ID NO: 337161 - DNA, 15 bp, Homo sapiens
agcaaaacatactcc

SEQ ID NO: 337162 - DNA, 15 bp, Homo sapiens
gagcaaaacatactc

SEQ ID NO: 337163 - DNA, 15 bp, Homo sapiens
tgagcaaaacatact

SEQ ID NO: 337164 - DNA, 15 bp, Homo sapiens
gtgagcaaaacatac

SEQ ID NO: 337165 - DNA, 15 bp, Homo sapiens
tgtgagcaaaacata

SEQ ID NO: 337166 - DNA, 15 bp, Homo sapiens
ctgtgagcaaaacat

SEQ ID NO: 337167 - DNA, 15 bp, Homo sapiens
tctgtgagcaaaaca

SEQ ID NO: 337168 - DNA, 15 bp, Homo sapiens
atctgtgagcaaaac

SEQ ID NO: 337169 - DNA, 15 bp, Homo sapiens
tatctgtgagcaaaa

SEQ ID NO: 337170 - DNA, 15 bp, Homo sapiens
ttatctgtgagcaaa

SEQ ID NO: 337171 - DNA, 15 bp, Homo sapiens
gttatctgtgagcaa

SEQ ID NO: 337172 - DNA, 15 bp, Homo sapiens
cgttatctgtgagca

SEQ ID NO: 337173 - DNA, 15 bp, Homo sapiens
tcgttatctgtgagc

SEQ ID NO: 337174 - DNA, 15 bp, Homo sapiens
atcgttatctgtgag

SEQ ID NO: 337175 - DNA, 15 bp, Homo sapiens
catcgttatctgtga

SEQ ID NO: 337176 - DNA, 15 bp, Homo sapiens
acatcgttatctgtg

SEQ ID NO: 337177 - DNA, 15 bp, Homo sapiens
tacatcgttatctgt

SEQ ID NO: 337178 - DNA, 15 bp, Homo sapiens
ctacatcgttatctg

SEQ ID NO: 337179 - DNA, 15 bp, Homo sapiens
tctacatcgttatct

SEQ ID NO: 337180 - DNA, 15 bp, Homo sapiens
gtctacatcgttatc

SEQ ID NO: 337181 - DNA, 15 bp, Homo sapiens
tgtctacatcgttat

SEQ ID NO: 337182 - DNA, 15 bp, Homo sapiens
ttgtctacatcgtta

SEQ ID NO: 337183 - DNA, 15 bp, Homo sapiens
cttgtctacatcgtt

SEQ ID NO: 337184 - DNA, 15 bp, Homo sapiens
acttgtctacatcgt

SEQ ID NO: 337185 - DNA, 15 bp, Homo sapiens
aacttgtctacatcg

SEQ ID NO: 337186 - DNA, 15 bp, Homo sapiens
aaacttgtctacatc

SEQ ID NO: 337187 - DNA, 15 bp, Homo sapiens
caaacttgtctacat

SEQ ID NO: 337188 - DNA, 15 bp, Homo sapiens
acaaacttgtctaca

SEQ ID NO: 337189 - DNA, 15 bp, Homo sapiens
aacaaacttgtctac

SEQ ID NO: 337190 - DNA, 15 bp, Homo sapiens
aaacaaacttgtcta

SEQ ID NO: 337191 - DNA, 15 bp, Homo sapiens
taaacaaacttgtct

SEQ ID NO: 337192 - DNA, 15 bp, Homo sapiens
ttaaacaaacttgtc

SEQ ID NO: 337193 - DNA, 15 bp, Homo sapiens
gttaaacaaacttgt

SEQ ID NO: 337194 - DNA, 15 bp, Homo sapiens
agttaaacaaacttg

SEQ ID NO: 337195 - DNA, 15 bp, Homo sapiens
aagttaaacaaactt

SEQ ID NO: 337196 - DNA, 15 bp, Homo sapiens
taagttaaacaaact

SEQ ID NO: 337197 - DNA, 15 bp, Homo sapiens
ttaagttaaacaaac

SEQ ID NO: 337198 - DNA, 15 bp, Homo sapiens
tttaagttaaacaaa

SEQ ID NO: 337199 - DNA, 15 bp, Homo sapiens
atttaagttaaacaa

SEQ ID NO: 337200 - DNA, 15 bp, Homo sapiens
aatttaagttaaaca

SEQ ID NO: 337201 - DNA, 15 bp, Homo sapiens
caatttaagttaaac

SEQ ID NO: 337202 - DNA, 15 bp, Homo sapiens
tcaatttaagttaaa

SEQ ID NO: 337203 - DNA, 15 bp, Homo sapiens
gtcaatttaagttaa

SEQ ID NO: 337204 - DNA, 15 bp, Homo sapiens
ggtcaatttaagtta

SEQ ID NO: 337205 - DNA, 15 bp, Homo sapiens
aggtcaatttaagtt

SEQ ID NO: 337206 - DNA, 15 bp, Homo sapiens
aaggtcaatttaagt

SEQ ID NO: 337207 - DNA, 15 bp, Homo sapiens
caaggtcaatttaag

SEQ ID NO: 337208 - DNA, 15 bp, Homo sapiens
tcaaggtcaatttaa

SEQ ID NO: 337209 - DNA, 15 bp, Homo sapiens
gtcaaggtcaattta

SEQ ID NO: 337210 - DNA, 15 bp, Homo sapiens
agtcaaggtcaattt

SEQ ID NO: 337211 - DNA, 15 bp, Homo sapiens
gagtcaaggtcaatt

SEQ ID NO: 337212 - DNA, 15 bp, Homo sapiens
ggagtcaaggtcaat

SEQ ID NO: 337213 - DNA, 15 bp, Homo sapiens
tggagtcaaggtcaa

SEQ ID NO: 337214 - DNA, 15 bp, Homo sapiens
ctggagtcaaggtca

SEQ ID NO: 337215 - DNA, 15 bp, Homo sapiens
cctggagtcaaggtc

SEQ ID NO: 337216 - DNA, 15 bp, Homo sapiens
acctggagtcaaggt

SEQ ID NO: 337217 - DNA, 15 bp, Homo sapiens
gacctggagtcaagg

SEQ ID NO: 337218 - DNA, 15 bp, Homo sapiens
tgacctggagtcaag

SEQ ID NO: 337219 - DNA, 15 bp, Homo sapiens
ttgacctggagtcaa

SEQ ID NO: 337220 - DNA, 15 bp, Homo sapiens
tttgacctggagtca

SEQ ID NO: 337221 - DNA, 15 bp, Homo sapiens
atttgacctggagtc

SEQ ID NO: 337222 - DNA, 15 bp, Homo sapiens
aatttgacctggagt

SEQ ID NO: 337223 - DNA, 15 bp, Homo sapiens
caatttgacctggag

SEQ ID NO: 337224 - DNA, 15 bp, Homo sapiens
ccaatttgacctgga

SEQ ID NO: 337225 - DNA, 15 bp, Homo sapiens
tccaatttgacctgg

SEQ ID NO: 337226 - DNA, 15 bp, Homo sapiens
ctccaatttgacctg

SEQ ID NO: 337227 - DNA, 15 bp, Homo sapiens
actccaatttgacct

SEQ ID NO: 337228 - DNA, 15 bp, Homo sapiens
gactccaatttgacc

SEQ ID NO: 337229 - DNA, 15 bp, Homo sapiens
tgactccaatttgac

SEQ ID NO: 337230 - DNA, 15 bp, Homo sapiens
ttgactccaatttga

SEQ ID NO: 337231 - DNA, 15 bp, Homo sapiens
gttgactccaatttg

SEQ ID NO: 337232 - DNA, 15 bp, Homo sapiens
agttgactccaattt

SEQ ID NO: 337233 - DNA, 15 bp, Homo sapiens
gagttgactccaatt

SEQ ID NO: 337234 - DNA, 15 bp, Homo sapiens
agagttgactccaat

SEQ ID NO: 337235 - DNA, 15 bp, Homo sapiens
cagagttgactccaa

SEQ ID NO: 337236 - DNA, 15 bp, Homo sapiens
ccagagttgactcca

SEQ ID NO: 337237 - DNA, 15 bp, Homo sapiens
accagagttgactcc

SEQ ID NO: 337238 - DNA, 15 bp, Homo sapiens
taccagagttgactc

SEQ ID NO: 337239 - DNA, 15 bp, Homo sapiens
ttaccagagttgact

SEQ ID NO: 337240 - DNA, 15 bp, Homo sapiens
cttaccagagttgac

SEQ ID NO: 337241 - DNA, 15 bp, Homo sapiens
tcttaccagagttga

SEQ ID NO: 337242 - DNA, 15 bp, Homo sapiens
atcttaccagagttg

SEQ ID NO: 337243 - DNA, 15 bp, Homo sapiens
catcttaccagagtt

SEQ ID NO: 337244 - DNA, 15 bp, Homo sapiens
tcatcttaccagagt

SEQ ID NO: 337245 - DNA, 15 bp, Homo sapiens
atcatcttaccagag

SEQ ID NO: 337246 - DNA, 15 bp, Homo sapiens
catcatcttaccaga

SEQ ID NO: 337247 - DNA, 15 bp, Homo sapiens
tcatcatcttaccag

SEQ ID NO: 337248 - DNA, 15 bp, Homo sapiens
ttcatcatcttacca

SEQ ID NO: 337249 - DNA, 15 bp, Homo sapiens
tttcatcatcttacc

SEQ ID NO: 337250 - DNA, 15 bp, Homo sapiens
gtttcatcatcttac

SEQ ID NO: 337251 - DNA, 15 bp, Homo sapiens
tgtttcatcatctta

SEQ ID NO: 337252 - DNA, 15 bp, Homo sapiens
ttgtttcatcatctt

SEQ ID NO: 337253 - DNA, 15 bp, Homo sapiens
attgtttcatcatct

SEQ ID NO: 337254 - DNA, 15 bp, Homo sapiens
tattgtttcatcatc

SEQ ID NO: 337255 - DNA, 15 bp, Homo sapiens
ttattgtttcatcat

SEQ ID NO: 337256 - DNA, 15 bp, Homo sapiens
gttattgtttcatca

SEQ ID NO: 337257 - DNA, 15 bp, Homo sapiens
agttattgtttcatc

SEQ ID NO: 337258 - DNA, 15 bp, Homo sapiens
aagttattgtttcat

SEQ ID NO: 337259 - DNA, 15 bp, Homo sapiens
gaagttattgtttca

SEQ ID NO: 337260 - DNA, 15 bp, Homo sapiens
agaagttattgtttc

SEQ ID NO: 337261 - DNA, 15 bp, Homo sapiens
cagaagttattgttt

SEQ ID NO: 337262 - DNA, 15 bp, Homo sapiens
tcagaagttattgtt

SEQ ID NO: 337263 - DNA, 15 bp, Homo sapiens
ttcagaagttattgt

SEQ ID NO: 337264 - DNA, 15 bp, Homo sapiens
tttcagaagttattg

SEQ ID NO: 337265 - DNA, 15 bp, Homo sapiens
atttcagaagttatt

SEQ ID NO: 337266 - DNA, 15 bp, Homo sapiens
gatttcagaagttat

SEQ ID NO: 337267 - DNA, 15 bp, Homo sapiens
agatttcagaagtta

SEQ ID NO: 337268 - DNA, 15 bp, Homo sapiens
gagatttcagaagtt

SEQ ID NO: 337269 - DNA, 15 bp, Homo sapiens
agagatttcagaagt

SEQ ID NO: 337270 - DNA, 15 bp, Homo sapiens
tagagatttcagaag

SEQ ID NO: 337271 - DNA, 15 bp, Homo sapiens
atagagatttcagaa

SEQ ID NO: 337272 - DNA, 15 bp, Homo sapiens
aatagagatttcaga

SEQ ID NO: 337273 - DNA, 15 bp, Homo sapiens
aaatagagatttcag

SEQ ID NO: 337274 - DNA, 15 bp, Homo sapiens
caaatagagatttca

SEQ ID NO: 337275 - DNA, 15 bp, Homo sapiens
tcaaatagagatttc

SEQ ID NO: 337276 - DNA, 15 bp, Homo sapiens
ttcaaatagagattt

SEQ ID NO: 337277 - DNA, 15 bp, Homo sapiens
tttcaaatagagatt

SEQ ID NO: 337278 - DNA, 15 bp, Homo sapiens
atttcaaatagagat

SEQ ID NO: 337279 - DNA, 15 bp, Homo sapiens
catttcaaatagaga

SEQ ID NO: 337280 - DNA, 15 bp, Homo sapiens
acatttcaaatagag

SEQ ID NO: 337281 - DNA, 15 bp, Homo sapiens
gacatttcaaataga

SEQ ID NO: 337282 - DNA, 15 bp, Homo sapiens
tgacatttcaaatag

SEQ ID NO: 337283 - DNA, 15 bp, Homo sapiens
ctgacatttcaaata

SEQ ID NO: 337284 - DNA, 15 bp, Homo sapiens
cctgacatttcaaat

SEQ ID NO: 337285 - DNA, 15 bp, Homo sapiens
tcctgacatttcaaa

SEQ ID NO: 337286 - DNA, 15 bp, Homo sapiens
atcctgacatttcaa

SEQ ID NO: 337287 - DNA, 15 bp, Homo sapiens
aatcctgacatttca

SEQ ID NO: 337288 - DNA, 15 bp, Homo sapiens
aaatcctgacatttc

SEQ ID NO: 337289 - DNA, 15 bp, Homo sapiens
aaaatcctgacattt

SEQ ID NO: 337290 - DNA, 15 bp, Homo sapiens
aaaaatcctgacatt

SEQ ID NO: 337291 - DNA, 15 bp, Homo sapiens
aaaaaatcctgacat

SEQ ID NO: 337292 - DNA, 15 bp, Homo sapiens
aaaaaaatcctgaca

SEQ ID NO: 337293 - DNA, 15 bp, Homo sapiens
caaaaaaatcctgac

SEQ ID NO: 337294 - DNA, 15 bp, Homo sapiens
acaaaaaaatcctga

SEQ ID NO: 337295 - DNA, 15 bp, Homo sapiens
tacaaaaaaatcctg

SEQ ID NO: 337296 - DNA, 15 bp, Homo sapiens
gtacaaaaaaatcct

SEQ ID NO: 337297 - DNA, 15 bp, Homo sapiens
cgtacaaaaaaatcc

SEQ ID NO: 337298 - DNA, 15 bp, Homo sapiens
tcgtacaaaaaaatc

SEQ ID NO: 337299 - DNA, 15 bp, Homo sapiens
atcgtacaaaaaaat

SEQ ID NO: 337300 - DNA, 15 bp, Homo sapiens
aatcgtacaaaaaaa

SEQ ID NO: 337301 - DNA, 15 bp, Homo sapiens
taatcgtacaaaaaa

SEQ ID NO: 337302 - DNA, 15 bp, Homo sapiens
ctaatcgtacaaaaa

SEQ ID NO: 337303 - DNA, 15 bp, Homo sapiens
actaatcgtacaaaa

SEQ ID NO: 337304 - DNA, 15 bp, Homo sapiens
cactaatcgtacaaa

SEQ ID NO: 337305 - DNA, 15 bp, Homo sapiens
ccactaatcgtacaa

SEQ ID NO: 337306 - DNA, 15 bp, Homo sapiens
cccactaatcgtaca

SEQ ID NO: 337307 - DNA, 15 bp, Homo sapiens
gcccactaatcgtac

SEQ ID NO: 337308 - DNA, 15 bp, Homo sapiens
tgcccactaatcgta

SEQ ID NO: 337309 - DNA, 15 bp, Homo sapiens
gtgcccactaatcgt

SEQ ID NO: 337310 - DNA, 15 bp, Homo sapiens
cgtgcccactaatcg

SEQ ID NO: 337311 - DNA, 15 bp, Homo sapiens
acgtgcccactaatc

SEQ ID NO: 337312 - DNA, 15 bp, Homo sapiens
gacgtgcccactaat

SEQ ID NO: 337313 - DNA, 15 bp, Homo sapiens
agacgtgcccactaa

SEQ ID NO: 337314 - DNA, 15 bp, Homo sapiens
gagacgtgcccacta

SEQ ID NO: 337315 - DNA, 15 bp, Homo sapiens
tgagacgtgcccact

SEQ ID NO: 337316 - DNA, 15 bp, Homo sapiens
ttgagacgtgcccac

SEQ ID NO: 337317 - DNA, 15 bp, Homo sapiens
tttgagacgtgccca

SEQ ID NO: 337318 - DNA, 15 bp, Homo sapiens
ctttgagacgtgccc

SEQ ID NO: 337319 - DNA, 15 bp, Homo sapiens
tctttgagacgtgcc

SEQ ID NO: 337320 - DNA, 15 bp, Homo sapiens
ttctttgagacgtgc

SEQ ID NO: 337321 - DNA, 15 bp, Homo sapiens
tttctttgagacgtg

SEQ ID NO: 337322 - DNA, 15 bp, Homo sapiens
atttctttgagacgt

SEQ ID NO: 337323 - DNA, 15 bp, Homo sapiens
catttctttgagacg

SEQ ID NO: 337324 - DNA, 15 bp, Homo sapiens
tcatttctttgagac

SEQ ID NO: 337325 - DNA, 15 bp, Homo sapiens
ttcatttctttgaga

SEQ ID NO: 337326 - DNA, 15 bp, Homo sapiens
cttcatttctttgag

SEQ ID NO: 337327 - DNA, 15 bp, Homo sapiens
tcttcatttctttga

SEQ ID NO: 337328 - DNA, 15 bp, Homo sapiens
ttcttcatttctttg

SEQ ID NO: 337329 - DNA, 15 bp, Homo sapiens
attcttcatttcttt

SEQ ID NO: 337330 - DNA, 15 bp, Homo sapiens
aattcttcatttctt

SEQ ID NO: 337331 - DNA, 15 bp, Homo sapiens
caattcttcatttct

SEQ ID NO: 337332 - DNA, 15 bp, Homo sapiens
tcaattcttcatttc

SEQ ID NO: 337333 - DNA, 15 bp, Homo sapiens
ttcaattcttcattt

SEQ ID NO: 337334 - DNA, 15 bp, Homo sapiens
tttcaattcttcatt

SEQ ID NO: 337335 - DNA, 15 bp, Homo sapiens
atttcaattcttcat

SEQ ID NO: 337336 - DNA, 15 bp, Homo sapiens
tatttcaattcttca

SEQ ID NO: 337337 - DNA, 15 bp, Homo sapiens
atatttcaattcttc

SEQ ID NO: 337338 - DNA, 15 bp, Homo sapiens
aatatttcaattctt

SEQ ID NO: 337339 - DNA, 15 bp, Homo sapiens
taatatttcaattct

SEQ ID NO: 337340 - DNA, 15 bp, Homo sapiens
ataatatttcaattc

SEQ ID NO: 337341 - DNA, 15 bp, Homo sapiens
tataatatttcaatt

SEQ ID NO: 337342 - DNA, 15 bp, Homo sapiens
gtataatatttcaat

SEQ ID NO: 337343 - DNA, 15 bp, Homo sapiens
tgtataatatttcaa

SEQ ID NO: 337344 - DNA, 15 bp, Homo sapiens
gtgtataatatttca

SEQ ID NO: 337345 - DNA, 15 bp, Homo sapiens
ggtgtataatatttc

SEQ ID NO: 337346 - DNA, 15 bp, Homo sapiens
aggtgtataatattt

SEQ ID NO: 337347 - DNA, 15 bp, Homo sapiens
aaggtgtataatatt

SEQ ID NO: 337348 - DNA, 15 bp, Homo sapiens
aaaggtgtataatat

SEQ ID NO: 337349 - DNA, 15 bp, Homo sapiens
aaaaggtgtataata

SEQ ID NO: 337350 - DNA, 15 bp, Homo sapiens
aaaaaggtgtataat

SEQ ID NO: 337351 - DNA, 15 bp, Homo sapiens
aaaaaaggtgtataa

SEQ ID NO: 337352 - DNA, 15 bp, Homo sapiens
aaaaaaaggtgtata

SEQ ID NO: 337353 - DNA, 15 bp, Homo sapiens
aaaaaaaaggtgtat

SEQ ID NO: 337354 - DNA, 15 bp, Homo sapiens
aaaaaaaaaggtgta

SEQ ID NO: 337355 - DNA, 15 bp, Homo sapiens
aaaaaaaaaaggtgt

SEQ ID NO: 337356 - DNA, 15 bp, Homo sapiens
aaaaaaaaaaaggtg

SEQ ID NO: 337357 - DNA, 15 bp, Homo sapiens
aaaaaaaaaaaaggt

SEQ ID NO: 337358 - DNA, 15 bp, Homo sapiens
gaaaaaaaaaaaagg

SEQ ID NO: 337359 - DNA, 15 bp, Homo sapiens
agaaaaaaaaaaaag

SEQ ID NO: 337360 - DNA, 15 bp, Homo sapiens
aaaaaagaaaaaaaa

SEQ ID NO: 337361 - DNA, 15 bp, Homo sapiens
aaaaaaagaaaaaaa

SEQ ID NO: 337362 - DNA, 15 bp, Homo sapiens
aaaaaaaagaaaaaa

SEQ ID NO: 337363 - DNA, 15 bp, Homo sapiens
caaaaaaaagaaaaa

SEQ ID NO: 337364 - DNA, 15 bp, Homo sapiens
ccaaaaaaaagaaaa

SEQ ID NO: 337365 - DNA, 15 bp, Homo sapiens
tccaaaaaaaagaaa

SEQ ID NO: 337366 - DNA, 15 bp, Homo sapiens
atccaaaaaaaagaa

SEQ ID NO: 337367 - DNA, 15 bp, Homo sapiens
tatccaaaaaaaaga

SEQ ID NO: 337368 - DNA, 15 bp, Homo sapiens
gtatccaaaaaaaag

SEQ ID NO: 337369 - DNA, 15 bp, Homo sapiens
tgtatccaaaaaaaa

SEQ ID NO: 337370 - DNA, 15 bp, Homo sapiens
ctgtatccaaaaaaa

SEQ ID NO: 337371 - DNA, 15 bp, Homo sapiens
cctgtatccaaaaaa

SEQ ID NO: 337372 - DNA, 15 bp, Homo sapiens
ccctgtatccaaaaa

SEQ ID NO: 337373 - DNA, 15 bp, Homo sapiens
accctgtatccaaaa

SEQ ID NO: 337374 - DNA, 15 bp, Homo sapiens
gaccctgtatccaaa

SEQ ID NO: 337375 - DNA, 15 bp, Homo sapiens
agaccctgtatccaa

SEQ ID NO: 337376 - DNA, 15 bp, Homo sapiens
aagaccctgtatcca

SEQ ID NO: 337377 - DNA, 15 bp, Homo sapiens
caagaccctgtatcc

SEQ ID NO: 337378 - DNA, 15 bp, Homo sapiens
gcaagaccctgtatc

SEQ ID NO: 337379 - DNA, 15 bp, Homo sapiens
agcaagaccctgtat

SEQ ID NO: 337380 - DNA, 15 bp, Homo sapiens
cagcaagaccctgta

SEQ ID NO: 337381 - DNA, 15 bp, Homo sapiens
acagcaagaccctgt

SEQ ID NO: 337382 - DNA, 15 bp, Homo sapiens
cacagcaagaccctg

SEQ ID NO: 337383 - DNA, 15 bp, Homo sapiens
agggcaacacagcaa

SEQ ID NO: 337384 - DNA, 15 bp, Homo sapiens
cagggcaacacagca

SEQ ID NO: 337385 - DNA, 15 bp, Homo sapiens
ccagggcaacacagc

SEQ ID NO: 337386 - DNA, 15 bp, Homo sapiens
gccagggcaacacag

SEQ ID NO: 337387 - DNA, 15 bp, Homo sapiens
agccagggcaacaca

SEQ ID NO: 337388 - DNA, 15 bp, Homo sapiens
cagccagggcaacac

SEQ ID NO: 337389 - DNA, 15 bp, Homo sapiens
ctgcactccagccag

SEQ ID NO: 337390 - DNA, 15 bp, Homo sapiens
actgcactccagcca

SEQ ID NO: 337391 - DNA, 15 bp, Homo sapiens
acaccactgcactcc

SEQ ID NO: 337392 - DNA, 15 bp, Homo sapiens
gacaccactgcactc

SEQ ID NO: 337393 - DNA, 15 bp, Homo sapiens
tgacaccactgcact

SEQ ID NO: 337394 - DNA, 15 bp, Homo sapiens
atgacaccactgcac

SEQ ID NO: 337395 - DNA, 15 bp, Homo sapiens
gatgacaccactgca

SEQ ID NO: 337396 - DNA, 15 bp, Homo sapiens
tgatgacaccactgc

SEQ ID NO: 337397 - DNA, 15 bp, Homo sapiens
atgatgacaccactg

SEQ ID NO: 337398 - DNA, 15 bp, Homo sapiens
catgatgacaccact

SEQ ID NO: 337399 - DNA, 15 bp, Homo sapiens
ccatgatgacaccac

SEQ ID NO: 337400 - DNA, 15 bp, Homo sapiens
gccatgatgacacca

SEQ ID NO: 337401 - DNA, 15 bp, Homo sapiens
agccatgatgacacc

SEQ ID NO: 337402 - DNA, 15 bp, Homo sapiens
gagccatgatgacac

SEQ ID NO: 337403 - DNA, 15 bp, Homo sapiens
tgagccatgatgaca

SEQ ID NO: 337404 - DNA, 15 bp, Homo sapiens
gtgagccatgatgac

SEQ ID NO: 337405 - DNA, 15 bp, Homo sapiens
agtgagccatgatga

SEQ ID NO: 337406 - DNA, 15 bp, Homo sapiens
cagtgagccatgatg

SEQ ID NO: 337407 - DNA, 15 bp, Homo sapiens
gcagtgagccatgat

SEQ ID NO: 337408 - DNA, 15 bp, Homo sapiens
tgcagtgagccatga

SEQ ID NO: 337409 - DNA, 15 bp, Homo sapiens
ctgcagtgagccatg

SEQ ID NO: 337410 - DNA, 15 bp, Homo sapiens
actgcagtgagccat

SEQ ID NO: 337411 - DNA, 15 bp, Homo sapiens
gactgcagtgagcca

SEQ ID NO: 337412 - DNA, 15 bp, Homo sapiens
agactgcagtgagcc

SEQ ID NO: 337413 - DNA, 15 bp, Homo sapiens
gagactgcagtgagc

SEQ ID NO: 337414 - DNA, 15 bp, Homo sapiens
tgagactgcagtgag

SEQ ID NO: 337415 - DNA, 15 bp, Homo sapiens
ctgagactgcagtga

SEQ ID NO: 337416 - DNA, 15 bp, Homo sapiens
gctgagactgcagtg

SEQ ID NO: 337417 - DNA, 15 bp, Homo sapiens
ggctgagactgcagt

SEQ ID NO: 337418 - DNA, 15 bp, Homo sapiens
aggctgagactgcag

SEQ ID NO: 337419 - DNA, 15 bp, Homo sapiens
gaggctgagactgca

SEQ ID NO: 337420 - DNA, 15 bp, Homo sapiens
agaggctgagactgc

SEQ ID NO: 337421 - DNA, 15 bp, Homo sapiens
gagaggctgagactg

SEQ ID NO: 337422 - DNA, 15 bp, Homo sapiens
ggagaggctgagact

SEQ ID NO: 337423 - DNA, 15 bp, Homo sapiens
aggagaggctgagac

SEQ ID NO: 337424 - DNA, 15 bp, Homo sapiens
caggagaggctgaga

SEQ ID NO: 337425 - DNA, 15 bp, Homo sapiens
ccaggagaggctgag

SEQ ID NO: 337426 - DNA, 15 bp, Homo sapiens
gccaggagaggctga

SEQ ID NO: 337427 - DNA, 15 bp, Homo sapiens
ggccaggagaggctg

SEQ ID NO: 337428 - DNA, 15 bp, Homo sapiens
aggccaggagaggct

SEQ ID NO: 337429 - DNA, 15 bp, Homo sapiens
caggccaggagaggc

SEQ ID NO: 337430 - DNA, 15 bp, Homo sapiens
tcaggccaggagagg

SEQ ID NO: 337431 - DNA, 15 bp, Homo sapiens
ctcaggccaggagag

SEQ ID NO: 337432 - DNA, 15 bp, Homo sapiens
actcaggccaggaga

SEQ ID NO: 337433 - DNA, 15 bp, Homo sapiens
gactcaggccaggag

SEQ ID NO: 337434 - DNA, 15 bp, Homo sapiens
agactcaggccagga

SEQ ID NO: 337435 - DNA, 15 bp, Homo sapiens
aagactcaggccagg

SEQ ID NO: 337436 - DNA, 15 bp, Homo sapiens
caagactcaggccag

SEQ ID NO: 337437 - DNA, 15 bp, Homo sapiens
gcaagactcaggcca

SEQ ID NO: 337438 - DNA, 15 bp, Homo sapiens
agcaagactcaggcc

SEQ ID NO: 337439 - DNA, 15 bp, Homo sapiens
gagcaagactcaggc

SEQ ID NO: 337440 - DNA, 15 bp, Homo sapiens
agagcaagactcagg

SEQ ID NO: 337441 - DNA, 15 bp, Homo sapiens
cagagcaagactcag

SEQ ID NO: 337442 - DNA, 15 bp, Homo sapiens
acagagcaagactca

SEQ ID NO: 337443 - DNA, 15 bp, Homo sapiens
aacagagcaagactc

SEQ ID NO: 337444 - DNA, 15 bp, Homo sapiens
caacagagcaagact

SEQ ID NO: 337445 - DNA, 15 bp, Homo sapiens
gcaacagagcaagac

SEQ ID NO: 337446 - DNA, 15 bp, Homo sapiens
ggcaacagagcaaga

SEQ ID NO: 337447 - DNA, 15 bp, Homo sapiens
aggcaacagagcaag

SEQ ID NO: 337448 - DNA, 15 bp, Homo sapiens
taggcaacagagcaa

SEQ ID NO: 337449 - DNA, 15 bp, Homo sapiens
ctaggcaacagagca

SEQ ID NO: 337450 - DNA, 15 bp, Homo sapiens
cctaggcaacagagc

SEQ ID NO: 337451 - DNA, 15 bp, Homo sapiens
gcctaggcaacagag

SEQ ID NO: 337452 - DNA, 15 bp, Homo sapiens
agcctaggcaacaga

SEQ ID NO: 337453 - DNA, 15 bp, Homo sapiens
cagcctaggcaacag

SEQ ID NO: 337454 - DNA, 15 bp, Homo sapiens
ccagcctaggcaaca

SEQ ID NO: 337455 - DNA, 15 bp, Homo sapiens
tccagcctaggcaac

SEQ ID NO: 337456 - DNA, 15 bp, Homo sapiens
ctccagcctaggcaa

SEQ ID NO: 337457 - DNA, 15 bp, Homo sapiens
actccagcctaggca

SEQ ID NO: 337458 - DNA, 15 bp, Homo sapiens
cactccagcctaggc

SEQ ID NO: 337459 - DNA, 15 bp, Homo sapiens
ctgccactgcactcc

SEQ ID NO: 337460 - DNA, 15 bp, Homo sapiens
cctgccactgcactc

SEQ ID NO: 337461 - DNA, 15 bp, Homo sapiens
tcctgccactgcact

SEQ ID NO: 337462 - DNA, 15 bp, Homo sapiens
atcctgccactgcac

SEQ ID NO: 337463 - DNA, 15 bp, Homo sapiens
gatcctgccactgca

SEQ ID NO: 337464 - DNA, 15 bp, Homo sapiens
agatcctgccactgc

SEQ ID NO: 337465 - DNA, 15 bp, Homo sapiens
aagatcctgccactg

SEQ ID NO: 337466 - DNA, 15 bp, Homo sapiens
caagatcctgccact

SEQ ID NO: 337467 - DNA, 15 bp, Homo sapiens
ccaagatcctgccac

SEQ ID NO: 337468 - DNA, 15 bp, Homo sapiens
gccaagatcctgcca

SEQ ID NO: 337469 - DNA, 15 bp, Homo sapiens
agccaagatcctgcc

SEQ ID NO: 337470 - DNA, 15 bp, Homo sapiens
gagccaagatcctgc

SEQ ID NO: 337471 - DNA, 15 bp, Homo sapiens
tgagccaagatcctg

SEQ ID NO: 337472 - DNA, 15 bp, Homo sapiens
gtgagccaagatcct

SEQ ID NO: 337473 - DNA, 15 bp, Homo sapiens
agtgagccaagatcc

SEQ ID NO: 337474 - DNA, 15 bp, Homo sapiens
gaggcagaggttgca

SEQ ID NO: 337475 - DNA, 15 bp, Homo sapiens
ggaggcagaggttgc

SEQ ID NO: 337476 - DNA, 15 bp, Homo sapiens
aggaggcagaggttg

SEQ ID NO: 337477 - DNA, 15 bp, Homo sapiens
caggaggcagaggtt

SEQ ID NO: 337478 - DNA, 15 bp, Homo sapiens
ccaggaggcagaggt

SEQ ID NO: 337479 - DNA, 15 bp, Homo sapiens
cccaggaggcagagg

SEQ ID NO: 337480 - DNA, 15 bp, Homo sapiens
gaacccaggaggcag

SEQ ID NO: 337481 - DNA, 15 bp, Homo sapiens
tgaacccaggaggca

SEQ ID NO: 337482 - DNA, 15 bp, Homo sapiens
ttgaacccaggaggc

SEQ ID NO: 337483 - DNA, 15 bp, Homo sapiens
cttgaacccaggagg

SEQ ID NO: 337484 - DNA, 15 bp, Homo sapiens
gcttgaacccaggag

SEQ ID NO: 337485 - DNA, 15 bp, Homo sapiens
tgcttgaacccagga

SEQ ID NO: 337486 - DNA, 15 bp, Homo sapiens
ttgcttgaacccagg

SEQ ID NO: 337487 - DNA, 15 bp, Homo sapiens
attgcttgaacccag

SEQ ID NO: 337488 - DNA, 15 bp, Homo sapiens
aattgcttgaaccca

SEQ ID NO: 337489 - DNA, 15 bp, Homo sapiens
agagaattgcttgaa

SEQ ID NO: 337490 - DNA, 15 bp, Homo sapiens
aagagaattgcttga

SEQ ID NO: 337491 - DNA, 15 bp, Homo sapiens
caagagaattgcttg

SEQ ID NO: 337492 - DNA, 15 bp, Homo sapiens
gcaagagaattgctt

SEQ ID NO: 337493 - DNA, 15 bp, Homo sapiens
ggcaagagaattgct

SEQ ID NO: 337494 - DNA, 15 bp, Homo sapiens
aggcaagagaattgc

SEQ ID NO: 337495 - DNA, 15 bp, Homo sapiens
gaggcaagagaattg

SEQ ID NO: 337496 - DNA, 15 bp, Homo sapiens
tgaggcaagagaatt

SEQ ID NO: 337497 - DNA, 15 bp, Homo sapiens
ctgaggcaagagaat

SEQ ID NO: 337498 - DNA, 15 bp, Homo sapiens
gctgaggcaagagaa

SEQ ID NO: 337499 - DNA, 15 bp, Homo sapiens
ggctgaggcaagaga

SEQ ID NO: 337500 - DNA, 15 bp, Homo sapiens
aggctgaggcaagag

SEQ ID NO: 337501 - DNA, 15 bp, Homo sapiens
gaggctgaggcaaga

SEQ ID NO: 337502 - DNA, 15 bp, Homo sapiens
gtgcgcctgtaatcc

SEQ ID NO: 337503 - DNA, 15 bp, Homo sapiens
tgtgcgcctgtaatc

SEQ ID NO: 337504 - DNA, 15 bp, Homo sapiens
gtgtgcgcctgtaat

SEQ ID NO: 337505 - DNA, 15 bp, Homo sapiens
ggtgtgcgcctgtaa

SEQ ID NO: 337506 - DNA, 15 bp, Homo sapiens
tggtgtgcgcctgta

SEQ ID NO: 337507 - DNA, 15 bp, Homo sapiens
gtggtgtgcgcctgt

SEQ ID NO: 337508 - DNA, 15 bp, Homo sapiens
ggtggtgtgcgcctg

SEQ ID NO: 337509 - DNA, 15 bp, Homo sapiens
tggtggtgtgcgcct

SEQ ID NO: 337510 - DNA, 15 bp, Homo sapiens
gtggtggtgtgcgcc

SEQ ID NO: 337511 - DNA, 15 bp, Homo sapiens
tgtggtggtgtgcgc

SEQ ID NO: 337512 - DNA, 15 bp, Homo sapiens
gtgtggtggtgtgcg

SEQ ID NO: 337513 - DNA, 15 bp, Homo sapiens
ggtgtggtggtgtgc

SEQ ID NO: 337514 - DNA, 15 bp, Homo sapiens
aggtgtggtggtgtg

SEQ ID NO: 337515 - DNA, 15 bp, Homo sapiens
caggtgtggtggtgt

SEQ ID NO: 337516 - DNA, 15 bp, Homo sapiens
ccaggtgtggtggtg

SEQ ID NO: 337517 - DNA, 15 bp, Homo sapiens
gccaggtgtggtggt

SEQ ID NO: 337518 - DNA, 15 bp, Homo sapiens
tatggtgaaacccca

SEQ ID NO: 337519 - DNA, 15 bp, Homo sapiens
ctggccaatatggtg

SEQ ID NO: 337520 - DNA, 15 bp, Homo sapiens
cctggccaatatggt

SEQ ID NO: 337521 - DNA, 15 bp, Homo sapiens
gcctggccaatatgg

SEQ ID NO: 337522 - DNA, 15 bp, Homo sapiens
agcctggccaatatg

SEQ ID NO: 337523 - DNA, 15 bp, Homo sapiens
cagaccagcctggcc

SEQ ID NO: 337524 - DNA, 15 bp, Homo sapiens
tcagaccagcctggc

SEQ ID NO: 337525 - DNA, 15 bp, Homo sapiens
ttcagaccagcctgg

SEQ ID NO: 337526 - DNA, 15 bp, Homo sapiens
tttcagaccagcctg

SEQ ID NO: 337527 - DNA, 15 bp, Homo sapiens
gtttcagaccagcct

SEQ ID NO: 337528 - DNA, 15 bp, Homo sapiens
agtttcagaccagcc

SEQ ID NO: 337529 - DNA, 15 bp, Homo sapiens
gagtttcagaccagc

SEQ ID NO: 337530 - DNA, 15 bp, Homo sapiens
ggagtttcagaccag

SEQ ID NO: 337531 - DNA, 15 bp, Homo sapiens
aggagtttcagacca

SEQ ID NO: 337532 - DNA, 15 bp, Homo sapiens
caggagtttcagacc

SEQ ID NO: 337533 - DNA, 15 bp, Homo sapiens
tcaggagtttcagac

SEQ ID NO: 337534 - DNA, 15 bp, Homo sapiens
gtcaggagtttcaga

SEQ ID NO: 337535 - DNA, 15 bp, Homo sapiens
ggtcaggagtttcag

SEQ ID NO: 337536 - DNA, 15 bp, Homo sapiens
aggtcaggagtttca

SEQ ID NO: 337537 - DNA, 15 bp, Homo sapiens
aaggtcaggagtttc

SEQ ID NO: 337538 - DNA, 15 bp, Homo sapiens
caaggtcaggagttt

SEQ ID NO: 337539 - DNA, 15 bp, Homo sapiens
acaaggtcaggagtt

SEQ ID NO: 337540 - DNA, 15 bp, Homo sapiens
cacaaggtcaggagt

SEQ ID NO: 337541 - DNA, 15 bp, Homo sapiens
tcacaaggtcaggag

SEQ ID NO: 337542 - DNA, 15 bp, Homo sapiens
atcacaaggtcagga

SEQ ID NO: 337543 - DNA, 15 bp, Homo sapiens
gatcacaaggtcagg

SEQ ID NO: 337544 - DNA, 15 bp, Homo sapiens
ggatcacaaggtcag

SEQ ID NO: 337545 - DNA, 15 bp, Homo sapiens
cggatcacaaggtca

SEQ ID NO: 337546 - DNA, 15 bp, Homo sapiens
gcggatcacaaggtc

SEQ ID NO: 337547 - DNA, 15 bp, Homo sapiens
ggcggatcacaaggt

SEQ ID NO: 337548 - DNA, 15 bp, Homo sapiens
aggcggatcacaagg

SEQ ID NO: 337549 - DNA, 15 bp, Homo sapiens
caggcggatcacaag

SEQ ID NO: 337550 - DNA, 15 bp, Homo sapiens
gcaggcggatcacaa

SEQ ID NO: 337551 - DNA, 15 bp, Homo sapiens
ggcaggcggatcaca

SEQ ID NO: 337552 - DNA, 15 bp, Homo sapiens
aaggcaggcggatca

SEQ ID NO: 337553 - DNA, 15 bp, Homo sapiens
caaggcaggcggatc

SEQ ID NO: 337554 - DNA, 15 bp, Homo sapiens
ccaaggcaggcggat

SEQ ID NO: 337555 - DNA, 15 bp, Homo sapiens
gccaaggcaggcgga

SEQ ID NO: 337556 - DNA, 15 bp, Homo sapiens
ggccaaggcaggcgg

SEQ ID NO: 337557 - DNA, 15 bp, Homo sapiens
aggccaaggcaggcg

SEQ ID NO: 337558 - DNA, 15 bp, Homo sapiens
gaggccaaggcaggc

SEQ ID NO: 337559 - DNA, 15 bp, Homo sapiens
ggcactttgggaggc

SEQ ID NO: 337560 - DNA, 15 bp, Homo sapiens
tggcactttgggagg

SEQ ID NO: 337561 - DNA, 15 bp, Homo sapiens
ctggcactttgggag

SEQ ID NO: 337562 - DNA, 15 bp, Homo sapiens
cctggcactttggga

SEQ ID NO: 337563 - DNA, 15 bp, Homo sapiens
tcctggcactttggg

SEQ ID NO: 337564 - DNA, 15 bp, Homo sapiens
atcctggcactttgg

SEQ ID NO: 337565 - DNA, 15 bp, Homo sapiens
aatcctggcactttg

SEQ ID NO: 337566 - DNA, 15 bp, Homo sapiens
taatcctggcacttt

SEQ ID NO: 337567 - DNA, 15 bp, Homo sapiens
gtaatcctggcactt

SEQ ID NO: 337568 - DNA, 15 bp, Homo sapiens
tgtaatcctggcact

SEQ ID NO: 337569 - DNA, 15 bp, Homo sapiens
ctgtaatcctggcac

SEQ ID NO: 337570 - DNA, 15 bp, Homo sapiens
cctgtaatcctggca

SEQ ID NO: 337571 - DNA, 15 bp, Homo sapiens
gcctgtaatcctggc

SEQ ID NO: 337572 - DNA, 15 bp, Homo sapiens
cgcctgtaatcctgg

SEQ ID NO: 337573 - DNA, 15 bp, Homo sapiens
acgcctgtaatcctg

SEQ ID NO: 337574 - DNA, 15 bp, Homo sapiens
cacgcctgtaatcct

SEQ ID NO: 337575 - DNA, 15 bp, Homo sapiens
atcacgcctgtaatc

SEQ ID NO: 337576 - DNA, 15 bp, Homo sapiens
gatcacgcctgtaat

SEQ ID NO: 337577 - DNA, 15 bp, Homo sapiens
ggatcacgcctgtaa

SEQ ID NO: 337578 - DNA, 15 bp, Homo sapiens
tggatcacgcctgta

SEQ ID NO: 337579 - DNA, 15 bp, Homo sapiens
gtggatcacgcctgt

SEQ ID NO: 337580 - DNA, 15 bp, Homo sapiens
ggtggatcacgcctg

SEQ ID NO: 337581 - DNA, 15 bp, Homo sapiens
cggtggatcacgcct

SEQ ID NO: 337582 - DNA, 15 bp, Homo sapiens
acggtggatcacgcc

SEQ ID NO: 337583 - DNA, 15 bp, Homo sapiens
cacggtggatcacgc

SEQ ID NO: 337584 - DNA, 15 bp, Homo sapiens
gcacggtggatcacg

SEQ ID NO: 337585 - DNA, 15 bp, Homo sapiens
ggcacggtggatcac

SEQ ID NO: 337586 - DNA, 15 bp, Homo sapiens
aggcacggtggatca

SEQ ID NO: 337587 - DNA, 15 bp, Homo sapiens
caggcacggtggatc

SEQ ID NO: 337588 - DNA, 15 bp, Homo sapiens
ccaggcacggtggat

SEQ ID NO: 337589 - DNA, 15 bp, Homo sapiens
gccaggcacggtgga

SEQ ID NO: 337590 - DNA, 15 bp, Homo sapiens
agccaggcacggtgg

SEQ ID NO: 337591 - DNA, 15 bp, Homo sapiens
tagccaggcacggtg

SEQ ID NO: 337592 - DNA, 15 bp, Homo sapiens
atagccaggcacggt

SEQ ID NO: 337593 - DNA, 15 bp, Homo sapiens
tatagccaggcacgg

SEQ ID NO: 337594 - DNA, 15 bp, Homo sapiens
gtatagccaggcacg

SEQ ID NO: 337595 - DNA, 15 bp, Homo sapiens
tgtatagccaggcac

SEQ ID NO: 337596 - DNA, 15 bp, Homo sapiens
atgtatagccaggca

SEQ ID NO: 337597 - DNA, 15 bp, Homo sapiens
aatgtatagccaggc

SEQ ID NO: 337598 - DNA, 15 bp, Homo sapiens
caatgtatagccagg

SEQ ID NO: 337599 - DNA, 15 bp, Homo sapiens
acaatgtatagccag

SEQ ID NO: 337600 - DNA, 15 bp, Homo sapiens
aaacaatgtatagcc

SEQ ID NO: 337601 - DNA, 15 bp, Homo sapiens
aaaacaatgtatagc

SEQ ID NO: 337602 - DNA, 15 bp, Homo sapiens
aaaaacaatgtatag

SEQ ID NO: 337603 - DNA, 15 bp, Homo sapiens
aaaaaacaatgtata

SEQ ID NO: 337604 - DNA, 15 bp, Homo sapiens
aaaaaaacaatgtat

SEQ ID NO: 337605 - DNA, 15 bp, Homo sapiens
aaaaaaaacaatgta

SEQ ID NO: 337606 - DNA, 15 bp, Homo sapiens
taaaaaaaacaatgt

SEQ ID NO: 337607 - DNA, 15 bp, Homo sapiens
ttaaaaaaaacaatg

SEQ ID NO: 337608 - DNA, 15 bp, Homo sapiens
attaaaaaaaacaat

SEQ ID NO: 337609 - DNA, 15 bp, Homo sapiens
cattaaaaaaaacaa

SEQ ID NO: 337610 - DNA, 15 bp, Homo sapiens
tcattaaaaaaaaca

SEQ ID NO: 337611 - DNA, 15 bp, Homo sapiens
ttcattaaaaaaaac

SEQ ID NO: 337612 - DNA, 15 bp, Homo sapiens
tttcattaaaaaaaa

SEQ ID NO: 337613 - DNA, 15 bp, Homo sapiens
ttttcattaaaaaaa

SEQ ID NO: 337614 - DNA, 15 bp, Homo sapiens
attttcattaaaaaa

SEQ ID NO: 337615 - DNA, 15 bp, Homo sapiens
tattttcattaaaaa

SEQ ID NO: 337616 - DNA, 15 bp, Homo sapiens
ctattttcattaaaa

SEQ ID NO: 337617 - DNA, 15 bp, Homo sapiens
tctattttcattaaa

SEQ ID NO: 337618 - DNA, 15 bp, Homo sapiens
ctctattttcattaa

SEQ ID NO: 337619 - DNA, 15 bp, Homo sapiens
tctctattttcatta

SEQ ID NO: 337620 - DNA, 15 bp, Homo sapiens
ttctctattttcatt

SEQ ID NO: 337621 - DNA, 15 bp, Homo sapiens
attctctattttcat

SEQ ID NO: 337622 - DNA, 15 bp, Homo sapiens
aattctctattttca

SEQ ID NO: 337623 - DNA, 15 bp, Homo sapiens
caattctctattttc

SEQ ID NO: 337624 - DNA, 15 bp, Homo sapiens
acaattctctatttt

SEQ ID NO: 337625 - DNA, 15 bp, Homo sapiens
aacaattctctattt

SEQ ID NO: 337626 - DNA, 15 bp, Homo sapiens
caacaattctctatt

SEQ ID NO: 337627 - DNA, 15 bp, Homo sapiens
acaacaattctctat

SEQ ID NO: 337628 - DNA, 15 bp, Homo sapiens
tacaacaattctcta

SEQ ID NO: 337629 - DNA, 15 bp, Homo sapiens
ctacaacaattctct

SEQ ID NO: 337630 - DNA, 15 bp, Homo sapiens
actacaacaattctc

SEQ ID NO: 337631 - DNA, 15 bp, Homo sapiens
tactacaacaattct

SEQ ID NO: 337632 - DNA, 15 bp, Homo sapiens
atactacaacaattc

SEQ ID NO: 337633 - DNA, 15 bp, Homo sapiens
aatactacaacaatt

SEQ ID NO: 337634 - DNA, 15 bp, Homo sapiens
caatactacaacaat

SEQ ID NO: 337635 - DNA, 15 bp, Homo sapiens
tcaatactacaacaa

SEQ ID NO: 337636 - DNA, 15 bp, Homo sapiens
ctcaatactacaaca

SEQ ID NO: 337637 - DNA, 15 bp, Homo sapiens
cctcaatactacaac

SEQ ID NO: 337638 - DNA, 15 bp, Homo sapiens
acctcaatactacaa

SEQ ID NO: 337639 - DNA, 15 bp, Homo sapiens
tacctcaatactaca

SEQ ID NO: 337640 - DNA, 15 bp, Homo sapiens
ttacctcaatactac

SEQ ID NO: 337641 - DNA, 15 bp, Homo sapiens
attacctcaatacta

SEQ ID NO: 337642 - DNA, 15 bp, Homo sapiens
tattacctcaatact

SEQ ID NO: 337643 - DNA, 15 bp, Homo sapiens
ctattacctcaatac

SEQ ID NO: 337644 - DNA, 15 bp, Homo sapiens
tctattacctcaata

SEQ ID NO: 337645 - DNA, 15 bp, Homo sapiens
ttctattacctcaat

SEQ ID NO: 337646 - DNA, 15 bp, Homo sapiens
attctattacctcaa

SEQ ID NO: 337647 - DNA, 15 bp, Homo sapiens
gattctattacctca

SEQ ID NO: 337648 - DNA, 15 bp, Homo sapiens
ggattctattacctc

SEQ ID NO: 337649 - DNA, 15 bp, Homo sapiens
aggattctattacct

SEQ ID NO: 337650 - DNA, 15 bp, Homo sapiens
taggattctattacc

SEQ ID NO: 337651 - DNA, 15 bp, Homo sapiens
ttaggattctattac

SEQ ID NO: 337652 - DNA, 15 bp, Homo sapiens
gttaggattctatta

SEQ ID NO: 337653 - DNA, 15 bp, Homo sapiens
agttaggattctatt

SEQ ID NO: 337654 - DNA, 15 bp, Homo sapiens
tagttaggattctat

SEQ ID NO: 337655 - DNA, 15 bp, Homo sapiens
ttagttaggattcta

SEQ ID NO: 337656 - DNA, 15 bp, Homo sapiens
tttagttaggattct

SEQ ID NO: 337657 - DNA, 15 bp, Homo sapiens
ctttagttaggattc

SEQ ID NO: 337658 - DNA, 15 bp, Homo sapiens
cctttagttaggatt

SEQ ID NO: 337659 - DNA, 15 bp, Homo sapiens
tcctttagttaggat

SEQ ID NO: 337660 - DNA, 15 bp, Homo sapiens
ctcctttagttagga

SEQ ID NO: 337661 - DNA, 15 bp, Homo sapiens
gctcctttagttagg

SEQ ID NO: 337662 - DNA, 15 bp, Homo sapiens
tgctcctttagttag

SEQ ID NO: 337663 - DNA, 15 bp, Homo sapiens
ttgctcctttagtta

SEQ ID NO: 337664 - DNA, 15 bp, Homo sapiens
attgctcctttagtt

SEQ ID NO: 337665 - DNA, 15 bp, Homo sapiens
aattgctcctttagt

SEQ ID NO: 337666 - DNA, 15 bp, Homo sapiens
aaattgctcctttag

SEQ ID NO: 337667 - DNA, 15 bp, Homo sapiens
gaaattgctccttta

SEQ ID NO: 337668 - DNA, 15 bp, Homo sapiens
agaaattgctccttt

SEQ ID NO: 337669 - DNA, 15 bp, Homo sapiens
aagaaattgctcctt

SEQ ID NO: 337670 - DNA, 15 bp, Homo sapiens
aaagaaattgctcct

SEQ ID NO: 337671 - DNA, 15 bp, Homo sapiens
caaagaaattgctcc

SEQ ID NO: 337672 - DNA, 15 bp, Homo sapiens
ccaaagaaattgctc

SEQ ID NO: 337673 - DNA, 15 bp, Homo sapiens
tccaaagaaattgct

SEQ ID NO: 337674 - DNA, 15 bp, Homo sapiens
ttccaaagaaattgc

SEQ ID NO: 337675 - DNA, 15 bp, Homo sapiens
attccaaagaaattg

SEQ ID NO: 337676 - DNA, 15 bp, Homo sapiens
aattccaaagaaatt

SEQ ID NO: 337677 - DNA, 15 bp, Homo sapiens
taattccaaagaaat

SEQ ID NO: 337678 - DNA, 15 bp, Homo sapiens
gtaattccaaagaaa

SEQ ID NO: 337679 - DNA, 15 bp, Homo sapiens
agtaattccaaagaa

SEQ ID NO: 337680 - DNA, 15 bp, Homo sapiens
aagtaattccaaaga

SEQ ID NO: 337681 - DNA, 15 bp, Homo sapiens
gaagtaattccaaag

SEQ ID NO: 337682 - DNA, 15 bp, Homo sapiens
agaagtaattccaaa

SEQ ID NO: 337683 - DNA, 15 bp, Homo sapiens
gagaagtaattccaa

SEQ ID NO: 337684 - DNA, 15 bp, Homo sapiens
agagaagtaattcca

SEQ ID NO: 337685 - DNA, 15 bp, Homo sapiens
cagagaagtaattcc

SEQ ID NO: 337686 - DNA, 15 bp, Homo sapiens
acagagaagtaattc

SEQ ID NO: 337687 - DNA, 15 bp, Homo sapiens
tacagagaagtaatt

SEQ ID NO: 337688 - DNA, 15 bp, Homo sapiens
ttacagagaagtaat

SEQ ID NO: 337689 - DNA, 15 bp, Homo sapiens
attacagagaagtaa

SEQ ID NO: 337690 - DNA, 15 bp, Homo sapiens
tattacagagaagta

SEQ ID NO: 337691 - DNA, 15 bp, Homo sapiens
ctattacagagaagt

SEQ ID NO: 337692 - DNA, 15 bp, Homo sapiens
tctattacagagaag

SEQ ID NO: 337693 - DNA, 15 bp, Homo sapiens
ttctattacagagaa

SEQ ID NO: 337694 - DNA, 15 bp, Homo sapiens
tttctattacagaga

SEQ ID NO: 337695 - DNA, 15 bp, Homo sapiens
atttctattacagag

SEQ ID NO: 337696 - DNA, 15 bp, Homo sapiens
aatttctattacaga

SEQ ID NO: 337697 - DNA, 15 bp, Homo sapiens
gaatttctattacag

SEQ ID NO: 337698 - DNA, 15 bp, Homo sapiens
agaatttctattaca

SEQ ID NO: 337699 - DNA, 15 bp, Homo sapiens
aagaatttctattac

SEQ ID NO: 337700 - DNA, 15 bp, Homo sapiens
caagaatttctatta

SEQ ID NO: 337701 - DNA, 15 bp, Homo sapiens
ccaagaatttctatt

SEQ ID NO: 337702 - DNA, 15 bp, Homo sapiens
gccaagaatttctat

SEQ ID NO: 337703 - DNA, 15 bp, Homo sapiens
agccaagaatttcta

SEQ ID NO: 337704 - DNA, 15 bp, Homo sapiens
cagccaagaatttct

SEQ ID NO: 337705 - DNA, 15 bp, Homo sapiens
ccagccaagaatttc

SEQ ID NO: 337706 - DNA, 15 bp, Homo sapiens
accagccaagaattt

SEQ ID NO: 337707 - DNA, 15 bp, Homo sapiens
caccagccaagaatt

SEQ ID NO: 337708 - DNA, 15 bp, Homo sapiens
ccaccagccaagaat

SEQ ID NO: 337709 - DNA, 15 bp, Homo sapiens
tccaccagccaagaa

SEQ ID NO: 337710 - DNA, 15 bp, Homo sapiens
ctccaccagccaaga

SEQ ID NO: 337711 - DNA, 15 bp, Homo sapiens
actccaccagccaag

SEQ ID NO: 337712 - DNA, 15 bp, Homo sapiens
cactccaccagccaa

SEQ ID NO: 337713 - DNA, 15 bp, Homo sapiens
ccactccaccagcca

SEQ ID NO: 337714 - DNA, 15 bp, Homo sapiens
gccactccaccagcc

SEQ ID NO: 337715 - DNA, 15 bp, Homo sapiens
agccactccaccagc

SEQ ID NO: 337716 - DNA, 15 bp, Homo sapiens
gagccactccaccag

SEQ ID NO: 337717 - DNA, 15 bp, Homo sapiens
tgagccactccacca

SEQ ID NO: 337718 - DNA, 15 bp, Homo sapiens
atgagccactccacc

SEQ ID NO: 337719 - DNA, 15 bp, Homo sapiens
catgagccactccac

SEQ ID NO: 337720 - DNA, 15 bp, Homo sapiens
gcatgagccactcca

SEQ ID NO: 337721 - DNA, 15 bp, Homo sapiens
tgcatgagccactcc

SEQ ID NO: 337722 - DNA, 15 bp, Homo sapiens
atgcatgagccactc

SEQ ID NO: 337723 - DNA, 15 bp, Homo sapiens
catgcatgagccact

SEQ ID NO: 337724 - DNA, 15 bp, Homo sapiens
acatgcatgagccac

SEQ ID NO: 337725 - DNA, 15 bp, Homo sapiens
tacatgcatgagcca

SEQ ID NO: 337726 - DNA, 15 bp, Homo sapiens
ttacatgcatgagcc

SEQ ID NO: 337727 - DNA, 15 bp, Homo sapiens
attacatgcatgagc

SEQ ID NO: 337728 - DNA, 15 bp, Homo sapiens
aattacatgcatgag

SEQ ID NO: 337729 - DNA, 15 bp, Homo sapiens
gaattacatgcatga

SEQ ID NO: 337730 - DNA, 15 bp, Homo sapiens
ggaattacatgcatg

SEQ ID NO: 337731 - DNA, 15 bp, Homo sapiens
tggaattacatgcat

SEQ ID NO: 337732 - DNA, 15 bp, Homo sapiens
ctggaattacatgca

SEQ ID NO: 337733 - DNA, 15 bp, Homo sapiens
gctggaattacatgc

SEQ ID NO: 337734 - DNA, 15 bp, Homo sapiens
tgctggaattacatg

SEQ ID NO: 337735 - DNA, 15 bp, Homo sapiens
gtgctggaattacat

SEQ ID NO: 337736 - DNA, 15 bp, Homo sapiens
agtgctggaattaca

SEQ ID NO: 337737 - DNA, 15 bp, Homo sapiens
aagtgctggaattac

SEQ ID NO: 337738 - DNA, 15 bp, Homo sapiens
aaagtgctggaatta

SEQ ID NO: 337739 - DNA, 15 bp, Homo sapiens
caaagtgctggaatt

SEQ ID NO: 337740 - DNA, 15 bp, Homo sapiens
ccaaagtgctggaat

SEQ ID NO: 337741 - DNA, 15 bp, Homo sapiens
cccaaagtgctggaa

SEQ ID NO: 337742 - DNA, 15 bp, Homo sapiens
tcccaaagtgctgga

SEQ ID NO: 337743 - DNA, 15 bp, Homo sapiens
agcctcccaaagtgc

SEQ ID NO: 337744 - DNA, 15 bp, Homo sapiens
tagcctcccaaagtg

SEQ ID NO: 337745 - DNA, 15 bp, Homo sapiens
ttagcctcccaaagt

SEQ ID NO: 337746 - DNA, 15 bp, Homo sapiens
tttagcctcccaaag

SEQ ID NO: 337747 - DNA, 15 bp, Homo sapiens
ctttagcctcccaaa

SEQ ID NO: 337748 - DNA, 15 bp, Homo sapiens
actttagcctcccaa

SEQ ID NO: 337749 - DNA, 15 bp, Homo sapiens
cactttagcctccca

SEQ ID NO: 337750 - DNA, 15 bp, Homo sapiens
ccactttagcctccc

SEQ ID NO: 337751 - DNA, 15 bp, Homo sapiens
cccactttagcctcc

SEQ ID NO: 337752 - DNA, 15 bp, Homo sapiens
tcccactttagcctc

SEQ ID NO: 337753 - DNA, 15 bp, Homo sapiens
ctcccactttagcct

SEQ ID NO: 337754 - DNA, 15 bp, Homo sapiens
cctcccactttagcc

SEQ ID NO: 337755 - DNA, 15 bp, Homo sapiens
tcctcccactttagc

SEQ ID NO: 337756 - DNA, 15 bp, Homo sapiens
atcctcccactttag

SEQ ID NO: 337757 - DNA, 15 bp, Homo sapiens
gatcctcccacttta

SEQ ID NO: 337758 - DNA, 15 bp, Homo sapiens
tgatcctcccacttt

SEQ ID NO: 337759 - DNA, 15 bp, Homo sapiens
gtgatcctcccactt

SEQ ID NO: 337760 - DNA, 15 bp, Homo sapiens
agtgatcctcccact

SEQ ID NO: 337761 - DNA, 15 bp, Homo sapiens
aagtgatcctcccac

SEQ ID NO: 337762 - DNA, 15 bp, Homo sapiens
caagtgatcctccca

SEQ ID NO: 337763 - DNA, 15 bp, Homo sapiens
tcaagtgatcctccc

SEQ ID NO: 337764 - DNA, 15 bp, Homo sapiens
ctcaagtgatcctcc

SEQ ID NO: 337765 - DNA, 15 bp, Homo sapiens
gctcaagtgatcctc

SEQ ID NO: 337766 - DNA, 15 bp, Homo sapiens
ggctcaagtgatcct

SEQ ID NO: 337767 - DNA, 15 bp, Homo sapiens
gggctcaagtgatcc

SEQ ID NO: 337768 - DNA, 15 bp, Homo sapiens
agggctcaagtgatc

SEQ ID NO: 337769 - DNA, 15 bp, Homo sapiens
cagggctcaagtgat

SEQ ID NO: 337770 - DNA, 15 bp, Homo sapiens
ccagggctcaagtga

SEQ ID NO: 337771 - DNA, 15 bp, Homo sapiens
tccagggctcaagtg

SEQ ID NO: 337772 - DNA, 15 bp, Homo sapiens
ctccagggctcaagt

SEQ ID NO: 337773 - DNA, 15 bp, Homo sapiens
actccagggctcaag

SEQ ID NO: 337774 - DNA, 15 bp, Homo sapiens
aactccagggctcaa

SEQ ID NO: 337775 - DNA, 15 bp, Homo sapiens
aaactccagggctca

SEQ ID NO: 337776 - DNA, 15 bp, Homo sapiens
caaactccagggctc

SEQ ID NO: 337777 - DNA, 15 bp, Homo sapiens
tcaaactccagggct

SEQ ID NO: 337778 - DNA, 15 bp, Homo sapiens
ctcaaactccagggc

SEQ ID NO: 337779 - DNA, 15 bp, Homo sapiens
tctcaaactccaggg

SEQ ID NO: 337780 - DNA, 15 bp, Homo sapiens
atctcaaactccagg

SEQ ID NO: 337781 - DNA, 15 bp, Homo sapiens
gatctcaaactccag

SEQ ID NO: 337782 - DNA, 15 bp, Homo sapiens
tgatctcaaactcca

SEQ ID NO: 337783 - DNA, 15 bp, Homo sapiens
gtgatctcaaactcc

SEQ ID NO: 337784 - DNA, 15 bp, Homo sapiens
ggtgatctcaaactc

SEQ ID NO: 337785 - DNA, 15 bp, Homo sapiens
gggtgatctcaaact

SEQ ID NO: 337786 - DNA, 15 bp, Homo sapiens
agggtgatctcaaac

SEQ ID NO: 337787 - DNA, 15 bp, Homo sapiens
cagggtgatctcaaa

SEQ ID NO: 337788 - DNA, 15 bp, Homo sapiens
tcagggtgatctcaa

SEQ ID NO: 337789 - DNA, 15 bp, Homo sapiens
ctcagggtgatctca

SEQ ID NO: 337790 - DNA, 15 bp, Homo sapiens
gctcagggtgatctc

SEQ ID NO: 337791 - DNA, 15 bp, Homo sapiens
tgctcagggtgatct

SEQ ID NO: 337792 - DNA, 15 bp, Homo sapiens
ttgctcagggtgatc

SEQ ID NO: 337793 - DNA, 15 bp, Homo sapiens
gttgctcagggtgat

SEQ ID NO: 337794 - DNA, 15 bp, Homo sapiens
tgttgctcagggtga

SEQ ID NO: 337795 - DNA, 15 bp, Homo sapiens
atgttgctcagggtg

SEQ ID NO: 337796 - DNA, 15 bp, Homo sapiens
tatgttgctcagggt

SEQ ID NO: 337797 - DNA, 15 bp, Homo sapiens
ctatgttgctcaggg

SEQ ID NO: 337798 - DNA, 15 bp, Homo sapiens
tctatgttgctcagg

SEQ ID NO: 337799 - DNA, 15 bp, Homo sapiens
gtctatgttgctcag

SEQ ID NO: 337800 - DNA, 15 bp, Homo sapiens
ggtctatgttgctca

SEQ ID NO: 337801 - DNA, 15 bp, Homo sapiens
gggtctatgttgctc

SEQ ID NO: 337802 - DNA, 15 bp, Homo sapiens
agggtctatgttgct

SEQ ID NO: 337803 - DNA, 15 bp, Homo sapiens
cagggtctatgttgc

SEQ ID NO: 337804 - DNA, 15 bp, Homo sapiens
tcagggtctatgttg

SEQ ID NO: 337805 - DNA, 15 bp, Homo sapiens
gtcagggtctatgtt

SEQ ID NO: 337806 - DNA, 15 bp, Homo sapiens
agtcagggtctatgt

SEQ ID NO: 337807 - DNA, 15 bp, Homo sapiens
gagtcagggtctatg

SEQ ID NO: 337808 - DNA, 15 bp, Homo sapiens
agagtcagggtctat

SEQ ID NO: 337809 - DNA, 15 bp, Homo sapiens
tagagtcagggtcta

SEQ ID NO: 337810 - DNA, 15 bp, Homo sapiens
gtagagtcagggtct

SEQ ID NO: 337811 - DNA, 15 bp, Homo sapiens
tgtagagtcagggtc

SEQ ID NO: 337812 - DNA, 15 bp, Homo sapiens
ttgtagagtcagggt

SEQ ID NO: 337813 - DNA, 15 bp, Homo sapiens
tttgtagagtcaggg

SEQ ID NO: 337814 - DNA, 15 bp, Homo sapiens
ttttgtagagtcagg

SEQ ID NO: 337815 - DNA, 15 bp, Homo sapiens
tttttgtagagtcag

SEQ ID NO: 337816 - DNA, 15 bp, Homo sapiens
ttttttgtagagtca

SEQ ID NO: 337817 - DNA, 15 bp, Homo sapiens
attttttgtagagtc

SEQ ID NO: 337818 - DNA, 15 bp, Homo sapiens
aattttttgtagagt

SEQ ID NO: 337819 - DNA, 15 bp, Homo sapiens
taattttttgtagag

SEQ ID NO: 337820 - DNA, 15 bp, Homo sapiens
ctaattttttgtaga

SEQ ID NO: 337821 - DNA, 15 bp, Homo sapiens
gctaattttttgtag

SEQ ID NO: 337822 - DNA, 15 bp, Homo sapiens
ggctaattttttgta

SEQ ID NO: 337823 - DNA, 15 bp, Homo sapiens
aggctaattttttgt

SEQ ID NO: 337824 - DNA, 15 bp, Homo sapiens
caggctaattttttg

SEQ ID NO: 337825 - DNA, 15 bp, Homo sapiens
ccaggctaatttttt

SEQ ID NO: 337826 - DNA, 15 bp, Homo sapiens
accaggctaattttt

SEQ ID NO: 337827 - DNA, 15 bp, Homo sapiens
caccaggctaatttt

SEQ ID NO: 337828 - DNA, 15 bp, Homo sapiens
acaccaggctaattt

SEQ ID NO: 337829 - DNA, 15 bp, Homo sapiens
cacaccaggctaatt

SEQ ID NO: 337830 - DNA, 15 bp, Homo sapiens
gcacaccaggctaat

SEQ ID NO: 337831 - DNA, 15 bp, Homo sapiens
agcacaccaggctaa

SEQ ID NO: 337832 - DNA, 15 bp, Homo sapiens
cagcacaccaggcta

SEQ ID NO: 337833 - DNA, 15 bp, Homo sapiens
ccagcacaccaggct

SEQ ID NO: 337834 - DNA, 15 bp, Homo sapiens
accagcacaccaggc

SEQ ID NO: 337835 - DNA, 15 bp, Homo sapiens
caccagcacaccagg

SEQ ID NO: 337836 - DNA, 15 bp, Homo sapiens
gcaccagcacaccag

SEQ ID NO: 337837 - DNA, 15 bp, Homo sapiens
cgcaccagcacacca

SEQ ID NO: 337838 - DNA, 15 bp, Homo sapiens
acgcaccagcacacc

SEQ ID NO: 337839 - DNA, 15 bp, Homo sapiens
tacgcaccagcacac

SEQ ID NO: 337840 - DNA, 15 bp, Homo sapiens
gtacgcaccagcaca

SEQ ID NO: 337841 - DNA, 15 bp, Homo sapiens
agtacgcaccagcac

SEQ ID NO: 337842 - DNA, 15 bp, Homo sapiens
aagtacgcaccagca

SEQ ID NO: 337843 - DNA, 15 bp, Homo sapiens
caagtacgcaccagc

SEQ ID NO: 337844 - DNA, 15 bp, Homo sapiens
acaagtacgcaccag

SEQ ID NO: 337845 - DNA, 15 bp, Homo sapiens
tacaagtacgcacca

SEQ ID NO: 337846 - DNA, 15 bp, Homo sapiens
ctacaagtacgcacc

SEQ ID NO: 337847 - DNA, 15 bp, Homo sapiens
actacaagtacgcac

SEQ ID NO: 337848 - DNA, 15 bp, Homo sapiens
gactacaagtacgca

SEQ ID NO: 337849 - DNA, 15 bp, Homo sapiens
ggactacaagtacgc

SEQ ID NO: 337850 - DNA, 15 bp, Homo sapiens
gggactacaagtacg

SEQ ID NO: 337851 - DNA, 15 bp, Homo sapiens
tgggactacaagtac

SEQ ID NO: 337852 - DNA, 15 bp, Homo sapiens
ctgggactacaagta

SEQ ID NO: 337853 - DNA, 15 bp, Homo sapiens
gctgggactacaagt

SEQ ID NO: 337854 - DNA, 15 bp, Homo sapiens
agctgggactacaag

SEQ ID NO: 337855 - DNA, 15 bp, Homo sapiens
cagctgggactacaa

SEQ ID NO: 337856 - DNA, 15 bp, Homo sapiens
gcagctgggactaca

SEQ ID NO: 337857 - DNA, 15 bp, Homo sapiens
agcagctgggactac

SEQ ID NO: 337858 - DNA, 15 bp, Homo sapiens
tagcagctgggacta

SEQ ID NO: 337859 - DNA, 15 bp, Homo sapiens
ttagcagctgggact

SEQ ID NO: 337860 - DNA, 15 bp, Homo sapiens
cttagcagctgggac

SEQ ID NO: 337861 - DNA, 15 bp, Homo sapiens
ccttagcagctggga

SEQ ID NO: 337862 - DNA, 15 bp, Homo sapiens
tccttagcagctggg

SEQ ID NO: 337863 - DNA, 15 bp, Homo sapiens
ctccttagcagctgg

SEQ ID NO: 337864 - DNA, 15 bp, Homo sapiens
cctccttagcagctg

SEQ ID NO: 337865 - DNA, 15 bp, Homo sapiens
acctccttagcagct

SEQ ID NO: 337866 - DNA, 15 bp, Homo sapiens
aacctccttagcagc

SEQ ID NO: 337867 - DNA, 15 bp, Homo sapiens
caacctccttagcag

SEQ ID NO: 337868 - DNA, 15 bp, Homo sapiens
tcaacctccttagca

SEQ ID NO: 337869 - DNA, 15 bp, Homo sapiens
ctcaacctccttagc

SEQ ID NO: 337870 - DNA, 15 bp, Homo sapiens
cctcaacctccttag

SEQ ID NO: 337871 - DNA, 15 bp, Homo sapiens
acctcaacctcctta

SEQ ID NO: 337872 - DNA, 15 bp, Homo sapiens
cacctcaacctcctt

SEQ ID NO: 337873 - DNA, 15 bp, Homo sapiens
ccacctcaacctcct

SEQ ID NO: 337874 - DNA, 15 bp, Homo sapiens
cccacctcaacctcc

SEQ ID NO: 337875 - DNA, 15 bp, Homo sapiens
tcccacctcaacctc

SEQ ID NO: 337876 - DNA, 15 bp, Homo sapiens
ctcccacctcaacct

SEQ ID NO: 337877 - DNA, 15 bp, Homo sapiens
cctcccacctcaacc

SEQ ID NO: 337878 - DNA, 15 bp, Homo sapiens
tcctcccacctcaac

SEQ ID NO: 337879 - DNA, 15 bp, Homo sapiens
atcctcccacctcaa

SEQ ID NO: 337880 - DNA, 15 bp, Homo sapiens
aatcctcccacctca

SEQ ID NO: 337881 - DNA, 15 bp, Homo sapiens
caatcctcccacctc

SEQ ID NO: 337882 - DNA, 15 bp, Homo sapiens
gcaatcctcccacct

SEQ ID NO: 337883 - DNA, 15 bp, Homo sapiens
agcaatcctcccacc

SEQ ID NO: 337884 - DNA, 15 bp, Homo sapiens
aagcaatcctcccac

SEQ ID NO: 337885 - DNA, 15 bp, Homo sapiens
caagcaatcctccca

SEQ ID NO: 337886 - DNA, 15 bp, Homo sapiens
tcaagcaatcctccc

SEQ ID NO: 337887 - DNA, 15 bp, Homo sapiens
ctcaagcaatcctcc

SEQ ID NO: 337888 - DNA, 15 bp, Homo sapiens
gctcaagcaatcctc

SEQ ID NO: 337889 - DNA, 15 bp, Homo sapiens
ggctcaagcaatcct

SEQ ID NO: 337890 - DNA, 15 bp, Homo sapiens
cggctcaagcaatcc

SEQ ID NO: 337891 - DNA, 15 bp, Homo sapiens
ccggctcaagcaatc

SEQ ID NO: 337892 - DNA, 15 bp, Homo sapiens
tccggctcaagcaat

SEQ ID NO: 337893 - DNA, 15 bp, Homo sapiens
ttccggctcaagcaa

SEQ ID NO: 337894 - DNA, 15 bp, Homo sapiens
tttccggctcaagca

SEQ ID NO: 337895 - DNA, 15 bp, Homo sapiens
ctttccggctcaagc

SEQ ID NO: 337896 - DNA, 15 bp, Homo sapiens
cctttccggctcaag

SEQ ID NO: 337897 - DNA, 15 bp, Homo sapiens
acctttccggctcaa

SEQ ID NO: 337898 - DNA, 15 bp, Homo sapiens
aacctttccggctca

SEQ ID NO: 337899 - DNA, 15 bp, Homo sapiens
taacctttccggctc

SEQ ID NO: 337900 - DNA, 15 bp, Homo sapiens
ttaacctttccggct

SEQ ID NO: 337901 - DNA, 15 bp, Homo sapiens
cttaacctttccggc

SEQ ID NO: 337902 - DNA, 15 bp, Homo sapiens
ccttaacctttccgg

SEQ ID NO: 337903 - DNA, 15 bp, Homo sapiens
gccttaacctttccg

SEQ ID NO: 337904 - DNA, 15 bp, Homo sapiens
ggccttaacctttcc

SEQ ID NO: 337905 - DNA, 15 bp, Homo sapiens
tggccttaacctttc

SEQ ID NO: 337906 - DNA, 15 bp, Homo sapiens
atggccttaaccttt

SEQ ID NO: 337907 - DNA, 15 bp, Homo sapiens
tatggccttaacctt

SEQ ID NO: 337908 - DNA, 15 bp, Homo sapiens
ttatggccttaacct

SEQ ID NO: 337909 - DNA, 15 bp, Homo sapiens
attatggccttaacc

SEQ ID NO: 337910 - DNA, 15 bp, Homo sapiens
cattatggccttaac

SEQ ID NO: 337911 - DNA, 15 bp, Homo sapiens
tcattatggccttaa

SEQ ID NO: 337912 - DNA, 15 bp, Homo sapiens
ctcattatggcctta

SEQ ID NO: 337913 - DNA, 15 bp, Homo sapiens
gctcattatggcctt

SEQ ID NO: 337914 - DNA, 15 bp, Homo sapiens
ggctcattatggcct

SEQ ID NO: 337915 - DNA, 15 bp, Homo sapiens
tggctcattatggcc

SEQ ID NO: 337916 - DNA, 15 bp, Homo sapiens
atggctcattatggc

SEQ ID NO: 337917 - DNA, 15 bp, Homo sapiens
catggctcattatgg

SEQ ID NO: 337918 - DNA, 15 bp, Homo sapiens
tcatggctcattatg

SEQ ID NO: 337919 - DNA, 15 bp, Homo sapiens
atcatggctcattat

SEQ ID NO: 337920 - DNA, 15 bp, Homo sapiens
catcatggctcatta

SEQ ID NO: 337921 - DNA, 15 bp, Homo sapiens
ccatcatggctcatt

SEQ ID NO: 337922 - DNA, 15 bp, Homo sapiens
gccatcatggctcat

SEQ ID NO: 337923 - DNA, 15 bp, Homo sapiens
tgccatcatggctca

SEQ ID NO: 337924 - DNA, 15 bp, Homo sapiens
gtgccatcatggctc

SEQ ID NO: 337925 - DNA, 15 bp, Homo sapiens
ggtgccatcatggct

SEQ ID NO: 337926 - DNA, 15 bp, Homo sapiens
tggtgccatcatggc

SEQ ID NO: 337927 - DNA, 15 bp, Homo sapiens
gtggtgccatcatgg

SEQ ID NO: 337928 - DNA, 15 bp, Homo sapiens
agtggtgccatcatg

SEQ ID NO: 337929 - DNA, 15 bp, Homo sapiens
cagtggtgccatcat

SEQ ID NO: 337930 - DNA, 15 bp, Homo sapiens
gcagtggtgccatca

SEQ ID NO: 337931 - DNA, 15 bp, Homo sapiens
tgcagtggtgccatc

SEQ ID NO: 337932 - DNA, 15 bp, Homo sapiens
gtgcagtggtgccat

SEQ ID NO: 337933 - DNA, 15 bp, Homo sapiens
agtgcagtggtgcca

SEQ ID NO: 337934 - DNA, 15 bp, Homo sapiens
gagtgcagtggtgcc

SEQ ID NO: 337935 - DNA, 15 bp, Homo sapiens
ggagtgcagtggtgc

SEQ ID NO: 337936 - DNA, 15 bp, Homo sapiens
tggagtgcagtggtg

SEQ ID NO: 337937 - DNA, 15 bp, Homo sapiens
ctggagtgcagtggt

SEQ ID NO: 337938 - DNA, 15 bp, Homo sapiens
cgcccaggctggagt

SEQ ID NO: 337939 - DNA, 15 bp, Homo sapiens
acgcccaggctggag

SEQ ID NO: 337940 - DNA, 15 bp, Homo sapiens
gacgcccaggctgga

SEQ ID NO: 337941 - DNA, 15 bp, Homo sapiens
tgacgcccaggctgg

SEQ ID NO: 337942 - DNA, 15 bp, Homo sapiens
ctgacgcccaggctg

SEQ ID NO: 337943 - DNA, 15 bp, Homo sapiens
tctgacgcccaggct

SEQ ID NO: 337944 - DNA, 15 bp, Homo sapiens
ctctgacgcccaggc

SEQ ID NO: 337945 - DNA, 15 bp, Homo sapiens
gctctgacgcccagg

SEQ ID NO: 337946 - DNA, 15 bp, Homo sapiens
cgctctgacgcccag

SEQ ID NO: 337947 - DNA, 15 bp, Homo sapiens
tcgctctgacgccca

SEQ ID NO: 337948 - DNA, 15 bp, Homo sapiens
ttcgctctgacgccc

SEQ ID NO: 337949 - DNA, 15 bp, Homo sapiens
tttcgctctgacgcc

SEQ ID NO: 337950 - DNA, 15 bp, Homo sapiens
gtttcgctctgacgc

SEQ ID NO: 337951 - DNA, 15 bp, Homo sapiens
agtttcgctctgacg

SEQ ID NO: 337952 - DNA, 15 bp, Homo sapiens
cagtttcgctctgac

SEQ ID NO: 337953 - DNA, 15 bp, Homo sapiens
acagtttcgctctga

SEQ ID NO: 337954 - DNA, 15 bp, Homo sapiens
gacagtttcgctctg

SEQ ID NO: 337955 - DNA, 15 bp, Homo sapiens
agacagtttcgctct

SEQ ID NO: 337956 - DNA, 15 bp, Homo sapiens
tagacagtttcgctc

SEQ ID NO: 337957 - DNA, 15 bp, Homo sapiens
ttagacagtttcgct

SEQ ID NO: 337958 - DNA, 15 bp, Homo sapiens
tttagacagtttcgc

SEQ ID NO: 337959 - DNA, 15 bp, Homo sapiens
ttttagacagtttcg

SEQ ID NO: 337960 - DNA, 15 bp, Homo sapiens
tttttagacagtttc

SEQ ID NO: 337961 - DNA, 15 bp, Homo sapiens
ctttttagacagttt

SEQ ID NO: 337962 - DNA, 15 bp, Homo sapiens
tctttttagacagtt

SEQ ID NO: 337963 - DNA, 15 bp, Homo sapiens
ttctttttagacagt

SEQ ID NO: 337964 - DNA, 15 bp, Homo sapiens
tttctttttagacag

SEQ ID NO: 337965 - DNA, 15 bp, Homo sapiens
ttttctttttagaca

SEQ ID NO: 337966 - DNA, 15 bp, Homo sapiens
tttttctttttagac

SEQ ID NO: 337967 - DNA, 15 bp, Homo sapiens
ttttttctttttaga

SEQ ID NO: 337968 - DNA, 15 bp, Homo sapiens
tttttttctttttag

SEQ ID NO: 337969 - DNA, 15 bp, Homo sapiens
ttttttttcttttta

SEQ ID NO: 337970 - DNA, 15 bp, Homo sapiens
gttttttttcttttt

SEQ ID NO: 337971 - DNA, 15 bp, Homo sapiens
tgttttttttctttt

SEQ ID NO: 337972 - DNA, 15 bp, Homo sapiens
ttgttttttttcttt

SEQ ID NO: 337973 - DNA, 15 bp, Homo sapiens
tttgttttttttctt

SEQ ID NO: 337974 - DNA, 15 bp, Homo sapiens
ttttgttttttttct

SEQ ID NO: 337975 - DNA, 15 bp, Homo sapiens
tttttgttttttttc

SEQ ID NO: 337976 - DNA, 15 bp, Homo sapiens
ctttttgtttttttt

SEQ ID NO: 337977 - DNA, 15 bp, Homo sapiens
gctttttgttttttt

SEQ ID NO: 337978 - DNA, 15 bp, Homo sapiens
ggctttttgtttttt

SEQ ID NO: 337979 - DNA, 15 bp, Homo sapiens
cggctttttgttttt

SEQ ID NO: 337980 - DNA, 15 bp, Homo sapiens
ccggctttttgtttt

SEQ ID NO: 337981 - DNA, 15 bp, Homo sapiens
cccggctttttgttt

SEQ ID NO: 337982 - DNA, 15 bp, Homo sapiens
gcccggctttttgtt

SEQ ID NO: 337983 - DNA, 15 bp, Homo sapiens
cgcccggctttttgt

SEQ ID NO: 337984 - DNA, 15 bp, Homo sapiens
gcgcccggctttttg

SEQ ID NO: 337985 - DNA, 15 bp, Homo sapiens
cgcgcccggcttttt

SEQ ID NO: 337986 - DNA, 15 bp, Homo sapiens
ccgcgcccggctttt

SEQ ID NO: 337987 - DNA, 15 bp, Homo sapiens
accgcgcccggcttt

SEQ ID NO: 337988 - DNA, 15 bp, Homo sapiens
caccgcgcccggctt

SEQ ID NO: 337989 - DNA, 15 bp, Homo sapiens
ccaccgcgcccggct

SEQ ID NO: 337990 - DNA, 15 bp, Homo sapiens
tgtgagccaccgcgc

SEQ ID NO: 337991 - DNA, 15 bp, Homo sapiens
gtgtgagccaccgcg

SEQ ID NO: 337992 - DNA, 15 bp, Homo sapiens
ggtgtgagccaccgc

SEQ ID NO: 337993 - DNA, 15 bp, Homo sapiens
aggtgtgagccaccg

SEQ ID NO: 337994 - DNA, 15 bp, Homo sapiens
caggtgtgagccacc

SEQ ID NO: 337995 - DNA, 15 bp, Homo sapiens
ggcctcagcctccca

SEQ ID NO: 337996 - DNA, 15 bp, Homo sapiens
aggcctcagcctccc

SEQ ID NO: 337997 - DNA, 15 bp, Homo sapiens
caggcctcagcctcc

SEQ ID NO: 337998 - DNA, 15 bp, Homo sapiens
gcaggcctcagcctc

SEQ ID NO: 337999 - DNA, 15 bp, Homo sapiens
cgcaggcctcagcct

SEQ ID NO: 338000 - DNA, 15 bp, Homo sapiens
ccgcaggcctcagcc

SEQ ID NO: 338001 - DNA, 15 bp, Homo sapiens
tccgcaggcctcagc

SEQ ID NO: 338002 - DNA, 15 bp, Homo sapiens
atccgcaggcctcag

SEQ ID NO: 338003 - DNA, 15 bp, Homo sapiens
gatccgcaggcctca

SEQ ID NO: 338004 - DNA, 15 bp, Homo sapiens
tgatccgcaggcctc

SEQ ID NO: 338005 - DNA, 15 bp, Homo sapiens
gtgatccgcaggcct

SEQ ID NO: 338006 - DNA, 15 bp, Homo sapiens
cgtgatccgcaggcc

SEQ ID NO: 338007 - DNA, 15 bp, Homo sapiens
tcgtgatccgcaggc

SEQ ID NO: 338008 - DNA, 15 bp, Homo sapiens
ctcgtgatccgcagg

SEQ ID NO: 338009 - DNA, 15 bp, Homo sapiens
cctcgtgatccgcag

SEQ ID NO: 338010 - DNA, 15 bp, Homo sapiens
acctcgtgatccgca

SEQ ID NO: 338011 - DNA, 15 bp, Homo sapiens
aacctcgtgatccgc

SEQ ID NO: 338012 - DNA, 15 bp, Homo sapiens
taacctcgtgatccg

SEQ ID NO: 338013 - DNA, 15 bp, Homo sapiens
ctaacctcgtgatcc

SEQ ID NO: 338014 - DNA, 15 bp, Homo sapiens
cctaacctcgtgatc

SEQ ID NO: 338015 - DNA, 15 bp, Homo sapiens
tcctaacctcgtgat

SEQ ID NO: 338016 - DNA, 15 bp, Homo sapiens
ctcctaacctcgtga

SEQ ID NO: 338017 - DNA, 15 bp, Homo sapiens
tctcctaacctcgtg

SEQ ID NO: 338018 - DNA, 15 bp, Homo sapiens
atctcctaacctcgt

SEQ ID NO: 338019 - DNA, 15 bp, Homo sapiens
gatctcctaacctcg

SEQ ID NO: 338020 - DNA, 15 bp, Homo sapiens
cgatctcctaacctc

SEQ ID NO: 338021 - DNA, 15 bp, Homo sapiens
tcgatctcctaacct

SEQ ID NO: 338022 - DNA, 15 bp, Homo sapiens
ctcgatctcctaacc

SEQ ID NO: 338023 - DNA, 15 bp, Homo sapiens
tctcgatctcctaac

SEQ ID NO: 338024 - DNA, 15 bp, Homo sapiens
gtctcgatctcctaa

SEQ ID NO: 338025 - DNA, 15 bp, Homo sapiens
ggtctcgatctccta

SEQ ID NO: 338026 - DNA, 15 bp, Homo sapiens
tggtctcgatctcct

SEQ ID NO: 338027 - DNA, 15 bp, Homo sapiens
atggtctcgatctcc

SEQ ID NO: 338028 - DNA, 15 bp, Homo sapiens
gatggtctcgatctc

SEQ ID NO: 338029 - DNA, 15 bp, Homo sapiens
agatggtctcgatct

SEQ ID NO: 338030 - DNA, 15 bp, Homo sapiens
aagatggtctcgatc

SEQ ID NO: 338031 - DNA, 15 bp, Homo sapiens
caagatggtctcgat

SEQ ID NO: 338032 - DNA, 15 bp, Homo sapiens
ccaagatggtctcga

SEQ ID NO: 338033 - DNA, 15 bp, Homo sapiens
gccaagatggtctcg

SEQ ID NO: 338034 - DNA, 15 bp, Homo sapiens
agccaagatggtctc

SEQ ID NO: 338035 - DNA, 15 bp, Homo sapiens
tagccaagatggtct

SEQ ID NO: 338036 - DNA, 15 bp, Homo sapiens
ttagccaagatggtc

SEQ ID NO: 338037 - DNA, 15 bp, Homo sapiens
gttagccaagatggt

SEQ ID NO: 338038 - DNA, 15 bp, Homo sapiens
tgttagccaagatgg

SEQ ID NO: 338039 - DNA, 15 bp, Homo sapiens
atgttagccaagatg

SEQ ID NO: 338040 - DNA, 15 bp, Homo sapiens
catgttagccaagat

SEQ ID NO: 338041 - DNA, 15 bp, Homo sapiens
ccatgttagccaaga

SEQ ID NO: 338042 - DNA, 15 bp, Homo sapiens
accatgttagccaag

SEQ ID NO: 338043 - DNA, 15 bp, Homo sapiens
caccatgttagccaa

SEQ ID NO: 338044 - DNA, 15 bp, Homo sapiens
tcaccatgttagcca

SEQ ID NO: 338045 - DNA, 15 bp, Homo sapiens
gtcaccatgttagcc

SEQ ID NO: 338046 - DNA, 15 bp, Homo sapiens
tgtcaccatgttagc

SEQ ID NO: 338047 - DNA, 15 bp, Homo sapiens
gtgtcaccatgttag

SEQ ID NO: 338048 - DNA, 15 bp, Homo sapiens
ggtgtcaccatgtta

SEQ ID NO: 338049 - DNA, 15 bp, Homo sapiens
gggtgtcaccatgtt

SEQ ID NO: 338050 - DNA, 15 bp, Homo sapiens
ggggtgtcaccatgt

SEQ ID NO: 338051 - DNA, 15 bp, Homo sapiens
cggggtgtcaccatg

SEQ ID NO: 338052 - DNA, 15 bp, Homo sapiens
acggggtgtcaccat

SEQ ID NO: 338053 - DNA, 15 bp, Homo sapiens
gacggggtgtcacca

SEQ ID NO: 338054 - DNA, 15 bp, Homo sapiens
agacggggtgtcacc

SEQ ID NO: 338055 - DNA, 15 bp, Homo sapiens
gagacggggtgtcac

SEQ ID NO: 338056 - DNA, 15 bp, Homo sapiens
agagacggggtgtca

SEQ ID NO: 338057 - DNA, 15 bp, Homo sapiens
tagagacggggtgtc

SEQ ID NO: 338058 - DNA, 15 bp, Homo sapiens
gtagagacggggtgt

SEQ ID NO: 338059 - DNA, 15 bp, Homo sapiens
agtagagacggggtg

SEQ ID NO: 338060 - DNA, 15 bp, Homo sapiens
attttttgtattttt

SEQ ID NO: 338061 - DNA, 15 bp, Homo sapiens
gattttttgtatttt

SEQ ID NO: 338062 - DNA, 15 bp, Homo sapiens
tgattttttgtattt

SEQ ID NO: 338063 - DNA, 15 bp, Homo sapiens
ctgattttttgtatt

SEQ ID NO: 338064 - DNA, 15 bp, Homo sapiens
gctgattttttgtat

SEQ ID NO: 338065 - DNA, 15 bp, Homo sapiens
ggctgattttttgta

SEQ ID NO: 338066 - DNA, 15 bp, Homo sapiens
cggctgattttttgt

SEQ ID NO: 338067 - DNA, 15 bp, Homo sapiens
ccggctgattttttg

SEQ ID NO: 338068 - DNA, 15 bp, Homo sapiens
accggctgatttttt

SEQ ID NO: 338069 - DNA, 15 bp, Homo sapiens
gaccggctgattttt

SEQ ID NO: 338070 - DNA, 15 bp, Homo sapiens
cgaccggctgatttt

SEQ ID NO: 338071 - DNA, 15 bp, Homo sapiens
gcgaccggctgattt

SEQ ID NO: 338072 - DNA, 15 bp, Homo sapiens
cgcgaccggctgatt

SEQ ID NO: 338073 - DNA, 15 bp, Homo sapiens
ccgcgaccggctgat

SEQ ID NO: 338074 - DNA, 15 bp, Homo sapiens
accgcgaccggctga

SEQ ID NO: 338075 - DNA, 15 bp, Homo sapiens
caccgcgaccggctg

SEQ ID NO: 338076 - DNA, 15 bp, Homo sapiens
ccaccgcgaccggct

SEQ ID NO: 338077 - DNA, 15 bp, Homo sapiens
gccaccgcgaccggc

SEQ ID NO: 338078 - DNA, 15 bp, Homo sapiens
tgccaccgcgaccgg

SEQ ID NO: 338079 - DNA, 15 bp, Homo sapiens
ctgccaccgcgaccg

SEQ ID NO: 338080 - DNA, 15 bp, Homo sapiens
cctgccaccgcgacc

SEQ ID NO: 338081 - DNA, 15 bp, Homo sapiens
gcctgccaccgcgac

SEQ ID NO: 338082 - DNA, 15 bp, Homo sapiens
tgcctgccaccgcga

SEQ ID NO: 338083 - DNA, 15 bp, Homo sapiens
gtgcctgccaccgcg

SEQ ID NO: 338084 - DNA, 15 bp, Homo sapiens
ggtgcctgccaccgc

SEQ ID NO: 338085 - DNA, 15 bp, Homo sapiens
aggtgcctgccaccg

SEQ ID NO: 338086 - DNA, 15 bp, Homo sapiens
caggtgcctgccacc

SEQ ID NO: 338087 - DNA, 15 bp, Homo sapiens
gcaggtgcctgccac

SEQ ID NO: 338088 - DNA, 15 bp, Homo sapiens
tgcaggtgcctgcca

SEQ ID NO: 338089 - DNA, 15 bp, Homo sapiens
atgcaggtgcctgcc

SEQ ID NO: 338090 - DNA, 15 bp, Homo sapiens
aatgcaggtgcctgc

SEQ ID NO: 338091 - DNA, 15 bp, Homo sapiens
gaatgcaggtgcctg

SEQ ID NO: 338092 - DNA, 15 bp, Homo sapiens
ggaatgcaggtgcct

SEQ ID NO: 338093 - DNA, 15 bp, Homo sapiens
gggaatgcaggtgcc

SEQ ID NO: 338094 - DNA, 15 bp, Homo sapiens
tgggaatgcaggtgc

SEQ ID NO: 338095 - DNA, 15 bp, Homo sapiens
ctgggaatgcaggtg

SEQ ID NO: 338096 - DNA, 15 bp, Homo sapiens
gctgggaatgcaggt

SEQ ID NO: 338097 - DNA, 15 bp, Homo sapiens
agctgggaatgcagg

SEQ ID NO: 338098 - DNA, 15 bp, Homo sapiens
tagctgggaatgcag

SEQ ID NO: 338099 - DNA, 15 bp, Homo sapiens
ttagctgggaatgca

SEQ ID NO: 338100 - DNA, 15 bp, Homo sapiens
attagctgggaatgc

SEQ ID NO: 338101 - DNA, 15 bp, Homo sapiens
gattagctgggaatg

SEQ ID NO: 338102 - DNA, 15 bp, Homo sapiens
tgattagctgggaat

SEQ ID NO: 338103 - DNA, 15 bp, Homo sapiens
ctgattagctgggaa

SEQ ID NO: 338104 - DNA, 15 bp, Homo sapiens
actgattagctggga

SEQ ID NO: 338105 - DNA, 15 bp, Homo sapiens
tactgattagctggg

SEQ ID NO: 338106 - DNA, 15 bp, Homo sapiens
ctactgattagctgg

SEQ ID NO: 338107 - DNA, 15 bp, Homo sapiens
cctactgattagctg

SEQ ID NO: 338108 - DNA, 15 bp, Homo sapiens
gcctactgattagct

SEQ ID NO: 338109 - DNA, 15 bp, Homo sapiens
agcctactgattagc

SEQ ID NO: 338110 - DNA, 15 bp, Homo sapiens
tagcctactgattag

SEQ ID NO: 338111 - DNA, 15 bp, Homo sapiens
ttagcctactgatta

SEQ ID NO: 338112 - DNA, 15 bp, Homo sapiens
cttagcctactgatt

SEQ ID NO: 338113 - DNA, 15 bp, Homo sapiens
ccttagcctactgat

SEQ ID NO: 338114 - DNA, 15 bp, Homo sapiens
gccttagcctactga

SEQ ID NO: 338115 - DNA, 15 bp, Homo sapiens
tgccttagcctactg

SEQ ID NO: 338116 - DNA, 15 bp, Homo sapiens
ctgccttagcctact

SEQ ID NO: 338117 - DNA, 15 bp, Homo sapiens
cctgccttagcctac

SEQ ID NO: 338118 - DNA, 15 bp, Homo sapiens
tcctgccttagccta

SEQ ID NO: 338119 - DNA, 15 bp, Homo sapiens
ctcctgccttagcct

SEQ ID NO: 338120 - DNA, 15 bp, Homo sapiens
tctcctgccttagcc

SEQ ID NO: 338121 - DNA, 15 bp, Homo sapiens
ttctcctgccttagc

SEQ ID NO: 338122 - DNA, 15 bp, Homo sapiens
attctcctgccttag

SEQ ID NO: 338123 - DNA, 15 bp, Homo sapiens
cattctcctgcctta

SEQ ID NO: 338124 - DNA, 15 bp, Homo sapiens
ccattctcctgcctt

SEQ ID NO: 338125 - DNA, 15 bp, Homo sapiens
accattctcctgcct

SEQ ID NO: 338126 - DNA, 15 bp, Homo sapiens
caccattctcctgcc

SEQ ID NO: 338127 - DNA, 15 bp, Homo sapiens
acaccattctcctgc

SEQ ID NO: 338128 - DNA, 15 bp, Homo sapiens
cacaccattctcctg

SEQ ID NO: 338129 - DNA, 15 bp, Homo sapiens
tcacaccattctcct

SEQ ID NO: 338130 - DNA, 15 bp, Homo sapiens
ttcacaccattctcc

SEQ ID NO: 338131 - DNA, 15 bp, Homo sapiens
gttcacaccattctc

SEQ ID NO: 338132 - DNA, 15 bp, Homo sapiens
ggttcacaccattct

SEQ ID NO: 338133 - DNA, 15 bp, Homo sapiens
gggttcacaccattc

SEQ ID NO: 338134 - DNA, 15 bp, Homo sapiens
tgggttcacaccatt

SEQ ID NO: 338135 - DNA, 15 bp, Homo sapiens
ctgggttcacaccat

SEQ ID NO: 338136 - DNA, 15 bp, Homo sapiens
cctgggttcacacca

SEQ ID NO: 338137 - DNA, 15 bp, Homo sapiens
tcctgggttcacacc

SEQ ID NO: 338138 - DNA, 15 bp, Homo sapiens
ctcctgggttcacac

SEQ ID NO: 338139 - DNA, 15 bp, Homo sapiens
cctcctgggttcaca

SEQ ID NO: 338140 - DNA, 15 bp, Homo sapiens
gcctcctgggttcac

SEQ ID NO: 338141 - DNA, 15 bp, Homo sapiens
gctccgcctcctggg

SEQ ID NO: 338142 - DNA, 15 bp, Homo sapiens
agctccgcctcctgg

SEQ ID NO: 338143 - DNA, 15 bp, Homo sapiens
aagctccgcctcctg

SEQ ID NO: 338144 - DNA, 15 bp, Homo sapiens
taagctccgcctcct

SEQ ID NO: 338145 - DNA, 15 bp, Homo sapiens
gtaagctccgcctcc

SEQ ID NO: 338146 - DNA, 15 bp, Homo sapiens
tgtaagctccgcctc

SEQ ID NO: 338147 - DNA, 15 bp, Homo sapiens
ctgtaagctccgcct

SEQ ID NO: 338148 - DNA, 15 bp, Homo sapiens
actgtaagctccgcc

SEQ ID NO: 338149 - DNA, 15 bp, Homo sapiens
cactgtaagctccgc

SEQ ID NO: 338150 - DNA, 15 bp, Homo sapiens
tcactgtaagctccg

SEQ ID NO: 338151 - DNA, 15 bp, Homo sapiens
ctcactgtaagctcc

SEQ ID NO: 338152 - DNA, 15 bp, Homo sapiens
gctcactgtaagctc

SEQ ID NO: 338153 - DNA, 15 bp, Homo sapiens
ggctcactgtaagct

SEQ ID NO: 338154 - DNA, 15 bp, Homo sapiens
cggctcactgtaagc

SEQ ID NO: 338155 - DNA, 15 bp, Homo sapiens
tcggctcactgtaag

SEQ ID NO: 338156 - DNA, 15 bp, Homo sapiens
ctcggctcactgtaa

SEQ ID NO: 338157 - DNA, 15 bp, Homo sapiens
tctcggctcactgta

SEQ ID NO: 338158 - DNA, 15 bp, Homo sapiens
atctcggctcactgt

SEQ ID NO: 338159 - DNA, 15 bp, Homo sapiens
tgcgatctcggctca

SEQ ID NO: 338160 - DNA, 15 bp, Homo sapiens
gtgcgatctcggctc

SEQ ID NO: 338161 - DNA, 15 bp, Homo sapiens
ggtgcgatctcggct

SEQ ID NO: 338162 - DNA, 15 bp, Homo sapiens
tggtgcgatctcggc

SEQ ID NO: 338163 - DNA, 15 bp, Homo sapiens
gtggtgcgatctcgg

SEQ ID NO: 338164 - DNA, 15 bp, Homo sapiens
agtggtgcgatctcg

SEQ ID NO: 338165 - DNA, 15 bp, Homo sapiens
cagtggtgcgatctc

SEQ ID NO: 338166 - DNA, 15 bp, Homo sapiens
gcagtggtgcgatct

SEQ ID NO: 338167 - DNA, 15 bp, Homo sapiens
tgcagtggtgcgatc

SEQ ID NO: 338168 - DNA, 15 bp, Homo sapiens
gtgcagtggtgcgat

SEQ ID NO: 338169 - DNA, 15 bp, Homo sapiens
agtgcagtggtgcga

SEQ ID NO: 338170 - DNA, 15 bp, Homo sapiens
gagtgcagtggtgcg

SEQ ID NO: 338171 - DNA, 15 bp, Homo sapiens
tctggagtgcagtgg

SEQ ID NO: 338172 - DNA, 15 bp, Homo sapiens
gtctggagtgcagtg

SEQ ID NO: 338173 - DNA, 15 bp, Homo sapiens
agtctggagtgcagt

SEQ ID NO: 338174 - DNA, 15 bp, Homo sapiens
cagtctggagtgcag

SEQ ID NO: 338175 - DNA, 15 bp, Homo sapiens
ccagtctggagtgca

SEQ ID NO: 338176 - DNA, 15 bp, Homo sapiens
cccagtctggagtgc

SEQ ID NO: 338177 - DNA, 15 bp, Homo sapiens
gcccagtctggagtg

SEQ ID NO: 338178 - DNA, 15 bp, Homo sapiens
cgcccagtctggagt

SEQ ID NO: 338179 - DNA, 15 bp, Homo sapiens
tcgcccagtctggag

SEQ ID NO: 338180 - DNA, 15 bp, Homo sapiens
gtcgcccagtctgga

SEQ ID NO: 338181 - DNA, 15 bp, Homo sapiens
tgtcgcccagtctgg

SEQ ID NO: 338182 - DNA, 15 bp, Homo sapiens
ctgtcgcccagtctg

SEQ ID NO: 338183 - DNA, 15 bp, Homo sapiens
actgtcgcccagtct

SEQ ID NO: 338184 - DNA, 15 bp, Homo sapiens
cactgtcgcccagtc

SEQ ID NO: 338185 - DNA, 15 bp, Homo sapiens
acactgtcgcccagt

SEQ ID NO: 338186 - DNA, 15 bp, Homo sapiens
cacactgtcgcccag

SEQ ID NO: 338187 - DNA, 15 bp, Homo sapiens
tcacactgtcgccca

SEQ ID NO: 338188 - DNA, 15 bp, Homo sapiens
ctcacactgtcgccc

SEQ ID NO: 338189 - DNA, 15 bp, Homo sapiens
tctcacactgtcgcc

SEQ ID NO: 338190 - DNA, 15 bp, Homo sapiens
gtctcacactgtcgc

SEQ ID NO: 338191 - DNA, 15 bp, Homo sapiens
agtctcacactgtcg

SEQ ID NO: 338192 - DNA, 15 bp, Homo sapiens
gagtctcacactgtc

SEQ ID NO: 338193 - DNA, 15 bp, Homo sapiens
agagtctcacactgt

SEQ ID NO: 338194 - DNA, 15 bp, Homo sapiens
cagagtctcacactg

SEQ ID NO: 338195 - DNA, 15 bp, Homo sapiens
acagagtctcacact

SEQ ID NO: 338196 - DNA, 15 bp, Homo sapiens
gacagagtctcacac

SEQ ID NO: 338197 - DNA, 15 bp, Homo sapiens
agacagagtctcaca

SEQ ID NO: 338198 - DNA, 15 bp, Homo sapiens
gtttttttttttttt

SEQ ID NO: 338199 - DNA, 15 bp, Homo sapiens
tgttttttttttttt

SEQ ID NO: 338200 - DNA, 15 bp, Homo sapiens
ttgtttttttttttt

SEQ ID NO: 338201 - DNA, 15 bp, Homo sapiens
tttgttttttttttt

SEQ ID NO: 338202 - DNA, 15 bp, Homo sapiens
ttttgtttttttttt

SEQ ID NO: 338203 - DNA, 15 bp, Homo sapiens
tttttgttttttttt

SEQ ID NO: 338204 - DNA, 15 bp, Homo sapiens
ttttttgtttttttt

SEQ ID NO: 338205 - DNA, 15 bp, Homo sapiens
tttttttgttttttt

SEQ ID NO: 338206 - DNA, 15 bp, Homo sapiens
ttttttttgtttttt

SEQ ID NO: 338207 - DNA, 15 bp, Homo sapiens
tttttttttgttttt

SEQ ID NO: 338208 - DNA, 15 bp, Homo sapiens
ttttttttttgtttt

SEQ ID NO: 338209 - DNA, 15 bp, Homo sapiens
tttttttttttgttt

SEQ ID NO: 338210 - DNA, 15 bp, Homo sapiens
ttctttttttttttg

SEQ ID NO: 338211 - DNA, 15 bp, Homo sapiens
tttttcttttttttt

SEQ ID NO: 338212 - DNA, 15 bp, Homo sapiens
ttttttctttttttt

SEQ ID NO: 338213 - DNA, 15 bp, Homo sapiens
attttttcttttttt

SEQ ID NO: 338214 - DNA, 15 bp, Homo sapiens
aattttttctttttt

SEQ ID NO: 338215 - DNA, 15 bp, Homo sapiens
gaattttttcttttt

SEQ ID NO: 338216 - DNA, 15 bp, Homo sapiens
agaattttttctttt

SEQ ID NO: 338217 - DNA, 15 bp, Homo sapiens
aagaattttttcttt

SEQ ID NO: 338218 - DNA, 15 bp, Homo sapiens
gaagaattttttctt

SEQ ID NO: 338219 - DNA, 15 bp, Homo sapiens
ggaagaattttttct

SEQ ID NO: 338220 - DNA, 15 bp, Homo sapiens
gggaagaattttttc

SEQ ID NO: 338221 - DNA, 15 bp, Homo sapiens
agggaagaatttttt

SEQ ID NO: 338222 - DNA, 15 bp, Homo sapiens
tagggaagaattttt

SEQ ID NO: 338223 - DNA, 15 bp, Homo sapiens
gtagggaagaatttt

SEQ ID NO: 338224 - DNA, 15 bp, Homo sapiens
agtagggaagaattt

SEQ ID NO: 338225 - DNA, 15 bp, Homo sapiens
aagtagggaagaatt

SEQ ID NO: 338226 - DNA, 15 bp, Homo sapiens
taagtagggaagaat

SEQ ID NO: 338227 - DNA, 15 bp, Homo sapiens
ttaagtagggaagaa

SEQ ID NO: 338228 - DNA, 15 bp, Homo sapiens
tttaagtagggaaga

SEQ ID NO: 338229 - DNA, 15 bp, Homo sapiens
ttttaagtagggaag

SEQ ID NO: 338230 - DNA, 15 bp, Homo sapiens
attttaagtagggaa

SEQ ID NO: 338231 - DNA, 15 bp, Homo sapiens
tattttaagtaggga

SEQ ID NO: 338232 - DNA, 15 bp, Homo sapiens
ttattttaagtaggg

SEQ ID NO: 338233 - DNA, 15 bp, Homo sapiens
attattttaagtagg

SEQ ID NO: 338234 - DNA, 15 bp, Homo sapiens
aattattttaagtag

SEQ ID NO: 338235 - DNA, 15 bp, Homo sapiens
aaattattttaagta

SEQ ID NO: 338236 - DNA, 15 bp, Homo sapiens
caaattattttaagt

SEQ ID NO: 338237 - DNA, 15 bp, Homo sapiens
acaaattattttaag

SEQ ID NO: 338238 - DNA, 15 bp, Homo sapiens
aacaaattattttaa

SEQ ID NO: 338239 - DNA, 15 bp, Homo sapiens
caacaaattatttta

SEQ ID NO: 338240 - DNA, 15 bp, Homo sapiens
tcaacaaattatttt

SEQ ID NO: 338241 - DNA, 15 bp, Homo sapiens
ttcaacaaattattt

SEQ ID NO: 338242 - DNA, 15 bp, Homo sapiens
tttcaacaaattatt

SEQ ID NO: 338243 - DNA, 15 bp, Homo sapiens
atttcaacaaattat

SEQ ID NO: 338244 - DNA, 15 bp, Homo sapiens
catttcaacaaatta

SEQ ID NO: 338245 - DNA, 15 bp, Homo sapiens
ccatttcaacaaatt

SEQ ID NO: 338246 - DNA, 15 bp, Homo sapiens
accatttcaacaaat

SEQ ID NO: 338247 - DNA, 15 bp, Homo sapiens
aaccatttcaacaaa

SEQ ID NO: 338248 - DNA, 15 bp, Homo sapiens
aaaccatttcaacaa

SEQ ID NO: 338249 - DNA, 15 bp, Homo sapiens
taaaccatttcaaca

SEQ ID NO: 338250 - DNA, 15 bp, Homo sapiens
ataaaccatttcaac

SEQ ID NO: 338251 - DNA, 15 bp, Homo sapiens
aataaaccatttcaa

SEQ ID NO: 338252 - DNA, 15 bp, Homo sapiens
aaataaaccatttca

SEQ ID NO: 338253 - DNA, 15 bp, Homo sapiens
aaaataaaccatttc

SEQ ID NO: 338254 - DNA, 15 bp, Homo sapiens
gaaaataaaccattt

SEQ ID NO: 338255 - DNA, 15 bp, Homo sapiens
agaaaataaaccatt

SEQ ID NO: 338256 - DNA, 15 bp, Homo sapiens
aagaaaataaaccat

SEQ ID NO: 338257 - DNA, 15 bp, Homo sapiens
gaagaaaataaacca

SEQ ID NO: 338258 - DNA, 15 bp, Homo sapiens
agaagaaaataaacc

SEQ ID NO: 338259 - DNA, 15 bp, Homo sapiens
gagaagaaaataaac

SEQ ID NO: 338260 - DNA, 15 bp, Homo sapiens
tgagaagaaaataaa

SEQ ID NO: 338261 - DNA, 15 bp, Homo sapiens
ttgagaagaaaataa

SEQ ID NO: 338262 - DNA, 15 bp, Homo sapiens
cttgagaagaaaata

SEQ ID NO: 338263 - DNA, 15 bp, Homo sapiens
acttgagaagaaaat

SEQ ID NO: 338264 - DNA, 15 bp, Homo sapiens
aacttgagaagaaaa

SEQ ID NO: 338265 - DNA, 15 bp, Homo sapiens
caacttgagaagaaa

SEQ ID NO: 338266 - DNA, 15 bp, Homo sapiens
gcaacttgagaagaa

SEQ ID NO: 338267 - DNA, 15 bp, Homo sapiens
tgcaacttgagaaga

SEQ ID NO: 338268 - DNA, 15 bp, Homo sapiens
atgcaacttgagaag

SEQ ID NO: 338269 - DNA, 15 bp, Homo sapiens
aatgcaacttgagaa

SEQ ID NO: 338270 - DNA, 15 bp, Homo sapiens
aaatgcaacttgaga

SEQ ID NO: 338271 - DNA, 15 bp, Homo sapiens
caaatgcaacttgag

SEQ ID NO: 338272 - DNA, 15 bp, Homo sapiens
gcaaatgcaacttga

SEQ ID NO: 338273 - DNA, 15 bp, Homo sapiens
agcaaatgcaacttg

SEQ ID NO: 338274 - DNA, 15 bp, Homo sapiens
aagcaaatgcaactt

SEQ ID NO: 338275 - DNA, 15 bp, Homo sapiens
aaagcaaatgcaact

SEQ ID NO: 338276 - DNA, 15 bp, Homo sapiens
taaagcaaatgcaac

SEQ ID NO: 338277 - DNA, 15 bp, Homo sapiens
ttaaagcaaatgcaa

SEQ ID NO: 338278 - DNA, 15 bp, Homo sapiens
attaaagcaaatgca

SEQ ID NO: 338279 - DNA, 15 bp, Homo sapiens
aattaaagcaaatgc

SEQ ID NO: 338280 - DNA, 15 bp, Homo sapiens
aaattaaagcaaatg

SEQ ID NO: 338281 - DNA, 15 bp, Homo sapiens
caaattaaagcaaat

SEQ ID NO: 338282 - DNA, 15 bp, Homo sapiens
acaaattaaagcaaa

SEQ ID NO: 338283 - DNA, 15 bp, Homo sapiens
aacaaattaaagcaa

SEQ ID NO: 338284 - DNA, 15 bp, Homo sapiens
caacaaattaaagca

SEQ ID NO: 338285 - DNA, 15 bp, Homo sapiens
ccaacaaattaaagc

SEQ ID NO: 338286 - DNA, 15 bp, Homo sapiens
gccaacaaattaaag

SEQ ID NO: 338287 - DNA, 15 bp, Homo sapiens
agccaacaaattaaa

SEQ ID NO: 338288 - DNA, 15 bp, Homo sapiens
tagccaacaaattaa

SEQ ID NO: 338289 - DNA, 15 bp, Homo sapiens
ttagccaacaaatta

SEQ ID NO: 338290 - DNA, 15 bp, Homo sapiens
tttagccaacaaatt

SEQ ID NO: 338291 - DNA, 15 bp, Homo sapiens
atttagccaacaaat

SEQ ID NO: 338292 - DNA, 15 bp, Homo sapiens
catttagccaacaaa

SEQ ID NO: 338293 - DNA, 15 bp, Homo sapiens
gcatttagccaacaa

SEQ ID NO: 338294 - DNA, 15 bp, Homo sapiens
agcatttagccaaca

SEQ ID NO: 338295 - DNA, 15 bp, Homo sapiens
aagcatttagccaac

SEQ ID NO: 338296 - DNA, 15 bp, Homo sapiens
taagcatttagccaa

SEQ ID NO: 338297 - DNA, 15 bp, Homo sapiens
ttaagcatttagcca

SEQ ID NO: 338298 - DNA, 15 bp, Homo sapiens
tttaagcatttagcc

SEQ ID NO: 338299 - DNA, 15 bp, Homo sapiens
ttttaagcatttagc

SEQ ID NO: 338300 - DNA, 15 bp, Homo sapiens
cttttaagcatttag

SEQ ID NO: 338301 - DNA, 15 bp, Homo sapiens
ccttttaagcattta

SEQ ID NO: 338302 - DNA, 15 bp, Homo sapiens
gccttttaagcattt

SEQ ID NO: 338303 - DNA, 15 bp, Homo sapiens
agccttttaagcatt

SEQ ID NO: 338304 - DNA, 15 bp, Homo sapiens
aagccttttaagcat

SEQ ID NO: 338305 - DNA, 15 bp, Homo sapiens
taagccttttaagca

SEQ ID NO: 338306 - DNA, 15 bp, Homo sapiens
ttaagccttttaagc

SEQ ID NO: 338307 - DNA, 15 bp, Homo sapiens
tttaagccttttaag

SEQ ID NO: 338308 - DNA, 15 bp, Homo sapiens
ttttaagccttttaa

SEQ ID NO: 338309 - DNA, 15 bp, Homo sapiens
attttaagcctttta

SEQ ID NO: 338310 - DNA, 15 bp, Homo sapiens
aattttaagcctttt

SEQ ID NO: 338311 - DNA, 15 bp, Homo sapiens
caattttaagccttt

SEQ ID NO: 338312 - DNA, 15 bp, Homo sapiens
ccaattttaagcctt

SEQ ID NO: 338313 - DNA, 15 bp, Homo sapiens
gccaattttaagcct

SEQ ID NO: 338314 - DNA, 15 bp, Homo sapiens
ggccaattttaagcc

SEQ ID NO: 338315 - DNA, 15 bp, Homo sapiens
aggccaattttaagc

SEQ ID NO: 338316 - DNA, 15 bp, Homo sapiens
caggccaattttaag

SEQ ID NO: 338317 - DNA, 15 bp, Homo sapiens
tcaggccaattttaa

SEQ ID NO: 338318 - DNA, 15 bp, Homo sapiens
gtcaggccaatttta

SEQ ID NO: 338319 - DNA, 15 bp, Homo sapiens
agtcaggccaatttt

SEQ ID NO: 338320 - DNA, 15 bp, Homo sapiens
aagtcaggccaattt

SEQ ID NO: 338321 - DNA, 15 bp, Homo sapiens
taagtcaggccaatt

SEQ ID NO: 338322 - DNA, 15 bp, Homo sapiens
ttaagtcaggccaat

SEQ ID NO: 338323 - DNA, 15 bp, Homo sapiens
tttaagtcaggccaa

SEQ ID NO: 338324 - DNA, 15 bp, Homo sapiens
ttttaagtcaggcca

SEQ ID NO: 338325 - DNA, 15 bp, Homo sapiens
tttttaagtcaggcc

SEQ ID NO: 338326 - DNA, 15 bp, Homo sapiens
atttttaagtcaggc

SEQ ID NO: 338327 - DNA, 15 bp, Homo sapiens
aatttttaagtcagg

SEQ ID NO: 338328 - DNA, 15 bp, Homo sapiens
gaatttttaagtcag

SEQ ID NO: 338329 - DNA, 15 bp, Homo sapiens
ggaatttttaagtca

SEQ ID NO: 338330 - DNA, 15 bp, Homo sapiens
aggaatttttaagtc

SEQ ID NO: 338331 - DNA, 15 bp, Homo sapiens
aaggaatttttaagt

SEQ ID NO: 338332 - DNA, 15 bp, Homo sapiens
taaggaatttttaag

SEQ ID NO: 338333 - DNA, 15 bp, Homo sapiens
ataaggaatttttaa

SEQ ID NO: 338334 - DNA, 15 bp, Homo sapiens
gataaggaattttta

SEQ ID NO: 338335 - DNA, 15 bp, Homo sapiens
agataaggaattttt

SEQ ID NO: 338336 - DNA, 15 bp, Homo sapiens
cagataaggaatttt

SEQ ID NO: 338337 - DNA, 15 bp, Homo sapiens
acagataaggaattt

SEQ ID NO: 338338 - DNA, 15 bp, Homo sapiens
cacagataaggaatt

SEQ ID NO: 338339 - DNA, 15 bp, Homo sapiens
acacagataaggaat

SEQ ID NO: 338340 - DNA, 15 bp, Homo sapiens
aacacagataaggaa

SEQ ID NO: 338341 - DNA, 15 bp, Homo sapiens
taacacagataagga

SEQ ID NO: 338342 - DNA, 15 bp, Homo sapiens
ttaacacagataagg

SEQ ID NO: 338343 - DNA, 15 bp, Homo sapiens
tttaacacagataag

SEQ ID NO: 338344 - DNA, 15 bp, Homo sapiens
ctttaacacagataa

SEQ ID NO: 338345 - DNA, 15 bp, Homo sapiens
tctttaacacagata

SEQ ID NO: 338346 - DNA, 15 bp, Homo sapiens
atctttaacacagat

SEQ ID NO: 338347 - DNA, 15 bp, Homo sapiens
catctttaacacaga

SEQ ID NO: 338348 - DNA, 15 bp, Homo sapiens
ccatctttaacacag

SEQ ID NO: 338349 - DNA, 15 bp, Homo sapiens
tccatctttaacaca

SEQ ID NO: 338350 - DNA, 15 bp, Homo sapiens
ttccatctttaacac

SEQ ID NO: 338351 - DNA, 15 bp, Homo sapiens
attccatctttaaca

SEQ ID NO: 338352 - DNA, 15 bp, Homo sapiens
tattccatctttaac

SEQ ID NO: 338353 - DNA, 15 bp, Homo sapiens
atattccatctttaa

SEQ ID NO: 338354 - DNA, 15 bp, Homo sapiens
catattccatcttta

SEQ ID NO: 338355 - DNA, 15 bp, Homo sapiens
tcatattccatcttt

SEQ ID NO: 338356 - DNA, 15 bp, Homo sapiens
ctcatattccatctt

SEQ ID NO: 338357 - DNA, 15 bp, Homo sapiens
cctcatattccatct

SEQ ID NO: 338358 - DNA, 15 bp, Homo sapiens
acctcatattccatc

SEQ ID NO: 338359 - DNA, 15 bp, Homo sapiens
tacctcatattccat

SEQ ID NO: 338360 - DNA, 15 bp, Homo sapiens
atacctcatattcca

SEQ ID NO: 338361 - DNA, 15 bp, Homo sapiens
catacctcatattcc

SEQ ID NO: 338362 - DNA, 15 bp, Homo sapiens
acatacctcatattc

SEQ ID NO: 338363 - DNA, 15 bp, Homo sapiens
aacatacctcatatt

SEQ ID NO: 338364 - DNA, 15 bp, Homo sapiens
aaacatacctcatat

SEQ ID NO: 338365 - DNA, 15 bp, Homo sapiens
taaacatacctcata

SEQ ID NO: 338366 - DNA, 15 bp, Homo sapiens
ttaaacatacctcat

SEQ ID NO: 338367 - DNA, 15 bp, Homo sapiens
attaaacatacctca

SEQ ID NO: 338368 - DNA, 15 bp, Homo sapiens
aattaaacatacctc

SEQ ID NO: 338369 - DNA, 15 bp, Homo sapiens
aaattaaacatacct

SEQ ID NO: 338370 - DNA, 15 bp, Homo sapiens
aaaattaaacatacc

SEQ ID NO: 338371 - DNA, 15 bp, Homo sapiens
taaaattaaacatac

SEQ ID NO: 338372 - DNA, 15 bp, Homo sapiens
gtaaaattaaacata

SEQ ID NO: 338373 - DNA, 15 bp, Homo sapiens
agtaaaattaaacat

SEQ ID NO: 338374 - DNA, 15 bp, Homo sapiens
gagtaaaattaaaca

SEQ ID NO: 338375 - DNA, 15 bp, Homo sapiens
tgagtaaaattaaac

SEQ ID NO: 338376 - DNA, 15 bp, Homo sapiens
ctgagtaaaattaaa

SEQ ID NO: 338377 - DNA, 15 bp, Homo sapiens
actgagtaaaattaa

SEQ ID NO: 338378 - DNA, 15 bp, Homo sapiens
aactgagtaaaatta

SEQ ID NO: 338379 - DNA, 15 bp, Homo sapiens
taactgagtaaaatt

SEQ ID NO: 338380 - DNA, 15 bp, Homo sapiens
ataactgagtaaaat

SEQ ID NO: 338381 - DNA, 15 bp, Homo sapiens
aataactgagtaaaa

SEQ ID NO: 338382 - DNA, 15 bp, Homo sapiens
aaataactgagtaaa

SEQ ID NO: 338383 - DNA, 15 bp, Homo sapiens
caaataactgagtaa

SEQ ID NO: 338384 - DNA, 15 bp, Homo sapiens
ccaaataactgagta

SEQ ID NO: 338385 - DNA, 15 bp, Homo sapiens
cccaaataactgagt

SEQ ID NO: 338386 - DNA, 15 bp, Homo sapiens
tcccaaataactgag

SEQ ID NO: 338387 - DNA, 15 bp, Homo sapiens
ctcccaaataactga

SEQ ID NO: 338388 - DNA, 15 bp, Homo sapiens
actcccaaataactg

SEQ ID NO: 338389 - DNA, 15 bp, Homo sapiens
aactcccaaataact

SEQ ID NO: 338390 - DNA, 15 bp, Homo sapiens
aaactcccaaataac

SEQ ID NO: 338391 - DNA, 15 bp, Homo sapiens
aaaactcccaaataa

SEQ ID NO: 338392 - DNA, 15 bp, Homo sapiens
taaaactcccaaata

SEQ ID NO: 338393 - DNA, 15 bp, Homo sapiens
ataaaactcccaaat

SEQ ID NO: 338394 - DNA, 15 bp, Homo sapiens
aataaaactcccaaa

SEQ ID NO: 338395 - DNA, 15 bp, Homo sapiens
aaataaaactcccaa

SEQ ID NO: 338396 - DNA, 15 bp, Homo sapiens
gaaataaaactccca

SEQ ID NO: 338397 - DNA, 15 bp, Homo sapiens
agaaataaaactccc

SEQ ID NO: 338398 - DNA, 15 bp, Homo sapiens
cagaaataaaactcc

SEQ ID NO: 338399 - DNA, 15 bp, Homo sapiens
tcagaaataaaactc

SEQ ID NO: 338400 - DNA, 15 bp, Homo sapiens
ttcagaaataaaact

SEQ ID NO: 338401 - DNA, 15 bp, Homo sapiens
tttcagaaataaaac

SEQ ID NO: 338402 - DNA, 15 bp, Homo sapiens
atttcagaaataaaa

SEQ ID NO: 338403 - DNA, 15 bp, Homo sapiens
tatttcagaaataaa

SEQ ID NO: 338404 - DNA, 15 bp, Homo sapiens
ttatttcagaaataa

SEQ ID NO: 338405 - DNA, 15 bp, Homo sapiens
cttatttcagaaata

SEQ ID NO: 338406 - DNA, 15 bp, Homo sapiens
ccttatttcagaaat

SEQ ID NO: 338407 - DNA, 15 bp, Homo sapiens
cccttatttcagaaa

SEQ ID NO: 338408 - DNA, 15 bp, Homo sapiens
acccttatttcagaa

SEQ ID NO: 338409 - DNA, 15 bp, Homo sapiens
tacccttatttcaga

SEQ ID NO: 338410 - DNA, 15 bp, Homo sapiens
ctacccttatttcag

SEQ ID NO: 338411 - DNA, 15 bp, Homo sapiens
cctacccttatttca

SEQ ID NO: 338412 - DNA, 15 bp, Homo sapiens
ccctacccttatttc

SEQ ID NO: 338413 - DNA, 15 bp, Homo sapiens
accctacccttattt

SEQ ID NO: 338414 - DNA, 15 bp, Homo sapiens
aaccctacccttatt

SEQ ID NO: 338415 - DNA, 15 bp, Homo sapiens
caaccctacccttat

SEQ ID NO: 338416 - DNA, 15 bp, Homo sapiens
acaaccctaccctta

SEQ ID NO: 338417 - DNA, 15 bp, Homo sapiens
tacaaccctaccctt

SEQ ID NO: 338418 - DNA, 15 bp, Homo sapiens
atacaaccctaccct

SEQ ID NO: 338419 - DNA, 15 bp, Homo sapiens
aatacaaccctaccc

SEQ ID NO: 338420 - DNA, 15 bp, Homo sapiens
aaatacaaccctacc

SEQ ID NO: 338421 - DNA, 15 bp, Homo sapiens
aaaatacaaccctac

SEQ ID NO: 338422 - DNA, 15 bp, Homo sapiens
aaaaatacaacccta

SEQ ID NO: 338423 - DNA, 15 bp, Homo sapiens
taaaaatacaaccct

SEQ ID NO: 338424 - DNA, 15 bp, Homo sapiens
ataaaaatacaaccc

SEQ ID NO: 338425 - DNA, 15 bp, Homo sapiens
aataaaaatacaacc

SEQ ID NO: 338426 - DNA, 15 bp, Homo sapiens
aaataaaaatacaac

SEQ ID NO: 338427 - DNA, 15 bp, Homo sapiens
gaaataaaaatacaa

SEQ ID NO: 338428 - DNA, 15 bp, Homo sapiens
agaaataaaaataca

SEQ ID NO: 338429 - DNA, 15 bp, Homo sapiens
aagaaataaaaatac

SEQ ID NO: 338430 - DNA, 15 bp, Homo sapiens
taagaaataaaaata

SEQ ID NO: 338431 - DNA, 15 bp, Homo sapiens
ttaagaaataaaaat

SEQ ID NO: 338432 - DNA, 15 bp, Homo sapiens
tttaagaaataaaaa

SEQ ID NO: 338433 - DNA, 15 bp, Homo sapiens
ttttaagaaataaaa

SEQ ID NO: 338434 - DNA, 15 bp, Homo sapiens
cttttaagaaataaa

SEQ ID NO: 338435 - DNA, 15 bp, Homo sapiens
tcttttaagaaataa

SEQ ID NO: 338436 - DNA, 15 bp, Homo sapiens
ttcttttaagaaata

SEQ ID NO: 338437 - DNA, 15 bp, Homo sapiens
cttcttttaagaaat

SEQ ID NO: 338438 - DNA, 15 bp, Homo sapiens
acttcttttaagaaa

SEQ ID NO: 338439 - DNA, 15 bp, Homo sapiens
aacttcttttaagaa

SEQ ID NO: 338440 - DNA, 15 bp, Homo sapiens
aaacttcttttaaga

SEQ ID NO: 338441 - DNA, 15 bp, Homo sapiens
gaaacttcttttaag

SEQ ID NO: 338442 - DNA, 15 bp, Homo sapiens
tgaaacttcttttaa

SEQ ID NO: 338443 - DNA, 15 bp, Homo sapiens
ctgaaacttctttta

SEQ ID NO: 338444 - DNA, 15 bp, Homo sapiens
tctgaaacttctttt

SEQ ID NO: 338445 - DNA, 15 bp, Homo sapiens
gtctgaaacttcttt

SEQ ID NO: 338446 - DNA, 15 bp, Homo sapiens
agtctgaaacttctt

SEQ ID NO: 338447 - DNA, 15 bp, Homo sapiens
tagtctgaaacttct

SEQ ID NO: 338448 - DNA, 15 bp, Homo sapiens
ttagtctgaaacttc

SEQ ID NO: 338449 - DNA, 15 bp, Homo sapiens
tttagtctgaaactt

SEQ ID NO: 338450 - DNA, 15 bp, Homo sapiens
ttttagtctgaaact

SEQ ID NO: 338451 - DNA, 15 bp, Homo sapiens
attttagtctgaaac

SEQ ID NO: 338452 - DNA, 15 bp, Homo sapiens
aattttagtctgaaa

SEQ ID NO: 338453 - DNA, 15 bp, Homo sapiens
aaattttagtctgaa

SEQ ID NO: 338454 - DNA, 15 bp, Homo sapiens
aaaattttagtctga

SEQ ID NO: 338455 - DNA, 15 bp, Homo sapiens
gaaaattttagtctg

SEQ ID NO: 338456 - DNA, 15 bp, Homo sapiens
agaaaattttagtct

SEQ ID NO: 338457 - DNA, 15 bp, Homo sapiens
aagaaaattttagtc

SEQ ID NO: 338458 - DNA, 15 bp, Homo sapiens
aaagaaaattttagt

SEQ ID NO: 338459 - DNA, 15 bp, Homo sapiens
gaaagaaaattttag

SEQ ID NO: 338460 - DNA, 15 bp, Homo sapiens
agaaagaaaatttta

SEQ ID NO: 338461 - DNA, 15 bp, Homo sapiens
gagaaagaaaatttt

SEQ ID NO: 338462 - DNA, 15 bp, Homo sapiens
tgagaaagaaaattt

SEQ ID NO: 338463 - DNA, 15 bp, Homo sapiens
ttgagaaagaaaatt

SEQ ID NO: 338464 - DNA, 15 bp, Homo sapiens
gttgagaaagaaaat

SEQ ID NO: 338465 - DNA, 15 bp, Homo sapiens
agttgagaaagaaaa

SEQ ID NO: 338466 - DNA, 15 bp, Homo sapiens
gagttgagaaagaaa

SEQ ID NO: 338467 - DNA, 15 bp, Homo sapiens
agagttgagaaagaa

SEQ ID NO: 338468 - DNA, 15 bp, Homo sapiens
aagagttgagaaaga

SEQ ID NO: 338469 - DNA, 15 bp, Homo sapiens
taagagttgagaaag

SEQ ID NO: 338470 - DNA, 15 bp, Homo sapiens
gtaagagttgagaaa

SEQ ID NO: 338471 - DNA, 15 bp, Homo sapiens
ggtaagagttgagaa

SEQ ID NO: 338472 - DNA, 15 bp, Homo sapiens
aggtaagagttgaga

SEQ ID NO: 338473 - DNA, 15 bp, Homo sapiens
taggtaagagttgag

SEQ ID NO: 338474 - DNA, 15 bp, Homo sapiens
ttaggtaagagttga

SEQ ID NO: 338475 - DNA, 15 bp, Homo sapiens
attaggtaagagttg

SEQ ID NO: 338476 - DNA, 15 bp, Homo sapiens
aattaggtaagagtt

SEQ ID NO: 338477 - DNA, 15 bp, Homo sapiens
taattaggtaagagt

SEQ ID NO: 338478 - DNA, 15 bp, Homo sapiens
ataattaggtaagag

SEQ ID NO: 338479 - DNA, 15 bp, Homo sapiens
tataattaggtaaga

SEQ ID NO: 338480 - DNA, 15 bp, Homo sapiens
atataattaggtaag

SEQ ID NO: 338481 - DNA, 15 bp, Homo sapiens
catataattaggtaa

SEQ ID NO: 338482 - DNA, 15 bp, Homo sapiens
ccatataattaggta

SEQ ID NO: 338483 - DNA, 15 bp, Homo sapiens
accatataattaggt

SEQ ID NO: 338484 - DNA, 15 bp, Homo sapiens
taccatataattagg

SEQ ID NO: 338485 - DNA, 15 bp, Homo sapiens
ttaccatataattag

SEQ ID NO: 338486 - DNA, 15 bp, Homo sapiens
cttaccatataatta

SEQ ID NO: 338487 - DNA, 15 bp, Homo sapiens
tcttaccatataatt

SEQ ID NO: 338488 - DNA, 15 bp, Homo sapiens
ctcttaccatataat

SEQ ID NO: 338489 - DNA, 15 bp, Homo sapiens
tctcttaccatataa

SEQ ID NO: 338490 - DNA, 15 bp, Homo sapiens
ctctcttaccatata

SEQ ID NO: 338491 - DNA, 15 bp, Homo sapiens
gctctcttaccatat

SEQ ID NO: 338492 - DNA, 15 bp, Homo sapiens
agctctcttaccata

SEQ ID NO: 338493 - DNA, 15 bp, Homo sapiens
tagctctcttaccat

SEQ ID NO: 338494 - DNA, 15 bp, Homo sapiens
ctagctctcttacca

SEQ ID NO: 338495 - DNA, 15 bp, Homo sapiens
gctagctctcttacc

SEQ ID NO: 338496 - DNA, 15 bp, Homo sapiens
agctagctctcttac

SEQ ID NO: 338497 - DNA, 15 bp, Homo sapiens
tagctagctctctta

SEQ ID NO: 338498 - DNA, 15 bp, Homo sapiens
ctagctagctctctt

SEQ ID NO: 338499 - DNA, 15 bp, Homo sapiens
actagctagctctct

SEQ ID NO: 338500 - DNA, 15 bp, Homo sapiens
aactagctagctctc

SEQ ID NO: 338501 - DNA, 15 bp, Homo sapiens
gaactagctagctct

SEQ ID NO: 338502 - DNA, 15 bp, Homo sapiens
ggaactagctagctc

SEQ ID NO: 338503 - DNA, 15 bp, Homo sapiens
aggaactagctagct

SEQ ID NO: 338504 - DNA, 15 bp, Homo sapiens
taggaactagctagc

SEQ ID NO: 338505 - DNA, 15 bp, Homo sapiens
ataggaactagctag

SEQ ID NO: 338506 - DNA, 15 bp, Homo sapiens
tataggaactagcta

SEQ ID NO: 338507 - DNA, 15 bp, Homo sapiens
ttataggaactagct

SEQ ID NO: 338508 - DNA, 15 bp, Homo sapiens
tttataggaactagc

SEQ ID NO: 338509 - DNA, 15 bp, Homo sapiens
ctttataggaactag

SEQ ID NO: 338510 - DNA, 15 bp, Homo sapiens
cctttataggaacta

SEQ ID NO: 338511 - DNA, 15 bp, Homo sapiens
acctttataggaact

SEQ ID NO: 338512 - DNA, 15 bp, Homo sapiens
tacctttataggaac

SEQ ID NO: 338513 - DNA, 15 bp, Homo sapiens
ctacctttataggaa

SEQ ID NO: 338514 - DNA, 15 bp, Homo sapiens
tctacctttatagga

SEQ ID NO: 338515 - DNA, 15 bp, Homo sapiens
ttctacctttatagg

SEQ ID NO: 338516 - DNA, 15 bp, Homo sapiens
cttctacctttatag

SEQ ID NO: 338517 - DNA, 15 bp, Homo sapiens
tcttctacctttata

SEQ ID NO: 338518 - DNA, 15 bp, Homo sapiens
atcttctacctttat

SEQ ID NO: 338519 - DNA, 15 bp, Homo sapiens
aatcttctaccttta

SEQ ID NO: 338520 - DNA, 15 bp, Homo sapiens
aaatcttctaccttt

SEQ ID NO: 338521 - DNA, 15 bp, Homo sapiens
taaatcttctacctt

SEQ ID NO: 338522 - DNA, 15 bp, Homo sapiens
ttaaatcttctacct

SEQ ID NO: 338523 - DNA, 15 bp, Homo sapiens
attaaatcttctacc

SEQ ID NO: 338524 - DNA, 15 bp, Homo sapiens
aattaaatcttctac

SEQ ID NO: 338525 - DNA, 15 bp, Homo sapiens
aaattaaatcttcta

SEQ ID NO: 338526 - DNA, 15 bp, Homo sapiens
aaaattaaatcttct

SEQ ID NO: 338527 - DNA, 15 bp, Homo sapiens
taaaattaaatcttc

SEQ ID NO: 338528 - DNA, 15 bp, Homo sapiens
gtaaaattaaatctt

SEQ ID NO: 338529 - DNA, 15 bp, Homo sapiens
tgtaaaattaaatct

SEQ ID NO: 338530 - DNA, 15 bp, Homo sapiens
ttgtaaaattaaatc

SEQ ID NO: 338531 - DNA, 15 bp, Homo sapiens
tttgtaaaattaaat

SEQ ID NO: 338532 - DNA, 15 bp, Homo sapiens
atttgtaaaattaaa

SEQ ID NO: 338533 - DNA, 15 bp, Homo sapiens
aatttgtaaaattaa

SEQ ID NO: 338534 - DNA, 15 bp, Homo sapiens
taatttgtaaaatta

SEQ ID NO: 338535 - DNA, 15 bp, Homo sapiens
ataatttgtaaaatt

SEQ ID NO: 338536 - DNA, 15 bp, Homo sapiens
cataatttgtaaaat

SEQ ID NO: 338537 - DNA, 15 bp, Homo sapiens
gcataatttgtaaaa

SEQ ID NO: 338538 - DNA, 15 bp, Homo sapiens
ggcataatttgtaaa

SEQ ID NO: 338539 - DNA, 15 bp, Homo sapiens
tggcataatttgtaa

SEQ ID NO: 338540 - DNA, 15 bp, Homo sapiens
atggcataatttgta

SEQ ID NO: 338541 - DNA, 15 bp, Homo sapiens
catggcataatttgt

SEQ ID NO: 338542 - DNA, 15 bp, Homo sapiens
gcatggcataatttg

SEQ ID NO: 338543 - DNA, 15 bp, Homo sapiens
tgcatggcataattt

SEQ ID NO: 338544 - DNA, 15 bp, Homo sapiens
gtgcatggcataatt

SEQ ID NO: 338545 - DNA, 15 bp, Homo sapiens
tgtgcatggcataat

SEQ ID NO: 338546 - DNA, 15 bp, Homo sapiens
atgtgcatggcataa

SEQ ID NO: 338547 - DNA, 15 bp, Homo sapiens
aatgtgcatggcata

SEQ ID NO: 338548 - DNA, 15 bp, Homo sapiens
aaatgtgcatggcat

SEQ ID NO: 338549 - DNA, 15 bp, Homo sapiens
aaaatgtgcatggca

SEQ ID NO: 338550 - DNA, 15 bp, Homo sapiens
taaaatgtgcatggc

SEQ ID NO: 338551 - DNA, 15 bp, Homo sapiens
ctaaaatgtgcatgg

SEQ ID NO: 338552 - DNA, 15 bp, Homo sapiens
cctaaaatgtgcatg

SEQ ID NO: 338553 - DNA, 15 bp, Homo sapiens
acctaaaatgtgcat

SEQ ID NO: 338554 - DNA, 15 bp, Homo sapiens
cacctaaaatgtgca

SEQ ID NO: 338555 - DNA, 15 bp, Homo sapiens
acacctaaaatgtgc

SEQ ID NO: 338556 - DNA, 15 bp, Homo sapiens
gacacctaaaatgtg

SEQ ID NO: 338557 - DNA, 15 bp, Homo sapiens
agacacctaaaatgt

SEQ ID NO: 338558 - DNA, 15 bp, Homo sapiens
cagacacctaaaatg

SEQ ID NO: 338559 - DNA, 15 bp, Homo sapiens
acagacacctaaaat

SEQ ID NO: 338560 - DNA, 15 bp, Homo sapiens
aacagacacctaaaa

SEQ ID NO: 338561 - DNA, 15 bp, Homo sapiens
aaacagacacctaaa

SEQ ID NO: 338562 - DNA, 15 bp, Homo sapiens
gaaacagacacctaa

SEQ ID NO: 338563 - DNA, 15 bp, Homo sapiens
tgaaacagacaccta

SEQ ID NO: 338564 - DNA, 15 bp, Homo sapiens
atgaaacagacacct

SEQ ID NO: 338565 - DNA, 15 bp, Homo sapiens
catgaaacagacacc

SEQ ID NO: 338566 - DNA, 15 bp, Homo sapiens
acatgaaacagacac

SEQ ID NO: 338567 - DNA, 15 bp, Homo sapiens
cacatgaaacagaca

SEQ ID NO: 338568 - DNA, 15 bp, Homo sapiens
ccacatgaaacagac

SEQ ID NO: 338569 - DNA, 15 bp, Homo sapiens
tccacatgaaacaga

SEQ ID NO: 338570 - DNA, 15 bp, Homo sapiens
ttccacatgaaacag

SEQ ID NO: 338571 - DNA, 15 bp, Homo sapiens
attccacatgaaaca

SEQ ID NO: 338572 - DNA, 15 bp, Homo sapiens
tattccacatgaaac

SEQ ID NO: 338573 - DNA, 15 bp, Homo sapiens
gtattccacatgaaa

SEQ ID NO: 338574 - DNA, 15 bp, Homo sapiens
ggtattccacatgaa

SEQ ID NO: 338575 - DNA, 15 bp, Homo sapiens
aggtattccacatga

SEQ ID NO: 338576 - DNA, 15 bp, Homo sapiens
caggtattccacatg

SEQ ID NO: 338577 - DNA, 15 bp, Homo sapiens
tcaggtattccacat

SEQ ID NO: 338578 - DNA, 15 bp, Homo sapiens
gtcaggtattccaca

SEQ ID NO: 338579 - DNA, 15 bp, Homo sapiens
agtcaggtattccac

SEQ ID NO: 338580 - DNA, 15 bp, Homo sapiens
aagtcaggtattcca

SEQ ID NO: 338581 - DNA, 15 bp, Homo sapiens
gaagtcaggtattcc

SEQ ID NO: 338582 - DNA, 15 bp, Homo sapiens
tgaagtcaggtattc

SEQ ID NO: 338583 - DNA, 15 bp, Homo sapiens
ctgaagtcaggtatt

SEQ ID NO: 338584 - DNA, 15 bp, Homo sapiens
cctgaagtcaggtat

SEQ ID NO: 338585 - DNA, 15 bp, Homo sapiens
acctgaagtcaggta

SEQ ID NO: 338586 - DNA, 15 bp, Homo sapiens
gacctgaagtcaggt

SEQ ID NO: 338587 - DNA, 15 bp, Homo sapiens
tgacctgaagtcagg

SEQ ID NO: 338588 - DNA, 15 bp, Homo sapiens
ttgacctgaagtcag

SEQ ID NO: 338589 - DNA, 15 bp, Homo sapiens
cttgacctgaagtca

SEQ ID NO: 338590 - DNA, 15 bp, Homo sapiens
ccttgacctgaagtc

SEQ ID NO: 338591 - DNA, 15 bp, Homo sapiens
cccttgacctgaagt

SEQ ID NO: 338592 - DNA, 15 bp, Homo sapiens
tcccttgacctgaag

SEQ ID NO: 338593 - DNA, 15 bp, Homo sapiens
atcccttgacctgaa

SEQ ID NO: 338594 - DNA, 15 bp, Homo sapiens
catcccttgacctga

SEQ ID NO: 338595 - DNA, 15 bp, Homo sapiens
ccatcccttgacctg

SEQ ID NO: 338596 - DNA, 15 bp, Homo sapiens
accatcccttgacct

SEQ ID NO: 338597 - DNA, 15 bp, Homo sapiens
taccatcccttgacc

SEQ ID NO: 338598 - DNA, 15 bp, Homo sapiens
ataccatcccttgac

SEQ ID NO: 338599 - DNA, 15 bp, Homo sapiens
aataccatcccttga

SEQ ID NO: 338600 - DNA, 15 bp, Homo sapiens
aaataccatcccttg

SEQ ID NO: 338601 - DNA, 15 bp, Homo sapiens
taaataccatccctt

SEQ ID NO: 338602 - DNA, 15 bp, Homo sapiens
ataaataccatccct

SEQ ID NO: 338603 - DNA, 15 bp, Homo sapiens
cataaataccatccc

SEQ ID NO: 338604 - DNA, 15 bp, Homo sapiens
gcataaataccatcc

SEQ ID NO: 338605 - DNA, 15 bp, Homo sapiens
agcataaataccatc

SEQ ID NO: 338606 - DNA, 15 bp, Homo sapiens
gagcataaataccat

SEQ ID NO: 338607 - DNA, 15 bp, Homo sapiens
cgagcataaatacca

SEQ ID NO: 338608 - DNA, 15 bp, Homo sapiens
gcgagcataaatacc

SEQ ID NO: 338609 - DNA, 15 bp, Homo sapiens
ggcgagcataaatac

SEQ ID NO: 338610 - DNA, 15 bp, Homo sapiens
aggcgagcataaata

SEQ ID NO: 338611 - DNA, 15 bp, Homo sapiens
aaggcgagcataaat

SEQ ID NO: 338612 - DNA, 15 bp, Homo sapiens
caaggcgagcataaa

SEQ ID NO: 338613 - DNA, 15 bp, Homo sapiens
gcaaggcgagcataa

SEQ ID NO: 338614 - DNA, 15 bp, Homo sapiens
agcaaggcgagcata

SEQ ID NO: 338615 - DNA, 15 bp, Homo sapiens
cagcaaggcgagcat

SEQ ID NO: 338616 - DNA, 15 bp, Homo sapiens
acagcaaggcgagca

SEQ ID NO: 338617 - DNA, 15 bp, Homo sapiens
tacagcaaggcgagc

SEQ ID NO: 338618 - DNA, 15 bp, Homo sapiens
ctacagcaaggcgag

SEQ ID NO: 338619 - DNA, 15 bp, Homo sapiens
tctacagcaaggcga

SEQ ID NO: 338620 - DNA, 15 bp, Homo sapiens
gtctacagcaaggcg

SEQ ID NO: 338621 - DNA, 15 bp, Homo sapiens
agtctacagcaaggc

SEQ ID NO: 338622 - DNA, 15 bp, Homo sapiens
aagtctacagcaagg

SEQ ID NO: 338623 - DNA, 15 bp, Homo sapiens
gaagtctacagcaag

SEQ ID NO: 338624 - DNA, 15 bp, Homo sapiens
ggaagtctacagcaa

SEQ ID NO: 338625 - DNA, 15 bp, Homo sapiens
gggaagtctacagca

SEQ ID NO: 338626 - DNA, 15 bp, Homo sapiens
tgggaagtctacagc

SEQ ID NO: 338627 - DNA, 15 bp, Homo sapiens
ctgggaagtctacag

SEQ ID NO: 338628 - DNA, 15 bp, Homo sapiens
tctgggaagtctaca

SEQ ID NO: 338629 - DNA, 15 bp, Homo sapiens
atctgggaagtctac

SEQ ID NO: 338630 - DNA, 15 bp, Homo sapiens
gatctgggaagtcta

SEQ ID NO: 338631 - DNA, 15 bp, Homo sapiens
agatctgggaagtct

SEQ ID NO: 338632 - DNA, 15 bp, Homo sapiens
aagatctgggaagtc

SEQ ID NO: 338633 - DNA, 15 bp, Homo sapiens
gaagatctgggaagt

SEQ ID NO: 338634 - DNA, 15 bp, Homo sapiens
ggaagatctgggaag

SEQ ID NO: 338635 - DNA, 15 bp, Homo sapiens
tggaagatctgggaa

SEQ ID NO: 338636 - DNA, 15 bp, Homo sapiens
ctggaagatctggga

SEQ ID NO: 338637 - DNA, 15 bp, Homo sapiens
tctggaagatctggg

SEQ ID NO: 338638 - DNA, 15 bp, Homo sapiens
atctggaagatctgg

SEQ ID NO: 338639 - DNA, 15 bp, Homo sapiens
gatctggaagatctg

SEQ ID NO: 338640 - DNA, 15 bp, Homo sapiens
ggatctggaagatct

SEQ ID NO: 338641 - DNA, 15 bp, Homo sapiens
aggatctggaagatc

SEQ ID NO: 338642 - DNA, 15 bp, Homo sapiens
gaggatctggaagat

SEQ ID NO: 338643 - DNA, 15 bp, Homo sapiens
tgaggatctggaaga

SEQ ID NO: 338644 - DNA, 15 bp, Homo sapiens
ttgaggatctggaag

SEQ ID NO: 338645 - DNA, 15 bp, Homo sapiens
cttgaggatctggaa

SEQ ID NO: 338646 - DNA, 15 bp, Homo sapiens
gcttgaggatctgga

SEQ ID NO: 338647 - DNA, 15 bp, Homo sapiens
cgcttgaggatctgg

SEQ ID NO: 338648 - DNA, 15 bp, Homo sapiens
tcgcttgaggatctg

SEQ ID NO: 338649 - DNA, 15 bp, Homo sapiens
atcgcttgaggatct

SEQ ID NO: 338650 - DNA, 15 bp, Homo sapiens
catcgcttgaggatc

SEQ ID NO: 338651 - DNA, 15 bp, Homo sapiens
acatcgcttgaggat

SEQ ID NO: 338652 - DNA, 15 bp, Homo sapiens
aacatcgcttgagga

SEQ ID NO: 338653 - DNA, 15 bp, Homo sapiens
aaacatcgcttgagg

SEQ ID NO: 338654 - DNA, 15 bp, Homo sapiens
caaacatcgcttgag

SEQ ID NO: 338655 - DNA, 15 bp, Homo sapiens
tcaaacatcgcttga

SEQ ID NO: 338656 - DNA, 15 bp, Homo sapiens
atcaaacatcgcttg

SEQ ID NO: 338657 - DNA, 15 bp, Homo sapiens
tatcaaacatcgctt

SEQ ID NO: 338658 - DNA, 15 bp, Homo sapiens
atatcaaacatcgct

SEQ ID NO: 338659 - DNA, 15 bp, Homo sapiens
aatatcaaacatcgc

SEQ ID NO: 338660 - DNA, 15 bp, Homo sapiens
caatatcaaacatcg

SEQ ID NO: 338661 - DNA, 15 bp, Homo sapiens
tcaatatcaaacatc

SEQ ID NO: 338662 - DNA, 15 bp, Homo sapiens
ttcaatatcaaacat

SEQ ID NO: 338663 - DNA, 15 bp, Homo sapiens
attcaatatcaaaca

SEQ ID NO: 338664 - DNA, 15 bp, Homo sapiens
tattcaatatcaaac

SEQ ID NO: 338665 - DNA, 15 bp, Homo sapiens
atattcaatatcaaa

SEQ ID NO: 338666 - DNA, 15 bp, Homo sapiens
aatattcaatatcaa

SEQ ID NO: 338667 - DNA, 15 bp, Homo sapiens
aaatattcaatatca

SEQ ID NO: 338668 - DNA, 15 bp, Homo sapiens
gaaatattcaatatc

SEQ ID NO: 338669 - DNA, 15 bp, Homo sapiens
tgaaatattcaatat

SEQ ID NO: 338670 - DNA, 15 bp, Homo sapiens
ctgaaatattcaata

SEQ ID NO: 338671 - DNA, 15 bp, Homo sapiens
tctgaaatattcaat

SEQ ID NO: 338672 - DNA, 15 bp, Homo sapiens
ttctgaaatattcaa

SEQ ID NO: 338673 - DNA, 15 bp, Homo sapiens
tttctgaaatattca

SEQ ID NO: 338674 - DNA, 15 bp, Homo sapiens
ttttctgaaatattc

SEQ ID NO: 338675 - DNA, 15 bp, Homo sapiens
cttttctgaaatatt

SEQ ID NO: 338676 - DNA, 15 bp, Homo sapiens
tcttttctgaaatat

SEQ ID NO: 338677 - DNA, 15 bp, Homo sapiens
atcttttctgaaata

SEQ ID NO: 338678 - DNA, 15 bp, Homo sapiens
gatcttttctgaaat

SEQ ID NO: 338679 - DNA, 15 bp, Homo sapiens
ggatcttttctgaaa

SEQ ID NO: 338680 - DNA, 15 bp, Homo sapiens
tggatcttttctgaa

SEQ ID NO: 338681 - DNA, 15 bp, Homo sapiens
ttggatcttttctga

SEQ ID NO: 338682 - DNA, 15 bp, Homo sapiens
cttggatcttttctg

SEQ ID NO: 338683 - DNA, 15 bp, Homo sapiens
tcttggatcttttct

SEQ ID NO: 338684 - DNA, 15 bp, Homo sapiens
gtcttggatcttttc

SEQ ID NO: 338685 - DNA, 15 bp, Homo sapiens
acaaagtgctgggat

SEQ ID NO: 338686 - DNA, 15 bp, Homo sapiens
cacaaagtgctggga

SEQ ID NO: 338687 - DNA, 15 bp, Homo sapiens
tcacaaagtgctggg

SEQ ID NO: 338688 - DNA, 15 bp, Homo sapiens
ctcacaaagtgctgg

SEQ ID NO: 338689 - DNA, 15 bp, Homo sapiens
tctcacaaagtgctg

SEQ ID NO: 338690 - DNA, 15 bp, Homo sapiens
gtctcacaaagtgct

SEQ ID NO: 338691 - DNA, 15 bp, Homo sapiens
ggtctcacaaagtgc

SEQ ID NO: 338692 - DNA, 15 bp, Homo sapiens
tggtctcacaaagtg

SEQ ID NO: 338693 - DNA, 15 bp, Homo sapiens
ttggtctcacaaagt

SEQ ID NO: 338694 - DNA, 15 bp, Homo sapiens
cttggtctcacaaag

SEQ ID NO: 338695 - DNA, 15 bp, Homo sapiens
ccttggtctcacaaa

SEQ ID NO: 338696 - DNA, 15 bp, Homo sapiens
accttggtctcacaa

SEQ ID NO: 338697 - DNA, 15 bp, Homo sapiens
caccttggtctcaca

SEQ ID NO: 338698 - DNA, 15 bp, Homo sapiens
ccaccttggtctcac

SEQ ID NO: 338699 - DNA, 15 bp, Homo sapiens
cccaccttggtctca

SEQ ID NO: 338700 - DNA, 15 bp, Homo sapiens
gcccaccttggtctc

SEQ ID NO: 338701 - DNA, 15 bp, Homo sapiens
cgcccaccttggtct

SEQ ID NO: 338702 - DNA, 15 bp, Homo sapiens
ccgcccaccttggtc

SEQ ID NO: 338703 - DNA, 15 bp, Homo sapiens
tccgcccaccttggt

SEQ ID NO: 338704 - DNA, 15 bp, Homo sapiens
atccgcccaccttgg

SEQ ID NO: 338705 - DNA, 15 bp, Homo sapiens
gatccgcccaccttg

SEQ ID NO: 338706 - DNA, 15 bp, Homo sapiens
tgatccgcccacctt

SEQ ID NO: 338707 - DNA, 15 bp, Homo sapiens
ggtgatccgcccacc

SEQ ID NO: 338708 - DNA, 15 bp, Homo sapiens
aggtgatccgcccac

SEQ ID NO: 338709 - DNA, 15 bp, Homo sapiens
caggtgatccgccca

SEQ ID NO: 338710 - DNA, 15 bp, Homo sapiens
tcaggtgatccgccc

SEQ ID NO: 338711 - DNA, 15 bp, Homo sapiens
ctcaggtgatccgcc

SEQ ID NO: 338712 - DNA, 15 bp, Homo sapiens
cctcaggtgatccgc

SEQ ID NO: 338713 - DNA, 15 bp, Homo sapiens
acctcaggtgatccg

SEQ ID NO: 338714 - DNA, 15 bp, Homo sapiens
tcaggctggtcttga

SEQ ID NO: 338715 - DNA, 15 bp, Homo sapiens
gtcaggctggtcttg

SEQ ID NO: 338716 - DNA, 15 bp, Homo sapiens
ggtcaggctggtctt

SEQ ID NO: 338717 - DNA, 15 bp, Homo sapiens
tccatgttggtcagg

SEQ ID NO: 338718 - DNA, 15 bp, Homo sapiens
ctccatgttggtcag

SEQ ID NO: 338719 - DNA, 15 bp, Homo sapiens
tctccatgttggtca

SEQ ID NO: 338720 - DNA, 15 bp, Homo sapiens
ttctccatgttggtc

SEQ ID NO: 338721 - DNA, 15 bp, Homo sapiens
tttctccatgttggt

SEQ ID NO: 338722 - DNA, 15 bp, Homo sapiens
gtttctccatgttgg

SEQ ID NO: 338723 - DNA, 15 bp, Homo sapiens
ggtttctccatgttg

SEQ ID NO: 338724 - DNA, 15 bp, Homo sapiens
gggtttctccatgtt

SEQ ID NO: 338725 - DNA, 15 bp, Homo sapiens
ggggtttctccatgt

SEQ ID NO: 338726 - DNA, 15 bp, Homo sapiens
cggggtttctccatg

SEQ ID NO: 338727 - DNA, 15 bp, Homo sapiens
acggggtttctccat

SEQ ID NO: 338728 - DNA, 15 bp, Homo sapiens
gacggggtttctcca

SEQ ID NO: 338729 - DNA, 15 bp, Homo sapiens
agacggggtttctcc

SEQ ID NO: 338730 - DNA, 15 bp, Homo sapiens
gagacggggtttctc

SEQ ID NO: 338731 - DNA, 15 bp, Homo sapiens
agagacggggtttct

SEQ ID NO: 338732 - DNA, 15 bp, Homo sapiens
tagagacggggtttc

SEQ ID NO: 338733 - DNA, 15 bp, Homo sapiens
attttgtatttttag

SEQ ID NO: 338734 - DNA, 15 bp, Homo sapiens
aattttgtattttta

SEQ ID NO: 338735 - DNA, 15 bp, Homo sapiens
taattttgtattttt

SEQ ID NO: 338736 - DNA, 15 bp, Homo sapiens
ctaattttgtatttt

SEQ ID NO: 338737 - DNA, 15 bp, Homo sapiens
gctaattttgtattt

SEQ ID NO: 338738 - DNA, 15 bp, Homo sapiens
agctaattttgtatt

SEQ ID NO: 338739 - DNA, 15 bp, Homo sapiens
cagctaattttgtat

SEQ ID NO: 338740 - DNA, 15 bp, Homo sapiens
ccagctaattttgta

SEQ ID NO: 338741 - DNA, 15 bp, Homo sapiens
cccagctaattttgt

SEQ ID NO: 338742 - DNA, 15 bp, Homo sapiens
ccccagctaattttg

SEQ ID NO: 338743 - DNA, 15 bp, Homo sapiens
accccagctaatttt

SEQ ID NO: 338744 - DNA, 15 bp, Homo sapiens
caccccagctaattt

SEQ ID NO: 338745 - DNA, 15 bp, Homo sapiens
ccaccccagctaatt

SEQ ID NO: 338746 - DNA, 15 bp, Homo sapiens
accaccccagctaat

SEQ ID NO: 338747 - DNA, 15 bp, Homo sapiens
caccaccccagctaa

SEQ ID NO: 338748 - DNA, 15 bp, Homo sapiens
ccaccaccccagcta

SEQ ID NO: 338749 - DNA, 15 bp, Homo sapiens
gccaccaccccagct

SEQ ID NO: 338750 - DNA, 15 bp, Homo sapiens
tgccaccaccccagc

SEQ ID NO: 338751 - DNA, 15 bp, Homo sapiens
gtgccaccaccccag

SEQ ID NO: 338752 - DNA, 15 bp, Homo sapiens
tgtgccaccacccca

SEQ ID NO: 338753 - DNA, 15 bp, Homo sapiens
atgtgccaccacccc

SEQ ID NO: 338754 - DNA, 15 bp, Homo sapiens
catgtgccaccaccc

SEQ ID NO: 338755 - DNA, 15 bp, Homo sapiens
gcatgtgccaccacc

SEQ ID NO: 338756 - DNA, 15 bp, Homo sapiens
ggcatgtgccaccac

SEQ ID NO: 338757 - DNA, 15 bp, Homo sapiens
aggcatgtgccacca

SEQ ID NO: 338758 - DNA, 15 bp, Homo sapiens
caggcatgtgccacc

SEQ ID NO: 338759 - DNA, 15 bp, Homo sapiens
acaggcatgtgccac

SEQ ID NO: 338760 - DNA, 15 bp, Homo sapiens
tacaggcatgtgcca

SEQ ID NO: 338761 - DNA, 15 bp, Homo sapiens
ttacaggcatgtgcc

SEQ ID NO: 338762 - DNA, 15 bp, Homo sapiens
attacaggcatgtgc

SEQ ID NO: 338763 - DNA, 15 bp, Homo sapiens
gattacaggcatgtg

SEQ ID NO: 338764 - DNA, 15 bp, Homo sapiens
ggattacaggcatgt

SEQ ID NO: 338765 - DNA, 15 bp, Homo sapiens
gggattacaggcatg

SEQ ID NO: 338766 - DNA, 15 bp, Homo sapiens
tgggattacaggcat

SEQ ID NO: 338767 - DNA, 15 bp, Homo sapiens
ctgggattacaggca

SEQ ID NO: 338768 - DNA, 15 bp, Homo sapiens
agctgggattacagg

SEQ ID NO: 338769 - DNA, 15 bp, Homo sapiens
atagctgggattaca

SEQ ID NO: 338770 - DNA, 15 bp, Homo sapiens
aatagctgggattac

SEQ ID NO: 338771 - DNA, 15 bp, Homo sapiens
gaatagctgggatta

SEQ ID NO: 338772 - DNA, 15 bp, Homo sapiens
tgaatagctgggatt

SEQ ID NO: 338773 - DNA, 15 bp, Homo sapiens
ctgaatagctgggat

SEQ ID NO: 338774 - DNA, 15 bp, Homo sapiens
cctgaatagctggga

SEQ ID NO: 338775 - DNA, 15 bp, Homo sapiens
tcctgaatagctggg

SEQ ID NO: 338776 - DNA, 15 bp, Homo sapiens
ttcctgaatagctgg

SEQ ID NO: 338777 - DNA, 15 bp, Homo sapiens
cttcctgaatagctg

SEQ ID NO: 338778 - DNA, 15 bp, Homo sapiens
gcttcctgaatagct

SEQ ID NO: 338779 - DNA, 15 bp, Homo sapiens
agcttcctgaatagc

SEQ ID NO: 338780 - DNA, 15 bp, Homo sapiens
cagcttcctgaatag

SEQ ID NO: 338781 - DNA, 15 bp, Homo sapiens
tcagcttcctgaata

SEQ ID NO: 338782 - DNA, 15 bp, Homo sapiens
ctcagcttcctgaat

SEQ ID NO: 338783 - DNA, 15 bp, Homo sapiens
cctcagcttcctgaa

SEQ ID NO: 338784 - DNA, 15 bp, Homo sapiens
gcctcagcttcctga

SEQ ID NO: 338785 - DNA, 15 bp, Homo sapiens
tgcctcagcttcctg

SEQ ID NO: 338786 - DNA, 15 bp, Homo sapiens
ctgcctcagcttcct

SEQ ID NO: 338787 - DNA, 15 bp, Homo sapiens
cctgcctcagcttcc

SEQ ID NO: 338788 - DNA, 15 bp, Homo sapiens
tcctgcctcagcttc

SEQ ID NO: 338789 - DNA, 15 bp, Homo sapiens
ctcctgcctcagctt

SEQ ID NO: 338790 - DNA, 15 bp, Homo sapiens
tctcctgcctcagct

SEQ ID NO: 338791 - DNA, 15 bp, Homo sapiens
cgggttcaagtgatt

SEQ ID NO: 338792 - DNA, 15 bp, Homo sapiens
ccgggttcaagtgat

SEQ ID NO: 338793 - DNA, 15 bp, Homo sapiens
cccgggttcaagtga

SEQ ID NO: 338794 - DNA, 15 bp, Homo sapiens
tcccgggttcaagtg

SEQ ID NO: 338795 - DNA, 15 bp, Homo sapiens
ctcccgggttcaagt

SEQ ID NO: 338796 - DNA, 15 bp, Homo sapiens
cctcccgggttcaag

SEQ ID NO: 338797 - DNA, 15 bp, Homo sapiens
acctcccgggttcaa

SEQ ID NO: 338798 - DNA, 15 bp, Homo sapiens
cacctcccgggttca

SEQ ID NO: 338799 - DNA, 15 bp, Homo sapiens
ccacctcccgggttc

SEQ ID NO: 338800 - DNA, 15 bp, Homo sapiens
tccacctcccgggtt

SEQ ID NO: 338801 - DNA, 15 bp, Homo sapiens
ctccacctcccgggt

SEQ ID NO: 338802 - DNA, 15 bp, Homo sapiens
cctccacctcccggg

SEQ ID NO: 338803 - DNA, 15 bp, Homo sapiens
acctccacctcccgg

SEQ ID NO: 338804 - DNA, 15 bp, Homo sapiens
aacctccacctcccg

SEQ ID NO: 338805 - DNA, 15 bp, Homo sapiens
acaacctccacctcc

SEQ ID NO: 338806 - DNA, 15 bp, Homo sapiens
cacaacctccacctc

SEQ ID NO: 338807 - DNA, 15 bp, Homo sapiens
ccacaacctccacct

SEQ ID NO: 338808 - DNA, 15 bp, Homo sapiens
accacaacctccacc

SEQ ID NO: 338809 - DNA, 15 bp, Homo sapiens
caccacaacctccac

SEQ ID NO: 338810 - DNA, 15 bp, Homo sapiens
tcaccacaacctcca

SEQ ID NO: 338811 - DNA, 15 bp, Homo sapiens
ctcaccacaacctcc

SEQ ID NO: 338812 - DNA, 15 bp, Homo sapiens
gctcaccacaacctc

SEQ ID NO: 338813 - DNA, 15 bp, Homo sapiens
agctcaccacaacct

SEQ ID NO: 338814 - DNA, 15 bp, Homo sapiens
cagctcaccacaacc

SEQ ID NO: 338815 - DNA, 15 bp, Homo sapiens
tcagctcaccacaac

SEQ ID NO: 338816 - DNA, 15 bp, Homo sapiens
ctcagctcaccacaa

SEQ ID NO: 338817 - DNA, 15 bp, Homo sapiens
tctcagctcaccaca

SEQ ID NO: 338818 - DNA, 15 bp, Homo sapiens
atctcagctcaccac

SEQ ID NO: 338819 - DNA, 15 bp, Homo sapiens
gatctcagctcacca

SEQ ID NO: 338820 - DNA, 15 bp, Homo sapiens
cgatctcagctcacc

SEQ ID NO: 338821 - DNA, 15 bp, Homo sapiens
ggcgcgatctcagct

SEQ ID NO: 338822 - DNA, 15 bp, Homo sapiens
tggcgcgatctcagc

SEQ ID NO: 338823 - DNA, 15 bp, Homo sapiens
atggcgcgatctcag

SEQ ID NO: 338824 - DNA, 15 bp, Homo sapiens
aatggcgcgatctca

SEQ ID NO: 338825 - DNA, 15 bp, Homo sapiens
caatggcgcgatctc

SEQ ID NO: 338826 - DNA, 15 bp, Homo sapiens
gcaatggcgcgatct

SEQ ID NO: 338827 - DNA, 15 bp, Homo sapiens
tgcaatggcgcgatc

SEQ ID NO: 338828 - DNA, 15 bp, Homo sapiens
gtgcaatggcgcgat

SEQ ID NO: 338829 - DNA, 15 bp, Homo sapiens
agtgcaatggcgcga

SEQ ID NO: 338830 - DNA, 15 bp, Homo sapiens
gagtgcaatggcgcg

SEQ ID NO: 338831 - DNA, 15 bp, Homo sapiens
ggagtgcaatggcgc

SEQ ID NO: 338832 - DNA, 15 bp, Homo sapiens
tggagtgcaatggcg

SEQ ID NO: 338833 - DNA, 15 bp, Homo sapiens
ctggagtgcaatggc

SEQ ID NO: 338834 - DNA, 15 bp, Homo sapiens
gctggagtgcaatgg

SEQ ID NO: 338835 - DNA, 15 bp, Homo sapiens
ggctggagtgcaatg

SEQ ID NO: 338836 - DNA, 15 bp, Homo sapiens
aggctggagtgcaat

SEQ ID NO: 338837 - DNA, 15 bp, Homo sapiens
caggctggagtgcaa

SEQ ID NO: 338838 - DNA, 15 bp, Homo sapiens
tttgcccaggctgga

SEQ ID NO: 338839 - DNA, 15 bp, Homo sapiens
ttttgcccaggctgg

SEQ ID NO: 338840 - DNA, 15 bp, Homo sapiens
tttttgcccaggctg

SEQ ID NO: 338841 - DNA, 15 bp, Homo sapiens
ctttttgcccaggct

SEQ ID NO: 338842 - DNA, 15 bp, Homo sapiens
tctttttgcccaggc

SEQ ID NO: 338843 - DNA, 15 bp, Homo sapiens
ctctttttgcccagg

SEQ ID NO: 338844 - DNA, 15 bp, Homo sapiens
gctctttttgcccag

SEQ ID NO: 338845 - DNA, 15 bp, Homo sapiens
cgctctttttgccca

SEQ ID NO: 338846 - DNA, 15 bp, Homo sapiens
tcgctctttttgccc

SEQ ID NO: 338847 - DNA, 15 bp, Homo sapiens
ttcgctctttttgcc

SEQ ID NO: 338848 - DNA, 15 bp, Homo sapiens
tttcgctctttttgc

SEQ ID NO: 338849 - DNA, 15 bp, Homo sapiens
gtttcgctctttttg

SEQ ID NO: 338850 - DNA, 15 bp, Homo sapiens
agtttcgctcttttt

SEQ ID NO: 338851 - DNA, 15 bp, Homo sapiens
gagtttcgctctttt

SEQ ID NO: 338852 - DNA, 15 bp, Homo sapiens
agagtttcgctcttt

SEQ ID NO: 338853 - DNA, 15 bp, Homo sapiens
cagagtttcgctctt

SEQ ID NO: 338854 - DNA, 15 bp, Homo sapiens
acagagtttcgctct

SEQ ID NO: 338855 - DNA, 15 bp, Homo sapiens
gacagagtttcgctc

SEQ ID NO: 338856 - DNA, 15 bp, Homo sapiens
agacagagtttcgct

SEQ ID NO: 338857 - DNA, 15 bp, Homo sapiens
gagacagagtttcgc

SEQ ID NO: 338858 - DNA, 15 bp, Homo sapiens
tgagacagagtttcg

SEQ ID NO: 338859 - DNA, 15 bp, Homo sapiens
ttgagacagagtttc

SEQ ID NO: 338860 - DNA, 15 bp, Homo sapiens
tttgagacagagttt

SEQ ID NO: 338861 - DNA, 15 bp, Homo sapiens
ttttgagacagagtt

SEQ ID NO: 338862 - DNA, 15 bp, Homo sapiens
gcttttttttttttt

SEQ ID NO: 338863 - DNA, 15 bp, Homo sapiens
tgctttttttttttt

SEQ ID NO: 338864 - DNA, 15 bp, Homo sapiens
ctgcttttttttttt

SEQ ID NO: 338865 - DNA, 15 bp, Homo sapiens
cctgctttttttttt

SEQ ID NO: 338866 - DNA, 15 bp, Homo sapiens
gcctgcttttttttt

SEQ ID NO: 338867 - DNA, 15 bp, Homo sapiens
agcctgctttttttt

SEQ ID NO: 338868 - DNA, 15 bp, Homo sapiens
aagcctgcttttttt

SEQ ID NO: 338869 - DNA, 15 bp, Homo sapiens
taagcctgctttttt

SEQ ID NO: 338870 - DNA, 15 bp, Homo sapiens
ataagcctgcttttt

SEQ ID NO: 338871 - DNA, 15 bp, Homo sapiens
tataagcctgctttt

SEQ ID NO: 338872 - DNA, 15 bp, Homo sapiens
ttataagcctgcttt

SEQ ID NO: 338873 - DNA, 15 bp, Homo sapiens
tttataagcctgctt

SEQ ID NO: 338874 - DNA, 15 bp, Homo sapiens
ttttataagcctgct

SEQ ID NO: 338875 - DNA, 15 bp, Homo sapiens
attttataagcctgc

SEQ ID NO: 338876 - DNA, 15 bp, Homo sapiens
tattttataagcctg

SEQ ID NO: 338877 - DNA, 15 bp, Homo sapiens
ttattttataagcct

SEQ ID NO: 338878 - DNA, 15 bp, Homo sapiens
tttattttataagcc

SEQ ID NO: 338879 - DNA, 15 bp, Homo sapiens
ttttattttataagc

SEQ ID NO: 338880 - DNA, 15 bp, Homo sapiens
gttttattttataag

SEQ ID NO: 338881 - DNA, 15 bp, Homo sapiens
tgttttattttataa

SEQ ID NO: 338882 - DNA, 15 bp, Homo sapiens
ttgttttattttata

SEQ ID NO: 338883 - DNA, 15 bp, Homo sapiens
tttgttttattttat

SEQ ID NO: 338884 - DNA, 15 bp, Homo sapiens
ttttgttttatttta

SEQ ID NO: 338885 - DNA, 15 bp, Homo sapiens
tttttgttttatttt

SEQ ID NO: 338886 - DNA, 15 bp, Homo sapiens
atttttgttttattt

SEQ ID NO: 338887 - DNA, 15 bp, Homo sapiens
catttttgttttatt

SEQ ID NO: 338888 - DNA, 15 bp, Homo sapiens
acatttttgttttat

SEQ ID NO: 338889 - DNA, 15 bp, Homo sapiens
gacatttttgtttta

SEQ ID NO: 338890 - DNA, 15 bp, Homo sapiens
ggacatttttgtttt

SEQ ID NO: 338891 - DNA, 15 bp, Homo sapiens
gggacatttttgttt

SEQ ID NO: 338892 - DNA, 15 bp, Homo sapiens
agggacatttttgtt

SEQ ID NO: 338893 - DNA, 15 bp, Homo sapiens
aagggacatttttgt

SEQ ID NO: 338894 - DNA, 15 bp, Homo sapiens
taagggacatttttg

SEQ ID NO: 338895 - DNA, 15 bp, Homo sapiens
ataagggacattttt

SEQ ID NO: 338896 - DNA, 15 bp, Homo sapiens
cataagggacatttt

SEQ ID NO: 338897 - DNA, 15 bp, Homo sapiens
tcataagggacattt

SEQ ID NO: 338898 - DNA, 15 bp, Homo sapiens
atcataagggacatt

SEQ ID NO: 338899 - DNA, 15 bp, Homo sapiens
aatcataagggacat

SEQ ID NO: 338900 - DNA, 15 bp, Homo sapiens
aaatcataagggaca

SEQ ID NO: 338901 - DNA, 15 bp, Homo sapiens
caaatcataagggac

SEQ ID NO: 338902 - DNA, 15 bp, Homo sapiens
acaaatcataaggga

SEQ ID NO: 338903 - DNA, 15 bp, Homo sapiens
gacaaatcataaggg

SEQ ID NO: 338904 - DNA, 15 bp, Homo sapiens
agacaaatcataagg

SEQ ID NO: 338905 - DNA, 15 bp, Homo sapiens
aagacaaatcataag

SEQ ID NO: 338906 - DNA, 15 bp, Homo sapiens
taagacaaatcataa

SEQ ID NO: 338907 - DNA, 15 bp, Homo sapiens
ttaagacaaatcata

SEQ ID NO: 338908 - DNA, 15 bp, Homo sapiens
tttaagacaaatcat

SEQ ID NO: 338909 - DNA, 15 bp, Homo sapiens
ctttaagacaaatca

SEQ ID NO: 338910 - DNA, 15 bp, Homo sapiens
cctttaagacaaatc

SEQ ID NO: 338911 - DNA, 15 bp, Homo sapiens
acctttaagacaaat

SEQ ID NO: 338912 - DNA, 15 bp, Homo sapiens
tacctttaagacaaa

SEQ ID NO: 338913 - DNA, 15 bp, Homo sapiens
ctacctttaagacaa

SEQ ID NO: 338914 - DNA, 15 bp, Homo sapiens
actacctttaagaca

SEQ ID NO: 338915 - DNA, 15 bp, Homo sapiens
aactacctttaagac

SEQ ID NO: 338916 - DNA, 15 bp, Homo sapiens
caactacctttaaga

SEQ ID NO: 338917 - DNA, 15 bp, Homo sapiens
tcaactacctttaag

SEQ ID NO: 338918 - DNA, 15 bp, Homo sapiens
ttcaactacctttaa

SEQ ID NO: 338919 - DNA, 15 bp, Homo sapiens
attcaactaccttta

SEQ ID NO: 338920 - DNA, 15 bp, Homo sapiens
aattcaactaccttt

SEQ ID NO: 338921 - DNA, 15 bp, Homo sapiens
taattcaactacctt

SEQ ID NO: 338922 - DNA, 15 bp, Homo sapiens
ttaattcaactacct

SEQ ID NO: 338923 - DNA, 15 bp, Homo sapiens
attaattcaactacc

SEQ ID NO: 338924 - DNA, 15 bp, Homo sapiens
tattaattcaactac

SEQ ID NO: 338925 - DNA, 15 bp, Homo sapiens
ttattaattcaacta

SEQ ID NO: 338926 - DNA, 15 bp, Homo sapiens
cttattaattcaact

SEQ ID NO: 338927 - DNA, 15 bp, Homo sapiens
tcttattaattcaac

SEQ ID NO: 338928 - DNA, 15 bp, Homo sapiens
ctcttattaattcaa

SEQ ID NO: 338929 - DNA, 15 bp, Homo sapiens
gctcttattaattca

SEQ ID NO: 338930 - DNA, 15 bp, Homo sapiens
agctcttattaattc

SEQ ID NO: 338931 - DNA, 15 bp, Homo sapiens
tagctcttattaatt

SEQ ID NO: 338932 - DNA, 15 bp, Homo sapiens
ttagctcttattaat

SEQ ID NO: 338933 - DNA, 15 bp, Homo sapiens
tttagctcttattaa

SEQ ID NO: 338934 - DNA, 15 bp, Homo sapiens
atttagctcttatta

SEQ ID NO: 338935 - DNA, 15 bp, Homo sapiens
gatttagctcttatt

SEQ ID NO: 338936 - DNA, 15 bp, Homo sapiens
agatttagctcttat

SEQ ID NO: 338937 - DNA, 15 bp, Homo sapiens
tagatttagctctta

SEQ ID NO: 338938 - DNA, 15 bp, Homo sapiens
ctagatttagctctt

SEQ ID NO: 338939 - DNA, 15 bp, Homo sapiens
actagatttagctct

SEQ ID NO: 338940 - DNA, 15 bp, Homo sapiens
cactagatttagctc

SEQ ID NO: 338941 - DNA, 15 bp, Homo sapiens
acactagatttagct

SEQ ID NO: 338942 - DNA, 15 bp, Homo sapiens
gacactagatttagc

SEQ ID NO: 338943 - DNA, 15 bp, Homo sapiens
ggacactagatttag

SEQ ID NO: 338944 - DNA, 15 bp, Homo sapiens
gggacactagattta

SEQ ID NO: 338945 - DNA, 15 bp, Homo sapiens
tgggacactagattt

SEQ ID NO: 338946 - DNA, 15 bp, Homo sapiens
atgggacactagatt

SEQ ID NO: 338947 - DNA, 15 bp, Homo sapiens
tatgggacactagat

SEQ ID NO: 338948 - DNA, 15 bp, Homo sapiens
gtatgggacactaga

SEQ ID NO: 338949 - DNA, 15 bp, Homo sapiens
tgtatgggacactag

SEQ ID NO: 338950 - DNA, 15 bp, Homo sapiens
atgtatgggacacta

SEQ ID NO: 338951 - DNA, 15 bp, Homo sapiens
gatgtatgggacact

SEQ ID NO: 338952 - DNA, 15 bp, Homo sapiens
agatgtatgggacac

SEQ ID NO: 338953 - DNA, 15 bp, Homo sapiens
aagatgtatgggaca

SEQ ID NO: 338954 - DNA, 15 bp, Homo sapiens
aaagatgtatgggac

SEQ ID NO: 338955 - DNA, 15 bp, Homo sapiens
caaagatgtatggga

SEQ ID NO: 338956 - DNA, 15 bp, Homo sapiens
acaaagatgtatggg

SEQ ID NO: 338957 - DNA, 15 bp, Homo sapiens
cacaaagatgtatgg

SEQ ID NO: 338958 - DNA, 15 bp, Homo sapiens
acacaaagatgtatg

SEQ ID NO: 338959 - DNA, 15 bp, Homo sapiens
aacacaaagatgtat

SEQ ID NO: 338960 - DNA, 15 bp, Homo sapiens
aaacacaaagatgta

SEQ ID NO: 338961 - DNA, 15 bp, Homo sapiens
gaaacacaaagatgt

SEQ ID NO: 338962 - DNA, 15 bp, Homo sapiens
agaaacacaaagatg

SEQ ID NO: 338963 - DNA, 15 bp, Homo sapiens
aagaaacacaaagat

SEQ ID NO: 338964 - DNA, 15 bp, Homo sapiens
taagaaacacaaaga

SEQ ID NO: 338965 - DNA, 15 bp, Homo sapiens
gtaagaaacacaaag

SEQ ID NO: 338966 - DNA, 15 bp, Homo sapiens
agtaagaaacacaaa

SEQ ID NO: 338967 - DNA, 15 bp, Homo sapiens
gagtaagaaacacaa

SEQ ID NO: 338968 - DNA, 15 bp, Homo sapiens
agagtaagaaacaca

SEQ ID NO: 338969 - DNA, 15 bp, Homo sapiens
tagagtaagaaacac

SEQ ID NO: 338970 - DNA, 15 bp, Homo sapiens
gtagagtaagaaaca

SEQ ID NO: 338971 - DNA, 15 bp, Homo sapiens
ggtagagtaagaaac

SEQ ID NO: 338972 - DNA, 15 bp, Homo sapiens
gggtagagtaagaaa

SEQ ID NO: 338973 - DNA, 15 bp, Homo sapiens
agggtagagtaagaa

SEQ ID NO: 338974 - DNA, 15 bp, Homo sapiens
aagggtagagtaaga

SEQ ID NO: 338975 - DNA, 15 bp, Homo sapiens
aaagggtagagtaag

SEQ ID NO: 338976 - DNA, 15 bp, Homo sapiens
taaagggtagagtaa

SEQ ID NO: 338977 - DNA, 15 bp, Homo sapiens
ctaaagggtagagta

SEQ ID NO: 338978 - DNA, 15 bp, Homo sapiens
tctaaagggtagagt

SEQ ID NO: 338979 - DNA, 15 bp, Homo sapiens
ttctaaagggtagag

SEQ ID NO: 338980 - DNA, 15 bp, Homo sapiens
tttctaaagggtaga

SEQ ID NO: 338981 - DNA, 15 bp, Homo sapiens
ctttctaaagggtag

SEQ ID NO: 338982 - DNA, 15 bp, Homo sapiens
cctttctaaagggta

SEQ ID NO: 338983 - DNA, 15 bp, Homo sapiens
ccctttctaaagggt

SEQ ID NO: 338984 - DNA, 15 bp, Homo sapiens
accctttctaaaggg

SEQ ID NO: 338985 - DNA, 15 bp, Homo sapiens
caccctttctaaagg

SEQ ID NO: 338986 - DNA, 15 bp, Homo sapiens
ccaccctttctaaag

SEQ ID NO: 338987 - DNA, 15 bp, Homo sapiens
cccaccctttctaaa

SEQ ID NO: 338988 - DNA, 15 bp, Homo sapiens
ccccaccctttctaa

SEQ ID NO: 338989 - DNA, 15 bp, Homo sapiens
cccccaccctttcta

SEQ ID NO: 338990 - DNA, 15 bp, Homo sapiens
acccccaccctttct

SEQ ID NO: 338991 - DNA, 15 bp, Homo sapiens
cacccccaccctttc

SEQ ID NO: 338992 - DNA, 15 bp, Homo sapiens
ccacccccacccttt

SEQ ID NO: 338993 - DNA, 15 bp, Homo sapiens
tccacccccaccctt

SEQ ID NO: 338994 - DNA, 15 bp, Homo sapiens
gtccacccccaccct

SEQ ID NO: 338995 - DNA, 15 bp, Homo sapiens
cgtccacccccaccc

SEQ ID NO: 338996 - DNA, 15 bp, Homo sapiens
acgtccacccccacc

SEQ ID NO: 338997 - DNA, 15 bp, Homo sapiens
cacgtccacccccac

SEQ ID NO: 338998 - DNA, 15 bp, Homo sapiens
ccacgtccaccccca

SEQ ID NO: 338999 - DNA, 15 bp, Homo sapiens
tccacgtccaccccc

SEQ ID NO: 339000 - DNA, 15 bp, Homo sapiens
atccacgtccacccc

SEQ ID NO: 339001 - DNA, 15 bp, Homo sapiens
tatccacgtccaccc

SEQ ID NO: 339002 - DNA, 15 bp, Homo sapiens
ttatccacgtccacc

SEQ ID NO: 339003 - DNA, 15 bp, Homo sapiens
cttatccacgtccac

SEQ ID NO: 339004 - DNA, 15 bp, Homo sapiens
ccttatccacgtcca

SEQ ID NO: 339005 - DNA, 15 bp, Homo sapiens
gccttatccacgtcc

SEQ ID NO: 339006 - DNA, 15 bp, Homo sapiens
tgccttatccacgtc

SEQ ID NO: 339007 - DNA, 15 bp, Homo sapiens
gtgccttatccacgt

SEQ ID NO: 339008 - DNA, 15 bp, Homo sapiens
tgtgccttatccacg

SEQ ID NO: 339009 - DNA, 15 bp, Homo sapiens
gtgtgccttatccac

SEQ ID NO: 339010 - DNA, 15 bp, Homo sapiens
tgtgtgccttatcca

SEQ ID NO: 339011 - DNA, 15 bp, Homo sapiens
ctgtgtgccttatcc

SEQ ID NO: 339012 - DNA, 15 bp, Homo sapiens
actgtgtgccttatc

SEQ ID NO: 339013 - DNA, 15 bp, Homo sapiens
aactgtgtgccttat

SEQ ID NO: 339014 - DNA, 15 bp, Homo sapiens
taactgtgtgcctta

SEQ ID NO: 339015 - DNA, 15 bp, Homo sapiens
ttaactgtgtgcctt

SEQ ID NO: 339016 - DNA, 15 bp, Homo sapiens
attaactgtgtgcct

SEQ ID NO: 339017 - DNA, 15 bp, Homo sapiens
aattaactgtgtgcc

SEQ ID NO: 339018 - DNA, 15 bp, Homo sapiens
gaattaactgtgtgc

SEQ ID NO: 339019 - DNA, 15 bp, Homo sapiens
tgaattaactgtgtg

SEQ ID NO: 339020 - DNA, 15 bp, Homo sapiens
ctgaattaactgtgt

SEQ ID NO: 339021 - DNA, 15 bp, Homo sapiens
cctgaattaactgtg

SEQ ID NO: 339022 - DNA, 15 bp, Homo sapiens
ccctgaattaactgt

SEQ ID NO: 339023 - DNA, 15 bp, Homo sapiens
tccctgaattaactg

SEQ ID NO: 339024 - DNA, 15 bp, Homo sapiens
gtccctgaattaact

SEQ ID NO: 339025 - DNA, 15 bp, Homo sapiens
cgtccctgaattaac

SEQ ID NO: 339026 - DNA, 15 bp, Homo sapiens
ccgtccctgaattaa

SEQ ID NO: 339027 - DNA, 15 bp, Homo sapiens
accgtccctgaatta

SEQ ID NO: 339028 - DNA, 15 bp, Homo sapiens
caccgtccctgaatt

SEQ ID NO: 339029 - DNA, 15 bp, Homo sapiens
ccaccgtccctgaat

SEQ ID NO: 339030 - DNA, 15 bp, Homo sapiens
tccaccgtccctgaa

SEQ ID NO: 339031 - DNA, 15 bp, Homo sapiens
ctccaccgtccctga

SEQ ID NO: 339032 - DNA, 15 bp, Homo sapiens
actccaccgtccctg

SEQ ID NO: 339033 - DNA, 15 bp, Homo sapiens
gactccaccgtccct

SEQ ID NO: 339034 - DNA, 15 bp, Homo sapiens
agactccaccgtccc

SEQ ID NO: 339035 - DNA, 15 bp, Homo sapiens
aagactccaccgtcc

SEQ ID NO: 339036 - DNA, 15 bp, Homo sapiens
caagactccaccgtc

SEQ ID NO: 339037 - DNA, 15 bp, Homo sapiens
ccaagactccaccgt

SEQ ID NO: 339038 - DNA, 15 bp, Homo sapiens
accaagactccaccg

SEQ ID NO: 339039 - DNA, 15 bp, Homo sapiens
taccaagactccacc

SEQ ID NO: 339040 - DNA, 15 bp, Homo sapiens
gtaccaagactccac

SEQ ID NO: 339041 - DNA, 15 bp, Homo sapiens
agtaccaagactcca

SEQ ID NO: 339042 - DNA, 15 bp, Homo sapiens
aagtaccaagactcc

SEQ ID NO: 339043 - DNA, 15 bp, Homo sapiens
caagtaccaagactc

SEQ ID NO: 339044 - DNA, 15 bp, Homo sapiens
gcaagtaccaagact

SEQ ID NO: 339045 - DNA, 15 bp, Homo sapiens
agcaagtaccaagac

SEQ ID NO: 339046 - DNA, 15 bp, Homo sapiens
gagcaagtaccaaga

SEQ ID NO: 339047 - DNA, 15 bp, Homo sapiens
agagcaagtaccaag

SEQ ID NO: 339048 - DNA, 15 bp, Homo sapiens
aagagcaagtaccaa

SEQ ID NO: 339049 - DNA, 15 bp, Homo sapiens
aaagagcaagtacca

SEQ ID NO: 339050 - DNA, 15 bp, Homo sapiens
aaaagagcaagtacc

SEQ ID NO: 339051 - DNA, 15 bp, Homo sapiens
aaaaagagcaagtac

SEQ ID NO: 339052 - DNA, 15 bp, Homo sapiens
gaaaaagagcaagta

SEQ ID NO: 339053 - DNA, 15 bp, Homo sapiens
ggaaaaagagcaagt

SEQ ID NO: 339054 - DNA, 15 bp, Homo sapiens
gggaaaaagagcaag

SEQ ID NO: 339055 - DNA, 15 bp, Homo sapiens
agggaaaaagagcaa

SEQ ID NO: 339056 - DNA, 15 bp, Homo sapiens
cagggaaaaagagca

SEQ ID NO: 339057 - DNA, 15 bp, Homo sapiens
tcagggaaaaagagc

SEQ ID NO: 339058 - DNA, 15 bp, Homo sapiens
gtcagggaaaaagag

SEQ ID NO: 339059 - DNA, 15 bp, Homo sapiens
ggtcagggaaaaaga

SEQ ID NO: 339060 - DNA, 15 bp, Homo sapiens
aggtcagggaaaaag

SEQ ID NO: 339061 - DNA, 15 bp, Homo sapiens
aaggtcagggaaaaa

SEQ ID NO: 339062 - DNA, 15 bp, Homo sapiens
caaggtcagggaaaa

SEQ ID NO: 339063 - DNA, 15 bp, Homo sapiens
gcaaggtcagggaaa

SEQ ID NO: 339064 - DNA, 15 bp, Homo sapiens
agcaaggtcagggaa

SEQ ID NO: 339065 - DNA, 15 bp, Homo sapiens
aagcaaggtcaggga

SEQ ID NO: 339066 - DNA, 15 bp, Homo sapiens
aaagcaaggtcaggg

SEQ ID NO: 339067 - DNA, 15 bp, Homo sapiens
caaagcaaggtcagg

SEQ ID NO: 339068 - DNA, 15 bp, Homo sapiens
ccaaagcaaggtcag

SEQ ID NO: 339069 - DNA, 15 bp, Homo sapiens
tccaaagcaaggtca

SEQ ID NO: 339070 - DNA, 15 bp, Homo sapiens
ctccaaagcaaggtc

SEQ ID NO: 339071 - DNA, 15 bp, Homo sapiens
actccaaagcaaggt

SEQ ID NO: 339072 - DNA, 15 bp, Homo sapiens
aactccaaagcaagg

SEQ ID NO: 339073 - DNA, 15 bp, Homo sapiens
taactccaaagcaag

SEQ ID NO: 339074 - DNA, 15 bp, Homo sapiens
ataactccaaagcaa

SEQ ID NO: 339075 - DNA, 15 bp, Homo sapiens
aataactccaaagca

SEQ ID NO: 339076 - DNA, 15 bp, Homo sapiens
aaataactccaaagc

SEQ ID NO: 339077 - DNA, 15 bp, Homo sapiens
aaaataactccaaag

SEQ ID NO: 339078 - DNA, 15 bp, Homo sapiens
taaaataactccaaa

SEQ ID NO: 339079 - DNA, 15 bp, Homo sapiens
ataaaataactccaa

SEQ ID NO: 339080 - DNA, 15 bp, Homo sapiens
aataaaataactcca

SEQ ID NO: 339081 - DNA, 15 bp, Homo sapiens
aaataaaataactcc

SEQ ID NO: 339082 - DNA, 15 bp, Homo sapiens
aaaataaaataactc

SEQ ID NO: 339083 - DNA, 15 bp, Homo sapiens
aaaaataaaataact

SEQ ID NO: 339084 - DNA, 15 bp, Homo sapiens
aaaaaataaaataac

SEQ ID NO: 339085 - DNA, 15 bp, Homo sapiens
taaaaaataaaataa

SEQ ID NO: 339086 - DNA, 15 bp, Homo sapiens
ttaaaaaataaaata

SEQ ID NO: 339087 - DNA, 15 bp, Homo sapiens
tttaaaaaataaaat

SEQ ID NO: 339088 - DNA, 15 bp, Homo sapiens
atttaaaaaataaaa

SEQ ID NO: 339089 - DNA, 15 bp, Homo sapiens
aatttaaaaaataaa

SEQ ID NO: 339090 - DNA, 15 bp, Homo sapiens
gaatttaaaaaataa

SEQ ID NO: 339091 - DNA, 15 bp, Homo sapiens
agaatttaaaaaata

SEQ ID NO: 339092 - DNA, 15 bp, Homo sapiens
cagaatttaaaaaat

SEQ ID NO: 339093 - DNA, 15 bp, Homo sapiens
gcagaatttaaaaaa

SEQ ID NO: 339094 - DNA, 15 bp, Homo sapiens
tgcagaatttaaaaa

SEQ ID NO: 339095 - DNA, 15 bp, Homo sapiens
atgcagaatttaaaa

SEQ ID NO: 339096 - DNA, 15 bp, Homo sapiens
aatgcagaatttaaa

SEQ ID NO: 339097 - DNA, 15 bp, Homo sapiens
aaatgcagaatttaa

SEQ ID NO: 339098 - DNA, 15 bp, Homo sapiens
caaatgcagaattta

SEQ ID NO: 339099 - DNA, 15 bp, Homo sapiens
ccaaatgcagaattt

SEQ ID NO: 339100 - DNA, 15 bp, Homo sapiens
gccaaatgcagaatt

SEQ ID NO: 339101 - DNA, 15 bp, Homo sapiens
tgccaaatgcagaat

SEQ ID NO: 339102 - DNA, 15 bp, Homo sapiens
atgccaaatgcagaa

SEQ ID NO: 339103 - DNA, 15 bp, Homo sapiens
catgccaaatgcaga

SEQ ID NO: 339104 - DNA, 15 bp, Homo sapiens
gcatgccaaatgcag

SEQ ID NO: 339105 - DNA, 15 bp, Homo sapiens
agcatgccaaatgca

SEQ ID NO: 339106 - DNA, 15 bp, Homo sapiens
tagcatgccaaatgc

SEQ ID NO: 339107 - DNA, 15 bp, Homo sapiens
atagcatgccaaatg

SEQ ID NO: 339108 - DNA, 15 bp, Homo sapiens
aatagcatgccaaat

SEQ ID NO: 339109 - DNA, 15 bp, Homo sapiens
taatagcatgccaaa

SEQ ID NO: 339110 - DNA, 15 bp, Homo sapiens
ataatagcatgccaa

SEQ ID NO: 339111 - DNA, 15 bp, Homo sapiens
gataatagcatgcca

SEQ ID NO: 339112 - DNA, 15 bp, Homo sapiens
tgataatagcatgcc

SEQ ID NO: 339113 - DNA, 15 bp, Homo sapiens
gtgataatagcatgc

SEQ ID NO: 339114 - DNA, 15 bp, Homo sapiens
agtgataatagcatg

SEQ ID NO: 339115 - DNA, 15 bp, Homo sapiens
aagtgataatagcat

SEQ ID NO: 339116 - DNA, 15 bp, Homo sapiens
caagtgataatagca

SEQ ID NO: 339117 - DNA, 15 bp, Homo sapiens
gcaagtgataatagc

SEQ ID NO: 339118 - DNA, 15 bp, Homo sapiens
agcaagtgataatag

SEQ ID NO: 339119 - DNA, 15 bp, Homo sapiens
aagcaagtgataata

SEQ ID NO: 339120 - DNA, 15 bp, Homo sapiens
taagcaagtgataat

SEQ ID NO: 339121 - DNA, 15 bp, Homo sapiens
gtaagcaagtgataa

SEQ ID NO: 339122 - DNA, 15 bp, Homo sapiens
agtaagcaagtgata

SEQ ID NO: 339123 - DNA, 15 bp, Homo sapiens
tagtaagcaagtgat

SEQ ID NO: 339124 - DNA, 15 bp, Homo sapiens
atagtaagcaagtga

SEQ ID NO: 339125 - DNA, 15 bp, Homo sapiens
aatagtaagcaagtg

SEQ ID NO: 339126 - DNA, 15 bp, Homo sapiens
taatagtaagcaagt

SEQ ID NO: 339127 - DNA, 15 bp, Homo sapiens
ataatagtaagcaag

SEQ ID NO: 339128 - DNA, 15 bp, Homo sapiens
tataatagtaagcaa

SEQ ID NO: 339129 - DNA, 15 bp, Homo sapiens
ctataatagtaagca

SEQ ID NO: 339130 - DNA, 15 bp, Homo sapiens
cctataatagtaagc

SEQ ID NO: 339131 - DNA, 15 bp, Homo sapiens
acctataatagtaag

SEQ ID NO: 339132 - DNA, 15 bp, Homo sapiens
gacctataatagtaa

SEQ ID NO: 339133 - DNA, 15 bp, Homo sapiens
ggacctataatagta

SEQ ID NO: 339134 - DNA, 15 bp, Homo sapiens
aggacctataatagt

SEQ ID NO: 339135 - DNA, 15 bp, Homo sapiens
taggacctataatag

SEQ ID NO: 339136 - DNA, 15 bp, Homo sapiens
ataggacctataata

SEQ ID NO: 339137 - DNA, 15 bp, Homo sapiens
aataggacctataat

SEQ ID NO: 339138 - DNA, 15 bp, Homo sapiens
aaataggacctataa

SEQ ID NO: 339139 - DNA, 15 bp, Homo sapiens
aaaataggacctata

SEQ ID NO: 339140 - DNA, 15 bp, Homo sapiens
taaaataggacctat

SEQ ID NO: 339141 - DNA, 15 bp, Homo sapiens
ataaaataggaccta

SEQ ID NO: 339142 - DNA, 15 bp, Homo sapiens
gataaaataggacct

SEQ ID NO: 339143 - DNA, 15 bp, Homo sapiens
agataaaataggacc

SEQ ID NO: 339144 - DNA, 15 bp, Homo sapiens
cagataaaataggac

SEQ ID NO: 339145 - DNA, 15 bp, Homo sapiens
acagataaaatagga

SEQ ID NO: 339146 - DNA, 15 bp, Homo sapiens
aacagataaaatagg

SEQ ID NO: 339147 - DNA, 15 bp, Homo sapiens
caacagataaaatag

SEQ ID NO: 339148 - DNA, 15 bp, Homo sapiens
gcaacagataaaata

SEQ ID NO: 339149 - DNA, 15 bp, Homo sapiens
ggcaacagataaaat

SEQ ID NO: 339150 - DNA, 15 bp, Homo sapiens
aggcaacagataaaa

SEQ ID NO: 339151 - DNA, 15 bp, Homo sapiens
taggcaacagataaa

SEQ ID NO: 339152 - DNA, 15 bp, Homo sapiens
ctaggcaacagataa

SEQ ID NO: 339153 - DNA, 15 bp, Homo sapiens
gctaggcaacagata

SEQ ID NO: 339154 - DNA, 15 bp, Homo sapiens
tgctaggcaacagat

SEQ ID NO: 339155 - DNA, 15 bp, Homo sapiens
atgctaggcaacaga

SEQ ID NO: 339156 - DNA, 15 bp, Homo sapiens
tatgctaggcaacag

SEQ ID NO: 339157 - DNA, 15 bp, Homo sapiens
atatgctaggcaaca

SEQ ID NO: 339158 - DNA, 15 bp, Homo sapiens
aatatgctaggcaac

SEQ ID NO: 339159 - DNA, 15 bp, Homo sapiens
gaatatgctaggcaa

SEQ ID NO: 339160 - DNA, 15 bp, Homo sapiens
agaatatgctaggca

SEQ ID NO: 339161 - DNA, 15 bp, Homo sapiens
gagaatatgctaggc

SEQ ID NO: 339162 - DNA, 15 bp, Homo sapiens
tgagaatatgctagg

SEQ ID NO: 339163 - DNA, 15 bp, Homo sapiens
atgagaatatgctag

SEQ ID NO: 339164 - DNA, 15 bp, Homo sapiens
tatgagaatatgcta

SEQ ID NO: 339165 - DNA, 15 bp, Homo sapiens
ctatgagaatatgct

SEQ ID NO: 339166 - DNA, 15 bp, Homo sapiens
actatgagaatatgc

SEQ ID NO: 339167 - DNA, 15 bp, Homo sapiens
cactatgagaatatg

SEQ ID NO: 339168 - DNA, 15 bp, Homo sapiens
gcactatgagaatat

SEQ ID NO: 339169 - DNA, 15 bp, Homo sapiens
ggcactatgagaata

SEQ ID NO: 339170 - DNA, 15 bp, Homo sapiens
aggcactatgagaat

SEQ ID NO: 339171 - DNA, 15 bp, Homo sapiens
taggcactatgagaa

SEQ ID NO: 339172 - DNA, 15 bp, Homo sapiens
ttaggcactatgaga

SEQ ID NO: 339173 - DNA, 15 bp, Homo sapiens
tttaggcactatgag

SEQ ID NO: 339174 - DNA, 15 bp, Homo sapiens
ttttaggcactatga

SEQ ID NO: 339175 - DNA, 15 bp, Homo sapiens
attttaggcactatg

SEQ ID NO: 339176 - DNA, 15 bp, Homo sapiens
tattttaggcactat

SEQ ID NO: 339177 - DNA, 15 bp, Homo sapiens
gtattttaggcacta

SEQ ID NO: 339178 - DNA, 15 bp, Homo sapiens
agtattttaggcact

SEQ ID NO: 339179 - DNA, 15 bp, Homo sapiens
gagtattttaggcac

SEQ ID NO: 339180 - DNA, 15 bp, Homo sapiens
agagtattttaggca

SEQ ID NO: 339181 - DNA, 15 bp, Homo sapiens
tagagtattttaggc

SEQ ID NO: 339182 - DNA, 15 bp, Homo sapiens
ttagagtattttagg

SEQ ID NO: 339183 - DNA, 15 bp, Homo sapiens
tttagagtattttag

SEQ ID NO: 339184 - DNA, 15 bp, Homo sapiens
ttttagagtatttta

SEQ ID NO: 339185 - DNA, 15 bp, Homo sapiens
cttttagagtatttt

SEQ ID NO: 339186 - DNA, 15 bp, Homo sapiens
gcttttagagtattt

SEQ ID NO: 339187 - DNA, 15 bp, Homo sapiens
agcttttagagtatt

SEQ ID NO: 339188 - DNA, 15 bp, Homo sapiens
tagcttttagagtat

SEQ ID NO: 339189 - DNA, 15 bp, Homo sapiens
atagcttttagagta

SEQ ID NO: 339190 - DNA, 15 bp, Homo sapiens
aatagcttttagagt

SEQ ID NO: 339191 - DNA, 15 bp, Homo sapiens
aaatagcttttagag

SEQ ID NO: 339192 - DNA, 15 bp, Homo sapiens
gaaatagcttttaga

SEQ ID NO: 339193 - DNA, 15 bp, Homo sapiens
ggaaatagcttttag

SEQ ID NO: 339194 - DNA, 15 bp, Homo sapiens
tggaaatagctttta

SEQ ID NO: 339195 - DNA, 15 bp, Homo sapiens
ctggaaatagctttt

SEQ ID NO: 339196 - DNA, 15 bp, Homo sapiens
tctggaaatagcttt

SEQ ID NO: 339197 - DNA, 15 bp, Homo sapiens
ctctggaaatagctt

SEQ ID NO: 339198 - DNA, 15 bp, Homo sapiens
cctctggaaatagct

SEQ ID NO: 339199 - DNA, 15 bp, Homo sapiens
ccctctggaaatagc

SEQ ID NO: 339200 - DNA, 15 bp, Homo sapiens
tccctctggaaatag

SEQ ID NO: 339201 - DNA, 15 bp, Homo sapiens
ctccctctggaaata

SEQ ID NO: 339202 - DNA, 15 bp, Homo sapiens
gctccctctggaaat

SEQ ID NO: 339203 - DNA, 15 bp, Homo sapiens
agctccctctggaaa

SEQ ID NO: 339204 - DNA, 15 bp, Homo sapiens
aagctccctctggaa

SEQ ID NO: 339205 - DNA, 15 bp, Homo sapiens
aaagctccctctgga

SEQ ID NO: 339206 - DNA, 15 bp, Homo sapiens
taaagctccctctgg

SEQ ID NO: 339207 - DNA, 15 bp, Homo sapiens
ttaaagctccctctg

SEQ ID NO: 339208 - DNA, 15 bp, Homo sapiens
attaaagctccctct

SEQ ID NO: 339209 - DNA, 15 bp, Homo sapiens
cattaaagctccctc

SEQ ID NO: 339210 - DNA, 15 bp, Homo sapiens
tcattaaagctccct

SEQ ID NO: 339211 - DNA, 15 bp, Homo sapiens
ctcattaaagctccc

SEQ ID NO: 339212 - DNA, 15 bp, Homo sapiens
tctcattaaagctcc

SEQ ID NO: 339213 - DNA, 15 bp, Homo sapiens
gtctcattaaagctc

SEQ ID NO: 339214 - DNA, 15 bp, Homo sapiens
tgtctcattaaagct

SEQ ID NO: 339215 - DNA, 15 bp, Homo sapiens
atgtctcattaaagc

SEQ ID NO: 339216 - DNA, 15 bp, Homo sapiens
tatgtctcattaaag

SEQ ID NO: 339217 - DNA, 15 bp, Homo sapiens
gtatgtctcattaaa

SEQ ID NO: 339218 - DNA, 15 bp, Homo sapiens
tgtatgtctcattaa

SEQ ID NO: 339219 - DNA, 15 bp, Homo sapiens
ttgtatgtctcatta

SEQ ID NO: 339220 - DNA, 15 bp, Homo sapiens
attgtatgtctcatt

SEQ ID NO: 339221 - DNA, 15 bp, Homo sapiens
cattgtatgtctcat

SEQ ID NO: 339222 - DNA, 15 bp, Homo sapiens
gcattgtatgtctca

SEQ ID NO: 339223 - DNA, 15 bp, Homo sapiens
agcattgtatgtctc

SEQ ID NO: 339224 - DNA, 15 bp, Homo sapiens
aagcattgtatgtct

SEQ ID NO: 339225 - DNA, 15 bp, Homo sapiens
taagcattgtatgtc

SEQ ID NO: 339226 - DNA, 15 bp, Homo sapiens
ttaagcattgtatgt

SEQ ID NO: 339227 - DNA, 15 bp, Homo sapiens
attaagcattgtatg

SEQ ID NO: 339228 - DNA, 15 bp, Homo sapiens
gattaagcattgtat

SEQ ID NO: 339229 - DNA, 15 bp, Homo sapiens
agattaagcattgta

SEQ ID NO: 339230 - DNA, 15 bp, Homo sapiens
gagattaagcattgt

SEQ ID NO: 339231 - DNA, 15 bp, Homo sapiens
agagattaagcattg

SEQ ID NO: 339232 - DNA, 15 bp, Homo sapiens
gagagattaagcatt

SEQ ID NO: 339233 - DNA, 15 bp, Homo sapiens
tgagagattaagcat

SEQ ID NO: 339234 - DNA, 15 bp, Homo sapiens
ttgagagattaagca

SEQ ID NO: 339235 - DNA, 15 bp, Homo sapiens
tttgagagattaagc

SEQ ID NO: 339236 - DNA, 15 bp, Homo sapiens
atttgagagattaag

SEQ ID NO: 339237 - DNA, 15 bp, Homo sapiens
catttgagagattaa

SEQ ID NO: 339238 - DNA, 15 bp, Homo sapiens
acatttgagagatta

SEQ ID NO: 339239 - DNA, 15 bp, Homo sapiens
tacatttgagagatt

SEQ ID NO: 339240 - DNA, 15 bp, Homo sapiens
ttacatttgagagat

SEQ ID NO: 339241 - DNA, 15 bp, Homo sapiens
tttacatttgagaga

SEQ ID NO: 339242 - DNA, 15 bp, Homo sapiens
atttacatttgagag

SEQ ID NO: 339243 - DNA, 15 bp, Homo sapiens
catttacatttgaga

SEQ ID NO: 339244 - DNA, 15 bp, Homo sapiens
acatttacatttgag

SEQ ID NO: 339245 - DNA, 15 bp, Homo sapiens
tacatttacatttga

SEQ ID NO: 339246 - DNA, 15 bp, Homo sapiens
gtacatttacatttg

SEQ ID NO: 339247 - DNA, 15 bp, Homo sapiens
agtacatttacattt

SEQ ID NO: 339248 - DNA, 15 bp, Homo sapiens
tagtacatttacatt

SEQ ID NO: 339249 - DNA, 15 bp, Homo sapiens
ctagtacatttacat

SEQ ID NO: 339250 - DNA, 15 bp, Homo sapiens
tctagtacatttaca

SEQ ID NO: 339251 - DNA, 15 bp, Homo sapiens
ttctagtacatttac

SEQ ID NO: 339252 - DNA, 15 bp, Homo sapiens
gttctagtacattta

SEQ ID NO: 339253 - DNA, 15 bp, Homo sapiens
tgttctagtacattt

SEQ ID NO: 339254 - DNA, 15 bp, Homo sapiens
ttgttctagtacatt

SEQ ID NO: 339255 - DNA, 15 bp, Homo sapiens
tttgttctagtacat

SEQ ID NO: 339256 - DNA, 15 bp, Homo sapiens
ctttgttctagtaca

SEQ ID NO: 339257 - DNA, 15 bp, Homo sapiens
gctttgttctagtac

SEQ ID NO: 339258 - DNA, 15 bp, Homo sapiens
tgctttgttctagta

SEQ ID NO: 339259 - DNA, 15 bp, Homo sapiens
atgctttgttctagt

SEQ ID NO: 339260 - DNA, 15 bp, Homo sapiens
aatgctttgttctag

SEQ ID NO: 339261 - DNA, 15 bp, Homo sapiens
gaatgctttgttcta

SEQ ID NO: 339262 - DNA, 15 bp, Homo sapiens
agaatgctttgttct

SEQ ID NO: 339263 - DNA, 15 bp, Homo sapiens
cagaatgctttgttc

SEQ ID NO: 339264 - DNA, 15 bp, Homo sapiens
ccagaatgctttgtt

SEQ ID NO: 339265 - DNA, 15 bp, Homo sapiens
cccagaatgctttgt

SEQ ID NO: 339266 - DNA, 15 bp, Homo sapiens
ccccagaatgctttg

SEQ ID NO: 339267 - DNA, 15 bp, Homo sapiens
tccccagaatgcttt

SEQ ID NO: 339268 - DNA, 15 bp, Homo sapiens
ttccccagaatgctt

SEQ ID NO: 339269 - DNA, 15 bp, Homo sapiens
cttccccagaatgct

SEQ ID NO: 339270 - DNA, 15 bp, Homo sapiens
tcttccccagaatgc

SEQ ID NO: 339271 - DNA, 15 bp, Homo sapiens
ttcttccccagaatg

SEQ ID NO: 339272 - DNA, 15 bp, Homo sapiens
tttcttccccagaat

SEQ ID NO: 339273 - DNA, 15 bp, Homo sapiens
ttttcttccccagaa

SEQ ID NO: 339274 - DNA, 15 bp, Homo sapiens
gttttcttccccaga

SEQ ID NO: 339275 - DNA, 15 bp, Homo sapiens
tgttttcttccccag

SEQ ID NO: 339276 - DNA, 15 bp, Homo sapiens
ctgttttcttcccca

SEQ ID NO: 339277 - DNA, 15 bp, Homo sapiens
actgttttcttcccc

SEQ ID NO: 339278 - DNA, 15 bp, Homo sapiens
cactgttttcttccc

SEQ ID NO: 339279 - DNA, 15 bp, Homo sapiens
ccactgttttcttcc

SEQ ID NO: 339280 - DNA, 15 bp, Homo sapiens
accactgttttcttc

SEQ ID NO: 339281 - DNA, 15 bp, Homo sapiens
aaccactgttttctt

SEQ ID NO: 339282 - DNA, 15 bp, Homo sapiens
caaccactgttttct

SEQ ID NO: 339283 - DNA, 15 bp, Homo sapiens
tcaaccactgttttc

SEQ ID NO: 339284 - DNA, 15 bp, Homo sapiens
atcaaccactgtttt

SEQ ID NO: 339285 - DNA, 15 bp, Homo sapiens
aatcaaccactgttt

SEQ ID NO: 339286 - DNA, 15 bp, Homo sapiens
aaatcaaccactgtt

SEQ ID NO: 339287 - DNA, 15 bp, Homo sapiens
taaatcaaccactgt

SEQ ID NO: 339288 - DNA, 15 bp, Homo sapiens
ttaaatcaaccactg

SEQ ID NO: 339289 - DNA, 15 bp, Homo sapiens
gttaaatcaaccact

SEQ ID NO: 339290 - DNA, 15 bp, Homo sapiens
agttaaatcaaccac

SEQ ID NO: 339291 - DNA, 15 bp, Homo sapiens
cagttaaatcaacca

SEQ ID NO: 339292 - DNA, 15 bp, Homo sapiens
tcagttaaatcaacc

SEQ ID NO: 339293 - DNA, 15 bp, Homo sapiens
ttcagttaaatcaac

SEQ ID NO: 339294 - DNA, 15 bp, Homo sapiens
gttcagttaaatcaa

SEQ ID NO: 339295 - DNA, 15 bp, Homo sapiens
agttcagttaaatca

SEQ ID NO: 339296 - DNA, 15 bp, Homo sapiens
gagttcagttaaatc

SEQ ID NO: 339297 - DNA, 15 bp, Homo sapiens
tgagttcagttaaat

SEQ ID NO: 339298 - DNA, 15 bp, Homo sapiens
gtgagttcagttaaa

SEQ ID NO: 339299 - DNA, 15 bp, Homo sapiens
agtgagttcagttaa

SEQ ID NO: 339300 - DNA, 15 bp, Homo sapiens
aagtgagttcagtta

SEQ ID NO: 339301 - DNA, 15 bp, Homo sapiens
aaagtgagttcagtt

SEQ ID NO: 339302 - DNA, 15 bp, Homo sapiens
aaaagtgagttcagt

SEQ ID NO: 339303 - DNA, 15 bp, Homo sapiens
gaaaagtgagttcag

SEQ ID NO: 339304 - DNA, 15 bp, Homo sapiens
ggaaaagtgagttca

SEQ ID NO: 339305 - DNA, 15 bp, Homo sapiens
tggaaaagtgagttc

SEQ ID NO: 339306 - DNA, 15 bp, Homo sapiens
ttggaaaagtgagtt

SEQ ID NO: 339307 - DNA, 15 bp, Homo sapiens
tttggaaaagtgagt

SEQ ID NO: 339308 - DNA, 15 bp, Homo sapiens
ttttggaaaagtgag

SEQ ID NO: 339309 - DNA, 15 bp, Homo sapiens
gttttggaaaagtga

SEQ ID NO: 339310 - DNA, 15 bp, Homo sapiens
tgttttggaaaagtg

SEQ ID NO: 339311 - DNA, 15 bp, Homo sapiens
ctgttttggaaaagt

SEQ ID NO: 339312 - DNA, 15 bp, Homo sapiens
actgttttggaaaag

SEQ ID NO: 339313 - DNA, 15 bp, Homo sapiens
cactgttttggaaaa

SEQ ID NO: 339314 - DNA, 15 bp, Homo sapiens
ccactgttttggaaa

SEQ ID NO: 339315 - DNA, 15 bp, Homo sapiens
gccactgttttggaa

SEQ ID NO: 339316 - DNA, 15 bp, Homo sapiens
agccactgttttgga

SEQ ID NO: 339317 - DNA, 15 bp, Homo sapiens
aagccactgttttgg

SEQ ID NO: 339318 - DNA, 15 bp, Homo sapiens
aaagccactgttttg

SEQ ID NO: 339319 - DNA, 15 bp, Homo sapiens
aaaagccactgtttt

SEQ ID NO: 339320 - DNA, 15 bp, Homo sapiens
caaaagccactgttt

SEQ ID NO: 339321 - DNA, 15 bp, Homo sapiens
tcaaaagccactgtt

SEQ ID NO: 339322 - DNA, 15 bp, Homo sapiens
atcaaaagccactgt

SEQ ID NO: 339323 - DNA, 15 bp, Homo sapiens
aatcaaaagccactg

SEQ ID NO: 339324 - DNA, 15 bp, Homo sapiens
aaatcaaaagccact

SEQ ID NO: 339325 - DNA, 15 bp, Homo sapiens
aaaatcaaaagccac

SEQ ID NO: 339326 - DNA, 15 bp, Homo sapiens
gaaaatcaaaagcca

SEQ ID NO: 339327 - DNA, 15 bp, Homo sapiens
agaaaatcaaaagcc

SEQ ID NO: 339328 - DNA, 15 bp, Homo sapiens
cagaaaatcaaaagc

SEQ ID NO: 339329 - DNA, 15 bp, Homo sapiens
acagaaaatcaaaag

SEQ ID NO: 339330 - DNA, 15 bp, Homo sapiens
tacagaaaatcaaaa

SEQ ID NO: 339331 - DNA, 15 bp, Homo sapiens
ttacagaaaatcaaa

SEQ ID NO: 339332 - DNA, 15 bp, Homo sapiens
tttacagaaaatcaa

SEQ ID NO: 339333 - DNA, 15 bp, Homo sapiens
gtttacagaaaatca

SEQ ID NO: 339334 - DNA, 15 bp, Homo sapiens
tgtttacagaaaatc

SEQ ID NO: 339335 - DNA, 15 bp, Homo sapiens
atgtttacagaaaat

SEQ ID NO: 339336 - DNA, 15 bp, Homo sapiens
aatgtttacagaaaa

SEQ ID NO: 339337 - DNA, 15 bp, Homo sapiens
caatgtttacagaaa

SEQ ID NO: 339338 - DNA, 15 bp, Homo sapiens
tcaatgtttacagaa

SEQ ID NO: 339339 - DNA, 15 bp, Homo sapiens
gtcaatgtttacaga

SEQ ID NO: 339340 - DNA, 15 bp, Homo sapiens
agtcaatgtttacag

SEQ ID NO: 339341 - DNA, 15 bp, Homo sapiens
aagtcaatgtttaca

SEQ ID NO: 339342 - DNA, 15 bp, Homo sapiens
aaagtcaatgtttac

SEQ ID NO: 339343 - DNA, 15 bp, Homo sapiens
taaagtcaatgttta

SEQ ID NO: 339344 - DNA, 15 bp, Homo sapiens
ataaagtcaatgttt

SEQ ID NO: 339345 - DNA, 15 bp, Homo sapiens
aataaagtcaatgtt

SEQ ID NO: 339346 - DNA, 15 bp, Homo sapiens
taataaagtcaatgt

SEQ ID NO: 339347 - DNA, 15 bp, Homo sapiens
ttaataaagtcaatg

SEQ ID NO: 339348 - DNA, 15 bp, Homo sapiens
cttaataaagtcaat

SEQ ID NO: 339349 - DNA, 15 bp, Homo sapiens
gcttaataaagtcaa

SEQ ID NO: 339350 - DNA, 15 bp, Homo sapiens
agcttaataaagtca

SEQ ID NO: 339351 - DNA, 15 bp, Homo sapiens
aagcttaataaagtc

SEQ ID NO: 339352 - DNA, 15 bp, Homo sapiens
aaagcttaataaagt

SEQ ID NO: 339353 - DNA, 15 bp, Homo sapiens
aaaagcttaataaag

SEQ ID NO: 339354 - DNA, 15 bp, Homo sapiens
gaaaagcttaataaa

SEQ ID NO: 339355 - DNA, 15 bp, Homo sapiens
ggaaaagcttaataa

SEQ ID NO: 339356 - DNA, 15 bp, Homo sapiens
gggaaaagcttaata

SEQ ID NO: 339357 - DNA, 15 bp, Homo sapiens
agggaaaagcttaat

SEQ ID NO: 339358 - DNA, 15 bp, Homo sapiens
aagggaaaagcttaa

SEQ ID NO: 339359 - DNA, 15 bp, Homo sapiens
caagggaaaagctta

SEQ ID NO: 339360 - DNA, 15 bp, Homo sapiens
gcaagggaaaagctt

SEQ ID NO: 339361 - DNA, 15 bp, Homo sapiens
agcaagggaaaagct

SEQ ID NO: 339362 - DNA, 15 bp, Homo sapiens
tagcaagggaaaagc

SEQ ID NO: 339363 - DNA, 15 bp, Homo sapiens
gtagcaagggaaaag

SEQ ID NO: 339364 - DNA, 15 bp, Homo sapiens
agtagcaagggaaaa

SEQ ID NO: 339365 - DNA, 15 bp, Homo sapiens
tagtagcaagggaaa

SEQ ID NO: 339366 - DNA, 15 bp, Homo sapiens
atagtagcaagggaa

SEQ ID NO: 339367 - DNA, 15 bp, Homo sapiens
tatagtagcaaggga

SEQ ID NO: 339368 - DNA, 15 bp, Homo sapiens
atatagtagcaaggg

SEQ ID NO: 339369 - DNA, 15 bp, Homo sapiens
catatagtagcaagg

SEQ ID NO: 339370 - DNA, 15 bp, Homo sapiens
gcatatagtagcaag

SEQ ID NO: 339371 - DNA, 15 bp, Homo sapiens
tgcatatagtagcaa

SEQ ID NO: 339372 - DNA, 15 bp, Homo sapiens
gtgcatatagtagca

SEQ ID NO: 339373 - DNA, 15 bp, Homo sapiens
agtgcatatagtagc

SEQ ID NO: 339374 - DNA, 15 bp, Homo sapiens
gagtgcatatagtag

SEQ ID NO: 339375 - DNA, 15 bp, Homo sapiens
agagtgcatatagta

SEQ ID NO: 339376 - DNA, 15 bp, Homo sapiens
gagagtgcatatagt

SEQ ID NO: 339377 - DNA, 15 bp, Homo sapiens
agagagtgcatatag

SEQ ID NO: 339378 - DNA, 15 bp, Homo sapiens
tagagagtgcatata

SEQ ID NO: 339379 - DNA, 15 bp, Homo sapiens
atagagagtgcatat

SEQ ID NO: 339380 - DNA, 15 bp, Homo sapiens
aatagagagtgcata

SEQ ID NO: 339381 - DNA, 15 bp, Homo sapiens
aaatagagagtgcat

SEQ ID NO: 339382 - DNA, 15 bp, Homo sapiens
gaaatagagagtgca

SEQ ID NO: 339383 - DNA, 15 bp, Homo sapiens
agaaatagagagtgc

SEQ ID NO: 339384 - DNA, 15 bp, Homo sapiens
aagaaatagagagtg

SEQ ID NO: 339385 - DNA, 15 bp, Homo sapiens
taagaaatagagagt

SEQ ID NO: 339386 - DNA, 15 bp, Homo sapiens
ttaagaaatagagag

SEQ ID NO: 339387 - DNA, 15 bp, Homo sapiens
tttaagaaatagaga

SEQ ID NO: 339388 - DNA, 15 bp, Homo sapiens
atttaagaaatagag

SEQ ID NO: 339389 - DNA, 15 bp, Homo sapiens
aatttaagaaataga

SEQ ID NO: 339390 - DNA, 15 bp, Homo sapiens
caatttaagaaatag

SEQ ID NO: 339391 - DNA, 15 bp, Homo sapiens
gcaatttaagaaata

SEQ ID NO: 339392 - DNA, 15 bp, Homo sapiens
tgcaatttaagaaat

SEQ ID NO: 339393 - DNA, 15 bp, Homo sapiens
ttgcaatttaagaaa

SEQ ID NO: 339394 - DNA, 15 bp, Homo sapiens
tttgcaatttaagaa

SEQ ID NO: 339395 - DNA, 15 bp, Homo sapiens
ctttgcaatttaaga

SEQ ID NO: 339396 - DNA, 15 bp, Homo sapiens
tctttgcaatttaag

SEQ ID NO: 339397 - DNA, 15 bp, Homo sapiens
ctctttgcaatttaa

SEQ ID NO: 339398 - DNA, 15 bp, Homo sapiens
actctttgcaattta

SEQ ID NO: 339399 - DNA, 15 bp, Homo sapiens
aactctttgcaattt

SEQ ID NO: 339400 - DNA, 15 bp, Homo sapiens
taactctttgcaatt

SEQ ID NO: 339401 - DNA, 15 bp, Homo sapiens
ataactctttgcaat

SEQ ID NO: 339402 - DNA, 15 bp, Homo sapiens
aataactctttgcaa

SEQ ID NO: 339403 - DNA, 15 bp, Homo sapiens
gaataactctttgca

SEQ ID NO: 339404 - DNA, 15 bp, Homo sapiens
tgaataactctttgc

SEQ ID NO: 339405 - DNA, 15 bp, Homo sapiens
atgaataactctttg

SEQ ID NO: 339406 - DNA, 15 bp, Homo sapiens
catgaataactcttt

SEQ ID NO: 339407 - DNA, 15 bp, Homo sapiens
tcatgaataactctt

SEQ ID NO: 339408 - DNA, 15 bp, Homo sapiens
ttcatgaataactct

SEQ ID NO: 339409 - DNA, 15 bp, Homo sapiens
tttcatgaataactc

SEQ ID NO: 339410 - DNA, 15 bp, Homo sapiens
atttcatgaataact

SEQ ID NO: 339411 - DNA, 15 bp, Homo sapiens
aatttcatgaataac

SEQ ID NO: 339412 - DNA, 15 bp, Homo sapiens
aaatttcatgaataa

SEQ ID NO: 339413 - DNA, 15 bp, Homo sapiens
caaatttcatgaata

SEQ ID NO: 339414 - DNA, 15 bp, Homo sapiens
acaaatttcatgaat

SEQ ID NO: 339415 - DNA, 15 bp, Homo sapiens
cacaaatttcatgaa

SEQ ID NO: 339416 - DNA, 15 bp, Homo sapiens
tcacaaatttcatga

SEQ ID NO: 339417 - DNA, 15 bp, Homo sapiens
atcacaaatttcatg

SEQ ID NO: 339418 - DNA, 15 bp, Homo sapiens
tatcacaaatttcat

SEQ ID NO: 339419 - DNA, 15 bp, Homo sapiens
ttatcacaaatttca

SEQ ID NO: 339420 - DNA, 15 bp, Homo sapiens
tttatcacaaatttc

SEQ ID NO: 339421 - DNA, 15 bp, Homo sapiens
atttatcacaaattt

SEQ ID NO: 339422 - DNA, 15 bp, Homo sapiens
tatttatcacaaatt

SEQ ID NO: 339423 - DNA, 15 bp, Homo sapiens
atatttatcacaaat

SEQ ID NO: 339424 - DNA, 15 bp, Homo sapiens
aatatttatcacaaa

SEQ ID NO: 339425 - DNA, 15 bp, Homo sapiens
aaatatttatcacaa

SEQ ID NO: 339426 - DNA, 15 bp, Homo sapiens
caaatatttatcaca

SEQ ID NO: 339427 - DNA, 15 bp, Homo sapiens
tcaaatatttatcac

SEQ ID NO: 339428 - DNA, 15 bp, Homo sapiens
ttcaaatatttatca

SEQ ID NO: 339429 - DNA, 15 bp, Homo sapiens
attcaaatatttatc

SEQ ID NO: 339430 - DNA, 15 bp, Homo sapiens
gattcaaatatttat

SEQ ID NO: 339431 - DNA, 15 bp, Homo sapiens
agattcaaatattta

SEQ ID NO: 339432 - DNA, 15 bp, Homo sapiens
tagattcaaatattt

SEQ ID NO: 339433 - DNA, 15 bp, Homo sapiens
ttagattcaaatatt

SEQ ID NO: 339434 - DNA, 15 bp, Homo sapiens
cttagattcaaatat

SEQ ID NO: 339435 - DNA, 15 bp, Homo sapiens
ccttagattcaaata

SEQ ID NO: 339436 - DNA, 15 bp, Homo sapiens
gccttagattcaaat

SEQ ID NO: 339437 - DNA, 15 bp, Homo sapiens
tgccttagattcaaa

SEQ ID NO: 339438 - DNA, 15 bp, Homo sapiens
ttgccttagattcaa

SEQ ID NO: 339439 - DNA, 15 bp, Homo sapiens
gttgccttagattca

SEQ ID NO: 339440 - DNA, 15 bp, Homo sapiens
cgttgccttagattc

SEQ ID NO: 339441 - DNA, 15 bp, Homo sapiens
acgttgccttagatt

SEQ ID NO: 339442 - DNA, 15 bp, Homo sapiens
aacgttgccttagat

SEQ ID NO: 339443 - DNA, 15 bp, Homo sapiens
aaacgttgccttaga

SEQ ID NO: 339444 - DNA, 15 bp, Homo sapiens
aaaacgttgccttag

SEQ ID NO: 339445 - DNA, 15 bp, Homo sapiens
aaaaacgttgcctta

SEQ ID NO: 339446 - DNA, 15 bp, Homo sapiens
caaaaacgttgcctt

SEQ ID NO: 339447 - DNA, 15 bp, Homo sapiens
ccaaaaacgttgcct

SEQ ID NO: 339448 - DNA, 15 bp, Homo sapiens
tccaaaaacgttgcc

SEQ ID NO: 339449 - DNA, 15 bp, Homo sapiens
atccaaaaacgttgc

SEQ ID NO: 339450 - DNA, 15 bp, Homo sapiens
aatccaaaaacgttg

SEQ ID NO: 339451 - DNA, 15 bp, Homo sapiens
gaatccaaaaacgtt

SEQ ID NO: 339452 - DNA, 15 bp, Homo sapiens
agaatccaaaaacgt

SEQ ID NO: 339453 - DNA, 15 bp, Homo sapiens
aagaatccaaaaacg

SEQ ID NO: 339454 - DNA, 15 bp, Homo sapiens
aaagaatccaaaaac

SEQ ID NO: 339455 - DNA, 15 bp, Homo sapiens
taaagaatccaaaaa

SEQ ID NO: 339456 - DNA, 15 bp, Homo sapiens
ataaagaatccaaaa

SEQ ID NO: 339457 - DNA, 15 bp, Homo sapiens
tataaagaatccaaa

SEQ ID NO: 339458 - DNA, 15 bp, Homo sapiens
gtataaagaatccaa

SEQ ID NO: 339459 - DNA, 15 bp, Homo sapiens
cgtataaagaatcca

SEQ ID NO: 339460 - DNA, 15 bp, Homo sapiens
tcgtataaagaatcc

SEQ ID NO: 339461 - DNA, 15 bp, Homo sapiens
ctcgtataaagaatc

SEQ ID NO: 339462 - DNA, 15 bp, Homo sapiens
cctcgtataaagaat

SEQ ID NO: 339463 - DNA, 15 bp, Homo sapiens
acctcgtataaagaa

SEQ ID NO: 339464 - DNA, 15 bp, Homo sapiens
aacctcgtataaaga

SEQ ID NO: 339465 - DNA, 15 bp, Homo sapiens
aaacctcgtataaag

SEQ ID NO: 339466 - DNA, 15 bp, Homo sapiens
aaaacctcgtataaa

SEQ ID NO: 339467 - DNA, 15 bp, Homo sapiens
aaaaacctcgtataa

SEQ ID NO: 339468 - DNA, 15 bp, Homo sapiens
taaaaacctcgtata

SEQ ID NO: 339469 - DNA, 15 bp, Homo sapiens
ctaaaaacctcgtat

SEQ ID NO: 339470 - DNA, 15 bp, Homo sapiens
gctaaaaacctcgta

SEQ ID NO: 339471 - DNA, 15 bp, Homo sapiens
tgctaaaaacctcgt

SEQ ID NO: 339472 - DNA, 15 bp, Homo sapiens
ctgctaaaaacctcg

SEQ ID NO: 339473 - DNA, 15 bp, Homo sapiens
gctgctaaaaacctc

SEQ ID NO: 339474 - DNA, 15 bp, Homo sapiens
tgctgctaaaaacct

SEQ ID NO: 339475 - DNA, 15 bp, Homo sapiens
atgctgctaaaaacc

SEQ ID NO: 339476 - DNA, 15 bp, Homo sapiens
catgctgctaaaaac

SEQ ID NO: 339477 - DNA, 15 bp, Homo sapiens
acatgctgctaaaaa

SEQ ID NO: 339478 - DNA, 15 bp, Homo sapiens
cacatgctgctaaaa

SEQ ID NO: 339479 - DNA, 15 bp, Homo sapiens
acacatgctgctaaa

SEQ ID NO: 339480 - DNA, 15 bp, Homo sapiens
tacacatgctgctaa

SEQ ID NO: 339481 - DNA, 15 bp, Homo sapiens
gtacacatgctgcta

SEQ ID NO: 339482 - DNA, 15 bp, Homo sapiens
tgtacacatgctgct

SEQ ID NO: 339483 - DNA, 15 bp, Homo sapiens
atgtacacatgctgc

SEQ ID NO: 339484 - DNA, 15 bp, Homo sapiens
catgtacacatgctg

SEQ ID NO: 339485 - DNA, 15 bp, Homo sapiens
acatgtacacatgct

SEQ ID NO: 339486 - DNA, 15 bp, Homo sapiens
tacatgtacacatgc

SEQ ID NO: 339487 - DNA, 15 bp, Homo sapiens
atacatgtacacatg

SEQ ID NO: 339488 - DNA, 15 bp, Homo sapiens
catacatgtacacat

SEQ ID NO: 339489 - DNA, 15 bp, Homo sapiens
acatacatgtacaca

SEQ ID NO: 339490 - DNA, 15 bp, Homo sapiens
cacatacatgtacac

SEQ ID NO: 339491 - DNA, 15 bp, Homo sapiens
tcacatacatgtaca

SEQ ID NO: 339492 - DNA, 15 bp, Homo sapiens
atcacatacatgtac

SEQ ID NO: 339493 - DNA, 15 bp, Homo sapiens
tatcacatacatgta

SEQ ID NO: 339494 - DNA, 15 bp, Homo sapiens
ctatcacatacatgt

SEQ ID NO: 339495 - DNA, 15 bp, Homo sapiens
gctatcacatacatg

SEQ ID NO: 339496 - DNA, 15 bp, Homo sapiens
agctatcacatacat

SEQ ID NO: 339497 - DNA, 15 bp, Homo sapiens
cagctatcacataca

SEQ ID NO: 339498 - DNA, 15 bp, Homo sapiens
acagctatcacatac

SEQ ID NO: 339499 - DNA, 15 bp, Homo sapiens
aacagctatcacata

SEQ ID NO: 339500 - DNA, 15 bp, Homo sapiens
taacagctatcacat

SEQ ID NO: 339501 - DNA, 15 bp, Homo sapiens
ttaacagctatcaca

SEQ ID NO: 339502 - DNA, 15 bp, Homo sapiens
gttaacagctatcac

SEQ ID NO: 339503 - DNA, 15 bp, Homo sapiens
cgttaacagctatca

SEQ ID NO: 339504 - DNA, 15 bp, Homo sapiens
ccgttaacagctatc

SEQ ID NO: 339505 - DNA, 15 bp, Homo sapiens
tccgttaacagctat

SEQ ID NO: 339506 - DNA, 15 bp, Homo sapiens
ttccgttaacagcta

SEQ ID NO: 339507 - DNA, 15 bp, Homo sapiens
attccgttaacagct

SEQ ID NO: 339508 - DNA, 15 bp, Homo sapiens
aattccgttaacagc

SEQ ID NO: 339509 - DNA, 15 bp, Homo sapiens
gaattccgttaacag

SEQ ID NO: 339510 - DNA, 15 bp, Homo sapiens
tgaattccgttaaca

SEQ ID NO: 339511 - DNA, 15 bp, Homo sapiens
gtgaattccgttaac

SEQ ID NO: 339512 - DNA, 15 bp, Homo sapiens
agtgaattccgttaa

SEQ ID NO: 339513 - DNA, 15 bp, Homo sapiens
aagtgaattccgtta

SEQ ID NO: 339514 - DNA, 15 bp, Homo sapiens
taagtgaattccgtt

SEQ ID NO: 339515 - DNA, 15 bp, Homo sapiens
ttaagtgaattccgt

SEQ ID NO: 339516 - DNA, 15 bp, Homo sapiens
cttaagtgaattccg

SEQ ID NO: 339517 - DNA, 15 bp, Homo sapiens
acttaagtgaattcc

SEQ ID NO: 339518 - DNA, 15 bp, Homo sapiens
aacttaagtgaattc

SEQ ID NO: 339519 - DNA, 15 bp, Homo sapiens
aaacttaagtgaatt

SEQ ID NO: 339520 - DNA, 15 bp, Homo sapiens
aaaacttaagtgaat

SEQ ID NO: 339521 - DNA, 15 bp, Homo sapiens
taaaacttaagtgaa

SEQ ID NO: 339522 - DNA, 15 bp, Homo sapiens
gtaaaacttaagtga

SEQ ID NO: 339523 - DNA, 15 bp, Homo sapiens
agtaaaacttaagtg

SEQ ID NO: 339524 - DNA, 15 bp, Homo sapiens
aagtaaaacttaagt

SEQ ID NO: 339525 - DNA, 15 bp, Homo sapiens
taagtaaaacttaag

SEQ ID NO: 339526 - DNA, 15 bp, Homo sapiens
ctaagtaaaacttaa

SEQ ID NO: 339527 - DNA, 15 bp, Homo sapiens
tctaagtaaaactta

SEQ ID NO: 339528 - DNA, 15 bp, Homo sapiens
ttctaagtaaaactt

SEQ ID NO: 339529 - DNA, 15 bp, Homo sapiens
cttctaagtaaaact

SEQ ID NO: 339530 - DNA, 15 bp, Homo sapiens
gcttctaagtaaaac

SEQ ID NO: 339531 - DNA, 15 bp, Homo sapiens
ggcttctaagtaaaa

SEQ ID NO: 339532 - DNA, 15 bp, Homo sapiens
aggcttctaagtaaa

SEQ ID NO: 339533 - DNA, 15 bp, Homo sapiens
caggcttctaagtaa

SEQ ID NO: 339534 - DNA, 15 bp, Homo sapiens
ccaggcttctaagta

SEQ ID NO: 339535 - DNA, 15 bp, Homo sapiens
cccaggcttctaagt

SEQ ID NO: 339536 - DNA, 15 bp, Homo sapiens
acccaggcttctaag

SEQ ID NO: 339537 - DNA, 15 bp, Homo sapiens
tacccaggcttctaa

SEQ ID NO: 339538 - DNA, 15 bp, Homo sapiens
ctacccaggcttcta

SEQ ID NO: 339539 - DNA, 15 bp, Homo sapiens
actacccaggcttct

SEQ ID NO: 339540 - DNA, 15 bp, Homo sapiens
tactacccaggcttc

SEQ ID NO: 339541 - DNA, 15 bp, Homo sapiens
ctactacccaggctt

SEQ ID NO: 339542 - DNA, 15 bp, Homo sapiens
tctactacccaggct

SEQ ID NO: 339543 - DNA, 15 bp, Homo sapiens
ttctactacccaggc

SEQ ID NO: 339544 - DNA, 15 bp, Homo sapiens
gttctactacccagg

SEQ ID NO: 339545 - DNA, 15 bp, Homo sapiens
ggttctactacccag

SEQ ID NO: 339546 - DNA, 15 bp, Homo sapiens
aggttctactaccca

SEQ ID NO: 339547 - DNA, 15 bp, Homo sapiens
taggttctactaccc

SEQ ID NO: 339548 - DNA, 15 bp, Homo sapiens
ctaggttctactacc

SEQ ID NO: 339549 - DNA, 15 bp, Homo sapiens
tctaggttctactac

SEQ ID NO: 339550 - DNA, 15 bp, Homo sapiens
ttctaggttctacta

SEQ ID NO: 339551 - DNA, 15 bp, Homo sapiens
cttctaggttctact

SEQ ID NO: 339552 - DNA, 15 bp, Homo sapiens
acttctaggttctac

SEQ ID NO: 339553 - DNA, 15 bp, Homo sapiens
aacttctaggttcta

SEQ ID NO: 339554 - DNA, 15 bp, Homo sapiens
caacttctaggttct

SEQ ID NO: 339555 - DNA, 15 bp, Homo sapiens
gcaacttctaggttc

SEQ ID NO: 339556 - DNA, 15 bp, Homo sapiens
tgcaacttctaggtt

SEQ ID NO: 339557 - DNA, 15 bp, Homo sapiens
ctgcaacttctaggt

SEQ ID NO: 339558 - DNA, 15 bp, Homo sapiens
actgcaacttctagg

SEQ ID NO: 339559 - DNA, 15 bp, Homo sapiens
cactgcaacttctag

SEQ ID NO: 339560 - DNA, 15 bp, Homo sapiens
ccactgcaacttcta

SEQ ID NO: 339561 - DNA, 15 bp, Homo sapiens
cccactgcaacttct

SEQ ID NO: 339562 - DNA, 15 bp, Homo sapiens
tcccactgcaacttc

SEQ ID NO: 339563 - DNA, 15 bp, Homo sapiens
ttcccactgcaactt

SEQ ID NO: 339564 - DNA, 15 bp, Homo sapiens
attcccactgcaact

SEQ ID NO: 339565 - DNA, 15 bp, Homo sapiens
aattcccactgcaac

SEQ ID NO: 339566 - DNA, 15 bp, Homo sapiens
aaattcccactgcaa

SEQ ID NO: 339567 - DNA, 15 bp, Homo sapiens
aaaattcccactgca

SEQ ID NO: 339568 - DNA, 15 bp, Homo sapiens
aaaaattcccactgc

SEQ ID NO: 339569 - DNA, 15 bp, Homo sapiens
aaaaaattcccactg

SEQ ID NO: 339570 - DNA, 15 bp, Homo sapiens
aaaaaaattcccact

SEQ ID NO: 339571 - DNA, 15 bp, Homo sapiens
aaaaaaaattcccac

SEQ ID NO: 339572 - DNA, 15 bp, Homo sapiens
aaaaaaaaattccca

SEQ ID NO: 339573 - DNA, 15 bp, Homo sapiens
taaaaaaaaattccc

SEQ ID NO: 339574 - DNA, 15 bp, Homo sapiens
ttaaaaaaaaattcc

SEQ ID NO: 339575 - DNA, 15 bp, Homo sapiens
attaaaaaaaaattc

SEQ ID NO: 339576 - DNA, 15 bp, Homo sapiens
aattaaaaaaaaatt

SEQ ID NO: 339577 - DNA, 15 bp, Homo sapiens
aaattaaaaaaaaat

SEQ ID NO: 339578 - DNA, 15 bp, Homo sapiens
caaattaaaaaaaaa

SEQ ID NO: 339579 - DNA, 15 bp, Homo sapiens
tcaaattaaaaaaaa

SEQ ID NO: 339580 - DNA, 15 bp, Homo sapiens
ttcaaattaaaaaaa

SEQ ID NO: 339581 - DNA, 15 bp, Homo sapiens
tttcaaattaaaaaa

SEQ ID NO: 339582 - DNA, 15 bp, Homo sapiens
ctttcaaattaaaaa

SEQ ID NO: 339583 - DNA, 15 bp, Homo sapiens
tctttcaaattaaaa

SEQ ID NO: 339584 - DNA, 15 bp, Homo sapiens
atctttcaaattaaa

SEQ ID NO: 339585 - DNA, 15 bp, Homo sapiens
aatctttcaaattaa

SEQ ID NO: 339586 - DNA, 15 bp, Homo sapiens
taatctttcaaatta

SEQ ID NO: 339587 - DNA, 15 bp, Homo sapiens
ttaatctttcaaatt

SEQ ID NO: 339588 - DNA, 15 bp, Homo sapiens
tttaatctttcaaat

SEQ ID NO: 339589 - DNA, 15 bp, Homo sapiens
atttaatctttcaaa

SEQ ID NO: 339590 - DNA, 15 bp, Homo sapiens
tatttaatctttcaa

SEQ ID NO: 339591 - DNA, 15 bp, Homo sapiens
ctatttaatctttca

SEQ ID NO: 339592 - DNA, 15 bp, Homo sapiens
cctatttaatctttc

SEQ ID NO: 339593 - DNA, 15 bp, Homo sapiens
acctatttaatcttt

SEQ ID NO: 339594 - DNA, 15 bp, Homo sapiens
tacctatttaatctt

SEQ ID NO: 339595 - DNA, 15 bp, Homo sapiens
ttacctatttaatct

SEQ ID NO: 339596 - DNA, 15 bp, Homo sapiens
tttacctatttaatc

SEQ ID NO: 339597 - DNA, 15 bp, Homo sapiens
ttttacctatttaat

SEQ ID NO: 339598 - DNA, 15 bp, Homo sapiens
tttttacctatttaa

SEQ ID NO: 339599 - DNA, 15 bp, Homo sapiens
ctttttacctattta

SEQ ID NO: 339600 - DNA, 15 bp, Homo sapiens
actttttacctattt

SEQ ID NO: 339601 - DNA, 15 bp, Homo sapiens
gactttttacctatt

SEQ ID NO: 339602 - DNA, 15 bp, Homo sapiens
tgactttttacctat

SEQ ID NO: 339603 - DNA, 15 bp, Homo sapiens
atgactttttaccta

SEQ ID NO: 339604 - DNA, 15 bp, Homo sapiens
gatgactttttacct

SEQ ID NO: 339605 - DNA, 15 bp, Homo sapiens
agatgactttttacc

SEQ ID NO: 339606 - DNA, 15 bp, Homo sapiens
aagatgactttttac

SEQ ID NO: 339607 - DNA, 15 bp, Homo sapiens
aaagatgacttttta

SEQ ID NO: 339608 - DNA, 15 bp, Homo sapiens
taaagatgacttttt

SEQ ID NO: 339609 - DNA, 15 bp, Homo sapiens
ttaaagatgactttt

SEQ ID NO: 339610 - DNA, 15 bp, Homo sapiens
attaaagatgacttt

SEQ ID NO: 339611 - DNA, 15 bp, Homo sapiens
gattaaagatgactt

SEQ ID NO: 339612 - DNA, 15 bp, Homo sapiens
agattaaagatgact

SEQ ID NO: 339613 - DNA, 15 bp, Homo sapiens
gagattaaagatgac

SEQ ID NO: 339614 - DNA, 15 bp, Homo sapiens
agagattaaagatga

SEQ ID NO: 339615 - DNA, 15 bp, Homo sapiens
tagagattaaagatg

SEQ ID NO: 339616 - DNA, 15 bp, Homo sapiens
atagagattaaagat

SEQ ID NO: 339617 - DNA, 15 bp, Homo sapiens
aatagagattaaaga

SEQ ID NO: 339618 - DNA, 15 bp, Homo sapiens
taatagagattaaag

SEQ ID NO: 339619 - DNA, 15 bp, Homo sapiens
ttaatagagattaaa

SEQ ID NO: 339620 - DNA, 15 bp, Homo sapiens
tttaatagagattaa

SEQ ID NO: 339621 - DNA, 15 bp, Homo sapiens
gtttaatagagatta

SEQ ID NO: 339622 - DNA, 15 bp, Homo sapiens
agtttaatagagatt

SEQ ID NO: 339623 - DNA, 15 bp, Homo sapiens
aagtttaatagagat

SEQ ID NO: 339624 - DNA, 15 bp, Homo sapiens
aaagtttaatagaga

SEQ ID NO: 339625 - DNA, 15 bp, Homo sapiens
aaaagtttaatagag

SEQ ID NO: 339626 - DNA, 15 bp, Homo sapiens
aaaaagtttaataga

SEQ ID NO: 339627 - DNA, 15 bp, Homo sapiens
aaaaaagtttaatag

SEQ ID NO: 339628 - DNA, 15 bp, Homo sapiens
caaaaaagtttaata

SEQ ID NO: 339629 - DNA, 15 bp, Homo sapiens
acaaaaaagtttaat

SEQ ID NO: 339630 - DNA, 15 bp, Homo sapiens
tacaaaaaagtttaa

SEQ ID NO: 339631 - DNA, 15 bp, Homo sapiens
atacaaaaaagttta

SEQ ID NO: 339632 - DNA, 15 bp, Homo sapiens
tatacaaaaaagttt

SEQ ID NO: 339633 - DNA, 15 bp, Homo sapiens
ttatacaaaaaagtt

SEQ ID NO: 339634 - DNA, 15 bp, Homo sapiens
attatacaaaaaagt

SEQ ID NO: 339635 - DNA, 15 bp, Homo sapiens
cattatacaaaaaag

SEQ ID NO: 339636 - DNA, 15 bp, Homo sapiens
acattatacaaaaaa

SEQ ID NO: 339637 - DNA, 15 bp, Homo sapiens
gacattatacaaaaa

SEQ ID NO: 339638 - DNA, 15 bp, Homo sapiens
tgacattatacaaaa

SEQ ID NO: 339639 - DNA, 15 bp, Homo sapiens
ctgacattatacaaa

SEQ ID NO: 339640 - DNA, 15 bp, Homo sapiens
tctgacattatacaa

SEQ ID NO: 339641 - DNA, 15 bp, Homo sapiens
ttctgacattataca

SEQ ID NO: 339642 - DNA, 15 bp, Homo sapiens
cttctgacattatac

SEQ ID NO: 339643 - DNA, 15 bp, Homo sapiens
acttctgacattata

SEQ ID NO: 339644 - DNA, 15 bp, Homo sapiens
cacttctgacattat

SEQ ID NO: 339645 - DNA, 15 bp, Homo sapiens
tcacttctgacatta

SEQ ID NO: 339646 - DNA, 15 bp, Homo sapiens
ttcacttctgacatt

SEQ ID NO: 339647 - DNA, 15 bp, Homo sapiens
tttcacttctgacat

SEQ ID NO: 339648 - DNA, 15 bp, Homo sapiens
ctttcacttctgaca

SEQ ID NO: 339649 - DNA, 15 bp, Homo sapiens
actttcacttctgac

SEQ ID NO: 339650 - DNA, 15 bp, Homo sapiens
aactttcacttctga

SEQ ID NO: 339651 - DNA, 15 bp, Homo sapiens
gaactttcacttctg

SEQ ID NO: 339652 - DNA, 15 bp, Homo sapiens
ggaactttcacttct

SEQ ID NO: 339653 - DNA, 15 bp, Homo sapiens
gggaactttcacttc

SEQ ID NO: 339654 - DNA, 15 bp, Homo sapiens
ggggaactttcactt

SEQ ID NO: 339655 - DNA, 15 bp, Homo sapiens
tggggaactttcact

SEQ ID NO: 339656 - DNA, 15 bp, Homo sapiens
gtggggaactttcac

SEQ ID NO: 339657 - DNA, 15 bp, Homo sapiens
tgtggggaactttca

SEQ ID NO: 339658 - DNA, 15 bp, Homo sapiens
atgtggggaactttc

SEQ ID NO: 339659 - DNA, 15 bp, Homo sapiens
gatgtggggaacttt

SEQ ID NO: 339660 - DNA, 15 bp, Homo sapiens
agatgtggggaactt

SEQ ID NO: 339661 - DNA, 15 bp, Homo sapiens
cagatgtggggaact

SEQ ID NO: 339662 - DNA, 15 bp, Homo sapiens
gcagatgtggggaac

SEQ ID NO: 339663 - DNA, 15 bp, Homo sapiens
agcagatgtggggaa

SEQ ID NO: 339664 - DNA, 15 bp, Homo sapiens
aagcagatgtgggga

SEQ ID NO: 339665 - DNA, 15 bp, Homo sapiens
taagcagatgtgggg

SEQ ID NO: 339666 - DNA, 15 bp, Homo sapiens
gtaagcagatgtggg

SEQ ID NO: 339667 - DNA, 15 bp, Homo sapiens
tgtaagcagatgtgg

SEQ ID NO: 339668 - DNA, 15 bp, Homo sapiens
ctgtaagcagatgtg

SEQ ID NO: 339669 - DNA, 15 bp, Homo sapiens
gctgtaagcagatgt

SEQ ID NO: 339670 - DNA, 15 bp, Homo sapiens
ggctgtaagcagatg

SEQ ID NO: 339671 - DNA, 15 bp, Homo sapiens
aggctgtaagcagat

SEQ ID NO: 339672 - DNA, 15 bp, Homo sapiens
caggctgtaagcaga

SEQ ID NO: 339673 - DNA, 15 bp, Homo sapiens
acaggctgtaagcag

SEQ ID NO: 339674 - DNA, 15 bp, Homo sapiens
aacaggctgtaagca

SEQ ID NO: 339675 - DNA, 15 bp, Homo sapiens
aaacaggctgtaagc

SEQ ID NO: 339676 - DNA, 15 bp, Homo sapiens
caaacaggctgtaag

SEQ ID NO: 339677 - DNA, 15 bp, Homo sapiens
acaaacaggctgtaa

SEQ ID NO: 339678 - DNA, 15 bp, Homo sapiens
tacaaacaggctgta

SEQ ID NO: 339679 - DNA, 15 bp, Homo sapiens
atacaaacaggctgt

SEQ ID NO: 339680 - DNA, 15 bp, Homo sapiens
gatacaaacaggctg

SEQ ID NO: 339681 - DNA, 15 bp, Homo sapiens
ggatacaaacaggct

SEQ ID NO: 339682 - DNA, 15 bp, Homo sapiens
aggatacaaacaggc

SEQ ID NO: 339683 - DNA, 15 bp, Homo sapiens
aaggatacaaacagg

SEQ ID NO: 339684 - DNA, 15 bp, Homo sapiens
gaaggatacaaacag

SEQ ID NO: 339685 - DNA, 15 bp, Homo sapiens
ggaaggatacaaaca

SEQ ID NO: 339686 - DNA, 15 bp, Homo sapiens
aggaaggatacaaac

SEQ ID NO: 339687 - DNA, 15 bp, Homo sapiens
caggaaggatacaaa

SEQ ID NO: 339688 - DNA, 15 bp, Homo sapiens
tcaggaaggatacaa

SEQ ID NO: 339689 - DNA, 15 bp, Homo sapiens
gtcaggaaggataca

SEQ ID NO: 339690 - DNA, 15 bp, Homo sapiens
agtcaggaaggatac

SEQ ID NO: 339691 - DNA, 15 bp, Homo sapiens
aagtcaggaaggata

SEQ ID NO: 339692 - DNA, 15 bp, Homo sapiens
caagtcaggaaggat

SEQ ID NO: 339693 - DNA, 15 bp, Homo sapiens
tcaagtcaggaagga

SEQ ID NO: 339694 - DNA, 15 bp, Homo sapiens
atcaagtcaggaagg

SEQ ID NO: 339695 - DNA, 15 bp, Homo sapiens
aatcaagtcaggaag

SEQ ID NO: 339696 - DNA, 15 bp, Homo sapiens
caatcaagtcaggaa

SEQ ID NO: 339697 - DNA, 15 bp, Homo sapiens
tcaatcaagtcagga

SEQ ID NO: 339698 - DNA, 15 bp, Homo sapiens
atcaatcaagtcagg

SEQ ID NO: 339699 - DNA, 15 bp, Homo sapiens
aatcaatcaagtcag

SEQ ID NO: 339700 - DNA, 15 bp, Homo sapiens
taatcaatcaagtca

SEQ ID NO: 339701 - DNA, 15 bp, Homo sapiens
ttaatcaatcaagtc

SEQ ID NO: 339702 - DNA, 15 bp, Homo sapiens
tttaatcaatcaagt

SEQ ID NO: 339703 - DNA, 15 bp, Homo sapiens
atttaatcaatcaag

SEQ ID NO: 339704 - DNA, 15 bp, Homo sapiens
catttaatcaatcaa

SEQ ID NO: 339705 - DNA, 15 bp, Homo sapiens
ccatttaatcaatca

SEQ ID NO: 339706 - DNA, 15 bp, Homo sapiens
tccatttaatcaatc

SEQ ID NO: 339707 - DNA, 15 bp, Homo sapiens
gtccatttaatcaat

SEQ ID NO: 339708 - DNA, 15 bp, Homo sapiens
tgtccatttaatcaa

SEQ ID NO: 339709 - DNA, 15 bp, Homo sapiens
atgtccatttaatca

SEQ ID NO: 339710 - DNA, 15 bp, Homo sapiens
gatgtccatttaatc

SEQ ID NO: 339711 - DNA, 15 bp, Homo sapiens
agatgtccatttaat

SEQ ID NO: 339712 - DNA, 15 bp, Homo sapiens
gagatgtccatttaa

SEQ ID NO: 339713 - DNA, 15 bp, Homo sapiens
agagatgtccattta

SEQ ID NO: 339714 - DNA, 15 bp, Homo sapiens
tagagatgtccattt

SEQ ID NO: 339715 - DNA, 15 bp, Homo sapiens
atagagatgtccatt

SEQ ID NO: 339716 - DNA, 15 bp, Homo sapiens
tatagagatgtccat

SEQ ID NO: 339717 - DNA, 15 bp, Homo sapiens
atatagagatgtcca

SEQ ID NO: 339718 - DNA, 15 bp, Homo sapiens
tatatagagatgtcc

SEQ ID NO: 339719 - DNA, 15 bp, Homo sapiens
gtatatagagatgtc

SEQ ID NO: 339720 - DNA, 15 bp, Homo sapiens
tgtatatagagatgt

SEQ ID NO: 339721 - DNA, 15 bp, Homo sapiens
atgtatatagagatg

SEQ ID NO: 339722 - DNA, 15 bp, Homo sapiens
tatgtatatagagat

SEQ ID NO: 339723 - DNA, 15 bp, Homo sapiens
atatgtatatagaga

SEQ ID NO: 339724 - DNA, 15 bp, Homo sapiens
catatgtatatagag

SEQ ID NO: 339725 - DNA, 15 bp, Homo sapiens
gcatatgtatataga

SEQ ID NO: 339726 - DNA, 15 bp, Homo sapiens
tgcatatgtatatag

SEQ ID NO: 339727 - DNA, 15 bp, Homo sapiens
atgcatatgtatata

SEQ ID NO: 339728 - DNA, 15 bp, Homo sapiens
tatgcatatgtatat

SEQ ID NO: 339729 - DNA, 15 bp, Homo sapiens
atatgcatatgtata

SEQ ID NO: 339730 - DNA, 15 bp, Homo sapiens
tatatgcatatgtat

SEQ ID NO: 339731 - DNA, 15 bp, Homo sapiens
ttatatgcatatgta

SEQ ID NO: 339732 - DNA, 15 bp, Homo sapiens
attatatgcatatgt

SEQ ID NO: 339733 - DNA, 15 bp, Homo sapiens
aattatatgcatatg

SEQ ID NO: 339734 - DNA, 15 bp, Homo sapiens
aaattatatgcatat

SEQ ID NO: 339735 - DNA, 15 bp, Homo sapiens
gaaattatatgcata

SEQ ID NO: 339736 - DNA, 15 bp, Homo sapiens
tgaaattatatgcat

SEQ ID NO: 339737 - DNA, 15 bp, Homo sapiens
ttgaaattatatgca

SEQ ID NO: 339738 - DNA, 15 bp, Homo sapiens
attgaaattatatgc

SEQ ID NO: 339739 - DNA, 15 bp, Homo sapiens
aattgaaattatatg

SEQ ID NO: 339740 - DNA, 15 bp, Homo sapiens
aaattgaaattatat

SEQ ID NO: 339741 - DNA, 15 bp, Homo sapiens
aaaattgaaattata

SEQ ID NO: 339742 - DNA, 15 bp, Homo sapiens
aaaaattgaaattat

SEQ ID NO: 339743 - DNA, 15 bp, Homo sapiens
caaaaattgaaatta

SEQ ID NO: 339744 - DNA, 15 bp, Homo sapiens
gcaaaaattgaaatt

SEQ ID NO: 339745 - DNA, 15 bp, Homo sapiens
agcaaaaattgaaat

SEQ ID NO: 339746 - DNA, 15 bp, Homo sapiens
aagcaaaaattgaaa

SEQ ID NO: 339747 - DNA, 15 bp, Homo sapiens
taagcaaaaattgaa

SEQ ID NO: 339748 - DNA, 15 bp, Homo sapiens
ctaagcaaaaattga

SEQ ID NO: 339749 - DNA, 15 bp, Homo sapiens
actaagcaaaaattg

SEQ ID NO: 339750 - DNA, 15 bp, Homo sapiens
tactaagcaaaaatt

SEQ ID NO: 339751 - DNA, 15 bp, Homo sapiens
ttactaagcaaaaat

SEQ ID NO: 339752 - DNA, 15 bp, Homo sapiens
gttactaagcaaaaa

SEQ ID NO: 339753 - DNA, 15 bp, Homo sapiens
tgttactaagcaaaa

SEQ ID NO: 339754 - DNA, 15 bp, Homo sapiens
ttgttactaagcaaa

SEQ ID NO: 339755 - DNA, 15 bp, Homo sapiens
tttgttactaagcaa

SEQ ID NO: 339756 - DNA, 15 bp, Homo sapiens
ttttgttactaagca

SEQ ID NO: 339757 - DNA, 15 bp, Homo sapiens
tttttgttactaagc

SEQ ID NO: 339758 - DNA, 15 bp, Homo sapiens
gtttttgttactaag

SEQ ID NO: 339759 - DNA, 15 bp, Homo sapiens
tgtttttgttactaa

SEQ ID NO: 339760 - DNA, 15 bp, Homo sapiens
ttgtttttgttacta

SEQ ID NO: 339761 - DNA, 15 bp, Homo sapiens
tttgtttttgttact

SEQ ID NO: 339762 - DNA, 15 bp, Homo sapiens
ttttgtttttgttac

SEQ ID NO: 339763 - DNA, 15 bp, Homo sapiens
cttttgtttttgtta

SEQ ID NO: 339764 - DNA, 15 bp, Homo sapiens
acttttgtttttgtt

SEQ ID NO: 339765 - DNA, 15 bp, Homo sapiens
aacttttgtttttgt

SEQ ID NO: 339766 - DNA, 15 bp, Homo sapiens
taacttttgtttttg

SEQ ID NO: 339767 - DNA, 15 bp, Homo sapiens
gtaacttttgttttt

SEQ ID NO: 339768 - DNA, 15 bp, Homo sapiens
tgtaacttttgtttt

SEQ ID NO: 339769 - DNA, 15 bp, Homo sapiens
gtgtaacttttgttt

SEQ ID NO: 339770 - DNA, 15 bp, Homo sapiens
tgtgtaacttttgtt

SEQ ID NO: 339771 - DNA, 15 bp, Homo sapiens
atgtgtaacttttgt

SEQ ID NO: 339772 - DNA, 15 bp, Homo sapiens
tatgtgtaacttttg

SEQ ID NO: 339773 - DNA, 15 bp, Homo sapiens
gtatgtgtaactttt

SEQ ID NO: 339774 - DNA, 15 bp, Homo sapiens
agtatgtgtaacttt

SEQ ID NO: 339775 - DNA, 15 bp, Homo sapiens
cagtatgtgtaactt

SEQ ID NO: 339776 - DNA, 15 bp, Homo sapiens
ccagtatgtgtaact

SEQ ID NO: 339777 - DNA, 15 bp, Homo sapiens
accagtatgtgtaac

SEQ ID NO: 339778 - DNA, 15 bp, Homo sapiens
caccagtatgtgtaa

SEQ ID NO: 339779 - DNA, 15 bp, Homo sapiens
tcaccagtatgtgta

SEQ ID NO: 339780 - DNA, 15 bp, Homo sapiens
gtcaccagtatgtgt

SEQ ID NO: 339781 - DNA, 15 bp, Homo sapiens
agtcaccagtatgtg

SEQ ID NO: 339782 - DNA, 15 bp, Homo sapiens
tagtcaccagtatgt

SEQ ID NO: 339783 - DNA, 15 bp, Homo sapiens
ttagtcaccagtatg

SEQ ID NO: 339784 - DNA, 15 bp, Homo sapiens
attagtcaccagtat

SEQ ID NO: 339785 - DNA, 15 bp, Homo sapiens
aattagtcaccagta

SEQ ID NO: 339786 - DNA, 15 bp, Homo sapiens
aaattagtcaccagt

SEQ ID NO: 339787 - DNA, 15 bp, Homo sapiens
caaattagtcaccag

SEQ ID NO: 339788 - DNA, 15 bp, Homo sapiens
gcaaattagtcacca

SEQ ID NO: 339789 - DNA, 15 bp, Homo sapiens
agcaaattagtcacc

SEQ ID NO: 339790 - DNA, 15 bp, Homo sapiens
aagcaaattagtcac

SEQ ID NO: 339791 - DNA, 15 bp, Homo sapiens
aaagcaaattagtca

SEQ ID NO: 339792 - DNA, 15 bp, Homo sapiens
aaaagcaaattagtc

SEQ ID NO: 339793 - DNA, 15 bp, Homo sapiens
aaaaagcaaattagt

SEQ ID NO: 339794 - DNA, 15 bp, Homo sapiens
aaaaaagcaaattag

SEQ ID NO: 339795 - DNA, 15 bp, Homo sapiens
gaaaaaagcaaatta

SEQ ID NO: 339796 - DNA, 15 bp, Homo sapiens
tgaaaaaagcaaatt

SEQ ID NO: 339797 - DNA, 15 bp, Homo sapiens
gtgaaaaaagcaaat

SEQ ID NO: 339798 - DNA, 15 bp, Homo sapiens
cgtgaaaaaagcaaa

SEQ ID NO: 339799 - DNA, 15 bp, Homo sapiens
acgtgaaaaaagcaa

SEQ ID NO: 339800 - DNA, 15 bp, Homo sapiens
tacgtgaaaaaagca

SEQ ID NO: 339801 - DNA, 15 bp, Homo sapiens
atacgtgaaaaaagc

SEQ ID NO: 339802 - DNA, 15 bp, Homo sapiens
catacgtgaaaaaag

SEQ ID NO: 339803 - DNA, 15 bp, Homo sapiens
acatacgtgaaaaaa

SEQ ID NO: 339804 - DNA, 15 bp, Homo sapiens
gacatacgtgaaaaa

SEQ ID NO: 339805 - DNA, 15 bp, Homo sapiens
tgacatacgtgaaaa

SEQ ID NO: 339806 - DNA, 15 bp, Homo sapiens
atgacatacgtgaaa

SEQ ID NO: 339807 - DNA, 15 bp, Homo sapiens
catgacatacgtgaa

SEQ ID NO: 339808 - DNA, 15 bp, Homo sapiens
tcatgacatacgtga

SEQ ID NO: 339809 - DNA, 15 bp, Homo sapiens
ttcatgacatacgtg

SEQ ID NO: 339810 - DNA, 15 bp, Homo sapiens
gttcatgacatacgt

SEQ ID NO: 339811 - DNA, 15 bp, Homo sapiens
ggttcatgacatacg

SEQ ID NO: 339812 - DNA, 15 bp, Homo sapiens
tggttcatgacatac

SEQ ID NO: 339813 - DNA, 15 bp, Homo sapiens
atggttcatgacata

SEQ ID NO: 339814 - DNA, 15 bp, Homo sapiens
aatggttcatgacat

SEQ ID NO: 339815 - DNA, 15 bp, Homo sapiens
aaatggttcatgaca

SEQ ID NO: 339816 - DNA, 15 bp, Homo sapiens
aaaatggttcatgac

SEQ ID NO: 339817 - DNA, 15 bp, Homo sapiens
gaaaatggttcatga

SEQ ID NO: 339818 - DNA, 15 bp, Homo sapiens
ggaaaatggttcatg

SEQ ID NO: 339819 - DNA, 15 bp, Homo sapiens
tggaaaatggttcat

SEQ ID NO: 339820 - DNA, 15 bp, Homo sapiens
ctggaaaatggttca

SEQ ID NO: 339821 - DNA, 15 bp, Homo sapiens
cctggaaaatggttc

SEQ ID NO: 339822 - DNA, 15 bp, Homo sapiens
ccctggaaaatggtt

SEQ ID NO: 339823 - DNA, 15 bp, Homo sapiens
gccctggaaaatggt

SEQ ID NO: 339824 - DNA, 15 bp, Homo sapiens
tgccctggaaaatgg

SEQ ID NO: 339825 - DNA, 15 bp, Homo sapiens
ctgccctggaaaatg

SEQ ID NO: 339826 - DNA, 15 bp, Homo sapiens
actgccctggaaaat

SEQ ID NO: 339827 - DNA, 15 bp, Homo sapiens
aactgccctggaaaa

SEQ ID NO: 339828 - DNA, 15 bp, Homo sapiens
gaactgccctggaaa

SEQ ID NO: 339829 - DNA, 15 bp, Homo sapiens
tgaactgccctggaa

SEQ ID NO: 339830 - DNA, 15 bp, Homo sapiens
atgaactgccctgga

SEQ ID NO: 339831 - DNA, 15 bp, Homo sapiens
gatgaactgccctgg

SEQ ID NO: 339832 - DNA, 15 bp, Homo sapiens
agatgaactgccctg

SEQ ID NO: 339833 - DNA, 15 bp, Homo sapiens
tagatgaactgccct

SEQ ID NO: 339834 - DNA, 15 bp, Homo sapiens
ctagatgaactgccc

SEQ ID NO: 339835 - DNA, 15 bp, Homo sapiens
tctagatgaactgcc

SEQ ID NO: 339836 - DNA, 15 bp, Homo sapiens
atctagatgaactgc

SEQ ID NO: 339837 - DNA, 15 bp, Homo sapiens
gatctagatgaactg

SEQ ID NO: 339838 - DNA, 15 bp, Homo sapiens
agatctagatgaact

SEQ ID NO: 339839 - DNA, 15 bp, Homo sapiens
gagatctagatgaac

SEQ ID NO: 339840 - DNA, 15 bp, Homo sapiens
ggagatctagatgaa

SEQ ID NO: 339841 - DNA, 15 bp, Homo sapiens
gggagatctagatga

SEQ ID NO: 339842 - DNA, 15 bp, Homo sapiens
agggagatctagatg

SEQ ID NO: 339843 - DNA, 15 bp, Homo sapiens
gagggagatctagat

SEQ ID NO: 339844 - DNA, 15 bp, Homo sapiens
tgagggagatctaga

SEQ ID NO: 339845 - DNA, 15 bp, Homo sapiens
ttgagggagatctag

SEQ ID NO: 339846 - DNA, 15 bp, Homo sapiens
attgagggagatcta

SEQ ID NO: 339847 - DNA, 15 bp, Homo sapiens
aattgagggagatct

SEQ ID NO: 339848 - DNA, 15 bp, Homo sapiens
gaattgagggagatc

SEQ ID NO: 339849 - DNA, 15 bp, Homo sapiens
agaattgagggagat

SEQ ID NO: 339850 - DNA, 15 bp, Homo sapiens
aagaattgagggaga

SEQ ID NO: 339851 - DNA, 15 bp, Homo sapiens
aaagaattgagggag

SEQ ID NO: 339852 - DNA, 15 bp, Homo sapiens
aaaagaattgaggga

SEQ ID NO: 339853 - DNA, 15 bp, Homo sapiens
aaaaagaattgaggg

SEQ ID NO: 339854 - DNA, 15 bp, Homo sapiens
taaaaagaattgagg

SEQ ID NO: 339855 - DNA, 15 bp, Homo sapiens
ttaaaaagaattgag

SEQ ID NO: 339856 - DNA, 15 bp, Homo sapiens
attaaaaagaattga

SEQ ID NO: 339857 - DNA, 15 bp, Homo sapiens
cattaaaaagaattg

SEQ ID NO: 339858 - DNA, 15 bp, Homo sapiens
ccattaaaaagaatt

SEQ ID NO: 339859 - DNA, 15 bp, Homo sapiens
gccattaaaaagaat

SEQ ID NO: 339860 - DNA, 15 bp, Homo sapiens
agccattaaaaagaa

SEQ ID NO: 339861 - DNA, 15 bp, Homo sapiens
tagccattaaaaaga

SEQ ID NO: 339862 - DNA, 15 bp, Homo sapiens
gtagccattaaaaag

SEQ ID NO: 339863 - DNA, 15 bp, Homo sapiens
tgtagccattaaaaa

SEQ ID NO: 339864 - DNA, 15 bp, Homo sapiens
atgtagccattaaaa

SEQ ID NO: 339865 - DNA, 15 bp, Homo sapiens
tatgtagccattaaa

SEQ ID NO: 339866 - DNA, 15 bp, Homo sapiens
atatgtagccattaa

SEQ ID NO: 339867 - DNA, 15 bp, Homo sapiens
aatatgtagccatta

SEQ ID NO: 339868 - DNA, 15 bp, Homo sapiens
gaatatgtagccatt

SEQ ID NO: 339869 - DNA, 15 bp, Homo sapiens
ggaatatgtagccat

SEQ ID NO: 339870 - DNA, 15 bp, Homo sapiens
tggaatatgtagcca

SEQ ID NO: 339871 - DNA, 15 bp, Homo sapiens
gtggaatatgtagcc

SEQ ID NO: 339872 - DNA, 15 bp, Homo sapiens
agtggaatatgtagc

SEQ ID NO: 339873 - DNA, 15 bp, Homo sapiens
tagtggaatatgtag

SEQ ID NO: 339874 - DNA, 15 bp, Homo sapiens
atagtggaatatgta

SEQ ID NO: 339875 - DNA, 15 bp, Homo sapiens
aatagtggaatatgt

SEQ ID NO: 339876 - DNA, 15 bp, Homo sapiens
taatagtggaatatg

SEQ ID NO: 339877 - DNA, 15 bp, Homo sapiens
ataatagtggaatat

SEQ ID NO: 339878 - DNA, 15 bp, Homo sapiens
cataatagtggaata

SEQ ID NO: 339879 - DNA, 15 bp, Homo sapiens
ccataatagtggaat

SEQ ID NO: 339880 - DNA, 15 bp, Homo sapiens
tccataatagtggaa

SEQ ID NO: 339881 - DNA, 15 bp, Homo sapiens
atccataatagtgga

SEQ ID NO: 339882 - DNA, 15 bp, Homo sapiens
catccataatagtgg

SEQ ID NO: 339883 - DNA, 15 bp, Homo sapiens
acatccataatagtg

SEQ ID NO: 339884 - DNA, 15 bp, Homo sapiens
tacatccataatagt

SEQ ID NO: 339885 - DNA, 15 bp, Homo sapiens
gtacatccataatag

SEQ ID NO: 339886 - DNA, 15 bp, Homo sapiens
ggtacatccataata

SEQ ID NO: 339887 - DNA, 15 bp, Homo sapiens
tggtacatccataat

SEQ ID NO: 339888 - DNA, 15 bp, Homo sapiens
atggtacatccataa

SEQ ID NO: 339889 - DNA, 15 bp, Homo sapiens
tatggtacatccata

SEQ ID NO: 339890 - DNA, 15 bp, Homo sapiens
atatggtacatccat

SEQ ID NO: 339891 - DNA, 15 bp, Homo sapiens
aatatggtacatcca

SEQ ID NO: 339892 - DNA, 15 bp, Homo sapiens
aaatatggtacatcc

SEQ ID NO: 339893 - DNA, 15 bp, Homo sapiens
taaatatggtacatc

SEQ ID NO: 339894 - DNA, 15 bp, Homo sapiens
ataaatatggtacat

SEQ ID NO: 339895 - DNA, 15 bp, Homo sapiens
tataaatatggtaca

SEQ ID NO: 339896 - DNA, 15 bp, Homo sapiens
gtataaatatggtac

SEQ ID NO: 339897 - DNA, 15 bp, Homo sapiens
tgtataaatatggta

SEQ ID NO: 339898 - DNA, 15 bp, Homo sapiens
ttgtataaatatggt

SEQ ID NO: 339899 - DNA, 15 bp, Homo sapiens
gttgtataaatatgg

SEQ ID NO: 339900 - DNA, 15 bp, Homo sapiens
ggttgtataaatatg

SEQ ID NO: 339901 - DNA, 15 bp, Homo sapiens
cggttgtataaatat

SEQ ID NO: 339902 - DNA, 15 bp, Homo sapiens
ccggttgtataaata

SEQ ID NO: 339903 - DNA, 15 bp, Homo sapiens
accggttgtataaat

SEQ ID NO: 339904 - DNA, 15 bp, Homo sapiens
aaccggttgtataaa

SEQ ID NO: 339905 - DNA, 15 bp, Homo sapiens
gaaccggttgtataa

SEQ ID NO: 339906 - DNA, 15 bp, Homo sapiens
ggaaccggttgtata

SEQ ID NO: 339907 - DNA, 15 bp, Homo sapiens
gggaaccggttgtat

SEQ ID NO: 339908 - DNA, 15 bp, Homo sapiens
agggaaccggttgta

SEQ ID NO: 339909 - DNA, 15 bp, Homo sapiens
tagggaaccggttgt

SEQ ID NO: 339910 - DNA, 15 bp, Homo sapiens
atagggaaccggttg

SEQ ID NO: 339911 - DNA, 15 bp, Homo sapiens
aatagggaaccggtt

SEQ ID NO: 339912 - DNA, 15 bp, Homo sapiens
caatagggaaccggt

SEQ ID NO: 339913 - DNA, 15 bp, Homo sapiens
tcaatagggaaccgg

SEQ ID NO: 339914 - DNA, 15 bp, Homo sapiens
atcaatagggaaccg

SEQ ID NO: 339915 - DNA, 15 bp, Homo sapiens
catcaatagggaacc

SEQ ID NO: 339916 - DNA, 15 bp, Homo sapiens
ccatcaatagggaac

SEQ ID NO: 339917 - DNA, 15 bp, Homo sapiens
tccatcaatagggaa

SEQ ID NO: 339918 - DNA, 15 bp, Homo sapiens
gtccatcaataggga

SEQ ID NO: 339919 - DNA, 15 bp, Homo sapiens
tgtccatcaataggg

SEQ ID NO: 339920 - DNA, 15 bp, Homo sapiens
atgtccatcaatagg

SEQ ID NO: 339921 - DNA, 15 bp, Homo sapiens
tatgtccatcaatag

SEQ ID NO: 339922 - DNA, 15 bp, Homo sapiens
atatgtccatcaata

SEQ ID NO: 339923 - DNA, 15 bp, Homo sapiens
catatgtccatcaat

SEQ ID NO: 339924 - DNA, 15 bp, Homo sapiens
ccatatgtccatcaa

SEQ ID NO: 339925 - DNA, 15 bp, Homo sapiens
accatatgtccatca

SEQ ID NO: 339926 - DNA, 15 bp, Homo sapiens
aaccatatgtccatc

SEQ ID NO: 339927 - DNA, 15 bp, Homo sapiens
caaccatatgtccat

SEQ ID NO: 339928 - DNA, 15 bp, Homo sapiens
acaaccatatgtcca

SEQ ID NO: 339929 - DNA, 15 bp, Homo sapiens
cacaaccatatgtcc

SEQ ID NO: 339930 - DNA, 15 bp, Homo sapiens
acacaaccatatgtc

SEQ ID NO: 339931 - DNA, 15 bp, Homo sapiens
gacacaaccatatgt

SEQ ID NO: 339932 - DNA, 15 bp, Homo sapiens
agacacaaccatatg

SEQ ID NO: 339933 - DNA, 15 bp, Homo sapiens
tagacacaaccatat

SEQ ID NO: 339934 - DNA, 15 bp, Homo sapiens
ctagacacaaccata

SEQ ID NO: 339935 - DNA, 15 bp, Homo sapiens
actagacacaaccat

SEQ ID NO: 339936 - DNA, 15 bp, Homo sapiens
aactagacacaacca

SEQ ID NO: 339937 - DNA, 15 bp, Homo sapiens
aaactagacacaacc

SEQ ID NO: 339938 - DNA, 15 bp, Homo sapiens
aaaactagacacaac

SEQ ID NO: 339939 - DNA, 15 bp, Homo sapiens
aaaaactagacacaa

SEQ ID NO: 339940 - DNA, 15 bp, Homo sapiens
aaaaaactagacaca

SEQ ID NO: 339941 - DNA, 15 bp, Homo sapiens
caaaaaactagacac

SEQ ID NO: 339942 - DNA, 15 bp, Homo sapiens
gcaaaaaactagaca

SEQ ID NO: 339943 - DNA, 15 bp, Homo sapiens
agcaaaaaactagac

SEQ ID NO: 339944 - DNA, 15 bp, Homo sapiens
tagcaaaaaactaga

SEQ ID NO: 339945 - DNA, 15 bp, Homo sapiens
ctagcaaaaaactag

SEQ ID NO: 339946 - DNA, 15 bp, Homo sapiens
gctagcaaaaaacta

SEQ ID NO: 339947 - DNA, 15 bp, Homo sapiens
tgctagcaaaaaact

SEQ ID NO: 339948 - DNA, 15 bp, Homo sapiens
atgctagcaaaaaac

SEQ ID NO: 339949 - DNA, 15 bp, Homo sapiens
aatgctagcaaaaaa

SEQ ID NO: 339950 - DNA, 15 bp, Homo sapiens
caatgctagcaaaaa

SEQ ID NO: 339951 - DNA, 15 bp, Homo sapiens
acaatgctagcaaaa

SEQ ID NO: 339952 - DNA, 15 bp, Homo sapiens
cacaatgctagcaaa

SEQ ID NO: 339953 - DNA, 15 bp, Homo sapiens
tcacaatgctagcaa

SEQ ID NO: 339954 - DNA, 15 bp, Homo sapiens
atcacaatgctagca

SEQ ID NO: 339955 - DNA, 15 bp, Homo sapiens
tatcacaatgctagc

SEQ ID NO: 339956 - DNA, 15 bp, Homo sapiens
ctatcacaatgctag

SEQ ID NO: 339957 - DNA, 15 bp, Homo sapiens
tctatcacaatgcta

SEQ ID NO: 339958 - DNA, 15 bp, Homo sapiens
atctatcacaatgct

SEQ ID NO: 339959 - DNA, 15 bp, Homo sapiens
aatctatcacaatgc

SEQ ID NO: 339960 - DNA, 15 bp, Homo sapiens
taatctatcacaatg

SEQ ID NO: 339961 - DNA, 15 bp, Homo sapiens
ctaatctatcacaat

SEQ ID NO: 339962 - DNA, 15 bp, Homo sapiens
tctaatctatcacaa

SEQ ID NO: 339963 - DNA, 15 bp, Homo sapiens
ctctaatctatcaca

SEQ ID NO: 339964 - DNA, 15 bp, Homo sapiens
gctctaatctatcac

SEQ ID NO: 339965 - DNA, 15 bp, Homo sapiens
ggctctaatctatca

SEQ ID NO: 339966 - DNA, 15 bp, Homo sapiens
aggctctaatctatc

SEQ ID NO: 339967 - DNA, 15 bp, Homo sapiens
caggctctaatctat

SEQ ID NO: 339968 - DNA, 15 bp, Homo sapiens
acaggctctaatcta

SEQ ID NO: 339969 - DNA, 15 bp, Homo sapiens
tacaggctctaatct

SEQ ID NO: 339970 - DNA, 15 bp, Homo sapiens
ttacaggctctaatc

SEQ ID NO: 339971 - DNA, 15 bp, Homo sapiens
attacaggctctaat

SEQ ID NO: 339972 - DNA, 15 bp, Homo sapiens
cattacaggctctaa

SEQ ID NO: 339973 - DNA, 15 bp, Homo sapiens
tcattacaggctcta

SEQ ID NO: 339974 - DNA, 15 bp, Homo sapiens
ttcattacaggctct

SEQ ID NO: 339975 - DNA, 15 bp, Homo sapiens
attcattacaggctc

SEQ ID NO: 339976 - DNA, 15 bp, Homo sapiens
cattcattacaggct

SEQ ID NO: 339977 - DNA, 15 bp, Homo sapiens
ccattcattacaggc

SEQ ID NO: 339978 - DNA, 15 bp, Homo sapiens
accattcattacagg

SEQ ID NO: 339979 - DNA, 15 bp, Homo sapiens
taccattcattacag

SEQ ID NO: 339980 - DNA, 15 bp, Homo sapiens
ttaccattcattaca

SEQ ID NO: 339981 - DNA, 15 bp, Homo sapiens
cttaccattcattac

SEQ ID NO: 339982 - DNA, 15 bp, Homo sapiens
ccttaccattcatta

SEQ ID NO: 339983 - DNA, 15 bp, Homo sapiens
tccttaccattcatt

SEQ ID NO: 339984 - DNA, 15 bp, Homo sapiens
ttccttaccattcat

SEQ ID NO: 339985 - DNA, 15 bp, Homo sapiens
cttccttaccattca

SEQ ID NO: 339986 - DNA, 15 bp, Homo sapiens
acttccttaccattc

SEQ ID NO: 339987 - DNA, 15 bp, Homo sapiens
tacttccttaccatt

SEQ ID NO: 339988 - DNA, 15 bp, Homo sapiens
ttacttccttaccat

SEQ ID NO: 339989 - DNA, 15 bp, Homo sapiens
cttacttccttacca

SEQ ID NO: 339990 - DNA, 15 bp, Homo sapiens
acttacttccttacc

SEQ ID NO: 339991 - DNA, 15 bp, Homo sapiens
tacttacttccttac

SEQ ID NO: 339992 - DNA, 15 bp, Homo sapiens
ctacttacttcctta

SEQ ID NO: 339993 - DNA, 15 bp, Homo sapiens
tctacttacttcctt

SEQ ID NO: 339994 - DNA, 15 bp, Homo sapiens
atctacttacttcct

SEQ ID NO: 339995 - DNA, 15 bp, Homo sapiens
catctacttacttcc

SEQ ID NO: 339996 - DNA, 15 bp, Homo sapiens
tcatctacttacttc

SEQ ID NO: 339997 - DNA, 15 bp, Homo sapiens
atcatctacttactt

SEQ ID NO: 339998 - DNA, 15 bp, Homo sapiens
tatcatctacttact

SEQ ID NO: 339999 - DNA, 15 bp, Homo sapiens
ctatcatctacttac

SEQ ID NO: 340000 - DNA, 15 bp, Homo sapiens
gctatcatctactta

SEQ ID NO: 340001 - DNA, 15 bp, Homo sapiens
tgctatcatctactt

SEQ ID NO: 340002 - DNA, 15 bp, Homo sapiens
gtgctatcatctact

SEQ ID NO: 340003 - DNA, 15 bp, Homo sapiens
agtgctatcatctac

SEQ ID NO: 340004 - DNA, 15 bp, Homo sapiens
tagtgctatcatcta

SEQ ID NO: 340005 - DNA, 15 bp, Homo sapiens
gtagtgctatcatct

SEQ ID NO: 340006 - DNA, 15 bp, Homo sapiens
agtagtgctatcatc

SEQ ID NO: 340007 - DNA, 15 bp, Homo sapiens
tagtagtgctatcat

SEQ ID NO: 340008 - DNA, 15 bp, Homo sapiens
gtagtagtgctatca

SEQ ID NO: 340009 - DNA, 15 bp, Homo sapiens
agtagtagtgctatc

SEQ ID NO: 340010 - DNA, 15 bp, Homo sapiens
aagtagtagtgctat

SEQ ID NO: 340011 - DNA, 15 bp, Homo sapiens
aaagtagtagtgcta

SEQ ID NO: 340012 - DNA, 15 bp, Homo sapiens
caaagtagtagtgct

SEQ ID NO: 340013 - DNA, 15 bp, Homo sapiens
tcaaagtagtagtgc

SEQ ID NO: 340014 - DNA, 15 bp, Homo sapiens
ttcaaagtagtagtg

SEQ ID NO: 340015 - DNA, 15 bp, Homo sapiens
cttcaaagtagtagt

SEQ ID NO: 340016 - DNA, 15 bp, Homo sapiens
ccttcaaagtagtag

SEQ ID NO: 340017 - DNA, 15 bp, Homo sapiens
tccttcaaagtagta

SEQ ID NO: 340018 - DNA, 15 bp, Homo sapiens
ttccttcaaagtagt

SEQ ID NO: 340019 - DNA, 15 bp, Homo sapiens
tttccttcaaagtag

SEQ ID NO: 340020 - DNA, 15 bp, Homo sapiens
ttttccttcaaagta

SEQ ID NO: 340021 - DNA, 15 bp, Homo sapiens
tttttccttcaaagt

SEQ ID NO: 340022 - DNA, 15 bp, Homo sapiens
ctttttccttcaaag

SEQ ID NO: 340023 - DNA, 15 bp, Homo sapiens
actttttccttcaaa

SEQ ID NO: 340024 - DNA, 15 bp, Homo sapiens
tactttttccttcaa

SEQ ID NO: 340025 - DNA, 15 bp, Homo sapiens
ctactttttccttca

SEQ ID NO: 340026 - DNA, 15 bp, Homo sapiens
tctactttttccttc

SEQ ID NO: 340027 - DNA, 15 bp, Homo sapiens
ctctactttttcctt

SEQ ID NO: 340028 - DNA, 15 bp, Homo sapiens
tctctactttttcct

SEQ ID NO: 340029 - DNA, 15 bp, Homo sapiens
ttctctactttttcc

SEQ ID NO: 340030 - DNA, 15 bp, Homo sapiens
attctctactttttc

SEQ ID NO: 340031 - DNA, 15 bp, Homo sapiens
tattctctacttttt

SEQ ID NO: 340032 - DNA, 15 bp, Homo sapiens
ttattctctactttt

SEQ ID NO: 340033 - DNA, 15 bp, Homo sapiens
tttattctctacttt

SEQ ID NO: 340034 - DNA, 15 bp, Homo sapiens
gtttattctctactt

SEQ ID NO: 340035 - DNA, 15 bp, Homo sapiens
agtttattctctact

SEQ ID NO: 340036 - DNA, 15 bp, Homo sapiens
aagtttattctctac

SEQ ID NO: 340037 - DNA, 15 bp, Homo sapiens
gaagtttattctcta

SEQ ID NO: 340038 - DNA, 15 bp, Homo sapiens
ggaagtttattctct

SEQ ID NO: 340039 - DNA, 15 bp, Homo sapiens
aggaagtttattctc

SEQ ID NO: 340040 - DNA, 15 bp, Homo sapiens
aaggaagtttattct

SEQ ID NO: 340041 - DNA, 15 bp, Homo sapiens
aaaggaagtttattc

SEQ ID NO: 340042 - DNA, 15 bp, Homo sapiens
caaaggaagtttatt

SEQ ID NO: 340043 - DNA, 15 bp, Homo sapiens
gcaaaggaagtttat

SEQ ID NO: 340044 - DNA, 15 bp, Homo sapiens
ggcaaaggaagttta

SEQ ID NO: 340045 - DNA, 15 bp, Homo sapiens
tggcaaaggaagttt

SEQ ID NO: 340046 - DNA, 15 bp, Homo sapiens
atggcaaaggaagtt

SEQ ID NO: 340047 - DNA, 15 bp, Homo sapiens
tatggcaaaggaagt

SEQ ID NO: 340048 - DNA, 15 bp, Homo sapiens
ctatggcaaaggaag

SEQ ID NO: 340049 - DNA, 15 bp, Homo sapiens
actatggcaaaggaa

SEQ ID NO: 340050 - DNA, 15 bp, Homo sapiens
gactatggcaaagga

SEQ ID NO: 340051 - DNA, 15 bp, Homo sapiens
tgactatggcaaagg

SEQ ID NO: 340052 - DNA, 15 bp, Homo sapiens
gtgactatggcaaag

SEQ ID NO: 340053 - DNA, 15 bp, Homo sapiens
agtgactatggcaaa

SEQ ID NO: 340054 - DNA, 15 bp, Homo sapiens
aagtgactatggcaa

SEQ ID NO: 340055 - DNA, 15 bp, Homo sapiens
taagtgactatggca

SEQ ID NO: 340056 - DNA, 15 bp, Homo sapiens
gtaagtgactatggc

SEQ ID NO: 340057 - DNA, 15 bp, Homo sapiens
agtaagtgactatgg

SEQ ID NO: 340058 - DNA, 15 bp, Homo sapiens
tagtaagtgactatg

SEQ ID NO: 340059 - DNA, 15 bp, Homo sapiens
ttagtaagtgactat

SEQ ID NO: 340060 - DNA, 15 bp, Homo sapiens
tttagtaagtgacta

SEQ ID NO: 340061 - DNA, 15 bp, Homo sapiens
atttagtaagtgact

SEQ ID NO: 340062 - DNA, 15 bp, Homo sapiens
catttagtaagtgac

SEQ ID NO: 340063 - DNA, 15 bp, Homo sapiens
ccatttagtaagtga

SEQ ID NO: 340064 - DNA, 15 bp, Homo sapiens
tccatttagtaagtg

SEQ ID NO: 340065 - DNA, 15 bp, Homo sapiens
ttccatttagtaagt

SEQ ID NO: 340066 - DNA, 15 bp, Homo sapiens
attccatttagtaag

SEQ ID NO: 340067 - DNA, 15 bp, Homo sapiens
aattccatttagtaa

SEQ ID NO: 340068 - DNA, 15 bp, Homo sapiens
aaattccatttagta

SEQ ID NO: 340069 - DNA, 15 bp, Homo sapiens
taaattccatttagt

SEQ ID NO: 340070 - DNA, 15 bp, Homo sapiens
ttaaattccatttag

SEQ ID NO: 340071 - DNA, 15 bp, Homo sapiens
attaaattccattta

SEQ ID NO: 340072 - DNA, 15 bp, Homo sapiens
tattaaattccattt

SEQ ID NO: 340073 - DNA, 15 bp, Homo sapiens
ttattaaattccatt

SEQ ID NO: 340074 - DNA, 15 bp, Homo sapiens
tttattaaattccat

SEQ ID NO: 340075 - DNA, 15 bp, Homo sapiens
ttttattaaattcca

SEQ ID NO: 340076 - DNA, 15 bp, Homo sapiens
tttttattaaattcc

SEQ ID NO: 340077 - DNA, 15 bp, Homo sapiens
gtttttattaaattc

SEQ ID NO: 340078 - DNA, 15 bp, Homo sapiens
tgtttttattaaatt

SEQ ID NO: 340079 - DNA, 15 bp, Homo sapiens
gtgtttttattaaat

SEQ ID NO: 340080 - DNA, 15 bp, Homo sapiens
agtgtttttattaaa

SEQ ID NO: 340081 - DNA, 15 bp, Homo sapiens
cagtgtttttattaa

SEQ ID NO: 340082 - DNA, 15 bp, Homo sapiens
acagtgtttttatta

SEQ ID NO: 340083 - DNA, 15 bp, Homo sapiens
gacagtgtttttatt

SEQ ID NO: 340084 - DNA, 15 bp, Homo sapiens
tgacagtgtttttat

SEQ ID NO: 340085 - DNA, 15 bp, Homo sapiens
ttgacagtgttttta

SEQ ID NO: 340086 - DNA, 15 bp, Homo sapiens
tttgacagtgttttt

SEQ ID NO: 340087 - DNA, 15 bp, Homo sapiens
ttttgacagtgtttt

SEQ ID NO: 340088 - DNA, 15 bp, Homo sapiens
cttttgacagtgttt

SEQ ID NO: 340089 - DNA, 15 bp, Homo sapiens
acttttgacagtgtt

SEQ ID NO: 340090 - DNA, 15 bp, Homo sapiens
aacttttgacagtgt

SEQ ID NO: 340091 - DNA, 15 bp, Homo sapiens
caacttttgacagtg

SEQ ID NO: 340092 - DNA, 15 bp, Homo sapiens
ccaacttttgacagt

SEQ ID NO: 340093 - DNA, 15 bp, Homo sapiens
cccaacttttgacag

SEQ ID NO: 340094 - DNA, 15 bp, Homo sapiens
tcccaacttttgaca

SEQ ID NO: 340095 - DNA, 15 bp, Homo sapiens
ctcccaacttttgac

SEQ ID NO: 340096 - DNA, 15 bp, Homo sapiens
cctcccaacttttga

SEQ ID NO: 340097 - DNA, 15 bp, Homo sapiens
tcctcccaacttttg

SEQ ID NO: 340098 - DNA, 15 bp, Homo sapiens
gtcctcccaactttt

SEQ ID NO: 340099 - DNA, 15 bp, Homo sapiens
ggtcctcccaacttt

SEQ ID NO: 340100 - DNA, 15 bp, Homo sapiens
tggtcctcccaactt

SEQ ID NO: 340101 - DNA, 15 bp, Homo sapiens
ttggtcctcccaact

SEQ ID NO: 340102 - DNA, 15 bp, Homo sapiens
tttggtcctcccaac

SEQ ID NO: 340103 - DNA, 15 bp, Homo sapiens
ttttggtcctcccaa

SEQ ID NO: 340104 - DNA, 15 bp, Homo sapiens
attttggtcctccca

SEQ ID NO: 340105 - DNA, 15 bp, Homo sapiens
aattttggtcctccc

SEQ ID NO: 340106 - DNA, 15 bp, Homo sapiens
caattttggtcctcc

SEQ ID NO: 340107 - DNA, 15 bp, Homo sapiens
tcaattttggtcctc

SEQ ID NO: 340108 - DNA, 15 bp, Homo sapiens
atcaattttggtcct

SEQ ID NO: 340109 - DNA, 15 bp, Homo sapiens
tatcaattttggtcc

SEQ ID NO: 340110 - DNA, 15 bp, Homo sapiens
gtatcaattttggtc

SEQ ID NO: 340111 - DNA, 15 bp, Homo sapiens
agtatcaattttggt

SEQ ID NO: 340112 - DNA, 15 bp, Homo sapiens
aagtatcaattttgg

SEQ ID NO: 340113 - DNA, 15 bp, Homo sapiens
aaagtatcaattttg

SEQ ID NO: 340114 - DNA, 15 bp, Homo sapiens
aaaagtatcaatttt

SEQ ID NO: 340115 - DNA, 15 bp, Homo sapiens
aaaaagtatcaattt

SEQ ID NO: 340116 - DNA, 15 bp, Homo sapiens
gaaaaagtatcaatt

SEQ ID NO: 340117 - DNA, 15 bp, Homo sapiens
agaaaaagtatcaat

SEQ ID NO: 340118 - DNA, 15 bp, Homo sapiens
gagaaaaagtatcaa

SEQ ID NO: 340119 - DNA, 15 bp, Homo sapiens
agagaaaaagtatca

SEQ ID NO: 340120 - DNA, 15 bp, Homo sapiens
cagagaaaaagtatc

SEQ ID NO: 340121 - DNA, 15 bp, Homo sapiens
tcagagaaaaagtat

SEQ ID NO: 340122 - DNA, 15 bp, Homo sapiens
atcagagaaaaagta

SEQ ID NO: 340123 - DNA, 15 bp, Homo sapiens
gatcagagaaaaagt

SEQ ID NO: 340124 - DNA, 15 bp, Homo sapiens
agatcagagaaaaag

SEQ ID NO: 340125 - DNA, 15 bp, Homo sapiens
aagatcagagaaaaa

SEQ ID NO: 340126 - DNA, 15 bp, Homo sapiens
aaagatcagagaaaa

SEQ ID NO: 340127 - DNA, 15 bp, Homo sapiens
aaaagatcagagaaa

SEQ ID NO: 340128 - DNA, 15 bp, Homo sapiens
aaaaagatcagagaa

SEQ ID NO: 340129 - DNA, 15 bp, Homo sapiens
caaaaagatcagaga

SEQ ID NO: 340130 - DNA, 15 bp, Homo sapiens
gcaaaaagatcagag

SEQ ID NO: 340131 - DNA, 15 bp, Homo sapiens
ggcaaaaagatcaga

SEQ ID NO: 340132 - DNA, 15 bp, Homo sapiens
tggcaaaaagatcag

SEQ ID NO: 340133 - DNA, 15 bp, Homo sapiens
atggcaaaaagatca

SEQ ID NO: 340134 - DNA, 15 bp, Homo sapiens
catggcaaaaagatc

SEQ ID NO: 340135 - DNA, 15 bp, Homo sapiens
acatggcaaaaagat

SEQ ID NO: 340136 - DNA, 15 bp, Homo sapiens
cacatggcaaaaaga

SEQ ID NO: 340137 - DNA, 15 bp, Homo sapiens
acacatggcaaaaag

SEQ ID NO: 340138 - DNA, 15 bp, Homo sapiens
tacacatggcaaaaa

SEQ ID NO: 340139 - DNA, 15 bp, Homo sapiens
atacacatggcaaaa

SEQ ID NO: 340140 - DNA, 15 bp, Homo sapiens
tatacacatggcaaa

SEQ ID NO: 340141 - DNA, 15 bp, Homo sapiens
atatacacatggcaa

SEQ ID NO: 340142 - DNA, 15 bp, Homo sapiens
gatatacacatggca

SEQ ID NO: 340143 - DNA, 15 bp, Homo sapiens
agatatacacatggc

SEQ ID NO: 340144 - DNA, 15 bp, Homo sapiens
cagatatacacatgg

SEQ ID NO: 340145 - DNA, 15 bp, Homo sapiens
tcagatatacacatg

SEQ ID NO: 340146 - DNA, 15 bp, Homo sapiens
ttcagatatacacat

SEQ ID NO: 340147 - DNA, 15 bp, Homo sapiens
attcagatatacaca

SEQ ID NO: 340148 - DNA, 15 bp, Homo sapiens
aattcagatatacac

SEQ ID NO: 340149 - DNA, 15 bp, Homo sapiens
gaattcagatataca

SEQ ID NO: 340150 - DNA, 15 bp, Homo sapiens
agaattcagatatac

SEQ ID NO: 340151 - DNA, 15 bp, Homo sapiens
aagaattcagatata

SEQ ID NO: 340152 - DNA, 15 bp, Homo sapiens
aaagaattcagatat

SEQ ID NO: 340153 - DNA, 15 bp, Homo sapiens
caaagaattcagata

SEQ ID NO: 340154 - DNA, 15 bp, Homo sapiens
acaaagaattcagat

SEQ ID NO: 340155 - DNA, 15 bp, Homo sapiens
aacaaagaattcaga

SEQ ID NO: 340156 - DNA, 15 bp, Homo sapiens
aaacaaagaattcag

SEQ ID NO: 340157 - DNA, 15 bp, Homo sapiens
aaaacaaagaattca

SEQ ID NO: 340158 - DNA, 15 bp, Homo sapiens
aaaaacaaagaattc

SEQ ID NO: 340159 - DNA, 15 bp, Homo sapiens
taaaaacaaagaatt

SEQ ID NO: 340160 - DNA, 15 bp, Homo sapiens
ttaaaaacaaagaat

SEQ ID NO: 340161 - DNA, 15 bp, Homo sapiens
tttaaaaacaaagaa

SEQ ID NO: 340162 - DNA, 15 bp, Homo sapiens
ctttaaaaacaaaga

SEQ ID NO: 340163 - DNA, 15 bp, Homo sapiens
tctttaaaaacaaag

SEQ ID NO: 340164 - DNA, 15 bp, Homo sapiens
ttctttaaaaacaaa

SEQ ID NO: 340165 - DNA, 15 bp, Homo sapiens
cttctttaaaaacaa

SEQ ID NO: 340166 - DNA, 15 bp, Homo sapiens
tcttctttaaaaaca

SEQ ID NO: 340167 - DNA, 15 bp, Homo sapiens
ttcttctttaaaaac

SEQ ID NO: 340168 - DNA, 15 bp, Homo sapiens
tttcttctttaaaaa

SEQ ID NO: 340169 - DNA, 15 bp, Homo sapiens
gtttcttctttaaaa

SEQ ID NO: 340170 - DNA, 15 bp, Homo sapiens
tgtttcttctttaaa

SEQ ID NO: 340171 - DNA, 15 bp, Homo sapiens
ctgtttcttctttaa

SEQ ID NO: 340172 - DNA, 15 bp, Homo sapiens
gctgtttcttcttta

SEQ ID NO: 340173 - DNA, 15 bp, Homo sapiens
tgctgtttcttcttt

SEQ ID NO: 340174 - DNA, 15 bp, Homo sapiens
atgctgtttcttctt

SEQ ID NO: 340175 - DNA, 15 bp, Homo sapiens
aatgctgtttcttct

SEQ ID NO: 340176 - DNA, 15 bp, Homo sapiens
caatgctgtttcttc

SEQ ID NO: 340177 - DNA, 15 bp, Homo sapiens
tcaatgctgtttctt

SEQ ID NO: 340178 - DNA, 15 bp, Homo sapiens
ttcaatgctgtttct

SEQ ID NO: 340179 - DNA, 15 bp, Homo sapiens
cttcaatgctgtttc

SEQ ID NO: 340180 - DNA, 15 bp, Homo sapiens
gcttcaatgctgttt

SEQ ID NO: 340181 - DNA, 15 bp, Homo sapiens
tgcttcaatgctgtt

SEQ ID NO: 340182 - DNA, 15 bp, Homo sapiens
atgcttcaatgctgt

SEQ ID NO: 340183 - DNA, 15 bp, Homo sapiens
aatgcttcaatgctg

SEQ ID NO: 340184 - DNA, 15 bp, Homo sapiens
taatgcttcaatgct

SEQ ID NO: 340185 - DNA, 15 bp, Homo sapiens
ataatgcttcaatgc

SEQ ID NO: 340186 - DNA, 15 bp, Homo sapiens
aataatgcttcaatg

SEQ ID NO: 340187 - DNA, 15 bp, Homo sapiens
aaataatgcttcaat

SEQ ID NO: 340188 - DNA, 15 bp, Homo sapiens
caaataatgcttcaa

SEQ ID NO: 340189 - DNA, 15 bp, Homo sapiens
ccaaataatgcttca

SEQ ID NO: 340190 - DNA, 15 bp, Homo sapiens
cccaaataatgcttc

SEQ ID NO: 340191 - DNA, 15 bp, Homo sapiens
ccccaaataatgctt

SEQ ID NO: 340192 - DNA, 15 bp, Homo sapiens
cccccaaataatgct

SEQ ID NO: 340193 - DNA, 15 bp, Homo sapiens
ccccccaaataatgc

SEQ ID NO: 340194 - DNA, 15 bp, Homo sapiens
tccccccaaataatg

SEQ ID NO: 340195 - DNA, 15 bp, Homo sapiens
ttccccccaaataat

SEQ ID NO: 340196 - DNA, 15 bp, Homo sapiens
tttccccccaaataa

SEQ ID NO: 340197 - DNA, 15 bp, Homo sapiens
ttttccccccaaata

SEQ ID NO: 340198 - DNA, 15 bp, Homo sapiens
tttttccccccaaat

SEQ ID NO: 340199 - DNA, 15 bp, Homo sapiens
gtttttccccccaaa

SEQ ID NO: 340200 - DNA, 15 bp, Homo sapiens
tgtttttccccccaa

SEQ ID NO: 340201 - DNA, 15 bp, Homo sapiens
gtgtttttcccccca

SEQ ID NO: 340202 - DNA, 15 bp, Homo sapiens
tgtgtttttcccccc

SEQ ID NO: 340203 - DNA, 15 bp, Homo sapiens
gtgtgtttttccccc

SEQ ID NO: 340204 - DNA, 15 bp, Homo sapiens
tgtgtgtttttcccc

SEQ ID NO: 340205 - DNA, 15 bp, Homo sapiens
gtgtgtgtttttccc

SEQ ID NO: 340206 - DNA, 15 bp, Homo sapiens
tgtgtgtgtttttcc

SEQ ID NO: 340207 - DNA, 15 bp, Homo sapiens
gtgtgtgtgtttttc

SEQ ID NO: 340208 - DNA, 15 bp, Homo sapiens
tgtgtgtgtgttttt

SEQ ID NO: 340209 - DNA, 15 bp, Homo sapiens
ttgtgtgtgtgtttt

SEQ ID NO: 340210 - DNA, 15 bp, Homo sapiens
tttgtgtgtgtgttt

SEQ ID NO: 340211 - DNA, 15 bp, Homo sapiens
ttttgtgtgtgtgtt

SEQ ID NO: 340212 - DNA, 15 bp, Homo sapiens
attttgtgtgtgtgt

SEQ ID NO: 340213 - DNA, 15 bp, Homo sapiens
gattttgtgtgtgtg

SEQ ID NO: 340214 - DNA, 15 bp, Homo sapiens
ggattttgtgtgtgt

SEQ ID NO: 340215 - DNA, 15 bp, Homo sapiens
tggattttgtgtgtg

SEQ ID NO: 340216 - DNA, 15 bp, Homo sapiens
ctggattttgtgtgt

SEQ ID NO: 340217 - DNA, 15 bp, Homo sapiens
gctggattttgtgtg

SEQ ID NO: 340218 - DNA, 15 bp, Homo sapiens
tgctggattttgtgt

SEQ ID NO: 340219 - DNA, 15 bp, Homo sapiens
ttgctggattttgtg

SEQ ID NO: 340220 - DNA, 15 bp, Homo sapiens
gttgctggattttgt

SEQ ID NO: 340221 - DNA, 15 bp, Homo sapiens
agttgctggattttg

SEQ ID NO: 340222 - DNA, 15 bp, Homo sapiens
gagttgctggatttt

SEQ ID NO: 340223 - DNA, 15 bp, Homo sapiens
tgagttgctggattt

SEQ ID NO: 340224 - DNA, 15 bp, Homo sapiens
ctgagttgctggatt

SEQ ID NO: 340225 - DNA, 15 bp, Homo sapiens
gctgagttgctggat

SEQ ID NO: 340226 - DNA, 15 bp, Homo sapiens
tgctgagttgctgga

SEQ ID NO: 340227 - DNA, 15 bp, Homo sapiens
atgctgagttgctgg

SEQ ID NO: 340228 - DNA, 15 bp, Homo sapiens
aatgctgagttgctg

SEQ ID NO: 340229 - DNA, 15 bp, Homo sapiens
gaatgctgagttgct

SEQ ID NO: 340230 - DNA, 15 bp, Homo sapiens
tgaatgctgagttgc

SEQ ID NO: 340231 - DNA, 15 bp, Homo sapiens
atgaatgctgagttg

SEQ ID NO: 340232 - DNA, 15 bp, Homo sapiens
catgaatgctgagtt

SEQ ID NO: 340233 - DNA, 15 bp, Homo sapiens
tcatgaatgctgagt

SEQ ID NO: 340234 - DNA, 15 bp, Homo sapiens
ctcatgaatgctgag

SEQ ID NO: 340235 - DNA, 15 bp, Homo sapiens
gctcatgaatgctga

SEQ ID NO: 340236 - DNA, 15 bp, Homo sapiens
tgctcatgaatgctg

SEQ ID NO: 340237 - DNA, 15 bp, Homo sapiens
ttgctcatgaatgct

SEQ ID NO: 340238 - DNA, 15 bp, Homo sapiens
gttgctcatgaatgc

SEQ ID NO: 340239 - DNA, 15 bp, Homo sapiens
agttgctcatgaatg

SEQ ID NO: 340240 - DNA, 15 bp, Homo sapiens
gagttgctcatgaat

SEQ ID NO: 340241 - DNA, 15 bp, Homo sapiens
agagttgctcatgaa

SEQ ID NO: 340242 - DNA, 15 bp, Homo sapiens
tagagttgctcatga

SEQ ID NO: 340243 - DNA, 15 bp, Homo sapiens
atagagttgctcatg

SEQ ID NO: 340244 - DNA, 15 bp, Homo sapiens
tatagagttgctcat

SEQ ID NO: 340245 - DNA, 15 bp, Homo sapiens
gtatagagttgctca

SEQ ID NO: 340246 - DNA, 15 bp, Homo sapiens
agtatagagttgctc

SEQ ID NO: 340247 - DNA, 15 bp, Homo sapiens
tagtatagagttgct

SEQ ID NO: 340248 - DNA, 15 bp, Homo sapiens
atagtatagagttgc

SEQ ID NO: 340249 - DNA, 15 bp, Homo sapiens
tatagtatagagttg

SEQ ID NO: 340250 - DNA, 15 bp, Homo sapiens
gtatagtatagagtt

SEQ ID NO: 340251 - DNA, 15 bp, Homo sapiens
ggtatagtatagagt

SEQ ID NO: 340252 - DNA, 15 bp, Homo sapiens
tggtatagtatagag

SEQ ID NO: 340253 - DNA, 15 bp, Homo sapiens
ctggtatagtataga

SEQ ID NO: 340254 - DNA, 15 bp, Homo sapiens
actggtatagtatag

SEQ ID NO: 340255 - DNA, 15 bp, Homo sapiens
tactggtatagtata

SEQ ID NO: 340256 - DNA, 15 bp, Homo sapiens
atactggtatagtat

SEQ ID NO: 340257 - DNA, 15 bp, Homo sapiens
catactggtatagta

SEQ ID NO: 340258 - DNA, 15 bp, Homo sapiens
acatactggtatagt

SEQ ID NO: 340259 - DNA, 15 bp, Homo sapiens
cacatactggtatag

SEQ ID NO: 340260 - DNA, 15 bp, Homo sapiens
gcacatactggtata

SEQ ID NO: 340261 - DNA, 15 bp, Homo sapiens
ggcacatactggtat

SEQ ID NO: 340262 - DNA, 15 bp, Homo sapiens
aggcacatactggta

SEQ ID NO: 340263 - DNA, 15 bp, Homo sapiens
caggcacatactggt

SEQ ID NO: 340264 - DNA, 15 bp, Homo sapiens
acaggcacatactgg

SEQ ID NO: 340265 - DNA, 15 bp, Homo sapiens
cacaggcacatactg

SEQ ID NO: 340266 - DNA, 15 bp, Homo sapiens
gcacaggcacatact

SEQ ID NO: 340267 - DNA, 15 bp, Homo sapiens
tgcacaggcacatac

SEQ ID NO: 340268 - DNA, 15 bp, Homo sapiens
ctgcacaggcacata

SEQ ID NO: 340269 - DNA, 15 bp, Homo sapiens
actgcacaggcacat

SEQ ID NO: 340270 - DNA, 15 bp, Homo sapiens
cactgcacaggcaca

SEQ ID NO: 340271 - DNA, 15 bp, Homo sapiens
ccactgcacaggcac

SEQ ID NO: 340272 - DNA, 15 bp, Homo sapiens
tccactgcacaggca

SEQ ID NO: 340273 - DNA, 15 bp, Homo sapiens
ttccactgcacaggc

SEQ ID NO: 340274 - DNA, 15 bp, Homo sapiens
cttccactgcacagg

SEQ ID NO: 340275 - DNA, 15 bp, Homo sapiens
ccttccactgcacag

SEQ ID NO: 340276 - DNA, 15 bp, Homo sapiens
tccttccactgcaca

SEQ ID NO: 340277 - DNA, 15 bp, Homo sapiens
ttccttccactgcac

SEQ ID NO: 340278 - DNA, 15 bp, Homo sapiens
tttccttccactgca

SEQ ID NO: 340279 - DNA, 15 bp, Homo sapiens
ttttccttccactgc

SEQ ID NO: 340280 - DNA, 15 bp, Homo sapiens
gttttccttccactg

SEQ ID NO: 340281 - DNA, 15 bp, Homo sapiens
tgttttccttccact

SEQ ID NO: 340282 - DNA, 15 bp, Homo sapiens
ttgttttccttccac

SEQ ID NO: 340283 - DNA, 15 bp, Homo sapiens
attgttttccttcca

SEQ ID NO: 340284 - DNA, 15 bp, Homo sapiens
aattgttttccttcc

SEQ ID NO: 340285 - DNA, 15 bp, Homo sapiens
aaattgttttccttc

SEQ ID NO: 340286 - DNA, 15 bp, Homo sapiens
aaaattgttttcctt

SEQ ID NO: 340287 - DNA, 15 bp, Homo sapiens
caaaattgttttcct

SEQ ID NO: 340288 - DNA, 15 bp, Homo sapiens
ccaaaattgttttcc

SEQ ID NO: 340289 - DNA, 15 bp, Homo sapiens
accaaaattgttttc

SEQ ID NO: 340290 - DNA, 15 bp, Homo sapiens
taccaaaattgtttt

SEQ ID NO: 340291 - DNA, 15 bp, Homo sapiens
ttaccaaaattgttt

SEQ ID NO: 340292 - DNA, 15 bp, Homo sapiens
cttaccaaaattgtt

SEQ ID NO: 340293 - DNA, 15 bp, Homo sapiens
ccttaccaaaattgt

SEQ ID NO: 340294 - DNA, 15 bp, Homo sapiens
tccttaccaaaattg

SEQ ID NO: 340295 - DNA, 15 bp, Homo sapiens
atccttaccaaaatt

SEQ ID NO: 340296 - DNA, 15 bp, Homo sapiens
aatccttaccaaaat

SEQ ID NO: 340297 - DNA, 15 bp, Homo sapiens
taatccttaccaaaa

SEQ ID NO: 340298 - DNA, 15 bp, Homo sapiens
ttaatccttaccaaa

SEQ ID NO: 340299 - DNA, 15 bp, Homo sapiens
tttaatccttaccaa

SEQ ID NO: 340300 - DNA, 15 bp, Homo sapiens
ttttaatccttacca

SEQ ID NO: 340301 - DNA, 15 bp, Homo sapiens
gttttaatccttacc

SEQ ID NO: 340302 - DNA, 15 bp, Homo sapiens
agttttaatccttac

SEQ ID NO: 340303 - DNA, 15 bp, Homo sapiens
aagttttaatcctta

SEQ ID NO: 340304 - DNA, 15 bp, Homo sapiens
aaagttttaatcctt

SEQ ID NO: 340305 - DNA, 15 bp, Homo sapiens
taaagttttaatcct

SEQ ID NO: 340306 - DNA, 15 bp, Homo sapiens
ctaaagttttaatcc

SEQ ID NO: 340307 - DNA, 15 bp, Homo sapiens
gctaaagttttaatc

SEQ ID NO: 340308 - DNA, 15 bp, Homo sapiens
agctaaagttttaat

SEQ ID NO: 340309 - DNA, 15 bp, Homo sapiens
aagctaaagttttaa

SEQ ID NO: 340310 - DNA, 15 bp, Homo sapiens
aaagctaaagtttta

SEQ ID NO: 340311 - DNA, 15 bp, Homo sapiens
taaagctaaagtttt

SEQ ID NO: 340312 - DNA, 15 bp, Homo sapiens
ttaaagctaaagttt

SEQ ID NO: 340313 - DNA, 15 bp, Homo sapiens
tttaaagctaaagtt

SEQ ID NO: 340314 - DNA, 15 bp, Homo sapiens
gtttaaagctaaagt

SEQ ID NO: 340315 - DNA, 15 bp, Homo sapiens
agtttaaagctaaag

SEQ ID NO: 340316 - DNA, 15 bp, Homo sapiens
aagtttaaagctaaa

SEQ ID NO: 340317 - DNA, 15 bp, Homo sapiens
gaagtttaaagctaa

SEQ ID NO: 340318 - DNA, 15 bp, Homo sapiens
ggaagtttaaagcta

SEQ ID NO: 340319 - DNA, 15 bp, Homo sapiens
tggaagtttaaagct

SEQ ID NO: 340320 - DNA, 15 bp, Homo sapiens
ctggaagtttaaagc

SEQ ID NO: 340321 - DNA, 15 bp, Homo sapiens
gctggaagtttaaag

SEQ ID NO: 340322 - DNA, 15 bp, Homo sapiens
tgctggaagtttaaa

SEQ ID NO: 340323 - DNA, 15 bp, Homo sapiens
ctgctggaagtttaa

SEQ ID NO: 340324 - DNA, 15 bp, Homo sapiens
cctgctggaagttta

SEQ ID NO: 340325 - DNA, 15 bp, Homo sapiens
acctgctggaagttt

SEQ ID NO: 340326 - DNA, 15 bp, Homo sapiens
aacctgctggaagtt

SEQ ID NO: 340327 - DNA, 15 bp, Homo sapiens
caacctgctggaagt

SEQ ID NO: 340328 - DNA, 15 bp, Homo sapiens
tcaacctgctggaag

SEQ ID NO: 340329 - DNA, 15 bp, Homo sapiens
atcaacctgctggaa

SEQ ID NO: 340330 - DNA, 15 bp, Homo sapiens
tatcaacctgctgga

SEQ ID NO: 340331 - DNA, 15 bp, Homo sapiens
atatcaacctgctgg

SEQ ID NO: 340332 - DNA, 15 bp, Homo sapiens
aatatcaacctgctg

SEQ ID NO: 340333 - DNA, 15 bp, Homo sapiens
gaatatcaacctgct

SEQ ID NO: 340334 - DNA, 15 bp, Homo sapiens
agaatatcaacctgc

SEQ ID NO: 340335 - DNA, 15 bp, Homo sapiens
tagaatatcaacctg

SEQ ID NO: 340336 - DNA, 15 bp, Homo sapiens
ttagaatatcaacct

SEQ ID NO: 340337 - DNA, 15 bp, Homo sapiens
attagaatatcaacc

SEQ ID NO: 340338 - DNA, 15 bp, Homo sapiens
cattagaatatcaac

SEQ ID NO: 340339 - DNA, 15 bp, Homo sapiens
tcattagaatatcaa

SEQ ID NO: 340340 - DNA, 15 bp, Homo sapiens
ttcattagaatatca

SEQ ID NO: 340341 - DNA, 15 bp, Homo sapiens
attcattagaatatc

SEQ ID NO: 340342 - DNA, 15 bp, Homo sapiens
cattcattagaatat

SEQ ID NO: 340343 - DNA, 15 bp, Homo sapiens
tcattcattagaata

SEQ ID NO: 340344 - DNA, 15 bp, Homo sapiens
atcattcattagaat

SEQ ID NO: 340345 - DNA, 15 bp, Homo sapiens
tatcattcattagaa

SEQ ID NO: 340346 - DNA, 15 bp, Homo sapiens
ttatcattcattaga

SEQ ID NO: 340347 - DNA, 15 bp, Homo sapiens
tttatcattcattag

SEQ ID NO: 340348 - DNA, 15 bp, Homo sapiens
atttatcattcatta

SEQ ID NO: 340349 - DNA, 15 bp, Homo sapiens
gatttatcattcatt

SEQ ID NO: 340350 - DNA, 15 bp, Homo sapiens
tgatttatcattcat

SEQ ID NO: 340351 - DNA, 15 bp, Homo sapiens
ttgatttatcattca

SEQ ID NO: 340352 - DNA, 15 bp, Homo sapiens
tttgatttatcattc

SEQ ID NO: 340353 - DNA, 15 bp, Homo sapiens
ttttgatttatcatt

SEQ ID NO: 340354 - DNA, 15 bp, Homo sapiens
tttttgatttatcat

SEQ ID NO: 340355 - DNA, 15 bp, Homo sapiens
ttttttgatttatca

SEQ ID NO: 340356 - DNA, 15 bp, Homo sapiens
tttttttgatttatc

SEQ ID NO: 340357 - DNA, 15 bp, Homo sapiens
ttttttttgatttat

SEQ ID NO: 340358 - DNA, 15 bp, Homo sapiens
tttttttttgattta

SEQ ID NO: 340359 - DNA, 15 bp, Homo sapiens
atttttttttgattt

SEQ ID NO: 340360 - DNA, 15 bp, Homo sapiens
aatttttttttgatt

SEQ ID NO: 340361 - DNA, 15 bp, Homo sapiens
aaatttttttttgat

SEQ ID NO: 340362 - DNA, 15 bp, Homo sapiens
aaaatttttttttga

SEQ ID NO: 340363 - DNA, 15 bp, Homo sapiens
taaaatttttttttg

SEQ ID NO: 340364 - DNA, 15 bp, Homo sapiens
ttaaaattttttttt

SEQ ID NO: 340365 - DNA, 15 bp, Homo sapiens
tttaaaatttttttt

SEQ ID NO: 340366 - DNA, 15 bp, Homo sapiens
atttaaaattttttt

SEQ ID NO: 340367 - DNA, 15 bp, Homo sapiens
tatttaaaatttttt

SEQ ID NO: 340368 - DNA, 15 bp, Homo sapiens
atatttaaaattttt

SEQ ID NO: 340369 - DNA, 15 bp, Homo sapiens
aatatttaaaatttt

SEQ ID NO: 340370 - DNA, 15 bp, Homo sapiens
gaatatttaaaattt

SEQ ID NO: 340371 - DNA, 15 bp, Homo sapiens
agaatatttaaaatt

SEQ ID NO: 340372 - DNA, 15 bp, Homo sapiens
aagaatatttaaaat

SEQ ID NO: 340373 - DNA, 15 bp, Homo sapiens
caagaatatttaaaa

SEQ ID NO: 340374 - DNA, 15 bp, Homo sapiens
acaagaatatttaaa

SEQ ID NO: 340375 - DNA, 15 bp, Homo sapiens
tacaagaatatttaa

SEQ ID NO: 340376 - DNA, 15 bp, Homo sapiens
atacaagaatattta

SEQ ID NO: 340377 - DNA, 15 bp, Homo sapiens
aatacaagaatattt

SEQ ID NO: 340378 - DNA, 15 bp, Homo sapiens
caatacaagaatatt

SEQ ID NO: 340379 - DNA, 15 bp, Homo sapiens
tcaatacaagaatat

SEQ ID NO: 340380 - DNA, 15 bp, Homo sapiens
gtcaatacaagaata

SEQ ID NO: 340381 - DNA, 15 bp, Homo sapiens
tgtcaatacaagaat

SEQ ID NO: 340382 - DNA, 15 bp, Homo sapiens
ctgtcaatacaagaa

SEQ ID NO: 340383 - DNA, 15 bp, Homo sapiens
actgtcaatacaaga

SEQ ID NO: 340384 - DNA, 15 bp, Homo sapiens
cactgtcaatacaag

SEQ ID NO: 340385 - DNA, 15 bp, Homo sapiens
gcactgtcaatacaa

SEQ ID NO: 340386 - DNA, 15 bp, Homo sapiens
agcactgtcaataca

SEQ ID NO: 340387 - DNA, 15 bp, Homo sapiens
aagcactgtcaatac

SEQ ID NO: 340388 - DNA, 15 bp, Homo sapiens
aaagcactgtcaata

SEQ ID NO: 340389 - DNA, 15 bp, Homo sapiens
aaaagcactgtcaat

SEQ ID NO: 340390 - DNA, 15 bp, Homo sapiens
aaaaagcactgtcaa

SEQ ID NO: 340391 - DNA, 15 bp, Homo sapiens
aaaaaagcactgtca

SEQ ID NO: 340392 - DNA, 15 bp, Homo sapiens
aaaaaaagcactgtc

SEQ ID NO: 340393 - DNA, 15 bp, Homo sapiens
aaaaaaaagcactgt

SEQ ID NO: 340394 - DNA, 15 bp, Homo sapiens
aaaaaaaaagcactg

SEQ ID NO: 340395 - DNA, 15 bp, Homo sapiens
aaaaaaaaaagcact

SEQ ID NO: 340396 - DNA, 15 bp, Homo sapiens
taaaaaaaaaagcac

SEQ ID NO: 340397 - DNA, 15 bp, Homo sapiens
ttaaaaaaaaaagca

SEQ ID NO: 340398 - DNA, 15 bp, Homo sapiens
tttaaaaaaaaaagc

SEQ ID NO: 340399 - DNA, 15 bp, Homo sapiens
atttaaaaaaaaaag

SEQ ID NO: 340400 - DNA, 15 bp, Homo sapiens
gatttaaaaaaaaaa

SEQ ID NO: 340401 - DNA, 15 bp, Homo sapiens
tgatttaaaaaaaaa

SEQ ID NO: 340402 - DNA, 15 bp, Homo sapiens
gtgatttaaaaaaaa

SEQ ID NO: 340403 - DNA, 15 bp, Homo sapiens
ggtgatttaaaaaaa

SEQ ID NO: 340404 - DNA, 15 bp, Homo sapiens
gggtgatttaaaaaa

SEQ ID NO: 340405 - DNA, 15 bp, Homo sapiens
agggtgatttaaaaa

SEQ ID NO: 340406 - DNA, 15 bp, Homo sapiens
tagggtgatttaaaa

SEQ ID NO: 340407 - DNA, 15 bp, Homo sapiens
gtagggtgatttaaa

SEQ ID NO: 340408 - DNA, 15 bp, Homo sapiens
ggtagggtgatttaa

SEQ ID NO: 340409 - DNA, 15 bp, Homo sapiens
aggtagggtgattta

SEQ ID NO: 340410 - DNA, 15 bp, Homo sapiens
aaggtagggtgattt

SEQ ID NO: 340411 - DNA, 15 bp, Homo sapiens
caaggtagggtgatt

SEQ ID NO: 340412 - DNA, 15 bp, Homo sapiens
tcaaggtagggtgat

SEQ ID NO: 340413 - DNA, 15 bp, Homo sapiens
atcaaggtagggtga

SEQ ID NO: 340414 - DNA, 15 bp, Homo sapiens
tatcaaggtagggtg

SEQ ID NO: 340415 - DNA, 15 bp, Homo sapiens
atatcaaggtagggt

SEQ ID NO: 340416 - DNA, 15 bp, Homo sapiens
gatatcaaggtaggg

SEQ ID NO: 340417 - DNA, 15 bp, Homo sapiens
agatatcaaggtagg

SEQ ID NO: 340418 - DNA, 15 bp, Homo sapiens
cagatatcaaggtag

SEQ ID NO: 340419 - DNA, 15 bp, Homo sapiens
acagatatcaaggta

SEQ ID NO: 340420 - DNA, 15 bp, Homo sapiens
tacagatatcaaggt

SEQ ID NO: 340421 - DNA, 15 bp, Homo sapiens
ttacagatatcaagg

SEQ ID NO: 340422 - DNA, 15 bp, Homo sapiens
attacagatatcaag

SEQ ID NO: 340423 - DNA, 15 bp, Homo sapiens
aattacagatatcaa

SEQ ID NO: 340424 - DNA, 15 bp, Homo sapiens
aaattacagatatca

SEQ ID NO: 340425 - DNA, 15 bp, Homo sapiens
aaaattacagatatc

SEQ ID NO: 340426 - DNA, 15 bp, Homo sapiens
taaaattacagatat

SEQ ID NO: 340427 - DNA, 15 bp, Homo sapiens
ctaaaattacagata

SEQ ID NO: 340428 - DNA, 15 bp, Homo sapiens
actaaaattacagat

SEQ ID NO: 340429 - DNA, 15 bp, Homo sapiens
aactaaaattacaga

SEQ ID NO: 340430 - DNA, 15 bp, Homo sapiens
aaactaaaattacag

SEQ ID NO: 340431 - DNA, 15 bp, Homo sapiens
taaactaaaattaca

SEQ ID NO: 340432 - DNA, 15 bp, Homo sapiens
ttaaactaaaattac

SEQ ID NO: 340433 - DNA, 15 bp, Homo sapiens
tttaaactaaaatta

SEQ ID NO: 340434 - DNA, 15 bp, Homo sapiens
gtttaaactaaaatt

SEQ ID NO: 340435 - DNA, 15 bp, Homo sapiens
agtttaaactaaaat

SEQ ID NO: 340436 - DNA, 15 bp, Homo sapiens
aagtttaaactaaaa

SEQ ID NO: 340437 - DNA, 15 bp, Homo sapiens
aaagtttaaactaaa

SEQ ID NO: 340438 - DNA, 15 bp, Homo sapiens
gaaagtttaaactaa

SEQ ID NO: 340439 - DNA, 15 bp, Homo sapiens
ggaaagtttaaacta

SEQ ID NO: 340440 - DNA, 15 bp, Homo sapiens
gggaaagtttaaact

SEQ ID NO: 340441 - DNA, 15 bp, Homo sapiens
tgggaaagtttaaac

SEQ ID NO: 340442 - DNA, 15 bp, Homo sapiens
atgggaaagtttaaa

SEQ ID NO: 340443 - DNA, 15 bp, Homo sapiens
aatgggaaagtttaa

SEQ ID NO: 340444 - DNA, 15 bp, Homo sapiens
aaatgggaaagttta

SEQ ID NO: 340445 - DNA, 15 bp, Homo sapiens
aaaatgggaaagttt

SEQ ID NO: 340446 - DNA, 15 bp, Homo sapiens
aaaaatgggaaagtt

SEQ ID NO: 340447 - DNA, 15 bp, Homo sapiens
gaaaaatgggaaagt

SEQ ID NO: 340448 - DNA, 15 bp, Homo sapiens
agaaaaatgggaaag

SEQ ID NO: 340449 - DNA, 15 bp, Homo sapiens
aagaaaaatgggaaa

SEQ ID NO: 340450 - DNA, 15 bp, Homo sapiens
aaagaaaaatgggaa

SEQ ID NO: 340451 - DNA, 15 bp, Homo sapiens
taaagaaaaatggga

SEQ ID NO: 340452 - DNA, 15 bp, Homo sapiens
ttaaagaaaaatggg

SEQ ID NO: 340453 - DNA, 15 bp, Homo sapiens
tttaaagaaaaatgg

SEQ ID NO: 340454 - DNA, 15 bp, Homo sapiens
ctttaaagaaaaatg

SEQ ID NO: 340455 - DNA, 15 bp, Homo sapiens
tctttaaagaaaaat

SEQ ID NO: 340456 - DNA, 15 bp, Homo sapiens
ttctttaaagaaaaa

SEQ ID NO: 340457 - DNA, 15 bp, Homo sapiens
tttctttaaagaaaa

SEQ ID NO: 340458 - DNA, 15 bp, Homo sapiens
ttttctttaaagaaa

SEQ ID NO: 340459 - DNA, 15 bp, Homo sapiens
tttttctttaaagaa

SEQ ID NO: 340460 - DNA, 15 bp, Homo sapiens
ttttttctttaaaga

SEQ ID NO: 340461 - DNA, 15 bp, Homo sapiens
tttttttctttaaag

SEQ ID NO: 340462 - DNA, 15 bp, Homo sapiens
atttttttctttaaa

SEQ ID NO: 340463 - DNA, 15 bp, Homo sapiens
gatttttttctttaa

SEQ ID NO: 340464 - DNA, 15 bp, Homo sapiens
agatttttttcttta

SEQ ID NO: 340465 - DNA, 15 bp, Homo sapiens
cagatttttttcttt

SEQ ID NO: 340466 - DNA, 15 bp, Homo sapiens
tcagatttttttctt

SEQ ID NO: 340467 - DNA, 15 bp, Homo sapiens
ttcagatttttttct

SEQ ID NO: 340468 - DNA, 15 bp, Homo sapiens
attcagatttttttc

SEQ ID NO: 340469 - DNA, 15 bp, Homo sapiens
aattcagattttttt

SEQ ID NO: 340470 - DNA, 15 bp, Homo sapiens
aaattcagatttttt

SEQ ID NO: 340471 - DNA, 15 bp, Homo sapiens
caaattcagattttt

SEQ ID NO: 340472 - DNA, 15 bp, Homo sapiens
gcaaattcagatttt

SEQ ID NO: 340473 - DNA, 15 bp, Homo sapiens
tgcaaattcagattt

SEQ ID NO: 340474 - DNA, 15 bp, Homo sapiens
ctgcaaattcagatt

SEQ ID NO: 340475 - DNA, 15 bp, Homo sapiens
gctgcaaattcagat

SEQ ID NO: 340476 - DNA, 15 bp, Homo sapiens
ggctgcaaattcaga

SEQ ID NO: 340477 - DNA, 15 bp, Homo sapiens
tggctgcaaattcag

SEQ ID NO: 340478 - DNA, 15 bp, Homo sapiens
ttggctgcaaattca

SEQ ID NO: 340479 - DNA, 15 bp, Homo sapiens
gttggctgcaaattc

SEQ ID NO: 340480 - DNA, 15 bp, Homo sapiens
tgttggctgcaaatt

SEQ ID NO: 340481 - DNA, 15 bp, Homo sapiens
ttgttggctgcaaat

SEQ ID NO: 340482 - DNA, 15 bp, Homo sapiens
tttgttggctgcaaa

SEQ ID NO: 340483 - DNA, 15 bp, Homo sapiens
ttttgttggctgcaa

SEQ ID NO: 340484 - DNA, 15 bp, Homo sapiens
tttttgttggctgca

SEQ ID NO: 340485 - DNA, 15 bp, Homo sapiens
atttttgttggctgc

SEQ ID NO: 340486 - DNA, 15 bp, Homo sapiens
aatttttgttggctg

SEQ ID NO: 340487 - DNA, 15 bp, Homo sapiens
taatttttgttggct

SEQ ID NO: 340488 - DNA, 15 bp, Homo sapiens
ctaatttttgttggc

SEQ ID NO: 340489 - DNA, 15 bp, Homo sapiens
tctaatttttgttgg

SEQ ID NO: 340490 - DNA, 15 bp, Homo sapiens
atctaatttttgttg

SEQ ID NO: 340491 - DNA, 15 bp, Homo sapiens
tatctaatttttgtt

SEQ ID NO: 340492 - DNA, 15 bp, Homo sapiens
atatctaatttttgt

SEQ ID NO: 340493 - DNA, 15 bp, Homo sapiens
gatatctaatttttg

SEQ ID NO: 340494 - DNA, 15 bp, Homo sapiens
ggatatctaattttt

SEQ ID NO: 340495 - DNA, 15 bp, Homo sapiens
aggatatctaatttt

SEQ ID NO: 340496 - DNA, 15 bp, Homo sapiens
taggatatctaattt

SEQ ID NO: 340497 - DNA, 15 bp, Homo sapiens
ttaggatatctaatt

SEQ ID NO: 340498 - DNA, 15 bp, Homo sapiens
cttaggatatctaat

SEQ ID NO: 340499 - DNA, 15 bp, Homo sapiens
ccttaggatatctaa

SEQ ID NO: 340500 - DNA, 15 bp, Homo sapiens
accttaggatatcta

SEQ ID NO: 340501 - DNA, 15 bp, Homo sapiens
aaccttaggatatct

SEQ ID NO: 340502 - DNA, 15 bp, Homo sapiens
caaccttaggatatc

SEQ ID NO: 340503 - DNA, 15 bp, Homo sapiens
acaaccttaggatat

SEQ ID NO: 340504 - DNA, 15 bp, Homo sapiens
tacaaccttaggata

SEQ ID NO: 340505 - DNA, 15 bp, Homo sapiens
atacaaccttaggat

SEQ ID NO: 340506 - DNA, 15 bp, Homo sapiens
aatacaaccttagga

SEQ ID NO: 340507 - DNA, 15 bp, Homo sapiens
taatacaaccttagg

SEQ ID NO: 340508 - DNA, 15 bp, Homo sapiens
gtaatacaaccttag

SEQ ID NO: 340509 - DNA, 15 bp, Homo sapiens
agtaatacaacctta

SEQ ID NO: 340510 - DNA, 15 bp, Homo sapiens
aagtaatacaacctt

SEQ ID NO: 340511 - DNA, 15 bp, Homo sapiens
gaagtaatacaacct

SEQ ID NO: 340512 - DNA, 15 bp, Homo sapiens
agaagtaatacaacc

SEQ ID NO: 340513 - DNA, 15 bp, Homo sapiens
cagaagtaatacaac

SEQ ID NO: 340514 - DNA, 15 bp, Homo sapiens
tcagaagtaatacaa

SEQ ID NO: 340515 - DNA, 15 bp, Homo sapiens
gtcagaagtaataca

SEQ ID NO: 340516 - DNA, 15 bp, Homo sapiens
agtcagaagtaatac

SEQ ID NO: 340517 - DNA, 15 bp, Homo sapiens
aagtcagaagtaata

SEQ ID NO: 340518 - DNA, 15 bp, Homo sapiens
aaagtcagaagtaat

SEQ ID NO: 340519 - DNA, 15 bp, Homo sapiens
aaaagtcagaagtaa

SEQ ID NO: 340520 - DNA, 15 bp, Homo sapiens
taaaagtcagaagta

SEQ ID NO: 340521 - DNA, 15 bp, Homo sapiens
ataaaagtcagaagt

SEQ ID NO: 340522 - DNA, 15 bp, Homo sapiens
aataaaagtcagaag

SEQ ID NO: 340523 - DNA, 15 bp, Homo sapiens
taataaaagtcagaa

SEQ ID NO: 340524 - DNA, 15 bp, Homo sapiens
ttaataaaagtcaga

SEQ ID NO: 340525 - DNA, 15 bp, Homo sapiens
tttaataaaagtcag

SEQ ID NO: 340526 - DNA, 15 bp, Homo sapiens
ttttaataaaagtca

SEQ ID NO: 340527 - DNA, 15 bp, Homo sapiens
attttaataaaagtc

SEQ ID NO: 340528 - DNA, 15 bp, Homo sapiens
tattttaataaaagt

SEQ ID NO: 340529 - DNA, 15 bp, Homo sapiens
atattttaataaaag

SEQ ID NO: 340530 - DNA, 15 bp, Homo sapiens
gatattttaataaaa

SEQ ID NO: 340531 - DNA, 15 bp, Homo sapiens
tgatattttaataaa

SEQ ID NO: 340532 - DNA, 15 bp, Homo sapiens
ttgatattttaataa

SEQ ID NO: 340533 - DNA, 15 bp, Homo sapiens
gttgatattttaata

SEQ ID NO: 340534 - DNA, 15 bp, Homo sapiens
tgttgatattttaat

SEQ ID NO: 340535 - DNA, 15 bp, Homo sapiens
atgttgatattttaa

SEQ ID NO: 340536 - DNA, 15 bp, Homo sapiens
aatgttgatatttta

SEQ ID NO: 340537 - DNA, 15 bp, Homo sapiens
aaatgttgatatttt

SEQ ID NO: 340538 - DNA, 15 bp, Homo sapiens
gaaatgttgatattt

SEQ ID NO: 340539 - DNA, 15 bp, Homo sapiens
agaaatgttgatatt

SEQ ID NO: 340540 - DNA, 15 bp, Homo sapiens
aagaaatgttgatat

SEQ ID NO: 340541 - DNA, 15 bp, Homo sapiens
taagaaatgttgata

SEQ ID NO: 340542 - DNA, 15 bp, Homo sapiens
ctaagaaatgttgat

SEQ ID NO: 340543 - DNA, 15 bp, Homo sapiens
tctaagaaatgttga

SEQ ID NO: 340544 - DNA, 15 bp, Homo sapiens
ctctaagaaatgttg

SEQ ID NO: 340545 - DNA, 15 bp, Homo sapiens
tctctaagaaatgtt

SEQ ID NO: 340546 - DNA, 15 bp, Homo sapiens
atctctaagaaatgt

SEQ ID NO: 340547 - DNA, 15 bp, Homo sapiens
catctctaagaaatg

SEQ ID NO: 340548 - DNA, 15 bp, Homo sapiens
acatctctaagaaat

SEQ ID NO: 340549 - DNA, 15 bp, Homo sapiens
aacatctctaagaaa

SEQ ID NO: 340550 - DNA, 15 bp, Homo sapiens
aaacatctctaagaa

SEQ ID NO: 340551 - DNA, 15 bp, Homo sapiens
taaacatctctaaga

SEQ ID NO: 340552 - DNA, 15 bp, Homo sapiens
ataaacatctctaag

SEQ ID NO: 340553 - DNA, 15 bp, Homo sapiens
cataaacatctctaa

SEQ ID NO: 340554 - DNA, 15 bp, Homo sapiens
ccataaacatctcta

SEQ ID NO: 340555 - DNA, 15 bp, Homo sapiens
cccataaacatctct

SEQ ID NO: 340556 - DNA, 15 bp, Homo sapiens
gcccataaacatctc

SEQ ID NO: 340557 - DNA, 15 bp, Homo sapiens
ggcccataaacatct

SEQ ID NO: 340558 - DNA, 15 bp, Homo sapiens
cggcccataaacatc

SEQ ID NO: 340559 - DNA, 15 bp, Homo sapiens
tcggcccataaacat

SEQ ID NO: 340560 - DNA, 15 bp, Homo sapiens
gtcggcccataaaca

SEQ ID NO: 340561 - DNA, 15 bp, Homo sapiens
agtcggcccataaac

SEQ ID NO: 340562 - DNA, 15 bp, Homo sapiens
aagtcggcccataaa

SEQ ID NO: 340563 - DNA, 15 bp, Homo sapiens
aaagtcggcccataa

SEQ ID NO: 340564 - DNA, 15 bp, Homo sapiens
caaagtcggcccata

SEQ ID NO: 340565 - DNA, 15 bp, Homo sapiens
acaaagtcggcccat

SEQ ID NO: 340566 - DNA, 15 bp, Homo sapiens
gacaaagtcggccca

SEQ ID NO: 340567 - DNA, 15 bp, Homo sapiens
agacaaagtcggccc

SEQ ID NO: 340568 - DNA, 15 bp, Homo sapiens
aagacaaagtcggcc

SEQ ID NO: 340569 - DNA, 15 bp, Homo sapiens
aaagacaaagtcggc

SEQ ID NO: 340570 - DNA, 15 bp, Homo sapiens
aaaagacaaagtcgg

SEQ ID NO: 340571 - DNA, 15 bp, Homo sapiens
aaaaagacaaagtcg

SEQ ID NO: 340572 - DNA, 15 bp, Homo sapiens
gaaaaagacaaagtc

SEQ ID NO: 340573 - DNA, 15 bp, Homo sapiens
agaaaaagacaaagt

SEQ ID NO: 340574 - DNA, 15 bp, Homo sapiens
aagaaaaagacaaag

SEQ ID NO: 340575 - DNA, 15 bp, Homo sapiens
gaagaaaaagacaaa

SEQ ID NO: 340576 - DNA, 15 bp, Homo sapiens
tgaagaaaaagacaa

SEQ ID NO: 340577 - DNA, 15 bp, Homo sapiens
ttgaagaaaaagaca

SEQ ID NO: 340578 - DNA, 15 bp, Homo sapiens
cttgaagaaaaagac

SEQ ID NO: 340579 - DNA, 15 bp, Homo sapiens
ccttgaagaaaaaga

SEQ ID NO: 340580 - DNA, 15 bp, Homo sapiens
cccttgaagaaaaag

SEQ ID NO: 340581 - DNA, 15 bp, Homo sapiens
ccccttgaagaaaaa

SEQ ID NO: 340582 - DNA, 15 bp, Homo sapiens
gccccttgaagaaaa

SEQ ID NO: 340583 - DNA, 15 bp, Homo sapiens
ggccccttgaagaaa

SEQ ID NO: 340584 - DNA, 15 bp, Homo sapiens
tggccccttgaagaa

SEQ ID NO: 340585 - DNA, 15 bp, Homo sapiens
ttggccccttgaaga

SEQ ID NO: 340586 - DNA, 15 bp, Homo sapiens
cttggccccttgaag

SEQ ID NO: 340587 - DNA, 15 bp, Homo sapiens
acttggccccttgaa

SEQ ID NO: 340588 - DNA, 15 bp, Homo sapiens
aacttggccccttga

SEQ ID NO: 340589 - DNA, 15 bp, Homo sapiens
gaacttggccccttg

SEQ ID NO: 340590 - DNA, 15 bp, Homo sapiens
tgaacttggcccctt

SEQ ID NO: 340591 - DNA, 15 bp, Homo sapiens
gtgaacttggcccct

SEQ ID NO: 340592 - DNA, 15 bp, Homo sapiens
agtgaacttggcccc

SEQ ID NO: 340593 - DNA, 15 bp, Homo sapiens
tagtgaacttggccc

SEQ ID NO: 340594 - DNA, 15 bp, Homo sapiens
ttagtgaacttggcc

SEQ ID NO: 340595 - DNA, 15 bp, Homo sapiens
attagtgaacttggc

SEQ ID NO: 340596 - DNA, 15 bp, Homo sapiens
aattagtgaacttgg

SEQ ID NO: 340597 - DNA, 15 bp, Homo sapiens
caattagtgaacttg

SEQ ID NO: 340598 - DNA, 15 bp, Homo sapiens
gcaattagtgaactt

SEQ ID NO: 340599 - DNA, 15 bp, Homo sapiens
agcaattagtgaact

SEQ ID NO: 340600 - DNA, 15 bp, Homo sapiens
cagcaattagtgaac

SEQ ID NO: 340601 - DNA, 15 bp, Homo sapiens
tcagcaattagtgaa

SEQ ID NO: 340602 - DNA, 15 bp, Homo sapiens
ctcagcaattagtga

SEQ ID NO: 340603 - DNA, 15 bp, Homo sapiens
actcagcaattagtg

SEQ ID NO: 340604 - DNA, 15 bp, Homo sapiens
aactcagcaattagt

SEQ ID NO: 340605 - DNA, 15 bp, Homo sapiens
aaactcagcaattag

SEQ ID NO: 340606 - DNA, 15 bp, Homo sapiens
aaaactcagcaatta

SEQ ID NO: 340607 - DNA, 15 bp, Homo sapiens
taaaactcagcaatt

SEQ ID NO: 340608 - DNA, 15 bp, Homo sapiens
ataaaactcagcaat

SEQ ID NO: 340609 - DNA, 15 bp, Homo sapiens
cataaaactcagcaa

SEQ ID NO: 340610 - DNA, 15 bp, Homo sapiens
gcataaaactcagca

SEQ ID NO: 340611 - DNA, 15 bp, Homo sapiens
tgcataaaactcagc

SEQ ID NO: 340612 - DNA, 15 bp, Homo sapiens
atgcataaaactcag

SEQ ID NO: 340613 - DNA, 15 bp, Homo sapiens
tatgcataaaactca

SEQ ID NO: 340614 - DNA, 15 bp, Homo sapiens
atatgcataaaactc

SEQ ID NO: 340615 - DNA, 15 bp, Homo sapiens
catatgcataaaact

SEQ ID NO: 340616 - DNA, 15 bp, Homo sapiens
tcatatgcataaaac

SEQ ID NO: 340617 - DNA, 15 bp, Homo sapiens
gtcatatgcataaaa

SEQ ID NO: 340618 - DNA, 15 bp, Homo sapiens
tgtcatatgcataaa

SEQ ID NO: 340619 - DNA, 15 bp, Homo sapiens
ctgtcatatgcataa

SEQ ID NO: 340620 - DNA, 15 bp, Homo sapiens
gctgtcatatgcata

SEQ ID NO: 340621 - DNA, 15 bp, Homo sapiens
tgctgtcatatgcat

SEQ ID NO: 340622 - DNA, 15 bp, Homo sapiens
ttgctgtcatatgca

SEQ ID NO: 340623 - DNA, 15 bp, Homo sapiens
gttgctgtcatatgc

SEQ ID NO: 340624 - DNA, 15 bp, Homo sapiens
ggttgctgtcatatg

SEQ ID NO: 340625 - DNA, 15 bp, Homo sapiens
cggttgctgtcatat

SEQ ID NO: 340626 - DNA, 15 bp, Homo sapiens
acggttgctgtcata

SEQ ID NO: 340627 - DNA, 15 bp, Homo sapiens
gacggttgctgtcat

SEQ ID NO: 340628 - DNA, 15 bp, Homo sapiens
ggacggttgctgtca

SEQ ID NO: 340629 - DNA, 15 bp, Homo sapiens
aggacggttgctgtc

SEQ ID NO: 340630 - DNA, 15 bp, Homo sapiens
aaggacggttgctgt

SEQ ID NO: 340631 - DNA, 15 bp, Homo sapiens
aaaggacggttgctg

SEQ ID NO: 340632 - DNA, 15 bp, Homo sapiens
aaaaggacggttgct

SEQ ID NO: 340633 - DNA, 15 bp, Homo sapiens
caaaaggacggttgc

SEQ ID NO: 340634 - DNA, 15 bp, Homo sapiens
acaaaaggacggttg

SEQ ID NO: 340635 - DNA, 15 bp, Homo sapiens
tacaaaaggacggtt

SEQ ID NO: 340636 - DNA, 15 bp, Homo sapiens
ctacaaaaggacggt

SEQ ID NO: 340637 - DNA, 15 bp, Homo sapiens
cctacaaaaggacgg

SEQ ID NO: 340638 - DNA, 15 bp, Homo sapiens
acctacaaaaggacg

SEQ ID NO: 340639 - DNA, 15 bp, Homo sapiens
cacctacaaaaggac

SEQ ID NO: 340640 - DNA, 15 bp, Homo sapiens
acacctacaaaagga

SEQ ID NO: 340641 - DNA, 15 bp, Homo sapiens
cacacctacaaaagg

SEQ ID NO: 340642 - DNA, 15 bp, Homo sapiens
acacacctacaaaag

SEQ ID NO: 340643 - DNA, 15 bp, Homo sapiens
cacacacctacaaaa

SEQ ID NO: 340644 - DNA, 15 bp, Homo sapiens
acacacacctacaaa

SEQ ID NO: 340645 - DNA, 15 bp, Homo sapiens
gacacacacctacaa

SEQ ID NO: 340646 - DNA, 15 bp, Homo sapiens
cgacacacacctaca

SEQ ID NO: 340647 - DNA, 15 bp, Homo sapiens
gcgacacacacctac

SEQ ID NO: 340648 - DNA, 15 bp, Homo sapiens
tgcgacacacaccta

SEQ ID NO: 340649 - DNA, 15 bp, Homo sapiens
atgcgacacacacct

SEQ ID NO: 340650 - DNA, 15 bp, Homo sapiens
gatgcgacacacacc

SEQ ID NO: 340651 - DNA, 15 bp, Homo sapiens
ggatgcgacacacac

SEQ ID NO: 340652 - DNA, 15 bp, Homo sapiens
tggatgcgacacaca

SEQ ID NO: 340653 - DNA, 15 bp, Homo sapiens
atggatgcgacacac

SEQ ID NO: 340654 - DNA, 15 bp, Homo sapiens
gatggatgcgacaca

SEQ ID NO: 340655 - DNA, 15 bp, Homo sapiens
agatggatgcgacac

SEQ ID NO: 340656 - DNA, 15 bp, Homo sapiens
tagatggatgcgaca

SEQ ID NO: 340657 - DNA, 15 bp, Homo sapiens
ctagatggatgcgac

SEQ ID NO: 340658 - DNA, 15 bp, Homo sapiens
tctagatggatgcga

SEQ ID NO: 340659 - DNA, 15 bp, Homo sapiens
atctagatggatgcg

SEQ ID NO: 340660 - DNA, 15 bp, Homo sapiens
tatctagatggatgc

SEQ ID NO: 340661 - DNA, 15 bp, Homo sapiens
gtatctagatggatg

SEQ ID NO: 340662 - DNA, 15 bp, Homo sapiens
agtatctagatggat

SEQ ID NO: 340663 - DNA, 15 bp, Homo sapiens
aagtatctagatgga

SEQ ID NO: 340664 - DNA, 15 bp, Homo sapiens
aaagtatctagatgg

SEQ ID NO: 340665 - DNA, 15 bp, Homo sapiens
taaagtatctagatg

SEQ ID NO: 340666 - DNA, 15 bp, Homo sapiens
ttaaagtatctagat

SEQ ID NO: 340667 - DNA, 15 bp, Homo sapiens
tttaaagtatctaga

SEQ ID NO: 340668 - DNA, 15 bp, Homo sapiens
ttttaaagtatctag

SEQ ID NO: 340669 - DNA, 15 bp, Homo sapiens
attttaaagtatcta

SEQ ID NO: 340670 - DNA, 15 bp, Homo sapiens
cattttaaagtatct

SEQ ID NO: 340671 - DNA, 15 bp, Homo sapiens
gcattttaaagtatc

SEQ ID NO: 340672 - DNA, 15 bp, Homo sapiens
agcattttaaagtat

SEQ ID NO: 340673 - DNA, 15 bp, Homo sapiens
gagcattttaaagta

SEQ ID NO: 340674 - DNA, 15 bp, Homo sapiens
tgagcattttaaagt

SEQ ID NO: 340675 - DNA, 15 bp, Homo sapiens
atgagcattttaaag

SEQ ID NO: 340676 - DNA, 15 bp, Homo sapiens
gatgagcattttaaa

SEQ ID NO: 340677 - DNA, 15 bp, Homo sapiens
agatgagcattttaa

SEQ ID NO: 340678 - DNA, 15 bp, Homo sapiens
tagatgagcatttta

SEQ ID NO: 340679 - DNA, 15 bp, Homo sapiens
atagatgagcatttt

SEQ ID NO: 340680 - DNA, 15 bp, Homo sapiens
aatagatgagcattt

SEQ ID NO: 340681 - DNA, 15 bp, Homo sapiens
aaatagatgagcatt

SEQ ID NO: 340682 - DNA, 15 bp, Homo sapiens
gaaatagatgagcat

SEQ ID NO: 340683 - DNA, 15 bp, Homo sapiens
tgaaatagatgagca

SEQ ID NO: 340684 - DNA, 15 bp, Homo sapiens
atgaaatagatgagc

SEQ ID NO: 340685 - DNA, 15 bp, Homo sapiens
aatgaaatagatgag

SEQ ID NO: 340686 - DNA, 15 bp, Homo sapiens
aaatgaaatagatga

SEQ ID NO: 340687 - DNA, 15 bp, Homo sapiens
aaaatgaaatagatg

SEQ ID NO: 340688 - DNA, 15 bp, Homo sapiens
aaaaatgaaatagat

SEQ ID NO: 340689 - DNA, 15 bp, Homo sapiens
taaaaatgaaataga

SEQ ID NO: 340690 - DNA, 15 bp, Homo sapiens
ttaaaaatgaaatag

SEQ ID NO: 340691 - DNA, 15 bp, Homo sapiens
tttaaaaatgaaata

SEQ ID NO: 340692 - DNA, 15 bp, Homo sapiens
ttttaaaaatgaaat

SEQ ID NO: 340693 - DNA, 15 bp, Homo sapiens
attttaaaaatgaaa

SEQ ID NO: 340694 - DNA, 15 bp, Homo sapiens
aattttaaaaatgaa

SEQ ID NO: 340695 - DNA, 15 bp, Homo sapiens
taattttaaaaatga

SEQ ID NO: 340696 - DNA, 15 bp, Homo sapiens
ataattttaaaaatg

SEQ ID NO: 340697 - DNA, 15 bp, Homo sapiens
cataattttaaaaat

SEQ ID NO: 340698 - DNA, 15 bp, Homo sapiens
acataattttaaaaa

SEQ ID NO: 340699 - DNA, 15 bp, Homo sapiens
cacataattttaaaa

SEQ ID NO: 340700 - DNA, 15 bp, Homo sapiens
acacataattttaaa

SEQ ID NO: 340701 - DNA, 15 bp, Homo sapiens
cacacataattttaa

SEQ ID NO: 340702 - DNA, 15 bp, Homo sapiens
acacacataatttta

SEQ ID NO: 340703 - DNA, 15 bp, Homo sapiens
cacacacataatttt

SEQ ID NO: 340704 - DNA, 15 bp, Homo sapiens
ccacacacataattt

SEQ ID NO: 340705 - DNA, 15 bp, Homo sapiens
cccacacacataatt

SEQ ID NO: 340706 - DNA, 15 bp, Homo sapiens
tcccacacacataat

SEQ ID NO: 340707 - DNA, 15 bp, Homo sapiens
atcccacacacataa

SEQ ID NO: 340708 - DNA, 15 bp, Homo sapiens
aatcccacacacata

SEQ ID NO: 340709 - DNA, 15 bp, Homo sapiens
taatcccacacacat

SEQ ID NO: 340710 - DNA, 15 bp, Homo sapiens
ataatcccacacaca

SEQ ID NO: 340711 - DNA, 15 bp, Homo sapiens
gataatcccacacac

SEQ ID NO: 340712 - DNA, 15 bp, Homo sapiens
tgataatcccacaca

SEQ ID NO: 340713 - DNA, 15 bp, Homo sapiens
ctgataatcccacac

SEQ ID NO: 340714 - DNA, 15 bp, Homo sapiens
actgataatcccaca

SEQ ID NO: 340715 - DNA, 15 bp, Homo sapiens
tactgataatcccac

SEQ ID NO: 340716 - DNA, 15 bp, Homo sapiens
atactgataatccca

SEQ ID NO: 340717 - DNA, 15 bp, Homo sapiens
aatactgataatccc

SEQ ID NO: 340718 - DNA, 15 bp, Homo sapiens
aaatactgataatcc

SEQ ID NO: 340719 - DNA, 15 bp, Homo sapiens
aaaatactgataatc

SEQ ID NO: 340720 - DNA, 15 bp, Homo sapiens
aaaaatactgataat

SEQ ID NO: 340721 - DNA, 15 bp, Homo sapiens
aaaaaatactgataa

SEQ ID NO: 340722 - DNA, 15 bp, Homo sapiens
aaaaaaatactgata

SEQ ID NO: 340723 - DNA, 15 bp, Homo sapiens
caaaaaaatactgat

SEQ ID NO: 340724 - DNA, 15 bp, Homo sapiens
acaaaaaaatactga

SEQ ID NO: 340725 - DNA, 15 bp, Homo sapiens
aacaaaaaaatactg

SEQ ID NO: 340726 - DNA, 15 bp, Homo sapiens
taacaaaaaaatact

SEQ ID NO: 340727 - DNA, 15 bp, Homo sapiens
ttaacaaaaaaatac

SEQ ID NO: 340728 - DNA, 15 bp, Homo sapiens
tttaacaaaaaaata

SEQ ID NO: 340729 - DNA, 15 bp, Homo sapiens
gtttaacaaaaaaat

SEQ ID NO: 340730 - DNA, 15 bp, Homo sapiens
tgtttaacaaaaaaa

SEQ ID NO: 340731 - DNA, 15 bp, Homo sapiens
atgtttaacaaaaaa

SEQ ID NO: 340732 - DNA, 15 bp, Homo sapiens
tatgtttaacaaaaa

SEQ ID NO: 340733 - DNA, 15 bp, Homo sapiens
atatgtttaacaaaa

SEQ ID NO: 340734 - DNA, 15 bp, Homo sapiens
catatgtttaacaaa

SEQ ID NO: 340735 - DNA, 15 bp, Homo sapiens
tcatatgtttaacaa

SEQ ID NO: 340736 - DNA, 15 bp, Homo sapiens
gtcatatgtttaaca

SEQ ID NO: 340737 - DNA, 15 bp, Homo sapiens
tgtcatatgtttaac

SEQ ID NO: 340738 - DNA, 15 bp, Homo sapiens
atgtcatatgtttaa

SEQ ID NO: 340739 - DNA, 15 bp, Homo sapiens
gatgtcatatgttta

SEQ ID NO: 340740 - DNA, 15 bp, Homo sapiens
agatgtcatatgttt

SEQ ID NO: 340741 - DNA, 15 bp, Homo sapiens
cagatgtcatatgtt

SEQ ID NO: 340742 - DNA, 15 bp, Homo sapiens
acagatgtcatatgt

SEQ ID NO: 340743 - DNA, 15 bp, Homo sapiens
tacagatgtcatatg

SEQ ID NO: 340744 - DNA, 15 bp, Homo sapiens
ctacagatgtcatat

SEQ ID NO: 340745 - DNA, 15 bp, Homo sapiens
actacagatgtcata

SEQ ID NO: 340746 - DNA, 15 bp, Homo sapiens
aactacagatgtcat

SEQ ID NO: 340747 - DNA, 15 bp, Homo sapiens
aaactacagatgtca

SEQ ID NO: 340748 - DNA, 15 bp, Homo sapiens
taaactacagatgtc

SEQ ID NO: 340749 - DNA, 15 bp, Homo sapiens
ataaactacagatgt

SEQ ID NO: 340750 - DNA, 15 bp, Homo sapiens
aataaactacagatg

SEQ ID NO: 340751 - DNA, 15 bp, Homo sapiens
aaataaactacagat

SEQ ID NO: 340752 - DNA, 15 bp, Homo sapiens
gaaataaactacaga

SEQ ID NO: 340753 - DNA, 15 bp, Homo sapiens
tgaaataaactacag

SEQ ID NO: 340754 - DNA, 15 bp, Homo sapiens
gtgaaataaactaca

SEQ ID NO: 340755 - DNA, 15 bp, Homo sapiens
agtgaaataaactac

SEQ ID NO: 340756 - DNA, 15 bp, Homo sapiens
tagtgaaataaacta

SEQ ID NO: 340757 - DNA, 15 bp, Homo sapiens
ttagtgaaataaact

SEQ ID NO: 340758 - DNA, 15 bp, Homo sapiens
attagtgaaataaac

SEQ ID NO: 340759 - DNA, 15 bp, Homo sapiens
cattagtgaaataaa

SEQ ID NO: 340760 - DNA, 15 bp, Homo sapiens
acattagtgaaataa

SEQ ID NO: 340761 - DNA, 15 bp, Homo sapiens
tacattagtgaaata

SEQ ID NO: 340762 - DNA, 15 bp, Homo sapiens
ttacattagtgaaat

SEQ ID NO: 340763 - DNA, 15 bp, Homo sapiens
tttacattagtgaaa

SEQ ID NO: 340764 - DNA, 15 bp, Homo sapiens
atttacattagtgaa

SEQ ID NO: 340765 - DNA, 15 bp, Homo sapiens
aatttacattagtga

SEQ ID NO: 340766 - DNA, 15 bp, Homo sapiens
aaatttacattagtg

SEQ ID NO: 340767 - DNA, 15 bp, Homo sapiens
aaaatttacattagt

SEQ ID NO: 340768 - DNA, 15 bp, Homo sapiens
aaaaatttacattag

SEQ ID NO: 340769 - DNA, 15 bp, Homo sapiens
aaaaaatttacatta

SEQ ID NO: 340770 - DNA, 15 bp, Homo sapiens
gaaaaaatttacatt

SEQ ID NO: 340771 - DNA, 15 bp, Homo sapiens
agaaaaaatttacat

SEQ ID NO: 340772 - DNA, 15 bp, Homo sapiens
tagaaaaaatttaca

SEQ ID NO: 340773 - DNA, 15 bp, Homo sapiens
gtagaaaaaatttac

SEQ ID NO: 340774 - DNA, 15 bp, Homo sapiens
ggtagaaaaaattta

SEQ ID NO: 340775 - DNA, 15 bp, Homo sapiens
tggtagaaaaaattt

SEQ ID NO: 340776 - DNA, 15 bp, Homo sapiens
atggtagaaaaaatt

SEQ ID NO: 340777 - DNA, 15 bp, Homo sapiens
aatggtagaaaaaat

SEQ ID NO: 340778 - DNA, 15 bp, Homo sapiens
aaatggtagaaaaaa

SEQ ID NO: 340779 - DNA, 15 bp, Homo sapiens
caaatggtagaaaaa

SEQ ID NO: 340780 - DNA, 15 bp, Homo sapiens
gcaaatggtagaaaa

SEQ ID NO: 340781 - DNA, 15 bp, Homo sapiens
agcaaatggtagaaa

SEQ ID NO: 340782 - DNA, 15 bp, Homo sapiens
aagcaaatggtagaa

SEQ ID NO: 340783 - DNA, 15 bp, Homo sapiens
caagcaaatggtaga

SEQ ID NO: 340784 - DNA, 15 bp, Homo sapiens
tcaagcaaatggtag

SEQ ID NO: 340785 - DNA, 15 bp, Homo sapiens
atcaagcaaatggta

SEQ ID NO: 340786 - DNA, 15 bp, Homo sapiens
tatcaagcaaatggt

SEQ ID NO: 340787 - DNA, 15 bp, Homo sapiens
gtatcaagcaaatgg

SEQ ID NO: 340788 - DNA, 15 bp, Homo sapiens
tgtatcaagcaaatg

SEQ ID NO: 340789 - DNA, 15 bp, Homo sapiens
ctgtatcaagcaaat

SEQ ID NO: 340790 - DNA, 15 bp, Homo sapiens
cctgtatcaagcaaa

SEQ ID NO: 340791 - DNA, 15 bp, Homo sapiens
tcctgtatcaagcaa

SEQ ID NO: 340792 - DNA, 15 bp, Homo sapiens
ttcctgtatcaagca

SEQ ID NO: 340793 - DNA, 15 bp, Homo sapiens
tttcctgtatcaagc

SEQ ID NO: 340794 - DNA, 15 bp, Homo sapiens
atttcctgtatcaag

SEQ ID NO: 340795 - DNA, 15 bp, Homo sapiens
tatttcctgtatcaa

SEQ ID NO: 340796 - DNA, 15 bp, Homo sapiens
atatttcctgtatca

SEQ ID NO: 340797 - DNA, 15 bp, Homo sapiens
tatatttcctgtatc

SEQ ID NO: 340798 - DNA, 15 bp, Homo sapiens
atatatttcctgtat

SEQ ID NO: 340799 - DNA, 15 bp, Homo sapiens
gatatatttcctgta

SEQ ID NO: 340800 - DNA, 15 bp, Homo sapiens
ggatatatttcctgt

SEQ ID NO: 340801 - DNA, 15 bp, Homo sapiens
aggatatatttcctg

SEQ ID NO: 340802 - DNA, 15 bp, Homo sapiens
caggatatatttcct

SEQ ID NO: 340803 - DNA, 15 bp, Homo sapiens
ccaggatatatttcc

SEQ ID NO: 340804 - DNA, 15 bp, Homo sapiens
tccaggatatatttc

SEQ ID NO: 340805 - DNA, 15 bp, Homo sapiens
gtccaggatatattt

SEQ ID NO: 340806 - DNA, 15 bp, Homo sapiens
tgtccaggatatatt

SEQ ID NO: 340807 - DNA, 15 bp, Homo sapiens
ttgtccaggatatat

SEQ ID NO: 340808 - DNA, 15 bp, Homo sapiens
attgtccaggatata

SEQ ID NO: 340809 - DNA, 15 bp, Homo sapiens
aattgtccaggatat

SEQ ID NO: 340810 - DNA, 15 bp, Homo sapiens
gaattgtccaggata

SEQ ID NO: 340811 - DNA, 15 bp, Homo sapiens
ggaattgtccaggat

SEQ ID NO: 340812 - DNA, 15 bp, Homo sapiens
tggaattgtccagga

SEQ ID NO: 340813 - DNA, 15 bp, Homo sapiens
ctggaattgtccagg

SEQ ID NO: 340814 - DNA, 15 bp, Homo sapiens
gctggaattgtccag

SEQ ID NO: 340815 - DNA, 15 bp, Homo sapiens
ggctggaattgtcca

SEQ ID NO: 340816 - DNA, 15 bp, Homo sapiens
tggctggaattgtcc

SEQ ID NO: 340817 - DNA, 15 bp, Homo sapiens
atggctggaattgtc

SEQ ID NO: 340818 - DNA, 15 bp, Homo sapiens
gatggctggaattgt

SEQ ID NO: 340819 - DNA, 15 bp, Homo sapiens
agatggctggaattg

SEQ ID NO: 340820 - DNA, 15 bp, Homo sapiens
gagatggctggaatt

SEQ ID NO: 340821 - DNA, 15 bp, Homo sapiens
agagatggctggaat

SEQ ID NO: 340822 - DNA, 15 bp, Homo sapiens
gagagatggctggaa

SEQ ID NO: 340823 - DNA, 15 bp, Homo sapiens
agagagatggctgga

SEQ ID NO: 340824 - DNA, 15 bp, Homo sapiens
cagagagatggctgg

SEQ ID NO: 340825 - DNA, 15 bp, Homo sapiens
acagagagatggctg

SEQ ID NO: 340826 - DNA, 15 bp, Homo sapiens
gacagagagatggct

SEQ ID NO: 340827 - DNA, 15 bp, Homo sapiens
tgacagagagatggc

SEQ ID NO: 340828 - DNA, 15 bp, Homo sapiens
gtgacagagagatgg

SEQ ID NO: 340829 - DNA, 15 bp, Homo sapiens
tgtgacagagagatg

SEQ ID NO: 340830 - DNA, 15 bp, Homo sapiens
ttgtgacagagagat

SEQ ID NO: 340831 - DNA, 15 bp, Homo sapiens
tttgtgacagagaga

SEQ ID NO: 340832 - DNA, 15 bp, Homo sapiens
atttgtgacagagag

SEQ ID NO: 340833 - DNA, 15 bp, Homo sapiens
aatttgtgacagaga

SEQ ID NO: 340834 - DNA, 15 bp, Homo sapiens
gaatttgtgacagag

SEQ ID NO: 340835 - DNA, 15 bp, Homo sapiens
tgaatttgtgacaga

SEQ ID NO: 340836 - DNA, 15 bp, Homo sapiens
atgaatttgtgacag

SEQ ID NO: 340837 - DNA, 15 bp, Homo sapiens
tatgaatttgtgaca

SEQ ID NO: 340838 - DNA, 15 bp, Homo sapiens
ctatgaatttgtgac

SEQ ID NO: 340839 - DNA, 15 bp, Homo sapiens
gctatgaatttgtga

SEQ ID NO: 340840 - DNA, 15 bp, Homo sapiens
ggctatgaatttgtg

SEQ ID NO: 340841 - DNA, 15 bp, Homo sapiens
aggctatgaatttgt

SEQ ID NO: 340842 - DNA, 15 bp, Homo sapiens
aaggctatgaatttg

SEQ ID NO: 340843 - DNA, 15 bp, Homo sapiens
caaggctatgaattt

SEQ ID NO: 340844 - DNA, 15 bp, Homo sapiens
acaaggctatgaatt

SEQ ID NO: 340845 - DNA, 15 bp, Homo sapiens
gacaaggctatgaat

SEQ ID NO: 340846 - DNA, 15 bp, Homo sapiens
tgacaaggctatgaa

SEQ ID NO: 340847 - DNA, 15 bp, Homo sapiens
ctgacaaggctatga

SEQ ID NO: 340848 - DNA, 15 bp, Homo sapiens
tctgacaaggctatg

SEQ ID NO: 340849 - DNA, 15 bp, Homo sapiens
atctgacaaggctat

SEQ ID NO: 340850 - DNA, 15 bp, Homo sapiens
tatctgacaaggcta

SEQ ID NO: 340851 - DNA, 15 bp, Homo sapiens
ttatctgacaaggct

SEQ ID NO: 340852 - DNA, 15 bp, Homo sapiens
cttatctgacaaggc

SEQ ID NO: 340853 - DNA, 15 bp, Homo sapiens
ccttatctgacaagg

SEQ ID NO: 340854 - DNA, 15 bp, Homo sapiens
tccttatctgacaag

SEQ ID NO: 340855 - DNA, 15 bp, Homo sapiens
ttccttatctgacaa

SEQ ID NO: 340856 - DNA, 15 bp, Homo sapiens
cttccttatctgaca

SEQ ID NO: 340857 - DNA, 15 bp, Homo sapiens
ccttccttatctgac

SEQ ID NO: 340858 - DNA, 15 bp, Homo sapiens
tccttccttatctga

SEQ ID NO: 340859 - DNA, 15 bp, Homo sapiens
ttccttccttatctg

SEQ ID NO: 340860 - DNA, 15 bp, Homo sapiens
tttccttccttatct

SEQ ID NO: 340861 - DNA, 15 bp, Homo sapiens
ttttccttccttatc

SEQ ID NO: 340862 - DNA, 15 bp, Homo sapiens
gttttccttccttat

SEQ ID NO: 340863 - DNA, 15 bp, Homo sapiens
agttttccttcctta

SEQ ID NO: 340864 - DNA, 15 bp, Homo sapiens
tagttttccttcctt

SEQ ID NO: 340865 - DNA, 15 bp, Homo sapiens
gtagttttccttcct

SEQ ID NO: 340866 - DNA, 15 bp, Homo sapiens
agtagttttccttcc

SEQ ID NO: 340867 - DNA, 15 bp, Homo sapiens
aagtagttttccttc

SEQ ID NO: 340868 - DNA, 15 bp, Homo sapiens
gaagtagttttcctt

SEQ ID NO: 340869 - DNA, 15 bp, Homo sapiens
cgaagtagttttcct

SEQ ID NO: 340870 - DNA, 15 bp, Homo sapiens
gcgaagtagttttcc

SEQ ID NO: 340871 - DNA, 15 bp, Homo sapiens
tgcgaagtagttttc

SEQ ID NO: 340872 - DNA, 15 bp, Homo sapiens
ttgcgaagtagtttt

SEQ ID NO: 340873 - DNA, 15 bp, Homo sapiens
gttgcgaagtagttt

SEQ ID NO: 340874 - DNA, 15 bp, Homo sapiens
agttgcgaagtagtt

SEQ ID NO: 340875 - DNA, 15 bp, Homo sapiens
tagttgcgaagtagt

SEQ ID NO: 340876 - DNA, 15 bp, Homo sapiens
atagttgcgaagtag

SEQ ID NO: 340877 - DNA, 15 bp, Homo sapiens
tatagttgcgaagta

SEQ ID NO: 340878 - DNA, 15 bp, Homo sapiens
gtatagttgcgaagt

SEQ ID NO: 340879 - DNA, 15 bp, Homo sapiens
ggtatagttgcgaag

SEQ ID NO: 340880 - DNA, 15 bp, Homo sapiens
gggtatagttgcgaa

SEQ ID NO: 340881 - DNA, 15 bp, Homo sapiens
tgggtatagttgcga

SEQ ID NO: 340882 - DNA, 15 bp, Homo sapiens
ctgggtatagttgcg

SEQ ID NO: 340883 - DNA, 15 bp, Homo sapiens
tctgggtatagttgc

SEQ ID NO: 340884 - DNA, 15 bp, Homo sapiens
ttctgggtatagttg

SEQ ID NO: 340885 - DNA, 15 bp, Homo sapiens
gttctgggtatagtt

SEQ ID NO: 340886 - DNA, 15 bp, Homo sapiens
tgttctgggtatagt

SEQ ID NO: 340887 - DNA, 15 bp, Homo sapiens
atgttctgggtatag

SEQ ID NO: 340888 - DNA, 15 bp, Homo sapiens
tatgttctgggtata

SEQ ID NO: 340889 - DNA, 15 bp, Homo sapiens
ctatgttctgggtat

SEQ ID NO: 340890 - DNA, 15 bp, Homo sapiens
tctatgttctgggta

SEQ ID NO: 340891 - DNA, 15 bp, Homo sapiens
gtctatgttctgggt

SEQ ID NO: 340892 - DNA, 15 bp, Homo sapiens
tgtctatgttctggg

SEQ ID NO: 340893 - DNA, 15 bp, Homo sapiens
gtgtctatgttctgg

SEQ ID NO: 340894 - DNA, 15 bp, Homo sapiens
cgtgtctatgttctg

SEQ ID NO: 340895 - DNA, 15 bp, Homo sapiens
gcgtgtctatgttct

SEQ ID NO: 340896 - DNA, 15 bp, Homo sapiens
agcgtgtctatgttc

SEQ ID NO: 340897 - DNA, 15 bp, Homo sapiens
cagcgtgtctatgtt

SEQ ID NO: 340898 - DNA, 15 bp, Homo sapiens
ccagcgtgtctatgt

SEQ ID NO: 340899 - DNA, 15 bp, Homo sapiens
tccagcgtgtctatg

SEQ ID NO: 340900 - DNA, 15 bp, Homo sapiens
ttccagcgtgtctat

SEQ ID NO: 340901 - DNA, 15 bp, Homo sapiens
gttccagcgtgtcta

SEQ ID NO: 340902 - DNA, 15 bp, Homo sapiens
tgttccagcgtgtct

SEQ ID NO: 340903 - DNA, 15 bp, Homo sapiens
ctgttccagcgtgtc

SEQ ID NO: 340904 - DNA, 15 bp, Homo sapiens
cctgttccagcgtgt

SEQ ID NO: 340905 - DNA, 15 bp, Homo sapiens
acctgttccagcgtg

SEQ ID NO: 340906 - DNA, 15 bp, Homo sapiens
aacctgttccagcgt

SEQ ID NO: 340907 - DNA, 15 bp, Homo sapiens
caacctgttccagcg

SEQ ID NO: 340908 - DNA, 15 bp, Homo sapiens
gcaacctgttccagc

SEQ ID NO: 340909 - DNA, 15 bp, Homo sapiens
cgcaacctgttccag

SEQ ID NO: 340910 - DNA, 15 bp, Homo sapiens
ccgcaacctgttcca

SEQ ID NO: 340911 - DNA, 15 bp, Homo sapiens
cccgcaacctgttcc

SEQ ID NO: 340912 - DNA, 15 bp, Homo sapiens
tcccgcaacctgttc

SEQ ID NO: 340913 - DNA, 15 bp, Homo sapiens
ttcccgcaacctgtt

SEQ ID NO: 340914 - DNA, 15 bp, Homo sapiens
attcccgcaacctgt

SEQ ID NO: 340915 - DNA, 15 bp, Homo sapiens
gattcccgcaacctg

SEQ ID NO: 340916 - DNA, 15 bp, Homo sapiens
ggattcccgcaacct

SEQ ID NO: 340917 - DNA, 15 bp, Homo sapiens
tggattcccgcaacc

SEQ ID NO: 340918 - DNA, 15 bp, Homo sapiens
ttggattcccgcaac

SEQ ID NO: 340919 - DNA, 15 bp, Homo sapiens
tttggattcccgcaa

SEQ ID NO: 340920 - DNA, 15 bp, Homo sapiens
ctttggattcccgca

SEQ ID NO: 340921 - DNA, 15 bp, Homo sapiens
cctttggattcccgc

SEQ ID NO: 340922 - DNA, 15 bp, Homo sapiens
tcctttggattcccg

SEQ ID NO: 340923 - DNA, 15 bp, Homo sapiens
atcctttggattccc

SEQ ID NO: 340924 - DNA, 15 bp, Homo sapiens
tatcctttggattcc

SEQ ID NO: 340925 - DNA, 15 bp, Homo sapiens
ttatcctttggattc

SEQ ID NO: 340926 - DNA, 15 bp, Homo sapiens
attatcctttggatt

SEQ ID NO: 340927 - DNA, 15 bp, Homo sapiens
aattatcctttggat

SEQ ID NO: 340928 - DNA, 15 bp, Homo sapiens
gaattatcctttgga

SEQ ID NO: 340929 - DNA, 15 bp, Homo sapiens
tgaattatcctttgg

SEQ ID NO: 340930 - DNA, 15 bp, Homo sapiens
ctgaattatcctttg

SEQ ID NO: 340931 - DNA, 15 bp, Homo sapiens
actgaattatccttt

SEQ ID NO: 340932 - DNA, 15 bp, Homo sapiens
cactgaattatcctt

SEQ ID NO: 340933 - DNA, 15 bp, Homo sapiens
acactgaattatcct

SEQ ID NO: 340934 - DNA, 15 bp, Homo sapiens
gacactgaattatcc

SEQ ID NO: 340935 - DNA, 15 bp, Homo sapiens
tgacactgaattatc

SEQ ID NO: 340936 - DNA, 15 bp, Homo sapiens
atgacactgaattat

SEQ ID NO: 340937 - DNA, 15 bp, Homo sapiens
catgacactgaatta

SEQ ID NO: 340938 - DNA, 15 bp, Homo sapiens
ccatgacactgaatt

SEQ ID NO: 340939 - DNA, 15 bp, Homo sapiens
accatgacactgaat

SEQ ID NO: 340940 - DNA, 15 bp, Homo sapiens
aaccatgacactgaa

SEQ ID NO: 340941 - DNA, 15 bp, Homo sapiens
taaccatgacactga

SEQ ID NO: 340942 - DNA, 15 bp, Homo sapiens
ctaaccatgacactg

SEQ ID NO: 340943 - DNA, 15 bp, Homo sapiens
actaaccatgacact

SEQ ID NO: 340944 - DNA, 15 bp, Homo sapiens
tactaaccatgacac

SEQ ID NO: 340945 - DNA, 15 bp, Homo sapiens
ttactaaccatgaca

SEQ ID NO: 340946 - DNA, 15 bp, Homo sapiens
tttactaaccatgac

SEQ ID NO: 340947 - DNA, 15 bp, Homo sapiens
gtttactaaccatga

SEQ ID NO: 340948 - DNA, 15 bp, Homo sapiens
agtttactaaccatg

SEQ ID NO: 340949 - DNA, 15 bp, Homo sapiens
aagtttactaaccat

SEQ ID NO: 340950 - DNA, 15 bp, Homo sapiens
gaagtttactaacca

SEQ ID NO: 340951 - DNA, 15 bp, Homo sapiens
tgaagtttactaacc

SEQ ID NO: 340952 - DNA, 15 bp, Homo sapiens
ctgaagtttactaac

SEQ ID NO: 340953 - DNA, 15 bp, Homo sapiens
tctgaagtttactaa

SEQ ID NO: 340954 - DNA, 15 bp, Homo sapiens
ctctgaagtttacta

SEQ ID NO: 340955 - DNA, 15 bp, Homo sapiens
actctgaagtttact

SEQ ID NO: 340956 - DNA, 15 bp, Homo sapiens
cactctgaagtttac

SEQ ID NO: 340957 - DNA, 15 bp, Homo sapiens
ccactctgaagttta

SEQ ID NO: 340958 - DNA, 15 bp, Homo sapiens
accactctgaagttt

SEQ ID NO: 340959 - DNA, 15 bp, Homo sapiens
aaccactctgaagtt

SEQ ID NO: 340960 - DNA, 15 bp, Homo sapiens
aaaccactctgaagt

SEQ ID NO: 340961 - DNA, 15 bp, Homo sapiens
aaaaccactctgaag

SEQ ID NO: 340962 - DNA, 15 bp, Homo sapiens
gaaaaccactctgaa

SEQ ID NO: 340963 - DNA, 15 bp, Homo sapiens
agaaaaccactctga

SEQ ID NO: 340964 - DNA, 15 bp, Homo sapiens
cagaaaaccactctg

SEQ ID NO: 340965 - DNA, 15 bp, Homo sapiens
acagaaaaccactct

SEQ ID NO: 340966 - DNA, 15 bp, Homo sapiens
tacagaaaaccactc

SEQ ID NO: 340967 - DNA, 15 bp, Homo sapiens
ttacagaaaaccact

SEQ ID NO: 340968 - DNA, 15 bp, Homo sapiens
attacagaaaaccac

SEQ ID NO: 340969 - DNA, 15 bp, Homo sapiens
aattacagaaaacca

SEQ ID NO: 340970 - DNA, 15 bp, Homo sapiens
aaattacagaaaacc

SEQ ID NO: 340971 - DNA, 15 bp, Homo sapiens
taaattacagaaaac

SEQ ID NO: 340972 - DNA, 15 bp, Homo sapiens
ataaattacagaaaa

SEQ ID NO: 340973 - DNA, 15 bp, Homo sapiens
aataaattacagaaa

SEQ ID NO: 340974 - DNA, 15 bp, Homo sapiens
aaataaattacagaa

SEQ ID NO: 340975 - DNA, 15 bp, Homo sapiens
aaaataaattacaga

SEQ ID NO: 340976 - DNA, 15 bp, Homo sapiens
taaaataaattacag

SEQ ID NO: 340977 - DNA, 15 bp, Homo sapiens
ctaaaataaattaca

SEQ ID NO: 340978 - DNA, 15 bp, Homo sapiens
actaaaataaattac

SEQ ID NO: 340979 - DNA, 15 bp, Homo sapiens
aactaaaataaatta

SEQ ID NO: 340980 - DNA, 15 bp, Homo sapiens
aaactaaaataaatt

SEQ ID NO: 340981 - DNA, 15 bp, Homo sapiens
aaaactaaaataaat

SEQ ID NO: 340982 - DNA, 15 bp, Homo sapiens
taaaactaaaataaa

SEQ ID NO: 340983 - DNA, 15 bp, Homo sapiens
ataaaactaaaataa

SEQ ID NO: 340984 - DNA, 15 bp, Homo sapiens
tataaaactaaaata

SEQ ID NO: 340985 - DNA, 15 bp, Homo sapiens
ctataaaactaaaat

SEQ ID NO: 340986 - DNA, 15 bp, Homo sapiens
cctataaaactaaaa

SEQ ID NO: 340987 - DNA, 15 bp, Homo sapiens
tcctataaaactaaa

SEQ ID NO: 340988 - DNA, 15 bp, Homo sapiens
ttcctataaaactaa

SEQ ID NO: 340989 - DNA, 15 bp, Homo sapiens
cttcctataaaacta

SEQ ID NO: 340990 - DNA, 15 bp, Homo sapiens
tcttcctataaaact

SEQ ID NO: 340991 - DNA, 15 bp, Homo sapiens
atcttcctataaaac

SEQ ID NO: 340992 - DNA, 15 bp, Homo sapiens
tatcttcctataaaa

SEQ ID NO: 340993 - DNA, 15 bp, Homo sapiens
atatcttcctataaa

SEQ ID NO: 340994 - DNA, 15 bp, Homo sapiens
aatatcttcctataa

SEQ ID NO: 340995 - DNA, 15 bp, Homo sapiens
aaatatcttcctata

SEQ ID NO: 340996 - DNA, 15 bp, Homo sapiens
gaaatatcttcctat

SEQ ID NO: 340997 - DNA, 15 bp, Homo sapiens
ggaaatatcttccta

SEQ ID NO: 340998 - DNA, 15 bp, Homo sapiens
aggaaatatcttcct

SEQ ID NO: 340999 - DNA, 15 bp, Homo sapiens
taggaaatatcttcc

SEQ ID NO: 341000 - DNA, 15 bp, Homo sapiens
ataggaaatatcttc

SEQ ID NO: 341001 - DNA, 15 bp, Homo sapiens
tataggaaatatctt

SEQ ID NO: 341002 - DNA, 15 bp, Homo sapiens
ttataggaaatatct

SEQ ID NO: 341003 - DNA, 15 bp, Homo sapiens
tttataggaaatatc

SEQ ID NO: 341004 - DNA, 15 bp, Homo sapiens
ctttataggaaatat

SEQ ID NO: 341005 - DNA, 15 bp, Homo sapiens
gctttataggaaata

SEQ ID NO: 341006 - DNA, 15 bp, Homo sapiens
agctttataggaaat

SEQ ID NO: 341007 - DNA, 15 bp, Homo sapiens
cagctttataggaaa

SEQ ID NO: 341008 - DNA, 15 bp, Homo sapiens
tcagctttataggaa

SEQ ID NO: 341009 - DNA, 15 bp, Homo sapiens
gtcagctttatagga

SEQ ID NO: 341010 - DNA, 15 bp, Homo sapiens
agtcagctttatagg

SEQ ID NO: 341011 - DNA, 15 bp, Homo sapiens
cagtcagctttatag

SEQ ID NO: 341012 - DNA, 15 bp, Homo sapiens
gcagtcagctttata

SEQ ID NO: 341013 - DNA, 15 bp, Homo sapiens
ggcagtcagctttat

SEQ ID NO: 341014 - DNA, 15 bp, Homo sapiens
tggcagtcagcttta

SEQ ID NO: 341015 - DNA, 15 bp, Homo sapiens
atggcagtcagcttt

SEQ ID NO: 341016 - DNA, 15 bp, Homo sapiens
gatggcagtcagctt

SEQ ID NO: 341017 - DNA, 15 bp, Homo sapiens
cgatggcagtcagct

SEQ ID NO: 341018 - DNA, 15 bp, Homo sapiens
tcgatggcagtcagc

SEQ ID NO: 341019 - DNA, 15 bp, Homo sapiens
ctcgatggcagtcag

SEQ ID NO: 341020 - DNA, 15 bp, Homo sapiens
tctcgatggcagtca

SEQ ID NO: 341021 - DNA, 15 bp, Homo sapiens
ttctcgatggcagtc

SEQ ID NO: 341022 - DNA, 15 bp, Homo sapiens
cttctcgatggcagt

SEQ ID NO: 341023 - DNA, 15 bp, Homo sapiens
acttctcgatggcag

SEQ ID NO: 341024 - DNA, 15 bp, Homo sapiens
cacttctcgatggca

SEQ ID NO: 341025 - DNA, 15 bp, Homo sapiens
ccacttctcgatggc

SEQ ID NO: 341026 - DNA, 15 bp, Homo sapiens
tccacttctcgatgg

SEQ ID NO: 341027 - DNA, 15 bp, Homo sapiens
ctccacttctcgatg

SEQ ID NO: 341028 - DNA, 15 bp, Homo sapiens
tctccacttctcgat

SEQ ID NO: 341029 - DNA, 15 bp, Homo sapiens
atctccacttctcga

SEQ ID NO: 341030 - DNA, 15 bp, Homo sapiens
tatctccacttctcg

SEQ ID NO: 341031 - DNA, 15 bp, Homo sapiens
ttatctccacttctc

SEQ ID NO: 341032 - DNA, 15 bp, Homo sapiens
tttatctccacttct

SEQ ID NO: 341033 - DNA, 15 bp, Homo sapiens
ctttatctccacttc

SEQ ID NO: 341034 - DNA, 15 bp, Homo sapiens
gctttatctccactt

SEQ ID NO: 341035 - DNA, 15 bp, Homo sapiens
tgctttatctccact

SEQ ID NO: 341036 - DNA, 15 bp, Homo sapiens
atgctttatctccac

SEQ ID NO: 341037 - DNA, 15 bp, Homo sapiens
aatgctttatctcca

SEQ ID NO: 341038 - DNA, 15 bp, Homo sapiens
taatgctttatctcc

SEQ ID NO: 341039 - DNA, 15 bp, Homo sapiens
ataatgctttatctc

SEQ ID NO: 341040 - DNA, 15 bp, Homo sapiens
aataatgctttatct

SEQ ID NO: 341041 - DNA, 15 bp, Homo sapiens
aaataatgctttatc

SEQ ID NO: 341042 - DNA, 15 bp, Homo sapiens
taaataatgctttat

SEQ ID NO: 341043 - DNA, 15 bp, Homo sapiens
ttaaataatgcttta

SEQ ID NO: 341044 - DNA, 15 bp, Homo sapiens
attaaataatgcttt

SEQ ID NO: 341045 - DNA, 15 bp, Homo sapiens
gattaaataatgctt

SEQ ID NO: 341046 - DNA, 15 bp, Homo sapiens
tgattaaataatgct

SEQ ID NO: 341047 - DNA, 15 bp, Homo sapiens
atgattaaataatgc

SEQ ID NO: 341048 - DNA, 15 bp, Homo sapiens
catgattaaataatg

SEQ ID NO: 341049 - DNA, 15 bp, Homo sapiens
acatgattaaataat

SEQ ID NO: 341050 - DNA, 15 bp, Homo sapiens
aacatgattaaataa

SEQ ID NO: 341051 - DNA, 15 bp, Homo sapiens
taacatgattaaata

SEQ ID NO: 341052 - DNA, 15 bp, Homo sapiens
ataacatgattaaat

SEQ ID NO: 341053 - DNA, 15 bp, Homo sapiens
gataacatgattaaa

SEQ ID NO: 341054 - DNA, 15 bp, Homo sapiens
agataacatgattaa

SEQ ID NO: 341055 - DNA, 15 bp, Homo sapiens
gagataacatgatta

SEQ ID NO: 341056 - DNA, 15 bp, Homo sapiens
tgagataacatgatt

SEQ ID NO: 341057 - DNA, 15 bp, Homo sapiens
atgagataacatgat

SEQ ID NO: 341058 - DNA, 15 bp, Homo sapiens
aatgagataacatga

SEQ ID NO: 341059 - DNA, 15 bp, Homo sapiens
aaatgagataacatg

SEQ ID NO: 341060 - DNA, 15 bp, Homo sapiens
taaatgagataacat

SEQ ID NO: 341061 - DNA, 15 bp, Homo sapiens
ataaatgagataaca

SEQ ID NO: 341062 - DNA, 15 bp, Homo sapiens
gataaatgagataac

SEQ ID NO: 341063 - DNA, 15 bp, Homo sapiens
cgataaatgagataa

SEQ ID NO: 341064 - DNA, 15 bp, Homo sapiens
tcgataaatgagata

SEQ ID NO: 341065 - DNA, 15 bp, Homo sapiens
atcgataaatgagat

SEQ ID NO: 341066 - DNA, 15 bp, Homo sapiens
tatcgataaatgaga

SEQ ID NO: 341067 - DNA, 15 bp, Homo sapiens
ttatcgataaatgag

SEQ ID NO: 341068 - DNA, 15 bp, Homo sapiens
gttatcgataaatga

SEQ ID NO: 341069 - DNA, 15 bp, Homo sapiens
ggttatcgataaatg

SEQ ID NO: 341070 - DNA, 15 bp, Homo sapiens
aggttatcgataaat

SEQ ID NO: 341071 - DNA, 15 bp, Homo sapiens
gaggttatcgataaa

SEQ ID NO: 341072 - DNA, 15 bp, Homo sapiens
tgaggttatcgataa

SEQ ID NO: 341073 - DNA, 15 bp, Homo sapiens
ctgaggttatcgata

SEQ ID NO: 341074 - DNA, 15 bp, Homo sapiens
tctgaggttatcgat

SEQ ID NO: 341075 - DNA, 15 bp, Homo sapiens
ttctgaggttatcga

SEQ ID NO: 341076 - DNA, 15 bp, Homo sapiens
tttctgaggttatcg

SEQ ID NO: 341077 - DNA, 15 bp, Homo sapiens
ttttctgaggttatc

SEQ ID NO: 341078 - DNA, 15 bp, Homo sapiens
cttttctgaggttat

SEQ ID NO: 341079 - DNA, 15 bp, Homo sapiens
acttttctgaggtta

SEQ ID NO: 341080 - DNA, 15 bp, Homo sapiens
tacttttctgaggtt

SEQ ID NO: 341081 - DNA, 15 bp, Homo sapiens
ctacttttctgaggt

SEQ ID NO: 341082 - DNA, 15 bp, Homo sapiens
tctacttttctgagg

SEQ ID NO: 341083 - DNA, 15 bp, Homo sapiens
ttctacttttctgag

SEQ ID NO: 341084 - DNA, 15 bp, Homo sapiens
tttctacttttctga

SEQ ID NO: 341085 - DNA, 15 bp, Homo sapiens
ttttctacttttctg

SEQ ID NO: 341086 - DNA, 15 bp, Homo sapiens
gttttctacttttct

SEQ ID NO: 341087 - DNA, 15 bp, Homo sapiens
tgttttctacttttc

SEQ ID NO: 341088 - DNA, 15 bp, Homo sapiens
ttgttttctactttt

SEQ ID NO: 341089 - DNA, 15 bp, Homo sapiens
tttgttttctacttt

SEQ ID NO: 341090 - DNA, 15 bp, Homo sapiens
ttttgttttctactt

SEQ ID NO: 341091 - DNA, 15 bp, Homo sapiens
tttttgttttctact

SEQ ID NO: 341092 - DNA, 15 bp, Homo sapiens
atttttgttttctac

SEQ ID NO: 341093 - DNA, 15 bp, Homo sapiens
tatttttgttttcta

SEQ ID NO: 341094 - DNA, 15 bp, Homo sapiens
ttatttttgttttct

SEQ ID NO: 341095 - DNA, 15 bp, Homo sapiens
attatttttgttttc

SEQ ID NO: 341096 - DNA, 15 bp, Homo sapiens
tattatttttgtttt

SEQ ID NO: 341097 - DNA, 15 bp, Homo sapiens
ttattatttttgttt

SEQ ID NO: 341098 - DNA, 15 bp, Homo sapiens
tttattatttttgtt

SEQ ID NO: 341099 - DNA, 15 bp, Homo sapiens
ttttattatttttgt

SEQ ID NO: 341100 - DNA, 15 bp, Homo sapiens
tttttattatttttg

SEQ ID NO: 341101 - DNA, 15 bp, Homo sapiens
gtttttattattttt

SEQ ID NO: 341102 - DNA, 15 bp, Homo sapiens
tgtttttattatttt

SEQ ID NO: 341103 - DNA, 15 bp, Homo sapiens
ctgtttttattattt

SEQ ID NO: 341104 - DNA, 15 bp, Homo sapiens
tctgtttttattatt

SEQ ID NO: 341105 - DNA, 15 bp, Homo sapiens
ttctgtttttattat

SEQ ID NO: 341106 - DNA, 15 bp, Homo sapiens
cttctgtttttatta

SEQ ID NO: 341107 - DNA, 15 bp, Homo sapiens
acttctgtttttatt

SEQ ID NO: 341108 - DNA, 15 bp, Homo sapiens
tacttctgtttttat

SEQ ID NO: 341109 - DNA, 15 bp, Homo sapiens
atacttctgttttta

SEQ ID NO: 341110 - DNA, 15 bp, Homo sapiens
aatacttctgttttt

SEQ ID NO: 341111 - DNA, 15 bp, Homo sapiens
caatacttctgtttt

SEQ ID NO: 341112 - DNA, 15 bp, Homo sapiens
ccaatacttctgttt

SEQ ID NO: 341113 - DNA, 15 bp, Homo sapiens
gccaatacttctgtt

SEQ ID NO: 341114 - DNA, 15 bp, Homo sapiens
ggccaatacttctgt

SEQ ID NO: 341115 - DNA, 15 bp, Homo sapiens
aggccaatacttctg

SEQ ID NO: 341116 - DNA, 15 bp, Homo sapiens
aaggccaatacttct

SEQ ID NO: 341117 - DNA, 15 bp, Homo sapiens
caaggccaatacttc

SEQ ID NO: 341118 - DNA, 15 bp, Homo sapiens
tcaaggccaatactt

SEQ ID NO: 341119 - DNA, 15 bp, Homo sapiens
gtcaaggccaatact

SEQ ID NO: 341120 - DNA, 15 bp, Homo sapiens
tgtcaaggccaatac

SEQ ID NO: 341121 - DNA, 15 bp, Homo sapiens
ctgtcaaggccaata

SEQ ID NO: 341122 - DNA, 15 bp, Homo sapiens
actgtcaaggccaat

SEQ ID NO: 341123 - DNA, 15 bp, Homo sapiens
aactgtcaaggccaa

SEQ ID NO: 341124 - DNA, 15 bp, Homo sapiens
taactgtcaaggcca

SEQ ID NO: 341125 - DNA, 15 bp, Homo sapiens
ttaactgtcaaggcc

SEQ ID NO: 341126 - DNA, 15 bp, Homo sapiens
attaactgtcaaggc

SEQ ID NO: 341127 - DNA, 15 bp, Homo sapiens
aattaactgtcaagg

SEQ ID NO: 341128 - DNA, 15 bp, Homo sapiens
taattaactgtcaag

SEQ ID NO: 341129 - DNA, 15 bp, Homo sapiens
ataattaactgtcaa

SEQ ID NO: 341130 - DNA, 15 bp, Homo sapiens
tataattaactgtca

SEQ ID NO: 341131 - DNA, 15 bp, Homo sapiens
ctataattaactgtc

SEQ ID NO: 341132 - DNA, 15 bp, Homo sapiens
tctataattaactgt

SEQ ID NO: 341133 - DNA, 15 bp, Homo sapiens
ttctataattaactg

SEQ ID NO: 341134 - DNA, 15 bp, Homo sapiens
tttctataattaact

SEQ ID NO: 341135 - DNA, 15 bp, Homo sapiens
ttttctataattaac

SEQ ID NO: 341136 - DNA, 15 bp, Homo sapiens
gttttctataattaa

SEQ ID NO: 341137 - DNA, 15 bp, Homo sapiens
ggttttctataatta

SEQ ID NO: 341138 - DNA, 15 bp, Homo sapiens
aggttttctataatt

SEQ ID NO: 341139 - DNA, 15 bp, Homo sapiens
gaggttttctataat

SEQ ID NO: 341140 - DNA, 15 bp, Homo sapiens
tgaggttttctataa

SEQ ID NO: 341141 - DNA, 15 bp, Homo sapiens
ctgaggttttctata

SEQ ID NO: 341142 - DNA, 15 bp, Homo sapiens
tctgaggttttctat

SEQ ID NO: 341143 - DNA, 15 bp, Homo sapiens
atctgaggttttcta

SEQ ID NO: 341144 - DNA, 15 bp, Homo sapiens
tatctgaggttttct

SEQ ID NO: 341145 - DNA, 15 bp, Homo sapiens
atatctgaggttttc

SEQ ID NO: 341146 - DNA, 15 bp, Homo sapiens
aatatctgaggtttt

SEQ ID NO: 341147 - DNA, 15 bp, Homo sapiens
taatatctgaggttt

SEQ ID NO: 341148 - DNA, 15 bp, Homo sapiens
ttaatatctgaggtt

SEQ ID NO: 341149 - DNA, 15 bp, Homo sapiens
attaatatctgaggt

SEQ ID NO: 341150 - DNA, 15 bp, Homo sapiens
aattaatatctgagg

SEQ ID NO: 341151 - DNA, 15 bp, Homo sapiens
aaattaatatctgag

SEQ ID NO: 341152 - DNA, 15 bp, Homo sapiens
caaattaatatctga

SEQ ID NO: 341153 - DNA, 15 bp, Homo sapiens
gcaaattaatatctg

SEQ ID NO: 341154 - DNA, 15 bp, Homo sapiens
agcaaattaatatct

SEQ ID NO: 341155 - DNA, 15 bp, Homo sapiens
aagcaaattaatatc

SEQ ID NO: 341156 - DNA, 15 bp, Homo sapiens
aaagcaaattaatat

SEQ ID NO: 341157 - DNA, 15 bp, Homo sapiens
aaaagcaaattaata

SEQ ID NO: 341158 - DNA, 15 bp, Homo sapiens
caaaagcaaattaat

SEQ ID NO: 341159 - DNA, 15 bp, Homo sapiens
tcaaaagcaaattaa

SEQ ID NO: 341160 - DNA, 15 bp, Homo sapiens
atcaaaagcaaatta

SEQ ID NO: 341161 - DNA, 15 bp, Homo sapiens
aatcaaaagcaaatt

SEQ ID NO: 341162 - DNA, 15 bp, Homo sapiens
aaatcaaaagcaaat

SEQ ID NO: 341163 - DNA, 15 bp, Homo sapiens
gaaatcaaaagcaaa

SEQ ID NO: 341164 - DNA, 15 bp, Homo sapiens
tgaaatcaaaagcaa

SEQ ID NO: 341165 - DNA, 15 bp, Homo sapiens
ttgaaatcaaaagca

SEQ ID NO: 341166 - DNA, 15 bp, Homo sapiens
tttgaaatcaaaagc

SEQ ID NO: 341167 - DNA, 15 bp, Homo sapiens
ttttgaaatcaaaag

SEQ ID NO: 341168 - DNA, 15 bp, Homo sapiens
cttttgaaatcaaaa

SEQ ID NO: 341169 - DNA, 15 bp, Homo sapiens
tcttttgaaatcaaa

SEQ ID NO: 341170 - DNA, 15 bp, Homo sapiens
atcttttgaaatcaa

SEQ ID NO: 341171 - DNA, 15 bp, Homo sapiens
catcttttgaaatca

SEQ ID NO: 341172 - DNA, 15 bp, Homo sapiens
gcatcttttgaaatc

SEQ ID NO: 341173 - DNA, 15 bp, Homo sapiens
agcatcttttgaaat

SEQ ID NO: 341174 - DNA, 15 bp, Homo sapiens
cagcatcttttgaaa

SEQ ID NO: 341175 - DNA, 15 bp, Homo sapiens
gcagcatcttttgaa

SEQ ID NO: 341176 - DNA, 15 bp, Homo sapiens
tgcagcatcttttga

SEQ ID NO: 341177 - DNA, 15 bp, Homo sapiens
ctgcagcatcttttg

SEQ ID NO: 341178 - DNA, 15 bp, Homo sapiens
actgcagcatctttt

SEQ ID NO: 341179 - DNA, 15 bp, Homo sapiens
aactgcagcatcttt

SEQ ID NO: 341180 - DNA, 15 bp, Homo sapiens
caactgcagcatctt

SEQ ID NO: 341181 - DNA, 15 bp, Homo sapiens
gcaactgcagcatct

SEQ ID NO: 341182 - DNA, 15 bp, Homo sapiens
tgcaactgcagcatc

SEQ ID NO: 341183 - DNA, 15 bp, Homo sapiens
atgcaactgcagcat

SEQ ID NO: 341184 - DNA, 15 bp, Homo sapiens
catgcaactgcagca

SEQ ID NO: 341185 - DNA, 15 bp, Homo sapiens
gcatgcaactgcagc

SEQ ID NO: 341186 - DNA, 15 bp, Homo sapiens
tgcatgcaactgcag

SEQ ID NO: 341187 - DNA, 15 bp, Homo sapiens
atgcatgcaactgca

SEQ ID NO: 341188 - DNA, 15 bp, Homo sapiens
aatgcatgcaactgc

SEQ ID NO: 341189 - DNA, 15 bp, Homo sapiens
gaatgcatgcaactg

SEQ ID NO: 341190 - DNA, 15 bp, Homo sapiens
tgaatgcatgcaact

SEQ ID NO: 341191 - DNA, 15 bp, Homo sapiens
ttgaatgcatgcaac

SEQ ID NO: 341192 - DNA, 15 bp, Homo sapiens
attgaatgcatgcaa

SEQ ID NO: 341193 - DNA, 15 bp, Homo sapiens
aattgaatgcatgca

SEQ ID NO: 341194 - DNA, 15 bp, Homo sapiens
taattgaatgcatgc

SEQ ID NO: 341195 - DNA, 15 bp, Homo sapiens
ataattgaatgcatg

SEQ ID NO: 341196 - DNA, 15 bp, Homo sapiens
aataattgaatgcat

SEQ ID NO: 341197 - DNA, 15 bp, Homo sapiens
aaataattgaatgca

SEQ ID NO: 341198 - DNA, 15 bp, Homo sapiens
aaaataattgaatgc

SEQ ID NO: 341199 - DNA, 15 bp, Homo sapiens
taaaataattgaatg

SEQ ID NO: 341200 - DNA, 15 bp, Homo sapiens
ttaaaataattgaat

SEQ ID NO: 341201 - DNA, 15 bp, Homo sapiens
tttaaaataattgaa

SEQ ID NO: 341202 - DNA, 15 bp, Homo sapiens
atttaaaataattga

SEQ ID NO: 341203 - DNA, 15 bp, Homo sapiens
tatttaaaataattg

SEQ ID NO: 341204 - DNA, 15 bp, Homo sapiens
ttatttaaaataatt

SEQ ID NO: 341205 - DNA, 15 bp, Homo sapiens
attatttaaaataat

SEQ ID NO: 341206 - DNA, 15 bp, Homo sapiens
gattatttaaaataa

SEQ ID NO: 341207 - DNA, 15 bp, Homo sapiens
agattatttaaaata

SEQ ID NO: 341208 - DNA, 15 bp, Homo sapiens
aagattatttaaaat

SEQ ID NO: 341209 - DNA, 15 bp, Homo sapiens
aaagattatttaaaa

SEQ ID NO: 341210 - DNA, 15 bp, Homo sapiens
aaaagattatttaaa

SEQ ID NO: 341211 - DNA, 15 bp, Homo sapiens
gaaaagattatttaa

SEQ ID NO: 341212 - DNA, 15 bp, Homo sapiens
agaaaagattattta

SEQ ID NO: 341213 - DNA, 15 bp, Homo sapiens
cagaaaagattattt

SEQ ID NO: 341214 - DNA, 15 bp, Homo sapiens
ccagaaaagattatt

SEQ ID NO: 341215 - DNA, 15 bp, Homo sapiens
gccagaaaagattat

SEQ ID NO: 341216 - DNA, 15 bp, Homo sapiens
agccagaaaagatta

SEQ ID NO: 341217 - DNA, 15 bp, Homo sapiens
cagccagaaaagatt

SEQ ID NO: 341218 - DNA, 15 bp, Homo sapiens
tcagccagaaaagat

SEQ ID NO: 341219 - DNA, 15 bp, Homo sapiens
ctcagccagaaaaga

SEQ ID NO: 341220 - DNA, 15 bp, Homo sapiens
actcagccagaaaag

SEQ ID NO: 341221 - DNA, 15 bp, Homo sapiens
cactcagccagaaaa

SEQ ID NO: 341222 - DNA, 15 bp, Homo sapiens
gcactcagccagaaa

SEQ ID NO: 341223 - DNA, 15 bp, Homo sapiens
tgcactcagccagaa

SEQ ID NO: 341224 - DNA, 15 bp, Homo sapiens
ctgcactcagccaga

SEQ ID NO: 341225 - DNA, 15 bp, Homo sapiens
actgcactcagccag

SEQ ID NO: 341226 - DNA, 15 bp, Homo sapiens
cactgcactcagcca

SEQ ID NO: 341227 - DNA, 15 bp, Homo sapiens
ccactgcactcagcc

SEQ ID NO: 341228 - DNA, 15 bp, Homo sapiens
gccactgcactcagc

SEQ ID NO: 341229 - DNA, 15 bp, Homo sapiens
agccactgcactcag

SEQ ID NO: 341230 - DNA, 15 bp, Homo sapiens
gagccactgcactca

SEQ ID NO: 341231 - DNA, 15 bp, Homo sapiens
tgagccactgcactc

SEQ ID NO: 341232 - DNA, 15 bp, Homo sapiens
gtgagccactgcact

SEQ ID NO: 341233 - DNA, 15 bp, Homo sapiens
aggattacaggcgtg

SEQ ID NO: 341234 - DNA, 15 bp, Homo sapiens
taggattacaggcgt

SEQ ID NO: 341235 - DNA, 15 bp, Homo sapiens
ctaggattacaggcg

SEQ ID NO: 341236 - DNA, 15 bp, Homo sapiens
gctaggattacaggc

SEQ ID NO: 341237 - DNA, 15 bp, Homo sapiens
tgctaggattacagg

SEQ ID NO: 341238 - DNA, 15 bp, Homo sapiens
gtgctaggattacag

SEQ ID NO: 341239 - DNA, 15 bp, Homo sapiens
ttcccaaagtgctag

SEQ ID NO: 341240 - DNA, 15 bp, Homo sapiens
cttcccaaagtgcta

SEQ ID NO: 341241 - DNA, 15 bp, Homo sapiens
gcttcccaaagtgct

SEQ ID NO: 341242 - DNA, 15 bp, Homo sapiens
ggcttcccaaagtgc

SEQ ID NO: 341243 - DNA, 15 bp, Homo sapiens
cggcttcccaaagtg

SEQ ID NO: 341244 - DNA, 15 bp, Homo sapiens
tcggcttcccaaagt

SEQ ID NO: 341245 - DNA, 15 bp, Homo sapiens
ctcggcttcccaaag

SEQ ID NO: 341246 - DNA, 15 bp, Homo sapiens
cctcggcttcccaaa

SEQ ID NO: 341247 - DNA, 15 bp, Homo sapiens
gcctcggcttcccaa

SEQ ID NO: 341248 - DNA, 15 bp, Homo sapiens
cgcctcggcttccca

SEQ ID NO: 341249 - DNA, 15 bp, Homo sapiens
ccgcctcggcttccc

SEQ ID NO: 341250 - DNA, 15 bp, Homo sapiens
cccgcctcggcttcc

SEQ ID NO: 341251 - DNA, 15 bp, Homo sapiens
gcccgcctcggcttc

SEQ ID NO: 341252 - DNA, 15 bp, Homo sapiens
tgcccgcctcggctt

SEQ ID NO: 341253 - DNA, 15 bp, Homo sapiens
ctgcccgcctcggct

SEQ ID NO: 341254 - DNA, 15 bp, Homo sapiens
tctgcccgcctcggc

SEQ ID NO: 341255 - DNA, 15 bp, Homo sapiens
atctgcccgcctcgg

SEQ ID NO: 341256 - DNA, 15 bp, Homo sapiens
gatctgcccgcctcg

SEQ ID NO: 341257 - DNA, 15 bp, Homo sapiens
ggatctgcccgcctc

SEQ ID NO: 341258 - DNA, 15 bp, Homo sapiens
gggatctgcccgcct

SEQ ID NO: 341259 - DNA, 15 bp, Homo sapiens
tgggatctgcccgcc

SEQ ID NO: 341260 - DNA, 15 bp, Homo sapiens
atgggatctgcccgc

SEQ ID NO: 341261 - DNA, 15 bp, Homo sapiens
catgggatctgcccg

SEQ ID NO: 341262 - DNA, 15 bp, Homo sapiens
tcatgggatctgccc

SEQ ID NO: 341263 - DNA, 15 bp, Homo sapiens
ttcatgggatctgcc

SEQ ID NO: 341264 - DNA, 15 bp, Homo sapiens
cttcatgggatctgc

SEQ ID NO: 341265 - DNA, 15 bp, Homo sapiens
gcttcatgggatctg

SEQ ID NO: 341266 - DNA, 15 bp, Homo sapiens
ggcttcatgggatct

SEQ ID NO: 341267 - DNA, 15 bp, Homo sapiens
tggcttcatgggatc

SEQ ID NO: 341268 - DNA, 15 bp, Homo sapiens
ttggcttcatgggat

SEQ ID NO: 341269 - DNA, 15 bp, Homo sapiens
cttggcttcatggga

SEQ ID NO: 341270 - DNA, 15 bp, Homo sapiens
tcttggcttcatggg

SEQ ID NO: 341271 - DNA, 15 bp, Homo sapiens
ctcttggcttcatgg

SEQ ID NO: 341272 - DNA, 15 bp, Homo sapiens
actcttggcttcatg

SEQ ID NO: 341273 - DNA, 15 bp, Homo sapiens
aactcttggcttcat

SEQ ID NO: 341274 - DNA, 15 bp, Homo sapiens
gaactcttggcttca

SEQ ID NO: 341275 - DNA, 15 bp, Homo sapiens
cgaactcttggcttc

SEQ ID NO: 341276 - DNA, 15 bp, Homo sapiens
tcgaactcttggctt

SEQ ID NO: 341277 - DNA, 15 bp, Homo sapiens
ctcgaactcttggct

SEQ ID NO: 341278 - DNA, 15 bp, Homo sapiens
tctcgaactcttggc

SEQ ID NO: 341279 - DNA, 15 bp, Homo sapiens
ttctcgaactcttgg

SEQ ID NO: 341280 - DNA, 15 bp, Homo sapiens
gttctcgaactcttg

SEQ ID NO: 341281 - DNA, 15 bp, Homo sapiens
tgttctcgaactctt

SEQ ID NO: 341282 - DNA, 15 bp, Homo sapiens
ctgttctcgaactct

SEQ ID NO: 341283 - DNA, 15 bp, Homo sapiens
gctgttctcgaactc

SEQ ID NO: 341284 - DNA, 15 bp, Homo sapiens
agctgttctcgaact

SEQ ID NO: 341285 - DNA, 15 bp, Homo sapiens
aagctgttctcgaac

SEQ ID NO: 341286 - DNA, 15 bp, Homo sapiens
caagctgttctcgaa

SEQ ID NO: 341287 - DNA, 15 bp, Homo sapiens
ccaagctgttctcga

SEQ ID NO: 341288 - DNA, 15 bp, Homo sapiens
gccaagctgttctcg

SEQ ID NO: 341289 - DNA, 15 bp, Homo sapiens
ggccaagctgttctc

SEQ ID NO: 341290 - DNA, 15 bp, Homo sapiens
tggccaagctgttct

SEQ ID NO: 341291 - DNA, 15 bp, Homo sapiens
ttggccaagctgttc

SEQ ID NO: 341292 - DNA, 15 bp, Homo sapiens
gttggccaagctgtt

SEQ ID NO: 341293 - DNA, 15 bp, Homo sapiens
tgttggccaagctgt

SEQ ID NO: 341294 - DNA, 15 bp, Homo sapiens
atgttggccaagctg

SEQ ID NO: 341295 - DNA, 15 bp, Homo sapiens
catgttggccaagct

SEQ ID NO: 341296 - DNA, 15 bp, Homo sapiens
ccatgttggccaagc

SEQ ID NO: 341297 - DNA, 15 bp, Homo sapiens
accatgttggccaag

SEQ ID NO: 341298 - DNA, 15 bp, Homo sapiens
caccatgttggccaa

SEQ ID NO: 341299 - DNA, 15 bp, Homo sapiens
atttcaccatgttgg

SEQ ID NO: 341300 - DNA, 15 bp, Homo sapiens
gatttcaccatgttg

SEQ ID NO: 341301 - DNA, 15 bp, Homo sapiens
ggatttcaccatgtt

SEQ ID NO: 341302 - DNA, 15 bp, Homo sapiens
gggatttcaccatgt

SEQ ID NO: 341303 - DNA, 15 bp, Homo sapiens
tgggatttcaccatg

SEQ ID NO: 341304 - DNA, 15 bp, Homo sapiens
ttgggatttcaccat

SEQ ID NO: 341305 - DNA, 15 bp, Homo sapiens
gttgggatttcacca

SEQ ID NO: 341306 - DNA, 15 bp, Homo sapiens
agttgggatttcacc

SEQ ID NO: 341307 - DNA, 15 bp, Homo sapiens
gagttgggatttcac

SEQ ID NO: 341308 - DNA, 15 bp, Homo sapiens
agagttgggatttca

SEQ ID NO: 341309 - DNA, 15 bp, Homo sapiens
tagagttgggatttc

SEQ ID NO: 341310 - DNA, 15 bp, Homo sapiens
gtagagttgggattt

SEQ ID NO: 341311 - DNA, 15 bp, Homo sapiens
agtagagttgggatt

SEQ ID NO: 341312 - DNA, 15 bp, Homo sapiens
tagtagagttgggat

SEQ ID NO: 341313 - DNA, 15 bp, Homo sapiens
ctagtagagttggga

SEQ ID NO: 341314 - DNA, 15 bp, Homo sapiens
tctagtagagttggg

SEQ ID NO: 341315 - DNA, 15 bp, Homo sapiens
ttctagtagagttgg

SEQ ID NO: 341316 - DNA, 15 bp, Homo sapiens
tttctagtagagttg

SEQ ID NO: 341317 - DNA, 15 bp, Homo sapiens
atttctagtagagtt

SEQ ID NO: 341318 - DNA, 15 bp, Homo sapiens
tatttctagtagagt

SEQ ID NO: 341319 - DNA, 15 bp, Homo sapiens
gtatttctagtagag

SEQ ID NO: 341320 - DNA, 15 bp, Homo sapiens
agtatttctagtaga

SEQ ID NO: 341321 - DNA, 15 bp, Homo sapiens
tagtatttctagtag

SEQ ID NO: 341322 - DNA, 15 bp, Homo sapiens
ttagtatttctagta

SEQ ID NO: 341323 - DNA, 15 bp, Homo sapiens
tttagtatttctagt

SEQ ID NO: 341324 - DNA, 15 bp, Homo sapiens
ttttagtatttctag

SEQ ID NO: 341325 - DNA, 15 bp, Homo sapiens
attttagtatttcta

SEQ ID NO: 341326 - DNA, 15 bp, Homo sapiens
aattttagtatttct

SEQ ID NO: 341327 - DNA, 15 bp, Homo sapiens
taattttagtatttc

SEQ ID NO: 341328 - DNA, 15 bp, Homo sapiens
ctaattttagtattt

SEQ ID NO: 341329 - DNA, 15 bp, Homo sapiens
gctaattttagtatt

SEQ ID NO: 341330 - DNA, 15 bp, Homo sapiens
ggctaattttagtat

SEQ ID NO: 341331 - DNA, 15 bp, Homo sapiens
cggctaattttagta

SEQ ID NO: 341332 - DNA, 15 bp, Homo sapiens
ccggctaattttagt

SEQ ID NO: 341333 - DNA, 15 bp, Homo sapiens
cccggctaattttag

SEQ ID NO: 341334 - DNA, 15 bp, Homo sapiens
gcccggctaatttta

SEQ ID NO: 341335 - DNA, 15 bp, Homo sapiens
ctgccaccatgcccg

SEQ ID NO: 341336 - DNA, 15 bp, Homo sapiens
cctgccaccatgccc

SEQ ID NO: 341337 - DNA, 15 bp, Homo sapiens
gcctgccaccatgcc

SEQ ID NO: 341338 - DNA, 15 bp, Homo sapiens
cgcctgccaccatgc

SEQ ID NO: 341339 - DNA, 15 bp, Homo sapiens
gcgcctgccaccatg

SEQ ID NO: 341340 - DNA, 15 bp, Homo sapiens
ggcgcctgccaccat

SEQ ID NO: 341341 - DNA, 15 bp, Homo sapiens
aggcgcctgccacca

SEQ ID NO: 341342 - DNA, 15 bp, Homo sapiens
caggcgcctgccacc

SEQ ID NO: 341343 - DNA, 15 bp, Homo sapiens
acaggcgcctgccac

SEQ ID NO: 341344 - DNA, 15 bp, Homo sapiens
tacaggcgcctgcca

SEQ ID NO: 341345 - DNA, 15 bp, Homo sapiens
ttacaggcgcctgcc

SEQ ID NO: 341346 - DNA, 15 bp, Homo sapiens
attacaggcgcctgc

SEQ ID NO: 341347 - DNA, 15 bp, Homo sapiens
gattacaggcgcctg

SEQ ID NO: 341348 - DNA, 15 bp, Homo sapiens
ggattacaggcgcct

SEQ ID NO: 341349 - DNA, 15 bp, Homo sapiens
gggattacaggcgcc

SEQ ID NO: 341350 - DNA, 15 bp, Homo sapiens
tgggattacaggcgc

SEQ ID NO: 341351 - DNA, 15 bp, Homo sapiens
gcctcagcctcctga

SEQ ID NO: 341352 - DNA, 15 bp, Homo sapiens
tgcctcagcctcctg

SEQ ID NO: 341353 - DNA, 15 bp, Homo sapiens
gtgcctcagcctcct

SEQ ID NO: 341354 - DNA, 15 bp, Homo sapiens
cgtgcctcagcctcc

SEQ ID NO: 341355 - DNA, 15 bp, Homo sapiens
tcgtgcctcagcctc

SEQ ID NO: 341356 - DNA, 15 bp, Homo sapiens
ctcgtgcctcagcct

SEQ ID NO: 341357 - DNA, 15 bp, Homo sapiens
tctcgtgcctcagcc

SEQ ID NO: 341358 - DNA, 15 bp, Homo sapiens
ttctcgtgcctcagc

SEQ ID NO: 341359 - DNA, 15 bp, Homo sapiens
attctcgtgcctcag

SEQ ID NO: 341360 - DNA, 15 bp, Homo sapiens
gattctcgtgcctca

SEQ ID NO: 341361 - DNA, 15 bp, Homo sapiens
tgattctcgtgcctc

SEQ ID NO: 341362 - DNA, 15 bp, Homo sapiens
gtgattctcgtgcct

SEQ ID NO: 341363 - DNA, 15 bp, Homo sapiens
agtgattctcgtgcc

SEQ ID NO: 341364 - DNA, 15 bp, Homo sapiens
aagtgattctcgtgc

SEQ ID NO: 341365 - DNA, 15 bp, Homo sapiens
caagtgattctcgtg

SEQ ID NO: 341366 - DNA, 15 bp, Homo sapiens
tcaagtgattctcgt

SEQ ID NO: 341367 - DNA, 15 bp, Homo sapiens
ttcaagtgattctcg

SEQ ID NO: 341368 - DNA, 15 bp, Homo sapiens
actcccaggttcaag

SEQ ID NO: 341369 - DNA, 15 bp, Homo sapiens
aactcccaggttcaa

SEQ ID NO: 341370 - DNA, 15 bp, Homo sapiens
caactcccaggttca

SEQ ID NO: 341371 - DNA, 15 bp, Homo sapiens
ccaactcccaggttc

SEQ ID NO: 341372 - DNA, 15 bp, Homo sapiens
tccaactcccaggtt

SEQ ID NO: 341373 - DNA, 15 bp, Homo sapiens
ctccaactcccaggt

SEQ ID NO: 341374 - DNA, 15 bp, Homo sapiens
cctccaactcccagg

SEQ ID NO: 341375 - DNA, 15 bp, Homo sapiens
acctccaactcccag

SEQ ID NO: 341376 - DNA, 15 bp, Homo sapiens
aacctccaactccca

SEQ ID NO: 341377 - DNA, 15 bp, Homo sapiens
caacctccaactccc

SEQ ID NO: 341378 - DNA, 15 bp, Homo sapiens
gcaacctccaactcc

SEQ ID NO: 341379 - DNA, 15 bp, Homo sapiens
tgcaacctccaactc

SEQ ID NO: 341380 - DNA, 15 bp, Homo sapiens
ctgcaacctccaact

SEQ ID NO: 341381 - DNA, 15 bp, Homo sapiens
gctgcaacctccaac

SEQ ID NO: 341382 - DNA, 15 bp, Homo sapiens
cgctgcaacctccaa

SEQ ID NO: 341383 - DNA, 15 bp, Homo sapiens
tcgctgcaacctcca

SEQ ID NO: 341384 - DNA, 15 bp, Homo sapiens
ctcgctgcaacctcc

SEQ ID NO: 341385 - DNA, 15 bp, Homo sapiens
gctcgctgcaacctc

SEQ ID NO: 341386 - DNA, 15 bp, Homo sapiens
ggctcgctgcaacct

SEQ ID NO: 341387 - DNA, 15 bp, Homo sapiens
tggctcgctgcaacc

SEQ ID NO: 341388 - DNA, 15 bp, Homo sapiens
ttggctcgctgcaac

SEQ ID NO: 341389 - DNA, 15 bp, Homo sapiens
cttggctcgctgcaa

SEQ ID NO: 341390 - DNA, 15 bp, Homo sapiens
tcttggctcgctgca

SEQ ID NO: 341391 - DNA, 15 bp, Homo sapiens
atcttggctcgctgc

SEQ ID NO: 341392 - DNA, 15 bp, Homo sapiens
aatcttggctcgctg

SEQ ID NO: 341393 - DNA, 15 bp, Homo sapiens
caatcttggctcgct

SEQ ID NO: 341394 - DNA, 15 bp, Homo sapiens
gcaatcttggctcgc

SEQ ID NO: 341395 - DNA, 15 bp, Homo sapiens
tgcaatcttggctcg

SEQ ID NO: 341396 - DNA, 15 bp, Homo sapiens
gtgcaatcttggctc

SEQ ID NO: 341397 - DNA, 15 bp, Homo sapiens
ggtgcaatcttggct

SEQ ID NO: 341398 - DNA, 15 bp, Homo sapiens
tggtgcaatcttggc

SEQ ID NO: 341399 - DNA, 15 bp, Homo sapiens
atggtgcaatcttgg

SEQ ID NO: 341400 - DNA, 15 bp, Homo sapiens
aatggtgcaatcttg

SEQ ID NO: 341401 - DNA, 15 bp, Homo sapiens
caatggtgcaatctt

SEQ ID NO: 341402 - DNA, 15 bp, Homo sapiens
gcaatggtgcaatct

SEQ ID NO: 341403 - DNA, 15 bp, Homo sapiens
cgcaatggtgcaatc

SEQ ID NO: 341404 - DNA, 15 bp, Homo sapiens
gcgcaatggtgcaat

SEQ ID NO: 341405 - DNA, 15 bp, Homo sapiens
agcgcaatggtgcaa

SEQ ID NO: 341406 - DNA, 15 bp, Homo sapiens
gagcgcaatggtgca

SEQ ID NO: 341407 - DNA, 15 bp, Homo sapiens
ggagcgcaatggtgc

SEQ ID NO: 341408 - DNA, 15 bp, Homo sapiens
tggagcgcaatggtg

SEQ ID NO: 341409 - DNA, 15 bp, Homo sapiens
ctggagcgcaatggt

SEQ ID NO: 341410 - DNA, 15 bp, Homo sapiens
gctggagcgcaatgg

SEQ ID NO: 341411 - DNA, 15 bp, Homo sapiens
ggctggagcgcaatg

SEQ ID NO: 341412 - DNA, 15 bp, Homo sapiens
aggctggagcgcaat

SEQ ID NO: 341413 - DNA, 15 bp, Homo sapiens
caggctggagcgcaa

SEQ ID NO: 341414 - DNA, 15 bp, Homo sapiens
ccaggctggagcgca

SEQ ID NO: 341415 - DNA, 15 bp, Homo sapiens
cccaggctggagcgc

SEQ ID NO: 341416 - DNA, 15 bp, Homo sapiens
tcccaggctggagcg

SEQ ID NO: 341417 - DNA, 15 bp, Homo sapiens
ctcccaggctggagc

SEQ ID NO: 341418 - DNA, 15 bp, Homo sapiens
tctcccaggctggag

SEQ ID NO: 341419 - DNA, 15 bp, Homo sapiens
gtctcccaggctgga

SEQ ID NO: 341420 - DNA, 15 bp, Homo sapiens
tgtctcccaggctgg

SEQ ID NO: 341421 - DNA, 15 bp, Homo sapiens
ctgtctcccaggctg

SEQ ID NO: 341422 - DNA, 15 bp, Homo sapiens
actgtctcccaggct

SEQ ID NO: 341423 - DNA, 15 bp, Homo sapiens
cactgtctcccaggc

SEQ ID NO: 341424 - DNA, 15 bp, Homo sapiens
tcactgtctcccagg

SEQ ID NO: 341425 - DNA, 15 bp, Homo sapiens
ctcactgtctcccag

SEQ ID NO: 341426 - DNA, 15 bp, Homo sapiens
tctcactgtctccca

SEQ ID NO: 341427 - DNA, 15 bp, Homo sapiens
gtctcactgtctccc

SEQ ID NO: 341428 - DNA, 15 bp, Homo sapiens
agtctcactgtctcc

SEQ ID NO: 341429 - DNA, 15 bp, Homo sapiens
gagtctcactgtctc

SEQ ID NO: 341430 - DNA, 15 bp, Homo sapiens
agagtctcactgtct

SEQ ID NO: 341431 - DNA, 15 bp, Homo sapiens
cagagtctcactgtc

SEQ ID NO: 341432 - DNA, 15 bp, Homo sapiens
acagagtctcactgt

SEQ ID NO: 341433 - DNA, 15 bp, Homo sapiens
gacagagtctcactg

SEQ ID NO: 341434 - DNA, 15 bp, Homo sapiens
tgacagagtctcact

SEQ ID NO: 341435 - DNA, 15 bp, Homo sapiens
ttgacagagtctcac

SEQ ID NO: 341436 - DNA, 15 bp, Homo sapiens
tttgacagagtctca

SEQ ID NO: 341437 - DNA, 15 bp, Homo sapiens
ttttgacagagtctc

SEQ ID NO: 341438 - DNA, 15 bp, Homo sapiens
tttttgacagagtct

SEQ ID NO: 341439 - DNA, 15 bp, Homo sapiens
ttttttgacagagtc

SEQ ID NO: 341440 - DNA, 15 bp, Homo sapiens
tttttttgacagagt

SEQ ID NO: 341441 - DNA, 15 bp, Homo sapiens
ttttttttgacagag

SEQ ID NO: 341442 - DNA, 15 bp, Homo sapiens
tttttttttgacaga

SEQ ID NO: 341443 - DNA, 15 bp, Homo sapiens
ttttttttttgacag

SEQ ID NO: 341444 - DNA, 15 bp, Homo sapiens
tttttttttttgaca

SEQ ID NO: 341445 - DNA, 15 bp, Homo sapiens
ttttttttttttgac

SEQ ID NO: 341446 - DNA, 15 bp, Homo sapiens
ctttttctttttttt

SEQ ID NO: 341447 - DNA, 15 bp, Homo sapiens
tctttttcttttttt

SEQ ID NO: 341448 - DNA, 15 bp, Homo sapiens
ttctttttctttttt

SEQ ID NO: 341449 - DNA, 15 bp, Homo sapiens
tttctttttcttttt

SEQ ID NO: 341450 - DNA, 15 bp, Homo sapiens
atttctttttctttt

SEQ ID NO: 341451 - DNA, 15 bp, Homo sapiens
aatttctttttcttt

SEQ ID NO: 341452 - DNA, 15 bp, Homo sapiens
gaatttctttttctt

SEQ ID NO: 341453 - DNA, 15 bp, Homo sapiens
agaatttctttttct

SEQ ID NO: 341454 - DNA, 15 bp, Homo sapiens
cagaatttctttttc

SEQ ID NO: 341455 - DNA, 15 bp, Homo sapiens
tcagaatttcttttt

SEQ ID NO: 341456 - DNA, 15 bp, Homo sapiens
ttcagaatttctttt

SEQ ID NO: 341457 - DNA, 15 bp, Homo sapiens
attcagaatttcttt

SEQ ID NO: 341458 - DNA, 15 bp, Homo sapiens
tattcagaatttctt

SEQ ID NO: 341459 - DNA, 15 bp, Homo sapiens
gtattcagaatttct

SEQ ID NO: 341460 - DNA, 15 bp, Homo sapiens
tgtattcagaatttc

SEQ ID NO: 341461 - DNA, 15 bp, Homo sapiens
ttgtattcagaattt

SEQ ID NO: 341462 - DNA, 15 bp, Homo sapiens
cttgtattcagaatt

SEQ ID NO: 341463 - DNA, 15 bp, Homo sapiens
tcttgtattcagaat

SEQ ID NO: 341464 - DNA, 15 bp, Homo sapiens
ctcttgtattcagaa

SEQ ID NO: 341465 - DNA, 15 bp, Homo sapiens
actcttgtattcaga

SEQ ID NO: 341466 - DNA, 15 bp, Homo sapiens
tactcttgtattcag

SEQ ID NO: 341467 - DNA, 15 bp, Homo sapiens
ctactcttgtattca

SEQ ID NO: 341468 - DNA, 15 bp, Homo sapiens
actactcttgtattc

SEQ ID NO: 341469 - DNA, 15 bp, Homo sapiens
tactactcttgtatt

SEQ ID NO: 341470 - DNA, 15 bp, Homo sapiens
atactactcttgtat

SEQ ID NO: 341471 - DNA, 15 bp, Homo sapiens
aatactactcttgta

SEQ ID NO: 341472 - DNA, 15 bp, Homo sapiens
taatactactcttgt

SEQ ID NO: 341473 - DNA, 15 bp, Homo sapiens
ctaatactactcttg

SEQ ID NO: 341474 - DNA, 15 bp, Homo sapiens
gctaatactactctt

SEQ ID NO: 341475 - DNA, 15 bp, Homo sapiens
agctaatactactct

SEQ ID NO: 341476 - DNA, 15 bp, Homo sapiens
cagctaatactactc

SEQ ID NO: 341477 - DNA, 15 bp, Homo sapiens
acagctaatactact

SEQ ID NO: 341478 - DNA, 15 bp, Homo sapiens
aacagctaatactac

SEQ ID NO: 341479 - DNA, 15 bp, Homo sapiens
taacagctaatacta

SEQ ID NO: 341480 - DNA, 15 bp, Homo sapiens
ttaacagctaatact

SEQ ID NO: 341481 - DNA, 15 bp, Homo sapiens
attaacagctaatac

SEQ ID NO: 341482 - DNA, 15 bp, Homo sapiens
cattaacagctaata

SEQ ID NO: 341483 - DNA, 15 bp, Homo sapiens
tcattaacagctaat

SEQ ID NO: 341484 - DNA, 15 bp, Homo sapiens
ttcattaacagctaa

SEQ ID NO: 341485 - DNA, 15 bp, Homo sapiens
cttcattaacagcta

SEQ ID NO: 341486 - DNA, 15 bp, Homo sapiens
tcttcattaacagct

SEQ ID NO: 341487 - DNA, 15 bp, Homo sapiens
ttcttcattaacagc

SEQ ID NO: 341488 - DNA, 15 bp, Homo sapiens
tttcttcattaacag

SEQ ID NO: 341489 - DNA, 15 bp, Homo sapiens
atttcttcattaaca

SEQ ID NO: 341490 - DNA, 15 bp, Homo sapiens
catttcttcattaac

SEQ ID NO: 341491 - DNA, 15 bp, Homo sapiens
acatttcttcattaa

SEQ ID NO: 341492 - DNA, 15 bp, Homo sapiens
cacatttcttcatta

SEQ ID NO: 341493 - DNA, 15 bp, Homo sapiens
tcacatttcttcatt

SEQ ID NO: 341494 - DNA, 15 bp, Homo sapiens
gtcacatttcttcat

SEQ ID NO: 341495 - DNA, 15 bp, Homo sapiens
tgtcacatttcttca

SEQ ID NO: 341496 - DNA, 15 bp, Homo sapiens
atgtcacatttcttc

SEQ ID NO: 341497 - DNA, 15 bp, Homo sapiens
gatgtcacatttctt

SEQ ID NO: 341498 - DNA, 15 bp, Homo sapiens
agatgtcacatttct

SEQ ID NO: 341499 - DNA, 15 bp, Homo sapiens
aagatgtcacatttc

SEQ ID NO: 341500 - DNA, 15 bp, Homo sapiens
aaagatgtcacattt

SEQ ID NO: 341501 - DNA, 15 bp, Homo sapiens
taaagatgtcacatt

SEQ ID NO: 341502 - DNA, 15 bp, Homo sapiens
ctaaagatgtcacat

SEQ ID NO: 341503 - DNA, 15 bp, Homo sapiens
actaaagatgtcaca

SEQ ID NO: 341504 - DNA, 15 bp, Homo sapiens
aactaaagatgtcac

SEQ ID NO: 341505 - DNA, 15 bp, Homo sapiens
aaactaaagatgtca

SEQ ID NO: 341506 - DNA, 15 bp, Homo sapiens
taaactaaagatgtc

SEQ ID NO: 341507 - DNA, 15 bp, Homo sapiens
ataaactaaagatgt

SEQ ID NO: 341508 - DNA, 15 bp, Homo sapiens
cataaactaaagatg

SEQ ID NO: 341509 - DNA, 15 bp, Homo sapiens
tcataaactaaagat

SEQ ID NO: 341510 - DNA, 15 bp, Homo sapiens
ttcataaactaaaga

SEQ ID NO: 341511 - DNA, 15 bp, Homo sapiens
tttcataaactaaag

SEQ ID NO: 341512 - DNA, 15 bp, Homo sapiens
gtttcataaactaaa

SEQ ID NO: 341513 - DNA, 15 bp, Homo sapiens
agtttcataaactaa

SEQ ID NO: 341514 - DNA, 15 bp, Homo sapiens
tagtttcataaacta

SEQ ID NO: 341515 - DNA, 15 bp, Homo sapiens
ttagtttcataaact

SEQ ID NO: 341516 - DNA, 15 bp, Homo sapiens
tttagtttcataaac

SEQ ID NO: 341517 - DNA, 15 bp, Homo sapiens
ttttagtttcataaa

SEQ ID NO: 341518 - DNA, 15 bp, Homo sapiens
cttttagtttcataa

SEQ ID NO: 341519 - DNA, 15 bp, Homo sapiens
tcttttagtttcata

SEQ ID NO: 341520 - DNA, 15 bp, Homo sapiens
ttcttttagtttcat

SEQ ID NO: 341521 - DNA, 15 bp, Homo sapiens
gttcttttagtttca

SEQ ID NO: 341522 - DNA, 15 bp, Homo sapiens
agttcttttagtttc

SEQ ID NO: 341523 - DNA, 15 bp, Homo sapiens
cagttcttttagttt

SEQ ID NO: 341524 - DNA, 15 bp, Homo sapiens
ccagttcttttagtt

SEQ ID NO: 341525 - DNA, 15 bp, Homo sapiens
tccagttcttttagt

SEQ ID NO: 341526 - DNA, 15 bp, Homo sapiens
atccagttcttttag

SEQ ID NO: 341527 - DNA, 15 bp, Homo sapiens
tatccagttctttta

SEQ ID NO: 341528 - DNA, 15 bp, Homo sapiens
ctatccagttctttt

SEQ ID NO: 341529 - DNA, 15 bp, Homo sapiens
actatccagttcttt

SEQ ID NO: 341530 - DNA, 15 bp, Homo sapiens
aactatccagttctt

SEQ ID NO: 341531 - DNA, 15 bp, Homo sapiens
caactatccagttct

SEQ ID NO: 341532 - DNA, 15 bp, Homo sapiens
tcaactatccagttc

SEQ ID NO: 341533 - DNA, 15 bp, Homo sapiens
ctcaactatccagtt

SEQ ID NO: 341534 - DNA, 15 bp, Homo sapiens
tctcaactatccagt

SEQ ID NO: 341535 - DNA, 15 bp, Homo sapiens
atctcaactatccag

SEQ ID NO: 341536 - DNA, 15 bp, Homo sapiens
catctcaactatcca

SEQ ID NO: 341537 - DNA, 15 bp, Homo sapiens
acatctcaactatcc

SEQ ID NO: 341538 - DNA, 15 bp, Homo sapiens
tacatctcaactatc

SEQ ID NO: 341539 - DNA, 15 bp, Homo sapiens
gtacatctcaactat

SEQ ID NO: 341540 - DNA, 15 bp, Homo sapiens
tgtacatctcaacta

SEQ ID NO: 341541 - DNA, 15 bp, Homo sapiens
ctgtacatctcaact

SEQ ID NO: 341542 - DNA, 15 bp, Homo sapiens
cctgtacatctcaac

SEQ ID NO: 341543 - DNA, 15 bp, Homo sapiens
tcctgtacatctcaa

SEQ ID NO: 341544 - DNA, 15 bp, Homo sapiens
atcctgtacatctca

SEQ ID NO: 341545 - DNA, 15 bp, Homo sapiens
aatcctgtacatctc

SEQ ID NO: 341546 - DNA, 15 bp, Homo sapiens
gaatcctgtacatct

SEQ ID NO: 341547 - DNA, 15 bp, Homo sapiens
tgaatcctgtacatc

SEQ ID NO: 341548 - DNA, 15 bp, Homo sapiens
ctgaatcctgtacat

SEQ ID NO: 341549 - DNA, 15 bp, Homo sapiens
tctgaatcctgtaca

SEQ ID NO: 341550 - DNA, 15 bp, Homo sapiens
ctctgaatcctgtac

SEQ ID NO: 341551 - DNA, 15 bp, Homo sapiens
tctctgaatcctgta

SEQ ID NO: 341552 - DNA, 15 bp, Homo sapiens
atctctgaatcctgt

SEQ ID NO: 341553 - DNA, 15 bp, Homo sapiens
aatctctgaatcctg

SEQ ID NO: 341554 - DNA, 15 bp, Homo sapiens
gaatctctgaatcct

SEQ ID NO: 341555 - DNA, 15 bp, Homo sapiens
tgaatctctgaatcc

SEQ ID NO: 341556 - DNA, 15 bp, Homo sapiens
ctgaatctctgaatc

SEQ ID NO: 341557 - DNA, 15 bp, Homo sapiens
tctgaatctctgaat

SEQ ID NO: 341558 - DNA, 15 bp, Homo sapiens
ttctgaatctctgaa

SEQ ID NO: 341559 - DNA, 15 bp, Homo sapiens
tttctgaatctctga

SEQ ID NO: 341560 - DNA, 15 bp, Homo sapiens
atttctgaatctctg

SEQ ID NO: 341561 - DNA, 15 bp, Homo sapiens
catttctgaatctct

SEQ ID NO: 341562 - DNA, 15 bp, Homo sapiens
acatttctgaatctc

SEQ ID NO: 341563 - DNA, 15 bp, Homo sapiens
aacatttctgaatct

SEQ ID NO: 341564 - DNA, 15 bp, Homo sapiens
aaacatttctgaatc

SEQ ID NO: 341565 - DNA, 15 bp, Homo sapiens
taaacatttctgaat

SEQ ID NO: 341566 - DNA, 15 bp, Homo sapiens
ttaaacatttctgaa

SEQ ID NO: 341567 - DNA, 15 bp, Homo sapiens
tttaaacatttctga

SEQ ID NO: 341568 - DNA, 15 bp, Homo sapiens
ttttaaacatttctg

SEQ ID NO: 341569 - DNA, 15 bp, Homo sapiens
gttttaaacatttct

SEQ ID NO: 341570 - DNA, 15 bp, Homo sapiens
tgttttaaacatttc

SEQ ID NO: 341571 - DNA, 15 bp, Homo sapiens
ttgttttaaacattt

SEQ ID NO: 341572 - DNA, 15 bp, Homo sapiens
cttgttttaaacatt

SEQ ID NO: 341573 - DNA, 15 bp, Homo sapiens
acttgttttaaacat

SEQ ID NO: 341574 - DNA, 15 bp, Homo sapiens
tacttgttttaaaca

SEQ ID NO: 341575 - DNA, 15 bp, Homo sapiens
atacttgttttaaac

SEQ ID NO: 341576 - DNA, 15 bp, Homo sapiens
gatacttgttttaaa

SEQ ID NO: 341577 - DNA, 15 bp, Homo sapiens
tgatacttgttttaa

SEQ ID NO: 341578 - DNA, 15 bp, Homo sapiens
ttgatacttgtttta

SEQ ID NO: 341579 - DNA, 15 bp, Homo sapiens
gttgatacttgtttt

SEQ ID NO: 341580 - DNA, 15 bp, Homo sapiens
tgttgatacttgttt

SEQ ID NO: 341581 - DNA, 15 bp, Homo sapiens
ctgttgatacttgtt

SEQ ID NO: 341582 - DNA, 15 bp, Homo sapiens
cctgttgatacttgt

SEQ ID NO: 341583 - DNA, 15 bp, Homo sapiens
gcctgttgatacttg

SEQ ID NO: 341584 - DNA, 15 bp, Homo sapiens
ggcctgttgatactt

SEQ ID NO: 341585 - DNA, 15 bp, Homo sapiens
tggcctgttgatact

SEQ ID NO: 341586 - DNA, 15 bp, Homo sapiens
atggcctgttgatac

SEQ ID NO: 341587 - DNA, 15 bp, Homo sapiens
aatggcctgttgata

SEQ ID NO: 341588 - DNA, 15 bp, Homo sapiens
taatggcctgttgat

SEQ ID NO: 341589 - DNA, 15 bp, Homo sapiens
ctaatggcctgttga

SEQ ID NO: 341590 - DNA, 15 bp, Homo sapiens
cctaatggcctgttg

SEQ ID NO: 341591 - DNA, 15 bp, Homo sapiens
acctaatggcctgtt

SEQ ID NO: 341592 - DNA, 15 bp, Homo sapiens
tacctaatggcctgt

SEQ ID NO: 341593 - DNA, 15 bp, Homo sapiens
atacctaatggcctg

SEQ ID NO: 341594 - DNA, 15 bp, Homo sapiens
gatacctaatggcct

SEQ ID NO: 341595 - DNA, 15 bp, Homo sapiens
agatacctaatggcc

SEQ ID NO: 341596 - DNA, 15 bp, Homo sapiens
tagatacctaatggc

SEQ ID NO: 341597 - DNA, 15 bp, Homo sapiens
ttagatacctaatgg

SEQ ID NO: 341598 - DNA, 15 bp, Homo sapiens
tttagatacctaatg

SEQ ID NO: 341599 - DNA, 15 bp, Homo sapiens
ctttagatacctaat

SEQ ID NO: 341600 - DNA, 15 bp, Homo sapiens
actttagatacctaa

SEQ ID NO: 341601 - DNA, 15 bp, Homo sapiens
cactttagataccta

SEQ ID NO: 341602 - DNA, 15 bp, Homo sapiens
acactttagatacct

SEQ ID NO: 341603 - DNA, 15 bp, Homo sapiens
aacactttagatacc

SEQ ID NO: 341604 - DNA, 15 bp, Homo sapiens
aaacactttagatac

SEQ ID NO: 341605 - DNA, 15 bp, Homo sapiens
gaaacactttagata

SEQ ID NO: 341606 - DNA, 15 bp, Homo sapiens
agaaacactttagat

SEQ ID NO: 341607 - DNA, 15 bp, Homo sapiens
tagaaacactttaga

SEQ ID NO: 341608 - DNA, 15 bp, Homo sapiens
ttagaaacactttag

SEQ ID NO: 341609 - DNA, 15 bp, Homo sapiens
cttagaaacacttta

SEQ ID NO: 341610 - DNA, 15 bp, Homo sapiens
tcttagaaacacttt

SEQ ID NO: 341611 - DNA, 15 bp, Homo sapiens
ttcttagaaacactt

SEQ ID NO: 341612 - DNA, 15 bp, Homo sapiens
gttcttagaaacact

SEQ ID NO: 341613 - DNA, 15 bp, Homo sapiens
agttcttagaaacac

SEQ ID NO: 341614 - DNA, 15 bp, Homo sapiens
cagttcttagaaaca

SEQ ID NO: 341615 - DNA, 15 bp, Homo sapiens
gcagttcttagaaac

SEQ ID NO: 341616 - DNA, 15 bp, Homo sapiens
ggcagttcttagaaa

SEQ ID NO: 341617 - DNA, 15 bp, Homo sapiens
cggcagttcttagaa

SEQ ID NO: 341618 - DNA, 15 bp, Homo sapiens
tcggcagttcttaga

SEQ ID NO: 341619 - DNA, 15 bp, Homo sapiens
ctcggcagttcttag

SEQ ID NO: 341620 - DNA, 15 bp, Homo sapiens
gctcggcagttctta

SEQ ID NO: 341621 - DNA, 15 bp, Homo sapiens
agctcggcagttctt

SEQ ID NO: 341622 - DNA, 15 bp, Homo sapiens
tagctcggcagttct

SEQ ID NO: 341623 - DNA, 15 bp, Homo sapiens
ttagctcggcagttc

SEQ ID NO: 341624 - DNA, 15 bp, Homo sapiens
cttagctcggcagtt

SEQ ID NO: 341625 - DNA, 15 bp, Homo sapiens
ccttagctcggcagt

SEQ ID NO: 341626 - DNA, 15 bp, Homo sapiens
accttagctcggcag

SEQ ID NO: 341627 - DNA, 15 bp, Homo sapiens
taccttagctcggca

SEQ ID NO: 341628 - DNA, 15 bp, Homo sapiens
ttaccttagctcggc

SEQ ID NO: 341629 - DNA, 15 bp, Homo sapiens
attaccttagctcgg

SEQ ID NO: 341630 - DNA, 15 bp, Homo sapiens
tattaccttagctcg

SEQ ID NO: 341631 - DNA, 15 bp, Homo sapiens
ctattaccttagctc

SEQ ID NO: 341632 - DNA, 15 bp, Homo sapiens
tctattaccttagct

SEQ ID NO: 341633 - DNA, 15 bp, Homo sapiens
ctctattaccttagc

SEQ ID NO: 341634 - DNA, 15 bp, Homo sapiens
actctattaccttag

SEQ ID NO: 341635 - DNA, 15 bp, Homo sapiens
aactctattacctta

SEQ ID NO: 341636 - DNA, 15 bp, Homo sapiens
caactctattacctt

SEQ ID NO: 341637 - DNA, 15 bp, Homo sapiens
ccaactctattacct

SEQ ID NO: 341638 - DNA, 15 bp, Homo sapiens
tccaactctattacc

SEQ ID NO: 341639 - DNA, 15 bp, Homo sapiens
ttccaactctattac

SEQ ID NO: 341640 - DNA, 15 bp, Homo sapiens
gttccaactctatta

SEQ ID NO: 341641 - DNA, 15 bp, Homo sapiens
agttccaactctatt

SEQ ID NO: 341642 - DNA, 15 bp, Homo sapiens
cagttccaactctat

SEQ ID NO: 341643 - DNA, 15 bp, Homo sapiens
acagttccaactcta

SEQ ID NO: 341644 - DNA, 15 bp, Homo sapiens
gacagttccaactct

SEQ ID NO: 341645 - DNA, 15 bp, Homo sapiens
ggacagttccaactc

SEQ ID NO: 341646 - DNA, 15 bp, Homo sapiens
tggacagttccaact

SEQ ID NO: 341647 - DNA, 15 bp, Homo sapiens
ttggacagttccaac

SEQ ID NO: 341648 - DNA, 15 bp, Homo sapiens
gttggacagttccaa

SEQ ID NO: 341649 - DNA, 15 bp, Homo sapiens
agttggacagttcca

SEQ ID NO: 341650 - DNA, 15 bp, Homo sapiens
gagttggacagttcc

SEQ ID NO: 341651 - DNA, 15 bp, Homo sapiens
agagttggacagttc

SEQ ID NO: 341652 - DNA, 15 bp, Homo sapiens
cagagttggacagtt

SEQ ID NO: 341653 - DNA, 15 bp, Homo sapiens
gcagagttggacagt

SEQ ID NO: 341654 - DNA, 15 bp, Homo sapiens
tgcagagttggacag

SEQ ID NO: 341655 - DNA, 15 bp, Homo sapiens
ctgcagagttggaca

SEQ ID NO: 341656 - DNA, 15 bp, Homo sapiens
cctgcagagttggac

SEQ ID NO: 341657 - DNA, 15 bp, Homo sapiens
tcctgcagagttgga

SEQ ID NO: 341658 - DNA, 15 bp, Homo sapiens
atcctgcagagttgg

SEQ ID NO: 341659 - DNA, 15 bp, Homo sapiens
aatcctgcagagttg

SEQ ID NO: 341660 - DNA, 15 bp, Homo sapiens
aaatcctgcagagtt

SEQ ID NO: 341661 - DNA, 15 bp, Homo sapiens
aaaatcctgcagagt

SEQ ID NO: 341662 - DNA, 15 bp, Homo sapiens
taaaatcctgcagag

SEQ ID NO: 341663 - DNA, 15 bp, Homo sapiens
ctaaaatcctgcaga

SEQ ID NO: 341664 - DNA, 15 bp, Homo sapiens
gctaaaatcctgcag

SEQ ID NO: 341665 - DNA, 15 bp, Homo sapiens
ggctaaaatcctgca

SEQ ID NO: 341666 - DNA, 15 bp, Homo sapiens
gggctaaaatcctgc

SEQ ID NO: 341667 - DNA, 15 bp, Homo sapiens
agggctaaaatcctg

SEQ ID NO: 341668 - DNA, 15 bp, Homo sapiens
cagggctaaaatcct

SEQ ID NO: 341669 - DNA, 15 bp, Homo sapiens
ccagggctaaaatcc

SEQ ID NO: 341670 - DNA, 15 bp, Homo sapiens
tccagggctaaaatc

SEQ ID NO: 341671 - DNA, 15 bp, Homo sapiens
ctccagggctaaaat

SEQ ID NO: 341672 - DNA, 15 bp, Homo sapiens
cctccagggctaaaa

SEQ ID NO: 341673 - DNA, 15 bp, Homo sapiens
tcctccagggctaaa

SEQ ID NO: 341674 - DNA, 15 bp, Homo sapiens
ctcctccagggctaa

SEQ ID NO: 341675 - DNA, 15 bp, Homo sapiens
actcctccagggcta

SEQ ID NO: 341676 - DNA, 15 bp, Homo sapiens
cactcctccagggct

SEQ ID NO: 341677 - DNA, 15 bp, Homo sapiens
tcactcctccagggc

SEQ ID NO: 341678 - DNA, 15 bp, Homo sapiens
ctcactcctccaggg

SEQ ID NO: 341679 - DNA, 15 bp, Homo sapiens
gctcactcctccagg

SEQ ID NO: 341680 - DNA, 15 bp, Homo sapiens
agctcactcctccag

SEQ ID NO: 341681 - DNA, 15 bp, Homo sapiens
cagctcactcctcca

SEQ ID NO: 341682 - DNA, 15 bp, Homo sapiens
acagctcactcctcc

SEQ ID NO: 341683 - DNA, 15 bp, Homo sapiens
aacagctcactcctc

SEQ ID NO: 341684 - DNA, 15 bp, Homo sapiens
taacagctcactcct

SEQ ID NO: 341685 - DNA, 15 bp, Homo sapiens
gtaacagctcactcc

SEQ ID NO: 341686 - DNA, 15 bp, Homo sapiens
tgtaacagctcactc

SEQ ID NO: 341687 - DNA, 15 bp, Homo sapiens
ctgtaacagctcact

SEQ ID NO: 341688 - DNA, 15 bp, Homo sapiens
actgtaacagctcac

SEQ ID NO: 341689 - DNA, 15 bp, Homo sapiens
aactgtaacagctca

SEQ ID NO: 341690 - DNA, 15 bp, Homo sapiens
aaactgtaacagctc

SEQ ID NO: 341691 - DNA, 15 bp, Homo sapiens
aaaactgtaacagct

SEQ ID NO: 341692 - DNA, 15 bp, Homo sapiens
caaaactgtaacagc

SEQ ID NO: 341693 - DNA, 15 bp, Homo sapiens
acaaaactgtaacag

SEQ ID NO: 341694 - DNA, 15 bp, Homo sapiens
aacaaaactgtaaca

SEQ ID NO: 341695 - DNA, 15 bp, Homo sapiens
caacaaaactgtaac

SEQ ID NO: 341696 - DNA, 15 bp, Homo sapiens
tcaacaaaactgtaa

SEQ ID NO: 341697 - DNA, 15 bp, Homo sapiens
ttcaacaaaactgta

SEQ ID NO: 341698 - DNA, 15 bp, Homo sapiens
tttcaacaaaactgt

SEQ ID NO: 341699 - DNA, 15 bp, Homo sapiens
ttttcaacaaaactg

SEQ ID NO: 341700 - DNA, 15 bp, Homo sapiens
cttttcaacaaaact

SEQ ID NO: 341701 - DNA, 15 bp, Homo sapiens
tcttttcaacaaaac

SEQ ID NO: 341702 - DNA, 15 bp, Homo sapiens
ctcttttcaacaaaa

SEQ ID NO: 341703 - DNA, 15 bp, Homo sapiens
actcttttcaacaaa

SEQ ID NO: 341704 - DNA, 15 bp, Homo sapiens
tactcttttcaacaa

SEQ ID NO: 341705 - DNA, 15 bp, Homo sapiens
ctactcttttcaaca

SEQ ID NO: 341706 - DNA, 15 bp, Homo sapiens
gctactcttttcaac

SEQ ID NO: 341707 - DNA, 15 bp, Homo sapiens
agctactcttttcaa

SEQ ID NO: 341708 - DNA, 15 bp, Homo sapiens
aagctactcttttca

SEQ ID NO: 341709 - DNA, 15 bp, Homo sapiens
aaagctactcttttc

SEQ ID NO: 341710 - DNA, 15 bp, Homo sapiens
taaagctactctttt

SEQ ID NO: 341711 - DNA, 15 bp, Homo sapiens
ctaaagctactcttt

SEQ ID NO: 341712 - DNA, 15 bp, Homo sapiens
tctaaagctactctt

SEQ ID NO: 341713 - DNA, 15 bp, Homo sapiens
ttctaaagctactct

SEQ ID NO: 341714 - DNA, 15 bp, Homo sapiens
cttctaaagctactc

SEQ ID NO: 341715 - DNA, 15 bp, Homo sapiens
ccttctaaagctact

SEQ ID NO: 341716 - DNA, 15 bp, Homo sapiens
gccttctaaagctac

SEQ ID NO: 341717 - DNA, 15 bp, Homo sapiens
tgccttctaaagcta

SEQ ID NO: 341718 - DNA, 15 bp, Homo sapiens
atgccttctaaagct

SEQ ID NO: 341719 - DNA, 15 bp, Homo sapiens
gatgccttctaaagc

SEQ ID NO: 341720 - DNA, 15 bp, Homo sapiens
tgatgccttctaaag

SEQ ID NO: 341721 - DNA, 15 bp, Homo sapiens
atgatgccttctaaa

SEQ ID NO: 341722 - DNA, 15 bp, Homo sapiens
aatgatgccttctaa

SEQ ID NO: 341723 - DNA, 15 bp, Homo sapiens
taatgatgccttcta

SEQ ID NO: 341724 - DNA, 15 bp, Homo sapiens
ataatgatgccttct

SEQ ID NO: 341725 - DNA, 15 bp, Homo sapiens
tataatgatgccttc

SEQ ID NO: 341726 - DNA, 15 bp, Homo sapiens
atataatgatgcctt

SEQ ID NO: 341727 - DNA, 15 bp, Homo sapiens
aatataatgatgcct

SEQ ID NO: 341728 - DNA, 15 bp, Homo sapiens
taatataatgatgcc

SEQ ID NO: 341729 - DNA, 15 bp, Homo sapiens
ctaatataatgatgc

SEQ ID NO: 341730 - DNA, 15 bp, Homo sapiens
actaatataatgatg

SEQ ID NO: 341731 - DNA, 15 bp, Homo sapiens
cactaatataatgat

SEQ ID NO: 341732 - DNA, 15 bp, Homo sapiens
acactaatataatga

SEQ ID NO: 341733 - DNA, 15 bp, Homo sapiens
gacactaatataatg

SEQ ID NO: 341734 - DNA, 15 bp, Homo sapiens
agacactaatataat

SEQ ID NO: 341735 - DNA, 15 bp, Homo sapiens
gagacactaatataa

SEQ ID NO: 341736 - DNA, 15 bp, Homo sapiens
tgagacactaatata

SEQ ID NO: 341737 - DNA, 15 bp, Homo sapiens
ctgagacactaatat

SEQ ID NO: 341738 - DNA, 15 bp, Homo sapiens
tctgagacactaata

SEQ ID NO: 341739 - DNA, 15 bp, Homo sapiens
ctctgagacactaat

SEQ ID NO: 341740 - DNA, 15 bp, Homo sapiens
tctctgagacactaa

SEQ ID NO: 341741 - DNA, 15 bp, Homo sapiens
atctctgagacacta

SEQ ID NO: 341742 - DNA, 15 bp, Homo sapiens
aatctctgagacact

SEQ ID NO: 341743 - DNA, 15 bp, Homo sapiens
caatctctgagacac

SEQ ID NO: 341744 - DNA, 15 bp, Homo sapiens
tcaatctctgagaca

SEQ ID NO: 341745 - DNA, 15 bp, Homo sapiens
ctcaatctctgagac

SEQ ID NO: 341746 - DNA, 15 bp, Homo sapiens
tctcaatctctgaga

SEQ ID NO: 341747 - DNA, 15 bp, Homo sapiens
ttctcaatctctgag

SEQ ID NO: 341748 - DNA, 15 bp, Homo sapiens
attctcaatctctga

SEQ ID NO: 341749 - DNA, 15 bp, Homo sapiens
gattctcaatctctg

SEQ ID NO: 341750 - DNA, 15 bp, Homo sapiens
tgattctcaatctct

SEQ ID NO: 341751 - DNA, 15 bp, Homo sapiens
atgattctcaatctc

SEQ ID NO: 341752 - DNA, 15 bp, Homo sapiens
tatgattctcaatct

SEQ ID NO: 341753 - DNA, 15 bp, Homo sapiens
atatgattctcaatc

SEQ ID NO: 341754 - DNA, 15 bp, Homo sapiens
aatatgattctcaat

SEQ ID NO: 341755 - DNA, 15 bp, Homo sapiens
gaatatgattctcaa

SEQ ID NO: 341756 - DNA, 15 bp, Homo sapiens
tgaatatgattctca

SEQ ID NO: 341757 - DNA, 15 bp, Homo sapiens
atgaatatgattctc

SEQ ID NO: 341758 - DNA, 15 bp, Homo sapiens
aatgaatatgattct

SEQ ID NO: 341759 - DNA, 15 bp, Homo sapiens
gaatgaatatgattc

SEQ ID NO: 341760 - DNA, 15 bp, Homo sapiens
agaatgaatatgatt

SEQ ID NO: 341761 - DNA, 15 bp, Homo sapiens
tagaatgaatatgat

SEQ ID NO: 341762 - DNA, 15 bp, Homo sapiens
atagaatgaatatga

SEQ ID NO: 341763 - DNA, 15 bp, Homo sapiens
catagaatgaatatg

SEQ ID NO: 341764 - DNA, 15 bp, Homo sapiens
acatagaatgaatat

SEQ ID NO: 341765 - DNA, 15 bp, Homo sapiens
tacatagaatgaata

SEQ ID NO: 341766 - DNA, 15 bp, Homo sapiens
atacatagaatgaat

SEQ ID NO: 341767 - DNA, 15 bp, Homo sapiens
tatacatagaatgaa

SEQ ID NO: 341768 - DNA, 15 bp, Homo sapiens
ttatacatagaatga

SEQ ID NO: 341769 - DNA, 15 bp, Homo sapiens
tttatacatagaatg

SEQ ID NO: 341770 - DNA, 15 bp, Homo sapiens
atttatacatagaat

SEQ ID NO: 341771 - DNA, 15 bp, Homo sapiens
tatttatacatagaa

SEQ ID NO: 341772 - DNA, 15 bp, Homo sapiens
atatttatacataga

SEQ ID NO: 341773 - DNA, 15 bp, Homo sapiens
tatatttatacatag

SEQ ID NO: 341774 - DNA, 15 bp, Homo sapiens
atatatttatacata

SEQ ID NO: 341775 - DNA, 15 bp, Homo sapiens
tatatatttatacat

SEQ ID NO: 341776 - DNA, 15 bp, Homo sapiens
ttatatatttataca

SEQ ID NO: 341777 - DNA, 15 bp, Homo sapiens
tttatatatttatac

SEQ ID NO: 341778 - DNA, 15 bp, Homo sapiens
atttatatatttata

SEQ ID NO: 341779 - DNA, 15 bp, Homo sapiens
aatttatatatttat

SEQ ID NO: 341780 - DNA, 15 bp, Homo sapiens
gaatttatatattta

SEQ ID NO: 341781 - DNA, 15 bp, Homo sapiens
agaatttatatattt

SEQ ID NO: 341782 - DNA, 15 bp, Homo sapiens
aagaatttatatatt

SEQ ID NO: 341783 - DNA, 15 bp, Homo sapiens
gaagaatttatatat

SEQ ID NO: 341784 - DNA, 15 bp, Homo sapiens
tgaagaatttatata

SEQ ID NO: 341785 - DNA, 15 bp, Homo sapiens
atgaagaatttatat

SEQ ID NO: 341786 - DNA, 15 bp, Homo sapiens
gatgaagaatttata

SEQ ID NO: 341787 - DNA, 15 bp, Homo sapiens
ggatgaagaatttat

SEQ ID NO: 341788 - DNA, 15 bp, Homo sapiens
gggatgaagaattta

SEQ ID NO: 341789 - DNA, 15 bp, Homo sapiens
ggggatgaagaattt

SEQ ID NO: 341790 - DNA, 15 bp, Homo sapiens
aggggatgaagaatt

SEQ ID NO: 341791 - DNA, 15 bp, Homo sapiens
taggggatgaagaat

SEQ ID NO: 341792 - DNA, 15 bp, Homo sapiens
ctaggggatgaagaa

SEQ ID NO: 341793 - DNA, 15 bp, Homo sapiens
tctaggggatgaaga

SEQ ID NO: 341794 - DNA, 15 bp, Homo sapiens
atctaggggatgaag

SEQ ID NO: 341795 - DNA, 15 bp, Homo sapiens
aatctaggggatgaa

SEQ ID NO: 341796 - DNA, 15 bp, Homo sapiens
gaatctaggggatga

SEQ ID NO: 341797 - DNA, 15 bp, Homo sapiens
agaatctaggggatg

SEQ ID NO: 341798 - DNA, 15 bp, Homo sapiens
gagaatctaggggat

SEQ ID NO: 341799 - DNA, 15 bp, Homo sapiens
ggagaatctagggga

SEQ ID NO: 341800 - DNA, 15 bp, Homo sapiens
aggagaatctagggg

SEQ ID NO: 341801 - DNA, 15 bp, Homo sapiens
caggagaatctaggg

SEQ ID NO: 341802 - DNA, 15 bp, Homo sapiens
acaggagaatctagg

SEQ ID NO: 341803 - DNA, 15 bp, Homo sapiens
tacaggagaatctag

SEQ ID NO: 341804 - DNA, 15 bp, Homo sapiens
ctacaggagaatcta

SEQ ID NO: 341805 - DNA, 15 bp, Homo sapiens
actacaggagaatct

SEQ ID NO: 341806 - DNA, 15 bp, Homo sapiens
tactacaggagaatc

SEQ ID NO: 341807 - DNA, 15 bp, Homo sapiens
atactacaggagaat

SEQ ID NO: 341808 - DNA, 15 bp, Homo sapiens
tatactacaggagaa

SEQ ID NO: 341809 - DNA, 15 bp, Homo sapiens
atatactacaggaga

SEQ ID NO: 341810 - DNA, 15 bp, Homo sapiens
gatatactacaggag

SEQ ID NO: 341811 - DNA, 15 bp, Homo sapiens
tgatatactacagga

SEQ ID NO: 341812 - DNA, 15 bp, Homo sapiens
gtgatatactacagg

SEQ ID NO: 341813 - DNA, 15 bp, Homo sapiens
tgtgatatactacag

SEQ ID NO: 341814 - DNA, 15 bp, Homo sapiens
ttgtgatatactaca

SEQ ID NO: 341815 - DNA, 15 bp, Homo sapiens
tttgtgatatactac

SEQ ID NO: 341816 - DNA, 15 bp, Homo sapiens
ttttgtgatatacta

SEQ ID NO: 341817 - DNA, 15 bp, Homo sapiens
attttgtgatatact

SEQ ID NO: 341818 - DNA, 15 bp, Homo sapiens
gattttgtgatatac

SEQ ID NO: 341819 - DNA, 15 bp, Homo sapiens
agattttgtgatata

SEQ ID NO: 341820 - DNA, 15 bp, Homo sapiens
cagattttgtgatat

SEQ ID NO: 341821 - DNA, 15 bp, Homo sapiens
gcagattttgtgata

SEQ ID NO: 341822 - DNA, 15 bp, Homo sapiens
tgcagattttgtgat

SEQ ID NO: 341823 - DNA, 15 bp, Homo sapiens
ctgcagattttgtga

SEQ ID NO: 341824 - DNA, 15 bp, Homo sapiens
actgcagattttgtg

SEQ ID NO: 341825 - DNA, 15 bp, Homo sapiens
cactgcagattttgt

SEQ ID NO: 341826 - DNA, 15 bp, Homo sapiens
acactgcagattttg

SEQ ID NO: 341827 - DNA, 15 bp, Homo sapiens
cacactgcagatttt

SEQ ID NO: 341828 - DNA, 15 bp, Homo sapiens
acacactgcagattt

SEQ ID NO: 341829 - DNA, 15 bp, Homo sapiens
aacacactgcagatt

SEQ ID NO: 341830 - DNA, 15 bp, Homo sapiens
gaacacactgcagat

SEQ ID NO: 341831 - DNA, 15 bp, Homo sapiens
agaacacactgcaga

SEQ ID NO: 341832 - DNA, 15 bp, Homo sapiens
cagaacacactgcag

SEQ ID NO: 341833 - DNA, 15 bp, Homo sapiens
tcagaacacactgca

SEQ ID NO: 341834 - DNA, 15 bp, Homo sapiens
ctcagaacacactgc

SEQ ID NO: 341835 - DNA, 15 bp, Homo sapiens
cctcagaacacactg

SEQ ID NO: 341836 - DNA, 15 bp, Homo sapiens
acctcagaacacact

SEQ ID NO: 341837 - DNA, 15 bp, Homo sapiens
aacctcagaacacac

SEQ ID NO: 341838 - DNA, 15 bp, Homo sapiens
aaacctcagaacaca

SEQ ID NO: 341839 - DNA, 15 bp, Homo sapiens
taaacctcagaacac

SEQ ID NO: 341840 - DNA, 15 bp, Homo sapiens
ttaaacctcagaaca

SEQ ID NO: 341841 - DNA, 15 bp, Homo sapiens
tttaaacctcagaac

SEQ ID NO: 341842 - DNA, 15 bp, Homo sapiens
ttttaaacctcagaa

SEQ ID NO: 341843 - DNA, 15 bp, Homo sapiens
attttaaacctcaga

SEQ ID NO: 341844 - DNA, 15 bp, Homo sapiens
gattttaaacctcag

SEQ ID NO: 341845 - DNA, 15 bp, Homo sapiens
tgattttaaacctca

SEQ ID NO: 341846 - DNA, 15 bp, Homo sapiens
ttgattttaaacctc

SEQ ID NO: 341847 - DNA, 15 bp, Homo sapiens
tttgattttaaacct

SEQ ID NO: 341848 - DNA, 15 bp, Homo sapiens
ctttgattttaaacc

SEQ ID NO: 341849 - DNA, 15 bp, Homo sapiens
actttgattttaaac

SEQ ID NO: 341850 - DNA, 15 bp, Homo sapiens
aactttgattttaaa

SEQ ID NO: 341851 - DNA, 15 bp, Homo sapiens
taactttgattttaa

SEQ ID NO: 341852 - DNA, 15 bp, Homo sapiens
ttaactttgatttta

SEQ ID NO: 341853 - DNA, 15 bp, Homo sapiens
tttaactttgatttt

SEQ ID NO: 341854 - DNA, 15 bp, Homo sapiens
ttttaactttgattt

SEQ ID NO: 341855 - DNA, 15 bp, Homo sapiens
tttttaactttgatt

SEQ ID NO: 341856 - DNA, 15 bp, Homo sapiens
gtttttaactttgat

SEQ ID NO: 341857 - DNA, 15 bp, Homo sapiens
tgtttttaactttga

SEQ ID NO: 341858 - DNA, 15 bp, Homo sapiens
ttgtttttaactttg

SEQ ID NO: 341859 - DNA, 15 bp, Homo sapiens
tttgtttttaacttt

SEQ ID NO: 341860 - DNA, 15 bp, Homo sapiens
ttttgtttttaactt

SEQ ID NO: 341861 - DNA, 15 bp, Homo sapiens
tttttgtttttaact

SEQ ID NO: 341862 - DNA, 15 bp, Homo sapiens
gtttttgtttttaac

SEQ ID NO: 341863 - DNA, 15 bp, Homo sapiens
tgtttttgtttttaa

SEQ ID NO: 341864 - DNA, 15 bp, Homo sapiens
ttgtttttgttttta

SEQ ID NO: 341865 - DNA, 15 bp, Homo sapiens
tttgtttttgttttt

SEQ ID NO: 341866 - DNA, 15 bp, Homo sapiens
ttttgtttttgtttt

SEQ ID NO: 341867 - DNA, 15 bp, Homo sapiens
tttttgtttttgttt

SEQ ID NO: 341868 - DNA, 15 bp, Homo sapiens
atttttgtttttgtt

SEQ ID NO: 341869 - DNA, 15 bp, Homo sapiens
gatttttgtttttgt

SEQ ID NO: 341870 - DNA, 15 bp, Homo sapiens
ggatttttgtttttg

SEQ ID NO: 341871 - DNA, 15 bp, Homo sapiens
aggatttttgttttt

SEQ ID NO: 341872 - DNA, 15 bp, Homo sapiens
aaggatttttgtttt

SEQ ID NO: 341873 - DNA, 15 bp, Homo sapiens
taaggatttttgttt

SEQ ID NO: 341874 - DNA, 15 bp, Homo sapiens
ttaaggatttttgtt

SEQ ID NO: 341875 - DNA, 15 bp, Homo sapiens
tttaaggatttttgt

SEQ ID NO: 341876 - DNA, 15 bp, Homo sapiens
gtttaaggatttttg

SEQ ID NO: 341877 - DNA, 15 bp, Homo sapiens
ggtttaaggattttt

SEQ ID NO: 341878 - DNA, 15 bp, Homo sapiens
gggtttaaggatttt

SEQ ID NO: 341879 - DNA, 15 bp, Homo sapiens
agggtttaaggattt

SEQ ID NO: 341880 - DNA, 15 bp, Homo sapiens
gagggtttaaggatt

SEQ ID NO: 341881 - DNA, 15 bp, Homo sapiens
agagggtttaaggat

SEQ ID NO: 341882 - DNA, 15 bp, Homo sapiens
aagagggtttaagga

SEQ ID NO: 341883 - DNA, 15 bp, Homo sapiens
taagagggtttaagg

SEQ ID NO: 341884 - DNA, 15 bp, Homo sapiens
ttaagagggtttaag

SEQ ID NO: 341885 - DNA, 15 bp, Homo sapiens
gttaagagggtttaa

SEQ ID NO: 341886 - DNA, 15 bp, Homo sapiens
tgttaagagggttta

SEQ ID NO: 341887 - DNA, 15 bp, Homo sapiens
atgttaagagggttt

SEQ ID NO: 341888 - DNA, 15 bp, Homo sapiens
aatgttaagagggtt

SEQ ID NO: 341889 - DNA, 15 bp, Homo sapiens
aaatgttaagagggt

SEQ ID NO: 341890 - DNA, 15 bp, Homo sapiens
caaatgttaagaggg

SEQ ID NO: 341891 - DNA, 15 bp, Homo sapiens
acaaatgttaagagg

SEQ ID NO: 341892 - DNA, 15 bp, Homo sapiens
cacaaatgttaagag

SEQ ID NO: 341893 - DNA, 15 bp, Homo sapiens
tcacaaatgttaaga

SEQ ID NO: 341894 - DNA, 15 bp, Homo sapiens
atcacaaatgttaag

SEQ ID NO: 341895 - DNA, 15 bp, Homo sapiens
catcacaaatgttaa

SEQ ID NO: 341896 - DNA, 15 bp, Homo sapiens
acatcacaaatgtta

SEQ ID NO: 341897 - DNA, 15 bp, Homo sapiens
aacatcacaaatgtt

SEQ ID NO: 341898 - DNA, 15 bp, Homo sapiens
taacatcacaaatgt

SEQ ID NO: 341899 - DNA, 15 bp, Homo sapiens
ttaacatcacaaatg

SEQ ID NO: 341900 - DNA, 15 bp, Homo sapiens
tttaacatcacaaat

SEQ ID NO: 341901 - DNA, 15 bp, Homo sapiens
gtttaacatcacaaa

SEQ ID NO: 341902 - DNA, 15 bp, Homo sapiens
agtttaacatcacaa

SEQ ID NO: 341903 - DNA, 15 bp, Homo sapiens
aagtttaacatcaca

SEQ ID NO: 341904 - DNA, 15 bp, Homo sapiens
aaagtttaacatcac

SEQ ID NO: 341905 - DNA, 15 bp, Homo sapiens
taaagtttaacatca

SEQ ID NO: 341906 - DNA, 15 bp, Homo sapiens
ataaagtttaacatc

SEQ ID NO: 341907 - DNA, 15 bp, Homo sapiens
tataaagtttaacat

SEQ ID NO: 341908 - DNA, 15 bp, Homo sapiens
ttataaagtttaaca

SEQ ID NO: 341909 - DNA, 15 bp, Homo sapiens
gttataaagtttaac

SEQ ID NO: 341910 - DNA, 15 bp, Homo sapiens
cgttataaagtttaa

SEQ ID NO: 341911 - DNA, 15 bp, Homo sapiens
acgttataaagttta

SEQ ID NO: 341912 - DNA, 15 bp, Homo sapiens
aacgttataaagttt

SEQ ID NO: 341913 - DNA, 15 bp, Homo sapiens
aaacgttataaagtt

SEQ ID NO: 341914 - DNA, 15 bp, Homo sapiens
caaacgttataaagt

SEQ ID NO: 341915 - DNA, 15 bp, Homo sapiens
acaaacgttataaag

SEQ ID NO: 341916 - DNA, 15 bp, Homo sapiens
cacaaacgttataaa

SEQ ID NO: 341917 - DNA, 15 bp, Homo sapiens
ccacaaacgttataa

SEQ ID NO: 341918 - DNA, 15 bp, Homo sapiens
accacaaacgttata

SEQ ID NO: 341919 - DNA, 15 bp, Homo sapiens
caccacaaacgttat

SEQ ID NO: 341920 - DNA, 15 bp, Homo sapiens
acaccacaaacgtta

SEQ ID NO: 341921 - DNA, 15 bp, Homo sapiens
cacaccacaaacgtt

SEQ ID NO: 341922 - DNA, 15 bp, Homo sapiens
acacaccacaaacgt

SEQ ID NO: 341923 - DNA, 15 bp, Homo sapiens
aacacaccacaaacg

SEQ ID NO: 341924 - DNA, 15 bp, Homo sapiens
gaacacaccacaaac

SEQ ID NO: 341925 - DNA, 15 bp, Homo sapiens
tgaacacaccacaaa

SEQ ID NO: 341926 - DNA, 15 bp, Homo sapiens
ttgaacacaccacaa

SEQ ID NO: 341927 - DNA, 15 bp, Homo sapiens
cttgaacacaccaca

SEQ ID NO: 341928 - DNA, 15 bp, Homo sapiens
tcttgaacacaccac

SEQ ID NO: 341929 - DNA, 15 bp, Homo sapiens
ttcttgaacacacca

SEQ ID NO: 341930 - DNA, 15 bp, Homo sapiens
tttcttgaacacacc

SEQ ID NO: 341931 - DNA, 15 bp, Homo sapiens
gtttcttgaacacac

SEQ ID NO: 341932 - DNA, 15 bp, Homo sapiens
tgtttcttgaacaca

SEQ ID NO: 341933 - DNA, 15 bp, Homo sapiens
ctgtttcttgaacac

SEQ ID NO: 341934 - DNA, 15 bp, Homo sapiens
tctgtttcttgaaca

SEQ ID NO: 341935 - DNA, 15 bp, Homo sapiens
ttctgtttcttgaac

SEQ ID NO: 341936 - DNA, 15 bp, Homo sapiens
tttctgtttcttgaa

SEQ ID NO: 341937 - DNA, 15 bp, Homo sapiens
atttctgtttcttga

SEQ ID NO: 341938 - DNA, 15 bp, Homo sapiens
tatttctgtttcttg

SEQ ID NO: 341939 - DNA, 15 bp, Homo sapiens
gtatttctgtttctt

SEQ ID NO: 341940 - DNA, 15 bp, Homo sapiens
agtatttctgtttct

SEQ ID NO: 341941 - DNA, 15 bp, Homo sapiens
aagtatttctgtttc

SEQ ID NO: 341942 - DNA, 15 bp, Homo sapiens
gaagtatttctgttt

SEQ ID NO: 341943 - DNA, 15 bp, Homo sapiens
agaagtatttctgtt

SEQ ID NO: 341944 - DNA, 15 bp, Homo sapiens
aagaagtatttctgt

SEQ ID NO: 341945 - DNA, 15 bp, Homo sapiens
aaagaagtatttctg

SEQ ID NO: 341946 - DNA, 15 bp, Homo sapiens
taaagaagtatttct

SEQ ID NO: 341947 - DNA, 15 bp, Homo sapiens
ttaaagaagtatttc

SEQ ID NO: 341948 - DNA, 15 bp, Homo sapiens
attaaagaagtattt

SEQ ID NO: 341949 - DNA, 15 bp, Homo sapiens
tattaaagaagtatt

SEQ ID NO: 341950 - DNA, 15 bp, Homo sapiens
ttattaaagaagtat

SEQ ID NO: 341951 - DNA, 15 bp, Homo sapiens
tttattaaagaagta

SEQ ID NO: 341952 - DNA, 15 bp, Homo sapiens
ctttattaaagaagt

SEQ ID NO: 341953 - DNA, 15 bp, Homo sapiens
gctttattaaagaag

SEQ ID NO: 341954 - DNA, 15 bp, Homo sapiens
tgctttattaaagaa

SEQ ID NO: 341955 - DNA, 15 bp, Homo sapiens
atgctttattaaaga

SEQ ID NO: 341956 - DNA, 15 bp, Homo sapiens
tatgctttattaaag

SEQ ID NO: 341957 - DNA, 15 bp, Homo sapiens
atatgctttattaaa

SEQ ID NO: 341958 - DNA, 15 bp, Homo sapiens
tatatgctttattaa

SEQ ID NO: 341959 - DNA, 15 bp, Homo sapiens
atatatgctttatta

SEQ ID NO: 341960 - DNA, 15 bp, Homo sapiens
tatatatgctttatt

SEQ ID NO: 341961 - DNA, 15 bp, Homo sapiens
atatatatgctttat

SEQ ID NO: 341962 - DNA, 15 bp, Homo sapiens
catatatatgcttta

SEQ ID NO: 341963 - DNA, 15 bp, Homo sapiens
acatatatatgcttt

SEQ ID NO: 341964 - DNA, 15 bp, Homo sapiens
aacatatatatgctt

SEQ ID NO: 341965 - DNA, 15 bp, Homo sapiens
caacatatatatgct

SEQ ID NO: 341966 - DNA, 15 bp, Homo sapiens
acaacatatatatgc

SEQ ID NO: 341967 - DNA, 15 bp, Homo sapiens
aacaacatatatatg

SEQ ID NO: 341968 - DNA, 15 bp, Homo sapiens
aaacaacatatatat

SEQ ID NO: 341969 - DNA, 15 bp, Homo sapiens
caaacaacatatata

SEQ ID NO: 341970 - DNA, 15 bp, Homo sapiens
acaaacaacatatat

SEQ ID NO: 341971 - DNA, 15 bp, Homo sapiens
aacaaacaacatata

SEQ ID NO: 341972 - DNA, 15 bp, Homo sapiens
aaacaaacaacatat

SEQ ID NO: 341973 - DNA, 15 bp, Homo sapiens
aaaacaaacaacata

SEQ ID NO: 341974 - DNA, 15 bp, Homo sapiens
aaaaacaaacaacat

SEQ ID NO: 341975 - DNA, 15 bp, Homo sapiens
taaaaacaaacaaca

SEQ ID NO: 341976 - DNA, 15 bp, Homo sapiens
ctaaaaacaaacaac

SEQ ID NO: 341977 - DNA, 15 bp, Homo sapiens
cctaaaaacaaacaa

SEQ ID NO: 341978 - DNA, 15 bp, Homo sapiens
acctaaaaacaaaca

SEQ ID NO: 341979 - DNA, 15 bp, Homo sapiens
aacctaaaaacaaac

SEQ ID NO: 341980 - DNA, 15 bp, Homo sapiens
gaacctaaaaacaaa

SEQ ID NO: 341981 - DNA, 15 bp, Homo sapiens
ggaacctaaaaacaa

SEQ ID NO: 341982 - DNA, 15 bp, Homo sapiens
aggaacctaaaaaca

SEQ ID NO: 341983 - DNA, 15 bp, Homo sapiens
aaggaacctaaaaac

SEQ ID NO: 341984 - DNA, 15 bp, Homo sapiens
aaaggaacctaaaaa

SEQ ID NO: 341985 - DNA, 15 bp, Homo sapiens
caaaggaacctaaaa

SEQ ID NO: 341986 - DNA, 15 bp, Homo sapiens
gcaaaggaacctaaa

SEQ ID NO: 341987 - DNA, 15 bp, Homo sapiens
tgcaaaggaacctaa

SEQ ID NO: 341988 - DNA, 15 bp, Homo sapiens
ttgcaaaggaaccta

SEQ ID NO: 341989 - DNA, 15 bp, Homo sapiens
gttgcaaaggaacct

SEQ ID NO: 341990 - DNA, 15 bp, Homo sapiens
tgttgcaaaggaacc

SEQ ID NO: 341991 - DNA, 15 bp, Homo sapiens
ctgttgcaaaggaac

SEQ ID NO: 341992 - DNA, 15 bp, Homo sapiens
gctgttgcaaaggaa

SEQ ID NO: 341993 - DNA, 15 bp, Homo sapiens
tgctgttgcaaagga

SEQ ID NO: 341994 - DNA, 15 bp, Homo sapiens
atgctgttgcaaagg

SEQ ID NO: 341995 - DNA, 15 bp, Homo sapiens
gatgctgttgcaaag

SEQ ID NO: 341996 - DNA, 15 bp, Homo sapiens
agatgctgttgcaaa

SEQ ID NO: 341997 - DNA, 15 bp, Homo sapiens
aagatgctgttgcaa

SEQ ID NO: 341998 - DNA, 15 bp, Homo sapiens
caagatgctgttgca

SEQ ID NO: 341999 - DNA, 15 bp, Homo sapiens
gcaagatgctgttgc

SEQ ID NO: 342000 - DNA, 15 bp, Homo sapiens
ggcaagatgctgttg

SEQ ID NO: 342001 - DNA, 15 bp, Homo sapiens
aggcaagatgctgtt

SEQ ID NO: 342002 - DNA, 15 bp, Homo sapiens
caggcaagatgctgt

SEQ ID NO: 342003 - DNA, 15 bp, Homo sapiens
tcaggcaagatgctg

SEQ ID NO: 342004 - DNA, 15 bp, Homo sapiens
atcaggcaagatgct

SEQ ID NO: 342005 - DNA, 15 bp, Homo sapiens
aatcaggcaagatgc

SEQ ID NO: 342006 - DNA, 15 bp, Homo sapiens
aaatcaggcaagatg

SEQ ID NO: 342007 - DNA, 15 bp, Homo sapiens
caaatcaggcaagat

SEQ ID NO: 342008 - DNA, 15 bp, Homo sapiens
acaaatcaggcaaga

SEQ ID NO: 342009 - DNA, 15 bp, Homo sapiens
tacaaatcaggcaag

SEQ ID NO: 342010 - DNA, 15 bp, Homo sapiens
ttacaaatcaggcaa

SEQ ID NO: 342011 - DNA, 15 bp, Homo sapiens
tttacaaatcaggca

SEQ ID NO: 342012 - DNA, 15 bp, Homo sapiens
atttacaaatcaggc

SEQ ID NO: 342013 - DNA, 15 bp, Homo sapiens
tatttacaaatcagg

SEQ ID NO: 342014 - DNA, 15 bp, Homo sapiens
gtatttacaaatcag

SEQ ID NO: 342015 - DNA, 15 bp, Homo sapiens
tgtatttacaaatca

SEQ ID NO: 342016 - DNA, 15 bp, Homo sapiens
ttgtatttacaaatc

SEQ ID NO: 342017 - DNA, 15 bp, Homo sapiens
tttgtatttacaaat

SEQ ID NO: 342018 - DNA, 15 bp, Homo sapiens
ctttgtatttacaaa

SEQ ID NO: 342019 - DNA, 15 bp, Homo sapiens
actttgtatttacaa

SEQ ID NO: 342020 - DNA, 15 bp, Homo sapiens
aactttgtatttaca

SEQ ID NO: 342021 - DNA, 15 bp, Homo sapiens
caactttgtatttac

SEQ ID NO: 342022 - DNA, 15 bp, Homo sapiens
tcaactttgtattta

SEQ ID NO: 342023 - DNA, 15 bp, Homo sapiens
gtcaactttgtattt

SEQ ID NO: 342024 - DNA, 15 bp, Homo sapiens
agtcaactttgtatt

SEQ ID NO: 342025 - DNA, 15 bp, Homo sapiens
cagtcaactttgtat

SEQ ID NO: 342026 - DNA, 15 bp, Homo sapiens
acagtcaactttgta

SEQ ID NO: 342027 - DNA, 15 bp, Homo sapiens
cacagtcaactttgt

SEQ ID NO: 342028 - DNA, 15 bp, Homo sapiens
tcacagtcaactttg

SEQ ID NO: 342029 - DNA, 15 bp, Homo sapiens
ttcacagtcaacttt

SEQ ID NO: 342030 - DNA, 15 bp, Homo sapiens
cttcacagtcaactt

SEQ ID NO: 342031 - DNA, 15 bp, Homo sapiens
gcttcacagtcaact

SEQ ID NO: 342032 - DNA, 15 bp, Homo sapiens
agcttcacagtcaac

SEQ ID NO: 342033 - DNA, 15 bp, Homo sapiens
cagcttcacagtcaa

SEQ ID NO: 342034 - DNA, 15 bp, Homo sapiens
acagcttcacagtca

SEQ ID NO: 342035 - DNA, 15 bp, Homo sapiens
tacagcttcacagtc

SEQ ID NO: 342036 - DNA, 15 bp, Homo sapiens
gtacagcttcacagt

SEQ ID NO: 342037 - DNA, 15 bp, Homo sapiens
cgtacagcttcacag

SEQ ID NO: 342038 - DNA, 15 bp, Homo sapiens
tcgtacagcttcaca

SEQ ID NO: 342039 - DNA, 15 bp, Homo sapiens
ctcgtacagcttcac

SEQ ID NO: 342040 - DNA, 15 bp, Homo sapiens
cctcgtacagcttca

SEQ ID NO: 342041 - DNA, 15 bp, Homo sapiens
tcctcgtacagcttc

SEQ ID NO: 342042 - DNA, 15 bp, Homo sapiens
ctcctcgtacagctt

SEQ ID NO: 342043 - DNA, 15 bp, Homo sapiens
tctcctcgtacagct

SEQ ID NO: 342044 - DNA, 15 bp, Homo sapiens
atctcctcgtacagc

SEQ ID NO: 342045 - DNA, 15 bp, Homo sapiens
tatctcctcgtacag

SEQ ID NO: 342046 - DNA, 15 bp, Homo sapiens
atatctcctcgtaca

SEQ ID NO: 342047 - DNA, 15 bp, Homo sapiens
aatatctcctcgtac

SEQ ID NO: 342048 - DNA, 15 bp, Homo sapiens
aaatatctcctcgta

SEQ ID NO: 342049 - DNA, 15 bp, Homo sapiens
aaaatatctcctcgt

SEQ ID NO: 342050 - DNA, 15 bp, Homo sapiens
aaaaatatctcctcg

SEQ ID NO: 342051 - DNA, 15 bp, Homo sapiens
taaaaatatctcctc

SEQ ID NO: 342052 - DNA, 15 bp, Homo sapiens
ttaaaaatatctcct

SEQ ID NO: 342053 - DNA, 15 bp, Homo sapiens
attaaaaatatctcc

SEQ ID NO: 342054 - DNA, 15 bp, Homo sapiens
gattaaaaatatctc

SEQ ID NO: 342055 - DNA, 15 bp, Homo sapiens
tgattaaaaatatct

SEQ ID NO: 342056 - DNA, 15 bp, Homo sapiens
ctgattaaaaatatc

SEQ ID NO: 342057 - DNA, 15 bp, Homo sapiens
cctgattaaaaatat

SEQ ID NO: 342058 - DNA, 15 bp, Homo sapiens
acctgattaaaaata

SEQ ID NO: 342059 - DNA, 15 bp, Homo sapiens
tacctgattaaaaat

SEQ ID NO: 342060 - DNA, 15 bp, Homo sapiens
ttacctgattaaaaa

SEQ ID NO: 342061 - DNA, 15 bp, Homo sapiens
attacctgattaaaa

SEQ ID NO: 342062 - DNA, 15 bp, Homo sapiens
aattacctgattaaa

SEQ ID NO: 342063 - DNA, 15 bp, Homo sapiens
aaattacctgattaa

SEQ ID NO: 342064 - DNA, 15 bp, Homo sapiens
caaattacctgatta

SEQ ID NO: 342065 - DNA, 15 bp, Homo sapiens
acaaattacctgatt

SEQ ID NO: 342066 - DNA, 15 bp, Homo sapiens
aacaaattacctgat

SEQ ID NO: 342067 - DNA, 15 bp, Homo sapiens
caacaaattacctga

SEQ ID NO: 342068 - DNA, 15 bp, Homo sapiens
gcaacaaattacctg

SEQ ID NO: 342069 - DNA, 15 bp, Homo sapiens
ggcaacaaattacct

SEQ ID NO: 342070 - DNA, 15 bp, Homo sapiens
gggcaacaaattacc

SEQ ID NO: 342071 - DNA, 15 bp, Homo sapiens
tgggcaacaaattac

SEQ ID NO: 342072 - DNA, 15 bp, Homo sapiens
atgggcaacaaatta

SEQ ID NO: 342073 - DNA, 15 bp, Homo sapiens
tatgggcaacaaatt

SEQ ID NO: 342074 - DNA, 15 bp, Homo sapiens
atatgggcaacaaat

SEQ ID NO: 342075 - DNA, 15 bp, Homo sapiens
aatatgggcaacaaa

SEQ ID NO: 342076 - DNA, 15 bp, Homo sapiens
aaatatgggcaacaa

SEQ ID NO: 342077 - DNA, 15 bp, Homo sapiens
aaaatatgggcaaca

SEQ ID NO: 342078 - DNA, 15 bp, Homo sapiens
taaaatatgggcaac

SEQ ID NO: 342079 - DNA, 15 bp, Homo sapiens
ctaaaatatgggcaa

SEQ ID NO: 342080 - DNA, 15 bp, Homo sapiens
cctaaaatatgggca

SEQ ID NO: 342081 - DNA, 15 bp, Homo sapiens
tcctaaaatatgggc

SEQ ID NO: 342082 - DNA, 15 bp, Homo sapiens
ttcctaaaatatggg

SEQ ID NO: 342083 - DNA, 15 bp, Homo sapiens
attcctaaaatatgg

SEQ ID NO: 342084 - DNA, 15 bp, Homo sapiens
aattcctaaaatatg

SEQ ID NO: 342085 - DNA, 15 bp, Homo sapiens
caattcctaaaatat

SEQ ID NO: 342086 - DNA, 15 bp, Homo sapiens
acaattcctaaaata

SEQ ID NO: 342087 - DNA, 15 bp, Homo sapiens
aacaattcctaaaat

SEQ ID NO: 342088 - DNA, 15 bp, Homo sapiens
gaacaattcctaaaa

SEQ ID NO: 342089 - DNA, 15 bp, Homo sapiens
tgaacaattcctaaa

SEQ ID NO: 342090 - DNA, 15 bp, Homo sapiens
atgaacaattcctaa

SEQ ID NO: 342091 - DNA, 15 bp, Homo sapiens
catgaacaattccta

SEQ ID NO: 342092 - DNA, 15 bp, Homo sapiens
acatgaacaattcct

SEQ ID NO: 342093 - DNA, 15 bp, Homo sapiens
gacatgaacaattcc

SEQ ID NO: 342094 - DNA, 15 bp, Homo sapiens
agacatgaacaattc

SEQ ID NO: 342095 - DNA, 15 bp, Homo sapiens
gagacatgaacaatt

SEQ ID NO: 342096 - DNA, 15 bp, Homo sapiens
agagacatgaacaat

SEQ ID NO: 342097 - DNA, 15 bp, Homo sapiens
cagagacatgaacaa

SEQ ID NO: 342098 - DNA, 15 bp, Homo sapiens
tcagagacatgaaca

SEQ ID NO: 342099 - DNA, 15 bp, Homo sapiens
ttcagagacatgaac

SEQ ID NO: 342100 - DNA, 15 bp, Homo sapiens
cttcagagacatgaa

SEQ ID NO: 342101 - DNA, 15 bp, Homo sapiens
acttcagagacatga

SEQ ID NO: 342102 - DNA, 15 bp, Homo sapiens
tacttcagagacatg

SEQ ID NO: 342103 - DNA, 15 bp, Homo sapiens
atacttcagagacat

SEQ ID NO: 342104 - DNA, 15 bp, Homo sapiens
aatacttcagagaca

SEQ ID NO: 342105 - DNA, 15 bp, Homo sapiens
aaatacttcagagac

SEQ ID NO: 342106 - DNA, 15 bp, Homo sapiens
gaaatacttcagaga

SEQ ID NO: 342107 - DNA, 15 bp, Homo sapiens
agaaatacttcagag

SEQ ID NO: 342108 - DNA, 15 bp, Homo sapiens
aagaaatacttcaga

SEQ ID NO: 342109 - DNA, 15 bp, Homo sapiens
gaagaaatacttcag

SEQ ID NO: 342110 - DNA, 15 bp, Homo sapiens
agaagaaatacttca

SEQ ID NO: 342111 - DNA, 15 bp, Homo sapiens
aagaagaaatacttc

SEQ ID NO: 342112 - DNA, 15 bp, Homo sapiens
aaagaagaaatactt

SEQ ID NO: 342113 - DNA, 15 bp, Homo sapiens
aaaagaagaaatact

SEQ ID NO: 342114 - DNA, 15 bp, Homo sapiens
caaaagaagaaatac

SEQ ID NO: 342115 - DNA, 15 bp, Homo sapiens
gcaaaagaagaaata

SEQ ID NO: 342116 - DNA, 15 bp, Homo sapiens
ggcaaaagaagaaat

SEQ ID NO: 342117 - DNA, 15 bp, Homo sapiens
aggcaaaagaagaaa

SEQ ID NO: 342118 - DNA, 15 bp, Homo sapiens
gaggcaaaagaagaa

SEQ ID NO: 342119 - DNA, 15 bp, Homo sapiens
tgaggcaaaagaaga

SEQ ID NO: 342120 - DNA, 15 bp, Homo sapiens
ttgaggcaaaagaag

SEQ ID NO: 342121 - DNA, 15 bp, Homo sapiens
tttgaggcaaaagaa

SEQ ID NO: 342122 - DNA, 15 bp, Homo sapiens
ttttgaggcaaaaga

SEQ ID NO: 342123 - DNA, 15 bp, Homo sapiens
attttgaggcaaaag

SEQ ID NO: 342124 - DNA, 15 bp, Homo sapiens
gattttgaggcaaaa

SEQ ID NO: 342125 - DNA, 15 bp, Homo sapiens
ggattttgaggcaaa

SEQ ID NO: 342126 - DNA, 15 bp, Homo sapiens
aggattttgaggcaa

SEQ ID NO: 342127 - DNA, 15 bp, Homo sapiens
aaggattttgaggca

SEQ ID NO: 342128 - DNA, 15 bp, Homo sapiens
aaaggattttgaggc

SEQ ID NO: 342129 - DNA, 15 bp, Homo sapiens
aaaaggattttgagg

SEQ ID NO: 342130 - DNA, 15 bp, Homo sapiens
aaaaaggattttgag

SEQ ID NO: 342131 - DNA, 15 bp, Homo sapiens
aaaaaaggattttga

SEQ ID NO: 342132 - DNA, 15 bp, Homo sapiens
taaaaaaggattttg

SEQ ID NO: 342133 - DNA, 15 bp, Homo sapiens
gtaaaaaaggatttt

SEQ ID NO: 342134 - DNA, 15 bp, Homo sapiens
ggtaaaaaaggattt

SEQ ID NO: 342135 - DNA, 15 bp, Homo sapiens
gggtaaaaaaggatt

SEQ ID NO: 342136 - DNA, 15 bp, Homo sapiens
ggggtaaaaaaggat

SEQ ID NO: 342137 - DNA, 15 bp, Homo sapiens
aggggtaaaaaagga

SEQ ID NO: 342138 - DNA, 15 bp, Homo sapiens
aaggggtaaaaaagg

SEQ ID NO: 342139 - DNA, 15 bp, Homo sapiens
aaaggggtaaaaaag

SEQ ID NO: 342140 - DNA, 15 bp, Homo sapiens
taaaggggtaaaaaa

SEQ ID NO: 342141 - DNA, 15 bp, Homo sapiens
ttaaaggggtaaaaa

SEQ ID NO: 342142 - DNA, 15 bp, Homo sapiens
tttaaaggggtaaaa

SEQ ID NO: 342143 - DNA, 15 bp, Homo sapiens
ctttaaaggggtaaa

SEQ ID NO: 342144 - DNA, 15 bp, Homo sapiens
actttaaaggggtaa

SEQ ID NO: 342145 - DNA, 15 bp, Homo sapiens
tactttaaaggggta

SEQ ID NO: 342146 - DNA, 15 bp, Homo sapiens
atactttaaaggggt

SEQ ID NO: 342147 - DNA, 15 bp, Homo sapiens
tatactttaaagggg

SEQ ID NO: 342148 - DNA, 15 bp, Homo sapiens
atatactttaaaggg

SEQ ID NO: 342149 - DNA, 15 bp, Homo sapiens
tatatactttaaagg

SEQ ID NO: 342150 - DNA, 15 bp, Homo sapiens
atatatactttaaag

SEQ ID NO: 342151 - DNA, 15 bp, Homo sapiens
catatatactttaaa

SEQ ID NO: 342152 - DNA, 15 bp, Homo sapiens
ccatatatactttaa

SEQ ID NO: 342153 - DNA, 15 bp, Homo sapiens
accatatatacttta

SEQ ID NO: 342154 - DNA, 15 bp, Homo sapiens
taccatatatacttt

SEQ ID NO: 342155 - DNA, 15 bp, Homo sapiens
gtaccatatatactt

SEQ ID NO: 342156 - DNA, 15 bp, Homo sapiens
tgtaccatatatact

SEQ ID NO: 342157 - DNA, 15 bp, Homo sapiens
ctgtaccatatatac

SEQ ID NO: 342158 - DNA, 15 bp, Homo sapiens
tctgtaccatatata

SEQ ID NO: 342159 - DNA, 15 bp, Homo sapiens
ttctgtaccatatat

SEQ ID NO: 342160 - DNA, 15 bp, Homo sapiens
tttctgtaccatata

SEQ ID NO: 342161 - DNA, 15 bp, Homo sapiens
ctttctgtaccatat

SEQ ID NO: 342162 - DNA, 15 bp, Homo sapiens
tctttctgtaccata

SEQ ID NO: 342163 - DNA, 15 bp, Homo sapiens
atctttctgtaccat

SEQ ID NO: 342164 - DNA, 15 bp, Homo sapiens
aatctttctgtacca

SEQ ID NO: 342165 - DNA, 15 bp, Homo sapiens
gaatctttctgtacc

SEQ ID NO: 342166 - DNA, 15 bp, Homo sapiens
tgaatctttctgtac

SEQ ID NO: 342167 - DNA, 15 bp, Homo sapiens
ctgaatctttctgta

SEQ ID NO: 342168 - DNA, 15 bp, Homo sapiens
cctgaatctttctgt

SEQ ID NO: 342169 - DNA, 15 bp, Homo sapiens
tcctgaatctttctg

SEQ ID NO: 342170 - DNA, 15 bp, Homo sapiens
ttcctgaatctttct

SEQ ID NO: 342171 - DNA, 15 bp, Homo sapiens
cttcctgaatctttc

SEQ ID NO: 342172 - DNA, 15 bp, Homo sapiens
tcttcctgaatcttt

SEQ ID NO: 342173 - DNA, 15 bp, Homo sapiens
ttcttcctgaatctt

SEQ ID NO: 342174 - DNA, 15 bp, Homo sapiens
tttcttcctgaatct

SEQ ID NO: 342175 - DNA, 15 bp, Homo sapiens
ttttcttcctgaatc

SEQ ID NO: 342176 - DNA, 15 bp, Homo sapiens
attttcttcctgaat

SEQ ID NO: 342177 - DNA, 15 bp, Homo sapiens
tattttcttcctgaa

SEQ ID NO: 342178 - DNA, 15 bp, Homo sapiens
ctattttcttcctga

SEQ ID NO: 342179 - DNA, 15 bp, Homo sapiens
actattttcttcctg

SEQ ID NO: 342180 - DNA, 15 bp, Homo sapiens
aactattttcttcct

SEQ ID NO: 342181 - DNA, 15 bp, Homo sapiens
taactattttcttcc

SEQ ID NO: 342182 - DNA, 15 bp, Homo sapiens
ctaactattttcttc

SEQ ID NO: 342183 - DNA, 15 bp, Homo sapiens
gctaactattttctt

SEQ ID NO: 342184 - DNA, 15 bp, Homo sapiens
tgctaactattttct

SEQ ID NO: 342185 - DNA, 15 bp, Homo sapiens
atgctaactattttc

SEQ ID NO: 342186 - DNA, 15 bp, Homo sapiens
aatgctaactatttt

SEQ ID NO: 342187 - DNA, 15 bp, Homo sapiens
aaatgctaactattt

SEQ ID NO: 342188 - DNA, 15 bp, Homo sapiens
caaatgctaactatt

SEQ ID NO: 342189 - DNA, 15 bp, Homo sapiens
ccaaatgctaactat

SEQ ID NO: 342190 - DNA, 15 bp, Homo sapiens
cccaaatgctaacta

SEQ ID NO: 342191 - DNA, 15 bp, Homo sapiens
tcccaaatgctaact

SEQ ID NO: 342192 - DNA, 15 bp, Homo sapiens
ttcccaaatgctaac

SEQ ID NO: 342193 - DNA, 15 bp, Homo sapiens
attcccaaatgctaa

SEQ ID NO: 342194 - DNA, 15 bp, Homo sapiens
aattcccaaatgcta

SEQ ID NO: 342195 - DNA, 15 bp, Homo sapiens
aaattcccaaatgct

SEQ ID NO: 342196 - DNA, 15 bp, Homo sapiens
aaaattcccaaatgc

SEQ ID NO: 342197 - DNA, 15 bp, Homo sapiens
caaaattcccaaatg

SEQ ID NO: 342198 - DNA, 15 bp, Homo sapiens
ccaaaattcccaaat

SEQ ID NO: 342199 - DNA, 15 bp, Homo sapiens
accaaaattcccaaa

SEQ ID NO: 342200 - DNA, 15 bp, Homo sapiens
taccaaaattcccaa

SEQ ID NO: 342201 - DNA, 15 bp, Homo sapiens
ttaccaaaattccca

SEQ ID NO: 342202 - DNA, 15 bp, Homo sapiens
tttaccaaaattccc

SEQ ID NO: 342203 - DNA, 15 bp, Homo sapiens
ttttaccaaaattcc

SEQ ID NO: 342204 - DNA, 15 bp, Homo sapiens
attttaccaaaattc

SEQ ID NO: 342205 - DNA, 15 bp, Homo sapiens
tattttaccaaaatt

SEQ ID NO: 342206 - DNA, 15 bp, Homo sapiens
gtattttaccaaaat

SEQ ID NO: 342207 - DNA, 15 bp, Homo sapiens
tgtattttaccaaaa

SEQ ID NO: 342208 - DNA, 15 bp, Homo sapiens
gtgtattttaccaaa

SEQ ID NO: 342209 - DNA, 15 bp, Homo sapiens
cgtgtattttaccaa

SEQ ID NO: 342210 - DNA, 15 bp, Homo sapiens
tcgtgtattttacca

SEQ ID NO: 342211 - DNA, 15 bp, Homo sapiens
ctcgtgtattttacc

SEQ ID NO: 342212 - DNA, 15 bp, Homo sapiens
tctcgtgtattttac

SEQ ID NO: 342213 - DNA, 15 bp, Homo sapiens
ttctcgtgtatttta

SEQ ID NO: 342214 - DNA, 15 bp, Homo sapiens
gttctcgtgtatttt

SEQ ID NO: 342215 - DNA, 15 bp, Homo sapiens
ggttctcgtgtattt

SEQ ID NO: 342216 - DNA, 15 bp, Homo sapiens
aggttctcgtgtatt

SEQ ID NO: 342217 - DNA, 15 bp, Homo sapiens
aaggttctcgtgtat

SEQ ID NO: 342218 - DNA, 15 bp, Homo sapiens
aaaggttctcgtgta

SEQ ID NO: 342219 - DNA, 15 bp, Homo sapiens
gaaaggttctcgtgt

SEQ ID NO: 342220 - DNA, 15 bp, Homo sapiens
tgaaaggttctcgtg

SEQ ID NO: 342221 - DNA, 15 bp, Homo sapiens
ttgaaaggttctcgt

SEQ ID NO: 342222 - DNA, 15 bp, Homo sapiens
attgaaaggttctcg

SEQ ID NO: 342223 - DNA, 15 bp, Homo sapiens
tattgaaaggttctc

SEQ ID NO: 342224 - DNA, 15 bp, Homo sapiens
gtattgaaaggttct

SEQ ID NO: 342225 - DNA, 15 bp, Homo sapiens
ggtattgaaaggttc

SEQ ID NO: 342226 - DNA, 15 bp, Homo sapiens
aggtattgaaaggtt

SEQ ID NO: 342227 - DNA, 15 bp, Homo sapiens
aaggtattgaaaggt

SEQ ID NO: 342228 - DNA, 15 bp, Homo sapiens
taaggtattgaaagg

SEQ ID NO: 342229 - DNA, 15 bp, Homo sapiens
ataaggtattgaaag

SEQ ID NO: 342230 - DNA, 15 bp, Homo sapiens
tataaggtattgaaa

SEQ ID NO: 342231 - DNA, 15 bp, Homo sapiens
atataaggtattgaa

SEQ ID NO: 342232 - DNA, 15 bp, Homo sapiens
tatataaggtattga

SEQ ID NO: 342233 - DNA, 15 bp, Homo sapiens
ctatataaggtattg

SEQ ID NO: 342234 - DNA, 15 bp, Homo sapiens
tctatataaggtatt

SEQ ID NO: 342235 - DNA, 15 bp, Homo sapiens
ttctatataaggtat

SEQ ID NO: 342236 - DNA, 15 bp, Homo sapiens
tttctatataaggta

SEQ ID NO: 342237 - DNA, 15 bp, Homo sapiens
ttttctatataaggt

SEQ ID NO: 342238 - DNA, 15 bp, Homo sapiens
gttttctatataagg

SEQ ID NO: 342239 - DNA, 15 bp, Homo sapiens
tgttttctatataag

SEQ ID NO: 342240 - DNA, 15 bp, Homo sapiens
ctgttttctatataa

SEQ ID NO: 342241 - DNA, 15 bp, Homo sapiens
gctgttttctatata

SEQ ID NO: 342242 - DNA, 15 bp, Homo sapiens
ggctgttttctatat

SEQ ID NO: 342243 - DNA, 15 bp, Homo sapiens
gggctgttttctata

SEQ ID NO: 342244 - DNA, 15 bp, Homo sapiens
agggctgttttctat

SEQ ID NO: 342245 - DNA, 15 bp, Homo sapiens
tagggctgttttcta

SEQ ID NO: 342246 - DNA, 15 bp, Homo sapiens
atagggctgttttct

SEQ ID NO: 342247 - DNA, 15 bp, Homo sapiens
tatagggctgttttc

SEQ ID NO: 342248 - DNA, 15 bp, Homo sapiens
ttatagggctgtttt

SEQ ID NO: 342249 - DNA, 15 bp, Homo sapiens
tttatagggctgttt

SEQ ID NO: 342250 - DNA, 15 bp, Homo sapiens
ctttatagggctgtt

SEQ ID NO: 342251 - DNA, 15 bp, Homo sapiens
cctttatagggctgt

SEQ ID NO: 342252 - DNA, 15 bp, Homo sapiens
gcctttatagggctg

SEQ ID NO: 342253 - DNA, 15 bp, Homo sapiens
agcctttatagggct

SEQ ID NO: 342254 - DNA, 15 bp, Homo sapiens
gagcctttatagggc

SEQ ID NO: 342255 - DNA, 15 bp, Homo sapiens
agagcctttataggg

SEQ ID NO: 342256 - DNA, 15 bp, Homo sapiens
aagagcctttatagg

SEQ ID NO: 342257 - DNA, 15 bp, Homo sapiens
gaagagcctttatag

SEQ ID NO: 342258 - DNA, 15 bp, Homo sapiens
tgaagagcctttata

SEQ ID NO: 342259 - DNA, 15 bp, Homo sapiens
ttgaagagcctttat

SEQ ID NO: 342260 - DNA, 15 bp, Homo sapiens
tttgaagagccttta

SEQ ID NO: 342261 - DNA, 15 bp, Homo sapiens
atttgaagagccttt

SEQ ID NO: 342262 - DNA, 15 bp, Homo sapiens
aatttgaagagcctt

SEQ ID NO: 342263 - DNA, 15 bp, Homo sapiens
taatttgaagagcct

SEQ ID NO: 342264 - DNA, 15 bp, Homo sapiens
ataatttgaagagcc

SEQ ID NO: 342265 - DNA, 15 bp, Homo sapiens
cataatttgaagagc

SEQ ID NO: 342266 - DNA, 15 bp, Homo sapiens
tcataatttgaagag

SEQ ID NO: 342267 - DNA, 15 bp, Homo sapiens
ttcataatttgaaga

SEQ ID NO: 342268 - DNA, 15 bp, Homo sapiens
tttcataatttgaag

SEQ ID NO: 342269 - DNA, 15 bp, Homo sapiens
atttcataatttgaa

SEQ ID NO: 342270 - DNA, 15 bp, Homo sapiens
aatttcataatttga

SEQ ID NO: 342271 - DNA, 15 bp, Homo sapiens
caatttcataatttg

SEQ ID NO: 342272 - DNA, 15 bp, Homo sapiens
ccaatttcataattt

SEQ ID NO: 342273 - DNA, 15 bp, Homo sapiens
gccaatttcataatt

SEQ ID NO: 342274 - DNA, 15 bp, Homo sapiens
agccaatttcataat

SEQ ID NO: 342275 - DNA, 15 bp, Homo sapiens
aagccaatttcataa

SEQ ID NO: 342276 - DNA, 15 bp, Homo sapiens
gaagccaatttcata

SEQ ID NO: 342277 - DNA, 15 bp, Homo sapiens
agaagccaatttcat

SEQ ID NO: 342278 - DNA, 15 bp, Homo sapiens
aagaagccaatttca

SEQ ID NO: 342279 - DNA, 15 bp, Homo sapiens
taagaagccaatttc

SEQ ID NO: 342280 - DNA, 15 bp, Homo sapiens
ctaagaagccaattt

SEQ ID NO: 342281 - DNA, 15 bp, Homo sapiens
actaagaagccaatt

SEQ ID NO: 342282 - DNA, 15 bp, Homo sapiens
tactaagaagccaat

SEQ ID NO: 342283 - DNA, 15 bp, Homo sapiens
atactaagaagccaa

SEQ ID NO: 342284 - DNA, 15 bp, Homo sapiens
gatactaagaagcca

SEQ ID NO: 342285 - DNA, 15 bp, Homo sapiens
agatactaagaagcc

SEQ ID NO: 342286 - DNA, 15 bp, Homo sapiens
tagatactaagaagc

SEQ ID NO: 342287 - DNA, 15 bp, Homo sapiens
ttagatactaagaag

SEQ ID NO: 342288 - DNA, 15 bp, Homo sapiens
cttagatactaagaa

SEQ ID NO: 342289 - DNA, 15 bp, Homo sapiens
gcttagatactaaga

SEQ ID NO: 342290 - DNA, 15 bp, Homo sapiens
ggcttagatactaag

SEQ ID NO: 342291 - DNA, 15 bp, Homo sapiens
cggcttagatactaa

SEQ ID NO: 342292 - DNA, 15 bp, Homo sapiens
tcggcttagatacta

SEQ ID NO: 342293 - DNA, 15 bp, Homo sapiens
ttcggcttagatact

SEQ ID NO: 342294 - DNA, 15 bp, Homo sapiens
gttcggcttagatac

SEQ ID NO: 342295 - DNA, 15 bp, Homo sapiens
tgttcggcttagata

SEQ ID NO: 342296 - DNA, 15 bp, Homo sapiens
atgttcggcttagat

SEQ ID NO: 342297 - DNA, 15 bp, Homo sapiens
tatgttcggcttaga

SEQ ID NO: 342298 - DNA, 15 bp, Homo sapiens
ttatgttcggcttag

SEQ ID NO: 342299 - DNA, 15 bp, Homo sapiens
tttatgttcggctta

SEQ ID NO: 342300 - DNA, 15 bp, Homo sapiens
ttttatgttcggctt

SEQ ID NO: 342301 - DNA, 15 bp, Homo sapiens
attttatgttcggct

SEQ ID NO: 342302 - DNA, 15 bp, Homo sapiens
cattttatgttcggc

SEQ ID NO: 342303 - DNA, 15 bp, Homo sapiens
acattttatgttcgg

SEQ ID NO: 342304 - DNA, 15 bp, Homo sapiens
gacattttatgttcg

SEQ ID NO: 342305 - DNA, 15 bp, Homo sapiens
tgacattttatgttc

SEQ ID NO: 342306 - DNA, 15 bp, Homo sapiens
ctgacattttatgtt

SEQ ID NO: 342307 - DNA, 15 bp, Homo sapiens
tctgacattttatgt

SEQ ID NO: 342308 - DNA, 15 bp, Homo sapiens
atctgacattttatg

SEQ ID NO: 342309 - DNA, 15 bp, Homo sapiens
gatctgacattttat

SEQ ID NO: 342310 - DNA, 15 bp, Homo sapiens
tgatctgacatttta

SEQ ID NO: 342311 - DNA, 15 bp, Homo sapiens
atgatctgacatttt

SEQ ID NO: 342312 - DNA, 15 bp, Homo sapiens
tatgatctgacattt

SEQ ID NO: 342313 - DNA, 15 bp, Homo sapiens
ttatgatctgacatt

SEQ ID NO: 342314 - DNA, 15 bp, Homo sapiens
cttatgatctgacat

SEQ ID NO: 342315 - DNA, 15 bp, Homo sapiens
gcttatgatctgaca

SEQ ID NO: 342316 - DNA, 15 bp, Homo sapiens
tgcttatgatctgac

SEQ ID NO: 342317 - DNA, 15 bp, Homo sapiens
ttgcttatgatctga

SEQ ID NO: 342318 - DNA, 15 bp, Homo sapiens
cttgcttatgatctg

SEQ ID NO: 342319 - DNA, 15 bp, Homo sapiens
acttgcttatgatct

SEQ ID NO: 342320 - DNA, 15 bp, Homo sapiens
aacttgcttatgatc

SEQ ID NO: 342321 - DNA, 15 bp, Homo sapiens
caacttgcttatgat

SEQ ID NO: 342322 - DNA, 15 bp, Homo sapiens
acaacttgcttatga

SEQ ID NO: 342323 - DNA, 15 bp, Homo sapiens
aacaacttgcttatg

SEQ ID NO: 342324 - DNA, 15 bp, Homo sapiens
caacaacttgcttat

SEQ ID NO: 342325 - DNA, 15 bp, Homo sapiens
acaacaacttgctta

SEQ ID NO: 342326 - DNA, 15 bp, Homo sapiens
aacaacaacttgctt

SEQ ID NO: 342327 - DNA, 15 bp, Homo sapiens
caacaacaacttgct

SEQ ID NO: 342328 - DNA, 15 bp, Homo sapiens
acaacaacaacttgc

SEQ ID NO: 342329 - DNA, 15 bp, Homo sapiens
tacaacaacaacttg

SEQ ID NO: 342330 - DNA, 15 bp, Homo sapiens
ctacaacaacaactt

SEQ ID NO: 342331 - DNA, 15 bp, Homo sapiens
actacaacaacaact

SEQ ID NO: 342332 - DNA, 15 bp, Homo sapiens
tactacaacaacaac

SEQ ID NO: 342333 - DNA, 15 bp, Homo sapiens
ctactacaacaacaa

SEQ ID NO: 342334 - DNA, 15 bp, Homo sapiens
actactacaacaaca

SEQ ID NO: 342335 - DNA, 15 bp, Homo sapiens
aactactacaacaac

SEQ ID NO: 342336 - DNA, 15 bp, Homo sapiens
aaactactacaacaa

SEQ ID NO: 342337 - DNA, 15 bp, Homo sapiens
aaaactactacaaca

SEQ ID NO: 342338 - DNA, 15 bp, Homo sapiens
aaaaactactacaac

SEQ ID NO: 342339 - DNA, 15 bp, Homo sapiens
gaaaaactactacaa

SEQ ID NO: 342340 - DNA, 15 bp, Homo sapiens
agaaaaactactaca

SEQ ID NO: 342341 - DNA, 15 bp, Homo sapiens
gagaaaaactactac

SEQ ID NO: 342342 - DNA, 15 bp, Homo sapiens
ggagaaaaactacta

SEQ ID NO: 342343 - DNA, 15 bp, Homo sapiens
aggagaaaaactact

SEQ ID NO: 342344 - DNA, 15 bp, Homo sapiens
aaggagaaaaactac

SEQ ID NO: 342345 - DNA, 15 bp, Homo sapiens
gaaggagaaaaacta

SEQ ID NO: 342346 - DNA, 15 bp, Homo sapiens
ggaaggagaaaaact

SEQ ID NO: 342347 - DNA, 15 bp, Homo sapiens
aggaaggagaaaaac

SEQ ID NO: 342348 - DNA, 15 bp, Homo sapiens
gaggaaggagaaaaa

SEQ ID NO: 342349 - DNA, 15 bp, Homo sapiens
agaggaaggagaaaa

SEQ ID NO: 342350 - DNA, 15 bp, Homo sapiens
gagaggaaggagaaa

SEQ ID NO: 342351 - DNA, 15 bp, Homo sapiens
ggagaggaaggagaa

SEQ ID NO: 342352 - DNA, 15 bp, Homo sapiens
gggagaggaaggaga

SEQ ID NO: 342353 - DNA, 15 bp, Homo sapiens
agggagaggaaggag

SEQ ID NO: 342354 - DNA, 15 bp, Homo sapiens
aagggagaggaagga

SEQ ID NO: 342355 - DNA, 15 bp, Homo sapiens
aaagggagaggaagg

SEQ ID NO: 342356 - DNA, 15 bp, Homo sapiens
aaaagggagaggaag

SEQ ID NO: 342357 - DNA, 15 bp, Homo sapiens
aaaaagggagaggaa

SEQ ID NO: 342358 - DNA, 15 bp, Homo sapiens
caaaaagggagagga

SEQ ID NO: 342359 - DNA, 15 bp, Homo sapiens
acaaaaagggagagg

SEQ ID NO: 342360 - DNA, 15 bp, Homo sapiens
cacaaaaagggagag

SEQ ID NO: 342361 - DNA, 15 bp, Homo sapiens
gcacaaaaagggaga

SEQ ID NO: 342362 - DNA, 15 bp, Homo sapiens
ggcacaaaaagggag

SEQ ID NO: 342363 - DNA, 15 bp, Homo sapiens
aggcacaaaaaggga

SEQ ID NO: 342364 - DNA, 15 bp, Homo sapiens
caggcacaaaaaggg

SEQ ID NO: 342365 - DNA, 15 bp, Homo sapiens
acaggcacaaaaagg

SEQ ID NO: 342366 - DNA, 15 bp, Homo sapiens
gacaggcacaaaaag

SEQ ID NO: 342367 - DNA, 15 bp, Homo sapiens
tgacaggcacaaaaa

SEQ ID NO: 342368 - DNA, 15 bp, Homo sapiens
ctgacaggcacaaaa

SEQ ID NO: 342369 - DNA, 15 bp, Homo sapiens
tctgacaggcacaaa

SEQ ID NO: 342370 - DNA, 15 bp, Homo sapiens
atctgacaggcacaa

SEQ ID NO: 342371 - DNA, 15 bp, Homo sapiens
aatctgacaggcaca

SEQ ID NO: 342372 - DNA, 15 bp, Homo sapiens
aaatctgacaggcac

SEQ ID NO: 342373 - DNA, 15 bp, Homo sapiens
caaatctgacaggca

SEQ ID NO: 342374 - DNA, 15 bp, Homo sapiens
ccaaatctgacaggc

SEQ ID NO: 342375 - DNA, 15 bp, Homo sapiens
tccaaatctgacagg

SEQ ID NO: 342376 - DNA, 15 bp, Homo sapiens
gtccaaatctgacag

SEQ ID NO: 342377 - DNA, 15 bp, Homo sapiens
ggtccaaatctgaca

SEQ ID NO: 342378 - DNA, 15 bp, Homo sapiens
aggtccaaatctgac

SEQ ID NO: 342379 - DNA, 15 bp, Homo sapiens
aaggtccaaatctga

SEQ ID NO: 342380 - DNA, 15 bp, Homo sapiens
taaggtccaaatctg

SEQ ID NO: 342381 - DNA, 15 bp, Homo sapiens
ttaaggtccaaatct

SEQ ID NO: 342382 - DNA, 15 bp, Homo sapiens
tttaaggtccaaatc

SEQ ID NO: 342383 - DNA, 15 bp, Homo sapiens
atttaaggtccaaat

SEQ ID NO: 342384 - DNA, 15 bp, Homo sapiens
aatttaaggtccaaa

SEQ ID NO: 342385 - DNA, 15 bp, Homo sapiens
taatttaaggtccaa

SEQ ID NO: 342386 - DNA, 15 bp, Homo sapiens
ctaatttaaggtcca

SEQ ID NO: 342387 - DNA, 15 bp, Homo sapiens
actaatttaaggtcc

SEQ ID NO: 342388 - DNA, 15 bp, Homo sapiens
aactaatttaaggtc

SEQ ID NO: 342389 - DNA, 15 bp, Homo sapiens
taactaatttaaggt

SEQ ID NO: 342390 - DNA, 15 bp, Homo sapiens
ataactaatttaagg

SEQ ID NO: 342391 - DNA, 15 bp, Homo sapiens
cataactaatttaag

SEQ ID NO: 342392 - DNA, 15 bp, Homo sapiens
ccataactaatttaa

SEQ ID NO: 342393 - DNA, 15 bp, Homo sapiens
accataactaattta

SEQ ID NO: 342394 - DNA, 15 bp, Homo sapiens
taccataactaattt

SEQ ID NO: 342395 - DNA, 15 bp, Homo sapiens
ttaccataactaatt

SEQ ID NO: 342396 - DNA, 15 bp, Homo sapiens
attaccataactaat

SEQ ID NO: 342397 - DNA, 15 bp, Homo sapiens
gattaccataactaa

SEQ ID NO: 342398 - DNA, 15 bp, Homo sapiens
agattaccataacta

SEQ ID NO: 342399 - DNA, 15 bp, Homo sapiens
tagattaccataact

SEQ ID NO: 342400 - DNA, 15 bp, Homo sapiens
ttagattaccataac

SEQ ID NO: 342401 - DNA, 15 bp, Homo sapiens
tttagattaccataa

SEQ ID NO: 342402 - DNA, 15 bp, Homo sapiens
ttttagattaccata

SEQ ID NO: 342403 - DNA, 15 bp, Homo sapiens
attttagattaccat

SEQ ID NO: 342404 - DNA, 15 bp, Homo sapiens
aattttagattacca

SEQ ID NO: 342405 - DNA, 15 bp, Homo sapiens
taattttagattacc

SEQ ID NO: 342406 - DNA, 15 bp, Homo sapiens
ataattttagattac

SEQ ID NO: 342407 - DNA, 15 bp, Homo sapiens
aataattttagatta

SEQ ID NO: 342408 - DNA, 15 bp, Homo sapiens
aaataattttagatt

SEQ ID NO: 342409 - DNA, 15 bp, Homo sapiens
gaaataattttagat

SEQ ID NO: 342410 - DNA, 15 bp, Homo sapiens
tgaaataattttaga

SEQ ID NO: 342411 - DNA, 15 bp, Homo sapiens
atgaaataattttag

SEQ ID NO: 342412 - DNA, 15 bp, Homo sapiens
tatgaaataatttta

SEQ ID NO: 342413 - DNA, 15 bp, Homo sapiens
gtatgaaataatttt

SEQ ID NO: 342414 - DNA, 15 bp, Homo sapiens
tgtatgaaataattt

SEQ ID NO: 342415 - DNA, 15 bp, Homo sapiens
atgtatgaaataatt

SEQ ID NO: 342416 - DNA, 15 bp, Homo sapiens
catgtatgaaataat

SEQ ID NO: 342417 - DNA, 15 bp, Homo sapiens
acatgtatgaaataa

SEQ ID NO: 342418 - DNA, 15 bp, Homo sapiens
aacatgtatgaaata

SEQ ID NO: 342419 - DNA, 15 bp, Homo sapiens
gaacatgtatgaaat

SEQ ID NO: 342420 - DNA, 15 bp, Homo sapiens
tgaacatgtatgaaa

SEQ ID NO: 342421 - DNA, 15 bp, Homo sapiens
atgaacatgtatgaa

SEQ ID NO: 342422 - DNA, 15 bp, Homo sapiens
aatgaacatgtatga

SEQ ID NO: 342423 - DNA, 15 bp, Homo sapiens
caatgaacatgtatg

SEQ ID NO: 342424 - DNA, 15 bp, Homo sapiens
gcaatgaacatgtat

SEQ ID NO: 342425 - DNA, 15 bp, Homo sapiens
ggcaatgaacatgta

SEQ ID NO: 342426 - DNA, 15 bp, Homo sapiens
tggcaatgaacatgt

SEQ ID NO: 342427 - DNA, 15 bp, Homo sapiens
ttggcaatgaacatg

SEQ ID NO: 342428 - DNA, 15 bp, Homo sapiens
tttggcaatgaacat

SEQ ID NO: 342429 - DNA, 15 bp, Homo sapiens
ttttggcaatgaaca

SEQ ID NO: 342430 - DNA, 15 bp, Homo sapiens
tttttggcaatgaac

SEQ ID NO: 342431 - DNA, 15 bp, Homo sapiens
ttttttggcaatgaa

SEQ ID NO: 342432 - DNA, 15 bp, Homo sapiens
attttttggcaatga

SEQ ID NO: 342433 - DNA, 15 bp, Homo sapiens
tattttttggcaatg

SEQ ID NO: 342434 - DNA, 15 bp, Homo sapiens
atattttttggcaat

SEQ ID NO: 342435 - DNA, 15 bp, Homo sapiens
tatattttttggcaa

SEQ ID NO: 342436 - DNA, 15 bp, Homo sapiens
ctatattttttggca

SEQ ID NO: 342437 - DNA, 15 bp, Homo sapiens
cctatattttttggc

SEQ ID NO: 342438 - DNA, 15 bp, Homo sapiens
tcctatattttttgg

SEQ ID NO: 342439 - DNA, 15 bp, Homo sapiens
ttcctatattttttg

SEQ ID NO: 342440 - DNA, 15 bp, Homo sapiens
tttcctatatttttt

SEQ ID NO: 342441 - DNA, 15 bp, Homo sapiens
ttttcctatattttt

SEQ ID NO: 342442 - DNA, 15 bp, Homo sapiens
attttcctatatttt

SEQ ID NO: 342443 - DNA, 15 bp, Homo sapiens
aattttcctatattt

SEQ ID NO: 342444 - DNA, 15 bp, Homo sapiens
aaattttcctatatt

SEQ ID NO: 342445 - DNA, 15 bp, Homo sapiens
caaattttcctatat

SEQ ID NO: 342446 - DNA, 15 bp, Homo sapiens
ccaaattttcctata

SEQ ID NO: 342447 - DNA, 15 bp, Homo sapiens
gccaaattttcctat

SEQ ID NO: 342448 - DNA, 15 bp, Homo sapiens
tgccaaattttccta

SEQ ID NO: 342449 - DNA, 15 bp, Homo sapiens
ctgccaaattttcct

SEQ ID NO: 342450 - DNA, 15 bp, Homo sapiens
tctgccaaattttcc

SEQ ID NO: 342451 - DNA, 15 bp, Homo sapiens
ttctgccaaattttc

SEQ ID NO: 342452 - DNA, 15 bp, Homo sapiens
tttctgccaaatttt

SEQ ID NO: 342453 - DNA, 15 bp, Homo sapiens
ttttctgccaaattt

SEQ ID NO: 342454 - DNA, 15 bp, Homo sapiens
attttctgccaaatt

SEQ ID NO: 342455 - DNA, 15 bp, Homo sapiens
tattttctgccaaat

SEQ ID NO: 342456 - DNA, 15 bp, Homo sapiens
ttattttctgccaaa

SEQ ID NO: 342457 - DNA, 15 bp, Homo sapiens
tttattttctgccaa

SEQ ID NO: 342458 - DNA, 15 bp, Homo sapiens
ttttattttctgcca

SEQ ID NO: 342459 - DNA, 15 bp, Homo sapiens
tttttattttctgcc

SEQ ID NO: 342460 - DNA, 15 bp, Homo sapiens
atttttattttctgc

SEQ ID NO: 342461 - DNA, 15 bp, Homo sapiens
aatttttattttctg

SEQ ID NO: 342462 - DNA, 15 bp, Homo sapiens
taatttttattttct

SEQ ID NO: 342463 - DNA, 15 bp, Homo sapiens
ataatttttattttc

SEQ ID NO: 342464 - DNA, 15 bp, Homo sapiens
gataatttttatttt

SEQ ID NO: 342465 - DNA, 15 bp, Homo sapiens
ggataatttttattt

SEQ ID NO: 342466 - DNA, 15 bp, Homo sapiens
tggataatttttatt

SEQ ID NO: 342467 - DNA, 15 bp, Homo sapiens
ctggataatttttat

SEQ ID NO: 342468 - DNA, 15 bp, Homo sapiens
tctggataattttta

SEQ ID NO: 342469 - DNA, 15 bp, Homo sapiens
ttctggataattttt

SEQ ID NO: 342470 - DNA, 15 bp, Homo sapiens
tttctggataatttt

SEQ ID NO: 342471 - DNA, 15 bp, Homo sapiens
atttctggataattt

SEQ ID NO: 342472 - DNA, 15 bp, Homo sapiens
tatttctggataatt

SEQ ID NO: 342473 - DNA, 15 bp, Homo sapiens
atatttctggataat

SEQ ID NO: 342474 - DNA, 15 bp, Homo sapiens
catatttctggataa

SEQ ID NO: 342475 - DNA, 15 bp, Homo sapiens
acatatttctggata

SEQ ID NO: 342476 - DNA, 15 bp, Homo sapiens
gacatatttctggat

SEQ ID NO: 342477 - DNA, 15 bp, Homo sapiens
ggacatatttctgga

SEQ ID NO: 342478 - DNA, 15 bp, Homo sapiens
aggacatatttctgg

SEQ ID NO: 342479 - DNA, 15 bp, Homo sapiens
caggacatatttctg

SEQ ID NO: 342480 - DNA, 15 bp, Homo sapiens
acaggacatatttct

SEQ ID NO: 342481 - DNA, 15 bp, Homo sapiens
cacaggacatatttc

SEQ ID NO: 342482 - DNA, 15 bp, Homo sapiens
acacaggacatattt

SEQ ID NO: 342483 - DNA, 15 bp, Homo sapiens
cacacaggacatatt

SEQ ID NO: 342484 - DNA, 15 bp, Homo sapiens
gcacacaggacatat

SEQ ID NO: 342485 - DNA, 15 bp, Homo sapiens
agcacacaggacata

SEQ ID NO: 342486 - DNA, 15 bp, Homo sapiens
aagcacacaggacat

SEQ ID NO: 342487 - DNA, 15 bp, Homo sapiens
taagcacacaggaca

SEQ ID NO: 342488 - DNA, 15 bp, Homo sapiens
ctaagcacacaggac

SEQ ID NO: 342489 - DNA, 15 bp, Homo sapiens
gctaagcacacagga

SEQ ID NO: 342490 - DNA, 15 bp, Homo sapiens
tgctaagcacacagg

SEQ ID NO: 342491 - DNA, 15 bp, Homo sapiens
ttgctaagcacacag

SEQ ID NO: 342492 - DNA, 15 bp, Homo sapiens
attgctaagcacaca

SEQ ID NO: 342493 - DNA, 15 bp, Homo sapiens
tattgctaagcacac

SEQ ID NO: 342494 - DNA, 15 bp, Homo sapiens
atattgctaagcaca

SEQ ID NO: 342495 - DNA, 15 bp, Homo sapiens
tatattgctaagcac

SEQ ID NO: 342496 - DNA, 15 bp, Homo sapiens
atatattgctaagca

SEQ ID NO: 342497 - DNA, 15 bp, Homo sapiens
catatattgctaagc

SEQ ID NO: 342498 - DNA, 15 bp, Homo sapiens
ccatatattgctaag

SEQ ID NO: 342499 - DNA, 15 bp, Homo sapiens
tccatatattgctaa

SEQ ID NO: 342500 - DNA, 15 bp, Homo sapiens
ctccatatattgcta

SEQ ID NO: 342501 - DNA, 15 bp, Homo sapiens
cctccatatattgct

SEQ ID NO: 342502 - DNA, 15 bp, Homo sapiens
acctccatatattgc

SEQ ID NO: 342503 - DNA, 15 bp, Homo sapiens
tacctccatatattg

SEQ ID NO: 342504 - DNA, 15 bp, Homo sapiens
ttacctccatatatt

SEQ ID NO: 342505 - DNA, 15 bp, Homo sapiens
attacctccatatat

SEQ ID NO: 342506 - DNA, 15 bp, Homo sapiens
gattacctccatata

SEQ ID NO: 342507 - DNA, 15 bp, Homo sapiens
tgattacctccatat

SEQ ID NO: 342508 - DNA, 15 bp, Homo sapiens
atgattacctccata

SEQ ID NO: 342509 - DNA, 15 bp, Homo sapiens
catgattacctccat

SEQ ID NO: 342510 - DNA, 15 bp, Homo sapiens
acatgattacctcca

SEQ ID NO: 342511 - DNA, 15 bp, Homo sapiens
gacatgattacctcc

SEQ ID NO: 342512 - DNA, 15 bp, Homo sapiens
tgacatgattacctc

SEQ ID NO: 342513 - DNA, 15 bp, Homo sapiens
atgacatgattacct

SEQ ID NO: 342514 - DNA, 15 bp, Homo sapiens
aatgacatgattacc

SEQ ID NO: 342515 - DNA, 15 bp, Homo sapiens
taatgacatgattac

SEQ ID NO: 342516 - DNA, 15 bp, Homo sapiens
gtaatgacatgatta

SEQ ID NO: 342517 - DNA, 15 bp, Homo sapiens
cgtaatgacatgatt

SEQ ID NO: 342518 - DNA, 15 bp, Homo sapiens
tcgtaatgacatgat

SEQ ID NO: 342519 - DNA, 15 bp, Homo sapiens
ttcgtaatgacatga

SEQ ID NO: 342520 - DNA, 15 bp, Homo sapiens
tttcgtaatgacatg

SEQ ID NO: 342521 - DNA, 15 bp, Homo sapiens
ctttcgtaatgacat

SEQ ID NO: 342522 - DNA, 15 bp, Homo sapiens
tctttcgtaatgaca

SEQ ID NO: 342523 - DNA, 15 bp, Homo sapiens
ctctttcgtaatgac

SEQ ID NO: 342524 - DNA, 15 bp, Homo sapiens
cctctttcgtaatga

SEQ ID NO: 342525 - DNA, 15 bp, Homo sapiens
tcctctttcgtaatg

SEQ ID NO: 342526 - DNA, 15 bp, Homo sapiens
ttcctctttcgtaat

SEQ ID NO: 342527 - DNA, 15 bp, Homo sapiens
cttcctctttcgtaa

SEQ ID NO: 342528 - DNA, 15 bp, Homo sapiens
tcttcctctttcgta

SEQ ID NO: 342529 - DNA, 15 bp, Homo sapiens
ttcttcctctttcgt

SEQ ID NO: 342530 - DNA, 15 bp, Homo sapiens
attcttcctctttcg

SEQ ID NO: 342531 - DNA, 15 bp, Homo sapiens
tattcttcctctttc

SEQ ID NO: 342532 - DNA, 15 bp, Homo sapiens
ctattcttcctcttt

SEQ ID NO: 342533 - DNA, 15 bp, Homo sapiens
actattcttcctctt

SEQ ID NO: 342534 - DNA, 15 bp, Homo sapiens
tactattcttcctct

SEQ ID NO: 342535 - DNA, 15 bp, Homo sapiens
atactattcttcctc

SEQ ID NO: 342536 - DNA, 15 bp, Homo sapiens
tatactattcttcct

SEQ ID NO: 342537 - DNA, 15 bp, Homo sapiens
atatactattcttcc

SEQ ID NO: 342538 - DNA, 15 bp, Homo sapiens
aatatactattcttc

SEQ ID NO: 342539 - DNA, 15 bp, Homo sapiens
taatatactattctt

SEQ ID NO: 342540 - DNA, 15 bp, Homo sapiens
ttaatatactattct

SEQ ID NO: 342541 - DNA, 15 bp, Homo sapiens
tttaatatactattc

SEQ ID NO: 342542 - DNA, 15 bp, Homo sapiens
ttttaatatactatt

SEQ ID NO: 342543 - DNA, 15 bp, Homo sapiens
attttaatatactat

SEQ ID NO: 342544 - DNA, 15 bp, Homo sapiens
cattttaatatacta

SEQ ID NO: 342545 - DNA, 15 bp, Homo sapiens
ccattttaatatact

SEQ ID NO: 342546 - DNA, 15 bp, Homo sapiens
tccattttaatatac

SEQ ID NO: 342547 - DNA, 15 bp, Homo sapiens
ctccattttaatata

SEQ ID NO: 342548 - DNA, 15 bp, Homo sapiens
actccattttaatat

SEQ ID NO: 342549 - DNA, 15 bp, Homo sapiens
gactccattttaata

SEQ ID NO: 342550 - DNA, 15 bp, Homo sapiens
tgactccattttaat

SEQ ID NO: 342551 - DNA, 15 bp, Homo sapiens
atgactccattttaa

SEQ ID NO: 342552 - DNA, 15 bp, Homo sapiens
aatgactccatttta

SEQ ID NO: 342553 - DNA, 15 bp, Homo sapiens
caatgactccatttt

SEQ ID NO: 342554 - DNA, 15 bp, Homo sapiens
ccaatgactccattt

SEQ ID NO: 342555 - DNA, 15 bp, Homo sapiens
accaatgactccatt

SEQ ID NO: 342556 - DNA, 15 bp, Homo sapiens
gaccaatgactccat

SEQ ID NO: 342557 - DNA, 15 bp, Homo sapiens
cgaccaatgactcca

SEQ ID NO: 342558 - DNA, 15 bp, Homo sapiens
ccgaccaatgactcc

SEQ ID NO: 342559 - DNA, 15 bp, Homo sapiens
cccgaccaatgactc

SEQ ID NO: 342560 - DNA, 15 bp, Homo sapiens
acccgaccaatgact

SEQ ID NO: 342561 - DNA, 15 bp, Homo sapiens
cacccgaccaatgac

SEQ ID NO: 342562 - DNA, 15 bp, Homo sapiens
gcacccgaccaatga

SEQ ID NO: 342563 - DNA, 15 bp, Homo sapiens
tgcacccgaccaatg

SEQ ID NO: 342564 - DNA, 15 bp, Homo sapiens
ctgcacccgaccaat

SEQ ID NO: 342565 - DNA, 15 bp, Homo sapiens
actgcacccgaccaa

SEQ ID NO: 342566 - DNA, 15 bp, Homo sapiens
cactgcacccgacca

SEQ ID NO: 342567 - DNA, 15 bp, Homo sapiens
ccactgcacccgacc

SEQ ID NO: 342568 - DNA, 15 bp, Homo sapiens
gccactgcacccgac

SEQ ID NO: 342569 - DNA, 15 bp, Homo sapiens
agccactgcacccga

SEQ ID NO: 342570 - DNA, 15 bp, Homo sapiens
agcatgagccactgc

SEQ ID NO: 342571 - DNA, 15 bp, Homo sapiens
aagcatgagccactg

SEQ ID NO: 342572 - DNA, 15 bp, Homo sapiens
caagcatgagccact

SEQ ID NO: 342573 - DNA, 15 bp, Homo sapiens
acaagcatgagccac

SEQ ID NO: 342574 - DNA, 15 bp, Homo sapiens
tacaagcatgagcca

SEQ ID NO: 342575 - DNA, 15 bp, Homo sapiens
ttacaagcatgagcc

SEQ ID NO: 342576 - DNA, 15 bp, Homo sapiens
attacaagcatgagc

SEQ ID NO: 342577 - DNA, 15 bp, Homo sapiens
gattacaagcatgag

SEQ ID NO: 342578 - DNA, 15 bp, Homo sapiens
ggattacaagcatga

SEQ ID NO: 342579 - DNA, 15 bp, Homo sapiens
gggattacaagcatg

SEQ ID NO: 342580 - DNA, 15 bp, Homo sapiens
tgggattacaagcat

SEQ ID NO: 342581 - DNA, 15 bp, Homo sapiens
ctgggattacaagca

SEQ ID NO: 342582 - DNA, 15 bp, Homo sapiens
gctgggattacaagc

SEQ ID NO: 342583 - DNA, 15 bp, Homo sapiens
tgctgggattacaag

SEQ ID NO: 342584 - DNA, 15 bp, Homo sapiens
gtgctgggattacaa

SEQ ID NO: 342585 - DNA, 15 bp, Homo sapiens
tcctcccaaagtgct

SEQ ID NO: 342586 - DNA, 15 bp, Homo sapiens
gtcctcccaaagtgc

SEQ ID NO: 342587 - DNA, 15 bp, Homo sapiens
cgtcctcccaaagtg

SEQ ID NO: 342588 - DNA, 15 bp, Homo sapiens
tcgtcctcccaaagt

SEQ ID NO: 342589 - DNA, 15 bp, Homo sapiens
ctcgtcctcccaaag

SEQ ID NO: 342590 - DNA, 15 bp, Homo sapiens
cctcgtcctcccaaa

SEQ ID NO: 342591 - DNA, 15 bp, Homo sapiens
acctcgtcctcccaa

SEQ ID NO: 342592 - DNA, 15 bp, Homo sapiens
cacctcgtcctccca

SEQ ID NO: 342593 - DNA, 15 bp, Homo sapiens
ccacctcgtcctccc

SEQ ID NO: 342594 - DNA, 15 bp, Homo sapiens
cccacctcgtcctcc

SEQ ID NO: 342595 - DNA, 15 bp, Homo sapiens
acccacctcgtcctc

SEQ ID NO: 342596 - DNA, 15 bp, Homo sapiens
gacccacctcgtcct

SEQ ID NO: 342597 - DNA, 15 bp, Homo sapiens
cgacccacctcgtcc

SEQ ID NO: 342598 - DNA, 15 bp, Homo sapiens
tcgacccacctcgtc

SEQ ID NO: 342599 - DNA, 15 bp, Homo sapiens
atcgacccacctcgt

SEQ ID NO: 342600 - DNA, 15 bp, Homo sapiens
gatcgacccacctcg

SEQ ID NO: 342601 - DNA, 15 bp, Homo sapiens
tgatcgacccacctc

SEQ ID NO: 342602 - DNA, 15 bp, Homo sapiens
atgatcgacccacct

SEQ ID NO: 342603 - DNA, 15 bp, Homo sapiens
aatgatcgacccacc

SEQ ID NO: 342604 - DNA, 15 bp, Homo sapiens
aaatgatcgacccac

SEQ ID NO: 342605 - DNA, 15 bp, Homo sapiens
caaatgatcgaccca

SEQ ID NO: 342606 - DNA, 15 bp, Homo sapiens
tcaaatgatcgaccc

SEQ ID NO: 342607 - DNA, 15 bp, Homo sapiens
ctcaaatgatcgacc

SEQ ID NO: 342608 - DNA, 15 bp, Homo sapiens
cctcaaatgatcgac

SEQ ID NO: 342609 - DNA, 15 bp, Homo sapiens
acctcaaatgatcga

SEQ ID NO: 342610 - DNA, 15 bp, Homo sapiens
gacctcaaatgatcg

SEQ ID NO: 342611 - DNA, 15 bp, Homo sapiens
tgacctcaaatgatc

SEQ ID NO: 342612 - DNA, 15 bp, Homo sapiens
ctgacctcaaatgat

SEQ ID NO: 342613 - DNA, 15 bp, Homo sapiens
tctgacctcaaatga

SEQ ID NO: 342614 - DNA, 15 bp, Homo sapiens
ttctgacctcaaatg

SEQ ID NO: 342615 - DNA, 15 bp, Homo sapiens
cttctgacctcaaat

SEQ ID NO: 342616 - DNA, 15 bp, Homo sapiens
acttctgacctcaaa

SEQ ID NO: 342617 - DNA, 15 bp, Homo sapiens
cacttctgacctcaa

SEQ ID NO: 342618 - DNA, 15 bp, Homo sapiens
tcacttctgacctca

SEQ ID NO: 342619 - DNA, 15 bp, Homo sapiens
ctcacttctgacctc

SEQ ID NO: 342620 - DNA, 15 bp, Homo sapiens
tctcacttctgacct

SEQ ID NO: 342621 - DNA, 15 bp, Homo sapiens
gtctcacttctgacc

SEQ ID NO: 342622 - DNA, 15 bp, Homo sapiens
ggtctcacttctgac

SEQ ID NO: 342623 - DNA, 15 bp, Homo sapiens
tggtctcacttctga

SEQ ID NO: 342624 - DNA, 15 bp, Homo sapiens
ctggtctcacttctg

SEQ ID NO: 342625 - DNA, 15 bp, Homo sapiens
gctggtctcacttct

SEQ ID NO: 342626 - DNA, 15 bp, Homo sapiens
ggctggtctcacttc

SEQ ID NO: 342627 - DNA, 15 bp, Homo sapiens
aggctggtctcactt

SEQ ID NO: 342628 - DNA, 15 bp, Homo sapiens
caggctggtctcact

SEQ ID NO: 342629 - DNA, 15 bp, Homo sapiens
ccaggctggtctcac

SEQ ID NO: 342630 - DNA, 15 bp, Homo sapiens
gccatgttggccagg

SEQ ID NO: 342631 - DNA, 15 bp, Homo sapiens
tgccatgttggccag

SEQ ID NO: 342632 - DNA, 15 bp, Homo sapiens
ttgccatgttggcca

SEQ ID NO: 342633 - DNA, 15 bp, Homo sapiens
tttgccatgttggcc

SEQ ID NO: 342634 - DNA, 15 bp, Homo sapiens
ttttgccatgttggc

SEQ ID NO: 342635 - DNA, 15 bp, Homo sapiens
gttttgccatgttgg

SEQ ID NO: 342636 - DNA, 15 bp, Homo sapiens
ggttttgccatgttg

SEQ ID NO: 342637 - DNA, 15 bp, Homo sapiens
gggttttgccatgtt

SEQ ID NO: 342638 - DNA, 15 bp, Homo sapiens
ggggttttgccatgt

SEQ ID NO: 342639 - DNA, 15 bp, Homo sapiens
cggggttttgccatg

SEQ ID NO: 342640 - DNA, 15 bp, Homo sapiens
acggggttttgccat

SEQ ID NO: 342641 - DNA, 15 bp, Homo sapiens
gacggggttttgcca

SEQ ID NO: 342642 - DNA, 15 bp, Homo sapiens
agacggggttttgcc

SEQ ID NO: 342643 - DNA, 15 bp, Homo sapiens
gagacggggttttgc

SEQ ID NO: 342644 - DNA, 15 bp, Homo sapiens
agagacggggttttg

SEQ ID NO: 342645 - DNA, 15 bp, Homo sapiens
gagagacggggtttt

SEQ ID NO: 342646 - DNA, 15 bp, Homo sapiens
agagagacggggttt

SEQ ID NO: 342647 - DNA, 15 bp, Homo sapiens
aagagagacggggtt

SEQ ID NO: 342648 - DNA, 15 bp, Homo sapiens
taagagagacggggt

SEQ ID NO: 342649 - DNA, 15 bp, Homo sapiens
ttaagagagacgggg

SEQ ID NO: 342650 - DNA, 15 bp, Homo sapiens
tttaagagagacggg

SEQ ID NO: 342651 - DNA, 15 bp, Homo sapiens
ttttaagagagacgg

SEQ ID NO: 342652 - DNA, 15 bp, Homo sapiens
tttttaagagagacg

SEQ ID NO: 342653 - DNA, 15 bp, Homo sapiens
atttttaagagagac

SEQ ID NO: 342654 - DNA, 15 bp, Homo sapiens
tatttttaagagaga

SEQ ID NO: 342655 - DNA, 15 bp, Homo sapiens
gtatttttaagagag

SEQ ID NO: 342656 - DNA, 15 bp, Homo sapiens
tgtatttttaagaga

SEQ ID NO: 342657 - DNA, 15 bp, Homo sapiens
ttgtatttttaagag

SEQ ID NO: 342658 - DNA, 15 bp, Homo sapiens
tttgtatttttaaga

SEQ ID NO: 342659 - DNA, 15 bp, Homo sapiens
ttttgtatttttaag

SEQ ID NO: 342660 - DNA, 15 bp, Homo sapiens
tttttgtatttttaa

SEQ ID NO: 342661 - DNA, 15 bp, Homo sapiens
aggctaatttttgta

SEQ ID NO: 342662 - DNA, 15 bp, Homo sapiens
caggctaatttttgt

SEQ ID NO: 342663 - DNA, 15 bp, Homo sapiens
ccaggctaatttttg

SEQ ID NO: 342664 - DNA, 15 bp, Homo sapiens
gccaggctaattttt

SEQ ID NO: 342665 - DNA, 15 bp, Homo sapiens
tgccaggctaatttt

SEQ ID NO: 342666 - DNA, 15 bp, Homo sapiens
atgccaggctaattt

SEQ ID NO: 342667 - DNA, 15 bp, Homo sapiens
catgccaggctaatt

SEQ ID NO: 342668 - DNA, 15 bp, Homo sapiens
ccatgccaggctaat

SEQ ID NO: 342669 - DNA, 15 bp, Homo sapiens
accatgccaggctaa

SEQ ID NO: 342670 - DNA, 15 bp, Homo sapiens
caccatgccaggcta

SEQ ID NO: 342671 - DNA, 15 bp, Homo sapiens
ccaccatgccaggct

SEQ ID NO: 342672 - DNA, 15 bp, Homo sapiens
gccaccatgccaggc

SEQ ID NO: 342673 - DNA, 15 bp, Homo sapiens
tgccaccatgccagg

SEQ ID NO: 342674 - DNA, 15 bp, Homo sapiens
atgccaccatgccag

SEQ ID NO: 342675 - DNA, 15 bp, Homo sapiens
tatgccaccatgcca

SEQ ID NO: 342676 - DNA, 15 bp, Homo sapiens
atatgccaccatgcc

SEQ ID NO: 342677 - DNA, 15 bp, Homo sapiens
catatgccaccatgc

SEQ ID NO: 342678 - DNA, 15 bp, Homo sapiens
gcatatgccaccatg

SEQ ID NO: 342679 - DNA, 15 bp, Homo sapiens
ggcatatgccaccat

SEQ ID NO: 342680 - DNA, 15 bp, Homo sapiens
aggcatatgccacca

SEQ ID NO: 342681 - DNA, 15 bp, Homo sapiens
aaggcatatgccacc

SEQ ID NO: 342682 - DNA, 15 bp, Homo sapiens
aaaggcatatgccac

SEQ ID NO: 342683 - DNA, 15 bp, Homo sapiens
taaaggcatatgcca

SEQ ID NO: 342684 - DNA, 15 bp, Homo sapiens
ttaaaggcatatgcc

SEQ ID NO: 342685 - DNA, 15 bp, Homo sapiens
attaaaggcatatgc

SEQ ID NO: 342686 - DNA, 15 bp, Homo sapiens
gattaaaggcatatg

SEQ ID NO: 342687 - DNA, 15 bp, Homo sapiens
agattaaaggcatat

SEQ ID NO: 342688 - DNA, 15 bp, Homo sapiens
gagattaaaggcata

SEQ ID NO: 342689 - DNA, 15 bp, Homo sapiens
tgagattaaaggcat

SEQ ID NO: 342690 - DNA, 15 bp, Homo sapiens
ctgagattaaaggca

SEQ ID NO: 342691 - DNA, 15 bp, Homo sapiens
gctgagattaaaggc

SEQ ID NO: 342692 - DNA, 15 bp, Homo sapiens
agctgagattaaagg

SEQ ID NO: 342693 - DNA, 15 bp, Homo sapiens
cagctgagattaaag

SEQ ID NO: 342694 - DNA, 15 bp, Homo sapiens
gcagctgagattaaa

SEQ ID NO: 342695 - DNA, 15 bp, Homo sapiens
agcagctgagattaa

SEQ ID NO: 342696 - DNA, 15 bp, Homo sapiens
aagcagctgagatta

SEQ ID NO: 342697 - DNA, 15 bp, Homo sapiens
caagcagctgagatt

SEQ ID NO: 342698 - DNA, 15 bp, Homo sapiens
ccaagcagctgagat

SEQ ID NO: 342699 - DNA, 15 bp, Homo sapiens
cccaagcagctgaga

SEQ ID NO: 342700 - DNA, 15 bp, Homo sapiens
tcccaagcagctgag

SEQ ID NO: 342701 - DNA, 15 bp, Homo sapiens
ctcccaagcagctga

SEQ ID NO: 342702 - DNA, 15 bp, Homo sapiens
cctcccaagcagctg

SEQ ID NO: 342703 - DNA, 15 bp, Homo sapiens
gcctcccaagcagct

SEQ ID NO: 342704 - DNA, 15 bp, Homo sapiens
agcctcccaagcagc

SEQ ID NO: 342705 - DNA, 15 bp, Homo sapiens
cagcctcccaagcag

SEQ ID NO: 342706 - DNA, 15 bp, Homo sapiens
tcagcctcccaagca

SEQ ID NO: 342707 - DNA, 15 bp, Homo sapiens
ctcagcctcccaagc

SEQ ID NO: 342708 - DNA, 15 bp, Homo sapiens
tgcctcagcctccca

SEQ ID NO: 342709 - DNA, 15 bp, Homo sapiens
cctgcctcagcctcc

SEQ ID NO: 342710 - DNA, 15 bp, Homo sapiens
aattctcctgcctca

SEQ ID NO: 342711 - DNA, 15 bp, Homo sapiens
taattctcctgcctc

SEQ ID NO: 342712 - DNA, 15 bp, Homo sapiens
ataattctcctgcct

SEQ ID NO: 342713 - DNA, 15 bp, Homo sapiens
aataattctcctgcc

SEQ ID NO: 342714 - DNA, 15 bp, Homo sapiens
aaataattctcctgc

SEQ ID NO: 342715 - DNA, 15 bp, Homo sapiens
caaataattctcctg

SEQ ID NO: 342716 - DNA, 15 bp, Homo sapiens
tcaaataattctcct

SEQ ID NO: 342717 - DNA, 15 bp, Homo sapiens
ttcaaataattctcc

SEQ ID NO: 342718 - DNA, 15 bp, Homo sapiens
gttcaaataattctc

SEQ ID NO: 342719 - DNA, 15 bp, Homo sapiens
agttcaaataattct

SEQ ID NO: 342720 - DNA, 15 bp, Homo sapiens
gagttcaaataattc

SEQ ID NO: 342721 - DNA, 15 bp, Homo sapiens
cgagttcaaataatt

SEQ ID NO: 342722 - DNA, 15 bp, Homo sapiens
ccgagttcaaataat

SEQ ID NO: 342723 - DNA, 15 bp, Homo sapiens
cccgagttcaaataa

SEQ ID NO: 342724 - DNA, 15 bp, Homo sapiens
tcccgagttcaaata

SEQ ID NO: 342725 - DNA, 15 bp, Homo sapiens
ctcccgagttcaaat

SEQ ID NO: 342726 - DNA, 15 bp, Homo sapiens
cctcccgagttcaaa

SEQ ID NO: 342727 - DNA, 15 bp, Homo sapiens
acctcccgagttcaa

SEQ ID NO: 342728 - DNA, 15 bp, Homo sapiens
cacctcccgagttca

SEQ ID NO: 342729 - DNA, 15 bp, Homo sapiens
ccacctcccgagttc

SEQ ID NO: 342730 - DNA, 15 bp, Homo sapiens
tccacctcccgagtt

SEQ ID NO: 342731 - DNA, 15 bp, Homo sapiens
ctccacctcccgagt

SEQ ID NO: 342732 - DNA, 15 bp, Homo sapiens
cctccacctcccgag

SEQ ID NO: 342733 - DNA, 15 bp, Homo sapiens
acctccacctcccga

SEQ ID NO: 342734 - DNA, 15 bp, Homo sapiens
tacaacctccacctc

SEQ ID NO: 342735 - DNA, 15 bp, Homo sapiens
ctacaacctccacct

SEQ ID NO: 342736 - DNA, 15 bp, Homo sapiens
actacaacctccacc

SEQ ID NO: 342737 - DNA, 15 bp, Homo sapiens
cactacaacctccac

SEQ ID NO: 342738 - DNA, 15 bp, Homo sapiens
tcactacaacctcca

SEQ ID NO: 342739 - DNA, 15 bp, Homo sapiens
ctcactacaacctcc

SEQ ID NO: 342740 - DNA, 15 bp, Homo sapiens
gctcactacaacctc

SEQ ID NO: 342741 - DNA, 15 bp, Homo sapiens
agctcactacaacct

SEQ ID NO: 342742 - DNA, 15 bp, Homo sapiens
cagctcactacaacc

SEQ ID NO: 342743 - DNA, 15 bp, Homo sapiens
tcagctcactacaac

SEQ ID NO: 342744 - DNA, 15 bp, Homo sapiens
ctcagctcactacaa

SEQ ID NO: 342745 - DNA, 15 bp, Homo sapiens
tctcagctcactaca

SEQ ID NO: 342746 - DNA, 15 bp, Homo sapiens
atctcagctcactac

SEQ ID NO: 342747 - DNA, 15 bp, Homo sapiens
gatctcagctcacta

SEQ ID NO: 342748 - DNA, 15 bp, Homo sapiens
tgatctcagctcact

SEQ ID NO: 342749 - DNA, 15 bp, Homo sapiens
atgatctcagctcac

SEQ ID NO: 342750 - DNA, 15 bp, Homo sapiens
catgatctcagctca

SEQ ID NO: 342751 - DNA, 15 bp, Homo sapiens
gcatgatctcagctc

SEQ ID NO: 342752 - DNA, 15 bp, Homo sapiens
ggcatgatctcagct

SEQ ID NO: 342753 - DNA, 15 bp, Homo sapiens
tggcatgatctcagc

SEQ ID NO: 342754 - DNA, 15 bp, Homo sapiens
gtggcatgatctcag

SEQ ID NO: 342755 - DNA, 15 bp, Homo sapiens
ttactctggctgcct

SEQ ID NO: 342756 - DNA, 15 bp, Homo sapiens
tttactctggctgcc

SEQ ID NO: 342757 - DNA, 15 bp, Homo sapiens
gtttactctggctgc

SEQ ID NO: 342758 - DNA, 15 bp, Homo sapiens
tgtttactctggctg

SEQ ID NO: 342759 - DNA, 15 bp, Homo sapiens
ctgtttactctggct

SEQ ID NO: 342760 - DNA, 15 bp, Homo sapiens
actgtttactctggc

SEQ ID NO: 342761 - DNA, 15 bp, Homo sapiens
aactgtttactctgg

SEQ ID NO: 342762 - DNA, 15 bp, Homo sapiens
caactgtttactctg

SEQ ID NO: 342763 - DNA, 15 bp, Homo sapiens
ccaactgtttactct

SEQ ID NO: 342764 - DNA, 15 bp, Homo sapiens
tccaactgtttactc

SEQ ID NO: 342765 - DNA, 15 bp, Homo sapiens
ttccaactgtttact

SEQ ID NO: 342766 - DNA, 15 bp, Homo sapiens
cttccaactgtttac

SEQ ID NO: 342767 - DNA, 15 bp, Homo sapiens
tcttccaactgttta

SEQ ID NO: 342768 - DNA, 15 bp, Homo sapiens
ttcttccaactgttt

SEQ ID NO: 342769 - DNA, 15 bp, Homo sapiens
tttcttccaactgtt

SEQ ID NO: 342770 - DNA, 15 bp, Homo sapiens
gtttcttccaactgt

SEQ ID NO: 342771 - DNA, 15 bp, Homo sapiens
tgtttcttccaactg

SEQ ID NO: 342772 - DNA, 15 bp, Homo sapiens
atgtttcttccaact

SEQ ID NO: 342773 - DNA, 15 bp, Homo sapiens
catgtttcttccaac

SEQ ID NO: 342774 - DNA, 15 bp, Homo sapiens
ccatgtttcttccaa

SEQ ID NO: 342775 - DNA, 15 bp, Homo sapiens
tccatgtttcttcca

SEQ ID NO: 342776 - DNA, 15 bp, Homo sapiens
ctccatgtttcttcc

SEQ ID NO: 342777 - DNA, 15 bp, Homo sapiens
actccatgtttcttc

SEQ ID NO: 342778 - DNA, 15 bp, Homo sapiens
gactccatgtttctt

SEQ ID NO: 342779 - DNA, 15 bp, Homo sapiens
tgactccatgtttct

SEQ ID NO: 342780 - DNA, 15 bp, Homo sapiens
ttgactccatgtttc

SEQ ID NO: 342781 - DNA, 15 bp, Homo sapiens
cttgactccatgttt

SEQ ID NO: 342782 - DNA, 15 bp, Homo sapiens
gcttgactccatgtt

SEQ ID NO: 342783 - DNA, 15 bp, Homo sapiens
agcttgactccatgt

SEQ ID NO: 342784 - DNA, 15 bp, Homo sapiens
gagcttgactccatg

SEQ ID NO: 342785 - DNA, 15 bp, Homo sapiens
agagcttgactccat

SEQ ID NO: 342786 - DNA, 15 bp, Homo sapiens
aagagcttgactcca

SEQ ID NO: 342787 - DNA, 15 bp, Homo sapiens
gaagagcttgactcc

SEQ ID NO: 342788 - DNA, 15 bp, Homo sapiens
tgaagagcttgactc

SEQ ID NO: 342789 - DNA, 15 bp, Homo sapiens
ttgaagagcttgact

SEQ ID NO: 342790 - DNA, 15 bp, Homo sapiens
attgaagagcttgac

SEQ ID NO: 342791 - DNA, 15 bp, Homo sapiens
aattgaagagcttga

SEQ ID NO: 342792 - DNA, 15 bp, Homo sapiens
aaattgaagagcttg

SEQ ID NO: 342793 - DNA, 15 bp, Homo sapiens
aaaattgaagagctt

SEQ ID NO: 342794 - DNA, 15 bp, Homo sapiens
caaaattgaagagct

SEQ ID NO: 342795 - DNA, 15 bp, Homo sapiens
acaaaattgaagagc

SEQ ID NO: 342796 - DNA, 15 bp, Homo sapiens
cacaaaattgaagag

SEQ ID NO: 342797 - DNA, 15 bp, Homo sapiens
acacaaaattgaaga

SEQ ID NO: 342798 - DNA, 15 bp, Homo sapiens
gacacaaaattgaag

SEQ ID NO: 342799 - DNA, 15 bp, Homo sapiens
agacacaaaattgaa

SEQ ID NO: 342800 - DNA, 15 bp, Homo sapiens
tagacacaaaattga

SEQ ID NO: 342801 - DNA, 15 bp, Homo sapiens
atagacacaaaattg

SEQ ID NO: 342802 - DNA, 15 bp, Homo sapiens
gatagacacaaaatt

SEQ ID NO: 342803 - DNA, 15 bp, Homo sapiens
ggatagacacaaaat

SEQ ID NO: 342804 - DNA, 15 bp, Homo sapiens
gggatagacacaaaa

SEQ ID NO: 342805 - DNA, 15 bp, Homo sapiens
tgggatagacacaaa

SEQ ID NO: 342806 - DNA, 15 bp, Homo sapiens
atgggatagacacaa

SEQ ID NO: 342807 - DNA, 15 bp, Homo sapiens
tatgggatagacaca

SEQ ID NO: 342808 - DNA, 15 bp, Homo sapiens
atatgggatagacac

SEQ ID NO: 342809 - DNA, 15 bp, Homo sapiens
gatatgggatagaca

SEQ ID NO: 342810 - DNA, 15 bp, Homo sapiens
agatatgggatagac

SEQ ID NO: 342811 - DNA, 15 bp, Homo sapiens
gagatatgggataga

SEQ ID NO: 342812 - DNA, 15 bp, Homo sapiens
cgagatatgggatag

SEQ ID NO: 342813 - DNA, 15 bp, Homo sapiens
acgagatatgggata

SEQ ID NO: 342814 - DNA, 15 bp, Homo sapiens
cacgagatatgggat

SEQ ID NO: 342815 - DNA, 15 bp, Homo sapiens
ccacgagatatggga

SEQ ID NO: 342816 - DNA, 15 bp, Homo sapiens
gccacgagatatggg

SEQ ID NO: 342817 - DNA, 15 bp, Homo sapiens
agccacgagatatgg

SEQ ID NO: 342818 - DNA, 15 bp, Homo sapiens
aagccacgagatatg

SEQ ID NO: 342819 - DNA, 15 bp, Homo sapiens
aaagccacgagatat

SEQ ID NO: 342820 - DNA, 15 bp, Homo sapiens
taaagccacgagata

SEQ ID NO: 342821 - DNA, 15 bp, Homo sapiens
ctaaagccacgagat

SEQ ID NO: 342822 - DNA, 15 bp, Homo sapiens
gctaaagccacgaga

SEQ ID NO: 342823 - DNA, 15 bp, Homo sapiens
tgctaaagccacgag

SEQ ID NO: 342824 - DNA, 15 bp, Homo sapiens
ctgctaaagccacga

SEQ ID NO: 342825 - DNA, 15 bp, Homo sapiens
actgctaaagccacg

SEQ ID NO: 342826 - DNA, 15 bp, Homo sapiens
aactgctaaagccac

SEQ ID NO: 342827 - DNA, 15 bp, Homo sapiens
taactgctaaagcca

SEQ ID NO: 342828 - DNA, 15 bp, Homo sapiens
ttaactgctaaagcc

SEQ ID NO: 342829 - DNA, 15 bp, Homo sapiens
gttaactgctaaagc

SEQ ID NO: 342830 - DNA, 15 bp, Homo sapiens
agttaactgctaaag

SEQ ID NO: 342831 - DNA, 15 bp, Homo sapiens
gagttaactgctaaa

SEQ ID NO: 342832 - DNA, 15 bp, Homo sapiens
tgagttaactgctaa

SEQ ID NO: 342833 - DNA, 15 bp, Homo sapiens
ctgagttaactgcta

SEQ ID NO: 342834 - DNA, 15 bp, Homo sapiens
actgagttaactgct

SEQ ID NO: 342835 - DNA, 15 bp, Homo sapiens
gactgagttaactgc

SEQ ID NO: 342836 - DNA, 15 bp, Homo sapiens
agactgagttaactg

SEQ ID NO: 342837 - DNA, 15 bp, Homo sapiens
aagactgagttaact

SEQ ID NO: 342838 - DNA, 15 bp, Homo sapiens
taagactgagttaac

SEQ ID NO: 342839 - DNA, 15 bp, Homo sapiens
gtaagactgagttaa

SEQ ID NO: 342840 - DNA, 15 bp, Homo sapiens
ggtaagactgagtta

SEQ ID NO: 342841 - DNA, 15 bp, Homo sapiens
aggtaagactgagtt

SEQ ID NO: 342842 - DNA, 15 bp, Homo sapiens
taggtaagactgagt

SEQ ID NO: 342843 - DNA, 15 bp, Homo sapiens
ttaggtaagactgag

SEQ ID NO: 342844 - DNA, 15 bp, Homo sapiens
attaggtaagactga

SEQ ID NO: 342845 - DNA, 15 bp, Homo sapiens
aattaggtaagactg

SEQ ID NO: 342846 - DNA, 15 bp, Homo sapiens
taattaggtaagact

SEQ ID NO: 342847 - DNA, 15 bp, Homo sapiens
ctaattaggtaagac

SEQ ID NO: 342848 - DNA, 15 bp, Homo sapiens
gctaattaggtaaga

SEQ ID NO: 342849 - DNA, 15 bp, Homo sapiens
agctaattaggtaag

SEQ ID NO: 342850 - DNA, 15 bp, Homo sapiens
cagctaattaggtaa

SEQ ID NO: 342851 - DNA, 15 bp, Homo sapiens
acagctaattaggta

SEQ ID NO: 342852 - DNA, 15 bp, Homo sapiens
cacagctaattaggt

SEQ ID NO: 342853 - DNA, 15 bp, Homo sapiens
tcacagctaattagg

SEQ ID NO: 342854 - DNA, 15 bp, Homo sapiens
ttcacagctaattag

SEQ ID NO: 342855 - DNA, 15 bp, Homo sapiens
tttcacagctaatta

SEQ ID NO: 342856 - DNA, 15 bp, Homo sapiens
atttcacagctaatt

SEQ ID NO: 342857 - DNA, 15 bp, Homo sapiens
aatttcacagctaat

SEQ ID NO: 342858 - DNA, 15 bp, Homo sapiens
gaatttcacagctaa

SEQ ID NO: 342859 - DNA, 15 bp, Homo sapiens
agaatttcacagcta

SEQ ID NO: 342860 - DNA, 15 bp, Homo sapiens
cagaatttcacagct

SEQ ID NO: 342861 - DNA, 15 bp, Homo sapiens
acagaatttcacagc

SEQ ID NO: 342862 - DNA, 15 bp, Homo sapiens
aacagaatttcacag

SEQ ID NO: 342863 - DNA, 15 bp, Homo sapiens
taacagaatttcaca

SEQ ID NO: 342864 - DNA, 15 bp, Homo sapiens
ttaacagaatttcac

SEQ ID NO: 342865 - DNA, 15 bp, Homo sapiens
tttaacagaatttca

SEQ ID NO: 342866 - DNA, 15 bp, Homo sapiens
ctttaacagaatttc

SEQ ID NO: 342867 - DNA, 15 bp, Homo sapiens
actttaacagaattt

SEQ ID NO: 342868 - DNA, 15 bp, Homo sapiens
tactttaacagaatt

SEQ ID NO: 342869 - DNA, 15 bp, Homo sapiens
ctactttaacagaat

SEQ ID NO: 342870 - DNA, 15 bp, Homo sapiens
tctactttaacagaa

SEQ ID NO: 342871 - DNA, 15 bp, Homo sapiens
ttctactttaacaga

SEQ ID NO: 342872 - DNA, 15 bp, Homo sapiens
attctactttaacag

SEQ ID NO: 342873 - DNA, 15 bp, Homo sapiens
tattctactttaaca

SEQ ID NO: 342874 - DNA, 15 bp, Homo sapiens
gtattctactttaac

SEQ ID NO: 342875 - DNA, 15 bp, Homo sapiens
tgtattctactttaa

SEQ ID NO: 342876 - DNA, 15 bp, Homo sapiens
ttgtattctacttta

SEQ ID NO: 342877 - DNA, 15 bp, Homo sapiens
cttgtattctacttt

SEQ ID NO: 342878 - DNA, 15 bp, Homo sapiens
tcttgtattctactt

SEQ ID NO: 342879 - DNA, 15 bp, Homo sapiens
gtcttgtattctact

SEQ ID NO: 342880 - DNA, 15 bp, Homo sapiens
tgtcttgtattctac

SEQ ID NO: 342881 - DNA, 15 bp, Homo sapiens
ttgtcttgtattcta

SEQ ID NO: 342882 - DNA, 15 bp, Homo sapiens
attgtcttgtattct

SEQ ID NO: 342883 - DNA, 15 bp, Homo sapiens
aattgtcttgtattc

SEQ ID NO: 342884 - DNA, 15 bp, Homo sapiens
aaattgtcttgtatt

SEQ ID NO: 342885 - DNA, 15 bp, Homo sapiens
caaattgtcttgtat

SEQ ID NO: 342886 - DNA, 15 bp, Homo sapiens
gcaaattgtcttgta

SEQ ID NO: 342887 - DNA, 15 bp, Homo sapiens
tgcaaattgtcttgt

SEQ ID NO: 342888 - DNA, 15 bp, Homo sapiens
ttgcaaattgtcttg

SEQ ID NO: 342889 - DNA, 15 bp, Homo sapiens
attgcaaattgtctt

SEQ ID NO: 342890 - DNA, 15 bp, Homo sapiens
aattgcaaattgtct

SEQ ID NO: 342891 - DNA, 15 bp, Homo sapiens
taattgcaaattgtc

SEQ ID NO: 342892 - DNA, 15 bp, Homo sapiens
ttaattgcaaattgt

SEQ ID NO: 342893 - DNA, 15 bp, Homo sapiens
tttaattgcaaattg

SEQ ID NO: 342894 - DNA, 15 bp, Homo sapiens
atttaattgcaaatt

SEQ ID NO: 342895 - DNA, 15 bp, Homo sapiens
catttaattgcaaat

SEQ ID NO: 342896 - DNA, 15 bp, Homo sapiens
tcatttaattgcaaa

SEQ ID NO: 342897 - DNA, 15 bp, Homo sapiens
ttcatttaattgcaa

SEQ ID NO: 342898 - DNA, 15 bp, Homo sapiens
tttcatttaattgca

SEQ ID NO: 342899 - DNA, 15 bp, Homo sapiens
gtttcatttaattgc

SEQ ID NO: 342900 - DNA, 15 bp, Homo sapiens
tgtttcatttaattg

SEQ ID NO: 342901 - DNA, 15 bp, Homo sapiens
atgtttcatttaatt

SEQ ID NO: 342902 - DNA, 15 bp, Homo sapiens
catgtttcatttaat

SEQ ID NO: 342903 - DNA, 15 bp, Homo sapiens
tcatgtttcatttaa

SEQ ID NO: 342904 - DNA, 15 bp, Homo sapiens
ttcatgtttcattta

SEQ ID NO: 342905 - DNA, 15 bp, Homo sapiens
tttcatgtttcattt

SEQ ID NO: 342906 - DNA, 15 bp, Homo sapiens
ttttcatgtttcatt

SEQ ID NO: 342907 - DNA, 15 bp, Homo sapiens
attttcatgtttcat

SEQ ID NO: 342908 - DNA, 15 bp, Homo sapiens
aattttcatgtttca

SEQ ID NO: 342909 - DNA, 15 bp, Homo sapiens
aaattttcatgtttc

SEQ ID NO: 342910 - DNA, 15 bp, Homo sapiens
taaattttcatgttt

SEQ ID NO: 342911 - DNA, 15 bp, Homo sapiens
ttaaattttcatgtt

SEQ ID NO: 342912 - DNA, 15 bp, Homo sapiens
attaaattttcatgt

SEQ ID NO: 342913 - DNA, 15 bp, Homo sapiens
tattaaattttcatg

SEQ ID NO: 342914 - DNA, 15 bp, Homo sapiens
atattaaattttcat

SEQ ID NO: 342915 - DNA, 15 bp, Homo sapiens
tatattaaattttca

SEQ ID NO: 342916 - DNA, 15 bp, Homo sapiens
gtatattaaattttc

SEQ ID NO: 342917 - DNA, 15 bp, Homo sapiens
tgtatattaaatttt

SEQ ID NO: 342918 - DNA, 15 bp, Homo sapiens
ttgtatattaaattt

SEQ ID NO: 342919 - DNA, 15 bp, Homo sapiens
tttgtatattaaatt

SEQ ID NO: 342920 - DNA, 15 bp, Homo sapiens
atttgtatattaaat

SEQ ID NO: 342921 - DNA, 15 bp, Homo sapiens
gatttgtatattaaa

SEQ ID NO: 342922 - DNA, 15 bp, Homo sapiens
agatttgtatattaa

SEQ ID NO: 342923 - DNA, 15 bp, Homo sapiens
gagatttgtatatta

SEQ ID NO: 342924 - DNA, 15 bp, Homo sapiens
agagatttgtatatt

SEQ ID NO: 342925 - DNA, 15 bp, Homo sapiens
aagagatttgtatat

SEQ ID NO: 342926 - DNA, 15 bp, Homo sapiens
aaagagatttgtata

SEQ ID NO: 342927 - DNA, 15 bp, Homo sapiens
caaagagatttgtat

SEQ ID NO: 342928 - DNA, 15 bp, Homo sapiens
acaaagagatttgta

SEQ ID NO: 342929 - DNA, 15 bp, Homo sapiens
aacaaagagatttgt

SEQ ID NO: 342930 - DNA, 15 bp, Homo sapiens
gaacaaagagatttg

SEQ ID NO: 342931 - DNA, 15 bp, Homo sapiens
agaacaaagagattt

SEQ ID NO: 342932 - DNA, 15 bp, Homo sapiens
aagaacaaagagatt

SEQ ID NO: 342933 - DNA, 15 bp, Homo sapiens
caagaacaaagagat

SEQ ID NO: 342934 - DNA, 15 bp, Homo sapiens
tcaagaacaaagaga

SEQ ID NO: 342935 - DNA, 15 bp, Homo sapiens
ctcaagaacaaagag

SEQ ID NO: 342936 - DNA, 15 bp, Homo sapiens
actcaagaacaaaga

SEQ ID NO: 342937 - DNA, 15 bp, Homo sapiens
aactcaagaacaaag

SEQ ID NO: 342938 - DNA, 15 bp, Homo sapiens
caactcaagaacaaa

SEQ ID NO: 342939 - DNA, 15 bp, Homo sapiens
gcaactcaagaacaa

SEQ ID NO: 342940 - DNA, 15 bp, Homo sapiens
agcaactcaagaaca

SEQ ID NO: 342941 - DNA, 15 bp, Homo sapiens
gagcaactcaagaac

SEQ ID NO: 342942 - DNA, 15 bp, Homo sapiens
agagcaactcaagaa

SEQ ID NO: 342943 - DNA, 15 bp, Homo sapiens
aagagcaactcaaga

SEQ ID NO: 342944 - DNA, 15 bp, Homo sapiens
gaagagcaactcaag

SEQ ID NO: 342945 - DNA, 15 bp, Homo sapiens
agaagagcaactcaa

SEQ ID NO: 342946 - DNA, 15 bp, Homo sapiens
aagaagagcaactca

SEQ ID NO: 342947 - DNA, 15 bp, Homo sapiens
taagaagagcaactc

SEQ ID NO: 342948 - DNA, 15 bp, Homo sapiens
ttaagaagagcaact

SEQ ID NO: 342949 - DNA, 15 bp, Homo sapiens
tttaagaagagcaac

SEQ ID NO: 342950 - DNA, 15 bp, Homo sapiens
ctttaagaagagcaa

SEQ ID NO: 342951 - DNA, 15 bp, Homo sapiens
gctttaagaagagca

SEQ ID NO: 342952 - DNA, 15 bp, Homo sapiens
tgctttaagaagagc

SEQ ID NO: 342953 - DNA, 15 bp, Homo sapiens
ttgctttaagaagag

SEQ ID NO: 342954 - DNA, 15 bp, Homo sapiens
tttgctttaagaaga

SEQ ID NO: 342955 - DNA, 15 bp, Homo sapiens
ttttgctttaagaag

SEQ ID NO: 342956 - DNA, 15 bp, Homo sapiens
attttgctttaagaa

SEQ ID NO: 342957 - DNA, 15 bp, Homo sapiens
gattttgctttaaga

SEQ ID NO: 342958 - DNA, 15 bp, Homo sapiens
tgattttgctttaag

SEQ ID NO: 342959 - DNA, 15 bp, Homo sapiens
ttgattttgctttaa

SEQ ID NO: 342960 - DNA, 15 bp, Homo sapiens
tttgattttgcttta

SEQ ID NO: 342961 - DNA, 15 bp, Homo sapiens
ctttgattttgcttt

SEQ ID NO: 342962 - DNA, 15 bp, Homo sapiens
cctttgattttgctt

SEQ ID NO: 342963 - DNA, 15 bp, Homo sapiens
gcctttgattttgct

SEQ ID NO: 342964 - DNA, 15 bp, Homo sapiens
tgcctttgattttgc

SEQ ID NO: 342965 - DNA, 15 bp, Homo sapiens
gtgcctttgattttg

SEQ ID NO: 342966 - DNA, 15 bp, Homo sapiens
agtgcctttgatttt

SEQ ID NO: 342967 - DNA, 15 bp, Homo sapiens
gagtgcctttgattt

SEQ ID NO: 342968 - DNA, 15 bp, Homo sapiens
agagtgcctttgatt

SEQ ID NO: 342969 - DNA, 15 bp, Homo sapiens
cagagtgcctttgat

SEQ ID NO: 342970 - DNA, 15 bp, Homo sapiens
gcagagtgcctttga

SEQ ID NO: 342971 - DNA, 15 bp, Homo sapiens
agcagagtgcctttg

SEQ ID NO: 342972 - DNA, 15 bp, Homo sapiens
aagcagagtgccttt

SEQ ID NO: 342973 - DNA, 15 bp, Homo sapiens
taagcagagtgcctt

SEQ ID NO: 342974 - DNA, 15 bp, Homo sapiens
ttaagcagagtgcct

SEQ ID NO: 342975 - DNA, 15 bp, Homo sapiens
tttaagcagagtgcc

SEQ ID NO: 342976 - DNA, 15 bp, Homo sapiens
ttttaagcagagtgc

SEQ ID NO: 342977 - DNA, 15 bp, Homo sapiens
cttttaagcagagtg

SEQ ID NO: 342978 - DNA, 15 bp, Homo sapiens
gcttttaagcagagt

SEQ ID NO: 342979 - DNA, 15 bp, Homo sapiens
agcttttaagcagag

SEQ ID NO: 342980 - DNA, 15 bp, Homo sapiens
aagcttttaagcaga

SEQ ID NO: 342981 - DNA, 15 bp, Homo sapiens
aaagcttttaagcag

SEQ ID NO: 342982 - DNA, 15 bp, Homo sapiens
aaaagcttttaagca

SEQ ID NO: 342983 - DNA, 15 bp, Homo sapiens
gaaaagcttttaagc

SEQ ID NO: 342984 - DNA, 15 bp, Homo sapiens
agaaaagcttttaag

SEQ ID NO: 342985 - DNA, 15 bp, Homo sapiens
aagaaaagcttttaa

SEQ ID NO: 342986 - DNA, 15 bp, Homo sapiens
aaagaaaagctttta

SEQ ID NO: 342987 - DNA, 15 bp, Homo sapiens
aaaagaaaagctttt

SEQ ID NO: 342988 - DNA, 15 bp, Homo sapiens
aaaaagaaaagcttt

SEQ ID NO: 342989 - DNA, 15 bp, Homo sapiens
taaaaagaaaagctt

SEQ ID NO: 342990 - DNA, 15 bp, Homo sapiens
ataaaaagaaaagct

SEQ ID NO: 342991 - DNA, 15 bp, Homo sapiens
aataaaaagaaaagc

SEQ ID NO: 342992 - DNA, 15 bp, Homo sapiens
aaataaaaagaaaag

SEQ ID NO: 342993 - DNA, 15 bp, Homo sapiens
aaaataaaaagaaaa

SEQ ID NO: 342994 - DNA, 15 bp, Homo sapiens
aaaaataaaaagaaa

SEQ ID NO: 342995 - DNA, 15 bp, Homo sapiens
aaaaaataaaaagaa

SEQ ID NO: 342996 - DNA, 15 bp, Homo sapiens
taaaaaataaaaaga

SEQ ID NO: 342997 - DNA, 15 bp, Homo sapiens
ctaaaaaataaaaag

SEQ ID NO: 342998 - DNA, 15 bp, Homo sapiens
tctaaaaaataaaaa

SEQ ID NO: 342999 - DNA, 15 bp, Homo sapiens
ctctaaaaaataaaa

SEQ ID NO: 343000 - DNA, 15 bp, Homo sapiens
tctctaaaaaataaa

SEQ ID NO: 343001 - DNA, 15 bp, Homo sapiens
gtctctaaaaaataa

SEQ ID NO: 343002 - DNA, 15 bp, Homo sapiens
cgtctctaaaaaata

SEQ ID NO: 343003 - DNA, 15 bp, Homo sapiens
ccgtctctaaaaaat

SEQ ID NO: 343004 - DNA, 15 bp, Homo sapiens
cccgtctctaaaaaa

SEQ ID NO: 343005 - DNA, 15 bp, Homo sapiens
acccgtctctaaaaa

SEQ ID NO: 343006 - DNA, 15 bp, Homo sapiens
cacccgtctctaaaa

SEQ ID NO: 343007 - DNA, 15 bp, Homo sapiens
acacccgtctctaaa

SEQ ID NO: 343008 - DNA, 15 bp, Homo sapiens
gacacccgtctctaa

SEQ ID NO: 343009 - DNA, 15 bp, Homo sapiens
agacacccgtctcta

SEQ ID NO: 343010 - DNA, 15 bp, Homo sapiens
aagacacccgtctct

SEQ ID NO: 343011 - DNA, 15 bp, Homo sapiens
caagacacccgtctc

SEQ ID NO: 343012 - DNA, 15 bp, Homo sapiens
gcaagacacccgtct

SEQ ID NO: 343013 - DNA, 15 bp, Homo sapiens
agcaagacacccgtc

SEQ ID NO: 343014 - DNA, 15 bp, Homo sapiens
cagcaagacacccgt

SEQ ID NO: 343015 - DNA, 15 bp, Homo sapiens
acagcaagacacccg

SEQ ID NO: 343016 - DNA, 15 bp, Homo sapiens
tacagcaagacaccc

SEQ ID NO: 343017 - DNA, 15 bp, Homo sapiens
ctacagcaagacacc

SEQ ID NO: 343018 - DNA, 15 bp, Homo sapiens
gctacagcaagacac

SEQ ID NO: 343019 - DNA, 15 bp, Homo sapiens
agctacagcaagaca

SEQ ID NO: 343020 - DNA, 15 bp, Homo sapiens
gagctacagcaagac

SEQ ID NO: 343021 - DNA, 15 bp, Homo sapiens
tgagctacagcaaga

SEQ ID NO: 343022 - DNA, 15 bp, Homo sapiens
ctgagctacagcaag

SEQ ID NO: 343023 - DNA, 15 bp, Homo sapiens
cctgagctacagcaa

SEQ ID NO: 343024 - DNA, 15 bp, Homo sapiens
gcctgagctacagca

SEQ ID NO: 343025 - DNA, 15 bp, Homo sapiens
agcctgagctacagc

SEQ ID NO: 343026 - DNA, 15 bp, Homo sapiens
tagcctgagctacag

SEQ ID NO: 343027 - DNA, 15 bp, Homo sapiens
ctagcctgagctaca

SEQ ID NO: 343028 - DNA, 15 bp, Homo sapiens
tctagcctgagctac

SEQ ID NO: 343029 - DNA, 15 bp, Homo sapiens
ctctagcctgagcta

SEQ ID NO: 343030 - DNA, 15 bp, Homo sapiens
actctagcctgagct

SEQ ID NO: 343031 - DNA, 15 bp, Homo sapiens
cactctagcctgagc

SEQ ID NO: 343032 - DNA, 15 bp, Homo sapiens
gcactctagcctgag

SEQ ID NO: 343033 - DNA, 15 bp, Homo sapiens
tgcactctagcctga

SEQ ID NO: 343034 - DNA, 15 bp, Homo sapiens
ctgcactctagcctg

SEQ ID NO: 343035 - DNA, 15 bp, Homo sapiens
actgcactctagcct

SEQ ID NO: 343036 - DNA, 15 bp, Homo sapiens
cactgcactctagcc

SEQ ID NO: 343037 - DNA, 15 bp, Homo sapiens
ccactgcactctagc

SEQ ID NO: 343038 - DNA, 15 bp, Homo sapiens
accactgcactctag

SEQ ID NO: 343039 - DNA, 15 bp, Homo sapiens
caccactgcactcta

SEQ ID NO: 343040 - DNA, 15 bp, Homo sapiens
gcaccactgcactct

SEQ ID NO: 343041 - DNA, 15 bp, Homo sapiens
tgcaccactgcactc

SEQ ID NO: 343042 - DNA, 15 bp, Homo sapiens
ctgcaccactgcact

SEQ ID NO: 343043 - DNA, 15 bp, Homo sapiens
actgcaccactgcac

SEQ ID NO: 343044 - DNA, 15 bp, Homo sapiens
aactgcaccactgca

SEQ ID NO: 343045 - DNA, 15 bp, Homo sapiens
aaactgcaccactgc

SEQ ID NO: 343046 - DNA, 15 bp, Homo sapiens
gaaactgcaccactg

SEQ ID NO: 343047 - DNA, 15 bp, Homo sapiens
tgaaactgcaccact

SEQ ID NO: 343048 - DNA, 15 bp, Homo sapiens
ctgaaactgcaccac

SEQ ID NO: 343049 - DNA, 15 bp, Homo sapiens
gctgaaactgcacca

SEQ ID NO: 343050 - DNA, 15 bp, Homo sapiens
agctgaaactgcacc

SEQ ID NO: 343051 - DNA, 15 bp, Homo sapiens
gagctgaaactgcac

SEQ ID NO: 343052 - DNA, 15 bp, Homo sapiens
tgagctgaaactgca

SEQ ID NO: 343053 - DNA, 15 bp, Homo sapiens
gtgagctgaaactgc

SEQ ID NO: 343054 - DNA, 15 bp, Homo sapiens
agtgagctgaaactg

SEQ ID NO: 343055 - DNA, 15 bp, Homo sapiens
cagtgagctgaaact

SEQ ID NO: 343056 - DNA, 15 bp, Homo sapiens
gcagtgagctgaaac

SEQ ID NO: 343057 - DNA, 15 bp, Homo sapiens
tgcagtgagctgaaa

SEQ ID NO: 343058 - DNA, 15 bp, Homo sapiens
ctgcagtgagctgaa

SEQ ID NO: 343059 - DNA, 15 bp, Homo sapiens
gctgcagtgagctga

SEQ ID NO: 343060 - DNA, 15 bp, Homo sapiens
aaggctgcagtgagc

SEQ ID NO: 343061 - DNA, 15 bp, Homo sapiens
gaaggctgcagtgag

SEQ ID NO: 343062 - DNA, 15 bp, Homo sapiens
tgaaggctgcagtga

SEQ ID NO: 343063 - DNA, 15 bp, Homo sapiens
ttgaaggctgcagtg

SEQ ID NO: 343064 - DNA, 15 bp, Homo sapiens
gttgaaggctgcagt

SEQ ID NO: 343065 - DNA, 15 bp, Homo sapiens
agttgaaggctgcag

SEQ ID NO: 343066 - DNA, 15 bp, Homo sapiens
gagttgaaggctgca

SEQ ID NO: 343067 - DNA, 15 bp, Homo sapiens
ggagttgaaggctgc

SEQ ID NO: 343068 - DNA, 15 bp, Homo sapiens
aggagttgaaggctg

SEQ ID NO: 343069 - DNA, 15 bp, Homo sapiens
caggagttgaaggct

SEQ ID NO: 343070 - DNA, 15 bp, Homo sapiens
ccaggagttgaaggc

SEQ ID NO: 343071 - DNA, 15 bp, Homo sapiens
cccaggagttgaagg

SEQ ID NO: 343072 - DNA, 15 bp, Homo sapiens
ccccaggagttgaag

SEQ ID NO: 343073 - DNA, 15 bp, Homo sapiens
tccccaggagttgaa

SEQ ID NO: 343074 - DNA, 15 bp, Homo sapiens
gtccccaggagttga

SEQ ID NO: 343075 - DNA, 15 bp, Homo sapiens
tgtccccaggagttg

SEQ ID NO: 343076 - DNA, 15 bp, Homo sapiens
ttgtccccaggagtt

SEQ ID NO: 343077 - DNA, 15 bp, Homo sapiens
cttgtccccaggagt

SEQ ID NO: 343078 - DNA, 15 bp, Homo sapiens
gcttgtccccaggag

SEQ ID NO: 343079 - DNA, 15 bp, Homo sapiens
tgcttgtccccagga

SEQ ID NO: 343080 - DNA, 15 bp, Homo sapiens
ctgcttgtccccagg

SEQ ID NO: 343081 - DNA, 15 bp, Homo sapiens
actgcttgtccccag

SEQ ID NO: 343082 - DNA, 15 bp, Homo sapiens
gactgcttgtcccca

SEQ ID NO: 343083 - DNA, 15 bp, Homo sapiens
ggactgcttgtcccc

SEQ ID NO: 343084 - DNA, 15 bp, Homo sapiens
aggactgcttgtccc

SEQ ID NO: 343085 - DNA, 15 bp, Homo sapiens
aaggactgcttgtcc

SEQ ID NO: 343086 - DNA, 15 bp, Homo sapiens
gaaggactgcttgtc

SEQ ID NO: 343087 - DNA, 15 bp, Homo sapiens
ggaaggactgcttgt

SEQ ID NO: 343088 - DNA, 15 bp, Homo sapiens
tggaaggactgcttg

SEQ ID NO: 343089 - DNA, 15 bp, Homo sapiens
gtggaaggactgctt

SEQ ID NO: 343090 - DNA, 15 bp, Homo sapiens
agtggaaggactgct

SEQ ID NO: 343091 - DNA, 15 bp, Homo sapiens
aagtggaaggactgc

SEQ ID NO: 343092 - DNA, 15 bp, Homo sapiens
gaagtggaaggactg

SEQ ID NO: 343093 - DNA, 15 bp, Homo sapiens
tgaagtggaaggact

SEQ ID NO: 343094 - DNA, 15 bp, Homo sapiens
ctgaagtggaaggac

SEQ ID NO: 343095 - DNA, 15 bp, Homo sapiens
gctgaagtggaagga

SEQ ID NO: 343096 - DNA, 15 bp, Homo sapiens
agctgaagtggaagg

SEQ ID NO: 343097 - DNA, 15 bp, Homo sapiens
aagctgaagtggaag

SEQ ID NO: 343098 - DNA, 15 bp, Homo sapiens
gaagctgaagtggaa

SEQ ID NO: 343099 - DNA, 15 bp, Homo sapiens
ggaagctgaagtgga

SEQ ID NO: 343100 - DNA, 15 bp, Homo sapiens
aggaagctgaagtgg

SEQ ID NO: 343101 - DNA, 15 bp, Homo sapiens
caggaagctgaagtg

SEQ ID NO: 343102 - DNA, 15 bp, Homo sapiens
tcaggaagctgaagt

SEQ ID NO: 343103 - DNA, 15 bp, Homo sapiens
ctcaggaagctgaag

SEQ ID NO: 343104 - DNA, 15 bp, Homo sapiens
actcaggaagctgaa

SEQ ID NO: 343105 - DNA, 15 bp, Homo sapiens
actactcaggaagct

SEQ ID NO: 343106 - DNA, 15 bp, Homo sapiens
aactactcaggaagc

SEQ ID NO: 343107 - DNA, 15 bp, Homo sapiens
taactactcaggaag

SEQ ID NO: 343108 - DNA, 15 bp, Homo sapiens
ctaactactcaggaa

SEQ ID NO: 343109 - DNA, 15 bp, Homo sapiens
cctaactactcagga

SEQ ID NO: 343110 - DNA, 15 bp, Homo sapiens
tcctaactactcagg

SEQ ID NO: 343111 - DNA, 15 bp, Homo sapiens
gtcctaactactcag

SEQ ID NO: 343112 - DNA, 15 bp, Homo sapiens
ggtcctaactactca

SEQ ID NO: 343113 - DNA, 15 bp, Homo sapiens
tggtcctaactactc

SEQ ID NO: 343114 - DNA, 15 bp, Homo sapiens
ctggtcctaactact

SEQ ID NO: 343115 - DNA, 15 bp, Homo sapiens
tctggtcctaactac

SEQ ID NO: 343116 - DNA, 15 bp, Homo sapiens
ctctggtcctaacta

SEQ ID NO: 343117 - DNA, 15 bp, Homo sapiens
cctctggtcctaact

SEQ ID NO: 343118 - DNA, 15 bp, Homo sapiens
gcctctggtcctaac

SEQ ID NO: 343119 - DNA, 15 bp, Homo sapiens
cgcctctggtcctaa

SEQ ID NO: 343120 - DNA, 15 bp, Homo sapiens
gcgcctctggtccta

SEQ ID NO: 343121 - DNA, 15 bp, Homo sapiens
tgcgcctctggtcct

SEQ ID NO: 343122 - DNA, 15 bp, Homo sapiens
gtgcgcctctggtcc

SEQ ID NO: 343123 - DNA, 15 bp, Homo sapiens
tgtgcgcctctggtc

SEQ ID NO: 343124 - DNA, 15 bp, Homo sapiens
gtgtgcgcctctggt

SEQ ID NO: 343125 - DNA, 15 bp, Homo sapiens
ggtgtgcgcctctgg

SEQ ID NO: 343126 - DNA, 15 bp, Homo sapiens
tggtgtgcgcctctg

SEQ ID NO: 343127 - DNA, 15 bp, Homo sapiens
atggtgtgcgcctct

SEQ ID NO: 343128 - DNA, 15 bp, Homo sapiens
catggtgtgcgcctc

SEQ ID NO: 343129 - DNA, 15 bp, Homo sapiens
gcatggtgtgcgcct

SEQ ID NO: 343130 - DNA, 15 bp, Homo sapiens
agcatggtgtgcgcc

SEQ ID NO: 343131 - DNA, 15 bp, Homo sapiens
aagcatggtgtgcgc

SEQ ID NO: 343132 - DNA, 15 bp, Homo sapiens
caagcatggtgtgcg

SEQ ID NO: 343133 - DNA, 15 bp, Homo sapiens
ccaagcatggtgtgc

SEQ ID NO: 343134 - DNA, 15 bp, Homo sapiens
gccaagcatggtgtg

SEQ ID NO: 343135 - DNA, 15 bp, Homo sapiens
tgccaagcatggtgt

SEQ ID NO: 343136 - DNA, 15 bp, Homo sapiens
ttgccaagcatggtg

SEQ ID NO: 343137 - DNA, 15 bp, Homo sapiens
tttgccaagcatggt

SEQ ID NO: 343138 - DNA, 15 bp, Homo sapiens
atttgccaagcatgg

SEQ ID NO: 343139 - DNA, 15 bp, Homo sapiens
aatttgccaagcatg

SEQ ID NO: 343140 - DNA, 15 bp, Homo sapiens
aaatttgccaagcat

SEQ ID NO: 343141 - DNA, 15 bp, Homo sapiens
aaaatttgccaagca

SEQ ID NO: 343142 - DNA, 15 bp, Homo sapiens
aaaaatttgccaagc

SEQ ID NO: 343143 - DNA, 15 bp, Homo sapiens
taaaaatttgccaag

SEQ ID NO: 343144 - DNA, 15 bp, Homo sapiens
ttaaaaatttgccaa

SEQ ID NO: 343145 - DNA, 15 bp, Homo sapiens
tttaaaaatttgcca

SEQ ID NO: 343146 - DNA, 15 bp, Homo sapiens
atttaaaaatttgcc

SEQ ID NO: 343147 - DNA, 15 bp, Homo sapiens
aatttaaaaatttgc

SEQ ID NO: 343148 - DNA, 15 bp, Homo sapiens
aaatttaaaaatttg

SEQ ID NO: 343149 - DNA, 15 bp, Homo sapiens
aaaatttaaaaattt

SEQ ID NO: 343150 - DNA, 15 bp, Homo sapiens
aaaaatttaaaaatt

SEQ ID NO: 343151 - DNA, 15 bp, Homo sapiens
aaaaaatttaaaaat

SEQ ID NO: 343152 - DNA, 15 bp, Homo sapiens
aaaaaaatttaaaaa

SEQ ID NO: 343153 - DNA, 15 bp, Homo sapiens
aaaaaaaatttaaaa

SEQ ID NO: 343154 - DNA, 15 bp, Homo sapiens
aaaaaaaaatttaaa

SEQ ID NO: 343155 - DNA, 15 bp, Homo sapiens
caaaaaaaaatttaa

SEQ ID NO: 343156 - DNA, 15 bp, Homo sapiens
acaaaaaaaaattta

SEQ ID NO: 343157 - DNA, 15 bp, Homo sapiens
tacaaaaaaaaattt

SEQ ID NO: 343158 - DNA, 15 bp, Homo sapiens
ctacaaaaaaaaatt

SEQ ID NO: 343159 - DNA, 15 bp, Homo sapiens
tctacaaaaaaaaat

SEQ ID NO: 343160 - DNA, 15 bp, Homo sapiens
ttctacaaaaaaaaa

SEQ ID NO: 343161 - DNA, 15 bp, Homo sapiens
tttctacaaaaaaaa

SEQ ID NO: 343162 - DNA, 15 bp, Homo sapiens
gtttctacaaaaaaa

SEQ ID NO: 343163 - DNA, 15 bp, Homo sapiens
cgtttctacaaaaaa

SEQ ID NO: 343164 - DNA, 15 bp, Homo sapiens
ccgtttctacaaaaa

SEQ ID NO: 343165 - DNA, 15 bp, Homo sapiens
cccgtttctacaaaa

SEQ ID NO: 343166 - DNA, 15 bp, Homo sapiens
tcccgtttctacaaa

SEQ ID NO: 343167 - DNA, 15 bp, Homo sapiens
atcccgtttctacaa

SEQ ID NO: 343168 - DNA, 15 bp, Homo sapiens
aatcccgtttctaca

SEQ ID NO: 343169 - DNA, 15 bp, Homo sapiens
gaatcccgtttctac

SEQ ID NO: 343170 - DNA, 15 bp, Homo sapiens
tgaatcccgtttcta

SEQ ID NO: 343171 - DNA, 15 bp, Homo sapiens
gtgaatcccgtttct

SEQ ID NO: 343172 - DNA, 15 bp, Homo sapiens
agtgaatcccgtttc

SEQ ID NO: 343173 - DNA, 15 bp, Homo sapiens
aagtgaatcccgttt

SEQ ID NO: 343174 - DNA, 15 bp, Homo sapiens
aaagtgaatcccgtt

SEQ ID NO: 343175 - DNA, 15 bp, Homo sapiens
caaagtgaatcccgt

SEQ ID NO: 343176 - DNA, 15 bp, Homo sapiens
acaaagtgaatcccg

SEQ ID NO: 343177 - DNA, 15 bp, Homo sapiens
aacaaagtgaatccc

SEQ ID NO: 343178 - DNA, 15 bp, Homo sapiens
caacaaagtgaatcc

SEQ ID NO: 343179 - DNA, 15 bp, Homo sapiens
gcaacaaagtgaatc

SEQ ID NO: 343180 - DNA, 15 bp, Homo sapiens
ggcaacaaagtgaat

SEQ ID NO: 343181 - DNA, 15 bp, Homo sapiens
gggcaacaaagtgaa

SEQ ID NO: 343182 - DNA, 15 bp, Homo sapiens
tgggcaacaaagtga

SEQ ID NO: 343183 - DNA, 15 bp, Homo sapiens
ctgggcaacaaagtg

SEQ ID NO: 343184 - DNA, 15 bp, Homo sapiens
cctgggcaacaaagt

SEQ ID NO: 343185 - DNA, 15 bp, Homo sapiens
gcctgggcaacaaag

SEQ ID NO: 343186 - DNA, 15 bp, Homo sapiens
agcctgggcaacaaa

SEQ ID NO: 343187 - DNA, 15 bp, Homo sapiens
tgaccagcctgggca

SEQ ID NO: 343188 - DNA, 15 bp, Homo sapiens
gtgaccagcctgggc

SEQ ID NO: 343189 - DNA, 15 bp, Homo sapiens
tgtgaccagcctggg

SEQ ID NO: 343190 - DNA, 15 bp, Homo sapiens
ttgtgaccagcctgg

SEQ ID NO: 343191 - DNA, 15 bp, Homo sapiens
tttgtgaccagcctg

SEQ ID NO: 343192 - DNA, 15 bp, Homo sapiens
gtttgtgaccagcct

SEQ ID NO: 343193 - DNA, 15 bp, Homo sapiens
agtttgtgaccagcc

SEQ ID NO: 343194 - DNA, 15 bp, Homo sapiens
gagtttgtgaccagc

SEQ ID NO: 343195 - DNA, 15 bp, Homo sapiens
ggagtttgtgaccag

SEQ ID NO: 343196 - DNA, 15 bp, Homo sapiens
aggagtttgtgacca

SEQ ID NO: 343197 - DNA, 15 bp, Homo sapiens
caggagtttgtgacc

SEQ ID NO: 343198 - DNA, 15 bp, Homo sapiens
ccaggagtttgtgac

SEQ ID NO: 343199 - DNA, 15 bp, Homo sapiens
gccaggagtttgtga

SEQ ID NO: 343200 - DNA, 15 bp, Homo sapiens
ggccaggagtttgtg

SEQ ID NO: 343201 - DNA, 15 bp, Homo sapiens
aggccaggagtttgt

SEQ ID NO: 343202 - DNA, 15 bp, Homo sapiens
gaggccaggagtttg

SEQ ID NO: 343203 - DNA, 15 bp, Homo sapiens
tgaggccaggagttt

SEQ ID NO: 343204 - DNA, 15 bp, Homo sapiens
ttgaggccaggagtt

SEQ ID NO: 343205 - DNA, 15 bp, Homo sapiens
cttgaggccaggagt

SEQ ID NO: 343206 - DNA, 15 bp, Homo sapiens
acttgaggccaggag

SEQ ID NO: 343207 - DNA, 15 bp, Homo sapiens
cacttgaggccagga

SEQ ID NO: 343208 - DNA, 15 bp, Homo sapiens
tcacttgaggccagg

SEQ ID NO: 343209 - DNA, 15 bp, Homo sapiens
atcacttgaggccag

SEQ ID NO: 343210 - DNA, 15 bp, Homo sapiens
gatcacttgaggcca

SEQ ID NO: 343211 - DNA, 15 bp, Homo sapiens
ggatcacttgaggcc

SEQ ID NO: 343212 - DNA, 15 bp, Homo sapiens
aggatcacttgaggc

SEQ ID NO: 343213 - DNA, 15 bp, Homo sapiens
aaggatcacttgagg

SEQ ID NO: 343214 - DNA, 15 bp, Homo sapiens
gaaggatcacttgag

SEQ ID NO: 343215 - DNA, 15 bp, Homo sapiens
ggaaggatcacttga

SEQ ID NO: 343216 - DNA, 15 bp, Homo sapiens
aggaaggatcacttg

SEQ ID NO: 343217 - DNA, 15 bp, Homo sapiens
gaggaaggatcactt

SEQ ID NO: 343218 - DNA, 15 bp, Homo sapiens
ggaggaaggatcact

SEQ ID NO: 343219 - DNA, 15 bp, Homo sapiens
aggaggaaggatcac

SEQ ID NO: 343220 - DNA, 15 bp, Homo sapiens
gaggaggaaggatca

SEQ ID NO: 343221 - DNA, 15 bp, Homo sapiens
agaggaggaaggatc

SEQ ID NO: 343222 - DNA, 15 bp, Homo sapiens
cagaggaggaaggat

SEQ ID NO: 343223 - DNA, 15 bp, Homo sapiens
gcagaggaggaagga

SEQ ID NO: 343224 - DNA, 15 bp, Homo sapiens
ggcagaggaggaagg

SEQ ID NO: 343225 - DNA, 15 bp, Homo sapiens
aggcagaggaggaag

SEQ ID NO: 343226 - DNA, 15 bp, Homo sapiens
gaggcagaggaggaa

SEQ ID NO: 343227 - DNA, 15 bp, Homo sapiens
agaggcagaggagga

SEQ ID NO: 343228 - DNA, 15 bp, Homo sapiens
gagaggcagaggagg

SEQ ID NO: 343229 - DNA, 15 bp, Homo sapiens
tgagaggcagaggag

SEQ ID NO: 343230 - DNA, 15 bp, Homo sapiens
ttgagaggcagagga

SEQ ID NO: 343231 - DNA, 15 bp, Homo sapiens
tttgagaggcagagg

SEQ ID NO: 343232 - DNA, 15 bp, Homo sapiens
ctttgagaggcagag

SEQ ID NO: 343233 - DNA, 15 bp, Homo sapiens
gctttgagaggcaga

SEQ ID NO: 343234 - DNA, 15 bp, Homo sapiens
tgctttgagaggcag

SEQ ID NO: 343235 - DNA, 15 bp, Homo sapiens
atgctttgagaggca

SEQ ID NO: 343236 - DNA, 15 bp, Homo sapiens
aatgctttgagaggc

SEQ ID NO: 343237 - DNA, 15 bp, Homo sapiens
taatgctttgagagg

SEQ ID NO: 343238 - DNA, 15 bp, Homo sapiens
ctaatgctttgagag

SEQ ID NO: 343239 - DNA, 15 bp, Homo sapiens
cctaatgctttgaga

SEQ ID NO: 343240 - DNA, 15 bp, Homo sapiens
tcctaatgctttgag

SEQ ID NO: 343241 - DNA, 15 bp, Homo sapiens
atcctaatgctttga

SEQ ID NO: 343242 - DNA, 15 bp, Homo sapiens
aatcctaatgctttg

SEQ ID NO: 343243 - DNA, 15 bp, Homo sapiens
taatcctaatgcttt

SEQ ID NO: 343244 - DNA, 15 bp, Homo sapiens
gtaatcctaatgctt

SEQ ID NO: 343245 - DNA, 15 bp, Homo sapiens
tgtaatcctaatgct

SEQ ID NO: 343246 - DNA, 15 bp, Homo sapiens
ctgtaatcctaatgc

SEQ ID NO: 343247 - DNA, 15 bp, Homo sapiens
cctgtaatcctaatg

SEQ ID NO: 343248 - DNA, 15 bp, Homo sapiens
gcctgtaatcctaat

SEQ ID NO: 343249 - DNA, 15 bp, Homo sapiens
tgcctgtaatcctaa

SEQ ID NO: 343250 - DNA, 15 bp, Homo sapiens
agctcatgcctgtaa

SEQ ID NO: 343251 - DNA, 15 bp, Homo sapiens
tagctcatgcctgta

SEQ ID NO: 343252 - DNA, 15 bp, Homo sapiens
gtagctcatgcctgt

SEQ ID NO: 343253 - DNA, 15 bp, Homo sapiens
ggtagctcatgcctg

SEQ ID NO: 343254 - DNA, 15 bp, Homo sapiens
tggtagctcatgcct

SEQ ID NO: 343255 - DNA, 15 bp, Homo sapiens
atggtagctcatgcc

SEQ ID NO: 343256 - DNA, 15 bp, Homo sapiens
catggtagctcatgc

SEQ ID NO: 343257 - DNA, 15 bp, Homo sapiens
gcatggtagctcatg

SEQ ID NO: 343258 - DNA, 15 bp, Homo sapiens
ggcatggtagctcat

SEQ ID NO: 343259 - DNA, 15 bp, Homo sapiens
aggcatggtagctca

SEQ ID NO: 343260 - DNA, 15 bp, Homo sapiens
caggcatggtagctc

SEQ ID NO: 343261 - DNA, 15 bp, Homo sapiens
ccaggcatggtagct

SEQ ID NO: 343262 - DNA, 15 bp, Homo sapiens
accaggcatggtagc

SEQ ID NO: 343263 - DNA, 15 bp, Homo sapiens
gaccaggcatggtag

SEQ ID NO: 343264 - DNA, 15 bp, Homo sapiens
ggaccaggcatggta

SEQ ID NO: 343265 - DNA, 15 bp, Homo sapiens
aggaccaggcatggt

SEQ ID NO: 343266 - DNA, 15 bp, Homo sapiens
aaggaccaggcatgg

SEQ ID NO: 343267 - DNA, 15 bp, Homo sapiens
taaggaccaggcatg

SEQ ID NO: 343268 - DNA, 15 bp, Homo sapiens
ttaaggaccaggcat

SEQ ID NO: 343269 - DNA, 15 bp, Homo sapiens
tttaaggaccaggca

SEQ ID NO: 343270 - DNA, 15 bp, Homo sapiens
ttttaaggaccaggc

SEQ ID NO: 343271 - DNA, 15 bp, Homo sapiens
tttttaaggaccagg

SEQ ID NO: 343272 - DNA, 15 bp, Homo sapiens
gtttttaaggaccag

SEQ ID NO: 343273 - DNA, 15 bp, Homo sapiens
agtttttaaggacca

SEQ ID NO: 343274 - DNA, 15 bp, Homo sapiens
aagtttttaaggacc

SEQ ID NO: 343275 - DNA, 15 bp, Homo sapiens
aaagtttttaaggac

SEQ ID NO: 343276 - DNA, 15 bp, Homo sapiens
aaaagtttttaagga

SEQ ID NO: 343277 - DNA, 15 bp, Homo sapiens
gaaaagtttttaagg

SEQ ID NO: 343278 - DNA, 15 bp, Homo sapiens
agaaaagtttttaag

SEQ ID NO: 343279 - DNA, 15 bp, Homo sapiens
aagaaaagtttttaa

SEQ ID NO: 343280 - DNA, 15 bp, Homo sapiens
aaagaaaagttttta

SEQ ID NO: 343281 - DNA, 15 bp, Homo sapiens
gaaagaaaagttttt

SEQ ID NO: 343282 - DNA, 15 bp, Homo sapiens
tgaaagaaaagtttt

SEQ ID NO: 343283 - DNA, 15 bp, Homo sapiens
ttgaaagaaaagttt

SEQ ID NO: 343284 - DNA, 15 bp, Homo sapiens
tttgaaagaaaagtt

SEQ ID NO: 343285 - DNA, 15 bp, Homo sapiens
ttttgaaagaaaagt

SEQ ID NO: 343286 - DNA, 15 bp, Homo sapiens
cttttgaaagaaaag

SEQ ID NO: 343287 - DNA, 15 bp, Homo sapiens
gcttttgaaagaaaa

SEQ ID NO: 343288 - DNA, 15 bp, Homo sapiens
agcttttgaaagaaa

SEQ ID NO: 343289 - DNA, 15 bp, Homo sapiens
aagcttttgaaagaa

SEQ ID NO: 343290 - DNA, 15 bp, Homo sapiens
aaagcttttgaaaga

SEQ ID NO: 343291 - DNA, 15 bp, Homo sapiens
gaaagcttttgaaag

SEQ ID NO: 343292 - DNA, 15 bp, Homo sapiens
agaaagcttttgaaa

SEQ ID NO: 343293 - DNA, 15 bp, Homo sapiens
cagaaagcttttgaa

SEQ ID NO: 343294 - DNA, 15 bp, Homo sapiens
acagaaagcttttga

SEQ ID NO: 343295 - DNA, 15 bp, Homo sapiens
cacagaaagcttttg

SEQ ID NO: 343296 - DNA, 15 bp, Homo sapiens
ccacagaaagctttt

SEQ ID NO: 343297 - DNA, 15 bp, Homo sapiens
cccacagaaagcttt

SEQ ID NO: 343298 - DNA, 15 bp, Homo sapiens
tcccacagaaagctt

SEQ ID NO: 343299 - DNA, 15 bp, Homo sapiens
atcccacagaaagct

SEQ ID NO: 343300 - DNA, 15 bp, Homo sapiens
tatcccacagaaagc

SEQ ID NO: 343301 - DNA, 15 bp, Homo sapiens
ctatcccacagaaag

SEQ ID NO: 343302 - DNA, 15 bp, Homo sapiens
actatcccacagaaa

SEQ ID NO: 343303 - DNA, 15 bp, Homo sapiens
tactatcccacagaa

SEQ ID NO: 343304 - DNA, 15 bp, Homo sapiens
atactatcccacaga

SEQ ID NO: 343305 - DNA, 15 bp, Homo sapiens
catactatcccacag

SEQ ID NO: 343306 - DNA, 15 bp, Homo sapiens
tcatactatcccaca

SEQ ID NO: 343307 - DNA, 15 bp, Homo sapiens
atcatactatcccac

SEQ ID NO: 343308 - DNA, 15 bp, Homo sapiens
catcatactatccca

SEQ ID NO: 343309 - DNA, 15 bp, Homo sapiens
acatcatactatccc

SEQ ID NO: 343310 - DNA, 15 bp, Homo sapiens
cacatcatactatcc

SEQ ID NO: 343311 - DNA, 15 bp, Homo sapiens
acacatcatactatc

SEQ ID NO: 343312 - DNA, 15 bp, Homo sapiens
aacacatcatactat

SEQ ID NO: 343313 - DNA, 15 bp, Homo sapiens
caacacatcatacta

SEQ ID NO: 343314 - DNA, 15 bp, Homo sapiens
gcaacacatcatact

SEQ ID NO: 343315 - DNA, 15 bp, Homo sapiens
tgcaacacatcatac

SEQ ID NO: 343316 - DNA, 15 bp, Homo sapiens
ttgcaacacatcata

SEQ ID NO: 343317 - DNA, 15 bp, Homo sapiens
tttgcaacacatcat

SEQ ID NO: 343318 - DNA, 15 bp, Homo sapiens
ctttgcaacacatca

SEQ ID NO: 343319 - DNA, 15 bp, Homo sapiens
tctttgcaacacatc

SEQ ID NO: 343320 - DNA, 15 bp, Homo sapiens
atctttgcaacacat

SEQ ID NO: 343321 - DNA, 15 bp, Homo sapiens
tatctttgcaacaca

SEQ ID NO: 343322 - DNA, 15 bp, Homo sapiens
ttatctttgcaacac

SEQ ID NO: 343323 - DNA, 15 bp, Homo sapiens
attatctttgcaaca

SEQ ID NO: 343324 - DNA, 15 bp, Homo sapiens
aattatctttgcaac

SEQ ID NO: 343325 - DNA, 15 bp, Homo sapiens
taattatctttgcaa

SEQ ID NO: 343326 - DNA, 15 bp, Homo sapiens
ttaattatctttgca

SEQ ID NO: 343327 - DNA, 15 bp, Homo sapiens
tttaattatctttgc

SEQ ID NO: 343328 - DNA, 15 bp, Homo sapiens
ttttaattatctttg

SEQ ID NO: 343329 - DNA, 15 bp, Homo sapiens
tttttaattatcttt

SEQ ID NO: 343330 - DNA, 15 bp, Homo sapiens
ttttttaattatctt

SEQ ID NO: 343331 - DNA, 15 bp, Homo sapiens
tttttttaattatct

SEQ ID NO: 343332 - DNA, 15 bp, Homo sapiens
ctttttttaattatc

SEQ ID NO: 343333 - DNA, 15 bp, Homo sapiens
tctttttttaattat

SEQ ID NO: 343334 - DNA, 15 bp, Homo sapiens
ttctttttttaatta

SEQ ID NO: 343335 - DNA, 15 bp, Homo sapiens
tttctttttttaatt

SEQ ID NO: 343336 - DNA, 15 bp, Homo sapiens
gtttctttttttaat

SEQ ID NO: 343337 - DNA, 15 bp, Homo sapiens
tgtttctttttttaa

SEQ ID NO: 343338 - DNA, 15 bp, Homo sapiens
ctgtttcttttttta

SEQ ID NO: 343339 - DNA, 15 bp, Homo sapiens
cctgtttcttttttt

SEQ ID NO: 343340 - DNA, 15 bp, Homo sapiens
acctgtttctttttt

SEQ ID NO: 343341 - DNA, 15 bp, Homo sapiens
aacctgtttcttttt

SEQ ID NO: 343342 - DNA, 15 bp, Homo sapiens
aaacctgtttctttt

SEQ ID NO: 343343 - DNA, 15 bp, Homo sapiens
taaacctgtttcttt

SEQ ID NO: 343344 - DNA, 15 bp, Homo sapiens
ataaacctgtttctt

SEQ ID NO: 343345 - DNA, 15 bp, Homo sapiens
tataaacctgtttct

SEQ ID NO: 343346 - DNA, 15 bp, Homo sapiens
ttataaacctgtttc

SEQ ID NO: 343347 - DNA, 15 bp, Homo sapiens
attataaacctgttt

SEQ ID NO: 343348 - DNA, 15 bp, Homo sapiens
tattataaacctgtt

SEQ ID NO: 343349 - DNA, 15 bp, Homo sapiens
ctattataaacctgt

SEQ ID NO: 343350 - DNA, 15 bp, Homo sapiens
gctattataaacctg

SEQ ID NO: 343351 - DNA, 15 bp, Homo sapiens
cgctattataaacct

SEQ ID NO: 343352 - DNA, 15 bp, Homo sapiens
acgctattataaacc

SEQ ID NO: 343353 - DNA, 15 bp, Homo sapiens
tacgctattataaac

SEQ ID NO: 343354 - DNA, 15 bp, Homo sapiens
ctacgctattataaa

SEQ ID NO: 343355 - DNA, 15 bp, Homo sapiens
tctacgctattataa

SEQ ID NO: 343356 - DNA, 15 bp, Homo sapiens
ttctacgctattata

SEQ ID NO: 343357 - DNA, 15 bp, Homo sapiens
attctacgctattat

SEQ ID NO: 343358 - DNA, 15 bp, Homo sapiens
tattctacgctatta

SEQ ID NO: 343359 - DNA, 15 bp, Homo sapiens
atattctacgctatt

SEQ ID NO: 343360 - DNA, 15 bp, Homo sapiens
catattctacgctat

SEQ ID NO: 343361 - DNA, 15 bp, Homo sapiens
acatattctacgcta

SEQ ID NO: 343362 - DNA, 15 bp, Homo sapiens
aacatattctacgct

SEQ ID NO: 343363 - DNA, 15 bp, Homo sapiens
aaacatattctacgc

SEQ ID NO: 343364 - DNA, 15 bp, Homo sapiens
taaacatattctacg

SEQ ID NO: 343365 - DNA, 15 bp, Homo sapiens
ataaacatattctac

SEQ ID NO: 343366 - DNA, 15 bp, Homo sapiens
tataaacatattcta

SEQ ID NO: 343367 - DNA, 15 bp, Homo sapiens
atataaacatattct

SEQ ID NO: 343368 - DNA, 15 bp, Homo sapiens
catataaacatattc

SEQ ID NO: 343369 - DNA, 15 bp, Homo sapiens
tcatataaacatatt

SEQ ID NO: 343370 - DNA, 15 bp, Homo sapiens
gtcatataaacatat

SEQ ID NO: 343371 - DNA, 15 bp, Homo sapiens
agtcatataaacata

SEQ ID NO: 343372 - DNA, 15 bp, Homo sapiens
aagtcatataaacat

SEQ ID NO: 343373 - DNA, 15 bp, Homo sapiens
aaagtcatataaaca

SEQ ID NO: 343374 - DNA, 15 bp, Homo sapiens
aaaagtcatataaac

SEQ ID NO: 343375 - DNA, 15 bp, Homo sapiens
aaaaagtcatataaa

SEQ ID NO: 343376 - DNA, 15 bp, Homo sapiens
gaaaaagtcatataa

SEQ ID NO: 343377 - DNA, 15 bp, Homo sapiens
ggaaaaagtcatata

SEQ ID NO: 343378 - DNA, 15 bp, Homo sapiens
gggaaaaagtcatat

SEQ ID NO: 343379 - DNA, 15 bp, Homo sapiens
agggaaaaagtcata

SEQ ID NO: 343380 - DNA, 15 bp, Homo sapiens
gagggaaaaagtcat

SEQ ID NO: 343381 - DNA, 15 bp, Homo sapiens
ggagggaaaaagtca

SEQ ID NO: 343382 - DNA, 15 bp, Homo sapiens
gggagggaaaaagtc

SEQ ID NO: 343383 - DNA, 15 bp, Homo sapiens
ggggagggaaaaagt

SEQ ID NO: 343384 - DNA, 15 bp, Homo sapiens
gggggagggaaaaag

SEQ ID NO: 343385 - DNA, 15 bp, Homo sapiens
ggggggagggaaaaa

SEQ ID NO: 343386 - DNA, 15 bp, Homo sapiens
gggggggagggaaaa

SEQ ID NO: 343387 - DNA, 15 bp, Homo sapiens
agggggggagggaaa

SEQ ID NO: 343388 - DNA, 15 bp, Homo sapiens
gagggggggagggaa

SEQ ID NO: 343389 - DNA, 15 bp, Homo sapiens
ggagggggggaggga

SEQ ID NO: 343390 - DNA, 15 bp, Homo sapiens
gggagggggggaggg

SEQ ID NO: 343391 - DNA, 15 bp, Homo sapiens
ggggagggggggagg

SEQ ID NO: 343392 - DNA, 15 bp, Homo sapiens
aggggagggggggag

SEQ ID NO: 343393 - DNA, 15 bp, Homo sapiens
gaggggaggggggga

SEQ ID NO: 343394 - DNA, 15 bp, Homo sapiens
ggaggggaggggggg

SEQ ID NO: 343395 - DNA, 15 bp, Homo sapiens
gggaggggagggggg

SEQ ID NO: 343396 - DNA, 15 bp, Homo sapiens
agggaggggaggggg

SEQ ID NO: 343397 - DNA, 15 bp, Homo sapiens
gagggaggggagggg

SEQ ID NO: 343398 - DNA, 15 bp, Homo sapiens
ggagggaggggaggg

SEQ ID NO: 343399 - DNA, 15 bp, Homo sapiens
gggagggaggggagg

SEQ ID NO: 343400 - DNA, 15 bp, Homo sapiens
agggagggaggggag

SEQ ID NO: 343401 - DNA, 15 bp, Homo sapiens
gagggagggagggga

SEQ ID NO: 343402 - DNA, 15 bp, Homo sapiens
ggagggagggagggg

SEQ ID NO: 343403 - DNA, 15 bp, Homo sapiens
gggagggagggaggg

SEQ ID NO: 343404 - DNA, 15 bp, Homo sapiens
agggagggagggagg

SEQ ID NO: 343405 - DNA, 15 bp, Homo sapiens
aagggagggagggag

SEQ ID NO: 343406 - DNA, 15 bp, Homo sapiens
gaagggagggaggga

SEQ ID NO: 343407 - DNA, 15 bp, Homo sapiens
ggaagggagggaggg

SEQ ID NO: 343408 - DNA, 15 bp, Homo sapiens
cggaagggagggagg

SEQ ID NO: 343409 - DNA, 15 bp, Homo sapiens
acggaagggagggag

SEQ ID NO: 343410 - DNA, 15 bp, Homo sapiens
aacggaagggaggga

SEQ ID NO: 343411 - DNA, 15 bp, Homo sapiens
aaacggaagggaggg

SEQ ID NO: 343412 - DNA, 15 bp, Homo sapiens
caaacggaagggagg

SEQ ID NO: 343413 - DNA, 15 bp, Homo sapiens
acaaacggaagggag

SEQ ID NO: 343414 - DNA, 15 bp, Homo sapiens
gacaaacggaaggga

SEQ ID NO: 343415 - DNA, 15 bp, Homo sapiens
ggacaaacggaaggg

SEQ ID NO: 343416 - DNA, 15 bp, Homo sapiens
aggacaaacggaagg

SEQ ID NO: 343417 - DNA, 15 bp, Homo sapiens
aaggacaaacggaag

SEQ ID NO: 343418 - DNA, 15 bp, Homo sapiens
gaaggacaaacggaa

SEQ ID NO: 343419 - DNA, 15 bp, Homo sapiens
ggaaggacaaacgga

SEQ ID NO: 343420 - DNA, 15 bp, Homo sapiens
aggaaggacaaacgg

SEQ ID NO: 343421 - DNA, 15 bp, Homo sapiens
aaggaaggacaaacg

SEQ ID NO: 343422 - DNA, 15 bp, Homo sapiens
gaaggaaggacaaac

SEQ ID NO: 343423 - DNA, 15 bp, Homo sapiens
ggaaggaaggacaaa

SEQ ID NO: 343424 - DNA, 15 bp, Homo sapiens
tggaaggaaggacaa

SEQ ID NO: 343425 - DNA, 15 bp, Homo sapiens
atggaaggaaggaca

SEQ ID NO: 343426 - DNA, 15 bp, Homo sapiens
aatggaaggaaggac

SEQ ID NO: 343427 - DNA, 15 bp, Homo sapiens
gaatggaaggaagga

SEQ ID NO: 343428 - DNA, 15 bp, Homo sapiens
tgaatggaaggaagg

SEQ ID NO: 343429 - DNA, 15 bp, Homo sapiens
atgaatggaaggaag

SEQ ID NO: 343430 - DNA, 15 bp, Homo sapiens
gatgaatggaaggaa

SEQ ID NO: 343431 - DNA, 15 bp, Homo sapiens
ggatgaatggaagga

SEQ ID NO: 343432 - DNA, 15 bp, Homo sapiens
aggatgaatggaagg

SEQ ID NO: 343433 - DNA, 15 bp, Homo sapiens
aaggatgaatggaag

SEQ ID NO: 343434 - DNA, 15 bp, Homo sapiens
gaaggatgaatggaa

SEQ ID NO: 343435 - DNA, 15 bp, Homo sapiens
ggaaggatgaatgga

SEQ ID NO: 343436 - DNA, 15 bp, Homo sapiens
aggaaggatgaatgg

SEQ ID NO: 343437 - DNA, 15 bp, Homo sapiens
aaggaaggatgaatg

SEQ ID NO: 343438 - DNA, 15 bp, Homo sapiens
gaaggaaggatgaat

SEQ ID NO: 343439 - DNA, 15 bp, Homo sapiens
agaaggaaggatgaa

SEQ ID NO: 343440 - DNA, 15 bp, Homo sapiens
cagaaggaaggatga

SEQ ID NO: 343441 - DNA, 15 bp, Homo sapiens
acagaaggaaggatg

SEQ ID NO: 343442 - DNA, 15 bp, Homo sapiens
aacagaaggaaggat

SEQ ID NO: 343443 - DNA, 15 bp, Homo sapiens
taacagaaggaagga

SEQ ID NO: 343444 - DNA, 15 bp, Homo sapiens
ctaacagaaggaagg

SEQ ID NO: 343445 - DNA, 15 bp, Homo sapiens
actaacagaaggaag

SEQ ID NO: 343446 - DNA, 15 bp, Homo sapiens
gactaacagaaggaa

SEQ ID NO: 343447 - DNA, 15 bp, Homo sapiens
ggactaacagaagga

SEQ ID NO: 343448 - DNA, 15 bp, Homo sapiens
aggactaacagaagg

SEQ ID NO: 343449 - DNA, 15 bp, Homo sapiens
aaggactaacagaag

SEQ ID NO: 343450 - DNA, 15 bp, Homo sapiens
gaaggactaacagaa

SEQ ID NO: 343451 - DNA, 15 bp, Homo sapiens
ggaaggactaacaga

SEQ ID NO: 343452 - DNA, 15 bp, Homo sapiens
aggaaggactaacag

SEQ ID NO: 343453 - DNA, 15 bp, Homo sapiens
aaggaaggactaaca

SEQ ID NO: 343454 - DNA, 15 bp, Homo sapiens
gaaggaaggactaac

SEQ ID NO: 343455 - DNA, 15 bp, Homo sapiens
agaaggaaggactaa

SEQ ID NO: 343456 - DNA, 15 bp, Homo sapiens
cagaaggaaggacta

SEQ ID NO: 343457 - DNA, 15 bp, Homo sapiens
acagaaggaaggact

SEQ ID NO: 343458 - DNA, 15 bp, Homo sapiens
gacagaaggaaggac

SEQ ID NO: 343459 - DNA, 15 bp, Homo sapiens
ggacagaaggaagga

SEQ ID NO: 343460 - DNA, 15 bp, Homo sapiens
tggacagaaggaagg

SEQ ID NO: 343461 - DNA, 15 bp, Homo sapiens
atggacagaaggaag

SEQ ID NO: 343462 - DNA, 15 bp, Homo sapiens
gatggacagaaggaa

SEQ ID NO: 343463 - DNA, 15 bp, Homo sapiens
ggatggacagaagga

SEQ ID NO: 343464 - DNA, 15 bp, Homo sapiens
aggatggacagaagg

SEQ ID NO: 343465 - DNA, 15 bp, Homo sapiens
aaggatggacagaag

SEQ ID NO: 343466 - DNA, 15 bp, Homo sapiens
gaaggatggacagaa

SEQ ID NO: 343467 - DNA, 15 bp, Homo sapiens
ggaaggatggacaga

SEQ ID NO: 343468 - DNA, 15 bp, Homo sapiens
gggaaggatggacag

SEQ ID NO: 343469 - DNA, 15 bp, Homo sapiens
cgggaaggatggaca

SEQ ID NO: 343470 - DNA, 15 bp, Homo sapiens
acgggaaggatggac

SEQ ID NO: 343471 - DNA, 15 bp, Homo sapiens
gacgggaaggatgga

SEQ ID NO: 343472 - DNA, 15 bp, Homo sapiens
ggacgggaaggatgg

SEQ ID NO: 343473 - DNA, 15 bp, Homo sapiens
cggacgggaaggatg

SEQ ID NO: 343474 - DNA, 15 bp, Homo sapiens
acggacgggaaggat

SEQ ID NO: 343475 - DNA, 15 bp, Homo sapiens
aacggacgggaagga

SEQ ID NO: 343476 - DNA, 15 bp, Homo sapiens
gaacggacgggaagg

SEQ ID NO: 343477 - DNA, 15 bp, Homo sapiens
agaacggacgggaag

SEQ ID NO: 343478 - DNA, 15 bp, Homo sapiens
aagaacggacgggaa

SEQ ID NO: 343479 - DNA, 15 bp, Homo sapiens
gaagaacggacggga

SEQ ID NO: 343480 - DNA, 15 bp, Homo sapiens
ggaagaacggacggg

SEQ ID NO: 343481 - DNA, 15 bp, Homo sapiens
aggaagaacggacgg

SEQ ID NO: 343482 - DNA, 15 bp, Homo sapiens
aaggaagaacggacg

SEQ ID NO: 343483 - DNA, 15 bp, Homo sapiens
gaaggaagaacggac

SEQ ID NO: 343484 - DNA, 15 bp, Homo sapiens
ggaaggaagaacgga

SEQ ID NO: 343485 - DNA, 15 bp, Homo sapiens
aggaaggaagaacgg

SEQ ID NO: 343486 - DNA, 15 bp, Homo sapiens
aaggaaggaagaacg

SEQ ID NO: 343487 - DNA, 15 bp, Homo sapiens
gaaggaaggaagaac

SEQ ID NO: 343488 - DNA, 15 bp, Homo sapiens
ggaaggaaggaagaa

SEQ ID NO: 343489 - DNA, 15 bp, Homo sapiens
aggaaggaaggaaga

SEQ ID NO: 343490 - DNA, 15 bp, Homo sapiens
aaggaaggaaggaag

SEQ ID NO: 343491 - DNA, 15 bp, Homo sapiens
gaaggaaggaaggaa

SEQ ID NO: 343492 - DNA, 15 bp, Homo sapiens
cgaaggaaggaagga

SEQ ID NO: 343493 - DNA, 15 bp, Homo sapiens
acgaaggaaggaagg

SEQ ID NO: 343494 - DNA, 15 bp, Homo sapiens
gacgaaggaaggaag

SEQ ID NO: 343495 - DNA, 15 bp, Homo sapiens
ggacgaaggaaggaa

SEQ ID NO: 343496 - DNA, 15 bp, Homo sapiens
tggacgaaggaagga

SEQ ID NO: 343497 - DNA, 15 bp, Homo sapiens
atggacgaaggaagg

SEQ ID NO: 343498 - DNA, 15 bp, Homo sapiens
gatggacgaaggaag

SEQ ID NO: 343499 - DNA, 15 bp, Homo sapiens
ggatggacgaaggaa

SEQ ID NO: 343500 - DNA, 15 bp, Homo sapiens
aggatggacgaagga

SEQ ID NO: 343501 - DNA, 15 bp, Homo sapiens
aaggatggacgaagg

SEQ ID NO: 343502 - DNA, 15 bp, Homo sapiens
gaaggatggacgaag

SEQ ID NO: 343503 - DNA, 15 bp, Homo sapiens
agaaggatggacgaa

SEQ ID NO: 343504 - DNA, 15 bp, Homo sapiens
cagaaggatggacga

SEQ ID NO: 343505 - DNA, 15 bp, Homo sapiens
acagaaggatggacg

SEQ ID NO: 343506 - DNA, 15 bp, Homo sapiens
gacagaaggatggac

SEQ ID NO: 343507 - DNA, 15 bp, Homo sapiens
agacagaaggatgga

SEQ ID NO: 343508 - DNA, 15 bp, Homo sapiens
cagacagaaggatgg

SEQ ID NO: 343509 - DNA, 15 bp, Homo sapiens
acagacagaaggatg

SEQ ID NO: 343510 - DNA, 15 bp, Homo sapiens
gacagacagaaggat

SEQ ID NO: 343511 - DNA, 15 bp, Homo sapiens
ggacagacagaagga

SEQ ID NO: 343512 - DNA, 15 bp, Homo sapiens
aggacagacagaagg

SEQ ID NO: 343513 - DNA, 15 bp, Homo sapiens
aaggacagacagaag

SEQ ID NO: 343514 - DNA, 15 bp, Homo sapiens
gaaggacagacagaa

SEQ ID NO: 343515 - DNA, 15 bp, Homo sapiens
ggaaggacagacaga

SEQ ID NO: 343516 - DNA, 15 bp, Homo sapiens
aggaaggacagacag

SEQ ID NO: 343517 - DNA, 15 bp, Homo sapiens
aaggaaggacagaca

SEQ ID NO: 343518 - DNA, 15 bp, Homo sapiens
gaaggaaggacagac

SEQ ID NO: 343519 - DNA, 15 bp, Homo sapiens
ggaaggaaggacaga

SEQ ID NO: 343520 - DNA, 15 bp, Homo sapiens
cggaaggaaggacag

SEQ ID NO: 343521 - DNA, 15 bp, Homo sapiens
acggaaggaaggaca

SEQ ID NO: 343522 - DNA, 15 bp, Homo sapiens
aacggaaggaaggac

SEQ ID NO: 343523 - DNA, 15 bp, Homo sapiens
gaacggaaggaagga

SEQ ID NO: 343524 - DNA, 15 bp, Homo sapiens
tgaacggaaggaagg

SEQ ID NO: 343525 - DNA, 15 bp, Homo sapiens
atgaacggaaggaag

SEQ ID NO: 343526 - DNA, 15 bp, Homo sapiens
gatgaacggaaggaa

SEQ ID NO: 343527 - DNA, 15 bp, Homo sapiens
agatgaacggaagga

SEQ ID NO: 343528 - DNA, 15 bp, Homo sapiens
cagatgaacggaagg

SEQ ID NO: 343529 - DNA, 15 bp, Homo sapiens
acagatgaacggaag

SEQ ID NO: 343530 - DNA, 15 bp, Homo sapiens
gacagatgaacggaa

SEQ ID NO: 343531 - DNA, 15 bp, Homo sapiens
ggacagatgaacgga

SEQ ID NO: 343532 - DNA, 15 bp, Homo sapiens
cggacagatgaacgg

SEQ ID NO: 343533 - DNA, 15 bp, Homo sapiens
acggacagatgaacg

SEQ ID NO: 343534 - DNA, 15 bp, Homo sapiens
gacggacagatgaac

SEQ ID NO: 343535 - DNA, 15 bp, Homo sapiens
ggacggacagatgaa

SEQ ID NO: 343536 - DNA, 15 bp, Homo sapiens
aggacggacagatga

SEQ ID NO: 343537 - DNA, 15 bp, Homo sapiens
aaggacggacagatg

SEQ ID NO: 343538 - DNA, 15 bp, Homo sapiens
gaaggacggacagat

SEQ ID NO: 343539 - DNA, 15 bp, Homo sapiens
ggaaggacggacaga

SEQ ID NO: 343540 - DNA, 15 bp, Homo sapiens
aggaaggacggacag

SEQ ID NO: 343541 - DNA, 15 bp, Homo sapiens
aaggaaggacggaca

SEQ ID NO: 343542 - DNA, 15 bp, Homo sapiens
gaaggaaggacggac

SEQ ID NO: 343543 - DNA, 15 bp, Homo sapiens
ggaaggaaggacgga

SEQ ID NO: 343544 - DNA, 15 bp, Homo sapiens
aggaaggaaggacgg

SEQ ID NO: 343545 - DNA, 15 bp, Homo sapiens
gaggaaggaaggacg

SEQ ID NO: 343546 - DNA, 15 bp, Homo sapiens
ggaggaaggaaggac

SEQ ID NO: 343547 - DNA, 15 bp, Homo sapiens
gggaggaaggaagga

SEQ ID NO: 343548 - DNA, 15 bp, Homo sapiens
tgggaggaaggaagg

SEQ ID NO: 343549 - DNA, 15 bp, Homo sapiens
gtgggaggaaggaag

SEQ ID NO: 343550 - DNA, 15 bp, Homo sapiens
ggtgggaggaaggaa

SEQ ID NO: 343551 - DNA, 15 bp, Homo sapiens
gggtgggaggaagga

SEQ ID NO: 343552 - DNA, 15 bp, Homo sapiens
agggtgggaggaagg

SEQ ID NO: 343553 - DNA, 15 bp, Homo sapiens
gagggtgggaggaag

SEQ ID NO: 343554 - DNA, 15 bp, Homo sapiens
ggagggtgggaggaa

SEQ ID NO: 343555 - DNA, 15 bp, Homo sapiens
gggagggtgggagga

SEQ ID NO: 343556 - DNA, 15 bp, Homo sapiens
agggagggtgggagg

SEQ ID NO: 343557 - DNA, 15 bp, Homo sapiens
gagggagggtgggag

SEQ ID NO: 343558 - DNA, 15 bp, Homo sapiens
ggagggagggtggga

SEQ ID NO: 343559 - DNA, 15 bp, Homo sapiens
gggagggagggtggg

SEQ ID NO: 343560 - DNA, 15 bp, Homo sapiens
agggagggagggtgg

SEQ ID NO: 343561 - DNA, 15 bp, Homo sapiens
gagggagggagggtg

SEQ ID NO: 343562 - DNA, 15 bp, Homo sapiens
ggagggagggagggt

SEQ ID NO: 343563 - DNA, 15 bp, Homo sapiens
gagggagggagggag

SEQ ID NO: 343564 - DNA, 15 bp, Homo sapiens
ggagggagggaggga

SEQ ID NO: 343565 - DNA, 15 bp, Homo sapiens
aggagggagggaggg

SEQ ID NO: 343566 - DNA, 15 bp, Homo sapiens
taggagggagggagg

SEQ ID NO: 343567 - DNA, 15 bp, Homo sapiens
ataggagggagggag

SEQ ID NO: 343568 - DNA, 15 bp, Homo sapiens
gataggagggaggga

SEQ ID NO: 343569 - DNA, 15 bp, Homo sapiens
ggataggagggaggg

SEQ ID NO: 343570 - DNA, 15 bp, Homo sapiens
aggataggagggagg

SEQ ID NO: 343571 - DNA, 15 bp, Homo sapiens
gaggataggagggag

SEQ ID NO: 343572 - DNA, 15 bp, Homo sapiens
ggaggataggaggga

SEQ ID NO: 343573 - DNA, 15 bp, Homo sapiens
gggaggataggaggg

SEQ ID NO: 343574 - DNA, 15 bp, Homo sapiens
agggaggataggagg

SEQ ID NO: 343575 - DNA, 15 bp, Homo sapiens
gagggaggataggag

SEQ ID NO: 343576 - DNA, 15 bp, Homo sapiens
ggagggaggatagga

SEQ ID NO: 343577 - DNA, 15 bp, Homo sapiens
gggagggaggatagg

SEQ ID NO: 343578 - DNA, 15 bp, Homo sapiens
agggagggaggatag

SEQ ID NO: 343579 - DNA, 15 bp, Homo sapiens
gagggagggaggata

SEQ ID NO: 343580 - DNA, 15 bp, Homo sapiens
ggagggagggaggat

SEQ ID NO: 343581 - DNA, 15 bp, Homo sapiens
gggagggagggagga

SEQ ID NO: 343582 - DNA, 15 bp, Homo sapiens
tgagggagggaggga

SEQ ID NO: 343583 - DNA, 15 bp, Homo sapiens
atgagggagggaggg

SEQ ID NO: 343584 - DNA, 15 bp, Homo sapiens
aatgagggagggagg

SEQ ID NO: 343585 - DNA, 15 bp, Homo sapiens
caatgagggagggag

SEQ ID NO: 343586 - DNA, 15 bp, Homo sapiens
gcaatgagggaggga

SEQ ID NO: 343587 - DNA, 15 bp, Homo sapiens
ggcaatgagggaggg

SEQ ID NO: 343588 - DNA, 15 bp, Homo sapiens
gggcaatgagggagg

SEQ ID NO: 343589 - DNA, 15 bp, Homo sapiens
tgggcaatgagggag

SEQ ID NO: 343590 - DNA, 15 bp, Homo sapiens
ctgggcaatgaggga

SEQ ID NO: 343591 - DNA, 15 bp, Homo sapiens
cctgggcaatgaggg

SEQ ID NO: 343592 - DNA, 15 bp, Homo sapiens
gcctgggcaatgagg

SEQ ID NO: 343593 - DNA, 15 bp, Homo sapiens
agcctgggcaatgag

SEQ ID NO: 343594 - DNA, 15 bp, Homo sapiens
cagcctgggcaatga

SEQ ID NO: 343595 - DNA, 15 bp, Homo sapiens
ccagcctgggcaatg

SEQ ID NO: 343596 - DNA, 15 bp, Homo sapiens
tccagcctgggcaat

SEQ ID NO: 343597 - DNA, 15 bp, Homo sapiens
gagatcatgccattg

SEQ ID NO: 343598 - DNA, 15 bp, Homo sapiens
cgagatcatgccatt

SEQ ID NO: 343599 - DNA, 15 bp, Homo sapiens
ccgagatcatgccat

SEQ ID NO: 343600 - DNA, 15 bp, Homo sapiens
gccgagatcatgcca

SEQ ID NO: 343601 - DNA, 15 bp, Homo sapiens
agccgagatcatgcc

SEQ ID NO: 343602 - DNA, 15 bp, Homo sapiens
gagccgagatcatgc

SEQ ID NO: 343603 - DNA, 15 bp, Homo sapiens
tgagccgagatcatg

SEQ ID NO: 343604 - DNA, 15 bp, Homo sapiens
gtgagccgagatcat

SEQ ID NO: 343605 - DNA, 15 bp, Homo sapiens
ctgcagtgagccgag

SEQ ID NO: 343606 - DNA, 15 bp, Homo sapiens
actgcagtgagccga

SEQ ID NO: 343607 - DNA, 15 bp, Homo sapiens
gactgcagtgagccg

SEQ ID NO: 343608 - DNA, 15 bp, Homo sapiens
ggagactgcagtgag

SEQ ID NO: 343609 - DNA, 15 bp, Homo sapiens
gggagactgcagtga

SEQ ID NO: 343610 - DNA, 15 bp, Homo sapiens
cgggagactgcagtg

SEQ ID NO: 343611 - DNA, 15 bp, Homo sapiens
acgggagactgcagt

SEQ ID NO: 343612 - DNA, 15 bp, Homo sapiens
cacgggagactgcag

SEQ ID NO: 343613 - DNA, 15 bp, Homo sapiens
acacgggagactgca

SEQ ID NO: 343614 - DNA, 15 bp, Homo sapiens
aacacgggagactgc

SEQ ID NO: 343615 - DNA, 15 bp, Homo sapiens
gaacacgggagactg

SEQ ID NO: 343616 - DNA, 15 bp, Homo sapiens
tgaacacgggagact

SEQ ID NO: 343617 - DNA, 15 bp, Homo sapiens
ttgaacacgggagac

SEQ ID NO: 343618 - DNA, 15 bp, Homo sapiens
cttgaacacgggaga

SEQ ID NO: 343619 - DNA, 15 bp, Homo sapiens
gcttgaacacgggag

SEQ ID NO: 343620 - DNA, 15 bp, Homo sapiens
tgcttgaacacggga

SEQ ID NO: 343621 - DNA, 15 bp, Homo sapiens
ctgcttgaacacggg

SEQ ID NO: 343622 - DNA, 15 bp, Homo sapiens
actgcttgaacacgg

SEQ ID NO: 343623 - DNA, 15 bp, Homo sapiens
aactgcttgaacacg

SEQ ID NO: 343624 - DNA, 15 bp, Homo sapiens
gaactgcttgaacac

SEQ ID NO: 343625 - DNA, 15 bp, Homo sapiens
agaactgcttgaaca

SEQ ID NO: 343626 - DNA, 15 bp, Homo sapiens
gagaactgcttgaac

SEQ ID NO: 343627 - DNA, 15 bp, Homo sapiens
ggagaactgcttgaa

SEQ ID NO: 343628 - DNA, 15 bp, Homo sapiens
aggagaactgcttga

SEQ ID NO: 343629 - DNA, 15 bp, Homo sapiens
gaggagaactgcttg

SEQ ID NO: 343630 - DNA, 15 bp, Homo sapiens
ggaggagaactgctt

SEQ ID NO: 343631 - DNA, 15 bp, Homo sapiens
gggaggagaactgct

SEQ ID NO: 343632 - DNA, 15 bp, Homo sapiens
tgggaggagaactgc

SEQ ID NO: 343633 - DNA, 15 bp, Homo sapiens
ttgggaggagaactg

SEQ ID NO: 343634 - DNA, 15 bp, Homo sapiens
cttgggaggagaact

SEQ ID NO: 343635 - DNA, 15 bp, Homo sapiens
acttgggaggagaac

SEQ ID NO: 343636 - DNA, 15 bp, Homo sapiens
tacttgggaggagaa

SEQ ID NO: 343637 - DNA, 15 bp, Homo sapiens
ctacttgggaggaga

SEQ ID NO: 343638 - DNA, 15 bp, Homo sapiens
actacttgggaggag

SEQ ID NO: 343639 - DNA, 15 bp, Homo sapiens
aactacttgggagga

SEQ ID NO: 343640 - DNA, 15 bp, Homo sapiens
ctaatcccaactact

SEQ ID NO: 343641 - DNA, 15 bp, Homo sapiens
tctaatcccaactac

SEQ ID NO: 343642 - DNA, 15 bp, Homo sapiens
ctctaatcccaacta

SEQ ID NO: 343643 - DNA, 15 bp, Homo sapiens
cctctaatcccaact

SEQ ID NO: 343644 - DNA, 15 bp, Homo sapiens
gcctctaatcccaac

SEQ ID NO: 343645 - DNA, 15 bp, Homo sapiens
tgcctctaatcccaa

SEQ ID NO: 343646 - DNA, 15 bp, Homo sapiens
atgcctctaatccca

SEQ ID NO: 343647 - DNA, 15 bp, Homo sapiens
catgcctctaatccc

SEQ ID NO: 343648 - DNA, 15 bp, Homo sapiens
gcatgcctctaatcc

SEQ ID NO: 343649 - DNA, 15 bp, Homo sapiens
cgcatgcctctaatc

SEQ ID NO: 343650 - DNA, 15 bp, Homo sapiens
gcgcatgcctctaat

SEQ ID NO: 343651 - DNA, 15 bp, Homo sapiens
agcgcatgcctctaa

SEQ ID NO: 343652 - DNA, 15 bp, Homo sapiens
tagcgcatgcctcta

SEQ ID NO: 343653 - DNA, 15 bp, Homo sapiens
gtagcgcatgcctct

SEQ ID NO: 343654 - DNA, 15 bp, Homo sapiens
ggtagcgcatgcctc

SEQ ID NO: 343655 - DNA, 15 bp, Homo sapiens
tggtagcgcatgcct

SEQ ID NO: 343656 - DNA, 15 bp, Homo sapiens
gtggtagcgcatgcc

SEQ ID NO: 343657 - DNA, 15 bp, Homo sapiens
tgtggtagcgcatgc

SEQ ID NO: 343658 - DNA, 15 bp, Homo sapiens
gtgtggtagcgcatg

SEQ ID NO: 343659 - DNA, 15 bp, Homo sapiens
cgtgtggtagcgcat

SEQ ID NO: 343660 - DNA, 15 bp, Homo sapiens
gcgtgtggtagcgca

SEQ ID NO: 343661 - DNA, 15 bp, Homo sapiens
ggcgtgtggtagcgc

SEQ ID NO: 343662 - DNA, 15 bp, Homo sapiens
gggcgtgtggtagcg

SEQ ID NO: 343663 - DNA, 15 bp, Homo sapiens
cgggcgtgtggtagc

SEQ ID NO: 343664 - DNA, 15 bp, Homo sapiens
ccgggcgtgtggtag

SEQ ID NO: 343665 - DNA, 15 bp, Homo sapiens
gccgggcgtgtggta

SEQ ID NO: 343666 - DNA, 15 bp, Homo sapiens
agccgggcgtgtggt

SEQ ID NO: 343667 - DNA, 15 bp, Homo sapiens
tagccgggcgtgtgg

SEQ ID NO: 343668 - DNA, 15 bp, Homo sapiens
ttagccgggcgtgtg

SEQ ID NO: 343669 - DNA, 15 bp, Homo sapiens
attagccgggcgtgt

SEQ ID NO: 343670 - DNA, 15 bp, Homo sapiens
cacaaaattagccgg

SEQ ID NO: 343671 - DNA, 15 bp, Homo sapiens
acacaaaattagccg

SEQ ID NO: 343672 - DNA, 15 bp, Homo sapiens
aacacaaaattagcc

SEQ ID NO: 343673 - DNA, 15 bp, Homo sapiens
aaacacaaaattagc

SEQ ID NO: 343674 - DNA, 15 bp, Homo sapiens
aaaacacaaaattag

SEQ ID NO: 343675 - DNA, 15 bp, Homo sapiens
aaaaacacaaaatta

SEQ ID NO: 343676 - DNA, 15 bp, Homo sapiens
taaaaacacaaaatt

SEQ ID NO: 343677 - DNA, 15 bp, Homo sapiens
ctaaaaacacaaaat

SEQ ID NO: 343678 - DNA, 15 bp, Homo sapiens
actaaaaacacaaaa

SEQ ID NO: 343679 - DNA, 15 bp, Homo sapiens
tactaaaaacacaaa

SEQ ID NO: 343680 - DNA, 15 bp, Homo sapiens
ctactaaaaacacaa

SEQ ID NO: 343681 - DNA, 15 bp, Homo sapiens
tctactaaaaacaca

SEQ ID NO: 343682 - DNA, 15 bp, Homo sapiens
ctctactaaaaacac

SEQ ID NO: 343683 - DNA, 15 bp, Homo sapiens
tctctactaaaaaca

SEQ ID NO: 343684 - DNA, 15 bp, Homo sapiens
atctctactaaaaac

SEQ ID NO: 343685 - DNA, 15 bp, Homo sapiens
catggtgaaacccca

SEQ ID NO: 343686 - DNA, 15 bp, Homo sapiens
cgaccaacatggtga

SEQ ID NO: 343687 - DNA, 15 bp, Homo sapiens
ccgaccaacatggtg

SEQ ID NO: 343688 - DNA, 15 bp, Homo sapiens
cccgaccaacatggt

SEQ ID NO: 343689 - DNA, 15 bp, Homo sapiens
acccgaccaacatgg

SEQ ID NO: 343690 - DNA, 15 bp, Homo sapiens
aacccgaccaacatg

SEQ ID NO: 343691 - DNA, 15 bp, Homo sapiens
caacccgaccaacat

SEQ ID NO: 343692 - DNA, 15 bp, Homo sapiens
ccaacccgaccaaca

SEQ ID NO: 343693 - DNA, 15 bp, Homo sapiens
accaacccgaccaac

SEQ ID NO: 343694 - DNA, 15 bp, Homo sapiens
gaccaacccgaccaa

SEQ ID NO: 343695 - DNA, 15 bp, Homo sapiens
agaccaacccgacca

SEQ ID NO: 343696 - DNA, 15 bp, Homo sapiens
aagaccaacccgacc

SEQ ID NO: 343697 - DNA, 15 bp, Homo sapiens
caagaccaacccgac

SEQ ID NO: 343698 - DNA, 15 bp, Homo sapiens
tcaagaccaacccga

SEQ ID NO: 343699 - DNA, 15 bp, Homo sapiens
ttcaagaccaacccg

SEQ ID NO: 343700 - DNA, 15 bp, Homo sapiens
gttcaagaccaaccc

SEQ ID NO: 343701 - DNA, 15 bp, Homo sapiens
gaggtcaggagttca

SEQ ID NO: 343702 - DNA, 15 bp, Homo sapiens
acagtggctcacgcc

SEQ ID NO: 343703 - DNA, 15 bp, Homo sapiens
tacagtggctcacgc

SEQ ID NO: 343704 - DNA, 15 bp, Homo sapiens
gtacagtggctcacg

SEQ ID NO: 343705 - DNA, 15 bp, Homo sapiens
ggtacagtggctcac

SEQ ID NO: 343706 - DNA, 15 bp, Homo sapiens
gggtacagtggctca

SEQ ID NO: 343707 - DNA, 15 bp, Homo sapiens
tgggtacagtggctc

SEQ ID NO: 343708 - DNA, 15 bp, Homo sapiens
ctgggtacagtggct

SEQ ID NO: 343709 - DNA, 15 bp, Homo sapiens
gctgggtacagtggc

SEQ ID NO: 343710 - DNA, 15 bp, Homo sapiens
agctgggtacagtgg

SEQ ID NO: 343711 - DNA, 15 bp, Homo sapiens
gagctgggtacagtg

SEQ ID NO: 343712 - DNA, 15 bp, Homo sapiens
tgagctgggtacagt

SEQ ID NO: 343713 - DNA, 15 bp, Homo sapiens
gtgagctgggtacag

SEQ ID NO: 343714 - DNA, 15 bp, Homo sapiens
ggtgagctgggtaca

SEQ ID NO: 343715 - DNA, 15 bp, Homo sapiens
aggtgagctgggtac

SEQ ID NO: 343716 - DNA, 15 bp, Homo sapiens
aaggtgagctgggta

SEQ ID NO: 343717 - DNA, 15 bp, Homo sapiens
gaaggtgagctgggt

SEQ ID NO: 343718 - DNA, 15 bp, Homo sapiens
agaaggtgagctggg

SEQ ID NO: 343719 - DNA, 15 bp, Homo sapiens
aagaaggtgagctgg

SEQ ID NO: 343720 - DNA, 15 bp, Homo sapiens
aaagaaggtgagctg

SEQ ID NO: 343721 - DNA, 15 bp, Homo sapiens
taaagaaggtgagct

SEQ ID NO: 343722 - DNA, 15 bp, Homo sapiens
ataaagaaggtgagc

SEQ ID NO: 343723 - DNA, 15 bp, Homo sapiens
tataaagaaggtgag

SEQ ID NO: 343724 - DNA, 15 bp, Homo sapiens
atataaagaaggtga

SEQ ID NO: 343725 - DNA, 15 bp, Homo sapiens
gatataaagaaggtg

SEQ ID NO: 343726 - DNA, 15 bp, Homo sapiens
tgatataaagaaggt

SEQ ID NO: 343727 - DNA, 15 bp, Homo sapiens
ctgatataaagaagg

SEQ ID NO: 343728 - DNA, 15 bp, Homo sapiens
cctgatataaagaag

SEQ ID NO: 343729 - DNA, 15 bp, Homo sapiens
tcctgatataaagaa

SEQ ID NO: 343730 - DNA, 15 bp, Homo sapiens
ctcctgatataaaga

SEQ ID NO: 343731 - DNA, 15 bp, Homo sapiens
gctcctgatataaag

SEQ ID NO: 343732 - DNA, 15 bp, Homo sapiens
agctcctgatataaa

SEQ ID NO: 343733 - DNA, 15 bp, Homo sapiens
tagctcctgatataa

SEQ ID NO: 343734 - DNA, 15 bp, Homo sapiens
gtagctcctgatata

SEQ ID NO: 343735 - DNA, 15 bp, Homo sapiens
agtagctcctgatat

SEQ ID NO: 343736 - DNA, 15 bp, Homo sapiens
aagtagctcctgata

SEQ ID NO: 343737 - DNA, 15 bp, Homo sapiens
taagtagctcctgat

SEQ ID NO: 343738 - DNA, 15 bp, Homo sapiens
ttaagtagctcctga

SEQ ID NO: 343739 - DNA, 15 bp, Homo sapiens
cttaagtagctcctg

SEQ ID NO: 343740 - DNA, 15 bp, Homo sapiens
acttaagtagctcct

SEQ ID NO: 343741 - DNA, 15 bp, Homo sapiens
tacttaagtagctcc

SEQ ID NO: 343742 - DNA, 15 bp, Homo sapiens
ctacttaagtagctc

SEQ ID NO: 343743 - DNA, 15 bp, Homo sapiens
tctacttaagtagct

SEQ ID NO: 343744 - DNA, 15 bp, Homo sapiens
ttctacttaagtagc

SEQ ID NO: 343745 - DNA, 15 bp, Homo sapiens
gttctacttaagtag

SEQ ID NO: 343746 - DNA, 15 bp, Homo sapiens
tgttctacttaagta

SEQ ID NO: 343747 - DNA, 15 bp, Homo sapiens
atgttctacttaagt

SEQ ID NO: 343748 - DNA, 15 bp, Homo sapiens
aatgttctacttaag

SEQ ID NO: 343749 - DNA, 15 bp, Homo sapiens
aaatgttctacttaa

SEQ ID NO: 343750 - DNA, 15 bp, Homo sapiens
taaatgttctactta

SEQ ID NO: 343751 - DNA, 15 bp, Homo sapiens
ataaatgttctactt

SEQ ID NO: 343752 - DNA, 15 bp, Homo sapiens
cataaatgttctact

SEQ ID NO: 343753 - DNA, 15 bp, Homo sapiens
acataaatgttctac

SEQ ID NO: 343754 - DNA, 15 bp, Homo sapiens
tacataaatgttcta

SEQ ID NO: 343755 - DNA, 15 bp, Homo sapiens
gtacataaatgttct

SEQ ID NO: 343756 - DNA, 15 bp, Homo sapiens
ggtacataaatgttc

SEQ ID NO: 343757 - DNA, 15 bp, Homo sapiens
tggtacataaatgtt

SEQ ID NO: 343758 - DNA, 15 bp, Homo sapiens
ttggtacataaatgt

SEQ ID NO: 343759 - DNA, 15 bp, Homo sapiens
cttggtacataaatg

SEQ ID NO: 343760 - DNA, 15 bp, Homo sapiens
tcttggtacataaat

SEQ ID NO: 343761 - DNA, 15 bp, Homo sapiens
ttcttggtacataaa

SEQ ID NO: 343762 - DNA, 15 bp, Homo sapiens
gttcttggtacataa

SEQ ID NO: 343763 - DNA, 15 bp, Homo sapiens
agttcttggtacata

SEQ ID NO: 343764 - DNA, 15 bp, Homo sapiens
gagttcttggtacat

SEQ ID NO: 343765 - DNA, 15 bp, Homo sapiens
agagttcttggtaca

SEQ ID NO: 343766 - DNA, 15 bp, Homo sapiens
aagagttcttggtac

SEQ ID NO: 343767 - DNA, 15 bp, Homo sapiens
gaagagttcttggta

SEQ ID NO: 343768 - DNA, 15 bp, Homo sapiens
agaagagttcttggt

SEQ ID NO: 343769 - DNA, 15 bp, Homo sapiens
cagaagagttcttgg

SEQ ID NO: 343770 - DNA, 15 bp, Homo sapiens
acagaagagttcttg

SEQ ID NO: 343771 - DNA, 15 bp, Homo sapiens
cacagaagagttctt

SEQ ID NO: 343772 - DNA, 15 bp, Homo sapiens
gcacagaagagttct

SEQ ID NO: 343773 - DNA, 15 bp, Homo sapiens
tgcacagaagagttc

SEQ ID NO: 343774 - DNA, 15 bp, Homo sapiens
gtgcacagaagagtt

SEQ ID NO: 343775 - DNA, 15 bp, Homo sapiens
agtgcacagaagagt

SEQ ID NO: 343776 - DNA, 15 bp, Homo sapiens
aagtgcacagaagag

SEQ ID NO: 343777 - DNA, 15 bp, Homo sapiens
caagtgcacagaaga

SEQ ID NO: 343778 - DNA, 15 bp, Homo sapiens
tcaagtgcacagaag

SEQ ID NO: 343779 - DNA, 15 bp, Homo sapiens
gtcaagtgcacagaa

SEQ ID NO: 343780 - DNA, 15 bp, Homo sapiens
agtcaagtgcacaga

SEQ ID NO: 343781 - DNA, 15 bp, Homo sapiens
tagtcaagtgcacag

SEQ ID NO: 343782 - DNA, 15 bp, Homo sapiens
ttagtcaagtgcaca

SEQ ID NO: 343783 - DNA, 15 bp, Homo sapiens
gttagtcaagtgcac

SEQ ID NO: 343784 - DNA, 15 bp, Homo sapiens
agttagtcaagtgca

SEQ ID NO: 343785 - DNA, 15 bp, Homo sapiens
gagttagtcaagtgc

SEQ ID NO: 343786 - DNA, 15 bp, Homo sapiens
tgagttagtcaagtg

SEQ ID NO: 343787 - DNA, 15 bp, Homo sapiens
atgagttagtcaagt

SEQ ID NO: 343788 - DNA, 15 bp, Homo sapiens
aatgagttagtcaag

SEQ ID NO: 343789 - DNA, 15 bp, Homo sapiens
aaatgagttagtcaa

SEQ ID NO: 343790 - DNA, 15 bp, Homo sapiens
taaatgagttagtca

SEQ ID NO: 343791 - DNA, 15 bp, Homo sapiens
ttaaatgagttagtc

SEQ ID NO: 343792 - DNA, 15 bp, Homo sapiens
attaaatgagttagt

SEQ ID NO: 343793 - DNA, 15 bp, Homo sapiens
gattaaatgagttag

SEQ ID NO: 343794 - DNA, 15 bp, Homo sapiens
ggattaaatgagtta

SEQ ID NO: 343795 - DNA, 15 bp, Homo sapiens
aggattaaatgagtt

SEQ ID NO: 343796 - DNA, 15 bp, Homo sapiens
gaggattaaatgagt

SEQ ID NO: 343797 - DNA, 15 bp, Homo sapiens
tgaggattaaatgag

SEQ ID NO: 343798 - DNA, 15 bp, Homo sapiens
gtgaggattaaatga

SEQ ID NO: 343799 - DNA, 15 bp, Homo sapiens
ggtgaggattaaatg

SEQ ID NO: 343800 - DNA, 15 bp, Homo sapiens
tggtgaggattaaat

SEQ ID NO: 343801 - DNA, 15 bp, Homo sapiens
gtggtgaggattaaa

SEQ ID NO: 343802 - DNA, 15 bp, Homo sapiens
tgtggtgaggattaa

SEQ ID NO: 343803 - DNA, 15 bp, Homo sapiens
ctgtggtgaggatta

SEQ ID NO: 343804 - DNA, 15 bp, Homo sapiens
actgtggtgaggatt

SEQ ID NO: 343805 - DNA, 15 bp, Homo sapiens
gactgtggtgaggat

SEQ ID NO: 343806 - DNA, 15 bp, Homo sapiens
agactgtggtgagga

SEQ ID NO: 343807 - DNA, 15 bp, Homo sapiens
aagactgtggtgagg

SEQ ID NO: 343808 - DNA, 15 bp, Homo sapiens
caagactgtggtgag

SEQ ID NO: 343809 - DNA, 15 bp, Homo sapiens
acaagactgtggtga

SEQ ID NO: 343810 - DNA, 15 bp, Homo sapiens
cacaagactgtggtg

SEQ ID NO: 343811 - DNA, 15 bp, Homo sapiens
ccacaagactgtggt

SEQ ID NO: 343812 - DNA, 15 bp, Homo sapiens
tccacaagactgtgg

SEQ ID NO: 343813 - DNA, 15 bp, Homo sapiens
ctccacaagactgtg

SEQ ID NO: 343814 - DNA, 15 bp, Homo sapiens
tctccacaagactgt

SEQ ID NO: 343815 - DNA, 15 bp, Homo sapiens
ttctccacaagactg

SEQ ID NO: 343816 - DNA, 15 bp, Homo sapiens
cttctccacaagact

SEQ ID NO: 343817 - DNA, 15 bp, Homo sapiens
acttctccacaagac

SEQ ID NO: 343818 - DNA, 15 bp, Homo sapiens
tacttctccacaaga

SEQ ID NO: 343819 - DNA, 15 bp, Homo sapiens
gtacttctccacaag

SEQ ID NO: 343820 - DNA, 15 bp, Homo sapiens
agtacttctccacaa

SEQ ID NO: 343821 - DNA, 15 bp, Homo sapiens
tagtacttctccaca

SEQ ID NO: 343822 - DNA, 15 bp, Homo sapiens
atagtacttctccac

SEQ ID NO: 343823 - DNA, 15 bp, Homo sapiens
aatagtacttctcca

SEQ ID NO: 343824 - DNA, 15 bp, Homo sapiens
taatagtacttctcc

SEQ ID NO: 343825 - DNA, 15 bp, Homo sapiens
ataatagtacttctc

SEQ ID NO: 343826 - DNA, 15 bp, Homo sapiens
gataatagtacttct

SEQ ID NO: 343827 - DNA, 15 bp, Homo sapiens
tgataatagtacttc

SEQ ID NO: 343828 - DNA, 15 bp, Homo sapiens
atgataatagtactt

SEQ ID NO: 343829 - DNA, 15 bp, Homo sapiens
gatgataatagtact

SEQ ID NO: 343830 - DNA, 15 bp, Homo sapiens
ggatgataatagtac

SEQ ID NO: 343831 - DNA, 15 bp, Homo sapiens
gggatgataatagta

SEQ ID NO: 343832 - DNA, 15 bp, Homo sapiens
ggggatgataatagt

SEQ ID NO: 343833 - DNA, 15 bp, Homo sapiens
tggggatgataatag

SEQ ID NO: 343834 - DNA, 15 bp, Homo sapiens
atggggatgataata

SEQ ID NO: 343835 - DNA, 15 bp, Homo sapiens
aatggggatgataat

SEQ ID NO: 343836 - DNA, 15 bp, Homo sapiens
gaatggggatgataa

SEQ ID NO: 343837 - DNA, 15 bp, Homo sapiens
agaatggggatgata

SEQ ID NO: 343838 - DNA, 15 bp, Homo sapiens
cagaatggggatgat

SEQ ID NO: 343839 - DNA, 15 bp, Homo sapiens
gcagaatggggatga

SEQ ID NO: 343840 - DNA, 15 bp, Homo sapiens
tgcagaatggggatg

SEQ ID NO: 343841 - DNA, 15 bp, Homo sapiens
ctgcagaatggggat

SEQ ID NO: 343842 - DNA, 15 bp, Homo sapiens
tctgcagaatgggga

SEQ ID NO: 343843 - DNA, 15 bp, Homo sapiens
gtctgcagaatgggg

SEQ ID NO: 343844 - DNA, 15 bp, Homo sapiens
tgtctgcagaatggg

SEQ ID NO: 343845 - DNA, 15 bp, Homo sapiens
ttgtctgcagaatgg

SEQ ID NO: 343846 - DNA, 15 bp, Homo sapiens
cttgtctgcagaatg

SEQ ID NO: 343847 - DNA, 15 bp, Homo sapiens
ccttgtctgcagaat

SEQ ID NO: 343848 - DNA, 15 bp, Homo sapiens
tccttgtctgcagaa

SEQ ID NO: 343849 - DNA, 15 bp, Homo sapiens
ttccttgtctgcaga

SEQ ID NO: 343850 - DNA, 15 bp, Homo sapiens
tttccttgtctgcag

SEQ ID NO: 343851 - DNA, 15 bp, Homo sapiens
atttccttgtctgca

SEQ ID NO: 343852 - DNA, 15 bp, Homo sapiens
aatttccttgtctgc

SEQ ID NO: 343853 - DNA, 15 bp, Homo sapiens
aaatttccttgtctg

SEQ ID NO: 343854 - DNA, 15 bp, Homo sapiens
caaatttccttgtct

SEQ ID NO: 343855 - DNA, 15 bp, Homo sapiens
tcaaatttccttgtc

SEQ ID NO: 343856 - DNA, 15 bp, Homo sapiens
ctcaaatttccttgt

SEQ ID NO: 343857 - DNA, 15 bp, Homo sapiens
cctcaaatttccttg

SEQ ID NO: 343858 - DNA, 15 bp, Homo sapiens
acctcaaatttcctt

SEQ ID NO: 343859 - DNA, 15 bp, Homo sapiens
aacctcaaatttcct

SEQ ID NO: 343860 - DNA, 15 bp, Homo sapiens
gaacctcaaatttcc

SEQ ID NO: 343861 - DNA, 15 bp, Homo sapiens
tgaacctcaaatttc

SEQ ID NO: 343862 - DNA, 15 bp, Homo sapiens
ctgaacctcaaattt

SEQ ID NO: 343863 - DNA, 15 bp, Homo sapiens
tctgaacctcaaatt

SEQ ID NO: 343864 - DNA, 15 bp, Homo sapiens
ctctgaacctcaaat

SEQ ID NO: 343865 - DNA, 15 bp, Homo sapiens
actctgaacctcaaa

SEQ ID NO: 343866 - DNA, 15 bp, Homo sapiens
cactctgaacctcaa

SEQ ID NO: 343867 - DNA, 15 bp, Homo sapiens
ccactctgaacctca

SEQ ID NO: 343868 - DNA, 15 bp, Homo sapiens
cccactctgaacctc

SEQ ID NO: 343869 - DNA, 15 bp, Homo sapiens
tcccactctgaacct

SEQ ID NO: 343870 - DNA, 15 bp, Homo sapiens
ttcccactctgaacc

SEQ ID NO: 343871 - DNA, 15 bp, Homo sapiens
tttcccactctgaac

SEQ ID NO: 343872 - DNA, 15 bp, Homo sapiens
ctttcccactctgaa

SEQ ID NO: 343873 - DNA, 15 bp, Homo sapiens
actttcccactctga

SEQ ID NO: 343874 - DNA, 15 bp, Homo sapiens
gactttcccactctg

SEQ ID NO: 343875 - DNA, 15 bp, Homo sapiens
agactttcccactct

SEQ ID NO: 343876 - DNA, 15 bp, Homo sapiens
cagactttcccactc

SEQ ID NO: 343877 - DNA, 15 bp, Homo sapiens
ccagactttcccact

SEQ ID NO: 343878 - DNA, 15 bp, Homo sapiens
cccagactttcccac

SEQ ID NO: 343879 - DNA, 15 bp, Homo sapiens
tcccagactttccca

SEQ ID NO: 343880 - DNA, 15 bp, Homo sapiens
ttcccagactttccc

SEQ ID NO: 343881 - DNA, 15 bp, Homo sapiens
cttcccagactttcc

SEQ ID NO: 343882 - DNA, 15 bp, Homo sapiens
tcttcccagactttc

SEQ ID NO: 343883 - DNA, 15 bp, Homo sapiens
atcttcccagacttt

SEQ ID NO: 343884 - DNA, 15 bp, Homo sapiens
aatcttcccagactt

SEQ ID NO: 343885 - DNA, 15 bp, Homo sapiens
caatcttcccagact

SEQ ID NO: 343886 - DNA, 15 bp, Homo sapiens
gcaatcttcccagac

SEQ ID NO: 343887 - DNA, 15 bp, Homo sapiens
agcaatcttcccaga

SEQ ID NO: 343888 - DNA, 15 bp, Homo sapiens
gagcaatcttcccag

SEQ ID NO: 343889 - DNA, 15 bp, Homo sapiens
tgagcaatcttccca

SEQ ID NO: 343890 - DNA, 15 bp, Homo sapiens
ctgagcaatcttccc

SEQ ID NO: 343891 - DNA, 15 bp, Homo sapiens
cctgagcaatcttcc

SEQ ID NO: 343892 - DNA, 15 bp, Homo sapiens
ccctgagcaatcttc

SEQ ID NO: 343893 - DNA, 15 bp, Homo sapiens
cccctgagcaatctt

SEQ ID NO: 343894 - DNA, 15 bp, Homo sapiens
acccctgagcaatct

SEQ ID NO: 343895 - DNA, 15 bp, Homo sapiens
tacccctgagcaatc

SEQ ID NO: 343896 - DNA, 15 bp, Homo sapiens
ttacccctgagcaat

SEQ ID NO: 343897 - DNA, 15 bp, Homo sapiens
gttacccctgagcaa

SEQ ID NO: 343898 - DNA, 15 bp, Homo sapiens
ggttacccctgagca

SEQ ID NO: 343899 - DNA, 15 bp, Homo sapiens
tggttacccctgagc

SEQ ID NO: 343900 - DNA, 15 bp, Homo sapiens
ctggttacccctgag

SEQ ID NO: 343901 - DNA, 15 bp, Homo sapiens
cctggttacccctga

SEQ ID NO: 343902 - DNA, 15 bp, Homo sapiens
acctggttacccctg

SEQ ID NO: 343903 - DNA, 15 bp, Homo sapiens
cacctggttacccct

SEQ ID NO: 343904 - DNA, 15 bp, Homo sapiens
tcacctggttacccc

SEQ ID NO: 343905 - DNA, 15 bp, Homo sapiens
atcacctggttaccc

SEQ ID NO: 343906 - DNA, 15 bp, Homo sapiens
tatcacctggttacc

SEQ ID NO: 343907 - DNA, 15 bp, Homo sapiens
ctatcacctggttac

SEQ ID NO: 343908 - DNA, 15 bp, Homo sapiens
cctatcacctggtta

SEQ ID NO: 343909 - DNA, 15 bp, Homo sapiens
tcctatcacctggtt

SEQ ID NO: 343910 - DNA, 15 bp, Homo sapiens
ctcctatcacctggt

SEQ ID NO: 343911 - DNA, 15 bp, Homo sapiens
gctcctatcacctgg

SEQ ID NO: 343912 - DNA, 15 bp, Homo sapiens
tgctcctatcacctg

SEQ ID NO: 343913 - DNA, 15 bp, Homo sapiens
ctgctcctatcacct

SEQ ID NO: 343914 - DNA, 15 bp, Homo sapiens
tctgctcctatcacc

SEQ ID NO: 343915 - DNA, 15 bp, Homo sapiens
ttctgctcctatcac

SEQ ID NO: 343916 - DNA, 15 bp, Homo sapiens
gttctgctcctatca

SEQ ID NO: 343917 - DNA, 15 bp, Homo sapiens
agttctgctcctatc

SEQ ID NO: 343918 - DNA, 15 bp, Homo sapiens
aagttctgctcctat

SEQ ID NO: 343919 - DNA, 15 bp, Homo sapiens
caagttctgctccta

SEQ ID NO: 343920 - DNA, 15 bp, Homo sapiens
tcaagttctgctcct

SEQ ID NO: 343921 - DNA, 15 bp, Homo sapiens
ctcaagttctgctcc

SEQ ID NO: 343922 - DNA, 15 bp, Homo sapiens
gctcaagttctgctc

SEQ ID NO: 343923 - DNA, 15 bp, Homo sapiens
cgctcaagttctgct

SEQ ID NO: 343924 - DNA, 15 bp, Homo sapiens
acgctcaagttctgc

SEQ ID NO: 343925 - DNA, 15 bp, Homo sapiens
aacgctcaagttctg

SEQ ID NO: 343926 - DNA, 15 bp, Homo sapiens
aaacgctcaagttct

SEQ ID NO: 343927 - DNA, 15 bp, Homo sapiens
aaaacgctcaagttc

SEQ ID NO: 343928 - DNA, 15 bp, Homo sapiens
taaaacgctcaagtt

SEQ ID NO: 343929 - DNA, 15 bp, Homo sapiens
ataaaacgctcaagt

SEQ ID NO: 343930 - DNA, 15 bp, Homo sapiens
tataaaacgctcaag

SEQ ID NO: 343931 - DNA, 15 bp, Homo sapiens
ttataaaacgctcaa

SEQ ID NO: 343932 - DNA, 15 bp, Homo sapiens
tttataaaacgctca

SEQ ID NO: 343933 - DNA, 15 bp, Homo sapiens
ttttataaaacgctc

SEQ ID NO: 343934 - DNA, 15 bp, Homo sapiens
cttttataaaacgct

SEQ ID NO: 343935 - DNA, 15 bp, Homo sapiens
tcttttataaaacgc

SEQ ID NO: 343936 - DNA, 15 bp, Homo sapiens
gtcttttataaaacg

SEQ ID NO: 343937 - DNA, 15 bp, Homo sapiens
tgtcttttataaaac

SEQ ID NO: 343938 - DNA, 15 bp, Homo sapiens
gtgtcttttataaaa

SEQ ID NO: 343939 - DNA, 15 bp, Homo sapiens
agtgtcttttataaa

SEQ ID NO: 343940 - DNA, 15 bp, Homo sapiens
aagtgtcttttataa

SEQ ID NO: 343941 - DNA, 15 bp, Homo sapiens
taagtgtcttttata

SEQ ID NO: 343942 - DNA, 15 bp, Homo sapiens
ttaagtgtcttttat

SEQ ID NO: 343943 - DNA, 15 bp, Homo sapiens
gttaagtgtctttta

SEQ ID NO: 343944 - DNA, 15 bp, Homo sapiens
agttaagtgtctttt

SEQ ID NO: 343945 - DNA, 15 bp, Homo sapiens
cagttaagtgtcttt

SEQ ID NO: 343946 - DNA, 15 bp, Homo sapiens
gcagttaagtgtctt

SEQ ID NO: 343947 - DNA, 15 bp, Homo sapiens
ggcagttaagtgtct

SEQ ID NO: 343948 - DNA, 15 bp, Homo sapiens
gggcagttaagtgtc

SEQ ID NO: 343949 - DNA, 15 bp, Homo sapiens
tgggcagttaagtgt

SEQ ID NO: 343950 - DNA, 15 bp, Homo sapiens
atgggcagttaagtg

SEQ ID NO: 343951 - DNA, 15 bp, Homo sapiens
gatgggcagttaagt

SEQ ID NO: 343952 - DNA, 15 bp, Homo sapiens
agatgggcagttaag

SEQ ID NO: 343953 - DNA, 15 bp, Homo sapiens
cagatgggcagttaa

SEQ ID NO: 343954 - DNA, 15 bp, Homo sapiens
gcagatgggcagtta

SEQ ID NO: 343955 - DNA, 15 bp, Homo sapiens
agcagatgggcagtt

SEQ ID NO: 343956 - DNA, 15 bp, Homo sapiens
aagcagatgggcagt

SEQ ID NO: 343957 - DNA, 15 bp, Homo sapiens
caagcagatgggcag

SEQ ID NO: 343958 - DNA, 15 bp, Homo sapiens
gcaagcagatgggca

SEQ ID NO: 343959 - DNA, 15 bp, Homo sapiens
agcaagcagatgggc

SEQ ID NO: 343960 - DNA, 15 bp, Homo sapiens
aagcaagcagatggg

SEQ ID NO: 343961 - DNA, 15 bp, Homo sapiens
caagcaagcagatgg

SEQ ID NO: 343962 - DNA, 15 bp, Homo sapiens
tcaagcaagcagatg

SEQ ID NO: 343963 - DNA, 15 bp, Homo sapiens
atcaagcaagcagat

SEQ ID NO: 343964 - DNA, 15 bp, Homo sapiens
catcaagcaagcaga

SEQ ID NO: 343965 - DNA, 15 bp, Homo sapiens
tcatcaagcaagcag

SEQ ID NO: 343966 - DNA, 15 bp, Homo sapiens
ttcatcaagcaagca

SEQ ID NO: 343967 - DNA, 15 bp, Homo sapiens
tttcatcaagcaagc

SEQ ID NO: 343968 - DNA, 15 bp, Homo sapiens
atttcatcaagcaag

SEQ ID NO: 343969 - DNA, 15 bp, Homo sapiens
catttcatcaagcaa

SEQ ID NO: 343970 - DNA, 15 bp, Homo sapiens
acatttcatcaagca

SEQ ID NO: 343971 - DNA, 15 bp, Homo sapiens
tacatttcatcaagc

SEQ ID NO: 343972 - DNA, 15 bp, Homo sapiens
ttacatttcatcaag

SEQ ID NO: 343973 - DNA, 15 bp, Homo sapiens
attacatttcatcaa

SEQ ID NO: 343974 - DNA, 15 bp, Homo sapiens
cattacatttcatca

SEQ ID NO: 343975 - DNA, 15 bp, Homo sapiens
ccattacatttcatc

SEQ ID NO: 343976 - DNA, 15 bp, Homo sapiens
gccattacatttcat

SEQ ID NO: 343977 - DNA, 15 bp, Homo sapiens
agccattacatttca

SEQ ID NO: 343978 - DNA, 15 bp, Homo sapiens
aagccattacatttc

SEQ ID NO: 343979 - DNA, 15 bp, Homo sapiens
caagccattacattt

SEQ ID NO: 343980 - DNA, 15 bp, Homo sapiens
ccaagccattacatt

SEQ ID NO: 343981 - DNA, 15 bp, Homo sapiens
accaagccattacat

SEQ ID NO: 343982 - DNA, 15 bp, Homo sapiens
aaccaagccattaca

SEQ ID NO: 343983 - DNA, 15 bp, Homo sapiens
taaccaagccattac

SEQ ID NO: 343984 - DNA, 15 bp, Homo sapiens
ttaaccaagccatta

SEQ ID NO: 343985 - DNA, 15 bp, Homo sapiens
cttaaccaagccatt

SEQ ID NO: 343986 - DNA, 15 bp, Homo sapiens
acttaaccaagccat

SEQ ID NO: 343987 - DNA, 15 bp, Homo sapiens
tacttaaccaagcca

SEQ ID NO: 343988 - DNA, 15 bp, Homo sapiens
atacttaaccaagcc

SEQ ID NO: 343989 - DNA, 15 bp, Homo sapiens
aatacttaaccaagc

SEQ ID NO: 343990 - DNA, 15 bp, Homo sapiens
aaatacttaaccaag

SEQ ID NO: 343991 - DNA, 15 bp, Homo sapiens
taaatacttaaccaa

SEQ ID NO: 343992 - DNA, 15 bp, Homo sapiens
ctaaatacttaacca

SEQ ID NO: 343993 - DNA, 15 bp, Homo sapiens
actaaatacttaacc

SEQ ID NO: 343994 - DNA, 15 bp, Homo sapiens
cactaaatacttaac

SEQ ID NO: 343995 - DNA, 15 bp, Homo sapiens
gcactaaatacttaa

SEQ ID NO: 343996 - DNA, 15 bp, Homo sapiens
tgcactaaatactta

SEQ ID NO: 343997 - DNA, 15 bp, Homo sapiens
atgcactaaatactt

SEQ ID NO: 343998 - DNA, 15 bp, Homo sapiens
catgcactaaatact

SEQ ID NO: 343999 - DNA, 15 bp, Homo sapiens
ccatgcactaaatac

SEQ ID NO: 344000 - DNA, 15 bp, Homo sapiens
cccatgcactaaata

SEQ ID NO: 344001 - DNA, 15 bp, Homo sapiens
acccatgcactaaat

SEQ ID NO: 344002 - DNA, 15 bp, Homo sapiens
gacccatgcactaaa

SEQ ID NO: 344003 - DNA, 15 bp, Homo sapiens
agacccatgcactaa

SEQ ID NO: 344004 - DNA, 15 bp, Homo sapiens
aagacccatgcacta

SEQ ID NO: 344005 - DNA, 15 bp, Homo sapiens
aaagacccatgcact

SEQ ID NO: 344006 - DNA, 15 bp, Homo sapiens
aaaagacccatgcac

SEQ ID NO: 344007 - DNA, 15 bp, Homo sapiens
aaaaagacccatgca

SEQ ID NO: 344008 - DNA, 15 bp, Homo sapiens
aaaaaagacccatgc

SEQ ID NO: 344009 - DNA, 15 bp, Homo sapiens
caaaaaagacccatg

SEQ ID NO: 344010 - DNA, 15 bp, Homo sapiens
ccaaaaaagacccat

SEQ ID NO: 344011 - DNA, 15 bp, Homo sapiens
cccaaaaaagaccca

SEQ ID NO: 344012 - DNA, 15 bp, Homo sapiens
tcccaaaaaagaccc

SEQ ID NO: 344013 - DNA, 15 bp, Homo sapiens
ttcccaaaaaagacc

SEQ ID NO: 344014 - DNA, 15 bp, Homo sapiens
attcccaaaaaagac

SEQ ID NO: 344015 - DNA, 15 bp, Homo sapiens
aattcccaaaaaaga

SEQ ID NO: 344016 - DNA, 15 bp, Homo sapiens
aaattcccaaaaaag

SEQ ID NO: 344017 - DNA, 15 bp, Homo sapiens
caaattcccaaaaaa

SEQ ID NO: 344018 - DNA, 15 bp, Homo sapiens
ccaaattcccaaaaa

SEQ ID NO: 344019 - DNA, 15 bp, Homo sapiens
tccaaattcccaaaa

SEQ ID NO: 344020 - DNA, 15 bp, Homo sapiens
ctccaaattcccaaa

SEQ ID NO: 344021 - DNA, 15 bp, Homo sapiens
gctccaaattcccaa

SEQ ID NO: 344022 - DNA, 15 bp, Homo sapiens
agctccaaattccca

SEQ ID NO: 344023 - DNA, 15 bp, Homo sapiens
gagctccaaattccc

SEQ ID NO: 344024 - DNA, 15 bp, Homo sapiens
tgagctccaaattcc

SEQ ID NO: 344025 - DNA, 15 bp, Homo sapiens
ttgagctccaaattc

SEQ ID NO: 344026 - DNA, 15 bp, Homo sapiens
cttgagctccaaatt

SEQ ID NO: 344027 - DNA, 15 bp, Homo sapiens
gcttgagctccaaat

SEQ ID NO: 344028 - DNA, 15 bp, Homo sapiens
ggcttgagctccaaa

SEQ ID NO: 344029 - DNA, 15 bp, Homo sapiens
gggcttgagctccaa

SEQ ID NO: 344030 - DNA, 15 bp, Homo sapiens
agggcttgagctcca

SEQ ID NO: 344031 - DNA, 15 bp, Homo sapiens
aagggcttgagctcc

SEQ ID NO: 344032 - DNA, 15 bp, Homo sapiens
caagggcttgagctc

SEQ ID NO: 344033 - DNA, 15 bp, Homo sapiens
acaagggcttgagct

SEQ ID NO: 344034 - DNA, 15 bp, Homo sapiens
aacaagggcttgagc

SEQ ID NO: 344035 - DNA, 15 bp, Homo sapiens
caacaagggcttgag

SEQ ID NO: 344036 - DNA, 15 bp, Homo sapiens
ccaacaagggcttga

SEQ ID NO: 344037 - DNA, 15 bp, Homo sapiens
tccaacaagggcttg

SEQ ID NO: 344038 - DNA, 15 bp, Homo sapiens
atccaacaagggctt

SEQ ID NO: 344039 - DNA, 15 bp, Homo sapiens
aatccaacaagggct

SEQ ID NO: 344040 - DNA, 15 bp, Homo sapiens
aaatccaacaagggc

SEQ ID NO: 344041 - DNA, 15 bp, Homo sapiens
aaaatccaacaaggg

SEQ ID NO: 344042 - DNA, 15 bp, Homo sapiens
aaaaatccaacaagg

SEQ ID NO: 344043 - DNA, 15 bp, Homo sapiens
caaaaatccaacaag

SEQ ID NO: 344044 - DNA, 15 bp, Homo sapiens
gcaaaaatccaacaa

SEQ ID NO: 344045 - DNA, 15 bp, Homo sapiens
tgcaaaaatccaaca

SEQ ID NO: 344046 - DNA, 15 bp, Homo sapiens
atgcaaaaatccaac

SEQ ID NO: 344047 - DNA, 15 bp, Homo sapiens
tatgcaaaaatccaa

SEQ ID NO: 344048 - DNA, 15 bp, Homo sapiens
ttatgcaaaaatcca

SEQ ID NO: 344049 - DNA, 15 bp, Homo sapiens
attatgcaaaaatcc

SEQ ID NO: 344050 - DNA, 15 bp, Homo sapiens
cattatgcaaaaatc

SEQ ID NO: 344051 - DNA, 15 bp, Homo sapiens
acattatgcaaaaat

SEQ ID NO: 344052 - DNA, 15 bp, Homo sapiens
tacattatgcaaaaa

SEQ ID NO: 344053 - DNA, 15 bp, Homo sapiens
atacattatgcaaaa

SEQ ID NO: 344054 - DNA, 15 bp, Homo sapiens
gatacattatgcaaa

SEQ ID NO: 344055 - DNA, 15 bp, Homo sapiens
agatacattatgcaa

SEQ ID NO: 344056 - DNA, 15 bp, Homo sapiens
cagatacattatgca

SEQ ID NO: 344057 - DNA, 15 bp, Homo sapiens
acagatacattatgc

SEQ ID NO: 344058 - DNA, 15 bp, Homo sapiens
aacagatacattatg

SEQ ID NO: 344059 - DNA, 15 bp, Homo sapiens
caacagatacattat

SEQ ID NO: 344060 - DNA, 15 bp, Homo sapiens
acaacagatacatta

SEQ ID NO: 344061 - DNA, 15 bp, Homo sapiens
cacaacagatacatt

SEQ ID NO: 344062 - DNA, 15 bp, Homo sapiens
ccacaacagatacat

SEQ ID NO: 344063 - DNA, 15 bp, Homo sapiens
accacaacagataca

SEQ ID NO: 344064 - DNA, 15 bp, Homo sapiens
aaccacaacagatac

SEQ ID NO: 344065 - DNA, 15 bp, Homo sapiens
aaaccacaacagata

SEQ ID NO: 344066 - DNA, 15 bp, Homo sapiens
aaaaccacaacagat

SEQ ID NO: 344067 - DNA, 15 bp, Homo sapiens
taaaaccacaacaga

SEQ ID NO: 344068 - DNA, 15 bp, Homo sapiens
ataaaaccacaacag

SEQ ID NO: 344069 - DNA, 15 bp, Homo sapiens
aataaaaccacaaca

SEQ ID NO: 344070 - DNA, 15 bp, Homo sapiens
taataaaaccacaac

SEQ ID NO: 344071 - DNA, 15 bp, Homo sapiens
ctaataaaaccacaa

SEQ ID NO: 344072 - DNA, 15 bp, Homo sapiens
gctaataaaaccaca

SEQ ID NO: 344073 - DNA, 15 bp, Homo sapiens
agctaataaaaccac

SEQ ID NO: 344074 - DNA, 15 bp, Homo sapiens
aagctaataaaacca

SEQ ID NO: 344075 - DNA, 15 bp, Homo sapiens
taagctaataaaacc

SEQ ID NO: 344076 - DNA, 15 bp, Homo sapiens
gtaagctaataaaac

SEQ ID NO: 344077 - DNA, 15 bp, Homo sapiens
agtaagctaataaaa

SEQ ID NO: 344078 - DNA, 15 bp, Homo sapiens
aagtaagctaataaa

SEQ ID NO: 344079 - DNA, 15 bp, Homo sapiens
gaagtaagctaataa

SEQ ID NO: 344080 - DNA, 15 bp, Homo sapiens
ggaagtaagctaata

SEQ ID NO: 344081 - DNA, 15 bp, Homo sapiens
aggaagtaagctaat

SEQ ID NO: 344082 - DNA, 15 bp, Homo sapiens
gaggaagtaagctaa

SEQ ID NO: 344083 - DNA, 15 bp, Homo sapiens
ggaggaagtaagcta

SEQ ID NO: 344084 - DNA, 15 bp, Homo sapiens
aggaggaagtaagct

SEQ ID NO: 344085 - DNA, 15 bp, Homo sapiens
gaggaggaagtaagc

SEQ ID NO: 344086 - DNA, 15 bp, Homo sapiens
ggaggaggaagtaag

SEQ ID NO: 344087 - DNA, 15 bp, Homo sapiens
gggaggaggaagtaa

SEQ ID NO: 344088 - DNA, 15 bp, Homo sapiens
agggaggaggaagta

SEQ ID NO: 344089 - DNA, 15 bp, Homo sapiens
aagggaggaggaagt

SEQ ID NO: 344090 - DNA, 15 bp, Homo sapiens
aaagggaggaggaag

SEQ ID NO: 344091 - DNA, 15 bp, Homo sapiens
aaaagggaggaggaa

SEQ ID NO: 344092 - DNA, 15 bp, Homo sapiens
aaaaagggaggagga

SEQ ID NO: 344093 - DNA, 15 bp, Homo sapiens
gaaaaagggaggagg

SEQ ID NO: 344094 - DNA, 15 bp, Homo sapiens
agaaaaagggaggag

SEQ ID NO: 344095 - DNA, 15 bp, Homo sapiens
tagaaaaagggagga

SEQ ID NO: 344096 - DNA, 15 bp, Homo sapiens
ttagaaaaagggagg

SEQ ID NO: 344097 - DNA, 15 bp, Homo sapiens
gttagaaaaagggag

SEQ ID NO: 344098 - DNA, 15 bp, Homo sapiens
agttagaaaaaggga

SEQ ID NO: 344099 - DNA, 15 bp, Homo sapiens
gagttagaaaaaggg

SEQ ID NO: 344100 - DNA, 15 bp, Homo sapiens
agagttagaaaaagg

SEQ ID NO: 344101 - DNA, 15 bp, Homo sapiens
aagagttagaaaaag

SEQ ID NO: 344102 - DNA, 15 bp, Homo sapiens
taagagttagaaaaa

SEQ ID NO: 344103 - DNA, 15 bp, Homo sapiens
ataagagttagaaaa

SEQ ID NO: 344104 - DNA, 15 bp, Homo sapiens
aataagagttagaaa

SEQ ID NO: 344105 - DNA, 15 bp, Homo sapiens
aaataagagttagaa

SEQ ID NO: 344106 - DNA, 15 bp, Homo sapiens
aaaataagagttaga

SEQ ID NO: 344107 - DNA, 15 bp, Homo sapiens
aaaaataagagttag

SEQ ID NO: 344108 - DNA, 15 bp, Homo sapiens
gaaaaataagagtta

SEQ ID NO: 344109 - DNA, 15 bp, Homo sapiens
tgaaaaataagagtt

SEQ ID NO: 344110 - DNA, 15 bp, Homo sapiens
gtgaaaaataagagt

SEQ ID NO: 344111 - DNA, 15 bp, Homo sapiens
ggtgaaaaataagag

SEQ ID NO: 344112 - DNA, 15 bp, Homo sapiens
gggtgaaaaataaga

SEQ ID NO: 344113 - DNA, 15 bp, Homo sapiens
agggtgaaaaataag

SEQ ID NO: 344114 - DNA, 15 bp, Homo sapiens
tagggtgaaaaataa

SEQ ID NO: 344115 - DNA, 15 bp, Homo sapiens
atagggtgaaaaata

SEQ ID NO: 344116 - DNA, 15 bp, Homo sapiens
aatagggtgaaaaat

SEQ ID NO: 344117 - DNA, 15 bp, Homo sapiens
aaatagggtgaaaaa

SEQ ID NO: 344118 - DNA, 15 bp, Homo sapiens
aaaatagggtgaaaa

SEQ ID NO: 344119 - DNA, 15 bp, Homo sapiens
taaaatagggtgaaa

SEQ ID NO: 344120 - DNA, 15 bp, Homo sapiens
ctaaaatagggtgaa

SEQ ID NO: 344121 - DNA, 15 bp, Homo sapiens
cctaaaatagggtga

SEQ ID NO: 344122 - DNA, 15 bp, Homo sapiens
acctaaaatagggtg

SEQ ID NO: 344123 - DNA, 15 bp, Homo sapiens
aacctaaaatagggt

SEQ ID NO: 344124 - DNA, 15 bp, Homo sapiens
gaacctaaaataggg

SEQ ID NO: 344125 - DNA, 15 bp, Homo sapiens
ggaacctaaaatagg

SEQ ID NO: 344126 - DNA, 15 bp, Homo sapiens
tggaacctaaaatag

SEQ ID NO: 344127 - DNA, 15 bp, Homo sapiens
atggaacctaaaata

SEQ ID NO: 344128 - DNA, 15 bp, Homo sapiens
tatggaacctaaaat

SEQ ID NO: 344129 - DNA, 15 bp, Homo sapiens
gtatggaacctaaaa

SEQ ID NO: 344130 - DNA, 15 bp, Homo sapiens
ggtatggaacctaaa

SEQ ID NO: 344131 - DNA, 15 bp, Homo sapiens
gggtatggaacctaa

SEQ ID NO: 344132 - DNA, 15 bp, Homo sapiens
ggggtatggaaccta

SEQ ID NO: 344133 - DNA, 15 bp, Homo sapiens
tggggtatggaacct

SEQ ID NO: 344134 - DNA, 15 bp, Homo sapiens
atggggtatggaacc

SEQ ID NO: 344135 - DNA, 15 bp, Homo sapiens
catggggtatggaac

SEQ ID NO: 344136 - DNA, 15 bp, Homo sapiens
tcatggggtatggaa

SEQ ID NO: 344137 - DNA, 15 bp, Homo sapiens
ttcatggggtatgga

SEQ ID NO: 344138 - DNA, 15 bp, Homo sapiens
cttcatggggtatgg

SEQ ID NO: 344139 - DNA, 15 bp, Homo sapiens
acttcatggggtatg

SEQ ID NO: 344140 - DNA, 15 bp, Homo sapiens
cacttcatggggtat

SEQ ID NO: 344141 - DNA, 15 bp, Homo sapiens
gcacttcatggggta

SEQ ID NO: 344142 - DNA, 15 bp, Homo sapiens
ggcacttcatggggt

SEQ ID NO: 344143 - DNA, 15 bp, Homo sapiens
aggcacttcatgggg

SEQ ID NO: 344144 - DNA, 15 bp, Homo sapiens
gaggcacttcatggg

SEQ ID NO: 344145 - DNA, 15 bp, Homo sapiens
tgaggcacttcatgg

SEQ ID NO: 344146 - DNA, 15 bp, Homo sapiens
ctgaggcacttcatg

SEQ ID NO: 344147 - DNA, 15 bp, Homo sapiens
tctgaggcacttcat

SEQ ID NO: 344148 - DNA, 15 bp, Homo sapiens
atctgaggcacttca

SEQ ID NO: 344149 - DNA, 15 bp, Homo sapiens
tatctgaggcacttc

SEQ ID NO: 344150 - DNA, 15 bp, Homo sapiens
atatctgaggcactt

SEQ ID NO: 344151 - DNA, 15 bp, Homo sapiens
aatatctgaggcact

SEQ ID NO: 344152 - DNA, 15 bp, Homo sapiens
taatatctgaggcac

SEQ ID NO: 344153 - DNA, 15 bp, Homo sapiens
ttaatatctgaggca

SEQ ID NO: 344154 - DNA, 15 bp, Homo sapiens
attaatatctgaggc

SEQ ID NO: 344155 - DNA, 15 bp, Homo sapiens
taattaatatctgag

SEQ ID NO: 344156 - DNA, 15 bp, Homo sapiens
ttaattaatatctga

SEQ ID NO: 344157 - DNA, 15 bp, Homo sapiens
attaattaatatctg

SEQ ID NO: 344158 - DNA, 15 bp, Homo sapiens
tattaattaatatct

SEQ ID NO: 344159 - DNA, 15 bp, Homo sapiens
ctattaattaatatc

SEQ ID NO: 344160 - DNA, 15 bp, Homo sapiens
tctattaattaatat

SEQ ID NO: 344161 - DNA, 15 bp, Homo sapiens
ctctattaattaata

SEQ ID NO: 344162 - DNA, 15 bp, Homo sapiens
tctctattaattaat

SEQ ID NO: 344163 - DNA, 15 bp, Homo sapiens
ttctctattaattaa

SEQ ID NO: 344164 - DNA, 15 bp, Homo sapiens
gttctctattaatta

SEQ ID NO: 344165 - DNA, 15 bp, Homo sapiens
ggttctctattaatt

SEQ ID NO: 344166 - DNA, 15 bp, Homo sapiens
aggttctctattaat

SEQ ID NO: 344167 - DNA, 15 bp, Homo sapiens
aaggttctctattaa

SEQ ID NO: 344168 - DNA, 15 bp, Homo sapiens
aaaggttctctatta

SEQ ID NO: 344169 - DNA, 15 bp, Homo sapiens
caaaggttctctatt

SEQ ID NO: 344170 - DNA, 15 bp, Homo sapiens
gcaaaggttctctat

SEQ ID NO: 344171 - DNA, 15 bp, Homo sapiens
ggcaaaggttctcta

SEQ ID NO: 344172 - DNA, 15 bp, Homo sapiens
aggcaaaggttctct

SEQ ID NO: 344173 - DNA, 15 bp, Homo sapiens
gaggcaaaggttctc

SEQ ID NO: 344174 - DNA, 15 bp, Homo sapiens
tgaggcaaaggttct

SEQ ID NO: 344175 - DNA, 15 bp, Homo sapiens
atgaggcaaaggttc

SEQ ID NO: 344176 - DNA, 15 bp, Homo sapiens
gatgaggcaaaggtt

SEQ ID NO: 344177 - DNA, 15 bp, Homo sapiens
agatgaggcaaaggt

SEQ ID NO: 344178 - DNA, 15 bp, Homo sapiens
cagatgaggcaaagg

SEQ ID NO: 344179 - DNA, 15 bp, Homo sapiens
gcagatgaggcaaag

SEQ ID NO: 344180 - DNA, 15 bp, Homo sapiens
tgcagatgaggcaaa

SEQ ID NO: 344181 - DNA, 15 bp, Homo sapiens
atgcagatgaggcaa

SEQ ID NO: 344182 - DNA, 15 bp, Homo sapiens
aatgcagatgaggca

SEQ ID NO: 344183 - DNA, 15 bp, Homo sapiens
aaatgcagatgaggc

SEQ ID NO: 344184 - DNA, 15 bp, Homo sapiens
aaaatgcagatgagg

SEQ ID NO: 344185 - DNA, 15 bp, Homo sapiens
caaaatgcagatgag

SEQ ID NO: 344186 - DNA, 15 bp, Homo sapiens
tcaaaatgcagatga

SEQ ID NO: 344187 - DNA, 15 bp, Homo sapiens
atcaaaatgcagatg

SEQ ID NO: 344188 - DNA, 15 bp, Homo sapiens
catcaaaatgcagat

SEQ ID NO: 344189 - DNA, 15 bp, Homo sapiens
acatcaaaatgcaga

SEQ ID NO: 344190 - DNA, 15 bp, Homo sapiens
tacatcaaaatgcag

SEQ ID NO: 344191 - DNA, 15 bp, Homo sapiens
ctacatcaaaatgca

SEQ ID NO: 344192 - DNA, 15 bp, Homo sapiens
tctacatcaaaatgc

SEQ ID NO: 344193 - DNA, 15 bp, Homo sapiens
ctctacatcaaaatg

SEQ ID NO: 344194 - DNA, 15 bp, Homo sapiens
gctctacatcaaaat

SEQ ID NO: 344195 - DNA, 15 bp, Homo sapiens
agctctacatcaaaa

SEQ ID NO: 344196 - DNA, 15 bp, Homo sapiens
aagctctacatcaaa

SEQ ID NO: 344197 - DNA, 15 bp, Homo sapiens
gaagctctacatcaa

SEQ ID NO: 344198 - DNA, 15 bp, Homo sapiens
agaagctctacatca

SEQ ID NO: 344199 - DNA, 15 bp, Homo sapiens
aagaagctctacatc

SEQ ID NO: 344200 - DNA, 15 bp, Homo sapiens
caagaagctctacat

SEQ ID NO: 344201 - DNA, 15 bp, Homo sapiens
ccaagaagctctaca

SEQ ID NO: 344202 - DNA, 15 bp, Homo sapiens
tccaagaagctctac

SEQ ID NO: 344203 - DNA, 15 bp, Homo sapiens
ctccaagaagctcta

SEQ ID NO: 344204 - DNA, 15 bp, Homo sapiens
tctccaagaagctct

SEQ ID NO: 344205 - DNA, 15 bp, Homo sapiens
gtctccaagaagctc

SEQ ID NO: 344206 - DNA, 15 bp, Homo sapiens
agtctccaagaagct

SEQ ID NO: 344207 - DNA, 15 bp, Homo sapiens
cagtctccaagaagc

SEQ ID NO: 344208 - DNA, 15 bp, Homo sapiens
acagtctccaagaag

SEQ ID NO: 344209 - DNA, 15 bp, Homo sapiens
cacagtctccaagaa

SEQ ID NO: 344210 - DNA, 15 bp, Homo sapiens
tcacagtctccaaga

SEQ ID NO: 344211 - DNA, 15 bp, Homo sapiens
atcacagtctccaag

SEQ ID NO: 344212 - DNA, 15 bp, Homo sapiens
catcacagtctccaa

SEQ ID NO: 344213 - DNA, 15 bp, Homo sapiens
acatcacagtctcca

SEQ ID NO: 344214 - DNA, 15 bp, Homo sapiens
gacatcacagtctcc

SEQ ID NO: 344215 - DNA, 15 bp, Homo sapiens
tgacatcacagtctc

SEQ ID NO: 344216 - DNA, 15 bp, Homo sapiens
atgacatcacagtct

SEQ ID NO: 344217 - DNA, 15 bp, Homo sapiens
tatgacatcacagtc

SEQ ID NO: 344218 - DNA, 15 bp, Homo sapiens
ttatgacatcacagt

SEQ ID NO: 344219 - DNA, 15 bp, Homo sapiens
attatgacatcacag

SEQ ID NO: 344220 - DNA, 15 bp, Homo sapiens
aattatgacatcaca

SEQ ID NO: 344221 - DNA, 15 bp, Homo sapiens
taattatgacatcac

SEQ ID NO: 344222 - DNA, 15 bp, Homo sapiens
ttaattatgacatca

SEQ ID NO: 344223 - DNA, 15 bp, Homo sapiens
attaattatgacatc

SEQ ID NO: 344224 - DNA, 15 bp, Homo sapiens
cattaattatgacat

SEQ ID NO: 344225 - DNA, 15 bp, Homo sapiens
tcattaattatgaca

SEQ ID NO: 344226 - DNA, 15 bp, Homo sapiens
ttcattaattatgac

SEQ ID NO: 344227 - DNA, 15 bp, Homo sapiens
attcattaattatga

SEQ ID NO: 344228 - DNA, 15 bp, Homo sapiens
aattcattaattatg

SEQ ID NO: 344229 - DNA, 15 bp, Homo sapiens
caattcattaattat

SEQ ID NO: 344230 - DNA, 15 bp, Homo sapiens
acaattcattaatta

SEQ ID NO: 344231 - DNA, 15 bp, Homo sapiens
cacaattcattaatt

SEQ ID NO: 344232 - DNA, 15 bp, Homo sapiens
acacaattcattaat

SEQ ID NO: 344233 - DNA, 15 bp, Homo sapiens
gacacaattcattaa

SEQ ID NO: 344234 - DNA, 15 bp, Homo sapiens
tgacacaattcatta

SEQ ID NO: 344235 - DNA, 15 bp, Homo sapiens
atgacacaattcatt

SEQ ID NO: 344236 - DNA, 15 bp, Homo sapiens
tatgacacaattcat

SEQ ID NO: 344237 - DNA, 15 bp, Homo sapiens
ctatgacacaattca

SEQ ID NO: 344238 - DNA, 15 bp, Homo sapiens
cctatgacacaattc

SEQ ID NO: 344239 - DNA, 15 bp, Homo sapiens
acctatgacacaatt

SEQ ID NO: 344240 - DNA, 15 bp, Homo sapiens
aacctatgacacaat

SEQ ID NO: 344241 - DNA, 15 bp, Homo sapiens
taacctatgacacaa

SEQ ID NO: 344242 - DNA, 15 bp, Homo sapiens
ctaacctatgacaca

SEQ ID NO: 344243 - DNA, 15 bp, Homo sapiens
cctaacctatgacac

SEQ ID NO: 344244 - DNA, 15 bp, Homo sapiens
acctaacctatgaca

SEQ ID NO: 344245 - DNA, 15 bp, Homo sapiens
cacctaacctatgac

SEQ ID NO: 344246 - DNA, 15 bp, Homo sapiens
ccacctaacctatga

SEQ ID NO: 344247 - DNA, 15 bp, Homo sapiens
accacctaacctatg

SEQ ID NO: 344248 - DNA, 15 bp, Homo sapiens
caccacctaacctat

SEQ ID NO: 344249 - DNA, 15 bp, Homo sapiens
tcaccacctaaccta

SEQ ID NO: 344250 - DNA, 15 bp, Homo sapiens
ttcaccacctaacct

SEQ ID NO: 344251 - DNA, 15 bp, Homo sapiens
attcaccacctaacc

SEQ ID NO: 344252 - DNA, 15 bp, Homo sapiens
tattcaccacctaac

SEQ ID NO: 344253 - DNA, 15 bp, Homo sapiens
atattcaccacctaa

SEQ ID NO: 344254 - DNA, 15 bp, Homo sapiens
catattcaccaccta

SEQ ID NO: 344255 - DNA, 15 bp, Homo sapiens
gcatattcaccacct

SEQ ID NO: 344256 - DNA, 15 bp, Homo sapiens
ggcatattcaccacc

SEQ ID NO: 344257 - DNA, 15 bp, Homo sapiens
tggcatattcaccac

SEQ ID NO: 344258 - DNA, 15 bp, Homo sapiens
ttggcatattcacca

SEQ ID NO: 344259 - DNA, 15 bp, Homo sapiens
tttggcatattcacc

SEQ ID NO: 344260 - DNA, 15 bp, Homo sapiens
gtttggcatattcac

SEQ ID NO: 344261 - DNA, 15 bp, Homo sapiens
agtttggcatattca

SEQ ID NO: 344262 - DNA, 15 bp, Homo sapiens
aagtttggcatattc

SEQ ID NO: 344263 - DNA, 15 bp, Homo sapiens
aaagtttggcatatt

SEQ ID NO: 344264 - DNA, 15 bp, Homo sapiens
caaagtttggcatat

SEQ ID NO: 344265 - DNA, 15 bp, Homo sapiens
gcaaagtttggcata

SEQ ID NO: 344266 - DNA, 15 bp, Homo sapiens
agcaaagtttggcat

SEQ ID NO: 344267 - DNA, 15 bp, Homo sapiens
cagcaaagtttggca

SEQ ID NO: 344268 - DNA, 15 bp, Homo sapiens
acagcaaagtttggc

SEQ ID NO: 344269 - DNA, 15 bp, Homo sapiens
tacagcaaagtttgg

SEQ ID NO: 344270 - DNA, 15 bp, Homo sapiens
ttacagcaaagtttg

SEQ ID NO: 344271 - DNA, 15 bp, Homo sapiens
gttacagcaaagttt

SEQ ID NO: 344272 - DNA, 15 bp, Homo sapiens
ggttacagcaaagtt

SEQ ID NO: 344273 - DNA, 15 bp, Homo sapiens
gggttacagcaaagt

SEQ ID NO: 344274 - DNA, 15 bp, Homo sapiens
agggttacagcaaag

SEQ ID NO: 344275 - DNA, 15 bp, Homo sapiens
cagggttacagcaaa

SEQ ID NO: 344276 - DNA, 15 bp, Homo sapiens
acagggttacagcaa

SEQ ID NO: 344277 - DNA, 15 bp, Homo sapiens
tacagggttacagca

SEQ ID NO: 344278 - DNA, 15 bp, Homo sapiens
ttacagggttacagc

SEQ ID NO: 344279 - DNA, 15 bp, Homo sapiens
tttacagggttacag

SEQ ID NO: 344280 - DNA, 15 bp, Homo sapiens
ctttacagggttaca

SEQ ID NO: 344281 - DNA, 15 bp, Homo sapiens
gctttacagggttac

SEQ ID NO: 344282 - DNA, 15 bp, Homo sapiens
agctttacagggtta

SEQ ID NO: 344283 - DNA, 15 bp, Homo sapiens
aagctttacagggtt

SEQ ID NO: 344284 - DNA, 15 bp, Homo sapiens
aaagctttacagggt

SEQ ID NO: 344285 - DNA, 15 bp, Homo sapiens
gaaagctttacaggg

SEQ ID NO: 344286 - DNA, 15 bp, Homo sapiens
tgaaagctttacagg

SEQ ID NO: 344287 - DNA, 15 bp, Homo sapiens
ctgaaagctttacag

SEQ ID NO: 344288 - DNA, 15 bp, Homo sapiens
tctgaaagctttaca

SEQ ID NO: 344289 - DNA, 15 bp, Homo sapiens
ttctgaaagctttac

SEQ ID NO: 344290 - DNA, 15 bp, Homo sapiens
tttctgaaagcttta

SEQ ID NO: 344291 - DNA, 15 bp, Homo sapiens
atttctgaaagcttt

SEQ ID NO: 344292 - DNA, 15 bp, Homo sapiens
aatttctgaaagctt

SEQ ID NO: 344293 - DNA, 15 bp, Homo sapiens
taatttctgaaagct

SEQ ID NO: 344294 - DNA, 15 bp, Homo sapiens
gtaatttctgaaagc

SEQ ID NO: 344295 - DNA, 15 bp, Homo sapiens
agtaatttctgaaag

SEQ ID NO: 344296 - DNA, 15 bp, Homo sapiens
cagtaatttctgaaa

SEQ ID NO: 344297 - DNA, 15 bp, Homo sapiens
tcagtaatttctgaa

SEQ ID NO: 344298 - DNA, 15 bp, Homo sapiens
ttcagtaatttctga

SEQ ID NO: 344299 - DNA, 15 bp, Homo sapiens
tttcagtaatttctg

SEQ ID NO: 344300 - DNA, 15 bp, Homo sapiens
ttttcagtaatttct

SEQ ID NO: 344301 - DNA, 15 bp, Homo sapiens
tttttcagtaatttc

SEQ ID NO: 344302 - DNA, 15 bp, Homo sapiens
gtttttcagtaattt

SEQ ID NO: 344303 - DNA, 15 bp, Homo sapiens
ggtttttcagtaatt

SEQ ID NO: 344304 - DNA, 15 bp, Homo sapiens
aggtttttcagtaat

SEQ ID NO: 344305 - DNA, 15 bp, Homo sapiens
gaggtttttcagtaa

SEQ ID NO: 344306 - DNA, 15 bp, Homo sapiens
ggaggtttttcagta

SEQ ID NO: 344307 - DNA, 15 bp, Homo sapiens
tggaggtttttcagt

SEQ ID NO: 344308 - DNA, 15 bp, Homo sapiens
gtggaggtttttcag

SEQ ID NO: 344309 - DNA, 15 bp, Homo sapiens
cgtggaggtttttca

SEQ ID NO: 344310 - DNA, 15 bp, Homo sapiens
tcgtggaggtttttc

SEQ ID NO: 344311 - DNA, 15 bp, Homo sapiens
ttcgtggaggttttt

SEQ ID NO: 344312 - DNA, 15 bp, Homo sapiens
gttcgtggaggtttt

SEQ ID NO: 344313 - DNA, 15 bp, Homo sapiens
tgttcgtggaggttt

SEQ ID NO: 344314 - DNA, 15 bp, Homo sapiens
gtgttcgtggaggtt

SEQ ID NO: 344315 - DNA, 15 bp, Homo sapiens
tgtgttcgtggaggt

SEQ ID NO: 344316 - DNA, 15 bp, Homo sapiens
ttgtgttcgtggagg

SEQ ID NO: 344317 - DNA, 15 bp, Homo sapiens
tttgtgttcgtggag

SEQ ID NO: 344318 - DNA, 15 bp, Homo sapiens
ttttgtgttcgtgga

SEQ ID NO: 344319 - DNA, 15 bp, Homo sapiens
tttttgtgttcgtgg

SEQ ID NO: 344320 - DNA, 15 bp, Homo sapiens
ctttttgtgttcgtg

SEQ ID NO: 344321 - DNA, 15 bp, Homo sapiens
tctttttgtgttcgt

SEQ ID NO: 344322 - DNA, 15 bp, Homo sapiens
ttctttttgtgttcg

SEQ ID NO: 344323 - DNA, 15 bp, Homo sapiens
attctttttgtgttc

SEQ ID NO: 344324 - DNA, 15 bp, Homo sapiens
aattctttttgtgtt

SEQ ID NO: 344325 - DNA, 15 bp, Homo sapiens
caattctttttgtgt

SEQ ID NO: 344326 - DNA, 15 bp, Homo sapiens
ccaattctttttgtg

SEQ ID NO: 344327 - DNA, 15 bp, Homo sapiens
gccaattctttttgt

SEQ ID NO: 344328 - DNA, 15 bp, Homo sapiens
agccaattctttttg

SEQ ID NO: 344329 - DNA, 15 bp, Homo sapiens
aagccaattcttttt

SEQ ID NO: 344330 - DNA, 15 bp, Homo sapiens
taagccaattctttt

SEQ ID NO: 344331 - DNA, 15 bp, Homo sapiens
ataagccaattcttt

SEQ ID NO: 344332 - DNA, 15 bp, Homo sapiens
aataagccaattctt

SEQ ID NO: 344333 - DNA, 15 bp, Homo sapiens
aaataagccaattct

SEQ ID NO: 344334 - DNA, 15 bp, Homo sapiens
caaataagccaattc

SEQ ID NO: 344335 - DNA, 15 bp, Homo sapiens
acaaataagccaatt

SEQ ID NO: 344336 - DNA, 15 bp, Homo sapiens
gacaaataagccaat

SEQ ID NO: 344337 - DNA, 15 bp, Homo sapiens
tgacaaataagccaa

SEQ ID NO: 344338 - DNA, 15 bp, Homo sapiens
ctgacaaataagcca

SEQ ID NO: 344339 - DNA, 15 bp, Homo sapiens
tctgacaaataagcc

SEQ ID NO: 344340 - DNA, 15 bp, Homo sapiens
ctctgacaaataagc

SEQ ID NO: 344341 - DNA, 15 bp, Homo sapiens
actctgacaaataag

SEQ ID NO: 344342 - DNA, 15 bp, Homo sapiens
aactctgacaaataa

SEQ ID NO: 344343 - DNA, 15 bp, Homo sapiens
caactctgacaaata

SEQ ID NO: 344344 - DNA, 15 bp, Homo sapiens
gcaactctgacaaat

SEQ ID NO: 344345 - DNA, 15 bp, Homo sapiens
ggcaactctgacaaa

SEQ ID NO: 344346 - DNA, 15 bp, Homo sapiens
tggcaactctgacaa

SEQ ID NO: 344347 - DNA, 15 bp, Homo sapiens
gtggcaactctgaca

SEQ ID NO: 344348 - DNA, 15 bp, Homo sapiens
ggtggcaactctgac

SEQ ID NO: 344349 - DNA, 15 bp, Homo sapiens
gggtggcaactctga

SEQ ID NO: 344350 - DNA, 15 bp, Homo sapiens
tgggtggcaactctg

SEQ ID NO: 344351 - DNA, 15 bp, Homo sapiens
gtgggtggcaactct

SEQ ID NO: 344352 - DNA, 15 bp, Homo sapiens
tgtgggtggcaactc

SEQ ID NO: 344353 - DNA, 15 bp, Homo sapiens
gtgtgggtggcaact

SEQ ID NO: 344354 - DNA, 15 bp, Homo sapiens
ggtgtgggtggcaac

SEQ ID NO: 344355 - DNA, 15 bp, Homo sapiens
aggtgtgggtggcaa

SEQ ID NO: 344356 - DNA, 15 bp, Homo sapiens
gaggtgtgggtggca

SEQ ID NO: 344357 - DNA, 15 bp, Homo sapiens
agaggtgtgggtggc

SEQ ID NO: 344358 - DNA, 15 bp, Homo sapiens
aagaggtgtgggtgg

SEQ ID NO: 344359 - DNA, 15 bp, Homo sapiens
gaagaggtgtgggtg

SEQ ID NO: 344360 - DNA, 15 bp, Homo sapiens
tgaagaggtgtgggt

SEQ ID NO: 344361 - DNA, 15 bp, Homo sapiens
atgaagaggtgtggg

SEQ ID NO: 344362 - DNA, 15 bp, Homo sapiens
catgaagaggtgtgg

SEQ ID NO: 344363 - DNA, 15 bp, Homo sapiens
acatgaagaggtgtg

SEQ ID NO: 344364 - DNA, 15 bp, Homo sapiens
aacatgaagaggtgt

SEQ ID NO: 344365 - DNA, 15 bp, Homo sapiens
aaacatgaagaggtg

SEQ ID NO: 344366 - DNA, 15 bp, Homo sapiens
gaaacatgaagaggt

SEQ ID NO: 344367 - DNA, 15 bp, Homo sapiens
tgaaacatgaagagg

SEQ ID NO: 344368 - DNA, 15 bp, Homo sapiens
ctgaaacatgaagag

SEQ ID NO: 344369 - DNA, 15 bp, Homo sapiens
tctgaaacatgaaga

SEQ ID NO: 344370 - DNA, 15 bp, Homo sapiens
ttctgaaacatgaag

SEQ ID NO: 344371 - DNA, 15 bp, Homo sapiens
cttctgaaacatgaa

SEQ ID NO: 344372 - DNA, 15 bp, Homo sapiens
tcttctgaaacatga

SEQ ID NO: 344373 - DNA, 15 bp, Homo sapiens
gtcttctgaaacatg

SEQ ID NO: 344374 - DNA, 15 bp, Homo sapiens
agtcttctgaaacat

SEQ ID NO: 344375 - DNA, 15 bp, Homo sapiens
gagtcttctgaaaca

SEQ ID NO: 344376 - DNA, 15 bp, Homo sapiens
tgagtcttctgaaac

SEQ ID NO: 344377 - DNA, 15 bp, Homo sapiens
ttgagtcttctgaaa

SEQ ID NO: 344378 - DNA, 15 bp, Homo sapiens
cttgagtcttctgaa

SEQ ID NO: 344379 - DNA, 15 bp, Homo sapiens
acttgagtcttctga

SEQ ID NO: 344380 - DNA, 15 bp, Homo sapiens
aacttgagtcttctg

SEQ ID NO: 344381 - DNA, 15 bp, Homo sapiens
gaacttgagtcttct

SEQ ID NO: 344382 - DNA, 15 bp, Homo sapiens
tgaacttgagtcttc

SEQ ID NO: 344383 - DNA, 15 bp, Homo sapiens
gtgaacttgagtctt

SEQ ID NO: 344384 - DNA, 15 bp, Homo sapiens
ggtgaacttgagtct

SEQ ID NO: 344385 - DNA, 15 bp, Homo sapiens
tggtgaacttgagtc

SEQ ID NO: 344386 - DNA, 15 bp, Homo sapiens
ctggtgaacttgagt

SEQ ID NO: 344387 - DNA, 15 bp, Homo sapiens
tctggtgaacttgag

SEQ ID NO: 344388 - DNA, 15 bp, Homo sapiens
ttctggtgaacttga

SEQ ID NO: 344389 - DNA, 15 bp, Homo sapiens
tttctggtgaacttg

SEQ ID NO: 344390 - DNA, 15 bp, Homo sapiens
ctttctggtgaactt

SEQ ID NO: 344391 - DNA, 15 bp, Homo sapiens
tctttctggtgaact

SEQ ID NO: 344392 - DNA, 15 bp, Homo sapiens
ttctttctggtgaac

SEQ ID NO: 344393 - DNA, 15 bp, Homo sapiens
gttctttctggtgaa

SEQ ID NO: 344394 - DNA, 15 bp, Homo sapiens
agttctttctggtga

SEQ ID NO: 344395 - DNA, 15 bp, Homo sapiens
aagttctttctggtg

SEQ ID NO: 344396 - DNA, 15 bp, Homo sapiens
gaagttctttctggt

SEQ ID NO: 344397 - DNA, 15 bp, Homo sapiens
tgaagttctttctgg

SEQ ID NO: 344398 - DNA, 15 bp, Homo sapiens
gtgaagttctttctg

SEQ ID NO: 344399 - DNA, 15 bp, Homo sapiens
ggtgaagttctttct

SEQ ID NO: 344400 - DNA, 15 bp, Homo sapiens
tggtgaagttctttc

SEQ ID NO: 344401 - DNA, 15 bp, Homo sapiens
gtggtgaagttcttt

SEQ ID NO: 344402 - DNA, 15 bp, Homo sapiens
ggtggtgaagttctt

SEQ ID NO: 344403 - DNA, 15 bp, Homo sapiens
tggtggtgaagttct

SEQ ID NO: 344404 - DNA, 15 bp, Homo sapiens
ctggtggtgaagttc

SEQ ID NO: 344405 - DNA, 15 bp, Homo sapiens
tctggtggtgaagtt

SEQ ID NO: 344406 - DNA, 15 bp, Homo sapiens
atctggtggtgaagt

SEQ ID NO: 344407 - DNA, 15 bp, Homo sapiens
aatctggtggtgaag

SEQ ID NO: 344408 - DNA, 15 bp, Homo sapiens
gaatctggtggtgaa

SEQ ID NO: 344409 - DNA, 15 bp, Homo sapiens
agaatctggtggtga

SEQ ID NO: 344410 - DNA, 15 bp, Homo sapiens
aagaatctggtggtg

SEQ ID NO: 344411 - DNA, 15 bp, Homo sapiens
gaagaatctggtggt

SEQ ID NO: 344412 - DNA, 15 bp, Homo sapiens
tgaagaatctggtgg

SEQ ID NO: 344413 - DNA, 15 bp, Homo sapiens
ctgaagaatctggtg

SEQ ID NO: 344414 - DNA, 15 bp, Homo sapiens
actgaagaatctggt

SEQ ID NO: 344415 - DNA, 15 bp, Homo sapiens
cactgaagaatctgg

SEQ ID NO: 344416 - DNA, 15 bp, Homo sapiens
tcactgaagaatctg

SEQ ID NO: 344417 - DNA, 15 bp, Homo sapiens
atcactgaagaatct

SEQ ID NO: 344418 - DNA, 15 bp, Homo sapiens
aatcactgaagaatc

SEQ ID NO: 344419 - DNA, 15 bp, Homo sapiens
caatcactgaagaat

SEQ ID NO: 344420 - DNA, 15 bp, Homo sapiens
acaatcactgaagaa

SEQ ID NO: 344421 - DNA, 15 bp, Homo sapiens
gacaatcactgaaga

SEQ ID NO: 344422 - DNA, 15 bp, Homo sapiens
tgacaatcactgaag

SEQ ID NO: 344423 - DNA, 15 bp, Homo sapiens
gtgacaatcactgaa

SEQ ID NO: 344424 - DNA, 15 bp, Homo sapiens
tgtgacaatcactga

SEQ ID NO: 344425 - DNA, 15 bp, Homo sapiens
gtgtgacaatcactg

SEQ ID NO: 344426 - DNA, 15 bp, Homo sapiens
agtgtgacaatcact

SEQ ID NO: 344427 - DNA, 15 bp, Homo sapiens
aagtgtgacaatcac

SEQ ID NO: 344428 - DNA, 15 bp, Homo sapiens
aaagtgtgacaatca

SEQ ID NO: 344429 - DNA, 15 bp, Homo sapiens
aaaagtgtgacaatc

SEQ ID NO: 344430 - DNA, 15 bp, Homo sapiens
taaaagtgtgacaat

SEQ ID NO: 344431 - DNA, 15 bp, Homo sapiens
ctaaaagtgtgacaa

SEQ ID NO: 344432 - DNA, 15 bp, Homo sapiens
tctaaaagtgtgaca

SEQ ID NO: 344433 - DNA, 15 bp, Homo sapiens
gtctaaaagtgtgac

SEQ ID NO: 344434 - DNA, 15 bp, Homo sapiens
ggtctaaaagtgtga

SEQ ID NO: 344435 - DNA, 15 bp, Homo sapiens
tggtctaaaagtgtg

SEQ ID NO: 344436 - DNA, 15 bp, Homo sapiens
ttggtctaaaagtgt

SEQ ID NO: 344437 - DNA, 15 bp, Homo sapiens
cttggtctaaaagtg

SEQ ID NO: 344438 - DNA, 15 bp, Homo sapiens
gcttggtctaaaagt

SEQ ID NO: 344439 - DNA, 15 bp, Homo sapiens
tgcttggtctaaaag

SEQ ID NO: 344440 - DNA, 15 bp, Homo sapiens
ctgcttggtctaaaa

SEQ ID NO: 344441 - DNA, 15 bp, Homo sapiens
gctgcttggtctaaa

SEQ ID NO: 344442 - DNA, 15 bp, Homo sapiens
agctgcttggtctaa

SEQ ID NO: 344443 - DNA, 15 bp, Homo sapiens
tagctgcttggtcta

SEQ ID NO: 344444 - DNA, 15 bp, Homo sapiens
ttagctgcttggtct

SEQ ID NO: 344445 - DNA, 15 bp, Homo sapiens
cttagctgcttggtc

SEQ ID NO: 344446 - DNA, 15 bp, Homo sapiens
tcttagctgcttggt

SEQ ID NO: 344447 - DNA, 15 bp, Homo sapiens
ctcttagctgcttgg

SEQ ID NO: 344448 - DNA, 15 bp, Homo sapiens
actcttagctgcttg

SEQ ID NO: 344449 - DNA, 15 bp, Homo sapiens
tactcttagctgctt

SEQ ID NO: 344450 - DNA, 15 bp, Homo sapiens
ttactcttagctgct

SEQ ID NO: 344451 - DNA, 15 bp, Homo sapiens
attactcttagctgc

SEQ ID NO: 344452 - DNA, 15 bp, Homo sapiens
cattactcttagctg

SEQ ID NO: 344453 - DNA, 15 bp, Homo sapiens
tcattactcttagct

SEQ ID NO: 344454 - DNA, 15 bp, Homo sapiens
atcattactcttagc

SEQ ID NO: 344455 - DNA, 15 bp, Homo sapiens
catcattactcttag

SEQ ID NO: 344456 - DNA, 15 bp, Homo sapiens
tcatcattactctta

SEQ ID NO: 344457 - DNA, 15 bp, Homo sapiens
atcatcattactctt

SEQ ID NO: 344458 - DNA, 15 bp, Homo sapiens
aatcatcattactct

SEQ ID NO: 344459 - DNA, 15 bp, Homo sapiens
aaatcatcattactc

SEQ ID NO: 344460 - DNA, 15 bp, Homo sapiens
taaatcatcattact

SEQ ID NO: 344461 - DNA, 15 bp, Homo sapiens
ctaaatcatcattac

SEQ ID NO: 344462 - DNA, 15 bp, Homo sapiens
tctaaatcatcatta

SEQ ID NO: 344463 - DNA, 15 bp, Homo sapiens
atctaaatcatcatt

SEQ ID NO: 344464 - DNA, 15 bp, Homo sapiens
catctaaatcatcat

SEQ ID NO: 344465 - DNA, 15 bp, Homo sapiens
acatctaaatcatca

SEQ ID NO: 344466 - DNA, 15 bp, Homo sapiens
cacatctaaatcatc

SEQ ID NO: 344467 - DNA, 15 bp, Homo sapiens
acacatctaaatcat

SEQ ID NO: 344468 - DNA, 15 bp, Homo sapiens
gacacatctaaatca

SEQ ID NO: 344469 - DNA, 15 bp, Homo sapiens
agacacatctaaatc

SEQ ID NO: 344470 - DNA, 15 bp, Homo sapiens
cagacacatctaaat

SEQ ID NO: 344471 - DNA, 15 bp, Homo sapiens
tcagacacatctaaa

SEQ ID NO: 344472 - DNA, 15 bp, Homo sapiens
ttcagacacatctaa

SEQ ID NO: 344473 - DNA, 15 bp, Homo sapiens
attcagacacatcta

SEQ ID NO: 344474 - DNA, 15 bp, Homo sapiens
gattcagacacatct

SEQ ID NO: 344475 - DNA, 15 bp, Homo sapiens
tgattcagacacatc

SEQ ID NO: 344476 - DNA, 15 bp, Homo sapiens
ttgattcagacacat

SEQ ID NO: 344477 - DNA, 15 bp, Homo sapiens
tttgattcagacaca

SEQ ID NO: 344478 - DNA, 15 bp, Homo sapiens
ttttgattcagacac

SEQ ID NO: 344479 - DNA, 15 bp, Homo sapiens
cttttgattcagaca

SEQ ID NO: 344480 - DNA, 15 bp, Homo sapiens
ccttttgattcagac

SEQ ID NO: 344481 - DNA, 15 bp, Homo sapiens
accttttgattcaga

SEQ ID NO: 344482 - DNA, 15 bp, Homo sapiens
aaccttttgattcag

SEQ ID NO: 344483 - DNA, 15 bp, Homo sapiens
caaccttttgattca

SEQ ID NO: 344484 - DNA, 15 bp, Homo sapiens
acaaccttttgattc

SEQ ID NO: 344485 - DNA, 15 bp, Homo sapiens
tacaaccttttgatt

SEQ ID NO: 344486 - DNA, 15 bp, Homo sapiens
atacaaccttttgat

SEQ ID NO: 344487 - DNA, 15 bp, Homo sapiens
catacaaccttttga

SEQ ID NO: 344488 - DNA, 15 bp, Homo sapiens
ccatacaaccttttg

SEQ ID NO: 344489 - DNA, 15 bp, Homo sapiens
tccatacaacctttt

SEQ ID NO: 344490 - DNA, 15 bp, Homo sapiens
ttccatacaaccttt

SEQ ID NO: 344491 - DNA, 15 bp, Homo sapiens
cttccatacaacctt

SEQ ID NO: 344492 - DNA, 15 bp, Homo sapiens
tcttccatacaacct

SEQ ID NO: 344493 - DNA, 15 bp, Homo sapiens
ttcttccatacaacc

SEQ ID NO: 344494 - DNA, 15 bp, Homo sapiens
tttcttccatacaac

SEQ ID NO: 344495 - DNA, 15 bp, Homo sapiens
ttttcttccatacaa

SEQ ID NO: 344496 - DNA, 15 bp, Homo sapiens
tttttcttccataca

SEQ ID NO: 344497 - DNA, 15 bp, Homo sapiens
gtttttcttccatac

SEQ ID NO: 344498 - DNA, 15 bp, Homo sapiens
ggtttttcttccata

SEQ ID NO: 344499 - DNA, 15 bp, Homo sapiens
tggtttttcttccat

SEQ ID NO: 344500 - DNA, 15 bp, Homo sapiens
gtggtttttcttcca

SEQ ID NO: 344501 - DNA, 15 bp, Homo sapiens
tgtggtttttcttcc

SEQ ID NO: 344502 - DNA, 15 bp, Homo sapiens
ctgtggtttttcttc

SEQ ID NO: 344503 - DNA, 15 bp, Homo sapiens
cctgtggtttttctt

SEQ ID NO: 344504 - DNA, 15 bp, Homo sapiens
tcctgtggtttttct

SEQ ID NO: 344505 - DNA, 15 bp, Homo sapiens
ttcctgtggtttttc

SEQ ID NO: 344506 - DNA, 15 bp, Homo sapiens
cttcctgtggttttt

SEQ ID NO: 344507 - DNA, 15 bp, Homo sapiens
acttcctgtggtttt

SEQ ID NO: 344508 - DNA, 15 bp, Homo sapiens
tacttcctgtggttt

SEQ ID NO: 344509 - DNA, 15 bp, Homo sapiens
gtacttcctgtggtt

SEQ ID NO: 344510 - DNA, 15 bp, Homo sapiens
tgtacttcctgtggt

SEQ ID NO: 344511 - DNA, 15 bp, Homo sapiens
ttgtacttcctgtgg

SEQ ID NO: 344512 - DNA, 15 bp, Homo sapiens
tttgtacttcctgtg

SEQ ID NO: 344513 - DNA, 15 bp, Homo sapiens
gtttgtacttcctgt

SEQ ID NO: 344514 - DNA, 15 bp, Homo sapiens
agtttgtacttcctg

SEQ ID NO: 344515 - DNA, 15 bp, Homo sapiens
aagtttgtacttcct

SEQ ID NO: 344516 - DNA, 15 bp, Homo sapiens
gaagtttgtacttcc

SEQ ID NO: 344517 - DNA, 15 bp, Homo sapiens
agaagtttgtacttc

SEQ ID NO: 344518 - DNA, 15 bp, Homo sapiens
tagaagtttgtactt

SEQ ID NO: 344519 - DNA, 15 bp, Homo sapiens
ctagaagtttgtact

SEQ ID NO: 344520 - DNA, 15 bp, Homo sapiens
cctagaagtttgtac

SEQ ID NO: 344521 - DNA, 15 bp, Homo sapiens
tcctagaagtttgta

SEQ ID NO: 344522 - DNA, 15 bp, Homo sapiens
ttcctagaagtttgt

SEQ ID NO: 344523 - DNA, 15 bp, Homo sapiens
attcctagaagtttg

SEQ ID NO: 344524 - DNA, 15 bp, Homo sapiens
cattcctagaagttt

SEQ ID NO: 344525 - DNA, 15 bp, Homo sapiens
acattcctagaagtt

SEQ ID NO: 344526 - DNA, 15 bp, Homo sapiens
aacattcctagaagt

SEQ ID NO: 344527 - DNA, 15 bp, Homo sapiens
caacattcctagaag

SEQ ID NO: 344528 - DNA, 15 bp, Homo sapiens
tcaacattcctagaa

SEQ ID NO: 344529 - DNA, 15 bp, Homo sapiens
ttcaacattcctaga

SEQ ID NO: 344530 - DNA, 15 bp, Homo sapiens
tttcaacattcctag

SEQ ID NO: 344531 - DNA, 15 bp, Homo sapiens
ctttcaacattccta

SEQ ID NO: 344532 - DNA, 15 bp, Homo sapiens
actttcaacattcct

SEQ ID NO: 344533 - DNA, 15 bp, Homo sapiens
tactttcaacattcc

SEQ ID NO: 344534 - DNA, 15 bp, Homo sapiens
atactttcaacattc

SEQ ID NO: 344535 - DNA, 15 bp, Homo sapiens
aatactttcaacatt

SEQ ID NO: 344536 - DNA, 15 bp, Homo sapiens
caatactttcaacat

SEQ ID NO: 344537 - DNA, 15 bp, Homo sapiens
gcaatactttcaaca

SEQ ID NO: 344538 - DNA, 15 bp, Homo sapiens
agcaatactttcaac

SEQ ID NO: 344539 - DNA, 15 bp, Homo sapiens
cagcaatactttcaa

SEQ ID NO: 344540 - DNA, 15 bp, Homo sapiens
tcagcaatactttca

SEQ ID NO: 344541 - DNA, 15 bp, Homo sapiens
ttcagcaatactttc

SEQ ID NO: 344542 - DNA, 15 bp, Homo sapiens
gttcagcaatacttt

SEQ ID NO: 344543 - DNA, 15 bp, Homo sapiens
tgttcagcaatactt

SEQ ID NO: 344544 - DNA, 15 bp, Homo sapiens
ctgttcagcaatact

SEQ ID NO: 344545 - DNA, 15 bp, Homo sapiens
tctgttcagcaatac

SEQ ID NO: 344546 - DNA, 15 bp, Homo sapiens
atctgttcagcaata

SEQ ID NO: 344547 - DNA, 15 bp, Homo sapiens
catctgttcagcaat

SEQ ID NO: 344548 - DNA, 15 bp, Homo sapiens
ccatctgttcagcaa

SEQ ID NO: 344549 - DNA, 15 bp, Homo sapiens
tccatctgttcagca

SEQ ID NO: 344550 - DNA, 15 bp, Homo sapiens
ttccatctgttcagc

SEQ ID NO: 344551 - DNA, 15 bp, Homo sapiens
tttccatctgttcag

SEQ ID NO: 344552 - DNA, 15 bp, Homo sapiens
ttttccatctgttca

SEQ ID NO: 344553 - DNA, 15 bp, Homo sapiens
attttccatctgttc

SEQ ID NO: 344554 - DNA, 15 bp, Homo sapiens
gattttccatctgtt

SEQ ID NO: 344555 - DNA, 15 bp, Homo sapiens
ggattttccatctgt

SEQ ID NO: 344556 - DNA, 15 bp, Homo sapiens
cggattttccatctg

SEQ ID NO: 344557 - DNA, 15 bp, Homo sapiens
ccggattttccatct

SEQ ID NO: 344558 - DNA, 15 bp, Homo sapiens
tccggattttccatc

SEQ ID NO: 344559 - DNA, 15 bp, Homo sapiens
atccggattttccat

SEQ ID NO: 344560 - DNA, 15 bp, Homo sapiens
aatccggattttcca

SEQ ID NO: 344561 - DNA, 15 bp, Homo sapiens
aaatccggattttcc

SEQ ID NO: 344562 - DNA, 15 bp, Homo sapiens
caaatccggattttc

SEQ ID NO: 344563 - DNA, 15 bp, Homo sapiens
tcaaatccggatttt

SEQ ID NO: 344564 - DNA, 15 bp, Homo sapiens
ttcaaatccggattt

SEQ ID NO: 344565 - DNA, 15 bp, Homo sapiens
cttcaaatccggatt

SEQ ID NO: 344566 - DNA, 15 bp, Homo sapiens
tcttcaaatccggat

SEQ ID NO: 344567 - DNA, 15 bp, Homo sapiens
ttcttcaaatccgga

SEQ ID NO: 344568 - DNA, 15 bp, Homo sapiens
attcttcaaatccgg

SEQ ID NO: 344569 - DNA, 15 bp, Homo sapiens
cattcttcaaatccg

SEQ ID NO: 344570 - DNA, 15 bp, Homo sapiens
acattcttcaaatcc

SEQ ID NO: 344571 - DNA, 15 bp, Homo sapiens
aacattcttcaaatc

SEQ ID NO: 344572 - DNA, 15 bp, Homo sapiens
caacattcttcaaat

SEQ ID NO: 344573 - DNA, 15 bp, Homo sapiens
ccaacattcttcaaa

SEQ ID NO: 344574 - DNA, 15 bp, Homo sapiens
accaacattcttcaa

SEQ ID NO: 344575 - DNA, 15 bp, Homo sapiens
aaccaacattcttca

SEQ ID NO: 344576 - DNA, 15 bp, Homo sapiens
gaaccaacattcttc

SEQ ID NO: 344577 - DNA, 15 bp, Homo sapiens
agaaccaacattctt

SEQ ID NO: 344578 - DNA, 15 bp, Homo sapiens
tagaaccaacattct

SEQ ID NO: 344579 - DNA, 15 bp, Homo sapiens
ctagaaccaacattc

SEQ ID NO: 344580 - DNA, 15 bp, Homo sapiens
actagaaccaacatt

SEQ ID NO: 344581 - DNA, 15 bp, Homo sapiens
tactagaaccaacat

SEQ ID NO: 344582 - DNA, 15 bp, Homo sapiens
gtactagaaccaaca

SEQ ID NO: 344583 - DNA, 15 bp, Homo sapiens
agtactagaaccaac

SEQ ID NO: 344584 - DNA, 15 bp, Homo sapiens
cagtactagaaccaa

SEQ ID NO: 344585 - DNA, 15 bp, Homo sapiens
ccagtactagaacca

SEQ ID NO: 344586 - DNA, 15 bp, Homo sapiens
cccagtactagaacc

SEQ ID NO: 344587 - DNA, 15 bp, Homo sapiens
ccccagtactagaac

SEQ ID NO: 344588 - DNA, 15 bp, Homo sapiens
tccccagtactagaa

SEQ ID NO: 344589 - DNA, 15 bp, Homo sapiens
ctccccagtactaga

SEQ ID NO: 344590 - DNA, 15 bp, Homo sapiens
tctccccagtactag

SEQ ID NO: 344591 - DNA, 15 bp, Homo sapiens
ttctccccagtacta

SEQ ID NO: 344592 - DNA, 15 bp, Homo sapiens
tttctccccagtact

SEQ ID NO: 344593 - DNA, 15 bp, Homo sapiens
ttttctccccagtac

SEQ ID NO: 344594 - DNA, 15 bp, Homo sapiens
tttttctccccagta

SEQ ID NO: 344595 - DNA, 15 bp, Homo sapiens
atttttctccccagt

SEQ ID NO: 344596 - DNA, 15 bp, Homo sapiens
catttttctccccag

SEQ ID NO: 344597 - DNA, 15 bp, Homo sapiens
tcatttttctcccca

SEQ ID NO: 344598 - DNA, 15 bp, Homo sapiens
ttcatttttctcccc

SEQ ID NO: 344599 - DNA, 15 bp, Homo sapiens
tttcatttttctccc

SEQ ID NO: 344600 - DNA, 15 bp, Homo sapiens
ctttcatttttctcc

SEQ ID NO: 344601 - DNA, 15 bp, Homo sapiens
tctttcatttttctc

SEQ ID NO: 344602 - DNA, 15 bp, Homo sapiens
ttctttcatttttct

SEQ ID NO: 344603 - DNA, 15 bp, Homo sapiens
gttctttcatttttc

SEQ ID NO: 344604 - DNA, 15 bp, Homo sapiens
agttctttcattttt

SEQ ID NO: 344605 - DNA, 15 bp, Homo sapiens
aagttctttcatttt

SEQ ID NO: 344606 - DNA, 15 bp, Homo sapiens
gaagttctttcattt

SEQ ID NO: 344607 - DNA, 15 bp, Homo sapiens
tgaagttctttcatt

SEQ ID NO: 344608 - DNA, 15 bp, Homo sapiens
ctgaagttctttcat

SEQ ID NO: 344609 - DNA, 15 bp, Homo sapiens
actgaagttctttca

SEQ ID NO: 344610 - DNA, 15 bp, Homo sapiens
cactgaagttctttc

SEQ ID NO: 344611 - DNA, 15 bp, Homo sapiens
ccactgaagttcttt

SEQ ID NO: 344612 - DNA, 15 bp, Homo sapiens
gccactgaagttctt

SEQ ID NO: 344613 - DNA, 15 bp, Homo sapiens
agccactgaagttct

SEQ ID NO: 344614 - DNA, 15 bp, Homo sapiens
cagccactgaagttc

SEQ ID NO: 344615 - DNA, 15 bp, Homo sapiens
ccagccactgaagtt

SEQ ID NO: 344616 - DNA, 15 bp, Homo sapiens
tccagccactgaagt

SEQ ID NO: 344617 - DNA, 15 bp, Homo sapiens
ttccagccactgaag

SEQ ID NO: 344618 - DNA, 15 bp, Homo sapiens
gttccagccactgaa

SEQ ID NO: 344619 - DNA, 15 bp, Homo sapiens
tgttccagccactga

SEQ ID NO: 344620 - DNA, 15 bp, Homo sapiens
ctgttccagccactg

SEQ ID NO: 344621 - DNA, 15 bp, Homo sapiens
actgttccagccact

SEQ ID NO: 344622 - DNA, 15 bp, Homo sapiens
cactgttccagccac

SEQ ID NO: 344623 - DNA, 15 bp, Homo sapiens
tcactgttccagcca

SEQ ID NO: 344624 - DNA, 15 bp, Homo sapiens
ctcactgttccagcc

SEQ ID NO: 344625 - DNA, 15 bp, Homo sapiens
tctcactgttccagc

SEQ ID NO: 344626 - DNA, 15 bp, Homo sapiens
ttctcactgttccag

SEQ ID NO: 344627 - DNA, 15 bp, Homo sapiens
tttctcactgttcca

SEQ ID NO: 344628 - DNA, 15 bp, Homo sapiens
ttttctcactgttcc

SEQ ID NO: 344629 - DNA, 15 bp, Homo sapiens
attttctcactgttc

SEQ ID NO: 344630 - DNA, 15 bp, Homo sapiens
cattttctcactgtt

SEQ ID NO: 344631 - DNA, 15 bp, Homo sapiens
gcattttctcactgt

SEQ ID NO: 344632 - DNA, 15 bp, Homo sapiens
agcattttctcactg

SEQ ID NO: 344633 - DNA, 15 bp, Homo sapiens
cagcattttctcact

SEQ ID NO: 344634 - DNA, 15 bp, Homo sapiens
ccagcattttctcac

SEQ ID NO: 344635 - DNA, 15 bp, Homo sapiens
gccagcattttctca

SEQ ID NO: 344636 - DNA, 15 bp, Homo sapiens
ggccagcattttctc

SEQ ID NO: 344637 - DNA, 15 bp, Homo sapiens
aggccagcattttct

SEQ ID NO: 344638 - DNA, 15 bp, Homo sapiens
taggccagcattttc

SEQ ID NO: 344639 - DNA, 15 bp, Homo sapiens
ttaggccagcatttt

SEQ ID NO: 344640 - DNA, 15 bp, Homo sapiens
attaggccagcattt

SEQ ID NO: 344641 - DNA, 15 bp, Homo sapiens
tattaggccagcatt

SEQ ID NO: 344642 - DNA, 15 bp, Homo sapiens
ctattaggccagcat

SEQ ID NO: 344643 - DNA, 15 bp, Homo sapiens
tctattaggccagca

SEQ ID NO: 344644 - DNA, 15 bp, Homo sapiens
ctctattaggccagc

SEQ ID NO: 344645 - DNA, 15 bp, Homo sapiens
actctattaggccag

SEQ ID NO: 344646 - DNA, 15 bp, Homo sapiens
cactctattaggcca

SEQ ID NO: 344647 - DNA, 15 bp, Homo sapiens
ccactctattaggcc

SEQ ID NO: 344648 - DNA, 15 bp, Homo sapiens
gccactctattaggc

SEQ ID NO: 344649 - DNA, 15 bp, Homo sapiens
tgccactctattagg

SEQ ID NO: 344650 - DNA, 15 bp, Homo sapiens
ttgccactctattag

SEQ ID NO: 344651 - DNA, 15 bp, Homo sapiens
tttgccactctatta

SEQ ID NO: 344652 - DNA, 15 bp, Homo sapiens
ctttgccactctatt

SEQ ID NO: 344653 - DNA, 15 bp, Homo sapiens
cctttgccactctat

SEQ ID NO: 344654 - DNA, 15 bp, Homo sapiens
tcctttgccactcta

SEQ ID NO: 344655 - DNA, 15 bp, Homo sapiens
ctcctttgccactct

SEQ ID NO: 344656 - DNA, 15 bp, Homo sapiens
gctcctttgccactc

SEQ ID NO: 344657 - DNA, 15 bp, Homo sapiens
tgctcctttgccact

SEQ ID NO: 344658 - DNA, 15 bp, Homo sapiens
ctgctcctttgccac

SEQ ID NO: 344659 - DNA, 15 bp, Homo sapiens
tctgctcctttgcca

SEQ ID NO: 344660 - DNA, 15 bp, Homo sapiens
atctgctcctttgcc

SEQ ID NO: 344661 - DNA, 15 bp, Homo sapiens
aatctgctcctttgc

SEQ ID NO: 344662 - DNA, 15 bp, Homo sapiens
taatctgctcctttg

SEQ ID NO: 344663 - DNA, 15 bp, Homo sapiens
ctaatctgctccttt

SEQ ID NO: 344664 - DNA, 15 bp, Homo sapiens
actaatctgctcctt

SEQ ID NO: 344665 - DNA, 15 bp, Homo sapiens
tactaatctgctcct

SEQ ID NO: 344666 - DNA, 15 bp, Homo sapiens
ctactaatctgctcc

SEQ ID NO: 344667 - DNA, 15 bp, Homo sapiens
cctactaatctgctc

SEQ ID NO: 344668 - DNA, 15 bp, Homo sapiens
gcctactaatctgct

SEQ ID NO: 344669 - DNA, 15 bp, Homo sapiens
cgcctactaatctgc

SEQ ID NO: 344670 - DNA, 15 bp, Homo sapiens
ccgcctactaatctg

SEQ ID NO: 344671 - DNA, 15 bp, Homo sapiens
gccgcctactaatct

SEQ ID NO: 344672 - DNA, 15 bp, Homo sapiens
agccgcctactaatc

SEQ ID NO: 344673 - DNA, 15 bp, Homo sapiens
aagccgcctactaat

SEQ ID NO: 344674 - DNA, 15 bp, Homo sapiens
caagccgcctactaa

SEQ ID NO: 344675 - DNA, 15 bp, Homo sapiens
tcaagccgcctacta

SEQ ID NO: 344676 - DNA, 15 bp, Homo sapiens
atcaagccgcctact

SEQ ID NO: 344677 - DNA, 15 bp, Homo sapiens
catcaagccgcctac

SEQ ID NO: 344678 - DNA, 15 bp, Homo sapiens
ccatcaagccgccta

SEQ ID NO: 344679 - DNA, 15 bp, Homo sapiens
accatcaagccgcct

SEQ ID NO: 344680 - DNA, 15 bp, Homo sapiens
taccatcaagccgcc

SEQ ID NO: 344681 - DNA, 15 bp, Homo sapiens
ttaccatcaagccgc

SEQ ID NO: 344682 - DNA, 15 bp, Homo sapiens
cttaccatcaagccg

SEQ ID NO: 344683 - DNA, 15 bp, Homo sapiens
tcttaccatcaagcc

SEQ ID NO: 344684 - DNA, 15 bp, Homo sapiens
ttcttaccatcaagc

SEQ ID NO: 344685 - DNA, 15 bp, Homo sapiens
tttcttaccatcaag

SEQ ID NO: 344686 - DNA, 15 bp, Homo sapiens
ctttcttaccatcaa

SEQ ID NO: 344687 - DNA, 15 bp, Homo sapiens
cctttcttaccatca

SEQ ID NO: 344688 - DNA, 15 bp, Homo sapiens
gcctttcttaccatc

SEQ ID NO: 344689 - DNA, 15 bp, Homo sapiens
tgcctttcttaccat

SEQ ID NO: 344690 - DNA, 15 bp, Homo sapiens
ctgcctttcttacca

SEQ ID NO: 344691 - DNA, 15 bp, Homo sapiens
actgcctttcttacc

SEQ ID NO: 344692 - DNA, 15 bp, Homo sapiens
gactgcctttcttac

SEQ ID NO: 344693 - DNA, 15 bp, Homo sapiens
cgactgcctttctta

SEQ ID NO: 344694 - DNA, 15 bp, Homo sapiens
ccgactgcctttctt

SEQ ID NO: 344695 - DNA, 15 bp, Homo sapiens
tccgactgcctttct

SEQ ID NO: 344696 - DNA, 15 bp, Homo sapiens
gtccgactgcctttc

SEQ ID NO: 344697 - DNA, 15 bp, Homo sapiens
ggtccgactgccttt

SEQ ID NO: 344698 - DNA, 15 bp, Homo sapiens
tggtccgactgcctt

SEQ ID NO: 344699 - DNA, 15 bp, Homo sapiens
atggtccgactgcct

SEQ ID NO: 344700 - DNA, 15 bp, Homo sapiens
aatggtccgactgcc

SEQ ID NO: 344701 - DNA, 15 bp, Homo sapiens
aaatggtccgactgc

SEQ ID NO: 344702 - DNA, 15 bp, Homo sapiens
aaaatggtccgactg

SEQ ID NO: 344703 - DNA, 15 bp, Homo sapiens
caaaatggtccgact

SEQ ID NO: 344704 - DNA, 15 bp, Homo sapiens
tcaaaatggtccgac

SEQ ID NO: 344705 - DNA, 15 bp, Homo sapiens
ttcaaaatggtccga

SEQ ID NO: 344706 - DNA, 15 bp, Homo sapiens
tttcaaaatggtccg

SEQ ID NO: 344707 - DNA, 15 bp, Homo sapiens
ctttcaaaatggtcc

SEQ ID NO: 344708 - DNA, 15 bp, Homo sapiens
actttcaaaatggtc

SEQ ID NO: 344709 - DNA, 15 bp, Homo sapiens
tactttcaaaatggt

SEQ ID NO: 344710 - DNA, 15 bp, Homo sapiens
atactttcaaaatgg

SEQ ID NO: 344711 - DNA, 15 bp, Homo sapiens
tatactttcaaaatg

SEQ ID NO: 344712 - DNA, 15 bp, Homo sapiens
ttatactttcaaaat

SEQ ID NO: 344713 - DNA, 15 bp, Homo sapiens
tttatactttcaaaa

SEQ ID NO: 344714 - DNA, 15 bp, Homo sapiens
atttatactttcaaa

SEQ ID NO: 344715 - DNA, 15 bp, Homo sapiens
catttatactttcaa

SEQ ID NO: 344716 - DNA, 15 bp, Homo sapiens
acatttatactttca

SEQ ID NO: 344717 - DNA, 15 bp, Homo sapiens
gacatttatactttc

SEQ ID NO: 344718 - DNA, 15 bp, Homo sapiens
tgacatttatacttt

SEQ ID NO: 344719 - DNA, 15 bp, Homo sapiens
atgacatttatactt

SEQ ID NO: 344720 - DNA, 15 bp, Homo sapiens
tatgacatttatact

SEQ ID NO: 344721 - DNA, 15 bp, Homo sapiens
ttatgacatttatac

SEQ ID NO: 344722 - DNA, 15 bp, Homo sapiens
gttatgacatttata

SEQ ID NO: 344723 - DNA, 15 bp, Homo sapiens
tgttatgacatttat

SEQ ID NO: 344724 - DNA, 15 bp, Homo sapiens
ctgttatgacattta

SEQ ID NO: 344725 - DNA, 15 bp, Homo sapiens
actgttatgacattt

SEQ ID NO: 344726 - DNA, 15 bp, Homo sapiens
tactgttatgacatt

SEQ ID NO: 344727 - DNA, 15 bp, Homo sapiens
atactgttatgacat

SEQ ID NO: 344728 - DNA, 15 bp, Homo sapiens
aatactgttatgaca

SEQ ID NO: 344729 - DNA, 15 bp, Homo sapiens
aaatactgttatgac

SEQ ID NO: 344730 - DNA, 15 bp, Homo sapiens
gaaatactgttatga

SEQ ID NO: 344731 - DNA, 15 bp, Homo sapiens
ggaaatactgttatg

SEQ ID NO: 344732 - DNA, 15 bp, Homo sapiens
tggaaatactgttat

SEQ ID NO: 344733 - DNA, 15 bp, Homo sapiens
ttggaaatactgtta

SEQ ID NO: 344734 - DNA, 15 bp, Homo sapiens
tttggaaatactgtt

SEQ ID NO: 344735 - DNA, 15 bp, Homo sapiens
ttttggaaatactgt

SEQ ID NO: 344736 - DNA, 15 bp, Homo sapiens
tttttggaaatactg

SEQ ID NO: 344737 - DNA, 15 bp, Homo sapiens
ttttttggaaatact

SEQ ID NO: 344738 - DNA, 15 bp, Homo sapiens
attttttggaaatac

SEQ ID NO: 344739 - DNA, 15 bp, Homo sapiens
aattttttggaaata

SEQ ID NO: 344740 - DNA, 15 bp, Homo sapiens
taattttttggaaat

SEQ ID NO: 344741 - DNA, 15 bp, Homo sapiens
ctaattttttggaaa

SEQ ID NO: 344742 - DNA, 15 bp, Homo sapiens
gctaattttttggaa

SEQ ID NO: 344743 - DNA, 15 bp, Homo sapiens
agctaattttttgga

SEQ ID NO: 344744 - DNA, 15 bp, Homo sapiens
tagctaattttttgg

SEQ ID NO: 344745 - DNA, 15 bp, Homo sapiens
atagctaattttttg

SEQ ID NO: 344746 - DNA, 15 bp, Homo sapiens
aatagctaatttttt

SEQ ID NO: 344747 - DNA, 15 bp, Homo sapiens
aaatagctaattttt

SEQ ID NO: 344748 - DNA, 15 bp, Homo sapiens
gaaatagctaatttt

SEQ ID NO: 344749 - DNA, 15 bp, Homo sapiens
cgaaatagctaattt

SEQ ID NO: 344750 - DNA, 15 bp, Homo sapiens
ccgaaatagctaatt

SEQ ID NO: 344751 - DNA, 15 bp, Homo sapiens
gccgaaatagctaat

SEQ ID NO: 344752 - DNA, 15 bp, Homo sapiens
tgccgaaatagctaa

SEQ ID NO: 344753 - DNA, 15 bp, Homo sapiens
ctgccgaaatagcta

SEQ ID NO: 344754 - DNA, 15 bp, Homo sapiens
cctgccgaaatagct

SEQ ID NO: 344755 - DNA, 15 bp, Homo sapiens
acctgccgaaatagc

SEQ ID NO: 344756 - DNA, 15 bp, Homo sapiens
aacctgccgaaatag

SEQ ID NO: 344757 - DNA, 15 bp, Homo sapiens
taacctgccgaaata

SEQ ID NO: 344758 - DNA, 15 bp, Homo sapiens
ttaacctgccgaaat

SEQ ID NO: 344759 - DNA, 15 bp, Homo sapiens
attaacctgccgaaa

SEQ ID NO: 344760 - DNA, 15 bp, Homo sapiens
gattaacctgccgaa

SEQ ID NO: 344761 - DNA, 15 bp, Homo sapiens
cgattaacctgccga

SEQ ID NO: 344762 - DNA, 15 bp, Homo sapiens
tcgattaacctgccg

SEQ ID NO: 344763 - DNA, 15 bp, Homo sapiens
atcgattaacctgcc

SEQ ID NO: 344764 - DNA, 15 bp, Homo sapiens
tatcgattaacctgc

SEQ ID NO: 344765 - DNA, 15 bp, Homo sapiens
ctatcgattaacctg

SEQ ID NO: 344766 - DNA, 15 bp, Homo sapiens
cctatcgattaacct

SEQ ID NO: 344767 - DNA, 15 bp, Homo sapiens
ccctatcgattaacc

SEQ ID NO: 344768 - DNA, 15 bp, Homo sapiens
accctatcgattaac

SEQ ID NO: 344769 - DNA, 15 bp, Homo sapiens
taccctatcgattaa

SEQ ID NO: 344770 - DNA, 15 bp, Homo sapiens
ctaccctatcgatta

SEQ ID NO: 344771 - DNA, 15 bp, Homo sapiens
gctaccctatcgatt

SEQ ID NO: 344772 - DNA, 15 bp, Homo sapiens
agctaccctatcgat

SEQ ID NO: 344773 - DNA, 15 bp, Homo sapiens
aagctaccctatcga

SEQ ID NO: 344774 - DNA, 15 bp, Homo sapiens
aaagctaccctatcg

SEQ ID NO: 344775 - DNA, 15 bp, Homo sapiens
taaagctaccctatc

SEQ ID NO: 344776 - DNA, 15 bp, Homo sapiens
ataaagctaccctat

SEQ ID NO: 344777 - DNA, 15 bp, Homo sapiens
cataaagctacccta

SEQ ID NO: 344778 - DNA, 15 bp, Homo sapiens
acataaagctaccct

SEQ ID NO: 344779 - DNA, 15 bp, Homo sapiens
tacataaagctaccc

SEQ ID NO: 344780 - DNA, 15 bp, Homo sapiens
ctacataaagctacc

SEQ ID NO: 344781 - DNA, 15 bp, Homo sapiens
actacataaagctac

SEQ ID NO: 344782 - DNA, 15 bp, Homo sapiens
aactacataaagcta

SEQ ID NO: 344783 - DNA, 15 bp, Homo sapiens
caactacataaagct

SEQ ID NO: 344784 - DNA, 15 bp, Homo sapiens
tcaactacataaagc

SEQ ID NO: 344785 - DNA, 15 bp, Homo sapiens
atcaactacataaag

SEQ ID NO: 344786 - DNA, 15 bp, Homo sapiens
aatcaactacataaa

SEQ ID NO: 344787 - DNA, 15 bp, Homo sapiens
gaatcaactacataa

SEQ ID NO: 344788 - DNA, 15 bp, Homo sapiens
agaatcaactacata

SEQ ID NO: 344789 - DNA, 15 bp, Homo sapiens
cagaatcaactacat

SEQ ID NO: 344790 - DNA, 15 bp, Homo sapiens
acagaatcaactaca

SEQ ID NO: 344791 - DNA, 15 bp, Homo sapiens
aacagaatcaactac

SEQ ID NO: 344792 - DNA, 15 bp, Homo sapiens
aaacagaatcaacta

SEQ ID NO: 344793 - DNA, 15 bp, Homo sapiens
taaacagaatcaact

SEQ ID NO: 344794 - DNA, 15 bp, Homo sapiens
ctaaacagaatcaac

SEQ ID NO: 344795 - DNA, 15 bp, Homo sapiens
tctaaacagaatcaa

SEQ ID NO: 344796 - DNA, 15 bp, Homo sapiens
ctctaaacagaatca

SEQ ID NO: 344797 - DNA, 15 bp, Homo sapiens
tctctaaacagaatc

SEQ ID NO: 344798 - DNA, 15 bp, Homo sapiens
ttctctaaacagaat

SEQ ID NO: 344799 - DNA, 15 bp, Homo sapiens
tttctctaaacagaa

SEQ ID NO: 344800 - DNA, 15 bp, Homo sapiens
gtttctctaaacaga

SEQ ID NO: 344801 - DNA, 15 bp, Homo sapiens
agtttctctaaacag

SEQ ID NO: 344802 - DNA, 15 bp, Homo sapiens
cagtttctctaaaca

SEQ ID NO: 344803 - DNA, 15 bp, Homo sapiens
acagtttctctaaac

SEQ ID NO: 344804 - DNA, 15 bp, Homo sapiens
tacagtttctctaaa

SEQ ID NO: 344805 - DNA, 15 bp, Homo sapiens
gtacagtttctctaa

SEQ ID NO: 344806 - DNA, 15 bp, Homo sapiens
tgtacagtttctcta

SEQ ID NO: 344807 - DNA, 15 bp, Homo sapiens
ctgtacagtttctct

SEQ ID NO: 344808 - DNA, 15 bp, Homo sapiens
actgtacagtttctc

SEQ ID NO: 344809 - DNA, 15 bp, Homo sapiens
aactgtacagtttct

SEQ ID NO: 344810 - DNA, 15 bp, Homo sapiens
gaactgtacagtttc

SEQ ID NO: 344811 - DNA, 15 bp, Homo sapiens
cgaactgtacagttt

SEQ ID NO: 344812 - DNA, 15 bp, Homo sapiens
acgaactgtacagtt

SEQ ID NO: 344813 - DNA, 15 bp, Homo sapiens
tacgaactgtacagt

SEQ ID NO: 344814 - DNA, 15 bp, Homo sapiens
ttacgaactgtacag

SEQ ID NO: 344815 - DNA, 15 bp, Homo sapiens
attacgaactgtaca

SEQ ID NO: 344816 - DNA, 15 bp, Homo sapiens
gattacgaactgtac

SEQ ID NO: 344817 - DNA, 15 bp, Homo sapiens
tgattacgaactgta

SEQ ID NO: 344818 - DNA, 15 bp, Homo sapiens
ctgattacgaactgt

SEQ ID NO: 344819 - DNA, 15 bp, Homo sapiens
tctgattacgaactg

SEQ ID NO: 344820 - DNA, 15 bp, Homo sapiens
ttctgattacgaact

SEQ ID NO: 344821 - DNA, 15 bp, Homo sapiens
tttctgattacgaac

SEQ ID NO: 344822 - DNA, 15 bp, Homo sapiens
ctttctgattacgaa

SEQ ID NO: 344823 - DNA, 15 bp, Homo sapiens
cctttctgattacga

SEQ ID NO: 344824 - DNA, 15 bp, Homo sapiens
acctttctgattacg

SEQ ID NO: 344825 - DNA, 15 bp, Homo sapiens
tacctttctgattac

SEQ ID NO: 344826 - DNA, 15 bp, Homo sapiens
ttacctttctgatta

SEQ ID NO: 344827 - DNA, 15 bp, Homo sapiens
tttacctttctgatt

SEQ ID NO: 344828 - DNA, 15 bp, Homo sapiens
atttacctttctgat

SEQ ID NO: 344829 - DNA, 15 bp, Homo sapiens
gatttacctttctga

SEQ ID NO: 344830 - DNA, 15 bp, Homo sapiens
agatttacctttctg

SEQ ID NO: 344831 - DNA, 15 bp, Homo sapiens
aagatttacctttct

SEQ ID NO: 344832 - DNA, 15 bp, Homo sapiens
gaagatttacctttc

SEQ ID NO: 344833 - DNA, 15 bp, Homo sapiens
agaagatttaccttt

SEQ ID NO: 344834 - DNA, 15 bp, Homo sapiens
cagaagatttacctt

SEQ ID NO: 344835 - DNA, 15 bp, Homo sapiens
ccagaagatttacct

SEQ ID NO: 344836 - DNA, 15 bp, Homo sapiens
accagaagatttacc

SEQ ID NO: 344837 - DNA, 15 bp, Homo sapiens
taccagaagatttac

SEQ ID NO: 344838 - DNA, 15 bp, Homo sapiens
ataccagaagattta

SEQ ID NO: 344839 - DNA, 15 bp, Homo sapiens
gataccagaagattt

SEQ ID NO: 344840 - DNA, 15 bp, Homo sapiens
agataccagaagatt

SEQ ID NO: 344841 - DNA, 15 bp, Homo sapiens
aagataccagaagat

SEQ ID NO: 344842 - DNA, 15 bp, Homo sapiens
taagataccagaaga

SEQ ID NO: 344843 - DNA, 15 bp, Homo sapiens
ttaagataccagaag

SEQ ID NO: 344844 - DNA, 15 bp, Homo sapiens
gttaagataccagaa

SEQ ID NO: 344845 - DNA, 15 bp, Homo sapiens
tgttaagataccaga

SEQ ID NO: 344846 - DNA, 15 bp, Homo sapiens
atgttaagataccag

SEQ ID NO: 344847 - DNA, 15 bp, Homo sapiens
catgttaagatacca

SEQ ID NO: 344848 - DNA, 15 bp, Homo sapiens
tcatgttaagatacc

SEQ ID NO: 344849 - DNA, 15 bp, Homo sapiens
atcatgttaagatac

SEQ ID NO: 344850 - DNA, 15 bp, Homo sapiens
tatcatgttaagata

SEQ ID NO: 344851 - DNA, 15 bp, Homo sapiens
atatcatgttaagat

SEQ ID NO: 344852 - DNA, 15 bp, Homo sapiens
catatcatgttaaga

SEQ ID NO: 344853 - DNA, 15 bp, Homo sapiens
ccatatcatgttaag

SEQ ID NO: 344854 - DNA, 15 bp, Homo sapiens
tccatatcatgttaa

SEQ ID NO: 344855 - DNA, 15 bp, Homo sapiens
ctccatatcatgtta

SEQ ID NO: 344856 - DNA, 15 bp, Homo sapiens
tctccatatcatgtt

SEQ ID NO: 344857 - DNA, 15 bp, Homo sapiens
ttctccatatcatgt

SEQ ID NO: 344858 - DNA, 15 bp, Homo sapiens
cttctccatatcatg

SEQ ID NO: 344859 - DNA, 15 bp, Homo sapiens
ccttctccatatcat

SEQ ID NO: 344860 - DNA, 15 bp, Homo sapiens
tccttctccatatca

SEQ ID NO: 344861 - DNA, 15 bp, Homo sapiens
ttccttctccatatc

SEQ ID NO: 344862 - DNA, 15 bp, Homo sapiens
cttccttctccatat

SEQ ID NO: 344863 - DNA, 15 bp, Homo sapiens
acttccttctccata

SEQ ID NO: 344864 - DNA, 15 bp, Homo sapiens
cacttccttctccat

SEQ ID NO: 344865 - DNA, 15 bp, Homo sapiens
acacttccttctcca

SEQ ID NO: 344866 - DNA, 15 bp, Homo sapiens
aacacttccttctcc

SEQ ID NO: 344867 - DNA, 15 bp, Homo sapiens
aaacacttccttctc

SEQ ID NO: 344868 - DNA, 15 bp, Homo sapiens
taaacacttccttct

SEQ ID NO: 344869 - DNA, 15 bp, Homo sapiens
ttaaacacttccttc

SEQ ID NO: 344870 - DNA, 15 bp, Homo sapiens
attaaacacttcctt

SEQ ID NO: 344871 - DNA, 15 bp, Homo sapiens
tattaaacacttcct

SEQ ID NO: 344872 - DNA, 15 bp, Homo sapiens
ctattaaacacttcc

SEQ ID NO: 344873 - DNA, 15 bp, Homo sapiens
actattaaacacttc

SEQ ID NO: 344874 - DNA, 15 bp, Homo sapiens
cactattaaacactt

SEQ ID NO: 344875 - DNA, 15 bp, Homo sapiens
gcactattaaacact

SEQ ID NO: 344876 - DNA, 15 bp, Homo sapiens
agcactattaaacac

SEQ ID NO: 344877 - DNA, 15 bp, Homo sapiens
gagcactattaaaca

SEQ ID NO: 344878 - DNA, 15 bp, Homo sapiens
agagcactattaaac

SEQ ID NO: 344879 - DNA, 15 bp, Homo sapiens
cagagcactattaaa

SEQ ID NO: 344880 - DNA, 15 bp, Homo sapiens
acagagcactattaa

SEQ ID NO: 344881 - DNA, 15 bp, Homo sapiens
tacagagcactatta

SEQ ID NO: 344882 - DNA, 15 bp, Homo sapiens
atacagagcactatt

SEQ ID NO: 344883 - DNA, 15 bp, Homo sapiens
catacagagcactat

SEQ ID NO: 344884 - DNA, 15 bp, Homo sapiens
acatacagagcacta

SEQ ID NO: 344885 - DNA, 15 bp, Homo sapiens
aacatacagagcact

SEQ ID NO: 344886 - DNA, 15 bp, Homo sapiens
caacatacagagcac

SEQ ID NO: 344887 - DNA, 15 bp, Homo sapiens
acaacatacagagca

SEQ ID NO: 344888 - DNA, 15 bp, Homo sapiens
cacaacatacagagc

SEQ ID NO: 344889 - DNA, 15 bp, Homo sapiens
acacaacatacagag

SEQ ID NO: 344890 - DNA, 15 bp, Homo sapiens
aacacaacatacaga

SEQ ID NO: 344891 - DNA, 15 bp, Homo sapiens
aaacacaacatacag

SEQ ID NO: 344892 - DNA, 15 bp, Homo sapiens
gaaacacaacataca

SEQ ID NO: 344893 - DNA, 15 bp, Homo sapiens
agaaacacaacatac

SEQ ID NO: 344894 - DNA, 15 bp, Homo sapiens
gagaaacacaacata

SEQ ID NO: 344895 - DNA, 15 bp, Homo sapiens
agagaaacacaacat

SEQ ID NO: 344896 - DNA, 15 bp, Homo sapiens
tagagaaacacaaca

SEQ ID NO: 344897 - DNA, 15 bp, Homo sapiens
ctagagaaacacaac

SEQ ID NO: 344898 - DNA, 15 bp, Homo sapiens
cctagagaaacacaa

SEQ ID NO: 344899 - DNA, 15 bp, Homo sapiens
ccctagagaaacaca

SEQ ID NO: 344900 - DNA, 15 bp, Homo sapiens
cccctagagaaacac

SEQ ID NO: 344901 - DNA, 15 bp, Homo sapiens
tcccctagagaaaca

SEQ ID NO: 344902 - DNA, 15 bp, Homo sapiens
atcccctagagaaac

SEQ ID NO: 344903 - DNA, 15 bp, Homo sapiens
catcccctagagaaa

SEQ ID NO: 344904 - DNA, 15 bp, Homo sapiens
ccatcccctagagaa

SEQ ID NO: 344905 - DNA, 15 bp, Homo sapiens
tccatcccctagaga

SEQ ID NO: 344906 - DNA, 15 bp, Homo sapiens
ttccatcccctagag

SEQ ID NO: 344907 - DNA, 15 bp, Homo sapiens
tttccatcccctaga

SEQ ID NO: 344908 - DNA, 15 bp, Homo sapiens
ttttccatcccctag

SEQ ID NO: 344909 - DNA, 15 bp, Homo sapiens
tttttccatccccta

SEQ ID NO: 344910 - DNA, 15 bp, Homo sapiens
atttttccatcccct

SEQ ID NO: 344911 - DNA, 15 bp, Homo sapiens
tatttttccatcccc

SEQ ID NO: 344912 - DNA, 15 bp, Homo sapiens
ttatttttccatccc

SEQ ID NO: 344913 - DNA, 15 bp, Homo sapiens
cttatttttccatcc

SEQ ID NO: 344914 - DNA, 15 bp, Homo sapiens
tcttatttttccatc

SEQ ID NO: 344915 - DNA, 15 bp, Homo sapiens
ttcttatttttccat

SEQ ID NO: 344916 - DNA, 15 bp, Homo sapiens
attcttatttttcca

SEQ ID NO: 344917 - DNA, 15 bp, Homo sapiens
cattcttatttttcc

SEQ ID NO: 344918 - DNA, 15 bp, Homo sapiens
ccattcttatttttc

SEQ ID NO: 344919 - DNA, 15 bp, Homo sapiens
cccattcttattttt

SEQ ID NO: 344920 - DNA, 15 bp, Homo sapiens
acccattcttatttt

SEQ ID NO: 344921 - DNA, 15 bp, Homo sapiens
aacccattcttattt

SEQ ID NO: 344922 - DNA, 15 bp, Homo sapiens
taacccattcttatt

SEQ ID NO: 344923 - DNA, 15 bp, Homo sapiens
ataacccattcttat

SEQ ID NO: 344924 - DNA, 15 bp, Homo sapiens
aataacccattctta

SEQ ID NO: 344925 - DNA, 15 bp, Homo sapiens
taataacccattctt

SEQ ID NO: 344926 - DNA, 15 bp, Homo sapiens
ctaataacccattct

SEQ ID NO: 344927 - DNA, 15 bp, Homo sapiens
gctaataacccattc

SEQ ID NO: 344928 - DNA, 15 bp, Homo sapiens
agctaataacccatt

SEQ ID NO: 344929 - DNA, 15 bp, Homo sapiens
cagctaataacccat

SEQ ID NO: 344930 - DNA, 15 bp, Homo sapiens
ccagctaataaccca

SEQ ID NO: 344931 - DNA, 15 bp, Homo sapiens
gccagctaataaccc

SEQ ID NO: 344932 - DNA, 15 bp, Homo sapiens
tgccagctaataacc

SEQ ID NO: 344933 - DNA, 15 bp, Homo sapiens
ctgccagctaataac

SEQ ID NO: 344934 - DNA, 15 bp, Homo sapiens
tctgccagctaataa

SEQ ID NO: 344935 - DNA, 15 bp, Homo sapiens
ttctgccagctaata

SEQ ID NO: 344936 - DNA, 15 bp, Homo sapiens
tttctgccagctaat

SEQ ID NO: 344937 - DNA, 15 bp, Homo sapiens
atttctgccagctaa

SEQ ID NO: 344938 - DNA, 15 bp, Homo sapiens
catttctgccagcta

SEQ ID NO: 344939 - DNA, 15 bp, Homo sapiens
tcatttctgccagct

SEQ ID NO: 344940 - DNA, 15 bp, Homo sapiens
atcatttctgccagc

SEQ ID NO: 344941 - DNA, 15 bp, Homo sapiens
catcatttctgccag

SEQ ID NO: 344942 - DNA, 15 bp, Homo sapiens
tcatcatttctgcca

SEQ ID NO: 344943 - DNA, 15 bp, Homo sapiens
gtcatcatttctgcc

SEQ ID NO: 344944 - DNA, 15 bp, Homo sapiens
tgtcatcatttctgc

SEQ ID NO: 344945 - DNA, 15 bp, Homo sapiens
ctgtcatcatttctg

SEQ ID NO: 344946 - DNA, 15 bp, Homo sapiens
tctgtcatcatttct

SEQ ID NO: 344947 - DNA, 15 bp, Homo sapiens
atctgtcatcatttc

SEQ ID NO: 344948 - DNA, 15 bp, Homo sapiens
aatctgtcatcattt

SEQ ID NO: 344949 - DNA, 15 bp, Homo sapiens
aaatctgtcatcatt

SEQ ID NO: 344950 - DNA, 15 bp, Homo sapiens
caaatctgtcatcat

SEQ ID NO: 344951 - DNA, 15 bp, Homo sapiens
tcaaatctgtcatca

SEQ ID NO: 344952 - DNA, 15 bp, Homo sapiens
ctcaaatctgtcatc

SEQ ID NO: 344953 - DNA, 15 bp, Homo sapiens
actcaaatctgtcat

SEQ ID NO: 344954 - DNA, 15 bp, Homo sapiens
cactcaaatctgtca

SEQ ID NO: 344955 - DNA, 15 bp, Homo sapiens
gcactcaaatctgtc

SEQ ID NO: 344956 - DNA, 15 bp, Homo sapiens
agcactcaaatctgt

SEQ ID NO: 344957 - DNA, 15 bp, Homo sapiens
aagcactcaaatctg

SEQ ID NO: 344958 - DNA, 15 bp, Homo sapiens
taagcactcaaatct

SEQ ID NO: 344959 - DNA, 15 bp, Homo sapiens
gtaagcactcaaatc

SEQ ID NO: 344960 - DNA, 15 bp, Homo sapiens
agtaagcactcaaat

SEQ ID NO: 344961 - DNA, 15 bp, Homo sapiens
cagtaagcactcaaa

SEQ ID NO: 344962 - DNA, 15 bp, Homo sapiens
acagtaagcactcaa

SEQ ID NO: 344963 - DNA, 15 bp, Homo sapiens
tacagtaagcactca

SEQ ID NO: 344964 - DNA, 15 bp, Homo sapiens
ctacagtaagcactc

SEQ ID NO: 344965 - DNA, 15 bp, Homo sapiens
cctacagtaagcact

SEQ ID NO: 344966 - DNA, 15 bp, Homo sapiens
acctacagtaagcac

SEQ ID NO: 344967 - DNA, 15 bp, Homo sapiens
gacctacagtaagca

SEQ ID NO: 344968 - DNA, 15 bp, Homo sapiens
tgacctacagtaagc

SEQ ID NO: 344969 - DNA, 15 bp, Homo sapiens
ctgacctacagtaag

SEQ ID NO: 344970 - DNA, 15 bp, Homo sapiens
gctgacctacagtaa

SEQ ID NO: 344971 - DNA, 15 bp, Homo sapiens
agctgacctacagta

SEQ ID NO: 344972 - DNA, 15 bp, Homo sapiens
cagctgacctacagt

SEQ ID NO: 344973 - DNA, 15 bp, Homo sapiens
gcagctgacctacag

SEQ ID NO: 344974 - DNA, 15 bp, Homo sapiens
agcagctgacctaca

SEQ ID NO: 344975 - DNA, 15 bp, Homo sapiens
aagcagctgacctac

SEQ ID NO: 344976 - DNA, 15 bp, Homo sapiens
aaagcagctgaccta

SEQ ID NO: 344977 - DNA, 15 bp, Homo sapiens
taaagcagctgacct

SEQ ID NO: 344978 - DNA, 15 bp, Homo sapiens
gtaaagcagctgacc

SEQ ID NO: 344979 - DNA, 15 bp, Homo sapiens
tgtaaagcagctgac

SEQ ID NO: 344980 - DNA, 15 bp, Homo sapiens
atgtaaagcagctga

SEQ ID NO: 344981 - DNA, 15 bp, Homo sapiens
tatgtaaagcagctg

SEQ ID NO: 344982 - DNA, 15 bp, Homo sapiens
atatgtaaagcagct

SEQ ID NO: 344983 - DNA, 15 bp, Homo sapiens
catatgtaaagcagc

SEQ ID NO: 344984 - DNA, 15 bp, Homo sapiens
acatatgtaaagcag

SEQ ID NO: 344985 - DNA, 15 bp, Homo sapiens
aacatatgtaaagca

SEQ ID NO: 344986 - DNA, 15 bp, Homo sapiens
taacatatgtaaagc

SEQ ID NO: 344987 - DNA, 15 bp, Homo sapiens
gtaacatatgtaaag

SEQ ID NO: 344988 - DNA, 15 bp, Homo sapiens
ggtaacatatgtaaa

SEQ ID NO: 344989 - DNA, 15 bp, Homo sapiens
aggtaacatatgtaa

SEQ ID NO: 344990 - DNA, 15 bp, Homo sapiens
caggtaacatatgta

SEQ ID NO: 344991 - DNA, 15 bp, Homo sapiens
tcaggtaacatatgt

SEQ ID NO: 344992 - DNA, 15 bp, Homo sapiens
atcaggtaacatatg

SEQ ID NO: 344993 - DNA, 15 bp, Homo sapiens
aatcaggtaacatat

SEQ ID NO: 344994 - DNA, 15 bp, Homo sapiens
aaatcaggtaacata

SEQ ID NO: 344995 - DNA, 15 bp, Homo sapiens
aaaatcaggtaacat

SEQ ID NO: 344996 - DNA, 15 bp, Homo sapiens
taaaatcaggtaaca

SEQ ID NO: 344997 - DNA, 15 bp, Homo sapiens
ttaaaatcaggtaac

SEQ ID NO: 344998 - DNA, 15 bp, Homo sapiens
attaaaatcaggtaa

SEQ ID NO: 344999 - DNA, 15 bp, Homo sapiens
gattaaaatcaggta

SEQ ID NO: 345000 - DNA, 15 bp, Homo sapiens
agattaaaatcaggt

SEQ ID NO: 345001 - DNA, 15 bp, Homo sapiens
cagattaaaatcagg

SEQ ID NO: 345002 - DNA, 15 bp, Homo sapiens
tcagattaaaatcag

SEQ ID NO: 345003 - DNA, 15 bp, Homo sapiens
ctcagattaaaatca

SEQ ID NO: 345004 - DNA, 15 bp, Homo sapiens
cctcagattaaaatc

SEQ ID NO: 345005 - DNA, 15 bp, Homo sapiens
acctcagattaaaat

SEQ ID NO: 345006 - DNA, 15 bp, Homo sapiens
tacctcagattaaaa

SEQ ID NO: 345007 - DNA, 15 bp, Homo sapiens
ctacctcagattaaa

SEQ ID NO: 345008 - DNA, 15 bp, Homo sapiens
cctacctcagattaa

SEQ ID NO: 345009 - DNA, 15 bp, Homo sapiens
tcctacctcagatta

SEQ ID NO: 345010 - DNA, 15 bp, Homo sapiens
ttcctacctcagatt

SEQ ID NO: 345011 - DNA, 15 bp, Homo sapiens
gttcctacctcagat

SEQ ID NO: 345012 - DNA, 15 bp, Homo sapiens
agttcctacctcaga

SEQ ID NO: 345013 - DNA, 15 bp, Homo sapiens
tagttcctacctcag

SEQ ID NO: 345014 - DNA, 15 bp, Homo sapiens
atagttcctacctca

SEQ ID NO: 345015 - DNA, 15 bp, Homo sapiens
aatagttcctacctc

SEQ ID NO: 345016 - DNA, 15 bp, Homo sapiens
taatagttcctacct

SEQ ID NO: 345017 - DNA, 15 bp, Homo sapiens
gtaatagttcctacc

SEQ ID NO: 345018 - DNA, 15 bp, Homo sapiens
agtaatagttcctac

SEQ ID NO: 345019 - DNA, 15 bp, Homo sapiens
gagtaatagttccta

SEQ ID NO: 345020 - DNA, 15 bp, Homo sapiens
agagtaatagttcct

SEQ ID NO: 345021 - DNA, 15 bp, Homo sapiens
aagagtaatagttcc

SEQ ID NO: 345022 - DNA, 15 bp, Homo sapiens
gaagagtaatagttc

SEQ ID NO: 345023 - DNA, 15 bp, Homo sapiens
agaagagtaatagtt

SEQ ID NO: 345024 - DNA, 15 bp, Homo sapiens
aagaagagtaatagt

SEQ ID NO: 345025 - DNA, 15 bp, Homo sapiens
gaagaagagtaatag

SEQ ID NO: 345026 - DNA, 15 bp, Homo sapiens
tgaagaagagtaata

SEQ ID NO: 345027 - DNA, 15 bp, Homo sapiens
ctgaagaagagtaat

SEQ ID NO: 345028 - DNA, 15 bp, Homo sapiens
cctgaagaagagtaa

SEQ ID NO: 345029 - DNA, 15 bp, Homo sapiens
acctgaagaagagta

SEQ ID NO: 345030 - DNA, 15 bp, Homo sapiens
cacctgaagaagagt

SEQ ID NO: 345031 - DNA, 15 bp, Homo sapiens
ccacctgaagaagag

SEQ ID NO: 345032 - DNA, 15 bp, Homo sapiens
cccacctgaagaaga

SEQ ID NO: 345033 - DNA, 15 bp, Homo sapiens
tcccacctgaagaag

SEQ ID NO: 345034 - DNA, 15 bp, Homo sapiens
ttcccacctgaagaa

SEQ ID NO: 345035 - DNA, 15 bp, Homo sapiens
tttcccacctgaaga

SEQ ID NO: 345036 - DNA, 15 bp, Homo sapiens
ttttcccacctgaag

SEQ ID NO: 345037 - DNA, 15 bp, Homo sapiens
gttttcccacctgaa

SEQ ID NO: 345038 - DNA, 15 bp, Homo sapiens
agttttcccacctga

SEQ ID NO: 345039 - DNA, 15 bp, Homo sapiens
gagttttcccacctg

SEQ ID NO: 345040 - DNA, 15 bp, Homo sapiens
tgagttttcccacct

SEQ ID NO: 345041 - DNA, 15 bp, Homo sapiens
ctgagttttcccacc

SEQ ID NO: 345042 - DNA, 15 bp, Homo sapiens
cctgagttttcccac

SEQ ID NO: 345043 - DNA, 15 bp, Homo sapiens
tcctgagttttccca

SEQ ID NO: 345044 - DNA, 15 bp, Homo sapiens
gtcctgagttttccc

SEQ ID NO: 345045 - DNA, 15 bp, Homo sapiens
ggtcctgagttttcc

SEQ ID NO: 345046 - DNA, 15 bp, Homo sapiens
tggtcctgagttttc

SEQ ID NO: 345047 - DNA, 15 bp, Homo sapiens
atggtcctgagtttt

SEQ ID NO: 345048 - DNA, 15 bp, Homo sapiens
tatggtcctgagttt

SEQ ID NO: 345049 - DNA, 15 bp, Homo sapiens
ctatggtcctgagtt

SEQ ID NO: 345050 - DNA, 15 bp, Homo sapiens
tctatggtcctgagt

SEQ ID NO: 345051 - DNA, 15 bp, Homo sapiens
ctctatggtcctgag

SEQ ID NO: 345052 - DNA, 15 bp, Homo sapiens
cctctatggtcctga

SEQ ID NO: 345053 - DNA, 15 bp, Homo sapiens
acctctatggtcctg

SEQ ID NO: 345054 - DNA, 15 bp, Homo sapiens
aacctctatggtcct

SEQ ID NO: 345055 - DNA, 15 bp, Homo sapiens
taacctctatggtcc

SEQ ID NO: 345056 - DNA, 15 bp, Homo sapiens
ttaacctctatggtc

SEQ ID NO: 345057 - DNA, 15 bp, Homo sapiens
tttaacctctatggt

SEQ ID NO: 345058 - DNA, 15 bp, Homo sapiens
atttaacctctatgg

SEQ ID NO: 345059 - DNA, 15 bp, Homo sapiens
tatttaacctctatg

SEQ ID NO: 345060 - DNA, 15 bp, Homo sapiens
gtatttaacctctat

SEQ ID NO: 345061 - DNA, 15 bp, Homo sapiens
ggtatttaacctcta

SEQ ID NO: 345062 - DNA, 15 bp, Homo sapiens
aggtatttaacctct

SEQ ID NO: 345063 - DNA, 15 bp, Homo sapiens
gaggtatttaacctc

SEQ ID NO: 345064 - DNA, 15 bp, Homo sapiens
tgaggtatttaacct

SEQ ID NO: 345065 - DNA, 15 bp, Homo sapiens
atgaggtatttaacc

SEQ ID NO: 345066 - DNA, 15 bp, Homo sapiens
catgaggtatttaac

SEQ ID NO: 345067 - DNA, 15 bp, Homo sapiens
gcatgaggtatttaa

SEQ ID NO: 345068 - DNA, 15 bp, Homo sapiens
tgcatgaggtattta

SEQ ID NO: 345069 - DNA, 15 bp, Homo sapiens
gtgcatgaggtattt

SEQ ID NO: 345070 - DNA, 15 bp, Homo sapiens
tgtgcatgaggtatt

SEQ ID NO: 345071 - DNA, 15 bp, Homo sapiens
ctgtgcatgaggtat

SEQ ID NO: 345072 - DNA, 15 bp, Homo sapiens
actgtgcatgaggta

SEQ ID NO: 345073 - DNA, 15 bp, Homo sapiens
tactgtgcatgaggt

SEQ ID NO: 345074 - DNA, 15 bp, Homo sapiens
ttactgtgcatgagg

SEQ ID NO: 345075 - DNA, 15 bp, Homo sapiens
gttactgtgcatgag

SEQ ID NO: 345076 - DNA, 15 bp, Homo sapiens
agttactgtgcatga

SEQ ID NO: 345077 - DNA, 15 bp, Homo sapiens
tagttactgtgcatg

SEQ ID NO: 345078 - DNA, 15 bp, Homo sapiens
gtagttactgtgcat

SEQ ID NO: 345079 - DNA, 15 bp, Homo sapiens
agtagttactgtgca

SEQ ID NO: 345080 - DNA, 15 bp, Homo sapiens
tagtagttactgtgc

SEQ ID NO: 345081 - DNA, 15 bp, Homo sapiens
ttagtagttactgtg

SEQ ID NO: 345082 - DNA, 15 bp, Homo sapiens
cttagtagttactgt

SEQ ID NO: 345083 - DNA, 15 bp, Homo sapiens
tcttagtagttactg

SEQ ID NO: 345084 - DNA, 15 bp, Homo sapiens
ttcttagtagttact

SEQ ID NO: 345085 - DNA, 15 bp, Homo sapiens
cttcttagtagttac

SEQ ID NO: 345086 - DNA, 15 bp, Homo sapiens
acttcttagtagtta

SEQ ID NO: 345087 - DNA, 15 bp, Homo sapiens
cacttcttagtagtt

SEQ ID NO: 345088 - DNA, 15 bp, Homo sapiens
ccacttcttagtagt

SEQ ID NO: 345089 - DNA, 15 bp, Homo sapiens
tccacttcttagtag

SEQ ID NO: 345090 - DNA, 15 bp, Homo sapiens
ttccacttcttagta

SEQ ID NO: 345091 - DNA, 15 bp, Homo sapiens
cttccacttcttagt

SEQ ID NO: 345092 - DNA, 15 bp, Homo sapiens
tcttccacttcttag

SEQ ID NO: 345093 - DNA, 15 bp, Homo sapiens
ttcttccacttctta

SEQ ID NO: 345094 - DNA, 15 bp, Homo sapiens
gttcttccacttctt

SEQ ID NO: 345095 - DNA, 15 bp, Homo sapiens
ggttcttccacttct

SEQ ID NO: 345096 - DNA, 15 bp, Homo sapiens
tggttcttccacttc

SEQ ID NO: 345097 - DNA, 15 bp, Homo sapiens
ctggttcttccactt

SEQ ID NO: 345098 - DNA, 15 bp, Homo sapiens
tctggttcttccact

SEQ ID NO: 345099 - DNA, 15 bp, Homo sapiens
atctggttcttccac

SEQ ID NO: 345100 - DNA, 15 bp, Homo sapiens
aatctggttcttcca

SEQ ID NO: 345101 - DNA, 15 bp, Homo sapiens
taatctggttcttcc

SEQ ID NO: 345102 - DNA, 15 bp, Homo sapiens
ttaatctggttcttc

SEQ ID NO: 345103 - DNA, 15 bp, Homo sapiens
tttaatctggttctt

SEQ ID NO: 345104 - DNA, 15 bp, Homo sapiens
ttttaatctggttct

SEQ ID NO: 345105 - DNA, 15 bp, Homo sapiens
attttaatctggttc

SEQ ID NO: 345106 - DNA, 15 bp, Homo sapiens
gattttaatctggtt

SEQ ID NO: 345107 - DNA, 15 bp, Homo sapiens
ggattttaatctggt

SEQ ID NO: 345108 - DNA, 15 bp, Homo sapiens
tggattttaatctgg

SEQ ID NO: 345109 - DNA, 15 bp, Homo sapiens
ctggattttaatctg

SEQ ID NO: 345110 - DNA, 15 bp, Homo sapiens
actggattttaatct

SEQ ID NO: 345111 - DNA, 15 bp, Homo sapiens
gactggattttaatc

SEQ ID NO: 345112 - DNA, 15 bp, Homo sapiens
agactggattttaat

SEQ ID NO: 345113 - DNA, 15 bp, Homo sapiens
tagactggattttaa

SEQ ID NO: 345114 - DNA, 15 bp, Homo sapiens
atagactggatttta

SEQ ID NO: 345115 - DNA, 15 bp, Homo sapiens
aatagactggatttt

SEQ ID NO: 345116 - DNA, 15 bp, Homo sapiens
aaatagactggattt

SEQ ID NO: 345117 - DNA, 15 bp, Homo sapiens
taaatagactggatt

SEQ ID NO: 345118 - DNA, 15 bp, Homo sapiens
ataaatagactggat

SEQ ID NO: 345119 - DNA, 15 bp, Homo sapiens
cataaatagactgga

SEQ ID NO: 345120 - DNA, 15 bp, Homo sapiens
gcataaatagactgg

SEQ ID NO: 345121 - DNA, 15 bp, Homo sapiens
agcataaatagactg

SEQ ID NO: 345122 - DNA, 15 bp, Homo sapiens
aagcataaatagact

SEQ ID NO: 345123 - DNA, 15 bp, Homo sapiens
taagcataaatagac

SEQ ID NO: 345124 - DNA, 15 bp, Homo sapiens
ctaagcataaataga

SEQ ID NO: 345125 - DNA, 15 bp, Homo sapiens
tctaagcataaatag

SEQ ID NO: 345126 - DNA, 15 bp, Homo sapiens
ctctaagcataaata

SEQ ID NO: 345127 - DNA, 15 bp, Homo sapiens
gctctaagcataaat

SEQ ID NO: 345128 - DNA, 15 bp, Homo sapiens
ggctctaagcataaa

SEQ ID NO: 345129 - DNA, 15 bp, Homo sapiens
aggctctaagcataa

SEQ ID NO: 345130 - DNA, 15 bp, Homo sapiens
caggctctaagcata

SEQ ID NO: 345131 - DNA, 15 bp, Homo sapiens
gcaggctctaagcat

SEQ ID NO: 345132 - DNA, 15 bp, Homo sapiens
ggcaggctctaagca

SEQ ID NO: 345133 - DNA, 15 bp, Homo sapiens
gggcaggctctaagc

SEQ ID NO: 345134 - DNA, 15 bp, Homo sapiens
ggggcaggctctaag

SEQ ID NO: 345135 - DNA, 15 bp, Homo sapiens
gggggcaggctctaa

SEQ ID NO: 345136 - DNA, 15 bp, Homo sapiens
agggggcaggctcta

SEQ ID NO: 345137 - DNA, 15 bp, Homo sapiens
aagggggcaggctct

SEQ ID NO: 345138 - DNA, 15 bp, Homo sapiens
taagggggcaggctc

SEQ ID NO: 345139 - DNA, 15 bp, Homo sapiens
ttaagggggcaggct

SEQ ID NO: 345140 - DNA, 15 bp, Homo sapiens
gttaagggggcaggc

SEQ ID NO: 345141 - DNA, 15 bp, Homo sapiens
agttaagggggcagg

SEQ ID NO: 345142 - DNA, 15 bp, Homo sapiens
tagttaagggggcag

SEQ ID NO: 345143 - DNA, 15 bp, Homo sapiens
gtagttaagggggca

SEQ ID NO: 345144 - DNA, 15 bp, Homo sapiens
agtagttaagggggc

SEQ ID NO: 345145 - DNA, 15 bp, Homo sapiens
tagtagttaaggggg

SEQ ID NO: 345146 - DNA, 15 bp, Homo sapiens
atagtagttaagggg

SEQ ID NO: 345147 - DNA, 15 bp, Homo sapiens
catagtagttaaggg

SEQ ID NO: 345148 - DNA, 15 bp, Homo sapiens
gcatagtagttaagg

SEQ ID NO: 345149 - DNA, 15 bp, Homo sapiens
cgcatagtagttaag

SEQ ID NO: 345150 - DNA, 15 bp, Homo sapiens
ccgcatagtagttaa

SEQ ID NO: 345151 - DNA, 15 bp, Homo sapiens
accgcatagtagtta

SEQ ID NO: 345152 - DNA, 15 bp, Homo sapiens
caccgcatagtagtt

SEQ ID NO: 345153 - DNA, 15 bp, Homo sapiens
acaccgcatagtagt

SEQ ID NO: 345154 - DNA, 15 bp, Homo sapiens
aacaccgcatagtag

SEQ ID NO: 345155 - DNA, 15 bp, Homo sapiens
caacaccgcatagta

SEQ ID NO: 345156 - DNA, 15 bp, Homo sapiens
acaacaccgcatagt

SEQ ID NO: 345157 - DNA, 15 bp, Homo sapiens
gacaacaccgcatag

SEQ ID NO: 345158 - DNA, 15 bp, Homo sapiens
agacaacaccgcata

SEQ ID NO: 345159 - DNA, 15 bp, Homo sapiens
gagacaacaccgcat

SEQ ID NO: 345160 - DNA, 15 bp, Homo sapiens
tgagacaacaccgca

SEQ ID NO: 345161 - DNA, 15 bp, Homo sapiens
ctgagacaacaccgc

SEQ ID NO: 345162 - DNA, 15 bp, Homo sapiens
tctgagacaacaccg

SEQ ID NO: 345163 - DNA, 15 bp, Homo sapiens
atctgagacaacacc

SEQ ID NO: 345164 - DNA, 15 bp, Homo sapiens
catctgagacaacac

SEQ ID NO: 345165 - DNA, 15 bp, Homo sapiens
acatctgagacaaca

SEQ ID NO: 345166 - DNA, 15 bp, Homo sapiens
tacatctgagacaac

SEQ ID NO: 345167 - DNA, 15 bp, Homo sapiens
ctacatctgagacaa

SEQ ID NO: 345168 - DNA, 15 bp, Homo sapiens
tctacatctgagaca

SEQ ID NO: 345169 - DNA, 15 bp, Homo sapiens
ttctacatctgagac

SEQ ID NO: 345170 - DNA, 15 bp, Homo sapiens
gttctacatctgaga

SEQ ID NO: 345171 - DNA, 15 bp, Homo sapiens
tgttctacatctgag

SEQ ID NO: 345172 - DNA, 15 bp, Homo sapiens
gtgttctacatctga

SEQ ID NO: 345173 - DNA, 15 bp, Homo sapiens
tgtgttctacatctg

SEQ ID NO: 345174 - DNA, 15 bp, Homo sapiens
atgtgttctacatct

SEQ ID NO: 345175 - DNA, 15 bp, Homo sapiens
gatgtgttctacatc

SEQ ID NO: 345176 - DNA, 15 bp, Homo sapiens
agatgtgttctacat

SEQ ID NO: 345177 - DNA, 15 bp, Homo sapiens
aagatgtgttctaca

SEQ ID NO: 345178 - DNA, 15 bp, Homo sapiens
aaagatgtgttctac

SEQ ID NO: 345179 - DNA, 15 bp, Homo sapiens
caaagatgtgttcta

SEQ ID NO: 345180 - DNA, 15 bp, Homo sapiens
acaaagatgtgttct

SEQ ID NO: 345181 - DNA, 15 bp, Homo sapiens
aacaaagatgtgttc

SEQ ID NO: 345182 - DNA, 15 bp, Homo sapiens
aaacaaagatgtgtt

SEQ ID NO: 345183 - DNA, 15 bp, Homo sapiens
aaaacaaagatgtgt

SEQ ID NO: 345184 - DNA, 15 bp, Homo sapiens
gaaaacaaagatgtg

SEQ ID NO: 345185 - DNA, 15 bp, Homo sapiens
agaaaacaaagatgt

SEQ ID NO: 345186 - DNA, 15 bp, Homo sapiens
gagaaaacaaagatg

SEQ ID NO: 345187 - DNA, 15 bp, Homo sapiens
agagaaaacaaagat

SEQ ID NO: 345188 - DNA, 15 bp, Homo sapiens
cagagaaaacaaaga

SEQ ID NO: 345189 - DNA, 15 bp, Homo sapiens
tcagagaaaacaaag

SEQ ID NO: 345190 - DNA, 15 bp, Homo sapiens
ctcagagaaaacaaa

SEQ ID NO: 345191 - DNA, 15 bp, Homo sapiens
cctcagagaaaacaa

SEQ ID NO: 345192 - DNA, 15 bp, Homo sapiens
tcctcagagaaaaca

SEQ ID NO: 345193 - DNA, 15 bp, Homo sapiens
gtcctcagagaaaac

SEQ ID NO: 345194 - DNA, 15 bp, Homo sapiens
agtcctcagagaaaa

SEQ ID NO: 345195 - DNA, 15 bp, Homo sapiens
aagtcctcagagaaa

SEQ ID NO: 345196 - DNA, 15 bp, Homo sapiens
taagtcctcagagaa

SEQ ID NO: 345197 - DNA, 15 bp, Homo sapiens
ctaagtcctcagaga

SEQ ID NO: 345198 - DNA, 15 bp, Homo sapiens
tctaagtcctcagag

SEQ ID NO: 345199 - DNA, 15 bp, Homo sapiens
ttctaagtcctcaga

SEQ ID NO: 345200 - DNA, 15 bp, Homo sapiens
tttctaagtcctcag

SEQ ID NO: 345201 - DNA, 15 bp, Homo sapiens
ttttctaagtcctca

SEQ ID NO: 345202 - DNA, 15 bp, Homo sapiens
tttttctaagtcctc

SEQ ID NO: 345203 - DNA, 15 bp, Homo sapiens
ttttttctaagtcct

SEQ ID NO: 345204 - DNA, 15 bp, Homo sapiens
gttttttctaagtcc

SEQ ID NO: 345205 - DNA, 15 bp, Homo sapiens
tgttttttctaagtc

SEQ ID NO: 345206 - DNA, 15 bp, Homo sapiens
gtgttttttctaagt

SEQ ID NO: 345207 - DNA, 15 bp, Homo sapiens
cgtgttttttctaag

SEQ ID NO: 345208 - DNA, 15 bp, Homo sapiens
gcgtgttttttctaa

SEQ ID NO: 345209 - DNA, 15 bp, Homo sapiens
cgcgtgttttttcta

SEQ ID NO: 345210 - DNA, 15 bp, Homo sapiens
acgcgtgttttttct

SEQ ID NO: 345211 - DNA, 15 bp, Homo sapiens
cacgcgtgttttttc

SEQ ID NO: 345212 - DNA, 15 bp, Homo sapiens
tcacgcgtgtttttt

SEQ ID NO: 345213 - DNA, 15 bp, Homo sapiens
atcacgcgtgttttt

SEQ ID NO: 345214 - DNA, 15 bp, Homo sapiens
aatcacgcgtgtttt

SEQ ID NO: 345215 - DNA, 15 bp, Homo sapiens
gaatcacgcgtgttt

SEQ ID NO: 345216 - DNA, 15 bp, Homo sapiens
agaatcacgcgtgtt

SEQ ID NO: 345217 - DNA, 15 bp, Homo sapiens
aagaatcacgcgtgt

SEQ ID NO: 345218 - DNA, 15 bp, Homo sapiens
gaagaatcacgcgtg

SEQ ID NO: 345219 - DNA, 15 bp, Homo sapiens
agaagaatcacgcgt

SEQ ID NO: 345220 - DNA, 15 bp, Homo sapiens
gagaagaatcacgcg

SEQ ID NO: 345221 - DNA, 15 bp, Homo sapiens
ggagaagaatcacgc

SEQ ID NO: 345222 - DNA, 15 bp, Homo sapiens
tggagaagaatcacg

SEQ ID NO: 345223 - DNA, 15 bp, Homo sapiens
gtggagaagaatcac

SEQ ID NO: 345224 - DNA, 15 bp, Homo sapiens
agtggagaagaatca

SEQ ID NO: 345225 - DNA, 15 bp, Homo sapiens
cagtggagaagaatc

SEQ ID NO: 345226 - DNA, 15 bp, Homo sapiens
tcagtggagaagaat

SEQ ID NO: 345227 - DNA, 15 bp, Homo sapiens
ttcagtggagaagaa

SEQ ID NO: 345228 - DNA, 15 bp, Homo sapiens
attcagtggagaaga

SEQ ID NO: 345229 - DNA, 15 bp, Homo sapiens
tattcagtggagaag

SEQ ID NO: 345230 - DNA, 15 bp, Homo sapiens
atattcagtggagaa

SEQ ID NO: 345231 - DNA, 15 bp, Homo sapiens
tatattcagtggaga

SEQ ID NO: 345232 - DNA, 15 bp, Homo sapiens
ctatattcagtggag

SEQ ID NO: 345233 - DNA, 15 bp, Homo sapiens
cctatattcagtgga

SEQ ID NO: 345234 - DNA, 15 bp, Homo sapiens
tcctatattcagtgg

SEQ ID NO: 345235 - DNA, 15 bp, Homo sapiens
ttcctatattcagtg

SEQ ID NO: 345236 - DNA, 15 bp, Homo sapiens
attcctatattcagt

SEQ ID NO: 345237 - DNA, 15 bp, Homo sapiens
tattcctatattcag

SEQ ID NO: 345238 - DNA, 15 bp, Homo sapiens
ctattcctatattca

SEQ ID NO: 345239 - DNA, 15 bp, Homo sapiens
actattcctatattc

SEQ ID NO: 345240 - DNA, 15 bp, Homo sapiens
aactattcctatatt

SEQ ID NO: 345241 - DNA, 15 bp, Homo sapiens
aaactattcctatat

SEQ ID NO: 345242 - DNA, 15 bp, Homo sapiens
gaaactattcctata

SEQ ID NO: 345243 - DNA, 15 bp, Homo sapiens
agaaactattcctat

SEQ ID NO: 345244 - DNA, 15 bp, Homo sapiens
tagaaactattccta

SEQ ID NO: 345245 - DNA, 15 bp, Homo sapiens
gtagaaactattcct

SEQ ID NO: 345246 - DNA, 15 bp, Homo sapiens
ggtagaaactattcc

SEQ ID NO: 345247 - DNA, 15 bp, Homo sapiens
gggtagaaactattc

SEQ ID NO: 345248 - DNA, 15 bp, Homo sapiens
agggtagaaactatt

SEQ ID NO: 345249 - DNA, 15 bp, Homo sapiens
cagggtagaaactat

SEQ ID NO: 345250 - DNA, 15 bp, Homo sapiens
acagggtagaaacta

SEQ ID NO: 345251 - DNA, 15 bp, Homo sapiens
aacagggtagaaact

SEQ ID NO: 345252 - DNA, 15 bp, Homo sapiens
aaacagggtagaaac

SEQ ID NO: 345253 - DNA, 15 bp, Homo sapiens
taaacagggtagaaa

SEQ ID NO: 345254 - DNA, 15 bp, Homo sapiens
ctaaacagggtagaa

SEQ ID NO: 345255 - DNA, 15 bp, Homo sapiens
tctaaacagggtaga

SEQ ID NO: 345256 - DNA, 15 bp, Homo sapiens
ttctaaacagggtag

SEQ ID NO: 345257 - DNA, 15 bp, Homo sapiens
gttctaaacagggta

SEQ ID NO: 345258 - DNA, 15 bp, Homo sapiens
tgttctaaacagggt

SEQ ID NO: 345259 - DNA, 15 bp, Homo sapiens
atgttctaaacaggg

SEQ ID NO: 345260 - DNA, 15 bp, Homo sapiens
catgttctaaacagg

SEQ ID NO: 345261 - DNA, 15 bp, Homo sapiens
gcatgttctaaacag

SEQ ID NO: 345262 - DNA, 15 bp, Homo sapiens
tgcatgttctaaaca

SEQ ID NO: 345263 - DNA, 15 bp, Homo sapiens
atgcatgttctaaac

SEQ ID NO: 345264 - DNA, 15 bp, Homo sapiens
tatgcatgttctaaa

SEQ ID NO: 345265 - DNA, 15 bp, Homo sapiens
ctatgcatgttctaa

SEQ ID NO: 345266 - DNA, 15 bp, Homo sapiens
actatgcatgttcta

SEQ ID NO: 345267 - DNA, 15 bp, Homo sapiens
gactatgcatgttct

SEQ ID NO: 345268 - DNA, 15 bp, Homo sapiens
agactatgcatgttc

SEQ ID NO: 345269 - DNA, 15 bp, Homo sapiens
aagactatgcatgtt

SEQ ID NO: 345270 - DNA, 15 bp, Homo sapiens
aaagactatgcatgt

SEQ ID NO: 345271 - DNA, 15 bp, Homo sapiens
taaagactatgcatg

SEQ ID NO: 345272 - DNA, 15 bp, Homo sapiens
ataaagactatgcat

SEQ ID NO: 345273 - DNA, 15 bp, Homo sapiens
gataaagactatgca

SEQ ID NO: 345274 - DNA, 15 bp, Homo sapiens
tgataaagactatgc

SEQ ID NO: 345275 - DNA, 15 bp, Homo sapiens
ttgataaagactatg

SEQ ID NO: 345276 - DNA, 15 bp, Homo sapiens
attgataaagactat

SEQ ID NO: 345277 - DNA, 15 bp, Homo sapiens
tattgataaagacta

SEQ ID NO: 345278 - DNA, 15 bp, Homo sapiens
ttattgataaagact

SEQ ID NO: 345279 - DNA, 15 bp, Homo sapiens
cttattgataaagac

SEQ ID NO: 345280 - DNA, 15 bp, Homo sapiens
acttattgataaaga

SEQ ID NO: 345281 - DNA, 15 bp, Homo sapiens
cacttattgataaag

SEQ ID NO: 345282 - DNA, 15 bp, Homo sapiens
acacttattgataaa

SEQ ID NO: 345283 - DNA, 15 bp, Homo sapiens
aacacttattgataa

SEQ ID NO: 345284 - DNA, 15 bp, Homo sapiens
taacacttattgata

SEQ ID NO: 345285 - DNA, 15 bp, Homo sapiens
ttaacacttattgat

SEQ ID NO: 345286 - DNA, 15 bp, Homo sapiens
gttaacacttattga

SEQ ID NO: 345287 - DNA, 15 bp, Homo sapiens
agttaacacttattg

SEQ ID NO: 345288 - DNA, 15 bp, Homo sapiens
cagttaacacttatt

SEQ ID NO: 345289 - DNA, 15 bp, Homo sapiens
tcagttaacacttat

SEQ ID NO: 345290 - DNA, 15 bp, Homo sapiens
gtcagttaacactta

SEQ ID NO: 345291 - DNA, 15 bp, Homo sapiens
tgtcagttaacactt

SEQ ID NO: 345292 - DNA, 15 bp, Homo sapiens
atgtcagttaacact

SEQ ID NO: 345293 - DNA, 15 bp, Homo sapiens
catgtcagttaacac

SEQ ID NO: 345294 - DNA, 15 bp, Homo sapiens
acatgtcagttaaca

SEQ ID NO: 345295 - DNA, 15 bp, Homo sapiens
cacatgtcagttaac

SEQ ID NO: 345296 - DNA, 15 bp, Homo sapiens
tcacatgtcagttaa

SEQ ID NO: 345297 - DNA, 15 bp, Homo sapiens
ttcacatgtcagtta

SEQ ID NO: 345298 - DNA, 15 bp, Homo sapiens
tttcacatgtcagtt

SEQ ID NO: 345299 - DNA, 15 bp, Homo sapiens
atttcacatgtcagt

SEQ ID NO: 345300 - DNA, 15 bp, Homo sapiens
gatttcacatgtcag

SEQ ID NO: 345301 - DNA, 15 bp, Homo sapiens
tgatttcacatgtca

SEQ ID NO: 345302 - DNA, 15 bp, Homo sapiens
gtgatttcacatgtc

SEQ ID NO: 345303 - DNA, 15 bp, Homo sapiens
agtgatttcacatgt

SEQ ID NO: 345304 - DNA, 15 bp, Homo sapiens
aagtgatttcacatg

SEQ ID NO: 345305 - DNA, 15 bp, Homo sapiens
aaagtgatttcacat

SEQ ID NO: 345306 - DNA, 15 bp, Homo sapiens
gaaagtgatttcaca

SEQ ID NO: 345307 - DNA, 15 bp, Homo sapiens
agaaagtgatttcac

SEQ ID NO: 345308 - DNA, 15 bp, Homo sapiens
tagaaagtgatttca

SEQ ID NO: 345309 - DNA, 15 bp, Homo sapiens
gtagaaagtgatttc

SEQ ID NO: 345310 - DNA, 15 bp, Homo sapiens
agtagaaagtgattt

SEQ ID NO: 345311 - DNA, 15 bp, Homo sapiens
gagtagaaagtgatt

SEQ ID NO: 345312 - DNA, 15 bp, Homo sapiens
agagtagaaagtgat

SEQ ID NO: 345313 - DNA, 15 bp, Homo sapiens
aagagtagaaagtga

SEQ ID NO: 345314 - DNA, 15 bp, Homo sapiens
aaagagtagaaagtg

SEQ ID NO: 345315 - DNA, 15 bp, Homo sapiens
caaagagtagaaagt

SEQ ID NO: 345316 - DNA, 15 bp, Homo sapiens
ccaaagagtagaaag

SEQ ID NO: 345317 - DNA, 15 bp, Homo sapiens
tccaaagagtagaaa

SEQ ID NO: 345318 - DNA, 15 bp, Homo sapiens
ttccaaagagtagaa

SEQ ID NO: 345319 - DNA, 15 bp, Homo sapiens
cttccaaagagtaga

SEQ ID NO: 345320 - DNA, 15 bp, Homo sapiens
gcttccaaagagtag

SEQ ID NO: 345321 - DNA, 15 bp, Homo sapiens
ggcttccaaagagta

SEQ ID NO: 345322 - DNA, 15 bp, Homo sapiens
cggcttccaaagagt

SEQ ID NO: 345323 - DNA, 15 bp, Homo sapiens
tcggcttccaaagag

SEQ ID NO: 345324 - DNA, 15 bp, Homo sapiens
atcggcttccaaaga

SEQ ID NO: 345325 - DNA, 15 bp, Homo sapiens
catcggcttccaaag

SEQ ID NO: 345326 - DNA, 15 bp, Homo sapiens
acatcggcttccaaa

SEQ ID NO: 345327 - DNA, 15 bp, Homo sapiens
aacatcggcttccaa

SEQ ID NO: 345328 - DNA, 15 bp, Homo sapiens
aaacatcggcttcca

SEQ ID NO: 345329 - DNA, 15 bp, Homo sapiens
aaaacatcggcttcc

SEQ ID NO: 345330 - DNA, 15 bp, Homo sapiens
taaaacatcggcttc

SEQ ID NO: 345331 - DNA, 15 bp, Homo sapiens
ttaaaacatcggctt

SEQ ID NO: 345332 - DNA, 15 bp, Homo sapiens
cttaaaacatcggct

SEQ ID NO: 345333 - DNA, 15 bp, Homo sapiens
acttaaaacatcggc

SEQ ID NO: 345334 - DNA, 15 bp, Homo sapiens
gacttaaaacatcgg

SEQ ID NO: 345335 - DNA, 15 bp, Homo sapiens
ggacttaaaacatcg

SEQ ID NO: 345336 - DNA, 15 bp, Homo sapiens
tggacttaaaacatc

SEQ ID NO: 345337 - DNA, 15 bp, Homo sapiens
ttggacttaaaacat

SEQ ID NO: 345338 - DNA, 15 bp, Homo sapiens
cttggacttaaaaca

SEQ ID NO: 345339 - DNA, 15 bp, Homo sapiens
acttggacttaaaac

SEQ ID NO: 345340 - DNA, 15 bp, Homo sapiens
tacttggacttaaaa

SEQ ID NO: 345341 - DNA, 15 bp, Homo sapiens
ctacttggacttaaa

SEQ ID NO: 345342 - DNA, 15 bp, Homo sapiens
actacttggacttaa

SEQ ID NO: 345343 - DNA, 15 bp, Homo sapiens
gactacttggactta

SEQ ID NO: 345344 - DNA, 15 bp, Homo sapiens
agactacttggactt

SEQ ID NO: 345345 - DNA, 15 bp, Homo sapiens
cagactacttggact

SEQ ID NO: 345346 - DNA, 15 bp, Homo sapiens
acagactacttggac

SEQ ID NO: 345347 - DNA, 15 bp, Homo sapiens
tacagactacttgga

SEQ ID NO: 345348 - DNA, 15 bp, Homo sapiens
atacagactacttgg

SEQ ID NO: 345349 - DNA, 15 bp, Homo sapiens
catacagactacttg

SEQ ID NO: 345350 - DNA, 15 bp, Homo sapiens
ccatacagactactt

SEQ ID NO: 345351 - DNA, 15 bp, Homo sapiens
accatacagactact

SEQ ID NO: 345352 - DNA, 15 bp, Homo sapiens
caccatacagactac

SEQ ID NO: 345353 - DNA, 15 bp, Homo sapiens
ccaccatacagacta

SEQ ID NO: 345354 - DNA, 15 bp, Homo sapiens
tccaccatacagact

SEQ ID NO: 345355 - DNA, 15 bp, Homo sapiens
ttccaccatacagac

SEQ ID NO: 345356 - DNA, 15 bp, Homo sapiens
tttccaccatacaga

SEQ ID NO: 345357 - DNA, 15 bp, Homo sapiens
atttccaccatacag

SEQ ID NO: 345358 - DNA, 15 bp, Homo sapiens
aatttccaccataca

SEQ ID NO: 345359 - DNA, 15 bp, Homo sapiens
gaatttccaccatac

SEQ ID NO: 345360 - DNA, 15 bp, Homo sapiens
ggaatttccaccata

SEQ ID NO: 345361 - DNA, 15 bp, Homo sapiens
aggaatttccaccat

SEQ ID NO: 345362 - DNA, 15 bp, Homo sapiens
taggaatttccacca

SEQ ID NO: 345363 - DNA, 15 bp, Homo sapiens
ttaggaatttccacc

SEQ ID NO: 345364 - DNA, 15 bp, Homo sapiens
gttaggaatttccac

SEQ ID NO: 345365 - DNA, 15 bp, Homo sapiens
agttaggaatttcca

SEQ ID NO: 345366 - DNA, 15 bp, Homo sapiens
aagttaggaatttcc

SEQ ID NO: 345367 - DNA, 15 bp, Homo sapiens
taagttaggaatttc

SEQ ID NO: 345368 - DNA, 15 bp, Homo sapiens
ataagttaggaattt

SEQ ID NO: 345369 - DNA, 15 bp, Homo sapiens
cataagttaggaatt

SEQ ID NO: 345370 - DNA, 15 bp, Homo sapiens
acataagttaggaat

SEQ ID NO: 345371 - DNA, 15 bp, Homo sapiens
aacataagttaggaa

SEQ ID NO: 345372 - DNA, 15 bp, Homo sapiens
taacataagttagga

SEQ ID NO: 345373 - DNA, 15 bp, Homo sapiens
ttaacataagttagg

SEQ ID NO: 345374 - DNA, 15 bp, Homo sapiens
tttaacataagttag

SEQ ID NO: 345375 - DNA, 15 bp, Homo sapiens
ttttaacataagtta

SEQ ID NO: 345376 - DNA, 15 bp, Homo sapiens
tttttaacataagtt

SEQ ID NO: 345377 - DNA, 15 bp, Homo sapiens
ttttttaacataagt

SEQ ID NO: 345378 - DNA, 15 bp, Homo sapiens
tttttttaacataag

SEQ ID NO: 345379 - DNA, 15 bp, Homo sapiens
ttttttttaacataa

SEQ ID NO: 345380 - DNA, 15 bp, Homo sapiens
cttttttttaacata

SEQ ID NO: 345381 - DNA, 15 bp, Homo sapiens
tcttttttttaacat

SEQ ID NO: 345382 - DNA, 15 bp, Homo sapiens
ttcttttttttaaca

SEQ ID NO: 345383 - DNA, 15 bp, Homo sapiens
tttcttttttttaac

SEQ ID NO: 345384 - DNA, 15 bp, Homo sapiens
ttttcttttttttaa

SEQ ID NO: 345385 - DNA, 15 bp, Homo sapiens
gttttctttttttta

SEQ ID NO: 345386 - DNA, 15 bp, Homo sapiens
ggttttctttttttt

SEQ ID NO: 345387 - DNA, 15 bp, Homo sapiens
tggttttcttttttt

SEQ ID NO: 345388 - DNA, 15 bp, Homo sapiens
gtggttttctttttt

SEQ ID NO: 345389 - DNA, 15 bp, Homo sapiens
agtggttttcttttt

SEQ ID NO: 345390 - DNA, 15 bp, Homo sapiens
cagtggttttctttt

SEQ ID NO: 345391 - DNA, 15 bp, Homo sapiens
acagtggttttcttt

SEQ ID NO: 345392 - DNA, 15 bp, Homo sapiens
tacagtggttttctt

SEQ ID NO: 345393 - DNA, 15 bp, Homo sapiens
ttacagtggttttct

SEQ ID NO: 345394 - DNA, 15 bp, Homo sapiens
gttacagtggttttc

SEQ ID NO: 345395 - DNA, 15 bp, Homo sapiens
agttacagtggtttt

SEQ ID NO: 345396 - DNA, 15 bp, Homo sapiens
aagttacagtggttt

SEQ ID NO: 345397 - DNA, 15 bp, Homo sapiens
taagttacagtggtt

SEQ ID NO: 345398 - DNA, 15 bp, Homo sapiens
ctaagttacagtggt

SEQ ID NO: 345399 - DNA, 15 bp, Homo sapiens
gctaagttacagtgg

SEQ ID NO: 345400 - DNA, 15 bp, Homo sapiens
agctaagttacagtg

SEQ ID NO: 345401 - DNA, 15 bp, Homo sapiens
tagctaagttacagt

SEQ ID NO: 345402 - DNA, 15 bp, Homo sapiens
atagctaagttacag

SEQ ID NO: 345403 - DNA, 15 bp, Homo sapiens
tatagctaagttaca

SEQ ID NO: 345404 - DNA, 15 bp, Homo sapiens
ttatagctaagttac

SEQ ID NO: 345405 - DNA, 15 bp, Homo sapiens
gttatagctaagtta

SEQ ID NO: 345406 - DNA, 15 bp, Homo sapiens
tgttatagctaagtt

SEQ ID NO: 345407 - DNA, 15 bp, Homo sapiens
ctgttatagctaagt

SEQ ID NO: 345408 - DNA, 15 bp, Homo sapiens
actgttatagctaag

SEQ ID NO: 345409 - DNA, 15 bp, Homo sapiens
gactgttatagctaa

SEQ ID NO: 345410 - DNA, 15 bp, Homo sapiens
agactgttatagcta

SEQ ID NO: 345411 - DNA, 15 bp, Homo sapiens
aagactgttatagct

SEQ ID NO: 345412 - DNA, 15 bp, Homo sapiens
taagactgttatagc

SEQ ID NO: 345413 - DNA, 15 bp, Homo sapiens
ataagactgttatag

SEQ ID NO: 345414 - DNA, 15 bp, Homo sapiens
tataagactgttata

SEQ ID NO: 345415 - DNA, 15 bp, Homo sapiens
atataagactgttat

SEQ ID NO: 345416 - DNA, 15 bp, Homo sapiens
tatataagactgtta

SEQ ID NO: 345417 - DNA, 15 bp, Homo sapiens
ttatataagactgtt

SEQ ID NO: 345418 - DNA, 15 bp, Homo sapiens
gttatataagactgt

SEQ ID NO: 345419 - DNA, 15 bp, Homo sapiens
agttatataagactg

SEQ ID NO: 345420 - DNA, 15 bp, Homo sapiens
aagttatataagact

SEQ ID NO: 345421 - DNA, 15 bp, Homo sapiens
taagttatataagac

SEQ ID NO: 345422 - DNA, 15 bp, Homo sapiens
ctaagttatataaga

SEQ ID NO: 345423 - DNA, 15 bp, Homo sapiens
tctaagttatataag

SEQ ID NO: 345424 - DNA, 15 bp, Homo sapiens
ttctaagttatataa

SEQ ID NO: 345425 - DNA, 15 bp, Homo sapiens
gttctaagttatata

SEQ ID NO: 345426 - DNA, 15 bp, Homo sapiens
agttctaagttatat

SEQ ID NO: 345427 - DNA, 15 bp, Homo sapiens
aagttctaagttata

SEQ ID NO: 345428 - DNA, 15 bp, Homo sapiens
aaagttctaagttat

SEQ ID NO: 345429 - DNA, 15 bp, Homo sapiens
taaagttctaagtta

SEQ ID NO: 345430 - DNA, 15 bp, Homo sapiens
ttaaagttctaagtt

SEQ ID NO: 345431 - DNA, 15 bp, Homo sapiens
cttaaagttctaagt

SEQ ID NO: 345432 - DNA, 15 bp, Homo sapiens
acttaaagttctaag

SEQ ID NO: 345433 - DNA, 15 bp, Homo sapiens
gacttaaagttctaa

SEQ ID NO: 345434 - DNA, 15 bp, Homo sapiens
agacttaaagttcta

SEQ ID NO: 345435 - DNA, 15 bp, Homo sapiens
gagacttaaagttct

SEQ ID NO: 345436 - DNA, 15 bp, Homo sapiens
tgagacttaaagttc

SEQ ID NO: 345437 - DNA, 15 bp, Homo sapiens
atgagacttaaagtt

SEQ ID NO: 345438 - DNA, 15 bp, Homo sapiens
aatgagacttaaagt

SEQ ID NO: 345439 - DNA, 15 bp, Homo sapiens
gaatgagacttaaag

SEQ ID NO: 345440 - DNA, 15 bp, Homo sapiens
ggaatgagacttaaa

SEQ ID NO: 345441 - DNA, 15 bp, Homo sapiens
tggaatgagacttaa

SEQ ID NO: 345442 - DNA, 15 bp, Homo sapiens
atggaatgagactta

SEQ ID NO: 345443 - DNA, 15 bp, Homo sapiens
aatggaatgagactt

SEQ ID NO: 345444 - DNA, 15 bp, Homo sapiens
aaatggaatgagact

SEQ ID NO: 345445 - DNA, 15 bp, Homo sapiens
taaatggaatgagac

SEQ ID NO: 345446 - DNA, 15 bp, Homo sapiens
gtaaatggaatgaga

SEQ ID NO: 345447 - DNA, 15 bp, Homo sapiens
ggtaaatggaatgag

SEQ ID NO: 345448 - DNA, 15 bp, Homo sapiens
tggtaaatggaatga

SEQ ID NO: 345449 - DNA, 15 bp, Homo sapiens
atggtaaatggaatg

SEQ ID NO: 345450 - DNA, 15 bp, Homo sapiens
tatggtaaatggaat

SEQ ID NO: 345451 - DNA, 15 bp, Homo sapiens
gtatggtaaatggaa

SEQ ID NO: 345452 - DNA, 15 bp, Homo sapiens
agtatggtaaatgga

SEQ ID NO: 345453 - DNA, 15 bp, Homo sapiens
aagtatggtaaatgg

SEQ ID NO: 345454 - DNA, 15 bp, Homo sapiens
caagtatggtaaatg

SEQ ID NO: 345455 - DNA, 15 bp, Homo sapiens
ccaagtatggtaaat

SEQ ID NO: 345456 - DNA, 15 bp, Homo sapiens
gccaagtatggtaaa

SEQ ID NO: 345457 - DNA, 15 bp, Homo sapiens
cgccaagtatggtaa

SEQ ID NO: 345458 - DNA, 15 bp, Homo sapiens
tcgccaagtatggta

SEQ ID NO: 345459 - DNA, 15 bp, Homo sapiens
ttcgccaagtatggt

SEQ ID NO: 345460 - DNA, 15 bp, Homo sapiens
tttcgccaagtatgg

SEQ ID NO: 345461 - DNA, 15 bp, Homo sapiens
ttttcgccaagtatg

SEQ ID NO: 345462 - DNA, 15 bp, Homo sapiens
gttttcgccaagtat

SEQ ID NO: 345463 - DNA, 15 bp, Homo sapiens
agttttcgccaagta

SEQ ID NO: 345464 - DNA, 15 bp, Homo sapiens
cagttttcgccaagt

SEQ ID NO: 345465 - DNA, 15 bp, Homo sapiens
tcagttttcgccaag

SEQ ID NO: 345466 - DNA, 15 bp, Homo sapiens
gtcagttttcgccaa

SEQ ID NO: 345467 - DNA, 15 bp, Homo sapiens
tgtcagttttcgcca

SEQ ID NO: 345468 - DNA, 15 bp, Homo sapiens
ttgtcagttttcgcc

SEQ ID NO: 345469 - DNA, 15 bp, Homo sapiens
tttgtcagttttcgc

SEQ ID NO: 345470 - DNA, 15 bp, Homo sapiens
atttgtcagttttcg

SEQ ID NO: 345471 - DNA, 15 bp, Homo sapiens
aatttgtcagttttc

SEQ ID NO: 345472 - DNA, 15 bp, Homo sapiens
aaatttgtcagtttt

SEQ ID NO: 345473 - DNA, 15 bp, Homo sapiens
aaaatttgtcagttt

SEQ ID NO: 345474 - DNA, 15 bp, Homo sapiens
taaaatttgtcagtt

SEQ ID NO: 345475 - DNA, 15 bp, Homo sapiens
ctaaaatttgtcagt

SEQ ID NO: 345476 - DNA, 15 bp, Homo sapiens
tctaaaatttgtcag

SEQ ID NO: 345477 - DNA, 15 bp, Homo sapiens
gtctaaaatttgtca

SEQ ID NO: 345478 - DNA, 15 bp, Homo sapiens
tgtctaaaatttgtc

SEQ ID NO: 345479 - DNA, 15 bp, Homo sapiens
ttgtctaaaatttgt

SEQ ID NO: 345480 - DNA, 15 bp, Homo sapiens
gttgtctaaaatttg

SEQ ID NO: 345481 - DNA, 15 bp, Homo sapiens
agttgtctaaaattt

SEQ ID NO: 345482 - DNA, 15 bp, Homo sapiens
cagttgtctaaaatt

SEQ ID NO: 345483 - DNA, 15 bp, Homo sapiens
acagttgtctaaaat

SEQ ID NO: 345484 - DNA, 15 bp, Homo sapiens
tacagttgtctaaaa

SEQ ID NO: 345485 - DNA, 15 bp, Homo sapiens
atacagttgtctaaa

SEQ ID NO: 345486 - DNA, 15 bp, Homo sapiens
aatacagttgtctaa

SEQ ID NO: 345487 - DNA, 15 bp, Homo sapiens
aaatacagttgtcta

SEQ ID NO: 345488 - DNA, 15 bp, Homo sapiens
caaatacagttgtct

SEQ ID NO: 345489 - DNA, 15 bp, Homo sapiens
tcaaatacagttgtc

SEQ ID NO: 345490 - DNA, 15 bp, Homo sapiens
ctcaaatacagttgt

SEQ ID NO: 345491 - DNA, 15 bp, Homo sapiens
actcaaatacagttg

SEQ ID NO: 345492 - DNA, 15 bp, Homo sapiens
tactcaaatacagtt

SEQ ID NO: 345493 - DNA, 15 bp, Homo sapiens
atactcaaatacagt

SEQ ID NO: 345494 - DNA, 15 bp, Homo sapiens
aatactcaaatacag

SEQ ID NO: 345495 - DNA, 15 bp, Homo sapiens
gaatactcaaataca

SEQ ID NO: 345496 - DNA, 15 bp, Homo sapiens
ggaatactcaaatac

SEQ ID NO: 345497 - DNA, 15 bp, Homo sapiens
tggaatactcaaata

SEQ ID NO: 345498 - DNA, 15 bp, Homo sapiens
ctggaatactcaaat

SEQ ID NO: 345499 - DNA, 15 bp, Homo sapiens
actggaatactcaaa

SEQ ID NO: 345500 - DNA, 15 bp, Homo sapiens
gactggaatactcaa

SEQ ID NO: 345501 - DNA, 15 bp, Homo sapiens
tgactggaatactca

SEQ ID NO: 345502 - DNA, 15 bp, Homo sapiens
atgactggaatactc

SEQ ID NO: 345503 - DNA, 15 bp, Homo sapiens
aatgactggaatact

SEQ ID NO: 345504 - DNA, 15 bp, Homo sapiens
aaatgactggaatac

SEQ ID NO: 345505 - DNA, 15 bp, Homo sapiens
caaatgactggaata

SEQ ID NO: 345506 - DNA, 15 bp, Homo sapiens
gcaaatgactggaat

SEQ ID NO: 345507 - DNA, 15 bp, Homo sapiens
agcaaatgactggaa

SEQ ID NO: 345508 - DNA, 15 bp, Homo sapiens
cagcaaatgactgga

SEQ ID NO: 345509 - DNA, 15 bp, Homo sapiens
acagcaaatgactgg

SEQ ID NO: 345510 - DNA, 15 bp, Homo sapiens
tacagcaaatgactg

SEQ ID NO: 345511 - DNA, 15 bp, Homo sapiens
ttacagcaaatgact

SEQ ID NO: 345512 - DNA, 15 bp, Homo sapiens
tttacagcaaatgac

SEQ ID NO: 345513 - DNA, 15 bp, Homo sapiens
atttacagcaaatga

SEQ ID NO: 345514 - DNA, 15 bp, Homo sapiens
tatttacagcaaatg

SEQ ID NO: 345515 - DNA, 15 bp, Homo sapiens
gtatttacagcaaat

SEQ ID NO: 345516 - DNA, 15 bp, Homo sapiens
tgtatttacagcaaa

SEQ ID NO: 345517 - DNA, 15 bp, Homo sapiens
atgtatttacagcaa

SEQ ID NO: 345518 - DNA, 15 bp, Homo sapiens
aatgtatttacagca

SEQ ID NO: 345519 - DNA, 15 bp, Homo sapiens
aaatgtatttacagc

SEQ ID NO: 345520 - DNA, 15 bp, Homo sapiens
aaaatgtatttacag

SEQ ID NO: 345521 - DNA, 15 bp, Homo sapiens
taaaatgtatttaca

SEQ ID NO: 345522 - DNA, 15 bp, Homo sapiens
ctaaaatgtatttac

SEQ ID NO: 345523 - DNA, 15 bp, Homo sapiens
actaaaatgtattta

SEQ ID NO: 345524 - DNA, 15 bp, Homo sapiens
aactaaaatgtattt

SEQ ID NO: 345525 - DNA, 15 bp, Homo sapiens
gaactaaaatgtatt

SEQ ID NO: 345526 - DNA, 15 bp, Homo sapiens
tgaactaaaatgtat

SEQ ID NO: 345527 - DNA, 15 bp, Homo sapiens
ctgaactaaaatgta

SEQ ID NO: 345528 - DNA, 15 bp, Homo sapiens
actgaactaaaatgt

SEQ ID NO: 345529 - DNA, 15 bp, Homo sapiens
aactgaactaaaatg

SEQ ID NO: 345530 - DNA, 15 bp, Homo sapiens
caactgaactaaaat

SEQ ID NO: 345531 - DNA, 15 bp, Homo sapiens
tcaactgaactaaaa

SEQ ID NO: 345532 - DNA, 15 bp, Homo sapiens
ttcaactgaactaaa

SEQ ID NO: 345533 - DNA, 15 bp, Homo sapiens
attcaactgaactaa

SEQ ID NO: 345534 - DNA, 15 bp, Homo sapiens
tattcaactgaacta

SEQ ID NO: 345535 - DNA, 15 bp, Homo sapiens
ttattcaactgaact

SEQ ID NO: 345536 - DNA, 15 bp, Homo sapiens
tttattcaactgaac

SEQ ID NO: 345537 - DNA, 15 bp, Homo sapiens
gtttattcaactgaa

SEQ ID NO: 345538 - DNA, 15 bp, Homo sapiens
ggtttattcaactga

SEQ ID NO: 345539 - DNA, 15 bp, Homo sapiens
aggtttattcaactg

SEQ ID NO: 345540 - DNA, 15 bp, Homo sapiens
aaggtttattcaact

SEQ ID NO: 345541 - DNA, 15 bp, Homo sapiens
aaaggtttattcaac

SEQ ID NO: 345542 - DNA, 15 bp, Homo sapiens
caaaggtttattcaa

SEQ ID NO: 345543 - DNA, 15 bp, Homo sapiens
ccaaaggtttattca

SEQ ID NO: 345544 - DNA, 15 bp, Homo sapiens
gccaaaggtttattc

SEQ ID NO: 345545 - DNA, 15 bp, Homo sapiens
ggccaaaggtttatt

SEQ ID NO: 345546 - DNA, 15 bp, Homo sapiens
aggccaaaggtttat

SEQ ID NO: 345547 - DNA, 15 bp, Homo sapiens
aaggccaaaggttta

SEQ ID NO: 345548 - DNA, 15 bp, Homo sapiens
aaaggccaaaggttt

SEQ ID NO: 345549 - DNA, 15 bp, Homo sapiens
aaaaggccaaaggtt

SEQ ID NO: 345550 - DNA, 15 bp, Homo sapiens
aaaaaggccaaaggt

SEQ ID NO: 345551 - DNA, 15 bp, Homo sapiens
gaaaaaggccaaagg

SEQ ID NO: 345552 - DNA, 15 bp, Homo sapiens
tgaaaaaggccaaag

SEQ ID NO: 345553 - DNA, 15 bp, Homo sapiens
atgaaaaaggccaaa

SEQ ID NO: 345554 - DNA, 15 bp, Homo sapiens
tatgaaaaaggccaa

SEQ ID NO: 345555 - DNA, 15 bp, Homo sapiens
atatgaaaaaggcca

SEQ ID NO: 345556 - DNA, 15 bp, Homo sapiens
aatatgaaaaaggcc

SEQ ID NO: 345557 - DNA, 15 bp, Homo sapiens
taatatgaaaaaggc

SEQ ID NO: 345558 - DNA, 15 bp, Homo sapiens
ctaatatgaaaaagg

SEQ ID NO: 345559 - DNA, 15 bp, Homo sapiens
cctaatatgaaaaag

SEQ ID NO: 345560 - DNA, 15 bp, Homo sapiens
gcctaatatgaaaaa

SEQ ID NO: 345561 - DNA, 15 bp, Homo sapiens
tgcctaatatgaaaa

SEQ ID NO: 345562 - DNA, 15 bp, Homo sapiens
gtgcctaatatgaaa

SEQ ID NO: 345563 - DNA, 15 bp, Homo sapiens
agtgcctaatatgaa

SEQ ID NO: 345564 - DNA, 15 bp, Homo sapiens
cagtgcctaatatga

SEQ ID NO: 345565 - DNA, 15 bp, Homo sapiens
acagtgcctaatatg

SEQ ID NO: 345566 - DNA, 15 bp, Homo sapiens
cacagtgcctaatat

SEQ ID NO: 345567 - DNA, 15 bp, Homo sapiens
ccacagtgcctaata

SEQ ID NO: 345568 - DNA, 15 bp, Homo sapiens
accacagtgcctaat

SEQ ID NO: 345569 - DNA, 15 bp, Homo sapiens
taccacagtgcctaa

SEQ ID NO: 345570 - DNA, 15 bp, Homo sapiens
ttaccacagtgccta

SEQ ID NO: 345571 - DNA, 15 bp, Homo sapiens
cttaccacagtgcct

SEQ ID NO: 345572 - DNA, 15 bp, Homo sapiens
acttaccacagtgcc

SEQ ID NO: 345573 - DNA, 15 bp, Homo sapiens
aacttaccacagtgc

SEQ ID NO: 345574 - DNA, 15 bp, Homo sapiens
taacttaccacagtg

SEQ ID NO: 345575 - DNA, 15 bp, Homo sapiens
ataacttaccacagt

SEQ ID NO: 345576 - DNA, 15 bp, Homo sapiens
cataacttaccacag

SEQ ID NO: 345577 - DNA, 15 bp, Homo sapiens
ccataacttaccaca

SEQ ID NO: 345578 - DNA, 15 bp, Homo sapiens
tccataacttaccac

SEQ ID NO: 345579 - DNA, 15 bp, Homo sapiens
ctccataacttacca

SEQ ID NO: 345580 - DNA, 15 bp, Homo sapiens
tctccataacttacc

SEQ ID NO: 345581 - DNA, 15 bp, Homo sapiens
gtctccataacttac

SEQ ID NO: 345582 - DNA, 15 bp, Homo sapiens
tgtctccataactta

SEQ ID NO: 345583 - DNA, 15 bp, Homo sapiens
gtgtctccataactt

SEQ ID NO: 345584 - DNA, 15 bp, Homo sapiens
tgtgtctccataact

SEQ ID NO: 345585 - DNA, 15 bp, Homo sapiens
ctgtgtctccataac

SEQ ID NO: 345586 - DNA, 15 bp, Homo sapiens
actgtgtctccataa

SEQ ID NO: 345587 - DNA, 15 bp, Homo sapiens
cactgtgtctccata

SEQ ID NO: 345588 - DNA, 15 bp, Homo sapiens
tcactgtgtctccat

SEQ ID NO: 345589 - DNA, 15 bp, Homo sapiens
atcactgtgtctcca

SEQ ID NO: 345590 - DNA, 15 bp, Homo sapiens
aatcactgtgtctcc

SEQ ID NO: 345591 - DNA, 15 bp, Homo sapiens
taatcactgtgtctc

SEQ ID NO: 345592 - DNA, 15 bp, Homo sapiens
ttaatcactgtgtct

SEQ ID NO: 345593 - DNA, 15 bp, Homo sapiens
attaatcactgtgtc

SEQ ID NO: 345594 - DNA, 15 bp, Homo sapiens
cattaatcactgtgt

SEQ ID NO: 345595 - DNA, 15 bp, Homo sapiens
acattaatcactgtg

SEQ ID NO: 345596 - DNA, 15 bp, Homo sapiens
aacattaatcactgt

SEQ ID NO: 345597 - DNA, 15 bp, Homo sapiens
caacattaatcactg

SEQ ID NO: 345598 - DNA, 15 bp, Homo sapiens
acaacattaatcact

SEQ ID NO: 345599 - DNA, 15 bp, Homo sapiens
cacaacattaatcac

SEQ ID NO: 345600 - DNA, 15 bp, Homo sapiens
acacaacattaatca

SEQ ID NO: 345601 - DNA, 15 bp, Homo sapiens
tacacaacattaatc

SEQ ID NO: 345602 - DNA, 15 bp, Homo sapiens
atacacaacattaat

SEQ ID NO: 345603 - DNA, 15 bp, Homo sapiens
tatacacaacattaa

SEQ ID NO: 345604 - DNA, 15 bp, Homo sapiens
ttatacacaacatta

SEQ ID NO: 345605 - DNA, 15 bp, Homo sapiens
attatacacaacatt

SEQ ID NO: 345606 - DNA, 15 bp, Homo sapiens
aattatacacaacat

SEQ ID NO: 345607 - DNA, 15 bp, Homo sapiens
taattatacacaaca

SEQ ID NO: 345608 - DNA, 15 bp, Homo sapiens
ataattatacacaac

SEQ ID NO: 345609 - DNA, 15 bp, Homo sapiens
tataattatacacaa

SEQ ID NO: 345610 - DNA, 15 bp, Homo sapiens
ttataattatacaca

SEQ ID NO: 345611 - DNA, 15 bp, Homo sapiens
tttataattatacac

SEQ ID NO: 345612 - DNA, 15 bp, Homo sapiens
atttataattataca

SEQ ID NO: 345613 - DNA, 15 bp, Homo sapiens
catttataattatac

SEQ ID NO: 345614 - DNA, 15 bp, Homo sapiens
acatttataattata

SEQ ID NO: 345615 - DNA, 15 bp, Homo sapiens
cacatttataattat

SEQ ID NO: 345616 - DNA, 15 bp, Homo sapiens
tcacatttataatta

SEQ ID NO: 345617 - DNA, 15 bp, Homo sapiens
ctcacatttataatt

SEQ ID NO: 345618 - DNA, 15 bp, Homo sapiens
actcacatttataat

SEQ ID NO: 345619 - DNA, 15 bp, Homo sapiens
cactcacatttataa

SEQ ID NO: 345620 - DNA, 15 bp, Homo sapiens
tcactcacatttata

SEQ ID NO: 345621 - DNA, 15 bp, Homo sapiens
atcactcacatttat

SEQ ID NO: 345622 - DNA, 15 bp, Homo sapiens
tatcactcacattta

SEQ ID NO: 345623 - DNA, 15 bp, Homo sapiens
gtatcactcacattt

SEQ ID NO: 345624 - DNA, 15 bp, Homo sapiens
agtatcactcacatt

SEQ ID NO: 345625 - DNA, 15 bp, Homo sapiens
gagtatcactcacat

SEQ ID NO: 345626 - DNA, 15 bp, Homo sapiens
tgagtatcactcaca

SEQ ID NO: 345627 - DNA, 15 bp, Homo sapiens
atgagtatcactcac

SEQ ID NO: 345628 - DNA, 15 bp, Homo sapiens
aatgagtatcactca

SEQ ID NO: 345629 - DNA, 15 bp, Homo sapiens
taatgagtatcactc

SEQ ID NO: 345630 - DNA, 15 bp, Homo sapiens
ttaatgagtatcact

SEQ ID NO: 345631 - DNA, 15 bp, Homo sapiens
attaatgagtatcac

SEQ ID NO: 345632 - DNA, 15 bp, Homo sapiens
tattaatgagtatca

SEQ ID NO: 345633 - DNA, 15 bp, Homo sapiens
gtattaatgagtatc

SEQ ID NO: 345634 - DNA, 15 bp, Homo sapiens
agtattaatgagtat

SEQ ID NO: 345635 - DNA, 15 bp, Homo sapiens
aagtattaatgagta

SEQ ID NO: 345636 - DNA, 15 bp, Homo sapiens
aaagtattaatgagt

SEQ ID NO: 345637 - DNA, 15 bp, Homo sapiens
caaagtattaatgag

SEQ ID NO: 345638 - DNA, 15 bp, Homo sapiens
ccaaagtattaatga

SEQ ID NO: 345639 - DNA, 15 bp, Homo sapiens
accaaagtattaatg

SEQ ID NO: 345640 - DNA, 15 bp, Homo sapiens
taccaaagtattaat

SEQ ID NO: 345641 - DNA, 15 bp, Homo sapiens
ataccaaagtattaa

SEQ ID NO: 345642 - DNA, 15 bp, Homo sapiens
tataccaaagtatta

SEQ ID NO: 345643 - DNA, 15 bp, Homo sapiens
ctataccaaagtatt

SEQ ID NO: 345644 - DNA, 15 bp, Homo sapiens
cctataccaaagtat

SEQ ID NO: 345645 - DNA, 15 bp, Homo sapiens
acctataccaaagta

SEQ ID NO: 345646 - DNA, 15 bp, Homo sapiens
cacctataccaaagt

SEQ ID NO: 345647 - DNA, 15 bp, Homo sapiens
gcacctataccaaag

SEQ ID NO: 345648 - DNA, 15 bp, Homo sapiens
agcacctataccaaa

SEQ ID NO: 345649 - DNA, 15 bp, Homo sapiens
cagcacctataccaa

SEQ ID NO: 345650 - DNA, 15 bp, Homo sapiens
gcagcacctatacca

SEQ ID NO: 345651 - DNA, 15 bp, Homo sapiens
agcagcacctatacc

SEQ ID NO: 345652 - DNA, 15 bp, Homo sapiens
cagcagcacctatac

SEQ ID NO: 345653 - DNA, 15 bp, Homo sapiens
tcagcagcacctata

SEQ ID NO: 345654 - DNA, 15 bp, Homo sapiens
ttcagcagcacctat

SEQ ID NO: 345655 - DNA, 15 bp, Homo sapiens
cttcagcagcaccta

SEQ ID NO: 345656 - DNA, 15 bp, Homo sapiens
tcttcagcagcacct

SEQ ID NO: 345657 - DNA, 15 bp, Homo sapiens
ttcttcagcagcacc

SEQ ID NO: 345658 - DNA, 15 bp, Homo sapiens
gttcttcagcagcac

SEQ ID NO: 345659 - DNA, 15 bp, Homo sapiens
tgttcttcagcagca

SEQ ID NO: 345660 - DNA, 15 bp, Homo sapiens
ttgttcttcagcagc

SEQ ID NO: 345661 - DNA, 15 bp, Homo sapiens
tttgttcttcagcag

SEQ ID NO: 345662 - DNA, 15 bp, Homo sapiens
ctttgttcttcagca

SEQ ID NO: 345663 - DNA, 15 bp, Homo sapiens
actttgttcttcagc

SEQ ID NO: 345664 - DNA, 15 bp, Homo sapiens
tactttgttcttcag

SEQ ID NO: 345665 - DNA, 15 bp, Homo sapiens
gtactttgttcttca

SEQ ID NO: 345666 - DNA, 15 bp, Homo sapiens
agtactttgttcttc

SEQ ID NO: 345667 - DNA, 15 bp, Homo sapiens
aagtactttgttctt

SEQ ID NO: 345668 - DNA, 15 bp, Homo sapiens
aaagtactttgttct

SEQ ID NO: 345669 - DNA, 15 bp, Homo sapiens
taaagtactttgttc

SEQ ID NO: 345670 - DNA, 15 bp, Homo sapiens
ataaagtactttgtt

SEQ ID NO: 345671 - DNA, 15 bp, Homo sapiens
aataaagtactttgt

SEQ ID NO: 345672 - DNA, 15 bp, Homo sapiens
taataaagtactttg

SEQ ID NO: 345673 - DNA, 15 bp, Homo sapiens
ataataaagtacttt

SEQ ID NO: 345674 - DNA, 15 bp, Homo sapiens
aataataaagtactt

SEQ ID NO: 345675 - DNA, 15 bp, Homo sapiens
caataataaagtact

SEQ ID NO: 345676 - DNA, 15 bp, Homo sapiens
acaataataaagtac

SEQ ID NO: 345677 - DNA, 15 bp, Homo sapiens
aacaataataaagta

SEQ ID NO: 345678 - DNA, 15 bp, Homo sapiens
aaacaataataaagt

SEQ ID NO: 345679 - DNA, 15 bp, Homo sapiens
aaaacaataataaag

SEQ ID NO: 345680 - DNA, 15 bp, Homo sapiens
caaaacaataataaa

SEQ ID NO: 345681 - DNA, 15 bp, Homo sapiens
tcaaaacaataataa

SEQ ID NO: 345682 - DNA, 15 bp, Homo sapiens
ttcaaaacaataata

SEQ ID NO: 345683 - DNA, 15 bp, Homo sapiens
gttcaaaacaataat

SEQ ID NO: 345684 - DNA, 15 bp, Homo sapiens
tgttcaaaacaataa

SEQ ID NO: 345685 - DNA, 15 bp, Homo sapiens
ttgttcaaaacaata

SEQ ID NO: 345686 - DNA, 15 bp, Homo sapiens
tttgttcaaaacaat

SEQ ID NO: 345687 - DNA, 15 bp, Homo sapiens
ttttgttcaaaacaa

SEQ ID NO: 345688 - DNA, 15 bp, Homo sapiens
gttttgttcaaaaca

SEQ ID NO: 345689 - DNA, 15 bp, Homo sapiens
tgttttgttcaaaac

SEQ ID NO: 345690 - DNA, 15 bp, Homo sapiens
atgttttgttcaaaa

SEQ ID NO: 345691 - DNA, 15 bp, Homo sapiens
gatgttttgttcaaa

SEQ ID NO: 345692 - DNA, 15 bp, Homo sapiens
tgatgttttgttcaa

SEQ ID NO: 345693 - DNA, 15 bp, Homo sapiens
gtgatgttttgttca

SEQ ID NO: 345694 - DNA, 15 bp, Homo sapiens
tgtgatgttttgttc

SEQ ID NO: 345695 - DNA, 15 bp, Homo sapiens
gtgtgatgttttgtt

SEQ ID NO: 345696 - DNA, 15 bp, Homo sapiens
tgtgtgatgttttgt

SEQ ID NO: 345697 - DNA, 15 bp, Homo sapiens
ttgtgtgatgttttg

SEQ ID NO: 345698 - DNA, 15 bp, Homo sapiens
tttgtgtgatgtttt

SEQ ID NO: 345699 - DNA, 15 bp, Homo sapiens
ttttgtgtgatgttt

SEQ ID NO: 345700 - DNA, 15 bp, Homo sapiens
cttttgtgtgatgtt

SEQ ID NO: 345701 - DNA, 15 bp, Homo sapiens
ccttttgtgtgatgt

SEQ ID NO: 345702 - DNA, 15 bp, Homo sapiens
accttttgtgtgatg

SEQ ID NO: 345703 - DNA, 15 bp, Homo sapiens
taccttttgtgtgat

SEQ ID NO: 345704 - DNA, 15 bp, Homo sapiens
ctaccttttgtgtga

SEQ ID NO: 345705 - DNA, 15 bp, Homo sapiens
tctaccttttgtgtg

SEQ ID NO: 345706 - DNA, 15 bp, Homo sapiens
atctaccttttgtgt

SEQ ID NO: 345707 - DNA, 15 bp, Homo sapiens
aatctaccttttgtg

SEQ ID NO: 345708 - DNA, 15 bp, Homo sapiens
aaatctaccttttgt

SEQ ID NO: 345709 - DNA, 15 bp, Homo sapiens
aaaatctaccttttg

SEQ ID NO: 345710 - DNA, 15 bp, Homo sapiens
aaaaatctacctttt

SEQ ID NO: 345711 - DNA, 15 bp, Homo sapiens
aaaaaatctaccttt

SEQ ID NO: 345712 - DNA, 15 bp, Homo sapiens
aaaaaaatctacctt

SEQ ID NO: 345713 - DNA, 15 bp, Homo sapiens
aaaaaaaatctacct

SEQ ID NO: 345714 - DNA, 15 bp, Homo sapiens
aaaaaaaaatctacc

SEQ ID NO: 345715 - DNA, 15 bp, Homo sapiens
aaaaaaaaaatctac

SEQ ID NO: 345716 - DNA, 15 bp, Homo sapiens
aaaaaaaaaaatcta

SEQ ID NO: 345717 - DNA, 15 bp, Homo sapiens
aaaaaaaaaaaatct

SEQ ID NO: 345718 - DNA, 15 bp, Homo sapiens
cacaaaaaaaaaaaa

SEQ ID NO: 345719 - DNA, 15 bp, Homo sapiens
tcacaaaaaaaaaaa

SEQ ID NO: 345720 - DNA, 15 bp, Homo sapiens
gtcacaaaaaaaaaa

SEQ ID NO: 345721 - DNA, 15 bp, Homo sapiens
cgtcacaaaaaaaaa

SEQ ID NO: 345722 - DNA, 15 bp, Homo sapiens
ccgtcacaaaaaaaa

SEQ ID NO: 345723 - DNA, 15 bp, Homo sapiens
tccgtcacaaaaaaa

SEQ ID NO: 345724 - DNA, 15 bp, Homo sapiens
ctccgtcacaaaaaa

SEQ ID NO: 345725 - DNA, 15 bp, Homo sapiens
actccgtcacaaaaa

SEQ ID NO: 345726 - DNA, 15 bp, Homo sapiens
gactccgtcacaaaa

SEQ ID NO: 345727 - DNA, 15 bp, Homo sapiens
agactccgtcacaaa

SEQ ID NO: 345728 - DNA, 15 bp, Homo sapiens
gagactccgtcacaa

SEQ ID NO: 345729 - DNA, 15 bp, Homo sapiens
tgagactccgtcaca

SEQ ID NO: 345730 - DNA, 15 bp, Homo sapiens
gtgagactccgtcac

SEQ ID NO: 345731 - DNA, 15 bp, Homo sapiens
agtgagactccgtca

SEQ ID NO: 345732 - DNA, 15 bp, Homo sapiens
gagatcgtgccactg

SEQ ID NO: 345733 - DNA, 15 bp, Homo sapiens
tgagatcgtgccact

SEQ ID NO: 345734 - DNA, 15 bp, Homo sapiens
ctgagatcgtgccac

SEQ ID NO: 345735 - DNA, 15 bp, Homo sapiens
gctgagatcgtgcca

SEQ ID NO: 345736 - DNA, 15 bp, Homo sapiens
agctgagatcgtgcc

SEQ ID NO: 345737 - DNA, 15 bp, Homo sapiens
gagctgagatcgtgc

SEQ ID NO: 345738 - DNA, 15 bp, Homo sapiens
tgagctgagatcgtg

SEQ ID NO: 345739 - DNA, 15 bp, Homo sapiens
gtgagctgagatcgt

SEQ ID NO: 345740 - DNA, 15 bp, Homo sapiens
agtgagctgagatcg

SEQ ID NO: 345741 - DNA, 15 bp, Homo sapiens
cagtgagctgagatc

SEQ ID NO: 345742 - DNA, 15 bp, Homo sapiens
gcagtgagctgagat

SEQ ID NO: 345743 - DNA, 15 bp, Homo sapiens
tgcagtgagctgaga

SEQ ID NO: 345744 - DNA, 15 bp, Homo sapiens
cgcagaggttgcagt

SEQ ID NO: 345745 - DNA, 15 bp, Homo sapiens
acgcagaggttgcag

SEQ ID NO: 345746 - DNA, 15 bp, Homo sapiens
gacgcagaggttgca

SEQ ID NO: 345747 - DNA, 15 bp, Homo sapiens
ggacgcagaggttgc

SEQ ID NO: 345748 - DNA, 15 bp, Homo sapiens
gggacgcagaggttg

SEQ ID NO: 345749 - DNA, 15 bp, Homo sapiens
tgggacgcagaggtt

SEQ ID NO: 345750 - DNA, 15 bp, Homo sapiens
ctgggacgcagaggt

SEQ ID NO: 345751 - DNA, 15 bp, Homo sapiens
cctgggacgcagagg

SEQ ID NO: 345752 - DNA, 15 bp, Homo sapiens
acctgggacgcagag

SEQ ID NO: 345753 - DNA, 15 bp, Homo sapiens
aacctgggacgcaga

SEQ ID NO: 345754 - DNA, 15 bp, Homo sapiens
gaacctgggacgcag

SEQ ID NO: 345755 - DNA, 15 bp, Homo sapiens
tgaacctgggacgca

SEQ ID NO: 345756 - DNA, 15 bp, Homo sapiens
ttgaacctgggacgc

SEQ ID NO: 345757 - DNA, 15 bp, Homo sapiens
cttgaacctgggacg

SEQ ID NO: 345758 - DNA, 15 bp, Homo sapiens
tcttgaacctgggac

SEQ ID NO: 345759 - DNA, 15 bp, Homo sapiens
ctcttgaacctggga

SEQ ID NO: 345760 - DNA, 15 bp, Homo sapiens
tctcttgaacctggg

SEQ ID NO: 345761 - DNA, 15 bp, Homo sapiens
atctcttgaacctgg

SEQ ID NO: 345762 - DNA, 15 bp, Homo sapiens
aatctcttgaacctg

SEQ ID NO: 345763 - DNA, 15 bp, Homo sapiens
gaatctcttgaacct

SEQ ID NO: 345764 - DNA, 15 bp, Homo sapiens
agaatctcttgaacc

SEQ ID NO: 345765 - DNA, 15 bp, Homo sapiens
tcagctactcagaag

SEQ ID NO: 345766 - DNA, 15 bp, Homo sapiens
ttcagctactcagaa

SEQ ID NO: 345767 - DNA, 15 bp, Homo sapiens
tttcagctactcaga

SEQ ID NO: 345768 - DNA, 15 bp, Homo sapiens
atttcagctactcag

SEQ ID NO: 345769 - DNA, 15 bp, Homo sapiens
aatttcagctactca

SEQ ID NO: 345770 - DNA, 15 bp, Homo sapiens
taatttcagctactc

SEQ ID NO: 345771 - DNA, 15 bp, Homo sapiens
gtaatttcagctact

SEQ ID NO: 345772 - DNA, 15 bp, Homo sapiens
tgtaatttcagctac

SEQ ID NO: 345773 - DNA, 15 bp, Homo sapiens
ctgtaatttcagcta

SEQ ID NO: 345774 - DNA, 15 bp, Homo sapiens
cctgtaatttcagct

SEQ ID NO: 345775 - DNA, 15 bp, Homo sapiens
gcctgtaatttcagc

SEQ ID NO: 345776 - DNA, 15 bp, Homo sapiens
tgcctgtaatttcag

SEQ ID NO: 345777 - DNA, 15 bp, Homo sapiens
atgcctgtaatttca

SEQ ID NO: 345778 - DNA, 15 bp, Homo sapiens
catgcctgtaatttc

SEQ ID NO: 345779 - DNA, 15 bp, Homo sapiens
gcatgcctgtaattt

SEQ ID NO: 345780 - DNA, 15 bp, Homo sapiens
cgcatgcctgtaatt

SEQ ID NO: 345781 - DNA, 15 bp, Homo sapiens
aggtggcgcatgcct

SEQ ID NO: 345782 - DNA, 15 bp, Homo sapiens
aaggtggcgcatgcc

SEQ ID NO: 345783 - DNA, 15 bp, Homo sapiens
caaggtggcgcatgc

SEQ ID NO: 345784 - DNA, 15 bp, Homo sapiens
gcaaggtggcgcatg

SEQ ID NO: 345785 - DNA, 15 bp, Homo sapiens
agcaaggtggcgcat

SEQ ID NO: 345786 - DNA, 15 bp, Homo sapiens
gagcaaggtggcgca

SEQ ID NO: 345787 - DNA, 15 bp, Homo sapiens
cgagcaaggtggcgc

SEQ ID NO: 345788 - DNA, 15 bp, Homo sapiens
ccgagcaaggtggcg

SEQ ID NO: 345789 - DNA, 15 bp, Homo sapiens
gccgagcaaggtggc

SEQ ID NO: 345790 - DNA, 15 bp, Homo sapiens
agccgagcaaggtgg

SEQ ID NO: 345791 - DNA, 15 bp, Homo sapiens
cagccgagcaaggtg

SEQ ID NO: 345792 - DNA, 15 bp, Homo sapiens
tcagccgagcaaggt

SEQ ID NO: 345793 - DNA, 15 bp, Homo sapiens
atcagccgagcaagg

SEQ ID NO: 345794 - DNA, 15 bp, Homo sapiens
aatcagccgagcaag

SEQ ID NO: 345795 - DNA, 15 bp, Homo sapiens
gaatcagccgagcaa

SEQ ID NO: 345796 - DNA, 15 bp, Homo sapiens
agaatcagccgagca

SEQ ID NO: 345797 - DNA, 15 bp, Homo sapiens
aagaatcagccgagc

SEQ ID NO: 345798 - DNA, 15 bp, Homo sapiens
caagaatcagccgag

SEQ ID NO: 345799 - DNA, 15 bp, Homo sapiens
acaagaatcagccga

SEQ ID NO: 345800 - DNA, 15 bp, Homo sapiens
tacaagaatcagccg

SEQ ID NO: 345801 - DNA, 15 bp, Homo sapiens
atacaagaatcagcc

SEQ ID NO: 345802 - DNA, 15 bp, Homo sapiens
aatacaagaatcagc

SEQ ID NO: 345803 - DNA, 15 bp, Homo sapiens
aaatacaagaatcag

SEQ ID NO: 345804 - DNA, 15 bp, Homo sapiens
aaaatacaagaatca

SEQ ID NO: 345805 - DNA, 15 bp, Homo sapiens
aaaaatacaagaatc

SEQ ID NO: 345806 - DNA, 15 bp, Homo sapiens
taaaaatacaagaat

SEQ ID NO: 345807 - DNA, 15 bp, Homo sapiens
ctaaaaatacaagaa

SEQ ID NO: 345808 - DNA, 15 bp, Homo sapiens
actaaaaatacaaga

SEQ ID NO: 345809 - DNA, 15 bp, Homo sapiens
tactaaaaatacaag

SEQ ID NO: 345810 - DNA, 15 bp, Homo sapiens
cgaaaccccgtctct

SEQ ID NO: 345811 - DNA, 15 bp, Homo sapiens
gcgaaaccccgtctc

SEQ ID NO: 345812 - DNA, 15 bp, Homo sapiens
ggcgaaaccccgtct

SEQ ID NO: 345813 - DNA, 15 bp, Homo sapiens
tggcgaaaccccgtc

SEQ ID NO: 345814 - DNA, 15 bp, Homo sapiens
atggcgaaaccccgt

SEQ ID NO: 345815 - DNA, 15 bp, Homo sapiens
catggcgaaaccccg

SEQ ID NO: 345816 - DNA, 15 bp, Homo sapiens
acatggcgaaacccc

SEQ ID NO: 345817 - DNA, 15 bp, Homo sapiens
aacatggcgaaaccc

SEQ ID NO: 345818 - DNA, 15 bp, Homo sapiens
caacatggcgaaacc

SEQ ID NO: 345819 - DNA, 15 bp, Homo sapiens
ccaacatggcgaaac

SEQ ID NO: 345820 - DNA, 15 bp, Homo sapiens
accaacatggcgaaa

SEQ ID NO: 345821 - DNA, 15 bp, Homo sapiens
gaccaacatggcgaa

SEQ ID NO: 345822 - DNA, 15 bp, Homo sapiens
tgaccaacatggcga

SEQ ID NO: 345823 - DNA, 15 bp, Homo sapiens
ctgaccaacatggcg

SEQ ID NO: 345824 - DNA, 15 bp, Homo sapiens
cctgaccaacatggc

SEQ ID NO: 345825 - DNA, 15 bp, Homo sapiens
tgagaccagcctgac

SEQ ID NO: 345826 - DNA, 15 bp, Homo sapiens
ttgagaccagcctga

SEQ ID NO: 345827 - DNA, 15 bp, Homo sapiens
gggtcaggagtttga

SEQ ID NO: 345828 - DNA, 15 bp, Homo sapiens
ggggtcaggagtttg

SEQ ID NO: 345829 - DNA, 15 bp, Homo sapiens
tggggtcaggagttt

SEQ ID NO: 345830 - DNA, 15 bp, Homo sapiens
atggggtcaggagtt

SEQ ID NO: 345831 - DNA, 15 bp, Homo sapiens
catggggtcaggagt

SEQ ID NO: 345832 - DNA, 15 bp, Homo sapiens
tcatggggtcaggag

SEQ ID NO: 345833 - DNA, 15 bp, Homo sapiens
atcatggggtcagga

SEQ ID NO: 345834 - DNA, 15 bp, Homo sapiens
gatcatggggtcagg

SEQ ID NO: 345835 - DNA, 15 bp, Homo sapiens
ggatcatggggtcag

SEQ ID NO: 345836 - DNA, 15 bp, Homo sapiens
tggatcatggggtca

SEQ ID NO: 345837 - DNA, 15 bp, Homo sapiens
atggatcatggggtc

SEQ ID NO: 345838 - DNA, 15 bp, Homo sapiens
gatggatcatggggt

SEQ ID NO: 345839 - DNA, 15 bp, Homo sapiens
ggatggatcatgggg

SEQ ID NO: 345840 - DNA, 15 bp, Homo sapiens
tggatggatcatggg

SEQ ID NO: 345841 - DNA, 15 bp, Homo sapiens
gtggatggatcatgg

SEQ ID NO: 345842 - DNA, 15 bp, Homo sapiens
ggtggatggatcatg

SEQ ID NO: 345843 - DNA, 15 bp, Homo sapiens
aggtggatggatcat

SEQ ID NO: 345844 - DNA, 15 bp, Homo sapiens
gaggtggatggatca

SEQ ID NO: 345845 - DNA, 15 bp, Homo sapiens
cgaggtggatggatc

SEQ ID NO: 345846 - DNA, 15 bp, Homo sapiens
ccgaggtggatggat

SEQ ID NO: 345847 - DNA, 15 bp, Homo sapiens
gccgaggtggatgga

SEQ ID NO: 345848 - DNA, 15 bp, Homo sapiens
ggccgaggtggatgg

SEQ ID NO: 345849 - DNA, 15 bp, Homo sapiens
aggccgaggtggatg

SEQ ID NO: 345850 - DNA, 15 bp, Homo sapiens
gaggccgaggtggat

SEQ ID NO: 345851 - DNA, 15 bp, Homo sapiens
ggaggccgaggtgga

SEQ ID NO: 345852 - DNA, 15 bp, Homo sapiens
gggaggccgaggtgg

SEQ ID NO: 345853 - DNA, 15 bp, Homo sapiens
tgggaggccgaggtg

SEQ ID NO: 345854 - DNA, 15 bp, Homo sapiens
ttgggaggccgaggt

SEQ ID NO: 345855 - DNA, 15 bp, Homo sapiens
tccagcactttggga

SEQ ID NO: 345856 - DNA, 15 bp, Homo sapiens
ttccagcactttggg

SEQ ID NO: 345857 - DNA, 15 bp, Homo sapiens
attccagcactttgg

SEQ ID NO: 345858 - DNA, 15 bp, Homo sapiens
aattccagcactttg

SEQ ID NO: 345859 - DNA, 15 bp, Homo sapiens
taattccagcacttt

SEQ ID NO: 345860 - DNA, 15 bp, Homo sapiens
gtaattccagcactt

SEQ ID NO: 345861 - DNA, 15 bp, Homo sapiens
tgtaattccagcact

SEQ ID NO: 345862 - DNA, 15 bp, Homo sapiens
ctgtaattccagcac

SEQ ID NO: 345863 - DNA, 15 bp, Homo sapiens
cctgtaattccagca

SEQ ID NO: 345864 - DNA, 15 bp, Homo sapiens
gcctgtaattccagc

SEQ ID NO: 345865 - DNA, 15 bp, Homo sapiens
cgcctgtaattccag

SEQ ID NO: 345866 - DNA, 15 bp, Homo sapiens
acgcctgtaattcca

SEQ ID NO: 345867 - DNA, 15 bp, Homo sapiens
cacgcctgtaattcc

SEQ ID NO: 345868 - DNA, 15 bp, Homo sapiens
tcacgcctgtaattc

SEQ ID NO: 345869 - DNA, 15 bp, Homo sapiens
ctcacgcctgtaatt

SEQ ID NO: 345870 - DNA, 15 bp, Homo sapiens
cgtggctcacgcctg

SEQ ID NO: 345871 - DNA, 15 bp, Homo sapiens
ccgtggctcacgcct

SEQ ID NO: 345872 - DNA, 15 bp, Homo sapiens
gccgtggctcacgcc

SEQ ID NO: 345873 - DNA, 15 bp, Homo sapiens
cgccgtggctcacgc

SEQ ID NO: 345874 - DNA, 15 bp, Homo sapiens
gcgccgtggctcacg

SEQ ID NO: 345875 - DNA, 15 bp, Homo sapiens
ggcgccgtggctcac

SEQ ID NO: 345876 - DNA, 15 bp, Homo sapiens
gggcgccgtggctca

SEQ ID NO: 345877 - DNA, 15 bp, Homo sapiens
tgggcgccgtggctc

SEQ ID NO: 345878 - DNA, 15 bp, Homo sapiens
ctgggcgccgtggct

SEQ ID NO: 345879 - DNA, 15 bp, Homo sapiens
gctgggcgccgtggc

SEQ ID NO: 345880 - DNA, 15 bp, Homo sapiens
ggctgggcgccgtgg

SEQ ID NO: 345881 - DNA, 15 bp, Homo sapiens
gggctgggcgccgtg

SEQ ID NO: 345882 - DNA, 15 bp, Homo sapiens
ggggctgggcgccgt

SEQ ID NO: 345883 - DNA, 15 bp, Homo sapiens
tggggctgggcgccg

SEQ ID NO: 345884 - DNA, 15 bp, Homo sapiens
ttggggctgggcgcc

SEQ ID NO: 345885 - DNA, 15 bp, Homo sapiens
tttggggctgggcgc

SEQ ID NO: 345886 - DNA, 15 bp, Homo sapiens
ttttggggctgggcg

SEQ ID NO: 345887 - DNA, 15 bp, Homo sapiens
cttttggggctgggc

SEQ ID NO: 345888 - DNA, 15 bp, Homo sapiens
ccttttggggctggg

SEQ ID NO: 345889 - DNA, 15 bp, Homo sapiens
accttttggggctgg

SEQ ID NO: 345890 - DNA, 15 bp, Homo sapiens
taccttttggggctg

SEQ ID NO: 345891 - DNA, 15 bp, Homo sapiens
ctaccttttggggct

SEQ ID NO: 345892 - DNA, 15 bp, Homo sapiens
tctaccttttggggc

SEQ ID NO: 345893 - DNA, 15 bp, Homo sapiens
atctaccttttgggg

SEQ ID NO: 345894 - DNA, 15 bp, Homo sapiens
aatctaccttttggg

SEQ ID NO: 345895 - DNA, 15 bp, Homo sapiens
gaatctaccttttgg

SEQ ID NO: 345896 - DNA, 15 bp, Homo sapiens
agaatctaccttttg

SEQ ID NO: 345897 - DNA, 15 bp, Homo sapiens
tagaatctacctttt

SEQ ID NO: 345898 - DNA, 15 bp, Homo sapiens
gtagaatctaccttt

SEQ ID NO: 345899 - DNA, 15 bp, Homo sapiens
agtagaatctacctt

SEQ ID NO: 345900 - DNA, 15 bp, Homo sapiens
aagtagaatctacct

SEQ ID NO: 345901 - DNA, 15 bp, Homo sapiens
caagtagaatctacc

SEQ ID NO: 345902 - DNA, 15 bp, Homo sapiens
ccaagtagaatctac

SEQ ID NO: 345903 - DNA, 15 bp, Homo sapiens
tccaagtagaatcta

SEQ ID NO: 345904 - DNA, 15 bp, Homo sapiens
ctccaagtagaatct

SEQ ID NO: 345905 - DNA, 15 bp, Homo sapiens
tctccaagtagaatc

SEQ ID NO: 345906 - DNA, 15 bp, Homo sapiens
atctccaagtagaat

SEQ ID NO: 345907 - DNA, 15 bp, Homo sapiens
aatctccaagtagaa

SEQ ID NO: 345908 - DNA, 15 bp, Homo sapiens
taatctccaagtaga

SEQ ID NO: 345909 - DNA, 15 bp, Homo sapiens
ctaatctccaagtag

SEQ ID NO: 345910 - DNA, 15 bp, Homo sapiens
tctaatctccaagta

SEQ ID NO: 345911 - DNA, 15 bp, Homo sapiens
atctaatctccaagt

SEQ ID NO: 345912 - DNA, 15 bp, Homo sapiens
aatctaatctccaag

SEQ ID NO: 345913 - DNA, 15 bp, Homo sapiens
taatctaatctccaa

SEQ ID NO: 345914 - DNA, 15 bp, Homo sapiens
gtaatctaatctcca

SEQ ID NO: 345915 - DNA, 15 bp, Homo sapiens
tgtaatctaatctcc

SEQ ID NO: 345916 - DNA, 15 bp, Homo sapiens
ctgtaatctaatctc

SEQ ID NO: 345917 - DNA, 15 bp, Homo sapiens
tctgtaatctaatct

SEQ ID NO: 345918 - DNA, 15 bp, Homo sapiens
ttctgtaatctaatc

SEQ ID NO: 345919 - DNA, 15 bp, Homo sapiens
cttctgtaatctaat

SEQ ID NO: 345920 - DNA, 15 bp, Homo sapiens
ccttctgtaatctaa

SEQ ID NO: 345921 - DNA, 15 bp, Homo sapiens
gccttctgtaatcta

SEQ ID NO: 345922 - DNA, 15 bp, Homo sapiens
agccttctgtaatct

SEQ ID NO: 345923 - DNA, 15 bp, Homo sapiens
aagccttctgtaatc

SEQ ID NO: 345924 - DNA, 15 bp, Homo sapiens
aaagccttctgtaat

SEQ ID NO: 345925 - DNA, 15 bp, Homo sapiens
gaaagccttctgtaa

SEQ ID NO: 345926 - DNA, 15 bp, Homo sapiens
agaaagccttctgta

SEQ ID NO: 345927 - DNA, 15 bp, Homo sapiens
tagaaagccttctgt

SEQ ID NO: 345928 - DNA, 15 bp, Homo sapiens
ttagaaagccttctg

SEQ ID NO: 345929 - DNA, 15 bp, Homo sapiens
cttagaaagccttct

SEQ ID NO: 345930 - DNA, 15 bp, Homo sapiens
ccttagaaagccttc

SEQ ID NO: 345931 - DNA, 15 bp, Homo sapiens
tccttagaaagcctt

SEQ ID NO: 345932 - DNA, 15 bp, Homo sapiens
ctccttagaaagcct

SEQ ID NO: 345933 - DNA, 15 bp, Homo sapiens
gctccttagaaagcc

SEQ ID NO: 345934 - DNA, 15 bp, Homo sapiens
tgctccttagaaagc

SEQ ID NO: 345935 - DNA, 15 bp, Homo sapiens
ttgctccttagaaag

SEQ ID NO: 345936 - DNA, 15 bp, Homo sapiens
tttgctccttagaaa

SEQ ID NO: 345937 - DNA, 15 bp, Homo sapiens
ttttgctccttagaa

SEQ ID NO: 345938 - DNA, 15 bp, Homo sapiens
attttgctccttaga

SEQ ID NO: 345939 - DNA, 15 bp, Homo sapiens
tattttgctccttag

SEQ ID NO: 345940 - DNA, 15 bp, Homo sapiens
atattttgctcctta

SEQ ID NO: 345941 - DNA, 15 bp, Homo sapiens
aatattttgctcctt

SEQ ID NO: 345942 - DNA, 15 bp, Homo sapiens
aaatattttgctcct

SEQ ID NO: 345943 - DNA, 15 bp, Homo sapiens
taaatattttgctcc

SEQ ID NO: 345944 - DNA, 15 bp, Homo sapiens
ttaaatattttgctc

SEQ ID NO: 345945 - DNA, 15 bp, Homo sapiens
gttaaatattttgct

SEQ ID NO: 345946 - DNA, 15 bp, Homo sapiens
tgttaaatattttgc

SEQ ID NO: 345947 - DNA, 15 bp, Homo sapiens
ttgttaaatattttg

SEQ ID NO: 345948 - DNA, 15 bp, Homo sapiens
attgttaaatatttt

SEQ ID NO: 345949 - DNA, 15 bp, Homo sapiens
tattgttaaatattt

SEQ ID NO: 345950 - DNA, 15 bp, Homo sapiens
ttattgttaaatatt

SEQ ID NO: 345951 - DNA, 15 bp, Homo sapiens
cttattgttaaatat

SEQ ID NO: 345952 - DNA, 15 bp, Homo sapiens
acttattgttaaata

SEQ ID NO: 345953 - DNA, 15 bp, Homo sapiens
tacttattgttaaat

SEQ ID NO: 345954 - DNA, 15 bp, Homo sapiens
ctacttattgttaaa

SEQ ID NO: 345955 - DNA, 15 bp, Homo sapiens
cctacttattgttaa

SEQ ID NO: 345956 - DNA, 15 bp, Homo sapiens
ccctacttattgtta

SEQ ID NO: 345957 - DNA, 15 bp, Homo sapiens
tccctacttattgtt

SEQ ID NO: 345958 - DNA, 15 bp, Homo sapiens
atccctacttattgt

SEQ ID NO: 345959 - DNA, 15 bp, Homo sapiens
aatccctacttattg

SEQ ID NO: 345960 - DNA, 15 bp, Homo sapiens
aaatccctacttatt

SEQ ID NO: 345961 - DNA, 15 bp, Homo sapiens
taaatccctacttat

SEQ ID NO: 345962 - DNA, 15 bp, Homo sapiens
ttaaatccctactta

SEQ ID NO: 345963 - DNA, 15 bp, Homo sapiens
tttaaatccctactt

SEQ ID NO: 345964 - DNA, 15 bp, Homo sapiens
ttttaaatccctact

SEQ ID NO: 345965 - DNA, 15 bp, Homo sapiens
tttttaaatccctac

SEQ ID NO: 345966 - DNA, 15 bp, Homo sapiens
ctttttaaatcccta

SEQ ID NO: 345967 - DNA, 15 bp, Homo sapiens
tctttttaaatccct

SEQ ID NO: 345968 - DNA, 15 bp, Homo sapiens
ctctttttaaatccc

SEQ ID NO: 345969 - DNA, 15 bp, Homo sapiens
gctctttttaaatcc

SEQ ID NO: 345970 - DNA, 15 bp, Homo sapiens
tgctctttttaaatc

SEQ ID NO: 345971 - DNA, 15 bp, Homo sapiens
ctgctctttttaaat

SEQ ID NO: 345972 - DNA, 15 bp, Homo sapiens
tctgctctttttaaa

SEQ ID NO: 345973 - DNA, 15 bp, Homo sapiens
gtctgctctttttaa

SEQ ID NO: 345974 - DNA, 15 bp, Homo sapiens
cgtctgctcttttta

SEQ ID NO: 345975 - DNA, 15 bp, Homo sapiens
acgtctgctcttttt

SEQ ID NO: 345976 - DNA, 15 bp, Homo sapiens
cacgtctgctctttt

SEQ ID NO: 345977 - DNA, 15 bp, Homo sapiens
acacgtctgctcttt

SEQ ID NO: 345978 - DNA, 15 bp, Homo sapiens
aacacgtctgctctt

SEQ ID NO: 345979 - DNA, 15 bp, Homo sapiens
gaacacgtctgctct

SEQ ID NO: 345980 - DNA, 15 bp, Homo sapiens
tgaacacgtctgctc

SEQ ID NO: 345981 - DNA, 15 bp, Homo sapiens
gtgaacacgtctgct

SEQ ID NO: 345982 - DNA, 15 bp, Homo sapiens
tgtgaacacgtctgc

SEQ ID NO: 345983 - DNA, 15 bp, Homo sapiens
ctgtgaacacgtctg

SEQ ID NO: 345984 - DNA, 15 bp, Homo sapiens
cctgtgaacacgtct

SEQ ID NO: 345985 - DNA, 15 bp, Homo sapiens
ccctgtgaacacgtc

SEQ ID NO: 345986 - DNA, 15 bp, Homo sapiens
cccctgtgaacacgt

SEQ ID NO: 345987 - DNA, 15 bp, Homo sapiens
tcccctgtgaacacg

SEQ ID NO: 345988 - DNA, 15 bp, Homo sapiens
ttcccctgtgaacac

SEQ ID NO: 345989 - DNA, 15 bp, Homo sapiens
tttcccctgtgaaca

SEQ ID NO: 345990 - DNA, 15 bp, Homo sapiens
gtttcccctgtgaac

SEQ ID NO: 345991 - DNA, 15 bp, Homo sapiens
agtttcccctgtgaa

SEQ ID NO: 345992 - DNA, 15 bp, Homo sapiens
tagtttcccctgtga

SEQ ID NO: 345993 - DNA, 15 bp, Homo sapiens
ctagtttcccctgtg

SEQ ID NO: 345994 - DNA, 15 bp, Homo sapiens
tctagtttcccctgt

SEQ ID NO: 345995 - DNA, 15 bp, Homo sapiens
ttctagtttcccctg

SEQ ID NO: 345996 - DNA, 15 bp, Homo sapiens
tttctagtttcccct

SEQ ID NO: 345997 - DNA, 15 bp, Homo sapiens
ttttctagtttcccc

SEQ ID NO: 345998 - DNA, 15 bp, Homo sapiens
tttttctagtttccc

SEQ ID NO: 345999 - DNA, 15 bp, Homo sapiens
ctttttctagtttcc

SEQ ID NO: 346000 - DNA, 15 bp, Homo sapiens
gctttttctagtttc

SEQ ID NO: 346001 - DNA, 15 bp, Homo sapiens
tgctttttctagttt

SEQ ID NO: 346002 - DNA, 15 bp, Homo sapiens
atgctttttctagtt

SEQ ID NO: 346003 - DNA, 15 bp, Homo sapiens
tatgctttttctagt

SEQ ID NO: 346004 - DNA, 15 bp, Homo sapiens
ctatgctttttctag

SEQ ID NO: 346005 - DNA, 15 bp, Homo sapiens
tctatgctttttcta

SEQ ID NO: 346006 - DNA, 15 bp, Homo sapiens
ctctatgctttttct

SEQ ID NO: 346007 - DNA, 15 bp, Homo sapiens
cctctatgctttttc

SEQ ID NO: 346008 - DNA, 15 bp, Homo sapiens
ccctctatgcttttt

SEQ ID NO: 346009 - DNA, 15 bp, Homo sapiens
tccctctatgctttt

SEQ ID NO: 346010 - DNA, 15 bp, Homo sapiens
atccctctatgcttt

SEQ ID NO: 346011 - DNA, 15 bp, Homo sapiens
catccctctatgctt

SEQ ID NO: 346012 - DNA, 15 bp, Homo sapiens
gcatccctctatgct

SEQ ID NO: 346013 - DNA, 15 bp, Homo sapiens
agcatccctctatgc

SEQ ID NO: 346014 - DNA, 15 bp, Homo sapiens
aagcatccctctatg

SEQ ID NO: 346015 - DNA, 15 bp, Homo sapiens
taagcatccctctat

SEQ ID NO: 346016 - DNA, 15 bp, Homo sapiens
gtaagcatccctcta

SEQ ID NO: 346017 - DNA, 15 bp, Homo sapiens
cgtaagcatccctct

SEQ ID NO: 346018 - DNA, 15 bp, Homo sapiens
acgtaagcatccctc

SEQ ID NO: 346019 - DNA, 15 bp, Homo sapiens
aacgtaagcatccct

SEQ ID NO: 346020 - DNA, 15 bp, Homo sapiens
aaacgtaagcatccc

SEQ ID NO: 346021 - DNA, 15 bp, Homo sapiens
caaacgtaagcatcc

SEQ ID NO: 346022 - DNA, 15 bp, Homo sapiens
gcaaacgtaagcatc

SEQ ID NO: 346023 - DNA, 15 bp, Homo sapiens
tgcaaacgtaagcat

SEQ ID NO: 346024 - DNA, 15 bp, Homo sapiens
ttgcaaacgtaagca

SEQ ID NO: 346025 - DNA, 15 bp, Homo sapiens
tttgcaaacgtaagc

SEQ ID NO: 346026 - DNA, 15 bp, Homo sapiens
atttgcaaacgtaag

SEQ ID NO: 346027 - DNA, 15 bp, Homo sapiens
gatttgcaaacgtaa

SEQ ID NO: 346028 - DNA, 15 bp, Homo sapiens
cgatttgcaaacgta

SEQ ID NO: 346029 - DNA, 15 bp, Homo sapiens
acgatttgcaaacgt

SEQ ID NO: 346030 - DNA, 15 bp, Homo sapiens
cacgatttgcaaacg

SEQ ID NO: 346031 - DNA, 15 bp, Homo sapiens
ccacgatttgcaaac

SEQ ID NO: 346032 - DNA, 15 bp, Homo sapiens
gccacgatttgcaaa

SEQ ID NO: 346033 - DNA, 15 bp, Homo sapiens
tgccacgatttgcaa

SEQ ID NO: 346034 - DNA, 15 bp, Homo sapiens
ctgccacgatttgca

SEQ ID NO: 346035 - DNA, 15 bp, Homo sapiens
tctgccacgatttgc

SEQ ID NO: 346036 - DNA, 15 bp, Homo sapiens
ttctgccacgatttg

SEQ ID NO: 346037 - DNA, 15 bp, Homo sapiens
cttctgccacgattt

SEQ ID NO: 346038 - DNA, 15 bp, Homo sapiens
acttctgccacgatt

SEQ ID NO: 346039 - DNA, 15 bp, Homo sapiens
gacttctgccacgat

SEQ ID NO: 346040 - DNA, 15 bp, Homo sapiens
tgacttctgccacga

SEQ ID NO: 346041 - DNA, 15 bp, Homo sapiens
ctgacttctgccacg

SEQ ID NO: 346042 - DNA, 15 bp, Homo sapiens
tctgacttctgccac

SEQ ID NO: 346043 - DNA, 15 bp, Homo sapiens
ttctgacttctgcca

SEQ ID NO: 346044 - DNA, 15 bp, Homo sapiens
tttctgacttctgcc

SEQ ID NO: 346045 - DNA, 15 bp, Homo sapiens
ctttctgacttctgc

SEQ ID NO: 346046 - DNA, 15 bp, Homo sapiens
actttctgacttctg

SEQ ID NO: 346047 - DNA, 15 bp, Homo sapiens
tactttctgacttct

SEQ ID NO: 346048 - DNA, 15 bp, Homo sapiens
ctactttctgacttc

SEQ ID NO: 346049 - DNA, 15 bp, Homo sapiens
tctactttctgactt

SEQ ID NO: 346050 - DNA, 15 bp, Homo sapiens
ttctactttctgact

SEQ ID NO: 346051 - DNA, 15 bp, Homo sapiens
tttctactttctgac

SEQ ID NO: 346052 - DNA, 15 bp, Homo sapiens
ttttctactttctga

SEQ ID NO: 346053 - DNA, 15 bp, Homo sapiens
tttttctactttctg

SEQ ID NO: 346054 - DNA, 15 bp, Homo sapiens
atttttctactttct

SEQ ID NO: 346055 - DNA, 15 bp, Homo sapiens
aatttttctactttc

SEQ ID NO: 346056 - DNA, 15 bp, Homo sapiens
caatttttctacttt

SEQ ID NO: 346057 - DNA, 15 bp, Homo sapiens
gcaatttttctactt

SEQ ID NO: 346058 - DNA, 15 bp, Homo sapiens
agcaatttttctact

SEQ ID NO: 346059 - DNA, 15 bp, Homo sapiens
tagcaatttttctac

SEQ ID NO: 346060 - DNA, 15 bp, Homo sapiens
gtagcaatttttcta

SEQ ID NO: 346061 - DNA, 15 bp, Homo sapiens
agtagcaatttttct

SEQ ID NO: 346062 - DNA, 15 bp, Homo sapiens
cagtagcaatttttc

SEQ ID NO: 346063 - DNA, 15 bp, Homo sapiens
tcagtagcaattttt

SEQ ID NO: 346064 - DNA, 15 bp, Homo sapiens
gtcagtagcaatttt

SEQ ID NO: 346065 - DNA, 15 bp, Homo sapiens
agtcagtagcaattt

SEQ ID NO: 346066 - DNA, 15 bp, Homo sapiens
aagtcagtagcaatt

SEQ ID NO: 346067 - DNA, 15 bp, Homo sapiens
taagtcagtagcaat

SEQ ID NO: 346068 - DNA, 15 bp, Homo sapiens
ctaagtcagtagcaa

SEQ ID NO: 346069 - DNA, 15 bp, Homo sapiens
tctaagtcagtagca

SEQ ID NO: 346070 - DNA, 15 bp, Homo sapiens
atctaagtcagtagc

SEQ ID NO: 346071 - DNA, 15 bp, Homo sapiens
tatctaagtcagtag

SEQ ID NO: 346072 - DNA, 15 bp, Homo sapiens
gtatctaagtcagta

SEQ ID NO: 346073 - DNA, 15 bp, Homo sapiens
tgtatctaagtcagt

SEQ ID NO: 346074 - DNA, 15 bp, Homo sapiens
gtgtatctaagtcag

SEQ ID NO: 346075 - DNA, 15 bp, Homo sapiens
tgtgtatctaagtca

SEQ ID NO: 346076 - DNA, 15 bp, Homo sapiens
ctgtgtatctaagtc

SEQ ID NO: 346077 - DNA, 15 bp, Homo sapiens
actgtgtatctaagt

SEQ ID NO: 346078 - DNA, 15 bp, Homo sapiens
aactgtgtatctaag

SEQ ID NO: 346079 - DNA, 15 bp, Homo sapiens
caactgtgtatctaa

SEQ ID NO: 346080 - DNA, 15 bp, Homo sapiens
acaactgtgtatcta

SEQ ID NO: 346081 - DNA, 15 bp, Homo sapiens
gacaactgtgtatct

SEQ ID NO: 346082 - DNA, 15 bp, Homo sapiens
agacaactgtgtatc

SEQ ID NO: 346083 - DNA, 15 bp, Homo sapiens
gagacaactgtgtat

SEQ ID NO: 346084 - DNA, 15 bp, Homo sapiens
agagacaactgtgta

SEQ ID NO: 346085 - DNA, 15 bp, Homo sapiens
tagagacaactgtgt

SEQ ID NO: 346086 - DNA, 15 bp, Homo sapiens
ctagagacaactgtg

SEQ ID NO: 346087 - DNA, 15 bp, Homo sapiens
gctagagacaactgt

SEQ ID NO: 346088 - DNA, 15 bp, Homo sapiens
cgctagagacaactg

SEQ ID NO: 346089 - DNA, 15 bp, Homo sapiens
acgctagagacaact

SEQ ID NO: 346090 - DNA, 15 bp, Homo sapiens
tacgctagagacaac

SEQ ID NO: 346091 - DNA, 15 bp, Homo sapiens
atacgctagagacaa

SEQ ID NO: 346092 - DNA, 15 bp, Homo sapiens
tatacgctagagaca

SEQ ID NO: 346093 - DNA, 15 bp, Homo sapiens
gtatacgctagagac

SEQ ID NO: 346094 - DNA, 15 bp, Homo sapiens
tgtatacgctagaga

SEQ ID NO: 346095 - DNA, 15 bp, Homo sapiens
ttgtatacgctagag

SEQ ID NO: 346096 - DNA, 15 bp, Homo sapiens
tttgtatacgctaga

SEQ ID NO: 346097 - DNA, 15 bp, Homo sapiens
ctttgtatacgctag

SEQ ID NO: 346098 - DNA, 15 bp, Homo sapiens
actttgtatacgcta

SEQ ID NO: 346099 - DNA, 15 bp, Homo sapiens
gactttgtatacgct

SEQ ID NO: 346100 - DNA, 15 bp, Homo sapiens
agactttgtatacgc

SEQ ID NO: 346101 - DNA, 15 bp, Homo sapiens
tagactttgtatacg

SEQ ID NO: 346102 - DNA, 15 bp, Homo sapiens
gtagactttgtatac

SEQ ID NO: 346103 - DNA, 15 bp, Homo sapiens
ggtagactttgtata

SEQ ID NO: 346104 - DNA, 15 bp, Homo sapiens
aggtagactttgtat

SEQ ID NO: 346105 - DNA, 15 bp, Homo sapiens
taggtagactttgta

SEQ ID NO: 346106 - DNA, 15 bp, Homo sapiens
ataggtagactttgt

SEQ ID NO: 346107 - DNA, 15 bp, Homo sapiens
cataggtagactttg

SEQ ID NO: 346108 - DNA, 15 bp, Homo sapiens
gcataggtagacttt

SEQ ID NO: 346109 - DNA, 15 bp, Homo sapiens
tgcataggtagactt

SEQ ID NO: 346110 - DNA, 15 bp, Homo sapiens
gtgcataggtagact

SEQ ID NO: 346111 - DNA, 15 bp, Homo sapiens
agtgcataggtagac

SEQ ID NO: 346112 - DNA, 15 bp, Homo sapiens
tagtgcataggtaga

SEQ ID NO: 346113 - DNA, 15 bp, Homo sapiens
ttagtgcataggtag

SEQ ID NO: 346114 - DNA, 15 bp, Homo sapiens
cttagtgcataggta

SEQ ID NO: 346115 - DNA, 15 bp, Homo sapiens
tcttagtgcataggt

SEQ ID NO: 346116 - DNA, 15 bp, Homo sapiens
gtcttagtgcatagg

SEQ ID NO: 346117 - DNA, 15 bp, Homo sapiens
agtcttagtgcatag

SEQ ID NO: 346118 - DNA, 15 bp, Homo sapiens
aagtcttagtgcata

SEQ ID NO: 346119 - DNA, 15 bp, Homo sapiens
caagtcttagtgcat

SEQ ID NO: 346120 - DNA, 15 bp, Homo sapiens
gcaagtcttagtgca

SEQ ID NO: 346121 - DNA, 15 bp, Homo sapiens
tgcaagtcttagtgc

SEQ ID NO: 346122 - DNA, 15 bp, Homo sapiens
gtgcaagtcttagtg

SEQ ID NO: 346123 - DNA, 15 bp, Homo sapiens
agtgcaagtcttagt

SEQ ID NO: 346124 - DNA, 15 bp, Homo sapiens
cagtgcaagtcttag

SEQ ID NO: 346125 - DNA, 15 bp, Homo sapiens
ccagtgcaagtctta

SEQ ID NO: 346126 - DNA, 15 bp, Homo sapiens
cccagtgcaagtctt

SEQ ID NO: 346127 - DNA, 15 bp, Homo sapiens
tcccagtgcaagtct

SEQ ID NO: 346128 - DNA, 15 bp, Homo sapiens
ttcccagtgcaagtc

SEQ ID NO: 346129 - DNA, 15 bp, Homo sapiens
gttcccagtgcaagt

SEQ ID NO: 346130 - DNA, 15 bp, Homo sapiens
agttcccagtgcaag

SEQ ID NO: 346131 - DNA, 15 bp, Homo sapiens
aagttcccagtgcaa

SEQ ID NO: 346132 - DNA, 15 bp, Homo sapiens
aaagttcccagtgca

SEQ ID NO: 346133 - DNA, 15 bp, Homo sapiens
aaaagttcccagtgc

SEQ ID NO: 346134 - DNA, 15 bp, Homo sapiens
gaaaagttcccagtg

SEQ ID NO: 346135 - DNA, 15 bp, Homo sapiens
agaaaagttcccagt

SEQ ID NO: 346136 - DNA, 15 bp, Homo sapiens
aagaaaagttcccag

SEQ ID NO: 346137 - DNA, 15 bp, Homo sapiens
caagaaaagttccca

SEQ ID NO: 346138 - DNA, 15 bp, Homo sapiens
tcaagaaaagttccc

SEQ ID NO: 346139 - DNA, 15 bp, Homo sapiens
ttcaagaaaagttcc

SEQ ID NO: 346140 - DNA, 15 bp, Homo sapiens
attcaagaaaagttc

SEQ ID NO: 346141 - DNA, 15 bp, Homo sapiens
cattcaagaaaagtt

SEQ ID NO: 346142 - DNA, 15 bp, Homo sapiens
acattcaagaaaagt

SEQ ID NO: 346143 - DNA, 15 bp, Homo sapiens
gacattcaagaaaag

SEQ ID NO: 346144 - DNA, 15 bp, Homo sapiens
tgacattcaagaaaa

SEQ ID NO: 346145 - DNA, 15 bp, Homo sapiens
atgacattcaagaaa

SEQ ID NO: 346146 - DNA, 15 bp, Homo sapiens
aatgacattcaagaa

SEQ ID NO: 346147 - DNA, 15 bp, Homo sapiens
aaatgacattcaaga

SEQ ID NO: 346148 - DNA, 15 bp, Homo sapiens
aaaatgacattcaag

SEQ ID NO: 346149 - DNA, 15 bp, Homo sapiens
caaaatgacattcaa

SEQ ID NO: 346150 - DNA, 15 bp, Homo sapiens
tcaaaatgacattca

SEQ ID NO: 346151 - DNA, 15 bp, Homo sapiens
gtcaaaatgacattc

SEQ ID NO: 346152 - DNA, 15 bp, Homo sapiens
tgtcaaaatgacatt

SEQ ID NO: 346153 - DNA, 15 bp, Homo sapiens
ctgtcaaaatgacat

SEQ ID NO: 346154 - DNA, 15 bp, Homo sapiens
tctgtcaaaatgaca

SEQ ID NO: 346155 - DNA, 15 bp, Homo sapiens
atctgtcaaaatgac

SEQ ID NO: 346156 - DNA, 15 bp, Homo sapiens
catctgtcaaaatga

SEQ ID NO: 346157 - DNA, 15 bp, Homo sapiens
acatctgtcaaaatg

SEQ ID NO: 346158 - DNA, 15 bp, Homo sapiens
cacatctgtcaaaat

SEQ ID NO: 346159 - DNA, 15 bp, Homo sapiens
acacatctgtcaaaa

SEQ ID NO: 346160 - DNA, 15 bp, Homo sapiens
gacacatctgtcaaa

SEQ ID NO: 346161 - DNA, 15 bp, Homo sapiens
tgacacatctgtcaa

SEQ ID NO: 346162 - DNA, 15 bp, Homo sapiens
ttgacacatctgtca

SEQ ID NO: 346163 - DNA, 15 bp, Homo sapiens
tttgacacatctgtc

SEQ ID NO: 346164 - DNA, 15 bp, Homo sapiens
gtttgacacatctgt

SEQ ID NO: 346165 - DNA, 15 bp, Homo sapiens
cgtttgacacatctg

SEQ ID NO: 346166 - DNA, 15 bp, Homo sapiens
ccgtttgacacatct

SEQ ID NO: 346167 - DNA, 15 bp, Homo sapiens
tccgtttgacacatc

SEQ ID NO: 346168 - DNA, 15 bp, Homo sapiens
gtccgtttgacacat

SEQ ID NO: 346169 - DNA, 15 bp, Homo sapiens
tgtccgtttgacaca

SEQ ID NO: 346170 - DNA, 15 bp, Homo sapiens
ttgtccgtttgacac

SEQ ID NO: 346171 - DNA, 15 bp, Homo sapiens
attgtccgtttgaca

SEQ ID NO: 346172 - DNA, 15 bp, Homo sapiens
gattgtccgtttgac

SEQ ID NO: 346173 - DNA, 15 bp, Homo sapiens
agattgtccgtttga

SEQ ID NO: 346174 - DNA, 15 bp, Homo sapiens
gagattgtccgtttg

SEQ ID NO: 346175 - DNA, 15 bp, Homo sapiens
agagattgtccgttt

SEQ ID NO: 346176 - DNA, 15 bp, Homo sapiens
aagagattgtccgtt

SEQ ID NO: 346177 - DNA, 15 bp, Homo sapiens
aaagagattgtccgt

SEQ ID NO: 346178 - DNA, 15 bp, Homo sapiens
caaagagattgtccg

SEQ ID NO: 346179 - DNA, 15 bp, Homo sapiens
gcaaagagattgtcc

SEQ ID NO: 346180 - DNA, 15 bp, Homo sapiens
ggcaaagagattgtc

SEQ ID NO: 346181 - DNA, 15 bp, Homo sapiens
gggcaaagagattgt

SEQ ID NO: 346182 - DNA, 15 bp, Homo sapiens
tgggcaaagagattg

SEQ ID NO: 346183 - DNA, 15 bp, Homo sapiens
ctgggcaaagagatt

SEQ ID NO: 346184 - DNA, 15 bp, Homo sapiens
cctgggcaaagagat

SEQ ID NO: 346185 - DNA, 15 bp, Homo sapiens
tcctgggcaaagaga

SEQ ID NO: 346186 - DNA, 15 bp, Homo sapiens
ttcctgggcaaagag

SEQ ID NO: 346187 - DNA, 15 bp, Homo sapiens
tttcctgggcaaaga

SEQ ID NO: 346188 - DNA, 15 bp, Homo sapiens
gtttcctgggcaaag

SEQ ID NO: 346189 - DNA, 15 bp, Homo sapiens
tgtttcctgggcaaa

SEQ ID NO: 346190 - DNA, 15 bp, Homo sapiens
ctgtttcctgggcaa

SEQ ID NO: 346191 - DNA, 15 bp, Homo sapiens
tctgtttcctgggca

SEQ ID NO: 346192 - DNA, 15 bp, Homo sapiens
ctctgtttcctgggc

SEQ ID NO: 346193 - DNA, 15 bp, Homo sapiens
actctgtttcctggg

SEQ ID NO: 346194 - DNA, 15 bp, Homo sapiens
aactctgtttcctgg

SEQ ID NO: 346195 - DNA, 15 bp, Homo sapiens
taactctgtttcctg

SEQ ID NO: 346196 - DNA, 15 bp, Homo sapiens
ttaactctgtttcct

SEQ ID NO: 346197 - DNA, 15 bp, Homo sapiens
gttaactctgtttcc

SEQ ID NO: 346198 - DNA, 15 bp, Homo sapiens
ggttaactctgtttc

SEQ ID NO: 346199 - DNA, 15 bp, Homo sapiens
aggttaactctgttt

SEQ ID NO: 346200 - DNA, 15 bp, Homo sapiens
caggttaactctgtt

SEQ ID NO: 346201 - DNA, 15 bp, Homo sapiens
ccaggttaactctgt

SEQ ID NO: 346202 - DNA, 15 bp, Homo sapiens
tccaggttaactctg

SEQ ID NO: 346203 - DNA, 15 bp, Homo sapiens
ttccaggttaactct

SEQ ID NO: 346204 - DNA, 15 bp, Homo sapiens
gttccaggttaactc

SEQ ID NO: 346205 - DNA, 15 bp, Homo sapiens
tgttccaggttaact

SEQ ID NO: 346206 - DNA, 15 bp, Homo sapiens
ctgttccaggttaac

SEQ ID NO: 346207 - DNA, 15 bp, Homo sapiens
actgttccaggttaa

SEQ ID NO: 346208 - DNA, 15 bp, Homo sapiens
gactgttccaggtta

SEQ ID NO: 346209 - DNA, 15 bp, Homo sapiens
tgactgttccaggtt

SEQ ID NO: 346210 - DNA, 15 bp, Homo sapiens
atgactgttccaggt

SEQ ID NO: 346211 - DNA, 15 bp, Homo sapiens
aatgactgttccagg

SEQ ID NO: 346212 - DNA, 15 bp, Homo sapiens
aaatgactgttccag

SEQ ID NO: 346213 - DNA, 15 bp, Homo sapiens
aaaatgactgttcca

SEQ ID NO: 346214 - DNA, 15 bp, Homo sapiens
aaaaatgactgttcc

SEQ ID NO: 346215 - DNA, 15 bp, Homo sapiens
aaaaaatgactgttc

SEQ ID NO: 346216 - DNA, 15 bp, Homo sapiens
aaaaaaatgactgtt

SEQ ID NO: 346217 - DNA, 15 bp, Homo sapiens
aaaaaaaatgactgt

SEQ ID NO: 346218 - DNA, 15 bp, Homo sapiens
aaaaaaaaatgactg

SEQ ID NO: 346219 - DNA, 15 bp, Homo sapiens
taaaaaaaaatgact

SEQ ID NO: 346220 - DNA, 15 bp, Homo sapiens
ttaaaaaaaaatgac

SEQ ID NO: 346221 - DNA, 15 bp, Homo sapiens
tttaaaaaaaaatga

SEQ ID NO: 346222 - DNA, 15 bp, Homo sapiens
atttaaaaaaaaatg

SEQ ID NO: 346223 - DNA, 15 bp, Homo sapiens
aatttaaaaaaaaat

SEQ ID NO: 346224 - DNA, 15 bp, Homo sapiens
aaatttaaaaaaaaa

SEQ ID NO: 346225 - DNA, 15 bp, Homo sapiens
taaatttaaaaaaaa

SEQ ID NO: 346226 - DNA, 15 bp, Homo sapiens
ataaatttaaaaaaa

SEQ ID NO: 346227 - DNA, 15 bp, Homo sapiens
aataaatttaaaaaa

SEQ ID NO: 346228 - DNA, 15 bp, Homo sapiens
aaataaatttaaaaa

SEQ ID NO: 346229 - DNA, 15 bp, Homo sapiens
taaataaatttaaaa

SEQ ID NO: 346230 - DNA, 15 bp, Homo sapiens
ataaataaatttaaa

SEQ ID NO: 346231 - DNA, 15 bp, Homo sapiens
aataaataaatttaa

SEQ ID NO: 346232 - DNA, 15 bp, Homo sapiens
aaataaataaattta

SEQ ID NO: 346233 - DNA, 15 bp, Homo sapiens
aaaataaataaattt

SEQ ID NO: 346234 - DNA, 15 bp, Homo sapiens
aaaaataaataaatt

SEQ ID NO: 346235 - DNA, 15 bp, Homo sapiens
cgtctcaaaaaataa

SEQ ID NO: 346236 - DNA, 15 bp, Homo sapiens
ccgtctcaaaaaata

SEQ ID NO: 346237 - DNA, 15 bp, Homo sapiens
tccgtctcaaaaaat

SEQ ID NO: 346238 - DNA, 15 bp, Homo sapiens
aaaactccgtctcaa

SEQ ID NO: 346239 - DNA, 15 bp, Homo sapiens
caaaactccgtctca

SEQ ID NO: 346240 - DNA, 15 bp, Homo sapiens
agcaaaactccgtct

SEQ ID NO: 346241 - DNA, 15 bp, Homo sapiens
gagcaaaactccgtc

SEQ ID NO: 346242 - DNA, 15 bp, Homo sapiens
agagcaaaactccgt

SEQ ID NO: 346243 - DNA, 15 bp, Homo sapiens
aagagcaaaactccg

SEQ ID NO: 346244 - DNA, 15 bp, Homo sapiens
caagagcaaaactcc

SEQ ID NO: 346245 - DNA, 15 bp, Homo sapiens
acaagagcaaaactc

SEQ ID NO: 346246 - DNA, 15 bp, Homo sapiens
acaacaagagcaaaa

SEQ ID NO: 346247 - DNA, 15 bp, Homo sapiens
gacaacaagagcaaa

SEQ ID NO: 346248 - DNA, 15 bp, Homo sapiens
ggacaacaagagcaa

SEQ ID NO: 346249 - DNA, 15 bp, Homo sapiens
tggacaacaagagca

SEQ ID NO: 346250 - DNA, 15 bp, Homo sapiens
ctggacaacaagagc

SEQ ID NO: 346251 - DNA, 15 bp, Homo sapiens
cctggacaacaagag

SEQ ID NO: 346252 - DNA, 15 bp, Homo sapiens
gcctggacaacaaga

SEQ ID NO: 346253 - DNA, 15 bp, Homo sapiens
agcctggacaacaag

SEQ ID NO: 346254 - DNA, 15 bp, Homo sapiens
cagcctggacaacaa

SEQ ID NO: 346255 - DNA, 15 bp, Homo sapiens
tcagcctggacaaca

SEQ ID NO: 346256 - DNA, 15 bp, Homo sapiens
ttcagcctggacaac

SEQ ID NO: 346257 - DNA, 15 bp, Homo sapiens
cttcagcctggacaa

SEQ ID NO: 346258 - DNA, 15 bp, Homo sapiens
acttcagcctggaca

SEQ ID NO: 346259 - DNA, 15 bp, Homo sapiens
tacttcagcctggac

SEQ ID NO: 346260 - DNA, 15 bp, Homo sapiens
gtacttcagcctgga

SEQ ID NO: 346261 - DNA, 15 bp, Homo sapiens
tgtacttcagcctgg

SEQ ID NO: 346262 - DNA, 15 bp, Homo sapiens
ttgtacttcagcctg

SEQ ID NO: 346263 - DNA, 15 bp, Homo sapiens
attgtacttcagcct

SEQ ID NO: 346264 - DNA, 15 bp, Homo sapiens
cattgtacttcagcc

SEQ ID NO: 346265 - DNA, 15 bp, Homo sapiens
ccattgtacttcagc

SEQ ID NO: 346266 - DNA, 15 bp, Homo sapiens
accattgtacttcag

SEQ ID NO: 346267 - DNA, 15 bp, Homo sapiens
caccattgtacttca

SEQ ID NO: 346268 - DNA, 15 bp, Homo sapiens
acaccattgtacttc

SEQ ID NO: 346269 - DNA, 15 bp, Homo sapiens
cacaccattgtactt

SEQ ID NO: 346270 - DNA, 15 bp, Homo sapiens
tcacaccattgtact

SEQ ID NO: 346271 - DNA, 15 bp, Homo sapiens
atcacaccattgtac

SEQ ID NO: 346272 - DNA, 15 bp, Homo sapiens
gatcacaccattgta

SEQ ID NO: 346273 - DNA, 15 bp, Homo sapiens
agatcacaccattgt

SEQ ID NO: 346274 - DNA, 15 bp, Homo sapiens
gagatcacaccattg

SEQ ID NO: 346275 - DNA, 15 bp, Homo sapiens
cgagatcacaccatt

SEQ ID NO: 346276 - DNA, 15 bp, Homo sapiens
accgagatcacacca

SEQ ID NO: 346277 - DNA, 15 bp, Homo sapiens
aaccgagatcacacc

SEQ ID NO: 346278 - DNA, 15 bp, Homo sapiens
gaaccgagatcacac

SEQ ID NO: 346279 - DNA, 15 bp, Homo sapiens
tgaaccgagatcaca

SEQ ID NO: 346280 - DNA, 15 bp, Homo sapiens
gtgaaccgagatcac

SEQ ID NO: 346281 - DNA, 15 bp, Homo sapiens
cgtgaaccgagatca

SEQ ID NO: 346282 - DNA, 15 bp, Homo sapiens
ccgtgaaccgagatc

SEQ ID NO: 346283 - DNA, 15 bp, Homo sapiens
gccgtgaaccgagat

SEQ ID NO: 346284 - DNA, 15 bp, Homo sapiens
tgccgtgaaccgaga

SEQ ID NO: 346285 - DNA, 15 bp, Homo sapiens
ttgccgtgaaccgag

SEQ ID NO: 346286 - DNA, 15 bp, Homo sapiens
gttgccgtgaaccga

SEQ ID NO: 346287 - DNA, 15 bp, Homo sapiens
ggttgccgtgaaccg

SEQ ID NO: 346288 - DNA, 15 bp, Homo sapiens
aggttgccgtgaacc

SEQ ID NO: 346289 - DNA, 15 bp, Homo sapiens
gaggttgccgtgaac

SEQ ID NO: 346290 - DNA, 15 bp, Homo sapiens
ggaggttgccgtgaa

SEQ ID NO: 346291 - DNA, 15 bp, Homo sapiens
cggaggttgccgtga

SEQ ID NO: 346292 - DNA, 15 bp, Homo sapiens
gcggaggttgccgtg

SEQ ID NO: 346293 - DNA, 15 bp, Homo sapiens
ggcggaggttgccgt

SEQ ID NO: 346294 - DNA, 15 bp, Homo sapiens
aggcggaggttgccg

SEQ ID NO: 346295 - DNA, 15 bp, Homo sapiens
gaggcggaggttgcc

SEQ ID NO: 346296 - DNA, 15 bp, Homo sapiens
gtgaggcaggagaat

SEQ ID NO: 346297 - DNA, 15 bp, Homo sapiens
agtgaggcaggagaa

SEQ ID NO: 346298 - DNA, 15 bp, Homo sapiens
gagtgaggcaggaga

SEQ ID NO: 346299 - DNA, 15 bp, Homo sapiens
agagtgaggcaggag

SEQ ID NO: 346300 - DNA, 15 bp, Homo sapiens
gagagtgaggcagga

SEQ ID NO: 346301 - DNA, 15 bp, Homo sapiens
ggagagtgaggcagg

SEQ ID NO: 346302 - DNA, 15 bp, Homo sapiens
tggagagtgaggcag

SEQ ID NO: 346303 - DNA, 15 bp, Homo sapiens
ctggagagtgaggca

SEQ ID NO: 346304 - DNA, 15 bp, Homo sapiens
tctggagagtgaggc

SEQ ID NO: 346305 - DNA, 15 bp, Homo sapiens
ctctggagagtgagg

SEQ ID NO: 346306 - DNA, 15 bp, Homo sapiens
actctggagagtgag

SEQ ID NO: 346307 - DNA, 15 bp, Homo sapiens
tactctggagagtga

SEQ ID NO: 346308 - DNA, 15 bp, Homo sapiens
ctactctggagagtg

SEQ ID NO: 346309 - DNA, 15 bp, Homo sapiens
gctactctggagagt

SEQ ID NO: 346310 - DNA, 15 bp, Homo sapiens
agctactctggagag

SEQ ID NO: 346311 - DNA, 15 bp, Homo sapiens
cagctactctggaga

SEQ ID NO: 346312 - DNA, 15 bp, Homo sapiens
acagctactctggag

SEQ ID NO: 346313 - DNA, 15 bp, Homo sapiens
tacagctactctgga

SEQ ID NO: 346314 - DNA, 15 bp, Homo sapiens
ctacagctactctgg

SEQ ID NO: 346315 - DNA, 15 bp, Homo sapiens
gctacagctactctg

SEQ ID NO: 346316 - DNA, 15 bp, Homo sapiens
agctacagctactct

SEQ ID NO: 346317 - DNA, 15 bp, Homo sapiens
cagctacagctactc

SEQ ID NO: 346318 - DNA, 15 bp, Homo sapiens
tcagctacagctact

SEQ ID NO: 346319 - DNA, 15 bp, Homo sapiens
ctcagctacagctac

SEQ ID NO: 346320 - DNA, 15 bp, Homo sapiens
tctcagctacagcta

SEQ ID NO: 346321 - DNA, 15 bp, Homo sapiens
gtctcagctacagct

SEQ ID NO: 346322 - DNA, 15 bp, Homo sapiens
ggtctcagctacagc

SEQ ID NO: 346323 - DNA, 15 bp, Homo sapiens
tggtctcagctacag

SEQ ID NO: 346324 - DNA, 15 bp, Homo sapiens
gtggtctcagctaca

SEQ ID NO: 346325 - DNA, 15 bp, Homo sapiens
tgtggtctcagctac

SEQ ID NO: 346326 - DNA, 15 bp, Homo sapiens
ctgtggtctcagcta

SEQ ID NO: 346327 - DNA, 15 bp, Homo sapiens
cctgtggtctcagct

SEQ ID NO: 346328 - DNA, 15 bp, Homo sapiens
gcctgtggtctcagc

SEQ ID NO: 346329 - DNA, 15 bp, Homo sapiens
cgcctgtggtctcag

SEQ ID NO: 346330 - DNA, 15 bp, Homo sapiens
gcgcctgtggtctca

SEQ ID NO: 346331 - DNA, 15 bp, Homo sapiens
tgcgcctgtggtctc

SEQ ID NO: 346332 - DNA, 15 bp, Homo sapiens
atgcgcctgtggtct

SEQ ID NO: 346333 - DNA, 15 bp, Homo sapiens
catgcgcctgtggtc

SEQ ID NO: 346334 - DNA, 15 bp, Homo sapiens
gcatgcgcctgtggt

SEQ ID NO: 346335 - DNA, 15 bp, Homo sapiens
ggcatgcgcctgtgg

SEQ ID NO: 346336 - DNA, 15 bp, Homo sapiens
gggcatgcgcctgtg

SEQ ID NO: 346337 - DNA, 15 bp, Homo sapiens
agggcatgcgcctgt

SEQ ID NO: 346338 - DNA, 15 bp, Homo sapiens
gagggcatgcgcctg

SEQ ID NO: 346339 - DNA, 15 bp, Homo sapiens
tgagggcatgcgcct

SEQ ID NO: 346340 - DNA, 15 bp, Homo sapiens
atgagggcatgcgcc

SEQ ID NO: 346341 - DNA, 15 bp, Homo sapiens
catgagggcatgcgc

SEQ ID NO: 346342 - DNA, 15 bp, Homo sapiens
gcatgagggcatgcg

SEQ ID NO: 346343 - DNA, 15 bp, Homo sapiens
agcatgagggcatgc

SEQ ID NO: 346344 - DNA, 15 bp, Homo sapiens
gagcatgagggcatg

SEQ ID NO: 346345 - DNA, 15 bp, Homo sapiens
tgagcatgagggcat

SEQ ID NO: 346346 - DNA, 15 bp, Homo sapiens
ctgagcatgagggca

SEQ ID NO: 346347 - DNA, 15 bp, Homo sapiens
gctgagcatgagggc

SEQ ID NO: 346348 - DNA, 15 bp, Homo sapiens
agctgagcatgaggg

SEQ ID NO: 346349 - DNA, 15 bp, Homo sapiens
tagctgagcatgagg

SEQ ID NO: 346350 - DNA, 15 bp, Homo sapiens
atagctgagcatgag

SEQ ID NO: 346351 - DNA, 15 bp, Homo sapiens
aatagctgagcatga

SEQ ID NO: 346352 - DNA, 15 bp, Homo sapiens
aaatagctgagcatg

SEQ ID NO: 346353 - DNA, 15 bp, Homo sapiens
aaaatagctgagcat

SEQ ID NO: 346354 - DNA, 15 bp, Homo sapiens
aaaaatagctgagca

SEQ ID NO: 346355 - DNA, 15 bp, Homo sapiens
aaaaaatagctgagc

SEQ ID NO: 346356 - DNA, 15 bp, Homo sapiens
aaaaaaatagctgag

SEQ ID NO: 346357 - DNA, 15 bp, Homo sapiens
aaaaaaaatagctga

SEQ ID NO: 346358 - DNA, 15 bp, Homo sapiens
aaaaaaaaatagctg

SEQ ID NO: 346359 - DNA, 15 bp, Homo sapiens
aaaaaaaaaatagct

SEQ ID NO: 346360 - DNA, 15 bp, Homo sapiens
aaaaaaaaaaatagc

SEQ ID NO: 346361 - DNA, 15 bp, Homo sapiens
aaaaaaaaaaaatag

SEQ ID NO: 346362 - DNA, 15 bp, Homo sapiens
aaaaaaaaaaaaata

SEQ ID NO: 346363 - DNA, 15 bp, Homo sapiens
ctaaaaaaaaaaaaa

SEQ ID NO: 346364 - DNA, 15 bp, Homo sapiens
actaaaaaaaaaaaa

SEQ ID NO: 346365 - DNA, 15 bp, Homo sapiens
aactaaaaaaaaaaa

SEQ ID NO: 346366 - DNA, 15 bp, Homo sapiens
aaactaaaaaaaaaa

SEQ ID NO: 346367 - DNA, 15 bp, Homo sapiens
aaaactaaaaaaaaa

SEQ ID NO: 346368 - DNA, 15 bp, Homo sapiens
aaaaactaaaaaaaa

SEQ ID NO: 346369 - DNA, 15 bp, Homo sapiens
caaaaactaaaaaaa

SEQ ID NO: 346370 - DNA, 15 bp, Homo sapiens
acaaaaactaaaaaa

SEQ ID NO: 346371 - DNA, 15 bp, Homo sapiens
tacaaaaactaaaaa

SEQ ID NO: 346372 - DNA, 15 bp, Homo sapiens
ctacaaaaactaaaa

SEQ ID NO: 346373 - DNA, 15 bp, Homo sapiens
tctacaaaaactaaa

SEQ ID NO: 346374 - DNA, 15 bp, Homo sapiens
ttctacaaaaactaa

SEQ ID NO: 346375 - DNA, 15 bp, Homo sapiens
tttctacaaaaacta

SEQ ID NO: 346376 - DNA, 15 bp, Homo sapiens
gtttctacaaaaact

SEQ ID NO: 346377 - DNA, 15 bp, Homo sapiens
tgtttctacaaaaac

SEQ ID NO: 346378 - DNA, 15 bp, Homo sapiens
ttgtttctacaaaaa

SEQ ID NO: 346379 - DNA, 15 bp, Homo sapiens
cttgtttctacaaaa

SEQ ID NO: 346380 - DNA, 15 bp, Homo sapiens
ccttgtttctacaaa

SEQ ID NO: 346381 - DNA, 15 bp, Homo sapiens
accttgtttctacaa

SEQ ID NO: 346382 - DNA, 15 bp, Homo sapiens
gaccttgtttctaca

SEQ ID NO: 346383 - DNA, 15 bp, Homo sapiens
agaccttgtttctac

SEQ ID NO: 346384 - DNA, 15 bp, Homo sapiens
aagaccttgtttcta

SEQ ID NO: 346385 - DNA, 15 bp, Homo sapiens
caagaccttgtttct

SEQ ID NO: 346386 - DNA, 15 bp, Homo sapiens
gcaagaccttgtttc

SEQ ID NO: 346387 - DNA, 15 bp, Homo sapiens
ggcaagaccttgttt

SEQ ID NO: 346388 - DNA, 15 bp, Homo sapiens
tggcaagaccttgtt

SEQ ID NO: 346389 - DNA, 15 bp, Homo sapiens
gtggcaagaccttgt

SEQ ID NO: 346390 - DNA, 15 bp, Homo sapiens
tgtggcaagaccttg

SEQ ID NO: 346391 - DNA, 15 bp, Homo sapiens
atgtggcaagacctt

SEQ ID NO: 346392 - DNA, 15 bp, Homo sapiens
aatgtggcaagacct

SEQ ID NO: 346393 - DNA, 15 bp, Homo sapiens
caatgtggcaagacc

SEQ ID NO: 346394 - DNA, 15 bp, Homo sapiens
gcaatgtggcaagac

SEQ ID NO: 346395 - DNA, 15 bp, Homo sapiens
ggcaatgtggcaaga

SEQ ID NO: 346396 - DNA, 15 bp, Homo sapiens
gggcaatgtggcaag

SEQ ID NO: 346397 - DNA, 15 bp, Homo sapiens
tgggcaatgtggcaa

SEQ ID NO: 346398 - DNA, 15 bp, Homo sapiens
ctgggcaatgtggca

SEQ ID NO: 346399 - DNA, 15 bp, Homo sapiens
cctgggcaatgtggc

SEQ ID NO: 346400 - DNA, 15 bp, Homo sapiens
gcctgggcaatgtgg

SEQ ID NO: 346401 - DNA, 15 bp, Homo sapiens
agcctgggcaatgtg

SEQ ID NO: 346402 - DNA, 15 bp, Homo sapiens
cagcctgggcaatgt

SEQ ID NO: 346403 - DNA, 15 bp, Homo sapiens
tcagcctgggcaatg

SEQ ID NO: 346404 - DNA, 15 bp, Homo sapiens
atcagcctgggcaat

SEQ ID NO: 346405 - DNA, 15 bp, Homo sapiens
tatcagcctgggcaa

SEQ ID NO: 346406 - DNA, 15 bp, Homo sapiens
gtatcagcctgggca

SEQ ID NO: 346407 - DNA, 15 bp, Homo sapiens
ggtatcagcctgggc

SEQ ID NO: 346408 - DNA, 15 bp, Homo sapiens
tggtatcagcctggg

SEQ ID NO: 346409 - DNA, 15 bp, Homo sapiens
ttggtatcagcctgg

SEQ ID NO: 346410 - DNA, 15 bp, Homo sapiens
tttggtatcagcctg

SEQ ID NO: 346411 - DNA, 15 bp, Homo sapiens
gtttggtatcagcct

SEQ ID NO: 346412 - DNA, 15 bp, Homo sapiens
agtttggtatcagcc

SEQ ID NO: 346413 - DNA, 15 bp, Homo sapiens
gagtttggtatcagc

SEQ ID NO: 346414 - DNA, 15 bp, Homo sapiens
ggagtttggtatcag

SEQ ID NO: 346415 - DNA, 15 bp, Homo sapiens
aggagtttggtatca

SEQ ID NO: 346416 - DNA, 15 bp, Homo sapiens
caggagtttggtatc

SEQ ID NO: 346417 - DNA, 15 bp, Homo sapiens
ccaggagtttggtat

SEQ ID NO: 346418 - DNA, 15 bp, Homo sapiens
cccaggagtttggta

SEQ ID NO: 346419 - DNA, 15 bp, Homo sapiens
gcccaggagtttggt

SEQ ID NO: 346420 - DNA, 15 bp, Homo sapiens
agcccaggagtttgg

SEQ ID NO: 346421 - DNA, 15 bp, Homo sapiens
gcttgagcccaggag

SEQ ID NO: 346422 - DNA, 15 bp, Homo sapiens
tgcttgagcccagga

SEQ ID NO: 346423 - DNA, 15 bp, Homo sapiens
ctgcttgagcccagg

SEQ ID NO: 346424 - DNA, 15 bp, Homo sapiens
actgcttgagcccag

SEQ ID NO: 346425 - DNA, 15 bp, Homo sapiens
gactgcttgagccca

SEQ ID NO: 346426 - DNA, 15 bp, Homo sapiens
agactgcttgagccc

SEQ ID NO: 346427 - DNA, 15 bp, Homo sapiens
cagactgcttgagcc

SEQ ID NO: 346428 - DNA, 15 bp, Homo sapiens
gcagactgcttgagc

SEQ ID NO: 346429 - DNA, 15 bp, Homo sapiens
ggcagactgcttgag

SEQ ID NO: 346430 - DNA, 15 bp, Homo sapiens
tggcagactgcttga

SEQ ID NO: 346431 - DNA, 15 bp, Homo sapiens
ctggcagactgcttg

SEQ ID NO: 346432 - DNA, 15 bp, Homo sapiens
gctggcagactgctt

SEQ ID NO: 346433 - DNA, 15 bp, Homo sapiens
ggctggcagactgct

SEQ ID NO: 346434 - DNA, 15 bp, Homo sapiens
aggctggcagactgc

SEQ ID NO: 346435 - DNA, 15 bp, Homo sapiens
aaggctggcagactg

SEQ ID NO: 346436 - DNA, 15 bp, Homo sapiens
caaggctggcagact

SEQ ID NO: 346437 - DNA, 15 bp, Homo sapiens
ccaaggctggcagac

SEQ ID NO: 346438 - DNA, 15 bp, Homo sapiens
gccaaggctggcaga

SEQ ID NO: 346439 - DNA, 15 bp, Homo sapiens
ggccaaggctggcag

SEQ ID NO: 346440 - DNA, 15 bp, Homo sapiens
aggccaaggctggca

SEQ ID NO: 346441 - DNA, 15 bp, Homo sapiens
gaggccaaggctggc

SEQ ID NO: 346442 - DNA, 15 bp, Homo sapiens
ggaggccaaggctgg

SEQ ID NO: 346443 - DNA, 15 bp, Homo sapiens
gggaggccaaggctg

SEQ ID NO: 346444 - DNA, 15 bp, Homo sapiens
tgggaggccaaggct

SEQ ID NO: 346445 - DNA, 15 bp, Homo sapiens
tacacctgtaatccc

SEQ ID NO: 346446 - DNA, 15 bp, Homo sapiens
ttacacctgtaatcc

SEQ ID NO: 346447 - DNA, 15 bp, Homo sapiens
cttacacctgtaatc

SEQ ID NO: 346448 - DNA, 15 bp, Homo sapiens
gcttacacctgtaat

SEQ ID NO: 346449 - DNA, 15 bp, Homo sapiens
ggcttacacctgtaa

SEQ ID NO: 346450 - DNA, 15 bp, Homo sapiens
tggcttacacctgta

SEQ ID NO: 346451 - DNA, 15 bp, Homo sapiens
gtggcttacacctgt

SEQ ID NO: 346452 - DNA, 15 bp, Homo sapiens
agtggcttacacctg

SEQ ID NO: 346453 - DNA, 15 bp, Homo sapiens
cagtggcttacacct

SEQ ID NO: 346454 - DNA, 15 bp, Homo sapiens
acagtggcttacacc

SEQ ID NO: 346455 - DNA, 15 bp, Homo sapiens
cacagtggcttacac

SEQ ID NO: 346456 - DNA, 15 bp, Homo sapiens
gcacagtggcttaca

SEQ ID NO: 346457 - DNA, 15 bp, Homo sapiens
ggcacagtggcttac

SEQ ID NO: 346458 - DNA, 15 bp, Homo sapiens
gggcacagtggctta

SEQ ID NO: 346459 - DNA, 15 bp, Homo sapiens
agggcacagtggctt

SEQ ID NO: 346460 - DNA, 15 bp, Homo sapiens
cagggcacagtggct

SEQ ID NO: 346461 - DNA, 15 bp, Homo sapiens
gcagggcacagtggc

SEQ ID NO: 346462 - DNA, 15 bp, Homo sapiens
ggcagggcacagtgg

SEQ ID NO: 346463 - DNA, 15 bp, Homo sapiens
aggcagggcacagtg

SEQ ID NO: 346464 - DNA, 15 bp, Homo sapiens
caggcagggcacagt

SEQ ID NO: 346465 - DNA, 15 bp, Homo sapiens
acaggcagggcacag

SEQ ID NO: 346466 - DNA, 15 bp, Homo sapiens
cacaggcagggcaca

SEQ ID NO: 346467 - DNA, 15 bp, Homo sapiens
ccacaggcagggcac

SEQ ID NO: 346468 - DNA, 15 bp, Homo sapiens
accacaggcagggca

SEQ ID NO: 346469 - DNA, 15 bp, Homo sapiens
caccacaggcagggc

SEQ ID NO: 346470 - DNA, 15 bp, Homo sapiens
acaccacaggcaggg

SEQ ID NO: 346471 - DNA, 15 bp, Homo sapiens
gacaccacaggcagg

SEQ ID NO: 346472 - DNA, 15 bp, Homo sapiens
gtatcccagacgaat

SEQ ID NO: 346473 - DNA, 15 bp, Homo sapiens
cgtatcccagacgaa

SEQ ID NO: 346474 - DNA, 15 bp, Homo sapiens
ccgtatcccagacga

SEQ ID NO: 346475 - DNA, 15 bp, Homo sapiens
accgtatcccagacg

SEQ ID NO: 346476 - DNA, 15 bp, Homo sapiens
taccgtatcccagac

SEQ ID NO: 346477 - DNA, 15 bp, Homo sapiens
gtaccgtatcccaga

SEQ ID NO: 346478 - DNA, 15 bp, Homo sapiens
tgtaccgtatcccag

SEQ ID NO: 346479 - DNA, 15 bp, Homo sapiens
ttgtaccgtatccca

SEQ ID NO: 346480 - DNA, 15 bp, Homo sapiens
attgtaccgtatccc

SEQ ID NO: 346481 - DNA, 15 bp, Homo sapiens
tattgtaccgtatcc

SEQ ID NO: 346482 - DNA, 15 bp, Homo sapiens
ttattgtaccgtatc

SEQ ID NO: 346483 - DNA, 15 bp, Homo sapiens
tttattgtaccgtat

SEQ ID NO: 346484 - DNA, 15 bp, Homo sapiens
atttattgtaccgta

SEQ ID NO: 346485 - DNA, 15 bp, Homo sapiens
tatttattgtaccgt

SEQ ID NO: 346486 - DNA, 15 bp, Homo sapiens
gtatttattgtaccg

SEQ ID NO: 346487 - DNA, 15 bp, Homo sapiens
agtatttattgtacc

SEQ ID NO: 346488 - DNA, 15 bp, Homo sapiens
tagtatttattgtac

SEQ ID NO: 346489 - DNA, 15 bp, Homo sapiens
gtagtatttattgta

SEQ ID NO: 346490 - DNA, 15 bp, Homo sapiens
tgtagtatttattgt

SEQ ID NO: 346491 - DNA, 15 bp, Homo sapiens
atgtagtatttattg

SEQ ID NO: 346492 - DNA, 15 bp, Homo sapiens
gatgtagtatttatt

SEQ ID NO: 346493 - DNA, 15 bp, Homo sapiens
agatgtagtatttat

SEQ ID NO: 346494 - DNA, 15 bp, Homo sapiens
tagatgtagtattta

SEQ ID NO: 346495 - DNA, 15 bp, Homo sapiens
atagatgtagtattt

SEQ ID NO: 346496 - DNA, 15 bp, Homo sapiens
aatagatgtagtatt

SEQ ID NO: 346497 - DNA, 15 bp, Homo sapiens
taatagatgtagtat

SEQ ID NO: 346498 - DNA, 15 bp, Homo sapiens
ataatagatgtagta

SEQ ID NO: 346499 - DNA, 15 bp, Homo sapiens
cataatagatgtagt

SEQ ID NO: 346500 - DNA, 15 bp, Homo sapiens
acataatagatgtag

SEQ ID NO: 346501 - DNA, 15 bp, Homo sapiens
cacataatagatgta

SEQ ID NO: 346502 - DNA, 15 bp, Homo sapiens
acacataatagatgt

SEQ ID NO: 346503 - DNA, 15 bp, Homo sapiens
cacacataatagatg

SEQ ID NO: 346504 - DNA, 15 bp, Homo sapiens
tcacacataatagat

SEQ ID NO: 346505 - DNA, 15 bp, Homo sapiens
ttcacacataataga

SEQ ID NO: 346506 - DNA, 15 bp, Homo sapiens
cttcacacataatag

SEQ ID NO: 346507 - DNA, 15 bp, Homo sapiens
tcttcacacataata

SEQ ID NO: 346508 - DNA, 15 bp, Homo sapiens
ctcttcacacataat

SEQ ID NO: 346509 - DNA, 15 bp, Homo sapiens
tctcttcacacataa

SEQ ID NO: 346510 - DNA, 15 bp, Homo sapiens
atctcttcacacata

SEQ ID NO: 346511 - DNA, 15 bp, Homo sapiens
catctcttcacacat

SEQ ID NO: 346512 - DNA, 15 bp, Homo sapiens
acatctcttcacaca

SEQ ID NO: 346513 - DNA, 15 bp, Homo sapiens
aacatctcttcacac

SEQ ID NO: 346514 - DNA, 15 bp, Homo sapiens
taacatctcttcaca

SEQ ID NO: 346515 - DNA, 15 bp, Homo sapiens
ttaacatctcttcac

SEQ ID NO: 346516 - DNA, 15 bp, Homo sapiens
cttaacatctcttca

SEQ ID NO: 346517 - DNA, 15 bp, Homo sapiens
acttaacatctcttc

SEQ ID NO: 346518 - DNA, 15 bp, Homo sapiens
aacttaacatctctt

SEQ ID NO: 346519 - DNA, 15 bp, Homo sapiens
taacttaacatctct

SEQ ID NO: 346520 - DNA, 15 bp, Homo sapiens
ctaacttaacatctc

SEQ ID NO: 346521 - DNA, 15 bp, Homo sapiens
cctaacttaacatct

SEQ ID NO: 346522 - DNA, 15 bp, Homo sapiens
ccctaacttaacatc

SEQ ID NO: 346523 - DNA, 15 bp, Homo sapiens
tccctaacttaacat

SEQ ID NO: 346524 - DNA, 15 bp, Homo sapiens
gtccctaacttaaca

SEQ ID NO: 346525 - DNA, 15 bp, Homo sapiens
tgtccctaacttaac

SEQ ID NO: 346526 - DNA, 15 bp, Homo sapiens
atgtccctaacttaa

SEQ ID NO: 346527 - DNA, 15 bp, Homo sapiens
tatgtccctaactta

SEQ ID NO: 346528 - DNA, 15 bp, Homo sapiens
gtatgtccctaactt

SEQ ID NO: 346529 - DNA, 15 bp, Homo sapiens
agtatgtccctaact

SEQ ID NO: 346530 - DNA, 15 bp, Homo sapiens
cagtatgtccctaac

SEQ ID NO: 346531 - DNA, 15 bp, Homo sapiens
acagtatgtccctaa

SEQ ID NO: 346532 - DNA, 15 bp, Homo sapiens
cacagtatgtcccta

SEQ ID NO: 346533 - DNA, 15 bp, Homo sapiens
tcacagtatgtccct

SEQ ID NO: 346534 - DNA, 15 bp, Homo sapiens
ttcacagtatgtccc

SEQ ID NO: 346535 - DNA, 15 bp, Homo sapiens
attcacagtatgtcc

SEQ ID NO: 346536 - DNA, 15 bp, Homo sapiens
aattcacagtatgtc

SEQ ID NO: 346537 - DNA, 15 bp, Homo sapiens
gaattcacagtatgt

SEQ ID NO: 346538 - DNA, 15 bp, Homo sapiens
tgaattcacagtatg

SEQ ID NO: 346539 - DNA, 15 bp, Homo sapiens
ttgaattcacagtat

SEQ ID NO: 346540 - DNA, 15 bp, Homo sapiens
cttgaattcacagta

SEQ ID NO: 346541 - DNA, 15 bp, Homo sapiens
ccttgaattcacagt

SEQ ID NO: 346542 - DNA, 15 bp, Homo sapiens
tccttgaattcacag

SEQ ID NO: 346543 - DNA, 15 bp, Homo sapiens
atccttgaattcaca

SEQ ID NO: 346544 - DNA, 15 bp, Homo sapiens
tatccttgaattcac

SEQ ID NO: 346545 - DNA, 15 bp, Homo sapiens
ctatccttgaattca

SEQ ID NO: 346546 - DNA, 15 bp, Homo sapiens
tctatccttgaattc

SEQ ID NO: 346547 - DNA, 15 bp, Homo sapiens
ttctatccttgaatt

SEQ ID NO: 346548 - DNA, 15 bp, Homo sapiens
tttctatccttgaat

SEQ ID NO: 346549 - DNA, 15 bp, Homo sapiens
ttttctatccttgaa

SEQ ID NO: 346550 - DNA, 15 bp, Homo sapiens
gttttctatccttga

SEQ ID NO: 346551 - DNA, 15 bp, Homo sapiens
agttttctatccttg

SEQ ID NO: 346552 - DNA, 15 bp, Homo sapiens
aagttttctatcctt

SEQ ID NO: 346553 - DNA, 15 bp, Homo sapiens
aaagttttctatcct

SEQ ID NO: 346554 - DNA, 15 bp, Homo sapiens
aaaagttttctatcc

SEQ ID NO: 346555 - DNA, 15 bp, Homo sapiens
gaaaagttttctatc

SEQ ID NO: 346556 - DNA, 15 bp, Homo sapiens
ggaaaagttttctat

SEQ ID NO: 346557 - DNA, 15 bp, Homo sapiens
tggaaaagttttcta

SEQ ID NO: 346558 - DNA, 15 bp, Homo sapiens
atggaaaagttttct

SEQ ID NO: 346559 - DNA, 15 bp, Homo sapiens
gatggaaaagttttc

SEQ ID NO: 346560 - DNA, 15 bp, Homo sapiens
tgatggaaaagtttt

SEQ ID NO: 346561 - DNA, 15 bp, Homo sapiens
ctgatggaaaagttt

SEQ ID NO: 346562 - DNA, 15 bp, Homo sapiens
actgatggaaaagtt

SEQ ID NO: 346563 - DNA, 15 bp, Homo sapiens
aactgatggaaaagt

SEQ ID NO: 346564 - DNA, 15 bp, Homo sapiens
aaactgatggaaaag

SEQ ID NO: 346565 - DNA, 15 bp, Homo sapiens
aaaactgatggaaaa

SEQ ID NO: 346566 - DNA, 15 bp, Homo sapiens
aaaaactgatggaaa

SEQ ID NO: 346567 - DNA, 15 bp, Homo sapiens
taaaaactgatggaa

SEQ ID NO: 346568 - DNA, 15 bp, Homo sapiens
ctaaaaactgatgga

SEQ ID NO: 346569 - DNA, 15 bp, Homo sapiens
cctaaaaactgatgg

SEQ ID NO: 346570 - DNA, 15 bp, Homo sapiens
ccctaaaaactgatg

SEQ ID NO: 346571 - DNA, 15 bp, Homo sapiens
tccctaaaaactgat

SEQ ID NO: 346572 - DNA, 15 bp, Homo sapiens
atccctaaaaactga

SEQ ID NO: 346573 - DNA, 15 bp, Homo sapiens
gatccctaaaaactg

SEQ ID NO: 346574 - DNA, 15 bp, Homo sapiens
ggatccctaaaaact

SEQ ID NO: 346575 - DNA, 15 bp, Homo sapiens
aggatccctaaaaac

SEQ ID NO: 346576 - DNA, 15 bp, Homo sapiens
taggatccctaaaaa

SEQ ID NO: 346577 - DNA, 15 bp, Homo sapiens
gtaggatccctaaaa

SEQ ID NO: 346578 - DNA, 15 bp, Homo sapiens
agtaggatccctaaa

SEQ ID NO: 346579 - DNA, 15 bp, Homo sapiens
gagtaggatccctaa

SEQ ID NO: 346580 - DNA, 15 bp, Homo sapiens
agagtaggatcccta

SEQ ID NO: 346581 - DNA, 15 bp, Homo sapiens
aagagtaggatccct

SEQ ID NO: 346582 - DNA, 15 bp, Homo sapiens
aaagagtaggatccc

SEQ ID NO: 346583 - DNA, 15 bp, Homo sapiens
gaaagagtaggatcc

SEQ ID NO: 346584 - DNA, 15 bp, Homo sapiens
tgaaagagtaggatc

SEQ ID NO: 346585 - DNA, 15 bp, Homo sapiens
gtgaaagagtaggat

SEQ ID NO: 346586 - DNA, 15 bp, Homo sapiens
agtgaaagagtagga

SEQ ID NO: 346587 - DNA, 15 bp, Homo sapiens
aagtgaaagagtagg

SEQ ID NO: 346588 - DNA, 15 bp, Homo sapiens
taagtgaaagagtag

SEQ ID NO: 346589 - DNA, 15 bp, Homo sapiens
ttaagtgaaagagta

SEQ ID NO: 346590 - DNA, 15 bp, Homo sapiens
tttaagtgaaagagt

SEQ ID NO: 346591 - DNA, 15 bp, Homo sapiens
gtttaagtgaaagag

SEQ ID NO: 346592 - DNA, 15 bp, Homo sapiens
ggtttaagtgaaaga

SEQ ID NO: 346593 - DNA, 15 bp, Homo sapiens
gggtttaagtgaaag

SEQ ID NO: 346594 - DNA, 15 bp, Homo sapiens
ggggtttaagtgaaa

SEQ ID NO: 346595 - DNA, 15 bp, Homo sapiens
tggggtttaagtgaa

SEQ ID NO: 346596 - DNA, 15 bp, Homo sapiens
ttggggtttaagtga

SEQ ID NO: 346597 - DNA, 15 bp, Homo sapiens
tttggggtttaagtg

SEQ ID NO: 346598 - DNA, 15 bp, Homo sapiens
atttggggtttaagt

SEQ ID NO: 346599 - DNA, 15 bp, Homo sapiens
catttggggtttaag

SEQ ID NO: 346600 - DNA, 15 bp, Homo sapiens
ccatttggggtttaa

SEQ ID NO: 346601 - DNA, 15 bp, Homo sapiens
gccatttggggttta

SEQ ID NO: 346602 - DNA, 15 bp, Homo sapiens
ggccatttggggttt

SEQ ID NO: 346603 - DNA, 15 bp, Homo sapiens
tggccatttggggtt

SEQ ID NO: 346604 - DNA, 15 bp, Homo sapiens
ttggccatttggggt

SEQ ID NO: 346605 - DNA, 15 bp, Homo sapiens
cttggccatttgggg

SEQ ID NO: 346606 - DNA, 15 bp, Homo sapiens
gcttggccatttggg

SEQ ID NO: 346607 - DNA, 15 bp, Homo sapiens
agcttggccatttgg

SEQ ID NO: 346608 - DNA, 15 bp, Homo sapiens
tagcttggccatttg

SEQ ID NO: 346609 - DNA, 15 bp, Homo sapiens
ctagcttggccattt

SEQ ID NO: 346610 - DNA, 15 bp, Homo sapiens
cctagcttggccatt

SEQ ID NO: 346611 - DNA, 15 bp, Homo sapiens
tcctagcttggccat

SEQ ID NO: 346612 - DNA, 15 bp, Homo sapiens
atcctagcttggcca

SEQ ID NO: 346613 - DNA, 15 bp, Homo sapiens
aatcctagcttggcc

SEQ ID NO: 346614 - DNA, 15 bp, Homo sapiens
caatcctagcttggc

SEQ ID NO: 346615 - DNA, 15 bp, Homo sapiens
tcaatcctagcttgg

SEQ ID NO: 346616 - DNA, 15 bp, Homo sapiens
atcaatcctagcttg

SEQ ID NO: 346617 - DNA, 15 bp, Homo sapiens
aatcaatcctagctt

SEQ ID NO: 346618 - DNA, 15 bp, Homo sapiens
aaatcaatcctagct

SEQ ID NO: 346619 - DNA, 15 bp, Homo sapiens
caaatcaatcctagc

SEQ ID NO: 346620 - DNA, 15 bp, Homo sapiens
ccaaatcaatcctag

SEQ ID NO: 346621 - DNA, 15 bp, Homo sapiens
accaaatcaatccta

SEQ ID NO: 346622 - DNA, 15 bp, Homo sapiens
caccaaatcaatcct

SEQ ID NO: 346623 - DNA, 15 bp, Homo sapiens
acaccaaatcaatcc

SEQ ID NO: 346624 - DNA, 15 bp, Homo sapiens
cacaccaaatcaatc

SEQ ID NO: 346625 - DNA, 15 bp, Homo sapiens
gcacaccaaatcaat

SEQ ID NO: 346626 - DNA, 15 bp, Homo sapiens
agcacaccaaatcaa

SEQ ID NO: 346627 - DNA, 15 bp, Homo sapiens
cagcacaccaaatca

SEQ ID NO: 346628 - DNA, 15 bp, Homo sapiens
acagcacaccaaatc

SEQ ID NO: 346629 - DNA, 15 bp, Homo sapiens
tacagcacaccaaat

SEQ ID NO: 346630 - DNA, 15 bp, Homo sapiens
ctacagcacaccaaa

SEQ ID NO: 346631 - DNA, 15 bp, Homo sapiens
tctacagcacaccaa

SEQ ID NO: 346632 - DNA, 15 bp, Homo sapiens
ttctacagcacacca

SEQ ID NO: 346633 - DNA, 15 bp, Homo sapiens
tttctacagcacacc

SEQ ID NO: 346634 - DNA, 15 bp, Homo sapiens
ctttctacagcacac

SEQ ID NO: 346635 - DNA, 15 bp, Homo sapiens
tctttctacagcaca

SEQ ID NO: 346636 - DNA, 15 bp, Homo sapiens
ttctttctacagcac

SEQ ID NO: 346637 - DNA, 15 bp, Homo sapiens
gttctttctacagca

SEQ ID NO: 346638 - DNA, 15 bp, Homo sapiens
agttctttctacagc

SEQ ID NO: 346639 - DNA, 15 bp, Homo sapiens
aagttctttctacag

SEQ ID NO: 346640 - DNA, 15 bp, Homo sapiens
gaagttctttctaca

SEQ ID NO: 346641 - DNA, 15 bp, Homo sapiens
tgaagttctttctac

SEQ ID NO: 346642 - DNA, 15 bp, Homo sapiens
atgaagttctttcta

SEQ ID NO: 346643 - DNA, 15 bp, Homo sapiens
aatgaagttctttct

SEQ ID NO: 346644 - DNA, 15 bp, Homo sapiens
caatgaagttctttc

SEQ ID NO: 346645 - DNA, 15 bp, Homo sapiens
ccaatgaagttcttt

SEQ ID NO: 346646 - DNA, 15 bp, Homo sapiens
accaatgaagttctt

SEQ ID NO: 346647 - DNA, 15 bp, Homo sapiens
taccaatgaagttct

SEQ ID NO: 346648 - DNA, 15 bp, Homo sapiens
ataccaatgaagttc

SEQ ID NO: 346649 - DNA, 15 bp, Homo sapiens
aataccaatgaagtt

SEQ ID NO: 346650 - DNA, 15 bp, Homo sapiens
gaataccaatgaagt

SEQ ID NO: 346651 - DNA, 15 bp, Homo sapiens
tgaataccaatgaag

SEQ ID NO: 346652 - DNA, 15 bp, Homo sapiens
atgaataccaatgaa

SEQ ID NO: 346653 - DNA, 15 bp, Homo sapiens
catgaataccaatga

SEQ ID NO: 346654 - DNA, 15 bp, Homo sapiens
ccatgaataccaatg

SEQ ID NO: 346655 - DNA, 15 bp, Homo sapiens
tccatgaataccaat

SEQ ID NO: 346656 - DNA, 15 bp, Homo sapiens
atccatgaataccaa

SEQ ID NO: 346657 - DNA, 15 bp, Homo sapiens
aatccatgaatacca

SEQ ID NO: 346658 - DNA, 15 bp, Homo sapiens
gaatccatgaatacc

SEQ ID NO: 346659 - DNA, 15 bp, Homo sapiens
tgaatccatgaatac

SEQ ID NO: 346660 - DNA, 15 bp, Homo sapiens
gtgaatccatgaata

SEQ ID NO: 346661 - DNA, 15 bp, Homo sapiens
tgtgaatccatgaat

SEQ ID NO: 346662 - DNA, 15 bp, Homo sapiens
atgtgaatccatgaa

SEQ ID NO: 346663 - DNA, 15 bp, Homo sapiens
aatgtgaatccatga

SEQ ID NO: 346664 - DNA, 15 bp, Homo sapiens
taatgtgaatccatg

SEQ ID NO: 346665 - DNA, 15 bp, Homo sapiens
gtaatgtgaatccat

SEQ ID NO: 346666 - DNA, 15 bp, Homo sapiens
tgtaatgtgaatcca

SEQ ID NO: 346667 - DNA, 15 bp, Homo sapiens
atgtaatgtgaatcc

SEQ ID NO: 346668 - DNA, 15 bp, Homo sapiens
gatgtaatgtgaatc

SEQ ID NO: 346669 - DNA, 15 bp, Homo sapiens
agatgtaatgtgaat

SEQ ID NO: 346670 - DNA, 15 bp, Homo sapiens
aagatgtaatgtgaa

SEQ ID NO: 346671 - DNA, 15 bp, Homo sapiens
taagatgtaatgtga

SEQ ID NO: 346672 - DNA, 15 bp, Homo sapiens
ctaagatgtaatgtg

SEQ ID NO: 346673 - DNA, 15 bp, Homo sapiens
tctaagatgtaatgt

SEQ ID NO: 346674 - DNA, 15 bp, Homo sapiens
ctctaagatgtaatg

SEQ ID NO: 346675 - DNA, 15 bp, Homo sapiens
cctctaagatgtaat

SEQ ID NO: 346676 - DNA, 15 bp, Homo sapiens
tcctctaagatgtaa

SEQ ID NO: 346677 - DNA, 15 bp, Homo sapiens
ctcctctaagatgta

SEQ ID NO: 346678 - DNA, 15 bp, Homo sapiens
actcctctaagatgt

SEQ ID NO: 346679 - DNA, 15 bp, Homo sapiens
aactcctctaagatg

SEQ ID NO: 346680 - DNA, 15 bp, Homo sapiens
aaactcctctaagat

SEQ ID NO: 346681 - DNA, 15 bp, Homo sapiens
aaaactcctctaaga

SEQ ID NO: 346682 - DNA, 15 bp, Homo sapiens
gaaaactcctctaag

SEQ ID NO: 346683 - DNA, 15 bp, Homo sapiens
tgaaaactcctctaa

SEQ ID NO: 346684 - DNA, 15 bp, Homo sapiens
ttgaaaactcctcta

SEQ ID NO: 346685 - DNA, 15 bp, Homo sapiens
tttgaaaactcctct

SEQ ID NO: 346686 - DNA, 15 bp, Homo sapiens
ttttgaaaactcctc

SEQ ID NO: 346687 - DNA, 15 bp, Homo sapiens
cttttgaaaactcct

SEQ ID NO: 346688 - DNA, 15 bp, Homo sapiens
gcttttgaaaactcc

SEQ ID NO: 346689 - DNA, 15 bp, Homo sapiens
cgcttttgaaaactc

SEQ ID NO: 346690 - DNA, 15 bp, Homo sapiens
acgcttttgaaaact

SEQ ID NO: 346691 - DNA, 15 bp, Homo sapiens
gacgcttttgaaaac

SEQ ID NO: 346692 - DNA, 15 bp, Homo sapiens
agacgcttttgaaaa

SEQ ID NO: 346693 - DNA, 15 bp, Homo sapiens
aagacgcttttgaaa

SEQ ID NO: 346694 - DNA, 15 bp, Homo sapiens
taagacgcttttgaa

SEQ ID NO: 346695 - DNA, 15 bp, Homo sapiens
ctaagacgcttttga

SEQ ID NO: 346696 - DNA, 15 bp, Homo sapiens
tctaagacgcttttg

SEQ ID NO: 346697 - DNA, 15 bp, Homo sapiens
gtctaagacgctttt

SEQ ID NO: 346698 - DNA, 15 bp, Homo sapiens
agtctaagacgcttt

SEQ ID NO: 346699 - DNA, 15 bp, Homo sapiens
cagtctaagacgctt

SEQ ID NO: 346700 - DNA, 15 bp, Homo sapiens
acagtctaagacgct

SEQ ID NO: 346701 - DNA, 15 bp, Homo sapiens
tacagtctaagacgc

SEQ ID NO: 346702 - DNA, 15 bp, Homo sapiens
atacagtctaagacg

SEQ ID NO: 346703 - DNA, 15 bp, Homo sapiens
catacagtctaagac

SEQ ID NO: 346704 - DNA, 15 bp, Homo sapiens
acatacagtctaaga

SEQ ID NO: 346705 - DNA, 15 bp, Homo sapiens
cacatacagtctaag

SEQ ID NO: 346706 - DNA, 15 bp, Homo sapiens
acacatacagtctaa

SEQ ID NO: 346707 - DNA, 15 bp, Homo sapiens
tacacatacagtcta

SEQ ID NO: 346708 - DNA, 15 bp, Homo sapiens
atacacatacagtct

SEQ ID NO: 346709 - DNA, 15 bp, Homo sapiens
tatacacatacagtc

SEQ ID NO: 346710 - DNA, 15 bp, Homo sapiens
atatacacatacagt

SEQ ID NO: 346711 - DNA, 15 bp, Homo sapiens
tatatacacatacag

SEQ ID NO: 346712 - DNA, 15 bp, Homo sapiens
gtatatacacataca

SEQ ID NO: 346713 - DNA, 15 bp, Homo sapiens
tgtatatacacatac

SEQ ID NO: 346714 - DNA, 15 bp, Homo sapiens
gtgtatatacacata

SEQ ID NO: 346715 - DNA, 15 bp, Homo sapiens
tgtgtatatacacat

SEQ ID NO: 346716 - DNA, 15 bp, Homo sapiens
gtgtgtatatacaca

SEQ ID NO: 346717 - DNA, 15 bp, Homo sapiens
gtgtgtgtatataca

SEQ ID NO: 346718 - DNA, 15 bp, Homo sapiens
tgtgtgtgtatatac

SEQ ID NO: 346719 - DNA, 15 bp, Homo sapiens
atgtgtgtgtatata

SEQ ID NO: 346720 - DNA, 15 bp, Homo sapiens
aatgtgtgtgtatat

SEQ ID NO: 346721 - DNA, 15 bp, Homo sapiens
gaatgtgtgtgtata

SEQ ID NO: 346722 - DNA, 15 bp, Homo sapiens
agaatgtgtgtgtat

SEQ ID NO: 346723 - DNA, 15 bp, Homo sapiens
cagaatgtgtgtgta

SEQ ID NO: 346724 - DNA, 15 bp, Homo sapiens
tcagaatgtgtgtgt

SEQ ID NO: 346725 - DNA, 15 bp, Homo sapiens
ttcagaatgtgtgtg

SEQ ID NO: 346726 - DNA, 15 bp, Homo sapiens
cttcagaatgtgtgt

SEQ ID NO: 346727 - DNA, 15 bp, Homo sapiens
gcttcagaatgtgtg

SEQ ID NO: 346728 - DNA, 15 bp, Homo sapiens
tgcttcagaatgtgt

SEQ ID NO: 346729 - DNA, 15 bp, Homo sapiens
ctgcttcagaatgtg

SEQ ID NO: 346730 - DNA, 15 bp, Homo sapiens
actgcttcagaatgt

SEQ ID NO: 346731 - DNA, 15 bp, Homo sapiens
tactgcttcagaatg

SEQ ID NO: 346732 - DNA, 15 bp, Homo sapiens
ctactgcttcagaat

SEQ ID NO: 346733 - DNA, 15 bp, Homo sapiens
cctactgcttcagaa

SEQ ID NO: 346734 - DNA, 15 bp, Homo sapiens
acctactgcttcaga

SEQ ID NO: 346735 - DNA, 15 bp, Homo sapiens
cacctactgcttcag

SEQ ID NO: 346736 - DNA, 15 bp, Homo sapiens
ccacctactgcttca

SEQ ID NO: 346737 - DNA, 15 bp, Homo sapiens
cccacctactgcttc

SEQ ID NO: 346738 - DNA, 15 bp, Homo sapiens
acccacctactgctt

SEQ ID NO: 346739 - DNA, 15 bp, Homo sapiens
gacccacctactgct

SEQ ID NO: 346740 - DNA, 15 bp, Homo sapiens
agacccacctactgc

SEQ ID NO: 346741 - DNA, 15 bp, Homo sapiens
aagacccacctactg

SEQ ID NO: 346742 - DNA, 15 bp, Homo sapiens
caagacccacctact

SEQ ID NO: 346743 - DNA, 15 bp, Homo sapiens
ccaagacccacctac

SEQ ID NO: 346744 - DNA, 15 bp, Homo sapiens
cccaagacccaccta

SEQ ID NO: 346745 - DNA, 15 bp, Homo sapiens
ccccaagacccacct

SEQ ID NO: 346746 - DNA, 15 bp, Homo sapiens
gccccaagacccacc

SEQ ID NO: 346747 - DNA, 15 bp, Homo sapiens
ggccccaagacccac

SEQ ID NO: 346748 - DNA, 15 bp, Homo sapiens
aggccccaagaccca

SEQ ID NO: 346749 - DNA, 15 bp, Homo sapiens
caggccccaagaccc

SEQ ID NO: 346750 - DNA, 15 bp, Homo sapiens
tcaggccccaagacc

SEQ ID NO: 346751 - DNA, 15 bp, Homo sapiens
ctcaggccccaagac

SEQ ID NO: 346752 - DNA, 15 bp, Homo sapiens
tctcaggccccaaga

SEQ ID NO: 346753 - DNA, 15 bp, Homo sapiens
atctcaggccccaag

SEQ ID NO: 346754 - DNA, 15 bp, Homo sapiens
gatctcaggccccaa

SEQ ID NO: 346755 - DNA, 15 bp, Homo sapiens
agatctcaggcccca

SEQ ID NO: 346756 - DNA, 15 bp, Homo sapiens
gagatctcaggcccc

SEQ ID NO: 346757 - DNA, 15 bp, Homo sapiens
cgagatctcaggccc

SEQ ID NO: 346758 - DNA, 15 bp, Homo sapiens
ccgagatctcaggcc

SEQ ID NO: 346759 - DNA, 15 bp, Homo sapiens
cccgagatctcaggc

SEQ ID NO: 346760 - DNA, 15 bp, Homo sapiens
acccgagatctcagg

SEQ ID NO: 346761 - DNA, 15 bp, Homo sapiens
cacccgagatctcag

SEQ ID NO: 346762 - DNA, 15 bp, Homo sapiens
tcacccgagatctca

SEQ ID NO: 346763 - DNA, 15 bp, Homo sapiens
ttcacccgagatctc

SEQ ID NO: 346764 - DNA, 15 bp, Homo sapiens
attcacccgagatct

SEQ ID NO: 346765 - DNA, 15 bp, Homo sapiens
cattcacccgagatc

SEQ ID NO: 346766 - DNA, 15 bp, Homo sapiens
acattcacccgagat

SEQ ID NO: 346767 - DNA, 15 bp, Homo sapiens
tacattcacccgaga

SEQ ID NO: 346768 - DNA, 15 bp, Homo sapiens
ttacattcacccgag

SEQ ID NO: 346769 - DNA, 15 bp, Homo sapiens
tttacattcacccga

SEQ ID NO: 346770 - DNA, 15 bp, Homo sapiens
atttacattcacccg

SEQ ID NO: 346771 - DNA, 15 bp, Homo sapiens
aatttacattcaccc

SEQ ID NO: 346772 - DNA, 15 bp, Homo sapiens
aaatttacattcacc

SEQ ID NO: 346773 - DNA, 15 bp, Homo sapiens
taaatttacattcac

SEQ ID NO: 346774 - DNA, 15 bp, Homo sapiens
ctaaatttacattca

SEQ ID NO: 346775 - DNA, 15 bp, Homo sapiens
cctaaatttacattc

SEQ ID NO: 346776 - DNA, 15 bp, Homo sapiens
acctaaatttacatt

SEQ ID NO: 346777 - DNA, 15 bp, Homo sapiens
aacctaaatttacat

SEQ ID NO: 346778 - DNA, 15 bp, Homo sapiens
gaacctaaatttaca

SEQ ID NO: 346779 - DNA, 15 bp, Homo sapiens
tgaacctaaatttac

SEQ ID NO: 346780 - DNA, 15 bp, Homo sapiens
gtgaacctaaattta

SEQ ID NO: 346781 - DNA, 15 bp, Homo sapiens
tgtgaacctaaattt

SEQ ID NO: 346782 - DNA, 15 bp, Homo sapiens
ctgtgaacctaaatt

SEQ ID NO: 346783 - DNA, 15 bp, Homo sapiens
cctgtgaacctaaat

SEQ ID NO: 346784 - DNA, 15 bp, Homo sapiens
acctgtgaacctaaa

SEQ ID NO: 346785 - DNA, 15 bp, Homo sapiens
cacctgtgaacctaa

SEQ ID NO: 346786 - DNA, 15 bp, Homo sapiens
tcacctgtgaaccta

SEQ ID NO: 346787 - DNA, 15 bp, Homo sapiens
atcacctgtgaacct

SEQ ID NO: 346788 - DNA, 15 bp, Homo sapiens
tatcacctgtgaacc

SEQ ID NO: 346789 - DNA, 15 bp, Homo sapiens
gtatcacctgtgaac

SEQ ID NO: 346790 - DNA, 15 bp, Homo sapiens
agtatcacctgtgaa

SEQ ID NO: 346791 - DNA, 15 bp, Homo sapiens
cagtatcacctgtga

SEQ ID NO: 346792 - DNA, 15 bp, Homo sapiens
acagtatcacctgtg

SEQ ID NO: 346793 - DNA, 15 bp, Homo sapiens
tacagtatcacctgt

SEQ ID NO: 346794 - DNA, 15 bp, Homo sapiens
ctacagtatcacctg

SEQ ID NO: 346795 - DNA, 15 bp, Homo sapiens
tctacagtatcacct

SEQ ID NO: 346796 - DNA, 15 bp, Homo sapiens
atctacagtatcacc

SEQ ID NO: 346797 - DNA, 15 bp, Homo sapiens
aatctacagtatcac

SEQ ID NO: 346798 - DNA, 15 bp, Homo sapiens
gaatctacagtatca

SEQ ID NO: 346799 - DNA, 15 bp, Homo sapiens
tgaatctacagtatc

SEQ ID NO: 346800 - DNA, 15 bp, Homo sapiens
gtgaatctacagtat

SEQ ID NO: 346801 - DNA, 15 bp, Homo sapiens
tgtgaatctacagta

SEQ ID NO: 346802 - DNA, 15 bp, Homo sapiens
ctgtgaatctacagt

SEQ ID NO: 346803 - DNA, 15 bp, Homo sapiens
actgtgaatctacag

SEQ ID NO: 346804 - DNA, 15 bp, Homo sapiens
cactgtgaatctaca

SEQ ID NO: 346805 - DNA, 15 bp, Homo sapiens
acactgtgaatctac

SEQ ID NO: 346806 - DNA, 15 bp, Homo sapiens
gacactgtgaatcta

SEQ ID NO: 346807 - DNA, 15 bp, Homo sapiens
agacactgtgaatct

SEQ ID NO: 346808 - DNA, 15 bp, Homo sapiens
tagacactgtgaatc

SEQ ID NO: 346809 - DNA, 15 bp, Homo sapiens
gtagacactgtgaat

SEQ ID NO: 346810 - DNA, 15 bp, Homo sapiens
tgtagacactgtgaa

SEQ ID NO: 346811 - DNA, 15 bp, Homo sapiens
ctgtagacactgtga

SEQ ID NO: 346812 - DNA, 15 bp, Homo sapiens
tctgtagacactgtg

SEQ ID NO: 346813 - DNA, 15 bp, Homo sapiens
ctctgtagacactgt

SEQ ID NO: 346814 - DNA, 15 bp, Homo sapiens
actctgtagacactg

SEQ ID NO: 346815 - DNA, 15 bp, Homo sapiens
tactctgtagacact

SEQ ID NO: 346816 - DNA, 15 bp, Homo sapiens
gtactctgtagacac

SEQ ID NO: 346817 - DNA, 15 bp, Homo sapiens
tgtactctgtagaca

SEQ ID NO: 346818 - DNA, 15 bp, Homo sapiens
gtgtactctgtagac

SEQ ID NO: 346819 - DNA, 15 bp, Homo sapiens
agtgtactctgtaga

SEQ ID NO: 346820 - DNA, 15 bp, Homo sapiens
tagtgtactctgtag

SEQ ID NO: 346821 - DNA, 15 bp, Homo sapiens
atagtgtactctgta

SEQ ID NO: 346822 - DNA, 15 bp, Homo sapiens
catagtgtactctgt

SEQ ID NO: 346823 - DNA, 15 bp, Homo sapiens
tcatagtgtactctg

SEQ ID NO: 346824 - DNA, 15 bp, Homo sapiens
ttcatagtgtactct

SEQ ID NO: 346825 - DNA, 15 bp, Homo sapiens
attcatagtgtactc

SEQ ID NO: 346826 - DNA, 15 bp, Homo sapiens
aattcatagtgtact

SEQ ID NO: 346827 - DNA, 15 bp, Homo sapiens
aaattcatagtgtac

SEQ ID NO: 346828 - DNA, 15 bp, Homo sapiens
caaattcatagtgta

SEQ ID NO: 346829 - DNA, 15 bp, Homo sapiens
acaaattcatagtgt

SEQ ID NO: 346830 - DNA, 15 bp, Homo sapiens
cacaaattcatagtg

SEQ ID NO: 346831 - DNA, 15 bp, Homo sapiens
ccacaaattcatagt

SEQ ID NO: 346832 - DNA, 15 bp, Homo sapiens
accacaaattcatag

SEQ ID NO: 346833 - DNA, 15 bp, Homo sapiens
caccacaaattcata

SEQ ID NO: 346834 - DNA, 15 bp, Homo sapiens
tcaccacaaattcat

SEQ ID NO: 346835 - DNA, 15 bp, Homo sapiens
gtcaccacaaattca

SEQ ID NO: 346836 - DNA, 15 bp, Homo sapiens
agtcaccacaaattc

SEQ ID NO: 346837 - DNA, 15 bp, Homo sapiens
tagtcaccacaaatt

SEQ ID NO: 346838 - DNA, 15 bp, Homo sapiens
gtagtcaccacaaat

SEQ ID NO: 346839 - DNA, 15 bp, Homo sapiens
tgtagtcaccacaaa

SEQ ID NO: 346840 - DNA, 15 bp, Homo sapiens
atgtagtcaccacaa

SEQ ID NO: 346841 - DNA, 15 bp, Homo sapiens
aatgtagtcaccaca

SEQ ID NO: 346842 - DNA, 15 bp, Homo sapiens
taatgtagtcaccac

SEQ ID NO: 346843 - DNA, 15 bp, Homo sapiens
ataatgtagtcacca

SEQ ID NO: 346844 - DNA, 15 bp, Homo sapiens
aataatgtagtcacc

SEQ ID NO: 346845 - DNA, 15 bp, Homo sapiens
caataatgtagtcac

SEQ ID NO: 346846 - DNA, 15 bp, Homo sapiens
tcaataatgtagtca

SEQ ID NO: 346847 - DNA, 15 bp, Homo sapiens
gtcaataatgtagtc

SEQ ID NO: 346848 - DNA, 15 bp, Homo sapiens
tgtcaataatgtagt

SEQ ID NO: 346849 - DNA, 15 bp, Homo sapiens
ttgtcaataatgtag

SEQ ID NO: 346850 - DNA, 15 bp, Homo sapiens
tttgtcaataatgta

SEQ ID NO: 346851 - DNA, 15 bp, Homo sapiens
ttttgtcaataatgt

SEQ ID NO: 346852 - DNA, 15 bp, Homo sapiens
attttgtcaataatg

SEQ ID NO: 346853 - DNA, 15 bp, Homo sapiens
tattttgtcaataat

SEQ ID NO: 346854 - DNA, 15 bp, Homo sapiens
atattttgtcaataa

SEQ ID NO: 346855 - DNA, 15 bp, Homo sapiens
aatattttgtcaata

SEQ ID NO: 346856 - DNA, 15 bp, Homo sapiens
aaatattttgtcaat

SEQ ID NO: 346857 - DNA, 15 bp, Homo sapiens
aaaatattttgtcaa

SEQ ID NO: 346858 - DNA, 15 bp, Homo sapiens
taaaatattttgtca

SEQ ID NO: 346859 - DNA, 15 bp, Homo sapiens
ctaaaatattttgtc

SEQ ID NO: 346860 - DNA, 15 bp, Homo sapiens
cctaaaatattttgt

SEQ ID NO: 346861 - DNA, 15 bp, Homo sapiens
acctaaaatattttg

SEQ ID NO: 346862 - DNA, 15 bp, Homo sapiens
aacctaaaatatttt

SEQ ID NO: 346863 - DNA, 15 bp, Homo sapiens
aaacctaaaatattt

SEQ ID NO: 346864 - DNA, 15 bp, Homo sapiens
taaacctaaaatatt

SEQ ID NO: 346865 - DNA, 15 bp, Homo sapiens
ataaacctaaaatat

SEQ ID NO: 346866 - DNA, 15 bp, Homo sapiens
tataaacctaaaata

SEQ ID NO: 346867 - DNA, 15 bp, Homo sapiens
ttataaacctaaaat

SEQ ID NO: 346868 - DNA, 15 bp, Homo sapiens
attataaacctaaaa

SEQ ID NO: 346869 - DNA, 15 bp, Homo sapiens
gattataaacctaaa

SEQ ID NO: 346870 - DNA, 15 bp, Homo sapiens
tgattataaacctaa

SEQ ID NO: 346871 - DNA, 15 bp, Homo sapiens
ctgattataaaccta

SEQ ID NO: 346872 - DNA, 15 bp, Homo sapiens
tctgattataaacct

SEQ ID NO: 346873 - DNA, 15 bp, Homo sapiens
ttctgattataaacc

SEQ ID NO: 346874 - DNA, 15 bp, Homo sapiens
tttctgattataaac

SEQ ID NO: 346875 - DNA, 15 bp, Homo sapiens
ttttctgattataaa

SEQ ID NO: 346876 - DNA, 15 bp, Homo sapiens
tttttctgattataa

SEQ ID NO: 346877 - DNA, 15 bp, Homo sapiens
ttttttctgattata

SEQ ID NO: 346878 - DNA, 15 bp, Homo sapiens
cttttttctgattat

SEQ ID NO: 346879 - DNA, 15 bp, Homo sapiens
acttttttctgatta

SEQ ID NO: 346880 - DNA, 15 bp, Homo sapiens
aacttttttctgatt

SEQ ID NO: 346881 - DNA, 15 bp, Homo sapiens
taacttttttctgat

SEQ ID NO: 346882 - DNA, 15 bp, Homo sapiens
ttaacttttttctga

SEQ ID NO: 346883 - DNA, 15 bp, Homo sapiens
tttaacttttttctg

SEQ ID NO: 346884 - DNA, 15 bp, Homo sapiens
ttttaacttttttct

SEQ ID NO: 346885 - DNA, 15 bp, Homo sapiens
attttaacttttttc

SEQ ID NO: 346886 - DNA, 15 bp, Homo sapiens
tattttaactttttt

SEQ ID NO: 346887 - DNA, 15 bp, Homo sapiens
ctattttaacttttt

SEQ ID NO: 346888 - DNA, 15 bp, Homo sapiens
actattttaactttt

SEQ ID NO: 346889 - DNA, 15 bp, Homo sapiens
aactattttaacttt

SEQ ID NO: 346890 - DNA, 15 bp, Homo sapiens
taactattttaactt

SEQ ID NO: 346891 - DNA, 15 bp, Homo sapiens
ttaactattttaact

SEQ ID NO: 346892 - DNA, 15 bp, Homo sapiens
attaactattttaac

SEQ ID NO: 346893 - DNA, 15 bp, Homo sapiens
cattaactattttaa

SEQ ID NO: 346894 - DNA, 15 bp, Homo sapiens
tcattaactatttta

SEQ ID NO: 346895 - DNA, 15 bp, Homo sapiens
ttcattaactatttt

SEQ ID NO: 346896 - DNA, 15 bp, Homo sapiens
cttcattaactattt

SEQ ID NO: 346897 - DNA, 15 bp, Homo sapiens
tcttcattaactatt

SEQ ID NO: 346898 - DNA, 15 bp, Homo sapiens
atcttcattaactat

SEQ ID NO: 346899 - DNA, 15 bp, Homo sapiens
catcttcattaacta

SEQ ID NO: 346900 - DNA, 15 bp, Homo sapiens
gcatcttcattaact

SEQ ID NO: 346901 - DNA, 15 bp, Homo sapiens
agcatcttcattaac

SEQ ID NO: 346902 - DNA, 15 bp, Homo sapiens
aagcatcttcattaa

SEQ ID NO: 346903 - DNA, 15 bp, Homo sapiens
aaagcatcttcatta

SEQ ID NO: 346904 - DNA, 15 bp, Homo sapiens
taaagcatcttcatt

SEQ ID NO: 346905 - DNA, 15 bp, Homo sapiens
ttaaagcatcttcat

SEQ ID NO: 346906 - DNA, 15 bp, Homo sapiens
tttaaagcatcttca

SEQ ID NO: 346907 - DNA, 15 bp, Homo sapiens
ttttaaagcatcttc

SEQ ID NO: 346908 - DNA, 15 bp, Homo sapiens
cttttaaagcatctt

SEQ ID NO: 346909 - DNA, 15 bp, Homo sapiens
gcttttaaagcatct

SEQ ID NO: 346910 - DNA, 15 bp, Homo sapiens
ggcttttaaagcatc

SEQ ID NO: 346911 - DNA, 15 bp, Homo sapiens
aggcttttaaagcat

SEQ ID NO: 346912 - DNA, 15 bp, Homo sapiens
caggcttttaaagca

SEQ ID NO: 346913 - DNA, 15 bp, Homo sapiens
acaggcttttaaagc

SEQ ID NO: 346914 - DNA, 15 bp, Homo sapiens
cacaggcttttaaag

SEQ ID NO: 346915 - DNA, 15 bp, Homo sapiens
acacaggcttttaaa

SEQ ID NO: 346916 - DNA, 15 bp, Homo sapiens
tacacaggcttttaa

SEQ ID NO: 346917 - DNA, 15 bp, Homo sapiens
gtacacaggctttta

SEQ ID NO: 346918 - DNA, 15 bp, Homo sapiens
agtacacaggctttt

SEQ ID NO: 346919 - DNA, 15 bp, Homo sapiens
aagtacacaggcttt

SEQ ID NO: 346920 - DNA, 15 bp, Homo sapiens
aaagtacacaggctt

SEQ ID NO: 346921 - DNA, 15 bp, Homo sapiens
taaagtacacaggct

SEQ ID NO: 346922 - DNA, 15 bp, Homo sapiens
ctaaagtacacaggc

SEQ ID NO: 346923 - DNA, 15 bp, Homo sapiens
tctaaagtacacagg

SEQ ID NO: 346924 - DNA, 15 bp, Homo sapiens
ctctaaagtacacag

SEQ ID NO: 346925 - DNA, 15 bp, Homo sapiens
tctctaaagtacaca

SEQ ID NO: 346926 - DNA, 15 bp, Homo sapiens
ttctctaaagtacac

SEQ ID NO: 346927 - DNA, 15 bp, Homo sapiens
cttctctaaagtaca

SEQ ID NO: 346928 - DNA, 15 bp, Homo sapiens
gcttctctaaagtac

SEQ ID NO: 346929 - DNA, 15 bp, Homo sapiens
agcttctctaaagta

SEQ ID NO: 346930 - DNA, 15 bp, Homo sapiens
tagcttctctaaagt

SEQ ID NO: 346931 - DNA, 15 bp, Homo sapiens
gtagcttctctaaag

SEQ ID NO: 346932 - DNA, 15 bp, Homo sapiens
agtagcttctctaaa

SEQ ID NO: 346933 - DNA, 15 bp, Homo sapiens
aagtagcttctctaa

SEQ ID NO: 346934 - DNA, 15 bp, Homo sapiens
taagtagcttctcta

SEQ ID NO: 346935 - DNA, 15 bp, Homo sapiens
ttaagtagcttctct

SEQ ID NO: 346936 - DNA, 15 bp, Homo sapiens
gttaagtagcttctc

SEQ ID NO: 346937 - DNA, 15 bp, Homo sapiens
tgttaagtagcttct

SEQ ID NO: 346938 - DNA, 15 bp, Homo sapiens
gtgttaagtagcttc

SEQ ID NO: 346939 - DNA, 15 bp, Homo sapiens
tgtgttaagtagctt

SEQ ID NO: 346940 - DNA, 15 bp, Homo sapiens
ttgtgttaagtagct

SEQ ID NO: 346941 - DNA, 15 bp, Homo sapiens
tttgtgttaagtagc

SEQ ID NO: 346942 - DNA, 15 bp, Homo sapiens
atttgtgttaagtag

SEQ ID NO: 346943 - DNA, 15 bp, Homo sapiens
aatttgtgttaagta

SEQ ID NO: 346944 - DNA, 15 bp, Homo sapiens
caatttgtgttaagt

SEQ ID NO: 346945 - DNA, 15 bp, Homo sapiens
ccaatttgtgttaag

SEQ ID NO: 346946 - DNA, 15 bp, Homo sapiens
cccaatttgtgttaa

SEQ ID NO: 346947 - DNA, 15 bp, Homo sapiens
acccaatttgtgtta

SEQ ID NO: 346948 - DNA, 15 bp, Homo sapiens
tacccaatttgtgtt

SEQ ID NO: 346949 - DNA, 15 bp, Homo sapiens
atacccaatttgtgt

SEQ ID NO: 346950 - DNA, 15 bp, Homo sapiens
gatacccaatttgtg

SEQ ID NO: 346951 - DNA, 15 bp, Homo sapiens
agatacccaatttgt

SEQ ID NO: 346952 - DNA, 15 bp, Homo sapiens
tagatacccaatttg

SEQ ID NO: 346953 - DNA, 15 bp, Homo sapiens
ttagatacccaattt

SEQ ID NO: 346954 - DNA, 15 bp, Homo sapiens
attagatacccaatt

SEQ ID NO: 346955 - DNA, 15 bp, Homo sapiens
cattagatacccaat

SEQ ID NO: 346956 - DNA, 15 bp, Homo sapiens
acattagatacccaa

SEQ ID NO: 346957 - DNA, 15 bp, Homo sapiens
tacattagataccca

SEQ ID NO: 346958 - DNA, 15 bp, Homo sapiens
ctacattagataccc

SEQ ID NO: 346959 - DNA, 15 bp, Homo sapiens
cctacattagatacc

SEQ ID NO: 346960 - DNA, 15 bp, Homo sapiens
gcctacattagatac

SEQ ID NO: 346961 - DNA, 15 bp, Homo sapiens
agcctacattagata

SEQ ID NO: 346962 - DNA, 15 bp, Homo sapiens
cagcctacattagat

SEQ ID NO: 346963 - DNA, 15 bp, Homo sapiens
ccagcctacattaga

SEQ ID NO: 346964 - DNA, 15 bp, Homo sapiens
cccagcctacattag

SEQ ID NO: 346965 - DNA, 15 bp, Homo sapiens
gcccagcctacatta

SEQ ID NO: 346966 - DNA, 15 bp, Homo sapiens
agcccagcctacatt

SEQ ID NO: 346967 - DNA, 15 bp, Homo sapiens
cagcccagcctacat

SEQ ID NO: 346968 - DNA, 15 bp, Homo sapiens
ccagcccagcctaca

SEQ ID NO: 346969 - DNA, 15 bp, Homo sapiens
tccagcccagcctac

SEQ ID NO: 346970 - DNA, 15 bp, Homo sapiens
atccagcccagccta

SEQ ID NO: 346971 - DNA, 15 bp, Homo sapiens
tatccagcccagcct

SEQ ID NO: 346972 - DNA, 15 bp, Homo sapiens
gtatccagcccagcc

SEQ ID NO: 346973 - DNA, 15 bp, Homo sapiens
agtatccagcccagc

SEQ ID NO: 346974 - DNA, 15 bp, Homo sapiens
aagtatccagcccag

SEQ ID NO: 346975 - DNA, 15 bp, Homo sapiens
gaagtatccagccca

SEQ ID NO: 346976 - DNA, 15 bp, Homo sapiens
tgaagtatccagccc

SEQ ID NO: 346977 - DNA, 15 bp, Homo sapiens
atgaagtatccagcc

SEQ ID NO: 346978 - DNA, 15 bp, Homo sapiens
aatgaagtatccagc

SEQ ID NO: 346979 - DNA, 15 bp, Homo sapiens
aaatgaagtatccag

SEQ ID NO: 346980 - DNA, 15 bp, Homo sapiens
aaaatgaagtatcca

SEQ ID NO: 346981 - DNA, 15 bp, Homo sapiens
gaaaatgaagtatcc

SEQ ID NO: 346982 - DNA, 15 bp, Homo sapiens
tgaaaatgaagtatc

SEQ ID NO: 346983 - DNA, 15 bp, Homo sapiens
atgaaaatgaagtat

SEQ ID NO: 346984 - DNA, 15 bp, Homo sapiens
gatgaaaatgaagta

SEQ ID NO: 346985 - DNA, 15 bp, Homo sapiens
tgatgaaaatgaagt

SEQ ID NO: 346986 - DNA, 15 bp, Homo sapiens
ttgatgaaaatgaag

SEQ ID NO: 346987 - DNA, 15 bp, Homo sapiens
tttgatgaaaatgaa

SEQ ID NO: 346988 - DNA, 15 bp, Homo sapiens
atttgatgaaaatga

SEQ ID NO: 346989 - DNA, 15 bp, Homo sapiens
gatttgatgaaaatg

SEQ ID NO: 346990 - DNA, 15 bp, Homo sapiens
agatttgatgaaaat

SEQ ID NO: 346991 - DNA, 15 bp, Homo sapiens
aagatttgatgaaaa

SEQ ID NO: 346992 - DNA, 15 bp, Homo sapiens
aaagatttgatgaaa

SEQ ID NO: 346993 - DNA, 15 bp, Homo sapiens
aaaagatttgatgaa

SEQ ID NO: 346994 - DNA, 15 bp, Homo sapiens
aaaaagatttgatga

SEQ ID NO: 346995 - DNA, 15 bp, Homo sapiens
taaaaagatttgatg

SEQ ID NO: 346996 - DNA, 15 bp, Homo sapiens
ttaaaaagatttgat

SEQ ID NO: 346997 - DNA, 15 bp, Homo sapiens
tttaaaaagatttga

SEQ ID NO: 346998 - DNA, 15 bp, Homo sapiens
ttttaaaaagatttg

SEQ ID NO: 346999 - DNA, 15 bp, Homo sapiens
attttaaaaagattt

SEQ ID NO: 347000 - DNA, 15 bp, Homo sapiens
tattttaaaaagatt

SEQ ID NO: 347001 - DNA, 15 bp, Homo sapiens
ttattttaaaaagat

SEQ ID NO: 347002 - DNA, 15 bp, Homo sapiens
attattttaaaaaga

SEQ ID NO: 347003 - DNA, 15 bp, Homo sapiens
aattattttaaaaag

SEQ ID NO: 347004 - DNA, 15 bp, Homo sapiens
caattattttaaaaa

SEQ ID NO: 347005 - DNA, 15 bp, Homo sapiens
ccaattattttaaaa

SEQ ID NO: 347006 - DNA, 15 bp, Homo sapiens
accaattattttaaa

SEQ ID NO: 347007 - DNA, 15 bp, Homo sapiens
caccaattattttaa

SEQ ID NO: 347008 - DNA, 15 bp, Homo sapiens
tcaccaattatttta

SEQ ID NO: 347009 - DNA, 15 bp, Homo sapiens
ttcaccaattatttt

SEQ ID NO: 347010 - DNA, 15 bp, Homo sapiens
tttcaccaattattt

SEQ ID NO: 347011 - DNA, 15 bp, Homo sapiens
atttcaccaattatt

SEQ ID NO: 347012 - DNA, 15 bp, Homo sapiens
tatttcaccaattat

SEQ ID NO: 347013 - DNA, 15 bp, Homo sapiens
ttatttcaccaatta

SEQ ID NO: 347014 - DNA, 15 bp, Homo sapiens
gttatttcaccaatt

SEQ ID NO: 347015 - DNA, 15 bp, Homo sapiens
ggttatttcaccaat

SEQ ID NO: 347016 - DNA, 15 bp, Homo sapiens
aggttatttcaccaa

SEQ ID NO: 347017 - DNA, 15 bp, Homo sapiens
aaggttatttcacca

SEQ ID NO: 347018 - DNA, 15 bp, Homo sapiens
aaaggttatttcacc

SEQ ID NO: 347019 - DNA, 15 bp, Homo sapiens
taaaggttatttcac

SEQ ID NO: 347020 - DNA, 15 bp, Homo sapiens
ataaaggttatttca

SEQ ID NO: 347021 - DNA, 15 bp, Homo sapiens
aataaaggttatttc

SEQ ID NO: 347022 - DNA, 15 bp, Homo sapiens
caataaaggttattt

SEQ ID NO: 347023 - DNA, 15 bp, Homo sapiens
tcaataaaggttatt

SEQ ID NO: 347024 - DNA, 15 bp, Homo sapiens
ttcaataaaggttat

SEQ ID NO: 347025 - DNA, 15 bp, Homo sapiens
attcaataaaggtta

SEQ ID NO: 347026 - DNA, 15 bp, Homo sapiens
tattcaataaaggtt

SEQ ID NO: 347027 - DNA, 15 bp, Homo sapiens
atattcaataaaggt

SEQ ID NO: 347028 - DNA, 15 bp, Homo sapiens
catattcaataaagg

SEQ ID NO: 347029 - DNA, 15 bp, Homo sapiens
ccatattcaataaag

SEQ ID NO: 347030 - DNA, 15 bp, Homo sapiens
accatattcaataaa

SEQ ID NO: 347031 - DNA, 15 bp, Homo sapiens
aaccatattcaataa

SEQ ID NO: 347032 - DNA, 15 bp, Homo sapiens
aaaccatattcaata

SEQ ID NO: 347033 - DNA, 15 bp, Homo sapiens
aaaaccatattcaat

SEQ ID NO: 347034 - DNA, 15 bp, Homo sapiens
gaaaaccatattcaa

SEQ ID NO: 347035 - DNA, 15 bp, Homo sapiens
agaaaaccatattca

SEQ ID NO: 347036 - DNA, 15 bp, Homo sapiens
tagaaaaccatattc

SEQ ID NO: 347037 - DNA, 15 bp, Homo sapiens
gtagaaaaccatatt

SEQ ID NO: 347038 - DNA, 15 bp, Homo sapiens
tgtagaaaaccatat

SEQ ID NO: 347039 - DNA, 15 bp, Homo sapiens
atgtagaaaaccata

SEQ ID NO: 347040 - DNA, 15 bp, Homo sapiens
aatgtagaaaaccat

SEQ ID NO: 347041 - DNA, 15 bp, Homo sapiens
aaatgtagaaaacca

SEQ ID NO: 347042 - DNA, 15 bp, Homo sapiens
aaaatgtagaaaacc

SEQ ID NO: 347043 - DNA, 15 bp, Homo sapiens
aaaaatgtagaaaac

SEQ ID NO: 347044 - DNA, 15 bp, Homo sapiens
gaaaaatgtagaaaa

SEQ ID NO: 347045 - DNA, 15 bp, Homo sapiens
tgaaaaatgtagaaa

SEQ ID NO: 347046 - DNA, 15 bp, Homo sapiens
gtgaaaaatgtagaa

SEQ ID NO: 347047 - DNA, 15 bp, Homo sapiens
tgtgaaaaatgtaga

SEQ ID NO: 347048 - DNA, 15 bp, Homo sapiens
gtgtgaaaaatgtag

SEQ ID NO: 347049 - DNA, 15 bp, Homo sapiens
agtgtgaaaaatgta

SEQ ID NO: 347050 - DNA, 15 bp, Homo sapiens
aagtgtgaaaaatgt

SEQ ID NO: 347051 - DNA, 15 bp, Homo sapiens
gaagtgtgaaaaatg

SEQ ID NO: 347052 - DNA, 15 bp, Homo sapiens
ggaagtgtgaaaaat

SEQ ID NO: 347053 - DNA, 15 bp, Homo sapiens
gggaagtgtgaaaaa

SEQ ID NO: 347054 - DNA, 15 bp, Homo sapiens
agggaagtgtgaaaa

SEQ ID NO: 347055 - DNA, 15 bp, Homo sapiens
gagggaagtgtgaaa

SEQ ID NO: 347056 - DNA, 15 bp, Homo sapiens
ggagggaagtgtgaa

SEQ ID NO: 347057 - DNA, 15 bp, Homo sapiens
aggagggaagtgtga

SEQ ID NO: 347058 - DNA, 15 bp, Homo sapiens
aaggagggaagtgtg

SEQ ID NO: 347059 - DNA, 15 bp, Homo sapiens
gaaggagggaagtgt

SEQ ID NO: 347060 - DNA, 15 bp, Homo sapiens
tgaaggagggaagtg

SEQ ID NO: 347061 - DNA, 15 bp, Homo sapiens
atgaaggagggaagt

SEQ ID NO: 347062 - DNA, 15 bp, Homo sapiens
tatgaaggagggaag

SEQ ID NO: 347063 - DNA, 15 bp, Homo sapiens
ctatgaaggagggaa

SEQ ID NO: 347064 - DNA, 15 bp, Homo sapiens
cctatgaaggaggga

SEQ ID NO: 347065 - DNA, 15 bp, Homo sapiens
ccctatgaaggaggg

SEQ ID NO: 347066 - DNA, 15 bp, Homo sapiens
accctatgaaggagg

SEQ ID NO: 347067 - DNA, 15 bp, Homo sapiens
aaccctatgaaggag

SEQ ID NO: 347068 - DNA, 15 bp, Homo sapiens
caaccctatgaagga

SEQ ID NO: 347069 - DNA, 15 bp, Homo sapiens
acaaccctatgaagg

SEQ ID NO: 347070 - DNA, 15 bp, Homo sapiens
cacaaccctatgaag

SEQ ID NO: 347071 - DNA, 15 bp, Homo sapiens
tcacaaccctatgaa

SEQ ID NO: 347072 - DNA, 15 bp, Homo sapiens
ttcacaaccctatga

SEQ ID NO: 347073 - DNA, 15 bp, Homo sapiens
tttcacaaccctatg

SEQ ID NO: 347074 - DNA, 15 bp, Homo sapiens
ttttcacaaccctat

SEQ ID NO: 347075 - DNA, 15 bp, Homo sapiens
attttcacaacccta

SEQ ID NO: 347076 - DNA, 15 bp, Homo sapiens
aattttcacaaccct

SEQ ID NO: 347077 - DNA, 15 bp, Homo sapiens
aaattttcacaaccc

SEQ ID NO: 347078 - DNA, 15 bp, Homo sapiens
taaattttcacaacc

SEQ ID NO: 347079 - DNA, 15 bp, Homo sapiens
ataaattttcacaac

SEQ ID NO: 347080 - DNA, 15 bp, Homo sapiens
aataaattttcacaa

SEQ ID NO: 347081 - DNA, 15 bp, Homo sapiens
aaataaattttcaca

SEQ ID NO: 347082 - DNA, 15 bp, Homo sapiens
gaaataaattttcac

SEQ ID NO: 347083 - DNA, 15 bp, Homo sapiens
tgaaataaattttca

SEQ ID NO: 347084 - DNA, 15 bp, Homo sapiens
atgaaataaattttc

SEQ ID NO: 347085 - DNA, 15 bp, Homo sapiens
tatgaaataaatttt

SEQ ID NO: 347086 - DNA, 15 bp, Homo sapiens
atatgaaataaattt

SEQ ID NO: 347087 - DNA, 15 bp, Homo sapiens
aatatgaaataaatt

SEQ ID NO: 347088 - DNA, 15 bp, Homo sapiens
gaatatgaaataaat

SEQ ID NO: 347089 - DNA, 15 bp, Homo sapiens
agaatatgaaataaa

SEQ ID NO: 347090 - DNA, 15 bp, Homo sapiens
tagaatatgaaataa

SEQ ID NO: 347091 - DNA, 15 bp, Homo sapiens
ctagaatatgaaata

SEQ ID NO: 347092 - DNA, 15 bp, Homo sapiens
tctagaatatgaaat

SEQ ID NO: 347093 - DNA, 15 bp, Homo sapiens
atctagaatatgaaa

SEQ ID NO: 347094 - DNA, 15 bp, Homo sapiens
catctagaatatgaa

SEQ ID NO: 347095 - DNA, 15 bp, Homo sapiens
tcatctagaatatga

SEQ ID NO: 347096 - DNA, 15 bp, Homo sapiens
ctcatctagaatatg

SEQ ID NO: 347097 - DNA, 15 bp, Homo sapiens
cctcatctagaatat

SEQ ID NO: 347098 - DNA, 15 bp, Homo sapiens
tcctcatctagaata

SEQ ID NO: 347099 - DNA, 15 bp, Homo sapiens
ttcctcatctagaat

SEQ ID NO: 347100 - DNA, 15 bp, Homo sapiens
tttcctcatctagaa

SEQ ID NO: 347101 - DNA, 15 bp, Homo sapiens
atttcctcatctaga

SEQ ID NO: 347102 - DNA, 15 bp, Homo sapiens
aatttcctcatctag

SEQ ID NO: 347103 - DNA, 15 bp, Homo sapiens
caatttcctcatcta

SEQ ID NO: 347104 - DNA, 15 bp, Homo sapiens
tcaatttcctcatct

SEQ ID NO: 347105 - DNA, 15 bp, Homo sapiens
ctcaatttcctcatc

SEQ ID NO: 347106 - DNA, 15 bp, Homo sapiens
cctcaatttcctcat

SEQ ID NO: 347107 - DNA, 15 bp, Homo sapiens
gcctcaatttcctca

SEQ ID NO: 347108 - DNA, 15 bp, Homo sapiens
tgcctcaatttcctc

SEQ ID NO: 347109 - DNA, 15 bp, Homo sapiens
gtgcctcaatttcct

SEQ ID NO: 347110 - DNA, 15 bp, Homo sapiens
tgtgcctcaatttcc

SEQ ID NO: 347111 - DNA, 15 bp, Homo sapiens
ctgtgcctcaatttc

SEQ ID NO: 347112 - DNA, 15 bp, Homo sapiens
tctgtgcctcaattt

SEQ ID NO: 347113 - DNA, 15 bp, Homo sapiens
ctctgtgcctcaatt

SEQ ID NO: 347114 - DNA, 15 bp, Homo sapiens
cctctgtgcctcaat

SEQ ID NO: 347115 - DNA, 15 bp, Homo sapiens
acctctgtgcctcaa

SEQ ID NO: 347116 - DNA, 15 bp, Homo sapiens
tacctctgtgcctca

SEQ ID NO: 347117 - DNA, 15 bp, Homo sapiens
gtacctctgtgcctc

SEQ ID NO: 347118 - DNA, 15 bp, Homo sapiens
tgtacctctgtgcct

SEQ ID NO: 347119 - DNA, 15 bp, Homo sapiens
gtgtacctctgtgcc

SEQ ID NO: 347120 - DNA, 15 bp, Homo sapiens
agtgtacctctgtgc

SEQ ID NO: 347121 - DNA, 15 bp, Homo sapiens
aagtgtacctctgtg

SEQ ID NO: 347122 - DNA, 15 bp, Homo sapiens
taagtgtacctctgt

SEQ ID NO: 347123 - DNA, 15 bp, Homo sapiens
gtaagtgtacctctg

SEQ ID NO: 347124 - DNA, 15 bp, Homo sapiens
tgtaagtgtacctct

SEQ ID NO: 347125 - DNA, 15 bp, Homo sapiens
ttgtaagtgtacctc

SEQ ID NO: 347126 - DNA, 15 bp, Homo sapiens
tttgtaagtgtacct

SEQ ID NO: 347127 - DNA, 15 bp, Homo sapiens
ctttgtaagtgtacc

SEQ ID NO: 347128 - DNA, 15 bp, Homo sapiens
tctttgtaagtgtac

SEQ ID NO: 347129 - DNA, 15 bp, Homo sapiens
atctttgtaagtgta

SEQ ID NO: 347130 - DNA, 15 bp, Homo sapiens
tatctttgtaagtgt

SEQ ID NO: 347131 - DNA, 15 bp, Homo sapiens
gtatctttgtaagtg

SEQ ID NO: 347132 - DNA, 15 bp, Homo sapiens
tgtatctttgtaagt

SEQ ID NO: 347133 - DNA, 15 bp, Homo sapiens
ttgtatctttgtaag

SEQ ID NO: 347134 - DNA, 15 bp, Homo sapiens
attgtatctttgtaa

SEQ ID NO: 347135 - DNA, 15 bp, Homo sapiens
tattgtatctttgta

SEQ ID NO: 347136 - DNA, 15 bp, Homo sapiens
ttattgtatctttgt

SEQ ID NO: 347137 - DNA, 15 bp, Homo sapiens
tttattgtatctttg

SEQ ID NO: 347138 - DNA, 15 bp, Homo sapiens
atttattgtatcttt

SEQ ID NO: 347139 - DNA, 15 bp, Homo sapiens
catttattgtatctt

SEQ ID NO: 347140 - DNA, 15 bp, Homo sapiens
ccatttattgtatct

SEQ ID NO: 347141 - DNA, 15 bp, Homo sapiens
gccatttattgtatc

SEQ ID NO: 347142 - DNA, 15 bp, Homo sapiens
tgccatttattgtat

SEQ ID NO: 347143 - DNA, 15 bp, Homo sapiens
ctgccatttattgta

SEQ ID NO: 347144 - DNA, 15 bp, Homo sapiens
tctgccatttattgt

SEQ ID NO: 347145 - DNA, 15 bp, Homo sapiens
ttctgccatttattg

SEQ ID NO: 347146 - DNA, 15 bp, Homo sapiens
gttctgccatttatt

SEQ ID NO: 347147 - DNA, 15 bp, Homo sapiens
agttctgccatttat

SEQ ID NO: 347148 - DNA, 15 bp, Homo sapiens
tagttctgccattta

SEQ ID NO: 347149 - DNA, 15 bp, Homo sapiens
ttagttctgccattt

SEQ ID NO: 347150 - DNA, 15 bp, Homo sapiens
cttagttctgccatt

SEQ ID NO: 347151 - DNA, 15 bp, Homo sapiens
tcttagttctgccat

SEQ ID NO: 347152 - DNA, 15 bp, Homo sapiens
atcttagttctgcca

SEQ ID NO: 347153 - DNA, 15 bp, Homo sapiens
aatcttagttctgcc

SEQ ID NO: 347154 - DNA, 15 bp, Homo sapiens
aaatcttagttctgc

SEQ ID NO: 347155 - DNA, 15 bp, Homo sapiens
caaatcttagttctg

SEQ ID NO: 347156 - DNA, 15 bp, Homo sapiens
tcaaatcttagttct

SEQ ID NO: 347157 - DNA, 15 bp, Homo sapiens
ttcaaatcttagttc

SEQ ID NO: 347158 - DNA, 15 bp, Homo sapiens
gttcaaatcttagtt

SEQ ID NO: 347159 - DNA, 15 bp, Homo sapiens
ggttcaaatcttagt

SEQ ID NO: 347160 - DNA, 15 bp, Homo sapiens
gggttcaaatcttag

SEQ ID NO: 347161 - DNA, 15 bp, Homo sapiens
tgggttcaaatctta

SEQ ID NO: 347162 - DNA, 15 bp, Homo sapiens
ctgggttcaaatctt

SEQ ID NO: 347163 - DNA, 15 bp, Homo sapiens
cctgggttcaaatct

SEQ ID NO: 347164 - DNA, 15 bp, Homo sapiens
tcctgggttcaaatc

SEQ ID NO: 347165 - DNA, 15 bp, Homo sapiens
gtcctgggttcaaat

SEQ ID NO: 347166 - DNA, 15 bp, Homo sapiens
agtcctgggttcaaa

SEQ ID NO: 347167 - DNA, 15 bp, Homo sapiens
tagtcctgggttcaa

SEQ ID NO: 347168 - DNA, 15 bp, Homo sapiens
ttagtcctgggttca

SEQ ID NO: 347169 - DNA, 15 bp, Homo sapiens
cttagtcctgggttc

SEQ ID NO: 347170 - DNA, 15 bp, Homo sapiens
acttagtcctgggtt

SEQ ID NO: 347171 - DNA, 15 bp, Homo sapiens
cacttagtcctgggt

SEQ ID NO: 347172 - DNA, 15 bp, Homo sapiens
acacttagtcctggg

SEQ ID NO: 347173 - DNA, 15 bp, Homo sapiens
tacacttagtcctgg

SEQ ID NO: 347174 - DNA, 15 bp, Homo sapiens
atacacttagtcctg

SEQ ID NO: 347175 - DNA, 15 bp, Homo sapiens
aatacacttagtcct

SEQ ID NO: 347176 - DNA, 15 bp, Homo sapiens
caatacacttagtcc

SEQ ID NO: 347177 - DNA, 15 bp, Homo sapiens
gcaatacacttagtc

SEQ ID NO: 347178 - DNA, 15 bp, Homo sapiens
agcaatacacttagt

SEQ ID NO: 347179 - DNA, 15 bp, Homo sapiens
aagcaatacacttag

SEQ ID NO: 347180 - DNA, 15 bp, Homo sapiens
caagcaatacactta

SEQ ID NO: 347181 - DNA, 15 bp, Homo sapiens
acaagcaatacactt

SEQ ID NO: 347182 - DNA, 15 bp, Homo sapiens
tacaagcaatacact

SEQ ID NO: 347183 - DNA, 15 bp, Homo sapiens
atacaagcaatacac

SEQ ID NO: 347184 - DNA, 15 bp, Homo sapiens
aatacaagcaataca

SEQ ID NO: 347185 - DNA, 15 bp, Homo sapiens
aaatacaagcaatac

SEQ ID NO: 347186 - DNA, 15 bp, Homo sapiens
taaatacaagcaata

SEQ ID NO: 347187 - DNA, 15 bp, Homo sapiens
ataaatacaagcaat

SEQ ID NO: 347188 - DNA, 15 bp, Homo sapiens
aataaatacaagcaa

SEQ ID NO: 347189 - DNA, 15 bp, Homo sapiens
aaataaatacaagca

SEQ ID NO: 347190 - DNA, 15 bp, Homo sapiens
taaataaatacaagc

SEQ ID NO: 347191 - DNA, 15 bp, Homo sapiens
ttaaataaatacaag

SEQ ID NO: 347192 - DNA, 15 bp, Homo sapiens
attaaataaatacaa

SEQ ID NO: 347193 - DNA, 15 bp, Homo sapiens
aattaaataaataca

SEQ ID NO: 347194 - DNA, 15 bp, Homo sapiens
taattaaataaatac

SEQ ID NO: 347195 - DNA, 15 bp, Homo sapiens
ttaattaaataaata

SEQ ID NO: 347196 - DNA, 15 bp, Homo sapiens
attaattaaataaat

SEQ ID NO: 347197 - DNA, 15 bp, Homo sapiens
aattaattaaataaa

SEQ ID NO: 347198 - DNA, 15 bp, Homo sapiens
taattaattaaataa

SEQ ID NO: 347199 - DNA, 15 bp, Homo sapiens
ttaattaattaaata

SEQ ID NO: 347200 - DNA, 15 bp, Homo sapiens
attaattaattaaat

SEQ ID NO: 347201 - DNA, 15 bp, Homo sapiens
aattaattaattaaa

SEQ ID NO: 347202 - DNA, 15 bp, Homo sapiens
aaattaattaattaa

SEQ ID NO: 347203 - DNA, 15 bp, Homo sapiens
aaaattaattaatta

SEQ ID NO: 347204 - DNA, 15 bp, Homo sapiens
aaaaattaattaatt

SEQ ID NO: 347205 - DNA, 15 bp, Homo sapiens
taaaaattaattaat

SEQ ID NO: 347206 - DNA, 15 bp, Homo sapiens
ttaaaaattaattaa

SEQ ID NO: 347207 - DNA, 15 bp, Homo sapiens
cttaaaaattaatta

SEQ ID NO: 347208 - DNA, 15 bp, Homo sapiens
tcttaaaaattaatt

SEQ ID NO: 347209 - DNA, 15 bp, Homo sapiens
ctcttaaaaattaat

SEQ ID NO: 347210 - DNA, 15 bp, Homo sapiens
tctcttaaaaattaa

SEQ ID NO: 347211 - DNA, 15 bp, Homo sapiens
gtctcttaaaaatta

SEQ ID NO: 347212 - DNA, 15 bp, Homo sapiens
tgtctcttaaaaatt

SEQ ID NO: 347213 - DNA, 15 bp, Homo sapiens
ctgtctcttaaaaat

SEQ ID NO: 347214 - DNA, 15 bp, Homo sapiens
cctgtctcttaaaaa

SEQ ID NO: 347215 - DNA, 15 bp, Homo sapiens
ccctgtctcttaaaa

SEQ ID NO: 347216 - DNA, 15 bp, Homo sapiens
gccctgtctcttaaa

SEQ ID NO: 347217 - DNA, 15 bp, Homo sapiens
ggccctgtctcttaa

SEQ ID NO: 347218 - DNA, 15 bp, Homo sapiens
aggccctgtctctta

SEQ ID NO: 347219 - DNA, 15 bp, Homo sapiens
gaggccctgtctctt

SEQ ID NO: 347220 - DNA, 15 bp, Homo sapiens
tgaggccctgtctct

SEQ ID NO: 347221 - DNA, 15 bp, Homo sapiens
gtgaggccctgtctc

SEQ ID NO: 347222 - DNA, 15 bp, Homo sapiens
agtgaggccctgtct

SEQ ID NO: 347223 - DNA, 15 bp, Homo sapiens
gagtgaggccctgtc

SEQ ID NO: 347224 - DNA, 15 bp, Homo sapiens
agagtgaggccctgt

SEQ ID NO: 347225 - DNA, 15 bp, Homo sapiens
cagagtgaggccctg

SEQ ID NO: 347226 - DNA, 15 bp, Homo sapiens
acagagtgaggccct

SEQ ID NO: 347227 - DNA, 15 bp, Homo sapiens
aacagagtgaggccc

SEQ ID NO: 347228 - DNA, 15 bp, Homo sapiens
caacagagtgaggcc

SEQ ID NO: 347229 - DNA, 15 bp, Homo sapiens
gcaacagagtgaggc

SEQ ID NO: 347230 - DNA, 15 bp, Homo sapiens
ggcaacagagtgagg

SEQ ID NO: 347231 - DNA, 15 bp, Homo sapiens
aggcaacagagtgag

SEQ ID NO: 347232 - DNA, 15 bp, Homo sapiens
taggcaacagagtga

SEQ ID NO: 347233 - DNA, 15 bp, Homo sapiens
ctaggcaacagagtg

SEQ ID NO: 347234 - DNA, 15 bp, Homo sapiens
cctaggcaacagagt

SEQ ID NO: 347235 - DNA, 15 bp, Homo sapiens
gccagcctaggcaac

SEQ ID NO: 347236 - DNA, 15 bp, Homo sapiens
ggccagcctaggcaa

SEQ ID NO: 347237 - DNA, 15 bp, Homo sapiens
gggccagcctaggca

SEQ ID NO: 347238 - DNA, 15 bp, Homo sapiens
agggccagcctaggc

SEQ ID NO: 347239 - DNA, 15 bp, Homo sapiens
aagggccagcctagg

SEQ ID NO: 347240 - DNA, 15 bp, Homo sapiens
caagggccagcctag

SEQ ID NO: 347241 - DNA, 15 bp, Homo sapiens
tcaagggccagccta

SEQ ID NO: 347242 - DNA, 15 bp, Homo sapiens
ttcaagggccagcct

SEQ ID NO: 347243 - DNA, 15 bp, Homo sapiens
gttcaagggccagcc

SEQ ID NO: 347244 - DNA, 15 bp, Homo sapiens
agttcaagggccagc

SEQ ID NO: 347245 - DNA, 15 bp, Homo sapiens
gagttcaagggccag

SEQ ID NO: 347246 - DNA, 15 bp, Homo sapiens
ggagttcaagggcca

SEQ ID NO: 347247 - DNA, 15 bp, Homo sapiens
aggagttcaagggcc

SEQ ID NO: 347248 - DNA, 15 bp, Homo sapiens
caggagttcaagggc

SEQ ID NO: 347249 - DNA, 15 bp, Homo sapiens
ccaggagttcaaggg

SEQ ID NO: 347250 - DNA, 15 bp, Homo sapiens
ggactgcttgagccc

SEQ ID NO: 347251 - DNA, 15 bp, Homo sapiens
tggactgcttgagcc

SEQ ID NO: 347252 - DNA, 15 bp, Homo sapiens
gtggactgcttgagc

SEQ ID NO: 347253 - DNA, 15 bp, Homo sapiens
ggtggactgcttgag

SEQ ID NO: 347254 - DNA, 15 bp, Homo sapiens
aggtggactgcttga

SEQ ID NO: 347255 - DNA, 15 bp, Homo sapiens
caggtggactgcttg

SEQ ID NO: 347256 - DNA, 15 bp, Homo sapiens
gcaggtggactgctt

SEQ ID NO: 347257 - DNA, 15 bp, Homo sapiens
ggcaggtggactgct

SEQ ID NO: 347258 - DNA, 15 bp, Homo sapiens
aggcaggtggactgc

SEQ ID NO: 347259 - DNA, 15 bp, Homo sapiens
gaggcaggtggactg

SEQ ID NO: 347260 - DNA, 15 bp, Homo sapiens
tgaggcaggtggact

SEQ ID NO: 347261 - DNA, 15 bp, Homo sapiens
ctgaggcaggtggac

SEQ ID NO: 347262 - DNA, 15 bp, Homo sapiens
gctgaggcaggtgga

SEQ ID NO: 347263 - DNA, 15 bp, Homo sapiens
ggctgaggcaggtgg

SEQ ID NO: 347264 - DNA, 15 bp, Homo sapiens
aggctgaggcaggtg

SEQ ID NO: 347265 - DNA, 15 bp, Homo sapiens
gaggctgaggcaggt

SEQ ID NO: 347266 - DNA, 15 bp, Homo sapiens
gtcccagctactcag

SEQ ID NO: 347267 - DNA, 15 bp, Homo sapiens
agtcccagctactca

SEQ ID NO: 347268 - DNA, 15 bp, Homo sapiens
cagtcccagctactc

SEQ ID NO: 347269 - DNA, 15 bp, Homo sapiens
gcagtcccagctact

SEQ ID NO: 347270 - DNA, 15 bp, Homo sapiens
tgcagtcccagctac

SEQ ID NO: 347271 - DNA, 15 bp, Homo sapiens
ctgcagtcccagcta

SEQ ID NO: 347272 - DNA, 15 bp, Homo sapiens
cctgcagtcccagct

SEQ ID NO: 347273 - DNA, 15 bp, Homo sapiens
gcctgcagtcccagc

SEQ ID NO: 347274 - DNA, 15 bp, Homo sapiens
tgcctgcagtcccag

SEQ ID NO: 347275 - DNA, 15 bp, Homo sapiens
gtgcctgcagtccca

SEQ ID NO: 347276 - DNA, 15 bp, Homo sapiens
tgtgcctgcagtccc

SEQ ID NO: 347277 - DNA, 15 bp, Homo sapiens
gtgtgcctgcagtcc

SEQ ID NO: 347278 - DNA, 15 bp, Homo sapiens
ggtgtgcctgcagtc

SEQ ID NO: 347279 - DNA, 15 bp, Homo sapiens
tggtgtgcctgcagt

SEQ ID NO: 347280 - DNA, 15 bp, Homo sapiens
atggtgtgcctgcag

SEQ ID NO: 347281 - DNA, 15 bp, Homo sapiens
catggtgtgcctgca

SEQ ID NO: 347282 - DNA, 15 bp, Homo sapiens
gcatggtgtgcctgc

SEQ ID NO: 347283 - DNA, 15 bp, Homo sapiens
ggcatggtgtgcctg

SEQ ID NO: 347284 - DNA, 15 bp, Homo sapiens
aggcatggtgtgcct

SEQ ID NO: 347285 - DNA, 15 bp, Homo sapiens
gaggcatggtgtgcc

SEQ ID NO: 347286 - DNA, 15 bp, Homo sapiens
ggaggcatggtgtgc

SEQ ID NO: 347287 - DNA, 15 bp, Homo sapiens
gggaggcatggtgtg

SEQ ID NO: 347288 - DNA, 15 bp, Homo sapiens
tgggaggcatggtgt

SEQ ID NO: 347289 - DNA, 15 bp, Homo sapiens
ctgggaggcatggtg

SEQ ID NO: 347290 - DNA, 15 bp, Homo sapiens
actgggaggcatggt

SEQ ID NO: 347291 - DNA, 15 bp, Homo sapiens
aactgggaggcatgg

SEQ ID NO: 347292 - DNA, 15 bp, Homo sapiens
caactgggaggcatg

SEQ ID NO: 347293 - DNA, 15 bp, Homo sapiens
acaactgggaggcat

SEQ ID NO: 347294 - DNA, 15 bp, Homo sapiens
aacaactgggaggca

SEQ ID NO: 347295 - DNA, 15 bp, Homo sapiens
aaacaactgggaggc

SEQ ID NO: 347296 - DNA, 15 bp, Homo sapiens
aaaacaactgggagg

SEQ ID NO: 347297 - DNA, 15 bp, Homo sapiens
aaaaacaactgggag

SEQ ID NO: 347298 - DNA, 15 bp, Homo sapiens
taaaaacaactggga

SEQ ID NO: 347299 - DNA, 15 bp, Homo sapiens
ttaaaaacaactggg

SEQ ID NO: 347300 - DNA, 15 bp, Homo sapiens
tttaaaaacaactgg

SEQ ID NO: 347301 - DNA, 15 bp, Homo sapiens
gtttaaaaacaactg

SEQ ID NO: 347302 - DNA, 15 bp, Homo sapiens
tgtttaaaaacaact

SEQ ID NO: 347303 - DNA, 15 bp, Homo sapiens
gtgtttaaaaacaac

SEQ ID NO: 347304 - DNA, 15 bp, Homo sapiens
agtgtttaaaaacaa

SEQ ID NO: 347305 - DNA, 15 bp, Homo sapiens
tagtgtttaaaaaca

SEQ ID NO: 347306 - DNA, 15 bp, Homo sapiens
ttagtgtttaaaaac

SEQ ID NO: 347307 - DNA, 15 bp, Homo sapiens
attagtgtttaaaaa

SEQ ID NO: 347308 - DNA, 15 bp, Homo sapiens
tattagtgtttaaaa

SEQ ID NO: 347309 - DNA, 15 bp, Homo sapiens
ctattagtgtttaaa

SEQ ID NO: 347310 - DNA, 15 bp, Homo sapiens
actattagtgtttaa

SEQ ID NO: 347311 - DNA, 15 bp, Homo sapiens
tactattagtgttta

SEQ ID NO: 347312 - DNA, 15 bp, Homo sapiens
ctactattagtgttt

SEQ ID NO: 347313 - DNA, 15 bp, Homo sapiens
actactattagtgtt

SEQ ID NO: 347314 - DNA, 15 bp, Homo sapiens
gactactattagtgt

SEQ ID NO: 347315 - DNA, 15 bp, Homo sapiens
agactactattagtg

SEQ ID NO: 347316 - DNA, 15 bp, Homo sapiens
aagactactattagt

SEQ ID NO: 347317 - DNA, 15 bp, Homo sapiens
aaagactactattag

SEQ ID NO: 347318 - DNA, 15 bp, Homo sapiens
gaaagactactatta

SEQ ID NO: 347319 - DNA, 15 bp, Homo sapiens
tgaaagactactatt

SEQ ID NO: 347320 - DNA, 15 bp, Homo sapiens
atgaaagactactat

SEQ ID NO: 347321 - DNA, 15 bp, Homo sapiens
tatgaaagactacta

SEQ ID NO: 347322 - DNA, 15 bp, Homo sapiens
ttatgaaagactact

SEQ ID NO: 347323 - DNA, 15 bp, Homo sapiens
cttatgaaagactac

SEQ ID NO: 347324 - DNA, 15 bp, Homo sapiens
ccttatgaaagacta

SEQ ID NO: 347325 - DNA, 15 bp, Homo sapiens
tccttatgaaagact

SEQ ID NO: 347326 - DNA, 15 bp, Homo sapiens
gtccttatgaaagac

SEQ ID NO: 347327 - DNA, 15 bp, Homo sapiens
tgtccttatgaaaga

SEQ ID NO: 347328 - DNA, 15 bp, Homo sapiens
gtgtccttatgaaag

SEQ ID NO: 347329 - DNA, 15 bp, Homo sapiens
agtgtccttatgaaa

SEQ ID NO: 347330 - DNA, 15 bp, Homo sapiens
aagtgtccttatgaa

SEQ ID NO: 347331 - DNA, 15 bp, Homo sapiens
taagtgtccttatga

SEQ ID NO: 347332 - DNA, 15 bp, Homo sapiens
ataagtgtccttatg

SEQ ID NO: 347333 - DNA, 15 bp, Homo sapiens
tataagtgtccttat

SEQ ID NO: 347334 - DNA, 15 bp, Homo sapiens
ttataagtgtcctta

SEQ ID NO: 347335 - DNA, 15 bp, Homo sapiens
attataagtgtcctt

SEQ ID NO: 347336 - DNA, 15 bp, Homo sapiens
tattataagtgtcct

SEQ ID NO: 347337 - DNA, 15 bp, Homo sapiens
ttattataagtgtcc

SEQ ID NO: 347338 - DNA, 15 bp, Homo sapiens
tttattataagtgtc

SEQ ID NO: 347339 - DNA, 15 bp, Homo sapiens
ctttattataagtgt

SEQ ID NO: 347340 - DNA, 15 bp, Homo sapiens
cctttattataagtg

SEQ ID NO: 347341 - DNA, 15 bp, Homo sapiens
gcctttattataagt

SEQ ID NO: 347342 - DNA, 15 bp, Homo sapiens
tgcctttattataag

SEQ ID NO: 347343 - DNA, 15 bp, Homo sapiens
ctgcctttattataa

SEQ ID NO: 347344 - DNA, 15 bp, Homo sapiens
tctgcctttattata

SEQ ID NO: 347345 - DNA, 15 bp, Homo sapiens
ctctgcctttattat

SEQ ID NO: 347346 - DNA, 15 bp, Homo sapiens
gctctgcctttatta

SEQ ID NO: 347347 - DNA, 15 bp, Homo sapiens
agctctgcctttatt

SEQ ID NO: 347348 - DNA, 15 bp, Homo sapiens
cagctctgcctttat

SEQ ID NO: 347349 - DNA, 15 bp, Homo sapiens
ccagctctgccttta

SEQ ID NO: 347350 - DNA, 15 bp, Homo sapiens
tccagctctgccttt

SEQ ID NO: 347351 - DNA, 15 bp, Homo sapiens
ttccagctctgcctt

SEQ ID NO: 347352 - DNA, 15 bp, Homo sapiens
gttccagctctgcct

SEQ ID NO: 347353 - DNA, 15 bp, Homo sapiens
ggttccagctctgcc

SEQ ID NO: 347354 - DNA, 15 bp, Homo sapiens
gggttccagctctgc

SEQ ID NO: 347355 - DNA, 15 bp, Homo sapiens
tgggttccagctctg

SEQ ID NO: 347356 - DNA, 15 bp, Homo sapiens
gtgggttccagctct

SEQ ID NO: 347357 - DNA, 15 bp, Homo sapiens
tgtgggttccagctc

SEQ ID NO: 347358 - DNA, 15 bp, Homo sapiens
gtgtgggttccagct

SEQ ID NO: 347359 - DNA, 15 bp, Homo sapiens
agtgtgggttccagc

SEQ ID NO: 347360 - DNA, 15 bp, Homo sapiens
aagtgtgggttccag

SEQ ID NO: 347361 - DNA, 15 bp, Homo sapiens
gaagtgtgggttcca

SEQ ID NO: 347362 - DNA, 15 bp, Homo sapiens
tgaagtgtgggttcc

SEQ ID NO: 347363 - DNA, 15 bp, Homo sapiens
atgaagtgtgggttc

SEQ ID NO: 347364 - DNA, 15 bp, Homo sapiens
aatgaagtgtgggtt

SEQ ID NO: 347365 - DNA, 15 bp, Homo sapiens
gaatgaagtgtgggt

SEQ ID NO: 347366 - DNA, 15 bp, Homo sapiens
ggaatgaagtgtggg

SEQ ID NO: 347367 - DNA, 15 bp, Homo sapiens
tggaatgaagtgtgg

SEQ ID NO: 347368 - DNA, 15 bp, Homo sapiens
ctggaatgaagtgtg

SEQ ID NO: 347369 - DNA, 15 bp, Homo sapiens
tctggaatgaagtgt

SEQ ID NO: 347370 - DNA, 15 bp, Homo sapiens
gtctggaatgaagtg

SEQ ID NO: 347371 - DNA, 15 bp, Homo sapiens
agtctggaatgaagt

SEQ ID NO: 347372 - DNA, 15 bp, Homo sapiens
cagtctggaatgaag

SEQ ID NO: 347373 - DNA, 15 bp, Homo sapiens
gcagtctggaatgaa

SEQ ID NO: 347374 - DNA, 15 bp, Homo sapiens
agcagtctggaatga

SEQ ID NO: 347375 - DNA, 15 bp, Homo sapiens
gagcagtctggaatg

SEQ ID NO: 347376 - DNA, 15 bp, Homo sapiens
tgagcagtctggaat

SEQ ID NO: 347377 - DNA, 15 bp, Homo sapiens
ctgagcagtctggaa

SEQ ID NO: 347378 - DNA, 15 bp, Homo sapiens
tctgagcagtctgga

SEQ ID NO: 347379 - DNA, 15 bp, Homo sapiens
gtctgagcagtctgg

SEQ ID NO: 347380 - DNA, 15 bp, Homo sapiens
agtctgagcagtctg

SEQ ID NO: 347381 - DNA, 15 bp, Homo sapiens
cagtctgagcagtct

SEQ ID NO: 347382 - DNA, 15 bp, Homo sapiens
tcagtctgagcagtc

SEQ ID NO: 347383 - DNA, 15 bp, Homo sapiens
ctcagtctgagcagt

SEQ ID NO: 347384 - DNA, 15 bp, Homo sapiens
actcagtctgagcag

SEQ ID NO: 347385 - DNA, 15 bp, Homo sapiens
aactcagtctgagca

SEQ ID NO: 347386 - DNA, 15 bp, Homo sapiens
taactcagtctgagc

SEQ ID NO: 347387 - DNA, 15 bp, Homo sapiens
ctaactcagtctgag

SEQ ID NO: 347388 - DNA, 15 bp, Homo sapiens
actaactcagtctga

SEQ ID NO: 347389 - DNA, 15 bp, Homo sapiens
cactaactcagtctg

SEQ ID NO: 347390 - DNA, 15 bp, Homo sapiens
acactaactcagtct

SEQ ID NO: 347391 - DNA, 15 bp, Homo sapiens
aacactaactcagtc

SEQ ID NO: 347392 - DNA, 15 bp, Homo sapiens
taacactaactcagt

SEQ ID NO: 347393 - DNA, 15 bp, Homo sapiens
ctaacactaactcag

SEQ ID NO: 347394 - DNA, 15 bp, Homo sapiens
tctaacactaactca

SEQ ID NO: 347395 - DNA, 15 bp, Homo sapiens
ttctaacactaactc

SEQ ID NO: 347396 - DNA, 15 bp, Homo sapiens
tttctaacactaact

SEQ ID NO: 347397 - DNA, 15 bp, Homo sapiens
ttttctaacactaac

SEQ ID NO: 347398 - DNA, 15 bp, Homo sapiens
gttttctaacactaa

SEQ ID NO: 347399 - DNA, 15 bp, Homo sapiens
agttttctaacacta

SEQ ID NO: 347400 - DNA, 15 bp, Homo sapiens
cagttttctaacact

SEQ ID NO: 347401 - DNA, 15 bp, Homo sapiens
tcagttttctaacac

SEQ ID NO: 347402 - DNA, 15 bp, Homo sapiens
ttcagttttctaaca

SEQ ID NO: 347403 - DNA, 15 bp, Homo sapiens
tttcagttttctaac

SEQ ID NO: 347404 - DNA, 15 bp, Homo sapiens
ctttcagttttctaa

SEQ ID NO: 347405 - DNA, 15 bp, Homo sapiens
actttcagttttcta

SEQ ID NO: 347406 - DNA, 15 bp, Homo sapiens
tactttcagttttct

SEQ ID NO: 347407 - DNA, 15 bp, Homo sapiens
ttactttcagttttc

SEQ ID NO: 347408 - DNA, 15 bp, Homo sapiens
gttactttcagtttt

SEQ ID NO: 347409 - DNA, 15 bp, Homo sapiens
tgttactttcagttt

SEQ ID NO: 347410 - DNA, 15 bp, Homo sapiens
atgttactttcagtt

SEQ ID NO: 347411 - DNA, 15 bp, Homo sapiens
aatgttactttcagt

SEQ ID NO: 347412 - DNA, 15 bp, Homo sapiens
aaatgttactttcag

SEQ ID NO: 347413 - DNA, 15 bp, Homo sapiens
aaaatgttactttca

SEQ ID NO: 347414 - DNA, 15 bp, Homo sapiens
aaaaatgttactttc

SEQ ID NO: 347415 - DNA, 15 bp, Homo sapiens
taaaaatgttacttt

SEQ ID NO: 347416 - DNA, 15 bp, Homo sapiens
ataaaaatgttactt

SEQ ID NO: 347417 - DNA, 15 bp, Homo sapiens
aataaaaatgttact

SEQ ID NO: 347418 - DNA, 15 bp, Homo sapiens
taataaaaatgttac

SEQ ID NO: 347419 - DNA, 15 bp, Homo sapiens
gtaataaaaatgtta

SEQ ID NO: 347420 - DNA, 15 bp, Homo sapiens
agtaataaaaatgtt

SEQ ID NO: 347421 - DNA, 15 bp, Homo sapiens
cagtaataaaaatgt

SEQ ID NO: 347422 - DNA, 15 bp, Homo sapiens
acagtaataaaaatg

SEQ ID NO: 347423 - DNA, 15 bp, Homo sapiens
tacagtaataaaaat

SEQ ID NO: 347424 - DNA, 15 bp, Homo sapiens
atacagtaataaaaa

SEQ ID NO: 347425 - DNA, 15 bp, Homo sapiens
aatacagtaataaaa

SEQ ID NO: 347426 - DNA, 15 bp, Homo sapiens
aaatacagtaataaa

SEQ ID NO: 347427 - DNA, 15 bp, Homo sapiens
gaaatacagtaataa

SEQ ID NO: 347428 - DNA, 15 bp, Homo sapiens
tgaaatacagtaata

SEQ ID NO: 347429 - DNA, 15 bp, Homo sapiens
ctgaaatacagtaat

SEQ ID NO: 347430 - DNA, 15 bp, Homo sapiens
cctgaaatacagtaa

SEQ ID NO: 347431 - DNA, 15 bp, Homo sapiens
acctgaaatacagta

SEQ ID NO: 347432 - DNA, 15 bp, Homo sapiens
tacctgaaatacagt

SEQ ID NO: 347433 - DNA, 15 bp, Homo sapiens
ttacctgaaatacag

SEQ ID NO: 347434 - DNA, 15 bp, Homo sapiens
attacctgaaataca

SEQ ID NO: 347435 - DNA, 15 bp, Homo sapiens
gattacctgaaatac

SEQ ID NO: 347436 - DNA, 15 bp, Homo sapiens
tgattacctgaaata

SEQ ID NO: 347437 - DNA, 15 bp, Homo sapiens
ctgattacctgaaat

SEQ ID NO: 347438 - DNA, 15 bp, Homo sapiens
actgattacctgaaa

SEQ ID NO: 347439 - DNA, 15 bp, Homo sapiens
tactgattacctgaa

SEQ ID NO: 347440 - DNA, 15 bp, Homo sapiens
atactgattacctga

SEQ ID NO: 347441 - DNA, 15 bp, Homo sapiens
gatactgattacctg

SEQ ID NO: 347442 - DNA, 15 bp, Homo sapiens
agatactgattacct

SEQ ID NO: 347443 - DNA, 15 bp, Homo sapiens
cagatactgattacc

SEQ ID NO: 347444 - DNA, 15 bp, Homo sapiens
acagatactgattac

SEQ ID NO: 347445 - DNA, 15 bp, Homo sapiens
aacagatactgatta

SEQ ID NO: 347446 - DNA, 15 bp, Homo sapiens
aaacagatactgatt

SEQ ID NO: 347447 - DNA, 15 bp, Homo sapiens
aaaacagatactgat

SEQ ID NO: 347448 - DNA, 15 bp, Homo sapiens
aaaaacagatactga

SEQ ID NO: 347449 - DNA, 15 bp, Homo sapiens
caaaaacagatactg

SEQ ID NO: 347450 - DNA, 15 bp, Homo sapiens
gcaaaaacagatact

SEQ ID NO: 347451 - DNA, 15 bp, Homo sapiens
ggcaaaaacagatac

SEQ ID NO: 347452 - DNA, 15 bp, Homo sapiens
tggcaaaaacagata

SEQ ID NO: 347453 - DNA, 15 bp, Homo sapiens
gtggcaaaaacagat

SEQ ID NO: 347454 - DNA, 15 bp, Homo sapiens
ggtggcaaaaacaga

SEQ ID NO: 347455 - DNA, 15 bp, Homo sapiens
tggtggcaaaaacag

SEQ ID NO: 347456 - DNA, 15 bp, Homo sapiens
ttggtggcaaaaaca

SEQ ID NO: 347457 - DNA, 15 bp, Homo sapiens
tttggtggcaaaaac

SEQ ID NO: 347458 - DNA, 15 bp, Homo sapiens
atttggtggcaaaaa

SEQ ID NO: 347459 - DNA, 15 bp, Homo sapiens
gatttggtggcaaaa

SEQ ID NO: 347460 - DNA, 15 bp, Homo sapiens
cgatttggtggcaaa

SEQ ID NO: 347461 - DNA, 15 bp, Homo sapiens
acgatttggtggcaa

SEQ ID NO: 347462 - DNA, 15 bp, Homo sapiens
aacgatttggtggca

SEQ ID NO: 347463 - DNA, 15 bp, Homo sapiens
taacgatttggtggc

SEQ ID NO: 347464 - DNA, 15 bp, Homo sapiens
gtaacgatttggtgg

SEQ ID NO: 347465 - DNA, 15 bp, Homo sapiens
tgtaacgatttggtg

SEQ ID NO: 347466 - DNA, 15 bp, Homo sapiens
atgtaacgatttggt

SEQ ID NO: 347467 - DNA, 15 bp, Homo sapiens
aatgtaacgatttgg

SEQ ID NO: 347468 - DNA, 15 bp, Homo sapiens
aaatgtaacgatttg

SEQ ID NO: 347469 - DNA, 15 bp, Homo sapiens
aaaatgtaacgattt

SEQ ID NO: 347470 - DNA, 15 bp, Homo sapiens
gaaaatgtaacgatt

SEQ ID NO: 347471 - DNA, 15 bp, Homo sapiens
ggaaaatgtaacgat

SEQ ID NO: 347472 - DNA, 15 bp, Homo sapiens
tggaaaatgtaacga

SEQ ID NO: 347473 - DNA, 15 bp, Homo sapiens
atggaaaatgtaacg

SEQ ID NO: 347474 - DNA, 15 bp, Homo sapiens
catggaaaatgtaac

SEQ ID NO: 347475 - DNA, 15 bp, Homo sapiens
ccatggaaaatgtaa

SEQ ID NO: 347476 - DNA, 15 bp, Homo sapiens
gccatggaaaatgta

SEQ ID NO: 347477 - DNA, 15 bp, Homo sapiens
cgccatggaaaatgt

SEQ ID NO: 347478 - DNA, 15 bp, Homo sapiens
gcgccatggaaaatg

SEQ ID NO: 347479 - DNA, 15 bp, Homo sapiens
agcgccatggaaaat

SEQ ID NO: 347480 - DNA, 15 bp, Homo sapiens
cagcgccatggaaaa

SEQ ID NO: 347481 - DNA, 15 bp, Homo sapiens
tcagcgccatggaaa

SEQ ID NO: 347482 - DNA, 15 bp, Homo sapiens
ctcagcgccatggaa

SEQ ID NO: 347483 - DNA, 15 bp, Homo sapiens
cctcagcgccatgga

SEQ ID NO: 347484 - DNA, 15 bp, Homo sapiens
acctcagcgccatgg

SEQ ID NO: 347485 - DNA, 15 bp, Homo sapiens
tacctcagcgccatg

SEQ ID NO: 347486 - DNA, 15 bp, Homo sapiens
atacctcagcgccat

SEQ ID NO: 347487 - DNA, 15 bp, Homo sapiens
tatacctcagcgcca

SEQ ID NO: 347488 - DNA, 15 bp, Homo sapiens
atatacctcagcgcc

SEQ ID NO: 347489 - DNA, 15 bp, Homo sapiens
aatatacctcagcgc

SEQ ID NO: 347490 - DNA, 15 bp, Homo sapiens
gaatatacctcagcg

SEQ ID NO: 347491 - DNA, 15 bp, Homo sapiens
tgaatatacctcagc

SEQ ID NO: 347492 - DNA, 15 bp, Homo sapiens
ctgaatatacctcag

SEQ ID NO: 347493 - DNA, 15 bp, Homo sapiens
tctgaatatacctca

SEQ ID NO: 347494 - DNA, 15 bp, Homo sapiens
gtctgaatatacctc

SEQ ID NO: 347495 - DNA, 15 bp, Homo sapiens
agtctgaatatacct

SEQ ID NO: 347496 - DNA, 15 bp, Homo sapiens
gagtctgaatatacc

SEQ ID NO: 347497 - DNA, 15 bp, Homo sapiens
agagtctgaatatac

SEQ ID NO: 347498 - DNA, 15 bp, Homo sapiens
cagagtctgaatata

SEQ ID NO: 347499 - DNA, 15 bp, Homo sapiens
tcagagtctgaatat

SEQ ID NO: 347500 - DNA, 15 bp, Homo sapiens
ttcagagtctgaata

SEQ ID NO: 347501 - DNA, 15 bp, Homo sapiens
cttcagagtctgaat

SEQ ID NO: 347502 - DNA, 15 bp, Homo sapiens
tcttcagagtctgaa

SEQ ID NO: 347503 - DNA, 15 bp, Homo sapiens
atcttcagagtctga

SEQ ID NO: 347504 - DNA, 15 bp, Homo sapiens
catcttcagagtctg

SEQ ID NO: 347505 - DNA, 15 bp, Homo sapiens
tcatcttcagagtct

SEQ ID NO: 347506 - DNA, 15 bp, Homo sapiens
gtcatcttcagagtc

SEQ ID NO: 347507 - DNA, 15 bp, Homo sapiens
cgtcatcttcagagt

SEQ ID NO: 347508 - DNA, 15 bp, Homo sapiens
acgtcatcttcagag

SEQ ID NO: 347509 - DNA, 15 bp, Homo sapiens
gacgtcatcttcaga

SEQ ID NO: 347510 - DNA, 15 bp, Homo sapiens
agacgtcatcttcag

SEQ ID NO: 347511 - DNA, 15 bp, Homo sapiens
aagacgtcatcttca

SEQ ID NO: 347512 - DNA, 15 bp, Homo sapiens
taagacgtcatcttc

SEQ ID NO: 347513 - DNA, 15 bp, Homo sapiens
ataagacgtcatctt

SEQ ID NO: 347514 - DNA, 15 bp, Homo sapiens
gataagacgtcatct

SEQ ID NO: 347515 - DNA, 15 bp, Homo sapiens
ggataagacgtcatc

SEQ ID NO: 347516 - DNA, 15 bp, Homo sapiens
aggataagacgtcat

SEQ ID NO: 347517 - DNA, 15 bp, Homo sapiens
gaggataagacgtca

SEQ ID NO: 347518 - DNA, 15 bp, Homo sapiens
agaggataagacgtc

SEQ ID NO: 347519 - DNA, 15 bp, Homo sapiens
tagaggataagacgt

SEQ ID NO: 347520 - DNA, 15 bp, Homo sapiens
ctagaggataagacg

SEQ ID NO: 347521 - DNA, 15 bp, Homo sapiens
actagaggataagac

SEQ ID NO: 347522 - DNA, 15 bp, Homo sapiens
aactagaggataaga

SEQ ID NO: 347523 - DNA, 15 bp, Homo sapiens
gaactagaggataag

SEQ ID NO: 347524 - DNA, 15 bp, Homo sapiens
agaactagaggataa

SEQ ID NO: 347525 - DNA, 15 bp, Homo sapiens
aagaactagaggata

SEQ ID NO: 347526 - DNA, 15 bp, Homo sapiens
caagaactagaggat

SEQ ID NO: 347527 - DNA, 15 bp, Homo sapiens
acaagaactagagga

SEQ ID NO: 347528 - DNA, 15 bp, Homo sapiens
cacaagaactagagg

SEQ ID NO: 347529 - DNA, 15 bp, Homo sapiens
ccacaagaactagag

SEQ ID NO: 347530 - DNA, 15 bp, Homo sapiens
gccacaagaactaga

SEQ ID NO: 347531 - DNA, 15 bp, Homo sapiens
tgccacaagaactag

SEQ ID NO: 347532 - DNA, 15 bp, Homo sapiens
ctgccacaagaacta

SEQ ID NO: 347533 - DNA, 15 bp, Homo sapiens
actgccacaagaact

SEQ ID NO: 347534 - DNA, 15 bp, Homo sapiens
tactgccacaagaac

SEQ ID NO: 347535 - DNA, 15 bp, Homo sapiens
ttactgccacaagaa

SEQ ID NO: 347536 - DNA, 15 bp, Homo sapiens
gttactgccacaaga

SEQ ID NO: 347537 - DNA, 15 bp, Homo sapiens
tgttactgccacaag

SEQ ID NO: 347538 - DNA, 15 bp, Homo sapiens
ctgttactgccacaa

SEQ ID NO: 347539 - DNA, 15 bp, Homo sapiens
actgttactgccaca

SEQ ID NO: 347540 - DNA, 15 bp, Homo sapiens
cactgttactgccac

SEQ ID NO: 347541 - DNA, 15 bp, Homo sapiens
tcactgttactgcca

SEQ ID NO: 347542 - DNA, 15 bp, Homo sapiens
atcactgttactgcc

SEQ ID NO: 347543 - DNA, 15 bp, Homo sapiens
tatcactgttactgc

SEQ ID NO: 347544 - DNA, 15 bp, Homo sapiens
ctatcactgttactg

SEQ ID NO: 347545 - DNA, 15 bp, Homo sapiens
actatcactgttact

SEQ ID NO: 347546 - DNA, 15 bp, Homo sapiens
cactatcactgttac

SEQ ID NO: 347547 - DNA, 15 bp, Homo sapiens
ccactatcactgtta

SEQ ID NO: 347548 - DNA, 15 bp, Homo sapiens
cccactatcactgtt

SEQ ID NO: 347549 - DNA, 15 bp, Homo sapiens
tcccactatcactgt

SEQ ID NO: 347550 - DNA, 15 bp, Homo sapiens
gtcccactatcactg

SEQ ID NO: 347551 - DNA, 15 bp, Homo sapiens
tgtcccactatcact

SEQ ID NO: 347552 - DNA, 15 bp, Homo sapiens
atgtcccactatcac

SEQ ID NO: 347553 - DNA, 15 bp, Homo sapiens
catgtcccactatca

SEQ ID NO: 347554 - DNA, 15 bp, Homo sapiens
gcatgtcccactatc

SEQ ID NO: 347555 - DNA, 15 bp, Homo sapiens
ggcatgtcccactat

SEQ ID NO: 347556 - DNA, 15 bp, Homo sapiens
tggcatgtcccacta

SEQ ID NO: 347557 - DNA, 15 bp, Homo sapiens
ctggcatgtcccact

SEQ ID NO: 347558 - DNA, 15 bp, Homo sapiens
tctggcatgtcccac

SEQ ID NO: 347559 - DNA, 15 bp, Homo sapiens
ctctggcatgtccca

SEQ ID NO: 347560 - DNA, 15 bp, Homo sapiens
actctggcatgtccc

SEQ ID NO: 347561 - DNA, 15 bp, Homo sapiens
gactctggcatgtcc

SEQ ID NO: 347562 - DNA, 15 bp, Homo sapiens
ggactctggcatgtc

SEQ ID NO: 347563 - DNA, 15 bp, Homo sapiens
tggactctggcatgt

SEQ ID NO: 347564 - DNA, 15 bp, Homo sapiens
ttggactctggcatg

SEQ ID NO: 347565 - DNA, 15 bp, Homo sapiens
cttggactctggcat

SEQ ID NO: 347566 - DNA, 15 bp, Homo sapiens
acttggactctggca

SEQ ID NO: 347567 - DNA, 15 bp, Homo sapiens
aacttggactctggc

SEQ ID NO: 347568 - DNA, 15 bp, Homo sapiens
aaacttggactctgg

SEQ ID NO: 347569 - DNA, 15 bp, Homo sapiens
taaacttggactctg

SEQ ID NO: 347570 - DNA, 15 bp, Homo sapiens
ctaaacttggactct

SEQ ID NO: 347571 - DNA, 15 bp, Homo sapiens
tctaaacttggactc

SEQ ID NO: 347572 - DNA, 15 bp, Homo sapiens
ttctaaacttggact

SEQ ID NO: 347573 - DNA, 15 bp, Homo sapiens
cttctaaacttggac

SEQ ID NO: 347574 - DNA, 15 bp, Homo sapiens
tcttctaaacttgga

SEQ ID NO: 347575 - DNA, 15 bp, Homo sapiens
ttcttctaaacttgg

SEQ ID NO: 347576 - DNA, 15 bp, Homo sapiens
gttcttctaaacttg

SEQ ID NO: 347577 - DNA, 15 bp, Homo sapiens
ggttcttctaaactt

SEQ ID NO: 347578 - DNA, 15 bp, Homo sapiens
gggttcttctaaact

SEQ ID NO: 347579 - DNA, 15 bp, Homo sapiens
tgggttcttctaaac

SEQ ID NO: 347580 - DNA, 15 bp, Homo sapiens
atgggttcttctaaa

SEQ ID NO: 347581 - DNA, 15 bp, Homo sapiens
catgggttcttctaa

SEQ ID NO: 347582 - DNA, 15 bp, Homo sapiens
ccatgggttcttcta

SEQ ID NO: 347583 - DNA, 15 bp, Homo sapiens
tccatgggttcttct

SEQ ID NO: 347584 - DNA, 15 bp, Homo sapiens
ctccatgggttcttc

SEQ ID NO: 347585 - DNA, 15 bp, Homo sapiens
cctccatgggttctt

SEQ ID NO: 347586 - DNA, 15 bp, Homo sapiens
tcctccatgggttct

SEQ ID NO: 347587 - DNA, 15 bp, Homo sapiens
atcctccatgggttc

SEQ ID NO: 347588 - DNA, 15 bp, Homo sapiens
catcctccatgggtt

SEQ ID NO: 347589 - DNA, 15 bp, Homo sapiens
tcatcctccatgggt

SEQ ID NO: 347590 - DNA, 15 bp, Homo sapiens
ttcatcctccatggg

SEQ ID NO: 347591 - DNA, 15 bp, Homo sapiens
tttcatcctccatgg

SEQ ID NO: 347592 - DNA, 15 bp, Homo sapiens
ctttcatcctccatg

SEQ ID NO: 347593 - DNA, 15 bp, Homo sapiens
actttcatcctccat

SEQ ID NO: 347594 - DNA, 15 bp, Homo sapiens
cactttcatcctcca

SEQ ID NO: 347595 - DNA, 15 bp, Homo sapiens
tcactttcatcctcc

SEQ ID NO: 347596 - DNA, 15 bp, Homo sapiens
ttcactttcatcctc

SEQ ID NO: 347597 - DNA, 15 bp, Homo sapiens
tttcactttcatcct

SEQ ID NO: 347598 - DNA, 15 bp, Homo sapiens
atttcactttcatcc

SEQ ID NO: 347599 - DNA, 15 bp, Homo sapiens
aatttcactttcatc

SEQ ID NO: 347600 - DNA, 15 bp, Homo sapiens
caatttcactttcat

SEQ ID NO: 347601 - DNA, 15 bp, Homo sapiens
tcaatttcactttca

SEQ ID NO: 347602 - DNA, 15 bp, Homo sapiens
ttcaatttcactttc

SEQ ID NO: 347603 - DNA, 15 bp, Homo sapiens
cttcaatttcacttt

SEQ ID NO: 347604 - DNA, 15 bp, Homo sapiens
tcttcaatttcactt

SEQ ID NO: 347605 - DNA, 15 bp, Homo sapiens
ttcttcaatttcact

SEQ ID NO: 347606 - DNA, 15 bp, Homo sapiens
attcttcaatttcac

SEQ ID NO: 347607 - DNA, 15 bp, Homo sapiens
aattcttcaatttca

SEQ ID NO: 347608 - DNA, 15 bp, Homo sapiens
gaattcttcaatttc

SEQ ID NO: 347609 - DNA, 15 bp, Homo sapiens
agaattcttcaattt

SEQ ID NO: 347610 - DNA, 15 bp, Homo sapiens
tagaattcttcaatt

SEQ ID NO: 347611 - DNA, 15 bp, Homo sapiens
gtagaattcttcaat

SEQ ID NO: 347612 - DNA, 15 bp, Homo sapiens
tgtagaattcttcaa

SEQ ID NO: 347613 - DNA, 15 bp, Homo sapiens
ttgtagaattcttca

SEQ ID NO: 347614 - DNA, 15 bp, Homo sapiens
attgtagaattcttc

SEQ ID NO: 347615 - DNA, 15 bp, Homo sapiens
cattgtagaattctt

SEQ ID NO: 347616 - DNA, 15 bp, Homo sapiens
ccattgtagaattct

SEQ ID NO: 347617 - DNA, 15 bp, Homo sapiens
gccattgtagaattc

SEQ ID NO: 347618 - DNA, 15 bp, Homo sapiens
agccattgtagaatt

SEQ ID NO: 347619 - DNA, 15 bp, Homo sapiens
aagccattgtagaat

SEQ ID NO: 347620 - DNA, 15 bp, Homo sapiens
taagccattgtagaa

SEQ ID NO: 347621 - DNA, 15 bp, Homo sapiens
ctaagccattgtaga

SEQ ID NO: 347622 - DNA, 15 bp, Homo sapiens
tctaagccattgtag

SEQ ID NO: 347623 - DNA, 15 bp, Homo sapiens
ttctaagccattgta

SEQ ID NO: 347624 - DNA, 15 bp, Homo sapiens
cttctaagccattgt

SEQ ID NO: 347625 - DNA, 15 bp, Homo sapiens
tcttctaagccattg

SEQ ID NO: 347626 - DNA, 15 bp, Homo sapiens
atcttctaagccatt

SEQ ID NO: 347627 - DNA, 15 bp, Homo sapiens
catcttctaagccat

SEQ ID NO: 347628 - DNA, 15 bp, Homo sapiens
tcatcttctaagcca

SEQ ID NO: 347629 - DNA, 15 bp, Homo sapiens
ctcatcttctaagcc

SEQ ID NO: 347630 - DNA, 15 bp, Homo sapiens
gctcatcttctaagc

SEQ ID NO: 347631 - DNA, 15 bp, Homo sapiens
ggctcatcttctaag

SEQ ID NO: 347632 - DNA, 15 bp, Homo sapiens
aggctcatcttctaa

SEQ ID NO: 347633 - DNA, 15 bp, Homo sapiens
caggctcatcttcta

SEQ ID NO: 347634 - DNA, 15 bp, Homo sapiens
tcaggctcatcttct

SEQ ID NO: 347635 - DNA, 15 bp, Homo sapiens
atcaggctcatcttc

SEQ ID NO: 347636 - DNA, 15 bp, Homo sapiens
catcaggctcatctt

SEQ ID NO: 347637 - DNA, 15 bp, Homo sapiens
acatcaggctcatct

SEQ ID NO: 347638 - DNA, 15 bp, Homo sapiens
aacatcaggctcatc

SEQ ID NO: 347639 - DNA, 15 bp, Homo sapiens
gaacatcaggctcat

SEQ ID NO: 347640 - DNA, 15 bp, Homo sapiens
ggaacatcaggctca

SEQ ID NO: 347641 - DNA, 15 bp, Homo sapiens
tggaacatcaggctc

SEQ ID NO: 347642 - DNA, 15 bp, Homo sapiens
ctggaacatcaggct

SEQ ID NO: 347643 - DNA, 15 bp, Homo sapiens
tctggaacatcaggc

SEQ ID NO: 347644 - DNA, 15 bp, Homo sapiens
ctctggaacatcagg

SEQ ID NO: 347645 - DNA, 15 bp, Homo sapiens
tctctggaacatcag

SEQ ID NO: 347646 - DNA, 15 bp, Homo sapiens
ctctctggaacatca

SEQ ID NO: 347647 - DNA, 15 bp, Homo sapiens
tctctctggaacatc

SEQ ID NO: 347648 - DNA, 15 bp, Homo sapiens
ctctctctggaacat

SEQ ID NO: 347649 - DNA, 15 bp, Homo sapiens
gctctctctggaaca

SEQ ID NO: 347650 - DNA, 15 bp, Homo sapiens
agctctctctggaac

SEQ ID NO: 347651 - DNA, 15 bp, Homo sapiens
cagctctctctggaa

SEQ ID NO: 347652 - DNA, 15 bp, Homo sapiens
ccagctctctctgga

SEQ ID NO: 347653 - DNA, 15 bp, Homo sapiens
tccagctctctctgg

SEQ ID NO: 347654 - DNA, 15 bp, Homo sapiens
ctccagctctctctg

SEQ ID NO: 347655 - DNA, 15 bp, Homo sapiens
cctccagctctctct

SEQ ID NO: 347656 - DNA, 15 bp, Homo sapiens
tcctccagctctctc

SEQ ID NO: 347657 - DNA, 15 bp, Homo sapiens
ctcctccagctctct

SEQ ID NO: 347658 - DNA, 15 bp, Homo sapiens
gctcctccagctctc

SEQ ID NO: 347659 - DNA, 15 bp, Homo sapiens
agctcctccagctct

SEQ ID NO: 347660 - DNA, 15 bp, Homo sapiens
cagctcctccagctc

SEQ ID NO: 347661 - DNA, 15 bp, Homo sapiens
ccagctcctccagct

SEQ ID NO: 347662 - DNA, 15 bp, Homo sapiens
tccagctcctccagc

SEQ ID NO: 347663 - DNA, 15 bp, Homo sapiens
atccagctcctccag

SEQ ID NO: 347664 - DNA, 15 bp, Homo sapiens
aatccagctcctcca

SEQ ID NO: 347665 - DNA, 15 bp, Homo sapiens
aaatccagctcctcc

SEQ ID NO: 347666 - DNA, 15 bp, Homo sapiens
caaatccagctcctc

SEQ ID NO: 347667 - DNA, 15 bp, Homo sapiens
ccaaatccagctcct

SEQ ID NO: 347668 - DNA, 15 bp, Homo sapiens
cccaaatccagctcc

SEQ ID NO: 347669 - DNA, 15 bp, Homo sapiens
tcccaaatccagctc

SEQ ID NO: 347670 - DNA, 15 bp, Homo sapiens
gtcccaaatccagct

SEQ ID NO: 347671 - DNA, 15 bp, Homo sapiens
agtcccaaatccagc

SEQ ID NO: 347672 - DNA, 15 bp, Homo sapiens
cagtcccaaatccag

SEQ ID NO: 347673 - DNA, 15 bp, Homo sapiens
tcagtcccaaatcca

SEQ ID NO: 347674 - DNA, 15 bp, Homo sapiens
atcagtcccaaatcc

SEQ ID NO: 347675 - DNA, 15 bp, Homo sapiens
catcagtcccaaatc

SEQ ID NO: 347676 - DNA, 15 bp, Homo sapiens
ccatcagtcccaaat

SEQ ID NO: 347677 - DNA, 15 bp, Homo sapiens
tccatcagtcccaaa

SEQ ID NO: 347678 - DNA, 15 bp, Homo sapiens
ctccatcagtcccaa

SEQ ID NO: 347679 - DNA, 15 bp, Homo sapiens
tctccatcagtccca

SEQ ID NO: 347680 - DNA, 15 bp, Homo sapiens
atctccatcagtccc

SEQ ID NO: 347681 - DNA, 15 bp, Homo sapiens
catctccatcagtcc

SEQ ID NO: 347682 - DNA, 15 bp, Homo sapiens
tcatctccatcagtc

SEQ ID NO: 347683 - DNA, 15 bp, Homo sapiens
atcatctccatcagt

SEQ ID NO: 347684 - DNA, 15 bp, Homo sapiens
gatcatctccatcag

SEQ ID NO: 347685 - DNA, 15 bp, Homo sapiens
tgatcatctccatca

SEQ ID NO: 347686 - DNA, 15 bp, Homo sapiens
ttgatcatctccatc

SEQ ID NO: 347687 - DNA, 15 bp, Homo sapiens
cttgatcatctccat

SEQ ID NO: 347688 - DNA, 15 bp, Homo sapiens
tcttgatcatctcca

SEQ ID NO: 347689 - DNA, 15 bp, Homo sapiens
ctcttgatcatctcc

SEQ ID NO: 347690 - DNA, 15 bp, Homo sapiens
cctcttgatcatctc

SEQ ID NO: 347691 - DNA, 15 bp, Homo sapiens
gcctcttgatcatct

SEQ ID NO: 347692 - DNA, 15 bp, Homo sapiens
tgcctcttgatcatc

SEQ ID NO: 347693 - DNA, 15 bp, Homo sapiens
ttgcctcttgatcat

SEQ ID NO: 347694 - DNA, 15 bp, Homo sapiens
attgcctcttgatca

SEQ ID NO: 347695 - DNA, 15 bp, Homo sapiens
aattgcctcttgatc

SEQ ID NO: 347696 - DNA, 15 bp, Homo sapiens
taattgcctcttgat

SEQ ID NO: 347697 - DNA, 15 bp, Homo sapiens
ttaattgcctcttga

SEQ ID NO: 347698 - DNA, 15 bp, Homo sapiens
attaattgcctcttg

SEQ ID NO: 347699 - DNA, 15 bp, Homo sapiens
cattaattgcctctt

SEQ ID NO: 347700 - DNA, 15 bp, Homo sapiens
tcattaattgcctct

SEQ ID NO: 347701 - DNA, 15 bp, Homo sapiens
ttcattaattgcctc

SEQ ID NO: 347702 - DNA, 15 bp, Homo sapiens
cttcattaattgcct

SEQ ID NO: 347703 - DNA, 15 bp, Homo sapiens
gcttcattaattgcc

SEQ ID NO: 347704 - DNA, 15 bp, Homo sapiens
agcttcattaattgc

SEQ ID NO: 347705 - DNA, 15 bp, Homo sapiens
tagcttcattaattg

SEQ ID NO: 347706 - DNA, 15 bp, Homo sapiens
atagcttcattaatt

SEQ ID NO: 347707 - DNA, 15 bp, Homo sapiens
tatagcttcattaat

SEQ ID NO: 347708 - DNA, 15 bp, Homo sapiens
atatagcttcattaa

SEQ ID NO: 347709 - DNA, 15 bp, Homo sapiens
gatatagcttcatta

SEQ ID NO: 347710 - DNA, 15 bp, Homo sapiens
agatatagcttcatt

SEQ ID NO: 347711 - DNA, 15 bp, Homo sapiens
cagatatagcttcat

SEQ ID NO: 347712 - DNA, 15 bp, Homo sapiens
acagatatagcttca

SEQ ID NO: 347713 - DNA, 15 bp, Homo sapiens
cacagatatagcttc

SEQ ID NO: 347714 - DNA, 15 bp, Homo sapiens
tcacagatatagctt

SEQ ID NO: 347715 - DNA, 15 bp, Homo sapiens
ttcacagatatagct

SEQ ID NO: 347716 - DNA, 15 bp, Homo sapiens
tttcacagatatagc

SEQ ID NO: 347717 - DNA, 15 bp, Homo sapiens
gtttcacagatatag

SEQ ID NO: 347718 - DNA, 15 bp, Homo sapiens
tgtttcacagatata

SEQ ID NO: 347719 - DNA, 15 bp, Homo sapiens
ctgtttcacagatat

SEQ ID NO: 347720 - DNA, 15 bp, Homo sapiens
cctgtttcacagata

SEQ ID NO: 347721 - DNA, 15 bp, Homo sapiens
tcctgtttcacagat

SEQ ID NO: 347722 - DNA, 15 bp, Homo sapiens
ttcctgtttcacaga

SEQ ID NO: 347723 - DNA, 15 bp, Homo sapiens
cttcctgtttcacag

SEQ ID NO: 347724 - DNA, 15 bp, Homo sapiens
acttcctgtttcaca

SEQ ID NO: 347725 - DNA, 15 bp, Homo sapiens
tacttcctgtttcac

SEQ ID NO: 347726 - DNA, 15 bp, Homo sapiens
ttacttcctgtttca

SEQ ID NO: 347727 - DNA, 15 bp, Homo sapiens
gttacttcctgtttc

SEQ ID NO: 347728 - DNA, 15 bp, Homo sapiens
tgttacttcctgttt

SEQ ID NO: 347729 - DNA, 15 bp, Homo sapiens
ctgttacttcctgtt

SEQ ID NO: 347730 - DNA, 15 bp, Homo sapiens
tctgttacttcctgt

SEQ ID NO: 347731 - DNA, 15 bp, Homo sapiens
gtctgttacttcctg

SEQ ID NO: 347732 - DNA, 15 bp, Homo sapiens
tgtctgttacttcct

SEQ ID NO: 347733 - DNA, 15 bp, Homo sapiens
atgtctgttacttcc

SEQ ID NO: 347734 - DNA, 15 bp, Homo sapiens
catgtctgttacttc

SEQ ID NO: 347735 - DNA, 15 bp, Homo sapiens
tcatgtctgttactt

SEQ ID NO: 347736 - DNA, 15 bp, Homo sapiens
ttcatgtctgttact

SEQ ID NO: 347737 - DNA, 15 bp, Homo sapiens
gttcatgtctgttac

SEQ ID NO: 347738 - DNA, 15 bp, Homo sapiens
agttcatgtctgtta

SEQ ID NO: 347739 - DNA, 15 bp, Homo sapiens
tagttcatgtctgtt

SEQ ID NO: 347740 - DNA, 15 bp, Homo sapiens
atagttcatgtctgt

SEQ ID NO: 347741 - DNA, 15 bp, Homo sapiens
gatagttcatgtctg

SEQ ID NO: 347742 - DNA, 15 bp, Homo sapiens
ggatagttcatgtct

SEQ ID NO: 347743 - DNA, 15 bp, Homo sapiens
tggatagttcatgtc

SEQ ID NO: 347744 - DNA, 15 bp, Homo sapiens
atggatagttcatgt

SEQ ID NO: 347745 - DNA, 15 bp, Homo sapiens
gatggatagttcatg

SEQ ID NO: 347746 - DNA, 15 bp, Homo sapiens
tgatggatagttcat

SEQ ID NO: 347747 - DNA, 15 bp, Homo sapiens
ttgatggatagttca

SEQ ID NO: 347748 - DNA, 15 bp, Homo sapiens
tttgatggatagttc

SEQ ID NO: 347749 - DNA, 15 bp, Homo sapiens
gtttgatggatagtt

SEQ ID NO: 347750 - DNA, 15 bp, Homo sapiens
tgtttgatggatagt

SEQ ID NO: 347751 - DNA, 15 bp, Homo sapiens
ttgtttgatggatag

SEQ ID NO: 347752 - DNA, 15 bp, Homo sapiens
tttgtttgatggata

SEQ ID NO: 347753 - DNA, 15 bp, Homo sapiens
atttgtttgatggat

SEQ ID NO: 347754 - DNA, 15 bp, Homo sapiens
gatttgtttgatgga

SEQ ID NO: 347755 - DNA, 15 bp, Homo sapiens
tgatttgtttgatgg

SEQ ID NO: 347756 - DNA, 15 bp, Homo sapiens
atgatttgtttgatg

SEQ ID NO: 347757 - DNA, 15 bp, Homo sapiens
tatgatttgtttgat

SEQ ID NO: 347758 - DNA, 15 bp, Homo sapiens
ctatgatttgtttga

SEQ ID NO: 347759 - DNA, 15 bp, Homo sapiens
actatgatttgtttg

SEQ ID NO: 347760 - DNA, 15 bp, Homo sapiens
cactatgatttgttt

SEQ ID NO: 347761 - DNA, 15 bp, Homo sapiens
acactatgatttgtt

SEQ ID NO: 347762 - DNA, 15 bp, Homo sapiens
tacactatgatttgt

SEQ ID NO: 347763 - DNA, 15 bp, Homo sapiens
ttacactatgatttg

SEQ ID NO: 347764 - DNA, 15 bp, Homo sapiens
attacactatgattt

SEQ ID NO: 347765 - DNA, 15 bp, Homo sapiens
tattacactatgatt

SEQ ID NO: 347766 - DNA, 15 bp, Homo sapiens
ttattacactatgat

SEQ ID NO: 347767 - DNA, 15 bp, Homo sapiens
attattacactatga

SEQ ID NO: 347768 - DNA, 15 bp, Homo sapiens
aattattacactatg

SEQ ID NO: 347769 - DNA, 15 bp, Homo sapiens
caattattacactat

SEQ ID NO: 347770 - DNA, 15 bp, Homo sapiens
acaattattacacta

SEQ ID NO: 347771 - DNA, 15 bp, Homo sapiens
cacaattattacact

SEQ ID NO: 347772 - DNA, 15 bp, Homo sapiens
gcacaattattacac

SEQ ID NO: 347773 - DNA, 15 bp, Homo sapiens
tgcacaattattaca

SEQ ID NO: 347774 - DNA, 15 bp, Homo sapiens
ctgcacaattattac

SEQ ID NO: 347775 - DNA, 15 bp, Homo sapiens
cctgcacaattatta

SEQ ID NO: 347776 - DNA, 15 bp, Homo sapiens
acctgcacaattatt

SEQ ID NO: 347777 - DNA, 15 bp, Homo sapiens
tacctgcacaattat

SEQ ID NO: 347778 - DNA, 15 bp, Homo sapiens
gtacctgcacaatta

SEQ ID NO: 347779 - DNA, 15 bp, Homo sapiens
tgtacctgcacaatt

SEQ ID NO: 347780 - DNA, 15 bp, Homo sapiens
ctgtacctgcacaat

SEQ ID NO: 347781 - DNA, 15 bp, Homo sapiens
cctgtacctgcacaa

SEQ ID NO: 347782 - DNA, 15 bp, Homo sapiens
tcctgtacctgcaca

SEQ ID NO: 347783 - DNA, 15 bp, Homo sapiens
ttcctgtacctgcac

SEQ ID NO: 347784 - DNA, 15 bp, Homo sapiens
attcctgtacctgca

SEQ ID NO: 347785 - DNA, 15 bp, Homo sapiens
aattcctgtacctgc

SEQ ID NO: 347786 - DNA, 15 bp, Homo sapiens
caattcctgtacctg

SEQ ID NO: 347787 - DNA, 15 bp, Homo sapiens
acaattcctgtacct

SEQ ID NO: 347788 - DNA, 15 bp, Homo sapiens
aacaattcctgtacc

SEQ ID NO: 347789 - DNA, 15 bp, Homo sapiens
gaacaattcctgtac

SEQ ID NO: 347790 - DNA, 15 bp, Homo sapiens
ggaacaattcctgta

SEQ ID NO: 347791 - DNA, 15 bp, Homo sapiens
tggaacaattcctgt

SEQ ID NO: 347792 - DNA, 15 bp, Homo sapiens
gtggaacaattcctg

SEQ ID NO: 347793 - DNA, 15 bp, Homo sapiens
ggtggaacaattcct

SEQ ID NO: 347794 - DNA, 15 bp, Homo sapiens
tggtggaacaattcc

SEQ ID NO: 347795 - DNA, 15 bp, Homo sapiens
ctggtggaacaattc

SEQ ID NO: 347796 - DNA, 15 bp, Homo sapiens
gctggtggaacaatt

SEQ ID NO: 347797 - DNA, 15 bp, Homo sapiens
tgctggtggaacaat

SEQ ID NO: 347798 - DNA, 15 bp, Homo sapiens
atgctggtggaacaa

SEQ ID NO: 347799 - DNA, 15 bp, Homo sapiens
aatgctggtggaaca

SEQ ID NO: 347800 - DNA, 15 bp, Homo sapiens
taatgctggtggaac

SEQ ID NO: 347801 - DNA, 15 bp, Homo sapiens
ctaatgctggtggaa

SEQ ID NO: 347802 - DNA, 15 bp, Homo sapiens
cctaatgctggtgga

SEQ ID NO: 347803 - DNA, 15 bp, Homo sapiens
tcctaatgctggtgg

SEQ ID NO: 347804 - DNA, 15 bp, Homo sapiens
ttcctaatgctggtg

SEQ ID NO: 347805 - DNA, 15 bp, Homo sapiens
gttcctaatgctggt

SEQ ID NO: 347806 - DNA, 15 bp, Homo sapiens
agttcctaatgctgg

SEQ ID NO: 347807 - DNA, 15 bp, Homo sapiens
aagttcctaatgctg

SEQ ID NO: 347808 - DNA, 15 bp, Homo sapiens
aaagttcctaatgct

SEQ ID NO: 347809 - DNA, 15 bp, Homo sapiens
taaagttcctaatgc

SEQ ID NO: 347810 - DNA, 15 bp, Homo sapiens
ctaaagttcctaatg

SEQ ID NO: 347811 - DNA, 15 bp, Homo sapiens
gctaaagttcctaat

SEQ ID NO: 347812 - DNA, 15 bp, Homo sapiens
tgctaaagttcctaa

SEQ ID NO: 347813 - DNA, 15 bp, Homo sapiens
atgctaaagttccta

SEQ ID NO: 347814 - DNA, 15 bp, Homo sapiens
catgctaaagttcct

SEQ ID NO: 347815 - DNA, 15 bp, Homo sapiens
acatgctaaagttcc

SEQ ID NO: 347816 - DNA, 15 bp, Homo sapiens
gacatgctaaagttc

SEQ ID NO: 347817 - DNA, 15 bp, Homo sapiens
tgacatgctaaagtt

SEQ ID NO: 347818 - DNA, 15 bp, Homo sapiens
ttgacatgctaaagt

SEQ ID NO: 347819 - DNA, 15 bp, Homo sapiens
tttgacatgctaaag

SEQ ID NO: 347820 - DNA, 15 bp, Homo sapiens
ttttgacatgctaaa

SEQ ID NO: 347821 - DNA, 15 bp, Homo sapiens
attttgacatgctaa

SEQ ID NO: 347822 - DNA, 15 bp, Homo sapiens
cattttgacatgcta

SEQ ID NO: 347823 - DNA, 15 bp, Homo sapiens
tcattttgacatgct

SEQ ID NO: 347824 - DNA, 15 bp, Homo sapiens
ttcattttgacatgc

SEQ ID NO: 347825 - DNA, 15 bp, Homo sapiens
attcattttgacatg

SEQ ID NO: 347826 - DNA, 15 bp, Homo sapiens
cattcattttgacat

SEQ ID NO: 347827 - DNA, 15 bp, Homo sapiens
acattcattttgaca

SEQ ID NO: 347828 - DNA, 15 bp, Homo sapiens
aacattcattttgac

SEQ ID NO: 347829 - DNA, 15 bp, Homo sapiens
aaacattcattttga

SEQ ID NO: 347830 - DNA, 15 bp, Homo sapiens
taaacattcattttg

SEQ ID NO: 347831 - DNA, 15 bp, Homo sapiens
gtaaacattcatttt

SEQ ID NO: 347832 - DNA, 15 bp, Homo sapiens
agtaaacattcattt

SEQ ID NO: 347833 - DNA, 15 bp, Homo sapiens
aagtaaacattcatt

SEQ ID NO: 347834 - DNA, 15 bp, Homo sapiens
caagtaaacattcat

SEQ ID NO: 347835 - DNA, 15 bp, Homo sapiens
acaagtaaacattca

SEQ ID NO: 347836 - DNA, 15 bp, Homo sapiens
cacaagtaaacattc

SEQ ID NO: 347837 - DNA, 15 bp, Homo sapiens
tcacaagtaaacatt

SEQ ID NO: 347838 - DNA, 15 bp, Homo sapiens
ttcacaagtaaacat

SEQ ID NO: 347839 - DNA, 15 bp, Homo sapiens
gttcacaagtaaaca

SEQ ID NO: 347840 - DNA, 15 bp, Homo sapiens
agttcacaagtaaac

SEQ ID NO: 347841 - DNA, 15 bp, Homo sapiens
gagttcacaagtaaa

SEQ ID NO: 347842 - DNA, 15 bp, Homo sapiens
cgagttcacaagtaa

SEQ ID NO: 347843 - DNA, 15 bp, Homo sapiens
tcgagttcacaagta

SEQ ID NO: 347844 - DNA, 15 bp, Homo sapiens
atcgagttcacaagt

SEQ ID NO: 347845 - DNA, 15 bp, Homo sapiens
tatcgagttcacaag

SEQ ID NO: 347846 - DNA, 15 bp, Homo sapiens
ctatcgagttcacaa

SEQ ID NO: 347847 - DNA, 15 bp, Homo sapiens
tctatcgagttcaca

SEQ ID NO: 347848 - DNA, 15 bp, Homo sapiens
ctctatcgagttcac

SEQ ID NO: 347849 - DNA, 15 bp, Homo sapiens
gctctatcgagttca

SEQ ID NO: 347850 - DNA, 15 bp, Homo sapiens
tgctctatcgagttc

SEQ ID NO: 347851 - DNA, 15 bp, Homo sapiens
ttgctctatcgagtt

SEQ ID NO: 347852 - DNA, 15 bp, Homo sapiens
cttgctctatcgagt

SEQ ID NO: 347853 - DNA, 15 bp, Homo sapiens
ccttgctctatcgag

SEQ ID NO: 347854 - DNA, 15 bp, Homo sapiens
tccttgctctatcga

SEQ ID NO: 347855 - DNA, 15 bp, Homo sapiens
ttccttgctctatcg

SEQ ID NO: 347856 - DNA, 15 bp, Homo sapiens
tttccttgctctatc

SEQ ID NO: 347857 - DNA, 15 bp, Homo sapiens
gtttccttgctctat

SEQ ID NO: 347858 - DNA, 15 bp, Homo sapiens
ggtttccttgctcta

SEQ ID NO: 347859 - DNA, 15 bp, Homo sapiens
tggtttccttgctct

SEQ ID NO: 347860 - DNA, 15 bp, Homo sapiens
ctggtttccttgctc

SEQ ID NO: 347861 - DNA, 15 bp, Homo sapiens
tctggtttccttgct

SEQ ID NO: 347862 - DNA, 15 bp, Homo sapiens
ttctggtttccttgc

SEQ ID NO: 347863 - DNA, 15 bp, Homo sapiens
tttctggtttccttg

SEQ ID NO: 347864 - DNA, 15 bp, Homo sapiens
ctttctggtttcctt

SEQ ID NO: 347865 - DNA, 15 bp, Homo sapiens
cctttctggtttcct

SEQ ID NO: 347866 - DNA, 15 bp, Homo sapiens
acctttctggtttcc

SEQ ID NO: 347867 - DNA, 15 bp, Homo sapiens
cacctttctggtttc

SEQ ID NO: 347868 - DNA, 15 bp, Homo sapiens
acacctttctggttt

SEQ ID NO: 347869 - DNA, 15 bp, Homo sapiens
tacacctttctggtt

SEQ ID NO: 347870 - DNA, 15 bp, Homo sapiens
ttacacctttctggt

SEQ ID NO: 347871 - DNA, 15 bp, Homo sapiens
attacacctttctgg

SEQ ID NO: 347872 - DNA, 15 bp, Homo sapiens
tattacacctttctg

SEQ ID NO: 347873 - DNA, 15 bp, Homo sapiens
atattacacctttct

SEQ ID NO: 347874 - DNA, 15 bp, Homo sapiens
aatattacacctttc

SEQ ID NO: 347875 - DNA, 15 bp, Homo sapiens
aaatattacaccttt

SEQ ID NO: 347876 - DNA, 15 bp, Homo sapiens
taaatattacacctt

SEQ ID NO: 347877 - DNA, 15 bp, Homo sapiens
ataaatattacacct

SEQ ID NO: 347878 - DNA, 15 bp, Homo sapiens
tataaatattacacc

SEQ ID NO: 347879 - DNA, 15 bp, Homo sapiens
ctataaatattacac

SEQ ID NO: 347880 - DNA, 15 bp, Homo sapiens
cctataaatattaca

SEQ ID NO: 347881 - DNA, 15 bp, Homo sapiens
acctataaatattac

SEQ ID NO: 347882 - DNA, 15 bp, Homo sapiens
aacctataaatatta

SEQ ID NO: 347883 - DNA, 15 bp, Homo sapiens
caacctataaatatt

SEQ ID NO: 347884 - DNA, 15 bp, Homo sapiens
ccaacctataaatat

SEQ ID NO: 347885 - DNA, 15 bp, Homo sapiens
accaacctataaata

SEQ ID NO: 347886 - DNA, 15 bp, Homo sapiens
taccaacctataaat

SEQ ID NO: 347887 - DNA, 15 bp, Homo sapiens
ttaccaacctataaa

SEQ ID NO: 347888 - DNA, 15 bp, Homo sapiens
tttaccaacctataa

SEQ ID NO: 347889 - DNA, 15 bp, Homo sapiens
ttttaccaacctata

SEQ ID NO: 347890 - DNA, 15 bp, Homo sapiens
attttaccaacctat

SEQ ID NO: 347891 - DNA, 15 bp, Homo sapiens
tattttaccaaccta

SEQ ID NO: 347892 - DNA, 15 bp, Homo sapiens
ctattttaccaacct

SEQ ID NO: 347893 - DNA, 15 bp, Homo sapiens
tctattttaccaacc

SEQ ID NO: 347894 - DNA, 15 bp, Homo sapiens
atctattttaccaac

SEQ ID NO: 347895 - DNA, 15 bp, Homo sapiens
aatctattttaccaa

SEQ ID NO: 347896 - DNA, 15 bp, Homo sapiens
caatctattttacca

SEQ ID NO: 347897 - DNA, 15 bp, Homo sapiens
acaatctattttacc

SEQ ID NO: 347898 - DNA, 15 bp, Homo sapiens
aacaatctattttac

SEQ ID NO: 347899 - DNA, 15 bp, Homo sapiens
aaacaatctatttta

SEQ ID NO: 347900 - DNA, 15 bp, Homo sapiens
aaaacaatctatttt

SEQ ID NO: 347901 - DNA, 15 bp, Homo sapiens
aaaaacaatctattt

SEQ ID NO: 347902 - DNA, 15 bp, Homo sapiens
gaaaaacaatctatt

SEQ ID NO: 347903 - DNA, 15 bp, Homo sapiens
tgaaaaacaatctat

SEQ ID NO: 347904 - DNA, 15 bp, Homo sapiens
atgaaaaacaatcta

SEQ ID NO: 347905 - DNA, 15 bp, Homo sapiens
catgaaaaacaatct

SEQ ID NO: 347906 - DNA, 15 bp, Homo sapiens
ccatgaaaaacaatc

SEQ ID NO: 347907 - DNA, 15 bp, Homo sapiens
tccatgaaaaacaat

SEQ ID NO: 347908 - DNA, 15 bp, Homo sapiens
atccatgaaaaacaa

SEQ ID NO: 347909 - DNA, 15 bp, Homo sapiens
tatccatgaaaaaca

SEQ ID NO: 347910 - DNA, 15 bp, Homo sapiens
ttatccatgaaaaac

SEQ ID NO: 347911 - DNA, 15 bp, Homo sapiens
attatccatgaaaaa

SEQ ID NO: 347912 - DNA, 15 bp, Homo sapiens
aattatccatgaaaa

SEQ ID NO: 347913 - DNA, 15 bp, Homo sapiens
aaattatccatgaaa

SEQ ID NO: 347914 - DNA, 15 bp, Homo sapiens
aaaattatccatgaa

SEQ ID NO: 347915 - DNA, 15 bp, Homo sapiens
aaaaattatccatga

SEQ ID NO: 347916 - DNA, 15 bp, Homo sapiens
taaaaattatccatg

SEQ ID NO: 347917 - DNA, 15 bp, Homo sapiens
ttaaaaattatccat

SEQ ID NO: 347918 - DNA, 15 bp, Homo sapiens
gttaaaaattatcca

SEQ ID NO: 347919 - DNA, 15 bp, Homo sapiens
agttaaaaattatcc

SEQ ID NO: 347920 - DNA, 15 bp, Homo sapiens
aagttaaaaattatc

SEQ ID NO: 347921 - DNA, 15 bp, Homo sapiens
gaagttaaaaattat

SEQ ID NO: 347922 - DNA, 15 bp, Homo sapiens
tgaagttaaaaatta

SEQ ID NO: 347923 - DNA, 15 bp, Homo sapiens
atgaagttaaaaatt

SEQ ID NO: 347924 - DNA, 15 bp, Homo sapiens
aatgaagttaaaaat

SEQ ID NO: 347925 - DNA, 15 bp, Homo sapiens
taatgaagttaaaaa

SEQ ID NO: 347926 - DNA, 15 bp, Homo sapiens
ataatgaagttaaaa

SEQ ID NO: 347927 - DNA, 15 bp, Homo sapiens
aataatgaagttaaa

SEQ ID NO: 347928 - DNA, 15 bp, Homo sapiens
aaataatgaagttaa

SEQ ID NO: 347929 - DNA, 15 bp, Homo sapiens
gaaataatgaagtta

SEQ ID NO: 347930 - DNA, 15 bp, Homo sapiens
agaaataatgaagtt

SEQ ID NO: 347931 - DNA, 15 bp, Homo sapiens
cagaaataatgaagt

SEQ ID NO: 347932 - DNA, 15 bp, Homo sapiens
acagaaataatgaag

SEQ ID NO: 347933 - DNA, 15 bp, Homo sapiens
tacagaaataatgaa

SEQ ID NO: 347934 - DNA, 15 bp, Homo sapiens
gtacagaaataatga

SEQ ID NO: 347935 - DNA, 15 bp, Homo sapiens
agtacagaaataatg

SEQ ID NO: 347936 - DNA, 15 bp, Homo sapiens
aagtacagaaataat

SEQ ID NO: 347937 - DNA, 15 bp, Homo sapiens
caagtacagaaataa

SEQ ID NO: 347938 - DNA, 15 bp, Homo sapiens
acaagtacagaaata

SEQ ID NO: 347939 - DNA, 15 bp, Homo sapiens
tacaagtacagaaat

SEQ ID NO: 347940 - DNA, 15 bp, Homo sapiens
gtacaagtacagaaa

SEQ ID NO: 347941 - DNA, 15 bp, Homo sapiens
tgtacaagtacagaa

SEQ ID NO: 347942 - DNA, 15 bp, Homo sapiens
ttgtacaagtacaga

SEQ ID NO: 347943 - DNA, 15 bp, Homo sapiens
tttgtacaagtacag

SEQ ID NO: 347944 - DNA, 15 bp, Homo sapiens
gtttgtacaagtaca

SEQ ID NO: 347945 - DNA, 15 bp, Homo sapiens
agtttgtacaagtac

SEQ ID NO: 347946 - DNA, 15 bp, Homo sapiens
gagtttgtacaagta

SEQ ID NO: 347947 - DNA, 15 bp, Homo sapiens
tgagtttgtacaagt

SEQ ID NO: 347948 - DNA, 15 bp, Homo sapiens
ttgagtttgtacaag

SEQ ID NO: 347949 - DNA, 15 bp, Homo sapiens
gttgagtttgtacaa

SEQ ID NO: 347950 - DNA, 15 bp, Homo sapiens
tgttgagtttgtaca

SEQ ID NO: 347951 - DNA, 15 bp, Homo sapiens
gtgttgagtttgtac

SEQ ID NO: 347952 - DNA, 15 bp, Homo sapiens
agtgttgagtttgta

SEQ ID NO: 347953 - DNA, 15 bp, Homo sapiens
tagtgttgagtttgt

SEQ ID NO: 347954 - DNA, 15 bp, Homo sapiens
ttagtgttgagtttg

SEQ ID NO: 347955 - DNA, 15 bp, Homo sapiens
gttagtgttgagttt

SEQ ID NO: 347956 - DNA, 15 bp, Homo sapiens
agttagtgttgagtt

SEQ ID NO: 347957 - DNA, 15 bp, Homo sapiens
aagttagtgttgagt

SEQ ID NO: 347958 - DNA, 15 bp, Homo sapiens
aaagttagtgttgag

SEQ ID NO: 347959 - DNA, 15 bp, Homo sapiens
aaaagttagtgttga

SEQ ID NO: 347960 - DNA, 15 bp, Homo sapiens
aaaaagttagtgttg

SEQ ID NO: 347961 - DNA, 15 bp, Homo sapiens
aaaaaagttagtgtt

SEQ ID NO: 347962 - DNA, 15 bp, Homo sapiens
aaaaaaagttagtgt

SEQ ID NO: 347963 - DNA, 15 bp, Homo sapiens
aaaaaaaagttagtg

SEQ ID NO: 347964 - DNA, 15 bp, Homo sapiens
aaaaaaaaagttagt

SEQ ID NO: 347965 - DNA, 15 bp, Homo sapiens
aaaaaaaaaagttag

SEQ ID NO: 347966 - DNA, 15 bp, Homo sapiens
taaaaaaaaaaaagt

SEQ ID NO: 347967 - DNA, 15 bp, Homo sapiens
ttaaaaaaaaaaaag

SEQ ID NO: 347968 - DNA, 15 bp, Homo sapiens
ttttaaaaaaaaaaa

SEQ ID NO: 347969 - DNA, 15 bp, Homo sapiens
tttttaaaaaaaaaa

SEQ ID NO: 347970 - DNA, 15 bp, Homo sapiens
ttttttaaaaaaaaa

SEQ ID NO: 347971 - DNA, 15 bp, Homo sapiens
tttttttaaaaaaaa

SEQ ID NO: 347972 - DNA, 15 bp, Homo sapiens
ttttttttaaaaaaa

SEQ ID NO: 347973 - DNA, 15 bp, Homo sapiens
tttttttttaaaaaa

SEQ ID NO: 347974 - DNA, 15 bp, Homo sapiens
ttttttttttaaaaa

SEQ ID NO: 347975 - DNA, 15 bp, Homo sapiens
tttttttttttaaaa

SEQ ID NO: 347976 - DNA, 15 bp, Homo sapiens
ctttttttttttaaa

SEQ ID NO: 347977 - DNA, 15 bp, Homo sapiens
cctttttttttttaa

SEQ ID NO: 347978 - DNA, 15 bp, Homo sapiens
accttttttttttta

SEQ ID NO: 347979 - DNA, 15 bp, Homo sapiens
taccttttttttttt

SEQ ID NO: 347980 - DNA, 15 bp, Homo sapiens
gtacctttttttttt

SEQ ID NO: 347981 - DNA, 15 bp, Homo sapiens
agtaccttttttttt

SEQ ID NO: 347982 - DNA, 15 bp, Homo sapiens
tagtacctttttttt

SEQ ID NO: 347983 - DNA, 15 bp, Homo sapiens
ttagtaccttttttt

SEQ ID NO: 347984 - DNA, 15 bp, Homo sapiens
cttagtacctttttt

SEQ ID NO: 347985 - DNA, 15 bp, Homo sapiens
acttagtaccttttt

SEQ ID NO: 347986 - DNA, 15 bp, Homo sapiens
tacttagtacctttt

SEQ ID NO: 347987 - DNA, 15 bp, Homo sapiens
atacttagtaccttt

SEQ ID NO: 347988 - DNA, 15 bp, Homo sapiens
gatacttagtacctt

SEQ ID NO: 347989 - DNA, 15 bp, Homo sapiens
agatacttagtacct

SEQ ID NO: 347990 - DNA, 15 bp, Homo sapiens
aagatacttagtacc

SEQ ID NO: 347991 - DNA, 15 bp, Homo sapiens
gaagatacttagtac

SEQ ID NO: 347992 - DNA, 15 bp, Homo sapiens
tgaagatacttagta

SEQ ID NO: 347993 - DNA, 15 bp, Homo sapiens
ttgaagatacttagt

SEQ ID NO: 347994 - DNA, 15 bp, Homo sapiens
attgaagatacttag

SEQ ID NO: 347995 - DNA, 15 bp, Homo sapiens
gattgaagatactta

SEQ ID NO: 347996 - DNA, 15 bp, Homo sapiens
tgattgaagatactt

SEQ ID NO: 347997 - DNA, 15 bp, Homo sapiens
ctgattgaagatact

SEQ ID NO: 347998 - DNA, 15 bp, Homo sapiens
gctgattgaagatac

SEQ ID NO: 347999 - DNA, 15 bp, Homo sapiens
agctgattgaagata

SEQ ID NO: 348000 - DNA, 15 bp, Homo sapiens
cagctgattgaagat

SEQ ID NO: 348001 - DNA, 15 bp, Homo sapiens
acagctgattgaaga

SEQ ID NO: 348002 - DNA, 15 bp, Homo sapiens
aacagctgattgaag

SEQ ID NO: 348003 - DNA, 15 bp, Homo sapiens
caacagctgattgaa

SEQ ID NO: 348004 - DNA, 15 bp, Homo sapiens
ccaacagctgattga

SEQ ID NO: 348005 - DNA, 15 bp, Homo sapiens
accaacagctgattg

SEQ ID NO: 348006 - DNA, 15 bp, Homo sapiens
gaccaacagctgatt

SEQ ID NO: 348007 - DNA, 15 bp, Homo sapiens
tgaccaacagctgat

SEQ ID NO: 348008 - DNA, 15 bp, Homo sapiens
ttgaccaacagctga

SEQ ID NO: 348009 - DNA, 15 bp, Homo sapiens
cttgaccaacagctg

SEQ ID NO: 348010 - DNA, 15 bp, Homo sapiens
tcttgaccaacagct

SEQ ID NO: 348011 - DNA, 15 bp, Homo sapiens
gtcttgaccaacagc

SEQ ID NO: 348012 - DNA, 15 bp, Homo sapiens
agtcttgaccaacag

SEQ ID NO: 348013 - DNA, 15 bp, Homo sapiens
tagtcttgaccaaca

SEQ ID NO: 348014 - DNA, 15 bp, Homo sapiens
ttagtcttgaccaac

SEQ ID NO: 348015 - DNA, 15 bp, Homo sapiens
gttagtcttgaccaa

SEQ ID NO: 348016 - DNA, 15 bp, Homo sapiens
agttagtcttgacca

SEQ ID NO: 348017 - DNA, 15 bp, Homo sapiens
aagttagtcttgacc

SEQ ID NO: 348018 - DNA, 15 bp, Homo sapiens
aaagttagtcttgac

SEQ ID NO: 348019 - DNA, 15 bp, Homo sapiens
gaaagttagtcttga

SEQ ID NO: 348020 - DNA, 15 bp, Homo sapiens
agaaagttagtcttg

SEQ ID NO: 348021 - DNA, 15 bp, Homo sapiens
aagaaagttagtctt

SEQ ID NO: 348022 - DNA, 15 bp, Homo sapiens
aaagaaagttagtct

SEQ ID NO: 348023 - DNA, 15 bp, Homo sapiens
aaaagaaagttagtc

SEQ ID NO: 348024 - DNA, 15 bp, Homo sapiens
taaaagaaagttagt

SEQ ID NO: 348025 - DNA, 15 bp, Homo sapiens
ttaaaagaaagttag

SEQ ID NO: 348026 - DNA, 15 bp, Homo sapiens
tttaaaagaaagtta

SEQ ID NO: 348027 - DNA, 15 bp, Homo sapiens
ctttaaaagaaagtt

SEQ ID NO: 348028 - DNA, 15 bp, Homo sapiens
cctttaaaagaaagt

SEQ ID NO: 348029 - DNA, 15 bp, Homo sapiens
acctttaaaagaaag

SEQ ID NO: 348030 - DNA, 15 bp, Homo sapiens
aacctttaaaagaaa

SEQ ID NO: 348031 - DNA, 15 bp, Homo sapiens
gaacctttaaaagaa

SEQ ID NO: 348032 - DNA, 15 bp, Homo sapiens
tgaacctttaaaaga

SEQ ID NO: 348033 - DNA, 15 bp, Homo sapiens
atgaacctttaaaag

SEQ ID NO: 348034 - DNA, 15 bp, Homo sapiens
aatgaacctttaaaa

SEQ ID NO: 348035 - DNA, 15 bp, Homo sapiens
aaatgaacctttaaa

SEQ ID NO: 348036 - DNA, 15 bp, Homo sapiens
caaatgaacctttaa

SEQ ID NO: 348037 - DNA, 15 bp, Homo sapiens
acaaatgaaccttta

SEQ ID NO: 348038 - DNA, 15 bp, Homo sapiens
tacaaatgaaccttt

SEQ ID NO: 348039 - DNA, 15 bp, Homo sapiens
atacaaatgaacctt

SEQ ID NO: 348040 - DNA, 15 bp, Homo sapiens
catacaaatgaacct

SEQ ID NO: 348041 - DNA, 15 bp, Homo sapiens
tcatacaaatgaacc

SEQ ID NO: 348042 - DNA, 15 bp, Homo sapiens
atcatacaaatgaac

SEQ ID NO: 348043 - DNA, 15 bp, Homo sapiens
tatcatacaaatgaa

SEQ ID NO: 348044 - DNA, 15 bp, Homo sapiens
ttatcatacaaatga

SEQ ID NO: 348045 - DNA, 15 bp, Homo sapiens
tttatcatacaaatg

SEQ ID NO: 348046 - DNA, 15 bp, Homo sapiens
atttatcatacaaat

SEQ ID NO: 348047 - DNA, 15 bp, Homo sapiens
aatttatcatacaaa

SEQ ID NO: 348048 - DNA, 15 bp, Homo sapiens
gaatttatcatacaa

SEQ ID NO: 348049 - DNA, 15 bp, Homo sapiens
tgaatttatcataca

SEQ ID NO: 348050 - DNA, 15 bp, Homo sapiens
atgaatttatcatac

SEQ ID NO: 348051 - DNA, 15 bp, Homo sapiens
tatgaatttatcata

SEQ ID NO: 348052 - DNA, 15 bp, Homo sapiens
atatgaatttatcat

SEQ ID NO: 348053 - DNA, 15 bp, Homo sapiens
catatgaatttatca

SEQ ID NO: 348054 - DNA, 15 bp, Homo sapiens
acatatgaatttatc

SEQ ID NO: 348055 - DNA, 15 bp, Homo sapiens
cacatatgaatttat

SEQ ID NO: 348056 - DNA, 15 bp, Homo sapiens
acacatatgaattta

SEQ ID NO: 348057 - DNA, 15 bp, Homo sapiens
tacacatatgaattt

SEQ ID NO: 348058 - DNA, 15 bp, Homo sapiens
atacacatatgaatt

SEQ ID NO: 348059 - DNA, 15 bp, Homo sapiens
tatacacatatgaat

SEQ ID NO: 348060 - DNA, 15 bp, Homo sapiens
atatacacatatgaa

SEQ ID NO: 348061 - DNA, 15 bp, Homo sapiens
tatatacacatatga

SEQ ID NO: 348062 - DNA, 15 bp, Homo sapiens
atatatacacatatg

SEQ ID NO: 348063 - DNA, 15 bp, Homo sapiens
tatatatacacatat

SEQ ID NO: 348064 - DNA, 15 bp, Homo sapiens
ttatatatacacata

SEQ ID NO: 348065 - DNA, 15 bp, Homo sapiens
attatatatacacat

SEQ ID NO: 348066 - DNA, 15 bp, Homo sapiens
aattatatatacaca

SEQ ID NO: 348067 - DNA, 15 bp, Homo sapiens
aaattatatatacac

SEQ ID NO: 348068 - DNA, 15 bp, Homo sapiens
aaaattatatataca

SEQ ID NO: 348069 - DNA, 15 bp, Homo sapiens
aaaaattatatatac

SEQ ID NO: 348070 - DNA, 15 bp, Homo sapiens
aaaaaattatatata

SEQ ID NO: 348071 - DNA, 15 bp, Homo sapiens
aaaaaaattatatat

SEQ ID NO: 348072 - DNA, 15 bp, Homo sapiens
aaaaaaaattatata

SEQ ID NO: 348073 - DNA, 15 bp, Homo sapiens
caaaaaaaattatat

SEQ ID NO: 348074 - DNA, 15 bp, Homo sapiens
acaaaaaaaattata

SEQ ID NO: 348075 - DNA, 15 bp, Homo sapiens
aacaaaaaaaattat

SEQ ID NO: 348076 - DNA, 15 bp, Homo sapiens
aaacaaaaaaaatta

SEQ ID NO: 348077 - DNA, 15 bp, Homo sapiens
aaaacaaaaaaaatt

SEQ ID NO: 348078 - DNA, 15 bp, Homo sapiens
caaaacaaaaaaaat

SEQ ID NO: 348079 - DNA, 15 bp, Homo sapiens
acaaaacaaaaaaaa

SEQ ID NO: 348080 - DNA, 15 bp, Homo sapiens
gacaaaacaaaaaaa

SEQ ID NO: 348081 - DNA, 15 bp, Homo sapiens
agacaaaacaaaaaa

SEQ ID NO: 348082 - DNA, 15 bp, Homo sapiens
tagacaaaacaaaaa

SEQ ID NO: 348083 - DNA, 15 bp, Homo sapiens
ctagacaaaacaaaa

SEQ ID NO: 348084 - DNA, 15 bp, Homo sapiens
actagacaaaacaaa

SEQ ID NO: 348085 - DNA, 15 bp, Homo sapiens
cactagacaaaacaa

SEQ ID NO: 348086 - DNA, 15 bp, Homo sapiens
tcactagacaaaaca

SEQ ID NO: 348087 - DNA, 15 bp, Homo sapiens
ctcactagacaaaac

SEQ ID NO: 348088 - DNA, 15 bp, Homo sapiens
actcactagacaaaa

SEQ ID NO: 348089 - DNA, 15 bp, Homo sapiens
aactcactagacaaa

SEQ ID NO: 348090 - DNA, 15 bp, Homo sapiens
aaactcactagacaa

SEQ ID NO: 348091 - DNA, 15 bp, Homo sapiens
gaaactcactagaca

SEQ ID NO: 348092 - DNA, 15 bp, Homo sapiens
tgaaactcactagac

SEQ ID NO: 348093 - DNA, 15 bp, Homo sapiens
ttgaaactcactaga

SEQ ID NO: 348094 - DNA, 15 bp, Homo sapiens
gttgaaactcactag

SEQ ID NO: 348095 - DNA, 15 bp, Homo sapiens
tgttgaaactcacta

SEQ ID NO: 348096 - DNA, 15 bp, Homo sapiens
atgttgaaactcact

SEQ ID NO: 348097 - DNA, 15 bp, Homo sapiens
aatgttgaaactcac

SEQ ID NO: 348098 - DNA, 15 bp, Homo sapiens
aaatgttgaaactca

SEQ ID NO: 348099 - DNA, 15 bp, Homo sapiens
aaaatgttgaaactc

SEQ ID NO: 348100 - DNA, 15 bp, Homo sapiens
aaaaatgttgaaact

SEQ ID NO: 348101 - DNA, 15 bp, Homo sapiens
taaaaatgttgaaac

SEQ ID NO: 348102 - DNA, 15 bp, Homo sapiens
ttaaaaatgttgaaa

SEQ ID NO: 348103 - DNA, 15 bp, Homo sapiens
tttaaaaatgttgaa

SEQ ID NO: 348104 - DNA, 15 bp, Homo sapiens
ctttaaaaatgttga

SEQ ID NO: 348105 - DNA, 15 bp, Homo sapiens
actttaaaaatgttg

SEQ ID NO: 348106 - DNA, 15 bp, Homo sapiens
aactttaaaaatgtt

SEQ ID NO: 348107 - DNA, 15 bp, Homo sapiens
aaactttaaaaatgt

SEQ ID NO: 348108 - DNA, 15 bp, Homo sapiens
aaaactttaaaaatg

SEQ ID NO: 348109 - DNA, 15 bp, Homo sapiens
gaaaactttaaaaat

SEQ ID NO: 348110 - DNA, 15 bp, Homo sapiens
tgaaaactttaaaaa

SEQ ID NO: 348111 - DNA, 15 bp, Homo sapiens
ttgaaaactttaaaa

SEQ ID NO: 348112 - DNA, 15 bp, Homo sapiens
tttgaaaactttaaa

SEQ ID NO: 348113 - DNA, 15 bp, Homo sapiens
ttttgaaaactttaa

SEQ ID NO: 348114 - DNA, 15 bp, Homo sapiens
tttttgaaaacttta

SEQ ID NO: 348115 - DNA, 15 bp, Homo sapiens
ctttttgaaaacttt

SEQ ID NO: 348116 - DNA, 15 bp, Homo sapiens
gctttttgaaaactt

SEQ ID NO: 348117 - DNA, 15 bp, Homo sapiens
ggctttttgaaaact

SEQ ID NO: 348118 - DNA, 15 bp, Homo sapiens
tggctttttgaaaac

SEQ ID NO: 348119 - DNA, 15 bp, Homo sapiens
atggctttttgaaaa

SEQ ID NO: 348120 - DNA, 15 bp, Homo sapiens
gatggctttttgaaa

SEQ ID NO: 348121 - DNA, 15 bp, Homo sapiens
cgatggctttttgaa

SEQ ID NO: 348122 - DNA, 15 bp, Homo sapiens
ccgatggctttttga

SEQ ID NO: 348123 - DNA, 15 bp, Homo sapiens
tccgatggctttttg

SEQ ID NO: 348124 - DNA, 15 bp, Homo sapiens
ttccgatggcttttt

SEQ ID NO: 348125 - DNA, 15 bp, Homo sapiens
attccgatggctttt

SEQ ID NO: 348126 - DNA, 15 bp, Homo sapiens
cattccgatggcttt

SEQ ID NO: 348127 - DNA, 15 bp, Homo sapiens
acattccgatggctt

SEQ ID NO: 348128 - DNA, 15 bp, Homo sapiens
aacattccgatggct

SEQ ID NO: 348129 - DNA, 15 bp, Homo sapiens
taacattccgatggc

SEQ ID NO: 348130 - DNA, 15 bp, Homo sapiens
ttaacattccgatgg

SEQ ID NO: 348131 - DNA, 15 bp, Homo sapiens
tttaacattccgatg

SEQ ID NO: 348132 - DNA, 15 bp, Homo sapiens
atttaacattccgat

SEQ ID NO: 348133 - DNA, 15 bp, Homo sapiens
aatttaacattccga

SEQ ID NO: 348134 - DNA, 15 bp, Homo sapiens
taatttaacattccg

SEQ ID NO: 348135 - DNA, 15 bp, Homo sapiens
ttaatttaacattcc

SEQ ID NO: 348136 - DNA, 15 bp, Homo sapiens
attaatttaacattc

SEQ ID NO: 348137 - DNA, 15 bp, Homo sapiens
cattaatttaacatt

SEQ ID NO: 348138 - DNA, 15 bp, Homo sapiens
acattaatttaacat

SEQ ID NO: 348139 - DNA, 15 bp, Homo sapiens
tacattaatttaaca

SEQ ID NO: 348140 - DNA, 15 bp, Homo sapiens
ttacattaatttaac

SEQ ID NO: 348141 - DNA, 15 bp, Homo sapiens
tttacattaatttaa

SEQ ID NO: 348142 - DNA, 15 bp, Homo sapiens
ctttacattaattta

SEQ ID NO: 348143 - DNA, 15 bp, Homo sapiens
cctttacattaattt

SEQ ID NO: 348144 - DNA, 15 bp, Homo sapiens
ccctttacattaatt

SEQ ID NO: 348145 - DNA, 15 bp, Homo sapiens
tccctttacattaat

SEQ ID NO: 348146 - DNA, 15 bp, Homo sapiens
ttccctttacattaa

SEQ ID NO: 348147 - DNA, 15 bp, Homo sapiens
gttccctttacatta

SEQ ID NO: 348148 - DNA, 15 bp, Homo sapiens
tgttccctttacatt

SEQ ID NO: 348149 - DNA, 15 bp, Homo sapiens
ctgttccctttacat

SEQ ID NO: 348150 - DNA, 15 bp, Homo sapiens
gctgttccctttaca

SEQ ID NO: 348151 - DNA, 15 bp, Homo sapiens
agctgttccctttac

SEQ ID NO: 348152 - DNA, 15 bp, Homo sapiens
tagctgttcccttta

SEQ ID NO: 348153 - DNA, 15 bp, Homo sapiens
ttagctgttcccttt

SEQ ID NO: 348154 - DNA, 15 bp, Homo sapiens
attagctgttccctt

SEQ ID NO: 348155 - DNA, 15 bp, Homo sapiens
gattagctgttccct

SEQ ID NO: 348156 - DNA, 15 bp, Homo sapiens
agattagctgttccc

SEQ ID NO: 348157 - DNA, 15 bp, Homo sapiens
tagattagctgttcc

SEQ ID NO: 348158 - DNA, 15 bp, Homo sapiens
ctagattagctgttc

SEQ ID NO: 348159 - DNA, 15 bp, Homo sapiens
tctagattagctgtt

SEQ ID NO: 348160 - DNA, 15 bp, Homo sapiens
gtctagattagctgt

SEQ ID NO: 348161 - DNA, 15 bp, Homo sapiens
ggtctagattagctg

SEQ ID NO: 348162 - DNA, 15 bp, Homo sapiens
tggtctagattagct

SEQ ID NO: 348163 - DNA, 15 bp, Homo sapiens
ttggtctagattagc

SEQ ID NO: 348164 - DNA, 15 bp, Homo sapiens
tttggtctagattag

SEQ ID NO: 348165 - DNA, 15 bp, Homo sapiens
ctttggtctagatta

SEQ ID NO: 348166 - DNA, 15 bp, Homo sapiens
tctttggtctagatt

SEQ ID NO: 348167 - DNA, 15 bp, Homo sapiens
ttctttggtctagat

SEQ ID NO: 348168 - DNA, 15 bp, Homo sapiens
attctttggtctaga

SEQ ID NO: 348169 - DNA, 15 bp, Homo sapiens
cattctttggtctag

SEQ ID NO: 348170 - DNA, 15 bp, Homo sapiens
ccattctttggtcta

SEQ ID NO: 348171 - DNA, 15 bp, Homo sapiens
accattctttggtct

SEQ ID NO: 348172 - DNA, 15 bp, Homo sapiens
taccattctttggtc

SEQ ID NO: 348173 - DNA, 15 bp, Homo sapiens
ataccattctttggt

SEQ ID NO: 348174 - DNA, 15 bp, Homo sapiens
aataccattctttgg

SEQ ID NO: 348175 - DNA, 15 bp, Homo sapiens
aaataccattctttg

SEQ ID NO: 348176 - DNA, 15 bp, Homo sapiens
aaaataccattcttt

SEQ ID NO: 348177 - DNA, 15 bp, Homo sapiens
gaaaataccattctt

SEQ ID NO: 348178 - DNA, 15 bp, Homo sapiens
tgaaaataccattct

SEQ ID NO: 348179 - DNA, 15 bp, Homo sapiens
gtgaaaataccattc

SEQ ID NO: 348180 - DNA, 15 bp, Homo sapiens
agtgaaaataccatt

SEQ ID NO: 348181 - DNA, 15 bp, Homo sapiens
aagtgaaaataccat

SEQ ID NO: 348182 - DNA, 15 bp, Homo sapiens
aaagtgaaaatacca

SEQ ID NO: 348183 - DNA, 15 bp, Homo sapiens
aaaagtgaaaatacc

SEQ ID NO: 348184 - DNA, 15 bp, Homo sapiens
gaaaagtgaaaatac

SEQ ID NO: 348185 - DNA, 15 bp, Homo sapiens
agaaaagtgaaaata

SEQ ID NO: 348186 - DNA, 15 bp, Homo sapiens
aagaaaagtgaaaat

SEQ ID NO: 348187 - DNA, 15 bp, Homo sapiens
aaagaaaagtgaaaa

SEQ ID NO: 348188 - DNA, 15 bp, Homo sapiens
caaagaaaagtgaaa

SEQ ID NO: 348189 - DNA, 15 bp, Homo sapiens
acaaagaaaagtgaa

SEQ ID NO: 348190 - DNA, 15 bp, Homo sapiens
tacaaagaaaagtga

SEQ ID NO: 348191 - DNA, 15 bp, Homo sapiens
ttacaaagaaaagtg

SEQ ID NO: 348192 - DNA, 15 bp, Homo sapiens
gttacaaagaaaagt

SEQ ID NO: 348193 - DNA, 15 bp, Homo sapiens
tgttacaaagaaaag

SEQ ID NO: 348194 - DNA, 15 bp, Homo sapiens
atgttacaaagaaaa

SEQ ID NO: 348195 - DNA, 15 bp, Homo sapiens
aatgttacaaagaaa

SEQ ID NO: 348196 - DNA, 15 bp, Homo sapiens
caatgttacaaagaa

SEQ ID NO: 348197 - DNA, 15 bp, Homo sapiens
tcaatgttacaaaga

SEQ ID NO: 348198 - DNA, 15 bp, Homo sapiens
ttcaatgttacaaag

SEQ ID NO: 348199 - DNA, 15 bp, Homo sapiens
attcaatgttacaaa

SEQ ID NO: 348200 - DNA, 15 bp, Homo sapiens
cattcaatgttacaa

SEQ ID NO: 348201 - DNA, 15 bp, Homo sapiens
ccattcaatgttaca

SEQ ID NO: 348202 - DNA, 15 bp, Homo sapiens
accattcaatgttac

SEQ ID NO: 348203 - DNA, 15 bp, Homo sapiens
aaccattcaatgtta

SEQ ID NO: 348204 - DNA, 15 bp, Homo sapiens
aaaccattcaatgtt

SEQ ID NO: 348205 - DNA, 15 bp, Homo sapiens
caaaccattcaatgt

SEQ ID NO: 348206 - DNA, 15 bp, Homo sapiens
tcaaaccattcaatg

SEQ ID NO: 348207 - DNA, 15 bp, Homo sapiens
ttcaaaccattcaat

SEQ ID NO: 348208 - DNA, 15 bp, Homo sapiens
cttcaaaccattcaa

SEQ ID NO: 348209 - DNA, 15 bp, Homo sapiens
acttcaaaccattca

SEQ ID NO: 348210 - DNA, 15 bp, Homo sapiens
tacttcaaaccattc

SEQ ID NO: 348211 - DNA, 15 bp, Homo sapiens
gtacttcaaaccatt

SEQ ID NO: 348212 - DNA, 15 bp, Homo sapiens
agtacttcaaaccat

SEQ ID NO: 348213 - DNA, 15 bp, Homo sapiens
gagtacttcaaacca

SEQ ID NO: 348214 - DNA, 15 bp, Homo sapiens
tgagtacttcaaacc

SEQ ID NO: 348215 - DNA, 15 bp, Homo sapiens
ttgagtacttcaaac

SEQ ID NO: 348216 - DNA, 15 bp, Homo sapiens
tttgagtacttcaaa

SEQ ID NO: 348217 - DNA, 15 bp, Homo sapiens
ttttgagtacttcaa

SEQ ID NO: 348218 - DNA, 15 bp, Homo sapiens
attttgagtacttca

SEQ ID NO: 348219 - DNA, 15 bp, Homo sapiens
gattttgagtacttc

SEQ ID NO: 348220 - DNA, 15 bp, Homo sapiens
agattttgagtactt

SEQ ID NO: 348221 - DNA, 15 bp, Homo sapiens
cagattttgagtact

SEQ ID NO: 348222 - DNA, 15 bp, Homo sapiens
acagattttgagtac

SEQ ID NO: 348223 - DNA, 15 bp, Homo sapiens
aacagattttgagta

SEQ ID NO: 348224 - DNA, 15 bp, Homo sapiens
taacagattttgagt

SEQ ID NO: 348225 - DNA, 15 bp, Homo sapiens
gtaacagattttgag

SEQ ID NO: 348226 - DNA, 15 bp, Homo sapiens
cgtaacagattttga

SEQ ID NO: 348227 - DNA, 15 bp, Homo sapiens
gcgtaacagattttg

SEQ ID NO: 348228 - DNA, 15 bp, Homo sapiens
agcgtaacagatttt

SEQ ID NO: 348229 - DNA, 15 bp, Homo sapiens
tagcgtaacagattt

SEQ ID NO: 348230 - DNA, 15 bp, Homo sapiens
ttagcgtaacagatt

SEQ ID NO: 348231 - DNA, 15 bp, Homo sapiens
tttagcgtaacagat

SEQ ID NO: 348232 - DNA, 15 bp, Homo sapiens
gtttagcgtaacaga

SEQ ID NO: 348233 - DNA, 15 bp, Homo sapiens
agtttagcgtaacag

SEQ ID NO: 348234 - DNA, 15 bp, Homo sapiens
aagtttagcgtaaca

SEQ ID NO: 348235 - DNA, 15 bp, Homo sapiens
aaagtttagcgtaac

SEQ ID NO: 348236 - DNA, 15 bp, Homo sapiens
aaaagtttagcgtaa

SEQ ID NO: 348237 - DNA, 15 bp, Homo sapiens
caaaagtttagcgta

SEQ ID NO: 348238 - DNA, 15 bp, Homo sapiens
tcaaaagtttagcgt

SEQ ID NO: 348239 - DNA, 15 bp, Homo sapiens
atcaaaagtttagcg

SEQ ID NO: 348240 - DNA, 15 bp, Homo sapiens
aatcaaaagtttagc

SEQ ID NO: 348241 - DNA, 15 bp, Homo sapiens
gaatcaaaagtttag

SEQ ID NO: 348242 - DNA, 15 bp, Homo sapiens
agaatcaaaagttta

SEQ ID NO: 348243 - DNA, 15 bp, Homo sapiens
aagaatcaaaagttt

SEQ ID NO: 348244 - DNA, 15 bp, Homo sapiens
aaagaatcaaaagtt

SEQ ID NO: 348245 - DNA, 15 bp, Homo sapiens
taaagaatcaaaagt

SEQ ID NO: 348246 - DNA, 15 bp, Homo sapiens
ttaaagaatcaaaag

SEQ ID NO: 348247 - DNA, 15 bp, Homo sapiens
gttaaagaatcaaaa

SEQ ID NO: 348248 - DNA, 15 bp, Homo sapiens
tgttaaagaatcaaa

SEQ ID NO: 348249 - DNA, 15 bp, Homo sapiens
gtgttaaagaatcaa

SEQ ID NO: 348250 - DNA, 15 bp, Homo sapiens
tgtgttaaagaatca

SEQ ID NO: 348251 - DNA, 15 bp, Homo sapiens
ttgtgttaaagaatc

SEQ ID NO: 348252 - DNA, 15 bp, Homo sapiens
attgtgttaaagaat

SEQ ID NO: 348253 - DNA, 15 bp, Homo sapiens
aattgtgttaaagaa

SEQ ID NO: 348254 - DNA, 15 bp, Homo sapiens
taattgtgttaaaga

SEQ ID NO: 348255 - DNA, 15 bp, Homo sapiens
ataattgtgttaaag

SEQ ID NO: 348256 - DNA, 15 bp, Homo sapiens
aataattgtgttaaa

SEQ ID NO: 348257 - DNA, 15 bp, Homo sapiens
aaataattgtgttaa

SEQ ID NO: 348258 - DNA, 15 bp, Homo sapiens
aaaataattgtgtta

SEQ ID NO: 348259 - DNA, 15 bp, Homo sapiens
aaaaataattgtgtt

SEQ ID NO: 348260 - DNA, 15 bp, Homo sapiens
taaaaataattgtgt

SEQ ID NO: 348261 - DNA, 15 bp, Homo sapiens
ttaaaaataattgtg

SEQ ID NO: 348262 - DNA, 15 bp, Homo sapiens
tttaaaaataattgt

SEQ ID NO: 348263 - DNA, 15 bp, Homo sapiens
gtttaaaaataattg

SEQ ID NO: 348264 - DNA, 15 bp, Homo sapiens
tgtttaaaaataatt

SEQ ID NO: 348265 - DNA, 15 bp, Homo sapiens
gtgtttaaaaataat

SEQ ID NO: 348266 - DNA, 15 bp, Homo sapiens
agtgtttaaaaataa

SEQ ID NO: 348267 - DNA, 15 bp, Homo sapiens
cagtgtttaaaaata

SEQ ID NO: 348268 - DNA, 15 bp, Homo sapiens
ccagtgtttaaaaat

SEQ ID NO: 348269 - DNA, 15 bp, Homo sapiens
gccagtgtttaaaaa

SEQ ID NO: 348270 - DNA, 15 bp, Homo sapiens
tgccagtgtttaaaa

SEQ ID NO: 348271 - DNA, 15 bp, Homo sapiens
atgccagtgtttaaa

SEQ ID NO: 348272 - DNA, 15 bp, Homo sapiens
aatgccagtgtttaa

SEQ ID NO: 348273 - DNA, 15 bp, Homo sapiens
aaatgccagtgttta

SEQ ID NO: 348274 - DNA, 15 bp, Homo sapiens
aaaatgccagtgttt

SEQ ID NO: 348275 - DNA, 15 bp, Homo sapiens
gaaaatgccagtgtt

SEQ ID NO: 348276 - DNA, 15 bp, Homo sapiens
ggaaaatgccagtgt

SEQ ID NO: 348277 - DNA, 15 bp, Homo sapiens
tggaaaatgccagtg

SEQ ID NO: 348278 - DNA, 15 bp, Homo sapiens
ttggaaaatgccagt

SEQ ID NO: 348279 - DNA, 15 bp, Homo sapiens
tttggaaaatgccag

SEQ ID NO: 348280 - DNA, 15 bp, Homo sapiens
ttttggaaaatgcca

SEQ ID NO: 348281 - DNA, 15 bp, Homo sapiens
gttttggaaaatgcc

SEQ ID NO: 348282 - DNA, 15 bp, Homo sapiens
agttttggaaaatgc

SEQ ID NO: 348283 - DNA, 15 bp, Homo sapiens
cagttttggaaaatg

SEQ ID NO: 348284 - DNA, 15 bp, Homo sapiens
acagttttggaaaat

SEQ ID NO: 348285 - DNA, 15 bp, Homo sapiens
cacagttttggaaaa

SEQ ID NO: 348286 - DNA, 15 bp, Homo sapiens
ccacagttttggaaa

SEQ ID NO: 348287 - DNA, 15 bp, Homo sapiens
gccacagttttggaa

SEQ ID NO: 348288 - DNA, 15 bp, Homo sapiens
tgccacagttttgga

SEQ ID NO: 348289 - DNA, 15 bp, Homo sapiens
ctgccacagttttgg

SEQ ID NO: 348290 - DNA, 15 bp, Homo sapiens
gctgccacagttttg

SEQ ID NO: 348291 - DNA, 15 bp, Homo sapiens
agctgccacagtttt

SEQ ID NO: 348292 - DNA, 15 bp, Homo sapiens
tagctgccacagttt

SEQ ID NO: 348293 - DNA, 15 bp, Homo sapiens
ttagctgccacagtt

SEQ ID NO: 348294 - DNA, 15 bp, Homo sapiens
gttagctgccacagt

SEQ ID NO: 348295 - DNA, 15 bp, Homo sapiens
agttagctgccacag

SEQ ID NO: 348296 - DNA, 15 bp, Homo sapiens
aagttagctgccaca

SEQ ID NO: 348297 - DNA, 15 bp, Homo sapiens
aaagttagctgccac

SEQ ID NO: 348298 - DNA, 15 bp, Homo sapiens
aaaagttagctgcca

SEQ ID NO: 348299 - DNA, 15 bp, Homo sapiens
aaaaagttagctgcc

SEQ ID NO: 348300 - DNA, 15 bp, Homo sapiens
taaaaagttagctgc

SEQ ID NO: 348301 - DNA, 15 bp, Homo sapiens
ttaaaaagttagctg

SEQ ID NO: 348302 - DNA, 15 bp, Homo sapiens
tttaaaaagttagct

SEQ ID NO: 348303 - DNA, 15 bp, Homo sapiens
ttttaaaaagttagc

SEQ ID NO: 348304 - DNA, 15 bp, Homo sapiens
attttaaaaagttag

SEQ ID NO: 348305 - DNA, 15 bp, Homo sapiens
gattttaaaaagtta

SEQ ID NO: 348306 - DNA, 15 bp, Homo sapiens
agattttaaaaagtt

SEQ ID NO: 348307 - DNA, 15 bp, Homo sapiens
gagattttaaaaagt

SEQ ID NO: 348308 - DNA, 15 bp, Homo sapiens
tgagattttaaaaag

SEQ ID NO: 348309 - DNA, 15 bp, Homo sapiens
ttgagattttaaaaa

SEQ ID NO: 348310 - DNA, 15 bp, Homo sapiens
tttgagattttaaaa

SEQ ID NO: 348311 - DNA, 15 bp, Homo sapiens
atttgagattttaaa

SEQ ID NO: 348312 - DNA, 15 bp, Homo sapiens
catttgagattttaa

SEQ ID NO: 348313 - DNA, 15 bp, Homo sapiens
tcatttgagatttta

SEQ ID NO: 348314 - DNA, 15 bp, Homo sapiens
gtcatttgagatttt

SEQ ID NO: 348315 - DNA, 15 bp, Homo sapiens
tgtcatttgagattt

SEQ ID NO: 348316 - DNA, 15 bp, Homo sapiens
atgtcatttgagatt

SEQ ID NO: 348317 - DNA, 15 bp, Homo sapiens
catgtcatttgagat

SEQ ID NO: 348318 - DNA, 15 bp, Homo sapiens
gcatgtcatttgaga

SEQ ID NO: 348319 - DNA, 15 bp, Homo sapiens
tgcatgtcatttgag

SEQ ID NO: 348320 - DNA, 15 bp, Homo sapiens
ctgcatgtcatttga

SEQ ID NO: 348321 - DNA, 15 bp, Homo sapiens
actgcatgtcatttg

SEQ ID NO: 348322 - DNA, 15 bp, Homo sapiens
cactgcatgtcattt

SEQ ID NO: 348323 - DNA, 15 bp, Homo sapiens
acactgcatgtcatt

SEQ ID NO: 348324 - DNA, 15 bp, Homo sapiens
cacactgcatgtcat

SEQ ID NO: 348325 - DNA, 15 bp, Homo sapiens
tcacactgcatgtca

SEQ ID NO: 348326 - DNA, 15 bp, Homo sapiens
ctcacactgcatgtc

SEQ ID NO: 348327 - DNA, 15 bp, Homo sapiens
actcacactgcatgt

SEQ ID NO: 348328 - DNA, 15 bp, Homo sapiens
tactcacactgcatg

SEQ ID NO: 348329 - DNA, 15 bp, Homo sapiens
ctactcacactgcat

SEQ ID NO: 348330 - DNA, 15 bp, Homo sapiens
tctactcacactgca

SEQ ID NO: 348331 - DNA, 15 bp, Homo sapiens
ttctactcacactgc

SEQ ID NO: 348332 - DNA, 15 bp, Homo sapiens
cttctactcacactg

SEQ ID NO: 348333 - DNA, 15 bp, Homo sapiens
ccttctactcacact

SEQ ID NO: 348334 - DNA, 15 bp, Homo sapiens
tccttctactcacac

SEQ ID NO: 348335 - DNA, 15 bp, Homo sapiens
ttccttctactcaca

SEQ ID NO: 348336 - DNA, 15 bp, Homo sapiens
cttccttctactcac

SEQ ID NO: 348337 - DNA, 15 bp, Homo sapiens
acttccttctactca

SEQ ID NO: 348338 - DNA, 15 bp, Homo sapiens
gacttccttctactc

SEQ ID NO: 348339 - DNA, 15 bp, Homo sapiens
tgacttccttctact

SEQ ID NO: 348340 - DNA, 15 bp, Homo sapiens
ttgacttccttctac

SEQ ID NO: 348341 - DNA, 15 bp, Homo sapiens
gttgacttccttcta

SEQ ID NO: 348342 - DNA, 15 bp, Homo sapiens
tgttgacttccttct

SEQ ID NO: 348343 - DNA, 15 bp, Homo sapiens
ttgttgacttccttc

SEQ ID NO: 348344 - DNA, 15 bp, Homo sapiens
attgttgacttcctt

SEQ ID NO: 348345 - DNA, 15 bp, Homo sapiens
tattgttgacttcct

SEQ ID NO: 348346 - DNA, 15 bp, Homo sapiens
atattgttgacttcc

SEQ ID NO: 348347 - DNA, 15 bp, Homo sapiens
catattgttgacttc

SEQ ID NO: 348348 - DNA, 15 bp, Homo sapiens
acatattgttgactt

SEQ ID NO: 348349 - DNA, 15 bp, Homo sapiens
cacatattgttgact

SEQ ID NO: 348350 - DNA, 15 bp, Homo sapiens
ccacatattgttgac

SEQ ID NO: 348351 - DNA, 15 bp, Homo sapiens
cccacatattgttga

SEQ ID NO: 348352 - DNA, 15 bp, Homo sapiens
ccccacatattgttg

SEQ ID NO: 348353 - DNA, 15 bp, Homo sapiens
tccccacatattgtt

SEQ ID NO: 348354 - DNA, 15 bp, Homo sapiens
ctccccacatattgt

SEQ ID NO: 348355 - DNA, 15 bp, Homo sapiens
tctccccacatattg

SEQ ID NO: 348356 - DNA, 15 bp, Homo sapiens
ctctccccacatatt

SEQ ID NO: 348357 - DNA, 15 bp, Homo sapiens
gctctccccacatat

SEQ ID NO: 348358 - DNA, 15 bp, Homo sapiens
tgctctccccacata

SEQ ID NO: 348359 - DNA, 15 bp, Homo sapiens
gtgctctccccacat

SEQ ID NO: 348360 - DNA, 15 bp, Homo sapiens
agtgctctccccaca

SEQ ID NO: 348361 - DNA, 15 bp, Homo sapiens
gagtgctctccccac

SEQ ID NO: 348362 - DNA, 15 bp, Homo sapiens
cgagtgctctcccca

SEQ ID NO: 348363 - DNA, 15 bp, Homo sapiens
ccgagtgctctcccc

SEQ ID NO: 348364 - DNA, 15 bp, Homo sapiens
accgagtgctctccc

SEQ ID NO: 348365 - DNA, 15 bp, Homo sapiens
aaccgagtgctctcc

SEQ ID NO: 348366 - DNA, 15 bp, Homo sapiens
caaccgagtgctctc

SEQ ID NO: 348367 - DNA, 15 bp, Homo sapiens
acaaccgagtgctct

SEQ ID NO: 348368 - DNA, 15 bp, Homo sapiens
gacaaccgagtgctc

SEQ ID NO: 348369 - DNA, 15 bp, Homo sapiens
agacaaccgagtgct

SEQ ID NO: 348370 - DNA, 15 bp, Homo sapiens
aagacaaccgagtgc

SEQ ID NO: 348371 - DNA, 15 bp, Homo sapiens
aaagacaaccgagtg

SEQ ID NO: 348372 - DNA, 15 bp, Homo sapiens
taaagacaaccgagt

SEQ ID NO: 348373 - DNA, 15 bp, Homo sapiens
gtaaagacaaccgag

SEQ ID NO: 348374 - DNA, 15 bp, Homo sapiens
agtaaagacaaccga

SEQ ID NO: 348375 - DNA, 15 bp, Homo sapiens
aagtaaagacaaccg

SEQ ID NO: 348376 - DNA, 15 bp, Homo sapiens
aaagtaaagacaacc

SEQ ID NO: 348377 - DNA, 15 bp, Homo sapiens
aaaagtaaagacaac

SEQ ID NO: 348378 - DNA, 15 bp, Homo sapiens
taaaagtaaagacaa

SEQ ID NO: 348379 - DNA, 15 bp, Homo sapiens
ttaaaagtaaagaca

SEQ ID NO: 348380 - DNA, 15 bp, Homo sapiens
tttaaaagtaaagac

SEQ ID NO: 348381 - DNA, 15 bp, Homo sapiens
ttttaaaagtaaaga

SEQ ID NO: 348382 - DNA, 15 bp, Homo sapiens
cttttaaaagtaaag

SEQ ID NO: 348383 - DNA, 15 bp, Homo sapiens
acttttaaaagtaaa

SEQ ID NO: 348384 - DNA, 15 bp, Homo sapiens
tacttttaaaagtaa

SEQ ID NO: 348385 - DNA, 15 bp, Homo sapiens
ttacttttaaaagta

SEQ ID NO: 348386 - DNA, 15 bp, Homo sapiens
attacttttaaaagt

SEQ ID NO: 348387 - DNA, 15 bp, Homo sapiens
tattacttttaaaag

SEQ ID NO: 348388 - DNA, 15 bp, Homo sapiens
gtattacttttaaaa

SEQ ID NO: 348389 - DNA, 15 bp, Homo sapiens
agtattacttttaaa

SEQ ID NO: 348390 - DNA, 15 bp, Homo sapiens
aagtattacttttaa

SEQ ID NO: 348391 - DNA, 15 bp, Homo sapiens
caagtattactttta

SEQ ID NO: 348392 - DNA, 15 bp, Homo sapiens
ccaagtattactttt

SEQ ID NO: 348393 - DNA, 15 bp, Homo sapiens
accaagtattacttt

SEQ ID NO: 348394 - DNA, 15 bp, Homo sapiens
caccaagtattactt

SEQ ID NO: 348395 - DNA, 15 bp, Homo sapiens
gcaccaagtattact

SEQ ID NO: 348396 - DNA, 15 bp, Homo sapiens
agcaccaagtattac

SEQ ID NO: 348397 - DNA, 15 bp, Homo sapiens
tagcaccaagtatta

SEQ ID NO: 348398 - DNA, 15 bp, Homo sapiens
ttagcaccaagtatt

SEQ ID NO: 348399 - DNA, 15 bp, Homo sapiens
cttagcaccaagtat

SEQ ID NO: 348400 - DNA, 15 bp, Homo sapiens
tcttagcaccaagta

SEQ ID NO: 348401 - DNA, 15 bp, Homo sapiens
ttcttagcaccaagt

SEQ ID NO: 348402 - DNA, 15 bp, Homo sapiens
attcttagcaccaag

SEQ ID NO: 348403 - DNA, 15 bp, Homo sapiens
aattcttagcaccaa

SEQ ID NO: 348404 - DNA, 15 bp, Homo sapiens
aaattcttagcacca

SEQ ID NO: 348405 - DNA, 15 bp, Homo sapiens
gaaattcttagcacc

SEQ ID NO: 348406 - DNA, 15 bp, Homo sapiens
tgaaattcttagcac

SEQ ID NO: 348407 - DNA, 15 bp, Homo sapiens
ctgaaattcttagca

SEQ ID NO: 348408 - DNA, 15 bp, Homo sapiens
cctgaaattcttagc

SEQ ID NO: 348409 - DNA, 15 bp, Homo sapiens
tcctgaaattcttag

SEQ ID NO: 348410 - DNA, 15 bp, Homo sapiens
atcctgaaattctta

SEQ ID NO: 348411 - DNA, 15 bp, Homo sapiens
aatcctgaaattctt

SEQ ID NO: 348412 - DNA, 15 bp, Homo sapiens
taatcctgaaattct

SEQ ID NO: 348413 - DNA, 15 bp, Homo sapiens
ataatcctgaaattc

SEQ ID NO: 348414 - DNA, 15 bp, Homo sapiens
aataatcctgaaatt

SEQ ID NO: 348415 - DNA, 15 bp, Homo sapiens
caataatcctgaaat

SEQ ID NO: 348416 - DNA, 15 bp, Homo sapiens
acaataatcctgaaa

SEQ ID NO: 348417 - DNA, 15 bp, Homo sapiens
tacaataatcctgaa

SEQ ID NO: 348418 - DNA, 15 bp, Homo sapiens
atacaataatcctga

SEQ ID NO: 348419 - DNA, 15 bp, Homo sapiens
aatacaataatcctg

SEQ ID NO: 348420 - DNA, 15 bp, Homo sapiens
aaatacaataatcct

SEQ ID NO: 348421 - DNA, 15 bp, Homo sapiens
taaatacaataatcc

SEQ ID NO: 348422 - DNA, 15 bp, Homo sapiens
gtaaatacaataatc

SEQ ID NO: 348423 - DNA, 15 bp, Homo sapiens
cgtaaatacaataat

SEQ ID NO: 348424 - DNA, 15 bp, Homo sapiens
acgtaaatacaataa

SEQ ID NO: 348425 - DNA, 15 bp, Homo sapiens
aacgtaaatacaata

SEQ ID NO: 348426 - DNA, 15 bp, Homo sapiens
gaacgtaaatacaat

SEQ ID NO: 348427 - DNA, 15 bp, Homo sapiens
tgaacgtaaatacaa

SEQ ID NO: 348428 - DNA, 15 bp, Homo sapiens
ttgaacgtaaataca

SEQ ID NO: 348429 - DNA, 15 bp, Homo sapiens
tttgaacgtaaatac

SEQ ID NO: 348430 - DNA, 15 bp, Homo sapiens
atttgaacgtaaata

SEQ ID NO: 348431 - DNA, 15 bp, Homo sapiens
catttgaacgtaaat

SEQ ID NO: 348432 - DNA, 15 bp, Homo sapiens
tcatttgaacgtaaa

SEQ ID NO: 348433 - DNA, 15 bp, Homo sapiens
ttcatttgaacgtaa

SEQ ID NO: 348434 - DNA, 15 bp, Homo sapiens
cttcatttgaacgta

SEQ ID NO: 348435 - DNA, 15 bp, Homo sapiens
tcttcatttgaacgt

SEQ ID NO: 348436 - DNA, 15 bp, Homo sapiens
atcttcatttgaacg

SEQ ID NO: 348437 - DNA, 15 bp, Homo sapiens
catcttcatttgaac

SEQ ID NO: 348438 - DNA, 15 bp, Homo sapiens
ccatcttcatttgaa

SEQ ID NO: 348439 - DNA, 15 bp, Homo sapiens
gccatcttcatttga

SEQ ID NO: 348440 - DNA, 15 bp, Homo sapiens
agccatcttcatttg

SEQ ID NO: 348441 - DNA, 15 bp, Homo sapiens
aagccatcttcattt

SEQ ID NO: 348442 - DNA, 15 bp, Homo sapiens
aaagccatcttcatt

SEQ ID NO: 348443 - DNA, 15 bp, Homo sapiens
aaaagccatcttcat

SEQ ID NO: 348444 - DNA, 15 bp, Homo sapiens
caaaagccatcttca

SEQ ID NO: 348445 - DNA, 15 bp, Homo sapiens
acaaaagccatcttc

SEQ ID NO: 348446 - DNA, 15 bp, Homo sapiens
tacaaaagccatctt

SEQ ID NO: 348447 - DNA, 15 bp, Homo sapiens
gtacaaaagccatct

SEQ ID NO: 348448 - DNA, 15 bp, Homo sapiens
agtacaaaagccatc

SEQ ID NO: 348449 - DNA, 15 bp, Homo sapiens
aagtacaaaagccat

SEQ ID NO: 348450 - DNA, 15 bp, Homo sapiens
gaagtacaaaagcca

SEQ ID NO: 348451 - DNA, 15 bp, Homo sapiens
ggaagtacaaaagcc

SEQ ID NO: 348452 - DNA, 15 bp, Homo sapiens
aggaagtacaaaagc

SEQ ID NO: 348453 - DNA, 15 bp, Homo sapiens
caggaagtacaaaag

SEQ ID NO: 348454 - DNA, 15 bp, Homo sapiens
acaggaagtacaaaa

SEQ ID NO: 348455 - DNA, 15 bp, Homo sapiens
cacaggaagtacaaa

SEQ ID NO: 348456 - DNA, 15 bp, Homo sapiens
ccacaggaagtacaa

SEQ ID NO: 348457 - DNA, 15 bp, Homo sapiens
tccacaggaagtaca

SEQ ID NO: 348458 - DNA, 15 bp, Homo sapiens
gtccacaggaagtac

SEQ ID NO: 348459 - DNA, 15 bp, Homo sapiens
tgtccacaggaagta

SEQ ID NO: 348460 - DNA, 15 bp, Homo sapiens
atgtccacaggaagt

SEQ ID NO: 348461 - DNA, 15 bp, Homo sapiens
catgtccacaggaag

SEQ ID NO: 348462 - DNA, 15 bp, Homo sapiens
acatgtccacaggaa

SEQ ID NO: 348463 - DNA, 15 bp, Homo sapiens
tacatgtccacagga

SEQ ID NO: 348464 - DNA, 15 bp, Homo sapiens
ctacatgtccacagg

SEQ ID NO: 348465 - DNA, 15 bp, Homo sapiens
gctacatgtccacag

SEQ ID NO: 348466 - DNA, 15 bp, Homo sapiens
tgctacatgtccaca

SEQ ID NO: 348467 - DNA, 15 bp, Homo sapiens
ttgctacatgtccac

SEQ ID NO: 348468 - DNA, 15 bp, Homo sapiens
attgctacatgtcca

SEQ ID NO: 348469 - DNA, 15 bp, Homo sapiens
cattgctacatgtcc

SEQ ID NO: 348470 - DNA, 15 bp, Homo sapiens
acattgctacatgtc

SEQ ID NO: 348471 - DNA, 15 bp, Homo sapiens
gacattgctacatgt

SEQ ID NO: 348472 - DNA, 15 bp, Homo sapiens
agacattgctacatg

SEQ ID NO: 348473 - DNA, 15 bp, Homo sapiens
tagacattgctacat

SEQ ID NO: 348474 - DNA, 15 bp, Homo sapiens
atagacattgctaca

SEQ ID NO: 348475 - DNA, 15 bp, Homo sapiens
tatagacattgctac

SEQ ID NO: 348476 - DNA, 15 bp, Homo sapiens
atatagacattgcta

SEQ ID NO: 348477 - DNA, 15 bp, Homo sapiens
aatatagacattgct

SEQ ID NO: 348478 - DNA, 15 bp, Homo sapiens
caatatagacattgc

SEQ ID NO: 348479 - DNA, 15 bp, Homo sapiens
ccaatatagacattg

SEQ ID NO: 348480 - DNA, 15 bp, Homo sapiens
gccaatatagacatt

SEQ ID NO: 348481 - DNA, 15 bp, Homo sapiens
agccaatatagacat

SEQ ID NO: 348482 - DNA, 15 bp, Homo sapiens
gagccaatatagaca

SEQ ID NO: 348483 - DNA, 15 bp, Homo sapiens
tgagccaatatagac

SEQ ID NO: 348484 - DNA, 15 bp, Homo sapiens
atgagccaatataga

SEQ ID NO: 348485 - DNA, 15 bp, Homo sapiens
tatgagccaatatag

SEQ ID NO: 348486 - DNA, 15 bp, Homo sapiens
ttatgagccaatata

SEQ ID NO: 348487 - DNA, 15 bp, Homo sapiens
tttatgagccaatat

SEQ ID NO: 348488 - DNA, 15 bp, Homo sapiens
ttttatgagccaata

SEQ ID NO: 348489 - DNA, 15 bp, Homo sapiens
gttttatgagccaat

SEQ ID NO: 348490 - DNA, 15 bp, Homo sapiens
agttttatgagccaa

SEQ ID NO: 348491 - DNA, 15 bp, Homo sapiens
tagttttatgagcca

SEQ ID NO: 348492 - DNA, 15 bp, Homo sapiens
ttagttttatgagcc

SEQ ID NO: 348493 - DNA, 15 bp, Homo sapiens
gttagttttatgagc

SEQ ID NO: 348494 - DNA, 15 bp, Homo sapiens
ggttagttttatgag

SEQ ID NO: 348495 - DNA, 15 bp, Homo sapiens
aggttagttttatga

SEQ ID NO: 348496 - DNA, 15 bp, Homo sapiens
caggttagttttatg

SEQ ID NO: 348497 - DNA, 15 bp, Homo sapiens
tcaggttagttttat

SEQ ID NO: 348498 - DNA, 15 bp, Homo sapiens
ttcaggttagtttta

SEQ ID NO: 348499 - DNA, 15 bp, Homo sapiens
tttcaggttagtttt

SEQ ID NO: 348500 - DNA, 15 bp, Homo sapiens
ttttcaggttagttt

SEQ ID NO: 348501 - DNA, 15 bp, Homo sapiens
tttttcaggttagtt

SEQ ID NO: 348502 - DNA, 15 bp, Homo sapiens
gtttttcaggttagt

SEQ ID NO: 348503 - DNA, 15 bp, Homo sapiens
tgtttttcaggttag

SEQ ID NO: 348504 - DNA, 15 bp, Homo sapiens
ttgtttttcaggtta

SEQ ID NO: 348505 - DNA, 15 bp, Homo sapiens
tttgtttttcaggtt

SEQ ID NO: 348506 - DNA, 15 bp, Homo sapiens
atttgtttttcaggt

SEQ ID NO: 348507 - DNA, 15 bp, Homo sapiens
tatttgtttttcagg

SEQ ID NO: 348508 - DNA, 15 bp, Homo sapiens
ttatttgtttttcag

SEQ ID NO: 348509 - DNA, 15 bp, Homo sapiens
tttatttgtttttca

SEQ ID NO: 348510 - DNA, 15 bp, Homo sapiens
atttatttgtttttc

SEQ ID NO: 348511 - DNA, 15 bp, Homo sapiens
catttatttgttttt

SEQ ID NO: 348512 - DNA, 15 bp, Homo sapiens
gcatttatttgtttt

SEQ ID NO: 348513 - DNA, 15 bp, Homo sapiens
agcatttatttgttt

SEQ ID NO: 348514 - DNA, 15 bp, Homo sapiens
aagcatttatttgtt

SEQ ID NO: 348515 - DNA, 15 bp, Homo sapiens
aaagcatttatttgt

SEQ ID NO: 348516 - DNA, 15 bp, Homo sapiens
caaagcatttatttg

SEQ ID NO: 348517 - DNA, 15 bp, Homo sapiens
ccaaagcatttattt

SEQ ID NO: 348518 - DNA, 15 bp, Homo sapiens
tccaaagcatttatt

SEQ ID NO: 348519 - DNA, 15 bp, Homo sapiens
ttccaaagcatttat

SEQ ID NO: 348520 - DNA, 15 bp, Homo sapiens
tttccaaagcattta

SEQ ID NO: 348521 - DNA, 15 bp, Homo sapiens
atttccaaagcattt

SEQ ID NO: 348522 - DNA, 15 bp, Homo sapiens
catttccaaagcatt

SEQ ID NO: 348523 - DNA, 15 bp, Homo sapiens
acatttccaaagcat

SEQ ID NO: 348524 - DNA, 15 bp, Homo sapiens
aacatttccaaagca

SEQ ID NO: 348525 - DNA, 15 bp, Homo sapiens
aaacatttccaaagc

SEQ ID NO: 348526 - DNA, 15 bp, Homo sapiens
gaaacatttccaaag

SEQ ID NO: 348527 - DNA, 15 bp, Homo sapiens
tgaaacatttccaaa

SEQ ID NO: 348528 - DNA, 15 bp, Homo sapiens
ctgaaacatttccaa

SEQ ID NO: 348529 - DNA, 15 bp, Homo sapiens
actgaaacatttcca

SEQ ID NO: 348530 - DNA, 15 bp, Homo sapiens
aactgaaacatttcc

SEQ ID NO: 348531 - DNA, 15 bp, Homo sapiens
caactgaaacatttc

SEQ ID NO: 348532 - DNA, 15 bp, Homo sapiens
gcaactgaaacattt

SEQ ID NO: 348533 - DNA, 15 bp, Homo sapiens
agcaactgaaacatt

SEQ ID NO: 348534 - DNA, 15 bp, Homo sapiens
aagcaactgaaacat

SEQ ID NO: 348535 - DNA, 15 bp, Homo sapiens
aaagcaactgaaaca

SEQ ID NO: 348536 - DNA, 15 bp, Homo sapiens
taaagcaactgaaac

SEQ ID NO: 348537 - DNA, 15 bp, Homo sapiens
ctaaagcaactgaaa

SEQ ID NO: 348538 - DNA, 15 bp, Homo sapiens
tctaaagcaactgaa

SEQ ID NO: 348539 - DNA, 15 bp, Homo sapiens
ttctaaagcaactga

SEQ ID NO: 348540 - DNA, 15 bp, Homo sapiens
tttctaaagcaactg

SEQ ID NO: 348541 - DNA, 15 bp, Homo sapiens
gtttctaaagcaact

SEQ ID NO: 348542 - DNA, 15 bp, Homo sapiens
tgtttctaaagcaac

SEQ ID NO: 348543 - DNA, 15 bp, Homo sapiens
atgtttctaaagcaa

SEQ ID NO: 348544 - DNA, 15 bp, Homo sapiens
aatgtttctaaagca

SEQ ID NO: 348545 - DNA, 15 bp, Homo sapiens
taatgtttctaaagc

SEQ ID NO: 348546 - DNA, 15 bp, Homo sapiens
ctaatgtttctaaag

SEQ ID NO: 348547 - DNA, 15 bp, Homo sapiens
actaatgtttctaaa

SEQ ID NO: 348548 - DNA, 15 bp, Homo sapiens
cactaatgtttctaa

SEQ ID NO: 348549 - DNA, 15 bp, Homo sapiens
gcactaatgtttcta

SEQ ID NO: 348550 - DNA, 15 bp, Homo sapiens
ggcactaatgtttct

SEQ ID NO: 348551 - DNA, 15 bp, Homo sapiens
aggcactaatgtttc

SEQ ID NO: 348552 - DNA, 15 bp, Homo sapiens
caggcactaatgttt

SEQ ID NO: 348553 - DNA, 15 bp, Homo sapiens
gcaggcactaatgtt

SEQ ID NO: 348554 - DNA, 15 bp, Homo sapiens
ggcaggcactaatgt

SEQ ID NO: 348555 - DNA, 15 bp, Homo sapiens
aggcaggcactaatg

SEQ ID NO: 348556 - DNA, 15 bp, Homo sapiens
caggcaggcactaat

SEQ ID NO: 348557 - DNA, 15 bp, Homo sapiens
ccaggcaggcactaa

SEQ ID NO: 348558 - DNA, 15 bp, Homo sapiens
tccaggcaggcacta

SEQ ID NO: 348559 - DNA, 15 bp, Homo sapiens
atccaggcaggcact

SEQ ID NO: 348560 - DNA, 15 bp, Homo sapiens
gatccaggcaggcac

SEQ ID NO: 348561 - DNA, 15 bp, Homo sapiens
ggatccaggcaggca

SEQ ID NO: 348562 - DNA, 15 bp, Homo sapiens
gggatccaggcaggc

SEQ ID NO: 348563 - DNA, 15 bp, Homo sapiens
ggggatccaggcagg

SEQ ID NO: 348564 - DNA, 15 bp, Homo sapiens
aggggatccaggcag

SEQ ID NO: 348565 - DNA, 15 bp, Homo sapiens
aaggggatccaggca

SEQ ID NO: 348566 - DNA, 15 bp, Homo sapiens
taaggggatccaggc

SEQ ID NO: 348567 - DNA, 15 bp, Homo sapiens
ctaaggggatccagg

SEQ ID NO: 348568 - DNA, 15 bp, Homo sapiens
actaaggggatccag

SEQ ID NO: 348569 - DNA, 15 bp, Homo sapiens
aactaaggggatcca

SEQ ID NO: 348570 - DNA, 15 bp, Homo sapiens
aaactaaggggatcc

SEQ ID NO: 348571 - DNA, 15 bp, Homo sapiens
aaaactaaggggatc

SEQ ID NO: 348572 - DNA, 15 bp, Homo sapiens
caaaactaaggggat

SEQ ID NO: 348573 - DNA, 15 bp, Homo sapiens
tcaaaactaagggga

SEQ ID NO: 348574 - DNA, 15 bp, Homo sapiens
ttcaaaactaagggg

SEQ ID NO: 348575 - DNA, 15 bp, Homo sapiens
tttcaaaactaaggg

SEQ ID NO: 348576 - DNA, 15 bp, Homo sapiens
atttcaaaactaagg

SEQ ID NO: 348577 - DNA, 15 bp, Homo sapiens
tatttcaaaactaag

SEQ ID NO: 348578 - DNA, 15 bp, Homo sapiens
atatttcaaaactaa

SEQ ID NO: 348579 - DNA, 15 bp, Homo sapiens
aatatttcaaaacta

SEQ ID NO: 348580 - DNA, 15 bp, Homo sapiens
aaatatttcaaaact

SEQ ID NO: 348581 - DNA, 15 bp, Homo sapiens
caaatatttcaaaac

SEQ ID NO: 348582 - DNA, 15 bp, Homo sapiens
gcaaatatttcaaaa

SEQ ID NO: 348583 - DNA, 15 bp, Homo sapiens
ggcaaatatttcaaa

SEQ ID NO: 348584 - DNA, 15 bp, Homo sapiens
tggcaaatatttcaa

SEQ ID NO: 348585 - DNA, 15 bp, Homo sapiens
atggcaaatatttca

SEQ ID NO: 348586 - DNA, 15 bp, Homo sapiens
aatggcaaatatttc

SEQ ID NO: 348587 - DNA, 15 bp, Homo sapiens
caatggcaaatattt

SEQ ID NO: 348588 - DNA, 15 bp, Homo sapiens
acaatggcaaatatt

SEQ ID NO: 348589 - DNA, 15 bp, Homo sapiens
aacaatggcaaatat

SEQ ID NO: 348590 - DNA, 15 bp, Homo sapiens
caacaatggcaaata

SEQ ID NO: 348591 - DNA, 15 bp, Homo sapiens
acaacaatggcaaat

SEQ ID NO: 348592 - DNA, 15 bp, Homo sapiens
aacaacaatggcaaa

SEQ ID NO: 348593 - DNA, 15 bp, Homo sapiens
aaacaacaatggcaa

SEQ ID NO: 348594 - DNA, 15 bp, Homo sapiens
taaacaacaatggca

SEQ ID NO: 348595 - DNA, 15 bp, Homo sapiens
ttaaacaacaatggc

SEQ ID NO: 348596 - DNA, 15 bp, Homo sapiens
tttaaacaacaatgg

SEQ ID NO: 348597 - DNA, 15 bp, Homo sapiens
atttaaacaacaatg

SEQ ID NO: 348598 - DNA, 15 bp, Homo sapiens
tatttaaacaacaat

SEQ ID NO: 348599 - DNA, 15 bp, Homo sapiens
gtatttaaacaacaa

SEQ ID NO: 348600 - DNA, 15 bp, Homo sapiens
ggtatttaaacaaca

SEQ ID NO: 348601 - DNA, 15 bp, Homo sapiens
aggtatttaaacaac

SEQ ID NO: 348602 - DNA, 15 bp, Homo sapiens
taggtatttaaacaa

SEQ ID NO: 348603 - DNA, 15 bp, Homo sapiens
ataggtatttaaaca

SEQ ID NO: 348604 - DNA, 15 bp, Homo sapiens
gataggtatttaaac

SEQ ID NO: 348605 - DNA, 15 bp, Homo sapiens
tgataggtatttaaa

SEQ ID NO: 348606 - DNA, 15 bp, Homo sapiens
gtgataggtatttaa

SEQ ID NO: 348607 - DNA, 15 bp, Homo sapiens
agtgataggtattta

SEQ ID NO: 348608 - DNA, 15 bp, Homo sapiens
cagtgataggtattt

SEQ ID NO: 348609 - DNA, 15 bp, Homo sapiens
acagtgataggtatt

SEQ ID NO: 348610 - DNA, 15 bp, Homo sapiens
cacagtgataggtat

SEQ ID NO: 348611 - DNA, 15 bp, Homo sapiens
ccacagtgataggta

SEQ ID NO: 348612 - DNA, 15 bp, Homo sapiens
accacagtgataggt

SEQ ID NO: 348613 - DNA, 15 bp, Homo sapiens
taccacagtgatagg

SEQ ID NO: 348614 - DNA, 15 bp, Homo sapiens
ctaccacagtgatag

SEQ ID NO: 348615 - DNA, 15 bp, Homo sapiens
tctaccacagtgata

SEQ ID NO: 348616 - DNA, 15 bp, Homo sapiens
ctctaccacagtgat

SEQ ID NO: 348617 - DNA, 15 bp, Homo sapiens
gctctaccacagtga

SEQ ID NO: 348618 - DNA, 15 bp, Homo sapiens
agctctaccacagtg

SEQ ID NO: 348619 - DNA, 15 bp, Homo sapiens
aagctctaccacagt

SEQ ID NO: 348620 - DNA, 15 bp, Homo sapiens
caagctctaccacag

SEQ ID NO: 348621 - DNA, 15 bp, Homo sapiens
gcaagctctaccaca

SEQ ID NO: 348622 - DNA, 15 bp, Homo sapiens
tgcaagctctaccac

SEQ ID NO: 348623 - DNA, 15 bp, Homo sapiens
atgcaagctctacca

SEQ ID NO: 348624 - DNA, 15 bp, Homo sapiens
aatgcaagctctacc

SEQ ID NO: 348625 - DNA, 15 bp, Homo sapiens
caatgcaagctctac

SEQ ID NO: 348626 - DNA, 15 bp, Homo sapiens
tcaatgcaagctcta

SEQ ID NO: 348627 - DNA, 15 bp, Homo sapiens
atcaatgcaagctct

SEQ ID NO: 348628 - DNA, 15 bp, Homo sapiens
gatcaatgcaagctc

SEQ ID NO: 348629 - DNA, 15 bp, Homo sapiens
agatcaatgcaagct

SEQ ID NO: 348630 - DNA, 15 bp, Homo sapiens
aagatcaatgcaagc

SEQ ID NO: 348631 - DNA, 15 bp, Homo sapiens
aaagatcaatgcaag

SEQ ID NO: 348632 - DNA, 15 bp, Homo sapiens
aaaagatcaatgcaa

SEQ ID NO: 348633 - DNA, 15 bp, Homo sapiens
gaaaagatcaatgca

SEQ ID NO: 348634 - DNA, 15 bp, Homo sapiens
ggaaaagatcaatgc

SEQ ID NO: 348635 - DNA, 15 bp, Homo sapiens
tggaaaagatcaatg

SEQ ID NO: 348636 - DNA, 15 bp, Homo sapiens
gtggaaaagatcaat

SEQ ID NO: 348637 - DNA, 15 bp, Homo sapiens
tgtggaaaagatcaa

SEQ ID NO: 348638 - DNA, 15 bp, Homo sapiens
ttgtggaaaagatca

SEQ ID NO: 348639 - DNA, 15 bp, Homo sapiens
cttgtggaaaagatc

SEQ ID NO: 348640 - DNA, 15 bp, Homo sapiens
acttgtggaaaagat

SEQ ID NO: 348641 - DNA, 15 bp, Homo sapiens
tacttgtggaaaaga

SEQ ID NO: 348642 - DNA, 15 bp, Homo sapiens
atacttgtggaaaag

SEQ ID NO: 348643 - DNA, 15 bp, Homo sapiens
aatacttgtggaaaa

SEQ ID NO: 348644 - DNA, 15 bp, Homo sapiens
taatacttgtggaaa

SEQ ID NO: 348645 - DNA, 15 bp, Homo sapiens
ttaatacttgtggaa

SEQ ID NO: 348646 - DNA, 15 bp, Homo sapiens
tttaatacttgtgga

SEQ ID NO: 348647 - DNA, 15 bp, Homo sapiens
gtttaatacttgtgg

SEQ ID NO: 348648 - DNA, 15 bp, Homo sapiens
agtttaatacttgtg

SEQ ID NO: 348649 - DNA, 15 bp, Homo sapiens
cagtttaatacttgt

SEQ ID NO: 348650 - DNA, 15 bp, Homo sapiens
gcagtttaatacttg

SEQ ID NO: 348651 - DNA, 15 bp, Homo sapiens
ggcagtttaatactt

SEQ ID NO: 348652 - DNA, 15 bp, Homo sapiens
tggcagtttaatact

SEQ ID NO: 348653 - DNA, 15 bp, Homo sapiens
ttggcagtttaatac

SEQ ID NO: 348654 - DNA, 15 bp, Homo sapiens
tttggcagtttaata

SEQ ID NO: 348655 - DNA, 15 bp, Homo sapiens
ttttggcagtttaat

SEQ ID NO: 348656 - DNA, 15 bp, Homo sapiens
attttggcagtttaa

SEQ ID NO: 348657 - DNA, 15 bp, Homo sapiens
cattttggcagttta

SEQ ID NO: 348658 - DNA, 15 bp, Homo sapiens
acattttggcagttt

SEQ ID NO: 348659 - DNA, 15 bp, Homo sapiens
cacattttggcagtt

SEQ ID NO: 348660 - DNA, 15 bp, Homo sapiens
tcacattttggcagt

SEQ ID NO: 348661 - DNA, 15 bp, Homo sapiens
ttcacattttggcag

SEQ ID NO: 348662 - DNA, 15 bp, Homo sapiens
attcacattttggca

SEQ ID NO: 348663 - DNA, 15 bp, Homo sapiens
tattcacattttggc

SEQ ID NO: 348664 - DNA, 15 bp, Homo sapiens
atattcacattttgg

SEQ ID NO: 348665 - DNA, 15 bp, Homo sapiens
catattcacattttg

SEQ ID NO: 348666 - DNA, 15 bp, Homo sapiens
gcatattcacatttt

SEQ ID NO: 348667 - DNA, 15 bp, Homo sapiens
tgcatattcacattt

SEQ ID NO: 348668 - DNA, 15 bp, Homo sapiens
ttgcatattcacatt

SEQ ID NO: 348669 - DNA, 15 bp, Homo sapiens
tttgcatattcacat

SEQ ID NO: 348670 - DNA, 15 bp, Homo sapiens
ctttgcatattcaca

SEQ ID NO: 348671 - DNA, 15 bp, Homo sapiens
gctttgcatattcac

SEQ ID NO: 348672 - DNA, 15 bp, Homo sapiens
ggctttgcatattca

SEQ ID NO: 348673 - DNA, 15 bp, Homo sapiens
aggctttgcatattc

SEQ ID NO: 348674 - DNA, 15 bp, Homo sapiens
aaggctttgcatatt

SEQ ID NO: 348675 - DNA, 15 bp, Homo sapiens
aaaggctttgcatat

SEQ ID NO: 348676 - DNA, 15 bp, Homo sapiens
gaaaggctttgcata

SEQ ID NO: 348677 - DNA, 15 bp, Homo sapiens
agaaaggctttgcat

SEQ ID NO: 348678 - DNA, 15 bp, Homo sapiens
cagaaaggctttgca

SEQ ID NO: 348679 - DNA, 15 bp, Homo sapiens
tcagaaaggctttgc

SEQ ID NO: 348680 - DNA, 15 bp, Homo sapiens
ttcagaaaggctttg

SEQ ID NO: 348681 - DNA, 15 bp, Homo sapiens
attcagaaaggcttt

SEQ ID NO: 348682 - DNA, 15 bp, Homo sapiens
gattcagaaaggctt

SEQ ID NO: 348683 - DNA, 15 bp, Homo sapiens
agattcagaaaggct

SEQ ID NO: 348684 - DNA, 15 bp, Homo sapiens
tagattcagaaaggc

SEQ ID NO: 348685 - DNA, 15 bp, Homo sapiens
atagattcagaaagg

SEQ ID NO: 348686 - DNA, 15 bp, Homo sapiens
tatagattcagaaag

SEQ ID NO: 348687 - DNA, 15 bp, Homo sapiens
ttatagattcagaaa

SEQ ID NO: 348688 - DNA, 15 bp, Homo sapiens
attatagattcagaa

SEQ ID NO: 348689 - DNA, 15 bp, Homo sapiens
tattatagattcaga

SEQ ID NO: 348690 - DNA, 15 bp, Homo sapiens
ttattatagattcag

SEQ ID NO: 348691 - DNA, 15 bp, Homo sapiens
attattatagattca

SEQ ID NO: 348692 - DNA, 15 bp, Homo sapiens
cattattatagattc

SEQ ID NO: 348693 - DNA, 15 bp, Homo sapiens
ccattattatagatt

SEQ ID NO: 348694 - DNA, 15 bp, Homo sapiens
accattattatagat

SEQ ID NO: 348695 - DNA, 15 bp, Homo sapiens
taccattattataga

SEQ ID NO: 348696 - DNA, 15 bp, Homo sapiens
gtaccattattatag

SEQ ID NO: 348697 - DNA, 15 bp, Homo sapiens
agtaccattattata

SEQ ID NO: 348698 - DNA, 15 bp, Homo sapiens
aagtaccattattat

SEQ ID NO: 348699 - DNA, 15 bp, Homo sapiens
gaagtaccattatta

SEQ ID NO: 348700 - DNA, 15 bp, Homo sapiens
agaagtaccattatt

SEQ ID NO: 348701 - DNA, 15 bp, Homo sapiens
tagaagtaccattat

SEQ ID NO: 348702 - DNA, 15 bp, Homo sapiens
gtagaagtaccatta

SEQ ID NO: 348703 - DNA, 15 bp, Homo sapiens
agtagaagtaccatt

SEQ ID NO: 348704 - DNA, 15 bp, Homo sapiens
cagtagaagtaccat

SEQ ID NO: 348705 - DNA, 15 bp, Homo sapiens
ccagtagaagtacca

SEQ ID NO: 348706 - DNA, 15 bp, Homo sapiens
cccagtagaagtacc

SEQ ID NO: 348707 - DNA, 15 bp, Homo sapiens
ccccagtagaagtac

SEQ ID NO: 348708 - DNA, 15 bp, Homo sapiens
tccccagtagaagta

SEQ ID NO: 348709 - DNA, 15 bp, Homo sapiens
ctccccagtagaagt

SEQ ID NO: 348710 - DNA, 15 bp, Homo sapiens
tctccccagtagaag

SEQ ID NO: 348711 - DNA, 15 bp, Homo sapiens
ctctccccagtagaa

SEQ ID NO: 348712 - DNA, 15 bp, Homo sapiens
actctccccagtaga

SEQ ID NO: 348713 - DNA, 15 bp, Homo sapiens
cactctccccagtag

SEQ ID NO: 348714 - DNA, 15 bp, Homo sapiens
acactctccccagta

SEQ ID NO: 348715 - DNA, 15 bp, Homo sapiens
tacactctccccagt

SEQ ID NO: 348716 - DNA, 15 bp, Homo sapiens
ttacactctccccag

SEQ ID NO: 348717 - DNA, 15 bp, Homo sapiens
attacactctcccca

SEQ ID NO: 348718 - DNA, 15 bp, Homo sapiens
tattacactctcccc

SEQ ID NO: 348719 - DNA, 15 bp, Homo sapiens
atattacactctccc

SEQ ID NO: 348720 - DNA, 15 bp, Homo sapiens
aatattacactctcc

SEQ ID NO: 348721 - DNA, 15 bp, Homo sapiens
aaatattacactctc

SEQ ID NO: 348722 - DNA, 15 bp, Homo sapiens
aaaatattacactct

SEQ ID NO: 348723 - DNA, 15 bp, Homo sapiens
caaaatattacactc

SEQ ID NO: 348724 - DNA, 15 bp, Homo sapiens
ccaaaatattacact

SEQ ID NO: 348725 - DNA, 15 bp, Homo sapiens
tccaaaatattacac

SEQ ID NO: 348726 - DNA, 15 bp, Homo sapiens
gtccaaaatattaca

SEQ ID NO: 348727 - DNA, 15 bp, Homo sapiens
agtccaaaatattac

SEQ ID NO: 348728 - DNA, 15 bp, Homo sapiens
cagtccaaaatatta

SEQ ID NO: 348729 - DNA, 15 bp, Homo sapiens
gcagtccaaaatatt

SEQ ID NO: 348730 - DNA, 15 bp, Homo sapiens
agcagtccaaaatat

SEQ ID NO: 348731 - DNA, 15 bp, Homo sapiens
cagcagtccaaaata

SEQ ID NO: 348732 - DNA, 15 bp, Homo sapiens
acagcagtccaaaat

SEQ ID NO: 348733 - DNA, 15 bp, Homo sapiens
aacagcagtccaaaa

SEQ ID NO: 348734 - DNA, 15 bp, Homo sapiens
aaacagcagtccaaa

SEQ ID NO: 348735 - DNA, 15 bp, Homo sapiens
aaaacagcagtccaa

SEQ ID NO: 348736 - DNA, 15 bp, Homo sapiens
gaaaacagcagtcca

SEQ ID NO: 348737 - DNA, 15 bp, Homo sapiens
ggaaaacagcagtcc

SEQ ID NO: 348738 - DNA, 15 bp, Homo sapiens
tggaaaacagcagtc

SEQ ID NO: 348739 - DNA, 15 bp, Homo sapiens
atggaaaacagcagt

SEQ ID NO: 348740 - DNA, 15 bp, Homo sapiens
aatggaaaacagcag

SEQ ID NO: 348741 - DNA, 15 bp, Homo sapiens
taatggaaaacagca

SEQ ID NO: 348742 - DNA, 15 bp, Homo sapiens
ttaatggaaaacagc

SEQ ID NO: 348743 - DNA, 15 bp, Homo sapiens
attaatggaaaacag

SEQ ID NO: 348744 - DNA, 15 bp, Homo sapiens
cattaatggaaaaca

SEQ ID NO: 348745 - DNA, 15 bp, Homo sapiens
tcattaatggaaaac

SEQ ID NO: 348746 - DNA, 15 bp, Homo sapiens
ctcattaatggaaaa

SEQ ID NO: 348747 - DNA, 15 bp, Homo sapiens
cctcattaatggaaa

SEQ ID NO: 348748 - DNA, 15 bp, Homo sapiens
tcctcattaatggaa

SEQ ID NO: 348749 - DNA, 15 bp, Homo sapiens
ctcctcattaatgga

SEQ ID NO: 348750 - DNA, 15 bp, Homo sapiens
tctcctcattaatgg

SEQ ID NO: 348751 - DNA, 15 bp, Homo sapiens
ctctcctcattaatg

SEQ ID NO: 348752 - DNA, 15 bp, Homo sapiens
gctctcctcattaat

SEQ ID NO: 348753 - DNA, 15 bp, Homo sapiens
tgctctcctcattaa

SEQ ID NO: 348754 - DNA, 15 bp, Homo sapiens
ttgctctcctcatta

SEQ ID NO: 348755 - DNA, 15 bp, Homo sapiens
gttgctctcctcatt

SEQ ID NO: 348756 - DNA, 15 bp, Homo sapiens
tgttgctctcctcat

SEQ ID NO: 348757 - DNA, 15 bp, Homo sapiens
ctgttgctctcctca

SEQ ID NO: 348758 - DNA, 15 bp, Homo sapiens
cctgttgctctcctc

SEQ ID NO: 348759 - DNA, 15 bp, Homo sapiens
gcctgttgctctcct

SEQ ID NO: 348760 - DNA, 15 bp, Homo sapiens
ggcctgttgctctcc

SEQ ID NO: 348761 - DNA, 15 bp, Homo sapiens
gggcctgttgctctc

SEQ ID NO: 348762 - DNA, 15 bp, Homo sapiens
ggggcctgttgctct

SEQ ID NO: 348763 - DNA, 15 bp, Homo sapiens
aggggcctgttgctc

SEQ ID NO: 348764 - DNA, 15 bp, Homo sapiens
caggggcctgttgct

SEQ ID NO: 348765 - DNA, 15 bp, Homo sapiens
tcaggggcctgttgc

SEQ ID NO: 348766 - DNA, 15 bp, Homo sapiens
atcaggggcctgttg

SEQ ID NO: 348767 - DNA, 15 bp, Homo sapiens
aatcaggggcctgtt

SEQ ID NO: 348768 - DNA, 15 bp, Homo sapiens
taatcaggggcctgt

SEQ ID NO: 348769 - DNA, 15 bp, Homo sapiens
ataatcaggggcctg

SEQ ID NO: 348770 - DNA, 15 bp, Homo sapiens
tataatcaggggcct

SEQ ID NO: 348771 - DNA, 15 bp, Homo sapiens
gtataatcaggggcc

SEQ ID NO: 348772 - DNA, 15 bp, Homo sapiens
tgtataatcaggggc

SEQ ID NO: 348773 - DNA, 15 bp, Homo sapiens
ctgtataatcagggg

SEQ ID NO: 348774 - DNA, 15 bp, Homo sapiens
actgtataatcaggg

SEQ ID NO: 348775 - DNA, 15 bp, Homo sapiens
aactgtataatcagg

SEQ ID NO: 348776 - DNA, 15 bp, Homo sapiens
gaactgtataatcag

SEQ ID NO: 348777 - DNA, 15 bp, Homo sapiens
ggaactgtataatca

SEQ ID NO: 348778 - DNA, 15 bp, Homo sapiens
tggaactgtataatc

SEQ ID NO: 348779 - DNA, 15 bp, Homo sapiens
ttggaactgtataat

SEQ ID NO: 348780 - DNA, 15 bp, Homo sapiens
tttggaactgtataa

SEQ ID NO: 348781 - DNA, 15 bp, Homo sapiens
ctttggaactgtata

SEQ ID NO: 348782 - DNA, 15 bp, Homo sapiens
actttggaactgtat

SEQ ID NO: 348783 - DNA, 15 bp, Homo sapiens
tactttggaactgta

SEQ ID NO: 348784 - DNA, 15 bp, Homo sapiens
ttactttggaactgt

SEQ ID NO: 348785 - DNA, 15 bp, Homo sapiens
attactttggaactg

SEQ ID NO: 348786 - DNA, 15 bp, Homo sapiens
tattactttggaact

SEQ ID NO: 348787 - DNA, 15 bp, Homo sapiens
ttattactttggaac

SEQ ID NO: 348788 - DNA, 15 bp, Homo sapiens
cttattactttggaa

SEQ ID NO: 348789 - DNA, 15 bp, Homo sapiens
tcttattactttgga

SEQ ID NO: 348790 - DNA, 15 bp, Homo sapiens
atcttattactttgg

SEQ ID NO: 348791 - DNA, 15 bp, Homo sapiens
catcttattactttg

SEQ ID NO: 348792 - DNA, 15 bp, Homo sapiens
acatcttattacttt

SEQ ID NO: 348793 - DNA, 15 bp, Homo sapiens
aacatcttattactt

SEQ ID NO: 348794 - DNA, 15 bp, Homo sapiens
taacatcttattact

SEQ ID NO: 348795 - DNA, 15 bp, Homo sapiens
ttaacatcttattac

SEQ ID NO: 348796 - DNA, 15 bp, Homo sapiens
attaacatcttatta

SEQ ID NO: 348797 - DNA, 15 bp, Homo sapiens
aattaacatcttatt

SEQ ID NO: 348798 - DNA, 15 bp, Homo sapiens
caattaacatcttat

SEQ ID NO: 348799 - DNA, 15 bp, Homo sapiens
acaattaacatctta

SEQ ID NO: 348800 - DNA, 15 bp, Homo sapiens
tacaattaacatctt

SEQ ID NO: 348801 - DNA, 15 bp, Homo sapiens
ttacaattaacatct

SEQ ID NO: 348802 - DNA, 15 bp, Homo sapiens
attacaattaacatc

SEQ ID NO: 348803 - DNA, 15 bp, Homo sapiens
aattacaattaacat

SEQ ID NO: 348804 - DNA, 15 bp, Homo sapiens
gaattacaattaaca

SEQ ID NO: 348805 - DNA, 15 bp, Homo sapiens
tgaattacaattaac

SEQ ID NO: 348806 - DNA, 15 bp, Homo sapiens
ctgaattacaattaa

SEQ ID NO: 348807 - DNA, 15 bp, Homo sapiens
gctgaattacaatta

SEQ ID NO: 348808 - DNA, 15 bp, Homo sapiens
ggctgaattacaatt

SEQ ID NO: 348809 - DNA, 15 bp, Homo sapiens
tggctgaattacaat

SEQ ID NO: 348810 - DNA, 15 bp, Homo sapiens
ctggctgaattacaa

SEQ ID NO: 348811 - DNA, 15 bp, Homo sapiens
tctggctgaattaca

SEQ ID NO: 348812 - DNA, 15 bp, Homo sapiens
ttctggctgaattac

SEQ ID NO: 348813 - DNA, 15 bp, Homo sapiens
tttctggctgaatta

SEQ ID NO: 348814 - DNA, 15 bp, Homo sapiens
ctttctggctgaatt

SEQ ID NO: 348815 - DNA, 15 bp, Homo sapiens
actttctggctgaat

SEQ ID NO: 348816 - DNA, 15 bp, Homo sapiens
tactttctggctgaa

SEQ ID NO: 348817 - DNA, 15 bp, Homo sapiens
gtactttctggctga

SEQ ID NO: 348818 - DNA, 15 bp, Homo sapiens
tgtactttctggctg

SEQ ID NO: 348819 - DNA, 15 bp, Homo sapiens
atgtactttctggct

SEQ ID NO: 348820 - DNA, 15 bp, Homo sapiens
catgtactttctggc

SEQ ID NO: 348821 - DNA, 15 bp, Homo sapiens
acatgtactttctgg

SEQ ID NO: 348822 - DNA, 15 bp, Homo sapiens
gacatgtactttctg

SEQ ID NO: 348823 - DNA, 15 bp, Homo sapiens
agacatgtactttct

SEQ ID NO: 348824 - DNA, 15 bp, Homo sapiens
gagacatgtactttc

SEQ ID NO: 348825 - DNA, 15 bp, Homo sapiens
ggagacatgtacttt

SEQ ID NO: 348826 - DNA, 15 bp, Homo sapiens
gggagacatgtactt

SEQ ID NO: 348827 - DNA, 15 bp, Homo sapiens
tgggagacatgtact

SEQ ID NO: 348828 - DNA, 15 bp, Homo sapiens
atgggagacatgtac

SEQ ID NO: 348829 - DNA, 15 bp, Homo sapiens
aatgggagacatgta

SEQ ID NO: 348830 - DNA, 15 bp, Homo sapiens
caatgggagacatgt

SEQ ID NO: 348831 - DNA, 15 bp, Homo sapiens
ccaatgggagacatg

SEQ ID NO: 348832 - DNA, 15 bp, Homo sapiens
cccaatgggagacat

SEQ ID NO: 348833 - DNA, 15 bp, Homo sapiens
tcccaatgggagaca

SEQ ID NO: 348834 - DNA, 15 bp, Homo sapiens
ctcccaatgggagac

SEQ ID NO: 348835 - DNA, 15 bp, Homo sapiens
cctcccaatgggaga

SEQ ID NO: 348836 - DNA, 15 bp, Homo sapiens
tcctcccaatgggag

SEQ ID NO: 348837 - DNA, 15 bp, Homo sapiens
atcctcccaatggga

SEQ ID NO: 348838 - DNA, 15 bp, Homo sapiens
aatcctcccaatggg

SEQ ID NO: 348839 - DNA, 15 bp, Homo sapiens
aaatcctcccaatgg

SEQ ID NO: 348840 - DNA, 15 bp, Homo sapiens
caaatcctcccaatg

SEQ ID NO: 348841 - DNA, 15 bp, Homo sapiens
ccaaatcctcccaat

SEQ ID NO: 348842 - DNA, 15 bp, Homo sapiens
accaaatcctcccaa

SEQ ID NO: 348843 - DNA, 15 bp, Homo sapiens
caccaaatcctccca

SEQ ID NO: 348844 - DNA, 15 bp, Homo sapiens
acaccaaatcctccc

SEQ ID NO: 348845 - DNA, 15 bp, Homo sapiens
aacaccaaatcctcc

SEQ ID NO: 348846 - DNA, 15 bp, Homo sapiens
taacaccaaatcctc

SEQ ID NO: 348847 - DNA, 15 bp, Homo sapiens
ttaacaccaaatcct

SEQ ID NO: 348848 - DNA, 15 bp, Homo sapiens
tttaacaccaaatcc

SEQ ID NO: 348849 - DNA, 15 bp, Homo sapiens
atttaacaccaaatc

SEQ ID NO: 348850 - DNA, 15 bp, Homo sapiens
tatttaacaccaaat

SEQ ID NO: 348851 - DNA, 15 bp, Homo sapiens
gtatttaacaccaaa

SEQ ID NO: 348852 - DNA, 15 bp, Homo sapiens
ggtatttaacaccaa

SEQ ID NO: 348853 - DNA, 15 bp, Homo sapiens
tggtatttaacacca

SEQ ID NO: 348854 - DNA, 15 bp, Homo sapiens
ttggtatttaacacc

SEQ ID NO: 348855 - DNA, 15 bp, Homo sapiens
tttggtatttaacac

SEQ ID NO: 348856 - DNA, 15 bp, Homo sapiens
gtttggtatttaaca

SEQ ID NO: 348857 - DNA, 15 bp, Homo sapiens
agtttggtatttaac

SEQ ID NO: 348858 - DNA, 15 bp, Homo sapiens
cagtttggtatttaa

SEQ ID NO: 348859 - DNA, 15 bp, Homo sapiens
gcagtttggtattta

SEQ ID NO: 348860 - DNA, 15 bp, Homo sapiens
agcagtttggtattt

SEQ ID NO: 348861 - DNA, 15 bp, Homo sapiens
tagcagtttggtatt

SEQ ID NO: 348862 - DNA, 15 bp, Homo sapiens
ctagcagtttggtat

SEQ ID NO: 348863 - DNA, 15 bp, Homo sapiens
gctagcagtttggta

SEQ ID NO: 348864 - DNA, 15 bp, Homo sapiens
ggctagcagtttggt

SEQ ID NO: 348865 - DNA, 15 bp, Homo sapiens
gggctagcagtttgg

SEQ ID NO: 348866 - DNA, 15 bp, Homo sapiens
agggctagcagtttg

SEQ ID NO: 348867 - DNA, 15 bp, Homo sapiens
tagggctagcagttt

SEQ ID NO: 348868 - DNA, 15 bp, Homo sapiens
ctagggctagcagtt

SEQ ID NO: 348869 - DNA, 15 bp, Homo sapiens
actagggctagcagt

SEQ ID NO: 348870 - DNA, 15 bp, Homo sapiens
tactagggctagcag

SEQ ID NO: 348871 - DNA, 15 bp, Homo sapiens
atactagggctagca

SEQ ID NO: 348872 - DNA, 15 bp, Homo sapiens
aatactagggctagc

SEQ ID NO: 348873 - DNA, 15 bp, Homo sapiens
taatactagggctag

SEQ ID NO: 348874 - DNA, 15 bp, Homo sapiens
ataatactagggcta

SEQ ID NO: 348875 - DNA, 15 bp, Homo sapiens
cataatactagggct

SEQ ID NO: 348876 - DNA, 15 bp, Homo sapiens
ccataatactagggc

SEQ ID NO: 348877 - DNA, 15 bp, Homo sapiens
tccataatactaggg

SEQ ID NO: 348878 - DNA, 15 bp, Homo sapiens
ctccataatactagg

SEQ ID NO: 348879 - DNA, 15 bp, Homo sapiens
tctccataatactag

SEQ ID NO: 348880 - DNA, 15 bp, Homo sapiens
atctccataatacta

SEQ ID NO: 348881 - DNA, 15 bp, Homo sapiens
catctccataatact

SEQ ID NO: 348882 - DNA, 15 bp, Homo sapiens
tcatctccataatac

SEQ ID NO: 348883 - DNA, 15 bp, Homo sapiens
ttcatctccataata

SEQ ID NO: 348884 - DNA, 15 bp, Homo sapiens
gttcatctccataat

SEQ ID NO: 348885 - DNA, 15 bp, Homo sapiens
tgttcatctccataa

SEQ ID NO: 348886 - DNA, 15 bp, Homo sapiens
atgttcatctccata

SEQ ID NO: 348887 - DNA, 15 bp, Homo sapiens
catgttcatctccat

SEQ ID NO: 348888 - DNA, 15 bp, Homo sapiens
tcatgttcatctcca

SEQ ID NO: 348889 - DNA, 15 bp, Homo sapiens
atcatgttcatctcc

SEQ ID NO: 348890 - DNA, 15 bp, Homo sapiens
catcatgttcatctc

SEQ ID NO: 348891 - DNA, 15 bp, Homo sapiens
tcatcatgttcatct

SEQ ID NO: 348892 - DNA, 15 bp, Homo sapiens
atcatcatgttcatc

SEQ ID NO: 348893 - DNA, 15 bp, Homo sapiens
catcatcatgttcat

SEQ ID NO: 348894 - DNA, 15 bp, Homo sapiens
acatcatcatgttca

SEQ ID NO: 348895 - DNA, 15 bp, Homo sapiens
tacatcatcatgttc

SEQ ID NO: 348896 - DNA, 15 bp, Homo sapiens
ttacatcatcatgtt

SEQ ID NO: 348897 - DNA, 15 bp, Homo sapiens
gttacatcatcatgt

SEQ ID NO: 348898 - DNA, 15 bp, Homo sapiens
agttacatcatcatg

SEQ ID NO: 348899 - DNA, 15 bp, Homo sapiens
aagttacatcatcat

SEQ ID NO: 348900 - DNA, 15 bp, Homo sapiens
caagttacatcatca

SEQ ID NO: 348901 - DNA, 15 bp, Homo sapiens
acaagttacatcatc

SEQ ID NO: 348902 - DNA, 15 bp, Homo sapiens
tacaagttacatcat

SEQ ID NO: 348903 - DNA, 15 bp, Homo sapiens
ttacaagttacatca

SEQ ID NO: 348904 - DNA, 15 bp, Homo sapiens
attacaagttacatc

SEQ ID NO: 348905 - DNA, 15 bp, Homo sapiens
tattacaagttacat

SEQ ID NO: 348906 - DNA, 15 bp, Homo sapiens
ctattacaagttaca

SEQ ID NO: 348907 - DNA, 15 bp, Homo sapiens
gctattacaagttac

SEQ ID NO: 348908 - DNA, 15 bp, Homo sapiens
tgctattacaagtta

SEQ ID NO: 348909 - DNA, 15 bp, Homo sapiens
ctgctattacaagtt

SEQ ID NO: 348910 - DNA, 15 bp, Homo sapiens
tctgctattacaagt

SEQ ID NO: 348911 - DNA, 15 bp, Homo sapiens
ttctgctattacaag

SEQ ID NO: 348912 - DNA, 15 bp, Homo sapiens
attctgctattacaa

SEQ ID NO: 348913 - DNA, 15 bp, Homo sapiens
tattctgctattaca

SEQ ID NO: 348914 - DNA, 15 bp, Homo sapiens
ctattctgctattac

SEQ ID NO: 348915 - DNA, 15 bp, Homo sapiens
actattctgctatta

SEQ ID NO: 348916 - DNA, 15 bp, Homo sapiens
aactattctgctatt

SEQ ID NO: 348917 - DNA, 15 bp, Homo sapiens
taactattctgctat

SEQ ID NO: 348918 - DNA, 15 bp, Homo sapiens
ttaactattctgcta

SEQ ID NO: 348919 - DNA, 15 bp, Homo sapiens
attaactattctgct

SEQ ID NO: 348920 - DNA, 15 bp, Homo sapiens
cattaactattctgc

SEQ ID NO: 348921 - DNA, 15 bp, Homo sapiens
tcattaactattctg

SEQ ID NO: 348922 - DNA, 15 bp, Homo sapiens
ttcattaactattct

SEQ ID NO: 348923 - DNA, 15 bp, Homo sapiens
attcattaactattc

SEQ ID NO: 348924 - DNA, 15 bp, Homo sapiens
cattcattaactatt

SEQ ID NO: 348925 - DNA, 15 bp, Homo sapiens
tcattcattaactat

SEQ ID NO: 348926 - DNA, 15 bp, Homo sapiens
ttcattcattaacta

SEQ ID NO: 348927 - DNA, 15 bp, Homo sapiens
tttcattcattaact

SEQ ID NO: 348928 - DNA, 15 bp, Homo sapiens
gtttcattcattaac

SEQ ID NO: 348929 - DNA, 15 bp, Homo sapiens
agtttcattcattaa

SEQ ID NO: 348930 - DNA, 15 bp, Homo sapiens
tagtttcattcatta

SEQ ID NO: 348931 - DNA, 15 bp, Homo sapiens
ctagtttcattcatt

SEQ ID NO: 348932 - DNA, 15 bp, Homo sapiens
actagtttcattcat

SEQ ID NO: 348933 - DNA, 15 bp, Homo sapiens
aactagtttcattca

SEQ ID NO: 348934 - DNA, 15 bp, Homo sapiens
gaactagtttcattc

SEQ ID NO: 348935 - DNA, 15 bp, Homo sapiens
agaactagtttcatt

SEQ ID NO: 348936 - DNA, 15 bp, Homo sapiens
aagaactagtttcat

SEQ ID NO: 348937 - DNA, 15 bp, Homo sapiens
taagaactagtttca

SEQ ID NO: 348938 - DNA, 15 bp, Homo sapiens
ataagaactagtttc

SEQ ID NO: 348939 - DNA, 15 bp, Homo sapiens
tataagaactagttt

SEQ ID NO: 348940 - DNA, 15 bp, Homo sapiens
ttataagaactagtt

SEQ ID NO: 348941 - DNA, 15 bp, Homo sapiens
attataagaactagt

SEQ ID NO: 348942 - DNA, 15 bp, Homo sapiens
aattataagaactag

SEQ ID NO: 348943 - DNA, 15 bp, Homo sapiens
aaattataagaacta

SEQ ID NO: 348944 - DNA, 15 bp, Homo sapiens
taaattataagaact

SEQ ID NO: 348945 - DNA, 15 bp, Homo sapiens
ataaattataagaac

SEQ ID NO: 348946 - DNA, 15 bp, Homo sapiens
gataaattataagaa

SEQ ID NO: 348947 - DNA, 15 bp, Homo sapiens
agataaattataaga

SEQ ID NO: 348948 - DNA, 15 bp, Homo sapiens
aagataaattataag

SEQ ID NO: 348949 - DNA, 15 bp, Homo sapiens
aaagataaattataa

SEQ ID NO: 348950 - DNA, 15 bp, Homo sapiens
taaagataaattata

SEQ ID NO: 348951 - DNA, 15 bp, Homo sapiens
ataaagataaattat

SEQ ID NO: 348952 - DNA, 15 bp, Homo sapiens
aataaagataaatta

SEQ ID NO: 348953 - DNA, 15 bp, Homo sapiens
aaataaagataaatt

SEQ ID NO: 348954 - DNA, 15 bp, Homo sapiens
taaataaagataaat

SEQ ID NO: 348955 - DNA, 15 bp, Homo sapiens
ttaaataaagataaa

SEQ ID NO: 348956 - DNA, 15 bp, Homo sapiens
tttaaataaagataa

SEQ ID NO: 348957 - DNA, 15 bp, Homo sapiens
ttttaaataaagata

SEQ ID NO: 348958 - DNA, 15 bp, Homo sapiens
cttttaaataaagat

SEQ ID NO: 348959 - DNA, 15 bp, Homo sapiens
gcttttaaataaaga

SEQ ID NO: 348960 - DNA, 15 bp, Homo sapiens
agcttttaaataaag

SEQ ID NO: 348961 - DNA, 15 bp, Homo sapiens
aagcttttaaataaa

SEQ ID NO: 348962 - DNA, 15 bp, Homo sapiens
taagcttttaaataa

SEQ ID NO: 348963 - DNA, 15 bp, Homo sapiens
ctaagcttttaaata

SEQ ID NO: 348964 - DNA, 15 bp, Homo sapiens
gctaagcttttaaat

SEQ ID NO: 348965 - DNA, 15 bp, Homo sapiens
ggctaagcttttaaa

SEQ ID NO: 348966 - DNA, 15 bp, Homo sapiens
aggctaagcttttaa

SEQ ID NO: 348967 - DNA, 15 bp, Homo sapiens
caggctaagctttta

SEQ ID NO: 348968 - DNA, 15 bp, Homo sapiens
gcaggctaagctttt

SEQ ID NO: 348969 - DNA, 15 bp, Homo sapiens
ggcaggctaagcttt

SEQ ID NO: 348970 - DNA, 15 bp, Homo sapiens
aggcaggctaagctt

SEQ ID NO: 348971 - DNA, 15 bp, Homo sapiens
aaggcaggctaagct

SEQ ID NO: 348972 - DNA, 15 bp, Homo sapiens
taaggcaggctaagc

SEQ ID NO: 348973 - DNA, 15 bp, Homo sapiens
ttaaggcaggctaag

SEQ ID NO: 348974 - DNA, 15 bp, Homo sapiens
tttaaggcaggctaa

SEQ ID NO: 348975 - DNA, 15 bp, Homo sapiens
ttttaaggcaggcta

SEQ ID NO: 348976 - DNA, 15 bp, Homo sapiens
gttttaaggcaggct

SEQ ID NO: 348977 - DNA, 15 bp, Homo sapiens
agttttaaggcaggc

SEQ ID NO: 348978 - DNA, 15 bp, Homo sapiens
tagttttaaggcagg

SEQ ID NO: 348979 - DNA, 15 bp, Homo sapiens
ctagttttaaggcag

SEQ ID NO: 348980 - DNA, 15 bp, Homo sapiens
tctagttttaaggca

SEQ ID NO: 348981 - DNA, 15 bp, Homo sapiens
ctctagttttaaggc

SEQ ID NO: 348982 - DNA, 15 bp, Homo sapiens
tctctagttttaagg

SEQ ID NO: 348983 - DNA, 15 bp, Homo sapiens
atctctagttttaag

SEQ ID NO: 348984 - DNA, 15 bp, Homo sapiens
gatctctagttttaa

SEQ ID NO: 348985 - DNA, 15 bp, Homo sapiens
tgatctctagtttta

SEQ ID NO: 348986 - DNA, 15 bp, Homo sapiens
ttgatctctagtttt

SEQ ID NO: 348987 - DNA, 15 bp, Homo sapiens
gttgatctctagttt

SEQ ID NO: 348988 - DNA, 15 bp, Homo sapiens
agttgatctctagtt

SEQ ID NO: 348989 - DNA, 15 bp, Homo sapiens
aagttgatctctagt

SEQ ID NO: 348990 - DNA, 15 bp, Homo sapiens
aaagttgatctctag

SEQ ID NO: 348991 - DNA, 15 bp, Homo sapiens
gaaagttgatctcta

SEQ ID NO: 348992 - DNA, 15 bp, Homo sapiens
agaaagttgatctct

SEQ ID NO: 348993 - DNA, 15 bp, Homo sapiens
gagaaagttgatctc

SEQ ID NO: 348994 - DNA, 15 bp, Homo sapiens
tgagaaagttgatct

SEQ ID NO: 348995 - DNA, 15 bp, Homo sapiens
ctgagaaagttgatc

SEQ ID NO: 348996 - DNA, 15 bp, Homo sapiens
gctgagaaagttgat

SEQ ID NO: 348997 - DNA, 15 bp, Homo sapiens
agctgagaaagttga

SEQ ID NO: 348998 - DNA, 15 bp, Homo sapiens
cagctgagaaagttg

SEQ ID NO: 348999 - DNA, 15 bp, Homo sapiens
gcagctgagaaagtt

SEQ ID NO: 349000 - DNA, 15 bp, Homo sapiens
tgcagctgagaaagt

SEQ ID NO: 349001 - DNA, 15 bp, Homo sapiens
ttgcagctgagaaag

SEQ ID NO: 349002 - DNA, 15 bp, Homo sapiens
tttgcagctgagaaa

SEQ ID NO: 349003 - DNA, 15 bp, Homo sapiens
ttttgcagctgagaa

SEQ ID NO: 349004 - DNA, 15 bp, Homo sapiens
cttttgcagctgaga

SEQ ID NO: 349005 - DNA, 15 bp, Homo sapiens
gcttttgcagctgag

SEQ ID NO: 349006 - DNA, 15 bp, Homo sapiens
agcttttgcagctga

SEQ ID NO: 349007 - DNA, 15 bp, Homo sapiens
aagcttttgcagctg

SEQ ID NO: 349008 - DNA, 15 bp, Homo sapiens
gaagcttttgcagct

SEQ ID NO: 349009 - DNA, 15 bp, Homo sapiens
agaagcttttgcagc

SEQ ID NO: 349010 - DNA, 15 bp, Homo sapiens
tagaagcttttgcag

SEQ ID NO: 349011 - DNA, 15 bp, Homo sapiens
ctagaagcttttgca

SEQ ID NO: 349012 - DNA, 15 bp, Homo sapiens
actagaagcttttgc

SEQ ID NO: 349013 - DNA, 15 bp, Homo sapiens
gactagaagcttttg

SEQ ID NO: 349014 - DNA, 15 bp, Homo sapiens
agactagaagctttt

SEQ ID NO: 349015 - DNA, 15 bp, Homo sapiens
aagactagaagcttt

SEQ ID NO: 349016 - DNA, 15 bp, Homo sapiens
aaagactagaagctt

SEQ ID NO: 349017 - DNA, 15 bp, Homo sapiens
gaaagactagaagct

SEQ ID NO: 349018 - DNA, 15 bp, Homo sapiens
tgaaagactagaagc

SEQ ID NO: 349019 - DNA, 15 bp, Homo sapiens
ttgaaagactagaag

SEQ ID NO: 349020 - DNA, 15 bp, Homo sapiens
cttgaaagactagaa

SEQ ID NO: 349021 - DNA, 15 bp, Homo sapiens
tcttgaaagactaga

SEQ ID NO: 349022 - DNA, 15 bp, Homo sapiens
ttcttgaaagactag

SEQ ID NO: 349023 - DNA, 15 bp, Homo sapiens
cttcttgaaagacta

SEQ ID NO: 349024 - DNA, 15 bp, Homo sapiens
acttcttgaaagact

SEQ ID NO: 349025 - DNA, 15 bp, Homo sapiens
aacttcttgaaagac

SEQ ID NO: 349026 - DNA, 15 bp, Homo sapiens
gaacttcttgaaaga

SEQ ID NO: 349027 - DNA, 15 bp, Homo sapiens
tgaacttcttgaaag

SEQ ID NO: 349028 - DNA, 15 bp, Homo sapiens
atgaacttcttgaaa

SEQ ID NO: 349029 - DNA, 15 bp, Homo sapiens
tatgaacttcttgaa

SEQ ID NO: 349030 - DNA, 15 bp, Homo sapiens
gtatgaacttcttga

SEQ ID NO: 349031 - DNA, 15 bp, Homo sapiens
agtatgaacttcttg

SEQ ID NO: 349032 - DNA, 15 bp, Homo sapiens
aagtatgaacttctt

SEQ ID NO: 349033 - DNA, 15 bp, Homo sapiens
aaagtatgaacttct

SEQ ID NO: 349034 - DNA, 15 bp, Homo sapiens
taaagtatgaacttc

SEQ ID NO: 349035 - DNA, 15 bp, Homo sapiens
ataaagtatgaactt

SEQ ID NO: 349036 - DNA, 15 bp, Homo sapiens
cataaagtatgaact

SEQ ID NO: 349037 - DNA, 15 bp, Homo sapiens
tcataaagtatgaac

SEQ ID NO: 349038 - DNA, 15 bp, Homo sapiens
ttcataaagtatgaa

SEQ ID NO: 349039 - DNA, 15 bp, Homo sapiens
tttcataaagtatga

SEQ ID NO: 349040 - DNA, 15 bp, Homo sapiens
atttcataaagtatg

SEQ ID NO: 349041 - DNA, 15 bp, Homo sapiens
aatttcataaagtat

SEQ ID NO: 349042 - DNA, 15 bp, Homo sapiens
caatttcataaagta

SEQ ID NO: 349043 - DNA, 15 bp, Homo sapiens
gcaatttcataaagt

SEQ ID NO: 349044 - DNA, 15 bp, Homo sapiens
tgcaatttcataaag

SEQ ID NO: 349045 - DNA, 15 bp, Homo sapiens
gtgcaatttcataaa

SEQ ID NO: 349046 - DNA, 15 bp, Homo sapiens
tgtgcaatttcataa

SEQ ID NO: 349047 - DNA, 15 bp, Homo sapiens
ctgtgcaatttcata

SEQ ID NO: 349048 - DNA, 15 bp, Homo sapiens
actgtgcaatttcat

SEQ ID NO: 349049 - DNA, 15 bp, Homo sapiens
tactgtgcaatttca

SEQ ID NO: 349050 - DNA, 15 bp, Homo sapiens
ttactgtgcaatttc

SEQ ID NO: 349051 - DNA, 15 bp, Homo sapiens
cttactgtgcaattt

SEQ ID NO: 349052 - DNA, 15 bp, Homo sapiens
gcttactgtgcaatt

SEQ ID NO: 349053 - DNA, 15 bp, Homo sapiens
tgcttactgtgcaat

SEQ ID NO: 349054 - DNA, 15 bp, Homo sapiens
atgcttactgtgcaa

SEQ ID NO: 349055 - DNA, 15 bp, Homo sapiens
aatgcttactgtgca

SEQ ID NO: 349056 - DNA, 15 bp, Homo sapiens
aaatgcttactgtgc

SEQ ID NO: 349057 - DNA, 15 bp, Homo sapiens
taaatgcttactgtg

SEQ ID NO: 349058 - DNA, 15 bp, Homo sapiens
ataaatgcttactgt

SEQ ID NO: 349059 - DNA, 15 bp, Homo sapiens
aataaatgcttactg

SEQ ID NO: 349060 - DNA, 15 bp, Homo sapiens
aaataaatgcttact

SEQ ID NO: 349061 - DNA, 15 bp, Homo sapiens
aaaataaatgcttac

SEQ ID NO: 349062 - DNA, 15 bp, Homo sapiens
aaaaataaatgctta

SEQ ID NO: 349063 - DNA, 15 bp, Homo sapiens
gaaaaataaatgctt

SEQ ID NO: 349064 - DNA, 15 bp, Homo sapiens
tgaaaaataaatgct

SEQ ID NO: 349065 - DNA, 15 bp, Homo sapiens
ctgaaaaataaatgc

SEQ ID NO: 349066 - DNA, 15 bp, Homo sapiens
tctgaaaaataaatg

SEQ ID NO: 349067 - DNA, 15 bp, Homo sapiens
gtctgaaaaataaat

SEQ ID NO: 349068 - DNA, 15 bp, Homo sapiens
ggtctgaaaaataaa

SEQ ID NO: 349069 - DNA, 15 bp, Homo sapiens
tggtctgaaaaataa

SEQ ID NO: 349070 - DNA, 15 bp, Homo sapiens
atggtctgaaaaata

SEQ ID NO: 349071 - DNA, 15 bp, Homo sapiens
aatggtctgaaaaat

SEQ ID NO: 349072 - DNA, 15 bp, Homo sapiens
aaatggtctgaaaaa

SEQ ID NO: 349073 - DNA, 15 bp, Homo sapiens
aaaatggtctgaaaa

SEQ ID NO: 349074 - DNA, 15 bp, Homo sapiens
aaaaatggtctgaaa

SEQ ID NO: 349075 - DNA, 15 bp, Homo sapiens
caaaaatggtctgaa

SEQ ID NO: 349076 - DNA, 15 bp, Homo sapiens
tcaaaaatggtctga

SEQ ID NO: 349077 - DNA, 15 bp, Homo sapiens
ttcaaaaatggtctg

SEQ ID NO: 349078 - DNA, 15 bp, Homo sapiens
gttcaaaaatggtct

SEQ ID NO: 349079 - DNA, 15 bp, Homo sapiens
tgttcaaaaatggtc

SEQ ID NO: 349080 - DNA, 15 bp, Homo sapiens
atgttcaaaaatggt

SEQ ID NO: 349081 - DNA, 15 bp, Homo sapiens
gatgttcaaaaatgg

SEQ ID NO: 349082 - DNA, 15 bp, Homo sapiens
tgatgttcaaaaatg

SEQ ID NO: 349083 - DNA, 15 bp, Homo sapiens
gtgatgttcaaaaat

SEQ ID NO: 349084 - DNA, 15 bp, Homo sapiens
agtgatgttcaaaaa

SEQ ID NO: 349085 - DNA, 15 bp, Homo sapiens
gagtgatgttcaaaa

SEQ ID NO: 349086 - DNA, 15 bp, Homo sapiens
ggagtgatgttcaaa

SEQ ID NO: 349087 - DNA, 15 bp, Homo sapiens
aggagtgatgttcaa

SEQ ID NO: 349088 - DNA, 15 bp, Homo sapiens
taggagtgatgttca

SEQ ID NO: 349089 - DNA, 15 bp, Homo sapiens
ttaggagtgatgttc

SEQ ID NO: 349090 - DNA, 15 bp, Homo sapiens
tttaggagtgatgtt

SEQ ID NO: 349091 - DNA, 15 bp, Homo sapiens
atttaggagtgatgt

SEQ ID NO: 349092 - DNA, 15 bp, Homo sapiens
aatttaggagtgatg

SEQ ID NO: 349093 - DNA, 15 bp, Homo sapiens
taatttaggagtgat

SEQ ID NO: 349094 - DNA, 15 bp, Homo sapiens
ttaatttaggagtga

SEQ ID NO: 349095 - DNA, 15 bp, Homo sapiens
attaatttaggagtg

SEQ ID NO: 349096 - DNA, 15 bp, Homo sapiens
tattaatttaggagt

SEQ ID NO: 349097 - DNA, 15 bp, Homo sapiens
ttattaatttaggag

SEQ ID NO: 349098 - DNA, 15 bp, Homo sapiens
tttattaatttagga

SEQ ID NO: 349099 - DNA, 15 bp, Homo sapiens
ctttattaatttagg

SEQ ID NO: 349100 - DNA, 15 bp, Homo sapiens
actttattaatttag

SEQ ID NO: 349101 - DNA, 15 bp, Homo sapiens
tactttattaattta

SEQ ID NO: 349102 - DNA, 15 bp, Homo sapiens
atactttattaattt

SEQ ID NO: 349103 - DNA, 15 bp, Homo sapiens
aatactttattaatt

SEQ ID NO: 349104 - DNA, 15 bp, Homo sapiens
gaatactttattaat

SEQ ID NO: 349105 - DNA, 15 bp, Homo sapiens
ggaatactttattaa

SEQ ID NO: 349106 - DNA, 15 bp, Homo sapiens
aggaatactttatta

SEQ ID NO: 349107 - DNA, 15 bp, Homo sapiens
gaggaatactttatt

SEQ ID NO: 349108 - DNA, 15 bp, Homo sapiens
agaggaatactttat

SEQ ID NO: 349109 - DNA, 15 bp, Homo sapiens
cagaggaatacttta

SEQ ID NO: 349110 - DNA, 15 bp, Homo sapiens
acagaggaatacttt

SEQ ID NO: 349111 - DNA, 15 bp, Homo sapiens
aacagaggaatactt

SEQ ID NO: 349112 - DNA, 15 bp, Homo sapiens
caacagaggaatact

SEQ ID NO: 349113 - DNA, 15 bp, Homo sapiens
gcaacagaggaatac

SEQ ID NO: 349114 - DNA, 15 bp, Homo sapiens
agcaacagaggaata

SEQ ID NO: 349115 - DNA, 15 bp, Homo sapiens
aagcaacagaggaat

SEQ ID NO: 349116 - DNA, 15 bp, Homo sapiens
aaagcaacagaggaa

SEQ ID NO: 349117 - DNA, 15 bp, Homo sapiens
taaagcaacagagga

SEQ ID NO: 349118 - DNA, 15 bp, Homo sapiens
ctaaagcaacagagg

SEQ ID NO: 349119 - DNA, 15 bp, Homo sapiens
actaaagcaacagag

SEQ ID NO: 349120 - DNA, 15 bp, Homo sapiens
tactaaagcaacaga

SEQ ID NO: 349121 - DNA, 15 bp, Homo sapiens
atactaaagcaacag

SEQ ID NO: 349122 - DNA, 15 bp, Homo sapiens
aatactaaagcaaca

SEQ ID NO: 349123 - DNA, 15 bp, Homo sapiens
aaatactaaagcaac

SEQ ID NO: 349124 - DNA, 15 bp, Homo sapiens
taaatactaaagcaa

SEQ ID NO: 349125 - DNA, 15 bp, Homo sapiens
ataaatactaaagca

SEQ ID NO: 349126 - DNA, 15 bp, Homo sapiens
aataaatactaaagc

SEQ ID NO: 349127 - DNA, 15 bp, Homo sapiens
taataaatactaaag

SEQ ID NO: 349128 - DNA, 15 bp, Homo sapiens
gtaataaatactaaa

SEQ ID NO: 349129 - DNA, 15 bp, Homo sapiens
tgtaataaatactaa

SEQ ID NO: 349130 - DNA, 15 bp, Homo sapiens
ttgtaataaatacta

SEQ ID NO: 349131 - DNA, 15 bp, Homo sapiens
attgtaataaatact

SEQ ID NO: 349132 - DNA, 15 bp, Homo sapiens
tattgtaataaatac

SEQ ID NO: 349133 - DNA, 15 bp, Homo sapiens
ttattgtaataaata

SEQ ID NO: 349134 - DNA, 15 bp, Homo sapiens
tttattgtaataaat

SEQ ID NO: 349135 - DNA, 15 bp, Homo sapiens
ttttattgtaataaa

SEQ ID NO: 349136 - DNA, 15 bp, Homo sapiens
tttttattgtaataa

SEQ ID NO: 349137 - DNA, 15 bp, Homo sapiens
ctttttattgtaata

SEQ ID NO: 349138 - DNA, 15 bp, Homo sapiens
cctttttattgtaat

SEQ ID NO: 349139 - DNA, 15 bp, Homo sapiens
ccctttttattgtaa

SEQ ID NO: 349140 - DNA, 15 bp, Homo sapiens
accctttttattgta

SEQ ID NO: 349141 - DNA, 15 bp, Homo sapiens
aaccctttttattgt

SEQ ID NO: 349142 - DNA, 15 bp, Homo sapiens
aaaccctttttattg

SEQ ID NO: 349143 - DNA, 15 bp, Homo sapiens
caaaccctttttatt

SEQ ID NO: 349144 - DNA, 15 bp, Homo sapiens
tcaaaccctttttat

SEQ ID NO: 349145 - DNA, 15 bp, Homo sapiens
ttcaaacccttttta

SEQ ID NO: 349146 - DNA, 15 bp, Homo sapiens
tttcaaacccttttt

SEQ ID NO: 349147 - DNA, 15 bp, Homo sapiens
atttcaaaccctttt

SEQ ID NO: 349148 - DNA, 15 bp, Homo sapiens
tatttcaaacccttt

SEQ ID NO: 349149 - DNA, 15 bp, Homo sapiens
atatttcaaaccctt

SEQ ID NO: 349150 - DNA, 15 bp, Homo sapiens
tatatttcaaaccct

SEQ ID NO: 349151 - DNA, 15 bp, Homo sapiens
ctatatttcaaaccc

SEQ ID NO: 349152 - DNA, 15 bp, Homo sapiens
gctatatttcaaacc

SEQ ID NO: 349153 - DNA, 15 bp, Homo sapiens
agctatatttcaaac

SEQ ID NO: 349154 - DNA, 15 bp, Homo sapiens
cagctatatttcaaa

SEQ ID NO: 349155 - DNA, 15 bp, Homo sapiens
acagctatatttcaa

SEQ ID NO: 349156 - DNA, 15 bp, Homo sapiens
aacagctatatttca

SEQ ID NO: 349157 - DNA, 15 bp, Homo sapiens
gaacagctatatttc

SEQ ID NO: 349158 - DNA, 15 bp, Homo sapiens
agaacagctatattt

SEQ ID NO: 349159 - DNA, 15 bp, Homo sapiens
aagaacagctatatt

SEQ ID NO: 349160 - DNA, 15 bp, Homo sapiens
aaagaacagctatat

SEQ ID NO: 349161 - DNA, 15 bp, Homo sapiens
taaagaacagctata

SEQ ID NO: 349162 - DNA, 15 bp, Homo sapiens
ataaagaacagctat

SEQ ID NO: 349163 - DNA, 15 bp, Homo sapiens
cataaagaacagcta

SEQ ID NO: 349164 - DNA, 15 bp, Homo sapiens
gcataaagaacagct

SEQ ID NO: 349165 - DNA, 15 bp, Homo sapiens
tgcataaagaacagc

SEQ ID NO: 349166 - DNA, 15 bp, Homo sapiens
atgcataaagaacag

SEQ ID NO: 349167 - DNA, 15 bp, Homo sapiens
tatgcataaagaaca

SEQ ID NO: 349168 - DNA, 15 bp, Homo sapiens
ttatgcataaagaac

SEQ ID NO: 349169 - DNA, 15 bp, Homo sapiens
tttatgcataaagaa

SEQ ID NO: 349170 - DNA, 15 bp, Homo sapiens
ttttatgcataaaga

SEQ ID NO: 349171 - DNA, 15 bp, Homo sapiens
gttttatgcataaag

SEQ ID NO: 349172 - DNA, 15 bp, Homo sapiens
tgttttatgcataaa

SEQ ID NO: 349173 - DNA, 15 bp, Homo sapiens
gtgttttatgcataa

SEQ ID NO: 349174 - DNA, 15 bp, Homo sapiens
ggtgttttatgcata

SEQ ID NO: 349175 - DNA, 15 bp, Homo sapiens
gggtgttttatgcat

SEQ ID NO: 349176 - DNA, 15 bp, Homo sapiens
tgggtgttttatgca

SEQ ID NO: 349177 - DNA, 15 bp, Homo sapiens
ctgggtgttttatgc

SEQ ID NO: 349178 - DNA, 15 bp, Homo sapiens
gctgggtgttttatg

SEQ ID NO: 349179 - DNA, 15 bp, Homo sapiens
agctgggtgttttat

SEQ ID NO: 349180 - DNA, 15 bp, Homo sapiens
tagctgggtgtttta

SEQ ID NO: 349181 - DNA, 15 bp, Homo sapiens
ctagctgggtgtttt

SEQ ID NO: 349182 - DNA, 15 bp, Homo sapiens
cctagctgggtgttt

SEQ ID NO: 349183 - DNA, 15 bp, Homo sapiens
tcctagctgggtgtt

SEQ ID NO: 349184 - DNA, 15 bp, Homo sapiens
gtcctagctgggtgt

SEQ ID NO: 349185 - DNA, 15 bp, Homo sapiens
ggtcctagctgggtg

SEQ ID NO: 349186 - DNA, 15 bp, Homo sapiens
tggtcctagctgggt

SEQ ID NO: 349187 - DNA, 15 bp, Homo sapiens
atggtcctagctggg

SEQ ID NO: 349188 - DNA, 15 bp, Homo sapiens
aatggtcctagctgg

SEQ ID NO: 349189 - DNA, 15 bp, Homo sapiens
taatggtcctagctg

SEQ ID NO: 349190 - DNA, 15 bp, Homo sapiens
gtaatggtcctagct

SEQ ID NO: 349191 - DNA, 15 bp, Homo sapiens
agtaatggtcctagc

SEQ ID NO: 349192 - DNA, 15 bp, Homo sapiens
cagtaatggtcctag

SEQ ID NO: 349193 - DNA, 15 bp, Homo sapiens
gcagtaatggtccta

SEQ ID NO: 349194 - DNA, 15 bp, Homo sapiens
ggcagtaatggtcct

SEQ ID NO: 349195 - DNA, 15 bp, Homo sapiens
tggcagtaatggtcc

SEQ ID NO: 349196 - DNA, 15 bp, Homo sapiens
ctggcagtaatggtc

SEQ ID NO: 349197 - DNA, 15 bp, Homo sapiens
tctggcagtaatggt

SEQ ID NO: 349198 - DNA, 15 bp, Homo sapiens
ctctggcagtaatgg

SEQ ID NO: 349199 - DNA, 15 bp, Homo sapiens
tctctggcagtaatg

SEQ ID NO: 349200 - DNA, 15 bp, Homo sapiens
ttctctggcagtaat

SEQ ID NO: 349201 - DNA, 15 bp, Homo sapiens
tttctctggcagtaa

SEQ ID NO: 349202 - DNA, 15 bp, Homo sapiens
ttttctctggcagta

SEQ ID NO: 349203 - DNA, 15 bp, Homo sapiens
tttttctctggcagt

SEQ ID NO: 349204 - DNA, 15 bp, Homo sapiens
ttttttctctggcag

SEQ ID NO: 349205 - DNA, 15 bp, Homo sapiens
tttttttctctggca

SEQ ID NO: 349206 - DNA, 15 bp, Homo sapiens
atttttttctctggc

SEQ ID NO: 349207 - DNA, 15 bp, Homo sapiens
gatttttttctctgg

SEQ ID NO: 349208 - DNA, 15 bp, Homo sapiens
cgatttttttctctg

SEQ ID NO: 349209 - DNA, 15 bp, Homo sapiens
acgatttttttctct

SEQ ID NO: 349210 - DNA, 15 bp, Homo sapiens
tacgatttttttctc

SEQ ID NO: 349211 - DNA, 15 bp, Homo sapiens
atacgatttttttct

SEQ ID NO: 349212 - DNA, 15 bp, Homo sapiens
aatacgatttttttc

SEQ ID NO: 349213 - DNA, 15 bp, Homo sapiens
caatacgattttttt

SEQ ID NO: 349214 - DNA, 15 bp, Homo sapiens
tcaatacgatttttt

SEQ ID NO: 349215 - DNA, 15 bp, Homo sapiens
ttcaatacgattttt

SEQ ID NO: 349216 - DNA, 15 bp, Homo sapiens
attcaatacgatttt

SEQ ID NO: 349217 - DNA, 15 bp, Homo sapiens
cattcaatacgattt

SEQ ID NO: 349218 - DNA, 15 bp, Homo sapiens
ccattcaatacgatt

SEQ ID NO: 349219 - DNA, 15 bp, Homo sapiens
gccattcaatacgat

SEQ ID NO: 349220 - DNA, 15 bp, Homo sapiens
ggccattcaatacga

SEQ ID NO: 349221 - DNA, 15 bp, Homo sapiens
tggccattcaatacg

SEQ ID NO: 349222 - DNA, 15 bp, Homo sapiens
atggccattcaatac

SEQ ID NO: 349223 - DNA, 15 bp, Homo sapiens
aatggccattcaata

SEQ ID NO: 349224 - DNA, 15 bp, Homo sapiens
aaatggccattcaat

SEQ ID NO: 349225 - DNA, 15 bp, Homo sapiens
gaaatggccattcaa

SEQ ID NO: 349226 - DNA, 15 bp, Homo sapiens
ggaaatggccattca

SEQ ID NO: 349227 - DNA, 15 bp, Homo sapiens
gggaaatggccattc

SEQ ID NO: 349228 - DNA, 15 bp, Homo sapiens
agggaaatggccatt

SEQ ID NO: 349229 - DNA, 15 bp, Homo sapiens
tagggaaatggccat

SEQ ID NO: 349230 - DNA, 15 bp, Homo sapiens
gtagggaaatggcca

SEQ ID NO: 349231 - DNA, 15 bp, Homo sapiens
agtagggaaatggcc

SEQ ID NO: 349232 - DNA, 15 bp, Homo sapiens
aagtagggaaatggc

SEQ ID NO: 349233 - DNA, 15 bp, Homo sapiens
taagtagggaaatgg

SEQ ID NO: 349234 - DNA, 15 bp, Homo sapiens
ataagtagggaaatg

SEQ ID NO: 349235 - DNA, 15 bp, Homo sapiens
tataagtagggaaat

SEQ ID NO: 349236 - DNA, 15 bp, Homo sapiens
ttataagtagggaaa

SEQ ID NO: 349237 - DNA, 15 bp, Homo sapiens
cttataagtagggaa

SEQ ID NO: 349238 - DNA, 15 bp, Homo sapiens
tcttataagtaggga

SEQ ID NO: 349239 - DNA, 15 bp, Homo sapiens
atcttataagtaggg

SEQ ID NO: 349240 - DNA, 15 bp, Homo sapiens
catcttataagtagg

SEQ ID NO: 349241 - DNA, 15 bp, Homo sapiens
acatcttataagtag

SEQ ID NO: 349242 - DNA, 15 bp, Homo sapiens
gacatcttataagta

SEQ ID NO: 349243 - DNA, 15 bp, Homo sapiens
agacatcttataagt

SEQ ID NO: 349244 - DNA, 15 bp, Homo sapiens
gagacatcttataag

SEQ ID NO: 349245 - DNA, 15 bp, Homo sapiens
tgagacatcttataa

SEQ ID NO: 349246 - DNA, 15 bp, Homo sapiens
ttgagacatcttata

SEQ ID NO: 349247 - DNA, 15 bp, Homo sapiens
attgagacatcttat

SEQ ID NO: 349248 - DNA, 15 bp, Homo sapiens
gattgagacatctta

SEQ ID NO: 349249 - DNA, 15 bp, Homo sapiens
agattgagacatctt

SEQ ID NO: 349250 - DNA, 15 bp, Homo sapiens
cagattgagacatct

SEQ ID NO: 349251 - DNA, 15 bp, Homo sapiens
tcagattgagacatc

SEQ ID NO: 349252 - DNA, 15 bp, Homo sapiens
ttcagattgagacat

SEQ ID NO: 349253 - DNA, 15 bp, Homo sapiens
attcagattgagaca

SEQ ID NO: 349254 - DNA, 15 bp, Homo sapiens
aattcagattgagac

SEQ ID NO: 349255 - DNA, 15 bp, Homo sapiens
aaattcagattgaga

SEQ ID NO: 349256 - DNA, 15 bp, Homo sapiens
taaattcagattgag

SEQ ID NO: 349257 - DNA, 15 bp, Homo sapiens
ataaattcagattga

SEQ ID NO: 349258 - DNA, 15 bp, Homo sapiens
aataaattcagattg

SEQ ID NO: 349259 - DNA, 15 bp, Homo sapiens
aaataaattcagatt

SEQ ID NO: 349260 - DNA, 15 bp, Homo sapiens
caaataaattcagat

SEQ ID NO: 349261 - DNA, 15 bp, Homo sapiens
ccaaataaattcaga

SEQ ID NO: 349262 - DNA, 15 bp, Homo sapiens
gccaaataaattcag

SEQ ID NO: 349263 - DNA, 15 bp, Homo sapiens
agccaaataaattca

SEQ ID NO: 349264 - DNA, 15 bp, Homo sapiens
tagccaaataaattc

SEQ ID NO: 349265 - DNA, 15 bp, Homo sapiens
gtagccaaataaatt

SEQ ID NO: 349266 - DNA, 15 bp, Homo sapiens
tgtagccaaataaat

SEQ ID NO: 349267 - DNA, 15 bp, Homo sapiens
gtgtagccaaataaa

SEQ ID NO: 349268 - DNA, 15 bp, Homo sapiens
agtgtagccaaataa

SEQ ID NO: 349269 - DNA, 15 bp, Homo sapiens
tagtgtagccaaata

SEQ ID NO: 349270 - DNA, 15 bp, Homo sapiens
ttagtgtagccaaat

SEQ ID NO: 349271 - DNA, 15 bp, Homo sapiens
tttagtgtagccaaa

SEQ ID NO: 349272 - DNA, 15 bp, Homo sapiens
ctttagtgtagccaa

SEQ ID NO: 349273 - DNA, 15 bp, Homo sapiens
tctttagtgtagcca

SEQ ID NO: 349274 - DNA, 15 bp, Homo sapiens
ttctttagtgtagcc

SEQ ID NO: 349275 - DNA, 15 bp, Homo sapiens
attctttagtgtagc

SEQ ID NO: 349276 - DNA, 15 bp, Homo sapiens
cattctttagtgtag

SEQ ID NO: 349277 - DNA, 15 bp, Homo sapiens
gcattctttagtgta

SEQ ID NO: 349278 - DNA, 15 bp, Homo sapiens
tgcattctttagtgt

SEQ ID NO: 349279 - DNA, 15 bp, Homo sapiens
ctgcattctttagtg

SEQ ID NO: 349280 - DNA, 15 bp, Homo sapiens
actgcattctttagt

SEQ ID NO: 349281 - DNA, 15 bp, Homo sapiens
tactgcattctttag

SEQ ID NO: 349282 - DNA, 15 bp, Homo sapiens
atactgcattcttta

SEQ ID NO: 349283 - DNA, 15 bp, Homo sapiens
tatactgcattcttt

SEQ ID NO: 349284 - DNA, 15 bp, Homo sapiens
atatactgcattctt

SEQ ID NO: 349285 - DNA, 15 bp, Homo sapiens
aatatactgcattct

SEQ ID NO: 349286 - DNA, 15 bp, Homo sapiens
aaatatactgcattc

SEQ ID NO: 349287 - DNA, 15 bp, Homo sapiens
taaatatactgcatt

SEQ ID NO: 349288 - DNA, 15 bp, Homo sapiens
ctaaatatactgcat

SEQ ID NO: 349289 - DNA, 15 bp, Homo sapiens
actaaatatactgca

SEQ ID NO: 349290 - DNA, 15 bp, Homo sapiens
aactaaatatactgc

SEQ ID NO: 349291 - DNA, 15 bp, Homo sapiens
aaactaaatatactg

SEQ ID NO: 349292 - DNA, 15 bp, Homo sapiens
aaaactaaatatact

SEQ ID NO: 349293 - DNA, 15 bp, Homo sapiens
gaaaactaaatatac

SEQ ID NO: 349294 - DNA, 15 bp, Homo sapiens
ggaaaactaaatata

SEQ ID NO: 349295 - DNA, 15 bp, Homo sapiens
tggaaaactaaatat

SEQ ID NO: 349296 - DNA, 15 bp, Homo sapiens
atggaaaactaaata

SEQ ID NO: 349297 - DNA, 15 bp, Homo sapiens
aatggaaaactaaat

SEQ ID NO: 349298 - DNA, 15 bp, Homo sapiens
aaatggaaaactaaa

SEQ ID NO: 349299 - DNA, 15 bp, Homo sapiens
caaatggaaaactaa

SEQ ID NO: 349300 - DNA, 15 bp, Homo sapiens
gcaaatggaaaacta

SEQ ID NO: 349301 - DNA, 15 bp, Homo sapiens
tgcaaatggaaaact

SEQ ID NO: 349302 - DNA, 15 bp, Homo sapiens
atgcaaatggaaaac

SEQ ID NO: 349303 - DNA, 15 bp, Homo sapiens
catgcaaatggaaaa

SEQ ID NO: 349304 - DNA, 15 bp, Homo sapiens
tcatgcaaatggaaa

SEQ ID NO: 349305 - DNA, 15 bp, Homo sapiens
atcatgcaaatggaa

SEQ ID NO: 349306 - DNA, 15 bp, Homo sapiens
catcatgcaaatgga

SEQ ID NO: 349307 - DNA, 15 bp, Homo sapiens
acatcatgcaaatgg

SEQ ID NO: 349308 - DNA, 15 bp, Homo sapiens
aacatcatgcaaatg

SEQ ID NO: 349309 - DNA, 15 bp, Homo sapiens
aaacatcatgcaaat

SEQ ID NO: 349310 - DNA, 15 bp, Homo sapiens
caaacatcatgcaaa

SEQ ID NO: 349311 - DNA, 15 bp, Homo sapiens
acaaacatcatgcaa

SEQ ID NO: 349312 - DNA, 15 bp, Homo sapiens
cacaaacatcatgca

SEQ ID NO: 349313 - DNA, 15 bp, Homo sapiens
acacaaacatcatgc

SEQ ID NO: 349314 - DNA, 15 bp, Homo sapiens
cacacaaacatcatg

SEQ ID NO: 349315 - DNA, 15 bp, Homo sapiens
gcacacaaacatcat

SEQ ID NO: 349316 - DNA, 15 bp, Homo sapiens
agcacacaaacatca

SEQ ID NO: 349317 - DNA, 15 bp, Homo sapiens
tagcacacaaacatc

SEQ ID NO: 349318 - DNA, 15 bp, Homo sapiens
atagcacacaaacat

SEQ ID NO: 349319 - DNA, 15 bp, Homo sapiens
tatagcacacaaaca

SEQ ID NO: 349320 - DNA, 15 bp, Homo sapiens
ctatagcacacaaac

SEQ ID NO: 349321 - DNA, 15 bp, Homo sapiens
tctatagcacacaaa

SEQ ID NO: 349322 - DNA, 15 bp, Homo sapiens
atctatagcacacaa

SEQ ID NO: 349323 - DNA, 15 bp, Homo sapiens
catctatagcacaca

SEQ ID NO: 349324 - DNA, 15 bp, Homo sapiens
tcatctatagcacac

SEQ ID NO: 349325 - DNA, 15 bp, Homo sapiens
atcatctatagcaca

SEQ ID NO: 349326 - DNA, 15 bp, Homo sapiens
tatcatctatagcac

SEQ ID NO: 349327 - DNA, 15 bp, Homo sapiens
atatcatctatagca

SEQ ID NO: 349328 - DNA, 15 bp, Homo sapiens
aatatcatctatagc

SEQ ID NO: 349329 - DNA, 15 bp, Homo sapiens
aaatatcatctatag

SEQ ID NO: 349330 - DNA, 15 bp, Homo sapiens
aaaatatcatctata

SEQ ID NO: 349331 - DNA, 15 bp, Homo sapiens
taaaatatcatctat

SEQ ID NO: 349332 - DNA, 15 bp, Homo sapiens
ttaaaatatcatcta

SEQ ID NO: 349333 - DNA, 15 bp, Homo sapiens
tttaaaatatcatct

SEQ ID NO: 349334 - DNA, 15 bp, Homo sapiens
atttaaaatatcatc

SEQ ID NO: 349335 - DNA, 15 bp, Homo sapiens
aatttaaaatatcat

SEQ ID NO: 349336 - DNA, 15 bp, Homo sapiens
caatttaaaatatca

SEQ ID NO: 349337 - DNA, 15 bp, Homo sapiens
tcaatttaaaatatc

SEQ ID NO: 349338 - DNA, 15 bp, Homo sapiens
ttcaatttaaaatat

SEQ ID NO: 349339 - DNA, 15 bp, Homo sapiens
tttcaatttaaaata

SEQ ID NO: 349340 - DNA, 15 bp, Homo sapiens
ttttcaatttaaaat

SEQ ID NO: 349341 - DNA, 15 bp, Homo sapiens
cttttcaatttaaaa

SEQ ID NO: 349342 - DNA, 15 bp, Homo sapiens
acttttcaatttaaa

SEQ ID NO: 349343 - DNA, 15 bp, Homo sapiens
aacttttcaatttaa

SEQ ID NO: 349344 - DNA, 15 bp, Homo sapiens
aaacttttcaattta

SEQ ID NO: 349345 - DNA, 15 bp, Homo sapiens
caaacttttcaattt

SEQ ID NO: 349346 - DNA, 15 bp, Homo sapiens
acaaacttttcaatt

SEQ ID NO: 349347 - DNA, 15 bp, Homo sapiens
aacaaacttttcaat

SEQ ID NO: 349348 - DNA, 15 bp, Homo sapiens
aaacaaacttttcaa

SEQ ID NO: 349349 - DNA, 15 bp, Homo sapiens
aaaacaaacttttca

SEQ ID NO: 349350 - DNA, 15 bp, Homo sapiens
taaaacaaacttttc

SEQ ID NO: 349351 - DNA, 15 bp, Homo sapiens
ttaaaacaaactttt

SEQ ID NO: 349352 - DNA, 15 bp, Homo sapiens
tttaaaacaaacttt

SEQ ID NO: 349353 - DNA, 15 bp, Homo sapiens
atttaaaacaaactt

SEQ ID NO: 349354 - DNA, 15 bp, Homo sapiens
aatttaaaacaaact

SEQ ID NO: 349355 - DNA, 15 bp, Homo sapiens
taatttaaaacaaac

SEQ ID NO: 349356 - DNA, 15 bp, Homo sapiens
ataatttaaaacaaa

SEQ ID NO: 349357 - DNA, 15 bp, Homo sapiens
aataatttaaaacaa

SEQ ID NO: 349358 - DNA, 15 bp, Homo sapiens
aaataatttaaaaca

SEQ ID NO: 349359 - DNA, 15 bp, Homo sapiens
aaaataatttaaaac

SEQ ID NO: 349360 - DNA, 15 bp, Homo sapiens
aaaaataatttaaaa

SEQ ID NO: 349361 - DNA, 15 bp, Homo sapiens
taaaaataatttaaa

SEQ ID NO: 349362 - DNA, 15 bp, Homo sapiens
gtaaaaataatttaa

SEQ ID NO: 349363 - DNA, 15 bp, Homo sapiens
tgtaaaaataattta

SEQ ID NO: 349364 - DNA, 15 bp, Homo sapiens
ctgtaaaaataattt

SEQ ID NO: 349365 - DNA, 15 bp, Homo sapiens
actgtaaaaataatt

SEQ ID NO: 349366 - DNA, 15 bp, Homo sapiens
cactgtaaaaataat

SEQ ID NO: 349367 - DNA, 15 bp, Homo sapiens
tcactgtaaaaataa

SEQ ID NO: 349368 - DNA, 15 bp, Homo sapiens
ttcactgtaaaaata

SEQ ID NO: 349369 - DNA, 15 bp, Homo sapiens
cttcactgtaaaaat

SEQ ID NO: 349370 - DNA, 15 bp, Homo sapiens
tcttcactgtaaaaa

SEQ ID NO: 349371 - DNA, 15 bp, Homo sapiens
gtcttcactgtaaaa

SEQ ID NO: 349372 - DNA, 15 bp, Homo sapiens
agtcttcactgtaaa

SEQ ID NO: 349373 - DNA, 15 bp, Homo sapiens
cagtcttcactgtaa

SEQ ID NO: 349374 - DNA, 15 bp, Homo sapiens
acagtcttcactgta

SEQ ID NO: 349375 - DNA, 15 bp, Homo sapiens
aacagtcttcactgt

SEQ ID NO: 349376 - DNA, 15 bp, Homo sapiens
aaacagtcttcactg

SEQ ID NO: 349377 - DNA, 15 bp, Homo sapiens
aaaacagtcttcact

SEQ ID NO: 349378 - DNA, 15 bp, Homo sapiens
gaaaacagtcttcac

SEQ ID NO: 349379 - DNA, 15 bp, Homo sapiens
tgaaaacagtcttca

SEQ ID NO: 349380 - DNA, 15 bp, Homo sapiens
ctgaaaacagtcttc

SEQ ID NO: 349381 - DNA, 15 bp, Homo sapiens
gctgaaaacagtctt

SEQ ID NO: 349382 - DNA, 15 bp, Homo sapiens
agctgaaaacagtct

SEQ ID NO: 349383 - DNA, 15 bp, Homo sapiens
gagctgaaaacagtc

SEQ ID NO: 349384 - DNA, 15 bp, Homo sapiens
agagctgaaaacagt

SEQ ID NO: 349385 - DNA, 15 bp, Homo sapiens
aagagctgaaaacag

SEQ ID NO: 349386 - DNA, 15 bp, Homo sapiens
aaagagctgaaaaca

SEQ ID NO: 349387 - DNA, 15 bp, Homo sapiens
aaaagagctgaaaac

SEQ ID NO: 349388 - DNA, 15 bp, Homo sapiens
aaaaagagctgaaaa

SEQ ID NO: 349389 - DNA, 15 bp, Homo sapiens
taaaaagagctgaaa

SEQ ID NO: 349390 - DNA, 15 bp, Homo sapiens
ataaaaagagctgaa

SEQ ID NO: 349391 - DNA, 15 bp, Homo sapiens
tataaaaagagctga

SEQ ID NO: 349392 - DNA, 15 bp, Homo sapiens
atataaaaagagctg

SEQ ID NO: 349393 - DNA, 15 bp, Homo sapiens
aatataaaaagagct

SEQ ID NO: 349394 - DNA, 15 bp, Homo sapiens
caatataaaaagagc

SEQ ID NO: 349395 - DNA, 15 bp, Homo sapiens
acaatataaaaagag

SEQ ID NO: 349396 - DNA, 15 bp, Homo sapiens
tacaatataaaaaga

SEQ ID NO: 349397 - DNA, 15 bp, Homo sapiens
gtacaatataaaaag

SEQ ID NO: 349398 - DNA, 15 bp, Homo sapiens
tgtacaatataaaaa

SEQ ID NO: 349399 - DNA, 15 bp, Homo sapiens
atgtacaatataaaa

SEQ ID NO: 349400 - DNA, 15 bp, Homo sapiens
tatgtacaatataaa

SEQ ID NO: 349401 - DNA, 15 bp, Homo sapiens
ctatgtacaatataa

SEQ ID NO: 349402 - DNA, 15 bp, Homo sapiens
actatgtacaatata

SEQ ID NO: 349403 - DNA, 15 bp, Homo sapiens
gactatgtacaatat

SEQ ID NO: 349404 - DNA, 15 bp, Homo sapiens
agactatgtacaata

SEQ ID NO: 349405 - DNA, 15 bp, Homo sapiens
aagactatgtacaat

SEQ ID NO: 349406 - DNA, 15 bp, Homo sapiens
aaagactatgtacaa

SEQ ID NO: 349407 - DNA, 15 bp, Homo sapiens
aaaagactatgtaca

SEQ ID NO: 349408 - DNA, 15 bp, Homo sapiens
taaaagactatgtac

SEQ ID NO: 349409 - DNA, 15 bp, Homo sapiens
ataaaagactatgta

SEQ ID NO: 349410 - DNA, 15 bp, Homo sapiens
cataaaagactatgt

SEQ ID NO: 349411 - DNA, 15 bp, Homo sapiens
acataaaagactatg

SEQ ID NO: 349412 - DNA, 15 bp, Homo sapiens
tacataaaagactat

SEQ ID NO: 349413 - DNA, 15 bp, Homo sapiens
ttacataaaagacta

SEQ ID NO: 349414 - DNA, 15 bp, Homo sapiens
attacataaaagact

SEQ ID NO: 349415 - DNA, 15 bp, Homo sapiens
aattacataaaagac

SEQ ID NO: 349416 - DNA, 15 bp, Homo sapiens
aaattacataaaaga

SEQ ID NO: 349417 - DNA, 15 bp, Homo sapiens
taaattacataaaag

SEQ ID NO: 349418 - DNA, 15 bp, Homo sapiens
gtaaattacataaaa

SEQ ID NO: 349419 - DNA, 15 bp, Homo sapiens
agtaaattacataaa

SEQ ID NO: 349420 - DNA, 15 bp, Homo sapiens
cagtaaattacataa

SEQ ID NO: 349421 - DNA, 15 bp, Homo sapiens
ccagtaaattacata

SEQ ID NO: 349422 - DNA, 15 bp, Homo sapiens
gccagtaaattacat

SEQ ID NO: 349423 - DNA, 15 bp, Homo sapiens
tgccagtaaattaca

SEQ ID NO: 349424 - DNA, 15 bp, Homo sapiens
atgccagtaaattac

SEQ ID NO: 349425 - DNA, 15 bp, Homo sapiens
tatgccagtaaatta

SEQ ID NO: 349426 - DNA, 15 bp, Homo sapiens
atatgccagtaaatt

SEQ ID NO: 349427 - DNA, 15 bp, Homo sapiens
catatgccagtaaat

SEQ ID NO: 349428 - DNA, 15 bp, Homo sapiens
acatatgccagtaaa

SEQ ID NO: 349429 - DNA, 15 bp, Homo sapiens
aacatatgccagtaa

SEQ ID NO: 349430 - DNA, 15 bp, Homo sapiens
aaacatatgccagta

SEQ ID NO: 349431 - DNA, 15 bp, Homo sapiens
aaaacatatgccagt

SEQ ID NO: 349432 - DNA, 15 bp, Homo sapiens
caaaacatatgccag

SEQ ID NO: 349433 - DNA, 15 bp, Homo sapiens
acaaaacatatgcca

SEQ ID NO: 349434 - DNA, 15 bp, Homo sapiens
tacaaaacatatgcc

SEQ ID NO: 349435 - DNA, 15 bp, Homo sapiens
ctacaaaacatatgc

SEQ ID NO: 349436 - DNA, 15 bp, Homo sapiens
tctacaaaacatatg

SEQ ID NO: 349437 - DNA, 15 bp, Homo sapiens
gtctacaaaacatat

SEQ ID NO: 349438 - DNA, 15 bp, Homo sapiens
agtctacaaaacata

SEQ ID NO: 349439 - DNA, 15 bp, Homo sapiens
cagtctacaaaacat

SEQ ID NO: 349440 - DNA, 15 bp, Homo sapiens
acagtctacaaaaca

SEQ ID NO: 349441 - DNA, 15 bp, Homo sapiens
aacagtctacaaaac

SEQ ID NO: 349442 - DNA, 15 bp, Homo sapiens
aaacagtctacaaaa

SEQ ID NO: 349443 - DNA, 15 bp, Homo sapiens
taaacagtctacaaa

SEQ ID NO: 349444 - DNA, 15 bp, Homo sapiens
ttaaacagtctacaa

SEQ ID NO: 349445 - DNA, 15 bp, Homo sapiens
attaaacagtctaca

SEQ ID NO: 349446 - DNA, 15 bp, Homo sapiens
cattaaacagtctac

SEQ ID NO: 349447 - DNA, 15 bp, Homo sapiens
tcattaaacagtcta

SEQ ID NO: 349448 - DNA, 15 bp, Homo sapiens
gtcattaaacagtct

SEQ ID NO: 349449 - DNA, 15 bp, Homo sapiens
agtcattaaacagtc

SEQ ID NO: 349450 - DNA, 15 bp, Homo sapiens
cagtcattaaacagt

SEQ ID NO: 349451 - DNA, 15 bp, Homo sapiens
ccagtcattaaacag

SEQ ID NO: 349452 - DNA, 15 bp, Homo sapiens
tccagtcattaaaca

SEQ ID NO: 349453 - DNA, 15 bp, Homo sapiens
atccagtcattaaac

SEQ ID NO: 349454 - DNA, 15 bp, Homo sapiens
tatccagtcattaaa

SEQ ID NO: 349455 - DNA, 15 bp, Homo sapiens
atatccagtcattaa

SEQ ID NO: 349456 - DNA, 15 bp, Homo sapiens
gatatccagtcatta

SEQ ID NO: 349457 - DNA, 15 bp, Homo sapiens
agatatccagtcatt

SEQ ID NO: 349458 - DNA, 15 bp, Homo sapiens
aagatatccagtcat

SEQ ID NO: 349459 - DNA, 15 bp, Homo sapiens
gaagatatccagtca

SEQ ID NO: 349460 - DNA, 15 bp, Homo sapiens
ggaagatatccagtc

SEQ ID NO: 349461 - DNA, 15 bp, Homo sapiens
aggaagatatccagt

SEQ ID NO: 349462 - DNA, 15 bp, Homo sapiens
aaggaagatatccag

SEQ ID NO: 349463 - DNA, 15 bp, Homo sapiens
gaaggaagatatcca

SEQ ID NO: 349464 - DNA, 15 bp, Homo sapiens
tgaaggaagatatcc

SEQ ID NO: 349465 - DNA, 15 bp, Homo sapiens
ttgaaggaagatatc

SEQ ID NO: 349466 - DNA, 15 bp, Homo sapiens
gttgaaggaagatat

SEQ ID NO: 349467 - DNA, 15 bp, Homo sapiens
agttgaaggaagata

SEQ ID NO: 349468 - DNA, 15 bp, Homo sapiens
aagttgaaggaagat

SEQ ID NO: 349469 - DNA, 15 bp, Homo sapiens
aaagttgaaggaaga

SEQ ID NO: 349470 - DNA, 15 bp, Homo sapiens
aaaagttgaaggaag

SEQ ID NO: 349471 - DNA, 15 bp, Homo sapiens
caaaagttgaaggaa

SEQ ID NO: 349472 - DNA, 15 bp, Homo sapiens
tcaaaagttgaagga

SEQ ID NO: 349473 - DNA, 15 bp, Homo sapiens
ttcaaaagttgaagg

SEQ ID NO: 349474 - DNA, 15 bp, Homo sapiens
tttcaaaagttgaag

SEQ ID NO: 349475 - DNA, 15 bp, Homo sapiens
atttcaaaagttgaa

SEQ ID NO: 349476 - DNA, 15 bp, Homo sapiens
tatttcaaaagttga

SEQ ID NO: 349477 - DNA, 15 bp, Homo sapiens
gtatttcaaaagttg

SEQ ID NO: 349478 - DNA, 15 bp, Homo sapiens
tgtatttcaaaagtt

SEQ ID NO: 349479 - DNA, 15 bp, Homo sapiens
ttgtatttcaaaagt

SEQ ID NO: 349480 - DNA, 15 bp, Homo sapiens
tttgtatttcaaaag

SEQ ID NO: 349481 - DNA, 15 bp, Homo sapiens
ttttgtatttcaaaa

SEQ ID NO: 349482 - DNA, 15 bp, Homo sapiens
gttttgtatttcaaa

SEQ ID NO: 349483 - DNA, 15 bp, Homo sapiens
ggttttgtatttcaa

SEQ ID NO: 349484 - DNA, 15 bp, Homo sapiens
tggttttgtatttca

SEQ ID NO: 349485 - DNA, 15 bp, Homo sapiens
ctggttttgtatttc

SEQ ID NO: 349486 - DNA, 15 bp, Homo sapiens
actggttttgtattt

SEQ ID NO: 349487 - DNA, 15 bp, Homo sapiens
cactggttttgtatt

SEQ ID NO: 349488 - DNA, 15 bp, Homo sapiens
acactggttttgtat

SEQ ID NO: 349489 - DNA, 15 bp, Homo sapiens
aacactggttttgta

SEQ ID NO: 349490 - DNA, 15 bp, Homo sapiens
aaacactggttttgt

SEQ ID NO: 349491 - DNA, 15 bp, Homo sapiens
aaaacactggttttg

SEQ ID NO: 349492 - DNA, 15 bp, Homo sapiens
aaaaacactggtttt

SEQ ID NO: 349493 - DNA, 15 bp, Homo sapiens
aaaaaacactggttt

SEQ ID NO: 349494 - DNA, 15 bp, Homo sapiens
taaaaaacactggtt

SEQ ID NO: 349495 - DNA, 15 bp, Homo sapiens
gtaaaaaacactggt

SEQ ID NO: 349496 - DNA, 15 bp, Homo sapiens
agtaaaaaacactgg

SEQ ID NO: 349497 - DNA, 15 bp, Homo sapiens
aagtaaaaaacactg

SEQ ID NO: 349498 - DNA, 15 bp, Homo sapiens
caagtaaaaaacact

SEQ ID NO: 349499 - DNA, 15 bp, Homo sapiens
acaagtaaaaaacac

SEQ ID NO: 349500 - DNA, 15 bp, Homo sapiens
tacaagtaaaaaaca

SEQ ID NO: 349501 - DNA, 15 bp, Homo sapiens
gtacaagtaaaaaac

SEQ ID NO: 349502 - DNA, 15 bp, Homo sapiens
tgtacaagtaaaaaa

SEQ ID NO: 349503 - DNA, 15 bp, Homo sapiens
gtgtacaagtaaaaa

SEQ ID NO: 349504 - DNA, 15 bp, Homo sapiens
agtgtacaagtaaaa

SEQ ID NO: 349505 - DNA, 15 bp, Homo sapiens
cagtgtacaagtaaa

SEQ ID NO: 349506 - DNA, 15 bp, Homo sapiens
acagtgtacaagtaa

SEQ ID NO: 349507 - DNA, 15 bp, Homo sapiens
aacagtgtacaagta

SEQ ID NO: 349508 - DNA, 15 bp, Homo sapiens
aaacagtgtacaagt

SEQ ID NO: 349509 - DNA, 15 bp, Homo sapiens
aaaacagtgtacaag

SEQ ID NO: 349510 - DNA, 15 bp, Homo sapiens
taaaacagtgtacaa

SEQ ID NO: 349511 - DNA, 15 bp, Homo sapiens
ttaaaacagtgtaca

SEQ ID NO: 349512 - DNA, 15 bp, Homo sapiens
tttaaaacagtgtac

SEQ ID NO: 349513 - DNA, 15 bp, Homo sapiens
ctttaaaacagtgta

SEQ ID NO: 349514 - DNA, 15 bp, Homo sapiens
actttaaaacagtgt

SEQ ID NO: 349515 - DNA, 15 bp, Homo sapiens
gactttaaaacagtg

SEQ ID NO: 349516 - DNA, 15 bp, Homo sapiens
agactttaaaacagt

SEQ ID NO: 349517 - DNA, 15 bp, Homo sapiens
tagactttaaaacag

SEQ ID NO: 349518 - DNA, 15 bp, Homo sapiens
atagactttaaaaca

SEQ ID NO: 349519 - DNA, 15 bp, Homo sapiens
aatagactttaaaac

SEQ ID NO: 349520 - DNA, 15 bp, Homo sapiens
taatagactttaaaa

SEQ ID NO: 349521 - DNA, 15 bp, Homo sapiens
ttaatagactttaaa

SEQ ID NO: 349522 - DNA, 15 bp, Homo sapiens
tttaatagactttaa

SEQ ID NO: 349523 - DNA, 15 bp, Homo sapiens
ttttaatagacttta

SEQ ID NO: 349524 - DNA, 15 bp, Homo sapiens
attttaatagacttt

SEQ ID NO: 349525 - DNA, 15 bp, Homo sapiens
aattttaatagactt

SEQ ID NO: 349526 - DNA, 15 bp, Homo sapiens
caattttaatagact

SEQ ID NO: 349527 - DNA, 15 bp, Homo sapiens
acaattttaatagac

SEQ ID NO: 349528 - DNA, 15 bp, Homo sapiens
gacaattttaataga

SEQ ID NO: 349529 - DNA, 15 bp, Homo sapiens
tgacaattttaatag

SEQ ID NO: 349530 - DNA, 15 bp, Homo sapiens
atgacaattttaata

SEQ ID NO: 349531 - DNA, 15 bp, Homo sapiens
aatgacaattttaat

SEQ ID NO: 349532 - DNA, 15 bp, Homo sapiens
aaatgacaattttaa

SEQ ID NO: 349533 - DNA, 15 bp, Homo sapiens
caaatgacaatttta

SEQ ID NO: 349534 - DNA, 15 bp, Homo sapiens
tcaaatgacaatttt

SEQ ID NO: 349535 - DNA, 15 bp, Homo sapiens
gtcaaatgacaattt

SEQ ID NO: 349536 - DNA, 15 bp, Homo sapiens
agtcaaatgacaatt

SEQ ID NO: 349537 - DNA, 15 bp, Homo sapiens
aagtcaaatgacaat

SEQ ID NO: 349538 - DNA, 15 bp, Homo sapiens
aaagtcaaatgacaa

SEQ ID NO: 349539 - DNA, 15 bp, Homo sapiens
aaaagtcaaatgaca

SEQ ID NO: 349540 - DNA, 15 bp, Homo sapiens
aaaaagtcaaatgac

SEQ ID NO: 349541 - DNA, 15 bp, Homo sapiens
aaaaaagtcaaatga

SEQ ID NO: 349542 - DNA, 15 bp, Homo sapiens
gaaaaaagtcaaatg

SEQ ID NO: 349543 - DNA, 15 bp, Homo sapiens
agaaaaaagtcaaat

SEQ ID NO: 349544 - DNA, 15 bp, Homo sapiens
cagaaaaaagtcaaa

SEQ ID NO: 349545 - DNA, 15 bp, Homo sapiens
acagaaaaaagtcaa

SEQ ID NO: 349546 - DNA, 15 bp, Homo sapiens
aacagaaaaaagtca

SEQ ID NO: 349547 - DNA, 15 bp, Homo sapiens
taacagaaaaaagtc

SEQ ID NO: 349548 - DNA, 15 bp, Homo sapiens
ttaacagaaaaaagt

SEQ ID NO: 349549 - DNA, 15 bp, Homo sapiens
gttaacagaaaaaag

SEQ ID NO: 349550 - DNA, 15 bp, Homo sapiens
agttaacagaaaaaa

SEQ ID NO: 349551 - DNA, 15 bp, Homo sapiens
aagttaacagaaaaa

SEQ ID NO: 349552 - DNA, 15 bp, Homo sapiens
taagttaacagaaaa

SEQ ID NO: 349553 - DNA, 15 bp, Homo sapiens
gtaagttaacagaaa

SEQ ID NO: 349554 - DNA, 15 bp, Homo sapiens
tgtaagttaacagaa

SEQ ID NO: 349555 - DNA, 15 bp, Homo sapiens
atgtaagttaacaga

SEQ ID NO: 349556 - DNA, 15 bp, Homo sapiens
aatgtaagttaacag

SEQ ID NO: 349557 - DNA, 15 bp, Homo sapiens
caatgtaagttaaca

SEQ ID NO: 349558 - DNA, 15 bp, Homo sapiens
acaatgtaagttaac

SEQ ID NO: 349559 - DNA, 15 bp, Homo sapiens
aacaatgtaagttaa

SEQ ID NO: 349560 - DNA, 15 bp, Homo sapiens
aaacaatgtaagtta

SEQ ID NO: 349561 - DNA, 15 bp, Homo sapiens
taaacaatgtaagtt

SEQ ID NO: 349562 - DNA, 15 bp, Homo sapiens
ttaaacaatgtaagt

SEQ ID NO: 349563 - DNA, 15 bp, Homo sapiens
cttaaacaatgtaag

SEQ ID NO: 349564 - DNA, 15 bp, Homo sapiens
ccttaaacaatgtaa

SEQ ID NO: 349565 - DNA, 15 bp, Homo sapiens
accttaaacaatgta

SEQ ID NO: 349566 - DNA, 15 bp, Homo sapiens
taccttaaacaatgt

SEQ ID NO: 349567 - DNA, 15 bp, Homo sapiens
ataccttaaacaatg

SEQ ID NO: 349568 - DNA, 15 bp, Homo sapiens
tataccttaaacaat

SEQ ID NO: 349569 - DNA, 15 bp, Homo sapiens
atataccttaaacaa

SEQ ID NO: 349570 - DNA, 15 bp, Homo sapiens
tatataccttaaaca

SEQ ID NO: 349571 - DNA, 15 bp, Homo sapiens
ttatataccttaaac

SEQ ID NO: 349572 - DNA, 15 bp, Homo sapiens
attatataccttaaa

SEQ ID NO: 349573 - DNA, 15 bp, Homo sapiens
aattatataccttaa

SEQ ID NO: 349574 - DNA, 15 bp, Homo sapiens
aaattatatacctta

SEQ ID NO: 349575 - DNA, 15 bp, Homo sapiens
aaaattatatacctt

SEQ ID NO: 349576 - DNA, 15 bp, Homo sapiens
aaaaattatatacct

SEQ ID NO: 349577 - DNA, 15 bp, Homo sapiens
taaaaattatatacc

SEQ ID NO: 349578 - DNA, 15 bp, Homo sapiens
ttaaaaattatatac

SEQ ID NO: 349579 - DNA, 15 bp, Homo sapiens
cttaaaaattatata

SEQ ID NO: 349580 - DNA, 15 bp, Homo sapiens
acttaaaaattatat

SEQ ID NO: 349581 - DNA, 15 bp, Homo sapiens
gacttaaaaattata

SEQ ID NO: 349582 - DNA, 15 bp, Homo sapiens
agacttaaaaattat

SEQ ID NO: 349583 - DNA, 15 bp, Homo sapiens
aagacttaaaaatta

SEQ ID NO: 349584 - DNA, 15 bp, Homo sapiens
taagacttaaaaatt

SEQ ID NO: 349585 - DNA, 15 bp, Homo sapiens
gtaagacttaaaaat

SEQ ID NO: 349586 - DNA, 15 bp, Homo sapiens
tgtaagacttaaaaa

SEQ ID NO: 349587 - DNA, 15 bp, Homo sapiens
ctgtaagacttaaaa

SEQ ID NO: 349588 - DNA, 15 bp, Homo sapiens
tctgtaagacttaaa

SEQ ID NO: 349589 - DNA, 15 bp, Homo sapiens
ttctgtaagacttaa

SEQ ID NO: 349590 - DNA, 15 bp, Homo sapiens
attctgtaagactta

SEQ ID NO: 349591 - DNA, 15 bp, Homo sapiens
aattctgtaagactt

SEQ ID NO: 349592 - DNA, 15 bp, Homo sapiens
aaattctgtaagact

SEQ ID NO: 349593 - DNA, 15 bp, Homo sapiens
caaattctgtaagac

SEQ ID NO: 349594 - DNA, 15 bp, Homo sapiens
acaaattctgtaaga

SEQ ID NO: 349595 - DNA, 15 bp, Homo sapiens
tacaaattctgtaag

SEQ ID NO: 349596 - DNA, 15 bp, Homo sapiens
gtacaaattctgtaa

SEQ ID NO: 349597 - DNA, 15 bp, Homo sapiens
tgtacaaattctgta

SEQ ID NO: 349598 - DNA, 15 bp, Homo sapiens
ctgtacaaattctgt

SEQ ID NO: 349599 - DNA, 15 bp, Homo sapiens
gctgtacaaattctg

SEQ ID NO: 349600 - DNA, 15 bp, Homo sapiens
agctgtacaaattct

SEQ ID NO: 349601 - DNA, 15 bp, Homo sapiens
aagctgtacaaattc

SEQ ID NO: 349602 - DNA, 15 bp, Homo sapiens
gaagctgtacaaatt

SEQ ID NO: 349603 - DNA, 15 bp, Homo sapiens
cgaagctgtacaaat

SEQ ID NO: 349604 - DNA, 15 bp, Homo sapiens
tcgaagctgtacaaa

SEQ ID NO: 349605 - DNA, 15 bp, Homo sapiens
ttcgaagctgtacaa

SEQ ID NO: 349606 - DNA, 15 bp, Homo sapiens
attcgaagctgtaca

SEQ ID NO: 349607 - DNA, 15 bp, Homo sapiens
cattcgaagctgtac

SEQ ID NO: 349608 - DNA, 15 bp, Homo sapiens
gcattcgaagctgta

SEQ ID NO: 349609 - DNA, 15 bp, Homo sapiens
agcattcgaagctgt

SEQ ID NO: 349610 - DNA, 15 bp, Homo sapiens
tagcattcgaagctg

SEQ ID NO: 349611 - DNA, 15 bp, Homo sapiens
atagcattcgaagct

SEQ ID NO: 349612 - DNA, 15 bp, Homo sapiens
tatagcattcgaagc

SEQ ID NO: 349613 - DNA, 15 bp, Homo sapiens
ctatagcattcgaag

SEQ ID NO: 349614 - DNA, 15 bp, Homo sapiens
actatagcattcgaa

SEQ ID NO: 349615 - DNA, 15 bp, Homo sapiens
tactatagcattcga

SEQ ID NO: 349616 - DNA, 15 bp, Homo sapiens
atactatagcattcg

SEQ ID NO: 349617 - DNA, 15 bp, Homo sapiens
aatactatagcattc

SEQ ID NO: 349618 - DNA, 15 bp, Homo sapiens
taatactatagcatt

SEQ ID NO: 349619 - DNA, 15 bp, Homo sapiens
ctaatactatagcat

SEQ ID NO: 349620 - DNA, 15 bp, Homo sapiens
tctaatactatagca

SEQ ID NO: 349621 - DNA, 15 bp, Homo sapiens
atctaatactatagc

SEQ ID NO: 349622 - DNA, 15 bp, Homo sapiens
catctaatactatag

SEQ ID NO: 349623 - DNA, 15 bp, Homo sapiens
gcatctaatactata

SEQ ID NO: 349624 - DNA, 15 bp, Homo sapiens
agcatctaatactat

SEQ ID NO: 349625 - DNA, 15 bp, Homo sapiens
aagcatctaatacta

SEQ ID NO: 349626 - DNA, 15 bp, Homo sapiens
aaagcatctaatact

SEQ ID NO: 349627 - DNA, 15 bp, Homo sapiens
gaaagcatctaatac

SEQ ID NO: 349628 - DNA, 15 bp, Homo sapiens
agaaagcatctaata

SEQ ID NO: 349629 - DNA, 15 bp, Homo sapiens
aagaaagcatctaat

SEQ ID NO: 349630 - DNA, 15 bp, Homo sapiens
aaagaaagcatctaa

SEQ ID NO: 349631 - DNA, 15 bp, Homo sapiens
gaaagaaagcatcta

SEQ ID NO: 349632 - DNA, 15 bp, Homo sapiens
agaaagaaagcatct

SEQ ID NO: 349633 - DNA, 15 bp, Homo sapiens
gagaaagaaagcatc

SEQ ID NO: 349634 - DNA, 15 bp, Homo sapiens
tgagaaagaaagcat

SEQ ID NO: 349635 - DNA, 15 bp, Homo sapiens
atgagaaagaaagca

SEQ ID NO: 349636 - DNA, 15 bp, Homo sapiens
tatgagaaagaaagc

SEQ ID NO: 349637 - DNA, 15 bp, Homo sapiens
gtatgagaaagaaag

SEQ ID NO: 349638 - DNA, 15 bp, Homo sapiens
agtatgagaaagaaa

SEQ ID NO: 349639 - DNA, 15 bp, Homo sapiens
tagtatgagaaagaa

SEQ ID NO: 349640 - DNA, 15 bp, Homo sapiens
gtagtatgagaaaga

SEQ ID NO: 349641 - DNA, 15 bp, Homo sapiens
tgtagtatgagaaag

SEQ ID NO: 349642 - DNA, 15 bp, Homo sapiens
atgtagtatgagaaa

SEQ ID NO: 349643 - DNA, 15 bp, Homo sapiens
aatgtagtatgagaa

SEQ ID NO: 349644 - DNA, 15 bp, Homo sapiens
aaatgtagtatgaga

SEQ ID NO: 349645 - DNA, 15 bp, Homo sapiens
gaaatgtagtatgag

SEQ ID NO: 349646 - DNA, 15 bp, Homo sapiens
agaaatgtagtatga

SEQ ID NO: 349647 - DNA, 15 bp, Homo sapiens
aagaaatgtagtatg

SEQ ID NO: 349648 - DNA, 15 bp, Homo sapiens
gaagaaatgtagtat

SEQ ID NO: 349649 - DNA, 15 bp, Homo sapiens
tgaagaaatgtagta

SEQ ID NO: 349650 - DNA, 15 bp, Homo sapiens
atgaagaaatgtagt

SEQ ID NO: 349651 - DNA, 15 bp, Homo sapiens
aatgaagaaatgtag

SEQ ID NO: 349652 - DNA, 15 bp, Homo sapiens
aaatgaagaaatgta

SEQ ID NO: 349653 - DNA, 15 bp, Homo sapiens
caaatgaagaaatgt

SEQ ID NO: 349654 - DNA, 15 bp, Homo sapiens
ccaaatgaagaaatg

SEQ ID NO: 349655 - DNA, 15 bp, Homo sapiens
accaaatgaagaaat

SEQ ID NO: 349656 - DNA, 15 bp, Homo sapiens
aaccaaatgaagaaa

SEQ ID NO: 349657 - DNA, 15 bp, Homo sapiens
aaaccaaatgaagaa

SEQ ID NO: 349658 - DNA, 15 bp, Homo sapiens
taaaccaaatgaaga

SEQ ID NO: 349659 - DNA, 15 bp, Homo sapiens
ataaaccaaatgaag

SEQ ID NO: 349660 - DNA, 15 bp, Homo sapiens
aataaaccaaatgaa

SEQ ID NO: 349661 - DNA, 15 bp, Homo sapiens
taataaaccaaatga

SEQ ID NO: 349662 - DNA, 15 bp, Homo sapiens
gtaataaaccaaatg

SEQ ID NO: 349663 - DNA, 15 bp, Homo sapiens
tgtaataaaccaaat

SEQ ID NO: 349664 - DNA, 15 bp, Homo sapiens
atgtaataaaccaaa

SEQ ID NO: 349665 - DNA, 15 bp, Homo sapiens
aatgtaataaaccaa

SEQ ID NO: 349666 - DNA, 15 bp, Homo sapiens
taatgtaataaacca

SEQ ID NO: 349667 - DNA, 15 bp, Homo sapiens
ctaatgtaataaacc

SEQ ID NO: 349668 - DNA, 15 bp, Homo sapiens
actaatgtaataaac

SEQ ID NO: 349669 - DNA, 15 bp, Homo sapiens
gactaatgtaataaa

SEQ ID NO: 349670 - DNA, 15 bp, Homo sapiens
agactaatgtaataa

SEQ ID NO: 349671 - DNA, 15 bp, Homo sapiens
gagactaatgtaata

SEQ ID NO: 349672 - DNA, 15 bp, Homo sapiens
tgagactaatgtaat

SEQ ID NO: 349673 - DNA, 15 bp, Homo sapiens
gtgagactaatgtaa

SEQ ID NO: 349674 - DNA, 15 bp, Homo sapiens
ggtgagactaatgta

SEQ ID NO: 349675 - DNA, 15 bp, Homo sapiens
tggtgagactaatgt

SEQ ID NO: 349676 - DNA, 15 bp, Homo sapiens
ctggtgagactaatg

SEQ ID NO: 349677 - DNA, 15 bp, Homo sapiens
tctggtgagactaat

SEQ ID NO: 349678 - DNA, 15 bp, Homo sapiens
gtctggtgagactaa

SEQ ID NO: 349679 - DNA, 15 bp, Homo sapiens
ggtctggtgagacta

SEQ ID NO: 349680 - DNA, 15 bp, Homo sapiens
tggtctggtgagact

SEQ ID NO: 349681 - DNA, 15 bp, Homo sapiens
ctggtctggtgagac

SEQ ID NO: 349682 - DNA, 15 bp, Homo sapiens
actggtctggtgaga

SEQ ID NO: 349683 - DNA, 15 bp, Homo sapiens
tactggtctggtgag

SEQ ID NO: 349684 - DNA, 15 bp, Homo sapiens
gtactggtctggtga

SEQ ID NO: 349685 - DNA, 15 bp, Homo sapiens
agtactggtctggtg

SEQ ID NO: 349686 - DNA, 15 bp, Homo sapiens
aagtactggtctggt

SEQ ID NO: 349687 - DNA, 15 bp, Homo sapiens
caagtactggtctgg

SEQ ID NO: 349688 - DNA, 15 bp, Homo sapiens
gcaagtactggtctg

SEQ ID NO: 349689 - DNA, 15 bp, Homo sapiens
tgcaagtactggtct

SEQ ID NO: 349690 - DNA, 15 bp, Homo sapiens
ttgcaagtactggtc

SEQ ID NO: 349691 - DNA, 15 bp, Homo sapiens
tttgcaagtactggt

SEQ ID NO: 349692 - DNA, 15 bp, Homo sapiens
ttttgcaagtactgg

SEQ ID NO: 349693 - DNA, 15 bp, Homo sapiens
gttttgcaagtactg

SEQ ID NO: 349694 - DNA, 15 bp, Homo sapiens
ggttttgcaagtact

SEQ ID NO: 349695 - DNA, 15 bp, Homo sapiens
gggttttgcaagtac

SEQ ID NO: 349696 - DNA, 15 bp, Homo sapiens
agggttttgcaagta

SEQ ID NO: 349697 - DNA, 15 bp, Homo sapiens
cagggttttgcaagt

SEQ ID NO: 349698 - DNA, 15 bp, Homo sapiens
tcagggttttgcaag

SEQ ID NO: 349699 - DNA, 15 bp, Homo sapiens
atcagggttttgcaa

SEQ ID NO: 349700 - DNA, 15 bp, Homo sapiens
catcagggttttgca

SEQ ID NO: 349701 - DNA, 15 bp, Homo sapiens
ccatcagggttttgc

SEQ ID NO: 349702 - DNA, 15 bp, Homo sapiens
accatcagggttttg

SEQ ID NO: 349703 - DNA, 15 bp, Homo sapiens
caccatcagggtttt

SEQ ID NO: 349704 - DNA, 15 bp, Homo sapiens
gcaccatcagggttt

SEQ ID NO: 349705 - DNA, 15 bp, Homo sapiens
agcaccatcagggtt

SEQ ID NO: 349706 - DNA, 15 bp, Homo sapiens
cagcaccatcagggt

SEQ ID NO: 349707 - DNA, 15 bp, Homo sapiens
tcagcaccatcaggg

SEQ ID NO: 349708 - DNA, 15 bp, Homo sapiens
atcagcaccatcagg

SEQ ID NO: 349709 - DNA, 15 bp, Homo sapiens
gatcagcaccatcag

SEQ ID NO: 349710 - DNA, 15 bp, Homo sapiens
cgatcagcaccatca

SEQ ID NO: 349711 - DNA, 15 bp, Homo sapiens
acgatcagcaccatc

SEQ ID NO: 349712 - DNA, 15 bp, Homo sapiens
tacgatcagcaccat

SEQ ID NO: 349713 - DNA, 15 bp, Homo sapiens
ctacgatcagcacca

SEQ ID NO: 349714 - DNA, 15 bp, Homo sapiens
gctacgatcagcacc

SEQ ID NO: 349715 - DNA, 15 bp, Homo sapiens
tgctacgatcagcac

SEQ ID NO: 349716 - DNA, 15 bp, Homo sapiens
ctgctacgatcagca

SEQ ID NO: 349717 - DNA, 15 bp, Homo sapiens
cctgctacgatcagc

SEQ ID NO: 349718 - DNA, 15 bp, Homo sapiens
acctgctacgatcag

SEQ ID NO: 349719 - DNA, 15 bp, Homo sapiens
cacctgctacgatca

SEQ ID NO: 349720 - DNA, 15 bp, Homo sapiens
tcacctgctacgatc

SEQ ID NO: 349721 - DNA, 15 bp, Homo sapiens
atcacctgctacgat

SEQ ID NO: 349722 - DNA, 15 bp, Homo sapiens
catcacctgctacga

SEQ ID NO: 349723 - DNA, 15 bp, Homo sapiens
gcatcacctgctacg

SEQ ID NO: 349724 - DNA, 15 bp, Homo sapiens
tgcatcacctgctac

SEQ ID NO: 349725 - DNA, 15 bp, Homo sapiens
atgcatcacctgcta

SEQ ID NO: 349726 - DNA, 15 bp, Homo sapiens
gatgcatcacctgct

SEQ ID NO: 349727 - DNA, 15 bp, Homo sapiens
tgatgcatcacctgc

SEQ ID NO: 349728 - DNA, 15 bp, Homo sapiens
gtgatgcatcacctg

SEQ ID NO: 349729 - DNA, 15 bp, Homo sapiens
ggtgatgcatcacct

SEQ ID NO: 349730 - DNA, 15 bp, Homo sapiens
tggtgatgcatcacc

SEQ ID NO: 349731 - DNA, 15 bp, Homo sapiens
gtggtgatgcatcac

SEQ ID NO: 349732 - DNA, 15 bp, Homo sapiens
ggtggtgatgcatca

SEQ ID NO: 349733 - DNA, 15 bp, Homo sapiens
tggtggtgatgcatc

SEQ ID NO: 349734 - DNA, 15 bp, Homo sapiens
ttggtggtgatgcat

SEQ ID NO: 349735 - DNA, 15 bp, Homo sapiens
cttggtggtgatgca

SEQ ID NO: 349736 - DNA, 15 bp, Homo sapiens
gcttggtggtgatgc

SEQ ID NO: 349737 - DNA, 15 bp, Homo sapiens
tgcttggtggtgatg

SEQ ID NO: 349738 - DNA, 15 bp, Homo sapiens
atgcttggtggtgat

SEQ ID NO: 349739 - DNA, 15 bp, Homo sapiens
aatgcttggtggtga

SEQ ID NO: 349740 - DNA, 15 bp, Homo sapiens
aaatgcttggtggtg

SEQ ID NO: 349741 - DNA, 15 bp, Homo sapiens
gaaatgcttggtggt

SEQ ID NO: 349742 - DNA, 15 bp, Homo sapiens
tgaaatgcttggtgg

SEQ ID NO: 349743 - DNA, 15 bp, Homo sapiens
ttgaaatgcttggtg

SEQ ID NO: 349744 - DNA, 15 bp, Homo sapiens
tttgaaatgcttggt

SEQ ID NO: 349745 - DNA, 15 bp, Homo sapiens
ttttgaaatgcttgg

SEQ ID NO: 349746 - DNA, 15 bp, Homo sapiens
tttttgaaatgcttg

SEQ ID NO: 349747 - DNA, 15 bp, Homo sapiens
gtttttgaaatgctt

SEQ ID NO: 349748 - DNA, 15 bp, Homo sapiens
agtttttgaaatgct

SEQ ID NO: 349749 - DNA, 15 bp, Homo sapiens
tagtttttgaaatgc

SEQ ID NO: 349750 - DNA, 15 bp, Homo sapiens
atagtttttgaaatg

SEQ ID NO: 349751 - DNA, 15 bp, Homo sapiens
aatagtttttgaaat

SEQ ID NO: 349752 - DNA, 15 bp, Homo sapiens
aaatagtttttgaaa

SEQ ID NO: 349753 - DNA, 15 bp, Homo sapiens
gaaatagtttttgaa

SEQ ID NO: 349754 - DNA, 15 bp, Homo sapiens
tgaaatagtttttga

SEQ ID NO: 349755 - DNA, 15 bp, Homo sapiens
ctgaaatagtttttg

SEQ ID NO: 349756 - DNA, 15 bp, Homo sapiens
gctgaaatagttttt

SEQ ID NO: 349757 - DNA, 15 bp, Homo sapiens
ggctgaaatagtttt

SEQ ID NO: 349758 - DNA, 15 bp, Homo sapiens
tggctgaaatagttt

SEQ ID NO: 349759 - DNA, 15 bp, Homo sapiens
atggctgaaatagtt

SEQ ID NO: 349760 - DNA, 15 bp, Homo sapiens
aatggctgaaatagt

SEQ ID NO: 349761 - DNA, 15 bp, Homo sapiens
gaatggctgaaatag

SEQ ID NO: 349762 - DNA, 15 bp, Homo sapiens
agaatggctgaaata

SEQ ID NO: 349763 - DNA, 15 bp, Homo sapiens
tagaatggctgaaat

SEQ ID NO: 349764 - DNA, 15 bp, Homo sapiens
ctagaatggctgaaa

SEQ ID NO: 349765 - DNA, 15 bp, Homo sapiens
cctagaatggctgaa

SEQ ID NO: 349766 - DNA, 15 bp, Homo sapiens
gcctagaatggctga

SEQ ID NO: 349767 - DNA, 15 bp, Homo sapiens
agcctagaatggctg

SEQ ID NO: 349768 - DNA, 15 bp, Homo sapiens
tagcctagaatggct

SEQ ID NO: 349769 - DNA, 15 bp, Homo sapiens
ctagcctagaatggc

SEQ ID NO: 349770 - DNA, 15 bp, Homo sapiens
tctagcctagaatgg

SEQ ID NO: 349771 - DNA, 15 bp, Homo sapiens
ctctagcctagaatg

SEQ ID NO: 349772 - DNA, 15 bp, Homo sapiens
cctctagcctagaat

SEQ ID NO: 349773 - DNA, 15 bp, Homo sapiens
gcctctagcctagaa

SEQ ID NO: 349774 - DNA, 15 bp, Homo sapiens
ggcctctagcctaga

SEQ ID NO: 349775 - DNA, 15 bp, Homo sapiens
aggcctctagcctag

SEQ ID NO: 349776 - DNA, 15 bp, Homo sapiens
caggcctctagccta

SEQ ID NO: 349777 - DNA, 15 bp, Homo sapiens
tcaggcctctagcct

SEQ ID NO: 349778 - DNA, 15 bp, Homo sapiens
ctcaggcctctagcc

SEQ ID NO: 349779 - DNA, 15 bp, Homo sapiens
gctcaggcctctagc

SEQ ID NO: 349780 - DNA, 15 bp, Homo sapiens
tgctcaggcctctag

SEQ ID NO: 349781 - DNA, 15 bp, Homo sapiens
ttgctcaggcctcta

SEQ ID NO: 349782 - DNA, 15 bp, Homo sapiens
cttgctcaggcctct

SEQ ID NO: 349783 - DNA, 15 bp, Homo sapiens
acttgctcaggcctc

SEQ ID NO: 349784 - DNA, 15 bp, Homo sapiens
tacttgctcaggcct

SEQ ID NO: 349785 - DNA, 15 bp, Homo sapiens
ttacttgctcaggcc

SEQ ID NO: 349786 - DNA, 15 bp, Homo sapiens
tttacttgctcaggc

SEQ ID NO: 349787 - DNA, 15 bp, Homo sapiens
ttttacttgctcagg

SEQ ID NO: 349788 - DNA, 15 bp, Homo sapiens
gttttacttgctcag

SEQ ID NO: 349789 - DNA, 15 bp, Homo sapiens
tgttttacttgctca

SEQ ID NO: 349790 - DNA, 15 bp, Homo sapiens
atgttttacttgctc

SEQ ID NO: 349791 - DNA, 15 bp, Homo sapiens
catgttttacttgct

SEQ ID NO: 349792 - DNA, 15 bp, Homo sapiens
ccatgttttacttgc

SEQ ID NO: 349793 - DNA, 15 bp, Homo sapiens
tccatgttttacttg

SEQ ID NO: 349794 - DNA, 15 bp, Homo sapiens
ctccatgttttactt

SEQ ID NO: 349795 - DNA, 15 bp, Homo sapiens
tctccatgttttact

SEQ ID NO: 349796 - DNA, 15 bp, Homo sapiens
ttctccatgttttac

SEQ ID NO: 349797 - DNA, 15 bp, Homo sapiens
tttctccatgtttta

SEQ ID NO: 349798 - DNA, 15 bp, Homo sapiens
ttttctccatgtttt

SEQ ID NO: 349799 - DNA, 15 bp, Homo sapiens
cttttctccatgttt

SEQ ID NO: 349800 - DNA, 15 bp, Homo sapiens
ccttttctccatgtt

SEQ ID NO: 349801 - DNA, 15 bp, Homo sapiens
gccttttctccatgt

SEQ ID NO: 349802 - DNA, 15 bp, Homo sapiens
tgccttttctccatg

SEQ ID NO: 349803 - DNA, 15 bp, Homo sapiens
ctgccttttctccat

SEQ ID NO: 349804 - DNA, 15 bp, Homo sapiens
cctgccttttctcca

SEQ ID NO: 349805 - DNA, 15 bp, Homo sapiens
ccctgccttttctcc

SEQ ID NO: 349806 - DNA, 15 bp, Homo sapiens
gccctgccttttctc

SEQ ID NO: 349807 - DNA, 15 bp, Homo sapiens
tgccctgccttttct

SEQ ID NO: 349808 - DNA, 15 bp, Homo sapiens
ctgccctgccttttc

SEQ ID NO: 349809 - DNA, 15 bp, Homo sapiens
cctgccctgcctttt

SEQ ID NO: 349810 - DNA, 15 bp, Homo sapiens
ccctgccctgccttt

SEQ ID NO: 349811 - DNA, 15 bp, Homo sapiens
gccctgccctgcctt

SEQ ID NO: 349812 - DNA, 15 bp, Homo sapiens
ggccctgccctgcct

SEQ ID NO: 349813 - DNA, 15 bp, Homo sapiens
aggccctgccctgcc

SEQ ID NO: 349814 - DNA, 15 bp, Homo sapiens
taggccctgccctgc

SEQ ID NO: 349815 - DNA, 15 bp, Homo sapiens
ttaggccctgccctg

SEQ ID NO: 349816 - DNA, 15 bp, Homo sapiens
cttaggccctgccct

SEQ ID NO: 349817 - DNA, 15 bp, Homo sapiens
tcttaggccctgccc

SEQ ID NO: 349818 - DNA, 15 bp, Homo sapiens
ttcttaggccctgcc

SEQ ID NO: 349819 - DNA, 15 bp, Homo sapiens
cttcttaggccctgc

SEQ ID NO: 349820 - DNA, 15 bp, Homo sapiens
ccttcttaggccctg

SEQ ID NO: 349821 - DNA, 15 bp, Homo sapiens
tccttcttaggccct

SEQ ID NO: 349822 - DNA, 15 bp, Homo sapiens
atccttcttaggccc

SEQ ID NO: 349823 - DNA, 15 bp, Homo sapiens
catccttcttaggcc

SEQ ID NO: 349824 - DNA, 15 bp, Homo sapiens
acatccttcttaggc

SEQ ID NO: 349825 - DNA, 15 bp, Homo sapiens
cacatccttcttagg

SEQ ID NO: 349826 - DNA, 15 bp, Homo sapiens
tcacatccttcttag

SEQ ID NO: 349827 - DNA, 15 bp, Homo sapiens
gtcacatccttctta

SEQ ID NO: 349828 - DNA, 15 bp, Homo sapiens
tgtcacatccttctt

SEQ ID NO: 349829 - DNA, 15 bp, Homo sapiens
atgtcacatccttct

SEQ ID NO: 349830 - DNA, 15 bp, Homo sapiens
catgtcacatccttc

SEQ ID NO: 349831 - DNA, 15 bp, Homo sapiens
acatgtcacatcctt

SEQ ID NO: 349832 - DNA, 15 bp, Homo sapiens
gacatgtcacatcct

SEQ ID NO: 349833 - DNA, 15 bp, Homo sapiens
ggacatgtcacatcc

SEQ ID NO: 349834 - DNA, 15 bp, Homo sapiens
aggacatgtcacatc

SEQ ID NO: 349835 - DNA, 15 bp, Homo sapiens
taggacatgtcacat

SEQ ID NO: 349836 - DNA, 15 bp, Homo sapiens
ataggacatgtcaca

SEQ ID NO: 349837 - DNA, 15 bp, Homo sapiens
cataggacatgtcac

SEQ ID NO: 349838 - DNA, 15 bp, Homo sapiens
tcataggacatgtca

SEQ ID NO: 349839 - DNA, 15 bp, Homo sapiens
atcataggacatgtc

SEQ ID NO: 349840 - DNA, 15 bp, Homo sapiens
tatcataggacatgt

SEQ ID NO: 349841 - DNA, 15 bp, Homo sapiens
ttatcataggacatg

SEQ ID NO: 349842 - DNA, 15 bp, Homo sapiens
tttatcataggacat

SEQ ID NO: 349843 - DNA, 15 bp, Homo sapiens
ctttatcataggaca

SEQ ID NO: 349844 - DNA, 15 bp, Homo sapiens
cctttatcataggac

SEQ ID NO: 349845 - DNA, 15 bp, Homo sapiens
tcctttatcatagga

SEQ ID NO: 349846 - DNA, 15 bp, Homo sapiens
gtcctttatcatagg

SEQ ID NO: 349847 - DNA, 15 bp, Homo sapiens
ggtcctttatcatag

SEQ ID NO: 349848 - DNA, 15 bp, Homo sapiens
tggtcctttatcata

SEQ ID NO: 349849 - DNA, 15 bp, Homo sapiens
ctggtcctttatcat

SEQ ID NO: 349850 - DNA, 15 bp, Homo sapiens
cctggtcctttatca

SEQ ID NO: 349851 - DNA, 15 bp, Homo sapiens
tcctggtcctttatc

SEQ ID NO: 349852 - DNA, 15 bp, Homo sapiens
ctcctggtcctttat

SEQ ID NO: 349853 - DNA, 15 bp, Homo sapiens
actcctggtccttta

SEQ ID NO: 349854 - DNA, 15 bp, Homo sapiens
aactcctggtccttt

SEQ ID NO: 349855 - DNA, 15 bp, Homo sapiens
aaactcctggtcctt

SEQ ID NO: 349856 - DNA, 15 bp, Homo sapiens
caaactcctggtcct

SEQ ID NO: 349857 - DNA, 15 bp, Homo sapiens
ccaaactcctggtcc

SEQ ID NO: 349858 - DNA, 15 bp, Homo sapiens
cccaaactcctggtc

SEQ ID NO: 349859 - DNA, 15 bp, Homo sapiens
tcccaaactcctggt

SEQ ID NO: 349860 - DNA, 15 bp, Homo sapiens
atcccaaactcctgg

SEQ ID NO: 349861 - DNA, 15 bp, Homo sapiens
aatcccaaactcctg

SEQ ID NO: 349862 - DNA, 15 bp, Homo sapiens
aaatcccaaactcct

SEQ ID NO: 349863 - DNA, 15 bp, Homo sapiens
caaatcccaaactcc

SEQ ID NO: 349864 - DNA, 15 bp, Homo sapiens
tcaaatcccaaactc

SEQ ID NO: 349865 - DNA, 15 bp, Homo sapiens
ctcaaatcccaaact

SEQ ID NO: 349866 - DNA, 15 bp, Homo sapiens
tctcaaatcccaaac

SEQ ID NO: 349867 - DNA, 15 bp, Homo sapiens
ctctcaaatcccaaa

SEQ ID NO: 349868 - DNA, 15 bp, Homo sapiens
tctctcaaatcccaa

SEQ ID NO: 349869 - DNA, 15 bp, Homo sapiens
ctctctcaaatccca

SEQ ID NO: 349870 - DNA, 15 bp, Homo sapiens
tctctctcaaatccc

SEQ ID NO: 349871 - DNA, 15 bp, Homo sapiens
ttctctctcaaatcc

SEQ ID NO: 349872 - DNA, 15 bp, Homo sapiens
gttctctctcaaatc

SEQ ID NO: 349873 - DNA, 15 bp, Homo sapiens
tgttctctctcaaat

SEQ ID NO: 349874 - DNA, 15 bp, Homo sapiens
ctgttctctctcaaa

SEQ ID NO: 349875 - DNA, 15 bp, Homo sapiens
cctgttctctctcaa

SEQ ID NO: 349876 - DNA, 15 bp, Homo sapiens
tcctgttctctctca

SEQ ID NO: 349877 - DNA, 15 bp, Homo sapiens
ttcctgttctctctc

SEQ ID NO: 349878 - DNA, 15 bp, Homo sapiens
cttcctgttctctct

SEQ ID NO: 349879 - DNA, 15 bp, Homo sapiens
acttcctgttctctc

SEQ ID NO: 349880 - DNA, 15 bp, Homo sapiens
cacttcctgttctct

SEQ ID NO: 349881 - DNA, 15 bp, Homo sapiens
ccacttcctgttctc

SEQ ID NO: 349882 - DNA, 15 bp, Homo sapiens
accacttcctgttct

SEQ ID NO: 349883 - DNA, 15 bp, Homo sapiens
caccacttcctgttc

SEQ ID NO: 349884 - DNA, 15 bp, Homo sapiens
ccaccacttcctgtt

SEQ ID NO: 349885 - DNA, 15 bp, Homo sapiens
tccaccacttcctgt

SEQ ID NO: 349886 - DNA, 15 bp, Homo sapiens
atccaccacttcctg

SEQ ID NO: 349887 - DNA, 15 bp, Homo sapiens
tatccaccacttcct

SEQ ID NO: 349888 - DNA, 15 bp, Homo sapiens
ctatccaccacttcc

SEQ ID NO: 349889 - DNA, 15 bp, Homo sapiens
actatccaccacttc

SEQ ID NO: 349890 - DNA, 15 bp, Homo sapiens
cactatccaccactt

SEQ ID NO: 349891 - DNA, 15 bp, Homo sapiens
tcactatccaccact

SEQ ID NO: 349892 - DNA, 15 bp, Homo sapiens
ttcactatccaccac

SEQ ID NO: 349893 - DNA, 15 bp, Homo sapiens
tttcactatccacca

SEQ ID NO: 349894 - DNA, 15 bp, Homo sapiens
ttttcactatccacc

SEQ ID NO: 349895 - DNA, 15 bp, Homo sapiens
attttcactatccac

SEQ ID NO: 349896 - DNA, 15 bp, Homo sapiens
gattttcactatcca

SEQ ID NO: 349897 - DNA, 15 bp, Homo sapiens
ggattttcactatcc

SEQ ID NO: 349898 - DNA, 15 bp, Homo sapiens
tggattttcactatc

SEQ ID NO: 349899 - DNA, 15 bp, Homo sapiens
atggattttcactat

SEQ ID NO: 349900 - DNA, 15 bp, Homo sapiens
gatggattttcacta

SEQ ID NO: 349901 - DNA, 15 bp, Homo sapiens
agatggattttcact

SEQ ID NO: 349902 - DNA, 15 bp, Homo sapiens
cagatggattttcac

SEQ ID NO: 349903 - DNA, 15 bp, Homo sapiens
tcagatggattttca

SEQ ID NO: 349904 - DNA, 15 bp, Homo sapiens
atcagatggattttc

SEQ ID NO: 349905 - DNA, 15 bp, Homo sapiens
catcagatggatttt

SEQ ID NO: 349906 - DNA, 15 bp, Homo sapiens
gcatcagatggattt

SEQ ID NO: 349907 - DNA, 15 bp, Homo sapiens
tgcatcagatggatt

SEQ ID NO: 349908 - DNA, 15 bp, Homo sapiens
ttgcatcagatggat

SEQ ID NO: 349909 - DNA, 15 bp, Homo sapiens
tttgcatcagatgga

SEQ ID NO: 349910 - DNA, 15 bp, Homo sapiens
ctttgcatcagatgg

SEQ ID NO: 349911 - DNA, 15 bp, Homo sapiens
cctttgcatcagatg

SEQ ID NO: 349912 - DNA, 15 bp, Homo sapiens
gcctttgcatcagat

SEQ ID NO: 349913 - DNA, 15 bp, Homo sapiens
agcctttgcatcaga

SEQ ID NO: 349914 - DNA, 15 bp, Homo sapiens
cagcctttgcatcag

SEQ ID NO: 349915 - DNA, 15 bp, Homo sapiens
ccagcctttgcatca

SEQ ID NO: 349916 - DNA, 15 bp, Homo sapiens
cccagcctttgcatc

SEQ ID NO: 349917 - DNA, 15 bp, Homo sapiens
acccagcctttgcat

SEQ ID NO: 349918 - DNA, 15 bp, Homo sapiens
aacccagcctttgca

SEQ ID NO: 349919 - DNA, 15 bp, Homo sapiens
taacccagcctttgc

SEQ ID NO: 349920 - DNA, 15 bp, Homo sapiens
ttaacccagcctttg

SEQ ID NO: 349921 - DNA, 15 bp, Homo sapiens
gttaacccagccttt

SEQ ID NO: 349922 - DNA, 15 bp, Homo sapiens
agttaacccagcctt

SEQ ID NO: 349923 - DNA, 15 bp, Homo sapiens
cagttaacccagcct

SEQ ID NO: 349924 - DNA, 15 bp, Homo sapiens
tcagttaacccagcc

SEQ ID NO: 349925 - DNA, 15 bp, Homo sapiens
ttcagttaacccagc

SEQ ID NO: 349926 - DNA, 15 bp, Homo sapiens
tttcagttaacccag

SEQ ID NO: 349927 - DNA, 15 bp, Homo sapiens
ttttcagttaaccca

SEQ ID NO: 349928 - DNA, 15 bp, Homo sapiens
attttcagttaaccc

SEQ ID NO: 349929 - DNA, 15 bp, Homo sapiens
gattttcagttaacc

SEQ ID NO: 349930 - DNA, 15 bp, Homo sapiens
agattttcagttaac

SEQ ID NO: 349931 - DNA, 15 bp, Homo sapiens
cagattttcagttaa

SEQ ID NO: 349932 - DNA, 15 bp, Homo sapiens
acagattttcagtta

SEQ ID NO: 349933 - DNA, 15 bp, Homo sapiens
aacagattttcagtt

SEQ ID NO: 349934 - DNA, 15 bp, Homo sapiens
gaacagattttcagt

SEQ ID NO: 349935 - DNA, 15 bp, Homo sapiens
agaacagattttcag

SEQ ID NO: 349936 - DNA, 15 bp, Homo sapiens
cagaacagattttca

SEQ ID NO: 349937 - DNA, 15 bp, Homo sapiens
ccagaacagattttc

SEQ ID NO: 349938 - DNA, 15 bp, Homo sapiens
cccagaacagatttt

SEQ ID NO: 349939 - DNA, 15 bp, Homo sapiens
tcccagaacagattt

SEQ ID NO: 349940 - DNA, 15 bp, Homo sapiens
atcccagaacagatt

SEQ ID NO: 349941 - DNA, 15 bp, Homo sapiens
catcccagaacagat

SEQ ID NO: 349942 - DNA, 15 bp, Homo sapiens
gcatcccagaacaga

SEQ ID NO: 349943 - DNA, 15 bp, Homo sapiens
agcatcccagaacag

SEQ ID NO: 349944 - DNA, 15 bp, Homo sapiens
tagcatcccagaaca

SEQ ID NO: 349945 - DNA, 15 bp, Homo sapiens
ctagcatcccagaac

SEQ ID NO: 349946 - DNA, 15 bp, Homo sapiens
cctagcatcccagaa

SEQ ID NO: 349947 - DNA, 15 bp, Homo sapiens
acctagcatcccaga

SEQ ID NO: 349948 - DNA, 15 bp, Homo sapiens
gacctagcatcccag

SEQ ID NO: 349949 - DNA, 15 bp, Homo sapiens
agacctagcatccca

SEQ ID NO: 349950 - DNA, 15 bp, Homo sapiens
aagacctagcatccc

SEQ ID NO: 349951 - DNA, 15 bp, Homo sapiens
aaagacctagcatcc

SEQ ID NO: 349952 - DNA, 15 bp, Homo sapiens
gaaagacctagcatc

SEQ ID NO: 349953 - DNA, 15 bp, Homo sapiens
tgaaagacctagcat

SEQ ID NO: 349954 - DNA, 15 bp, Homo sapiens
ttgaaagacctagca

SEQ ID NO: 349955 - DNA, 15 bp, Homo sapiens
cttgaaagacctagc

SEQ ID NO: 349956 - DNA, 15 bp, Homo sapiens
acttgaaagacctag

SEQ ID NO: 349957 - DNA, 15 bp, Homo sapiens
gacttgaaagaccta

SEQ ID NO: 349958 - DNA, 15 bp, Homo sapiens
agacttgaaagacct

SEQ ID NO: 349959 - DNA, 15 bp, Homo sapiens
cagacttgaaagacc

SEQ ID NO: 349960 - DNA, 15 bp, Homo sapiens
tcagacttgaaagac

SEQ ID NO: 349961 - DNA, 15 bp, Homo sapiens
ttcagacttgaaaga

SEQ ID NO: 349962 - DNA, 15 bp, Homo sapiens
cttcagacttgaaag

SEQ ID NO: 349963 - DNA, 15 bp, Homo sapiens
tcttcagacttgaaa

SEQ ID NO: 349964 - DNA, 15 bp, Homo sapiens
gtcttcagacttgaa

SEQ ID NO: 349965 - DNA, 15 bp, Homo sapiens
agtcttcagacttga

SEQ ID NO: 349966 - DNA, 15 bp, Homo sapiens
cagtcttcagacttg

SEQ ID NO: 349967 - DNA, 15 bp, Homo sapiens
gcagtcttcagactt

SEQ ID NO: 349968 - DNA, 15 bp, Homo sapiens
tgcagtcttcagact

SEQ ID NO: 349969 - DNA, 15 bp, Homo sapiens
ctgcagtcttcagac

SEQ ID NO: 349970 - DNA, 15 bp, Homo sapiens
tctgcagtcttcaga

SEQ ID NO: 349971 - DNA, 15 bp, Homo sapiens
gtctgcagtcttcag

SEQ ID NO: 349972 - DNA, 15 bp, Homo sapiens
ggtctgcagtcttca

SEQ ID NO: 349973 - DNA, 15 bp, Homo sapiens
tggtctgcagtcttc

SEQ ID NO: 349974 - DNA, 15 bp, Homo sapiens
gtggtctgcagtctt

SEQ ID NO: 349975 - DNA, 15 bp, Homo sapiens
tgtggtctgcagtct

SEQ ID NO: 349976 - DNA, 15 bp, Homo sapiens
atgtggtctgcagtc

SEQ ID NO: 349977 - DNA, 15 bp, Homo sapiens
aatgtggtctgcagt

SEQ ID NO: 349978 - DNA, 15 bp, Homo sapiens
aaatgtggtctgcag

SEQ ID NO: 349979 - DNA, 15 bp, Homo sapiens
caaatgtggtctgca

SEQ ID NO: 349980 - DNA, 15 bp, Homo sapiens
ccaaatgtggtctgc

SEQ ID NO: 349981 - DNA, 15 bp, Homo sapiens
accaaatgtggtctg

SEQ ID NO: 349982 - DNA, 15 bp, Homo sapiens
taccaaatgtggtct

SEQ ID NO: 349983 - DNA, 15 bp, Homo sapiens
ataccaaatgtggtc

SEQ ID NO: 349984 - DNA, 15 bp, Homo sapiens
gataccaaatgtggt

SEQ ID NO: 349985 - DNA, 15 bp, Homo sapiens
tgataccaaatgtgg

SEQ ID NO: 349986 - DNA, 15 bp, Homo sapiens
ttgataccaaatgtg

SEQ ID NO: 349987 - DNA, 15 bp, Homo sapiens
gttgataccaaatgt

SEQ ID NO: 349988 - DNA, 15 bp, Homo sapiens
agttgataccaaatg

SEQ ID NO: 349989 - DNA, 15 bp, Homo sapiens
aagttgataccaaat

SEQ ID NO: 349990 - DNA, 15 bp, Homo sapiens
aaagttgataccaaa

SEQ ID NO: 349991 - DNA, 15 bp, Homo sapiens
gaaagttgataccaa

SEQ ID NO: 349992 - DNA, 15 bp, Homo sapiens
agaaagttgatacca

SEQ ID NO: 349993 - DNA, 15 bp, Homo sapiens
cagaaagttgatacc

SEQ ID NO: 349994 - DNA, 15 bp, Homo sapiens
tcagaaagttgatac

SEQ ID NO: 349995 - DNA, 15 bp, Homo sapiens
ctcagaaagttgata

SEQ ID NO: 349996 - DNA, 15 bp, Homo sapiens
cctcagaaagttgat

SEQ ID NO: 349997 - DNA, 15 bp, Homo sapiens
gcctcagaaagttga

SEQ ID NO: 349998 - DNA, 15 bp, Homo sapiens
agcctcagaaagttg

SEQ ID NO: 349999 - DNA, 15 bp, Homo sapiens
cagcctcagaaagtt

SEQ ID NO: 350000 - DNA, 15 bp, Homo sapiens
tcagcctcagaaagt

SEQ ID NO: 350001 - DNA, 15 bp, Homo sapiens
gtcagcctcagaaag

SEQ ID NO: 350002 - DNA, 15 bp, Homo sapiens
ggtcagcctcagaaa

SEQ ID NO: 350003 - DNA, 15 bp, Homo sapiens
aggtcagcctcagaa

SEQ ID NO: 350004 - DNA, 15 bp, Homo sapiens
caggtcagcctcaga

SEQ ID NO: 350005 - DNA, 15 bp, Homo sapiens
tcaggtcagcctcag

SEQ ID NO: 350006 - DNA, 15 bp, Homo sapiens
ctcaggtcagcctca

SEQ ID NO: 350007 - DNA, 15 bp, Homo sapiens
tctcaggtcagcctc

SEQ ID NO: 350008 - DNA, 15 bp, Homo sapiens
ttctcaggtcagcct

SEQ ID NO: 350009 - DNA, 15 bp, Homo sapiens
gttctcaggtcagcc

SEQ ID NO: 350010 - DNA, 15 bp, Homo sapiens
ggttctcaggtcagc

SEQ ID NO: 350011 - DNA, 15 bp, Homo sapiens
aggttctcaggtcag

SEQ ID NO: 350012 - DNA, 15 bp, Homo sapiens
taggttctcaggtca

SEQ ID NO: 350013 - DNA, 15 bp, Homo sapiens
gtaggttctcaggtc

SEQ ID NO: 350014 - DNA, 15 bp, Homo sapiens
agtaggttctcaggt

SEQ ID NO: 350015 - DNA, 15 bp, Homo sapiens
aagtaggttctcagg

SEQ ID NO: 350016 - DNA, 15 bp, Homo sapiens
taagtaggttctcag

SEQ ID NO: 350017 - DNA, 15 bp, Homo sapiens
ttaagtaggttctca

SEQ ID NO: 350018 - DNA, 15 bp, Homo sapiens
cttaagtaggttctc

SEQ ID NO: 350019 - DNA, 15 bp, Homo sapiens
gcttaagtaggttct

SEQ ID NO: 350020 - DNA, 15 bp, Homo sapiens
ggcttaagtaggttc

SEQ ID NO: 350021 - DNA, 15 bp, Homo sapiens
tggcttaagtaggtt

SEQ ID NO: 350022 - DNA, 15 bp, Homo sapiens
atggcttaagtaggt

SEQ ID NO: 350023 - DNA, 15 bp, Homo sapiens
aatggcttaagtagg

SEQ ID NO: 350024 - DNA, 15 bp, Homo sapiens
taatggcttaagtag

SEQ ID NO: 350025 - DNA, 15 bp, Homo sapiens
ttaatggcttaagta

SEQ ID NO: 350026 - DNA, 15 bp, Homo sapiens
tttaatggcttaagt

SEQ ID NO: 350027 - DNA, 15 bp, Homo sapiens
ctttaatggcttaag

SEQ ID NO: 350028 - DNA, 15 bp, Homo sapiens
cctttaatggcttaa

SEQ ID NO: 350029 - DNA, 15 bp, Homo sapiens
acctttaatggctta

SEQ ID NO: 350030 - DNA, 15 bp, Homo sapiens
aacctttaatggctt

SEQ ID NO: 350031 - DNA, 15 bp, Homo sapiens
aaacctttaatggct

SEQ ID NO: 350032 - DNA, 15 bp, Homo sapiens
aaaacctttaatggc

SEQ ID NO: 350033 - DNA, 15 bp, Homo sapiens
caaaacctttaatgg

SEQ ID NO: 350034 - DNA, 15 bp, Homo sapiens
tcaaaacctttaatg

SEQ ID NO: 350035 - DNA, 15 bp, Homo sapiens
ctcaaaacctttaat

SEQ ID NO: 350036 - DNA, 15 bp, Homo sapiens
cctcaaaacctttaa

SEQ ID NO: 350037 - DNA, 15 bp, Homo sapiens
ccctcaaaaccttta

SEQ ID NO: 350038 - DNA, 15 bp, Homo sapiens
gccctcaaaaccttt

SEQ ID NO: 350039 - DNA, 15 bp, Homo sapiens
cgccctcaaaacctt

SEQ ID NO: 350040 - DNA, 15 bp, Homo sapiens
tcgccctcaaaacct

SEQ ID NO: 350041 - DNA, 15 bp, Homo sapiens
ttcgccctcaaaacc

SEQ ID NO: 350042 - DNA, 15 bp, Homo sapiens
tttcgccctcaaaac

SEQ ID NO: 350043 - DNA, 15 bp, Homo sapiens
ctttcgccctcaaaa

SEQ ID NO: 350044 - DNA, 15 bp, Homo sapiens
actttcgccctcaaa

SEQ ID NO: 350045 - DNA, 15 bp, Homo sapiens
tactttcgccctcaa

SEQ ID NO: 350046 - DNA, 15 bp, Homo sapiens
atactttcgccctca

SEQ ID NO: 350047 - DNA, 15 bp, Homo sapiens
aatactttcgccctc

SEQ ID NO: 350048 - DNA, 15 bp, Homo sapiens
taatactttcgccct

SEQ ID NO: 350049 - DNA, 15 bp, Homo sapiens
gtaatactttcgccc

SEQ ID NO: 350050 - DNA, 15 bp, Homo sapiens
agtaatactttcgcc

SEQ ID NO: 350051 - DNA, 15 bp, Homo sapiens
cagtaatactttcgc

SEQ ID NO: 350052 - DNA, 15 bp, Homo sapiens
tcagtaatactttcg

SEQ ID NO: 350053 - DNA, 15 bp, Homo sapiens
ttcagtaatactttc

SEQ ID NO: 350054 - DNA, 15 bp, Homo sapiens
cttcagtaatacttt

SEQ ID NO: 350055 - DNA, 15 bp, Homo sapiens
tcttcagtaatactt

SEQ ID NO: 350056 - DNA, 15 bp, Homo sapiens
ctcttcagtaatact

SEQ ID NO: 350057 - DNA, 15 bp, Homo sapiens
cctcttcagtaatac

SEQ ID NO: 350058 - DNA, 15 bp, Homo sapiens
gcctcttcagtaata

SEQ ID NO: 350059 - DNA, 15 bp, Homo sapiens
ggcctcttcagtaat

SEQ ID NO: 350060 - DNA, 15 bp, Homo sapiens
tggcctcttcagtaa

SEQ ID NO: 350061 - DNA, 15 bp, Homo sapiens
ctggcctcttcagta

SEQ ID NO: 350062 - DNA, 15 bp, Homo sapiens
gctggcctcttcagt

SEQ ID NO: 350063 - DNA, 15 bp, Homo sapiens
tgctggcctcttcag

SEQ ID NO: 350064 - DNA, 15 bp, Homo sapiens
ctgctggcctcttca

SEQ ID NO: 350065 - DNA, 15 bp, Homo sapiens
actgctggcctcttc

SEQ ID NO: 350066 - DNA, 15 bp, Homo sapiens
cactgctggcctctt

SEQ ID NO: 350067 - DNA, 15 bp, Homo sapiens
acactgctggcctct

SEQ ID NO: 350068 - DNA, 15 bp, Homo sapiens
tacactgctggcctc

SEQ ID NO: 350069 - DNA, 15 bp, Homo sapiens
gtacactgctggcct

SEQ ID NO: 350070 - DNA, 15 bp, Homo sapiens
ggtacactgctggcc

SEQ ID NO: 350071 - DNA, 15 bp, Homo sapiens
gggtacactgctggc

SEQ ID NO: 350072 - DNA, 15 bp, Homo sapiens
ggggtacactgctgg

SEQ ID NO: 350073 - DNA, 15 bp, Homo sapiens
aggggtacactgctg

SEQ ID NO: 350074 - DNA, 15 bp, Homo sapiens
aaggggtacactgct

SEQ ID NO: 350075 - DNA, 15 bp, Homo sapiens
taaggggtacactgc

SEQ ID NO: 350076 - DNA, 15 bp, Homo sapiens
ttaaggggtacactg

SEQ ID NO: 350077 - DNA, 15 bp, Homo sapiens
tttaaggggtacact

SEQ ID NO: 350078 - DNA, 15 bp, Homo sapiens
ttttaaggggtacac

SEQ ID NO: 350079 - DNA, 15 bp, Homo sapiens
attttaaggggtaca

SEQ ID NO: 350080 - DNA, 15 bp, Homo sapiens
cattttaaggggtac

SEQ ID NO: 350081 - DNA, 15 bp, Homo sapiens
acattttaaggggta

SEQ ID NO: 350082 - DNA, 15 bp, Homo sapiens
tacattttaaggggt

SEQ ID NO: 350083 - DNA, 15 bp, Homo sapiens
atacattttaagggg

SEQ ID NO: 350084 - DNA, 15 bp, Homo sapiens
catacattttaaggg

SEQ ID NO: 350085 - DNA, 15 bp, Homo sapiens
acatacattttaagg

SEQ ID NO: 350086 - DNA, 15 bp, Homo sapiens
cacatacattttaag

SEQ ID NO: 350087 - DNA, 15 bp, Homo sapiens
acacatacattttaa

SEQ ID NO: 350088 - DNA, 15 bp, Homo sapiens
tacacatacatttta

SEQ ID NO: 350089 - DNA, 15 bp, Homo sapiens
ttacacatacatttt

SEQ ID NO: 350090 - DNA, 15 bp, Homo sapiens
gttacacatacattt

SEQ ID NO: 350091 - DNA, 15 bp, Homo sapiens
agttacacatacatt

SEQ ID NO: 350092 - DNA, 15 bp, Homo sapiens
aagttacacatacat

SEQ ID NO: 350093 - DNA, 15 bp, Homo sapiens
caagttacacataca

SEQ ID NO: 350094 - DNA, 15 bp, Homo sapiens
ccaagttacacatac

SEQ ID NO: 350095 - DNA, 15 bp, Homo sapiens
accaagttacacata

SEQ ID NO: 350096 - DNA, 15 bp, Homo sapiens
gaccaagttacacat

SEQ ID NO: 350097 - DNA, 15 bp, Homo sapiens
cgaccaagttacaca

SEQ ID NO: 350098 - DNA, 15 bp, Homo sapiens
ccgaccaagttacac

SEQ ID NO: 350099 - DNA, 15 bp, Homo sapiens
cccgaccaagttaca

SEQ ID NO: 350100 - DNA, 15 bp, Homo sapiens
acccgaccaagttac

SEQ ID NO: 350101 - DNA, 15 bp, Homo sapiens
cacccgaccaagtta

SEQ ID NO: 350102 - DNA, 15 bp, Homo sapiens
gcacccgaccaagtt

SEQ ID NO: 350103 - DNA, 15 bp, Homo sapiens
tgcacccgaccaagt

SEQ ID NO: 350104 - DNA, 15 bp, Homo sapiens
ctgcacccgaccaag

SEQ ID NO: 350105 - DNA, 15 bp, Homo sapiens
gagtgctgggattac

SEQ ID NO: 350106 - DNA, 15 bp, Homo sapiens
agagtgctgggatta

SEQ ID NO: 350107 - DNA, 15 bp, Homo sapiens
cagagtgctgggatt

SEQ ID NO: 350108 - DNA, 15 bp, Homo sapiens
ccagagtgctgggat

SEQ ID NO: 350109 - DNA, 15 bp, Homo sapiens
cccagagtgctggga

SEQ ID NO: 350110 - DNA, 15 bp, Homo sapiens
tcccagagtgctggg

SEQ ID NO: 350111 - DNA, 15 bp, Homo sapiens
ctcccagagtgctgg

SEQ ID NO: 350112 - DNA, 15 bp, Homo sapiens
cctcccagagtgctg

SEQ ID NO: 350113 - DNA, 15 bp, Homo sapiens
gcctcccagagtgct

SEQ ID NO: 350114 - DNA, 15 bp, Homo sapiens
ggcctcccagagtgc

SEQ ID NO: 350115 - DNA, 15 bp, Homo sapiens
aggcctcccagagtg

SEQ ID NO: 350116 - DNA, 15 bp, Homo sapiens
taggcctcccagagt

SEQ ID NO: 350117 - DNA, 15 bp, Homo sapiens
gtaggcctcccagag

SEQ ID NO: 350118 - DNA, 15 bp, Homo sapiens
tgtaggcctcccaga

SEQ ID NO: 350119 - DNA, 15 bp, Homo sapiens
gtgtaggcctcccag

SEQ ID NO: 350120 - DNA, 15 bp, Homo sapiens
cgtgtaggcctccca

SEQ ID NO: 350121 - DNA, 15 bp, Homo sapiens
ccgtgtaggcctccc

SEQ ID NO: 350122 - DNA, 15 bp, Homo sapiens
cccgtgtaggcctcc

SEQ ID NO: 350123 - DNA, 15 bp, Homo sapiens
gcccgtgtaggcctc

SEQ ID NO: 350124 - DNA, 15 bp, Homo sapiens
cgcccgtgtaggcct

SEQ ID NO: 350125 - DNA, 15 bp, Homo sapiens
ccgcccgtgtaggcc

SEQ ID NO: 350126 - DNA, 15 bp, Homo sapiens
tccgcccgtgtaggc

SEQ ID NO: 350127 - DNA, 15 bp, Homo sapiens
gtccgcccgtgtagg

SEQ ID NO: 350128 - DNA, 15 bp, Homo sapiens
ggtccgcccgtgtag

SEQ ID NO: 350129 - DNA, 15 bp, Homo sapiens
tggtccgcccgtgta

SEQ ID NO: 350130 - DNA, 15 bp, Homo sapiens
gtggtccgcccgtgt

SEQ ID NO: 350131 - DNA, 15 bp, Homo sapiens
ggtggtccgcccgtg

SEQ ID NO: 350132 - DNA, 15 bp, Homo sapiens
aggtggtccgcccgt

SEQ ID NO: 350133 - DNA, 15 bp, Homo sapiens
caggtggtccgcccg

SEQ ID NO: 350134 - DNA, 15 bp, Homo sapiens
tcaggtggtccgccc

SEQ ID NO: 350135 - DNA, 15 bp, Homo sapiens
ctcaggtggtccgcc

SEQ ID NO: 350136 - DNA, 15 bp, Homo sapiens
cctcaggtggtccgc

SEQ ID NO: 350137 - DNA, 15 bp, Homo sapiens
acctcaggtggtccg

SEQ ID NO: 350138 - DNA, 15 bp, Homo sapiens
gacctcaggtggtcc

SEQ ID NO: 350139 - DNA, 15 bp, Homo sapiens
tgacctcaggtggtc

SEQ ID NO: 350140 - DNA, 15 bp, Homo sapiens
ctgacctcaggtggt

SEQ ID NO: 350141 - DNA, 15 bp, Homo sapiens
cctgacctcaggtgg

SEQ ID NO: 350142 - DNA, 15 bp, Homo sapiens
cgccatgttggccag

SEQ ID NO: 350143 - DNA, 15 bp, Homo sapiens
tcgccatgttggcca

SEQ ID NO: 350144 - DNA, 15 bp, Homo sapiens
ttcgccatgttggcc

SEQ ID NO: 350145 - DNA, 15 bp, Homo sapiens
gtttcgccatgttgg

SEQ ID NO: 350146 - DNA, 15 bp, Homo sapiens
ggtttcgccatgttg

SEQ ID NO: 350147 - DNA, 15 bp, Homo sapiens
gggtttcgccatgtt

SEQ ID NO: 350148 - DNA, 15 bp, Homo sapiens
ggggtttcgccatgt

SEQ ID NO: 350149 - DNA, 15 bp, Homo sapiens
cggggtttcgccatg

SEQ ID NO: 350150 - DNA, 15 bp, Homo sapiens
acggggtttcgccat

SEQ ID NO: 350151 - DNA, 15 bp, Homo sapiens
aacggggtttcgcca

SEQ ID NO: 350152 - DNA, 15 bp, Homo sapiens
aaacggggtttcgcc

SEQ ID NO: 350153 - DNA, 15 bp, Homo sapiens
aaaacggggtttcgc

SEQ ID NO: 350154 - DNA, 15 bp, Homo sapiens
aaaaacggggtttcg

SEQ ID NO: 350155 - DNA, 15 bp, Homo sapiens
taaaaacggggtttc

SEQ ID NO: 350156 - DNA, 15 bp, Homo sapiens
gtaaaaacggggttt

SEQ ID NO: 350157 - DNA, 15 bp, Homo sapiens
agtaaaaacggggtt

SEQ ID NO: 350158 - DNA, 15 bp, Homo sapiens
tagtaaaaacggggt

SEQ ID NO: 350159 - DNA, 15 bp, Homo sapiens
ttagtaaaaacgggg

SEQ ID NO: 350160 - DNA, 15 bp, Homo sapiens
tttagtaaaaacggg

SEQ ID NO: 350161 - DNA, 15 bp, Homo sapiens
ttttagtaaaaacgg

SEQ ID NO: 350162 - DNA, 15 bp, Homo sapiens
tttttagtaaaaacg

SEQ ID NO: 350163 - DNA, 15 bp, Homo sapiens
atttttagtaaaaac

SEQ ID NO: 350164 - DNA, 15 bp, Homo sapiens
tatttttagtaaaaa

SEQ ID NO: 350165 - DNA, 15 bp, Homo sapiens
gtatttttagtaaaa

SEQ ID NO: 350166 - DNA, 15 bp, Homo sapiens
tgtatttttagtaaa

SEQ ID NO: 350167 - DNA, 15 bp, Homo sapiens
ttgtatttttagtaa

SEQ ID NO: 350168 - DNA, 15 bp, Homo sapiens
actaatttttgtatt

SEQ ID NO: 350169 - DNA, 15 bp, Homo sapiens
gactaatttttgtat

SEQ ID NO: 350170 - DNA, 15 bp, Homo sapiens
cgactaatttttgta

SEQ ID NO: 350171 - DNA, 15 bp, Homo sapiens
ccgactaatttttgt

SEQ ID NO: 350172 - DNA, 15 bp, Homo sapiens
cccgactaatttttg

SEQ ID NO: 350173 - DNA, 15 bp, Homo sapiens
acccgactaattttt

SEQ ID NO: 350174 - DNA, 15 bp, Homo sapiens
cacccgactaatttt

SEQ ID NO: 350175 - DNA, 15 bp, Homo sapiens
acacccgactaattt

SEQ ID NO: 350176 - DNA, 15 bp, Homo sapiens
cacacccgactaatt

SEQ ID NO: 350177 - DNA, 15 bp, Homo sapiens
ccacacccgactaat

SEQ ID NO: 350178 - DNA, 15 bp, Homo sapiens
accacacccgactaa

SEQ ID NO: 350179 - DNA, 15 bp, Homo sapiens
caccacacccgacta

SEQ ID NO: 350180 - DNA, 15 bp, Homo sapiens
ccaccacacccgact

SEQ ID NO: 350181 - DNA, 15 bp, Homo sapiens
gccaccacacccgac

SEQ ID NO: 350182 - DNA, 15 bp, Homo sapiens
cgccaccacacccga

SEQ ID NO: 350183 - DNA, 15 bp, Homo sapiens
ccgccaccacacccg

SEQ ID NO: 350184 - DNA, 15 bp, Homo sapiens
gccgccaccacaccc

SEQ ID NO: 350185 - DNA, 15 bp, Homo sapiens
tgccgccaccacacc

SEQ ID NO: 350186 - DNA, 15 bp, Homo sapiens
gtgccgccaccacac

SEQ ID NO: 350187 - DNA, 15 bp, Homo sapiens
ggtgccgccaccaca

SEQ ID NO: 350188 - DNA, 15 bp, Homo sapiens
aggtgccgccaccac

SEQ ID NO: 350189 - DNA, 15 bp, Homo sapiens
caggtgccgccacca

SEQ ID NO: 350190 - DNA, 15 bp, Homo sapiens
acaggtgccgccacc

SEQ ID NO: 350191 - DNA, 15 bp, Homo sapiens
tacaggtgccgccac

SEQ ID NO: 350192 - DNA, 15 bp, Homo sapiens
ctacaggtgccgcca

SEQ ID NO: 350193 - DNA, 15 bp, Homo sapiens
actacaggtgccgcc

SEQ ID NO: 350194 - DNA, 15 bp, Homo sapiens
gactacaggtgccgc

SEQ ID NO: 350195 - DNA, 15 bp, Homo sapiens
ggactacaggtgccg

SEQ ID NO: 350196 - DNA, 15 bp, Homo sapiens
gggactacaggtgcc

SEQ ID NO: 350197 - DNA, 15 bp, Homo sapiens
aaatagctgggacta

SEQ ID NO: 350198 - DNA, 15 bp, Homo sapiens
caaatagctgggact

SEQ ID NO: 350199 - DNA, 15 bp, Homo sapiens
ccaaatagctgggac

SEQ ID NO: 350200 - DNA, 15 bp, Homo sapiens
cccaaatagctggga

SEQ ID NO: 350201 - DNA, 15 bp, Homo sapiens
tcccaaatagctggg

SEQ ID NO: 350202 - DNA, 15 bp, Homo sapiens
ctcccaaatagctgg

SEQ ID NO: 350203 - DNA, 15 bp, Homo sapiens
cctcccaaatagctg

SEQ ID NO: 350204 - DNA, 15 bp, Homo sapiens
gcctcccaaatagct

SEQ ID NO: 350205 - DNA, 15 bp, Homo sapiens
agcctcccaaatagc

SEQ ID NO: 350206 - DNA, 15 bp, Homo sapiens
cagcctcccaaatag

SEQ ID NO: 350207 - DNA, 15 bp, Homo sapiens
tcagcctcccaaata

SEQ ID NO: 350208 - DNA, 15 bp, Homo sapiens
ctcagcctcccaaat

SEQ ID NO: 350209 - DNA, 15 bp, Homo sapiens
agcctcagcctccca

SEQ ID NO: 350210 - DNA, 15 bp, Homo sapiens
cagcctcagcctccc

SEQ ID NO: 350211 - DNA, 15 bp, Homo sapiens
ccagcctcagcctcc

SEQ ID NO: 350212 - DNA, 15 bp, Homo sapiens
tccagcctcagcctc

SEQ ID NO: 350213 - DNA, 15 bp, Homo sapiens
ctccagcctcagcct

SEQ ID NO: 350214 - DNA, 15 bp, Homo sapiens
tctccagcctcagcc

SEQ ID NO: 350215 - DNA, 15 bp, Homo sapiens
ttctccagcctcagc

SEQ ID NO: 350216 - DNA, 15 bp, Homo sapiens
attctccagcctcag

SEQ ID NO: 350217 - DNA, 15 bp, Homo sapiens
gattctccagcctca

SEQ ID NO: 350218 - DNA, 15 bp, Homo sapiens
cgattctccagcctc

SEQ ID NO: 350219 - DNA, 15 bp, Homo sapiens
gcgattctccagcct

SEQ ID NO: 350220 - DNA, 15 bp, Homo sapiens
agcgattctccagcc

SEQ ID NO: 350221 - DNA, 15 bp, Homo sapiens
aagcgattctccagc

SEQ ID NO: 350222 - DNA, 15 bp, Homo sapiens
gaagcgattctccag

SEQ ID NO: 350223 - DNA, 15 bp, Homo sapiens
tgaagcgattctcca

SEQ ID NO: 350224 - DNA, 15 bp, Homo sapiens
ttgaagcgattctcc

SEQ ID NO: 350225 - DNA, 15 bp, Homo sapiens
gttgaagcgattctc

SEQ ID NO: 350226 - DNA, 15 bp, Homo sapiens
ggttgaagcgattct

SEQ ID NO: 350227 - DNA, 15 bp, Homo sapiens
gggttgaagcgattc

SEQ ID NO: 350228 - DNA, 15 bp, Homo sapiens
tgggttgaagcgatt

SEQ ID NO: 350229 - DNA, 15 bp, Homo sapiens
ctgggttgaagcgat

SEQ ID NO: 350230 - DNA, 15 bp, Homo sapiens
cctgggttgaagcga

SEQ ID NO: 350231 - DNA, 15 bp, Homo sapiens
tcctgggttgaagcg

SEQ ID NO: 350232 - DNA, 15 bp, Homo sapiens
ctcctgggttgaagc

SEQ ID NO: 350233 - DNA, 15 bp, Homo sapiens
cctcctgggttgaag

SEQ ID NO: 350234 - DNA, 15 bp, Homo sapiens
acctcctgggttgaa

SEQ ID NO: 350235 - DNA, 15 bp, Homo sapiens
cacctcctgggttga

SEQ ID NO: 350236 - DNA, 15 bp, Homo sapiens
ccacctcctgggttg

SEQ ID NO: 350237 - DNA, 15 bp, Homo sapiens
gcctccacctcctgg

SEQ ID NO: 350238 - DNA, 15 bp, Homo sapiens
agcctccacctcctg

SEQ ID NO: 350239 - DNA, 15 bp, Homo sapiens
cagcctccacctcct

SEQ ID NO: 350240 - DNA, 15 bp, Homo sapiens
gcagcctccacctcc

SEQ ID NO: 350241 - DNA, 15 bp, Homo sapiens
tgcagcctccacctc

SEQ ID NO: 350242 - DNA, 15 bp, Homo sapiens
ctgcagcctccacct

SEQ ID NO: 350243 - DNA, 15 bp, Homo sapiens
actgcagcctccacc

SEQ ID NO: 350244 - DNA, 15 bp, Homo sapiens
cactgcagcctccac

SEQ ID NO: 350245 - DNA, 15 bp, Homo sapiens
tcactgcagcctcca

SEQ ID NO: 350246 - DNA, 15 bp, Homo sapiens
ctcactgcagcctcc

SEQ ID NO: 350247 - DNA, 15 bp, Homo sapiens
ggctcactgcagcct

SEQ ID NO: 350248 - DNA, 15 bp, Homo sapiens
tggctcactgcagcc

SEQ ID NO: 350249 - DNA, 15 bp, Homo sapiens
ttggctcactgcagc

SEQ ID NO: 350250 - DNA, 15 bp, Homo sapiens
cttggctcactgcag

SEQ ID NO: 350251 - DNA, 15 bp, Homo sapiens
gatcttggctcactg

SEQ ID NO: 350252 - DNA, 15 bp, Homo sapiens
cgatcttggctcact

SEQ ID NO: 350253 - DNA, 15 bp, Homo sapiens
gcgatcttggctcac

SEQ ID NO: 350254 - DNA, 15 bp, Homo sapiens
cgcgatcttggctca

SEQ ID NO: 350255 - DNA, 15 bp, Homo sapiens
gcgcgatcttggctc

SEQ ID NO: 350256 - DNA, 15 bp, Homo sapiens
ggcgcgatcttggct

SEQ ID NO: 350257 - DNA, 15 bp, Homo sapiens
tggcgcgatcttggc

SEQ ID NO: 350258 - DNA, 15 bp, Homo sapiens
gtggcgcgatcttgg

SEQ ID NO: 350259 - DNA, 15 bp, Homo sapiens
agtggcgcgatcttg

SEQ ID NO: 350260 - DNA, 15 bp, Homo sapiens
cagtggcgcgatctt

SEQ ID NO: 350261 - DNA, 15 bp, Homo sapiens
accaggctggagtgc

SEQ ID NO: 350262 - DNA, 15 bp, Homo sapiens
caccaggctggagtg

SEQ ID NO: 350263 - DNA, 15 bp, Homo sapiens
tcaccaggctggagt

SEQ ID NO: 350264 - DNA, 15 bp, Homo sapiens
gtcaccaggctggag

SEQ ID NO: 350265 - DNA, 15 bp, Homo sapiens
tgtcaccaggctgga

SEQ ID NO: 350266 - DNA, 15 bp, Homo sapiens
ctgtcaccaggctgg

SEQ ID NO: 350267 - DNA, 15 bp, Homo sapiens
tctgtcaccaggctg

SEQ ID NO: 350268 - DNA, 15 bp, Homo sapiens
ctctgtcaccaggct

SEQ ID NO: 350269 - DNA, 15 bp, Homo sapiens
gctctgtcaccaggc

SEQ ID NO: 350270 - DNA, 15 bp, Homo sapiens
tgctctgtcaccagg

SEQ ID NO: 350271 - DNA, 15 bp, Homo sapiens
ttgctctgtcaccag

SEQ ID NO: 350272 - DNA, 15 bp, Homo sapiens
cttgctctgtcacca

SEQ ID NO: 350273 - DNA, 15 bp, Homo sapiens
tcttgctctgtcacc

SEQ ID NO: 350274 - DNA, 15 bp, Homo sapiens
agtcttgctctgtca

SEQ ID NO: 350275 - DNA, 15 bp, Homo sapiens
gagtcttgctctgtc

SEQ ID NO: 350276 - DNA, 15 bp, Homo sapiens
ggagtcttgctctgt

SEQ ID NO: 350277 - DNA, 15 bp, Homo sapiens
cggagtcttgctctg

SEQ ID NO: 350278 - DNA, 15 bp, Homo sapiens
acggagtcttgctct

SEQ ID NO: 350279 - DNA, 15 bp, Homo sapiens
gacggagtcttgctc

SEQ ID NO: 350280 - DNA, 15 bp, Homo sapiens
agacggagtcttgct

SEQ ID NO: 350281 - DNA, 15 bp, Homo sapiens
gagacggagtcttgc

SEQ ID NO: 350282 - DNA, 15 bp, Homo sapiens
tgagacggagtcttg

SEQ ID NO: 350283 - DNA, 15 bp, Homo sapiens
ttgagacggagtctt

SEQ ID NO: 350284 - DNA, 15 bp, Homo sapiens
tttgagacggagtct

SEQ ID NO: 350285 - DNA, 15 bp, Homo sapiens
ctttgagacggagtc

SEQ ID NO: 350286 - DNA, 15 bp, Homo sapiens
tctttgagacggagt

SEQ ID NO: 350287 - DNA, 15 bp, Homo sapiens
ttctttgagacggag

SEQ ID NO: 350288 - DNA, 15 bp, Homo sapiens
gttctttgagacgga

SEQ ID NO: 350289 - DNA, 15 bp, Homo sapiens
tgttctttgagacgg

SEQ ID NO: 350290 - DNA, 15 bp, Homo sapiens
ttgttctttgagacg

SEQ ID NO: 350291 - DNA, 15 bp, Homo sapiens
tttgttctttgagac

SEQ ID NO: 350292 - DNA, 15 bp, Homo sapiens
ttttgttctttgaga

SEQ ID NO: 350293 - DNA, 15 bp, Homo sapiens
tttttgttctttgag

SEQ ID NO: 350294 - DNA, 15 bp, Homo sapiens
ttttttgttctttga

SEQ ID NO: 350295 - DNA, 15 bp, Homo sapiens
cttttttgttctttg

SEQ ID NO: 350296 - DNA, 15 bp, Homo sapiens
acttttttgttcttt

SEQ ID NO: 350297 - DNA, 15 bp, Homo sapiens
tacttttttgttctt

SEQ ID NO: 350298 - DNA, 15 bp, Homo sapiens
atacttttttgttct

SEQ ID NO: 350299 - DNA, 15 bp, Homo sapiens
tatacttttttgttc

SEQ ID NO: 350300 - DNA, 15 bp, Homo sapiens
atatacttttttgtt

SEQ ID NO: 350301 - DNA, 15 bp, Homo sapiens
catatacttttttgt

SEQ ID NO: 350302 - DNA, 15 bp, Homo sapiens
acatatacttttttg

SEQ ID NO: 350303 - DNA, 15 bp, Homo sapiens
tacatatactttttt

SEQ ID NO: 350304 - DNA, 15 bp, Homo sapiens
ttacatatacttttt

SEQ ID NO: 350305 - DNA, 15 bp, Homo sapiens
attacatatactttt

SEQ ID NO: 350306 - DNA, 15 bp, Homo sapiens
cattacatatacttt

SEQ ID NO: 350307 - DNA, 15 bp, Homo sapiens
tcattacatatactt

SEQ ID NO: 350308 - DNA, 15 bp, Homo sapiens
ttcattacatatact

SEQ ID NO: 350309 - DNA, 15 bp, Homo sapiens
attcattacatatac

SEQ ID NO: 350310 - DNA, 15 bp, Homo sapiens
tattcattacatata

SEQ ID NO: 350311 - DNA, 15 bp, Homo sapiens
ttattcattacatat

SEQ ID NO: 350312 - DNA, 15 bp, Homo sapiens
tttattcattacata

SEQ ID NO: 350313 - DNA, 15 bp, Homo sapiens
ctttattcattacat

SEQ ID NO: 350314 - DNA, 15 bp, Homo sapiens
gctttattcattaca

SEQ ID NO: 350315 - DNA, 15 bp, Homo sapiens
agctttattcattac

SEQ ID NO: 350316 - DNA, 15 bp, Homo sapiens
aagctttattcatta

SEQ ID NO: 350317 - DNA, 15 bp, Homo sapiens
aaagctttattcatt

SEQ ID NO: 350318 - DNA, 15 bp, Homo sapiens
taaagctttattcat

SEQ ID NO: 350319 - DNA, 15 bp, Homo sapiens
ctaaagctttattca

SEQ ID NO: 350320 - DNA, 15 bp, Homo sapiens
gctaaagctttattc

SEQ ID NO: 350321 - DNA, 15 bp, Homo sapiens
tgctaaagctttatt

SEQ ID NO: 350322 - DNA, 15 bp, Homo sapiens
ttgctaaagctttat

SEQ ID NO: 350323 - DNA, 15 bp, Homo sapiens
attgctaaagcttta

SEQ ID NO: 350324 - DNA, 15 bp, Homo sapiens
aattgctaaagcttt

SEQ ID NO: 350325 - DNA, 15 bp, Homo sapiens
aaattgctaaagctt

SEQ ID NO: 350326 - DNA, 15 bp, Homo sapiens
gaaattgctaaagct

SEQ ID NO: 350327 - DNA, 15 bp, Homo sapiens
ggaaattgctaaagc

SEQ ID NO: 350328 - DNA, 15 bp, Homo sapiens
aggaaattgctaaag

SEQ ID NO: 350329 - DNA, 15 bp, Homo sapiens
caggaaattgctaaa

SEQ ID NO: 350330 - DNA, 15 bp, Homo sapiens
acaggaaattgctaa

SEQ ID NO: 350331 - DNA, 15 bp, Homo sapiens
aacaggaaattgcta

SEQ ID NO: 350332 - DNA, 15 bp, Homo sapiens
gaacaggaaattgct

SEQ ID NO: 350333 - DNA, 15 bp, Homo sapiens
ggaacaggaaattgc

SEQ ID NO: 350334 - DNA, 15 bp, Homo sapiens
gggaacaggaaattg

SEQ ID NO: 350335 - DNA, 15 bp, Homo sapiens
tgggaacaggaaatt

SEQ ID NO: 350336 - DNA, 15 bp, Homo sapiens
ctgggaacaggaaat

SEQ ID NO: 350337 - DNA, 15 bp, Homo sapiens
actgggaacaggaaa

SEQ ID NO: 350338 - DNA, 15 bp, Homo sapiens
aactgggaacaggaa

SEQ ID NO: 350339 - DNA, 15 bp, Homo sapiens
gaactgggaacagga

SEQ ID NO: 350340 - DNA, 15 bp, Homo sapiens
agaactgggaacagg

SEQ ID NO: 350341 - DNA, 15 bp, Homo sapiens
cagaactgggaacag

SEQ ID NO: 350342 - DNA, 15 bp, Homo sapiens
gcagaactgggaaca

SEQ ID NO: 350343 - DNA, 15 bp, Homo sapiens
ggcagaactgggaac

SEQ ID NO: 350344 - DNA, 15 bp, Homo sapiens
aggcagaactgggaa

SEQ ID NO: 350345 - DNA, 15 bp, Homo sapiens
gaggcagaactggga

SEQ ID NO: 350346 - DNA, 15 bp, Homo sapiens
ggaggcagaactggg

SEQ ID NO: 350347 - DNA, 15 bp, Homo sapiens
gggaggcagaactgg

SEQ ID NO: 350348 - DNA, 15 bp, Homo sapiens
agggaggcagaactg

SEQ ID NO: 350349 - DNA, 15 bp, Homo sapiens
gagggaggcagaact

SEQ ID NO: 350350 - DNA, 15 bp, Homo sapiens
ggagggaggcagaac

SEQ ID NO: 350351 - DNA, 15 bp, Homo sapiens
gggagggaggcagaa

SEQ ID NO: 350352 - DNA, 15 bp, Homo sapiens
ggggagggaggcaga

SEQ ID NO: 350353 - DNA, 15 bp, Homo sapiens
tggggagggaggcag

SEQ ID NO: 350354 - DNA, 15 bp, Homo sapiens
ctggggagggaggca

SEQ ID NO: 350355 - DNA, 15 bp, Homo sapiens
gctggggagggaggc

SEQ ID NO: 350356 - DNA, 15 bp, Homo sapiens
tgctggggagggagg

SEQ ID NO: 350357 - DNA, 15 bp, Homo sapiens
ttgctggggagggag

SEQ ID NO: 350358 - DNA, 15 bp, Homo sapiens
tttgctggggaggga

SEQ ID NO: 350359 - DNA, 15 bp, Homo sapiens
gtttgctggggaggg

SEQ ID NO: 350360 - DNA, 15 bp, Homo sapiens
agtttgctggggagg

SEQ ID NO: 350361 - DNA, 15 bp, Homo sapiens
aagtttgctggggag

SEQ ID NO: 350362 - DNA, 15 bp, Homo sapiens
aaagtttgctgggga

SEQ ID NO: 350363 - DNA, 15 bp, Homo sapiens
gaaagtttgctgggg

SEQ ID NO: 350364 - DNA, 15 bp, Homo sapiens
agaaagtttgctggg

SEQ ID NO: 350365 - DNA, 15 bp, Homo sapiens
tagaaagtttgctgg

SEQ ID NO: 350366 - DNA, 15 bp, Homo sapiens
ctagaaagtttgctg

SEQ ID NO: 350367 - DNA, 15 bp, Homo sapiens
cctagaaagtttgct

SEQ ID NO: 350368 - DNA, 15 bp, Homo sapiens
acctagaaagtttgc

SEQ ID NO: 350369 - DNA, 15 bp, Homo sapiens
tacctagaaagtttg

SEQ ID NO: 350370 - DNA, 15 bp, Homo sapiens
ctacctagaaagttt

SEQ ID NO: 350371 - DNA, 15 bp, Homo sapiens
tctacctagaaagtt

SEQ ID NO: 350372 - DNA, 15 bp, Homo sapiens
gtctacctagaaagt

SEQ ID NO: 350373 - DNA, 15 bp, Homo sapiens
ggtctacctagaaag

SEQ ID NO: 350374 - DNA, 15 bp, Homo sapiens
aggtctacctagaaa

SEQ ID NO: 350375 - DNA, 15 bp, Homo sapiens
caggtctacctagaa

SEQ ID NO: 350376 - DNA, 15 bp, Homo sapiens
acaggtctacctaga

SEQ ID NO: 350377 - DNA, 15 bp, Homo sapiens
gacaggtctacctag

SEQ ID NO: 350378 - DNA, 15 bp, Homo sapiens
ggacaggtctaccta

SEQ ID NO: 350379 - DNA, 15 bp, Homo sapiens
aggacaggtctacct

SEQ ID NO: 350380 - DNA, 15 bp, Homo sapiens
caggacaggtctacc

SEQ ID NO: 350381 - DNA, 15 bp, Homo sapiens
acaggacaggtctac

SEQ ID NO: 350382 - DNA, 15 bp, Homo sapiens
tacaggacaggtcta

SEQ ID NO: 350383 - DNA, 15 bp, Homo sapiens
atacaggacaggtct

SEQ ID NO: 350384 - DNA, 15 bp, Homo sapiens
tatacaggacaggtc

SEQ ID NO: 350385 - DNA, 15 bp, Homo sapiens
atatacaggacaggt

SEQ ID NO: 350386 - DNA, 15 bp, Homo sapiens
aatatacaggacagg

SEQ ID NO: 350387 - DNA, 15 bp, Homo sapiens
caatatacaggacag

SEQ ID NO: 350388 - DNA, 15 bp, Homo sapiens
acaatatacaggaca

SEQ ID NO: 350389 - DNA, 15 bp, Homo sapiens
aacaatatacaggac

SEQ ID NO: 350390 - DNA, 15 bp, Homo sapiens
taacaatatacagga

SEQ ID NO: 350391 - DNA, 15 bp, Homo sapiens
ctaacaatatacagg

SEQ ID NO: 350392 - DNA, 15 bp, Homo sapiens
gctaacaatatacag

SEQ ID NO: 350393 - DNA, 15 bp, Homo sapiens
tgctaacaatataca

SEQ ID NO: 350394 - DNA, 15 bp, Homo sapiens
gtgctaacaatatac

SEQ ID NO: 350395 - DNA, 15 bp, Homo sapiens
agtgctaacaatata

SEQ ID NO: 350396 - DNA, 15 bp, Homo sapiens
tagtgctaacaatat

SEQ ID NO: 350397 - DNA, 15 bp, Homo sapiens
ctagtgctaacaata

SEQ ID NO: 350398 - DNA, 15 bp, Homo sapiens
tctagtgctaacaat

SEQ ID NO: 350399 - DNA, 15 bp, Homo sapiens
ctctagtgctaacaa

SEQ ID NO: 350400 - DNA, 15 bp, Homo sapiens
tctctagtgctaaca

SEQ ID NO: 350401 - DNA, 15 bp, Homo sapiens
ttctctagtgctaac

SEQ ID NO: 350402 - DNA, 15 bp, Homo sapiens
tttctctagtgctaa

SEQ ID NO: 350403 - DNA, 15 bp, Homo sapiens
atttctctagtgcta

SEQ ID NO: 350404 - DNA, 15 bp, Homo sapiens
aatttctctagtgct

SEQ ID NO: 350405 - DNA, 15 bp, Homo sapiens
taatttctctagtgc

SEQ ID NO: 350406 - DNA, 15 bp, Homo sapiens
gtaatttctctagtg

SEQ ID NO: 350407 - DNA, 15 bp, Homo sapiens
ggtaatttctctagt

SEQ ID NO: 350408 - DNA, 15 bp, Homo sapiens
aggtaatttctctag

SEQ ID NO: 350409 - DNA, 15 bp, Homo sapiens
caggtaatttctcta

SEQ ID NO: 350410 - DNA, 15 bp, Homo sapiens
cccgtccacgttctg

SEQ ID NO: 350411 - DNA, 15 bp, Homo sapiens
gcccgtccacgttct

SEQ ID NO: 350412 - DNA, 15 bp, Homo sapiens
agcccgtccacgttc

SEQ ID NO: 350413 - DNA, 15 bp, Homo sapiens
gagcccgtccacgtt

SEQ ID NO: 350414 - DNA, 15 bp, Homo sapiens
ggagcccgtccacgt

SEQ ID NO: 350415 - DNA, 15 bp, Homo sapiens
tggagcccgtccacg

SEQ ID NO: 350416 - DNA, 15 bp, Homo sapiens
atggagcccgtccac

SEQ ID NO: 350417 - DNA, 15 bp, Homo sapiens
catggagcccgtcca

SEQ ID NO: 350418 - DNA, 15 bp, Homo sapiens
acatggagcccgtcc

SEQ ID NO: 350419 - DNA, 15 bp, Homo sapiens
cacatggagcccgtc

SEQ ID NO: 350420 - DNA, 15 bp, Homo sapiens
gcacatggagcccgt

SEQ ID NO: 350421 - DNA, 15 bp, Homo sapiens
cgcacatggagcccg

SEQ ID NO: 350422 - DNA, 15 bp, Homo sapiens
gcgcacatggagccc

SEQ ID NO: 350423 - DNA, 15 bp, Homo sapiens
agcgcacatggagcc

SEQ ID NO: 350424 - DNA, 15 bp, Homo sapiens
gagcgcacatggagc

SEQ ID NO: 350425 - DNA, 15 bp, Homo sapiens
tgagcgcacatggag

SEQ ID NO: 350426 - DNA, 15 bp, Homo sapiens
ctgagcgcacatgga

SEQ ID NO: 350427 - DNA, 15 bp, Homo sapiens
cctgagcgcacatgg

SEQ ID NO: 350428 - DNA, 15 bp, Homo sapiens
gcctgagcgcacatg

SEQ ID NO: 350429 - DNA, 15 bp, Homo sapiens
agcctgagcgcacat

SEQ ID NO: 350430 - DNA, 15 bp, Homo sapiens
aagcctgagcgcaca

SEQ ID NO: 350431 - DNA, 15 bp, Homo sapiens
gaagcctgagcgcac

SEQ ID NO: 350432 - DNA, 15 bp, Homo sapiens
ggaagcctgagcgca

SEQ ID NO: 350433 - DNA, 15 bp, Homo sapiens
gggaagcctgagcgc

SEQ ID NO: 350434 - DNA, 15 bp, Homo sapiens
ggggaagcctgagcg

SEQ ID NO: 350435 - DNA, 15 bp, Homo sapiens
tggggaagcctgagc

SEQ ID NO: 350436 - DNA, 15 bp, Homo sapiens
ctggggaagcctgag

SEQ ID NO: 350437 - DNA, 15 bp, Homo sapiens
cctggggaagcctga

SEQ ID NO: 350438 - DNA, 15 bp, Homo sapiens
acctggggaagcctg

SEQ ID NO: 350439 - DNA, 15 bp, Homo sapiens
tacctggggaagcct

SEQ ID NO: 350440 - DNA, 15 bp, Homo sapiens
ttacctggggaagcc

SEQ ID NO: 350441 - DNA, 15 bp, Homo sapiens
gttacctggggaagc

SEQ ID NO: 350442 - DNA, 15 bp, Homo sapiens
tgttacctggggaag

SEQ ID NO: 350443 - DNA, 15 bp, Homo sapiens
gtgttacctggggaa

SEQ ID NO: 350444 - DNA, 15 bp, Homo sapiens
ggtgttacctgggga

SEQ ID NO: 350445 - DNA, 15 bp, Homo sapiens
gggtgttacctgggg

SEQ ID NO: 350446 - DNA, 15 bp, Homo sapiens
agggtgttacctggg

SEQ ID NO: 350447 - DNA, 15 bp, Homo sapiens
cagggtgttacctgg

SEQ ID NO: 350448 - DNA, 15 bp, Homo sapiens
ccagggtgttacctg

SEQ ID NO: 350449 - DNA, 15 bp, Homo sapiens
gccagggtgttacct

SEQ ID NO: 350450 - DNA, 15 bp, Homo sapiens
ggccagggtgttacc

SEQ ID NO: 350451 - DNA, 15 bp, Homo sapiens
gggccagggtgttac

SEQ ID NO: 350452 - DNA, 15 bp, Homo sapiens
ggggccagggtgtta

SEQ ID NO: 350453 - DNA, 15 bp, Homo sapiens
cggggccagggtgtt

SEQ ID NO: 350454 - DNA, 15 bp, Homo sapiens
gcggggccagggtgt

SEQ ID NO: 350455 - DNA, 15 bp, Homo sapiens
ggcggggccagggtg

SEQ ID NO: 350456 - DNA, 15 bp, Homo sapiens
gggcggggccagggt

SEQ ID NO: 350457 - DNA, 15 bp, Homo sapiens
ggggcggggccaggg

SEQ ID NO: 350458 - DNA, 15 bp, Homo sapiens
gggggcggggccagg

SEQ ID NO: 350459 - DNA, 15 bp, Homo sapiens
tgggggcggggccag

SEQ ID NO: 350460 - DNA, 15 bp, Homo sapiens
gtgggggcggggcca

SEQ ID NO: 350461 - DNA, 15 bp, Homo sapiens
tgtgggggcggggcc

SEQ ID NO: 350462 - DNA, 15 bp, Homo sapiens
ttgtgggggcggggc

SEQ ID NO: 350463 - DNA, 15 bp, Homo sapiens
tttgtgggggcgggg

SEQ ID NO: 350464 - DNA, 15 bp, Homo sapiens
ttttgtgggggcggg

SEQ ID NO: 350465 - DNA, 15 bp, Homo sapiens
cttttgtgggggcgg

SEQ ID NO: 350466 - DNA, 15 bp, Homo sapiens
tcttttgtgggggcg

SEQ ID NO: 350467 - DNA, 15 bp, Homo sapiens
ctcttttgtgggggc

SEQ ID NO: 350468 - DNA, 15 bp, Homo sapiens
gctcttttgtggggg

SEQ ID NO: 350469 - DNA, 15 bp, Homo sapiens
agctcttttgtgggg

SEQ ID NO: 350470 - DNA, 15 bp, Homo sapiens
aagctcttttgtggg

SEQ ID NO: 350471 - DNA, 15 bp, Homo sapiens
caagctcttttgtgg

SEQ ID NO: 350472 - DNA, 15 bp, Homo sapiens
ccaagctcttttgtg

SEQ ID NO: 350473 - DNA, 15 bp, Homo sapiens
cccaagctcttttgt

SEQ ID NO: 350474 - DNA, 15 bp, Homo sapiens
ccccaagctcttttg

SEQ ID NO: 350475 - DNA, 15 bp, Homo sapiens
gccccaagctctttt

SEQ ID NO: 350476 - DNA, 15 bp, Homo sapiens
ggccccaagctcttt

SEQ ID NO: 350477 - DNA, 15 bp, Homo sapiens
gggccccaagctctt

SEQ ID NO: 350478 - DNA, 15 bp, Homo sapiens
ggggccccaagctct

SEQ ID NO: 350479 - DNA, 15 bp, Homo sapiens
tggggccccaagctc

SEQ ID NO: 350480 - DNA, 15 bp, Homo sapiens
gtggggccccaagct

SEQ ID NO: 350481 - DNA, 15 bp, Homo sapiens
tgtggggccccaagc

SEQ ID NO: 350482 - DNA, 15 bp, Homo sapiens
ttgtggggccccaag

SEQ ID NO: 350483 - DNA, 15 bp, Homo sapiens
tttgtggggccccaa

SEQ ID NO: 350484 - DNA, 15 bp, Homo sapiens
gtttgtggggcccca

SEQ ID NO: 350485 - DNA, 15 bp, Homo sapiens
ggtttgtggggcccc

SEQ ID NO: 350486 - DNA, 15 bp, Homo sapiens
cggtttgtggggccc

SEQ ID NO: 350487 - DNA, 15 bp, Homo sapiens
acggtttgtggggcc

SEQ ID NO: 350488 - DNA, 15 bp, Homo sapiens
cacggtttgtggggc

SEQ ID NO: 350489 - DNA, 15 bp, Homo sapiens
acacggtttgtgggg

SEQ ID NO: 350490 - DNA, 15 bp, Homo sapiens
aacacggtttgtggg

SEQ ID NO: 350491 - DNA, 15 bp, Homo sapiens
aaacacggtttgtgg

SEQ ID NO: 350492 - DNA, 15 bp, Homo sapiens
caaacacggtttgtg

SEQ ID NO: 350493 - DNA, 15 bp, Homo sapiens
gcaaacacggtttgt

SEQ ID NO: 350494 - DNA, 15 bp, Homo sapiens
tgcaaacacggtttg

SEQ ID NO: 350495 - DNA, 15 bp, Homo sapiens
atgcaaacacggttt

SEQ ID NO: 350496 - DNA, 15 bp, Homo sapiens
aatgcaaacacggtt

SEQ ID NO: 350497 - DNA, 15 bp, Homo sapiens
aaatgcaaacacggt

SEQ ID NO: 350498 - DNA, 15 bp, Homo sapiens
aaaatgcaaacacgg

SEQ ID NO: 350499 - DNA, 15 bp, Homo sapiens
aaaaatgcaaacacg

SEQ ID NO: 350500 - DNA, 15 bp, Homo sapiens
taaaaatgcaaacac

SEQ ID NO: 350501 - DNA, 15 bp, Homo sapiens
ctaaaaatgcaaaca

SEQ ID NO: 350502 - DNA, 15 bp, Homo sapiens
cctaaaaatgcaaac

SEQ ID NO: 350503 - DNA, 15 bp, Homo sapiens
ccctaaaaatgcaaa

SEQ ID NO: 350504 - DNA, 15 bp, Homo sapiens
cccctaaaaatgcaa

SEQ ID NO: 350505 - DNA, 15 bp, Homo sapiens
ccccctaaaaatgca

SEQ ID NO: 350506 - DNA, 15 bp, Homo sapiens
tccccctaaaaatgc

SEQ ID NO: 350507 - DNA, 15 bp, Homo sapiens
ctccccctaaaaatg

SEQ ID NO: 350508 - DNA, 15 bp, Homo sapiens
tctccccctaaaaat

SEQ ID NO: 350509 - DNA, 15 bp, Homo sapiens
ctctccccctaaaaa

SEQ ID NO: 350510 - DNA, 15 bp, Homo sapiens
actctccccctaaaa

SEQ ID NO: 350511 - DNA, 15 bp, Homo sapiens
gactctccccctaaa

SEQ ID NO: 350512 - DNA, 15 bp, Homo sapiens
ggactctccccctaa

SEQ ID NO: 350513 - DNA, 15 bp, Homo sapiens
gggactctcccccta

SEQ ID NO: 350514 - DNA, 15 bp, Homo sapiens
ggggactctccccct

SEQ ID NO: 350515 - DNA, 15 bp, Homo sapiens
aggggactctccccc

SEQ ID NO: 350516 - DNA, 15 bp, Homo sapiens
aaggggactctcccc

SEQ ID NO: 350517 - DNA, 15 bp, Homo sapiens
aaaggggactctccc

SEQ ID NO: 350518 - DNA, 15 bp, Homo sapiens
aaaaggggactctcc

SEQ ID NO: 350519 - DNA, 15 bp, Homo sapiens
gaaaaggggactctc

SEQ ID NO: 350520 - DNA, 15 bp, Homo sapiens
ggaaaaggggactct

SEQ ID NO: 350521 - DNA, 15 bp, Homo sapiens
aggaaaaggggactc

SEQ ID NO: 350522 - DNA, 15 bp, Homo sapiens
caggaaaaggggact

SEQ ID NO: 350523 - DNA, 15 bp, Homo sapiens
ccaggaaaaggggac

SEQ ID NO: 350524 - DNA, 15 bp, Homo sapiens
accaggaaaagggga

SEQ ID NO: 350525 - DNA, 15 bp, Homo sapiens
aaccaggaaaagggg

SEQ ID NO: 350526 - DNA, 15 bp, Homo sapiens
gaaccaggaaaaggg

SEQ ID NO: 350527 - DNA, 15 bp, Homo sapiens
agaaccaggaaaagg

SEQ ID NO: 350528 - DNA, 15 bp, Homo sapiens
tagaaccaggaaaag

SEQ ID NO: 350529 - DNA, 15 bp, Homo sapiens
atagaaccaggaaaa

SEQ ID NO: 350530 - DNA, 15 bp, Homo sapiens
tatagaaccaggaaa

SEQ ID NO: 350531 - DNA, 15 bp, Homo sapiens
ttatagaaccaggaa

SEQ ID NO: 350532 - DNA, 15 bp, Homo sapiens
cttatagaaccagga

SEQ ID NO: 350533 - DNA, 15 bp, Homo sapiens
tcttatagaaccagg

SEQ ID NO: 350534 - DNA, 15 bp, Homo sapiens
atcttatagaaccag

SEQ ID NO: 350535 - DNA, 15 bp, Homo sapiens
aatcttatagaacca

SEQ ID NO: 350536 - DNA, 15 bp, Homo sapiens
gaatcttatagaacc

SEQ ID NO: 350537 - DNA, 15 bp, Homo sapiens
agaatcttatagaac

SEQ ID NO: 350538 - DNA, 15 bp, Homo sapiens
tagaatcttatagaa

SEQ ID NO: 350539 - DNA, 15 bp, Homo sapiens
ctagaatcttataga

SEQ ID NO: 350540 - DNA, 15 bp, Homo sapiens
gctagaatcttatag

SEQ ID NO: 350541 - DNA, 15 bp, Homo sapiens
ggctagaatcttata

SEQ ID NO: 350542 - DNA, 15 bp, Homo sapiens
gggctagaatcttat

SEQ ID NO: 350543 - DNA, 15 bp, Homo sapiens
agggctagaatctta

SEQ ID NO: 350544 - DNA, 15 bp, Homo sapiens
cagggctagaatctt

SEQ ID NO: 350545 - DNA, 15 bp, Homo sapiens
tcagggctagaatct

SEQ ID NO: 350546 - DNA, 15 bp, Homo sapiens
ctcagggctagaatc

SEQ ID NO: 350547 - DNA, 15 bp, Homo sapiens
actcagggctagaat

SEQ ID NO: 350548 - DNA, 15 bp, Homo sapiens
aactcagggctagaa

SEQ ID NO: 350549 - DNA, 15 bp, Homo sapiens
gaactcagggctaga

SEQ ID NO: 350550 - DNA, 15 bp, Homo sapiens
agaactcagggctag

SEQ ID NO: 350551 - DNA, 15 bp, Homo sapiens
aagaactcagggcta

SEQ ID NO: 350552 - DNA, 15 bp, Homo sapiens
caagaactcagggct

SEQ ID NO: 350553 - DNA, 15 bp, Homo sapiens
ccaagaactcagggc

SEQ ID NO: 350554 - DNA, 15 bp, Homo sapiens
gccaagaactcaggg

SEQ ID NO: 350555 - DNA, 15 bp, Homo sapiens
ggccaagaactcagg

SEQ ID NO: 350556 - DNA, 15 bp, Homo sapiens
gggccaagaactcag

SEQ ID NO: 350557 - DNA, 15 bp, Homo sapiens
tgggccaagaactca

SEQ ID NO: 350558 - DNA, 15 bp, Homo sapiens
ctgggccaagaactc

SEQ ID NO: 350559 - DNA, 15 bp, Homo sapiens
actgggccaagaact

SEQ ID NO: 350560 - DNA, 15 bp, Homo sapiens
cactgggccaagaac

SEQ ID NO: 350561 - DNA, 15 bp, Homo sapiens
acactgggccaagaa

SEQ ID NO: 350562 - DNA, 15 bp, Homo sapiens
cacactgggccaaga

SEQ ID NO: 350563 - DNA, 15 bp, Homo sapiens
acacactgggccaag

SEQ ID NO: 350564 - DNA, 15 bp, Homo sapiens
cacacactgggccaa

SEQ ID NO: 350565 - DNA, 15 bp, Homo sapiens
ccacacactgggcca

SEQ ID NO: 350566 - DNA, 15 bp, Homo sapiens
tccacacactgggcc

SEQ ID NO: 350567 - DNA, 15 bp, Homo sapiens
ctccacacactgggc

SEQ ID NO: 350568 - DNA, 15 bp, Homo sapiens
tctccacacactggg

SEQ ID NO: 350569 - DNA, 15 bp, Homo sapiens
atctccacacactgg

SEQ ID NO: 350570 - DNA, 15 bp, Homo sapiens
gatctccacacactg

SEQ ID NO: 350571 - DNA, 15 bp, Homo sapiens
agatctccacacact

SEQ ID NO: 350572 - DNA, 15 bp, Homo sapiens
gagatctccacacac

SEQ ID NO: 350573 - DNA, 15 bp, Homo sapiens
agagatctccacaca

SEQ ID NO: 350574 - DNA, 15 bp, Homo sapiens
cagagatctccacac

SEQ ID NO: 350575 - DNA, 15 bp, Homo sapiens
tcagagatctccaca

SEQ ID NO: 350576 - DNA, 15 bp, Homo sapiens
ctcagagatctccac

SEQ ID NO: 350577 - DNA, 15 bp, Homo sapiens
actcagagatctcca

SEQ ID NO: 350578 - DNA, 15 bp, Homo sapiens
gactcagagatctcc

SEQ ID NO: 350579 - DNA, 15 bp, Homo sapiens
ggactcagagatctc

SEQ ID NO: 350580 - DNA, 15 bp, Homo sapiens
gggactcagagatct

SEQ ID NO: 350581 - DNA, 15 bp, Homo sapiens
tgggactcagagatc

SEQ ID NO: 350582 - DNA, 15 bp, Homo sapiens
atgggactcagagat

SEQ ID NO: 350583 - DNA, 15 bp, Homo sapiens
catgggactcagaga

SEQ ID NO: 350584 - DNA, 15 bp, Homo sapiens
ccatgggactcagag

SEQ ID NO: 350585 - DNA, 15 bp, Homo sapiens
gccatgggactcaga

SEQ ID NO: 350586 - DNA, 15 bp, Homo sapiens
agccatgggactcag

SEQ ID NO: 350587 - DNA, 15 bp, Homo sapiens
gagccatgggactca

SEQ ID NO: 350588 - DNA, 15 bp, Homo sapiens
tgagccatgggactc

SEQ ID NO: 350589 - DNA, 15 bp, Homo sapiens
ctgagccatgggact

SEQ ID NO: 350590 - DNA, 15 bp, Homo sapiens
tctgagccatgggac

SEQ ID NO: 350591 - DNA, 15 bp, Homo sapiens
ctctgagccatggga

SEQ ID NO: 350592 - DNA, 15 bp, Homo sapiens
gctctgagccatggg

SEQ ID NO: 350593 - DNA, 15 bp, Homo sapiens
agctctgagccatgg

SEQ ID NO: 350594 - DNA, 15 bp, Homo sapiens
cagctctgagccatg

SEQ ID NO: 350595 - DNA, 15 bp, Homo sapiens
acagctctgagccat

SEQ ID NO: 350596 - DNA, 15 bp, Homo sapiens
gacagctctgagcca

SEQ ID NO: 350597 - DNA, 15 bp, Homo sapiens
ggacagctctgagcc

SEQ ID NO: 350598 - DNA, 15 bp, Homo sapiens
gggacagctctgagc

SEQ ID NO: 350599 - DNA, 15 bp, Homo sapiens
cgggacagctctgag

SEQ ID NO: 350600 - DNA, 15 bp, Homo sapiens
ccgggacagctctga

SEQ ID NO: 350601 - DNA, 15 bp, Homo sapiens
gccgggacagctctg

SEQ ID NO: 350602 - DNA, 15 bp, Homo sapiens
agccgggacagctct

SEQ ID NO: 350603 - DNA, 15 bp, Homo sapiens
cagccgggacagctc

SEQ ID NO: 350604 - DNA, 15 bp, Homo sapiens
tcagccgggacagct

SEQ ID NO: 350605 - DNA, 15 bp, Homo sapiens
ctcagccgggacagc

SEQ ID NO: 350606 - DNA, 15 bp, Homo sapiens
cctcagccgggacag

SEQ ID NO: 350607 - DNA, 15 bp, Homo sapiens
gcctcagccgggaca

SEQ ID NO: 350608 - DNA, 15 bp, Homo sapiens
ggcctcagccgggac

SEQ ID NO: 350609 - DNA, 15 bp, Homo sapiens
tggcctcagccggga

SEQ ID NO: 350610 - DNA, 15 bp, Homo sapiens
ctggcctcagccggg

SEQ ID NO: 350611 - DNA, 15 bp, Homo sapiens
tctggcctcagccgg

SEQ ID NO: 350612 - DNA, 15 bp, Homo sapiens
ctctggcctcagccg

SEQ ID NO: 350613 - DNA, 15 bp, Homo sapiens
cctctggcctcagcc

SEQ ID NO: 350614 - DNA, 15 bp, Homo sapiens
gcctctggcctcagc

SEQ ID NO: 350615 - DNA, 15 bp, Homo sapiens
tgcctctggcctcag

SEQ ID NO: 350616 - DNA, 15 bp, Homo sapiens
ctgcctctggcctca

SEQ ID NO: 350617 - DNA, 15 bp, Homo sapiens
tctgcctctggcctc

SEQ ID NO: 350618 - DNA, 15 bp, Homo sapiens
ttctgcctctggcct

SEQ ID NO: 350619 - DNA, 15 bp, Homo sapiens
attctgcctctggcc

SEQ ID NO: 350620 - DNA, 15 bp, Homo sapiens
aattctgcctctggc

SEQ ID NO: 350621 - DNA, 15 bp, Homo sapiens
aaattctgcctctgg

SEQ ID NO: 350622 - DNA, 15 bp, Homo sapiens
gaaattctgcctctg

SEQ ID NO: 350623 - DNA, 15 bp, Homo sapiens
ggaaattctgcctct

SEQ ID NO: 350624 - DNA, 15 bp, Homo sapiens
gggaaattctgcctc

SEQ ID NO: 350625 - DNA, 15 bp, Homo sapiens
agggaaattctgcct

SEQ ID NO: 350626 - DNA, 15 bp, Homo sapiens
gagggaaattctgcc

SEQ ID NO: 350627 - DNA, 15 bp, Homo sapiens
cgagggaaattctgc

SEQ ID NO: 350628 - DNA, 15 bp, Homo sapiens
tcgagggaaattctg

SEQ ID NO: 350629 - DNA, 15 bp, Homo sapiens
ctcgagggaaattct

SEQ ID NO: 350630 - DNA, 15 bp, Homo sapiens
tctcgagggaaattc

SEQ ID NO: 350631 - DNA, 15 bp, Homo sapiens
atctcgagggaaatt

SEQ ID NO: 350632 - DNA, 15 bp, Homo sapiens
catctcgagggaaat

SEQ ID NO: 350633 - DNA, 15 bp, Homo sapiens
ccatctcgagggaaa

SEQ ID NO: 350634 - DNA, 15 bp, Homo sapiens
cccatctcgagggaa

SEQ ID NO: 350635 - DNA, 15 bp, Homo sapiens
ccccatctcgaggga

SEQ ID NO: 350636 - DNA, 15 bp, Homo sapiens
gccccatctcgaggg

SEQ ID NO: 350637 - DNA, 15 bp, Homo sapiens
agccccatctcgagg

SEQ ID NO: 350638 - DNA, 15 bp, Homo sapiens
tagccccatctcgag

SEQ ID NO: 350639 - DNA, 15 bp, Homo sapiens
ttagccccatctcga

SEQ ID NO: 350640 - DNA, 15 bp, Homo sapiens
cttagccccatctcg

SEQ ID NO: 350641 - DNA, 15 bp, Homo sapiens
ccttagccccatctc

SEQ ID NO: 350642 - DNA, 15 bp, Homo sapiens
cccttagccccatct

SEQ ID NO: 350643 - DNA, 15 bp, Homo sapiens
ccccttagccccatc

SEQ ID NO: 350644 - DNA, 15 bp, Homo sapiens
tccccttagccccat

SEQ ID NO: 350645 - DNA, 15 bp, Homo sapiens
ctccccttagcccca

SEQ ID NO: 350646 - DNA, 15 bp, Homo sapiens
cctccccttagcccc

SEQ ID NO: 350647 - DNA, 15 bp, Homo sapiens
tcctccccttagccc

SEQ ID NO: 350648 - DNA, 15 bp, Homo sapiens
ctcctccccttagcc

SEQ ID NO: 350649 - DNA, 15 bp, Homo sapiens
tctcctccccttagc

SEQ ID NO: 350650 - DNA, 15 bp, Homo sapiens
ctctcctccccttag

SEQ ID NO: 350651 - DNA, 15 bp, Homo sapiens
gctctcctcccctta

SEQ ID NO: 350652 - DNA, 15 bp, Homo sapiens
agctctcctcccctt

SEQ ID NO: 350653 - DNA, 15 bp, Homo sapiens
cagctctcctcccct

SEQ ID NO: 350654 - DNA, 15 bp, Homo sapiens
acagctctcctcccc

SEQ ID NO: 350655 - DNA, 15 bp, Homo sapiens
gacagctctcctccc

SEQ ID NO: 350656 - DNA, 15 bp, Homo sapiens
tgacagctctcctcc

SEQ ID NO: 350657 - DNA, 15 bp, Homo sapiens
ctgacagctctcctc

SEQ ID NO: 350658 - DNA, 15 bp, Homo sapiens
cctgacagctctcct

SEQ ID NO: 350659 - DNA, 15 bp, Homo sapiens
ccctgacagctctcc

SEQ ID NO: 350660 - DNA, 15 bp, Homo sapiens
accctgacagctctc

SEQ ID NO: 350661 - DNA, 15 bp, Homo sapiens
gaccctgacagctct

SEQ ID NO: 350662 - DNA, 15 bp, Homo sapiens
agaccctgacagctc

SEQ ID NO: 350663 - DNA, 15 bp, Homo sapiens
tagaccctgacagct

SEQ ID NO: 350664 - DNA, 15 bp, Homo sapiens
ctagaccctgacagc

SEQ ID NO: 350665 - DNA, 15 bp, Homo sapiens
tctagaccctgacag

SEQ ID NO: 350666 - DNA, 15 bp, Homo sapiens
ttctagaccctgaca

SEQ ID NO: 350667 - DNA, 15 bp, Homo sapiens
cttctagaccctgac

SEQ ID NO: 350668 - DNA, 15 bp, Homo sapiens
acttctagaccctga

SEQ ID NO: 350669 - DNA, 15 bp, Homo sapiens
aacttctagaccctg

SEQ ID NO: 350670 - DNA, 15 bp, Homo sapiens
caacttctagaccct

SEQ ID NO: 350671 - DNA, 15 bp, Homo sapiens
gcaacttctagaccc

SEQ ID NO: 350672 - DNA, 15 bp, Homo sapiens
tgcaacttctagacc

SEQ ID NO: 350673 - DNA, 15 bp, Homo sapiens
ctgcaacttctagac

SEQ ID NO: 350674 - DNA, 15 bp, Homo sapiens
actgcaacttctaga

SEQ ID NO: 350675 - DNA, 15 bp, Homo sapiens
aactgcaacttctag

SEQ ID NO: 350676 - DNA, 15 bp, Homo sapiens
aaactgcaacttcta

SEQ ID NO: 350677 - DNA, 15 bp, Homo sapiens
caaactgcaacttct

SEQ ID NO: 350678 - DNA, 15 bp, Homo sapiens
acaaactgcaacttc

SEQ ID NO: 350679 - DNA, 15 bp, Homo sapiens
aacaaactgcaactt

SEQ ID NO: 350680 - DNA, 15 bp, Homo sapiens
aaacaaactgcaact

SEQ ID NO: 350681 - DNA, 15 bp, Homo sapiens
aaaacaaactgcaac

SEQ ID NO: 350682 - DNA, 15 bp, Homo sapiens
aaaaacaaactgcaa

SEQ ID NO: 350683 - DNA, 15 bp, Homo sapiens
aaaaaacaaactgca

SEQ ID NO: 350684 - DNA, 15 bp, Homo sapiens
caaaaaacaaactgc

SEQ ID NO: 350685 - DNA, 15 bp, Homo sapiens
acaaaaaacaaactg

SEQ ID NO: 350686 - DNA, 15 bp, Homo sapiens
aacaaaaaacaaact

SEQ ID NO: 350687 - DNA, 15 bp, Homo sapiens
caacaaaaaacaaac

SEQ ID NO: 350688 - DNA, 15 bp, Homo sapiens
acaacaaaaaacaaa

SEQ ID NO: 350689 - DNA, 15 bp, Homo sapiens
aacaacaaaaaacaa

SEQ ID NO: 350690 - DNA, 15 bp, Homo sapiens
caacaacaaaaaaca

SEQ ID NO: 350691 - DNA, 15 bp, Homo sapiens
acaacaacaaaaaac

SEQ ID NO: 350692 - DNA, 15 bp, Homo sapiens
aacaacaacaaaaaa

SEQ ID NO: 350693 - DNA, 15 bp, Homo sapiens
caacaacaacaaaaa

SEQ ID NO: 350694 - DNA, 15 bp, Homo sapiens
acaacaacaacaaaa

SEQ ID NO: 350695 - DNA, 15 bp, Homo sapiens
aacaacaacaacaaa

SEQ ID NO: 350696 - DNA, 15 bp, Homo sapiens
caacaacaacaacaa

SEQ ID NO: 350697 - DNA, 15 bp, Homo sapiens
acaacaacaacaaca

SEQ ID NO: 350698 - DNA, 15 bp, Homo sapiens
aacaacaacaacaac

SEQ ID NO: 350699 - DNA, 15 bp, Homo sapiens
aaacaacaacaacaa

SEQ ID NO: 350700 - DNA, 15 bp, Homo sapiens
aaaacaacaacaaca

SEQ ID NO: 350701 - DNA, 15 bp, Homo sapiens
aaaaacaacaacaac

SEQ ID NO: 350702 - DNA, 15 bp, Homo sapiens
caaaaacaacaacaa

SEQ ID NO: 350703 - DNA, 15 bp, Homo sapiens
tcaaaaacaacaaca

SEQ ID NO: 350704 - DNA, 15 bp, Homo sapiens
ctcaaaaacaacaac

SEQ ID NO: 350705 - DNA, 15 bp, Homo sapiens
tctcaaaaacaacaa

SEQ ID NO: 350706 - DNA, 15 bp, Homo sapiens
gtctcaaaaacaaca

SEQ ID NO: 350707 - DNA, 15 bp, Homo sapiens
ggtctcaaaaacaac

SEQ ID NO: 350708 - DNA, 15 bp, Homo sapiens
cggtctcaaaaacaa

SEQ ID NO: 350709 - DNA, 15 bp, Homo sapiens
tcggtctcaaaaaca

SEQ ID NO: 350710 - DNA, 15 bp, Homo sapiens
ctcggtctcaaaaac

SEQ ID NO: 350711 - DNA, 15 bp, Homo sapiens
actcggtctcaaaaa

SEQ ID NO: 350712 - DNA, 15 bp, Homo sapiens
aactcggtctcaaaa

SEQ ID NO: 350713 - DNA, 15 bp, Homo sapiens
aaactcggtctcaaa

SEQ ID NO: 350714 - DNA, 15 bp, Homo sapiens
gaaactcggtctcaa

SEQ ID NO: 350715 - DNA, 15 bp, Homo sapiens
cgaaactcggtctca

SEQ ID NO: 350716 - DNA, 15 bp, Homo sapiens
acgaaactcggtctc

SEQ ID NO: 350717 - DNA, 15 bp, Homo sapiens
aacgaaactcggtct

SEQ ID NO: 350718 - DNA, 15 bp, Homo sapiens
gaacgaaactcggtc

SEQ ID NO: 350719 - DNA, 15 bp, Homo sapiens
agaacgaaactcggt

SEQ ID NO: 350720 - DNA, 15 bp, Homo sapiens
aagaacgaaactcgg

SEQ ID NO: 350721 - DNA, 15 bp, Homo sapiens
caagaacgaaactcg

SEQ ID NO: 350722 - DNA, 15 bp, Homo sapiens
acaagaacgaaactc

SEQ ID NO: 350723 - DNA, 15 bp, Homo sapiens
aacaagaacgaaact

SEQ ID NO: 350724 - DNA, 15 bp, Homo sapiens
caacaagaacgaaac

SEQ ID NO: 350725 - DNA, 15 bp, Homo sapiens
gcaacaagaacgaaa

SEQ ID NO: 350726 - DNA, 15 bp, Homo sapiens
ggcaacaagaacgaa

SEQ ID NO: 350727 - DNA, 15 bp, Homo sapiens
gggcaacaagaacga

SEQ ID NO: 350728 - DNA, 15 bp, Homo sapiens
tgggcaacaagaacg

SEQ ID NO: 350729 - DNA, 15 bp, Homo sapiens
ctgggcaacaagaac

SEQ ID NO: 350730 - DNA, 15 bp, Homo sapiens
cctgggcaacaagaa

SEQ ID NO: 350731 - DNA, 15 bp, Homo sapiens
gcctgggcaacaaga

SEQ ID NO: 350732 - DNA, 15 bp, Homo sapiens
acgccattgcactcc

SEQ ID NO: 350733 - DNA, 15 bp, Homo sapiens
cacgccattgcactc

SEQ ID NO: 350734 - DNA, 15 bp, Homo sapiens
tcacgccattgcact

SEQ ID NO: 350735 - DNA, 15 bp, Homo sapiens
ggagatcacgccatt

SEQ ID NO: 350736 - DNA, 15 bp, Homo sapiens
cggagatcacgccat

SEQ ID NO: 350737 - DNA, 15 bp, Homo sapiens
gcggagatcacgcca

SEQ ID NO: 350738 - DNA, 15 bp, Homo sapiens
agcggagatcacgcc

SEQ ID NO: 350739 - DNA, 15 bp, Homo sapiens
gagcggagatcacgc

SEQ ID NO: 350740 - DNA, 15 bp, Homo sapiens
tgagcggagatcacg

SEQ ID NO: 350741 - DNA, 15 bp, Homo sapiens
ctgagcggagatcac

SEQ ID NO: 350742 - DNA, 15 bp, Homo sapiens
gctgagcggagatca

SEQ ID NO: 350743 - DNA, 15 bp, Homo sapiens
ggctgagcggagatc

SEQ ID NO: 350744 - DNA, 15 bp, Homo sapiens
aggctgagcggagat

SEQ ID NO: 350745 - DNA, 15 bp, Homo sapiens
gaggctgagcggaga

SEQ ID NO: 350746 - DNA, 15 bp, Homo sapiens
ggaggctgagcggag

SEQ ID NO: 350747 - DNA, 15 bp, Homo sapiens
gggaggctgagcgga

SEQ ID NO: 350748 - DNA, 15 bp, Homo sapiens
tgggaggctgagcgg

SEQ ID NO: 350749 - DNA, 15 bp, Homo sapiens
ctgggaggctgagcg

SEQ ID NO: 350750 - DNA, 15 bp, Homo sapiens
cctgggaggctgagc

SEQ ID NO: 350751 - DNA, 15 bp, Homo sapiens
acctgggaggctgag

SEQ ID NO: 350752 - DNA, 15 bp, Homo sapiens
aacctgggaggctga

SEQ ID NO: 350753 - DNA, 15 bp, Homo sapiens
gaacctgggaggctg

SEQ ID NO: 350754 - DNA, 15 bp, Homo sapiens
tgaacctgggaggct

SEQ ID NO: 350755 - DNA, 15 bp, Homo sapiens
ttgaacctgggaggc

SEQ ID NO: 350756 - DNA, 15 bp, Homo sapiens
cgcttgaacctggga

SEQ ID NO: 350757 - DNA, 15 bp, Homo sapiens
tcgcttgaacctggg

SEQ ID NO: 350758 - DNA, 15 bp, Homo sapiens
atcgcttgaacctgg

SEQ ID NO: 350759 - DNA, 15 bp, Homo sapiens
aatcgcttgaacctg

SEQ ID NO: 350760 - DNA, 15 bp, Homo sapiens
agggaggctgaggca

SEQ ID NO: 350761 - DNA, 15 bp, Homo sapiens
tagggaggctgaggc

SEQ ID NO: 350762 - DNA, 15 bp, Homo sapiens
ctagggaggctgagg

SEQ ID NO: 350763 - DNA, 15 bp, Homo sapiens
actagggaggctgag

SEQ ID NO: 350764 - DNA, 15 bp, Homo sapiens
tactagggaggctga

SEQ ID NO: 350765 - DNA, 15 bp, Homo sapiens
ttactagggaggctg

SEQ ID NO: 350766 - DNA, 15 bp, Homo sapiens
gttactagggaggct

SEQ ID NO: 350767 - DNA, 15 bp, Homo sapiens
agttactagggaggc

SEQ ID NO: 350768 - DNA, 15 bp, Homo sapiens
cagttactagggagg

SEQ ID NO: 350769 - DNA, 15 bp, Homo sapiens
ccagttactagggag

SEQ ID NO: 350770 - DNA, 15 bp, Homo sapiens
cccagttactaggga

SEQ ID NO: 350771 - DNA, 15 bp, Homo sapiens
tcccagttactaggg

SEQ ID NO: 350772 - DNA, 15 bp, Homo sapiens
atcccagttactagg

SEQ ID NO: 350773 - DNA, 15 bp, Homo sapiens
aatcccagttactag

SEQ ID NO: 350774 - DNA, 15 bp, Homo sapiens
taatcccagttacta

SEQ ID NO: 350775 - DNA, 15 bp, Homo sapiens
gtaatcccagttact

SEQ ID NO: 350776 - DNA, 15 bp, Homo sapiens
tgtaatcccagttac

SEQ ID NO: 350777 - DNA, 15 bp, Homo sapiens
ctgtaatcccagtta

SEQ ID NO: 350778 - DNA, 15 bp, Homo sapiens
cctgtaatcccagtt

SEQ ID NO: 350779 - DNA, 15 bp, Homo sapiens
gcctgtaatcccagt

SEQ ID NO: 350780 - DNA, 15 bp, Homo sapiens
gcatgcctgtaatcc

SEQ ID NO: 350781 - DNA, 15 bp, Homo sapiens
cgcatgcctgtaatc

SEQ ID NO: 350782 - DNA, 15 bp, Homo sapiens
gcgcatgcctgtaat

SEQ ID NO: 350783 - DNA, 15 bp, Homo sapiens
ggcgcatgcctgtaa

SEQ ID NO: 350784 - DNA, 15 bp, Homo sapiens
tggcgcatgcctgta

SEQ ID NO: 350785 - DNA, 15 bp, Homo sapiens
atggcgcatgcctgt

SEQ ID NO: 350786 - DNA, 15 bp, Homo sapiens
gatggcgcatgcctg

SEQ ID NO: 350787 - DNA, 15 bp, Homo sapiens
tgatggcgcatgcct

SEQ ID NO: 350788 - DNA, 15 bp, Homo sapiens
gtgatggcgcatgcc

SEQ ID NO: 350789 - DNA, 15 bp, Homo sapiens
tgtgatggcgcatgc

SEQ ID NO: 350790 - DNA, 15 bp, Homo sapiens
gtgtgatggcgcatg

SEQ ID NO: 350791 - DNA, 15 bp, Homo sapiens
ggtgtgatggcgcat

SEQ ID NO: 350792 - DNA, 15 bp, Homo sapiens
gggtgtgatggcgca

SEQ ID NO: 350793 - DNA, 15 bp, Homo sapiens
tgggtgtgatggcgc

SEQ ID NO: 350794 - DNA, 15 bp, Homo sapiens
ctgggtgtgatggcg

SEQ ID NO: 350795 - DNA, 15 bp, Homo sapiens
gctgggtgtgatggc

SEQ ID NO: 350796 - DNA, 15 bp, Homo sapiens
agctgggtgtgatgg

SEQ ID NO: 350797 - DNA, 15 bp, Homo sapiens
tagctgggtgtgatg

SEQ ID NO: 350798 - DNA, 15 bp, Homo sapiens
ttagctgggtgtgat

SEQ ID NO: 350799 - DNA, 15 bp, Homo sapiens
attagctgggtgtga

SEQ ID NO: 350800 - DNA, 15 bp, Homo sapiens
gccaacatggagaaa

SEQ ID NO: 350801 - DNA, 15 bp, Homo sapiens
ggccaacatggagaa

SEQ ID NO: 350802 - DNA, 15 bp, Homo sapiens
tggccaacatggaga

SEQ ID NO: 350803 - DNA, 15 bp, Homo sapiens
ctggccaacatggag

SEQ ID NO: 350804 - DNA, 15 bp, Homo sapiens
cctggccaacatgga

SEQ ID NO: 350805 - DNA, 15 bp, Homo sapiens
aagaccagcctggcc

SEQ ID NO: 350806 - DNA, 15 bp, Homo sapiens
caagaccagcctggc

SEQ ID NO: 350807 - DNA, 15 bp, Homo sapiens
tcaagaccagcctgg

SEQ ID NO: 350808 - DNA, 15 bp, Homo sapiens
tgaggcgggcagatc

SEQ ID NO: 350809 - DNA, 15 bp, Homo sapiens
ctgaggcgggcagat

SEQ ID NO: 350810 - DNA, 15 bp, Homo sapiens
gctgaggcgggcaga

SEQ ID NO: 350811 - DNA, 15 bp, Homo sapiens
ggctgaggcgggcag

SEQ ID NO: 350812 - DNA, 15 bp, Homo sapiens
aggctgaggcgggca

SEQ ID NO: 350813 - DNA, 15 bp, Homo sapiens
gaggctgaggcgggc

SEQ ID NO: 350814 - DNA, 15 bp, Homo sapiens
ggaggctgaggcggg

SEQ ID NO: 350815 - DNA, 15 bp, Homo sapiens
gggaggctgaggcgg

SEQ ID NO: 350816 - DNA, 15 bp, Homo sapiens
ccccagcactttggg

SEQ ID NO: 350817 - DNA, 15 bp, Homo sapiens
accccagcactttgg

SEQ ID NO: 350818 - DNA, 15 bp, Homo sapiens
aaccccagcactttg

SEQ ID NO: 350819 - DNA, 15 bp, Homo sapiens
taaccccagcacttt

SEQ ID NO: 350820 - DNA, 15 bp, Homo sapiens
gtaaccccagcactt

SEQ ID NO: 350821 - DNA, 15 bp, Homo sapiens
tgtaaccccagcact

SEQ ID NO: 350822 - DNA, 15 bp, Homo sapiens
ctgtaaccccagcac

SEQ ID NO: 350823 - DNA, 15 bp, Homo sapiens
cctgtaaccccagca

SEQ ID NO: 350824 - DNA, 15 bp, Homo sapiens
acctgtaaccccagc

SEQ ID NO: 350825 - DNA, 15 bp, Homo sapiens
cacctgtaaccccag

SEQ ID NO: 350826 - DNA, 15 bp, Homo sapiens
acacctgtaacccca

SEQ ID NO: 350827 - DNA, 15 bp, Homo sapiens
cacacctgtaacccc

SEQ ID NO: 350828 - DNA, 15 bp, Homo sapiens
tcacacctgtaaccc

SEQ ID NO: 350829 - DNA, 15 bp, Homo sapiens
ctcacacctgtaacc

SEQ ID NO: 350830 - DNA, 15 bp, Homo sapiens
gctcacacctgtaac

SEQ ID NO: 350831 - DNA, 15 bp, Homo sapiens
agcgtggtggctcac

SEQ ID NO: 350832 - DNA, 15 bp, Homo sapiens
aagcgtggtggctca

SEQ ID NO: 350833 - DNA, 15 bp, Homo sapiens
caagcgtggtggctc

SEQ ID NO: 350834 - DNA, 15 bp, Homo sapiens
ccaagcgtggtggct

SEQ ID NO: 350835 - DNA, 15 bp, Homo sapiens
gccaagcgtggtggc

SEQ ID NO: 350836 - DNA, 15 bp, Homo sapiens
ggccaagcgtggtgg

SEQ ID NO: 350837 - DNA, 15 bp, Homo sapiens
aggccaagcgtggtg

SEQ ID NO: 350838 - DNA, 15 bp, Homo sapiens
caggccaagcgtggt

SEQ ID NO: 350839 - DNA, 15 bp, Homo sapiens
acaggccaagcgtgg

SEQ ID NO: 350840 - DNA, 15 bp, Homo sapiens
aacaggccaagcgtg

SEQ ID NO: 350841 - DNA, 15 bp, Homo sapiens
caacaggccaagcgt

SEQ ID NO: 350842 - DNA, 15 bp, Homo sapiens
acaacaggccaagcg

SEQ ID NO: 350843 - DNA, 15 bp, Homo sapiens
cacaacaggccaagc

SEQ ID NO: 350844 - DNA, 15 bp, Homo sapiens
acacaacaggccaag

SEQ ID NO: 350845 - DNA, 15 bp, Homo sapiens
aacacaacaggccaa

SEQ ID NO: 350846 - DNA, 15 bp, Homo sapiens
aaacacaacaggcca

SEQ ID NO: 350847 - DNA, 15 bp, Homo sapiens
aaaacacaacaggcc

SEQ ID NO: 350848 - DNA, 15 bp, Homo sapiens
aaaaacacaacaggc

SEQ ID NO: 350849 - DNA, 15 bp, Homo sapiens
taaaaacacaacagg

SEQ ID NO: 350850 - DNA, 15 bp, Homo sapiens
ttaaaaacacaacag

SEQ ID NO: 350851 - DNA, 15 bp, Homo sapiens
attaaaaacacaaca

SEQ ID NO: 350852 - DNA, 15 bp, Homo sapiens
tattaaaaacacaac

SEQ ID NO: 350853 - DNA, 15 bp, Homo sapiens
atattaaaaacacaa

SEQ ID NO: 350854 - DNA, 15 bp, Homo sapiens
gatattaaaaacaca

SEQ ID NO: 350855 - DNA, 15 bp, Homo sapiens
ggatattaaaaacac

SEQ ID NO: 350856 - DNA, 15 bp, Homo sapiens
tggatattaaaaaca

SEQ ID NO: 350857 - DNA, 15 bp, Homo sapiens
atggatattaaaaac

SEQ ID NO: 350858 - DNA, 15 bp, Homo sapiens
gatggatattaaaaa

SEQ ID NO: 350859 - DNA, 15 bp, Homo sapiens
agatggatattaaaa

SEQ ID NO: 350860 - DNA, 15 bp, Homo sapiens
aagatggatattaaa

SEQ ID NO: 350861 - DNA, 15 bp, Homo sapiens
aaagatggatattaa

SEQ ID NO: 350862 - DNA, 15 bp, Homo sapiens
taaagatggatatta

SEQ ID NO: 350863 - DNA, 15 bp, Homo sapiens
ataaagatggatatt

SEQ ID NO: 350864 - DNA, 15 bp, Homo sapiens
aataaagatggatat

SEQ ID NO: 350865 - DNA, 15 bp, Homo sapiens
taataaagatggata

SEQ ID NO: 350866 - DNA, 15 bp, Homo sapiens
ttaataaagatggat

SEQ ID NO: 350867 - DNA, 15 bp, Homo sapiens
attaataaagatgga

SEQ ID NO: 350868 - DNA, 15 bp, Homo sapiens
gattaataaagatgg

SEQ ID NO: 350869 - DNA, 15 bp, Homo sapiens
agattaataaagatg

SEQ ID NO: 350870 - DNA, 15 bp, Homo sapiens
cagattaataaagat

SEQ ID NO: 350871 - DNA, 15 bp, Homo sapiens
tcagattaataaaga

SEQ ID NO: 350872 - DNA, 15 bp, Homo sapiens
gtcagattaataaag

SEQ ID NO: 350873 - DNA, 15 bp, Homo sapiens
tgtcagattaataaa

SEQ ID NO: 350874 - DNA, 15 bp, Homo sapiens
gtgtcagattaataa

SEQ ID NO: 350875 - DNA, 15 bp, Homo sapiens
agtgtcagattaata

SEQ ID NO: 350876 - DNA, 15 bp, Homo sapiens
tagtgtcagattaat

SEQ ID NO: 350877 - DNA, 15 bp, Homo sapiens
ttagtgtcagattaa

SEQ ID NO: 350878 - DNA, 15 bp, Homo sapiens
tttagtgtcagatta

SEQ ID NO: 350879 - DNA, 15 bp, Homo sapiens
gtttagtgtcagatt

SEQ ID NO: 350880 - DNA, 15 bp, Homo sapiens
cgtttagtgtcagat

SEQ ID NO: 350881 - DNA, 15 bp, Homo sapiens
acgtttagtgtcaga

SEQ ID NO: 350882 - DNA, 15 bp, Homo sapiens
cacgtttagtgtcag

SEQ ID NO: 350883 - DNA, 15 bp, Homo sapiens
acacgtttagtgtca

SEQ ID NO: 350884 - DNA, 15 bp, Homo sapiens
gacacgtttagtgtc

SEQ ID NO: 350885 - DNA, 15 bp, Homo sapiens
agacacgtttagtgt

SEQ ID NO: 350886 - DNA, 15 bp, Homo sapiens
cagacacgtttagtg

SEQ ID NO: 350887 - DNA, 15 bp, Homo sapiens
tcagacacgtttagt

SEQ ID NO: 350888 - DNA, 15 bp, Homo sapiens
gtcagacacgtttag

SEQ ID NO: 350889 - DNA, 15 bp, Homo sapiens
tgtcagacacgttta

SEQ ID NO: 350890 - DNA, 15 bp, Homo sapiens
gtgtcagacacgttt

SEQ ID NO: 350891 - DNA, 15 bp, Homo sapiens
agtgtcagacacgtt

SEQ ID NO: 350892 - DNA, 15 bp, Homo sapiens
cagtgtcagacacgt

SEQ ID NO: 350893 - DNA, 15 bp, Homo sapiens
tcagtgtcagacacg

SEQ ID NO: 350894 - DNA, 15 bp, Homo sapiens
ttcagtgtcagacac

SEQ ID NO: 350895 - DNA, 15 bp, Homo sapiens
cttcagtgtcagaca

SEQ ID NO: 350896 - DNA, 15 bp, Homo sapiens
acttcagtgtcagac

SEQ ID NO: 350897 - DNA, 15 bp, Homo sapiens
cacttcagtgtcaga

SEQ ID NO: 350898 - DNA, 15 bp, Homo sapiens
tcacttcagtgtcag

SEQ ID NO: 350899 - DNA, 15 bp, Homo sapiens
ttcacttcagtgtca

SEQ ID NO: 350900 - DNA, 15 bp, Homo sapiens
gttcacttcagtgtc

SEQ ID NO: 350901 - DNA, 15 bp, Homo sapiens
ggttcacttcagtgt

SEQ ID NO: 350902 - DNA, 15 bp, Homo sapiens
aggttcacttcagtg

SEQ ID NO: 350903 - DNA, 15 bp, Homo sapiens
caggttcacttcagt

SEQ ID NO: 350904 - DNA, 15 bp, Homo sapiens
acaggttcacttcag

SEQ ID NO: 350905 - DNA, 15 bp, Homo sapiens
cacaggttcacttca

SEQ ID NO: 350906 - DNA, 15 bp, Homo sapiens
gcacaggttcacttc

SEQ ID NO: 350907 - DNA, 15 bp, Homo sapiens
agcacaggttcactt

SEQ ID NO: 350908 - DNA, 15 bp, Homo sapiens
gagcacaggttcact

SEQ ID NO: 350909 - DNA, 15 bp, Homo sapiens
agagcacaggttcac

SEQ ID NO: 350910 - DNA, 15 bp, Homo sapiens
cagagcacaggttca

SEQ ID NO: 350911 - DNA, 15 bp, Homo sapiens
ccagagcacaggttc

SEQ ID NO: 350912 - DNA, 15 bp, Homo sapiens
cccagagcacaggtt

SEQ ID NO: 350913 - DNA, 15 bp, Homo sapiens
ccccagagcacaggt

SEQ ID NO: 350914 - DNA, 15 bp, Homo sapiens
gccccagagcacagg

SEQ ID NO: 350915 - DNA, 15 bp, Homo sapiens
tgccccagagcacag

SEQ ID NO: 350916 - DNA, 15 bp, Homo sapiens
ctgccccagagcaca

SEQ ID NO: 350917 - DNA, 15 bp, Homo sapiens
cctgccccagagcac

SEQ ID NO: 350918 - DNA, 15 bp, Homo sapiens
gcctgccccagagca

SEQ ID NO: 350919 - DNA, 15 bp, Homo sapiens
agcctgccccagagc

SEQ ID NO: 350920 - DNA, 15 bp, Homo sapiens
cagcctgccccagag

SEQ ID NO: 350921 - DNA, 15 bp, Homo sapiens
tcagcctgccccaga

SEQ ID NO: 350922 - DNA, 15 bp, Homo sapiens
atcagcctgccccag

SEQ ID NO: 350923 - DNA, 15 bp, Homo sapiens
aatcagcctgcccca

SEQ ID NO: 350924 - DNA, 15 bp, Homo sapiens
aaatcagcctgcccc

SEQ ID NO: 350925 - DNA, 15 bp, Homo sapiens
gaaatcagcctgccc

SEQ ID NO: 350926 - DNA, 15 bp, Homo sapiens
ggaaatcagcctgcc

SEQ ID NO: 350927 - DNA, 15 bp, Homo sapiens
gggaaatcagcctgc

SEQ ID NO: 350928 - DNA, 15 bp, Homo sapiens
tgggaaatcagcctg

SEQ ID NO: 350929 - DNA, 15 bp, Homo sapiens
ttgggaaatcagcct

SEQ ID NO: 350930 - DNA, 15 bp, Homo sapiens
attgggaaatcagcc

SEQ ID NO: 350931 - DNA, 15 bp, Homo sapiens
tattgggaaatcagc

SEQ ID NO: 350932 - DNA, 15 bp, Homo sapiens
ttattgggaaatcag

SEQ ID NO: 350933 - DNA, 15 bp, Homo sapiens
tttattgggaaatca

SEQ ID NO: 350934 - DNA, 15 bp, Homo sapiens
ttttattgggaaatc

SEQ ID NO: 350935 - DNA, 15 bp, Homo sapiens
cttttattgggaaat

SEQ ID NO: 350936 - DNA, 15 bp, Homo sapiens
acttttattgggaaa

SEQ ID NO: 350937 - DNA, 15 bp, Homo sapiens
cacttttattgggaa

SEQ ID NO: 350938 - DNA, 15 bp, Homo sapiens
acacttttattggga

SEQ ID NO: 350939 - DNA, 15 bp, Homo sapiens
cacacttttattggg

SEQ ID NO: 350940 - DNA, 15 bp, Homo sapiens
ccacacttttattgg

SEQ ID NO: 350941 - DNA, 15 bp, Homo sapiens
gccacacttttattg

SEQ ID NO: 350942 - DNA, 15 bp, Homo sapiens
ggccacacttttatt

SEQ ID NO: 350943 - DNA, 15 bp, Homo sapiens
gggccacacttttat

SEQ ID NO: 350944 - DNA, 15 bp, Homo sapiens
agggccacactttta

SEQ ID NO: 350945 - DNA, 15 bp, Homo sapiens
gagggccacactttt

SEQ ID NO: 350946 - DNA, 15 bp, Homo sapiens
ggagggccacacttt

SEQ ID NO: 350947 - DNA, 15 bp, Homo sapiens
gggagggccacactt

SEQ ID NO: 350948 - DNA, 15 bp, Homo sapiens
ggggagggccacact

SEQ ID NO: 350949 - DNA, 15 bp, Homo sapiens
aggggagggccacac

SEQ ID NO: 350950 - DNA, 15 bp, Homo sapiens
caggggagggccaca

SEQ ID NO: 350951 - DNA, 15 bp, Homo sapiens
gcaggggagggccac

SEQ ID NO: 350952 - DNA, 15 bp, Homo sapiens
ggcaggggagggcca

SEQ ID NO: 350953 - DNA, 15 bp, Homo sapiens
gggcaggggagggcc

SEQ ID NO: 350954 - DNA, 15 bp, Homo sapiens
ggggcaggggagggc

SEQ ID NO: 350955 - DNA, 15 bp, Homo sapiens
aggggcaggggaggg

SEQ ID NO: 350956 - DNA, 15 bp, Homo sapiens
gaggggcaggggagg

SEQ ID NO: 350957 - DNA, 15 bp, Homo sapiens
agaggggcaggggag

SEQ ID NO: 350958 - DNA, 15 bp, Homo sapiens
aagaggggcagggga

SEQ ID NO: 350959 - DNA, 15 bp, Homo sapiens
aaagaggggcagggg

SEQ ID NO: 350960 - DNA, 15 bp, Homo sapiens
caaagaggggcaggg

SEQ ID NO: 350961 - DNA, 15 bp, Homo sapiens
gcaaagaggggcagg

SEQ ID NO: 350962 - DNA, 15 bp, Homo sapiens
ggcaaagaggggcag

SEQ ID NO: 350963 - DNA, 15 bp, Homo sapiens
tggcaaagaggggca

SEQ ID NO: 350964 - DNA, 15 bp, Homo sapiens
ctggcaaagaggggc

SEQ ID NO: 350965 - DNA, 15 bp, Homo sapiens
cctggcaaagagggg

SEQ ID NO: 350966 - DNA, 15 bp, Homo sapiens
acctggcaaagaggg

SEQ ID NO: 350967 - DNA, 15 bp, Homo sapiens
gacctggcaaagagg

SEQ ID NO: 350968 - DNA, 15 bp, Homo sapiens
agacctggcaaagag

SEQ ID NO: 350969 - DNA, 15 bp, Homo sapiens
gagacctggcaaaga

SEQ ID NO: 350970 - DNA, 15 bp, Homo sapiens
tgagacctggcaaag

SEQ ID NO: 350971 - DNA, 15 bp, Homo sapiens
gtgagacctggcaaa

SEQ ID NO: 350972 - DNA, 15 bp, Homo sapiens
ggtgagacctggcaa

SEQ ID NO: 350973 - DNA, 15 bp, Homo sapiens
gggtgagacctggca

SEQ ID NO: 350974 - DNA, 15 bp, Homo sapiens
ggggtgagacctggc

SEQ ID NO: 350975 - DNA, 15 bp, Homo sapiens
aggggtgagacctgg

SEQ ID NO: 350976 - DNA, 15 bp, Homo sapiens
caggggtgagacctg

SEQ ID NO: 350977 - DNA, 15 bp, Homo sapiens
ccaggggtgagacct

SEQ ID NO: 350978 - DNA, 15 bp, Homo sapiens
cccaggggtgagacc

SEQ ID NO: 350979 - DNA, 15 bp, Homo sapiens
ccccaggggtgagac

SEQ ID NO: 350980 - DNA, 15 bp, Homo sapiens
gccccaggggtgaga

SEQ ID NO: 350981 - DNA, 15 bp, Homo sapiens
tgccccaggggtgag

SEQ ID NO: 350982 - DNA, 15 bp, Homo sapiens
ttgccccaggggtga

SEQ ID NO: 350983 - DNA, 15 bp, Homo sapiens
gttgccccaggggtg

SEQ ID NO: 350984 - DNA, 15 bp, Homo sapiens
ggttgccccaggggt

SEQ ID NO: 350985 - DNA, 15 bp, Homo sapiens
tggttgccccagggg

SEQ ID NO: 350986 - DNA, 15 bp, Homo sapiens
ttggttgccccaggg

SEQ ID NO: 350987 - DNA, 15 bp, Homo sapiens
attggttgccccagg

SEQ ID NO: 350988 - DNA, 15 bp, Homo sapiens
cattggttgccccag

SEQ ID NO: 350989 - DNA, 15 bp, Homo sapiens
tcattggttgcccca

SEQ ID NO: 350990 - DNA, 15 bp, Homo sapiens
gtcattggttgcccc

SEQ ID NO: 350991 - DNA, 15 bp, Homo sapiens
tgtcattggttgccc

SEQ ID NO: 350992 - DNA, 15 bp, Homo sapiens
ctgtcattggttgcc

SEQ ID NO: 350993 - DNA, 15 bp, Homo sapiens
gctgtcattggttgc

SEQ ID NO: 350994 - DNA, 15 bp, Homo sapiens
ggctgtcattggttg

SEQ ID NO: 350995 - DNA, 15 bp, Homo sapiens
tggctgtcattggtt

SEQ ID NO: 350996 - DNA, 15 bp, Homo sapiens
ctggctgtcattggt

SEQ ID NO: 350997 - DNA, 15 bp, Homo sapiens
cctggctgtcattgg

SEQ ID NO: 350998 - DNA, 15 bp, Homo sapiens
acctggctgtcattg

SEQ ID NO: 350999 - DNA, 15 bp, Homo sapiens
gacctggctgtcatt

SEQ ID NO: 351000 - DNA, 15 bp, Homo sapiens
tgacctggctgtcat

SEQ ID NO: 351001 - DNA, 15 bp, Homo sapiens
ctgacctggctgtca

SEQ ID NO: 351002 - DNA, 15 bp, Homo sapiens
actgacctggctgtc

SEQ ID NO: 351003 - DNA, 15 bp, Homo sapiens
aactgacctggctgt

SEQ ID NO: 351004 - DNA, 15 bp, Homo sapiens
caactgacctggctg

SEQ ID NO: 351005 - DNA, 15 bp, Homo sapiens
acaactgacctggct

SEQ ID NO: 351006 - DNA, 15 bp, Homo sapiens
aacaactgacctggc

SEQ ID NO: 351007 - DNA, 15 bp, Homo sapiens
caacaactgacctgg

SEQ ID NO: 351008 - DNA, 15 bp, Homo sapiens
tcaacaactgacctg

SEQ ID NO: 351009 - DNA, 15 bp, Homo sapiens
ctcaacaactgacct

SEQ ID NO: 351010 - DNA, 15 bp, Homo sapiens
tctcaacaactgacc

SEQ ID NO: 351011 - DNA, 15 bp, Homo sapiens
gtctcaacaactgac

SEQ ID NO: 351012 - DNA, 15 bp, Homo sapiens
cgtctcaacaactga

SEQ ID NO: 351013 - DNA, 15 bp, Homo sapiens
tcgtctcaacaactg

SEQ ID NO: 351014 - DNA, 15 bp, Homo sapiens
ctcgtctcaacaact

SEQ ID NO: 351015 - DNA, 15 bp, Homo sapiens
cctcgtctcaacaac

SEQ ID NO: 351016 - DNA, 15 bp, Homo sapiens
tcctcgtctcaacaa

SEQ ID NO: 351017 - DNA, 15 bp, Homo sapiens
ctcctcgtctcaaca

SEQ ID NO: 351018 - DNA, 15 bp, Homo sapiens
gctcctcgtctcaac

SEQ ID NO: 351019 - DNA, 15 bp, Homo sapiens
agctcctcgtctcaa

SEQ ID NO: 351020 - DNA, 15 bp, Homo sapiens
gagctcctcgtctca

SEQ ID NO: 351021 - DNA, 15 bp, Homo sapiens
cgagctcctcgtctc

SEQ ID NO: 351022 - DNA, 15 bp, Homo sapiens
ccgagctcctcgtct

SEQ ID NO: 351023 - DNA, 15 bp, Homo sapiens
gccgagctcctcgtc

SEQ ID NO: 351024 - DNA, 15 bp, Homo sapiens
tgccgagctcctcgt

SEQ ID NO: 351025 - DNA, 15 bp, Homo sapiens
ctgccgagctcctcg

SEQ ID NO: 351026 - DNA, 15 bp, Homo sapiens
gctgccgagctcctc

SEQ ID NO: 351027 - DNA, 15 bp, Homo sapiens
ggctgccgagctcct

SEQ ID NO: 351028 - DNA, 15 bp, Homo sapiens
tggctgccgagctcc

SEQ ID NO: 351029 - DNA, 15 bp, Homo sapiens
ctggctgccgagctc

SEQ ID NO: 351030 - DNA, 15 bp, Homo sapiens
cctggctgccgagct

SEQ ID NO: 351031 - DNA, 15 bp, Homo sapiens
ccctggctgccgagc

SEQ ID NO: 351032 - DNA, 15 bp, Homo sapiens
cccctggctgccgag

SEQ ID NO: 351033 - DNA, 15 bp, Homo sapiens
acccctggctgccga

SEQ ID NO: 351034 - DNA, 15 bp, Homo sapiens
cacccctggctgccg

SEQ ID NO: 351035 - DNA, 15 bp, Homo sapiens
tcacccctggctgcc

SEQ ID NO: 351036 - DNA, 15 bp, Homo sapiens
ctcacccctggctgc

SEQ ID NO: 351037 - DNA, 15 bp, Homo sapiens
cctcacccctggctg

SEQ ID NO: 351038 - DNA, 15 bp, Homo sapiens
ccctcacccctggct

SEQ ID NO: 351039 - DNA, 15 bp, Homo sapiens
cccctcacccctggc

SEQ ID NO: 351040 - DNA, 15 bp, Homo sapiens
acccctcacccctgg

SEQ ID NO: 351041 - DNA, 15 bp, Homo sapiens
cacccctcacccctg

SEQ ID NO: 351042 - DNA, 15 bp, Homo sapiens
tcacccctcacccct

SEQ ID NO: 351043 - DNA, 15 bp, Homo sapiens
ctcacccctcacccc

SEQ ID NO: 351044 - DNA, 15 bp, Homo sapiens
cctcacccctcaccc

SEQ ID NO: 351045 - DNA, 15 bp, Homo sapiens
tcctcacccctcacc

SEQ ID NO: 351046 - DNA, 15 bp, Homo sapiens
ttcctcacccctcac

SEQ ID NO: 351047 - DNA, 15 bp, Homo sapiens
cttcctcacccctca

SEQ ID NO: 351048 - DNA, 15 bp, Homo sapiens
tcttcctcacccctc

SEQ ID NO: 351049 - DNA, 15 bp, Homo sapiens
ctcttcctcacccct

SEQ ID NO: 351050 - DNA, 15 bp, Homo sapiens
tctcttcctcacccc

SEQ ID NO: 351051 - DNA, 15 bp, Homo sapiens
atctcttcctcaccc

SEQ ID NO: 351052 - DNA, 15 bp, Homo sapiens
aatctcttcctcacc

SEQ ID NO: 351053 - DNA, 15 bp, Homo sapiens
aaatctcttcctcac

SEQ ID NO: 351054 - DNA, 15 bp, Homo sapiens
aaaatctcttcctca

SEQ ID NO: 351055 - DNA, 15 bp, Homo sapiens
aaaaatctcttcctc

SEQ ID NO: 351056 - DNA, 15 bp, Homo sapiens
gaaaaatctcttcct

SEQ ID NO: 351057 - DNA, 15 bp, Homo sapiens
agaaaaatctcttcc

SEQ ID NO: 351058 - DNA, 15 bp, Homo sapiens
gagaaaaatctcttc

SEQ ID NO: 351059 - DNA, 15 bp, Homo sapiens
agagaaaaatctctt

SEQ ID NO: 351060 - DNA, 15 bp, Homo sapiens
cagagaaaaatctct

SEQ ID NO: 351061 - DNA, 15 bp, Homo sapiens
gcagagaaaaatctc

SEQ ID NO: 351062 - DNA, 15 bp, Homo sapiens
agcagagaaaaatct

SEQ ID NO: 351063 - DNA, 15 bp, Homo sapiens
aagcagagaaaaatc

SEQ ID NO: 351064 - DNA, 15 bp, Homo sapiens
taagcagagaaaaat

SEQ ID NO: 351065 - DNA, 15 bp, Homo sapiens
ataagcagagaaaaa

SEQ ID NO: 351066 - DNA, 15 bp, Homo sapiens
tataagcagagaaaa

SEQ ID NO: 351067 - DNA, 15 bp, Homo sapiens
ttataagcagagaaa

SEQ ID NO: 351068 - DNA, 15 bp, Homo sapiens
tttataagcagagaa

SEQ ID NO: 351069 - DNA, 15 bp, Homo sapiens
ttttataagcagaga

SEQ ID NO: 351070 - DNA, 15 bp, Homo sapiens
cttttataagcagag

SEQ ID NO: 351071 - DNA, 15 bp, Homo sapiens
gcttttataagcaga

SEQ ID NO: 351072 - DNA, 15 bp, Homo sapiens
tgcttttataagcag

SEQ ID NO: 351073 - DNA, 15 bp, Homo sapiens
ttgcttttataagca

SEQ ID NO: 351074 - DNA, 15 bp, Homo sapiens
tttgcttttataagc

SEQ ID NO: 351075 - DNA, 15 bp, Homo sapiens
gtttgcttttataag

SEQ ID NO: 351076 - DNA, 15 bp, Homo sapiens
cgtttgcttttataa

SEQ ID NO: 351077 - DNA, 15 bp, Homo sapiens
tcgtttgcttttata

SEQ ID NO: 351078 - DNA, 15 bp, Homo sapiens
ctcgtttgcttttat

SEQ ID NO: 351079 - DNA, 15 bp, Homo sapiens
cctcgtttgctttta

SEQ ID NO: 351080 - DNA, 15 bp, Homo sapiens
ccctcgtttgctttt

SEQ ID NO: 351081 - DNA, 15 bp, Homo sapiens
cccctcgtttgcttt

SEQ ID NO: 351082 - DNA, 15 bp, Homo sapiens
gcccctcgtttgctt

SEQ ID NO: 351083 - DNA, 15 bp, Homo sapiens
ggcccctcgtttgct

SEQ ID NO: 351084 - DNA, 15 bp, Homo sapiens
cggcccctcgtttgc

SEQ ID NO: 351085 - DNA, 15 bp, Homo sapiens
ccggcccctcgtttg

SEQ ID NO: 351086 - DNA, 15 bp, Homo sapiens
cccggcccctcgttt

SEQ ID NO: 351087 - DNA, 15 bp, Homo sapiens
gcccggcccctcgtt

SEQ ID NO: 351088 - DNA, 15 bp, Homo sapiens
tgcccggcccctcgt

SEQ ID NO: 351089 - DNA, 15 bp, Homo sapiens
atgcccggcccctcg

SEQ ID NO: 351090 - DNA, 15 bp, Homo sapiens
catgcccggcccctc

SEQ ID NO: 351091 - DNA, 15 bp, Homo sapiens
ccatgcccggcccct

SEQ ID NO: 351092 - DNA, 15 bp, Homo sapiens
accatgcccggcccc

SEQ ID NO: 351093 - DNA, 15 bp, Homo sapiens
gtgagccaccatgcc

SEQ ID NO: 351094 - DNA, 15 bp, Homo sapiens
tgtgagccaccatgc

SEQ ID NO: 351095 - DNA, 15 bp, Homo sapiens
atgtgagccaccatg

SEQ ID NO: 351096 - DNA, 15 bp, Homo sapiens
gatgtgagccaccat

SEQ ID NO: 351097 - DNA, 15 bp, Homo sapiens
agatgtgagccacca

SEQ ID NO: 351098 - DNA, 15 bp, Homo sapiens
cagatgtgagccacc

SEQ ID NO: 351099 - DNA, 15 bp, Homo sapiens
acagatgtgagccac

SEQ ID NO: 351100 - DNA, 15 bp, Homo sapiens
tacagatgtgagcca

SEQ ID NO: 351101 - DNA, 15 bp, Homo sapiens
ttacagatgtgagcc

SEQ ID NO: 351102 - DNA, 15 bp, Homo sapiens
attacagatgtgagc

SEQ ID NO: 351103 - DNA, 15 bp, Homo sapiens
gattacagatgtgag

SEQ ID NO: 351104 - DNA, 15 bp, Homo sapiens
ggattacagatgtga

SEQ ID NO: 351105 - DNA, 15 bp, Homo sapiens
gggattacagatgtg

SEQ ID NO: 351106 - DNA, 15 bp, Homo sapiens
tgggattacagatgt

SEQ ID NO: 351107 - DNA, 15 bp, Homo sapiens
ctgggattacagatg

SEQ ID NO: 351108 - DNA, 15 bp, Homo sapiens
gctgggattacagat

SEQ ID NO: 351109 - DNA, 15 bp, Homo sapiens
tgcctcggcctccca

SEQ ID NO: 351110 - DNA, 15 bp, Homo sapiens
ctgcctcggcctccc

SEQ ID NO: 351111 - DNA, 15 bp, Homo sapiens
cctgcctcggcctcc

SEQ ID NO: 351112 - DNA, 15 bp, Homo sapiens
gcctgcctcggcctc

SEQ ID NO: 351113 - DNA, 15 bp, Homo sapiens
cgcctgcctcggcct

SEQ ID NO: 351114 - DNA, 15 bp, Homo sapiens
ccgcctgcctcggcc

SEQ ID NO: 351115 - DNA, 15 bp, Homo sapiens
tccgcctgcctcggc

SEQ ID NO: 351116 - DNA, 15 bp, Homo sapiens
atccgcctgcctcgg

SEQ ID NO: 351117 - DNA, 15 bp, Homo sapiens
gatccgcctgcctcg

SEQ ID NO: 351118 - DNA, 15 bp, Homo sapiens
gtgatccgcctgcct

SEQ ID NO: 351119 - DNA, 15 bp, Homo sapiens
cgtgatccgcctgcc

SEQ ID NO: 351120 - DNA, 15 bp, Homo sapiens
tcgtgatccgcctgc

SEQ ID NO: 351121 - DNA, 15 bp, Homo sapiens
ctcgtgatccgcctg

SEQ ID NO: 351122 - DNA, 15 bp, Homo sapiens
cctcgtgatccgcct

SEQ ID NO: 351123 - DNA, 15 bp, Homo sapiens
acctcgtgatccgcc

SEQ ID NO: 351124 - DNA, 15 bp, Homo sapiens
gacctcgtgatccgc

SEQ ID NO: 351125 - DNA, 15 bp, Homo sapiens
tgacctcgtgatccg

SEQ ID NO: 351126 - DNA, 15 bp, Homo sapiens
ttgacctcgtgatcc

SEQ ID NO: 351127 - DNA, 15 bp, Homo sapiens
cttgacctcgtgatc

SEQ ID NO: 351128 - DNA, 15 bp, Homo sapiens
tcttgacctcgtgat

SEQ ID NO: 351129 - DNA, 15 bp, Homo sapiens
ctcttgacctcgtga

SEQ ID NO: 351130 - DNA, 15 bp, Homo sapiens
actcttgacctcgtg

SEQ ID NO: 351131 - DNA, 15 bp, Homo sapiens
aactcttgacctcgt

SEQ ID NO: 351132 - DNA, 15 bp, Homo sapiens
gaactcttgacctcg

SEQ ID NO: 351133 - DNA, 15 bp, Homo sapiens
cgaactcttgacctc

SEQ ID NO: 351134 - DNA, 15 bp, Homo sapiens
tcgaactcttgacct

SEQ ID NO: 351135 - DNA, 15 bp, Homo sapiens
ctcgaactcttgacc

SEQ ID NO: 351136 - DNA, 15 bp, Homo sapiens
tctcgaactcttgac

SEQ ID NO: 351137 - DNA, 15 bp, Homo sapiens
gtctcgaactcttga

SEQ ID NO: 351138 - DNA, 15 bp, Homo sapiens
ggtctcgaactcttg

SEQ ID NO: 351139 - DNA, 15 bp, Homo sapiens
tggtctcgaactctt

SEQ ID NO: 351140 - DNA, 15 bp, Homo sapiens
ctggtctcgaactct

SEQ ID NO: 351141 - DNA, 15 bp, Homo sapiens
gctggtctcgaactc

SEQ ID NO: 351142 - DNA, 15 bp, Homo sapiens
ggctggtctcgaact

SEQ ID NO: 351143 - DNA, 15 bp, Homo sapiens
aggctggtctcgaac

SEQ ID NO: 351144 - DNA, 15 bp, Homo sapiens
caggctggtctcgaa

SEQ ID NO: 351145 - DNA, 15 bp, Homo sapiens
ccaggctggtctcga

SEQ ID NO: 351146 - DNA, 15 bp, Homo sapiens
gccaggctggtctcg

SEQ ID NO: 351147 - DNA, 15 bp, Homo sapiens
acatgttggccaggc

SEQ ID NO: 351148 - DNA, 15 bp, Homo sapiens
aacatgttggccagg

SEQ ID NO: 351149 - DNA, 15 bp, Homo sapiens
caacatgttggccag

SEQ ID NO: 351150 - DNA, 15 bp, Homo sapiens
tcaacatgttggcca

SEQ ID NO: 351151 - DNA, 15 bp, Homo sapiens
ttcaacatgttggcc

SEQ ID NO: 351152 - DNA, 15 bp, Homo sapiens
tttcaacatgttggc

SEQ ID NO: 351153 - DNA, 15 bp, Homo sapiens
gtttcaacatgttgg

SEQ ID NO: 351154 - DNA, 15 bp, Homo sapiens
ggtttcaacatgttg

SEQ ID NO: 351155 - DNA, 15 bp, Homo sapiens
gggtttcaacatgtt

SEQ ID NO: 351156 - DNA, 15 bp, Homo sapiens
ggggtttcaacatgt

SEQ ID NO: 351157 - DNA, 15 bp, Homo sapiens
tggggtttcaacatg

SEQ ID NO: 351158 - DNA, 15 bp, Homo sapiens
atggggtttcaacat

SEQ ID NO: 351159 - DNA, 15 bp, Homo sapiens
gatggggtttcaaca

SEQ ID NO: 351160 - DNA, 15 bp, Homo sapiens
agatggggtttcaac

SEQ ID NO: 351161 - DNA, 15 bp, Homo sapiens
gagatggggtttcaa

SEQ ID NO: 351162 - DNA, 15 bp, Homo sapiens
agagatggggtttca

SEQ ID NO: 351163 - DNA, 15 bp, Homo sapiens
tagagatggggtttc

SEQ ID NO: 351164 - DNA, 15 bp, Homo sapiens
gtagagatggggttt

SEQ ID NO: 351165 - DNA, 15 bp, Homo sapiens
agtagagatggggtt

SEQ ID NO: 351166 - DNA, 15 bp, Homo sapiens
tagtagagatggggt

SEQ ID NO: 351167 - DNA, 15 bp, Homo sapiens
ttagtagagatgggg

SEQ ID NO: 351168 - DNA, 15 bp, Homo sapiens
cttagtagagatggg

SEQ ID NO: 351169 - DNA, 15 bp, Homo sapiens
tcttagtagagatgg

SEQ ID NO: 351170 - DNA, 15 bp, Homo sapiens
ctcttagtagagatg

SEQ ID NO: 351171 - DNA, 15 bp, Homo sapiens
actcttagtagagat

SEQ ID NO: 351172 - DNA, 15 bp, Homo sapiens
tactcttagtagaga

SEQ ID NO: 351173 - DNA, 15 bp, Homo sapiens
gtactcttagtagag

SEQ ID NO: 351174 - DNA, 15 bp, Homo sapiens
tgtactcttagtaga

SEQ ID NO: 351175 - DNA, 15 bp, Homo sapiens
ttgtactcttagtag

SEQ ID NO: 351176 - DNA, 15 bp, Homo sapiens
tttgtactcttagta

SEQ ID NO: 351177 - DNA, 15 bp, Homo sapiens
ttttgtactcttagt

SEQ ID NO: 351178 - DNA, 15 bp, Homo sapiens
tttttgtactcttag

SEQ ID NO: 351179 - DNA, 15 bp, Homo sapiens
atttttgtactctta

SEQ ID NO: 351180 - DNA, 15 bp, Homo sapiens
aatttttgtactctt

SEQ ID NO: 351181 - DNA, 15 bp, Homo sapiens
taatttttgtactct

SEQ ID NO: 351182 - DNA, 15 bp, Homo sapiens
ctaatttttgtactc

SEQ ID NO: 351183 - DNA, 15 bp, Homo sapiens
gctaatttttgtact

SEQ ID NO: 351184 - DNA, 15 bp, Homo sapiens
agctaatttttgtac

SEQ ID NO: 351185 - DNA, 15 bp, Homo sapiens
cgcccagctaatttt

SEQ ID NO: 351186 - DNA, 15 bp, Homo sapiens
acgcccagctaattt

SEQ ID NO: 351187 - DNA, 15 bp, Homo sapiens
cacgcccagctaatt

SEQ ID NO: 351188 - DNA, 15 bp, Homo sapiens
ccacgcccagctaat

SEQ ID NO: 351189 - DNA, 15 bp, Homo sapiens
accacgcccagctaa

SEQ ID NO: 351190 - DNA, 15 bp, Homo sapiens
caccacgcccagcta

SEQ ID NO: 351191 - DNA, 15 bp, Homo sapiens
ccaccacgcccagct

SEQ ID NO: 351192 - DNA, 15 bp, Homo sapiens
gccaccacgcccagc

SEQ ID NO: 351193 - DNA, 15 bp, Homo sapiens
cgccaccacgcccag

SEQ ID NO: 351194 - DNA, 15 bp, Homo sapiens
gcgccaccacgccca

SEQ ID NO: 351195 - DNA, 15 bp, Homo sapiens
tgcgccaccacgccc

SEQ ID NO: 351196 - DNA, 15 bp, Homo sapiens
atgcgccaccacgcc

SEQ ID NO: 351197 - DNA, 15 bp, Homo sapiens
catgcgccaccacgc

SEQ ID NO: 351198 - DNA, 15 bp, Homo sapiens
gcatgcgccaccacg

SEQ ID NO: 351199 - DNA, 15 bp, Homo sapiens
ggcatgcgccaccac

SEQ ID NO: 351200 - DNA, 15 bp, Homo sapiens
aggcatgcgccacca

SEQ ID NO: 351201 - DNA, 15 bp, Homo sapiens
caggcatgcgccacc

SEQ ID NO: 351202 - DNA, 15 bp, Homo sapiens
acaggcatgcgccac

SEQ ID NO: 351203 - DNA, 15 bp, Homo sapiens
tacaggcatgcgcca

SEQ ID NO: 351204 - DNA, 15 bp, Homo sapiens
ttacaggcatgcgcc

SEQ ID NO: 351205 - DNA, 15 bp, Homo sapiens
attacaggcatgcgc

SEQ ID NO: 351206 - DNA, 15 bp, Homo sapiens
gattacaggcatgcg

SEQ ID NO: 351207 - DNA, 15 bp, Homo sapiens
ggattacaggcatgc

SEQ ID NO: 351208 - DNA, 15 bp, Homo sapiens
actcagcctcccgag

SEQ ID NO: 351209 - DNA, 15 bp, Homo sapiens
gactcagcctcccga

SEQ ID NO: 351210 - DNA, 15 bp, Homo sapiens
tgactcagcctcccg

SEQ ID NO: 351211 - DNA, 15 bp, Homo sapiens
ctgactcagcctccc

SEQ ID NO: 351212 - DNA, 15 bp, Homo sapiens
cctgactcagcctcc

SEQ ID NO: 351213 - DNA, 15 bp, Homo sapiens
tcctgactcagcctc

SEQ ID NO: 351214 - DNA, 15 bp, Homo sapiens
ctcctgactcagcct

SEQ ID NO: 351215 - DNA, 15 bp, Homo sapiens
tctcctgactcagcc

SEQ ID NO: 351216 - DNA, 15 bp, Homo sapiens
ttctcctgactcagc

SEQ ID NO: 351217 - DNA, 15 bp, Homo sapiens
attctcctgactcag

SEQ ID NO: 351218 - DNA, 15 bp, Homo sapiens
gattctcctgactca

SEQ ID NO: 351219 - DNA, 15 bp, Homo sapiens
cgattctcctgactc

SEQ ID NO: 351220 - DNA, 15 bp, Homo sapiens
gcgattctcctgact

SEQ ID NO: 351221 - DNA, 15 bp, Homo sapiens
agcgattctcctgac

SEQ ID NO: 351222 - DNA, 15 bp, Homo sapiens
aagcgattctcctga

SEQ ID NO: 351223 - DNA, 15 bp, Homo sapiens
catctcggctcactg

SEQ ID NO: 351224 - DNA, 15 bp, Homo sapiens
ccatctcggctcact

SEQ ID NO: 351225 - DNA, 15 bp, Homo sapiens
gccatctcggctcac

SEQ ID NO: 351226 - DNA, 15 bp, Homo sapiens
cgccatctcggctca

SEQ ID NO: 351227 - DNA, 15 bp, Homo sapiens
gcgccatctcggctc

SEQ ID NO: 351228 - DNA, 15 bp, Homo sapiens
ggcgccatctcggct

SEQ ID NO: 351229 - DNA, 15 bp, Homo sapiens
tggcgccatctcggc

SEQ ID NO: 351230 - DNA, 15 bp, Homo sapiens
gtggcgccatctcgg

SEQ ID NO: 351231 - DNA, 15 bp, Homo sapiens
agtggcgccatctcg

SEQ ID NO: 351232 - DNA, 15 bp, Homo sapiens
cagtggcgccatctc

SEQ ID NO: 351233 - DNA, 15 bp, Homo sapiens
gcagtggcgccatct

SEQ ID NO: 351234 - DNA, 15 bp, Homo sapiens
tgcagtggcgccatc

SEQ ID NO: 351235 - DNA, 15 bp, Homo sapiens
gtgcagtggcgccat

SEQ ID NO: 351236 - DNA, 15 bp, Homo sapiens
agtgcagtggcgcca

SEQ ID NO: 351237 - DNA, 15 bp, Homo sapiens
gagtgcagtggcgcc

SEQ ID NO: 351238 - DNA, 15 bp, Homo sapiens
agctggagtgcagtg

SEQ ID NO: 351239 - DNA, 15 bp, Homo sapiens
aagctggagtgcagt

SEQ ID NO: 351240 - DNA, 15 bp, Homo sapiens
caagctggagtgcag

SEQ ID NO: 351241 - DNA, 15 bp, Homo sapiens
ccaagctggagtgca

SEQ ID NO: 351242 - DNA, 15 bp, Homo sapiens
cccaagctggagtgc

SEQ ID NO: 351243 - DNA, 15 bp, Homo sapiens
acccaagctggagtg

SEQ ID NO: 351244 - DNA, 15 bp, Homo sapiens
cacccaagctggagt

SEQ ID NO: 351245 - DNA, 15 bp, Homo sapiens
tcacccaagctggag

SEQ ID NO: 351246 - DNA, 15 bp, Homo sapiens
gtcacccaagctgga

SEQ ID NO: 351247 - DNA, 15 bp, Homo sapiens
tgtcacccaagctgg

SEQ ID NO: 351248 - DNA, 15 bp, Homo sapiens
ctgtcacccaagctg

SEQ ID NO: 351249 - DNA, 15 bp, Homo sapiens
tctgtcacccaagct

SEQ ID NO: 351250 - DNA, 15 bp, Homo sapiens
ctctgtcacccaagc

SEQ ID NO: 351251 - DNA, 15 bp, Homo sapiens
gctctgtcacccaag

SEQ ID NO: 351252 - DNA, 15 bp, Homo sapiens
tgctctgtcacccaa

SEQ ID NO: 351253 - DNA, 15 bp, Homo sapiens
ttgctctgtcaccca

SEQ ID NO: 351254 - DNA, 15 bp, Homo sapiens
cttgctctgtcaccc

SEQ ID NO: 351255 - DNA, 15 bp, Homo sapiens
tcttgctctgtcacc

SEQ ID NO: 351256 - DNA, 15 bp, Homo sapiens
gtcttgctctgtcac

SEQ ID NO: 351257 - DNA, 15 bp, Homo sapiens
agtcttgctctgtca

SEQ ID NO: 351258 - DNA, 15 bp, Homo sapiens
gagtcttgctctgtc

SEQ ID NO: 351259 - DNA, 15 bp, Homo sapiens
aagacagagtcttgc

SEQ ID NO: 351260 - DNA, 15 bp, Homo sapiens
caagacagagtcttg

SEQ ID NO: 351261 - DNA, 15 bp, Homo sapiens
tcaagacagagtctt

SEQ ID NO: 351262 - DNA, 15 bp, Homo sapiens
ttcaagacagagtct

SEQ ID NO: 351263 - DNA, 15 bp, Homo sapiens
tttcaagacagagtc

SEQ ID NO: 351264 - DNA, 15 bp, Homo sapiens
ttttcaagacagagt

SEQ ID NO: 351265 - DNA, 15 bp, Homo sapiens
tttttcaagacagag

SEQ ID NO: 351266 - DNA, 15 bp, Homo sapiens
ttttttcaagacaga

SEQ ID NO: 351267 - DNA, 15 bp, Homo sapiens
tttttttcaagacag

SEQ ID NO: 351268 - DNA, 15 bp, Homo sapiens
ttttttttcaagaca

SEQ ID NO: 351269 - DNA, 15 bp, Homo sapiens
tttttttttcaagac

SEQ ID NO: 351270 - DNA, 15 bp, Homo sapiens
ttttttttttcaaga

SEQ ID NO: 351271 - DNA, 15 bp, Homo sapiens
tttttttttttcaag

SEQ ID NO: 351272 - DNA, 15 bp, Homo sapiens
ttttttttttttcaa

SEQ ID NO: 351273 - DNA, 15 bp, Homo sapiens
cttttttttttttca

SEQ ID NO: 351274 - DNA, 15 bp, Homo sapiens
gcttttttttttttc

SEQ ID NO: 351275 - DNA, 15 bp, Homo sapiens
tgctttttttttttt

SEQ ID NO: 351276 - DNA, 15 bp, Homo sapiens
ttgcttttttttttt

SEQ ID NO: 351277 - DNA, 15 bp, Homo sapiens
tttgctttttttttt

SEQ ID NO: 351278 - DNA, 15 bp, Homo sapiens
ctttgcttttttttt

SEQ ID NO: 351279 - DNA, 15 bp, Homo sapiens
cctttgctttttttt

SEQ ID NO: 351280 - DNA, 15 bp, Homo sapiens
tcctttgcttttttt

SEQ ID NO: 351281 - DNA, 15 bp, Homo sapiens
ctcctttgctttttt

SEQ ID NO: 351282 - DNA, 15 bp, Homo sapiens
cctcctttgcttttt

SEQ ID NO: 351283 - DNA, 15 bp, Homo sapiens
ccctcctttgctttt

SEQ ID NO: 351284 - DNA, 15 bp, Homo sapiens
accctcctttgcttt

SEQ ID NO: 351285 - DNA, 15 bp, Homo sapiens
gaccctcctttgctt

SEQ ID NO: 351286 - DNA, 15 bp, Homo sapiens
tgaccctcctttgct

SEQ ID NO: 351287 - DNA, 15 bp, Homo sapiens
ctgaccctcctttgc

SEQ ID NO: 351288 - DNA, 15 bp, Homo sapiens
cctgaccctcctttg

SEQ ID NO: 351289 - DNA, 15 bp, Homo sapiens
acctgaccctccttt

SEQ ID NO: 351290 - DNA, 15 bp, Homo sapiens
cacctgaccctcctt

SEQ ID NO: 351291 - DNA, 15 bp, Homo sapiens
acacctgaccctcct

SEQ ID NO: 351292 - DNA, 15 bp, Homo sapiens
cacacctgaccctcc

SEQ ID NO: 351293 - DNA, 15 bp, Homo sapiens
ccacacctgaccctc

SEQ ID NO: 351294 - DNA, 15 bp, Homo sapiens
accacacctgaccct

SEQ ID NO: 351295 - DNA, 15 bp, Homo sapiens
caccacacctgaccc

SEQ ID NO: 351296 - DNA, 15 bp, Homo sapiens
tcaccacacctgacc

SEQ ID NO: 351297 - DNA, 15 bp, Homo sapiens
gtcaccacacctgac

SEQ ID NO: 351298 - DNA, 15 bp, Homo sapiens
agtcaccacacctga

SEQ ID NO: 351299 - DNA, 15 bp, Homo sapiens
aagtcaccacacctg

SEQ ID NO: 351300 - DNA, 15 bp, Homo sapiens
taagtcaccacacct

SEQ ID NO: 351301 - DNA, 15 bp, Homo sapiens
ataagtcaccacacc

SEQ ID NO: 351302 - DNA, 15 bp, Homo sapiens
cataagtcaccacac

SEQ ID NO: 351303 - DNA, 15 bp, Homo sapiens
gcataagtcaccaca

SEQ ID NO: 351304 - DNA, 15 bp, Homo sapiens
ggcataagtcaccac

SEQ ID NO: 351305 - DNA, 15 bp, Homo sapiens
aggcataagtcacca

SEQ ID NO: 351306 - DNA, 15 bp, Homo sapiens
caggcataagtcacc

SEQ ID NO: 351307 - DNA, 15 bp, Homo sapiens
ccaggcataagtcac

SEQ ID NO: 351308 - DNA, 15 bp, Homo sapiens
tccaggcataagtca

SEQ ID NO: 351309 - DNA, 15 bp, Homo sapiens
ttccaggcataagtc

SEQ ID NO: 351310 - DNA, 15 bp, Homo sapiens
attccaggcataagt

SEQ ID NO: 351311 - DNA, 15 bp, Homo sapiens
gattccaggcataag

SEQ ID NO: 351312 - DNA, 15 bp, Homo sapiens
agattccaggcataa

SEQ ID NO: 351313 - DNA, 15 bp, Homo sapiens
gagattccaggcata

SEQ ID NO: 351314 - DNA, 15 bp, Homo sapiens
tgagattccaggcat

SEQ ID NO: 351315 - DNA, 15 bp, Homo sapiens
ctgagattccaggca

SEQ ID NO: 351316 - DNA, 15 bp, Homo sapiens
gctgagattccaggc

SEQ ID NO: 351317 - DNA, 15 bp, Homo sapiens
tgctgagattccagg

SEQ ID NO: 351318 - DNA, 15 bp, Homo sapiens
gtgctgagattccag

SEQ ID NO: 351319 - DNA, 15 bp, Homo sapiens
agtgctgagattcca

SEQ ID NO: 351320 - DNA, 15 bp, Homo sapiens
aagtgctgagattcc

SEQ ID NO: 351321 - DNA, 15 bp, Homo sapiens
aaagtgctgagattc

SEQ ID NO: 351322 - DNA, 15 bp, Homo sapiens
gcccgccttggcctc

SEQ ID NO: 351323 - DNA, 15 bp, Homo sapiens
cgcccgccttggcct

SEQ ID NO: 351324 - DNA, 15 bp, Homo sapiens
ccgcccgccttggcc

SEQ ID NO: 351325 - DNA, 15 bp, Homo sapiens
tccgcccgccttggc

SEQ ID NO: 351326 - DNA, 15 bp, Homo sapiens
atccgcccgccttgg

SEQ ID NO: 351327 - DNA, 15 bp, Homo sapiens
gatccgcccgccttg

SEQ ID NO: 351328 - DNA, 15 bp, Homo sapiens
tgatccgcccgcctt

SEQ ID NO: 351329 - DNA, 15 bp, Homo sapiens
atgatccgcccgcct

SEQ ID NO: 351330 - DNA, 15 bp, Homo sapiens
catgatccgcccgcc

SEQ ID NO: 351331 - DNA, 15 bp, Homo sapiens
tcatgatccgcccgc

SEQ ID NO: 351332 - DNA, 15 bp, Homo sapiens
ctcatgatccgcccg

SEQ ID NO: 351333 - DNA, 15 bp, Homo sapiens
cctcatgatccgccc

SEQ ID NO: 351334 - DNA, 15 bp, Homo sapiens
acctcatgatccgcc

SEQ ID NO: 351335 - DNA, 15 bp, Homo sapiens
gacctcatgatccgc

SEQ ID NO: 351336 - DNA, 15 bp, Homo sapiens
tgacctcatgatccg

SEQ ID NO: 351337 - DNA, 15 bp, Homo sapiens
ctgacctcatgatcc

SEQ ID NO: 351338 - DNA, 15 bp, Homo sapiens
cctgacctcatgatc

SEQ ID NO: 351339 - DNA, 15 bp, Homo sapiens
tcctgacctcatgat

SEQ ID NO: 351340 - DNA, 15 bp, Homo sapiens
ctcctgacctcatga

SEQ ID NO: 351341 - DNA, 15 bp, Homo sapiens
tctcctgacctcatg

SEQ ID NO: 351342 - DNA, 15 bp, Homo sapiens
atctcctgacctcat

SEQ ID NO: 351343 - DNA, 15 bp, Homo sapiens
gatctcctgacctca

SEQ ID NO: 351344 - DNA, 15 bp, Homo sapiens
cgatctcctgacctc

SEQ ID NO: 351345 - DNA, 15 bp, Homo sapiens
tcgatctcctgacct

SEQ ID NO: 351346 - DNA, 15 bp, Homo sapiens
ctcgatctcctgacc

SEQ ID NO: 351347 - DNA, 15 bp, Homo sapiens
tctcgatctcctgac

SEQ ID NO: 351348 - DNA, 15 bp, Homo sapiens
gtctcgatctcctga

SEQ ID NO: 351349 - DNA, 15 bp, Homo sapiens
ggtctcgatctcctg

SEQ ID NO: 351350 - DNA, 15 bp, Homo sapiens
tggtctcgatctcct

SEQ ID NO: 351351 - DNA, 15 bp, Homo sapiens
atggtctcgatctcc

SEQ ID NO: 351352 - DNA, 15 bp, Homo sapiens
gatggtctcgatctc

SEQ ID NO: 351353 - DNA, 15 bp, Homo sapiens
ggatggtctcgatct

SEQ ID NO: 351354 - DNA, 15 bp, Homo sapiens
gggatggtctcgatc

SEQ ID NO: 351355 - DNA, 15 bp, Homo sapiens
cgggatggtctcgat

SEQ ID NO: 351356 - DNA, 15 bp, Homo sapiens
ccgggatggtctcga

SEQ ID NO: 351357 - DNA, 15 bp, Homo sapiens
gccgggatggtctcg

SEQ ID NO: 351358 - DNA, 15 bp, Homo sapiens
ggccgggatggtctc

SEQ ID NO: 351359 - DNA, 15 bp, Homo sapiens
tggccgggatggtct

SEQ ID NO: 351360 - DNA, 15 bp, Homo sapiens
gtggccgggatggtc

SEQ ID NO: 351361 - DNA, 15 bp, Homo sapiens
tgtggccgggatggt

SEQ ID NO: 351362 - DNA, 15 bp, Homo sapiens
atgtggccgggatgg

SEQ ID NO: 351363 - DNA, 15 bp, Homo sapiens
catgtggccgggatg

SEQ ID NO: 351364 - DNA, 15 bp, Homo sapiens
ccatgtggccgggat

SEQ ID NO: 351365 - DNA, 15 bp, Homo sapiens
accatgtggccggga

SEQ ID NO: 351366 - DNA, 15 bp, Homo sapiens
taccatgtggccggg

SEQ ID NO: 351367 - DNA, 15 bp, Homo sapiens
ttaccatgtggccgg

SEQ ID NO: 351368 - DNA, 15 bp, Homo sapiens
tttaccatgtggccg

SEQ ID NO: 351369 - DNA, 15 bp, Homo sapiens
ttttaccatgtggcc

SEQ ID NO: 351370 - DNA, 15 bp, Homo sapiens
gttttaccatgtggc

SEQ ID NO: 351371 - DNA, 15 bp, Homo sapiens
ggttttaccatgtgg

SEQ ID NO: 351372 - DNA, 15 bp, Homo sapiens
gggttttaccatgtg

SEQ ID NO: 351373 - DNA, 15 bp, Homo sapiens
ggggttttaccatgt

SEQ ID NO: 351374 - DNA, 15 bp, Homo sapiens
cggggttttaccatg

SEQ ID NO: 351375 - DNA, 15 bp, Homo sapiens
acggggttttaccat

SEQ ID NO: 351376 - DNA, 15 bp, Homo sapiens
gacggggttttacca

SEQ ID NO: 351377 - DNA, 15 bp, Homo sapiens
agacggggttttacc

SEQ ID NO: 351378 - DNA, 15 bp, Homo sapiens
gagacggggttttac

SEQ ID NO: 351379 - DNA, 15 bp, Homo sapiens
agagacggggtttta

SEQ ID NO: 351380 - DNA, 15 bp, Homo sapiens
tagagacggggtttt

SEQ ID NO: 351381 - DNA, 15 bp, Homo sapiens
ctgtttttagtagag

SEQ ID NO: 351382 - DNA, 15 bp, Homo sapiens
tctgtttttagtaga

SEQ ID NO: 351383 - DNA, 15 bp, Homo sapiens
ttctgtttttagtag

SEQ ID NO: 351384 - DNA, 15 bp, Homo sapiens
tttctgtttttagta

SEQ ID NO: 351385 - DNA, 15 bp, Homo sapiens
ttttctgtttttagt

SEQ ID NO: 351386 - DNA, 15 bp, Homo sapiens
tttttctgtttttag

SEQ ID NO: 351387 - DNA, 15 bp, Homo sapiens
atttttctgttttta

SEQ ID NO: 351388 - DNA, 15 bp, Homo sapiens
aatttttctgttttt

SEQ ID NO: 351389 - DNA, 15 bp, Homo sapiens
taatttttctgtttt

SEQ ID NO: 351390 - DNA, 15 bp, Homo sapiens
ctaatttttctgttt

SEQ ID NO: 351391 - DNA, 15 bp, Homo sapiens
cctaatttttctgtt

SEQ ID NO: 351392 - DNA, 15 bp, Homo sapiens
gcctaatttttctgt

SEQ ID NO: 351393 - DNA, 15 bp, Homo sapiens
agcctaatttttctg

SEQ ID NO: 351394 - DNA, 15 bp, Homo sapiens
cagcctaatttttct

SEQ ID NO: 351395 - DNA, 15 bp, Homo sapiens
ccagcctaatttttc

SEQ ID NO: 351396 - DNA, 15 bp, Homo sapiens
cccagcctaattttt

SEQ ID NO: 351397 - DNA, 15 bp, Homo sapiens
acccagcctaatttt

SEQ ID NO: 351398 - DNA, 15 bp, Homo sapiens
tacccagcctaattt

SEQ ID NO: 351399 - DNA, 15 bp, Homo sapiens
gtacccagcctaatt

SEQ ID NO: 351400 - DNA, 15 bp, Homo sapiens
tgtacccagcctaat

SEQ ID NO: 351401 - DNA, 15 bp, Homo sapiens
ctgtacccagcctaa

SEQ ID NO: 351402 - DNA, 15 bp, Homo sapiens
actgtacccagccta

SEQ ID NO: 351403 - DNA, 15 bp, Homo sapiens
cactgtacccagcct

SEQ ID NO: 351404 - DNA, 15 bp, Homo sapiens
ccactgtacccagcc

SEQ ID NO: 351405 - DNA, 15 bp, Homo sapiens
gccactgtacccagc

SEQ ID NO: 351406 - DNA, 15 bp, Homo sapiens
agccactgtacccag

SEQ ID NO: 351407 - DNA, 15 bp, Homo sapiens
gagccactgtaccca

SEQ ID NO: 351408 - DNA, 15 bp, Homo sapiens
tgagccactgtaccc

SEQ ID NO: 351409 - DNA, 15 bp, Homo sapiens
gtgagccactgtacc

SEQ ID NO: 351410 - DNA, 15 bp, Homo sapiens
cgtgagccactgtac

SEQ ID NO: 351411 - DNA, 15 bp, Homo sapiens
gcgtgagccactgta

SEQ ID NO: 351412 - DNA, 15 bp, Homo sapiens
ggcgtgagccactgt

SEQ ID NO: 351413 - DNA, 15 bp, Homo sapiens
cgggattacaggcgt

SEQ ID NO: 351414 - DNA, 15 bp, Homo sapiens
ccgggattacaggcg

SEQ ID NO: 351415 - DNA, 15 bp, Homo sapiens
gccgggattacaggc

SEQ ID NO: 351416 - DNA, 15 bp, Homo sapiens
tgccgggattacagg

SEQ ID NO: 351417 - DNA, 15 bp, Homo sapiens
gtgccgggattacag

SEQ ID NO: 351418 - DNA, 15 bp, Homo sapiens
agtgccgggattaca

SEQ ID NO: 351419 - DNA, 15 bp, Homo sapiens
aagtgccgggattac

SEQ ID NO: 351420 - DNA, 15 bp, Homo sapiens
aaagtgccgggatta

SEQ ID NO: 351421 - DNA, 15 bp, Homo sapiens
caaagtgccgggatt

SEQ ID NO: 351422 - DNA, 15 bp, Homo sapiens
ccaaagtgccgggat

SEQ ID NO: 351423 - DNA, 15 bp, Homo sapiens
cccaaagtgccggga

SEQ ID NO: 351424 - DNA, 15 bp, Homo sapiens
tcccaaagtgccggg

SEQ ID NO: 351425 - DNA, 15 bp, Homo sapiens
ctcccaaagtgccgg

SEQ ID NO: 351426 - DNA, 15 bp, Homo sapiens
cctcccaaagtgccg

SEQ ID NO: 351427 - DNA, 15 bp, Homo sapiens
gcctcccaaagtgcc

SEQ ID NO: 351428 - DNA, 15 bp, Homo sapiens
cccgcctcggcctcc

SEQ ID NO: 351429 - DNA, 15 bp, Homo sapiens
acccgcctcggcctc

SEQ ID NO: 351430 - DNA, 15 bp, Homo sapiens
cacccgcctcggcct

SEQ ID NO: 351431 - DNA, 15 bp, Homo sapiens
ccacccgcctcggcc

SEQ ID NO: 351432 - DNA, 15 bp, Homo sapiens
tccacccgcctcggc

SEQ ID NO: 351433 - DNA, 15 bp, Homo sapiens
atccacccgcctcgg

SEQ ID NO: 351434 - DNA, 15 bp, Homo sapiens
gatccacccgcctcg

SEQ ID NO: 351435 - DNA, 15 bp, Homo sapiens
tgatccacccgcctc

SEQ ID NO: 351436 - DNA, 15 bp, Homo sapiens
gtgatccacccgcct

SEQ ID NO: 351437 - DNA, 15 bp, Homo sapiens
tgtgatccacccgcc

SEQ ID NO: 351438 - DNA, 15 bp, Homo sapiens
ttgtgatccacccgc

SEQ ID NO: 351439 - DNA, 15 bp, Homo sapiens
cttgtgatccacccg

SEQ ID NO: 351440 - DNA, 15 bp, Homo sapiens
gcttgtgatccaccc

SEQ ID NO: 351441 - DNA, 15 bp, Homo sapiens
agcttgtgatccacc

SEQ ID NO: 351442 - DNA, 15 bp, Homo sapiens
gagcttgtgatccac

SEQ ID NO: 351443 - DNA, 15 bp, Homo sapiens
tgagcttgtgatcca

SEQ ID NO: 351444 - DNA, 15 bp, Homo sapiens
ctgagcttgtgatcc

SEQ ID NO: 351445 - DNA, 15 bp, Homo sapiens
cctgagcttgtgatc

SEQ ID NO: 351446 - DNA, 15 bp, Homo sapiens
tcctgagcttgtgat

SEQ ID NO: 351447 - DNA, 15 bp, Homo sapiens
ctcctgagcttgtga

SEQ ID NO: 351448 - DNA, 15 bp, Homo sapiens
tctcctgagcttgtg

SEQ ID NO: 351449 - DNA, 15 bp, Homo sapiens
atctcctgagcttgt

SEQ ID NO: 351450 - DNA, 15 bp, Homo sapiens
gatctcctgagcttg

SEQ ID NO: 351451 - DNA, 15 bp, Homo sapiens
cgatctcctgagctt

SEQ ID NO: 351452 - DNA, 15 bp, Homo sapiens
tcgatctcctgagct

SEQ ID NO: 351453 - DNA, 15 bp, Homo sapiens
ctcgatctcctgagc

SEQ ID NO: 351454 - DNA, 15 bp, Homo sapiens
tctcgatctcctgag

SEQ ID NO: 351455 - DNA, 15 bp, Homo sapiens
aggatggtctcgatc

SEQ ID NO: 351456 - DNA, 15 bp, Homo sapiens
caggatggtctcgat

SEQ ID NO: 351457 - DNA, 15 bp, Homo sapiens
ccaggatggtctcga

SEQ ID NO: 351458 - DNA, 15 bp, Homo sapiens
gccaggatggtctcg

SEQ ID NO: 351459 - DNA, 15 bp, Homo sapiens
agccaggatggtctc

SEQ ID NO: 351460 - DNA, 15 bp, Homo sapiens
tagccaggatggtct

SEQ ID NO: 351461 - DNA, 15 bp, Homo sapiens
ttagccaggatggtc

SEQ ID NO: 351462 - DNA, 15 bp, Homo sapiens
gttagccaggatggt

SEQ ID NO: 351463 - DNA, 15 bp, Homo sapiens
tgttagccaggatgg

SEQ ID NO: 351464 - DNA, 15 bp, Homo sapiens
gtgttagccaggatg

SEQ ID NO: 351465 - DNA, 15 bp, Homo sapiens
cgtgttagccaggat

SEQ ID NO: 351466 - DNA, 15 bp, Homo sapiens
ccgtgttagccagga

SEQ ID NO: 351467 - DNA, 15 bp, Homo sapiens
accgtgttagccagg

SEQ ID NO: 351468 - DNA, 15 bp, Homo sapiens
caccgtgttagccag

SEQ ID NO: 351469 - DNA, 15 bp, Homo sapiens
tcaccgtgttagcca

SEQ ID NO: 351470 - DNA, 15 bp, Homo sapiens
ttcaccgtgttagcc

SEQ ID NO: 351471 - DNA, 15 bp, Homo sapiens
tttcaccgtgttagc

SEQ ID NO: 351472 - DNA, 15 bp, Homo sapiens
gtttcaccgtgttag

SEQ ID NO: 351473 - DNA, 15 bp, Homo sapiens
ggtttcaccgtgtta

SEQ ID NO: 351474 - DNA, 15 bp, Homo sapiens
gggtttcaccgtgtt

SEQ ID NO: 351475 - DNA, 15 bp, Homo sapiens
agggtttcaccgtgt

SEQ ID NO: 351476 - DNA, 15 bp, Homo sapiens
cagggtttcaccgtg

SEQ ID NO: 351477 - DNA, 15 bp, Homo sapiens
acagggtttcaccgt

SEQ ID NO: 351478 - DNA, 15 bp, Homo sapiens
gacagggtttcaccg

SEQ ID NO: 351479 - DNA, 15 bp, Homo sapiens
agacagggtttcacc

SEQ ID NO: 351480 - DNA, 15 bp, Homo sapiens
attttttgtattttt

SEQ ID NO: 351481 - DNA, 15 bp, Homo sapiens
aattttttgtatttt

SEQ ID NO: 351482 - DNA, 15 bp, Homo sapiens
taattttttgtattt

SEQ ID NO: 351483 - DNA, 15 bp, Homo sapiens
ctaattttttgtatt

SEQ ID NO: 351484 - DNA, 15 bp, Homo sapiens
gctaattttttgtat

SEQ ID NO: 351485 - DNA, 15 bp, Homo sapiens
ggctaattttttgta

SEQ ID NO: 351486 - DNA, 15 bp, Homo sapiens
gggctaattttttgt

SEQ ID NO: 351487 - DNA, 15 bp, Homo sapiens
cgggctaattttttg

SEQ ID NO: 351488 - DNA, 15 bp, Homo sapiens
ccgggctaatttttt

SEQ ID NO: 351489 - DNA, 15 bp, Homo sapiens
gccgggctaattttt

SEQ ID NO: 351490 - DNA, 15 bp, Homo sapiens
cgccgggctaatttt

SEQ ID NO: 351491 - DNA, 15 bp, Homo sapiens
acgccgggctaattt

SEQ ID NO: 351492 - DNA, 15 bp, Homo sapiens
cacgccgggctaatt

SEQ ID NO: 351493 - DNA, 15 bp, Homo sapiens
ccacgccgggctaat

SEQ ID NO: 351494 - DNA, 15 bp, Homo sapiens
accacgccgggctaa

SEQ ID NO: 351495 - DNA, 15 bp, Homo sapiens
caccacgccgggcta

SEQ ID NO: 351496 - DNA, 15 bp, Homo sapiens
ccaccacgccgggct

SEQ ID NO: 351497 - DNA, 15 bp, Homo sapiens
gccaccacgccgggc

SEQ ID NO: 351498 - DNA, 15 bp, Homo sapiens
cgccaccacgccggg

SEQ ID NO: 351499 - DNA, 15 bp, Homo sapiens
ccgccaccacgccgg

SEQ ID NO: 351500 - DNA, 15 bp, Homo sapiens
cccgccaccacgccg

SEQ ID NO: 351501 - DNA, 15 bp, Homo sapiens
gcccgccaccacgcc

SEQ ID NO: 351502 - DNA, 15 bp, Homo sapiens
cgcccgccaccacgc

SEQ ID NO: 351503 - DNA, 15 bp, Homo sapiens
gcgcccgccaccacg

SEQ ID NO: 351504 - DNA, 15 bp, Homo sapiens
ctacaggcgcccgcc

SEQ ID NO: 351505 - DNA, 15 bp, Homo sapiens
actacaggcgcccgc

SEQ ID NO: 351506 - DNA, 15 bp, Homo sapiens
gactacaggcgcccg

SEQ ID NO: 351507 - DNA, 15 bp, Homo sapiens
ggactacaggcgccc

SEQ ID NO: 351508 - DNA, 15 bp, Homo sapiens
tgagtagctgggact

SEQ ID NO: 351509 - DNA, 15 bp, Homo sapiens
ctgagtagctgggac

SEQ ID NO: 351510 - DNA, 15 bp, Homo sapiens
cctgagtagctggga

SEQ ID NO: 351511 - DNA, 15 bp, Homo sapiens
tcctgagtagctggg

SEQ ID NO: 351512 - DNA, 15 bp, Homo sapiens
ctcctgagtagctgg

SEQ ID NO: 351513 - DNA, 15 bp, Homo sapiens
cctcctgagtagctg

SEQ ID NO: 351514 - DNA, 15 bp, Homo sapiens
gcctcctgagtagct

SEQ ID NO: 351515 - DNA, 15 bp, Homo sapiens
agcctcctgagtagc

SEQ ID NO: 351516 - DNA, 15 bp, Homo sapiens
cagcctcctgagtag

SEQ ID NO: 351517 - DNA, 15 bp, Homo sapiens
tcagcctcctgagta

SEQ ID NO: 351518 - DNA, 15 bp, Homo sapiens
ctcagcctcctgagt

SEQ ID NO: 351519 - DNA, 15 bp, Homo sapiens
cctcagcctcctgag

SEQ ID NO: 351520 - DNA, 15 bp, Homo sapiens
gcctcagcctcctga

SEQ ID NO: 351521 - DNA, 15 bp, Homo sapiens
tgcctcagcctcctg

SEQ ID NO: 351522 - DNA, 15 bp, Homo sapiens
ctgcctcagcctcct

SEQ ID NO: 351523 - DNA, 15 bp, Homo sapiens
tgattctcctgcctc

SEQ ID NO: 351524 - DNA, 15 bp, Homo sapiens
gtgattctcctgcct

SEQ ID NO: 351525 - DNA, 15 bp, Homo sapiens
agtgattctcctgcc

SEQ ID NO: 351526 - DNA, 15 bp, Homo sapiens
aagtgattctcctgc

SEQ ID NO: 351527 - DNA, 15 bp, Homo sapiens
caagtgattctcctg

SEQ ID NO: 351528 - DNA, 15 bp, Homo sapiens
tcaagtgattctcct

SEQ ID NO: 351529 - DNA, 15 bp, Homo sapiens
ttcaagtgattctcc

SEQ ID NO: 351530 - DNA, 15 bp, Homo sapiens
gttcaagtgattctc

SEQ ID NO: 351531 - DNA, 15 bp, Homo sapiens
ggttcaagtgattct

SEQ ID NO: 351532 - DNA, 15 bp, Homo sapiens
gggttcaagtgattc

SEQ ID NO: 351533 - DNA, 15 bp, Homo sapiens
ggggttcaagtgatt

SEQ ID NO: 351534 - DNA, 15 bp, Homo sapiens
cggggttcaagtgat

SEQ ID NO: 351535 - DNA, 15 bp, Homo sapiens
ccggggttcaagtga

SEQ ID NO: 351536 - DNA, 15 bp, Homo sapiens
tccggggttcaagtg

SEQ ID NO: 351537 - DNA, 15 bp, Homo sapiens
ctccggggttcaagt

SEQ ID NO: 351538 - DNA, 15 bp, Homo sapiens
cctccggggttcaag

SEQ ID NO: 351539 - DNA, 15 bp, Homo sapiens
gcctccggggttcaa

SEQ ID NO: 351540 - DNA, 15 bp, Homo sapiens
tgcctccggggttca

SEQ ID NO: 351541 - DNA, 15 bp, Homo sapiens
ctgcctccggggttc

SEQ ID NO: 351542 - DNA, 15 bp, Homo sapiens
tctgcctccggggtt

SEQ ID NO: 351543 - DNA, 15 bp, Homo sapiens
ctctgcctccggggt

SEQ ID NO: 351544 - DNA, 15 bp, Homo sapiens
cctctgcctccgggg

SEQ ID NO: 351545 - DNA, 15 bp, Homo sapiens
acctctgcctccggg

SEQ ID NO: 351546 - DNA, 15 bp, Homo sapiens
aacctctgcctccgg

SEQ ID NO: 351547 - DNA, 15 bp, Homo sapiens
caacctctgcctccg

SEQ ID NO: 351548 - DNA, 15 bp, Homo sapiens
acaacctctgcctcc

SEQ ID NO: 351549 - DNA, 15 bp, Homo sapiens
cacaacctctgcctc

SEQ ID NO: 351550 - DNA, 15 bp, Homo sapiens
ccacaacctctgcct

SEQ ID NO: 351551 - DNA, 15 bp, Homo sapiens
accacaacctctgcc

SEQ ID NO: 351552 - DNA, 15 bp, Homo sapiens
caccacaacctctgc

SEQ ID NO: 351553 - DNA, 15 bp, Homo sapiens
tcaccacaacctctg

SEQ ID NO: 351554 - DNA, 15 bp, Homo sapiens
ctcaccacaacctct

SEQ ID NO: 351555 - DNA, 15 bp, Homo sapiens
gctcaccacaacctc

SEQ ID NO: 351556 - DNA, 15 bp, Homo sapiens
agctcaccacaacct

SEQ ID NO: 351557 - DNA, 15 bp, Homo sapiens
cagctcaccacaacc

SEQ ID NO: 351558 - DNA, 15 bp, Homo sapiens
tcagctcaccacaac

SEQ ID NO: 351559 - DNA, 15 bp, Homo sapiens
ctcagctcaccacaa

SEQ ID NO: 351560 - DNA, 15 bp, Homo sapiens
tctcagctcaccaca

SEQ ID NO: 351561 - DNA, 15 bp, Homo sapiens
atctcagctcaccac

SEQ ID NO: 351562 - DNA, 15 bp, Homo sapiens
aatctcagctcacca

SEQ ID NO: 351563 - DNA, 15 bp, Homo sapiens
caatctcagctcacc

SEQ ID NO: 351564 - DNA, 15 bp, Homo sapiens
acaatctcagctcac

SEQ ID NO: 351565 - DNA, 15 bp, Homo sapiens
cacaatctcagctca

SEQ ID NO: 351566 - DNA, 15 bp, Homo sapiens
gcacaatctcagctc

SEQ ID NO: 351567 - DNA, 15 bp, Homo sapiens
ggcacaatctcagct

SEQ ID NO: 351568 - DNA, 15 bp, Homo sapiens
tggcacaatctcagc

SEQ ID NO: 351569 - DNA, 15 bp, Homo sapiens
atggcacaatctcag

SEQ ID NO: 351570 - DNA, 15 bp, Homo sapiens
aatggcacaatctca

SEQ ID NO: 351571 - DNA, 15 bp, Homo sapiens
caatggcacaatctc

SEQ ID NO: 351572 - DNA, 15 bp, Homo sapiens
tcaatggcacaatct

SEQ ID NO: 351573 - DNA, 15 bp, Homo sapiens
ctcaatggcacaatc

SEQ ID NO: 351574 - DNA, 15 bp, Homo sapiens
cctcaatggcacaat

SEQ ID NO: 351575 - DNA, 15 bp, Homo sapiens
acctcaatggcacaa

SEQ ID NO: 351576 - DNA, 15 bp, Homo sapiens
aacctcaatggcaca

SEQ ID NO: 351577 - DNA, 15 bp, Homo sapiens
caacctcaatggcac

SEQ ID NO: 351578 - DNA, 15 bp, Homo sapiens
acaacctcaatggca

SEQ ID NO: 351579 - DNA, 15 bp, Homo sapiens
cacaacctcaatggc

SEQ ID NO: 351580 - DNA, 15 bp, Homo sapiens
ccacaacctcaatgg

SEQ ID NO: 351581 - DNA, 15 bp, Homo sapiens
accacaacctcaatg

SEQ ID NO: 351582 - DNA, 15 bp, Homo sapiens
caccacaacctcaat

SEQ ID NO: 351583 - DNA, 15 bp, Homo sapiens
tcaccacaacctcaa

SEQ ID NO: 351584 - DNA, 15 bp, Homo sapiens
ctcaccacaacctca

SEQ ID NO: 351585 - DNA, 15 bp, Homo sapiens
gcaatctcagctcac

SEQ ID NO: 351586 - DNA, 15 bp, Homo sapiens
tgcaatctcagctca

SEQ ID NO: 351587 - DNA, 15 bp, Homo sapiens
gtgcaatctcagctc

SEQ ID NO: 351588 - DNA, 15 bp, Homo sapiens
ggtgcaatctcagct

SEQ ID NO: 351589 - DNA, 15 bp, Homo sapiens
tggtgcaatctcagc

SEQ ID NO: 351590 - DNA, 15 bp, Homo sapiens
atggtgcaatctcag

SEQ ID NO: 351591 - DNA, 15 bp, Homo sapiens
aatggtgcaatctca

SEQ ID NO: 351592 - DNA, 15 bp, Homo sapiens
caatggtgcaatctc

SEQ ID NO: 351593 - DNA, 15 bp, Homo sapiens
gcaatggtgcaatct

SEQ ID NO: 351594 - DNA, 15 bp, Homo sapiens
tgcaatggtgcaatc

SEQ ID NO: 351595 - DNA, 15 bp, Homo sapiens
gtgcaatggtgcaat

SEQ ID NO: 351596 - DNA, 15 bp, Homo sapiens
agtgcaatggtgcaa

SEQ ID NO: 351597 - DNA, 15 bp, Homo sapiens
gagtgcaatggtgca

SEQ ID NO: 351598 - DNA, 15 bp, Homo sapiens
ggagtgcaatggtgc

SEQ ID NO: 351599 - DNA, 15 bp, Homo sapiens
tggagtgcaatggtg

SEQ ID NO: 351600 - DNA, 15 bp, Homo sapiens
ttggagtgcaatggt

SEQ ID NO: 351601 - DNA, 15 bp, Homo sapiens
gttggagtgcaatgg

SEQ ID NO: 351602 - DNA, 15 bp, Homo sapiens
ggttggagtgcaatg

SEQ ID NO: 351603 - DNA, 15 bp, Homo sapiens
aggttggagtgcaat

SEQ ID NO: 351604 - DNA, 15 bp, Homo sapiens
caggttggagtgcaa

SEQ ID NO: 351605 - DNA, 15 bp, Homo sapiens
ccaggttggagtgca

SEQ ID NO: 351606 - DNA, 15 bp, Homo sapiens
cccaggttggagtgc

SEQ ID NO: 351607 - DNA, 15 bp, Homo sapiens
gcccaggttggagtg

SEQ ID NO: 351608 - DNA, 15 bp, Homo sapiens
tgcccaggttggagt

SEQ ID NO: 351609 - DNA, 15 bp, Homo sapiens
ttgcccaggttggag

SEQ ID NO: 351610 - DNA, 15 bp, Homo sapiens
gttgcccaggttgga

SEQ ID NO: 351611 - DNA, 15 bp, Homo sapiens
tgttgcccaggttgg

SEQ ID NO: 351612 - DNA, 15 bp, Homo sapiens
ttgttgcccaggttg

SEQ ID NO: 351613 - DNA, 15 bp, Homo sapiens
cttgttgcccaggtt

SEQ ID NO: 351614 - DNA, 15 bp, Homo sapiens
tcttgttgcccaggt

SEQ ID NO: 351615 - DNA, 15 bp, Homo sapiens
ctcttgttgcccagg

SEQ ID NO: 351616 - DNA, 15 bp, Homo sapiens
gctcttgttgcccag

SEQ ID NO: 351617 - DNA, 15 bp, Homo sapiens
tgctcttgttgccca

SEQ ID NO: 351618 - DNA, 15 bp, Homo sapiens
ttgctcttgttgccc

SEQ ID NO: 351619 - DNA, 15 bp, Homo sapiens
tttgctcttgttgcc

SEQ ID NO: 351620 - DNA, 15 bp, Homo sapiens
ttttgctcttgttgc

SEQ ID NO: 351621 - DNA, 15 bp, Homo sapiens
gttttgctcttgttg

SEQ ID NO: 351622 - DNA, 15 bp, Homo sapiens
agttttgctcttgtt

SEQ ID NO: 351623 - DNA, 15 bp, Homo sapiens
gagttttgctcttgt

SEQ ID NO: 351624 - DNA, 15 bp, Homo sapiens
agagttttgctcttg

SEQ ID NO: 351625 - DNA, 15 bp, Homo sapiens
cagagttttgctctt

SEQ ID NO: 351626 - DNA, 15 bp, Homo sapiens
acagagttttgctct

SEQ ID NO: 351627 - DNA, 15 bp, Homo sapiens
gacagagttttgctc

SEQ ID NO: 351628 - DNA, 15 bp, Homo sapiens
agacagagttttgct

SEQ ID NO: 351629 - DNA, 15 bp, Homo sapiens
gagacagagttttgc

SEQ ID NO: 351630 - DNA, 15 bp, Homo sapiens
tgagacagagttttg

SEQ ID NO: 351631 - DNA, 15 bp, Homo sapiens
ttgagacagagtttt

SEQ ID NO: 351632 - DNA, 15 bp, Homo sapiens
tttgagacagagttt

SEQ ID NO: 351633 - DNA, 15 bp, Homo sapiens
ttttgagacagagtt

SEQ ID NO: 351634 - DNA, 15 bp, Homo sapiens
attttatttatttat

SEQ ID NO: 351635 - DNA, 15 bp, Homo sapiens
tattttatttattta

SEQ ID NO: 351636 - DNA, 15 bp, Homo sapiens
ttattttatttattt

SEQ ID NO: 351637 - DNA, 15 bp, Homo sapiens
tttattttatttatt

SEQ ID NO: 351638 - DNA, 15 bp, Homo sapiens
ctttattttatttat

SEQ ID NO: 351639 - DNA, 15 bp, Homo sapiens
gctttattttattta

SEQ ID NO: 351640 - DNA, 15 bp, Homo sapiens
agctttattttattt

SEQ ID NO: 351641 - DNA, 15 bp, Homo sapiens
cagctttattttatt

SEQ ID NO: 351642 - DNA, 15 bp, Homo sapiens
ccagctttattttat

SEQ ID NO: 351643 - DNA, 15 bp, Homo sapiens
cccagctttatttta

SEQ ID NO: 351644 - DNA, 15 bp, Homo sapiens
tcccagctttatttt

SEQ ID NO: 351645 - DNA, 15 bp, Homo sapiens
atcccagctttattt

SEQ ID NO: 351646 - DNA, 15 bp, Homo sapiens
aatcccagctttatt

SEQ ID NO: 351647 - DNA, 15 bp, Homo sapiens
caatcccagctttat

SEQ ID NO: 351648 - DNA, 15 bp, Homo sapiens
ccaatcccagcttta

SEQ ID NO: 351649 - DNA, 15 bp, Homo sapiens
tccaatcccagcttt

SEQ ID NO: 351650 - DNA, 15 bp, Homo sapiens
atccaatcccagctt

SEQ ID NO: 351651 - DNA, 15 bp, Homo sapiens
gatccaatcccagct

SEQ ID NO: 351652 - DNA, 15 bp, Homo sapiens
agatccaatcccagc

SEQ ID NO: 351653 - DNA, 15 bp, Homo sapiens
gagatccaatcccag

SEQ ID NO: 351654 - DNA, 15 bp, Homo sapiens
tgagatccaatccca

SEQ ID NO: 351655 - DNA, 15 bp, Homo sapiens
atgagatccaatccc

SEQ ID NO: 351656 - DNA, 15 bp, Homo sapiens
catgagatccaatcc

SEQ ID NO: 351657 - DNA, 15 bp, Homo sapiens
gcatgagatccaatc

SEQ ID NO: 351658 - DNA, 15 bp, Homo sapiens
agcatgagatccaat

SEQ ID NO: 351659 - DNA, 15 bp, Homo sapiens
aagcatgagatccaa

SEQ ID NO: 351660 - DNA, 15 bp, Homo sapiens
gaagcatgagatcca

SEQ ID NO: 351661 - DNA, 15 bp, Homo sapiens
tgaagcatgagatcc

SEQ ID NO: 351662 - DNA, 15 bp, Homo sapiens
ctgaagcatgagatc

SEQ ID NO: 351663 - DNA, 15 bp, Homo sapiens
cctgaagcatgagat

SEQ ID NO: 351664 - DNA, 15 bp, Homo sapiens
ccctgaagcatgaga

SEQ ID NO: 351665 - DNA, 15 bp, Homo sapiens
gccctgaagcatgag

SEQ ID NO: 351666 - DNA, 15 bp, Homo sapiens
ggccctgaagcatga

SEQ ID NO: 351667 - DNA, 15 bp, Homo sapiens
tggccctgaagcatg

SEQ ID NO: 351668 - DNA, 15 bp, Homo sapiens
atggccctgaagcat

SEQ ID NO: 351669 - DNA, 15 bp, Homo sapiens
aatggccctgaagca

SEQ ID NO: 351670 - DNA, 15 bp, Homo sapiens
gaatggccctgaagc

SEQ ID NO: 351671 - DNA, 15 bp, Homo sapiens
tgaatggccctgaag

SEQ ID NO: 351672 - DNA, 15 bp, Homo sapiens
ttgaatggccctgaa

SEQ ID NO: 351673 - DNA, 15 bp, Homo sapiens
attgaatggccctga

SEQ ID NO: 351674 - DNA, 15 bp, Homo sapiens
cattgaatggccctg

SEQ ID NO: 351675 - DNA, 15 bp, Homo sapiens
acattgaatggccct

SEQ ID NO: 351676 - DNA, 15 bp, Homo sapiens
gacattgaatggccc

SEQ ID NO: 351677 - DNA, 15 bp, Homo sapiens
agacattgaatggcc

SEQ ID NO: 351678 - DNA, 15 bp, Homo sapiens
gagacattgaatggc

SEQ ID NO: 351679 - DNA, 15 bp, Homo sapiens
cgagacattgaatgg

SEQ ID NO: 351680 - DNA, 15 bp, Homo sapiens
ccgagacattgaatg

SEQ ID NO: 351681 - DNA, 15 bp, Homo sapiens
accgagacattgaat

SEQ ID NO: 351682 - DNA, 15 bp, Homo sapiens
aaccgagacattgaa

SEQ ID NO: 351683 - DNA, 15 bp, Homo sapiens
aaaccgagacattga

SEQ ID NO: 351684 - DNA, 15 bp, Homo sapiens
gaaaccgagacattg

SEQ ID NO: 351685 - DNA, 15 bp, Homo sapiens
agaaaccgagacatt

SEQ ID NO: 351686 - DNA, 15 bp, Homo sapiens
aagaaaccgagacat

SEQ ID NO: 351687 - DNA, 15 bp, Homo sapiens
gaagaaaccgagaca

SEQ ID NO: 351688 - DNA, 15 bp, Homo sapiens
ggaagaaaccgagac

SEQ ID NO: 351689 - DNA, 15 bp, Homo sapiens
tggaagaaaccgaga

SEQ ID NO: 351690 - DNA, 15 bp, Homo sapiens
atggaagaaaccgag

SEQ ID NO: 351691 - DNA, 15 bp, Homo sapiens
aatggaagaaaccga

SEQ ID NO: 351692 - DNA, 15 bp, Homo sapiens
taatggaagaaaccg

SEQ ID NO: 351693 - DNA, 15 bp, Homo sapiens
ataatggaagaaacc

SEQ ID NO: 351694 - DNA, 15 bp, Homo sapiens
tataatggaagaaac

SEQ ID NO: 351695 - DNA, 15 bp, Homo sapiens
ttataatggaagaaa

SEQ ID NO: 351696 - DNA, 15 bp, Homo sapiens
tttataatggaagaa

SEQ ID NO: 351697 - DNA, 15 bp, Homo sapiens
gtttataatggaaga

SEQ ID NO: 351698 - DNA, 15 bp, Homo sapiens
agtttataatggaag

SEQ ID NO: 351699 - DNA, 15 bp, Homo sapiens
cagtttataatggaa

SEQ ID NO: 351700 - DNA, 15 bp, Homo sapiens
ccagtttataatgga

SEQ ID NO: 351701 - DNA, 15 bp, Homo sapiens
cccagtttataatgg

SEQ ID NO: 351702 - DNA, 15 bp, Homo sapiens
tcccagtttataatg

SEQ ID NO: 351703 - DNA, 15 bp, Homo sapiens
ttcccagtttataat

SEQ ID NO: 351704 - DNA, 15 bp, Homo sapiens
attcccagtttataa

SEQ ID NO: 351705 - DNA, 15 bp, Homo sapiens
aattcccagtttata

SEQ ID NO: 351706 - DNA, 15 bp, Homo sapiens
aaattcccagtttat

SEQ ID NO: 351707 - DNA, 15 bp, Homo sapiens
caaattcccagttta

SEQ ID NO: 351708 - DNA, 15 bp, Homo sapiens
tcaaattcccagttt

SEQ ID NO: 351709 - DNA, 15 bp, Homo sapiens
ttcaaattcccagtt

SEQ ID NO: 351710 - DNA, 15 bp, Homo sapiens
attcaaattcccagt

SEQ ID NO: 351711 - DNA, 15 bp, Homo sapiens
aattcaaattcccag

SEQ ID NO: 351712 - DNA, 15 bp, Homo sapiens
gaattcaaattccca

SEQ ID NO: 351713 - DNA, 15 bp, Homo sapiens
ggaattcaaattccc

SEQ ID NO: 351714 - DNA, 15 bp, Homo sapiens
aggaattcaaattcc

SEQ ID NO: 351715 - DNA, 15 bp, Homo sapiens
caggaattcaaattc

SEQ ID NO: 351716 - DNA, 15 bp, Homo sapiens
acaggaattcaaatt

SEQ ID NO: 351717 - DNA, 15 bp, Homo sapiens
cacaggaattcaaat

SEQ ID NO: 351718 - DNA, 15 bp, Homo sapiens
gcacaggaattcaaa

SEQ ID NO: 351719 - DNA, 15 bp, Homo sapiens
agcacaggaattcaa

SEQ ID NO: 351720 - DNA, 15 bp, Homo sapiens
aagcacaggaattca

SEQ ID NO: 351721 - DNA, 15 bp, Homo sapiens
gaagcacaggaattc

SEQ ID NO: 351722 - DNA, 15 bp, Homo sapiens
agaagcacaggaatt

SEQ ID NO: 351723 - DNA, 15 bp, Homo sapiens
cagaagcacaggaat

SEQ ID NO: 351724 - DNA, 15 bp, Homo sapiens
tcagaagcacaggaa

SEQ ID NO: 351725 - DNA, 15 bp, Homo sapiens
gtcagaagcacagga

SEQ ID NO: 351726 - DNA, 15 bp, Homo sapiens
ggtcagaagcacagg

SEQ ID NO: 351727 - DNA, 15 bp, Homo sapiens
aggtcagaagcacag

SEQ ID NO: 351728 - DNA, 15 bp, Homo sapiens
caggtcagaagcaca

SEQ ID NO: 351729 - DNA, 15 bp, Homo sapiens
ccaggtcagaagcac

SEQ ID NO: 351730 - DNA, 15 bp, Homo sapiens
accaggtcagaagca

SEQ ID NO: 351731 - DNA, 15 bp, Homo sapiens
caccaggtcagaagc

SEQ ID NO: 351732 - DNA, 15 bp, Homo sapiens
tcaccaggtcagaag

SEQ ID NO: 351733 - DNA, 15 bp, Homo sapiens
gtcaccaggtcagaa

SEQ ID NO: 351734 - DNA, 15 bp, Homo sapiens
tgtcaccaggtcaga

SEQ ID NO: 351735 - DNA, 15 bp, Homo sapiens
atgtcaccaggtcag

SEQ ID NO: 351736 - DNA, 15 bp, Homo sapiens
gatgtcaccaggtca

SEQ ID NO: 351737 - DNA, 15 bp, Homo sapiens
tgatgtcaccaggtc

SEQ ID NO: 351738 - DNA, 15 bp, Homo sapiens
ttgatgtcaccaggt

SEQ ID NO: 351739 - DNA, 15 bp, Homo sapiens
cttgatgtcaccagg

SEQ ID NO: 351740 - DNA, 15 bp, Homo sapiens
tcttgatgtcaccag

SEQ ID NO: 351741 - DNA, 15 bp, Homo sapiens
ctcttgatgtcacca

SEQ ID NO: 351742 - DNA, 15 bp, Homo sapiens
cctcttgatgtcacc

SEQ ID NO: 351743 - DNA, 15 bp, Homo sapiens
acctcttgatgtcac

SEQ ID NO: 351744 - DNA, 15 bp, Homo sapiens
aacctcttgatgtca

SEQ ID NO: 351745 - DNA, 15 bp, Homo sapiens
gaacctcttgatgtc

SEQ ID NO: 351746 - DNA, 15 bp, Homo sapiens
ggaacctcttgatgt

SEQ ID NO: 351747 - DNA, 15 bp, Homo sapiens
gggaacctcttgatg

SEQ ID NO: 351748 - DNA, 15 bp, Homo sapiens
tgggaacctcttgat

SEQ ID NO: 351749 - DNA, 15 bp, Homo sapiens
atgggaacctcttga

SEQ ID NO: 351750 - DNA, 15 bp, Homo sapiens
tatgggaacctcttg

SEQ ID NO: 351751 - DNA, 15 bp, Homo sapiens
atatgggaacctctt

SEQ ID NO: 351752 - DNA, 15 bp, Homo sapiens
catatgggaacctct

SEQ ID NO: 351753 - DNA, 15 bp, Homo sapiens
gcatatgggaacctc

SEQ ID NO: 351754 - DNA, 15 bp, Homo sapiens
agcatatgggaacct

SEQ ID NO: 351755 - DNA, 15 bp, Homo sapiens
gagcatatgggaacc

SEQ ID NO: 351756 - DNA, 15 bp, Homo sapiens
agagcatatgggaac

SEQ ID NO: 351757 - DNA, 15 bp, Homo sapiens
gagagcatatgggaa

SEQ ID NO: 351758 - DNA, 15 bp, Homo sapiens
cgagagcatatggga

SEQ ID NO: 351759 - DNA, 15 bp, Homo sapiens
ccgagagcatatggg

SEQ ID NO: 351760 - DNA, 15 bp, Homo sapiens
tccgagagcatatgg

SEQ ID NO: 351761 - DNA, 15 bp, Homo sapiens
ctccgagagcatatg

SEQ ID NO: 351762 - DNA, 15 bp, Homo sapiens
cctccgagagcatat

SEQ ID NO: 351763 - DNA, 15 bp, Homo sapiens
ccctccgagagcata

SEQ ID NO: 351764 - DNA, 15 bp, Homo sapiens
cccctccgagagcat

SEQ ID NO: 351765 - DNA, 15 bp, Homo sapiens
ccccctccgagagca

SEQ ID NO: 351766 - DNA, 15 bp, Homo sapiens
tccccctccgagagc

SEQ ID NO: 351767 - DNA, 15 bp, Homo sapiens
gtccccctccgagag

SEQ ID NO: 351768 - DNA, 15 bp, Homo sapiens
cgtccccctccgaga

SEQ ID NO: 351769 - DNA, 15 bp, Homo sapiens
ccgtccccctccgag

SEQ ID NO: 351770 - DNA, 15 bp, Homo sapiens
cccgtccccctccga

SEQ ID NO: 351771 - DNA, 15 bp, Homo sapiens
gcccgtccccctccg

SEQ ID NO: 351772 - DNA, 15 bp, Homo sapiens
tgcccgtccccctcc

SEQ ID NO: 351773 - DNA, 15 bp, Homo sapiens
atgcccgtccccctc

SEQ ID NO: 351774 - DNA, 15 bp, Homo sapiens
aatgcccgtccccct

SEQ ID NO: 351775 - DNA, 15 bp, Homo sapiens
aaatgcccgtccccc

SEQ ID NO: 351776 - DNA, 15 bp, Homo sapiens
aaaatgcccgtcccc

SEQ ID NO: 351777 - DNA, 15 bp, Homo sapiens
caaaatgcccgtccc

SEQ ID NO: 351778 - DNA, 15 bp, Homo sapiens
acaaaatgcccgtcc

SEQ ID NO: 351779 - DNA, 15 bp, Homo sapiens
cacaaaatgcccgtc

SEQ ID NO: 351780 - DNA, 15 bp, Homo sapiens
tcacaaaatgcccgt

SEQ ID NO: 351781 - DNA, 15 bp, Homo sapiens
ctcacaaaatgcccg

SEQ ID NO: 351782 - DNA, 15 bp, Homo sapiens
actcacaaaatgccc

SEQ ID NO: 351783 - DNA, 15 bp, Homo sapiens
cactcacaaaatgcc

SEQ ID NO: 351784 - DNA, 15 bp, Homo sapiens
ccactcacaaaatgc

SEQ ID NO: 351785 - DNA, 15 bp, Homo sapiens
tccactcacaaaatg

SEQ ID NO: 351786 - DNA, 15 bp, Homo sapiens
ttccactcacaaaat

SEQ ID NO: 351787 - DNA, 15 bp, Homo sapiens
tttccactcacaaaa

SEQ ID NO: 351788 - DNA, 15 bp, Homo sapiens
ctttccactcacaaa

SEQ ID NO: 351789 - DNA, 15 bp, Homo sapiens
cctttccactcacaa

SEQ ID NO: 351790 - DNA, 15 bp, Homo sapiens
ccctttccactcaca

SEQ ID NO: 351791 - DNA, 15 bp, Homo sapiens
gccctttccactcac

SEQ ID NO: 351792 - DNA, 15 bp, Homo sapiens
agccctttccactca

SEQ ID NO: 351793 - DNA, 15 bp, Homo sapiens
aagccctttccactc

SEQ ID NO: 351794 - DNA, 15 bp, Homo sapiens
gaagccctttccact

SEQ ID NO: 351795 - DNA, 15 bp, Homo sapiens
ggaagccctttccac

SEQ ID NO: 351796 - DNA, 15 bp, Homo sapiens
gggaagccctttcca

SEQ ID NO: 351797 - DNA, 15 bp, Homo sapiens
cgggaagccctttcc

SEQ ID NO: 351798 - DNA, 15 bp, Homo sapiens
acgggaagccctttc

SEQ ID NO: 351799 - DNA, 15 bp, Homo sapiens
aacgggaagcccttt

SEQ ID NO: 351800 - DNA, 15 bp, Homo sapiens
taacgggaagccctt

SEQ ID NO: 351801 - DNA, 15 bp, Homo sapiens
ataacgggaagccct

SEQ ID NO: 351802 - DNA, 15 bp, Homo sapiens
gataacgggaagccc

SEQ ID NO: 351803 - DNA, 15 bp, Homo sapiens
agataacgggaagcc

SEQ ID NO: 351804 - DNA, 15 bp, Homo sapiens
tagataacgggaagc

SEQ ID NO: 351805 - DNA, 15 bp, Homo sapiens
ttagataacgggaag

SEQ ID NO: 351806 - DNA, 15 bp, Homo sapiens
cttagataacgggaa

SEQ ID NO: 351807 - DNA, 15 bp, Homo sapiens
ccttagataacggga

SEQ ID NO: 351808 - DNA, 15 bp, Homo sapiens
accttagataacggg

SEQ ID NO: 351809 - DNA, 15 bp, Homo sapiens
caccttagataacgg

SEQ ID NO: 351810 - DNA, 15 bp, Homo sapiens
ccaccttagataacg

SEQ ID NO: 351811 - DNA, 15 bp, Homo sapiens
cccaccttagataac

SEQ ID NO: 351812 - DNA, 15 bp, Homo sapiens
acccaccttagataa

SEQ ID NO: 351813 - DNA, 15 bp, Homo sapiens
aacccaccttagata

SEQ ID NO: 351814 - DNA, 15 bp, Homo sapiens
gaacccaccttagat

SEQ ID NO: 351815 - DNA, 15 bp, Homo sapiens
tgaacccaccttaga

SEQ ID NO: 351816 - DNA, 15 bp, Homo sapiens
ctgaacccaccttag

SEQ ID NO: 351817 - DNA, 15 bp, Homo sapiens
gctgaacccacctta

SEQ ID NO: 351818 - DNA, 15 bp, Homo sapiens
ggctgaacccacctt

SEQ ID NO: 351819 - DNA, 15 bp, Homo sapiens
aggctgaacccacct

SEQ ID NO: 351820 - DNA, 15 bp, Homo sapiens
aaggctgaacccacc

SEQ ID NO: 351821 - DNA, 15 bp, Homo sapiens
caaggctgaacccac

SEQ ID NO: 351822 - DNA, 15 bp, Homo sapiens
ccaaggctgaaccca

SEQ ID NO: 351823 - DNA, 15 bp, Homo sapiens
cccaaggctgaaccc

SEQ ID NO: 351824 - DNA, 15 bp, Homo sapiens
ccccaaggctgaacc

SEQ ID NO: 351825 - DNA, 15 bp, Homo sapiens
cccccaaggctgaac

SEQ ID NO: 351826 - DNA, 15 bp, Homo sapiens
acccccaaggctgaa

SEQ ID NO: 351827 - DNA, 15 bp, Homo sapiens
aacccccaaggctga

SEQ ID NO: 351828 - DNA, 15 bp, Homo sapiens
taacccccaaggctg

SEQ ID NO: 351829 - DNA, 15 bp, Homo sapiens
ttaacccccaaggct

SEQ ID NO: 351830 - DNA, 15 bp, Homo sapiens
attaacccccaaggc

SEQ ID NO: 351831 - DNA, 15 bp, Homo sapiens
cattaacccccaagg

SEQ ID NO: 351832 - DNA, 15 bp, Homo sapiens
tcattaacccccaag

SEQ ID NO: 351833 - DNA, 15 bp, Homo sapiens
atcattaacccccaa

SEQ ID NO: 351834 - DNA, 15 bp, Homo sapiens
aatcattaaccccca

SEQ ID NO: 351835 - DNA, 15 bp, Homo sapiens
gaatcattaaccccc

SEQ ID NO: 351836 - DNA, 15 bp, Homo sapiens
ggaatcattaacccc

SEQ ID NO: 351837 - DNA, 15 bp, Homo sapiens
aggaatcattaaccc

SEQ ID NO: 351838 - DNA, 15 bp, Homo sapiens
aaggaatcattaacc

SEQ ID NO: 351839 - DNA, 15 bp, Homo sapiens
caaggaatcattaac

SEQ ID NO: 351840 - DNA, 15 bp, Homo sapiens
ccaaggaatcattaa

SEQ ID NO: 351841 - DNA, 15 bp, Homo sapiens
cccaaggaatcatta

SEQ ID NO: 351842 - DNA, 15 bp, Homo sapiens
gcccaaggaatcatt

SEQ ID NO: 351843 - DNA, 15 bp, Homo sapiens
agcccaaggaatcat

SEQ ID NO: 351844 - DNA, 15 bp, Homo sapiens
gagcccaaggaatca

SEQ ID NO: 351845 - DNA, 15 bp, Homo sapiens
tgagcccaaggaatc

SEQ ID NO: 351846 - DNA, 15 bp, Homo sapiens
ctgagcccaaggaat

SEQ ID NO: 351847 - DNA, 15 bp, Homo sapiens
tctgagcccaaggaa

SEQ ID NO: 351848 - DNA, 15 bp, Homo sapiens
ctctgagcccaagga

SEQ ID NO: 351849 - DNA, 15 bp, Homo sapiens
tctctgagcccaagg

SEQ ID NO: 351850 - DNA, 15 bp, Homo sapiens
ctctctgagcccaag

SEQ ID NO: 351851 - DNA, 15 bp, Homo sapiens
cctctctgagcccaa

SEQ ID NO: 351852 - DNA, 15 bp, Homo sapiens
acctctctgagccca

SEQ ID NO: 351853 - DNA, 15 bp, Homo sapiens
aacctctctgagccc

SEQ ID NO: 351854 - DNA, 15 bp, Homo sapiens
caacctctctgagcc

SEQ ID NO: 351855 - DNA, 15 bp, Homo sapiens
ccaacctctctgagc

SEQ ID NO: 351856 - DNA, 15 bp, Homo sapiens
accaacctctctgag

SEQ ID NO: 351857 - DNA, 15 bp, Homo sapiens
gaccaacctctctga

SEQ ID NO: 351858 - DNA, 15 bp, Homo sapiens
ggaccaacctctctg

SEQ ID NO: 351859 - DNA, 15 bp, Homo sapiens
tggaccaacctctct

SEQ ID NO: 351860 - DNA, 15 bp, Homo sapiens
gtggaccaacctctc

SEQ ID NO: 351861 - DNA, 15 bp, Homo sapiens
agtggaccaacctct

SEQ ID NO: 351862 - DNA, 15 bp, Homo sapiens
aagtggaccaacctc

SEQ ID NO: 351863 - DNA, 15 bp, Homo sapiens
caagtggaccaacct

SEQ ID NO: 351864 - DNA, 15 bp, Homo sapiens
gcaagtggaccaacc

SEQ ID NO: 351865 - DNA, 15 bp, Homo sapiens
ggcaagtggaccaac

SEQ ID NO: 351866 - DNA, 15 bp, Homo sapiens
gggcaagtggaccaa

SEQ ID NO: 351867 - DNA, 15 bp, Homo sapiens
tgggcaagtggacca

SEQ ID NO: 351868 - DNA, 15 bp, Homo sapiens
ctgggcaagtggacc

SEQ ID NO: 351869 - DNA, 15 bp, Homo sapiens
tctgggcaagtggac

SEQ ID NO: 351870 - DNA, 15 bp, Homo sapiens
ctctgggcaagtgga

SEQ ID NO: 351871 - DNA, 15 bp, Homo sapiens
tctctgggcaagtgg

SEQ ID NO: 351872 - DNA, 15 bp, Homo sapiens
atctctgggcaagtg

SEQ ID NO: 351873 - DNA, 15 bp, Homo sapiens
catctctgggcaagt

SEQ ID NO: 351874 - DNA, 15 bp, Homo sapiens
gcatctctgggcaag

SEQ ID NO: 351875 - DNA, 15 bp, Homo sapiens
tgcatctctgggcaa

SEQ ID NO: 351876 - DNA, 15 bp, Homo sapiens
gtgcatctctgggca

SEQ ID NO: 351877 - DNA, 15 bp, Homo sapiens
tgtgcatctctgggc

SEQ ID NO: 351878 - DNA, 15 bp, Homo sapiens
ctgtgcatctctggg

SEQ ID NO: 351879 - DNA, 15 bp, Homo sapiens
gctgtgcatctctgg

SEQ ID NO: 351880 - DNA, 15 bp, Homo sapiens
tgctgtgcatctctg

SEQ ID NO: 351881 - DNA, 15 bp, Homo sapiens
ctgctgtgcatctct

SEQ ID NO: 351882 - DNA, 15 bp, Homo sapiens
tctgctgtgcatctc

SEQ ID NO: 351883 - DNA, 15 bp, Homo sapiens
atctgctgtgcatct

SEQ ID NO: 351884 - DNA, 15 bp, Homo sapiens
catctgctgtgcatc

SEQ ID NO: 351885 - DNA, 15 bp, Homo sapiens
tcatctgctgtgcat

SEQ ID NO: 351886 - DNA, 15 bp, Homo sapiens
ttcatctgctgtgca

SEQ ID NO: 351887 - DNA, 15 bp, Homo sapiens
attcatctgctgtgc

SEQ ID NO: 351888 - DNA, 15 bp, Homo sapiens
cattcatctgctgtg

SEQ ID NO: 351889 - DNA, 15 bp, Homo sapiens
ccattcatctgctgt

SEQ ID NO: 351890 - DNA, 15 bp, Homo sapiens
accattcatctgctg

SEQ ID NO: 351891 - DNA, 15 bp, Homo sapiens
caccattcatctgct

SEQ ID NO: 351892 - DNA, 15 bp, Homo sapiens
ccaccattcatctgc

SEQ ID NO: 351893 - DNA, 15 bp, Homo sapiens
tccaccattcatctg

SEQ ID NO: 351894 - DNA, 15 bp, Homo sapiens
ctccaccattcatct

SEQ ID NO: 351895 - DNA, 15 bp, Homo sapiens
gctccaccattcatc

SEQ ID NO: 351896 - DNA, 15 bp, Homo sapiens
ggctccaccattcat

SEQ ID NO: 351897 - DNA, 15 bp, Homo sapiens
tggctccaccattca

SEQ ID NO: 351898 - DNA, 15 bp, Homo sapiens
ctggctccaccattc

SEQ ID NO: 351899 - DNA, 15 bp, Homo sapiens
cctggctccaccatt

SEQ ID NO: 351900 - DNA, 15 bp, Homo sapiens
tcctggctccaccat

SEQ ID NO: 351901 - DNA, 15 bp, Homo sapiens
ctcctggctccacca

SEQ ID NO: 351902 - DNA, 15 bp, Homo sapiens
gctcctggctccacc

SEQ ID NO: 351903 - DNA, 15 bp, Homo sapiens
agctcctggctccac

SEQ ID NO: 351904 - DNA, 15 bp, Homo sapiens
tagctcctggctcca

SEQ ID NO: 351905 - DNA, 15 bp, Homo sapiens
ctagctcctggctcc

SEQ ID NO: 351906 - DNA, 15 bp, Homo sapiens
tctagctcctggctc

SEQ ID NO: 351907 - DNA, 15 bp, Homo sapiens
ttctagctcctggct

SEQ ID NO: 351908 - DNA, 15 bp, Homo sapiens
cttctagctcctggc

SEQ ID NO: 351909 - DNA, 15 bp, Homo sapiens
tcttctagctcctgg

SEQ ID NO: 351910 - DNA, 15 bp, Homo sapiens
ctcttctagctcctg

SEQ ID NO: 351911 - DNA, 15 bp, Homo sapiens
gctcttctagctcct

SEQ ID NO: 351912 - DNA, 15 bp, Homo sapiens
ggctcttctagctcc

SEQ ID NO: 351913 - DNA, 15 bp, Homo sapiens
tggctcttctagctc

SEQ ID NO: 351914 - DNA, 15 bp, Homo sapiens
ctggctcttctagct

SEQ ID NO: 351915 - DNA, 15 bp, Homo sapiens
tctggctcttctagc

SEQ ID NO: 351916 - DNA, 15 bp, Homo sapiens
ttctggctcttctag

SEQ ID NO: 351917 - DNA, 15 bp, Homo sapiens
tttctggctcttcta

SEQ ID NO: 351918 - DNA, 15 bp, Homo sapiens
ctttctggctcttct

SEQ ID NO: 351919 - DNA, 15 bp, Homo sapiens
tctttctggctcttc

SEQ ID NO: 351920 - DNA, 15 bp, Homo sapiens
ttctttctggctctt

SEQ ID NO: 351921 - DNA, 15 bp, Homo sapiens
cttctttctggctct

SEQ ID NO: 351922 - DNA, 15 bp, Homo sapiens
ccttctttctggctc

SEQ ID NO: 351923 - DNA, 15 bp, Homo sapiens
tccttctttctggct

SEQ ID NO: 351924 - DNA, 15 bp, Homo sapiens
ctccttctttctggc

SEQ ID NO: 351925 - DNA, 15 bp, Homo sapiens
actccttctttctgg

SEQ ID NO: 351926 - DNA, 15 bp, Homo sapiens
aactccttctttctg

SEQ ID NO: 351927 - DNA, 15 bp, Homo sapiens
caactccttctttct

SEQ ID NO: 351928 - DNA, 15 bp, Homo sapiens
tcaactccttctttc

SEQ ID NO: 351929 - DNA, 15 bp, Homo sapiens
atcaactccttcttt

SEQ ID NO: 351930 - DNA, 15 bp, Homo sapiens
gatcaactccttctt

SEQ ID NO: 351931 - DNA, 15 bp, Homo sapiens
tgatcaactccttct

SEQ ID NO: 351932 - DNA, 15 bp, Homo sapiens
ttgatcaactccttc

SEQ ID NO: 351933 - DNA, 15 bp, Homo sapiens
attgatcaactcctt

SEQ ID NO: 351934 - DNA, 15 bp, Homo sapiens
cattgatcaactcct

SEQ ID NO: 351935 - DNA, 15 bp, Homo sapiens
acattgatcaactcc

SEQ ID NO: 351936 - DNA, 15 bp, Homo sapiens
aacattgatcaactc

SEQ ID NO: 351937 - DNA, 15 bp, Homo sapiens
caacattgatcaact

SEQ ID NO: 351938 - DNA, 15 bp, Homo sapiens
acaacattgatcaac

SEQ ID NO: 351939 - DNA, 15 bp, Homo sapiens
cacaacattgatcaa

SEQ ID NO: 351940 - DNA, 15 bp, Homo sapiens
ccacaacattgatca

SEQ ID NO: 351941 - DNA, 15 bp, Homo sapiens
cccacaacattgatc

SEQ ID NO: 351942 - DNA, 15 bp, Homo sapiens
tcccacaacattgat

SEQ ID NO: 351943 - DNA, 15 bp, Homo sapiens
ctcccacaacattga

SEQ ID NO: 351944 - DNA, 15 bp, Homo sapiens
tctcccacaacattg

SEQ ID NO: 351945 - DNA, 15 bp, Homo sapiens
ctctcccacaacatt

SEQ ID NO: 351946 - DNA, 15 bp, Homo sapiens
cctctcccacaacat

SEQ ID NO: 351947 - DNA, 15 bp, Homo sapiens
tcctctcccacaaca

SEQ ID NO: 351948 - DNA, 15 bp, Homo sapiens
ctcctctcccacaac

SEQ ID NO: 351949 - DNA, 15 bp, Homo sapiens
actcctctcccacaa

SEQ ID NO: 351950 - DNA, 15 bp, Homo sapiens
gactcctctcccaca

SEQ ID NO: 351951 - DNA, 15 bp, Homo sapiens
ggactcctctcccac

SEQ ID NO: 351952 - DNA, 15 bp, Homo sapiens
cggactcctctccca

SEQ ID NO: 351953 - DNA, 15 bp, Homo sapiens
ccggactcctctccc

SEQ ID NO: 351954 - DNA, 15 bp, Homo sapiens
cccggactcctctcc

SEQ ID NO: 351955 - DNA, 15 bp, Homo sapiens
tcccggactcctctc

SEQ ID NO: 351956 - DNA, 15 bp, Homo sapiens
ttcccggactcctct

SEQ ID NO: 351957 - DNA, 15 bp, Homo sapiens
cttcccggactcctc

SEQ ID NO: 351958 - DNA, 15 bp, Homo sapiens
gcttcccggactcct

SEQ ID NO: 351959 - DNA, 15 bp, Homo sapiens
ggcttcccggactcc

SEQ ID NO: 351960 - DNA, 15 bp, Homo sapiens
aggcttcccggactc

SEQ ID NO: 351961 - DNA, 15 bp, Homo sapiens
aaggcttcccggact

SEQ ID NO: 351962 - DNA, 15 bp, Homo sapiens
gaaggcttcccggac

SEQ ID NO: 351963 - DNA, 15 bp, Homo sapiens
ggaaggcttcccgga

SEQ ID NO: 351964 - DNA, 15 bp, Homo sapiens
aggaaggcttcccgg

SEQ ID NO: 351965 - DNA, 15 bp, Homo sapiens
caggaaggcttcccg

SEQ ID NO: 351966 - DNA, 15 bp, Homo sapiens
ccaggaaggcttccc

SEQ ID NO: 351967 - DNA, 15 bp, Homo sapiens
tccaggaaggcttcc

SEQ ID NO: 351968 - DNA, 15 bp, Homo sapiens
ctccaggaaggcttc

SEQ ID NO: 351969 - DNA, 15 bp, Homo sapiens
cctccaggaaggctt

SEQ ID NO: 351970 - DNA, 15 bp, Homo sapiens
tcctccaggaaggct

SEQ ID NO: 351971 - DNA, 15 bp, Homo sapiens
ctcctccaggaaggc

SEQ ID NO: 351972 - DNA, 15 bp, Homo sapiens
tctcctccaggaagg

SEQ ID NO: 351973 - DNA, 15 bp, Homo sapiens
ctctcctccaggaag

SEQ ID NO: 351974 - DNA, 15 bp, Homo sapiens
cctctcctccaggaa

SEQ ID NO: 351975 - DNA, 15 bp, Homo sapiens
ccctctcctccagga

SEQ ID NO: 351976 - DNA, 15 bp, Homo sapiens
cccctctcctccagg

SEQ ID NO: 351977 - DNA, 15 bp, Homo sapiens
gcccctctcctccag

SEQ ID NO: 351978 - DNA, 15 bp, Homo sapiens
agcccctctcctcca

SEQ ID NO: 351979 - DNA, 15 bp, Homo sapiens
aagcccctctcctcc

SEQ ID NO: 351980 - DNA, 15 bp, Homo sapiens
taagcccctctcctc

SEQ ID NO: 351981 - DNA, 15 bp, Homo sapiens
ctaagcccctctcct

SEQ ID NO: 351982 - DNA, 15 bp, Homo sapiens
gctaagcccctctcc

SEQ ID NO: 351983 - DNA, 15 bp, Homo sapiens
tgctaagcccctctc

SEQ ID NO: 351984 - DNA, 15 bp, Homo sapiens
gtgctaagcccctct

SEQ ID NO: 351985 - DNA, 15 bp, Homo sapiens
ggtgctaagcccctc

SEQ ID NO: 351986 - DNA, 15 bp, Homo sapiens
tggtgctaagcccct

SEQ ID NO: 351987 - DNA, 15 bp, Homo sapiens
ctggtgctaagcccc

SEQ ID NO: 351988 - DNA, 15 bp, Homo sapiens
gctggtgctaagccc

SEQ ID NO: 351989 - DNA, 15 bp, Homo sapiens
agctggtgctaagcc

SEQ ID NO: 351990 - DNA, 15 bp, Homo sapiens
gagctggtgctaagc

SEQ ID NO: 351991 - DNA, 15 bp, Homo sapiens
ggagctggtgctaag

SEQ ID NO: 351992 - DNA, 15 bp, Homo sapiens
tggagctggtgctaa

SEQ ID NO: 351993 - DNA, 15 bp, Homo sapiens
ttggagctggtgcta

SEQ ID NO: 351994 - DNA, 15 bp, Homo sapiens
tttggagctggtgct

SEQ ID NO: 351995 - DNA, 15 bp, Homo sapiens
ctttggagctggtgc

SEQ ID NO: 351996 - DNA, 15 bp, Homo sapiens
gctttggagctggtg

SEQ ID NO: 351997 - DNA, 15 bp, Homo sapiens
ggctttggagctggt

SEQ ID NO: 351998 - DNA, 15 bp, Homo sapiens
aggctttggagctgg

SEQ ID NO: 351999 - DNA, 15 bp, Homo sapiens
caggctttggagctg

SEQ ID NO: 352000 - DNA, 15 bp, Homo sapiens
ccaggctttggagct

SEQ ID NO: 352001 - DNA, 15 bp, Homo sapiens
cccaggctttggagc

SEQ ID NO: 352002 - DNA, 15 bp, Homo sapiens
gcccaggctttggag

SEQ ID NO: 352003 - DNA, 15 bp, Homo sapiens
tgcccaggctttgga

SEQ ID NO: 352004 - DNA, 15 bp, Homo sapiens
atgcccaggctttgg

SEQ ID NO: 352005 - DNA, 15 bp, Homo sapiens
gatgcccaggctttg

SEQ ID NO: 352006 - DNA, 15 bp, Homo sapiens
ggatgcccaggcttt

SEQ ID NO: 352007 - DNA, 15 bp, Homo sapiens
tggatgcccaggctt

SEQ ID NO: 352008 - DNA, 15 bp, Homo sapiens
ctggatgcccaggct

SEQ ID NO: 352009 - DNA, 15 bp, Homo sapiens
cctggatgcccaggc

SEQ ID NO: 352010 - DNA, 15 bp, Homo sapiens
ccctggatgcccagg

SEQ ID NO: 352011 - DNA, 15 bp, Homo sapiens
tccctggatgcccag

SEQ ID NO: 352012 - DNA, 15 bp, Homo sapiens
atccctggatgccca

SEQ ID NO: 352013 - DNA, 15 bp, Homo sapiens
gatccctggatgccc

SEQ ID NO: 352014 - DNA, 15 bp, Homo sapiens
ggatccctggatgcc

SEQ ID NO: 352015 - DNA, 15 bp, Homo sapiens
aggatccctggatgc

SEQ ID NO: 352016 - DNA, 15 bp, Homo sapiens
aaggatccctggatg

SEQ ID NO: 352017 - DNA, 15 bp, Homo sapiens
aaaggatccctggat

SEQ ID NO: 352018 - DNA, 15 bp, Homo sapiens
gaaaggatccctgga

SEQ ID NO: 352019 - DNA, 15 bp, Homo sapiens
ggaaaggatccctgg

SEQ ID NO: 352020 - DNA, 15 bp, Homo sapiens
gggaaaggatccctg

SEQ ID NO: 352021 - DNA, 15 bp, Homo sapiens
tgggaaaggatccct

SEQ ID NO: 352022 - DNA, 15 bp, Homo sapiens
gtgggaaaggatccc

SEQ ID NO: 352023 - DNA, 15 bp, Homo sapiens
ggtgggaaaggatcc

SEQ ID NO: 352024 - DNA, 15 bp, Homo sapiens
tggtgggaaaggatc

SEQ ID NO: 352025 - DNA, 15 bp, Homo sapiens
atggtgggaaaggat

SEQ ID NO: 352026 - DNA, 15 bp, Homo sapiens
gatggtgggaaagga

SEQ ID NO: 352027 - DNA, 15 bp, Homo sapiens
tgatggtgggaaagg

SEQ ID NO: 352028 - DNA, 15 bp, Homo sapiens
ttgatggtgggaaag

SEQ ID NO: 352029 - DNA, 15 bp, Homo sapiens
cttgatggtgggaaa

SEQ ID NO: 352030 - DNA, 15 bp, Homo sapiens
gcttgatggtgggaa

SEQ ID NO: 352031 - DNA, 15 bp, Homo sapiens
ggcttgatggtggga

SEQ ID NO: 352032 - DNA, 15 bp, Homo sapiens
aggcttgatggtggg

SEQ ID NO: 352033 - DNA, 15 bp, Homo sapiens
gaggcttgatggtgg

SEQ ID NO: 352034 - DNA, 15 bp, Homo sapiens
agaggcttgatggtg

SEQ ID NO: 352035 - DNA, 15 bp, Homo sapiens
aagaggcttgatggt

SEQ ID NO: 352036 - DNA, 15 bp, Homo sapiens
gaagaggcttgatgg

SEQ ID NO: 352037 - DNA, 15 bp, Homo sapiens
ggaagaggcttgatg

SEQ ID NO: 352038 - DNA, 15 bp, Homo sapiens
aggaagaggcttgat

SEQ ID NO: 352039 - DNA, 15 bp, Homo sapiens
caggaagaggcttga

SEQ ID NO: 352040 - DNA, 15 bp, Homo sapiens
gcaggaagaggcttg

SEQ ID NO: 352041 - DNA, 15 bp, Homo sapiens
agcaggaagaggctt

SEQ ID NO: 352042 - DNA, 15 bp, Homo sapiens
gagcaggaagaggct

SEQ ID NO: 352043 - DNA, 15 bp, Homo sapiens
agagcaggaagaggc

SEQ ID NO: 352044 - DNA, 15 bp, Homo sapiens
aagagcaggaagagg

SEQ ID NO: 352045 - DNA, 15 bp, Homo sapiens
gaagagcaggaagag

SEQ ID NO: 352046 - DNA, 15 bp, Homo sapiens
ggaagagcaggaaga

SEQ ID NO: 352047 - DNA, 15 bp, Homo sapiens
gggaagagcaggaag

SEQ ID NO: 352048 - DNA, 15 bp, Homo sapiens
tgggaagagcaggaa

SEQ ID NO: 352049 - DNA, 15 bp, Homo sapiens
gtgggaagagcagga

SEQ ID NO: 352050 - DNA, 15 bp, Homo sapiens
tgtgggaagagcagg

SEQ ID NO: 352051 - DNA, 15 bp, Homo sapiens
ctgtgggaagagcag

SEQ ID NO: 352052 - DNA, 15 bp, Homo sapiens
cctgtgggaagagca

SEQ ID NO: 352053 - DNA, 15 bp, Homo sapiens
ccctgtgggaagagc

SEQ ID NO: 352054 - DNA, 15 bp, Homo sapiens
tccctgtgggaagag

SEQ ID NO: 352055 - DNA, 15 bp, Homo sapiens
gtccctgtgggaaga

SEQ ID NO: 352056 - DNA, 15 bp, Homo sapiens
tgtccctgtgggaag

SEQ ID NO: 352057 - DNA, 15 bp, Homo sapiens
ttgtccctgtgggaa

SEQ ID NO: 352058 - DNA, 15 bp, Homo sapiens
tttgtccctgtggga

SEQ ID NO: 352059 - DNA, 15 bp, Homo sapiens
gtttgtccctgtggg

SEQ ID NO: 352060 - DNA, 15 bp, Homo sapiens
agtttgtccctgtgg

SEQ ID NO: 352061 - DNA, 15 bp, Homo sapiens
cagtttgtccctgtg

SEQ ID NO: 352062 - DNA, 15 bp, Homo sapiens
ccagtttgtccctgt

SEQ ID NO: 352063 - DNA, 15 bp, Homo sapiens
gccagtttgtccctg

SEQ ID NO: 352064 - DNA, 15 bp, Homo sapiens
tgccagtttgtccct

SEQ ID NO: 352065 - DNA, 15 bp, Homo sapiens
ctgccagtttgtccc

SEQ ID NO: 352066 - DNA, 15 bp, Homo sapiens
tctgccagtttgtcc

SEQ ID NO: 352067 - DNA, 15 bp, Homo sapiens
ctctgccagtttgtc

SEQ ID NO: 352068 - DNA, 15 bp, Homo sapiens
gctctgccagtttgt

SEQ ID NO: 352069 - DNA, 15 bp, Homo sapiens
agctctgccagtttg

SEQ ID NO: 352070 - DNA, 15 bp, Homo sapiens
gagctctgccagttt

SEQ ID NO: 352071 - DNA, 15 bp, Homo sapiens
ggagctctgccagtt

SEQ ID NO: 352072 - DNA, 15 bp, Homo sapiens
tggagctctgccagt

SEQ ID NO: 352073 - DNA, 15 bp, Homo sapiens
gtggagctctgccag

SEQ ID NO: 352074 - DNA, 15 bp, Homo sapiens
cgtggagctctgcca

SEQ ID NO: 352075 - DNA, 15 bp, Homo sapiens
ccgtggagctctgcc

SEQ ID NO: 352076 - DNA, 15 bp, Homo sapiens
cccgtggagctctgc

SEQ ID NO: 352077 - DNA, 15 bp, Homo sapiens
tcccgtggagctctg

SEQ ID NO: 352078 - DNA, 15 bp, Homo sapiens
ttcccgtggagctct

SEQ ID NO: 352079 - DNA, 15 bp, Homo sapiens
gttcccgtggagctc

SEQ ID NO: 352080 - DNA, 15 bp, Homo sapiens
tgttcccgtggagct

SEQ ID NO: 352081 - DNA, 15 bp, Homo sapiens
atgttcccgtggagc

SEQ ID NO: 352082 - DNA, 15 bp, Homo sapiens
catgttcccgtggag

SEQ ID NO: 352083 - DNA, 15 bp, Homo sapiens
acatgttcccgtgga

SEQ ID NO: 352084 - DNA, 15 bp, Homo sapiens
aacatgttcccgtgg

SEQ ID NO: 352085 - DNA, 15 bp, Homo sapiens
aaacatgttcccgtg

SEQ ID NO: 352086 - DNA, 15 bp, Homo sapiens
caaacatgttcccgt

SEQ ID NO: 352087 - DNA, 15 bp, Homo sapiens
acaaacatgttcccg

SEQ ID NO: 352088 - DNA, 15 bp, Homo sapiens
cacaaacatgttccc

SEQ ID NO: 352089 - DNA, 15 bp, Homo sapiens
ccacaaacatgttcc

SEQ ID NO: 352090 - DNA, 15 bp, Homo sapiens
tccacaaacatgttc

SEQ ID NO: 352091 - DNA, 15 bp, Homo sapiens
ttccacaaacatgtt

SEQ ID NO: 352092 - DNA, 15 bp, Homo sapiens
cttccacaaacatgt

SEQ ID NO: 352093 - DNA, 15 bp, Homo sapiens
tcttccacaaacatg

SEQ ID NO: 352094 - DNA, 15 bp, Homo sapiens
ttcttccacaaacat

SEQ ID NO: 352095 - DNA, 15 bp, Homo sapiens
attcttccacaaaca

SEQ ID NO: 352096 - DNA, 15 bp, Homo sapiens
cattcttccacaaac

SEQ ID NO: 352097 - DNA, 15 bp, Homo sapiens
acattcttccacaaa

SEQ ID NO: 352098 - DNA, 15 bp, Homo sapiens
cacattcttccacaa

SEQ ID NO: 352099 - DNA, 15 bp, Homo sapiens
gcacattcttccaca

SEQ ID NO: 352100 - DNA, 15 bp, Homo sapiens
ggcacattcttccac

SEQ ID NO: 352101 - DNA, 15 bp, Homo sapiens
tggcacattcttcca

SEQ ID NO: 352102 - DNA, 15 bp, Homo sapiens
ttggcacattcttcc

SEQ ID NO: 352103 - DNA, 15 bp, Homo sapiens
cttggcacattcttc

SEQ ID NO: 352104 - DNA, 15 bp, Homo sapiens
acttggcacattctt

SEQ ID NO: 352105 - DNA, 15 bp, Homo sapiens
cacttggcacattct

SEQ ID NO: 352106 - DNA, 15 bp, Homo sapiens
acacttggcacattc

SEQ ID NO: 352107 - DNA, 15 bp, Homo sapiens
tacacttggcacatt

SEQ ID NO: 352108 - DNA, 15 bp, Homo sapiens
ttacacttggcacat

SEQ ID NO: 352109 - DNA, 15 bp, Homo sapiens
cttacacttggcaca

SEQ ID NO: 352110 - DNA, 15 bp, Homo sapiens
tcttacacttggcac

SEQ ID NO: 352111 - DNA, 15 bp, Homo sapiens
gtcttacacttggca

SEQ ID NO: 352112 - DNA, 15 bp, Homo sapiens
cgtcttacacttggc

SEQ ID NO: 352113 - DNA, 15 bp, Homo sapiens
acgtcttacacttgg

SEQ ID NO: 352114 - DNA, 15 bp, Homo sapiens
cacgtcttacacttg

SEQ ID NO: 352115 - DNA, 15 bp, Homo sapiens
tcacgtcttacactt

SEQ ID NO: 352116 - DNA, 15 bp, Homo sapiens
ctcacgtcttacact

SEQ ID NO: 352117 - DNA, 15 bp, Homo sapiens
actcacgtcttacac

SEQ ID NO: 352118 - DNA, 15 bp, Homo sapiens
cactcacgtcttaca

SEQ ID NO: 352119 - DNA, 15 bp, Homo sapiens
gcactcacgtcttac

SEQ ID NO: 352120 - DNA, 15 bp, Homo sapiens
ggcactcacgtctta

SEQ ID NO: 352121 - DNA, 15 bp, Homo sapiens
tggcactcacgtctt

SEQ ID NO: 352122 - DNA, 15 bp, Homo sapiens
gtggcactcacgtct

SEQ ID NO: 352123 - DNA, 15 bp, Homo sapiens
ggtggcactcacgtc

SEQ ID NO: 352124 - DNA, 15 bp, Homo sapiens
aggtggcactcacgt

SEQ ID NO: 352125 - DNA, 15 bp, Homo sapiens
caggtggcactcacg

SEQ ID NO: 352126 - DNA, 15 bp, Homo sapiens
ccaggtggcactcac

SEQ ID NO: 352127 - DNA, 15 bp, Homo sapiens
cccaggtggcactca

SEQ ID NO: 352128 - DNA, 15 bp, Homo sapiens
acccaggtggcactc

SEQ ID NO: 352129 - DNA, 15 bp, Homo sapiens
cacccaggtggcact

SEQ ID NO: 352130 - DNA, 15 bp, Homo sapiens
gcacccaggtggcac

SEQ ID NO: 352131 - DNA, 15 bp, Homo sapiens
tgcacccaggtggca

SEQ ID NO: 352132 - DNA, 15 bp, Homo sapiens
ctgcacccaggtggc

SEQ ID NO: 352133 - DNA, 15 bp, Homo sapiens
cctgcacccaggtgg

SEQ ID NO: 352134 - DNA, 15 bp, Homo sapiens
ccctgcacccaggtg

SEQ ID NO: 352135 - DNA, 15 bp, Homo sapiens
cccctgcacccaggt

SEQ ID NO: 352136 - DNA, 15 bp, Homo sapiens
acccctgcacccagg

SEQ ID NO: 352137 - DNA, 15 bp, Homo sapiens
cacccctgcacccag

SEQ ID NO: 352138 - DNA, 15 bp, Homo sapiens
ccacccctgcaccca

SEQ ID NO: 352139 - DNA, 15 bp, Homo sapiens
cccacccctgcaccc

SEQ ID NO: 352140 - DNA, 15 bp, Homo sapiens
ccccacccctgcacc

SEQ ID NO: 352141 - DNA, 15 bp, Homo sapiens
cccccacccctgcac

SEQ ID NO: 352142 - DNA, 15 bp, Homo sapiens
gcccccacccctgca

SEQ ID NO: 352143 - DNA, 15 bp, Homo sapiens
agcccccacccctgc

SEQ ID NO: 352144 - DNA, 15 bp, Homo sapiens
gagcccccacccctg

SEQ ID NO: 352145 - DNA, 15 bp, Homo sapiens
agagcccccacccct

SEQ ID NO: 352146 - DNA, 15 bp, Homo sapiens
cagagcccccacccc

SEQ ID NO: 352147 - DNA, 15 bp, Homo sapiens
gcagagcccccaccc

SEQ ID NO: 352148 - DNA, 15 bp, Homo sapiens
ggcagagcccccacc

SEQ ID NO: 352149 - DNA, 15 bp, Homo sapiens
tggcagagcccccac

SEQ ID NO: 352150 - DNA, 15 bp, Homo sapiens
ctggcagagccccca

SEQ ID NO: 352151 - DNA, 15 bp, Homo sapiens
tctggcagagccccc

SEQ ID NO: 352152 - DNA, 15 bp, Homo sapiens
ctctggcagagcccc

SEQ ID NO: 352153 - DNA, 15 bp, Homo sapiens
cctctggcagagccc

SEQ ID NO: 352154 - DNA, 15 bp, Homo sapiens
ccctctggcagagcc

SEQ ID NO: 352155 - DNA, 15 bp, Homo sapiens
cccctctggcagagc

SEQ ID NO: 352156 - DNA, 15 bp, Homo sapiens
ccccctctggcagag

SEQ ID NO: 352157 - DNA, 15 bp, Homo sapiens
accccctctggcaga

SEQ ID NO: 352158 - DNA, 15 bp, Homo sapiens
aaccccctctggcag

SEQ ID NO: 352159 - DNA, 15 bp, Homo sapiens
caaccccctctggca

SEQ ID NO: 352160 - DNA, 15 bp, Homo sapiens
ccaaccccctctggc

SEQ ID NO: 352161 - DNA, 15 bp, Homo sapiens
cccaaccccctctgg

SEQ ID NO: 352162 - DNA, 15 bp, Homo sapiens
ccccaaccccctctg

SEQ ID NO: 352163 - DNA, 15 bp, Homo sapiens
cccccaaccccctct

SEQ ID NO: 352164 - DNA, 15 bp, Homo sapiens
acccccaaccccctc

SEQ ID NO: 352165 - DNA, 15 bp, Homo sapiens
gacccccaaccccct

SEQ ID NO: 352166 - DNA, 15 bp, Homo sapiens
cgacccccaaccccc

SEQ ID NO: 352167 - DNA, 15 bp, Homo sapiens
tcgacccccaacccc

SEQ ID NO: 352168 - DNA, 15 bp, Homo sapiens
ttcgacccccaaccc

SEQ ID NO: 352169 - DNA, 15 bp, Homo sapiens
attcgacccccaacc

SEQ ID NO: 352170 - DNA, 15 bp, Homo sapiens
gattcgacccccaac

SEQ ID NO: 352171 - DNA, 15 bp, Homo sapiens
ggattcgacccccaa

SEQ ID NO: 352172 - DNA, 15 bp, Homo sapiens
cggattcgaccccca

SEQ ID NO: 352173 - DNA, 15 bp, Homo sapiens
tcggattcgaccccc

SEQ ID NO: 352174 - DNA, 15 bp, Homo sapiens
atcggattcgacccc

SEQ ID NO: 352175 - DNA, 15 bp, Homo sapiens
catcggattcgaccc

SEQ ID NO: 352176 - DNA, 15 bp, Homo sapiens
acatcggattcgacc

SEQ ID NO: 352177 - DNA, 15 bp, Homo sapiens
gacatcggattcgac

SEQ ID NO: 352178 - DNA, 15 bp, Homo sapiens
ggacatcggattcga

SEQ ID NO: 352179 - DNA, 15 bp, Homo sapiens
gggacatcggattcg

SEQ ID NO: 352180 - DNA, 15 bp, Homo sapiens
tgggacatcggattc

SEQ ID NO: 352181 - DNA, 15 bp, Homo sapiens
ctgggacatcggatt

SEQ ID NO: 352182 - DNA, 15 bp, Homo sapiens
tctgggacatcggat

SEQ ID NO: 352183 - DNA, 15 bp, Homo sapiens
ctctgggacatcgga

SEQ ID NO: 352184 - DNA, 15 bp, Homo sapiens
tctctgggacatcgg

SEQ ID NO: 352185 - DNA, 15 bp, Homo sapiens
gtctctgggacatcg

SEQ ID NO: 352186 - DNA, 15 bp, Homo sapiens
ggtctctgggacatc

SEQ ID NO: 352187 - DNA, 15 bp, Homo sapiens
gggtctctgggacat

SEQ ID NO: 352188 - DNA, 15 bp, Homo sapiens
tgggtctctgggaca

SEQ ID NO: 352189 - DNA, 15 bp, Homo sapiens
ctgggtctctgggac

SEQ ID NO: 352190 - DNA, 15 bp, Homo sapiens
tctgggtctctggga

SEQ ID NO: 352191 - DNA, 15 bp, Homo sapiens
ctctgggtctctggg

SEQ ID NO: 352192 - DNA, 15 bp, Homo sapiens
cctctgggtctctgg

SEQ ID NO: 352193 - DNA, 15 bp, Homo sapiens
ccctctgggtctctg

SEQ ID NO: 352194 - DNA, 15 bp, Homo sapiens
accctctgggtctct

SEQ ID NO: 352195 - DNA, 15 bp, Homo sapiens
taccctctgggtctc

SEQ ID NO: 352196 - DNA, 15 bp, Homo sapiens
ataccctctgggtct

SEQ ID NO: 352197 - DNA, 15 bp, Homo sapiens
cataccctctgggtc

SEQ ID NO: 352198 - DNA, 15 bp, Homo sapiens
ccataccctctgggt

SEQ ID NO: 352199 - DNA, 15 bp, Homo sapiens
cccataccctctggg

SEQ ID NO: 352200 - DNA, 15 bp, Homo sapiens
ccccataccctctgg

SEQ ID NO: 352201 - DNA, 15 bp, Homo sapiens
cccccataccctctg

SEQ ID NO: 352202 - DNA, 15 bp, Homo sapiens
ccccccataccctct

SEQ ID NO: 352203 - DNA, 15 bp, Homo sapiens
tccccccataccctc

SEQ ID NO: 352204 - DNA, 15 bp, Homo sapiens
gtccccccataccct

SEQ ID NO: 352205 - DNA, 15 bp, Homo sapiens
agtccccccataccc

SEQ ID NO: 352206 - DNA, 15 bp, Homo sapiens
cagtccccccatacc

SEQ ID NO: 352207 - DNA, 15 bp, Homo sapiens
ccagtccccccatac

SEQ ID NO: 352208 - DNA, 15 bp, Homo sapiens
cccagtccccccata

SEQ ID NO: 352209 - DNA, 15 bp, Homo sapiens
ccccagtccccccat

SEQ ID NO: 352210 - DNA, 15 bp, Homo sapiens
accccagtcccccca

SEQ ID NO: 352211 - DNA, 15 bp, Homo sapiens
caccccagtcccccc

SEQ ID NO: 352212 - DNA, 15 bp, Homo sapiens
acaccccagtccccc

SEQ ID NO: 352213 - DNA, 15 bp, Homo sapiens
cacaccccagtcccc

SEQ ID NO: 352214 - DNA, 15 bp, Homo sapiens
ccacaccccagtccc

SEQ ID NO: 352215 - DNA, 15 bp, Homo sapiens
gccacaccccagtcc

SEQ ID NO: 352216 - DNA, 15 bp, Homo sapiens
ggccacaccccagtc

SEQ ID NO: 352217 - DNA, 15 bp, Homo sapiens
gggccacaccccagt

SEQ ID NO: 352218 - DNA, 15 bp, Homo sapiens
agggccacaccccag

SEQ ID NO: 352219 - DNA, 15 bp, Homo sapiens
gagggccacacccca

SEQ ID NO: 352220 - DNA, 15 bp, Homo sapiens
ggagggccacacccc

SEQ ID NO: 352221 - DNA, 15 bp, Homo sapiens
aggagggccacaccc

SEQ ID NO: 352222 - DNA, 15 bp, Homo sapiens
caggagggccacacc

SEQ ID NO: 352223 - DNA, 15 bp, Homo sapiens
ccaggagggccacac

SEQ ID NO: 352224 - DNA, 15 bp, Homo sapiens
cccaggagggccaca

SEQ ID NO: 352225 - DNA, 15 bp, Homo sapiens
ccccaggagggccac

SEQ ID NO: 352226 - DNA, 15 bp, Homo sapiens
cccccaggagggcca

SEQ ID NO: 352227 - DNA, 15 bp, Homo sapiens
ccccccaggagggcc

SEQ ID NO: 352228 - DNA, 15 bp, Homo sapiens
tccccccaggagggc

SEQ ID NO: 352229 - DNA, 15 bp, Homo sapiens
atccccccaggaggg

SEQ ID NO: 352230 - DNA, 15 bp, Homo sapiens
gatccccccaggagg

SEQ ID NO: 352231 - DNA, 15 bp, Homo sapiens
agatccccccaggag

SEQ ID NO: 352232 - DNA, 15 bp, Homo sapiens
cagatccccccagga

SEQ ID NO: 352233 - DNA, 15 bp, Homo sapiens
ccagatccccccagg

SEQ ID NO: 352234 - DNA, 15 bp, Homo sapiens
cccagatccccccag

SEQ ID NO: 352235 - DNA, 15 bp, Homo sapiens
ccccagatcccccca

SEQ ID NO: 352236 - DNA, 15 bp, Homo sapiens
cccccagatcccccc

SEQ ID NO: 352237 - DNA, 15 bp, Homo sapiens
gcccccagatccccc

SEQ ID NO: 352238 - DNA, 15 bp, Homo sapiens
cgcccccagatcccc

SEQ ID NO: 352239 - DNA, 15 bp, Homo sapiens
acgcccccagatccc

SEQ ID NO: 352240 - DNA, 15 bp, Homo sapiens
cacgcccccagatcc

SEQ ID NO: 352241 - DNA, 15 bp, Homo sapiens
acacgcccccagatc

SEQ ID NO: 352242 - DNA, 15 bp, Homo sapiens
gacacgcccccagat

SEQ ID NO: 352243 - DNA, 15 bp, Homo sapiens
agacacgcccccaga

SEQ ID NO: 352244 - DNA, 15 bp, Homo sapiens
gagacacgcccccag

SEQ ID NO: 352245 - DNA, 15 bp, Homo sapiens
ggagacacgccccca

SEQ ID NO: 352246 - DNA, 15 bp, Homo sapiens
gggagacacgccccc

SEQ ID NO: 352247 - DNA, 15 bp, Homo sapiens
agggagacacgcccc

SEQ ID NO: 352248 - DNA, 15 bp, Homo sapiens
gagggagacacgccc

SEQ ID NO: 352249 - DNA, 15 bp, Homo sapiens
agagggagacacgcc

SEQ ID NO: 352250 - DNA, 15 bp, Homo sapiens
aagagggagacacgc

SEQ ID NO: 352251 - DNA, 15 bp, Homo sapiens
caagagggagacacg

SEQ ID NO: 352252 - DNA, 15 bp, Homo sapiens
ccaagagggagacac

SEQ ID NO: 352253 - DNA, 15 bp, Homo sapiens
cccaagagggagaca

SEQ ID NO: 352254 - DNA, 15 bp, Homo sapiens
ccccaagagggagac

SEQ ID NO: 352255 - DNA, 15 bp, Homo sapiens
cccccaagagggaga

SEQ ID NO: 352256 - DNA, 15 bp, Homo sapiens
ccccccaagagggag

SEQ ID NO: 352257 - DNA, 15 bp, Homo sapiens
tccccccaagaggga

SEQ ID NO: 352258 - DNA, 15 bp, Homo sapiens
atccccccaagaggg

SEQ ID NO: 352259 - DNA, 15 bp, Homo sapiens
tatccccccaagagg

SEQ ID NO: 352260 - DNA, 15 bp, Homo sapiens
atatccccccaagag

SEQ ID NO: 352261 - DNA, 15 bp, Homo sapiens
tatatccccccaaga

SEQ ID NO: 352262 - DNA, 15 bp, Homo sapiens
ttatatccccccaag

SEQ ID NO: 352263 - DNA, 15 bp, Homo sapiens
cttatatccccccaa

SEQ ID NO: 352264 - DNA, 15 bp, Homo sapiens
ccttatatcccccca

SEQ ID NO: 352265 - DNA, 15 bp, Homo sapiens
tccttatatcccccc

SEQ ID NO: 352266 - DNA, 15 bp, Homo sapiens
ctccttatatccccc

SEQ ID NO: 352267 - DNA, 15 bp, Homo sapiens
actccttatatcccc

SEQ ID NO: 352268 - DNA, 15 bp, Homo sapiens
tactccttatatccc

SEQ ID NO: 352269 - DNA, 15 bp, Homo sapiens
atactccttatatcc

SEQ ID NO: 352270 - DNA, 15 bp, Homo sapiens
catactccttatatc

SEQ ID NO: 352271 - DNA, 15 bp, Homo sapiens
acatactccttatat

SEQ ID NO: 352272 - DNA, 15 bp, Homo sapiens
gacatactccttata

SEQ ID NO: 352273 - DNA, 15 bp, Homo sapiens
agacatactccttat

SEQ ID NO: 352274 - DNA, 15 bp, Homo sapiens
gagacatactcctta

SEQ ID NO: 352275 - DNA, 15 bp, Homo sapiens
ggagacatactcctt

SEQ ID NO: 352276 - DNA, 15 bp, Homo sapiens
gggagacatactcct

SEQ ID NO: 352277 - DNA, 15 bp, Homo sapiens
agggagacatactcc

SEQ ID NO: 352278 - DNA, 15 bp, Homo sapiens
gagggagacatactc

SEQ ID NO: 352279 - DNA, 15 bp, Homo sapiens
ggagggagacatact

SEQ ID NO: 352280 - DNA, 15 bp, Homo sapiens
aggagggagacatac

SEQ ID NO: 352281 - DNA, 15 bp, Homo sapiens
caggagggagacata

SEQ ID NO: 352282 - DNA, 15 bp, Homo sapiens
ccaggagggagacat

SEQ ID NO: 352283 - DNA, 15 bp, Homo sapiens
tccaggagggagaca

SEQ ID NO: 352284 - DNA, 15 bp, Homo sapiens
ctccaggagggagac

SEQ ID NO: 352285 - DNA, 15 bp, Homo sapiens
cctccaggagggaga

SEQ ID NO: 352286 - DNA, 15 bp, Homo sapiens
ccctccaggagggag

SEQ ID NO: 352287 - DNA, 15 bp, Homo sapiens
tccctccaggaggga

SEQ ID NO: 352288 - DNA, 15 bp, Homo sapiens
atccctccaggaggg

SEQ ID NO: 352289 - DNA, 15 bp, Homo sapiens
aatccctccaggagg

SEQ ID NO: 352290 - DNA, 15 bp, Homo sapiens
aaatccctccaggag

SEQ ID NO: 352291 - DNA, 15 bp, Homo sapiens
caaatccctccagga

SEQ ID NO: 352292 - DNA, 15 bp, Homo sapiens
ccaaatccctccagg

SEQ ID NO: 352293 - DNA, 15 bp, Homo sapiens
cccaaatccctccag

SEQ ID NO: 352294 - DNA, 15 bp, Homo sapiens
ccccaaatccctcca

SEQ ID NO: 352295 - DNA, 15 bp, Homo sapiens
cccccaaatccctcc

SEQ ID NO: 352296 - DNA, 15 bp, Homo sapiens
ccccccaaatccctc

SEQ ID NO: 352297 - DNA, 15 bp, Homo sapiens
gccccccaaatccct

SEQ ID NO: 352298 - DNA, 15 bp, Homo sapiens
tgccccccaaatccc

SEQ ID NO: 352299 - DNA, 15 bp, Homo sapiens
atgccccccaaatcc

SEQ ID NO: 352300 - DNA, 15 bp, Homo sapiens
catgccccccaaatc

SEQ ID NO: 352301 - DNA, 15 bp, Homo sapiens
acatgccccccaaat

SEQ ID NO: 352302 - DNA, 15 bp, Homo sapiens
gacatgccccccaaa

SEQ ID NO: 352303 - DNA, 15 bp, Homo sapiens
agacatgccccccaa

SEQ ID NO: 352304 - DNA, 15 bp, Homo sapiens
aagacatgcccccca

SEQ ID NO: 352305 - DNA, 15 bp, Homo sapiens
gaagacatgcccccc

SEQ ID NO: 352306 - DNA, 15 bp, Homo sapiens
ggaagacatgccccc

SEQ ID NO: 352307 - DNA, 15 bp, Homo sapiens
aggaagacatgcccc

SEQ ID NO: 352308 - DNA, 15 bp, Homo sapiens
gaggaagacatgccc

SEQ ID NO: 352309 - DNA, 15 bp, Homo sapiens
ggaggaagacatgcc

SEQ ID NO: 352310 - DNA, 15 bp, Homo sapiens
aggaggaagacatgc

SEQ ID NO: 352311 - DNA, 15 bp, Homo sapiens
caggaggaagacatg

SEQ ID NO: 352312 - DNA, 15 bp, Homo sapiens
ccaggaggaagacat

SEQ ID NO: 352313 - DNA, 15 bp, Homo sapiens
tccaggaggaagaca

SEQ ID NO: 352314 - DNA, 15 bp, Homo sapiens
ctccaggaggaagac

SEQ ID NO: 352315 - DNA, 15 bp, Homo sapiens
cctccaggaggaaga

SEQ ID NO: 352316 - DNA, 15 bp, Homo sapiens
ccctccaggaggaag

SEQ ID NO: 352317 - DNA, 15 bp, Homo sapiens
tccctccaggaggaa

SEQ ID NO: 352318 - DNA, 15 bp, Homo sapiens
atccctccaggagga

SEQ ID NO: 352319 - DNA, 15 bp, Homo sapiens
cccccccaaatccct

SEQ ID NO: 352320 - DNA, 15 bp, Homo sapiens
gcccccccaaatccc

SEQ ID NO: 352321 - DNA, 15 bp, Homo sapiens
ggcccccccaaatcc

SEQ ID NO: 352322 - DNA, 15 bp, Homo sapiens
cggcccccccaaatc

SEQ ID NO: 352323 - DNA, 15 bp, Homo sapiens
acggcccccccaaat

SEQ ID NO: 352324 - DNA, 15 bp, Homo sapiens
cacggcccccccaaa

SEQ ID NO: 352325 - DNA, 15 bp, Homo sapiens
gcacggcccccccaa

SEQ ID NO: 352326 - DNA, 15 bp, Homo sapiens
ggcacggccccccca

SEQ ID NO: 352327 - DNA, 15 bp, Homo sapiens
aggcacggccccccc

SEQ ID NO: 352328 - DNA, 15 bp, Homo sapiens
gaggcacggcccccc

SEQ ID NO: 352329 - DNA, 15 bp, Homo sapiens
ggaggcacggccccc

SEQ ID NO: 352330 - DNA, 15 bp, Homo sapiens
gggaggcacggcccc

SEQ ID NO: 352331 - DNA, 15 bp, Homo sapiens
agggaggcacggccc

SEQ ID NO: 352332 - DNA, 15 bp, Homo sapiens
gagggaggcacggcc

SEQ ID NO: 352333 - DNA, 15 bp, Homo sapiens
ggagggaggcacggc

SEQ ID NO: 352334 - DNA, 15 bp, Homo sapiens
aggagggaggcacgg

SEQ ID NO: 352335 - DNA, 15 bp, Homo sapiens
caggagggaggcacg

SEQ ID NO: 352336 - DNA, 15 bp, Homo sapiens
acaggagggaggcac

SEQ ID NO: 352337 - DNA, 15 bp, Homo sapiens
cacaggagggaggca

SEQ ID NO: 352338 - DNA, 15 bp, Homo sapiens
ccacaggagggaggc

SEQ ID NO: 352339 - DNA, 15 bp, Homo sapiens
cccacaggagggagg

SEQ ID NO: 352340 - DNA, 15 bp, Homo sapiens
ccccacaggagggag

SEQ ID NO: 352341 - DNA, 15 bp, Homo sapiens
cccccacaggaggga

SEQ ID NO: 352342 - DNA, 15 bp, Homo sapiens
ccccccacaggaggg

SEQ ID NO: 352343 - DNA, 15 bp, Homo sapiens
accccccacaggagg

SEQ ID NO: 352344 - DNA, 15 bp, Homo sapiens
taccccccacaggag

SEQ ID NO: 352345 - DNA, 15 bp, Homo sapiens
gtaccccccacagga

SEQ ID NO: 352346 - DNA, 15 bp, Homo sapiens
tgtaccccccacagg

SEQ ID NO: 352347 - DNA, 15 bp, Homo sapiens
atgtaccccccacag

SEQ ID NO: 352348 - DNA, 15 bp, Homo sapiens
gatgtaccccccaca

SEQ ID NO: 352349 - DNA, 15 bp, Homo sapiens
ggatgtaccccccac

SEQ ID NO: 352350 - DNA, 15 bp, Homo sapiens
cggatgtacccccca

SEQ ID NO: 352351 - DNA, 15 bp, Homo sapiens
acggatgtacccccc

SEQ ID NO: 352352 - DNA, 15 bp, Homo sapiens
cacggatgtaccccc

SEQ ID NO: 352353 - DNA, 15 bp, Homo sapiens
acacggatgtacccc

SEQ ID NO: 352354 - DNA, 15 bp, Homo sapiens
gacacggatgtaccc

SEQ ID NO: 352355 - DNA, 15 bp, Homo sapiens
ggacacggatgtacc

SEQ ID NO: 352356 - DNA, 15 bp, Homo sapiens
aggacacggatgtac

SEQ ID NO: 352357 - DNA, 15 bp, Homo sapiens
caggacacggatgta

SEQ ID NO: 352358 - DNA, 15 bp, Homo sapiens
ccaggacacggatgt

SEQ ID NO: 352359 - DNA, 15 bp, Homo sapiens
gccaggacacggatg

SEQ ID NO: 352360 - DNA, 15 bp, Homo sapiens
tgccaggacacggat

SEQ ID NO: 352361 - DNA, 15 bp, Homo sapiens
gtgccaggacacgga

SEQ ID NO: 352362 - DNA, 15 bp, Homo sapiens
agtgccaggacacgg

SEQ ID NO: 352363 - DNA, 15 bp, Homo sapiens
cagtgccaggacacg

SEQ ID NO: 352364 - DNA, 15 bp, Homo sapiens
gcagtgccaggacac

SEQ ID NO: 352365 - DNA, 15 bp, Homo sapiens
agcagtgccaggaca

SEQ ID NO: 352366 - DNA, 15 bp, Homo sapiens
cagcagtgccaggac

SEQ ID NO: 352367 - DNA, 15 bp, Homo sapiens
acagcagtgccagga

SEQ ID NO: 352368 - DNA, 15 bp, Homo sapiens
tacagcagtgccagg

SEQ ID NO: 352369 - DNA, 15 bp, Homo sapiens
ctacagcagtgccag

SEQ ID NO: 352370 - DNA, 15 bp, Homo sapiens
gctacagcagtgcca

SEQ ID NO: 352371 - DNA, 15 bp, Homo sapiens
tgctacagcagtgcc

SEQ ID NO: 352372 - DNA, 15 bp, Homo sapiens
ttgctacagcagtgc

SEQ ID NO: 352373 - DNA, 15 bp, Homo sapiens
gttgctacagcagtg

SEQ ID NO: 352374 - DNA, 15 bp, Homo sapiens
ggttgctacagcagt

SEQ ID NO: 352375 - DNA, 15 bp, Homo sapiens
aggttgctacagcag

SEQ ID NO: 352376 - DNA, 15 bp, Homo sapiens
caggttgctacagca

SEQ ID NO: 352377 - DNA, 15 bp, Homo sapiens
gcaggttgctacagc

SEQ ID NO: 352378 - DNA, 15 bp, Homo sapiens
ggcaggttgctacag

SEQ ID NO: 352379 - DNA, 15 bp, Homo sapiens
tggcaggttgctaca

SEQ ID NO: 352380 - DNA, 15 bp, Homo sapiens
gtggcaggttgctac

SEQ ID NO: 352381 - DNA, 15 bp, Homo sapiens
tgtggcaggttgcta

SEQ ID NO: 352382 - DNA, 15 bp, Homo sapiens
ctgtggcaggttgct

SEQ ID NO: 352383 - DNA, 15 bp, Homo sapiens
tctgtggcaggttgc

SEQ ID NO: 352384 - DNA, 15 bp, Homo sapiens
atctgtggcaggttg

SEQ ID NO: 352385 - DNA, 15 bp, Homo sapiens
catctgtggcaggtt

SEQ ID NO: 352386 - DNA, 15 bp, Homo sapiens
tcatctgtggcaggt

SEQ ID NO: 352387 - DNA, 15 bp, Homo sapiens
ctcatctgtggcagg

SEQ ID NO: 352388 - DNA, 15 bp, Homo sapiens
gctcatctgtggcag

SEQ ID NO: 352389 - DNA, 15 bp, Homo sapiens
tgctcatctgtggca

SEQ ID NO: 352390 - DNA, 15 bp, Homo sapiens
ctgctcatctgtggc

SEQ ID NO: 352391 - DNA, 15 bp, Homo sapiens
gctgctcatctgtgg

SEQ ID NO: 352392 - DNA, 15 bp, Homo sapiens
cgctgctcatctgtg

SEQ ID NO: 352393 - DNA, 15 bp, Homo sapiens
acgctgctcatctgt

SEQ ID NO: 352394 - DNA, 15 bp, Homo sapiens
tacgctgctcatctg

SEQ ID NO: 352395 - DNA, 15 bp, Homo sapiens
ctacgctgctcatct

SEQ ID NO: 352396 - DNA, 15 bp, Homo sapiens
tctacgctgctcatc

SEQ ID NO: 352397 - DNA, 15 bp, Homo sapiens
ttctacgctgctcat

SEQ ID NO: 352398 - DNA, 15 bp, Homo sapiens
gttctacgctgctca

SEQ ID NO: 352399 - DNA, 15 bp, Homo sapiens
tgttctacgctgctc

SEQ ID NO: 352400 - DNA, 15 bp, Homo sapiens
ttgttctacgctgct

SEQ ID NO: 352401 - DNA, 15 bp, Homo sapiens
attgttctacgctgc

SEQ ID NO: 352402 - DNA, 15 bp, Homo sapiens
tattgttctacgctg

SEQ ID NO: 352403 - DNA, 15 bp, Homo sapiens
ctattgttctacgct

SEQ ID NO: 352404 - DNA, 15 bp, Homo sapiens
tctattgttctacgc

SEQ ID NO: 352405 - DNA, 15 bp, Homo sapiens
ttctattgttctacg

SEQ ID NO: 352406 - DNA, 15 bp, Homo sapiens
tttctattgttctac

SEQ ID NO: 352407 - DNA, 15 bp, Homo sapiens
atttctattgttcta

SEQ ID NO: 352408 - DNA, 15 bp, Homo sapiens
aatttctattgttct

SEQ ID NO: 352409 - DNA, 15 bp, Homo sapiens
aaatttctattgttc

SEQ ID NO: 352410 - DNA, 15 bp, Homo sapiens
caaatttctattgtt

SEQ ID NO: 352411 - DNA, 15 bp, Homo sapiens
acaaatttctattgt

SEQ ID NO: 352412 - DNA, 15 bp, Homo sapiens
cacaaatttctattg

SEQ ID NO: 352413 - DNA, 15 bp, Homo sapiens
tcacaaatttctatt

SEQ ID NO: 352414 - DNA, 15 bp, Homo sapiens
atcacaaatttctat

SEQ ID NO: 352415 - DNA, 15 bp, Homo sapiens
gatcacaaatttcta

SEQ ID NO: 352416 - DNA, 15 bp, Homo sapiens
agatcacaaatttct

SEQ ID NO: 352417 - DNA, 15 bp, Homo sapiens
gagatcacaaatttc

SEQ ID NO: 352418 - DNA, 15 bp, Homo sapiens
tgagatcacaaattt

SEQ ID NO: 352419 - DNA, 15 bp, Homo sapiens
gtgagatcacaaatt

SEQ ID NO: 352420 - DNA, 15 bp, Homo sapiens
tgtgagatcacaaat

SEQ ID NO: 352421 - DNA, 15 bp, Homo sapiens
ctgtgagatcacaaa

SEQ ID NO: 352422 - DNA, 15 bp, Homo sapiens
actgtgagatcacaa

SEQ ID NO: 352423 - DNA, 15 bp, Homo sapiens
aactgtgagatcaca

SEQ ID NO: 352424 - DNA, 15 bp, Homo sapiens
gaactgtgagatcac

SEQ ID NO: 352425 - DNA, 15 bp, Homo sapiens
agaactgtgagatca

SEQ ID NO: 352426 - DNA, 15 bp, Homo sapiens
cagaactgtgagatc

SEQ ID NO: 352427 - DNA, 15 bp, Homo sapiens
ccagaactgtgagat

SEQ ID NO: 352428 - DNA, 15 bp, Homo sapiens
cccagaactgtgaga

SEQ ID NO: 352429 - DNA, 15 bp, Homo sapiens
ccccagaactgtgag

SEQ ID NO: 352430 - DNA, 15 bp, Homo sapiens
tccccagaactgtga

SEQ ID NO: 352431 - DNA, 15 bp, Homo sapiens
gtccccagaactgtg

SEQ ID NO: 352432 - DNA, 15 bp, Homo sapiens
ggtccccagaactgt

SEQ ID NO: 352433 - DNA, 15 bp, Homo sapiens
tggtccccagaactg

SEQ ID NO: 352434 - DNA, 15 bp, Homo sapiens
ctggtccccagaact

SEQ ID NO: 352435 - DNA, 15 bp, Homo sapiens
tctggtccccagaac

SEQ ID NO: 352436 - DNA, 15 bp, Homo sapiens
ttctggtccccagaa

SEQ ID NO: 352437 - DNA, 15 bp, Homo sapiens
cttctggtccccaga

SEQ ID NO: 352438 - DNA, 15 bp, Homo sapiens
acttctggtccccag

SEQ ID NO: 352439 - DNA, 15 bp, Homo sapiens
gacttctggtcccca

SEQ ID NO: 352440 - DNA, 15 bp, Homo sapiens
ggacttctggtcccc

SEQ ID NO: 352441 - DNA, 15 bp, Homo sapiens
tggacttctggtccc

SEQ ID NO: 352442 - DNA, 15 bp, Homo sapiens
ttggacttctggtcc

SEQ ID NO: 352443 - DNA, 15 bp, Homo sapiens
tttggacttctggtc

SEQ ID NO: 352444 - DNA, 15 bp, Homo sapiens
ttttggacttctggt

SEQ ID NO: 352445 - DNA, 15 bp, Homo sapiens
attttggacttctgg

SEQ ID NO: 352446 - DNA, 15 bp, Homo sapiens
gattttggacttctg

SEQ ID NO: 352447 - DNA, 15 bp, Homo sapiens
ggattttggacttct

SEQ ID NO: 352448 - DNA, 15 bp, Homo sapiens
tggattttggacttc

SEQ ID NO: 352449 - DNA, 15 bp, Homo sapiens
ctggattttggactt

SEQ ID NO: 352450 - DNA, 15 bp, Homo sapiens
cctggattttggact

SEQ ID NO: 352451 - DNA, 15 bp, Homo sapiens
acctggattttggac

SEQ ID NO: 352452 - DNA, 15 bp, Homo sapiens
cacctggattttgga

SEQ ID NO: 352453 - DNA, 15 bp, Homo sapiens
acacctggattttgg

SEQ ID NO: 352454 - DNA, 15 bp, Homo sapiens
gacacctggattttg

SEQ ID NO: 352455 - DNA, 15 bp, Homo sapiens
agacacctggatttt

SEQ ID NO: 352456 - DNA, 15 bp, Homo sapiens
cagacacctggattt

SEQ ID NO: 352457 - DNA, 15 bp, Homo sapiens
gcagacacctggatt

SEQ ID NO: 352458 - DNA, 15 bp, Homo sapiens
tgcagacacctggat

SEQ ID NO: 352459 - DNA, 15 bp, Homo sapiens
ctgcagacacctgga

SEQ ID NO: 352460 - DNA, 15 bp, Homo sapiens
cctgcagacacctgg

SEQ ID NO: 352461 - DNA, 15 bp, Homo sapiens
ccctgcagacacctg

SEQ ID NO: 352462 - DNA, 15 bp, Homo sapiens
gccctgcagacacct

SEQ ID NO: 352463 - DNA, 15 bp, Homo sapiens
ggccctgcagacacc

SEQ ID NO: 352464 - DNA, 15 bp, Homo sapiens
tggccctgcagacac

SEQ ID NO: 352465 - DNA, 15 bp, Homo sapiens
atggccctgcagaca

SEQ ID NO: 352466 - DNA, 15 bp, Homo sapiens
catggccctgcagac

SEQ ID NO: 352467 - DNA, 15 bp, Homo sapiens
gcatggccctgcaga

SEQ ID NO: 352468 - DNA, 15 bp, Homo sapiens
ggcatggccctgcag

SEQ ID NO: 352469 - DNA, 15 bp, Homo sapiens
gggcatggccctgca

SEQ ID NO: 352470 - DNA, 15 bp, Homo sapiens
ggggcatggccctgc

SEQ ID NO: 352471 - DNA, 15 bp, Homo sapiens
aggggcatggccctg

SEQ ID NO: 352472 - DNA, 15 bp, Homo sapiens
gaggggcatggccct

SEQ ID NO: 352473 - DNA, 15 bp, Homo sapiens
agaggggcatggccc

SEQ ID NO: 352474 - DNA, 15 bp, Homo sapiens
cagaggggcatggcc

SEQ ID NO: 352475 - DNA, 15 bp, Homo sapiens
gcagaggggcatggc

SEQ ID NO: 352476 - DNA, 15 bp, Homo sapiens
tgcagaggggcatgg

SEQ ID NO: 352477 - DNA, 15 bp, Homo sapiens
ttgcagaggggcatg

SEQ ID NO: 352478 - DNA, 15 bp, Homo sapiens
gttgcagaggggcat

SEQ ID NO: 352479 - DNA, 15 bp, Homo sapiens
ggttgcagaggggca

SEQ ID NO: 352480 - DNA, 15 bp, Homo sapiens
aggttgcagaggggc

SEQ ID NO: 352481 - DNA, 15 bp, Homo sapiens
caggttgcagagggg

SEQ ID NO: 352482 - DNA, 15 bp, Homo sapiens
acaggttgcagaggg

SEQ ID NO: 352483 - DNA, 15 bp, Homo sapiens
tacaggttgcagagg

SEQ ID NO: 352484 - DNA, 15 bp, Homo sapiens
ctacaggttgcagag

SEQ ID NO: 352485 - DNA, 15 bp, Homo sapiens
cctacaggttgcaga

SEQ ID NO: 352486 - DNA, 15 bp, Homo sapiens
ccctacaggttgcag

SEQ ID NO: 352487 - DNA, 15 bp, Homo sapiens
cccctacaggttgca

SEQ ID NO: 352488 - DNA, 15 bp, Homo sapiens
tcccctacaggttgc

SEQ ID NO: 352489 - DNA, 15 bp, Homo sapiens
ctcccctacaggttg

SEQ ID NO: 352490 - DNA, 15 bp, Homo sapiens
cctcccctacaggtt

SEQ ID NO: 352491 - DNA, 15 bp, Homo sapiens
tcctcccctacaggt

SEQ ID NO: 352492 - DNA, 15 bp, Homo sapiens
atcctcccctacagg

SEQ ID NO: 352493 - DNA, 15 bp, Homo sapiens
aatcctcccctacag

SEQ ID NO: 352494 - DNA, 15 bp, Homo sapiens
aaatcctcccctaca

SEQ ID NO: 352495 - DNA, 15 bp, Homo sapiens
aaaatcctcccctac

SEQ ID NO: 352496 - DNA, 15 bp, Homo sapiens
aaaaatcctccccta

SEQ ID NO: 352497 - DNA, 15 bp, Homo sapiens
gaaaaatcctcccct

SEQ ID NO: 352498 - DNA, 15 bp, Homo sapiens
ggaaaaatcctcccc

SEQ ID NO: 352499 - DNA, 15 bp, Homo sapiens
aggaaaaatcctccc

SEQ ID NO: 352500 - DNA, 15 bp, Homo sapiens
caggaaaaatcctcc

SEQ ID NO: 352501 - DNA, 15 bp, Homo sapiens
gcaggaaaaatcctc

SEQ ID NO: 352502 - DNA, 15 bp, Homo sapiens
ggcaggaaaaatcct

SEQ ID NO: 352503 - DNA, 15 bp, Homo sapiens
aggcaggaaaaatcc

SEQ ID NO: 352504 - DNA, 15 bp, Homo sapiens
aaggcaggaaaaatc

SEQ ID NO: 352505 - DNA, 15 bp, Homo sapiens
aaaggcaggaaaaat

SEQ ID NO: 352506 - DNA, 15 bp, Homo sapiens
aaaaggcaggaaaaa

SEQ ID NO: 352507 - DNA, 15 bp, Homo sapiens
gaaaaggcaggaaaa

SEQ ID NO: 352508 - DNA, 15 bp, Homo sapiens
ggaaaaggcaggaaa

SEQ ID NO: 352509 - DNA, 15 bp, Homo sapiens
aggaaaaggcaggaa

SEQ ID NO: 352510 - DNA, 15 bp, Homo sapiens
caggaaaaggcagga

SEQ ID NO: 352511 - DNA, 15 bp, Homo sapiens
ccaggaaaaggcagg

SEQ ID NO: 352512 - DNA, 15 bp, Homo sapiens
gccaggaaaaggcag

SEQ ID NO: 352513 - DNA, 15 bp, Homo sapiens
agccaggaaaaggca

SEQ ID NO: 352514 - DNA, 15 bp, Homo sapiens
cagccaggaaaaggc

SEQ ID NO: 352515 - DNA, 15 bp, Homo sapiens
gcagccaggaaaagg

SEQ ID NO: 352516 - DNA, 15 bp, Homo sapiens
agcagccaggaaaag

SEQ ID NO: 352517 - DNA, 15 bp, Homo sapiens
cagcagccaggaaaa

SEQ ID NO: 352518 - DNA, 15 bp, Homo sapiens
ccagcagccaggaaa

SEQ ID NO: 352519 - DNA, 15 bp, Homo sapiens
accagcagccaggaa

SEQ ID NO: 352520 - DNA, 15 bp, Homo sapiens
caccagcagccagga

SEQ ID NO: 352521 - DNA, 15 bp, Homo sapiens
ccaccagcagccagg

SEQ ID NO: 352522 - DNA, 15 bp, Homo sapiens
gccaccagcagccag

SEQ ID NO: 352523 - DNA, 15 bp, Homo sapiens
tgccaccagcagcca

SEQ ID NO: 352524 - DNA, 15 bp, Homo sapiens
ctgccaccagcagcc

SEQ ID NO: 352525 - DNA, 15 bp, Homo sapiens
gctgccaccagcagc

SEQ ID NO: 352526 - DNA, 15 bp, Homo sapiens
ggctgccaccagcag

SEQ ID NO: 352527 - DNA, 15 bp, Homo sapiens
tggctgccaccagca

SEQ ID NO: 352528 - DNA, 15 bp, Homo sapiens
ctggctgccaccagc

SEQ ID NO: 352529 - DNA, 15 bp, Homo sapiens
gctggctgccaccag

SEQ ID NO: 352530 - DNA, 15 bp, Homo sapiens
ggctggctgccacca

SEQ ID NO: 352531 - DNA, 15 bp, Homo sapiens
tggctggctgccacc

SEQ ID NO: 352532 - DNA, 15 bp, Homo sapiens
gtggctggctgccac

SEQ ID NO: 352533 - DNA, 15 bp, Homo sapiens
ggtggctggctgcca

SEQ ID NO: 352534 - DNA, 15 bp, Homo sapiens
gggtggctggctgcc

SEQ ID NO: 352535 - DNA, 15 bp, Homo sapiens
agggtggctggctgc

SEQ ID NO: 352536 - DNA, 15 bp, Homo sapiens
aagggtggctggctg

SEQ ID NO: 352537 - DNA, 15 bp, Homo sapiens
caagggtggctggct

SEQ ID NO: 352538 - DNA, 15 bp, Homo sapiens
ccaagggtggctggc

SEQ ID NO: 352539 - DNA, 15 bp, Homo sapiens
accaagggtggctgg

SEQ ID NO: 352540 - DNA, 15 bp, Homo sapiens
caccaagggtggctg

SEQ ID NO: 352541 - DNA, 15 bp, Homo sapiens
ccaccaagggtggct

SEQ ID NO: 352542 - DNA, 15 bp, Homo sapiens
accaccaagggtggc

SEQ ID NO: 352543 - DNA, 15 bp, Homo sapiens
gaccaccaagggtgg

SEQ ID NO: 352544 - DNA, 15 bp, Homo sapiens
ggaccaccaagggtg

SEQ ID NO: 352545 - DNA, 15 bp, Homo sapiens
aggaccaccaagggt

SEQ ID NO: 352546 - DNA, 15 bp, Homo sapiens
caggaccaccaaggg

SEQ ID NO: 352547 - DNA, 15 bp, Homo sapiens
ccaggaccaccaagg

SEQ ID NO: 352548 - DNA, 15 bp, Homo sapiens
tccaggaccaccaag

SEQ ID NO: 352549 - DNA, 15 bp, Homo sapiens
gtccaggaccaccaa

SEQ ID NO: 352550 - DNA, 15 bp, Homo sapiens
ggtccaggaccacca

SEQ ID NO: 352551 - DNA, 15 bp, Homo sapiens
aggtccaggaccacc

SEQ ID NO: 352552 - DNA, 15 bp, Homo sapiens
taggtccaggaccac

SEQ ID NO: 352553 - DNA, 15 bp, Homo sapiens
gtaggtccaggacca

SEQ ID NO: 352554 - DNA, 15 bp, Homo sapiens
tgtaggtccaggacc

SEQ ID NO: 352555 - DNA, 15 bp, Homo sapiens
ctgtaggtccaggac

SEQ ID NO: 352556 - DNA, 15 bp, Homo sapiens
gctgtaggtccagga

SEQ ID NO: 352557 - DNA, 15 bp, Homo sapiens
ggctgtaggtccagg

SEQ ID NO: 352558 - DNA, 15 bp, Homo sapiens
tggctgtaggtccag

SEQ ID NO: 352559 - DNA, 15 bp, Homo sapiens
gtggctgtaggtcca

SEQ ID NO: 352560 - DNA, 15 bp, Homo sapiens
tgtggctgtaggtcc

SEQ ID NO: 352561 - DNA, 15 bp, Homo sapiens
ctgtggctgtaggtc

SEQ ID NO: 352562 - DNA, 15 bp, Homo sapiens
cctgtggctgtaggt

SEQ ID NO: 352563 - DNA, 15 bp, Homo sapiens
ccctgtggctgtagg

SEQ ID NO: 352564 - DNA, 15 bp, Homo sapiens
cccctgtggctgtag

SEQ ID NO: 352565 - DNA, 15 bp, Homo sapiens
gcccctgtggctgta

SEQ ID NO: 352566 - DNA, 15 bp, Homo sapiens
ggcccctgtggctgt

SEQ ID NO: 352567 - DNA, 15 bp, Homo sapiens
aggcccctgtggctg

SEQ ID NO: 352568 - DNA, 15 bp, Homo sapiens
aaggcccctgtggct

SEQ ID NO: 352569 - DNA, 15 bp, Homo sapiens
gaaggcccctgtggc

SEQ ID NO: 352570 - DNA, 15 bp, Homo sapiens
agaaggcccctgtgg

SEQ ID NO: 352571 - DNA, 15 bp, Homo sapiens
aagaaggcccctgtg

SEQ ID NO: 352572 - DNA, 15 bp, Homo sapiens
taagaaggcccctgt

SEQ ID NO: 352573 - DNA, 15 bp, Homo sapiens
ataagaaggcccctg

SEQ ID NO: 352574 - DNA, 15 bp, Homo sapiens
gataagaaggcccct

SEQ ID NO: 352575 - DNA, 15 bp, Homo sapiens
agataagaaggcccc

SEQ ID NO: 352576 - DNA, 15 bp, Homo sapiens
gagataagaaggccc

SEQ ID NO: 352577 - DNA, 15 bp, Homo sapiens
agagataagaaggcc

SEQ ID NO: 352578 - DNA, 15 bp, Homo sapiens
cagagataagaaggc

SEQ ID NO: 352579 - DNA, 15 bp, Homo sapiens
acagagataagaagg

SEQ ID NO: 352580 - DNA, 15 bp, Homo sapiens
cacagagataagaag

SEQ ID NO: 352581 - DNA, 15 bp, Homo sapiens
acacagagataagaa

SEQ ID NO: 352582 - DNA, 15 bp, Homo sapiens
aacacagagataaga

SEQ ID NO: 352583 - DNA, 15 bp, Homo sapiens
aaacacagagataag

SEQ ID NO: 352584 - DNA, 15 bp, Homo sapiens
gaaacacagagataa

SEQ ID NO: 352585 - DNA, 15 bp, Homo sapiens
agaaacacagagata

SEQ ID NO: 352586 - DNA, 15 bp, Homo sapiens
gagaaacacagagat

SEQ ID NO: 352587 - DNA, 15 bp, Homo sapiens
ggagaaacacagaga

SEQ ID NO: 352588 - DNA, 15 bp, Homo sapiens
aggagaaacacagag

SEQ ID NO: 352589 - DNA, 15 bp, Homo sapiens
aaggagaaacacaga

SEQ ID NO: 352590 - DNA, 15 bp, Homo sapiens
aaaggagaaacacag

SEQ ID NO: 352591 - DNA, 15 bp, Homo sapiens
aaaaggagaaacaca

SEQ ID NO: 352592 - DNA, 15 bp, Homo sapiens
aaaaaggagaaacac

SEQ ID NO: 352593 - DNA, 15 bp, Homo sapiens
aaaaaaggagaaaca

SEQ ID NO: 352594 - DNA, 15 bp, Homo sapiens
aaaaaaaggagaaac

SEQ ID NO: 352595 - DNA, 15 bp, Homo sapiens
aaaaaaaaggagaaa

SEQ ID NO: 352596 - DNA, 15 bp, Homo sapiens
caaaaaaaaggagaa

SEQ ID NO: 352597 - DNA, 15 bp, Homo sapiens
tcaaaaaaaaggaga

SEQ ID NO: 352598 - DNA, 15 bp, Homo sapiens
ctcaaaaaaaaggag

SEQ ID NO: 352599 - DNA, 15 bp, Homo sapiens
tctcaaaaaaaagga

SEQ ID NO: 352600 - DNA, 15 bp, Homo sapiens
gtctcaaaaaaaagg

SEQ ID NO: 352601 - DNA, 15 bp, Homo sapiens
tgtctcaaaaaaaag

SEQ ID NO: 352602 - DNA, 15 bp, Homo sapiens
ctgtctcaaaaaaaa

SEQ ID NO: 352603 - DNA, 15 bp, Homo sapiens
actgtctcaaaaaaa

SEQ ID NO: 352604 - DNA, 15 bp, Homo sapiens
gactgtctcaaaaaa

SEQ ID NO: 352605 - DNA, 15 bp, Homo sapiens
ggactgtctcaaaaa

SEQ ID NO: 352606 - DNA, 15 bp, Homo sapiens
gggactgtctcaaaa

SEQ ID NO: 352607 - DNA, 15 bp, Homo sapiens
cgggactgtctcaaa

SEQ ID NO: 352608 - DNA, 15 bp, Homo sapiens
gcgggactgtctcaa

SEQ ID NO: 352609 - DNA, 15 bp, Homo sapiens
agcgggactgtctca

SEQ ID NO: 352610 - DNA, 15 bp, Homo sapiens
gagcgggactgtctc

SEQ ID NO: 352611 - DNA, 15 bp, Homo sapiens
agagcgggactgtct

SEQ ID NO: 352612 - DNA, 15 bp, Homo sapiens
cagagcgggactgtc

SEQ ID NO: 352613 - DNA, 15 bp, Homo sapiens
acagagcgggactgt

SEQ ID NO: 352614 - DNA, 15 bp, Homo sapiens
gacagagcgggactg

SEQ ID NO: 352615 - DNA, 15 bp, Homo sapiens
tgacagagcgggact

SEQ ID NO: 352616 - DNA, 15 bp, Homo sapiens
atgacagagcgggac

SEQ ID NO: 352617 - DNA, 15 bp, Homo sapiens
gatgacagagcggga

SEQ ID NO: 352618 - DNA, 15 bp, Homo sapiens
ggatgacagagcggg

SEQ ID NO: 352619 - DNA, 15 bp, Homo sapiens
tggatgacagagcgg

SEQ ID NO: 352620 - DNA, 15 bp, Homo sapiens
ctggatgacagagcg

SEQ ID NO: 352621 - DNA, 15 bp, Homo sapiens
cctggatgacagagc

SEQ ID NO: 352622 - DNA, 15 bp, Homo sapiens
gcctggatgacagag

SEQ ID NO: 352623 - DNA, 15 bp, Homo sapiens
agcctggatgacaga

SEQ ID NO: 352624 - DNA, 15 bp, Homo sapiens
cagcctggatgacag

SEQ ID NO: 352625 - DNA, 15 bp, Homo sapiens
ccagcctggatgaca

SEQ ID NO: 352626 - DNA, 15 bp, Homo sapiens
tccagcctggatgac

SEQ ID NO: 352627 - DNA, 15 bp, Homo sapiens
ctccagcctggatga

SEQ ID NO: 352628 - DNA, 15 bp, Homo sapiens
actccagcctggatg

SEQ ID NO: 352629 - DNA, 15 bp, Homo sapiens
tactccagcctggat

SEQ ID NO: 352630 - DNA, 15 bp, Homo sapiens
gtactccagcctgga

SEQ ID NO: 352631 - DNA, 15 bp, Homo sapiens
cccactgtactccag

SEQ ID NO: 352632 - DNA, 15 bp, Homo sapiens
ccccactgtactcca

SEQ ID NO: 352633 - DNA, 15 bp, Homo sapiens
gccccactgtactcc

SEQ ID NO: 352634 - DNA, 15 bp, Homo sapiens
tgccccactgtactc

SEQ ID NO: 352635 - DNA, 15 bp, Homo sapiens
ttgccccactgtact

SEQ ID NO: 352636 - DNA, 15 bp, Homo sapiens
attgccccactgtac

SEQ ID NO: 352637 - DNA, 15 bp, Homo sapiens
gattgccccactgta

SEQ ID NO: 352638 - DNA, 15 bp, Homo sapiens
agattgccccactgt

SEQ ID NO: 352639 - DNA, 15 bp, Homo sapiens
gagattgccccactg

SEQ ID NO: 352640 - DNA, 15 bp, Homo sapiens
cgagattgccccact

SEQ ID NO: 352641 - DNA, 15 bp, Homo sapiens
ccgagattgccccac

SEQ ID NO: 352642 - DNA, 15 bp, Homo sapiens
gccgagattgcccca

SEQ ID NO: 352643 - DNA, 15 bp, Homo sapiens
agccgagattgcccc

SEQ ID NO: 352644 - DNA, 15 bp, Homo sapiens
gagccgagattgccc

SEQ ID NO: 352645 - DNA, 15 bp, Homo sapiens
tgagccgagattgcc

SEQ ID NO: 352646 - DNA, 15 bp, Homo sapiens
gtgagccgagattgc

SEQ ID NO: 352647 - DNA, 15 bp, Homo sapiens
agtgagccgagattg

SEQ ID NO: 352648 - DNA, 15 bp, Homo sapiens
cagtgagccgagatt

SEQ ID NO: 352649 - DNA, 15 bp, Homo sapiens
gggaggcggaggttg

SEQ ID NO: 352650 - DNA, 15 bp, Homo sapiens
cgggaggcggaggtt

SEQ ID NO: 352651 - DNA, 15 bp, Homo sapiens
ccgggaggcggaggt

SEQ ID NO: 352652 - DNA, 15 bp, Homo sapiens
cccgggaggcggagg

SEQ ID NO: 352653 - DNA, 15 bp, Homo sapiens
acccgggaggcggag

SEQ ID NO: 352654 - DNA, 15 bp, Homo sapiens
aacccgggaggcgga

SEQ ID NO: 352655 - DNA, 15 bp, Homo sapiens
gaacccgggaggcgg

SEQ ID NO: 352656 - DNA, 15 bp, Homo sapiens
tgaacccgggaggcg

SEQ ID NO: 352657 - DNA, 15 bp, Homo sapiens
ctgaacccgggaggc

SEQ ID NO: 352658 - DNA, 15 bp, Homo sapiens
cctgaacccgggagg

SEQ ID NO: 352659 - DNA, 15 bp, Homo sapiens
gcctgaacccgggag

SEQ ID NO: 352660 - DNA, 15 bp, Homo sapiens
tgcctgaacccggga

SEQ ID NO: 352661 - DNA, 15 bp, Homo sapiens
ttgcctgaacccggg

SEQ ID NO: 352662 - DNA, 15 bp, Homo sapiens
attgcctgaacccgg

SEQ ID NO: 352663 - DNA, 15 bp, Homo sapiens
aattgcctgaacccg

SEQ ID NO: 352664 - DNA, 15 bp, Homo sapiens
taattgcctgaaccc

SEQ ID NO: 352665 - DNA, 15 bp, Homo sapiens
ataattgcctgaacc

SEQ ID NO: 352666 - DNA, 15 bp, Homo sapiens
aataattgcctgaac

SEQ ID NO: 352667 - DNA, 15 bp, Homo sapiens
gaataattgcctgaa

SEQ ID NO: 352668 - DNA, 15 bp, Homo sapiens
agaataattgcctga

SEQ ID NO: 352669 - DNA, 15 bp, Homo sapiens
cagaataattgcctg

SEQ ID NO: 352670 - DNA, 15 bp, Homo sapiens
gcagaataattgcct

SEQ ID NO: 352671 - DNA, 15 bp, Homo sapiens
ggcagaataattgcc

SEQ ID NO: 352672 - DNA, 15 bp, Homo sapiens
aggcagaataattgc

SEQ ID NO: 352673 - DNA, 15 bp, Homo sapiens
gaggcagaataattg

SEQ ID NO: 352674 - DNA, 15 bp, Homo sapiens
tgaggcagaataatt

SEQ ID NO: 352675 - DNA, 15 bp, Homo sapiens
ctgaggcagaataat

SEQ ID NO: 352676 - DNA, 15 bp, Homo sapiens
gctgaggcagaataa

SEQ ID NO: 352677 - DNA, 15 bp, Homo sapiens
ggctgaggcagaata

SEQ ID NO: 352678 - DNA, 15 bp, Homo sapiens
tggctgaggcagaat

SEQ ID NO: 352679 - DNA, 15 bp, Homo sapiens
atggctgaggcagaa

SEQ ID NO: 352680 - DNA, 15 bp, Homo sapiens
gatggctgaggcaga

SEQ ID NO: 352681 - DNA, 15 bp, Homo sapiens
ggatggctgaggcag

SEQ ID NO: 352682 - DNA, 15 bp, Homo sapiens
tggatggctgaggca

SEQ ID NO: 352683 - DNA, 15 bp, Homo sapiens
ttggatggctgaggc

SEQ ID NO: 352684 - DNA, 15 bp, Homo sapiens
cttggatggctgagg

SEQ ID NO: 352685 - DNA, 15 bp, Homo sapiens
acttggatggctgag

SEQ ID NO: 352686 - DNA, 15 bp, Homo sapiens
tacttggatggctga

SEQ ID NO: 352687 - DNA, 15 bp, Homo sapiens
ctacttggatggctg

SEQ ID NO: 352688 - DNA, 15 bp, Homo sapiens
gctacttggatggct

SEQ ID NO: 352689 - DNA, 15 bp, Homo sapiens
agctacttggatggc

SEQ ID NO: 352690 - DNA, 15 bp, Homo sapiens
cagctacttggatgg

SEQ ID NO: 352691 - DNA, 15 bp, Homo sapiens
gcagctacttggatg

SEQ ID NO: 352692 - DNA, 15 bp, Homo sapiens
tgcagctacttggat

SEQ ID NO: 352693 - DNA, 15 bp, Homo sapiens
ttgcagctacttgga

SEQ ID NO: 352694 - DNA, 15 bp, Homo sapiens
gttgcagctacttgg

SEQ ID NO: 352695 - DNA, 15 bp, Homo sapiens
agttgcagctacttg

SEQ ID NO: 352696 - DNA, 15 bp, Homo sapiens
cagttgcagctactt

SEQ ID NO: 352697 - DNA, 15 bp, Homo sapiens
gcagttgcagctact

SEQ ID NO: 352698 - DNA, 15 bp, Homo sapiens
tgcagttgcagctac

SEQ ID NO: 352699 - DNA, 15 bp, Homo sapiens
ctgcagttgcagcta

SEQ ID NO: 352700 - DNA, 15 bp, Homo sapiens
cctgcagttgcagct

SEQ ID NO: 352701 - DNA, 15 bp, Homo sapiens
gcctgcagttgcagc

SEQ ID NO: 352702 - DNA, 15 bp, Homo sapiens
cgcctgcagttgcag

SEQ ID NO: 352703 - DNA, 15 bp, Homo sapiens
gcgcctgcagttgca

SEQ ID NO: 352704 - DNA, 15 bp, Homo sapiens
ggcgcctgcagttgc

SEQ ID NO: 352705 - DNA, 15 bp, Homo sapiens
gggcgcctgcagttg

SEQ ID NO: 352706 - DNA, 15 bp, Homo sapiens
cgggcgcctgcagtt

SEQ ID NO: 352707 - DNA, 15 bp, Homo sapiens
gcgggcgcctgcagt

SEQ ID NO: 352708 - DNA, 15 bp, Homo sapiens
ggcgggcgcctgcag

SEQ ID NO: 352709 - DNA, 15 bp, Homo sapiens
tggcgggcgcctgca

SEQ ID NO: 352710 - DNA, 15 bp, Homo sapiens
gtggcgggcgcctgc

SEQ ID NO: 352711 - DNA, 15 bp, Homo sapiens
tgtggtggcgggcgc

SEQ ID NO: 352712 - DNA, 15 bp, Homo sapiens
gtgtggtggcgggcg

SEQ ID NO: 352713 - DNA, 15 bp, Homo sapiens
ggtgtggtggcgggc

SEQ ID NO: 352714 - DNA, 15 bp, Homo sapiens
aggtgtggtggcggg

SEQ ID NO: 352715 - DNA, 15 bp, Homo sapiens
caggtgtggtggcgg

SEQ ID NO: 352716 - DNA, 15 bp, Homo sapiens
ccaggtgtggtggcg

SEQ ID NO: 352717 - DNA, 15 bp, Homo sapiens
gccaggtgtggtggc

SEQ ID NO: 352718 - DNA, 15 bp, Homo sapiens
agccaggtgtggtgg

SEQ ID NO: 352719 - DNA, 15 bp, Homo sapiens
tagccaggtgtggtg

SEQ ID NO: 352720 - DNA, 15 bp, Homo sapiens
ttagccaggtgtggt

SEQ ID NO: 352721 - DNA, 15 bp, Homo sapiens
attagccaggtgtgg

SEQ ID NO: 352722 - DNA, 15 bp, Homo sapiens
tattagccaggtgtg

SEQ ID NO: 352723 - DNA, 15 bp, Homo sapiens
atattagccaggtgt

SEQ ID NO: 352724 - DNA, 15 bp, Homo sapiens
aatattagccaggtg

SEQ ID NO: 352725 - DNA, 15 bp, Homo sapiens
aaatattagccaggt

SEQ ID NO: 352726 - DNA, 15 bp, Homo sapiens
caaatattagccagg

SEQ ID NO: 352727 - DNA, 15 bp, Homo sapiens
acaaatattagccag

SEQ ID NO: 352728 - DNA, 15 bp, Homo sapiens
tacaaatattagcca

SEQ ID NO: 352729 - DNA, 15 bp, Homo sapiens
atacaaatattagcc

SEQ ID NO: 352730 - DNA, 15 bp, Homo sapiens
aatacaaatattagc

SEQ ID NO: 352731 - DNA, 15 bp, Homo sapiens
aaatacaaatattag

SEQ ID NO: 352732 - DNA, 15 bp, Homo sapiens
aaaatacaaatatta

SEQ ID NO: 352733 - DNA, 15 bp, Homo sapiens
aaaaatacaaatatt

SEQ ID NO: 352734 - DNA, 15 bp, Homo sapiens
taaaaatacaaatat

SEQ ID NO: 352735 - DNA, 15 bp, Homo sapiens
ctaaaaatacaaata

SEQ ID NO: 352736 - DNA, 15 bp, Homo sapiens
actaaaaatacaaat

SEQ ID NO: 352737 - DNA, 15 bp, Homo sapiens
tggtgaaaccccgtc

SEQ ID NO: 352738 - DNA, 15 bp, Homo sapiens
atggtgaaaccccgt

SEQ ID NO: 352739 - DNA, 15 bp, Homo sapiens
tatggtgaaaccccg

SEQ ID NO: 352740 - DNA, 15 bp, Homo sapiens
atatggtgaaacccc

SEQ ID NO: 352741 - DNA, 15 bp, Homo sapiens
aatatggtgaaaccc

SEQ ID NO: 352742 - DNA, 15 bp, Homo sapiens
caatatggtgaaacc

SEQ ID NO: 352743 - DNA, 15 bp, Homo sapiens
ccaatatggtgaaac

SEQ ID NO: 352744 - DNA, 15 bp, Homo sapiens
gccaatatggtgaaa

SEQ ID NO: 352745 - DNA, 15 bp, Homo sapiens
ggccaatatggtgaa

SEQ ID NO: 352746 - DNA, 15 bp, Homo sapiens
tggccaatatggtga

SEQ ID NO: 352747 - DNA, 15 bp, Homo sapiens
ctggccaatatggtg

SEQ ID NO: 352748 - DNA, 15 bp, Homo sapiens
cctggccaatatggt

SEQ ID NO: 352749 - DNA, 15 bp, Homo sapiens
gcctggccaatatgg

SEQ ID NO: 352750 - DNA, 15 bp, Homo sapiens
agcctggccaatatg

SEQ ID NO: 352751 - DNA, 15 bp, Homo sapiens
cagcctggccaatat

SEQ ID NO: 352752 - DNA, 15 bp, Homo sapiens
ccagcctggccaata

SEQ ID NO: 352753 - DNA, 15 bp, Homo sapiens
accagcctggccaat

SEQ ID NO: 352754 - DNA, 15 bp, Homo sapiens
caccagcctggccaa

SEQ ID NO: 352755 - DNA, 15 bp, Homo sapiens
acaccagcctggcca

SEQ ID NO: 352756 - DNA, 15 bp, Homo sapiens
gacaccagcctggcc

SEQ ID NO: 352757 - DNA, 15 bp, Homo sapiens
cgacaccagcctggc

SEQ ID NO: 352758 - DNA, 15 bp, Homo sapiens
tcgacaccagcctgg

SEQ ID NO: 352759 - DNA, 15 bp, Homo sapiens
ttcgacaccagcctg

SEQ ID NO: 352760 - DNA, 15 bp, Homo sapiens
gttcgacaccagcct

SEQ ID NO: 352761 - DNA, 15 bp, Homo sapiens
agttcgacaccagcc

SEQ ID NO: 352762 - DNA, 15 bp, Homo sapiens
gagttcgacaccagc

SEQ ID NO: 352763 - DNA, 15 bp, Homo sapiens
ggagttcgacaccag

SEQ ID NO: 352764 - DNA, 15 bp, Homo sapiens
aggagttcgacacca

SEQ ID NO: 352765 - DNA, 15 bp, Homo sapiens
caggagttcgacacc

SEQ ID NO: 352766 - DNA, 15 bp, Homo sapiens
tcaggagttcgacac

SEQ ID NO: 352767 - DNA, 15 bp, Homo sapiens
gtcaggagttcgaca

SEQ ID NO: 352768 - DNA, 15 bp, Homo sapiens
ggtcaggagttcgac

SEQ ID NO: 352769 - DNA, 15 bp, Homo sapiens
aaggtcaggagttcg

SEQ ID NO: 352770 - DNA, 15 bp, Homo sapiens
caaggtcaggagttc

SEQ ID NO: 352771 - DNA, 15 bp, Homo sapiens
acaaggtcaggagtt

SEQ ID NO: 352772 - DNA, 15 bp, Homo sapiens
cacaaggtcaggagt

SEQ ID NO: 352773 - DNA, 15 bp, Homo sapiens
tcacaaggtcaggag

SEQ ID NO: 352774 - DNA, 15 bp, Homo sapiens
atcacaaggtcagga

SEQ ID NO: 352775 - DNA, 15 bp, Homo sapiens
gatcacaaggtcagg

SEQ ID NO: 352776 - DNA, 15 bp, Homo sapiens
agatcacaaggtcag

SEQ ID NO: 352777 - DNA, 15 bp, Homo sapiens
cagatcacaaggtca

SEQ ID NO: 352778 - DNA, 15 bp, Homo sapiens
gcagatcacaaggtc

SEQ ID NO: 352779 - DNA, 15 bp, Homo sapiens
ggcagatcacaaggt

SEQ ID NO: 352780 - DNA, 15 bp, Homo sapiens
gggcagatcacaagg

SEQ ID NO: 352781 - DNA, 15 bp, Homo sapiens
cgggcagatcacaag

SEQ ID NO: 352782 - DNA, 15 bp, Homo sapiens
gcgggcagatcacaa

SEQ ID NO: 352783 - DNA, 15 bp, Homo sapiens
ggcgggcagatcaca

SEQ ID NO: 352784 - DNA, 15 bp, Homo sapiens
catcccagcactttg

SEQ ID NO: 352785 - DNA, 15 bp, Homo sapiens
tcatcccagcacttt

SEQ ID NO: 352786 - DNA, 15 bp, Homo sapiens
gtcatcccagcactt

SEQ ID NO: 352787 - DNA, 15 bp, Homo sapiens
tgtcatcccagcact

SEQ ID NO: 352788 - DNA, 15 bp, Homo sapiens
ctgtcatcccagcac

SEQ ID NO: 352789 - DNA, 15 bp, Homo sapiens
cctgtcatcccagca

SEQ ID NO: 352790 - DNA, 15 bp, Homo sapiens
gcctgtcatcccagc

SEQ ID NO: 352791 - DNA, 15 bp, Homo sapiens
cgcctgtcatcccag

SEQ ID NO: 352792 - DNA, 15 bp, Homo sapiens
acgcctgtcatccca

SEQ ID NO: 352793 - DNA, 15 bp, Homo sapiens
cacgcctgtcatccc

SEQ ID NO: 352794 - DNA, 15 bp, Homo sapiens
tcacgcctgtcatcc

SEQ ID NO: 352795 - DNA, 15 bp, Homo sapiens
ctcacgcctgtcatc

SEQ ID NO: 352796 - DNA, 15 bp, Homo sapiens
gctcacgcctgtcat

SEQ ID NO: 352797 - DNA, 15 bp, Homo sapiens
ggctcacgcctgtca

SEQ ID NO: 352798 - DNA, 15 bp, Homo sapiens
tggctcacgcctgtc

SEQ ID NO: 352799 - DNA, 15 bp, Homo sapiens
ggtggctcacgcctg

SEQ ID NO: 352800 - DNA, 15 bp, Homo sapiens
gtggtggctcacgcc

SEQ ID NO: 352801 - DNA, 15 bp, Homo sapiens
cgtggtggctcacgc

SEQ ID NO: 352802 - DNA, 15 bp, Homo sapiens
gcgtggtggctcacg

SEQ ID NO: 352803 - DNA, 15 bp, Homo sapiens
cgggcgtggtggctc

SEQ ID NO: 352804 - DNA, 15 bp, Homo sapiens
ccgggcgtggtggct

SEQ ID NO: 352805 - DNA, 15 bp, Homo sapiens
ggccgggcgtggtgg

SEQ ID NO: 352806 - DNA, 15 bp, Homo sapiens
gggccgggcgtggtg

SEQ ID NO: 352807 - DNA, 15 bp, Homo sapiens
tgggccgggcgtggt

SEQ ID NO: 352808 - DNA, 15 bp, Homo sapiens
ctgggccgggcgtgg

SEQ ID NO: 352809 - DNA, 15 bp, Homo sapiens
actgggccgggcgtg

SEQ ID NO: 352810 - DNA, 15 bp, Homo sapiens
tactgggccgggcgt

SEQ ID NO: 352811 - DNA, 15 bp, Homo sapiens
atactgggccgggcg

SEQ ID NO: 352812 - DNA, 15 bp, Homo sapiens
tatactgggccgggc

SEQ ID NO: 352813 - DNA, 15 bp, Homo sapiens
ttatactgggccggg

SEQ ID NO: 352814 - DNA, 15 bp, Homo sapiens
gttatactgggccgg

SEQ ID NO: 352815 - DNA, 15 bp, Homo sapiens
cgttatactgggccg

SEQ ID NO: 352816 - DNA, 15 bp, Homo sapiens
tcgttatactgggcc

SEQ ID NO: 352817 - DNA, 15 bp, Homo sapiens
atcgttatactgggc

SEQ ID NO: 352818 - DNA, 15 bp, Homo sapiens
aatcgttatactggg

SEQ ID NO: 352819 - DNA, 15 bp, Homo sapiens
taatcgttatactgg

SEQ ID NO: 352820 - DNA, 15 bp, Homo sapiens
ttaatcgttatactg

SEQ ID NO: 352821 - DNA, 15 bp, Homo sapiens
tttaatcgttatact

SEQ ID NO: 352822 - DNA, 15 bp, Homo sapiens
ctttaatcgttatac

SEQ ID NO: 352823 - DNA, 15 bp, Homo sapiens
actttaatcgttata

SEQ ID NO: 352824 - DNA, 15 bp, Homo sapiens
gactttaatcgttat

SEQ ID NO: 352825 - DNA, 15 bp, Homo sapiens
tgactttaatcgtta

SEQ ID NO: 352826 - DNA, 15 bp, Homo sapiens
ctgactttaatcgtt

SEQ ID NO: 352827 - DNA, 15 bp, Homo sapiens
cctgactttaatcgt

SEQ ID NO: 352828 - DNA, 15 bp, Homo sapiens
tcctgactttaatcg

SEQ ID NO: 352829 - DNA, 15 bp, Homo sapiens
ttcctgactttaatc

SEQ ID NO: 352830 - DNA, 15 bp, Homo sapiens
tttcctgactttaat

SEQ ID NO: 352831 - DNA, 15 bp, Homo sapiens
ttttcctgactttaa

SEQ ID NO: 352832 - DNA, 15 bp, Homo sapiens
cttttcctgacttta

SEQ ID NO: 352833 - DNA, 15 bp, Homo sapiens
acttttcctgacttt

SEQ ID NO: 352834 - DNA, 15 bp, Homo sapiens
tacttttcctgactt

SEQ ID NO: 352835 - DNA, 15 bp, Homo sapiens
ttacttttcctgact

SEQ ID NO: 352836 - DNA, 15 bp, Homo sapiens
tttacttttcctgac

SEQ ID NO: 352837 - DNA, 15 bp, Homo sapiens
ctttacttttcctga

SEQ ID NO: 352838 - DNA, 15 bp, Homo sapiens
actttacttttcctg

SEQ ID NO: 352839 - DNA, 15 bp, Homo sapiens
cactttacttttcct

SEQ ID NO: 352840 - DNA, 15 bp, Homo sapiens
ccactttacttttcc

SEQ ID NO: 352841 - DNA, 15 bp, Homo sapiens
tccactttacttttc

SEQ ID NO: 352842 - DNA, 15 bp, Homo sapiens
gtccactttactttt

SEQ ID NO: 352843 - DNA, 15 bp, Homo sapiens
tgtccactttacttt

SEQ ID NO: 352844 - DNA, 15 bp, Homo sapiens
atgtccactttactt

SEQ ID NO: 352845 - DNA, 15 bp, Homo sapiens
gatgtccactttact

SEQ ID NO: 352846 - DNA, 15 bp, Homo sapiens
cgatgtccactttac

SEQ ID NO: 352847 - DNA, 15 bp, Homo sapiens
gcgatgtccacttta

SEQ ID NO: 352848 - DNA, 15 bp, Homo sapiens
ggcgatgtccacttt

SEQ ID NO: 352849 - DNA, 15 bp, Homo sapiens
aggcgatgtccactt

SEQ ID NO: 352850 - DNA, 15 bp, Homo sapiens
aaggcgatgtccact

SEQ ID NO: 352851 - DNA, 15 bp, Homo sapiens
gaaggcgatgtccac

SEQ ID NO: 352852 - DNA, 15 bp, Homo sapiens
agaaggcgatgtcca

SEQ ID NO: 352853 - DNA, 15 bp, Homo sapiens
gagaaggcgatgtcc

SEQ ID NO: 352854 - DNA, 15 bp, Homo sapiens
agagaaggcgatgtc

SEQ ID NO: 352855 - DNA, 15 bp, Homo sapiens
tagagaaggcgatgt

SEQ ID NO: 352856 - DNA, 15 bp, Homo sapiens
ttagagaaggcgatg

SEQ ID NO: 352857 - DNA, 15 bp, Homo sapiens
attagagaaggcgat

SEQ ID NO: 352858 - DNA, 15 bp, Homo sapiens
gattagagaaggcga

SEQ ID NO: 352859 - DNA, 15 bp, Homo sapiens
ggattagagaaggcg

SEQ ID NO: 352860 - DNA, 15 bp, Homo sapiens
gggattagagaaggc

SEQ ID NO: 352861 - DNA, 15 bp, Homo sapiens
cgggattagagaagg

SEQ ID NO: 352862 - DNA, 15 bp, Homo sapiens
tcgggattagagaag

SEQ ID NO: 352863 - DNA, 15 bp, Homo sapiens
ttcgggattagagaa

SEQ ID NO: 352864 - DNA, 15 bp, Homo sapiens
attcgggattagaga

SEQ ID NO: 352865 - DNA, 15 bp, Homo sapiens
gattcgggattagag

SEQ ID NO: 352866 - DNA, 15 bp, Homo sapiens
ggattcgggattaga

SEQ ID NO: 352867 - DNA, 15 bp, Homo sapiens
tggattcgggattag

SEQ ID NO: 352868 - DNA, 15 bp, Homo sapiens
ctggattcgggatta

SEQ ID NO: 352869 - DNA, 15 bp, Homo sapiens
tctggattcgggatt

SEQ ID NO: 352870 - DNA, 15 bp, Homo sapiens
gtctggattcgggat

SEQ ID NO: 352871 - DNA, 15 bp, Homo sapiens
agtctggattcggga

SEQ ID NO: 352872 - DNA, 15 bp, Homo sapiens
gagtctggattcggg

SEQ ID NO: 352873 - DNA, 15 bp, Homo sapiens
cgagtctggattcgg

SEQ ID NO: 352874 - DNA, 15 bp, Homo sapiens
ccgagtctggattcg

SEQ ID NO: 352875 - DNA, 15 bp, Homo sapiens
gccgagtctggattc

SEQ ID NO: 352876 - DNA, 15 bp, Homo sapiens
ggccgagtctggatt

SEQ ID NO: 352877 - DNA, 15 bp, Homo sapiens
aggccgagtctggat

SEQ ID NO: 352878 - DNA, 15 bp, Homo sapiens
caggccgagtctgga

SEQ ID NO: 352879 - DNA, 15 bp, Homo sapiens
acaggccgagtctgg

SEQ ID NO: 352880 - DNA, 15 bp, Homo sapiens
gacaggccgagtctg

SEQ ID NO: 352881 - DNA, 15 bp, Homo sapiens
cgacaggccgagtct

SEQ ID NO: 352882 - DNA, 15 bp, Homo sapiens
gcgacaggccgagtc

SEQ ID NO: 352883 - DNA, 15 bp, Homo sapiens
ggcgacaggccgagt

SEQ ID NO: 352884 - DNA, 15 bp, Homo sapiens
gggcgacaggccgag

SEQ ID NO: 352885 - DNA, 15 bp, Homo sapiens
ggggcgacaggccga

SEQ ID NO: 352886 - DNA, 15 bp, Homo sapiens
gggggcgacaggccg

SEQ ID NO: 352887 - DNA, 15 bp, Homo sapiens
tgggggcgacaggcc

SEQ ID NO: 352888 - DNA, 15 bp, Homo sapiens
atgggggcgacaggc

SEQ ID NO: 352889 - DNA, 15 bp, Homo sapiens
catgggggcgacagg

SEQ ID NO: 352890 - DNA, 15 bp, Homo sapiens
gcatgggggcgacag

SEQ ID NO: 352891 - DNA, 15 bp, Homo sapiens
agcatgggggcgaca

SEQ ID NO: 352892 - DNA, 15 bp, Homo sapiens
gagcatgggggcgac

SEQ ID NO: 352893 - DNA, 15 bp, Homo sapiens
ggagcatgggggcga

SEQ ID NO: 352894 - DNA, 15 bp, Homo sapiens
tggagcatgggggcg

SEQ ID NO: 352895 - DNA, 15 bp, Homo sapiens
ttggagcatgggggc

SEQ ID NO: 352896 - DNA, 15 bp, Homo sapiens
attggagcatggggg

SEQ ID NO: 352897 - DNA, 15 bp, Homo sapiens
aattggagcatgggg

SEQ ID NO: 352898 - DNA, 15 bp, Homo sapiens
caattggagcatggg

SEQ ID NO: 352899 - DNA, 15 bp, Homo sapiens
acaattggagcatgg

SEQ ID NO: 352900 - DNA, 15 bp, Homo sapiens
aacaattggagcatg

SEQ ID NO: 352901 - DNA, 15 bp, Homo sapiens
gaacaattggagcat

SEQ ID NO: 352902 - DNA, 15 bp, Homo sapiens
ggaacaattggagca

SEQ ID NO: 352903 - DNA, 15 bp, Homo sapiens
aggaacaattggagc

SEQ ID NO: 352904 - DNA, 15 bp, Homo sapiens
caggaacaattggag

SEQ ID NO: 352905 - DNA, 15 bp, Homo sapiens
acaggaacaattgga

SEQ ID NO: 352906 - DNA, 15 bp, Homo sapiens
aacaggaacaattgg

SEQ ID NO: 352907 - DNA, 15 bp, Homo sapiens
aaacaggaacaattg

SEQ ID NO: 352908 - DNA, 15 bp, Homo sapiens
gaaacaggaacaatt

SEQ ID NO: 352909 - DNA, 15 bp, Homo sapiens
agaaacaggaacaat

SEQ ID NO: 352910 - DNA, 15 bp, Homo sapiens
gagaaacaggaacaa

SEQ ID NO: 352911 - DNA, 15 bp, Homo sapiens
ggagaaacaggaaca

SEQ ID NO: 352912 - DNA, 15 bp, Homo sapiens
aggagaaacaggaac

SEQ ID NO: 352913 - DNA, 15 bp, Homo sapiens
caggagaaacaggaa

SEQ ID NO: 352914 - DNA, 15 bp, Homo sapiens
ccaggagaaacagga

SEQ ID NO: 352915 - DNA, 15 bp, Homo sapiens
accaggagaaacagg

SEQ ID NO: 352916 - DNA, 15 bp, Homo sapiens
gaccaggagaaacag

SEQ ID NO: 352917 - DNA, 15 bp, Homo sapiens
ggaccaggagaaaca

SEQ ID NO: 352918 - DNA, 15 bp, Homo sapiens
cggaccaggagaaac

SEQ ID NO: 352919 - DNA, 15 bp, Homo sapiens
ccggaccaggagaaa

SEQ ID NO: 352920 - DNA, 15 bp, Homo sapiens
cccggaccaggagaa

SEQ ID NO: 352921 - DNA, 15 bp, Homo sapiens
tcccggaccaggaga

SEQ ID NO: 352922 - DNA, 15 bp, Homo sapiens
atcccggaccaggag

SEQ ID NO: 352923 - DNA, 15 bp, Homo sapiens
gatcccggaccagga

SEQ ID NO: 352924 - DNA, 15 bp, Homo sapiens
ggatcccggaccagg

SEQ ID NO: 352925 - DNA, 15 bp, Homo sapiens
gggatcccggaccag

SEQ ID NO: 352926 - DNA, 15 bp, Homo sapiens
tgggatcccggacca

SEQ ID NO: 352927 - DNA, 15 bp, Homo sapiens
atgggatcccggacc

SEQ ID NO: 352928 - DNA, 15 bp, Homo sapiens
catgggatcccggac

SEQ ID NO: 352929 - DNA, 15 bp, Homo sapiens
gcatgggatcccgga

SEQ ID NO: 352930 - DNA, 15 bp, Homo sapiens
agcatgggatcccgg

SEQ ID NO: 352931 - DNA, 15 bp, Homo sapiens
cagcatgggatcccg

SEQ ID NO: 352932 - DNA, 15 bp, Homo sapiens
ccagcatgggatccc

SEQ ID NO: 352933 - DNA, 15 bp, Homo sapiens
cccagcatgggatcc

SEQ ID NO: 352934 - DNA, 15 bp, Homo sapiens
acccagcatgggatc

SEQ ID NO: 352935 - DNA, 15 bp, Homo sapiens
gacccagcatgggat

SEQ ID NO: 352936 - DNA, 15 bp, Homo sapiens
agacccagcatggga

SEQ ID NO: 352937 - DNA, 15 bp, Homo sapiens
aagacccagcatggg

SEQ ID NO: 352938 - DNA, 15 bp, Homo sapiens
caagacccagcatgg

SEQ ID NO: 352939 - DNA, 15 bp, Homo sapiens
acaagacccagcatg

SEQ ID NO: 352940 - DNA, 15 bp, Homo sapiens
gacaagacccagcat

SEQ ID NO: 352941 - DNA, 15 bp, Homo sapiens
agacaagacccagca

SEQ ID NO: 352942 - DNA, 15 bp, Homo sapiens
gagacaagacccagc

SEQ ID NO: 352943 - DNA, 15 bp, Homo sapiens
agagacaagacccag

SEQ ID NO: 352944 - DNA, 15 bp, Homo sapiens
gagagacaagaccca

SEQ ID NO: 352945 - DNA, 15 bp, Homo sapiens
cgagagacaagaccc

SEQ ID NO: 352946 - DNA, 15 bp, Homo sapiens
tcgagagacaagacc

SEQ ID NO: 352947 - DNA, 15 bp, Homo sapiens
ctcgagagacaagac

SEQ ID NO: 352948 - DNA, 15 bp, Homo sapiens
gctcgagagacaaga

SEQ ID NO: 352949 - DNA, 15 bp, Homo sapiens
ggctcgagagacaag

SEQ ID NO: 352950 - DNA, 15 bp, Homo sapiens
gggctcgagagacaa

SEQ ID NO: 352951 - DNA, 15 bp, Homo sapiens
ggggctcgagagaca

SEQ ID NO: 352952 - DNA, 15 bp, Homo sapiens
aggggctcgagagac

SEQ ID NO: 352953 - DNA, 15 bp, Homo sapiens
aaggggctcgagaga

SEQ ID NO: 352954 - DNA, 15 bp, Homo sapiens
gaaggggctcgagag

SEQ ID NO: 352955 - DNA, 15 bp, Homo sapiens
cgaaggggctcgaga

SEQ ID NO: 352956 - DNA, 15 bp, Homo sapiens
acgaaggggctcgag

SEQ ID NO: 352957 - DNA, 15 bp, Homo sapiens
gacgaaggggctcga

SEQ ID NO: 352958 - DNA, 15 bp, Homo sapiens
agacgaaggggctcg

SEQ ID NO: 352959 - DNA, 15 bp, Homo sapiens
cagacgaaggggctc

SEQ ID NO: 352960 - DNA, 15 bp, Homo sapiens
acagacgaaggggct

SEQ ID NO: 352961 - DNA, 15 bp, Homo sapiens
gacagacgaaggggc

SEQ ID NO: 352962 - DNA, 15 bp, Homo sapiens
agacagacgaagggg

SEQ ID NO: 352963 - DNA, 15 bp, Homo sapiens
cagacagacgaaggg

SEQ ID NO: 352964 - DNA, 15 bp, Homo sapiens
ccagacagacgaagg

SEQ ID NO: 352965 - DNA, 15 bp, Homo sapiens
cccagacagacgaag

SEQ ID NO: 352966 - DNA, 15 bp, Homo sapiens
tcccagacagacgaa

SEQ ID NO: 352967 - DNA, 15 bp, Homo sapiens
gtcccagacagacga

SEQ ID NO: 352968 - DNA, 15 bp, Homo sapiens
tgtcccagacagacg

SEQ ID NO: 352969 - DNA, 15 bp, Homo sapiens
ctgtcccagacagac

SEQ ID NO: 352970 - DNA, 15 bp, Homo sapiens
actgtcccagacaga

SEQ ID NO: 352971 - DNA, 15 bp, Homo sapiens
aactgtcccagacag

SEQ ID NO: 352972 - DNA, 15 bp, Homo sapiens
aaactgtcccagaca

SEQ ID NO: 352973 - DNA, 15 bp, Homo sapiens
gaaactgtcccagac

SEQ ID NO: 352974 - DNA, 15 bp, Homo sapiens
ggaaactgtcccaga

SEQ ID NO: 352975 - DNA, 15 bp, Homo sapiens
aggaaactgtcccag

SEQ ID NO: 352976 - DNA, 15 bp, Homo sapiens
caggaaactgtccca

SEQ ID NO: 352977 - DNA, 15 bp, Homo sapiens
gcaggaaactgtccc

SEQ ID NO: 352978 - DNA, 15 bp, Homo sapiens
agcaggaaactgtcc

SEQ ID NO: 352979 - DNA, 15 bp, Homo sapiens
aagcaggaaactgtc

SEQ ID NO: 352980 - DNA, 15 bp, Homo sapiens
aaagcaggaaactgt

SEQ ID NO: 352981 - DNA, 15 bp, Homo sapiens
caaagcaggaaactg

SEQ ID NO: 352982 - DNA, 15 bp, Homo sapiens
acaaagcaggaaact

SEQ ID NO: 352983 - DNA, 15 bp, Homo sapiens
aacaaagcaggaaac

SEQ ID NO: 352984 - DNA, 15 bp, Homo sapiens
aaacaaagcaggaaa

SEQ ID NO: 352985 - DNA, 15 bp, Homo sapiens
aaaacaaagcaggaa

SEQ ID NO: 352986 - DNA, 15 bp, Homo sapiens
gaaaacaaagcagga

SEQ ID NO: 352987 - DNA, 15 bp, Homo sapiens
agaaaacaaagcagg

SEQ ID NO: 352988 - DNA, 15 bp, Homo sapiens
cagaaaacaaagcag

SEQ ID NO: 352989 - DNA, 15 bp, Homo sapiens
acagaaaacaaagca

SEQ ID NO: 352990 - DNA, 15 bp, Homo sapiens
cacagaaaacaaagc

SEQ ID NO: 352991 - DNA, 15 bp, Homo sapiens
gcacagaaaacaaag

SEQ ID NO: 352992 - DNA, 15 bp, Homo sapiens
agcacagaaaacaaa

SEQ ID NO: 352993 - DNA, 15 bp, Homo sapiens
gagcacagaaaacaa

SEQ ID NO: 352994 - DNA, 15 bp, Homo sapiens
ggagcacagaaaaca

SEQ ID NO: 352995 - DNA, 15 bp, Homo sapiens
cggagcacagaaaac

SEQ ID NO: 352996 - DNA, 15 bp, Homo sapiens
ccggagcacagaaaa

SEQ ID NO: 352997 - DNA, 15 bp, Homo sapiens
cccggagcacagaaa

SEQ ID NO: 352998 - DNA, 15 bp, Homo sapiens
gcccggagcacagaa

SEQ ID NO: 352999 - DNA, 15 bp, Homo sapiens
tgcccggagcacaga

SEQ ID NO: 353000 - DNA, 15 bp, Homo sapiens
gtgcccggagcacag

SEQ ID NO: 353001 - DNA, 15 bp, Homo sapiens
ggtgcccggagcaca

SEQ ID NO: 353002 - DNA, 15 bp, Homo sapiens
cggtgcccggagcac

SEQ ID NO: 353003 - DNA, 15 bp, Homo sapiens
tcggtgcccggagca

SEQ ID NO: 353004 - DNA, 15 bp, Homo sapiens
ctcggtgcccggagc

SEQ ID NO: 353005 - DNA, 15 bp, Homo sapiens
gctcggtgcccggag

SEQ ID NO: 353006 - DNA, 15 bp, Homo sapiens
tgctcggtgcccgga

SEQ ID NO: 353007 - DNA, 15 bp, Homo sapiens
ctgctcggtgcccgg

SEQ ID NO: 353008 - DNA, 15 bp, Homo sapiens
gctgctcggtgcccg

SEQ ID NO: 353009 - DNA, 15 bp, Homo sapiens
tgctgctcggtgccc

SEQ ID NO: 353010 - DNA, 15 bp, Homo sapiens
atgctgctcggtgcc

SEQ ID NO: 353011 - DNA, 15 bp, Homo sapiens
gatgctgctcggtgc

SEQ ID NO: 353012 - DNA, 15 bp, Homo sapiens
ggatgctgctcggtg

SEQ ID NO: 353013 - DNA, 15 bp, Homo sapiens
gggatgctgctcggt

SEQ ID NO: 353014 - DNA, 15 bp, Homo sapiens
tgggatgctgctcgg

SEQ ID NO: 353015 - DNA, 15 bp, Homo sapiens
ctgggatgctgctcg

SEQ ID NO: 353016 - DNA, 15 bp, Homo sapiens
gctgggatgctgctc

SEQ ID NO: 353017 - DNA, 15 bp, Homo sapiens
ggctgggatgctgct

SEQ ID NO: 353018 - DNA, 15 bp, Homo sapiens
gggctgggatgctgc

SEQ ID NO: 353019 - DNA, 15 bp, Homo sapiens
cgggctgggatgctg

SEQ ID NO: 353020 - DNA, 15 bp, Homo sapiens
acgggctgggatgct

SEQ ID NO: 353021 - DNA, 15 bp, Homo sapiens
aacgggctgggatgc

SEQ ID NO: 353022 - DNA, 15 bp, Homo sapiens
taacgggctgggatg

SEQ ID NO: 353023 - DNA, 15 bp, Homo sapiens
ataacgggctgggat

SEQ ID NO: 353024 - DNA, 15 bp, Homo sapiens
aataacgggctggga

SEQ ID NO: 353025 - DNA, 15 bp, Homo sapiens
gaataacgggctggg

SEQ ID NO: 353026 - DNA, 15 bp, Homo sapiens
tgaataacgggctgg

SEQ ID NO: 353027 - DNA, 15 bp, Homo sapiens
atgaataacgggctg

SEQ ID NO: 353028 - DNA, 15 bp, Homo sapiens
catgaataacgggct

SEQ ID NO: 353029 - DNA, 15 bp, Homo sapiens
ccatgaataacgggc

SEQ ID NO: 353030 - DNA, 15 bp, Homo sapiens
tccatgaataacggg

SEQ ID NO: 353031 - DNA, 15 bp, Homo sapiens
ttccatgaataacgg

SEQ ID NO: 353032 - DNA, 15 bp, Homo sapiens
cttccatgaataacg

SEQ ID NO: 353033 - DNA, 15 bp, Homo sapiens
ccttccatgaataac

SEQ ID NO: 353034 - DNA, 15 bp, Homo sapiens
gccttccatgaataa

SEQ ID NO: 353035 - DNA, 15 bp, Homo sapiens
agccttccatgaata

SEQ ID NO: 353036 - DNA, 15 bp, Homo sapiens
tagccttccatgaat

SEQ ID NO: 353037 - DNA, 15 bp, Homo sapiens
gtagccttccatgaa

SEQ ID NO: 353038 - DNA, 15 bp, Homo sapiens
agtagccttccatga

SEQ ID NO: 353039 - DNA, 15 bp, Homo sapiens
gagtagccttccatg

SEQ ID NO: 353040 - DNA, 15 bp, Homo sapiens
cgagtagccttccat

SEQ ID NO: 353041 - DNA, 15 bp, Homo sapiens
acgagtagccttcca

SEQ ID NO: 353042 - DNA, 15 bp, Homo sapiens
aacgagtagccttcc

SEQ ID NO: 353043 - DNA, 15 bp, Homo sapiens
gaacgagtagccttc

SEQ ID NO: 353044 - DNA, 15 bp, Homo sapiens
ggaacgagtagcctt

SEQ ID NO: 353045 - DNA, 15 bp, Homo sapiens
cggaacgagtagcct

SEQ ID NO: 353046 - DNA, 15 bp, Homo sapiens
acggaacgagtagcc

SEQ ID NO: 353047 - DNA, 15 bp, Homo sapiens
cacggaacgagtagc

SEQ ID NO: 353048 - DNA, 15 bp, Homo sapiens
acacggaacgagtag

SEQ ID NO: 353049 - DNA, 15 bp, Homo sapiens
gacacggaacgagta

SEQ ID NO: 353050 - DNA, 15 bp, Homo sapiens
cgacacggaacgagt

SEQ ID NO: 353051 - DNA, 15 bp, Homo sapiens
gcgacacggaacgag

SEQ ID NO: 353052 - DNA, 15 bp, Homo sapiens
agcgacacggaacga

SEQ ID NO: 353053 - DNA, 15 bp, Homo sapiens
cagcgacacggaacg

SEQ ID NO: 353054 - DNA, 15 bp, Homo sapiens
ccagcgacacggaac

SEQ ID NO: 353055 - DNA, 15 bp, Homo sapiens
cccagcgacacggaa

SEQ ID NO: 353056 - DNA, 15 bp, Homo sapiens
acccagcgacacgga

SEQ ID NO: 353057 - DNA, 15 bp, Homo sapiens
cacccagcgacacgg

SEQ ID NO: 353058 - DNA, 15 bp, Homo sapiens
gcacccagcgacacg

SEQ ID NO: 353059 - DNA, 15 bp, Homo sapiens
agcacccagcgacac

SEQ ID NO: 353060 - DNA, 15 bp, Homo sapiens
tagcacccagcgaca

SEQ ID NO: 353061 - DNA, 15 bp, Homo sapiens
ctagcacccagcgac

SEQ ID NO: 353062 - DNA, 15 bp, Homo sapiens
actagcacccagcga

SEQ ID NO: 353063 - DNA, 15 bp, Homo sapiens
aactagcacccagcg

SEQ ID NO: 353064 - DNA, 15 bp, Homo sapiens
gaactagcacccagc

SEQ ID NO: 353065 - DNA, 15 bp, Homo sapiens
agaactagcacccag

SEQ ID NO: 353066 - DNA, 15 bp, Homo sapiens
cagaactagcaccca

SEQ ID NO: 353067 - DNA, 15 bp, Homo sapiens
ccagaactagcaccc

SEQ ID NO: 353068 - DNA, 15 bp, Homo sapiens
accagaactagcacc

SEQ ID NO: 353069 - DNA, 15 bp, Homo sapiens
gaccagaactagcac

SEQ ID NO: 353070 - DNA, 15 bp, Homo sapiens
tgaccagaactagca

SEQ ID NO: 353071 - DNA, 15 bp, Homo sapiens
gtgaccagaactagc

SEQ ID NO: 353072 - DNA, 15 bp, Homo sapiens
ggtgaccagaactag

SEQ ID NO: 353073 - DNA, 15 bp, Homo sapiens
aggtgaccagaacta

SEQ ID NO: 353074 - DNA, 15 bp, Homo sapiens
caggtgaccagaact

SEQ ID NO: 353075 - DNA, 15 bp, Homo sapiens
acaggtgaccagaac

SEQ ID NO: 353076 - DNA, 15 bp, Homo sapiens
gacaggtgaccagaa

SEQ ID NO: 353077 - DNA, 15 bp, Homo sapiens
ggacaggtgaccaga

SEQ ID NO: 353078 - DNA, 15 bp, Homo sapiens
tggacaggtgaccag

SEQ ID NO: 353079 - DNA, 15 bp, Homo sapiens
gtggacaggtgacca

SEQ ID NO: 353080 - DNA, 15 bp, Homo sapiens
ggtggacaggtgacc

SEQ ID NO: 353081 - DNA, 15 bp, Homo sapiens
gggtggacaggtgac

SEQ ID NO: 353082 - DNA, 15 bp, Homo sapiens
ggggtggacaggtga

SEQ ID NO: 353083 - DNA, 15 bp, Homo sapiens
gggggtggacaggtg

SEQ ID NO: 353084 - DNA, 15 bp, Homo sapiens
ggggggtggacaggt

SEQ ID NO: 353085 - DNA, 15 bp, Homo sapiens
tggggggtggacagg

SEQ ID NO: 353086 - DNA, 15 bp, Homo sapiens
gtggggggtggacag

SEQ ID NO: 353087 - DNA, 15 bp, Homo sapiens
ggtggggggtggaca

SEQ ID NO: 353088 - DNA, 15 bp, Homo sapiens
aggtggggggtggac

SEQ ID NO: 353089 - DNA, 15 bp, Homo sapiens
gaggtggggggtgga

SEQ ID NO: 353090 - DNA, 15 bp, Homo sapiens
ggaggtggggggtgg

SEQ ID NO: 353091 - DNA, 15 bp, Homo sapiens
gggaggtggggggtg

SEQ ID NO: 353092 - DNA, 15 bp, Homo sapiens
agggaggtggggggt

SEQ ID NO: 353093 - DNA, 15 bp, Homo sapiens
cagggaggtgggggg

SEQ ID NO: 353094 - DNA, 15 bp, Homo sapiens
ccagggaggtggggg

SEQ ID NO: 353095 - DNA, 15 bp, Homo sapiens
cccagggaggtgggg

SEQ ID NO: 353096 - DNA, 15 bp, Homo sapiens
tcccagggaggtggg

SEQ ID NO: 353097 - DNA, 15 bp, Homo sapiens
ctcccagggaggtgg

SEQ ID NO: 353098 - DNA, 15 bp, Homo sapiens
tctcccagggaggtg

SEQ ID NO: 353099 - DNA, 15 bp, Homo sapiens
ttctcccagggaggt

SEQ ID NO: 353100 - DNA, 15 bp, Homo sapiens
gttctcccagggagg

SEQ ID NO: 353101 - DNA, 15 bp, Homo sapiens
cgttctcccagggag

SEQ ID NO: 353102 - DNA, 15 bp, Homo sapiens
acgttctcccaggga

SEQ ID NO: 353103 - DNA, 15 bp, Homo sapiens
gacgttctcccaggg

SEQ ID NO: 353104 - DNA, 15 bp, Homo sapiens
tgacgttctcccagg

SEQ ID NO: 353105 - DNA, 15 bp, Homo sapiens
gtgacgttctcccag

SEQ ID NO: 353106 - DNA, 15 bp, Homo sapiens
ggtgacgttctccca

SEQ ID NO: 353107 - DNA, 15 bp, Homo sapiens
gggtgacgttctccc

SEQ ID NO: 353108 - DNA, 15 bp, Homo sapiens
agggtgacgttctcc

SEQ ID NO: 353109 - DNA, 15 bp, Homo sapiens
tagggtgacgttctc

SEQ ID NO: 353110 - DNA, 15 bp, Homo sapiens
ctagggtgacgttct

SEQ ID NO: 353111 - DNA, 15 bp, Homo sapiens
tctagggtgacgttc

SEQ ID NO: 353112 - DNA, 15 bp, Homo sapiens
ttctagggtgacgtt

SEQ ID NO: 353113 - DNA, 15 bp, Homo sapiens
tttctagggtgacgt

SEQ ID NO: 353114 - DNA, 15 bp, Homo sapiens
gtttctagggtgacg

SEQ ID NO: 353115 - DNA, 15 bp, Homo sapiens
tgtttctagggtgac

SEQ ID NO: 353116 - DNA, 15 bp, Homo sapiens
ctgtttctagggtga

SEQ ID NO: 353117 - DNA, 15 bp, Homo sapiens
actgtttctagggtg

SEQ ID NO: 353118 - DNA, 15 bp, Homo sapiens
cactgtttctagggt

SEQ ID NO: 353119 - DNA, 15 bp, Homo sapiens
gcactgtttctaggg

SEQ ID NO: 353120 - DNA, 15 bp, Homo sapiens
cgcactgtttctagg

SEQ ID NO: 353121 - DNA, 15 bp, Homo sapiens
tcgcactgtttctag

SEQ ID NO: 353122 - DNA, 15 bp, Homo sapiens
ctcgcactgtttcta

SEQ ID NO: 353123 - DNA, 15 bp, Homo sapiens
tctcgcactgtttct

SEQ ID NO: 353124 - DNA, 15 bp, Homo sapiens
ctctcgcactgtttc

SEQ ID NO: 353125 - DNA, 15 bp, Homo sapiens
actctcgcactgttt

SEQ ID NO: 353126 - DNA, 15 bp, Homo sapiens
gactctcgcactgtt

SEQ ID NO: 353127 - DNA, 15 bp, Homo sapiens
tgactctcgcactgt

SEQ ID NO: 353128 - DNA, 15 bp, Homo sapiens
gtgactctcgcactg

SEQ ID NO: 353129 - DNA, 15 bp, Homo sapiens
ggtgactctcgcact

SEQ ID NO: 353130 - DNA, 15 bp, Homo sapiens
gggtgactctcgcac

SEQ ID NO: 353131 - DNA, 15 bp, Homo sapiens
tgggtgactctcgca

SEQ ID NO: 353132 - DNA, 15 bp, Homo sapiens
atgggtgactctcgc

SEQ ID NO: 353133 - DNA, 15 bp, Homo sapiens
catgggtgactctcg

SEQ ID NO: 353134 - DNA, 15 bp, Homo sapiens
ccatgggtgactctc

SEQ ID NO: 353135 - DNA, 15 bp, Homo sapiens
cccatgggtgactct

SEQ ID NO: 353136 - DNA, 15 bp, Homo sapiens
tcccatgggtgactc

SEQ ID NO: 353137 - DNA, 15 bp, Homo sapiens
ctcccatgggtgact

SEQ ID NO: 353138 - DNA, 15 bp, Homo sapiens
gctcccatgggtgac

SEQ ID NO: 353139 - DNA, 15 bp, Homo sapiens
agctcccatgggtga

SEQ ID NO: 353140 - DNA, 15 bp, Homo sapiens
gagctcccatgggtg

SEQ ID NO: 353141 - DNA, 15 bp, Homo sapiens
tgagctcccatgggt

SEQ ID NO: 353142 - DNA, 15 bp, Homo sapiens
gtgagctcccatggg

SEQ ID NO: 353143 - DNA, 15 bp, Homo sapiens
ggtgagctcccatgg

SEQ ID NO: 353144 - DNA, 15 bp, Homo sapiens
aggtgagctcccatg

SEQ ID NO: 353145 - DNA, 15 bp, Homo sapiens
caggtgagctcccat

SEQ ID NO: 353146 - DNA, 15 bp, Homo sapiens
ccaggtgagctccca

SEQ ID NO: 353147 - DNA, 15 bp, Homo sapiens
accaggtgagctccc

SEQ ID NO: 353148 - DNA, 15 bp, Homo sapiens
gaccaggtgagctcc

SEQ ID NO: 353149 - DNA, 15 bp, Homo sapiens
ggaccaggtgagctc

SEQ ID NO: 353150 - DNA, 15 bp, Homo sapiens
gggaccaggtgagct

SEQ ID NO: 353151 - DNA, 15 bp, Homo sapiens
tgggaccaggtgagc

SEQ ID NO: 353152 - DNA, 15 bp, Homo sapiens
atgggaccaggtgag

SEQ ID NO: 353153 - DNA, 15 bp, Homo sapiens
gatgggaccaggtga

SEQ ID NO: 353154 - DNA, 15 bp, Homo sapiens
ggatgggaccaggtg

SEQ ID NO: 353155 - DNA, 15 bp, Homo sapiens
aggatgggaccaggt

SEQ ID NO: 353156 - DNA, 15 bp, Homo sapiens
gaggatgggaccagg

SEQ ID NO: 353157 - DNA, 15 bp, Homo sapiens
ggaggatgggaccag

SEQ ID NO: 353158 - DNA, 15 bp, Homo sapiens
gggaggatgggacca

SEQ ID NO: 353159 - DNA, 15 bp, Homo sapiens
ggggaggatgggacc

SEQ ID NO: 353160 - DNA, 15 bp, Homo sapiens
gggggaggatgggac

SEQ ID NO: 353161 - DNA, 15 bp, Homo sapiens
agggggaggatggga

SEQ ID NO: 353162 - DNA, 15 bp, Homo sapiens
aagggggaggatggg

SEQ ID NO: 353163 - DNA, 15 bp, Homo sapiens
gaagggggaggatgg

SEQ ID NO: 353164 - DNA, 15 bp, Homo sapiens
ggaagggggaggatg

SEQ ID NO: 353165 - DNA, 15 bp, Homo sapiens
aggaagggggaggat

SEQ ID NO: 353166 - DNA, 15 bp, Homo sapiens
gaggaagggggagga

SEQ ID NO: 353167 - DNA, 15 bp, Homo sapiens
ggaggaagggggagg

SEQ ID NO: 353168 - DNA, 15 bp, Homo sapiens
gggaggaagggggag

SEQ ID NO: 353169 - DNA, 15 bp, Homo sapiens
agggaggaaggggga

SEQ ID NO: 353170 - DNA, 15 bp, Homo sapiens
cagggaggaaggggg

SEQ ID NO: 353171 - DNA, 15 bp, Homo sapiens
tcagggaggaagggg

SEQ ID NO: 353172 - DNA, 15 bp, Homo sapiens
gtcagggaggaaggg

SEQ ID NO: 353173 - DNA, 15 bp, Homo sapiens
tgtcagggaggaagg

SEQ ID NO: 353174 - DNA, 15 bp, Homo sapiens
gtgtcagggaggaag

SEQ ID NO: 353175 - DNA, 15 bp, Homo sapiens
tgtgtcagggaggaa

SEQ ID NO: 353176 - DNA, 15 bp, Homo sapiens
ctgtgtcagggagga

SEQ ID NO: 353177 - DNA, 15 bp, Homo sapiens
cctgtgtcagggagg

SEQ ID NO: 353178 - DNA, 15 bp, Homo sapiens
gcctgtgtcagggag

SEQ ID NO: 353179 - DNA, 15 bp, Homo sapiens
tgcctgtgtcaggga

SEQ ID NO: 353180 - DNA, 15 bp, Homo sapiens
ctgcctgtgtcaggg

SEQ ID NO: 353181 - DNA, 15 bp, Homo sapiens
actgcctgtgtcagg

SEQ ID NO: 353182 - DNA, 15 bp, Homo sapiens
tactgcctgtgtcag

SEQ ID NO: 353183 - DNA, 15 bp, Homo sapiens
gtactgcctgtgtca

SEQ ID NO: 353184 - DNA, 15 bp, Homo sapiens
cgtactgcctgtgtc

SEQ ID NO: 353185 - DNA, 15 bp, Homo sapiens
acgtactgcctgtgt

SEQ ID NO: 353186 - DNA, 15 bp, Homo sapiens
gacgtactgcctgtg

SEQ ID NO: 353187 - DNA, 15 bp, Homo sapiens
ggacgtactgcctgt

SEQ ID NO: 353188 - DNA, 15 bp, Homo sapiens
cggacgtactgcctg

SEQ ID NO: 353189 - DNA, 15 bp, Homo sapiens
tcggacgtactgcct

SEQ ID NO: 353190 - DNA, 15 bp, Homo sapiens
ctcggacgtactgcc

SEQ ID NO: 353191 - DNA, 15 bp, Homo sapiens
tctcggacgtactgc

SEQ ID NO: 353192 - DNA, 15 bp, Homo sapiens
gtctcggacgtactg

SEQ ID NO: 353193 - DNA, 15 bp, Homo sapiens
tgtctcggacgtact

SEQ ID NO: 353194 - DNA, 15 bp, Homo sapiens
gtgtctcggacgtac

SEQ ID NO: 353195 - DNA, 15 bp, Homo sapiens
tgtgtctcggacgta

SEQ ID NO: 353196 - DNA, 15 bp, Homo sapiens
ctgtgtctcggacgt

SEQ ID NO: 353197 - DNA, 15 bp, Homo sapiens
actgtgtctcggacg

SEQ ID NO: 353198 - DNA, 15 bp, Homo sapiens
gactgtgtctcggac

SEQ ID NO: 353199 - DNA, 15 bp, Homo sapiens
cgactgtgtctcgga

SEQ ID NO: 353200 - DNA, 15 bp, Homo sapiens
acgactgtgtctcgg

SEQ ID NO: 353201 - DNA, 15 bp, Homo sapiens
cacgactgtgtctcg

SEQ ID NO: 353202 - DNA, 15 bp, Homo sapiens
ccacgactgtgtctc

SEQ ID NO: 353203 - DNA, 15 bp, Homo sapiens
cccacgactgtgtct

SEQ ID NO: 353204 - DNA, 15 bp, Homo sapiens
gcccacgactgtgtc

SEQ ID NO: 353205 - DNA, 15 bp, Homo sapiens
tgcccacgactgtgt

SEQ ID NO: 353206 - DNA, 15 bp, Homo sapiens
gtgcccacgactgtg

SEQ ID NO: 353207 - DNA, 15 bp, Homo sapiens
ggtgcccacgactgt

SEQ ID NO: 353208 - DNA, 15 bp, Homo sapiens
tggtgcccacgactg

SEQ ID NO: 353209 - DNA, 15 bp, Homo sapiens
atggtgcccacgact

SEQ ID NO: 353210 - DNA, 15 bp, Homo sapiens
catggtgcccacgac

SEQ ID NO: 353211 - DNA, 15 bp, Homo sapiens
ccatggtgcccacga

SEQ ID NO: 353212 - DNA, 15 bp, Homo sapiens
cccatggtgcccacg

SEQ ID NO: 353213 - DNA, 15 bp, Homo sapiens
gcccatggtgcccac

SEQ ID NO: 353214 - DNA, 15 bp, Homo sapiens
ggcccatggtgccca

SEQ ID NO: 353215 - DNA, 15 bp, Homo sapiens
aggcccatggtgccc

SEQ ID NO: 353216 - DNA, 15 bp, Homo sapiens
caggcccatggtgcc

SEQ ID NO: 353217 - DNA, 15 bp, Homo sapiens
tcaggcccatggtgc

SEQ ID NO: 353218 - DNA, 15 bp, Homo sapiens
ttcaggcccatggtg

SEQ ID NO: 353219 - DNA, 15 bp, Homo sapiens
cttcaggcccatggt

SEQ ID NO: 353220 - DNA, 15 bp, Homo sapiens
ccttcaggcccatgg

SEQ ID NO: 353221 - DNA, 15 bp, Homo sapiens
gccttcaggcccatg

SEQ ID NO: 353222 - DNA, 15 bp, Homo sapiens
ggccttcaggcccat

SEQ ID NO: 353223 - DNA, 15 bp, Homo sapiens
tggccttcaggccca

SEQ ID NO: 353224 - DNA, 15 bp, Homo sapiens
gtggccttcaggccc

SEQ ID NO: 353225 - DNA, 15 bp, Homo sapiens
cgtggccttcaggcc

SEQ ID NO: 353226 - DNA, 15 bp, Homo sapiens
ccgtggccttcaggc

SEQ ID NO: 353227 - DNA, 15 bp, Homo sapiens
cccgtggccttcagg

SEQ ID NO: 353228 - DNA, 15 bp, Homo sapiens
gcccgtggccttcag

SEQ ID NO: 353229 - DNA, 15 bp, Homo sapiens
ggcccgtggccttca

SEQ ID NO: 353230 - DNA, 15 bp, Homo sapiens
cggcccgtggccttc

SEQ ID NO: 353231 - DNA, 15 bp, Homo sapiens
ccggcccgtggcctt

SEQ ID NO: 353232 - DNA, 15 bp, Homo sapiens
gccggcccgtggcct

SEQ ID NO: 353233 - DNA, 15 bp, Homo sapiens
agccggcccgtggcc

SEQ ID NO: 353234 - DNA, 15 bp, Homo sapiens
gagccggcccgtggc

SEQ ID NO: 353235 - DNA, 15 bp, Homo sapiens
agagccggcccgtgg

SEQ ID NO: 353236 - DNA, 15 bp, Homo sapiens
cagagccggcccgtg

SEQ ID NO: 353237 - DNA, 15 bp, Homo sapiens
gcagagccggcccgt

SEQ ID NO: 353238 - DNA, 15 bp, Homo sapiens
tgcagagccggcccg

SEQ ID NO: 353239 - DNA, 15 bp, Homo sapiens
gtgcagagccggccc

SEQ ID NO: 353240 - DNA, 15 bp, Homo sapiens
ggtgcagagccggcc

SEQ ID NO: 353241 - DNA, 15 bp, Homo sapiens
cggtgcagagccggc

SEQ ID NO: 353242 - DNA, 15 bp, Homo sapiens
acggtgcagagccgg

SEQ ID NO: 353243 - DNA, 15 bp, Homo sapiens
cacggtgcagagccg

SEQ ID NO: 353244 - DNA, 15 bp, Homo sapiens
ccacggtgcagagcc

SEQ ID NO: 353245 - DNA, 15 bp, Homo sapiens
gccacggtgcagagc

SEQ ID NO: 353246 - DNA, 15 bp, Homo sapiens
agccacggtgcagag

SEQ ID NO: 353247 - DNA, 15 bp, Homo sapiens
tagccacggtgcaga

SEQ ID NO: 353248 - DNA, 15 bp, Homo sapiens
ttagccacggtgcag

SEQ ID NO: 353249 - DNA, 15 bp, Homo sapiens
cttagccacggtgca

SEQ ID NO: 353250 - DNA, 15 bp, Homo sapiens
ccttagccacggtgc

SEQ ID NO: 353251 - DNA, 15 bp, Homo sapiens
gccttagccacggtg

SEQ ID NO: 353252 - DNA, 15 bp, Homo sapiens
tgccttagccacggt

SEQ ID NO: 353253 - DNA, 15 bp, Homo sapiens
ttgccttagccacgg

SEQ ID NO: 353254 - DNA, 15 bp, Homo sapiens
cttgccttagccacg

SEQ ID NO: 353255 - DNA, 15 bp, Homo sapiens
ccttgccttagccac

SEQ ID NO: 353256 - DNA, 15 bp, Homo sapiens
cccttgccttagcca

SEQ ID NO: 353257 - DNA, 15 bp, Homo sapiens
ccccttgccttagcc

SEQ ID NO: 353258 - DNA, 15 bp, Homo sapiens
cccccttgccttagc

SEQ ID NO: 353259 - DNA, 15 bp, Homo sapiens
gcccccttgccttag

SEQ ID NO: 353260 - DNA, 15 bp, Homo sapiens
agcccccttgcctta

SEQ ID NO: 353261 - DNA, 15 bp, Homo sapiens
cagcccccttgcctt

SEQ ID NO: 353262 - DNA, 15 bp, Homo sapiens
gcagcccccttgcct

SEQ ID NO: 353263 - DNA, 15 bp, Homo sapiens
cgcagcccccttgcc

SEQ ID NO: 353264 - DNA, 15 bp, Homo sapiens
tcgcagcccccttgc

SEQ ID NO: 353265 - DNA, 15 bp, Homo sapiens
ctcgcagcccccttg

SEQ ID NO: 353266 - DNA, 15 bp, Homo sapiens
gctcgcagccccctt

SEQ ID NO: 353267 - DNA, 15 bp, Homo sapiens
ggctcgcagccccct

SEQ ID NO: 353268 - DNA, 15 bp, Homo sapiens
aggctcgcagccccc

SEQ ID NO: 353269 - DNA, 15 bp, Homo sapiens
caggctcgcagcccc

SEQ ID NO: 353270 - DNA, 15 bp, Homo sapiens
gcaggctcgcagccc

SEQ ID NO: 353271 - DNA, 15 bp, Homo sapiens
tgcaggctcgcagcc

SEQ ID NO: 353272 - DNA, 15 bp, Homo sapiens
ctgcaggctcgcagc

SEQ ID NO: 353273 - DNA, 15 bp, Homo sapiens
cctgcaggctcgcag

SEQ ID NO: 353274 - DNA, 15 bp, Homo sapiens
acctgcaggctcgca

SEQ ID NO: 353275 - DNA, 15 bp, Homo sapiens
cacctgcaggctcgc

SEQ ID NO: 353276 - DNA, 15 bp, Homo sapiens
tcacctgcaggctcg

SEQ ID NO: 353277 - DNA, 15 bp, Homo sapiens
ctcacctgcaggctc

SEQ ID NO: 353278 - DNA, 15 bp, Homo sapiens
gctcacctgcaggct

SEQ ID NO: 353279 - DNA, 15 bp, Homo sapiens
ggctcacctgcaggc

SEQ ID NO: 353280 - DNA, 15 bp, Homo sapiens
tggctcacctgcagg

SEQ ID NO: 353281 - DNA, 15 bp, Homo sapiens
gtggctcacctgcag

SEQ ID NO: 353282 - DNA, 15 bp, Homo sapiens
ggtggctcacctgca

SEQ ID NO: 353283 - DNA, 15 bp, Homo sapiens
gggtggctcacctgc

SEQ ID NO: 353284 - DNA, 15 bp, Homo sapiens
ggggtggctcacctg

SEQ ID NO: 353285 - DNA, 15 bp, Homo sapiens
gggggtggctcacct

SEQ ID NO: 353286 - DNA, 15 bp, Homo sapiens
tgggggtggctcacc

SEQ ID NO: 353287 - DNA, 15 bp, Homo sapiens
gtgggggtggctcac

SEQ ID NO: 353288 - DNA, 15 bp, Homo sapiens
ggtgggggtggctca

SEQ ID NO: 353289 - DNA, 15 bp, Homo sapiens
gggtgggggtggctc

SEQ ID NO: 353290 - DNA, 15 bp, Homo sapiens
tgggtgggggtggct

SEQ ID NO: 353291 - DNA, 15 bp, Homo sapiens
atgggtgggggtggc

SEQ ID NO: 353292 - DNA, 15 bp, Homo sapiens
catgggtgggggtgg

SEQ ID NO: 353293 - DNA, 15 bp, Homo sapiens
gcatgggtgggggtg

SEQ ID NO: 353294 - DNA, 15 bp, Homo sapiens
ggcatgggtgggggt

SEQ ID NO: 353295 - DNA, 15 bp, Homo sapiens
gggcatgggtggggg

SEQ ID NO: 353296 - DNA, 15 bp, Homo sapiens
agggcatgggtgggg

SEQ ID NO: 353297 - DNA, 15 bp, Homo sapiens
cagggcatgggtggg

SEQ ID NO: 353298 - DNA, 15 bp, Homo sapiens
ccagggcatgggtgg

SEQ ID NO: 353299 - DNA, 15 bp, Homo sapiens
cccagggcatgggtg

SEQ ID NO: 353300 - DNA, 15 bp, Homo sapiens
gcccagggcatgggt

SEQ ID NO: 353301 - DNA, 15 bp, Homo sapiens
agcccagggcatggg

SEQ ID NO: 353302 - DNA, 15 bp, Homo sapiens
gagcccagggcatgg

SEQ ID NO: 353303 - DNA, 15 bp, Homo sapiens
ggagcccagggcatg

SEQ ID NO: 353304 - DNA, 15 bp, Homo sapiens
tggagcccagggcat

SEQ ID NO: 353305 - DNA, 15 bp, Homo sapiens
ctggagcccagggca

SEQ ID NO: 353306 - DNA, 15 bp, Homo sapiens
cctggagcccagggc

SEQ ID NO: 353307 - DNA, 15 bp, Homo sapiens
ccctggagcccaggg

SEQ ID NO: 353308 - DNA, 15 bp, Homo sapiens
cccctggagcccagg

SEQ ID NO: 353309 - DNA, 15 bp, Homo sapiens
tcccctggagcccag

SEQ ID NO: 353310 - DNA, 15 bp, Homo sapiens
ctcccctggagccca

SEQ ID NO: 353311 - DNA, 15 bp, Homo sapiens
cctcccctggagccc

SEQ ID NO: 353312 - DNA, 15 bp, Homo sapiens
gcctcccctggagcc

SEQ ID NO: 353313 - DNA, 15 bp, Homo sapiens
agcctcccctggagc

SEQ ID NO: 353314 - DNA, 15 bp, Homo sapiens
cagcctcccctggag

SEQ ID NO: 353315 - DNA, 15 bp, Homo sapiens
gcagcctcccctgga

SEQ ID NO: 353316 - DNA, 15 bp, Homo sapiens
cgcagcctcccctgg

SEQ ID NO: 353317 - DNA, 15 bp, Homo sapiens
tcgcagcctcccctg

SEQ ID NO: 353318 - DNA, 15 bp, Homo sapiens
ctcgcagcctcccct

SEQ ID NO: 353319 - DNA, 15 bp, Homo sapiens
cctcgcagcctcccc

SEQ ID NO: 353320 - DNA, 15 bp, Homo sapiens
gcctcgcagcctccc

SEQ ID NO: 353321 - DNA, 15 bp, Homo sapiens
ggcctcgcagcctcc

SEQ ID NO: 353322 - DNA, 15 bp, Homo sapiens
gggcctcgcagcctc

SEQ ID NO: 353323 - DNA, 15 bp, Homo sapiens
ggggcctcgcagcct

SEQ ID NO: 353324 - DNA, 15 bp, Homo sapiens
aggggcctcgcagcc

SEQ ID NO: 353325 - DNA, 15 bp, Homo sapiens
caggggcctcgcagc

SEQ ID NO: 353326 - DNA, 15 bp, Homo sapiens
tcaggggcctcgcag

SEQ ID NO: 353327 - DNA, 15 bp, Homo sapiens
ctcaggggcctcgca

SEQ ID NO: 353328 - DNA, 15 bp, Homo sapiens
cctcaggggcctcgc

SEQ ID NO: 353329 - DNA, 15 bp, Homo sapiens
tcctcaggggcctcg

SEQ ID NO: 353330 - DNA, 15 bp, Homo sapiens
gtcctcaggggcctc

SEQ ID NO: 353331 - DNA, 15 bp, Homo sapiens
agtcctcaggggcct

SEQ ID NO: 353332 - DNA, 15 bp, Homo sapiens
gagtcctcaggggcc

SEQ ID NO: 353333 - DNA, 15 bp, Homo sapiens
agagtcctcaggggc

SEQ ID NO: 353334 - DNA, 15 bp, Homo sapiens
gagagtcctcagggg

SEQ ID NO: 353335 - DNA, 15 bp, Homo sapiens
ggagagtcctcaggg

SEQ ID NO: 353336 - DNA, 15 bp, Homo sapiens
aggagagtcctcagg

SEQ ID NO: 353337 - DNA, 15 bp, Homo sapiens
gaggagagtcctcag

SEQ ID NO: 353338 - DNA, 15 bp, Homo sapiens
tgaggagagtcctca

SEQ ID NO: 353339 - DNA, 15 bp, Homo sapiens
ctgaggagagtcctc

SEQ ID NO: 353340 - DNA, 15 bp, Homo sapiens
gctgaggagagtcct

SEQ ID NO: 353341 - DNA, 15 bp, Homo sapiens
agctgaggagagtcc

SEQ ID NO: 353342 - DNA, 15 bp, Homo sapiens
aagctgaggagagtc

SEQ ID NO: 353343 - DNA, 15 bp, Homo sapiens
gaagctgaggagagt

SEQ ID NO: 353344 - DNA, 15 bp, Homo sapiens
ggaagctgaggagag

SEQ ID NO: 353345 - DNA, 15 bp, Homo sapiens
aggaagctgaggaga

SEQ ID NO: 353346 - DNA, 15 bp, Homo sapiens
gaggaagctgaggag

SEQ ID NO: 353347 - DNA, 15 bp, Homo sapiens
tgaggaagctgagga

SEQ ID NO: 353348 - DNA, 15 bp, Homo sapiens
atgaggaagctgagg

SEQ ID NO: 353349 - DNA, 15 bp, Homo sapiens
aatgaggaagctgag

SEQ ID NO: 353350 - DNA, 15 bp, Homo sapiens
caatgaggaagctga

SEQ ID NO: 353351 - DNA, 15 bp, Homo sapiens
gcaatgaggaagctg

SEQ ID NO: 353352 - DNA, 15 bp, Homo sapiens
tgcaatgaggaagct

SEQ ID NO: 353353 - DNA, 15 bp, Homo sapiens
ctgcaatgaggaagc

SEQ ID NO: 353354 - DNA, 15 bp, Homo sapiens
cctgcaatgaggaag

SEQ ID NO: 353355 - DNA, 15 bp, Homo sapiens
ccctgcaatgaggaa

SEQ ID NO: 353356 - DNA, 15 bp, Homo sapiens
cccctgcaatgagga

SEQ ID NO: 353357 - DNA, 15 bp, Homo sapiens
tcccctgcaatgagg

SEQ ID NO: 353358 - DNA, 15 bp, Homo sapiens
ctcccctgcaatgag

SEQ ID NO: 353359 - DNA, 15 bp, Homo sapiens
tctcccctgcaatga

SEQ ID NO: 353360 - DNA, 15 bp, Homo sapiens
ctctcccctgcaatg

SEQ ID NO: 353361 - DNA, 15 bp, Homo sapiens
gctctcccctgcaat

SEQ ID NO: 353362 - DNA, 15 bp, Homo sapiens
agctctcccctgcaa

SEQ ID NO: 353363 - DNA, 15 bp, Homo sapiens
cagctctcccctgca

SEQ ID NO: 353364 - DNA, 15 bp, Homo sapiens
tcagctctcccctgc

SEQ ID NO: 353365 - DNA, 15 bp, Homo sapiens
ctcagctctcccctg

SEQ ID NO: 353366 - DNA, 15 bp, Homo sapiens
cctcagctctcccct

SEQ ID NO: 353367 - DNA, 15 bp, Homo sapiens
ccctcagctctcccc

SEQ ID NO: 353368 - DNA, 15 bp, Homo sapiens
tccctcagctctccc

SEQ ID NO: 353369 - DNA, 15 bp, Homo sapiens
gtccctcagctctcc

SEQ ID NO: 353370 - DNA, 15 bp, Homo sapiens
tgtccctcagctctc

SEQ ID NO: 353371 - DNA, 15 bp, Homo sapiens
gtgtccctcagctct

SEQ ID NO: 353372 - DNA, 15 bp, Homo sapiens
ggtgtccctcagctc

SEQ ID NO: 353373 - DNA, 15 bp, Homo sapiens
tggtgtccctcagct

SEQ ID NO: 353374 - DNA, 15 bp, Homo sapiens
atggtgtccctcagc

SEQ ID NO: 353375 - DNA, 15 bp, Homo sapiens
gatggtgtccctcag

SEQ ID NO: 353376 - DNA, 15 bp, Homo sapiens
ggatggtgtccctca

SEQ ID NO: 353377 - DNA, 15 bp, Homo sapiens
aggatggtgtccctc

SEQ ID NO: 353378 - DNA, 15 bp, Homo sapiens
taggatggtgtccct

SEQ ID NO: 353379 - DNA, 15 bp, Homo sapiens
ctaggatggtgtccc

SEQ ID NO: 353380 - DNA, 15 bp, Homo sapiens
tctaggatggtgtcc

SEQ ID NO: 353381 - DNA, 15 bp, Homo sapiens
gtctaggatggtgtc

SEQ ID NO: 353382 - DNA, 15 bp, Homo sapiens
agtctaggatggtgt

SEQ ID NO: 353383 - DNA, 15 bp, Homo sapiens
cagtctaggatggtg

SEQ ID NO: 353384 - DNA, 15 bp, Homo sapiens
ccagtctaggatggt

SEQ ID NO: 353385 - DNA, 15 bp, Homo sapiens
cccagtctaggatgg

SEQ ID NO: 353386 - DNA, 15 bp, Homo sapiens
tcccagtctaggatg

SEQ ID NO: 353387 - DNA, 15 bp, Homo sapiens
ctcccagtctaggat

SEQ ID NO: 353388 - DNA, 15 bp, Homo sapiens
cctcccagtctagga

SEQ ID NO: 353389 - DNA, 15 bp, Homo sapiens
tcctcccagtctagg

SEQ ID NO: 353390 - DNA, 15 bp, Homo sapiens
gtcctcccagtctag

SEQ ID NO: 353391 - DNA, 15 bp, Homo sapiens
agtcctcccagtcta

SEQ ID NO: 353392 - DNA, 15 bp, Homo sapiens
gagtcctcccagtct

SEQ ID NO: 353393 - DNA, 15 bp, Homo sapiens
ggagtcctcccagtc

SEQ ID NO: 353394 - DNA, 15 bp, Homo sapiens
gggagtcctcccagt

SEQ ID NO: 353395 - DNA, 15 bp, Homo sapiens
agggagtcctcccag

SEQ ID NO: 353396 - DNA, 15 bp, Homo sapiens
cagggagtcctccca

SEQ ID NO: 353397 - DNA, 15 bp, Homo sapiens
gcagggagtcctccc

SEQ ID NO: 353398 - DNA, 15 bp, Homo sapiens
ggcagggagtcctcc

SEQ ID NO: 353399 - DNA, 15 bp, Homo sapiens
gggcagggagtcctc

SEQ ID NO: 353400 - DNA, 15 bp, Homo sapiens
cgggcagggagtcct

SEQ ID NO: 353401 - DNA, 15 bp, Homo sapiens
tcgggcagggagtcc

SEQ ID NO: 353402 - DNA, 15 bp, Homo sapiens
gtcgggcagggagtc

SEQ ID NO: 353403 - DNA, 15 bp, Homo sapiens
ggtcgggcagggagt

SEQ ID NO: 353404 - DNA, 15 bp, Homo sapiens
cggtcgggcagggag

SEQ ID NO: 353405 - DNA, 15 bp, Homo sapiens
ccggtcgggcaggga

SEQ ID NO: 353406 - DNA, 15 bp, Homo sapiens
cccggtcgggcaggg

SEQ ID NO: 353407 - DNA, 15 bp, Homo sapiens
tcccggtcgggcagg

SEQ ID NO: 353408 - DNA, 15 bp, Homo sapiens
gtcccggtcgggcag

SEQ ID NO: 353409 - DNA, 15 bp, Homo sapiens
ggtcccggtcgggca

SEQ ID NO: 353410 - DNA, 15 bp, Homo sapiens
aggtcccggtcgggc

SEQ ID NO: 353411 - DNA, 15 bp, Homo sapiens
caggtcccggtcggg

SEQ ID NO: 353412 - DNA, 15 bp, Homo sapiens
ccaggtcccggtcgg

SEQ ID NO: 353413 - DNA, 15 bp, Homo sapiens
gccaggtcccggtcg

SEQ ID NO: 353414 - DNA, 15 bp, Homo sapiens
tgccaggtcccggtc

SEQ ID NO: 353415 - DNA, 15 bp, Homo sapiens
gtgccaggtcccggt

SEQ ID NO: 353416 - DNA, 15 bp, Homo sapiens
agtgccaggtcccgg

SEQ ID NO: 353417 - DNA, 15 bp, Homo sapiens
gagtgccaggtcccg

SEQ ID NO: 353418 - DNA, 15 bp, Homo sapiens
cgagtgccaggtccc

SEQ ID NO: 353419 - DNA, 15 bp, Homo sapiens
gcgagtgccaggtcc

SEQ ID NO: 353420 - DNA, 15 bp, Homo sapiens
ggcgagtgccaggtc

SEQ ID NO: 353421 - DNA, 15 bp, Homo sapiens
cggcgagtgccaggt

SEQ ID NO: 353422 - DNA, 15 bp, Homo sapiens
tcggcgagtgccagg

SEQ ID NO: 353423 - DNA, 15 bp, Homo sapiens
atcggcgagtgccag

SEQ ID NO: 353424 - DNA, 15 bp, Homo sapiens
catcggcgagtgcca

SEQ ID NO: 353425 - DNA, 15 bp, Homo sapiens
tcatcggcgagtgcc

SEQ ID NO: 353426 - DNA, 15 bp, Homo sapiens
ctcatcggcgagtgc

SEQ ID NO: 353427 - DNA, 15 bp, Homo sapiens
cctcatcggcgagtg

SEQ ID NO: 353428 - DNA, 15 bp, Homo sapiens
gcctcatcggcgagt

SEQ ID NO: 353429 - DNA, 15 bp, Homo sapiens
ggcctcatcggcgag

SEQ ID NO: 353430 - DNA, 15 bp, Homo sapiens
tggcctcatcggcga

SEQ ID NO: 353431 - DNA, 15 bp, Homo sapiens
ctggcctcatcggcg

SEQ ID NO: 353432 - DNA, 15 bp, Homo sapiens
gctggcctcatcggc

SEQ ID NO: 353433 - DNA, 15 bp, Homo sapiens
tgctggcctcatcgg

SEQ ID NO: 353434 - DNA, 15 bp, Homo sapiens
ctgctggcctcatcg

SEQ ID NO: 353435 - DNA, 15 bp, Homo sapiens
cctgctggcctcatc

SEQ ID NO: 353436 - DNA, 15 bp, Homo sapiens
acctgctggcctcat

SEQ ID NO: 353437 - DNA, 15 bp, Homo sapiens
gacctgctggcctca

SEQ ID NO: 353438 - DNA, 15 bp, Homo sapiens
agacctgctggcctc

SEQ ID NO: 353439 - DNA, 15 bp, Homo sapiens
cagacctgctggcct

SEQ ID NO: 353440 - DNA, 15 bp, Homo sapiens
tcagacctgctggcc

SEQ ID NO: 353441 - DNA, 15 bp, Homo sapiens
gtcagacctgctggc

SEQ ID NO: 353442 - DNA, 15 bp, Homo sapiens
ggtcagacctgctgg

SEQ ID NO: 353443 - DNA, 15 bp, Homo sapiens
gggtcagacctgctg

SEQ ID NO: 353444 - DNA, 15 bp, Homo sapiens
ggggtcagacctgct

SEQ ID NO: 353445 - DNA, 15 bp, Homo sapiens
gggggtcagacctgc

SEQ ID NO: 353446 - DNA, 15 bp, Homo sapiens
ggggggtcagacctg

SEQ ID NO: 353447 - DNA, 15 bp, Homo sapiens
tggggggtcagacct

SEQ ID NO: 353448 - DNA, 15 bp, Homo sapiens
gtggggggtcagacc

SEQ ID NO: 353449 - DNA, 15 bp, Homo sapiens
ggtggggggtcagac

SEQ ID NO: 353450 - DNA, 15 bp, Homo sapiens
gggtggggggtcaga

SEQ ID NO: 353451 - DNA, 15 bp, Homo sapiens
ggggtggggggtcag

SEQ ID NO: 353452 - DNA, 15 bp, Homo sapiens
gggggtggggggtca

SEQ ID NO: 353453 - DNA, 15 bp, Homo sapiens
tgggggtggggggtc

SEQ ID NO: 353454 - DNA, 15 bp, Homo sapiens
ctgggggtggggggt

SEQ ID NO: 353455 - DNA, 15 bp, Homo sapiens
cctgggggtgggggg

SEQ ID NO: 353456 - DNA, 15 bp, Homo sapiens
ccctgggggtggggg

SEQ ID NO: 353457 - DNA, 15 bp, Homo sapiens
tccctgggggtgggg

SEQ ID NO: 353458 - DNA, 15 bp, Homo sapiens
ctccctgggggtggg

SEQ ID NO: 353459 - DNA, 15 bp, Homo sapiens
gctccctgggggtgg

SEQ ID NO: 353460 - DNA, 15 bp, Homo sapiens
ggctccctgggggtg

SEQ ID NO: 353461 - DNA, 15 bp, Homo sapiens
gggctccctgggggt

SEQ ID NO: 353462 - DNA, 15 bp, Homo sapiens
tgggctccctggggg

SEQ ID NO: 353463 - DNA, 15 bp, Homo sapiens
atgggctccctgggg

SEQ ID NO: 353464 - DNA, 15 bp, Homo sapiens
catgggctccctggg

SEQ ID NO: 353465 - DNA, 15 bp, Homo sapiens
ccatgggctccctgg

SEQ ID NO: 353466 - DNA, 15 bp, Homo sapiens
accatgggctccctg

SEQ ID NO: 353467 - DNA, 15 bp, Homo sapiens
caccatgggctccct

SEQ ID NO: 353468 - DNA, 15 bp, Homo sapiens
ccaccatgggctccc

SEQ ID NO: 353469 - DNA, 15 bp, Homo sapiens
cccaccatgggctcc

SEQ ID NO: 353470 - DNA, 15 bp, Homo sapiens
ccccaccatgggctc

SEQ ID NO: 353471 - DNA, 15 bp, Homo sapiens
gccccaccatgggct

SEQ ID NO: 353472 - DNA, 15 bp, Homo sapiens
cgccccaccatgggc

SEQ ID NO: 353473 - DNA, 15 bp, Homo sapiens
ccgccccaccatggg

SEQ ID NO: 353474 - DNA, 15 bp, Homo sapiens
cccgccccaccatgg

SEQ ID NO: 353475 - DNA, 15 bp, Homo sapiens
ccccgccccaccatg

SEQ ID NO: 353476 - DNA, 15 bp, Homo sapiens
gccccgccccaccat

SEQ ID NO: 353477 - DNA, 15 bp, Homo sapiens
cgccccgccccacca

SEQ ID NO: 353478 - DNA, 15 bp, Homo sapiens
ccgccccgccccacc

SEQ ID NO: 353479 - DNA, 15 bp, Homo sapiens
cccgccccgccccac

SEQ ID NO: 353480 - DNA, 15 bp, Homo sapiens
tcccgccccgcccca

SEQ ID NO: 353481 - DNA, 15 bp, Homo sapiens
gtcccgccccgcccc

SEQ ID NO: 353482 - DNA, 15 bp, Homo sapiens
cgtcccgccccgccc

SEQ ID NO: 353483 - DNA, 15 bp, Homo sapiens
tcgtcccgccccgcc

SEQ ID NO: 353484 - DNA, 15 bp, Homo sapiens
gtcgtcccgccccgc

SEQ ID NO: 353485 - DNA, 15 bp, Homo sapiens
tgtcgtcccgccccg

SEQ ID NO: 353486 - DNA, 15 bp, Homo sapiens
ctgtcgtcccgcccc

SEQ ID NO: 353487 - DNA, 15 bp, Homo sapiens
gctgtcgtcccgccc

SEQ ID NO: 353488 - DNA, 15 bp, Homo sapiens
tgctgtcgtcccgcc

SEQ ID NO: 353489 - DNA, 15 bp, Homo sapiens
ctgctgtcgtcccgc

SEQ ID NO: 353490 - DNA, 15 bp, Homo sapiens
tctgctgtcgtcccg

SEQ ID NO: 353491 - DNA, 15 bp, Homo sapiens
ttctgctgtcgtccc

SEQ ID NO: 353492 - DNA, 15 bp, Homo sapiens
tttctgctgtcgtcc

SEQ ID NO: 353493 - DNA, 15 bp, Homo sapiens
gtttctgctgtcgtc

SEQ ID NO: 353494 - DNA, 15 bp, Homo sapiens
tgtttctgctgtcgt

SEQ ID NO: 353495 - DNA, 15 bp, Homo sapiens
gtgtttctgctgtcg

SEQ ID NO: 353496 - DNA, 15 bp, Homo sapiens
tgtgtttctgctgtc

SEQ ID NO: 353497 - DNA, 15 bp, Homo sapiens
ctgtgtttctgctgt

SEQ ID NO: 353498 - DNA, 15 bp, Homo sapiens
gctgtgtttctgctg

SEQ ID NO: 353499 - DNA, 15 bp, Homo sapiens
ggctgtgtttctgct

SEQ ID NO: 353500 - DNA, 15 bp, Homo sapiens
tggctgtgtttctgc

SEQ ID NO: 353501 - DNA, 15 bp, Homo sapiens
ctggctgtgtttctg

SEQ ID NO: 353502 - DNA, 15 bp, Homo sapiens
gctggctgtgtttct

SEQ ID NO: 353503 - DNA, 15 bp, Homo sapiens
agctggctgtgtttc

SEQ ID NO: 353504 - DNA, 15 bp, Homo sapiens
gagctggctgtgttt

SEQ ID NO: 353505 - DNA, 15 bp, Homo sapiens
ggagctggctgtgtt

SEQ ID NO: 353506 - DNA, 15 bp, Homo sapiens
tggagctggctgtgt

SEQ ID NO: 353507 - DNA, 15 bp, Homo sapiens
ctggagctggctgtg

SEQ ID NO: 353508 - DNA, 15 bp, Homo sapiens
gctggagctggctgt

SEQ ID NO: 353509 - DNA, 15 bp, Homo sapiens
tgctggagctggctg

SEQ ID NO: 353510 - DNA, 15 bp, Homo sapiens
atgctggagctggct

SEQ ID NO: 353511 - DNA, 15 bp, Homo sapiens
catgctggagctggc

SEQ ID NO: 353512 - DNA, 15 bp, Homo sapiens
ccatgctggagctgg

SEQ ID NO: 353513 - DNA, 15 bp, Homo sapiens
cccatgctggagctg

SEQ ID NO: 353514 - DNA, 15 bp, Homo sapiens
tcccatgctggagct

SEQ ID NO: 353515 - DNA, 15 bp, Homo sapiens
gtcccatgctggagc

SEQ ID NO: 353516 - DNA, 15 bp, Homo sapiens
tgtcccatgctggag

SEQ ID NO: 353517 - DNA, 15 bp, Homo sapiens
ctgtcccatgctgga

SEQ ID NO: 353518 - DNA, 15 bp, Homo sapiens
actgtcccatgctgg

SEQ ID NO: 353519 - DNA, 15 bp, Homo sapiens
cactgtcccatgctg

SEQ ID NO: 353520 - DNA, 15 bp, Homo sapiens
ccactgtcccatgct

SEQ ID NO: 353521 - DNA, 15 bp, Homo sapiens
gccactgtcccatgc

SEQ ID NO: 353522 - DNA, 15 bp, Homo sapiens
agccactgtcccatg

SEQ ID NO: 353523 - DNA, 15 bp, Homo sapiens
cagccactgtcccat

SEQ ID NO: 353524 - DNA, 15 bp, Homo sapiens
tcagccactgtccca

SEQ ID NO: 353525 - DNA, 15 bp, Homo sapiens
ctcagccactgtccc

SEQ ID NO: 353526 - DNA, 15 bp, Homo sapiens
cctcagccactgtcc

SEQ ID NO: 353527 - DNA, 15 bp, Homo sapiens
gcctcagccactgtc

SEQ ID NO: 353528 - DNA, 15 bp, Homo sapiens
agcctcagccactgt

SEQ ID NO: 353529 - DNA, 15 bp, Homo sapiens
gagcctcagccactg

SEQ ID NO: 353530 - DNA, 15 bp, Homo sapiens
tgagcctcagccact

SEQ ID NO: 353531 - DNA, 15 bp, Homo sapiens
gtgagcctcagccac

SEQ ID NO: 353532 - DNA, 15 bp, Homo sapiens
tgtgagcctcagcca

SEQ ID NO: 353533 - DNA, 15 bp, Homo sapiens
ctgtgagcctcagcc

SEQ ID NO: 353534 - DNA, 15 bp, Homo sapiens
cctgtgagcctcagc

SEQ ID NO: 353535 - DNA, 15 bp, Homo sapiens
gcctgtgagcctcag

SEQ ID NO: 353536 - DNA, 15 bp, Homo sapiens
tgcctgtgagcctca

SEQ ID NO: 353537 - DNA, 15 bp, Homo sapiens
ctgcctgtgagcctc

SEQ ID NO: 353538 - DNA, 15 bp, Homo sapiens
actgcctgtgagcct

SEQ ID NO: 353539 - DNA, 15 bp, Homo sapiens
cactgcctgtgagcc

SEQ ID NO: 353540 - DNA, 15 bp, Homo sapiens
tcactgcctgtgagc

SEQ ID NO: 353541 - DNA, 15 bp, Homo sapiens
ctcactgcctgtgag

SEQ ID NO: 353542 - DNA, 15 bp, Homo sapiens
cctcactgcctgtga

SEQ ID NO: 353543 - DNA, 15 bp, Homo sapiens
ccctcactgcctgtg

SEQ ID NO: 353544 - DNA, 15 bp, Homo sapiens
cccctcactgcctgt

SEQ ID NO: 353545 - DNA, 15 bp, Homo sapiens
tcccctcactgcctg

SEQ ID NO: 353546 - DNA, 15 bp, Homo sapiens
ctcccctcactgcct

SEQ ID NO: 353547 - DNA, 15 bp, Homo sapiens
cctcccctcactgcc

SEQ ID NO: 353548 - DNA, 15 bp, Homo sapiens
gcctcccctcactgc

SEQ ID NO: 353549 - DNA, 15 bp, Homo sapiens
agcctcccctcactg

SEQ ID NO: 353550 - DNA, 15 bp, Homo sapiens
aagcctcccctcact

SEQ ID NO: 353551 - DNA, 15 bp, Homo sapiens
gaagcctcccctcac

SEQ ID NO: 353552 - DNA, 15 bp, Homo sapiens
ggaagcctcccctca

SEQ ID NO: 353553 - DNA, 15 bp, Homo sapiens
aggaagcctcccctc

SEQ ID NO: 353554 - DNA, 15 bp, Homo sapiens
caggaagcctcccct

SEQ ID NO: 353555 - DNA, 15 bp, Homo sapiens
ccaggaagcctcccc

SEQ ID NO: 353556 - DNA, 15 bp, Homo sapiens
tccaggaagcctccc

SEQ ID NO: 353557 - DNA, 15 bp, Homo sapiens
ctccaggaagcctcc

SEQ ID NO: 353558 - DNA, 15 bp, Homo sapiens
gctccaggaagcctc

SEQ ID NO: 353559 - DNA, 15 bp, Homo sapiens
tgctccaggaagcct

SEQ ID NO: 353560 - DNA, 15 bp, Homo sapiens
ctgctccaggaagcc

SEQ ID NO: 353561 - DNA, 15 bp, Homo sapiens
cctgctccaggaagc

SEQ ID NO: 353562 - DNA, 15 bp, Homo sapiens
acctgctccaggaag

SEQ ID NO: 353563 - DNA, 15 bp, Homo sapiens
cacctgctccaggaa

SEQ ID NO: 353564 - DNA, 15 bp, Homo sapiens
ccacctgctccagga

SEQ ID NO: 353565 - DNA, 15 bp, Homo sapiens
cccacctgctccagg

SEQ ID NO: 353566 - DNA, 15 bp, Homo sapiens
gcccacctgctccag

SEQ ID NO: 353567 - DNA, 15 bp, Homo sapiens
ggcccacctgctcca

SEQ ID NO: 353568 - DNA, 15 bp, Homo sapiens
tggcccacctgctcc

SEQ ID NO: 353569 - DNA, 15 bp, Homo sapiens
ctggcccacctgctc

SEQ ID NO: 353570 - DNA, 15 bp, Homo sapiens
cctggcccacctgct

SEQ ID NO: 353571 - DNA, 15 bp, Homo sapiens
gcctggcccacctgc

SEQ ID NO: 353572 - DNA, 15 bp, Homo sapiens
ggcctggcccacctg

SEQ ID NO: 353573 - DNA, 15 bp, Homo sapiens
tggcctggcccacct

SEQ ID NO: 353574 - DNA, 15 bp, Homo sapiens
ctggcctggcccacc

SEQ ID NO: 353575 - DNA, 15 bp, Homo sapiens
cctggcctggcccac

SEQ ID NO: 353576 - DNA, 15 bp, Homo sapiens
ccctggcctggccca

SEQ ID NO: 353577 - DNA, 15 bp, Homo sapiens
cccctggcctggccc

SEQ ID NO: 353578 - DNA, 15 bp, Homo sapiens
gcccctggcctggcc

SEQ ID NO: 353579 - DNA, 15 bp, Homo sapiens
agcccctggcctggc

SEQ ID NO: 353580 - DNA, 15 bp, Homo sapiens
cagcccctggcctgg

SEQ ID NO: 353581 - DNA, 15 bp, Homo sapiens
gcagcccctggcctg

SEQ ID NO: 353582 - DNA, 15 bp, Homo sapiens
tgcagcccctggcct

SEQ ID NO: 353583 - DNA, 15 bp, Homo sapiens
gtgcagcccctggcc

SEQ ID NO: 353584 - DNA, 15 bp, Homo sapiens
tgtgcagcccctggc

SEQ ID NO: 353585 - DNA, 15 bp, Homo sapiens
gtgtgcagcccctgg

SEQ ID NO: 353586 - DNA, 15 bp, Homo sapiens
tgtgtgcagcccctg

SEQ ID NO: 353587 - DNA, 15 bp, Homo sapiens
gtgtgtgcagcccct

SEQ ID NO: 353588 - DNA, 15 bp, Homo sapiens
cgtgtgtgcagcccc

SEQ ID NO: 353589 - DNA, 15 bp, Homo sapiens
gcgtgtgtgcagccc

SEQ ID NO: 353590 - DNA, 15 bp, Homo sapiens
tgcgtgtgtgcagcc

SEQ ID NO: 353591 - DNA, 15 bp, Homo sapiens
gtgcgtgtgtgcagc

SEQ ID NO: 353592 - DNA, 15 bp, Homo sapiens
agtgcgtgtgtgcag

SEQ ID NO: 353593 - DNA, 15 bp, Homo sapiens
gagtgcgtgtgtgca

SEQ ID NO: 353594 - DNA, 15 bp, Homo sapiens
tgagtgcgtgtgtgc

SEQ ID NO: 353595 - DNA, 15 bp, Homo sapiens
gtgagtgcgtgtgtg

SEQ ID NO: 353596 - DNA, 15 bp, Homo sapiens
tgtgagtgcgtgtgt

SEQ ID NO: 353597 - DNA, 15 bp, Homo sapiens
gtgtgagtgcgtgtg

SEQ ID NO: 353598 - DNA, 15 bp, Homo sapiens
tgtgtgagtgcgtgt

SEQ ID NO: 353599 - DNA, 15 bp, Homo sapiens
gtgtgtgagtgcgtg

SEQ ID NO: 353600 - DNA, 15 bp, Homo sapiens
tgtgtgtgagtgcgt

SEQ ID NO: 353601 - DNA, 15 bp, Homo sapiens
gtgtgtgtgagtgcg

SEQ ID NO: 353602 - DNA, 15 bp, Homo sapiens
agtgtgtgtgagtgc

SEQ ID NO: 353603 - DNA, 15 bp, Homo sapiens
gagtgtgtgtgagtg

SEQ ID NO: 353604 - DNA, 15 bp, Homo sapiens
cgagtgtgtgtgagt

SEQ ID NO: 353605 - DNA, 15 bp, Homo sapiens
acgagtgtgtgtgag

SEQ ID NO: 353606 - DNA, 15 bp, Homo sapiens
gacgagtgtgtgtga

SEQ ID NO: 353607 - DNA, 15 bp, Homo sapiens
tgacgagtgtgtgtg

SEQ ID NO: 353608 - DNA, 15 bp, Homo sapiens
gtgacgagtgtgtgt

SEQ ID NO: 353609 - DNA, 15 bp, Homo sapiens
ggtgacgagtgtgtg

SEQ ID NO: 353610 - DNA, 15 bp, Homo sapiens
aggtgacgagtgtgt

SEQ ID NO: 353611 - DNA, 15 bp, Homo sapiens
gaggtgacgagtgtg

SEQ ID NO: 353612 - DNA, 15 bp, Homo sapiens
tgaggtgacgagtgt

SEQ ID NO: 353613 - DNA, 15 bp, Homo sapiens
atgaggtgacgagtg

SEQ ID NO: 353614 - DNA, 15 bp, Homo sapiens
catgaggtgacgagt

SEQ ID NO: 353615 - DNA, 15 bp, Homo sapiens
ccatgaggtgacgag

SEQ ID NO: 353616 - DNA, 15 bp, Homo sapiens
gccatgaggtgacga

SEQ ID NO: 353617 - DNA, 15 bp, Homo sapiens
agccatgaggtgacg

SEQ ID NO: 353618 - DNA, 15 bp, Homo sapiens
gagccatgaggtgac

SEQ ID NO: 353619 - DNA, 15 bp, Homo sapiens
agagccatgaggtga

SEQ ID NO: 353620 - DNA, 15 bp, Homo sapiens
cagagccatgaggtg

SEQ ID NO: 353621 - DNA, 15 bp, Homo sapiens
ccagagccatgaggt

SEQ ID NO: 353622 - DNA, 15 bp, Homo sapiens
cccagagccatgagg

SEQ ID NO: 353623 - DNA, 15 bp, Homo sapiens
acccagagccatgag

SEQ ID NO: 353624 - DNA, 15 bp, Homo sapiens
cacccagagccatga

SEQ ID NO: 353625 - DNA, 15 bp, Homo sapiens
ccacccagagccatg

SEQ ID NO: 353626 - DNA, 15 bp, Homo sapiens
cccacccagagccat

SEQ ID NO: 353627 - DNA, 15 bp, Homo sapiens
acccacccagagcca

SEQ ID NO: 353628 - DNA, 15 bp, Homo sapiens
cacccacccagagcc

SEQ ID NO: 353629 - DNA, 15 bp, Homo sapiens
gcacccacccagagc

SEQ ID NO: 353630 - DNA, 15 bp, Homo sapiens
agcacccacccagag

SEQ ID NO: 353631 - DNA, 15 bp, Homo sapiens
tagcacccacccaga

SEQ ID NO: 353632 - DNA, 15 bp, Homo sapiens
gtagcacccacccag

SEQ ID NO: 353633 - DNA, 15 bp, Homo sapiens
tgtagcacccaccca

SEQ ID NO: 353634 - DNA, 15 bp, Homo sapiens
gtgtagcacccaccc

SEQ ID NO: 353635 - DNA, 15 bp, Homo sapiens
tgtgtagcacccacc

SEQ ID NO: 353636 - DNA, 15 bp, Homo sapiens
ttgtgtagcacccac

SEQ ID NO: 353637 - DNA, 15 bp, Homo sapiens
cttgtgtagcaccca

SEQ ID NO: 353638 - DNA, 15 bp, Homo sapiens
ccttgtgtagcaccc

SEQ ID NO: 353639 - DNA, 15 bp, Homo sapiens
tccttgtgtagcacc

SEQ ID NO: 353640 - DNA, 15 bp, Homo sapiens
ttccttgtgtagcac

SEQ ID NO: 353641 - DNA, 15 bp, Homo sapiens
tttccttgtgtagca

SEQ ID NO: 353642 - DNA, 15 bp, Homo sapiens
gtttccttgtgtagc

SEQ ID NO: 353643 - DNA, 15 bp, Homo sapiens
ggtttccttgtgtag

SEQ ID NO: 353644 - DNA, 15 bp, Homo sapiens
tggtttccttgtgta

SEQ ID NO: 353645 - DNA, 15 bp, Homo sapiens
ttggtttccttgtgt

SEQ ID NO: 353646 - DNA, 15 bp, Homo sapiens
cttggtttccttgtg

SEQ ID NO: 353647 - DNA, 15 bp, Homo sapiens
ccttggtttccttgt

SEQ ID NO: 353648 - DNA, 15 bp, Homo sapiens
gccttggtttccttg

SEQ ID NO: 353649 - DNA, 15 bp, Homo sapiens
agccttggtttcctt

SEQ ID NO: 353650 - DNA, 15 bp, Homo sapiens
aagccttggtttcct

SEQ ID NO: 353651 - DNA, 15 bp, Homo sapiens
gaagccttggtttcc

SEQ ID NO: 353652 - DNA, 15 bp, Homo sapiens
ggaagccttggtttc

SEQ ID NO: 353653 - DNA, 15 bp, Homo sapiens
cggaagccttggttt

SEQ ID NO: 353654 - DNA, 15 bp, Homo sapiens
gcggaagccttggtt

SEQ ID NO: 353655 - DNA, 15 bp, Homo sapiens
ggcggaagccttggt

SEQ ID NO: 353656 - DNA, 15 bp, Homo sapiens
tggcggaagccttgg

SEQ ID NO: 353657 - DNA, 15 bp, Homo sapiens
ctggcggaagccttg

SEQ ID NO: 353658 - DNA, 15 bp, Homo sapiens
cctggcggaagcctt

SEQ ID NO: 353659 - DNA, 15 bp, Homo sapiens
acctggcggaagcct

SEQ ID NO: 353660 - DNA, 15 bp, Homo sapiens
cacctggcggaagcc

SEQ ID NO: 353661 - DNA, 15 bp, Homo sapiens
acacctggcggaagc

SEQ ID NO: 353662 - DNA, 15 bp, Homo sapiens
gacacctggcggaag

SEQ ID NO: 353663 - DNA, 15 bp, Homo sapiens
agacacctggcggaa

SEQ ID NO: 353664 - DNA, 15 bp, Homo sapiens
gagacacctggcgga

SEQ ID NO: 353665 - DNA, 15 bp, Homo sapiens
ggagacacctggcgg

SEQ ID NO: 353666 - DNA, 15 bp, Homo sapiens
aggagacacctggcg

SEQ ID NO: 353667 - DNA, 15 bp, Homo sapiens
gaggagacacctggc

SEQ ID NO: 353668 - DNA, 15 bp, Homo sapiens
agaggagacacctgg

SEQ ID NO: 353669 - DNA, 15 bp, Homo sapiens
tagaggagacacctg

SEQ ID NO: 353670 - DNA, 15 bp, Homo sapiens
atagaggagacacct

SEQ ID NO: 353671 - DNA, 15 bp, Homo sapiens
gatagaggagacacc

SEQ ID NO: 353672 - DNA, 15 bp, Homo sapiens
ggatagaggagacac

SEQ ID NO: 353673 - DNA, 15 bp, Homo sapiens
tggatagaggagaca

SEQ ID NO: 353674 - DNA, 15 bp, Homo sapiens
ctggatagaggagac

SEQ ID NO: 353675 - DNA, 15 bp, Homo sapiens
actggatagaggaga

SEQ ID NO: 353676 - DNA, 15 bp, Homo sapiens
cactggatagaggag

SEQ ID NO: 353677 - DNA, 15 bp, Homo sapiens
gcactggatagagga

SEQ ID NO: 353678 - DNA, 15 bp, Homo sapiens
agcactggatagagg

SEQ ID NO: 353679 - DNA, 15 bp, Homo sapiens
cagcactggatagag

SEQ ID NO: 353680 - DNA, 15 bp, Homo sapiens
gcagcactggataga

SEQ ID NO: 353681 - DNA, 15 bp, Homo sapiens
ggcagcactggatag

SEQ ID NO: 353682 - DNA, 15 bp, Homo sapiens
gggcagcactggata

SEQ ID NO: 353683 - DNA, 15 bp, Homo sapiens
tgggcagcactggat

SEQ ID NO: 353684 - DNA, 15 bp, Homo sapiens
ctgggcagcactgga

SEQ ID NO: 353685 - DNA, 15 bp, Homo sapiens
gctgggcagcactgg

SEQ ID NO: 353686 - DNA, 15 bp, Homo sapiens
ggctgggcagcactg

SEQ ID NO: 353687 - DNA, 15 bp, Homo sapiens
cggctgggcagcact

SEQ ID NO: 353688 - DNA, 15 bp, Homo sapiens
ccggctgggcagcac

SEQ ID NO: 353689 - DNA, 15 bp, Homo sapiens
cccggctgggcagca

SEQ ID NO: 353690 - DNA, 15 bp, Homo sapiens
tcccggctgggcagc

SEQ ID NO: 353691 - DNA, 15 bp, Homo sapiens
ctcccggctgggcag

SEQ ID NO: 353692 - DNA, 15 bp, Homo sapiens
cctcccggctgggca

SEQ ID NO: 353693 - DNA, 15 bp, Homo sapiens
acctcccggctgggc

SEQ ID NO: 353694 - DNA, 15 bp, Homo sapiens
cacctcccggctggg

SEQ ID NO: 353695 - DNA, 15 bp, Homo sapiens
tcacctcccggctgg

SEQ ID NO: 353696 - DNA, 15 bp, Homo sapiens
gtcacctcccggctg

SEQ ID NO: 353697 - DNA, 15 bp, Homo sapiens
ggtcacctcccggct

SEQ ID NO: 353698 - DNA, 15 bp, Homo sapiens
cggtcacctcccggc

SEQ ID NO: 353699 - DNA, 15 bp, Homo sapiens
tcggtcacctcccgg

SEQ ID NO: 353700 - DNA, 15 bp, Homo sapiens
ctcggtcacctcccg

SEQ ID NO: 353701 - DNA, 15 bp, Homo sapiens
gctcggtcacctccc

SEQ ID NO: 353702 - DNA, 15 bp, Homo sapiens
ggctcggtcacctcc

SEQ ID NO: 353703 - DNA, 15 bp, Homo sapiens
tggctcggtcacctc

SEQ ID NO: 353704 - DNA, 15 bp, Homo sapiens
ctggctcggtcacct

SEQ ID NO: 353705 - DNA, 15 bp, Homo sapiens
cctggctcggtcacc

SEQ ID NO: 353706 - DNA, 15 bp, Homo sapiens
ccctggctcggtcac

SEQ ID NO: 353707 - DNA, 15 bp, Homo sapiens
accctggctcggtca

SEQ ID NO: 353708 - DNA, 15 bp, Homo sapiens
gaccctggctcggtc

SEQ ID NO: 353709 - DNA, 15 bp, Homo sapiens
ggaccctggctcggt

SEQ ID NO: 353710 - DNA, 15 bp, Homo sapiens
gggaccctggctcgg

SEQ ID NO: 353711 - DNA, 15 bp, Homo sapiens
tgggaccctggctcg

SEQ ID NO: 353712 - DNA, 15 bp, Homo sapiens
gtgggaccctggctc

SEQ ID NO: 353713 - DNA, 15 bp, Homo sapiens
ggtgggaccctggct

SEQ ID NO: 353714 - DNA, 15 bp, Homo sapiens
gggtgggaccctggc

SEQ ID NO: 353715 - DNA, 15 bp, Homo sapiens
agggtgggaccctgg

SEQ ID NO: 353716 - DNA, 15 bp, Homo sapiens
tagggtgggaccctg

SEQ ID NO: 353717 - DNA, 15 bp, Homo sapiens
ctagggtgggaccct

SEQ ID NO: 353718 - DNA, 15 bp, Homo sapiens
cctagggtgggaccc

SEQ ID NO: 353719 - DNA, 15 bp, Homo sapiens
acctagggtgggacc

SEQ ID NO: 353720 - DNA, 15 bp, Homo sapiens
cacctagggtgggac

SEQ ID NO: 353721 - DNA, 15 bp, Homo sapiens
acacctagggtggga

SEQ ID NO: 353722 - DNA, 15 bp, Homo sapiens
gacacctagggtggg

SEQ ID NO: 353723 - DNA, 15 bp, Homo sapiens
ggacacctagggtgg

SEQ ID NO: 353724 - DNA, 15 bp, Homo sapiens
tggacacctagggtg

SEQ ID NO: 353725 - DNA, 15 bp, Homo sapiens
ttggacacctagggt

SEQ ID NO: 353726 - DNA, 15 bp, Homo sapiens
cttggacacctaggg

SEQ ID NO: 353727 - DNA, 15 bp, Homo sapiens
gcttggacacctagg

SEQ ID NO: 353728 - DNA, 15 bp, Homo sapiens
agcttggacacctag

SEQ ID NO: 353729 - DNA, 15 bp, Homo sapiens
gagcttggacaccta

SEQ ID NO: 353730 - DNA, 15 bp, Homo sapiens
agagcttggacacct

SEQ ID NO: 353731 - DNA, 15 bp, Homo sapiens
aagagcttggacacc

SEQ ID NO: 353732 - DNA, 15 bp, Homo sapiens
taagagcttggacac

SEQ ID NO: 353733 - DNA, 15 bp, Homo sapiens
gtaagagcttggaca

SEQ ID NO: 353734 - DNA, 15 bp, Homo sapiens
ggtaagagcttggac

SEQ ID NO: 353735 - DNA, 15 bp, Homo sapiens
tggtaagagcttgga

SEQ ID NO: 353736 - DNA, 15 bp, Homo sapiens
gtggtaagagcttgg

SEQ ID NO: 353737 - DNA, 15 bp, Homo sapiens
tgtggtaagagcttg

SEQ ID NO: 353738 - DNA, 15 bp, Homo sapiens
gtgtggtaagagctt

SEQ ID NO: 353739 - DNA, 15 bp, Homo sapiens
agtgtggtaagagct

SEQ ID NO: 353740 - DNA, 15 bp, Homo sapiens
cagtgtggtaagagc

SEQ ID NO: 353741 - DNA, 15 bp, Homo sapiens
acagtgtggtaagag

SEQ ID NO: 353742 - DNA, 15 bp, Homo sapiens
cacagtgtggtaaga

SEQ ID NO: 353743 - DNA, 15 bp, Homo sapiens
tcacagtgtggtaag

SEQ ID NO: 353744 - DNA, 15 bp, Homo sapiens
atcacagtgtggtaa

SEQ ID NO: 353745 - DNA, 15 bp, Homo sapiens
tatcacagtgtggta

SEQ ID NO: 353746 - DNA, 15 bp, Homo sapiens
gtatcacagtgtggt

SEQ ID NO: 353747 - DNA, 15 bp, Homo sapiens
agtatcacagtgtgg

SEQ ID NO: 353748 - DNA, 15 bp, Homo sapiens
gagtatcacagtgtg

SEQ ID NO: 353749 - DNA, 15 bp, Homo sapiens
ggagtatcacagtgt

SEQ ID NO: 353750 - DNA, 15 bp, Homo sapiens
gggagtatcacagtg

SEQ ID NO: 353751 - DNA, 15 bp, Homo sapiens
ggggagtatcacagt

SEQ ID NO: 353752 - DNA, 15 bp, Homo sapiens
cggggagtatcacag

SEQ ID NO: 353753 - DNA, 15 bp, Homo sapiens
ccggggagtatcaca

SEQ ID NO: 353754 - DNA, 15 bp, Homo sapiens
tccggggagtatcac

SEQ ID NO: 353755 - DNA, 15 bp, Homo sapiens
ttccggggagtatca

SEQ ID NO: 353756 - DNA, 15 bp, Homo sapiens
cttccggggagtatc

SEQ ID NO: 353757 - DNA, 15 bp, Homo sapiens
acttccggggagtat

SEQ ID NO: 353758 - DNA, 15 bp, Homo sapiens
cacttccggggagta

SEQ ID NO: 353759 - DNA, 15 bp, Homo sapiens
acacttccggggagt

SEQ ID NO: 353760 - DNA, 15 bp, Homo sapiens
gacacttccggggag

SEQ ID NO: 353761 - DNA, 15 bp, Homo sapiens
agacacttccgggga

SEQ ID NO: 353762 - DNA, 15 bp, Homo sapiens
tagacacttccgggg

SEQ ID NO: 353763 - DNA, 15 bp, Homo sapiens
ttagacacttccggg

SEQ ID NO: 353764 - DNA, 15 bp, Homo sapiens
cttagacacttccgg

SEQ ID NO: 353765 - DNA, 15 bp, Homo sapiens
ccttagacacttccg

SEQ ID NO: 353766 - DNA, 15 bp, Homo sapiens
cccttagacacttcc

SEQ ID NO: 353767 - DNA, 15 bp, Homo sapiens
gcccttagacacttc

SEQ ID NO: 353768 - DNA, 15 bp, Homo sapiens
ggcccttagacactt

SEQ ID NO: 353769 - DNA, 15 bp, Homo sapiens
gggcccttagacact

SEQ ID NO: 353770 - DNA, 15 bp, Homo sapiens
cgggcccttagacac

SEQ ID NO: 353771 - DNA, 15 bp, Homo sapiens
gcgggcccttagaca

SEQ ID NO: 353772 - DNA, 15 bp, Homo sapiens
ggcgggcccttagac

SEQ ID NO: 353773 - DNA, 15 bp, Homo sapiens
gggcgggcccttaga

SEQ ID NO: 353774 - DNA, 15 bp, Homo sapiens
tgggcgggcccttag

SEQ ID NO: 353775 - DNA, 15 bp, Homo sapiens
ctgggcgggccctta

SEQ ID NO: 353776 - DNA, 15 bp, Homo sapiens
tctgggcgggccctt

SEQ ID NO: 353777 - DNA, 15 bp, Homo sapiens
atctgggcgggccct

SEQ ID NO: 353778 - DNA, 15 bp, Homo sapiens
gatctgggcgggccc

SEQ ID NO: 353779 - DNA, 15 bp, Homo sapiens
tgatctgggcgggcc

SEQ ID NO: 353780 - DNA, 15 bp, Homo sapiens
ttgatctgggcgggc

SEQ ID NO: 353781 - DNA, 15 bp, Homo sapiens
attgatctgggcggg

SEQ ID NO: 353782 - DNA, 15 bp, Homo sapiens
cattgatctgggcgg

SEQ ID NO: 353783 - DNA, 15 bp, Homo sapiens
tcattgatctgggcg

SEQ ID NO: 353784 - DNA, 15 bp, Homo sapiens
gtcattgatctgggc

SEQ ID NO: 353785 - DNA, 15 bp, Homo sapiens
ggtcattgatctggg

SEQ ID NO: 353786 - DNA, 15 bp, Homo sapiens
gggtcattgatctgg

SEQ ID NO: 353787 - DNA, 15 bp, Homo sapiens
ggggtcattgatctg

SEQ ID NO: 353788 - DNA, 15 bp, Homo sapiens
cggggtcattgatct

SEQ ID NO: 353789 - DNA, 15 bp, Homo sapiens
gcggggtcattgatc

SEQ ID NO: 353790 - DNA, 15 bp, Homo sapiens
ggcggggtcattgat

SEQ ID NO: 353791 - DNA, 15 bp, Homo sapiens
tggcggggtcattga

SEQ ID NO: 353792 - DNA, 15 bp, Homo sapiens
ttggcggggtcattg

SEQ ID NO: 353793 - DNA, 15 bp, Homo sapiens
gttggcggggtcatt

SEQ ID NO: 353794 - DNA, 15 bp, Homo sapiens
cgttggcggggtcat

SEQ ID NO: 353795 - DNA, 15 bp, Homo sapiens
ccgttggcggggtca

SEQ ID NO: 353796 - DNA, 15 bp, Homo sapiens
tccgttggcggggtc

SEQ ID NO: 353797 - DNA, 15 bp, Homo sapiens
gtccgttggcggggt

SEQ ID NO: 353798 - DNA, 15 bp, Homo sapiens
ggtccgttggcgggg

SEQ ID NO: 353799 - DNA, 15 bp, Homo sapiens
cggtccgttggcggg

SEQ ID NO: 353800 - DNA, 15 bp, Homo sapiens
gcggtccgttggcgg

SEQ ID NO: 353801 - DNA, 15 bp, Homo sapiens
tgcggtccgttggcg

SEQ ID NO: 353802 - DNA, 15 bp, Homo sapiens
ctgcggtccgttggc

SEQ ID NO: 353803 - DNA, 15 bp, Homo sapiens
tctgcggtccgttgg

SEQ ID NO: 353804 - DNA, 15 bp, Homo sapiens
ctctgcggtccgttg

SEQ ID NO: 353805 - DNA, 15 bp, Homo sapiens
cctctgcggtccgtt

SEQ ID NO: 353806 - DNA, 15 bp, Homo sapiens
tcctctgcggtccgt

SEQ ID NO: 353807 - DNA, 15 bp, Homo sapiens
ctcctctgcggtccg

SEQ ID NO: 353808 - DNA, 15 bp, Homo sapiens
cctcctctgcggtcc

SEQ ID NO: 353809 - DNA, 15 bp, Homo sapiens
ccctcctctgcggtc

SEQ ID NO: 353810 - DNA, 15 bp, Homo sapiens
gccctcctctgcggt

SEQ ID NO: 353811 - DNA, 15 bp, Homo sapiens
tgccctcctctgcgg

SEQ ID NO: 353812 - DNA, 15 bp, Homo sapiens
ctgccctcctctgcg

SEQ ID NO: 353813 - DNA, 15 bp, Homo sapiens
cctgccctcctctgc

SEQ ID NO: 353814 - DNA, 15 bp, Homo sapiens
ccctgccctcctctg

SEQ ID NO: 353815 - DNA, 15 bp, Homo sapiens
gccctgccctcctct

SEQ ID NO: 353816 - DNA, 15 bp, Homo sapiens
cgccctgccctcctc

SEQ ID NO: 353817 - DNA, 15 bp, Homo sapiens
ccgccctgccctcct

SEQ ID NO: 353818 - DNA, 15 bp, Homo sapiens
cccgccctgccctcc

SEQ ID NO: 353819 - DNA, 15 bp, Homo sapiens
tcccgccctgccctc

SEQ ID NO: 353820 - DNA, 15 bp, Homo sapiens
atcccgccctgccct

SEQ ID NO: 353821 - DNA, 15 bp, Homo sapiens
gatcccgccctgccc

SEQ ID NO: 353822 - DNA, 15 bp, Homo sapiens
ggatcccgccctgcc

SEQ ID NO: 353823 - DNA, 15 bp, Homo sapiens
gggatcccgccctgc

SEQ ID NO: 353824 - DNA, 15 bp, Homo sapiens
tgggatcccgccctg

SEQ ID NO: 353825 - DNA, 15 bp, Homo sapiens
ttgggatcccgccct

SEQ ID NO: 353826 - DNA, 15 bp, Homo sapiens
tttgggatcccgccc

SEQ ID NO: 353827 - DNA, 15 bp, Homo sapiens
ctttgggatcccgcc

SEQ ID NO: 353828 - DNA, 15 bp, Homo sapiens
cctttgggatcccgc

SEQ ID NO: 353829 - DNA, 15 bp, Homo sapiens
gcctttgggatcccg

SEQ ID NO: 353830 - DNA, 15 bp, Homo sapiens
agcctttgggatccc

SEQ ID NO: 353831 - DNA, 15 bp, Homo sapiens
cagcctttgggatcc

SEQ ID NO: 353832 - DNA, 15 bp, Homo sapiens
tcagcctttgggatc

SEQ ID NO: 353833 - DNA, 15 bp, Homo sapiens
gtcagcctttgggat

SEQ ID NO: 353834 - DNA, 15 bp, Homo sapiens
agtcagcctttggga

SEQ ID NO: 353835 - DNA, 15 bp, Homo sapiens
gagtcagcctttggg

SEQ ID NO: 353836 - DNA, 15 bp, Homo sapiens
cgagtcagcctttgg

SEQ ID NO: 353837 - DNA, 15 bp, Homo sapiens
ccgagtcagcctttg

SEQ ID NO: 353838 - DNA, 15 bp, Homo sapiens
cccgagtcagccttt

SEQ ID NO: 353839 - DNA, 15 bp, Homo sapiens
tcccgagtcagcctt

SEQ ID NO: 353840 - DNA, 15 bp, Homo sapiens
ctcccgagtcagcct

SEQ ID NO: 353841 - DNA, 15 bp, Homo sapiens
actcccgagtcagcc

SEQ ID NO: 353842 - DNA, 15 bp, Homo sapiens
cactcccgagtcagc

SEQ ID NO: 353843 - DNA, 15 bp, Homo sapiens
ccactcccgagtcag

SEQ ID NO: 353844 - DNA, 15 bp, Homo sapiens
cccactcccgagtca

SEQ ID NO: 353845 - DNA, 15 bp, Homo sapiens
ccccactcccgagtc

SEQ ID NO: 353846 - DNA, 15 bp, Homo sapiens
gccccactcccgagt

SEQ ID NO: 353847 - DNA, 15 bp, Homo sapiens
agccccactcccgag

SEQ ID NO: 353848 - DNA, 15 bp, Homo sapiens
cagccccactcccga

SEQ ID NO: 353849 - DNA, 15 bp, Homo sapiens
ccagccccactcccg

SEQ ID NO: 353850 - DNA, 15 bp, Homo sapiens
gccagccccactccc

SEQ ID NO: 353851 - DNA, 15 bp, Homo sapiens
ggccagccccactcc

SEQ ID NO: 353852 - DNA, 15 bp, Homo sapiens
aggccagccccactc

SEQ ID NO: 353853 - DNA, 15 bp, Homo sapiens
aaggccagccccact

SEQ ID NO: 353854 - DNA, 15 bp, Homo sapiens
caaggccagccccac

SEQ ID NO: 353855 - DNA, 15 bp, Homo sapiens
tcaaggccagcccca

SEQ ID NO: 353856 - DNA, 15 bp, Homo sapiens
gtcaaggccagcccc

SEQ ID NO: 353857 - DNA, 15 bp, Homo sapiens
ggtcaaggccagccc

SEQ ID NO: 353858 - DNA, 15 bp, Homo sapiens
cggtcaaggccagcc

SEQ ID NO: 353859 - DNA, 15 bp, Homo sapiens
gcggtcaaggccagc

SEQ ID NO: 353860 - DNA, 15 bp, Homo sapiens
ggcggtcaaggccag

SEQ ID NO: 353861 - DNA, 15 bp, Homo sapiens
gggcggtcaaggcca

SEQ ID NO: 353862 - DNA, 15 bp, Homo sapiens
ggggcggtcaaggcc

SEQ ID NO: 353863 - DNA, 15 bp, Homo sapiens
cggggcggtcaaggc

SEQ ID NO: 353864 - DNA, 15 bp, Homo sapiens
ccggggcggtcaagg

SEQ ID NO: 353865 - DNA, 15 bp, Homo sapiens
accggggcggtcaag

SEQ ID NO: 353866 - DNA, 15 bp, Homo sapiens
caccggggcggtcaa

SEQ ID NO: 353867 - DNA, 15 bp, Homo sapiens
tcaccggggcggtca

SEQ ID NO: 353868 - DNA, 15 bp, Homo sapiens
ctcaccggggcggtc

SEQ ID NO: 353869 - DNA, 15 bp, Homo sapiens
gctcaccggggcggt

SEQ ID NO: 353870 - DNA, 15 bp, Homo sapiens
tgctcaccggggcgg

SEQ ID NO: 353871 - DNA, 15 bp, Homo sapiens
gtgctcaccggggcg

SEQ ID NO: 353872 - DNA, 15 bp, Homo sapiens
tgtgctcaccggggc

SEQ ID NO: 353873 - DNA, 15 bp, Homo sapiens
ctgtgctcaccgggg

SEQ ID NO: 353874 - DNA, 15 bp, Homo sapiens
tctgtgctcaccggg

SEQ ID NO: 353875 - DNA, 15 bp, Homo sapiens
atctgtgctcaccgg

SEQ ID NO: 353876 - DNA, 15 bp, Homo sapiens
catctgtgctcaccg

SEQ ID NO: 353877 - DNA, 15 bp, Homo sapiens
ccatctgtgctcacc

SEQ ID NO: 353878 - DNA, 15 bp, Homo sapiens
gccatctgtgctcac

SEQ ID NO: 353879 - DNA, 15 bp, Homo sapiens
ggccatctgtgctca

SEQ ID NO: 353880 - DNA, 15 bp, Homo sapiens
aggccatctgtgctc

SEQ ID NO: 353881 - DNA, 15 bp, Homo sapiens
taggccatctgtgct

SEQ ID NO: 353882 - DNA, 15 bp, Homo sapiens
ctaggccatctgtgc

SEQ ID NO: 353883 - DNA, 15 bp, Homo sapiens
cctaggccatctgtg

SEQ ID NO: 353884 - DNA, 15 bp, Homo sapiens
acctaggccatctgt

SEQ ID NO: 353885 - DNA, 15 bp, Homo sapiens
cacctaggccatctg

SEQ ID NO: 353886 - DNA, 15 bp, Homo sapiens
acacctaggccatct

SEQ ID NO: 353887 - DNA, 15 bp, Homo sapiens
cacacctaggccatc

SEQ ID NO: 353888 - DNA, 15 bp, Homo sapiens
tcacacctaggccat

SEQ ID NO: 353889 - DNA, 15 bp, Homo sapiens
ttcacacctaggcca

SEQ ID NO: 353890 - DNA, 15 bp, Homo sapiens
gttcacacctaggcc

SEQ ID NO: 353891 - DNA, 15 bp, Homo sapiens
ggttcacacctaggc

SEQ ID NO: 353892 - DNA, 15 bp, Homo sapiens
cggttcacacctagg

SEQ ID NO: 353893 - DNA, 15 bp, Homo sapiens
ccggttcacacctag

SEQ ID NO: 353894 - DNA, 15 bp, Homo sapiens
gccggttcacaccta

SEQ ID NO: 353895 - DNA, 15 bp, Homo sapiens
ggccggttcacacct

SEQ ID NO: 353896 - DNA, 15 bp, Homo sapiens
gggccggttcacacc

SEQ ID NO: 353897 - DNA, 15 bp, Homo sapiens
ggggccggttcacac

SEQ ID NO: 353898 - DNA, 15 bp, Homo sapiens
gggggccggttcaca

SEQ ID NO: 353899 - DNA, 15 bp, Homo sapiens
tgggggccggttcac

SEQ ID NO: 353900 - DNA, 15 bp, Homo sapiens
ctgggggccggttca

SEQ ID NO: 353901 - DNA, 15 bp, Homo sapiens
cctgggggccggttc

SEQ ID NO: 353902 - DNA, 15 bp, Homo sapiens
ccctgggggccggtt

SEQ ID NO: 353903 - DNA, 15 bp, Homo sapiens
gccctgggggccggt

SEQ ID NO: 353904 - DNA, 15 bp, Homo sapiens
agccctgggggccgg

SEQ ID NO: 353905 - DNA, 15 bp, Homo sapiens
cagccctgggggccg

SEQ ID NO: 353906 - DNA, 15 bp, Homo sapiens
ccagccctgggggcc

SEQ ID NO: 353907 - DNA, 15 bp, Homo sapiens
gccagccctgggggc

SEQ ID NO: 353908 - DNA, 15 bp, Homo sapiens
agccagccctggggg

SEQ ID NO: 353909 - DNA, 15 bp, Homo sapiens
gagccagccctgggg

SEQ ID NO: 353910 - DNA, 15 bp, Homo sapiens
cgagccagccctggg

SEQ ID NO: 353911 - DNA, 15 bp, Homo sapiens
ccgagccagccctgg

SEQ ID NO: 353912 - DNA, 15 bp, Homo sapiens
cccgagccagccctg

SEQ ID NO: 353913 - DNA, 15 bp, Homo sapiens
tcccgagccagccct

SEQ ID NO: 353914 - DNA, 15 bp, Homo sapiens
atcccgagccagccc

SEQ ID NO: 353915 - DNA, 15 bp, Homo sapiens
catcccgagccagcc

SEQ ID NO: 353916 - DNA, 15 bp, Homo sapiens
acatcccgagccagc

SEQ ID NO: 353917 - DNA, 15 bp, Homo sapiens
aacatcccgagccag

SEQ ID NO: 353918 - DNA, 15 bp, Homo sapiens
caacatcccgagcca

SEQ ID NO: 353919 - DNA, 15 bp, Homo sapiens
ccaacatcccgagcc

SEQ ID NO: 353920 - DNA, 15 bp, Homo sapiens
gccaacatcccgagc

SEQ ID NO: 353921 - DNA, 15 bp, Homo sapiens
tgccaacatcccgag

SEQ ID NO: 353922 - DNA, 15 bp, Homo sapiens
ctgccaacatcccga

SEQ ID NO: 353923 - DNA, 15 bp, Homo sapiens
cctgccaacatcccg

SEQ ID NO: 353924 - DNA, 15 bp, Homo sapiens
tcctgccaacatccc

SEQ ID NO: 353925 - DNA, 15 bp, Homo sapiens
ctcctgccaacatcc

SEQ ID NO: 353926 - DNA, 15 bp, Homo sapiens
gctcctgccaacatc

SEQ ID NO: 353927 - DNA, 15 bp, Homo sapiens
tgctcctgccaacat

SEQ ID NO: 353928 - DNA, 15 bp, Homo sapiens
ctgctcctgccaaca

SEQ ID NO: 353929 - DNA, 15 bp, Homo sapiens
cctgctcctgccaac

SEQ ID NO: 353930 - DNA, 15 bp, Homo sapiens
ccctgctcctgccaa

SEQ ID NO: 353931 - DNA, 15 bp, Homo sapiens
gccctgctcctgcca

SEQ ID NO: 353932 - DNA, 15 bp, Homo sapiens
tgccctgctcctgcc

SEQ ID NO: 353933 - DNA, 15 bp, Homo sapiens
atgccctgctcctgc

SEQ ID NO: 353934 - DNA, 15 bp, Homo sapiens
gatgccctgctcctg

SEQ ID NO: 353935 - DNA, 15 bp, Homo sapiens
tgatgccctgctcct

SEQ ID NO: 353936 - DNA, 15 bp, Homo sapiens
ctgatgccctgctcc

SEQ ID NO: 353937 - DNA, 15 bp, Homo sapiens
cctgatgccctgctc

SEQ ID NO: 353938 - DNA, 15 bp, Homo sapiens
gcctgatgccctgct

SEQ ID NO: 353939 - DNA, 15 bp, Homo sapiens
agcctgatgccctgc

SEQ ID NO: 353940 - DNA, 15 bp, Homo sapiens
gagcctgatgccctg

SEQ ID NO: 353941 - DNA, 15 bp, Homo sapiens
tgagcctgatgccct

SEQ ID NO: 353942 - DNA, 15 bp, Homo sapiens
ctgagcctgatgccc

SEQ ID NO: 353943 - DNA, 15 bp, Homo sapiens
gctgagcctgatgcc

SEQ ID NO: 353944 - DNA, 15 bp, Homo sapiens
ggctgagcctgatgc

SEQ ID NO: 353945 - DNA, 15 bp, Homo sapiens
gggctgagcctgatg

SEQ ID NO: 353946 - DNA, 15 bp, Homo sapiens
tgggctgagcctgat

SEQ ID NO: 353947 - DNA, 15 bp, Homo sapiens
gtgggctgagcctga

SEQ ID NO: 353948 - DNA, 15 bp, Homo sapiens
cgtgggctgagcctg

SEQ ID NO: 353949 - DNA, 15 bp, Homo sapiens
gcgtgggctgagcct

SEQ ID NO: 353950 - DNA, 15 bp, Homo sapiens
agcgtgggctgagcc

SEQ ID NO: 353951 - DNA, 15 bp, Homo sapiens
gagcgtgggctgagc

SEQ ID NO: 353952 - DNA, 15 bp, Homo sapiens
ggagcgtgggctgag

SEQ ID NO: 353953 - DNA, 15 bp, Homo sapiens
gggagcgtgggctga

SEQ ID NO: 353954 - DNA, 15 bp, Homo sapiens
ggggagcgtgggctg

SEQ ID NO: 353955 - DNA, 15 bp, Homo sapiens
cggggagcgtgggct

SEQ ID NO: 353956 - DNA, 15 bp, Homo sapiens
ccggggagcgtgggc

SEQ ID NO: 353957 - DNA, 15 bp, Homo sapiens
gccggggagcgtggg

SEQ ID NO: 353958 - DNA, 15 bp, Homo sapiens
ggccggggagcgtgg

SEQ ID NO: 353959 - DNA, 15 bp, Homo sapiens
gggccggggagcgtg

SEQ ID NO: 353960 - DNA, 15 bp, Homo sapiens
ggggccggggagcgt

SEQ ID NO: 353961 - DNA, 15 bp, Homo sapiens
tggggccggggagcg

SEQ ID NO: 353962 - DNA, 15 bp, Homo sapiens
ctggggccggggagc

SEQ ID NO: 353963 - DNA, 15 bp, Homo sapiens
cctggggccggggag

SEQ ID NO: 353964 - DNA, 15 bp, Homo sapiens
tcctggggccgggga

SEQ ID NO: 353965 - DNA, 15 bp, Homo sapiens
ttcctggggccgggg

SEQ ID NO: 353966 - DNA, 15 bp, Homo sapiens
gttcctggggccggg

SEQ ID NO: 353967 - DNA, 15 bp, Homo sapiens
cgttcctggggccgg

SEQ ID NO: 353968 - DNA, 15 bp, Homo sapiens
gcgttcctggggccg

SEQ ID NO: 353969 - DNA, 15 bp, Homo sapiens
ggcgttcctggggcc

SEQ ID NO: 353970 - DNA, 15 bp, Homo sapiens
cggcgttcctggggc

SEQ ID NO: 353971 - DNA, 15 bp, Homo sapiens
tcggcgttcctgggg

SEQ ID NO: 353972 - DNA, 15 bp, Homo sapiens
gtcggcgttcctggg

SEQ ID NO: 353973 - DNA, 15 bp, Homo sapiens
ggtcggcgttcctgg

SEQ ID NO: 353974 - DNA, 15 bp, Homo sapiens
aggtcggcgttcctg

SEQ ID NO: 353975 - DNA, 15 bp, Homo sapiens
caggtcggcgttcct

SEQ ID NO: 353976 - DNA, 15 bp, Homo sapiens
acaggtcggcgttcc

SEQ ID NO: 353977 - DNA, 15 bp, Homo sapiens
gacaggtcggcgttc

SEQ ID NO: 353978 - DNA, 15 bp, Homo sapiens
ggacaggtcggcgtt

SEQ ID NO: 353979 - DNA, 15 bp, Homo sapiens
tggacaggtcggcgt

SEQ ID NO: 353980 - DNA, 15 bp, Homo sapiens
atggacaggtcggcg

SEQ ID NO: 353981 - DNA, 15 bp, Homo sapiens
gatggacaggtcggc

SEQ ID NO: 353982 - DNA, 15 bp, Homo sapiens
tgatggacaggtcgg

SEQ ID NO: 353983 - DNA, 15 bp, Homo sapiens
gtgatggacaggtcg

SEQ ID NO: 353984 - DNA, 15 bp, Homo sapiens
cgtgatggacaggtc

SEQ ID NO: 353985 - DNA, 15 bp, Homo sapiens
gcgtgatggacaggt

SEQ ID NO: 353986 - DNA, 15 bp, Homo sapiens
agcgtgatggacagg

SEQ ID NO: 353987 - DNA, 15 bp, Homo sapiens
cagcgtgatggacag

SEQ ID NO: 353988 - DNA, 15 bp, Homo sapiens
ccagcgtgatggaca

SEQ ID NO: 353989 - DNA, 15 bp, Homo sapiens
cccagcgtgatggac

SEQ ID NO: 353990 - DNA, 15 bp, Homo sapiens
acccagcgtgatgga

SEQ ID NO: 353991 - DNA, 15 bp, Homo sapiens
tacccagcgtgatgg

SEQ ID NO: 353992 - DNA, 15 bp, Homo sapiens
gtacccagcgtgatg

SEQ ID NO: 353993 - DNA, 15 bp, Homo sapiens
tgtacccagcgtgat

SEQ ID NO: 353994 - DNA, 15 bp, Homo sapiens
atgtacccagcgtga

SEQ ID NO: 353995 - DNA, 15 bp, Homo sapiens
gatgtacccagcgtg

SEQ ID NO: 353996 - DNA, 15 bp, Homo sapiens
cgatgtacccagcgt

SEQ ID NO: 353997 - DNA, 15 bp, Homo sapiens
gcgatgtacccagcg

SEQ ID NO: 353998 - DNA, 15 bp, Homo sapiens
agcgatgtacccagc

SEQ ID NO: 353999 - DNA, 15 bp, Homo sapiens
cagcgatgtacccag

SEQ ID NO: 354000 - DNA, 15 bp, Homo sapiens
gcagcgatgtaccca

SEQ ID NO: 354001 - DNA, 15 bp, Homo sapiens
tgcagcgatgtaccc

SEQ ID NO: 354002 - DNA, 15 bp, Homo sapiens
ctgcagcgatgtacc

SEQ ID NO: 354003 - DNA, 15 bp, Homo sapiens
tctgcagcgatgtac

SEQ ID NO: 354004 - DNA, 15 bp, Homo sapiens
atctgcagcgatgta

SEQ ID NO: 354005 - DNA, 15 bp, Homo sapiens
gatctgcagcgatgt

SEQ ID NO: 354006 - DNA, 15 bp, Homo sapiens
ggatctgcagcgatg

SEQ ID NO: 354007 - DNA, 15 bp, Homo sapiens
cggatctgcagcgat

SEQ ID NO: 354008 - DNA, 15 bp, Homo sapiens
ccggatctgcagcga

SEQ ID NO: 354009 - DNA, 15 bp, Homo sapiens
gccggatctgcagcg

SEQ ID NO: 354010 - DNA, 15 bp, Homo sapiens
ggccggatctgcagc

SEQ ID NO: 354011 - DNA, 15 bp, Homo sapiens
gggccggatctgcag

SEQ ID NO: 354012 - DNA, 15 bp, Homo sapiens
tgggccggatctgca

SEQ ID NO: 354013 - DNA, 15 bp, Homo sapiens
ctgggccggatctgc

SEQ ID NO: 354014 - DNA, 15 bp, Homo sapiens
gctgggccggatctg

SEQ ID NO: 354015 - DNA, 15 bp, Homo sapiens
cgctgggccggatct

SEQ ID NO: 354016 - DNA, 15 bp, Homo sapiens
ccgctgggccggatc

SEQ ID NO: 354017 - DNA, 15 bp, Homo sapiens
cccgctgggccggat

SEQ ID NO: 354018 - DNA, 15 bp, Homo sapiens
tcccgctgggccgga

SEQ ID NO: 354019 - DNA, 15 bp, Homo sapiens
ttcccgctgggccgg

SEQ ID NO: 354020 - DNA, 15 bp, Homo sapiens
gttcccgctgggccg

SEQ ID NO: 354021 - DNA, 15 bp, Homo sapiens
ggttcccgctgggcc

SEQ ID NO: 354022 - DNA, 15 bp, Homo sapiens
aggttcccgctgggc

SEQ ID NO: 354023 - DNA, 15 bp, Homo sapiens
caggttcccgctggg

SEQ ID NO: 354024 - DNA, 15 bp, Homo sapiens
gcaggttcccgctgg

SEQ ID NO: 354025 - DNA, 15 bp, Homo sapiens
ggcaggttcccgctg

SEQ ID NO: 354026 - DNA, 15 bp, Homo sapiens
cggcaggttcccgct

SEQ ID NO: 354027 - DNA, 15 bp, Homo sapiens
gcggcaggttcccgc

SEQ ID NO: 354028 - DNA, 15 bp, Homo sapiens
agcggcaggttcccg

SEQ ID NO: 354029 - DNA, 15 bp, Homo sapiens
cagcggcaggttccc

SEQ ID NO: 354030 - DNA, 15 bp, Homo sapiens
ccagcggcaggttcc

SEQ ID NO: 354031 - DNA, 15 bp, Homo sapiens
gccagcggcaggttc

SEQ ID NO: 354032 - DNA, 15 bp, Homo sapiens
agccagcggcaggtt

SEQ ID NO: 354033 - DNA, 15 bp, Homo sapiens
tagccagcggcaggt

SEQ ID NO: 354034 - DNA, 15 bp, Homo sapiens
gtagccagcggcagg

SEQ ID NO: 354035 - DNA, 15 bp, Homo sapiens
ggtagccagcggcag

SEQ ID NO: 354036 - DNA, 15 bp, Homo sapiens
tggtagccagcggca

SEQ ID NO: 354037 - DNA, 15 bp, Homo sapiens
ttggtagccagcggc

SEQ ID NO: 354038 - DNA, 15 bp, Homo sapiens
cttggtagccagcgg

SEQ ID NO: 354039 - DNA, 15 bp, Homo sapiens
gcttggtagccagcg

SEQ ID NO: 354040 - DNA, 15 bp, Homo sapiens
cgcttggtagccagc

SEQ ID NO: 354041 - DNA, 15 bp, Homo sapiens
gcgcttggtagccag

SEQ ID NO: 354042 - DNA, 15 bp, Homo sapiens
ggcgcttggtagcca

SEQ ID NO: 354043 - DNA, 15 bp, Homo sapiens
cggcgcttggtagcc

SEQ ID NO: 354044 - DNA, 15 bp, Homo sapiens
ccggcgcttggtagc

SEQ ID NO: 354045 - DNA, 15 bp, Homo sapiens
cccggcgcttggtag

SEQ ID NO: 354046 - DNA, 15 bp, Homo sapiens
ccccggcgcttggta

SEQ ID NO: 354047 - DNA, 15 bp, Homo sapiens
tccccggcgcttggt

SEQ ID NO: 354048 - DNA, 15 bp, Homo sapiens
ctccccggcgcttgg

SEQ ID NO: 354049 - DNA, 15 bp, Homo sapiens
cctccccggcgcttg

SEQ ID NO: 354050 - DNA, 15 bp, Homo sapiens
gcctccccggcgctt

SEQ ID NO: 354051 - DNA, 15 bp, Homo sapiens
ggcctccccggcgct

SEQ ID NO: 354052 - DNA, 15 bp, Homo sapiens
cggcctccccggcgc

SEQ ID NO: 354053 - DNA, 15 bp, Homo sapiens
gcggcctccccggcg

SEQ ID NO: 354054 - DNA, 15 bp, Homo sapiens
ggcggcctccccggc

SEQ ID NO: 354055 - DNA, 15 bp, Homo sapiens
aggcggcctccccgg

SEQ ID NO: 354056 - DNA, 15 bp, Homo sapiens
caggcggcctccccg

SEQ ID NO: 354057 - DNA, 15 bp, Homo sapiens
ccaggcggcctcccc

SEQ ID NO: 354058 - DNA, 15 bp, Homo sapiens
accaggcggcctccc

SEQ ID NO: 354059 - DNA, 15 bp, Homo sapiens
gaccaggcggcctcc

SEQ ID NO: 354060 - DNA, 15 bp, Homo sapiens
tgaccaggcggcctc

SEQ ID NO: 354061 - DNA, 15 bp, Homo sapiens
atgaccaggcggcct

SEQ ID NO: 354062 - DNA, 15 bp, Homo sapiens
gatgaccaggcggcc

SEQ ID NO: 354063 - DNA, 15 bp, Homo sapiens
cgatgaccaggcggc

SEQ ID NO: 354064 - DNA, 15 bp, Homo sapiens
acgatgaccaggcgg

SEQ ID NO: 354065 - DNA, 15 bp, Homo sapiens
gacgatgaccaggcg

SEQ ID NO: 354066 - DNA, 15 bp, Homo sapiens
tgacgatgaccaggc

SEQ ID NO: 354067 - DNA, 15 bp, Homo sapiens
ttgacgatgaccagg

SEQ ID NO: 354068 - DNA, 15 bp, Homo sapiens
gttgacgatgaccag

SEQ ID NO: 354069 - DNA, 15 bp, Homo sapiens
ggttgacgatgacca

SEQ ID NO: 354070 - DNA, 15 bp, Homo sapiens
aggttgacgatgacc

SEQ ID NO: 354071 - DNA, 15 bp, Homo sapiens
caggttgacgatgac

SEQ ID NO: 354072 - DNA, 15 bp, Homo sapiens
gcaggttgacgatga

SEQ ID NO: 354073 - DNA, 15 bp, Homo sapiens
tgcaggttgacgatg

SEQ ID NO: 354074 - DNA, 15 bp, Homo sapiens
ctgcaggttgacgat

SEQ ID NO: 354075 - DNA, 15 bp, Homo sapiens
gctgcaggttgacga

SEQ ID NO: 354076 - DNA, 15 bp, Homo sapiens
ggctgcaggttgacg

SEQ ID NO: 354077 - DNA, 15 bp, Homo sapiens
gggctgcaggttgac

SEQ ID NO: 354078 - DNA, 15 bp, Homo sapiens
tgggctgcaggttga

SEQ ID NO: 354079 - DNA, 15 bp, Homo sapiens
gtgggctgcaggttg

SEQ ID NO: 354080 - DNA, 15 bp, Homo sapiens
ggtgggctgcaggtt

SEQ ID NO: 354081 - DNA, 15 bp, Homo sapiens
tggtgggctgcaggt

SEQ ID NO: 354082 - DNA, 15 bp, Homo sapiens
ttggtgggctgcagg

SEQ ID NO: 354083 - DNA, 15 bp, Homo sapiens
cttggtgggctgcag

SEQ ID NO: 354084 - DNA, 15 bp, Homo sapiens
gcttggtgggctgca

SEQ ID NO: 354085 - DNA, 15 bp, Homo sapiens
tgcttggtgggctgc

SEQ ID NO: 354086 - DNA, 15 bp, Homo sapiens
gtgcttggtgggctg

SEQ ID NO: 354087 - DNA, 15 bp, Homo sapiens
cgtgcttggtgggct

SEQ ID NO: 354088 - DNA, 15 bp, Homo sapiens
acgtgcttggtgggc

SEQ ID NO: 354089 - DNA, 15 bp, Homo sapiens
tacgtgcttggtggg

SEQ ID NO: 354090 - DNA, 15 bp, Homo sapiens
ctacgtgcttggtgg

SEQ ID NO: 354091 - DNA, 15 bp, Homo sapiens
cctacgtgcttggtg

SEQ ID NO: 354092 - DNA, 15 bp, Homo sapiens
acctacgtgcttggt

SEQ ID NO: 354093 - DNA, 15 bp, Homo sapiens
cacctacgtgcttgg

SEQ ID NO: 354094 - DNA, 15 bp, Homo sapiens
acacctacgtgcttg

SEQ ID NO: 354095 - DNA, 15 bp, Homo sapiens
gacacctacgtgctt

SEQ ID NO: 354096 - DNA, 15 bp, Homo sapiens
agacacctacgtgct

SEQ ID NO: 354097 - DNA, 15 bp, Homo sapiens
cagacacctacgtgc

SEQ ID NO: 354098 - DNA, 15 bp, Homo sapiens
tcagacacctacgtg

SEQ ID NO: 354099 - DNA, 15 bp, Homo sapiens
ctcagacacctacgt

SEQ ID NO: 354100 - DNA, 15 bp, Homo sapiens
gctcagacacctacg

SEQ ID NO: 354101 - DNA, 15 bp, Homo sapiens
ggctcagacacctac

SEQ ID NO: 354102 - DNA, 15 bp, Homo sapiens
aggctcagacaccta

SEQ ID NO: 354103 - DNA, 15 bp, Homo sapiens
taggctcagacacct

SEQ ID NO: 354104 - DNA, 15 bp, Homo sapiens
gtaggctcagacacc

SEQ ID NO: 354105 - DNA, 15 bp, Homo sapiens
ggtaggctcagacac

SEQ ID NO: 354106 - DNA, 15 bp, Homo sapiens
gggtaggctcagaca

SEQ ID NO: 354107 - DNA, 15 bp, Homo sapiens
ggggtaggctcagac

SEQ ID NO: 354108 - DNA, 15 bp, Homo sapiens
aggggtaggctcaga

SEQ ID NO: 354109 - DNA, 15 bp, Homo sapiens
caggggtaggctcag

SEQ ID NO: 354110 - DNA, 15 bp, Homo sapiens
gcaggggtaggctca

SEQ ID NO: 354111 - DNA, 15 bp, Homo sapiens
ggcaggggtaggctc

SEQ ID NO: 354112 - DNA, 15 bp, Homo sapiens
gggcaggggtaggct

SEQ ID NO: 354113 - DNA, 15 bp, Homo sapiens
tgggcaggggtaggc

SEQ ID NO: 354114 - DNA, 15 bp, Homo sapiens
ctgggcaggggtagg

SEQ ID NO: 354115 - DNA, 15 bp, Homo sapiens
cctgggcaggggtag

SEQ ID NO: 354116 - DNA, 15 bp, Homo sapiens
ccctgggcaggggta

SEQ ID NO: 354117 - DNA, 15 bp, Homo sapiens
gccctgggcaggggt

SEQ ID NO: 354118 - DNA, 15 bp, Homo sapiens
ggccctgggcagggg

SEQ ID NO: 354119 - DNA, 15 bp, Homo sapiens
tggccctgggcaggg

SEQ ID NO: 354120 - DNA, 15 bp, Homo sapiens
gtggccctgggcagg

SEQ ID NO: 354121 - DNA, 15 bp, Homo sapiens
ggtggccctgggcag

SEQ ID NO: 354122 - DNA, 15 bp, Homo sapiens
tggtggccctgggca

SEQ ID NO: 354123 - DNA, 15 bp, Homo sapiens
atggtggccctgggc

SEQ ID NO: 354124 - DNA, 15 bp, Homo sapiens
catggtggccctggg

SEQ ID NO: 354125 - DNA, 15 bp, Homo sapiens
gcatggtggccctgg

SEQ ID NO: 354126 - DNA, 15 bp, Homo sapiens
tgcatggtggccctg

SEQ ID NO: 354127 - DNA, 15 bp, Homo sapiens
gtgcatggtggccct

SEQ ID NO: 354128 - DNA, 15 bp, Homo sapiens
ggtgcatggtggccc

SEQ ID NO: 354129 - DNA, 15 bp, Homo sapiens
gggtgcatggtggcc

SEQ ID NO: 354130 - DNA, 15 bp, Homo sapiens
agggtgcatggtggc

SEQ ID NO: 354131 - DNA, 15 bp, Homo sapiens
gagggtgcatggtgg

SEQ ID NO: 354132 - DNA, 15 bp, Homo sapiens
agagggtgcatggtg

SEQ ID NO: 354133 - DNA, 15 bp, Homo sapiens
cagagggtgcatggt

SEQ ID NO: 354134 - DNA, 15 bp, Homo sapiens
acagagggtgcatgg

SEQ ID NO: 354135 - DNA, 15 bp, Homo sapiens
gacagagggtgcatg

SEQ ID NO: 354136 - DNA, 15 bp, Homo sapiens
ggacagagggtgcat

SEQ ID NO: 354137 - DNA, 15 bp, Homo sapiens
gggacagagggtgca

SEQ ID NO: 354138 - DNA, 15 bp, Homo sapiens
ggggacagagggtgc

SEQ ID NO: 354139 - DNA, 15 bp, Homo sapiens
gggggacagagggtg

SEQ ID NO: 354140 - DNA, 15 bp, Homo sapiens
tgggggacagagggt

SEQ ID NO: 354141 - DNA, 15 bp, Homo sapiens
gtgggggacagaggg

SEQ ID NO: 354142 - DNA, 15 bp, Homo sapiens
cgtgggggacagagg

SEQ ID NO: 354143 - DNA, 15 bp, Homo sapiens
gcgtgggggacagag

SEQ ID NO: 354144 - DNA, 15 bp, Homo sapiens
ggcgtgggggacaga

SEQ ID NO: 354145 - DNA, 15 bp, Homo sapiens
aggcgtgggggacag

SEQ ID NO: 354146 - DNA, 15 bp, Homo sapiens
caggcgtgggggaca

SEQ ID NO: 354147 - DNA, 15 bp, Homo sapiens
tcaggcgtgggggac

SEQ ID NO: 354148 - DNA, 15 bp, Homo sapiens
gtcaggcgtggggga

SEQ ID NO: 354149 - DNA, 15 bp, Homo sapiens
ggtcaggcgtggggg

SEQ ID NO: 354150 - DNA, 15 bp, Homo sapiens
gggtcaggcgtgggg

SEQ ID NO: 354151 - DNA, 15 bp, Homo sapiens
cgggtcaggcgtggg

SEQ ID NO: 354152 - DNA, 15 bp, Homo sapiens
acgggtcaggcgtgg

SEQ ID NO: 354153 - DNA, 15 bp, Homo sapiens
gacgggtcaggcgtg

SEQ ID NO: 354154 - DNA, 15 bp, Homo sapiens
ggacgggtcaggcgt

SEQ ID NO: 354155 - DNA, 15 bp, Homo sapiens
gggacgggtcaggcg

SEQ ID NO: 354156 - DNA, 15 bp, Homo sapiens
cgggacgggtcaggc

SEQ ID NO: 354157 - DNA, 15 bp, Homo sapiens
gcgggacgggtcagg

SEQ ID NO: 354158 - DNA, 15 bp, Homo sapiens
ggcgggacgggtcag

SEQ ID NO: 354159 - DNA, 15 bp, Homo sapiens
gggcgggacgggtca

SEQ ID NO: 354160 - DNA, 15 bp, Homo sapiens
ggggcgggacgggtc

SEQ ID NO: 354161 - DNA, 15 bp, Homo sapiens
aggggcgggacgggt

SEQ ID NO: 354162 - DNA, 15 bp, Homo sapiens
gaggggcgggacggg

SEQ ID NO: 354163 - DNA, 15 bp, Homo sapiens
cgaggggcgggacgg

SEQ ID NO: 354164 - DNA, 15 bp, Homo sapiens
ccgaggggcgggacg

SEQ ID NO: 354165 - DNA, 15 bp, Homo sapiens
gccgaggggcgggac

SEQ ID NO: 354166 - DNA, 15 bp, Homo sapiens
tgccgaggggcggga

SEQ ID NO: 354167 - DNA, 15 bp, Homo sapiens
ctgccgaggggcggg

SEQ ID NO: 354168 - DNA, 15 bp, Homo sapiens
cctgccgaggggcgg

SEQ ID NO: 354169 - DNA, 15 bp, Homo sapiens
tcctgccgaggggcg

SEQ ID NO: 354170 - DNA, 15 bp, Homo sapiens
gtcctgccgaggggc

SEQ ID NO: 354171 - DNA, 15 bp, Homo sapiens
ggtcctgccgagggg

SEQ ID NO: 354172 - DNA, 15 bp, Homo sapiens
cggtcctgccgaggg

SEQ ID NO: 354173 - DNA, 15 bp, Homo sapiens
gcggtcctgccgagg

SEQ ID NO: 354174 - DNA, 15 bp, Homo sapiens
ggcggtcctgccgag

SEQ ID NO: 354175 - DNA, 15 bp, Homo sapiens
tggcggtcctgccga

SEQ ID NO: 354176 - DNA, 15 bp, Homo sapiens
atggcggtcctgccg

SEQ ID NO: 354177 - DNA, 15 bp, Homo sapiens
catggcggtcctgcc

SEQ ID NO: 354178 - DNA, 15 bp, Homo sapiens
gcatggcggtcctgc

SEQ ID NO: 354179 - DNA, 15 bp, Homo sapiens
agcatggcggtcctg

SEQ ID NO: 354180 - DNA, 15 bp, Homo sapiens
cagcatggcggtcct

SEQ ID NO: 354181 - DNA, 15 bp, Homo sapiens
tcagcatggcggtcc

SEQ ID NO: 354182 - DNA, 15 bp, Homo sapiens
gtcagcatggcggtc

SEQ ID NO: 354183 - DNA, 15 bp, Homo sapiens
ggtcagcatggcggt

SEQ ID NO: 354184 - DNA, 15 bp, Homo sapiens
aggtcagcatggcgg

SEQ ID NO: 354185 - DNA, 15 bp, Homo sapiens
gaggtcagcatggcg

SEQ ID NO: 354186 - DNA, 15 bp, Homo sapiens
ggaggtcagcatggc

SEQ ID NO: 354187 - DNA, 15 bp, Homo sapiens
cggaggtcagcatgg

SEQ ID NO: 354188 - DNA, 15 bp, Homo sapiens
gcggaggtcagcatg

SEQ ID NO: 354189 - DNA, 15 bp, Homo sapiens
tgcggaggtcagcat

SEQ ID NO: 354190 - DNA, 15 bp, Homo sapiens
atgcggaggtcagca

SEQ ID NO: 354191 - DNA, 15 bp, Homo sapiens
gatgcggaggtcagc

SEQ ID NO: 354192 - DNA, 15 bp, Homo sapiens
ggatgcggaggtcag

SEQ ID NO: 354193 - DNA, 15 bp, Homo sapiens
tggatgcggaggtca

SEQ ID NO: 354194 - DNA, 15 bp, Homo sapiens
atggatgcggaggtc

SEQ ID NO: 354195 - DNA, 15 bp, Homo sapiens
catggatgcggaggt

SEQ ID NO: 354196 - DNA, 15 bp, Homo sapiens
ccatggatgcggagg

SEQ ID NO: 354197 - DNA, 15 bp, Homo sapiens
gccatggatgcggag

SEQ ID NO: 354198 - DNA, 15 bp, Homo sapiens
agccatggatgcgga

SEQ ID NO: 354199 - DNA, 15 bp, Homo sapiens
tagccatggatgcgg

SEQ ID NO: 354200 - DNA, 15 bp, Homo sapiens
gtagccatggatgcg

SEQ ID NO: 354201 - DNA, 15 bp, Homo sapiens
cgtagccatggatgc

SEQ ID NO: 354202 - DNA, 15 bp, Homo sapiens
acgtagccatggatg

SEQ ID NO: 354203 - DNA, 15 bp, Homo sapiens
aacgtagccatggat

SEQ ID NO: 354204 - DNA, 15 bp, Homo sapiens
caacgtagccatgga

SEQ ID NO: 354205 - DNA, 15 bp, Homo sapiens
tcaacgtagccatgg

SEQ ID NO: 354206 - DNA, 15 bp, Homo sapiens
gtcaacgtagccatg

SEQ ID NO: 354207 - DNA, 15 bp, Homo sapiens
cgtcaacgtagccat

SEQ ID NO: 354208 - DNA, 15 bp, Homo sapiens
tcgtcaacgtagcca

SEQ ID NO: 354209 - DNA, 15 bp, Homo sapiens
ctcgtcaacgtagcc

SEQ ID NO: 354210 - DNA, 15 bp, Homo sapiens
cctcgtcaacgtagc

SEQ ID NO: 354211 - DNA, 15 bp, Homo sapiens
acctcgtcaacgtag

SEQ ID NO: 354212 - DNA, 15 bp, Homo sapiens
gacctcgtcaacgta

SEQ ID NO: 354213 - DNA, 15 bp, Homo sapiens
tgacctcgtcaacgt

SEQ ID NO: 354214 - DNA, 15 bp, Homo sapiens
atgacctcgtcaacg

SEQ ID NO: 354215 - DNA, 15 bp, Homo sapiens
catgacctcgtcaac

SEQ ID NO: 354216 - DNA, 15 bp, Homo sapiens
tcatgacctcgtcaa

SEQ ID NO: 354217 - DNA, 15 bp, Homo sapiens
gtcatgacctcgtca

SEQ ID NO: 354218 - DNA, 15 bp, Homo sapiens
ggtcatgacctcgtc

SEQ ID NO: 354219 - DNA, 15 bp, Homo sapiens
gggtcatgacctcgt

SEQ ID NO: 354220 - DNA, 15 bp, Homo sapiens
cgggtcatgacctcg

SEQ ID NO: 354221 - DNA, 15 bp, Homo sapiens
ccgggtcatgacctc

SEQ ID NO: 354222 - DNA, 15 bp, Homo sapiens
gccgggtcatgacct

SEQ ID NO: 354223 - DNA, 15 bp, Homo sapiens
agccgggtcatgacc

SEQ ID NO: 354224 - DNA, 15 bp, Homo sapiens
gagccgggtcatgac

SEQ ID NO: 354225 - DNA, 15 bp, Homo sapiens
tgagccgggtcatga

SEQ ID NO: 354226 - DNA, 15 bp, Homo sapiens
atgagccgggtcatg

SEQ ID NO: 354227 - DNA, 15 bp, Homo sapiens
catgagccgggtcat

SEQ ID NO: 354228 - DNA, 15 bp, Homo sapiens
tcatgagccgggtca

SEQ ID NO: 354229 - DNA, 15 bp, Homo sapiens
ttcatgagccgggtc

SEQ ID NO: 354230 - DNA, 15 bp, Homo sapiens
cttcatgagccgggt

SEQ ID NO: 354231 - DNA, 15 bp, Homo sapiens
gcttcatgagccggg

SEQ ID NO: 354232 - DNA, 15 bp, Homo sapiens
tgcttcatgagccgg

SEQ ID NO: 354233 - DNA, 15 bp, Homo sapiens
gtgcttcatgagccg

SEQ ID NO: 354234 - DNA, 15 bp, Homo sapiens
ggtgcttcatgagcc

SEQ ID NO: 354235 - DNA, 15 bp, Homo sapiens
aggtgcttcatgagc

SEQ ID NO: 354236 - DNA, 15 bp, Homo sapiens
caggtgcttcatgag

SEQ ID NO: 354237 - DNA, 15 bp, Homo sapiens
ccaggtgcttcatga

SEQ ID NO: 354238 - DNA, 15 bp, Homo sapiens
cccaggtgcttcatg

SEQ ID NO: 354239 - DNA, 15 bp, Homo sapiens
ccccaggtgcttcat

SEQ ID NO: 354240 - DNA, 15 bp, Homo sapiens
gccccaggtgcttca

SEQ ID NO: 354241 - DNA, 15 bp, Homo sapiens
agccccaggtgcttc

SEQ ID NO: 354242 - DNA, 15 bp, Homo sapiens
cagccccaggtgctt

SEQ ID NO: 354243 - DNA, 15 bp, Homo sapiens
ccagccccaggtgct

SEQ ID NO: 354244 - DNA, 15 bp, Homo sapiens
tccagccccaggtgc

SEQ ID NO: 354245 - DNA, 15 bp, Homo sapiens
ctccagccccaggtg

SEQ ID NO: 354246 - DNA, 15 bp, Homo sapiens
tctccagccccaggt

SEQ ID NO: 354247 - DNA, 15 bp, Homo sapiens
atctccagccccagg

SEQ ID NO: 354248 - DNA, 15 bp, Homo sapiens
gatctccagccccag

SEQ ID NO: 354249 - DNA, 15 bp, Homo sapiens
ggatctccagcccca

SEQ ID NO: 354250 - DNA, 15 bp, Homo sapiens
gggatctccagcccc

SEQ ID NO: 354251 - DNA, 15 bp, Homo sapiens
ggggatctccagccc

SEQ ID NO: 354252 - DNA, 15 bp, Homo sapiens
cggggatctccagcc

SEQ ID NO: 354253 - DNA, 15 bp, Homo sapiens
gcggggatctccagc

SEQ ID NO: 354254 - DNA, 15 bp, Homo sapiens
ggcggggatctccag

SEQ ID NO: 354255 - DNA, 15 bp, Homo sapiens
aggcggggatctcca

SEQ ID NO: 354256 - DNA, 15 bp, Homo sapiens
caggcggggatctcc

SEQ ID NO: 354257 - DNA, 15 bp, Homo sapiens
ccaggcggggatctc

SEQ ID NO: 354258 - DNA, 15 bp, Homo sapiens
cccaggcggggatct

SEQ ID NO: 354259 - DNA, 15 bp, Homo sapiens
tcccaggcggggatc

SEQ ID NO: 354260 - DNA, 15 bp, Homo sapiens
gtcccaggcggggat

SEQ ID NO: 354261 - DNA, 15 bp, Homo sapiens
cgtcccaggcgggga

SEQ ID NO: 354262 - DNA, 15 bp, Homo sapiens
ccgtcccaggcgggg

SEQ ID NO: 354263 - DNA, 15 bp, Homo sapiens
gccgtcccaggcggg

SEQ ID NO: 354264 - DNA, 15 bp, Homo sapiens
ggccgtcccaggcgg

SEQ ID NO: 354265 - DNA, 15 bp, Homo sapiens
gggccgtcccaggcg

SEQ ID NO: 354266 - DNA, 15 bp, Homo sapiens
ggggccgtcccaggc

SEQ ID NO: 354267 - DNA, 15 bp, Homo sapiens
gggggccgtcccagg

SEQ ID NO: 354268 - DNA, 15 bp, Homo sapiens
cgggggccgtcccag

SEQ ID NO: 354269 - DNA, 15 bp, Homo sapiens
acgggggccgtccca

SEQ ID NO: 354270 - DNA, 15 bp, Homo sapiens
cacgggggccgtccc

SEQ ID NO: 354271 - DNA, 15 bp, Homo sapiens
acacgggggccgtcc

SEQ ID NO: 354272 - DNA, 15 bp, Homo sapiens
cacacgggggccgtc

SEQ ID NO: 354273 - DNA, 15 bp, Homo sapiens
gcacacgggggccgt

SEQ ID NO: 354274 - DNA, 15 bp, Homo sapiens
agcacacgggggccg

SEQ ID NO: 354275 - DNA, 15 bp, Homo sapiens
cagcacacgggggcc

SEQ ID NO: 354276 - DNA, 15 bp, Homo sapiens
ccagcacacgggggc

SEQ ID NO: 354277 - DNA, 15 bp, Homo sapiens
tccagcacacggggg

SEQ ID NO: 354278 - DNA, 15 bp, Homo sapiens
ctccagcacacgggg

SEQ ID NO: 354279 - DNA, 15 bp, Homo sapiens
tctccagcacacggg

SEQ ID NO: 354280 - DNA, 15 bp, Homo sapiens
ctctccagcacacgg

SEQ ID NO: 354281 - DNA, 15 bp, Homo sapiens
cctctccagcacacg

SEQ ID NO: 354282 - DNA, 15 bp, Homo sapiens
ccctctccagcacac

SEQ ID NO: 354283 - DNA, 15 bp, Homo sapiens
gccctctccagcaca

SEQ ID NO: 354284 - DNA, 15 bp, Homo sapiens
cgccctctccagcac

SEQ ID NO: 354285 - DNA, 15 bp, Homo sapiens
gcgccctctccagca

SEQ ID NO: 354286 - DNA, 15 bp, Homo sapiens
agcgccctctccagc

SEQ ID NO: 354287 - DNA, 15 bp, Homo sapiens
cagcgccctctccag

SEQ ID NO: 354288 - DNA, 15 bp, Homo sapiens
gcagcgccctctcca

SEQ ID NO: 354289 - DNA, 15 bp, Homo sapiens
ggcagcgccctctcc

SEQ ID NO: 354290 - DNA, 15 bp, Homo sapiens
tggcagcgccctctc

SEQ ID NO: 354291 - DNA, 15 bp, Homo sapiens
gtggcagcgccctct

SEQ ID NO: 354292 - DNA, 15 bp, Homo sapiens
ggtggcagcgccctc

SEQ ID NO: 354293 - DNA, 15 bp, Homo sapiens
gggtggcagcgccct

SEQ ID NO: 354294 - DNA, 15 bp, Homo sapiens
ggggtggcagcgccc

SEQ ID NO: 354295 - DNA, 15 bp, Homo sapiens
aggggtggcagcgcc

SEQ ID NO: 354296 - DNA, 15 bp, Homo sapiens
caggggtggcagcgc

SEQ ID NO: 354297 - DNA, 15 bp, Homo sapiens
gcaggggtggcagcg

SEQ ID NO: 354298 - DNA, 15 bp, Homo sapiens
ggcaggggtggcagc

SEQ ID NO: 354299 - DNA, 15 bp, Homo sapiens
gggcaggggtggcag

SEQ ID NO: 354300 - DNA, 15 bp, Homo sapiens
ggggcaggggtggca

SEQ ID NO: 354301 - DNA, 15 bp, Homo sapiens
cggggcaggggtggc

SEQ ID NO: 354302 - DNA, 15 bp, Homo sapiens
gcggggcaggggtgg

SEQ ID NO: 354303 - DNA, 15 bp, Homo sapiens
ggcggggcaggggtg

SEQ ID NO: 354304 - DNA, 15 bp, Homo sapiens
gggcggggcaggggt

SEQ ID NO: 354305 - DNA, 15 bp, Homo sapiens
cgggcggggcagggg

SEQ ID NO: 354306 - DNA, 15 bp, Homo sapiens
gcgggcggggcaggg

SEQ ID NO: 354307 - DNA, 15 bp, Homo sapiens
ggcgggcggggcagg

SEQ ID NO: 354308 - DNA, 15 bp, Homo sapiens
gggcgggcggggcag

SEQ ID NO: 354309 - DNA, 15 bp, Homo sapiens
tgggcgggcggggca

SEQ ID NO: 354310 - DNA, 15 bp, Homo sapiens
gtgggcgggcggggc

SEQ ID NO: 354311 - DNA, 15 bp, Homo sapiens
ggtgggcgggcgggg

SEQ ID NO: 354312 - DNA, 15 bp, Homo sapiens
gggtgggcgggcggg

SEQ ID NO: 354313 - DNA, 15 bp, Homo sapiens
ggggtgggcgggcgg

SEQ ID NO: 354314 - DNA, 15 bp, Homo sapiens
gggggtgggcgggcg

SEQ ID NO: 354315 - DNA, 15 bp, Homo sapiens
tgggggtgggcgggc

SEQ ID NO: 354316 - DNA, 15 bp, Homo sapiens
ttgggggtgggcggg

SEQ ID NO: 354317 - DNA, 15 bp, Homo sapiens
cttgggggtgggcgg

SEQ ID NO: 354318 - DNA, 15 bp, Homo sapiens
gcttgggggtgggcg

SEQ ID NO: 354319 - DNA, 15 bp, Homo sapiens
agcttgggggtgggc

SEQ ID NO: 354320 - DNA, 15 bp, Homo sapiens
cagcttgggggtggg

SEQ ID NO: 354321 - DNA, 15 bp, Homo sapiens
ccagcttgggggtgg

SEQ ID NO: 354322 - DNA, 15 bp, Homo sapiens
tccagcttgggggtg

SEQ ID NO: 354323 - DNA, 15 bp, Homo sapiens
ctccagcttgggggt

SEQ ID NO: 354324 - DNA, 15 bp, Homo sapiens
gctccagcttggggg

SEQ ID NO: 354325 - DNA, 15 bp, Homo sapiens
ggctccagcttgggg

SEQ ID NO: 354326 - DNA, 15 bp, Homo sapiens
gggctccagcttggg

SEQ ID NO: 354327 - DNA, 15 bp, Homo sapiens
tgggctccagcttgg

SEQ ID NO: 354328 - DNA, 15 bp, Homo sapiens
ttgggctccagcttg

SEQ ID NO: 354329 - DNA, 15 bp, Homo sapiens
cttgggctccagctt

SEQ ID NO: 354330 - DNA, 15 bp, Homo sapiens
ccttgggctccagct

SEQ ID NO: 354331 - DNA, 15 bp, Homo sapiens
tccttgggctccagc

SEQ ID NO: 354332 - DNA, 15 bp, Homo sapiens
ctccttgggctccag

SEQ ID NO: 354333 - DNA, 15 bp, Homo sapiens
cctccttgggctcca

SEQ ID NO: 354334 - DNA, 15 bp, Homo sapiens
tcctccttgggctcc

SEQ ID NO: 354335 - DNA, 15 bp, Homo sapiens
ttcctccttgggctc

SEQ ID NO: 354336 - DNA, 15 bp, Homo sapiens
attcctccttgggct

SEQ ID NO: 354337 - DNA, 15 bp, Homo sapiens
gattcctccttgggc

SEQ ID NO: 354338 - DNA, 15 bp, Homo sapiens
agattcctccttggg

SEQ ID NO: 354339 - DNA, 15 bp, Homo sapiens
gagattcctccttgg

SEQ ID NO: 354340 - DNA, 15 bp, Homo sapiens
ggagattcctccttg

SEQ ID NO: 354341 - DNA, 15 bp, Homo sapiens
gggagattcctcctt

SEQ ID NO: 354342 - DNA, 15 bp, Homo sapiens
tgggagattcctcct

SEQ ID NO: 354343 - DNA, 15 bp, Homo sapiens
gtgggagattcctcc

SEQ ID NO: 354344 - DNA, 15 bp, Homo sapiens
ggtgggagattcctc

SEQ ID NO: 354345 - DNA, 15 bp, Homo sapiens
gggtgggagattcct

SEQ ID NO: 354346 - DNA, 15 bp, Homo sapiens
cgggtgggagattcc

SEQ ID NO: 354347 - DNA, 15 bp, Homo sapiens
ccgggtgggagattc

SEQ ID NO: 354348 - DNA, 15 bp, Homo sapiens
tccgggtgggagatt

SEQ ID NO: 354349 - DNA, 15 bp, Homo sapiens
atccgggtgggagat

SEQ ID NO: 354350 - DNA, 15 bp, Homo sapiens
gatccgggtgggaga

SEQ ID NO: 354351 - DNA, 15 bp, Homo sapiens
tgatccgggtgggag

SEQ ID NO: 354352 - DNA, 15 bp, Homo sapiens
ttgatccgggtggga

SEQ ID NO: 354353 - DNA, 15 bp, Homo sapiens
gttgatccgggtggg

SEQ ID NO: 354354 - DNA, 15 bp, Homo sapiens
cgttgatccgggtgg

SEQ ID NO: 354355 - DNA, 15 bp, Homo sapiens
ccgttgatccgggtg

SEQ ID NO: 354356 - DNA, 15 bp, Homo sapiens
gccgttgatccgggt

SEQ ID NO: 354357 - DNA, 15 bp, Homo sapiens
agccgttgatccggg

SEQ ID NO: 354358 - DNA, 15 bp, Homo sapiens
gagccgttgatccgg

SEQ ID NO: 354359 - DNA, 15 bp, Homo sapiens
agagccgttgatccg

SEQ ID NO: 354360 - DNA, 15 bp, Homo sapiens
tagagccgttgatcc

SEQ ID NO: 354361 - DNA, 15 bp, Homo sapiens
atagagccgttgatc

SEQ ID NO: 354362 - DNA, 15 bp, Homo sapiens
gatagagccgttgat

SEQ ID NO: 354363 - DNA, 15 bp, Homo sapiens
ggatagagccgttga

SEQ ID NO: 354364 - DNA, 15 bp, Homo sapiens
gggatagagccgttg

SEQ ID NO: 354365 - DNA, 15 bp, Homo sapiens
ggggatagagccgtt

SEQ ID NO: 354366 - DNA, 15 bp, Homo sapiens
cggggatagagccgt

SEQ ID NO: 354367 - DNA, 15 bp, Homo sapiens
gcggggatagagccg

SEQ ID NO: 354368 - DNA, 15 bp, Homo sapiens
ggcggggatagagcc

SEQ ID NO: 354369 - DNA, 15 bp, Homo sapiens
cggcggggatagagc

SEQ ID NO: 354370 - DNA, 15 bp, Homo sapiens
ccggcggggatagag

SEQ ID NO: 354371 - DNA, 15 bp, Homo sapiens
gccggcggggataga

SEQ ID NO: 354372 - DNA, 15 bp, Homo sapiens
ggccggcggggatag

SEQ ID NO: 354373 - DNA, 15 bp, Homo sapiens
gggccggcggggata

SEQ ID NO: 354374 - DNA, 15 bp, Homo sapiens
ggggccggcggggat

SEQ ID NO: 354375 - DNA, 15 bp, Homo sapiens
tggggccggcgggga

SEQ ID NO: 354376 - DNA, 15 bp, Homo sapiens
ttggggccggcgggg

SEQ ID NO: 354377 - DNA, 15 bp, Homo sapiens
cttggggccggcggg

SEQ ID NO: 354378 - DNA, 15 bp, Homo sapiens
gcttggggccggcgg

SEQ ID NO: 354379 - DNA, 15 bp, Homo sapiens
tgcttggggccggcg

SEQ ID NO: 354380 - DNA, 15 bp, Homo sapiens
ctgcttggggccggc

SEQ ID NO: 354381 - DNA, 15 bp, Homo sapiens
cctgcttggggccgg

SEQ ID NO: 354382 - DNA, 15 bp, Homo sapiens
tcctgcttggggccg

SEQ ID NO: 354383 - DNA, 15 bp, Homo sapiens
ctcctgcttggggcc

SEQ ID NO: 354384 - DNA, 15 bp, Homo sapiens
gctcctgcttggggc

SEQ ID NO: 354385 - DNA, 15 bp, Homo sapiens
ggctcctgcttgggg

SEQ ID NO: 354386 - DNA, 15 bp, Homo sapiens
gggctcctgcttggg

SEQ ID NO: 354387 - DNA, 15 bp, Homo sapiens
agggctcctgcttgg

SEQ ID NO: 354388 - DNA, 15 bp, Homo sapiens
cagggctcctgcttg

SEQ ID NO: 354389 - DNA, 15 bp, Homo sapiens
gcagggctcctgctt

SEQ ID NO: 354390 - DNA, 15 bp, Homo sapiens
cgcagggctcctgct

SEQ ID NO: 354391 - DNA, 15 bp, Homo sapiens
gcgcagggctcctgc

SEQ ID NO: 354392 - DNA, 15 bp, Homo sapiens
ggcgcagggctcctg

SEQ ID NO: 354393 - DNA, 15 bp, Homo sapiens
gggcgcagggctcct

SEQ ID NO: 354394 - DNA, 15 bp, Homo sapiens
tgggcgcagggctcc

SEQ ID NO: 354395 - DNA, 15 bp, Homo sapiens
ctgggcgcagggctc

SEQ ID NO: 354396 - DNA, 15 bp, Homo sapiens
gctgggcgcagggct

SEQ ID NO: 354397 - DNA, 15 bp, Homo sapiens
tgctgggcgcagggc

SEQ ID NO: 354398 - DNA, 15 bp, Homo sapiens
gtgctgggcgcaggg

SEQ ID NO: 354399 - DNA, 15 bp, Homo sapiens
tgtgctgggcgcagg

SEQ ID NO: 354400 - DNA, 15 bp, Homo sapiens
ttgtgctgggcgcag

SEQ ID NO: 354401 - DNA, 15 bp, Homo sapiens
gttgtgctgggcgca

SEQ ID NO: 354402 - DNA, 15 bp, Homo sapiens
cgttgtgctgggcgc

SEQ ID NO: 354403 - DNA, 15 bp, Homo sapiens
ccgttgtgctgggcg

SEQ ID NO: 354404 - DNA, 15 bp, Homo sapiens
gccgttgtgctgggc

SEQ ID NO: 354405 - DNA, 15 bp, Homo sapiens
agccgttgtgctggg

SEQ ID NO: 354406 - DNA, 15 bp, Homo sapiens
gagccgttgtgctgg

SEQ ID NO: 354407 - DNA, 15 bp, Homo sapiens
tgagccgttgtgctg

SEQ ID NO: 354408 - DNA, 15 bp, Homo sapiens
ctgagccgttgtgct

SEQ ID NO: 354409 - DNA, 15 bp, Homo sapiens
tctgagccgttgtgc

SEQ ID NO: 354410 - DNA, 15 bp, Homo sapiens
ctctgagccgttgtg

SEQ ID NO: 354411 - DNA, 15 bp, Homo sapiens
gctctgagccgttgt

SEQ ID NO: 354412 - DNA, 15 bp, Homo sapiens
ggctctgagccgttg

SEQ ID NO: 354413 - DNA, 15 bp, Homo sapiens
gggctctgagccgtt

SEQ ID NO: 354414 - DNA, 15 bp, Homo sapiens
cgggctctgagccgt

SEQ ID NO: 354415 - DNA, 15 bp, Homo sapiens
gcgggctctgagccg

SEQ ID NO: 354416 - DNA, 15 bp, Homo sapiens
ggcgggctctgagcc

SEQ ID NO: 354417 - DNA, 15 bp, Homo sapiens
tggcgggctctgagc

SEQ ID NO: 354418 - DNA, 15 bp, Homo sapiens
ctggcgggctctgag

SEQ ID NO: 354419 - DNA, 15 bp, Homo sapiens
gctggcgggctctga

SEQ ID NO: 354420 - DNA, 15 bp, Homo sapiens
ggctggcgggctctg

SEQ ID NO: 354421 - DNA, 15 bp, Homo sapiens
gggctggcgggctct

SEQ ID NO: 354422 - DNA, 15 bp, Homo sapiens
ggggctggcgggctc

SEQ ID NO: 354423 - DNA, 15 bp, Homo sapiens
tggggctggcgggct

SEQ ID NO: 354424 - DNA, 15 bp, Homo sapiens
ttggggctggcgggc

SEQ ID NO: 354425 - DNA, 15 bp, Homo sapiens
tttggggctggcggg

SEQ ID NO: 354426 - DNA, 15 bp, Homo sapiens
gtttggggctggcgg

SEQ ID NO: 354427 - DNA, 15 bp, Homo sapiens
cgtttggggctggcg

SEQ ID NO: 354428 - DNA, 15 bp, Homo sapiens
ccgtttggggctggc

SEQ ID NO: 354429 - DNA, 15 bp, Homo sapiens
cccgtttggggctgg

SEQ ID NO: 354430 - DNA, 15 bp, Homo sapiens
tcccgtttggggctg

SEQ ID NO: 354431 - DNA, 15 bp, Homo sapiens
ctcccgtttggggct

SEQ ID NO: 354432 - DNA, 15 bp, Homo sapiens
gctcccgtttggggc

SEQ ID NO: 354433 - DNA, 15 bp, Homo sapiens
cgctcccgtttgggg

SEQ ID NO: 354434 - DNA, 15 bp, Homo sapiens
ccgctcccgtttggg

SEQ ID NO: 354435 - DNA, 15 bp, Homo sapiens
gccgctcccgtttgg

SEQ ID NO: 354436 - DNA, 15 bp, Homo sapiens
ggccgctcccgtttg

SEQ ID NO: 354437 - DNA, 15 bp, Homo sapiens
gggccgctcccgttt

SEQ ID NO: 354438 - DNA, 15 bp, Homo sapiens
tgggccgctcccgtt

SEQ ID NO: 354439 - DNA, 15 bp, Homo sapiens
gtgggccgctcccgt

SEQ ID NO: 354440 - DNA, 15 bp, Homo sapiens
ggtgggccgctcccg

SEQ ID NO: 354441 - DNA, 15 bp, Homo sapiens
tggtgggccgctccc

SEQ ID NO: 354442 - DNA, 15 bp, Homo sapiens
ctggtgggccgctcc

SEQ ID NO: 354443 - DNA, 15 bp, Homo sapiens
gctggtgggccgctc

SEQ ID NO: 354444 - DNA, 15 bp, Homo sapiens
ggctggtgggccgct

SEQ ID NO: 354445 - DNA, 15 bp, Homo sapiens
gggctggtgggccgc

SEQ ID NO: 354446 - DNA, 15 bp, Homo sapiens
agggctggtgggccg

SEQ ID NO: 354447 - DNA, 15 bp, Homo sapiens
cagggctggtgggcc

SEQ ID NO: 354448 - DNA, 15 bp, Homo sapiens
gcagggctggtgggc

SEQ ID NO: 354449 - DNA, 15 bp, Homo sapiens
ggcagggctggtggg

SEQ ID NO: 354450 - DNA, 15 bp, Homo sapiens
gggcagggctggtgg

SEQ ID NO: 354451 - DNA, 15 bp, Homo sapiens
ggggcagggctggtg

SEQ ID NO: 354452 - DNA, 15 bp, Homo sapiens
gggggcagggctggt

SEQ ID NO: 354453 - DNA, 15 bp, Homo sapiens
ggggggcagggctgg

SEQ ID NO: 354454 - DNA, 15 bp, Homo sapiens
tggggggcagggctg

SEQ ID NO: 354455 - DNA, 15 bp, Homo sapiens
gtggggggcagggct

SEQ ID NO: 354456 - DNA, 15 bp, Homo sapiens
tgtggggggcagggc

SEQ ID NO: 354457 - DNA, 15 bp, Homo sapiens
ctgtggggggcaggg

SEQ ID NO: 354458 - DNA, 15 bp, Homo sapiens
tctgtggggggcagg

SEQ ID NO: 354459 - DNA, 15 bp, Homo sapiens
gtctgtggggggcag

SEQ ID NO: 354460 - DNA, 15 bp, Homo sapiens
ggtctgtggggggca

SEQ ID NO: 354461 - DNA, 15 bp, Homo sapiens
gggtctgtggggggc

SEQ ID NO: 354462 - DNA, 15 bp, Homo sapiens
ggggtctgtgggggg

SEQ ID NO: 354463 - DNA, 15 bp, Homo sapiens
gggggtctgtggggg

SEQ ID NO: 354464 - DNA, 15 bp, Homo sapiens
ggggggtctgtgggg

SEQ ID NO: 354465 - DNA, 15 bp, Homo sapiens
tggggggtctgtggg

SEQ ID NO: 354466 - DNA, 15 bp, Homo sapiens
ttggggggtctgtgg

SEQ ID NO: 354467 - DNA, 15 bp, Homo sapiens
tttggggggtctgtg

SEQ ID NO: 354468 - DNA, 15 bp, Homo sapiens
ttttggggggtctgt

SEQ ID NO: 354469 - DNA, 15 bp, Homo sapiens
cttttggggggtctg

SEQ ID NO: 354470 - DNA, 15 bp, Homo sapiens
ccttttggggggtct

SEQ ID NO: 354471 - DNA, 15 bp, Homo sapiens
cccttttggggggtc

SEQ ID NO: 354472 - DNA, 15 bp, Homo sapiens
acccttttggggggt

SEQ ID NO: 354473 - DNA, 15 bp, Homo sapiens
cacccttttgggggg

SEQ ID NO: 354474 - DNA, 15 bp, Homo sapiens
tcacccttttggggg

SEQ ID NO: 354475 - DNA, 15 bp, Homo sapiens
ttcacccttttgggg

SEQ ID NO: 354476 - DNA, 15 bp, Homo sapiens
cttcacccttttggg

SEQ ID NO: 354477 - DNA, 15 bp, Homo sapiens
ccttcacccttttgg

SEQ ID NO: 354478 - DNA, 15 bp, Homo sapiens
gccttcacccttttg

SEQ ID NO: 354479 - DNA, 15 bp, Homo sapiens
ggccttcaccctttt

SEQ ID NO: 354480 - DNA, 15 bp, Homo sapiens
tggccttcacccttt

SEQ ID NO: 354481 - DNA, 15 bp, Homo sapiens
ttggccttcaccctt

SEQ ID NO: 354482 - DNA, 15 bp, Homo sapiens
cttggccttcaccct

SEQ ID NO: 354483 - DNA, 15 bp, Homo sapiens
ccttggccttcaccc

SEQ ID NO: 354484 - DNA, 15 bp, Homo sapiens
gccttggccttcacc

SEQ ID NO: 354485 - DNA, 15 bp, Homo sapiens
cgccttggccttcac

SEQ ID NO: 354486 - DNA, 15 bp, Homo sapiens
ccgccttggccttca

SEQ ID NO: 354487 - DNA, 15 bp, Homo sapiens
accgccttggccttc

SEQ ID NO: 354488 - DNA, 15 bp, Homo sapiens
gaccgccttggcctt

SEQ ID NO: 354489 - DNA, 15 bp, Homo sapiens
ggaccgccttggcct

SEQ ID NO: 354490 - DNA, 15 bp, Homo sapiens
gggaccgccttggcc

SEQ ID NO: 354491 - DNA, 15 bp, Homo sapiens
ggggaccgccttggc

SEQ ID NO: 354492 - DNA, 15 bp, Homo sapiens
tggggaccgccttgg

SEQ ID NO: 354493 - DNA, 15 bp, Homo sapiens
ctggggaccgccttg

SEQ ID NO: 354494 - DNA, 15 bp, Homo sapiens
gctggggaccgcctt

SEQ ID NO: 354495 - DNA, 15 bp, Homo sapiens
agctggggaccgcct

SEQ ID NO: 354496 - DNA, 15 bp, Homo sapiens
cagctggggaccgcc

SEQ ID NO: 354497 - DNA, 15 bp, Homo sapiens
tcagctggggaccgc

SEQ ID NO: 354498 - DNA, 15 bp, Homo sapiens
gtcagctggggaccg

SEQ ID NO: 354499 - DNA, 15 bp, Homo sapiens
ggtcagctggggacc

SEQ ID NO: 354500 - DNA, 15 bp, Homo sapiens
tggtcagctggggac

SEQ ID NO: 354501 - DNA, 15 bp, Homo sapiens
ctggtcagctgggga

SEQ ID NO: 354502 - DNA, 15 bp, Homo sapiens
cctggtcagctgggg

SEQ ID NO: 354503 - DNA, 15 bp, Homo sapiens
ccctggtcagctggg

SEQ ID NO: 354504 - DNA, 15 bp, Homo sapiens
accctggtcagctgg

SEQ ID NO: 354505 - DNA, 15 bp, Homo sapiens
caccctggtcagctg

SEQ ID NO: 354506 - DNA, 15 bp, Homo sapiens
gcaccctggtcagct

SEQ ID NO: 354507 - DNA, 15 bp, Homo sapiens
agcaccctggtcagc

SEQ ID NO: 354508 - DNA, 15 bp, Homo sapiens
aagcaccctggtcag

SEQ ID NO: 354509 - DNA, 15 bp, Homo sapiens
caagcaccctggtca

SEQ ID NO: 354510 - DNA, 15 bp, Homo sapiens
ccaagcaccctggtc

SEQ ID NO: 354511 - DNA, 15 bp, Homo sapiens
cccaagcaccctggt

SEQ ID NO: 354512 - DNA, 15 bp, Homo sapiens
ccccaagcaccctgg

SEQ ID NO: 354513 - DNA, 15 bp, Homo sapiens
tccccaagcaccctg

SEQ ID NO: 354514 - DNA, 15 bp, Homo sapiens
ctccccaagcaccct

SEQ ID NO: 354515 - DNA, 15 bp, Homo sapiens
cctccccaagcaccc

SEQ ID NO: 354516 - DNA, 15 bp, Homo sapiens
ccctccccaagcacc

SEQ ID NO: 354517 - DNA, 15 bp, Homo sapiens
accctccccaagcac

SEQ ID NO: 354518 - DNA, 15 bp, Homo sapiens
caccctccccaagca

SEQ ID NO: 354519 - DNA, 15 bp, Homo sapiens
ccaccctccccaagc

SEQ ID NO: 354520 - DNA, 15 bp, Homo sapiens
cccaccctccccaag

SEQ ID NO: 354521 - DNA, 15 bp, Homo sapiens
ccccaccctccccaa

SEQ ID NO: 354522 - DNA, 15 bp, Homo sapiens
gccccaccctcccca

SEQ ID NO: 354523 - DNA, 15 bp, Homo sapiens
agccccaccctcccc

SEQ ID NO: 354524 - DNA, 15 bp, Homo sapiens
aagccccaccctccc

SEQ ID NO: 354525 - DNA, 15 bp, Homo sapiens
aaagccccaccctcc

SEQ ID NO: 354526 - DNA, 15 bp, Homo sapiens
aaaagccccaccctc

SEQ ID NO: 354527 - DNA, 15 bp, Homo sapiens
aaaaagccccaccct

SEQ ID NO: 354528 - DNA, 15 bp, Homo sapiens
caaaaagccccaccc

SEQ ID NO: 354529 - DNA, 15 bp, Homo sapiens
acaaaaagccccacc

SEQ ID NO: 354530 - DNA, 15 bp, Homo sapiens
tacaaaaagccccac

SEQ ID NO: 354531 - DNA, 15 bp, Homo sapiens
ctacaaaaagcccca

SEQ ID NO: 354532 - DNA, 15 bp, Homo sapiens
tctacaaaaagcccc

SEQ ID NO: 354533 - DNA, 15 bp, Homo sapiens
ttctacaaaaagccc

SEQ ID NO: 354534 - DNA, 15 bp, Homo sapiens
tttctacaaaaagcc

SEQ ID NO: 354535 - DNA, 15 bp, Homo sapiens
gtttctacaaaaagc

SEQ ID NO: 354536 - DNA, 15 bp, Homo sapiens
agtttctacaaaaag

SEQ ID NO: 354537 - DNA, 15 bp, Homo sapiens
cagtttctacaaaaa

SEQ ID NO: 354538 - DNA, 15 bp, Homo sapiens
acagtttctacaaaa

SEQ ID NO: 354539 - DNA, 15 bp, Homo sapiens
cacagtttctacaaa

SEQ ID NO: 354540 - DNA, 15 bp, Homo sapiens
ccacagtttctacaa

SEQ ID NO: 354541 - DNA, 15 bp, Homo sapiens
tccacagtttctaca

SEQ ID NO: 354542 - DNA, 15 bp, Homo sapiens
atccacagtttctac

SEQ ID NO: 354543 - DNA, 15 bp, Homo sapiens
aatccacagtttcta

SEQ ID NO: 354544 - DNA, 15 bp, Homo sapiens
gaatccacagtttct

SEQ ID NO: 354545 - DNA, 15 bp, Homo sapiens
agaatccacagtttc

SEQ ID NO: 354546 - DNA, 15 bp, Homo sapiens
aagaatccacagttt

SEQ ID NO: 354547 - DNA, 15 bp, Homo sapiens
aaagaatccacagtt

SEQ ID NO: 354548 - DNA, 15 bp, Homo sapiens
aaaagaatccacagt

SEQ ID NO: 354549 - DNA, 15 bp, Homo sapiens
aaaaagaatccacag

SEQ ID NO: 354550 - DNA, 15 bp, Homo sapiens
gaaaaagaatccaca

SEQ ID NO: 354551 - DNA, 15 bp, Homo sapiens
agaaaaagaatccac

SEQ ID NO: 354552 - DNA, 15 bp, Homo sapiens
gagaaaaagaatcca

SEQ ID NO: 354553 - DNA, 15 bp, Homo sapiens
agagaaaaagaatcc

SEQ ID NO: 354554 - DNA, 15 bp, Homo sapiens
gagagaaaaagaatc

SEQ ID NO: 354555 - DNA, 15 bp, Homo sapiens
cgagagaaaaagaat

SEQ ID NO: 354556 - DNA, 15 bp, Homo sapiens
acgagagaaaaagaa

SEQ ID NO: 354557 - DNA, 15 bp, Homo sapiens
cacgagagaaaaaga

SEQ ID NO: 354558 - DNA, 15 bp, Homo sapiens
ccacgagagaaaaag

SEQ ID NO: 354559 - DNA, 15 bp, Homo sapiens
accacgagagaaaaa

SEQ ID NO: 354560 - DNA, 15 bp, Homo sapiens
gaccacgagagaaaa

SEQ ID NO: 354561 - DNA, 15 bp, Homo sapiens
agaccacgagagaaa

SEQ ID NO: 354562 - DNA, 15 bp, Homo sapiens
gagaccacgagagaa

SEQ ID NO: 354563 - DNA, 15 bp, Homo sapiens
tgagaccacgagaga

SEQ ID NO: 354564 - DNA, 15 bp, Homo sapiens
gtgagaccacgagag

SEQ ID NO: 354565 - DNA, 15 bp, Homo sapiens
agtgagaccacgaga

SEQ ID NO: 354566 - DNA, 15 bp, Homo sapiens
aagtgagaccacgag

SEQ ID NO: 354567 - DNA, 15 bp, Homo sapiens
aaagtgagaccacga

SEQ ID NO: 354568 - DNA, 15 bp, Homo sapiens
caaagtgagaccacg

SEQ ID NO: 354569 - DNA, 15 bp, Homo sapiens
acaaagtgagaccac

SEQ ID NO: 354570 - DNA, 15 bp, Homo sapiens
aacaaagtgagacca

SEQ ID NO: 354571 - DNA, 15 bp, Homo sapiens
taacaaagtgagacc

SEQ ID NO: 354572 - DNA, 15 bp, Homo sapiens
gtaacaaagtgagac

SEQ ID NO: 354573 - DNA, 15 bp, Homo sapiens
agtaacaaagtgaga

SEQ ID NO: 354574 - DNA, 15 bp, Homo sapiens
aagtaacaaagtgag

SEQ ID NO: 354575 - DNA, 15 bp, Homo sapiens
caagtaacaaagtga

SEQ ID NO: 354576 - DNA, 15 bp, Homo sapiens
acaagtaacaaagtg

SEQ ID NO: 354577 - DNA, 15 bp, Homo sapiens
aacaagtaacaaagt

SEQ ID NO: 354578 - DNA, 15 bp, Homo sapiens
aaacaagtaacaaag

SEQ ID NO: 354579 - DNA, 15 bp, Homo sapiens
gaaacaagtaacaaa

SEQ ID NO: 354580 - DNA, 15 bp, Homo sapiens
agaaacaagtaacaa

SEQ ID NO: 354581 - DNA, 15 bp, Homo sapiens
cagaaacaagtaaca

SEQ ID NO: 354582 - DNA, 15 bp, Homo sapiens
acagaaacaagtaac

SEQ ID NO: 354583 - DNA, 15 bp, Homo sapiens
gacagaaacaagtaa

SEQ ID NO: 354584 - DNA, 15 bp, Homo sapiens
ggacagaaacaagta

SEQ ID NO: 354585 - DNA, 15 bp, Homo sapiens
gggacagaaacaagt

SEQ ID NO: 354586 - DNA, 15 bp, Homo sapiens
ggggacagaaacaag

SEQ ID NO: 354587 - DNA, 15 bp, Homo sapiens
cggggacagaaacaa

SEQ ID NO: 354588 - DNA, 15 bp, Homo sapiens
ccggggacagaaaca

SEQ ID NO: 354589 - DNA, 15 bp, Homo sapiens
cccggggacagaaac

SEQ ID NO: 354590 - DNA, 15 bp, Homo sapiens
tcccggggacagaaa

SEQ ID NO: 354591 - DNA, 15 bp, Homo sapiens
ctcccggggacagaa

SEQ ID NO: 354592 - DNA, 15 bp, Homo sapiens
gctcccggggacaga

SEQ ID NO: 354593 - DNA, 15 bp, Homo sapiens
ggctcccggggacag

SEQ ID NO: 354594 - DNA, 15 bp, Homo sapiens
aggctcccggggaca

SEQ ID NO: 354595 - DNA, 15 bp, Homo sapiens
gaggctcccggggac

SEQ ID NO: 354596 - DNA, 15 bp, Homo sapiens
tgaggctcccgggga

SEQ ID NO: 354597 - DNA, 15 bp, Homo sapiens
ctgaggctcccgggg

SEQ ID NO: 354598 - DNA, 15 bp, Homo sapiens
cctgaggctcccggg

SEQ ID NO: 354599 - DNA, 15 bp, Homo sapiens
ccctgaggctcccgg

SEQ ID NO: 354600 - DNA, 15 bp, Homo sapiens
gccctgaggctcccg

SEQ ID NO: 354601 - DNA, 15 bp, Homo sapiens
agccctgaggctccc

SEQ ID NO: 354602 - DNA, 15 bp, Homo sapiens
gagccctgaggctcc

SEQ ID NO: 354603 - DNA, 15 bp, Homo sapiens
agagccctgaggctc

SEQ ID NO: 354604 - DNA, 15 bp, Homo sapiens
cagagccctgaggct

SEQ ID NO: 354605 - DNA, 15 bp, Homo sapiens
tcagagccctgaggc

SEQ ID NO: 354606 - DNA, 15 bp, Homo sapiens
ctcagagccctgagg

SEQ ID NO: 354607 - DNA, 15 bp, Homo sapiens
tctcagagccctgag

SEQ ID NO: 354608 - DNA, 15 bp, Homo sapiens
ctctcagagccctga

SEQ ID NO: 354609 - DNA, 15 bp, Homo sapiens
gctctcagagccctg

SEQ ID NO: 354610 - DNA, 15 bp, Homo sapiens
agctctcagagccct

SEQ ID NO: 354611 - DNA, 15 bp, Homo sapiens
cagctctcagagccc

SEQ ID NO: 354612 - DNA, 15 bp, Homo sapiens
acagctctcagagcc

SEQ ID NO: 354613 - DNA, 15 bp, Homo sapiens
cacagctctcagagc

SEQ ID NO: 354614 - DNA, 15 bp, Homo sapiens
gcacagctctcagag

SEQ ID NO: 354615 - DNA, 15 bp, Homo sapiens
agcacagctctcaga

SEQ ID NO: 354616 - DNA, 15 bp, Homo sapiens
gagcacagctctcag

SEQ ID NO: 354617 - DNA, 15 bp, Homo sapiens
ggagcacagctctca

SEQ ID NO: 354618 - DNA, 15 bp, Homo sapiens
tggagcacagctctc

SEQ ID NO: 354619 - DNA, 15 bp, Homo sapiens
ctggagcacagctct

SEQ ID NO: 354620 - DNA, 15 bp, Homo sapiens
cctggagcacagctc

SEQ ID NO: 354621 - DNA, 15 bp, Homo sapiens
gcctggagcacagct

SEQ ID NO: 354622 - DNA, 15 bp, Homo sapiens
ggcctggagcacagc

SEQ ID NO: 354623 - DNA, 15 bp, Homo sapiens
tggcctggagcacag

SEQ ID NO: 354624 - DNA, 15 bp, Homo sapiens
ctggcctggagcaca

SEQ ID NO: 354625 - DNA, 15 bp, Homo sapiens
cctggcctggagcac

SEQ ID NO: 354626 - DNA, 15 bp, Homo sapiens
ccctggcctggagca

SEQ ID NO: 354627 - DNA, 15 bp, Homo sapiens
cccctggcctggagc

SEQ ID NO: 354628 - DNA, 15 bp, Homo sapiens
acccctggcctggag

SEQ ID NO: 354629 - DNA, 15 bp, Homo sapiens
aacccctggcctgga

SEQ ID NO: 354630 - DNA, 15 bp, Homo sapiens
taacccctggcctgg

SEQ ID NO: 354631 - DNA, 15 bp, Homo sapiens
gtaacccctggcctg

SEQ ID NO: 354632 - DNA, 15 bp, Homo sapiens
tgtaacccctggcct

SEQ ID NO: 354633 - DNA, 15 bp, Homo sapiens
gtgtaacccctggcc

SEQ ID NO: 354634 - DNA, 15 bp, Homo sapiens
ggtgtaacccctggc

SEQ ID NO: 354635 - DNA, 15 bp, Homo sapiens
aggtgtaacccctgg

SEQ ID NO: 354636 - DNA, 15 bp, Homo sapiens
caggtgtaacccctg

SEQ ID NO: 354637 - DNA, 15 bp, Homo sapiens
gcaggtgtaacccct

SEQ ID NO: 354638 - DNA, 15 bp, Homo sapiens
ggcaggtgtaacccc

SEQ ID NO: 354639 - DNA, 15 bp, Homo sapiens
gggcaggtgtaaccc

SEQ ID NO: 354640 - DNA, 15 bp, Homo sapiens
agggcaggtgtaacc

SEQ ID NO: 354641 - DNA, 15 bp, Homo sapiens
gagggcaggtgtaac

SEQ ID NO: 354642 - DNA, 15 bp, Homo sapiens
ggagggcaggtgtaa

SEQ ID NO: 354643 - DNA, 15 bp, Homo sapiens
cggagggcaggtgta

SEQ ID NO: 354644 - DNA, 15 bp, Homo sapiens
acggagggcaggtgt

SEQ ID NO: 354645 - DNA, 15 bp, Homo sapiens
cacggagggcaggtg

SEQ ID NO: 354646 - DNA, 15 bp, Homo sapiens
ccacggagggcaggt

SEQ ID NO: 354647 - DNA, 15 bp, Homo sapiens
accacggagggcagg

SEQ ID NO: 354648 - DNA, 15 bp, Homo sapiens
gaccacggagggcag

SEQ ID NO: 354649 - DNA, 15 bp, Homo sapiens
ggaccacggagggca

SEQ ID NO: 354650 - DNA, 15 bp, Homo sapiens
gggaccacggagggc

SEQ ID NO: 354651 - DNA, 15 bp, Homo sapiens
agggaccacggaggg

SEQ ID NO: 354652 - DNA, 15 bp, Homo sapiens
gagggaccacggagg

SEQ ID NO: 354653 - DNA, 15 bp, Homo sapiens
ggagggaccacggag

SEQ ID NO: 354654 - DNA, 15 bp, Homo sapiens
gggagggaccacgga

SEQ ID NO: 354655 - DNA, 15 bp, Homo sapiens
agggagggaccacgg

SEQ ID NO: 354656 - DNA, 15 bp, Homo sapiens
cagggagggaccacg

SEQ ID NO: 354657 - DNA, 15 bp, Homo sapiens
ccagggagggaccac

SEQ ID NO: 354658 - DNA, 15 bp, Homo sapiens
cccagggagggacca

SEQ ID NO: 354659 - DNA, 15 bp, Homo sapiens
gcccagggagggacc

SEQ ID NO: 354660 - DNA, 15 bp, Homo sapiens
agcccagggagggac

SEQ ID NO: 354661 - DNA, 15 bp, Homo sapiens
gagcccagggaggga

SEQ ID NO: 354662 - DNA, 15 bp, Homo sapiens
ggagcccagggaggg

SEQ ID NO: 354663 - DNA, 15 bp, Homo sapiens
tggagcccagggagg

SEQ ID NO: 354664 - DNA, 15 bp, Homo sapiens
ctggagcccagggag

SEQ ID NO: 354665 - DNA, 15 bp, Homo sapiens
cctggagcccaggga

SEQ ID NO: 354666 - DNA, 15 bp, Homo sapiens
gcccctggagcccag

SEQ ID NO: 354667 - DNA, 15 bp, Homo sapiens
ggcccctggagccca

SEQ ID NO: 354668 - DNA, 15 bp, Homo sapiens
aggcccctggagccc

SEQ ID NO: 354669 - DNA, 15 bp, Homo sapiens
gaggcccctggagcc

SEQ ID NO: 354670 - DNA, 15 bp, Homo sapiens
agaggcccctggagc

SEQ ID NO: 354671 - DNA, 15 bp, Homo sapiens
cagaggcccctggag

SEQ ID NO: 354672 - DNA, 15 bp, Homo sapiens
ccagaggcccctgga

SEQ ID NO: 354673 - DNA, 15 bp, Homo sapiens
accagaggcccctgg

SEQ ID NO: 354674 - DNA, 15 bp, Homo sapiens
caccagaggcccctg

SEQ ID NO: 354675 - DNA, 15 bp, Homo sapiens
gcaccagaggcccct

SEQ ID NO: 354676 - DNA, 15 bp, Homo sapiens
cgcaccagaggcccc

SEQ ID NO: 354677 - DNA, 15 bp, Homo sapiens
ccgcaccagaggccc

SEQ ID NO: 354678 - DNA, 15 bp, Homo sapiens
accgcaccagaggcc

SEQ ID NO: 354679 - DNA, 15 bp, Homo sapiens
aaccgcaccagaggc

SEQ ID NO: 354680 - DNA, 15 bp, Homo sapiens
gaaccgcaccagagg

SEQ ID NO: 354681 - DNA, 15 bp, Homo sapiens
ggaaccgcaccagag

SEQ ID NO: 354682 - DNA, 15 bp, Homo sapiens
cggaaccgcaccaga

SEQ ID NO: 354683 - DNA, 15 bp, Homo sapiens
ccggaaccgcaccag

SEQ ID NO: 354684 - DNA, 15 bp, Homo sapiens
cccggaaccgcacca

SEQ ID NO: 354685 - DNA, 15 bp, Homo sapiens
tcccggaaccgcacc

SEQ ID NO: 354686 - DNA, 15 bp, Homo sapiens
ttcccggaaccgcac

SEQ ID NO: 354687 - DNA, 15 bp, Homo sapiens
cttcccggaaccgca

SEQ ID NO: 354688 - DNA, 15 bp, Homo sapiens
tcttcccggaaccgc

SEQ ID NO: 354689 - DNA, 15 bp, Homo sapiens
ttcttcccggaaccg

SEQ ID NO: 354690 - DNA, 15 bp, Homo sapiens
cttcttcccggaacc

SEQ ID NO: 354691 - DNA, 15 bp, Homo sapiens
gcttcttcccggaac

SEQ ID NO: 354692 - DNA, 15 bp, Homo sapiens
ggcttcttcccggaa

SEQ ID NO: 354693 - DNA, 15 bp, Homo sapiens
tggcttcttcccgga

SEQ ID NO: 354694 - DNA, 15 bp, Homo sapiens
gtggcttcttcccgg

SEQ ID NO: 354695 - DNA, 15 bp, Homo sapiens
tgtggcttcttcccg

SEQ ID NO: 354696 - DNA, 15 bp, Homo sapiens
gtgtggcttcttccc

SEQ ID NO: 354697 - DNA, 15 bp, Homo sapiens
ggtgtggcttcttcc

SEQ ID NO: 354698 - DNA, 15 bp, Homo sapiens
gggtgtggcttcttc

SEQ ID NO: 354699 - DNA, 15 bp, Homo sapiens
ggggtgtggcttctt

SEQ ID NO: 354700 - DNA, 15 bp, Homo sapiens
tggggtgtggcttct

SEQ ID NO: 354701 - DNA, 15 bp, Homo sapiens
ctggggtgtggcttc

SEQ ID NO: 354702 - DNA, 15 bp, Homo sapiens
tctggggtgtggctt

SEQ ID NO: 354703 - DNA, 15 bp, Homo sapiens
ctctggggtgtggct

SEQ ID NO: 354704 - DNA, 15 bp, Homo sapiens
cctctggggtgtggc

SEQ ID NO: 354705 - DNA, 15 bp, Homo sapiens
acctctggggtgtgg

SEQ ID NO: 354706 - DNA, 15 bp, Homo sapiens
cacctctggggtgtg

SEQ ID NO: 354707 - DNA, 15 bp, Homo sapiens
tcacctctggggtgt

SEQ ID NO: 354708 - DNA, 15 bp, Homo sapiens
gtcacctctggggtg

SEQ ID NO: 354709 - DNA, 15 bp, Homo sapiens
tgtcacctctggggt

SEQ ID NO: 354710 - DNA, 15 bp, Homo sapiens
ctgtcacctctgggg

SEQ ID NO: 354711 - DNA, 15 bp, Homo sapiens
cctgtcacctctggg

SEQ ID NO: 354712 - DNA, 15 bp, Homo sapiens
acctgtcacctctgg

SEQ ID NO: 354713 - DNA, 15 bp, Homo sapiens
cacctgtcacctctg

SEQ ID NO: 354714 - DNA, 15 bp, Homo sapiens
tcacctgtcacctct

SEQ ID NO: 354715 - DNA, 15 bp, Homo sapiens
ctcacctgtcacctc

SEQ ID NO: 354716 - DNA, 15 bp, Homo sapiens
gctcacctgtcacct

SEQ ID NO: 354717 - DNA, 15 bp, Homo sapiens
ggctcacctgtcacc

SEQ ID NO: 354718 - DNA, 15 bp, Homo sapiens
gggctcacctgtcac

SEQ ID NO: 354719 - DNA, 15 bp, Homo sapiens
ggggctcacctgtca

SEQ ID NO: 354720 - DNA, 15 bp, Homo sapiens
aggggctcacctgtc

SEQ ID NO: 354721 - DNA, 15 bp, Homo sapiens
caggggctcacctgt

SEQ ID NO: 354722 - DNA, 15 bp, Homo sapiens
gcaggggctcacctg

SEQ ID NO: 354723 - DNA, 15 bp, Homo sapiens
ggcaggggctcacct

SEQ ID NO: 354724 - DNA, 15 bp, Homo sapiens
tggcaggggctcacc

SEQ ID NO: 354725 - DNA, 15 bp, Homo sapiens
gtggcaggggctcac

SEQ ID NO: 354726 - DNA, 15 bp, Homo sapiens
tgtggcaggggctca

SEQ ID NO: 354727 - DNA, 15 bp, Homo sapiens
gtgtggcaggggctc

SEQ ID NO: 354728 - DNA, 15 bp, Homo sapiens
ggtgtggcaggggct

SEQ ID NO: 354729 - DNA, 15 bp, Homo sapiens
gggtgtggcaggggc

SEQ ID NO: 354730 - DNA, 15 bp, Homo sapiens
ggggtgtggcagggg

SEQ ID NO: 354731 - DNA, 15 bp, Homo sapiens
tggggtgtggcaggg

SEQ ID NO: 354732 - DNA, 15 bp, Homo sapiens
ctggggtgtggcagg

SEQ ID NO: 354733 - DNA, 15 bp, Homo sapiens
gctggggtgtggcag

SEQ ID NO: 354734 - DNA, 15 bp, Homo sapiens
ggctggggtgtggca

SEQ ID NO: 354735 - DNA, 15 bp, Homo sapiens
aggctggggtgtggc

SEQ ID NO: 354736 - DNA, 15 bp, Homo sapiens
gaggctggggtgtgg

SEQ ID NO: 354737 - DNA, 15 bp, Homo sapiens
agaggctggggtgtg

SEQ ID NO: 354738 - DNA, 15 bp, Homo sapiens
cagaggctggggtgt

SEQ ID NO: 354739 - DNA, 15 bp, Homo sapiens
tcagaggctggggtg

SEQ ID NO: 354740 - DNA, 15 bp, Homo sapiens
gtcagaggctggggt

SEQ ID NO: 354741 - DNA, 15 bp, Homo sapiens
agtcagaggctgggg

SEQ ID NO: 354742 - DNA, 15 bp, Homo sapiens
aagtcagaggctggg

SEQ ID NO: 354743 - DNA, 15 bp, Homo sapiens
caagtcagaggctgg

SEQ ID NO: 354744 - DNA, 15 bp, Homo sapiens
gcaagtcagaggctg

SEQ ID NO: 354745 - DNA, 15 bp, Homo sapiens
agcaagtcagaggct

SEQ ID NO: 354746 - DNA, 15 bp, Homo sapiens
cagcaagtcagaggc

SEQ ID NO: 354747 - DNA, 15 bp, Homo sapiens
acagcaagtcagagg

SEQ ID NO: 354748 - DNA, 15 bp, Homo sapiens
cacagcaagtcagag

SEQ ID NO: 354749 - DNA, 15 bp, Homo sapiens
acacagcaagtcaga

SEQ ID NO: 354750 - DNA, 15 bp, Homo sapiens
aacacagcaagtcag

SEQ ID NO: 354751 - DNA, 15 bp, Homo sapiens
caacacagcaagtca

SEQ ID NO: 354752 - DNA, 15 bp, Homo sapiens
acaacacagcaagtc

SEQ ID NO: 354753 - DNA, 15 bp, Homo sapiens
gacaacacagcaagt

SEQ ID NO: 354754 - DNA, 15 bp, Homo sapiens
ggacaacacagcaag

SEQ ID NO: 354755 - DNA, 15 bp, Homo sapiens
tggacaacacagcaa

SEQ ID NO: 354756 - DNA, 15 bp, Homo sapiens
ctggacaacacagca

SEQ ID NO: 354757 - DNA, 15 bp, Homo sapiens
tctggacaacacagc

SEQ ID NO: 354758 - DNA, 15 bp, Homo sapiens
ctctggacaacacag

SEQ ID NO: 354759 - DNA, 15 bp, Homo sapiens
cctctggacaacaca

SEQ ID NO: 354760 - DNA, 15 bp, Homo sapiens
acctctggacaacac

SEQ ID NO: 354761 - DNA, 15 bp, Homo sapiens
cacctctggacaaca

SEQ ID NO: 354762 - DNA, 15 bp, Homo sapiens
tcacctctggacaac

SEQ ID NO: 354763 - DNA, 15 bp, Homo sapiens
ctcacctctggacaa

SEQ ID NO: 354764 - DNA, 15 bp, Homo sapiens
cctcacctctggaca

SEQ ID NO: 354765 - DNA, 15 bp, Homo sapiens
gcctcacctctggac

SEQ ID NO: 354766 - DNA, 15 bp, Homo sapiens
agcctcacctctgga

SEQ ID NO: 354767 - DNA, 15 bp, Homo sapiens
cagcctcacctctgg

SEQ ID NO: 354768 - DNA, 15 bp, Homo sapiens
ccagcctcacctctg

SEQ ID NO: 354769 - DNA, 15 bp, Homo sapiens
cccagcctcacctct

SEQ ID NO: 354770 - DNA, 15 bp, Homo sapiens
gcccagcctcacctc

SEQ ID NO: 354771 - DNA, 15 bp, Homo sapiens
ggcccagcctcacct

SEQ ID NO: 354772 - DNA, 15 bp, Homo sapiens
gggcccagcctcacc

SEQ ID NO: 354773 - DNA, 15 bp, Homo sapiens
agggcccagcctcac

SEQ ID NO: 354774 - DNA, 15 bp, Homo sapiens
gagggcccagcctca

SEQ ID NO: 354775 - DNA, 15 bp, Homo sapiens
ggagggcccagcctc

SEQ ID NO: 354776 - DNA, 15 bp, Homo sapiens
gggagggcccagcct

SEQ ID NO: 354777 - DNA, 15 bp, Homo sapiens
agggagggcccagcc

SEQ ID NO: 354778 - DNA, 15 bp, Homo sapiens
cagggagggcccagc

SEQ ID NO: 354779 - DNA, 15 bp, Homo sapiens
ccagggagggcccag

SEQ ID NO: 354780 - DNA, 15 bp, Homo sapiens
accagggagggccca

SEQ ID NO: 354781 - DNA, 15 bp, Homo sapiens
gaccagggagggccc

SEQ ID NO: 354782 - DNA, 15 bp, Homo sapiens
agaccagggagggcc

SEQ ID NO: 354783 - DNA, 15 bp, Homo sapiens
gagaccagggagggc

SEQ ID NO: 354784 - DNA, 15 bp, Homo sapiens
ggagaccagggaggg

SEQ ID NO: 354785 - DNA, 15 bp, Homo sapiens
tggagaccagggagg

SEQ ID NO: 354786 - DNA, 15 bp, Homo sapiens
ctggagaccagggag

SEQ ID NO: 354787 - DNA, 15 bp, Homo sapiens
gctggagaccaggga

SEQ ID NO: 354788 - DNA, 15 bp, Homo sapiens
agctggagaccaggg

SEQ ID NO: 354789 - DNA, 15 bp, Homo sapiens
aagctggagaccagg

SEQ ID NO: 354790 - DNA, 15 bp, Homo sapiens
taagctggagaccag

SEQ ID NO: 354791 - DNA, 15 bp, Homo sapiens
ttaagctggagacca

SEQ ID NO: 354792 - DNA, 15 bp, Homo sapiens
tttaagctggagacc

SEQ ID NO: 354793 - DNA, 15 bp, Homo sapiens
gtttaagctggagac

SEQ ID NO: 354794 - DNA, 15 bp, Homo sapiens
tgtttaagctggaga

SEQ ID NO: 354795 - DNA, 15 bp, Homo sapiens
ctgtttaagctggag

SEQ ID NO: 354796 - DNA, 15 bp, Homo sapiens
cctgtttaagctgga

SEQ ID NO: 354797 - DNA, 15 bp, Homo sapiens
tcctgtttaagctgg

SEQ ID NO: 354798 - DNA, 15 bp, Homo sapiens
ctcctgtttaagctg

SEQ ID NO: 354799 - DNA, 15 bp, Homo sapiens
actcctgtttaagct

SEQ ID NO: 354800 - DNA, 15 bp, Homo sapiens
cactcctgtttaagc

SEQ ID NO: 354801 - DNA, 15 bp, Homo sapiens
tcactcctgtttaag

SEQ ID NO: 354802 - DNA, 15 bp, Homo sapiens
ttcactcctgtttaa

SEQ ID NO: 354803 - DNA, 15 bp, Homo sapiens
gttcactcctgttta

SEQ ID NO: 354804 - DNA, 15 bp, Homo sapiens
agttcactcctgttt

SEQ ID NO: 354805 - DNA, 15 bp, Homo sapiens
gagttcactcctgtt

SEQ ID NO: 354806 - DNA, 15 bp, Homo sapiens
ggagttcactcctgt

SEQ ID NO: 354807 - DNA, 15 bp, Homo sapiens
gggagttcactcctg

SEQ ID NO: 354808 - DNA, 15 bp, Homo sapiens
agggagttcactcct

SEQ ID NO: 354809 - DNA, 15 bp, Homo sapiens
gagggagttcactcc

SEQ ID NO: 354810 - DNA, 15 bp, Homo sapiens
agagggagttcactc

SEQ ID NO: 354811 - DNA, 15 bp, Homo sapiens
cagagggagttcact

SEQ ID NO: 354812 - DNA, 15 bp, Homo sapiens
acagagggagttcac

SEQ ID NO: 354813 - DNA, 15 bp, Homo sapiens
gacagagggagttca

SEQ ID NO: 354814 - DNA, 15 bp, Homo sapiens
ggacagagggagttc

SEQ ID NO: 354815 - DNA, 15 bp, Homo sapiens
gggacagagggagtt

SEQ ID NO: 354816 - DNA, 15 bp, Homo sapiens
ggggacagagggagt

SEQ ID NO: 354817 - DNA, 15 bp, Homo sapiens
tggggacagagggag

SEQ ID NO: 354818 - DNA, 15 bp, Homo sapiens
ctggggacagaggga

SEQ ID NO: 354819 - DNA, 15 bp, Homo sapiens
cctggggacagaggg

SEQ ID NO: 354820 - DNA, 15 bp, Homo sapiens
ccctggggacagagg

SEQ ID NO: 354821 - DNA, 15 bp, Homo sapiens
gccctggggacagag

SEQ ID NO: 354822 - DNA, 15 bp, Homo sapiens
ggccctggggacaga

SEQ ID NO: 354823 - DNA, 15 bp, Homo sapiens
aggccctggggacag

SEQ ID NO: 354824 - DNA, 15 bp, Homo sapiens
gaggccctggggaca

SEQ ID NO: 354825 - DNA, 15 bp, Homo sapiens
ggaggccctggggac

SEQ ID NO: 354826 - DNA, 15 bp, Homo sapiens
gggaggccctgggga

SEQ ID NO: 354827 - DNA, 15 bp, Homo sapiens
agggaggccctgggg

SEQ ID NO: 354828 - DNA, 15 bp, Homo sapiens
aagggaggccctggg

SEQ ID NO: 354829 - DNA, 15 bp, Homo sapiens
gaagggaggccctgg

SEQ ID NO: 354830 - DNA, 15 bp, Homo sapiens
agaagggaggccctg

SEQ ID NO: 354831 - DNA, 15 bp, Homo sapiens
cagaagggaggccct

SEQ ID NO: 354832 - DNA, 15 bp, Homo sapiens
ccagaagggaggccc

SEQ ID NO: 354833 - DNA, 15 bp, Homo sapiens
cccagaagggaggcc

SEQ ID NO: 354834 - DNA, 15 bp, Homo sapiens
gcccagaagggaggc

SEQ ID NO: 354835 - DNA, 15 bp, Homo sapiens
ggcccagaagggagg

SEQ ID NO: 354836 - DNA, 15 bp, Homo sapiens
gggcccagaagggag

SEQ ID NO: 354837 - DNA, 15 bp, Homo sapiens
ggggcccagaaggga

SEQ ID NO: 354838 - DNA, 15 bp, Homo sapiens
gggggcccagaaggg

SEQ ID NO: 354839 - DNA, 15 bp, Homo sapiens
agggggcccagaagg

SEQ ID NO: 354840 - DNA, 15 bp, Homo sapiens
tagggggcccagaag

SEQ ID NO: 354841 - DNA, 15 bp, Homo sapiens
gtagggggcccagaa

SEQ ID NO: 354842 - DNA, 15 bp, Homo sapiens
tgtagggggcccaga

SEQ ID NO: 354843 - DNA, 15 bp, Homo sapiens
ctgtagggggcccag

SEQ ID NO: 354844 - DNA, 15 bp, Homo sapiens
gctgtagggggccca

SEQ ID NO: 354845 - DNA, 15 bp, Homo sapiens
ggctgtagggggccc

SEQ ID NO: 354846 - DNA, 15 bp, Homo sapiens
gggctgtagggggcc

SEQ ID NO: 354847 - DNA, 15 bp, Homo sapiens
tgggctgtagggggc

SEQ ID NO: 354848 - DNA, 15 bp, Homo sapiens
gtgggctgtaggggg

SEQ ID NO: 354849 - DNA, 15 bp, Homo sapiens
ggtgggctgtagggg

SEQ ID NO: 354850 - DNA, 15 bp, Homo sapiens
gggtgggctgtaggg

SEQ ID NO: 354851 - DNA, 15 bp, Homo sapiens
agggtgggctgtagg

SEQ ID NO: 354852 - DNA, 15 bp, Homo sapiens
tagggtgggctgtag

SEQ ID NO: 354853 - DNA, 15 bp, Homo sapiens
gtagggtgggctgta

SEQ ID NO: 354854 - DNA, 15 bp, Homo sapiens
ggtagggtgggctgt

SEQ ID NO: 354855 - DNA, 15 bp, Homo sapiens
gggtagggtgggctg

SEQ ID NO: 354856 - DNA, 15 bp, Homo sapiens
ggggtagggtgggct

SEQ ID NO: 354857 - DNA, 15 bp, Homo sapiens
aggggtagggtgggc

SEQ ID NO: 354858 - DNA, 15 bp, Homo sapiens
gaggggtagggtggg

SEQ ID NO: 354859 - DNA, 15 bp, Homo sapiens
ggaggggtagggtgg

SEQ ID NO: 354860 - DNA, 15 bp, Homo sapiens
aggaggggtagggtg

SEQ ID NO: 354861 - DNA, 15 bp, Homo sapiens
gaggaggggtagggt

SEQ ID NO: 354862 - DNA, 15 bp, Homo sapiens
ggaggaggggtaggg

SEQ ID NO: 354863 - DNA, 15 bp, Homo sapiens
tggaggaggggtagg

SEQ ID NO: 354864 - DNA, 15 bp, Homo sapiens
atggaggaggggtag

SEQ ID NO: 354865 - DNA, 15 bp, Homo sapiens
catggaggaggggta

SEQ ID NO: 354866 - DNA, 15 bp, Homo sapiens
ccatggaggaggggt

SEQ ID NO: 354867 - DNA, 15 bp, Homo sapiens
cccatggaggagggg

SEQ ID NO: 354868 - DNA, 15 bp, Homo sapiens
gcccatggaggaggg

SEQ ID NO: 354869 - DNA, 15 bp, Homo sapiens
ggcccatggaggagg

SEQ ID NO: 354870 - DNA, 15 bp, Homo sapiens
gggcccatggaggag

SEQ ID NO: 354871 - DNA, 15 bp, Homo sapiens
agggcccatggagga

SEQ ID NO: 354872 - DNA, 15 bp, Homo sapiens
cagggcccatggagg

SEQ ID NO: 354873 - DNA, 15 bp, Homo sapiens
gcagggcccatggag

SEQ ID NO: 354874 - DNA, 15 bp, Homo sapiens
tgcagggcccatgga

SEQ ID NO: 354875 - DNA, 15 bp, Homo sapiens
ctgcagggcccatgg

SEQ ID NO: 354876 - DNA, 15 bp, Homo sapiens
cctgcagggcccatg

SEQ ID NO: 354877 - DNA, 15 bp, Homo sapiens
tcctgcagggcccat

SEQ ID NO: 354878 - DNA, 15 bp, Homo sapiens
ctcctgcagggccca

SEQ ID NO: 354879 - DNA, 15 bp, Homo sapiens
cctcctgcagggccc

SEQ ID NO: 354880 - DNA, 15 bp, Homo sapiens
ccctcctgcagggcc

SEQ ID NO: 354881 - DNA, 15 bp, Homo sapiens
cccctcctgcagggc

SEQ ID NO: 354882 - DNA, 15 bp, Homo sapiens
tcccctcctgcaggg

SEQ ID NO: 354883 - DNA, 15 bp, Homo sapiens
ctcccctcctgcagg

SEQ ID NO: 354884 - DNA, 15 bp, Homo sapiens
tctcccctcctgcag

SEQ ID NO: 354885 - DNA, 15 bp, Homo sapiens
gtctcccctcctgca

SEQ ID NO: 354886 - DNA, 15 bp, Homo sapiens
ggtctcccctcctgc

SEQ ID NO: 354887 - DNA, 15 bp, Homo sapiens
gggtctcccctcctg

SEQ ID NO: 354888 - DNA, 15 bp, Homo sapiens
tgggtctcccctcct

SEQ ID NO: 354889 - DNA, 15 bp, Homo sapiens
gtgggtctcccctcc

SEQ ID NO: 354890 - DNA, 15 bp, Homo sapiens
ggtgggtctcccctc

SEQ ID NO: 354891 - DNA, 15 bp, Homo sapiens
aggtgggtctcccct

SEQ ID NO: 354892 - DNA, 15 bp, Homo sapiens
aaggtgggtctcccc

SEQ ID NO: 354893 - DNA, 15 bp, Homo sapiens
caaggtgggtctccc

SEQ ID NO: 354894 - DNA, 15 bp, Homo sapiens
tcaaggtgggtctcc

SEQ ID NO: 354895 - DNA, 15 bp, Homo sapiens
ttcaaggtgggtctc

SEQ ID NO: 354896 - DNA, 15 bp, Homo sapiens
cttcaaggtgggtct

SEQ ID NO: 354897 - DNA, 15 bp, Homo sapiens
acttcaaggtgggtc

SEQ ID NO: 354898 - DNA, 15 bp, Homo sapiens
cacttcaaggtgggt

SEQ ID NO: 354899 - DNA, 15 bp, Homo sapiens
ccacttcaaggtggg

SEQ ID NO: 354900 - DNA, 15 bp, Homo sapiens
cccacttcaaggtgg

SEQ ID NO: 354901 - DNA, 15 bp, Homo sapiens
ccccacttcaaggtg

SEQ ID NO: 354902 - DNA, 15 bp, Homo sapiens
cccccacttcaaggt

SEQ ID NO: 354903 - DNA, 15 bp, Homo sapiens
tcccccacttcaagg

SEQ ID NO: 354904 - DNA, 15 bp, Homo sapiens
atcccccacttcaag

SEQ ID NO: 354905 - DNA, 15 bp, Homo sapiens
gatcccccacttcaa

SEQ ID NO: 354906 - DNA, 15 bp, Homo sapiens
tgatcccccacttca

SEQ ID NO: 354907 - DNA, 15 bp, Homo sapiens
ctgatcccccacttc

SEQ ID NO: 354908 - DNA, 15 bp, Homo sapiens
actgatcccccactt

SEQ ID NO: 354909 - DNA, 15 bp, Homo sapiens
tactgatcccccact

SEQ ID NO: 354910 - DNA, 15 bp, Homo sapiens
ctactgatcccccac

SEQ ID NO: 354911 - DNA, 15 bp, Homo sapiens
tctactgatccccca

SEQ ID NO: 354912 - DNA, 15 bp, Homo sapiens
ctctactgatccccc

SEQ ID NO: 354913 - DNA, 15 bp, Homo sapiens
cctctactgatcccc

SEQ ID NO: 354914 - DNA, 15 bp, Homo sapiens
gcctctactgatccc

SEQ ID NO: 354915 - DNA, 15 bp, Homo sapiens
agcctctactgatcc

SEQ ID NO: 354916 - DNA, 15 bp, Homo sapiens
aagcctctactgatc

SEQ ID NO: 354917 - DNA, 15 bp, Homo sapiens
caagcctctactgat

SEQ ID NO: 354918 - DNA, 15 bp, Homo sapiens
gcaagcctctactga

SEQ ID NO: 354919 - DNA, 15 bp, Homo sapiens
tgcaagcctctactg

SEQ ID NO: 354920 - DNA, 15 bp, Homo sapiens
gtgcaagcctctact

SEQ ID NO: 354921 - DNA, 15 bp, Homo sapiens
agtgcaagcctctac

SEQ ID NO: 354922 - DNA, 15 bp, Homo sapiens
cagtgcaagcctcta

SEQ ID NO: 354923 - DNA, 15 bp, Homo sapiens
gcagtgcaagcctct

SEQ ID NO: 354924 - DNA, 15 bp, Homo sapiens
ggcagtgcaagcctc

SEQ ID NO: 354925 - DNA, 15 bp, Homo sapiens
aggcagtgcaagcct

SEQ ID NO: 354926 - DNA, 15 bp, Homo sapiens
aaggcagtgcaagcc

SEQ ID NO: 354927 - DNA, 15 bp, Homo sapiens
aaaggcagtgcaagc

SEQ ID NO: 354928 - DNA, 15 bp, Homo sapiens
caaaggcagtgcaag

SEQ ID NO: 354929 - DNA, 15 bp, Homo sapiens
ccaaaggcagtgcaa

SEQ ID NO: 354930 - DNA, 15 bp, Homo sapiens
cccaaaggcagtgca

SEQ ID NO: 354931 - DNA, 15 bp, Homo sapiens
ccccaaaggcagtgc

SEQ ID NO: 354932 - DNA, 15 bp, Homo sapiens
gccccaaaggcagtg

SEQ ID NO: 354933 - DNA, 15 bp, Homo sapiens
agccccaaaggcagt

SEQ ID NO: 354934 - DNA, 15 bp, Homo sapiens
cagccccaaaggcag

SEQ ID NO: 354935 - DNA, 15 bp, Homo sapiens
ccagccccaaaggca

SEQ ID NO: 354936 - DNA, 15 bp, Homo sapiens
tccagccccaaaggc

SEQ ID NO: 354937 - DNA, 15 bp, Homo sapiens
ctccagccccaaagg

SEQ ID NO: 354938 - DNA, 15 bp, Homo sapiens
cctccagccccaaag

SEQ ID NO: 354939 - DNA, 15 bp, Homo sapiens
ccctccagccccaaa

SEQ ID NO: 354940 - DNA, 15 bp, Homo sapiens
tccctccagccccaa

SEQ ID NO: 354941 - DNA, 15 bp, Homo sapiens
ctccctccagcccca

SEQ ID NO: 354942 - DNA, 15 bp, Homo sapiens
tctccctccagcccc

SEQ ID NO: 354943 - DNA, 15 bp, Homo sapiens
gtctccctccagccc

SEQ ID NO: 354944 - DNA, 15 bp, Homo sapiens
cgtctccctccagcc

SEQ ID NO: 354945 - DNA, 15 bp, Homo sapiens
acgtctccctccagc

SEQ ID NO: 354946 - DNA, 15 bp, Homo sapiens
cacgtctccctccag

SEQ ID NO: 354947 - DNA, 15 bp, Homo sapiens
ccacgtctccctcca

SEQ ID NO: 354948 - DNA, 15 bp, Homo sapiens
cccacgtctccctcc

SEQ ID NO: 354949 - DNA, 15 bp, Homo sapiens
acccacgtctccctc

SEQ ID NO: 354950 - DNA, 15 bp, Homo sapiens
gacccacgtctccct

SEQ ID NO: 354951 - DNA, 15 bp, Homo sapiens
ggacccacgtctccc

SEQ ID NO: 354952 - DNA, 15 bp, Homo sapiens
tggacccacgtctcc

SEQ ID NO: 354953 - DNA, 15 bp, Homo sapiens
gtggacccacgtctc

SEQ ID NO: 354954 - DNA, 15 bp, Homo sapiens
ggtggacccacgtct

SEQ ID NO: 354955 - DNA, 15 bp, Homo sapiens
tggtggacccacgtc

SEQ ID NO: 354956 - DNA, 15 bp, Homo sapiens
ctggtggacccacgt

SEQ ID NO: 354957 - DNA, 15 bp, Homo sapiens
cctggtggacccacg

SEQ ID NO: 354958 - DNA, 15 bp, Homo sapiens
gcctggtggacccac

SEQ ID NO: 354959 - DNA, 15 bp, Homo sapiens
agcctggtggaccca

SEQ ID NO: 354960 - DNA, 15 bp, Homo sapiens
aagcctggtggaccc

SEQ ID NO: 354961 - DNA, 15 bp, Homo sapiens
gaagcctggtggacc

SEQ ID NO: 354962 - DNA, 15 bp, Homo sapiens
agaagcctggtggac

SEQ ID NO: 354963 - DNA, 15 bp, Homo sapiens
cagaagcctggtgga

SEQ ID NO: 354964 - DNA, 15 bp, Homo sapiens
ccagaagcctggtgg

SEQ ID NO: 354965 - DNA, 15 bp, Homo sapiens
tccagaagcctggtg

SEQ ID NO: 354966 - DNA, 15 bp, Homo sapiens
ttccagaagcctggt

SEQ ID NO: 354967 - DNA, 15 bp, Homo sapiens
tttccagaagcctgg

SEQ ID NO: 354968 - DNA, 15 bp, Homo sapiens
ttttccagaagcctg

SEQ ID NO: 354969 - DNA, 15 bp, Homo sapiens
cttttccagaagcct

SEQ ID NO: 354970 - DNA, 15 bp, Homo sapiens
acttttccagaagcc

SEQ ID NO: 354971 - DNA, 15 bp, Homo sapiens
gacttttccagaagc

SEQ ID NO: 354972 - DNA, 15 bp, Homo sapiens
ggacttttccagaag

SEQ ID NO: 354973 - DNA, 15 bp, Homo sapiens
aggacttttccagaa

SEQ ID NO: 354974 - DNA, 15 bp, Homo sapiens
gaggacttttccaga

SEQ ID NO: 354975 - DNA, 15 bp, Homo sapiens
tgaggacttttccag

SEQ ID NO: 354976 - DNA, 15 bp, Homo sapiens
ttgaggacttttcca

SEQ ID NO: 354977 - DNA, 15 bp, Homo sapiens
attgaggacttttcc

SEQ ID NO: 354978 - DNA, 15 bp, Homo sapiens
cattgaggacttttc

SEQ ID NO: 354979 - DNA, 15 bp, Homo sapiens
gcattgaggactttt

SEQ ID NO: 354980 - DNA, 15 bp, Homo sapiens
tgcattgaggacttt

SEQ ID NO: 354981 - DNA, 15 bp, Homo sapiens
ttgcattgaggactt

SEQ ID NO: 354982 - DNA, 15 bp, Homo sapiens
attgcattgaggact

SEQ ID NO: 354983 - DNA, 15 bp, Homo sapiens
tattgcattgaggac

SEQ ID NO: 354984 - DNA, 15 bp, Homo sapiens
ttattgcattgagga

SEQ ID NO: 354985 - DNA, 15 bp, Homo sapiens
tttattgcattgagg

SEQ ID NO: 354986 - DNA, 15 bp, Homo sapiens
ttttattgcattgag

SEQ ID NO: 354987 - DNA, 15 bp, Homo sapiens
tttttattgcattga

SEQ ID NO: 354988 - DNA, 15 bp, Homo sapiens
gtttttattgcattg

SEQ ID NO: 354989 - DNA, 15 bp, Homo sapiens
tgtttttattgcatt

SEQ ID NO: 354990 - DNA, 15 bp, Homo sapiens
ttgtttttattgcat

SEQ ID NO: 354991 - DNA, 15 bp, Homo sapiens
attgtttttattgca

SEQ ID NO: 354992 - DNA, 15 bp, Homo sapiens
aattgtttttattgc

SEQ ID NO: 354993 - DNA, 15 bp, Homo sapiens
aaattgtttttattg

SEQ ID NO: 354994 - DNA, 15 bp, Homo sapiens
gaaattgtttttatt

SEQ ID NO: 354995 - DNA, 15 bp, Homo sapiens
agaaattgtttttat

SEQ ID NO: 354996 - DNA, 15 bp, Homo sapiens
aagaaattgttttta

SEQ ID NO: 354997 - DNA, 15 bp, Homo sapiens
aaagaaattgttttt

SEQ ID NO: 354998 - DNA, 15 bp, Homo sapiens
gaaagaaattgtttt

SEQ ID NO: 354999 - DNA, 15 bp, Homo sapiens
agaaagaaattgttt

SEQ ID NO: 355000 - DNA, 15 bp, Homo sapiens
aagaaagaaattgtt

SEQ ID NO: 355001 - DNA, 15 bp, Homo sapiens
caagaaagaaattgt

SEQ ID NO: 355002 - DNA, 15 bp, Homo sapiens
gcaagaaagaaattg

SEQ ID NO: 355003 - DNA, 15 bp, Homo sapiens
tgcaagaaagaaatt

SEQ ID NO: 355004 - DNA, 15 bp, Homo sapiens
atgcaagaaagaaat

SEQ ID NO: 355005 - DNA, 15 bp, Homo sapiens
gatgcaagaaagaaa

SEQ ID NO: 355006 - DNA, 15 bp, Homo sapiens
agatgcaagaaagaa

SEQ ID NO: 355007 - DNA, 15 bp, Homo sapiens
gagatgcaagaaaga

SEQ ID NO: 355008 - DNA, 15 bp, Homo sapiens
tgagatgcaagaaag

SEQ ID NO: 355009 - DNA, 15 bp, Homo sapiens
ctgagatgcaagaaa

SEQ ID NO: 355010 - DNA, 15 bp, Homo sapiens
actgagatgcaagaa

SEQ ID NO: 355011 - DNA, 15 bp, Homo sapiens
cactgagatgcaaga

SEQ ID NO: 355012 - DNA, 15 bp, Homo sapiens
acactgagatgcaag

SEQ ID NO: 355013 - DNA, 15 bp, Homo sapiens
cacactgagatgcaa

SEQ ID NO: 355014 - DNA, 15 bp, Homo sapiens
acacactgagatgca

SEQ ID NO: 355015 - DNA, 15 bp, Homo sapiens
aacacactgagatgc

SEQ ID NO: 355016 - DNA, 15 bp, Homo sapiens
aaacacactgagatg

SEQ ID NO: 355017 - DNA, 15 bp, Homo sapiens
taaacacactgagat

SEQ ID NO: 355018 - DNA, 15 bp, Homo sapiens
gtaaacacactgaga

SEQ ID NO: 355019 - DNA, 15 bp, Homo sapiens
agtaaacacactgag

SEQ ID NO: 355020 - DNA, 15 bp, Homo sapiens
aagtaaacacactga

SEQ ID NO: 355021 - DNA, 15 bp, Homo sapiens
aaagtaaacacactg

SEQ ID NO: 355022 - DNA, 15 bp, Homo sapiens
taaagtaaacacact

SEQ ID NO: 355023 - DNA, 15 bp, Homo sapiens
ataaagtaaacacac

SEQ ID NO: 355024 - DNA, 15 bp, Homo sapiens
aataaagtaaacaca

SEQ ID NO: 355025 - DNA, 15 bp, Homo sapiens
aaataaagtaaacac

SEQ ID NO: 355026 - DNA, 15 bp, Homo sapiens
aaaataaagtaaaca

SEQ ID NO: 355027 - DNA, 15 bp, Homo sapiens
taaaataaagtaaac

SEQ ID NO: 355028 - DNA, 15 bp, Homo sapiens
ataaaataaagtaaa

SEQ ID NO: 355029 - DNA, 15 bp, Homo sapiens
aataaaataaagtaa

SEQ ID NO: 355030 - DNA, 15 bp, Homo sapiens
caataaaataaagta

SEQ ID NO: 355031 - DNA, 15 bp, Homo sapiens
tcaataaaataaagt

SEQ ID NO: 355032 - DNA, 15 bp, Homo sapiens
ctcaataaaataaag

SEQ ID NO: 355033 - DNA, 15 bp, Homo sapiens
gctcaataaaataaa

SEQ ID NO: 355034 - DNA, 15 bp, Homo sapiens
ggctcaataaaataa

SEQ ID NO: 355035 - DNA, 15 bp, Homo sapiens
tggctcaataaaata

SEQ ID NO: 355036 - DNA, 15 bp, Homo sapiens
ctggctcaataaaat

SEQ ID NO: 355037 - DNA, 15 bp, Homo sapiens
tctggctcaataaaa

SEQ ID NO: 355038 - DNA, 15 bp, Homo sapiens
ctctggctcaataaa

SEQ ID NO: 355039 - DNA, 15 bp, Homo sapiens
actctggctcaataa

SEQ ID NO: 355040 - DNA, 15 bp, Homo sapiens
gactctggctcaata

SEQ ID NO: 355041 - DNA, 15 bp, Homo sapiens
agactctggctcaat

SEQ ID NO: 355042 - DNA, 15 bp, Homo sapiens
gagactctggctcaa

SEQ ID NO: 355043 - DNA, 15 bp, Homo sapiens
tgagactctggctca

SEQ ID NO: 355044 - DNA, 15 bp, Homo sapiens
gtgagactctggctc

SEQ ID NO: 355045 - DNA, 15 bp, Homo sapiens
agtgagactctggct

SEQ ID NO: 355046 - DNA, 15 bp, Homo sapiens
gagtgagactctggc

SEQ ID NO: 355047 - DNA, 15 bp, Homo sapiens
agagtgagactctgg

SEQ ID NO: 355048 - DNA, 15 bp, Homo sapiens
cagagtgagactctg

SEQ ID NO: 355049 - DNA, 15 bp, Homo sapiens
acagagtgagactct

SEQ ID NO: 355050 - DNA, 15 bp, Homo sapiens
gacagagtgagactc

SEQ ID NO: 355051 - DNA, 15 bp, Homo sapiens
tgacagagtgagact

SEQ ID NO: 355052 - DNA, 15 bp, Homo sapiens
gtgacagagtgagac

SEQ ID NO: 355053 - DNA, 15 bp, Homo sapiens
ggtgacagagtgaga

SEQ ID NO: 355054 - DNA, 15 bp, Homo sapiens
tggtgacagagtgag

SEQ ID NO: 355055 - DNA, 15 bp, Homo sapiens
ttggtgacagagtga

SEQ ID NO: 355056 - DNA, 15 bp, Homo sapiens
cttggtgacagagtg

SEQ ID NO: 355057 - DNA, 15 bp, Homo sapiens
ccttggtgacagagt

SEQ ID NO: 355058 - DNA, 15 bp, Homo sapiens
gccttggtgacagag

SEQ ID NO: 355059 - DNA, 15 bp, Homo sapiens
agccttggtgacaga

SEQ ID NO: 355060 - DNA, 15 bp, Homo sapiens
cagccttggtgacag

SEQ ID NO: 355061 - DNA, 15 bp, Homo sapiens
ccagccttggtgaca

SEQ ID NO: 355062 - DNA, 15 bp, Homo sapiens
tccagccttggtgac

SEQ ID NO: 355063 - DNA, 15 bp, Homo sapiens
ttccagccttggtga

SEQ ID NO: 355064 - DNA, 15 bp, Homo sapiens
attccagccttggtg

SEQ ID NO: 355065 - DNA, 15 bp, Homo sapiens
cattccagccttggt

SEQ ID NO: 355066 - DNA, 15 bp, Homo sapiens
gcattccagccttgg

SEQ ID NO: 355067 - DNA, 15 bp, Homo sapiens
tgcattccagccttg

SEQ ID NO: 355068 - DNA, 15 bp, Homo sapiens
ctgcattccagcctt

SEQ ID NO: 355069 - DNA, 15 bp, Homo sapiens
actgcattccagcct

SEQ ID NO: 355070 - DNA, 15 bp, Homo sapiens
cactgcattccagcc

SEQ ID NO: 355071 - DNA, 15 bp, Homo sapiens
ccactgcattccagc

SEQ ID NO: 355072 - DNA, 15 bp, Homo sapiens
gccactgcattccag

SEQ ID NO: 355073 - DNA, 15 bp, Homo sapiens
cgccactgcattcca

SEQ ID NO: 355074 - DNA, 15 bp, Homo sapiens
acgccactgcattcc

SEQ ID NO: 355075 - DNA, 15 bp, Homo sapiens
cacgccactgcattc

SEQ ID NO: 355076 - DNA, 15 bp, Homo sapiens
tcacgccactgcatt

SEQ ID NO: 355077 - DNA, 15 bp, Homo sapiens
atcacgccactgcat

SEQ ID NO: 355078 - DNA, 15 bp, Homo sapiens
gatcacgccactgca

SEQ ID NO: 355079 - DNA, 15 bp, Homo sapiens
agatcacgccactgc

SEQ ID NO: 355080 - DNA, 15 bp, Homo sapiens
gagatcacgccactg

SEQ ID NO: 355081 - DNA, 15 bp, Homo sapiens
tgagatcacgccact

SEQ ID NO: 355082 - DNA, 15 bp, Homo sapiens
ctgagatcacgccac

SEQ ID NO: 355083 - DNA, 15 bp, Homo sapiens
gctgagatcacgcca

SEQ ID NO: 355084 - DNA, 15 bp, Homo sapiens
agctgagatcacgcc

SEQ ID NO: 355085 - DNA, 15 bp, Homo sapiens
gagctgagatcacgc

SEQ ID NO: 355086 - DNA, 15 bp, Homo sapiens
tgagctgagatcacg

SEQ ID NO: 355087 - DNA, 15 bp, Homo sapiens
gtgagctgagatcac

SEQ ID NO: 355088 - DNA, 15 bp, Homo sapiens
agtgagctgagatca

SEQ ID NO: 355089 - DNA, 15 bp, Homo sapiens
cagtgagctgagatc

SEQ ID NO: 355090 - DNA, 15 bp, Homo sapiens
ctgcagtgagctgag

SEQ ID NO: 355091 - DNA, 15 bp, Homo sapiens
gctgcagtgagctga

SEQ ID NO: 355092 - DNA, 15 bp, Homo sapiens
ggctgcagtgagctg

SEQ ID NO: 355093 - DNA, 15 bp, Homo sapiens
aggctgcagtgagct

SEQ ID NO: 355094 - DNA, 15 bp, Homo sapiens
gaggctgcagtgagc

SEQ ID NO: 355095 - DNA, 15 bp, Homo sapiens
agaggctgcagtgag

SEQ ID NO: 355096 - DNA, 15 bp, Homo sapiens
cagaggctgcagtga

SEQ ID NO: 355097 - DNA, 15 bp, Homo sapiens
gcagaggctgcagtg

SEQ ID NO: 355098 - DNA, 15 bp, Homo sapiens
ggcagaggctgcagt

SEQ ID NO: 355099 - DNA, 15 bp, Homo sapiens
aggcagaggctgcag

SEQ ID NO: 355100 - DNA, 15 bp, Homo sapiens
gaggcagaggctgca

SEQ ID NO: 355101 - DNA, 15 bp, Homo sapiens
ggaggcagaggctgc

SEQ ID NO: 355102 - DNA, 15 bp, Homo sapiens
aggaggcagaggctg

SEQ ID NO: 355103 - DNA, 15 bp, Homo sapiens
taggaggcagaggct

SEQ ID NO: 355104 - DNA, 15 bp, Homo sapiens
ctaggaggcagaggc

SEQ ID NO: 355105 - DNA, 15 bp, Homo sapiens
cctaggaggcagagg

SEQ ID NO: 355106 - DNA, 15 bp, Homo sapiens
acctaggaggcagag

SEQ ID NO: 355107 - DNA, 15 bp, Homo sapiens
aacctaggaggcaga

SEQ ID NO: 355108 - DNA, 15 bp, Homo sapiens
gaacctaggaggcag

SEQ ID NO: 355109 - DNA, 15 bp, Homo sapiens
tgaacctaggaggca

SEQ ID NO: 355110 - DNA, 15 bp, Homo sapiens
tgcttgaacctagga

SEQ ID NO: 355111 - DNA, 15 bp, Homo sapiens
ttgcttgaacctagg

SEQ ID NO: 355112 - DNA, 15 bp, Homo sapiens
attgcttgaacctag

SEQ ID NO: 355113 - DNA, 15 bp, Homo sapiens
aattgcttgaaccta

SEQ ID NO: 355114 - DNA, 15 bp, Homo sapiens
tggaggctgaggcag

SEQ ID NO: 355115 - DNA, 15 bp, Homo sapiens
ctggaggctgaggca

SEQ ID NO: 355116 - DNA, 15 bp, Homo sapiens
tctggaggctgaggc

SEQ ID NO: 355117 - DNA, 15 bp, Homo sapiens
ctctggaggctgagg

SEQ ID NO: 355118 - DNA, 15 bp, Homo sapiens
actctggaggctgag

SEQ ID NO: 355119 - DNA, 15 bp, Homo sapiens
tactctggaggctga

SEQ ID NO: 355120 - DNA, 15 bp, Homo sapiens
ctactctggaggctg

SEQ ID NO: 355121 - DNA, 15 bp, Homo sapiens
gctactctggaggct

SEQ ID NO: 355122 - DNA, 15 bp, Homo sapiens
agctactctggaggc

SEQ ID NO: 355123 - DNA, 15 bp, Homo sapiens
cagctactctggagg

SEQ ID NO: 355124 - DNA, 15 bp, Homo sapiens
ccagctactctggag

SEQ ID NO: 355125 - DNA, 15 bp, Homo sapiens
cccagctactctgga

SEQ ID NO: 355126 - DNA, 15 bp, Homo sapiens
tcccagctactctgg

SEQ ID NO: 355127 - DNA, 15 bp, Homo sapiens
atcccagctactctg

SEQ ID NO: 355128 - DNA, 15 bp, Homo sapiens
aatcccagctactct

SEQ ID NO: 355129 - DNA, 15 bp, Homo sapiens
ataatcccagctact

SEQ ID NO: 355130 - DNA, 15 bp, Homo sapiens
tataatcccagctac

SEQ ID NO: 355131 - DNA, 15 bp, Homo sapiens
ctataatcccagcta

SEQ ID NO: 355132 - DNA, 15 bp, Homo sapiens
cctataatcccagct

SEQ ID NO: 355133 - DNA, 15 bp, Homo sapiens
acctataatcccagc

SEQ ID NO: 355134 - DNA, 15 bp, Homo sapiens
cacctataatcccag

SEQ ID NO: 355135 - DNA, 15 bp, Homo sapiens
acacctataatccca

SEQ ID NO: 355136 - DNA, 15 bp, Homo sapiens
cacacctataatccc

SEQ ID NO: 355137 - DNA, 15 bp, Homo sapiens
acacacctataatcc

SEQ ID NO: 355138 - DNA, 15 bp, Homo sapiens
cacacacctataatc

SEQ ID NO: 355139 - DNA, 15 bp, Homo sapiens
gcacacacctataat

SEQ ID NO: 355140 - DNA, 15 bp, Homo sapiens
ggcacacacctataa

SEQ ID NO: 355141 - DNA, 15 bp, Homo sapiens
tggcacacacctata

SEQ ID NO: 355142 - DNA, 15 bp, Homo sapiens
gtggcacacacctat

SEQ ID NO: 355143 - DNA, 15 bp, Homo sapiens
ggtggcacacaccta

SEQ ID NO: 355144 - DNA, 15 bp, Homo sapiens
tggtggcacacacct

SEQ ID NO: 355145 - DNA, 15 bp, Homo sapiens
gtggtggcacacacc

SEQ ID NO: 355146 - DNA, 15 bp, Homo sapiens
tgtggtggcacacac

SEQ ID NO: 355147 - DNA, 15 bp, Homo sapiens
gtgtggtggcacaca

SEQ ID NO: 355148 - DNA, 15 bp, Homo sapiens
ggtgtggtggcacac

SEQ ID NO: 355149 - DNA, 15 bp, Homo sapiens
gggtgtggtggcaca

SEQ ID NO: 355150 - DNA, 15 bp, Homo sapiens
tgggtgtggtggcac

SEQ ID NO: 355151 - DNA, 15 bp, Homo sapiens
ctgggtgtggtggca

SEQ ID NO: 355152 - DNA, 15 bp, Homo sapiens
caattagctgggtgt

SEQ ID NO: 355153 - DNA, 15 bp, Homo sapiens
acaattagctgggtg

SEQ ID NO: 355154 - DNA, 15 bp, Homo sapiens
aacaattagctgggt

SEQ ID NO: 355155 - DNA, 15 bp, Homo sapiens
aaacaattagctggg

SEQ ID NO: 355156 - DNA, 15 bp, Homo sapiens
caaacaattagctgg

SEQ ID NO: 355157 - DNA, 15 bp, Homo sapiens
gcaaacaattagctg

SEQ ID NO: 355158 - DNA, 15 bp, Homo sapiens
tgcaaacaattagct

SEQ ID NO: 355159 - DNA, 15 bp, Homo sapiens
atgcaaacaattagc

SEQ ID NO: 355160 - DNA, 15 bp, Homo sapiens
aatgcaaacaattag

SEQ ID NO: 355161 - DNA, 15 bp, Homo sapiens
aaatgcaaacaatta

SEQ ID NO: 355162 - DNA, 15 bp, Homo sapiens
aaaatgcaaacaatt

SEQ ID NO: 355163 - DNA, 15 bp, Homo sapiens
aaaaatgcaaacaat

SEQ ID NO: 355164 - DNA, 15 bp, Homo sapiens
aaaaaatgcaaacaa

SEQ ID NO: 355165 - DNA, 15 bp, Homo sapiens
caaaaaatgcaaaca

SEQ ID NO: 355166 - DNA, 15 bp, Homo sapiens
acaaaaaatgcaaac

SEQ ID NO: 355167 - DNA, 15 bp, Homo sapiens
tacaaaaaatgcaaa

SEQ ID NO: 355168 - DNA, 15 bp, Homo sapiens
ctacaaaaaatgcaa

SEQ ID NO: 355169 - DNA, 15 bp, Homo sapiens
tctacaaaaaatgca

SEQ ID NO: 355170 - DNA, 15 bp, Homo sapiens
ctctacaaaaaatgc

SEQ ID NO: 355171 - DNA, 15 bp, Homo sapiens
tctctacaaaaaatg

SEQ ID NO: 355172 - DNA, 15 bp, Homo sapiens
atctctacaaaaaat

SEQ ID NO: 355173 - DNA, 15 bp, Homo sapiens
catctctacaaaaaa

SEQ ID NO: 355174 - DNA, 15 bp, Homo sapiens
ccatctctacaaaaa

SEQ ID NO: 355175 - DNA, 15 bp, Homo sapiens
cccatctctacaaaa

SEQ ID NO: 355176 - DNA, 15 bp, Homo sapiens
ccccatctctacaaa

SEQ ID NO: 355177 - DNA, 15 bp, Homo sapiens
cccccatctctacaa

SEQ ID NO: 355178 - DNA, 15 bp, Homo sapiens
acccccatctctaca

SEQ ID NO: 355179 - DNA, 15 bp, Homo sapiens
gacccccatctctac

SEQ ID NO: 355180 - DNA, 15 bp, Homo sapiens
agacccccatctcta

SEQ ID NO: 355181 - DNA, 15 bp, Homo sapiens
gagacccccatctct

SEQ ID NO: 355182 - DNA, 15 bp, Homo sapiens
tgagacccccatctc

SEQ ID NO: 355183 - DNA, 15 bp, Homo sapiens
gtgagacccccatct

SEQ ID NO: 355184 - DNA, 15 bp, Homo sapiens
agtgagacccccatc

SEQ ID NO: 355185 - DNA, 15 bp, Homo sapiens
tagtgagacccccat

SEQ ID NO: 355186 - DNA, 15 bp, Homo sapiens
atagtgagaccccca

SEQ ID NO: 355187 - DNA, 15 bp, Homo sapiens
catagtgagaccccc

SEQ ID NO: 355188 - DNA, 15 bp, Homo sapiens
acatagtgagacccc

SEQ ID NO: 355189 - DNA, 15 bp, Homo sapiens
cacatagtgagaccc

SEQ ID NO: 355190 - DNA, 15 bp, Homo sapiens
tcacatagtgagacc

SEQ ID NO: 355191 - DNA, 15 bp, Homo sapiens
gtcacatagtgagac

SEQ ID NO: 355192 - DNA, 15 bp, Homo sapiens
agtcacatagtgaga

SEQ ID NO: 355193 - DNA, 15 bp, Homo sapiens
gagtcacatagtgag

SEQ ID NO: 355194 - DNA, 15 bp, Homo sapiens
tgagtcacatagtga

SEQ ID NO: 355195 - DNA, 15 bp, Homo sapiens
ctgagtcacatagtg

SEQ ID NO: 355196 - DNA, 15 bp, Homo sapiens
cctgagtcacatagt

SEQ ID NO: 355197 - DNA, 15 bp, Homo sapiens
gcctgagtcacatag

SEQ ID NO: 355198 - DNA, 15 bp, Homo sapiens
agcctgagtcacata

SEQ ID NO: 355199 - DNA, 15 bp, Homo sapiens
cagcctgagtcacat

SEQ ID NO: 355200 - DNA, 15 bp, Homo sapiens
ccagcctgagtcaca

SEQ ID NO: 355201 - DNA, 15 bp, Homo sapiens
accagcctgagtcac

SEQ ID NO: 355202 - DNA, 15 bp, Homo sapiens
gaccagcctgagtca

SEQ ID NO: 355203 - DNA, 15 bp, Homo sapiens
agaccagcctgagtc

SEQ ID NO: 355204 - DNA, 15 bp, Homo sapiens
gagaccagcctgagt

SEQ ID NO: 355205 - DNA, 15 bp, Homo sapiens
tgagaccagcctgag

SEQ ID NO: 355206 - DNA, 15 bp, Homo sapiens
ttgagaccagcctga

SEQ ID NO: 355207 - DNA, 15 bp, Homo sapiens
gagcccaggagtttg

SEQ ID NO: 355208 - DNA, 15 bp, Homo sapiens
tgagcccaggagttt

SEQ ID NO: 355209 - DNA, 15 bp, Homo sapiens
ttgagcccaggagtt

SEQ ID NO: 355210 - DNA, 15 bp, Homo sapiens
cttgagcccaggagt

SEQ ID NO: 355211 - DNA, 15 bp, Homo sapiens
gcttgagcccaggag

SEQ ID NO: 355212 - DNA, 15 bp, Homo sapiens
tgcttgagcccagga

SEQ ID NO: 355213 - DNA, 15 bp, Homo sapiens
ctgcttgagcccagg

SEQ ID NO: 355214 - DNA, 15 bp, Homo sapiens
actgcttgagcccag

SEQ ID NO: 355215 - DNA, 15 bp, Homo sapiens
gactgcttgagccca

SEQ ID NO: 355216 - DNA, 15 bp, Homo sapiens
tgactgcttgagccc

SEQ ID NO: 355217 - DNA, 15 bp, Homo sapiens
ctgactgcttgagcc

SEQ ID NO: 355218 - DNA, 15 bp, Homo sapiens
cctgactgcttgagc

SEQ ID NO: 355219 - DNA, 15 bp, Homo sapiens
gcctgactgcttgag

SEQ ID NO: 355220 - DNA, 15 bp, Homo sapiens
ggcctgactgcttga

SEQ ID NO: 355221 - DNA, 15 bp, Homo sapiens
tggcctgactgcttg

SEQ ID NO: 355222 - DNA, 15 bp, Homo sapiens
gtggcctgactgctt

SEQ ID NO: 355223 - DNA, 15 bp, Homo sapiens
ggtggcctgactgct

SEQ ID NO: 355224 - DNA, 15 bp, Homo sapiens
aggtggcctgactgc

SEQ ID NO: 355225 - DNA, 15 bp, Homo sapiens
aaggtggcctgactg

SEQ ID NO: 355226 - DNA, 15 bp, Homo sapiens
caaggtggcctgact

SEQ ID NO: 355227 - DNA, 15 bp, Homo sapiens
ccaaggtggcctgac

SEQ ID NO: 355228 - DNA, 15 bp, Homo sapiens
gccaaggtggcctga

SEQ ID NO: 355229 - DNA, 15 bp, Homo sapiens
ggccaaggtggcctg

SEQ ID NO: 355230 - DNA, 15 bp, Homo sapiens
aggccaaggtggcct

SEQ ID NO: 355231 - DNA, 15 bp, Homo sapiens
gaggccaaggtggcc

SEQ ID NO: 355232 - DNA, 15 bp, Homo sapiens
ggaggccaaggtggc

SEQ ID NO: 355233 - DNA, 15 bp, Homo sapiens
gggaggccaaggtgg

SEQ ID NO: 355234 - DNA, 15 bp, Homo sapiens
tgggaggccaaggtg

SEQ ID NO: 355235 - DNA, 15 bp, Homo sapiens
ttgggaggccaaggt

SEQ ID NO: 355236 - DNA, 15 bp, Homo sapiens
tccagcactttggga

SEQ ID NO: 355237 - DNA, 15 bp, Homo sapiens
gtccagcactttggg

SEQ ID NO: 355238 - DNA, 15 bp, Homo sapiens
agtccagcactttgg

SEQ ID NO: 355239 - DNA, 15 bp, Homo sapiens
aagtccagcactttg

SEQ ID NO: 355240 - DNA, 15 bp, Homo sapiens
taagtccagcacttt

SEQ ID NO: 355241 - DNA, 15 bp, Homo sapiens
ttaagtccagcactt

SEQ ID NO: 355242 - DNA, 15 bp, Homo sapiens
gttaagtccagcact

SEQ ID NO: 355243 - DNA, 15 bp, Homo sapiens
cgttaagtccagcac

SEQ ID NO: 355244 - DNA, 15 bp, Homo sapiens
ccgttaagtccagca

SEQ ID NO: 355245 - DNA, 15 bp, Homo sapiens
cccgttaagtccagc

SEQ ID NO: 355246 - DNA, 15 bp, Homo sapiens
gcccgttaagtccag

SEQ ID NO: 355247 - DNA, 15 bp, Homo sapiens
cgcccgttaagtcca

SEQ ID NO: 355248 - DNA, 15 bp, Homo sapiens
acgcccgttaagtcc

SEQ ID NO: 355249 - DNA, 15 bp, Homo sapiens
cacgcccgttaagtc

SEQ ID NO: 355250 - DNA, 15 bp, Homo sapiens
tcacgcccgttaagt

SEQ ID NO: 355251 - DNA, 15 bp, Homo sapiens
ctcacgcccgttaag

SEQ ID NO: 355252 - DNA, 15 bp, Homo sapiens
gctcacgcccgttaa

SEQ ID NO: 355253 - DNA, 15 bp, Homo sapiens
ggctcacgcccgtta

SEQ ID NO: 355254 - DNA, 15 bp, Homo sapiens
tggctcacgcccgtt

SEQ ID NO: 355255 - DNA, 15 bp, Homo sapiens
gtggctcacgcccgt

SEQ ID NO: 355256 - DNA, 15 bp, Homo sapiens
agtggctcacgcccg

SEQ ID NO: 355257 - DNA, 15 bp, Homo sapiens
cagtggctcacgccc

SEQ ID NO: 355258 - DNA, 15 bp, Homo sapiens
acagtggctcacgcc

SEQ ID NO: 355259 - DNA, 15 bp, Homo sapiens
cacagtggctcacgc

SEQ ID NO: 355260 - DNA, 15 bp, Homo sapiens
gcacagtggctcacg

SEQ ID NO: 355261 - DNA, 15 bp, Homo sapiens
ggcacagtggctcac

SEQ ID NO: 355262 - DNA, 15 bp, Homo sapiens
gggcacagtggctca

SEQ ID NO: 355263 - DNA, 15 bp, Homo sapiens
tgggcacagtggctc

SEQ ID NO: 355264 - DNA, 15 bp, Homo sapiens
ctgggcacagtggct

SEQ ID NO: 355265 - DNA, 15 bp, Homo sapiens
actgggcacagtggc

SEQ ID NO: 355266 - DNA, 15 bp, Homo sapiens
cactgggcacagtgg

SEQ ID NO: 355267 - DNA, 15 bp, Homo sapiens
tcactgggcacagtg

SEQ ID NO: 355268 - DNA, 15 bp, Homo sapiens
ctcactgggcacagt

SEQ ID NO: 355269 - DNA, 15 bp, Homo sapiens
actcactgggcacag

SEQ ID NO: 355270 - DNA, 15 bp, Homo sapiens
cactcactgggcaca

SEQ ID NO: 355271 - DNA, 15 bp, Homo sapiens
acactcactgggcac

SEQ ID NO: 355272 - DNA, 15 bp, Homo sapiens
aacactcactgggca

SEQ ID NO: 355273 - DNA, 15 bp, Homo sapiens
aaacactcactgggc

SEQ ID NO: 355274 - DNA, 15 bp, Homo sapiens
taaacactcactggg

SEQ ID NO: 355275 - DNA, 15 bp, Homo sapiens
ttaaacactcactgg

SEQ ID NO: 355276 - DNA, 15 bp, Homo sapiens
tttaaacactcactg

SEQ ID NO: 355277 - DNA, 15 bp, Homo sapiens
atttaaacactcact

SEQ ID NO: 355278 - DNA, 15 bp, Homo sapiens
aatttaaacactcac

SEQ ID NO: 355279 - DNA, 15 bp, Homo sapiens
gaatttaaacactca

SEQ ID NO: 355280 - DNA, 15 bp, Homo sapiens
ggaatttaaacactc

SEQ ID NO: 355281 - DNA, 15 bp, Homo sapiens
gggaatttaaacact

SEQ ID NO: 355282 - DNA, 15 bp, Homo sapiens
agggaatttaaacac

SEQ ID NO: 355283 - DNA, 15 bp, Homo sapiens
tagggaatttaaaca

SEQ ID NO: 355284 - DNA, 15 bp, Homo sapiens
atagggaatttaaac

SEQ ID NO: 355285 - DNA, 15 bp, Homo sapiens
aatagggaatttaaa

SEQ ID NO: 355286 - DNA, 15 bp, Homo sapiens
aaatagggaatttaa

SEQ ID NO: 355287 - DNA, 15 bp, Homo sapiens
caaatagggaattta

SEQ ID NO: 355288 - DNA, 15 bp, Homo sapiens
acaaatagggaattt

SEQ ID NO: 355289 - DNA, 15 bp, Homo sapiens
cacaaatagggaatt

SEQ ID NO: 355290 - DNA, 15 bp, Homo sapiens
ccacaaatagggaat

SEQ ID NO: 355291 - DNA, 15 bp, Homo sapiens
gccacaaatagggaa

SEQ ID NO: 355292 - DNA, 15 bp, Homo sapiens
tgccacaaataggga

SEQ ID NO: 355293 - DNA, 15 bp, Homo sapiens
ctgccacaaataggg

SEQ ID NO: 355294 - DNA, 15 bp, Homo sapiens
cctgccacaaatagg

SEQ ID NO: 355295 - DNA, 15 bp, Homo sapiens
acctgccacaaatag

SEQ ID NO: 355296 - DNA, 15 bp, Homo sapiens
gacctgccacaaata

SEQ ID NO: 355297 - DNA, 15 bp, Homo sapiens
ggacctgccacaaat

SEQ ID NO: 355298 - DNA, 15 bp, Homo sapiens
aggacctgccacaaa

SEQ ID NO: 355299 - DNA, 15 bp, Homo sapiens
gaggacctgccacaa

SEQ ID NO: 355300 - DNA, 15 bp, Homo sapiens
cgaggacctgccaca

SEQ ID NO: 355301 - DNA, 15 bp, Homo sapiens
gcgaggacctgccac

SEQ ID NO: 355302 - DNA, 15 bp, Homo sapiens
ggcgaggacctgcca

SEQ ID NO: 355303 - DNA, 15 bp, Homo sapiens
gggcgaggacctgcc

SEQ ID NO: 355304 - DNA, 15 bp, Homo sapiens
ggggcgaggacctgc

SEQ ID NO: 355305 - DNA, 15 bp, Homo sapiens
gggggcgaggacctg

SEQ ID NO: 355306 - DNA, 15 bp, Homo sapiens
ggggggcgaggacct

SEQ ID NO: 355307 - DNA, 15 bp, Homo sapiens
aggggggcgaggacc

SEQ ID NO: 355308 - DNA, 15 bp, Homo sapiens
caggggggcgaggac

SEQ ID NO: 355309 - DNA, 15 bp, Homo sapiens
ccaggggggcgagga

SEQ ID NO: 355310 - DNA, 15 bp, Homo sapiens
cccaggggggcgagg

SEQ ID NO: 355311 - DNA, 15 bp, Homo sapiens
acccaggggggcgag

SEQ ID NO: 355312 - DNA, 15 bp, Homo sapiens
gacccaggggggcga

SEQ ID NO: 355313 - DNA, 15 bp, Homo sapiens
tgacccaggggggcg

SEQ ID NO: 355314 - DNA, 15 bp, Homo sapiens
ctgacccaggggggc

SEQ ID NO: 355315 - DNA, 15 bp, Homo sapiens
cctgacccagggggg

SEQ ID NO: 355316 - DNA, 15 bp, Homo sapiens
tcctgacccaggggg

SEQ ID NO: 355317 - DNA, 15 bp, Homo sapiens
ctcctgacccagggg

SEQ ID NO: 355318 - DNA, 15 bp, Homo sapiens
actcctgacccaggg

SEQ ID NO: 355319 - DNA, 15 bp, Homo sapiens
aactcctgacccagg

SEQ ID NO: 355320 - DNA, 15 bp, Homo sapiens
gaactcctgacccag

SEQ ID NO: 355321 - DNA, 15 bp, Homo sapiens
cgaactcctgaccca

SEQ ID NO: 355322 - DNA, 15 bp, Homo sapiens
acgaactcctgaccc

SEQ ID NO: 355323 - DNA, 15 bp, Homo sapiens
cacgaactcctgacc

SEQ ID NO: 355324 - DNA, 15 bp, Homo sapiens
ccacgaactcctgac

SEQ ID NO: 355325 - DNA, 15 bp, Homo sapiens
accacgaactcctga

SEQ ID NO: 355326 - DNA, 15 bp, Homo sapiens
gaccacgaactcctg

SEQ ID NO: 355327 - DNA, 15 bp, Homo sapiens
ggaccacgaactcct

SEQ ID NO: 355328 - DNA, 15 bp, Homo sapiens
gggaccacgaactcc

SEQ ID NO: 355329 - DNA, 15 bp, Homo sapiens
ggggaccacgaactc

SEQ ID NO: 355330 - DNA, 15 bp, Homo sapiens
aggggaccacgaact

SEQ ID NO: 355331 - DNA, 15 bp, Homo sapiens
gaggggaccacgaac

SEQ ID NO: 355332 - DNA, 15 bp, Homo sapiens
ggaggggaccacgaa

SEQ ID NO: 355333 - DNA, 15 bp, Homo sapiens
aggaggggaccacga

SEQ ID NO: 355334 - DNA, 15 bp, Homo sapiens
gaggaggggaccacg

SEQ ID NO: 355335 - DNA, 15 bp, Homo sapiens
ggaggaggggaccac

SEQ ID NO: 355336 - DNA, 15 bp, Homo sapiens
gggaggaggggacca

SEQ ID NO: 355337 - DNA, 15 bp, Homo sapiens
agggaggaggggacc

SEQ ID NO: 355338 - DNA, 15 bp, Homo sapiens
cagggaggaggggac

SEQ ID NO: 355339 - DNA, 15 bp, Homo sapiens
ccagggaggagggga

SEQ ID NO: 355340 - DNA, 15 bp, Homo sapiens
tccagggaggagggg

SEQ ID NO: 355341 - DNA, 15 bp, Homo sapiens
gtccagggaggaggg

SEQ ID NO: 355342 - DNA, 15 bp, Homo sapiens
ggtccagggaggagg

SEQ ID NO: 355343 - DNA, 15 bp, Homo sapiens
tggtccagggaggag

SEQ ID NO: 355344 - DNA, 15 bp, Homo sapiens
ctggtccagggagga

SEQ ID NO: 355345 - DNA, 15 bp, Homo sapiens
gctggtccagggagg

SEQ ID NO: 355346 - DNA, 15 bp, Homo sapiens
agctggtccagggag

SEQ ID NO: 355347 - DNA, 15 bp, Homo sapiens
cagctggtccaggga

SEQ ID NO: 355348 - DNA, 15 bp, Homo sapiens
gcagctggtccaggg

SEQ ID NO: 355349 - DNA, 15 bp, Homo sapiens
agcagctggtccagg

SEQ ID NO: 355350 - DNA, 15 bp, Homo sapiens
aagcagctggtccag

SEQ ID NO: 355351 - DNA, 15 bp, Homo sapiens
caagcagctggtcca

SEQ ID NO: 355352 - DNA, 15 bp, Homo sapiens
ccaagcagctggtcc

SEQ ID NO: 355353 - DNA, 15 bp, Homo sapiens
cccaagcagctggtc

SEQ ID NO: 355354 - DNA, 15 bp, Homo sapiens
gcccaagcagctggt

SEQ ID NO: 355355 - DNA, 15 bp, Homo sapiens
agcccaagcagctgg

SEQ ID NO: 355356 - DNA, 15 bp, Homo sapiens
gagcccaagcagctg

SEQ ID NO: 355357 - DNA, 15 bp, Homo sapiens
ggagcccaagcagct

SEQ ID NO: 355358 - DNA, 15 bp, Homo sapiens
cggagcccaagcagc

SEQ ID NO: 355359 - DNA, 15 bp, Homo sapiens
acggagcccaagcag

SEQ ID NO: 355360 - DNA, 15 bp, Homo sapiens
aacggagcccaagca

SEQ ID NO: 355361 - DNA, 15 bp, Homo sapiens
caacggagcccaagc

SEQ ID NO: 355362 - DNA, 15 bp, Homo sapiens
gcaacggagcccaag

SEQ ID NO: 355363 - DNA, 15 bp, Homo sapiens
tgcaacggagcccaa

SEQ ID NO: 355364 - DNA, 15 bp, Homo sapiens
ttgcaacggagccca

SEQ ID NO: 355365 - DNA, 15 bp, Homo sapiens
attgcaacggagccc

SEQ ID NO: 355366 - DNA, 15 bp, Homo sapiens
gattgcaacggagcc

SEQ ID NO: 355367 - DNA, 15 bp, Homo sapiens
ggattgcaacggagc

SEQ ID NO: 355368 - DNA, 15 bp, Homo sapiens
gggattgcaacggag

SEQ ID NO: 355369 - DNA, 15 bp, Homo sapiens
agggattgcaacgga

SEQ ID NO: 355370 - DNA, 15 bp, Homo sapiens
cagggattgcaacgg

SEQ ID NO: 355371 - DNA, 15 bp, Homo sapiens
gcagggattgcaacg

SEQ ID NO: 355372 - DNA, 15 bp, Homo sapiens
ggcagggattgcaac

SEQ ID NO: 355373 - DNA, 15 bp, Homo sapiens
gggcagggattgcaa

SEQ ID NO: 355374 - DNA, 15 bp, Homo sapiens
ggggcagggattgca

SEQ ID NO: 355375 - DNA, 15 bp, Homo sapiens
aggggcagggattgc

SEQ ID NO: 355376 - DNA, 15 bp, Homo sapiens
gaggggcagggattg

SEQ ID NO: 355377 - DNA, 15 bp, Homo sapiens
tgaggggcagggatt

SEQ ID NO: 355378 - DNA, 15 bp, Homo sapiens
ttgaggggcagggat

SEQ ID NO: 355379 - DNA, 15 bp, Homo sapiens
cttgaggggcaggga

SEQ ID NO: 355380 - DNA, 15 bp, Homo sapiens
gcttgaggggcaggg

SEQ ID NO: 355381 - DNA, 15 bp, Homo sapiens
ggcttgaggggcagg

SEQ ID NO: 355382 - DNA, 15 bp, Homo sapiens
aggcttgaggggcag

SEQ ID NO: 355383 - DNA, 15 bp, Homo sapiens
caggcttgaggggca

SEQ ID NO: 355384 - DNA, 15 bp, Homo sapiens
ccaggcttgaggggc

SEQ ID NO: 355385 - DNA, 15 bp, Homo sapiens
cccaggcttgagggg

SEQ ID NO: 355386 - DNA, 15 bp, Homo sapiens
ccccaggcttgaggg

SEQ ID NO: 355387 - DNA, 15 bp, Homo sapiens
cccccaggcttgagg

SEQ ID NO: 355388 - DNA, 15 bp, Homo sapiens
gcccccaggcttgag

SEQ ID NO: 355389 - DNA, 15 bp, Homo sapiens
ggcccccaggcttga

SEQ ID NO: 355390 - DNA, 15 bp, Homo sapiens
cggcccccaggcttg

SEQ ID NO: 355391 - DNA, 15 bp, Homo sapiens
tcggcccccaggctt

SEQ ID NO: 355392 - DNA, 15 bp, Homo sapiens
ctcggcccccaggct

SEQ ID NO: 355393 - DNA, 15 bp, Homo sapiens
cctcggcccccaggc

SEQ ID NO: 355394 - DNA, 15 bp, Homo sapiens
tcctcggcccccagg

SEQ ID NO: 355395 - DNA, 15 bp, Homo sapiens
ttcctcggcccccag

SEQ ID NO: 355396 - DNA, 15 bp, Homo sapiens
gttcctcggccccca

SEQ ID NO: 355397 - DNA, 15 bp, Homo sapiens
tgttcctcggccccc

SEQ ID NO: 355398 - DNA, 15 bp, Homo sapiens
ttgttcctcggcccc

SEQ ID NO: 355399 - DNA, 15 bp, Homo sapiens
cttgttcctcggccc

SEQ ID NO: 355400 - DNA, 15 bp, Homo sapiens
ccttgttcctcggcc

SEQ ID NO: 355401 - DNA, 15 bp, Homo sapiens
cccttgttcctcggc

SEQ ID NO: 355402 - DNA, 15 bp, Homo sapiens
gcccttgttcctcgg

SEQ ID NO: 355403 - DNA, 15 bp, Homo sapiens
agcccttgttcctcg

SEQ ID NO: 355404 - DNA, 15 bp, Homo sapiens
gagcccttgttcctc

SEQ ID NO: 355405 - DNA, 15 bp, Homo sapiens
tgagcccttgttcct

SEQ ID NO: 355406 - DNA, 15 bp, Homo sapiens
gtgagcccttgttcc

SEQ ID NO: 355407 - DNA, 15 bp, Homo sapiens
ggtgagcccttgttc

SEQ ID NO: 355408 - DNA, 15 bp, Homo sapiens
aggtgagcccttgtt

SEQ ID NO: 355409 - DNA, 15 bp, Homo sapiens
gaggtgagcccttgt

SEQ ID NO: 355410 - DNA, 15 bp, Homo sapiens
agaggtgagcccttg

SEQ ID NO: 355411 - DNA, 15 bp, Homo sapiens
gagaggtgagccctt

SEQ ID NO: 355412 - DNA, 15 bp, Homo sapiens
ggagaggtgagccct

SEQ ID NO: 355413 - DNA, 15 bp, Homo sapiens
gggagaggtgagccc

SEQ ID NO: 355414 - DNA, 15 bp, Homo sapiens
ggggagaggtgagcc

SEQ ID NO: 355415 - DNA, 15 bp, Homo sapiens
gggggagaggtgagc

SEQ ID NO: 355416 - DNA, 15 bp, Homo sapiens
ggggggagaggtgag

SEQ ID NO: 355417 - DNA, 15 bp, Homo sapiens
tggggggagaggtga

SEQ ID NO: 355418 - DNA, 15 bp, Homo sapiens
gtggggggagaggtg

SEQ ID NO: 355419 - DNA, 15 bp, Homo sapiens
ggtggggggagaggt

SEQ ID NO: 355420 - DNA, 15 bp, Homo sapiens
gggtggggggagagg

SEQ ID NO: 355421 - DNA, 15 bp, Homo sapiens
ggggtggggggagag

SEQ ID NO: 355422 - DNA, 15 bp, Homo sapiens
cggggtggggggaga

SEQ ID NO: 355423 - DNA, 15 bp, Homo sapiens
gcggggtggggggag

SEQ ID NO: 355424 - DNA, 15 bp, Homo sapiens
ggcggggtgggggga

SEQ ID NO: 355425 - DNA, 15 bp, Homo sapiens
aggcggggtgggggg

SEQ ID NO: 355426 - DNA, 15 bp, Homo sapiens
gaggcggggtggggg

SEQ ID NO: 355427 - DNA, 15 bp, Homo sapiens
agaggcggggtgggg

SEQ ID NO: 355428 - DNA, 15 bp, Homo sapiens
cagaggcggggtggg

SEQ ID NO: 355429 - DNA, 15 bp, Homo sapiens
ccagaggcggggtgg

SEQ ID NO: 355430 - DNA, 15 bp, Homo sapiens
tccagaggcggggtg

SEQ ID NO: 355431 - DNA, 15 bp, Homo sapiens
ctccagaggcggggt

SEQ ID NO: 355432 - DNA, 15 bp, Homo sapiens
cctccagaggcgggg

SEQ ID NO: 355433 - DNA, 15 bp, Homo sapiens
ccctccagaggcggg

SEQ ID NO: 355434 - DNA, 15 bp, Homo sapiens
tccctccagaggcgg

SEQ ID NO: 355435 - DNA, 15 bp, Homo sapiens
atccctccagaggcg

SEQ ID NO: 355436 - DNA, 15 bp, Homo sapiens
gatccctccagaggc

SEQ ID NO: 355437 - DNA, 15 bp, Homo sapiens
tgatccctccagagg

SEQ ID NO: 355438 - DNA, 15 bp, Homo sapiens
ctgatccctccagag

SEQ ID NO: 355439 - DNA, 15 bp, Homo sapiens
cctgatccctccaga

SEQ ID NO: 355440 - DNA, 15 bp, Homo sapiens
gcctgatccctccag

SEQ ID NO: 355441 - DNA, 15 bp, Homo sapiens
ggcctgatccctcca

SEQ ID NO: 355442 - DNA, 15 bp, Homo sapiens
tggcctgatccctcc

SEQ ID NO: 355443 - DNA, 15 bp, Homo sapiens
ctggcctgatccctc

SEQ ID NO: 355444 - DNA, 15 bp, Homo sapiens
actggcctgatccct

SEQ ID NO: 355445 - DNA, 15 bp, Homo sapiens
aactggcctgatccc

SEQ ID NO: 355446 - DNA, 15 bp, Homo sapiens
aaactggcctgatcc

SEQ ID NO: 355447 - DNA, 15 bp, Homo sapiens
aaaactggcctgatc

SEQ ID NO: 355448 - DNA, 15 bp, Homo sapiens
gaaaactggcctgat

SEQ ID NO: 355449 - DNA, 15 bp, Homo sapiens
agaaaactggcctga

SEQ ID NO: 355450 - DNA, 15 bp, Homo sapiens
cagaaaactggcctg

SEQ ID NO: 355451 - DNA, 15 bp, Homo sapiens
tcagaaaactggcct

SEQ ID NO: 355452 - DNA, 15 bp, Homo sapiens
atcagaaaactggcc

SEQ ID NO: 355453 - DNA, 15 bp, Homo sapiens
catcagaaaactggc

SEQ ID NO: 355454 - DNA, 15 bp, Homo sapiens
tcatcagaaaactgg

SEQ ID NO: 355455 - DNA, 15 bp, Homo sapiens
atcatcagaaaactg

SEQ ID NO: 355456 - DNA, 15 bp, Homo sapiens
catcatcagaaaact

SEQ ID NO: 355457 - DNA, 15 bp, Homo sapiens
tcatcatcagaaaac

SEQ ID NO: 355458 - DNA, 15 bp, Homo sapiens
ttcatcatcagaaaa

SEQ ID NO: 355459 - DNA, 15 bp, Homo sapiens
cttcatcatcagaaa

SEQ ID NO: 355460 - DNA, 15 bp, Homo sapiens
gcttcatcatcagaa

SEQ ID NO: 355461 - DNA, 15 bp, Homo sapiens
ggcttcatcatcaga

SEQ ID NO: 355462 - DNA, 15 bp, Homo sapiens
tggcttcatcatcag

SEQ ID NO: 355463 - DNA, 15 bp, Homo sapiens
ttggcttcatcatca

SEQ ID NO: 355464 - DNA, 15 bp, Homo sapiens
attggcttcatcatc

SEQ ID NO: 355465 - DNA, 15 bp, Homo sapiens
tattggcttcatcat

SEQ ID NO: 355466 - DNA, 15 bp, Homo sapiens
ttattggcttcatca

SEQ ID NO: 355467 - DNA, 15 bp, Homo sapiens
cttattggcttcatc

SEQ ID NO: 355468 - DNA, 15 bp, Homo sapiens
ccttattggcttcat

SEQ ID NO: 355469 - DNA, 15 bp, Homo sapiens
gccttattggcttca

SEQ ID NO: 355470 - DNA, 15 bp, Homo sapiens
tgccttattggcttc

SEQ ID NO: 355471 - DNA, 15 bp, Homo sapiens
ctgccttattggctt

SEQ ID NO: 355472 - DNA, 15 bp, Homo sapiens
gctgccttattggct

SEQ ID NO: 355473 - DNA, 15 bp, Homo sapiens
agctgccttattggc

SEQ ID NO: 355474 - DNA, 15 bp, Homo sapiens
cagctgccttattgg

SEQ ID NO: 355475 - DNA, 15 bp, Homo sapiens
ccagctgccttattg

SEQ ID NO: 355476 - DNA, 15 bp, Homo sapiens
gccagctgccttatt

SEQ ID NO: 355477 - DNA, 15 bp, Homo sapiens
tgccagctgccttat

SEQ ID NO: 355478 - DNA, 15 bp, Homo sapiens
atgccagctgcctta

SEQ ID NO: 355479 - DNA, 15 bp, Homo sapiens
aatgccagctgcctt

SEQ ID NO: 355480 - DNA, 15 bp, Homo sapiens
aaatgccagctgcct

SEQ ID NO: 355481 - DNA, 15 bp, Homo sapiens
aaaatgccagctgcc

SEQ ID NO: 355482 - DNA, 15 bp, Homo sapiens
gaaaatgccagctgc

SEQ ID NO: 355483 - DNA, 15 bp, Homo sapiens
agaaaatgccagctg

SEQ ID NO: 355484 - DNA, 15 bp, Homo sapiens
cagaaaatgccagct

SEQ ID NO: 355485 - DNA, 15 bp, Homo sapiens
tcagaaaatgccagc

SEQ ID NO: 355486 - DNA, 15 bp, Homo sapiens
ctcagaaaatgccag

SEQ ID NO: 355487 - DNA, 15 bp, Homo sapiens
gctcagaaaatgcca

SEQ ID NO: 355488 - DNA, 15 bp, Homo sapiens
tgctcagaaaatgcc

SEQ ID NO: 355489 - DNA, 15 bp, Homo sapiens
gtgctcagaaaatgc

SEQ ID NO: 355490 - DNA, 15 bp, Homo sapiens
agtgctcagaaaatg

SEQ ID NO: 355491 - DNA, 15 bp, Homo sapiens
gagtgctcagaaaat

SEQ ID NO: 355492 - DNA, 15 bp, Homo sapiens
tgagtgctcagaaaa

SEQ ID NO: 355493 - DNA, 15 bp, Homo sapiens
ctgagtgctcagaaa

SEQ ID NO: 355494 - DNA, 15 bp, Homo sapiens
actgagtgctcagaa

SEQ ID NO: 355495 - DNA, 15 bp, Homo sapiens
aactgagtgctcaga

SEQ ID NO: 355496 - DNA, 15 bp, Homo sapiens
aaactgagtgctcag

SEQ ID NO: 355497 - DNA, 15 bp, Homo sapiens
caaactgagtgctca

SEQ ID NO: 355498 - DNA, 15 bp, Homo sapiens
acaaactgagtgctc

SEQ ID NO: 355499 - DNA, 15 bp, Homo sapiens
tacaaactgagtgct

SEQ ID NO: 355500 - DNA, 15 bp, Homo sapiens
ctacaaactgagtgc

SEQ ID NO: 355501 - DNA, 15 bp, Homo sapiens
actacaaactgagtg

SEQ ID NO: 355502 - DNA, 15 bp, Homo sapiens
aactacaaactgagt

SEQ ID NO: 355503 - DNA, 15 bp, Homo sapiens
taactacaaactgag

SEQ ID NO: 355504 - DNA, 15 bp, Homo sapiens
ataactacaaactga

SEQ ID NO: 355505 - DNA, 15 bp, Homo sapiens
tataactacaaactg

SEQ ID NO: 355506 - DNA, 15 bp, Homo sapiens
gtataactacaaact

SEQ ID NO: 355507 - DNA, 15 bp, Homo sapiens
tgtataactacaaac

SEQ ID NO: 355508 - DNA, 15 bp, Homo sapiens
gtgtataactacaaa

SEQ ID NO: 355509 - DNA, 15 bp, Homo sapiens
agtgtataactacaa

SEQ ID NO: 355510 - DNA, 15 bp, Homo sapiens
aagtgtataactaca

SEQ ID NO: 355511 - DNA, 15 bp, Homo sapiens
taagtgtataactac

SEQ ID NO: 355512 - DNA, 15 bp, Homo sapiens
ataagtgtataacta

SEQ ID NO: 355513 - DNA, 15 bp, Homo sapiens
cataagtgtataact

SEQ ID NO: 355514 - DNA, 15 bp, Homo sapiens
gcataagtgtataac

SEQ ID NO: 355515 - DNA, 15 bp, Homo sapiens
tgcataagtgtataa

SEQ ID NO: 355516 - DNA, 15 bp, Homo sapiens
gtgcataagtgtata

SEQ ID NO: 355517 - DNA, 15 bp, Homo sapiens
tgtgcataagtgtat

SEQ ID NO: 355518 - DNA, 15 bp, Homo sapiens
atgtgcataagtgta

SEQ ID NO: 355519 - DNA, 15 bp, Homo sapiens
catgtgcataagtgt

SEQ ID NO: 355520 - DNA, 15 bp, Homo sapiens
gcatgtgcataagtg

SEQ ID NO: 355521 - DNA, 15 bp, Homo sapiens
agcatgtgcataagt

SEQ ID NO: 355522 - DNA, 15 bp, Homo sapiens
aagcatgtgcataag

SEQ ID NO: 355523 - DNA, 15 bp, Homo sapiens
aaagcatgtgcataa

SEQ ID NO: 355524 - DNA, 15 bp, Homo sapiens
aaaagcatgtgcata

SEQ ID NO: 355525 - DNA, 15 bp, Homo sapiens
aaaaagcatgtgcat

SEQ ID NO: 355526 - DNA, 15 bp, Homo sapiens
caaaaagcatgtgca

SEQ ID NO: 355527 - DNA, 15 bp, Homo sapiens
acaaaaagcatgtgc

SEQ ID NO: 355528 - DNA, 15 bp, Homo sapiens
aacaaaaagcatgtg

SEQ ID NO: 355529 - DNA, 15 bp, Homo sapiens
caacaaaaagcatgt

SEQ ID NO: 355530 - DNA, 15 bp, Homo sapiens
acaacaaaaagcatg

SEQ ID NO: 355531 - DNA, 15 bp, Homo sapiens
aacaacaaaaagcat

SEQ ID NO: 355532 - DNA, 15 bp, Homo sapiens
caacaacaaaaagca

SEQ ID NO: 355533 - DNA, 15 bp, Homo sapiens
acaacaacaaaaagc

SEQ ID NO: 355534 - DNA, 15 bp, Homo sapiens
aacaacaacaaaaag

SEQ ID NO: 355535 - DNA, 15 bp, Homo sapiens
aaacaacaacaaaaa

SEQ ID NO: 355536 - DNA, 15 bp, Homo sapiens
taaacaacaacaaaa

SEQ ID NO: 355537 - DNA, 15 bp, Homo sapiens
ttaaacaacaacaaa

SEQ ID NO: 355538 - DNA, 15 bp, Homo sapiens
gttaaacaacaacaa

SEQ ID NO: 355539 - DNA, 15 bp, Homo sapiens
tgttaaacaacaaca

SEQ ID NO: 355540 - DNA, 15 bp, Homo sapiens
atgttaaacaacaac

SEQ ID NO: 355541 - DNA, 15 bp, Homo sapiens
aatgttaaacaacaa

SEQ ID NO: 355542 - DNA, 15 bp, Homo sapiens
aaatgttaaacaaca

SEQ ID NO: 355543 - DNA, 15 bp, Homo sapiens
taaatgttaaacaac

SEQ ID NO: 355544 - DNA, 15 bp, Homo sapiens
gtaaatgttaaacaa

SEQ ID NO: 355545 - DNA, 15 bp, Homo sapiens
ggtaaatgttaaaca

SEQ ID NO: 355546 - DNA, 15 bp, Homo sapiens
gggtaaatgttaaac

SEQ ID NO: 355547 - DNA, 15 bp, Homo sapiens
ggggtaaatgttaaa

SEQ ID NO: 355548 - DNA, 15 bp, Homo sapiens
gggggtaaatgttaa

SEQ ID NO: 355549 - DNA, 15 bp, Homo sapiens
tgggggtaaatgtta

SEQ ID NO: 355550 - DNA, 15 bp, Homo sapiens
ctgggggtaaatgtt

SEQ ID NO: 355551 - DNA, 15 bp, Homo sapiens
cctgggggtaaatgt

SEQ ID NO: 355552 - DNA, 15 bp, Homo sapiens
gcctgggggtaaatg

SEQ ID NO: 355553 - DNA, 15 bp, Homo sapiens
agcctgggggtaaat

SEQ ID NO: 355554 - DNA, 15 bp, Homo sapiens
tagcctgggggtaaa

SEQ ID NO: 355555 - DNA, 15 bp, Homo sapiens
atagcctgggggtaa

SEQ ID NO: 355556 - DNA, 15 bp, Homo sapiens
catagcctgggggta

SEQ ID NO: 355557 - DNA, 15 bp, Homo sapiens
tcatagcctgggggt

SEQ ID NO: 355558 - DNA, 15 bp, Homo sapiens
ctcatagcctggggg

SEQ ID NO: 355559 - DNA, 15 bp, Homo sapiens
actcatagcctgggg

SEQ ID NO: 355560 - DNA, 15 bp, Homo sapiens
gactcatagcctggg

SEQ ID NO: 355561 - DNA, 15 bp, Homo sapiens
ggactcatagcctgg

SEQ ID NO: 355562 - DNA, 15 bp, Homo sapiens
gggactcatagcctg

SEQ ID NO: 355563 - DNA, 15 bp, Homo sapiens
ggggactcatagcct

SEQ ID NO: 355564 - DNA, 15 bp, Homo sapiens
tggggactcatagcc

SEQ ID NO: 355565 - DNA, 15 bp, Homo sapiens
gtggggactcatagc

SEQ ID NO: 355566 - DNA, 15 bp, Homo sapiens
ggtggggactcatag

SEQ ID NO: 355567 - DNA, 15 bp, Homo sapiens
aggtggggactcata

SEQ ID NO: 355568 - DNA, 15 bp, Homo sapiens
caggtggggactcat

SEQ ID NO: 355569 - DNA, 15 bp, Homo sapiens
acaggtggggactca

SEQ ID NO: 355570 - DNA, 15 bp, Homo sapiens
cacaggtggggactc

SEQ ID NO: 355571 - DNA, 15 bp, Homo sapiens
gcacaggtggggact

SEQ ID NO: 355572 - DNA, 15 bp, Homo sapiens
agcacaggtggggac

SEQ ID NO: 355573 - DNA, 15 bp, Homo sapiens
aagcacaggtgggga

SEQ ID NO: 355574 - DNA, 15 bp, Homo sapiens
aaagcacaggtgggg

SEQ ID NO: 355575 - DNA, 15 bp, Homo sapiens
caaagcacaggtggg

SEQ ID NO: 355576 - DNA, 15 bp, Homo sapiens
ccaaagcacaggtgg

SEQ ID NO: 355577 - DNA, 15 bp, Homo sapiens
cccaaagcacaggtg

SEQ ID NO: 355578 - DNA, 15 bp, Homo sapiens
gcccaaagcacaggt

SEQ ID NO: 355579 - DNA, 15 bp, Homo sapiens
cgcccaaagcacagg

SEQ ID NO: 355580 - DNA, 15 bp, Homo sapiens
gcgcccaaagcacag

SEQ ID NO: 355581 - DNA, 15 bp, Homo sapiens
cgcgcccaaagcaca

SEQ ID NO: 355582 - DNA, 15 bp, Homo sapiens
tcgcgcccaaagcac

SEQ ID NO: 355583 - DNA, 15 bp, Homo sapiens
atcgcgcccaaagca

SEQ ID NO: 355584 - DNA, 15 bp, Homo sapiens
aatcgcgcccaaagc

SEQ ID NO: 355585 - DNA, 15 bp, Homo sapiens
aaatcgcgcccaaag

SEQ ID NO: 355586 - DNA, 15 bp, Homo sapiens
aaaatcgcgcccaaa

SEQ ID NO: 355587 - DNA, 15 bp, Homo sapiens
caaaatcgcgcccaa

SEQ ID NO: 355588 - DNA, 15 bp, Homo sapiens
gcaaaatcgcgccca

SEQ ID NO: 355589 - DNA, 15 bp, Homo sapiens
cgcaaaatcgcgccc

SEQ ID NO: 355590 - DNA, 15 bp, Homo sapiens
tcgcaaaatcgcgcc

SEQ ID NO: 355591 - DNA, 15 bp, Homo sapiens
atcgcaaaatcgcgc

SEQ ID NO: 355592 - DNA, 15 bp, Homo sapiens
catcgcaaaatcgcg

SEQ ID NO: 355593 - DNA, 15 bp, Homo sapiens
ccatcgcaaaatcgc

SEQ ID NO: 355594 - DNA, 15 bp, Homo sapiens
gccatcgcaaaatcg

SEQ ID NO: 355595 - DNA, 15 bp, Homo sapiens
cgccatcgcaaaatc

SEQ ID NO: 355596 - DNA, 15 bp, Homo sapiens
gcgccatcgcaaaat

SEQ ID NO: 355597 - DNA, 15 bp, Homo sapiens
ggcgccatcgcaaaa

SEQ ID NO: 355598 - DNA, 15 bp, Homo sapiens
gggcgccatcgcaaa

SEQ ID NO: 355599 - DNA, 15 bp, Homo sapiens
cgggcgccatcgcaa

SEQ ID NO: 355600 - DNA, 15 bp, Homo sapiens
ccgggcgccatcgca

SEQ ID NO: 355601 - DNA, 15 bp, Homo sapiens
cccgggcgccatcgc

SEQ ID NO: 355602 - DNA, 15 bp, Homo sapiens
gcccgggcgccatcg

SEQ ID NO: 355603 - DNA, 15 bp, Homo sapiens
tgcccgggcgccatc

SEQ ID NO: 355604 - DNA, 15 bp, Homo sapiens
ctgcccgggcgccat

SEQ ID NO: 355605 - DNA, 15 bp, Homo sapiens
cctgcccgggcgcca

SEQ ID NO: 355606 - DNA, 15 bp, Homo sapiens
gcctgcccgggcgcc

SEQ ID NO: 355607 - DNA, 15 bp, Homo sapiens
cgcctgcccgggcgc

SEQ ID NO: 355608 - DNA, 15 bp, Homo sapiens
gcgcctgcccgggcg

SEQ ID NO: 355609 - DNA, 15 bp, Homo sapiens
cgcgcctgcccgggc

SEQ ID NO: 355610 - DNA, 15 bp, Homo sapiens
gcgcgcctgcccggg

SEQ ID NO: 355611 - DNA, 15 bp, Homo sapiens
tgcgcgcctgcccgg

SEQ ID NO: 355612 - DNA, 15 bp, Homo sapiens
gtgcgcgcctgcccg

SEQ ID NO: 355613 - DNA, 15 bp, Homo sapiens
tgtgcgcgcctgccc

SEQ ID NO: 355614 - DNA, 15 bp, Homo sapiens
ctgtgcgcgcctgcc

SEQ ID NO: 355615 - DNA, 15 bp, Homo sapiens
gctgtgcgcgcctgc

SEQ ID NO: 355616 - DNA, 15 bp, Homo sapiens
ggctgtgcgcgcctg

SEQ ID NO: 355617 - DNA, 15 bp, Homo sapiens
gggctgtgcgcgcct

SEQ ID NO: 355618 - DNA, 15 bp, Homo sapiens
cgggctgtgcgcgcc

SEQ ID NO: 355619 - DNA, 15 bp, Homo sapiens
gcgggctgtgcgcgc

SEQ ID NO: 355620 - DNA, 15 bp, Homo sapiens
tgcgggctgtgcgcg

SEQ ID NO: 355621 - DNA, 15 bp, Homo sapiens
ctgcgggctgtgcgc

SEQ ID NO: 355622 - DNA, 15 bp, Homo sapiens
actgcgggctgtgcg

SEQ ID NO: 355623 - DNA, 15 bp, Homo sapiens
cactgcgggctgtgc

SEQ ID NO: 355624 - DNA, 15 bp, Homo sapiens
ccactgcgggctgtg

SEQ ID NO: 355625 - DNA, 15 bp, Homo sapiens
cccactgcgggctgt

SEQ ID NO: 355626 - DNA, 15 bp, Homo sapiens
ccccactgcgggctg

SEQ ID NO: 355627 - DNA, 15 bp, Homo sapiens
cccccactgcgggct

SEQ ID NO: 355628 - DNA, 15 bp, Homo sapiens
gcccccactgcgggc

SEQ ID NO: 355629 - DNA, 15 bp, Homo sapiens
cgcccccactgcggg

SEQ ID NO: 355630 - DNA, 15 bp, Homo sapiens
tcgcccccactgcgg

SEQ ID NO: 355631 - DNA, 15 bp, Homo sapiens
gtcgcccccactgcg

SEQ ID NO: 355632 - DNA, 15 bp, Homo sapiens
ggtcgcccccactgc

SEQ ID NO: 355633 - DNA, 15 bp, Homo sapiens
gggtcgcccccactg

SEQ ID NO: 355634 - DNA, 15 bp, Homo sapiens
ggggtcgcccccact

SEQ ID NO: 355635 - DNA, 15 bp, Homo sapiens
tggggtcgcccccac

SEQ ID NO: 355636 - DNA, 15 bp, Homo sapiens
gtggggtcgccccca

SEQ ID NO: 355637 - DNA, 15 bp, Homo sapiens
tgtggggtcgccccc

SEQ ID NO: 355638 - DNA, 15 bp, Homo sapiens
ctgtggggtcgcccc

SEQ ID NO: 355639 - DNA, 15 bp, Homo sapiens
tctgtggggtcgccc

SEQ ID NO: 355640 - DNA, 15 bp, Homo sapiens
gtctgtggggtcgcc

SEQ ID NO: 355641 - DNA, 15 bp, Homo sapiens
cgtctgtggggtcgc

SEQ ID NO: 355642 - DNA, 15 bp, Homo sapiens
tcgtctgtggggtcg

SEQ ID NO: 355643 - DNA, 15 bp, Homo sapiens
ctcgtctgtggggtc

SEQ ID NO: 355644 - DNA, 15 bp, Homo sapiens
gctcgtctgtggggt

SEQ ID NO: 355645 - DNA, 15 bp, Homo sapiens
cgctcgtctgtgggg

SEQ ID NO: 355646 - DNA, 15 bp, Homo sapiens
gcgctcgtctgtggg

SEQ ID NO: 355647 - DNA, 15 bp, Homo sapiens
tgcgctcgtctgtgg

SEQ ID NO: 355648 - DNA, 15 bp, Homo sapiens
ctgcgctcgtctgtg

SEQ ID NO: 355649 - DNA, 15 bp, Homo sapiens
cctgcgctcgtctgt

SEQ ID NO: 355650 - DNA, 15 bp, Homo sapiens
tcctgcgctcgtctg

SEQ ID NO: 355651 - DNA, 15 bp, Homo sapiens
ctcctgcgctcgtct

SEQ ID NO: 355652 - DNA, 15 bp, Homo sapiens
gctcctgcgctcgtc

SEQ ID NO: 355653 - DNA, 15 bp, Homo sapiens
tgctcctgcgctcgt

SEQ ID NO: 355654 - DNA, 15 bp, Homo sapiens
ctgctcctgcgctcg

SEQ ID NO: 355655 - DNA, 15 bp, Homo sapiens
gctgctcctgcgctc

SEQ ID NO: 355656 - DNA, 15 bp, Homo sapiens
ggctgctcctgcgct

SEQ ID NO: 355657 - DNA, 15 bp, Homo sapiens
cggctgctcctgcgc

SEQ ID NO: 355658 - DNA, 15 bp, Homo sapiens
ccggctgctcctgcg

SEQ ID NO: 355659 - DNA, 15 bp, Homo sapiens
cccggctgctcctgc

SEQ ID NO: 355660 - DNA, 15 bp, Homo sapiens
acccggctgctcctg

SEQ ID NO: 355661 - DNA, 15 bp, Homo sapiens
aacccggctgctcct

SEQ ID NO: 355662 - DNA, 15 bp, Homo sapiens
gaacccggctgctcc

SEQ ID NO: 355663 - DNA, 15 bp, Homo sapiens
ggaacccggctgctc

SEQ ID NO: 355664 - DNA, 15 bp, Homo sapiens
tggaacccggctgct

SEQ ID NO: 355665 - DNA, 15 bp, Homo sapiens
gtggaacccggctgc

SEQ ID NO: 355666 - DNA, 15 bp, Homo sapiens
agtggaacccggctg

SEQ ID NO: 355667 - DNA, 15 bp, Homo sapiens
gagtggaacccggct

SEQ ID NO: 355668 - DNA, 15 bp, Homo sapiens
agagtggaacccggc

SEQ ID NO: 355669 - DNA, 15 bp, Homo sapiens
gagagtggaacccgg

SEQ ID NO: 355670 - DNA, 15 bp, Homo sapiens
ggagagtggaacccg

SEQ ID NO: 355671 - DNA, 15 bp, Homo sapiens
gggagagtggaaccc

SEQ ID NO: 355672 - DNA, 15 bp, Homo sapiens
ggggagagtggaacc

SEQ ID NO: 355673 - DNA, 15 bp, Homo sapiens
tggggagagtggaac

SEQ ID NO: 355674 - DNA, 15 bp, Homo sapiens
ctggggagagtggaa

SEQ ID NO: 355675 - DNA, 15 bp, Homo sapiens
gctggggagagtgga

SEQ ID NO: 355676 - DNA, 15 bp, Homo sapiens
agctggggagagtgg

SEQ ID NO: 355677 - DNA, 15 bp, Homo sapiens
cagctggggagagtg

SEQ ID NO: 355678 - DNA, 15 bp, Homo sapiens
acagctggggagagt

SEQ ID NO: 355679 - DNA, 15 bp, Homo sapiens
cacagctggggagag

SEQ ID NO: 355680 - DNA, 15 bp, Homo sapiens
tcacagctggggaga

SEQ ID NO: 355681 - DNA, 15 bp, Homo sapiens
gtcacagctggggag

SEQ ID NO: 355682 - DNA, 15 bp, Homo sapiens
ggtcacagctgggga

SEQ ID NO: 355683 - DNA, 15 bp, Homo sapiens
aggtcacagctgggg

SEQ ID NO: 355684 - DNA, 15 bp, Homo sapiens
aaggtcacagctggg

SEQ ID NO: 355685 - DNA, 15 bp, Homo sapiens
taaggtcacagctgg

SEQ ID NO: 355686 - DNA, 15 bp, Homo sapiens
ctaaggtcacagctg

SEQ ID NO: 355687 - DNA, 15 bp, Homo sapiens
cctaaggtcacagct

SEQ ID NO: 355688 - DNA, 15 bp, Homo sapiens
gcctaaggtcacagc

SEQ ID NO: 355689 - DNA, 15 bp, Homo sapiens
tgcctaaggtcacag

SEQ ID NO: 355690 - DNA, 15 bp, Homo sapiens
ctgcctaaggtcaca

SEQ ID NO: 355691 - DNA, 15 bp, Homo sapiens
actgcctaaggtcac

SEQ ID NO: 355692 - DNA, 15 bp, Homo sapiens
gactgcctaaggtca

SEQ ID NO: 355693 - DNA, 15 bp, Homo sapiens
ggactgcctaaggtc

SEQ ID NO: 355694 - DNA, 15 bp, Homo sapiens
gggactgcctaaggt

SEQ ID NO: 355695 - DNA, 15 bp, Homo sapiens
agggactgcctaagg

SEQ ID NO: 355696 - DNA, 15 bp, Homo sapiens
gagggactgcctaag

SEQ ID NO: 355697 - DNA, 15 bp, Homo sapiens
ggagggactgcctaa

SEQ ID NO: 355698 - DNA, 15 bp, Homo sapiens
tggagggactgccta

SEQ ID NO: 355699 - DNA, 15 bp, Homo sapiens
gtggagggactgcct

SEQ ID NO: 355700 - DNA, 15 bp, Homo sapiens
agtggagggactgcc

SEQ ID NO: 355701 - DNA, 15 bp, Homo sapiens
aagtggagggactgc

SEQ ID NO: 355702 - DNA, 15 bp, Homo sapiens
gaagtggagggactg

SEQ ID NO: 355703 - DNA, 15 bp, Homo sapiens
ggaagtggagggact

SEQ ID NO: 355704 - DNA, 15 bp, Homo sapiens
cggaagtggagggac

SEQ ID NO: 355705 - DNA, 15 bp, Homo sapiens
tcggaagtggaggga

SEQ ID NO: 355706 - DNA, 15 bp, Homo sapiens
gtcggaagtggaggg

SEQ ID NO: 355707 - DNA, 15 bp, Homo sapiens
cgtcggaagtggagg

SEQ ID NO: 355708 - DNA, 15 bp, Homo sapiens
gcgtcggaagtggag

SEQ ID NO: 355709 - DNA, 15 bp, Homo sapiens
ggcgtcggaagtgga

SEQ ID NO: 355710 - DNA, 15 bp, Homo sapiens
aggcgtcggaagtgg

SEQ ID NO: 355711 - DNA, 15 bp, Homo sapiens
gaggcgtcggaagtg

SEQ ID NO: 355712 - DNA, 15 bp, Homo sapiens
cgaggcgtcggaagt

SEQ ID NO: 355713 - DNA, 15 bp, Homo sapiens
ccgaggcgtcggaag

SEQ ID NO: 355714 - DNA, 15 bp, Homo sapiens
accgaggcgtcggaa

SEQ ID NO: 355715 - DNA, 15 bp, Homo sapiens
caccgaggcgtcgga

SEQ ID NO: 355716 - DNA, 15 bp, Homo sapiens
acaccgaggcgtcgg

SEQ ID NO: 355717 - DNA, 15 bp, Homo sapiens
gacaccgaggcgtcg

SEQ ID NO: 355718 - DNA, 15 bp, Homo sapiens
ggacaccgaggcgtc

SEQ ID NO: 355719 - DNA, 15 bp, Homo sapiens
aggacaccgaggcgt

SEQ ID NO: 355720 - DNA, 15 bp, Homo sapiens
gaggacaccgaggcg

SEQ ID NO: 355721 - DNA, 15 bp, Homo sapiens
cgaggacaccgaggc

SEQ ID NO: 355722 - DNA, 15 bp, Homo sapiens
gcgaggacaccgagg

SEQ ID NO: 355723 - DNA, 15 bp, Homo sapiens
ggcgaggacaccgag

SEQ ID NO: 355724 - DNA, 15 bp, Homo sapiens
gggcgaggacaccga

SEQ ID NO: 355725 - DNA, 15 bp, Homo sapiens
cgggcgaggacaccg

SEQ ID NO: 355726 - DNA, 15 bp, Homo sapiens
gcgggcgaggacacc

SEQ ID NO: 355727 - DNA, 15 bp, Homo sapiens
tgcgggcgaggacac

SEQ ID NO: 355728 - DNA, 15 bp, Homo sapiens
ttgcgggcgaggaca

SEQ ID NO: 355729 - DNA, 15 bp, Homo sapiens
tttgcgggcgaggac

SEQ ID NO: 355730 - DNA, 15 bp, Homo sapiens
ttttgcgggcgagga

SEQ ID NO: 355731 - DNA, 15 bp, Homo sapiens
attttgcgggcgagg

SEQ ID NO: 355732 - DNA, 15 bp, Homo sapiens
cattttgcgggcgag

SEQ ID NO: 355733 - DNA, 15 bp, Homo sapiens
tcattttgcgggcga

SEQ ID NO: 355734 - DNA, 15 bp, Homo sapiens
ctcattttgcgggcg

SEQ ID NO: 355735 - DNA, 15 bp, Homo sapiens
gctcattttgcgggc

SEQ ID NO: 355736 - DNA, 15 bp, Homo sapiens
tgctcattttgcggg

SEQ ID NO: 355737 - DNA, 15 bp, Homo sapiens
ctgctcattttgcgg

SEQ ID NO: 355738 - DNA, 15 bp, Homo sapiens
cctgctcattttgcg

SEQ ID NO: 355739 - DNA, 15 bp, Homo sapiens
ccctgctcattttgc

SEQ ID NO: 355740 - DNA, 15 bp, Homo sapiens
accctgctcattttg

SEQ ID NO: 355741 - DNA, 15 bp, Homo sapiens
caccctgctcatttt

SEQ ID NO: 355742 - DNA, 15 bp, Homo sapiens
ccaccctgctcattt

SEQ ID NO: 355743 - DNA, 15 bp, Homo sapiens
cccaccctgctcatt

SEQ ID NO: 355744 - DNA, 15 bp, Homo sapiens
gcccaccctgctcat

SEQ ID NO: 355745 - DNA, 15 bp, Homo sapiens
ggcccaccctgctca

SEQ ID NO: 355746 - DNA, 15 bp, Homo sapiens
cggcccaccctgctc

SEQ ID NO: 355747 - DNA, 15 bp, Homo sapiens
gcggcccaccctgct

SEQ ID NO: 355748 - DNA, 15 bp, Homo sapiens
ggcggcccaccctgc

SEQ ID NO: 355749 - DNA, 15 bp, Homo sapiens
gggcggcccaccctg

SEQ ID NO: 355750 - DNA, 15 bp, Homo sapiens
tgggcggcccaccct

SEQ ID NO: 355751 - DNA, 15 bp, Homo sapiens
ctgggcggcccaccc

SEQ ID NO: 355752 - DNA, 15 bp, Homo sapiens
tctgggcggcccacc

SEQ ID NO: 355753 - DNA, 15 bp, Homo sapiens
atctgggcggcccac

SEQ ID NO: 355754 - DNA, 15 bp, Homo sapiens
gatctgggcggccca

SEQ ID NO: 355755 - DNA, 15 bp, Homo sapiens
ggatctgggcggccc

SEQ ID NO: 355756 - DNA, 15 bp, Homo sapiens
gggatctgggcggcc

SEQ ID NO: 355757 - DNA, 15 bp, Homo sapiens
ggggatctgggcggc

SEQ ID NO: 355758 - DNA, 15 bp, Homo sapiens
cggggatctgggcgg

SEQ ID NO: 355759 - DNA, 15 bp, Homo sapiens
ccggggatctgggcg

SEQ ID NO: 355760 - DNA, 15 bp, Homo sapiens
cccggggatctgggc

SEQ ID NO: 355761 - DNA, 15 bp, Homo sapiens
tcccggggatctggg

SEQ ID NO: 355762 - DNA, 15 bp, Homo sapiens
ttcccggggatctgg

SEQ ID NO: 355763 - DNA, 15 bp, Homo sapiens
cttcccggggatctg

SEQ ID NO: 355764 - DNA, 15 bp, Homo sapiens
ccttcccggggatct

SEQ ID NO: 355765 - DNA, 15 bp, Homo sapiens
gccttcccggggatc

SEQ ID NO: 355766 - DNA, 15 bp, Homo sapiens
tgccttcccggggat

SEQ ID NO: 355767 - DNA, 15 bp, Homo sapiens
ctgccttcccgggga

SEQ ID NO: 355768 - DNA, 15 bp, Homo sapiens
gctgccttcccgggg

SEQ ID NO: 355769 - DNA, 15 bp, Homo sapiens
agctgccttcccggg

SEQ ID NO: 355770 - DNA, 15 bp, Homo sapiens
cagctgccttcccgg

SEQ ID NO: 355771 - DNA, 15 bp, Homo sapiens
gcagctgccttcccg

SEQ ID NO: 355772 - DNA, 15 bp, Homo sapiens
ggcagctgccttccc

SEQ ID NO: 355773 - DNA, 15 bp, Homo sapiens
aggcagctgccttcc

SEQ ID NO: 355774 - DNA, 15 bp, Homo sapiens
aaggcagctgccttc

SEQ ID NO: 355775 - DNA, 15 bp, Homo sapiens
gaaggcagctgcctt

SEQ ID NO: 355776 - DNA, 15 bp, Homo sapiens
ggaaggcagctgcct

SEQ ID NO: 355777 - DNA, 15 bp, Homo sapiens
gggaaggcagctgcc

SEQ ID NO: 355778 - DNA, 15 bp, Homo sapiens
ggggaaggcagctgc

SEQ ID NO: 355779 - DNA, 15 bp, Homo sapiens
cggggaaggcagctg

SEQ ID NO: 355780 - DNA, 15 bp, Homo sapiens
gcggggaaggcagct

SEQ ID NO: 355781 - DNA, 15 bp, Homo sapiens
tgcggggaaggcagc

SEQ ID NO: 355782 - DNA, 15 bp, Homo sapiens
ttgcggggaaggcag

SEQ ID NO: 355783 - DNA, 15 bp, Homo sapiens
gttgcggggaaggca

SEQ ID NO: 355784 - DNA, 15 bp, Homo sapiens
agttgcggggaaggc

SEQ ID NO: 355785 - DNA, 15 bp, Homo sapiens
gagttgcggggaagg

SEQ ID NO: 355786 - DNA, 15 bp, Homo sapiens
ggagttgcggggaag

SEQ ID NO: 355787 - DNA, 15 bp, Homo sapiens
cggagttgcggggaa

SEQ ID NO: 355788 - DNA, 15 bp, Homo sapiens
ccggagttgcgggga

SEQ ID NO: 355789 - DNA, 15 bp, Homo sapiens
tccggagttgcgggg

SEQ ID NO: 355790 - DNA, 15 bp, Homo sapiens
ctccggagttgcggg

SEQ ID NO: 355791 - DNA, 15 bp, Homo sapiens
cctccggagttgcgg

SEQ ID NO: 355792 - DNA, 15 bp, Homo sapiens
ccctccggagttgcg

SEQ ID NO: 355793 - DNA, 15 bp, Homo sapiens
cccctccggagttgc

SEQ ID NO: 355794 - DNA, 15 bp, Homo sapiens
tcccctccggagttg

SEQ ID NO: 355795 - DNA, 15 bp, Homo sapiens
gtcccctccggagtt

SEQ ID NO: 355796 - DNA, 15 bp, Homo sapiens
tgtcccctccggagt

SEQ ID NO: 355797 - DNA, 15 bp, Homo sapiens
gtgtcccctccggag

SEQ ID NO: 355798 - DNA, 15 bp, Homo sapiens
ggtgtcccctccgga

SEQ ID NO: 355799 - DNA, 15 bp, Homo sapiens
aggtgtcccctccgg

SEQ ID NO: 355800 - DNA, 15 bp, Homo sapiens
aaggtgtcccctccg

SEQ ID NO: 355801 - DNA, 15 bp, Homo sapiens
caaggtgtcccctcc

SEQ ID NO: 355802 - DNA, 15 bp, Homo sapiens
ccaaggtgtcccctc

SEQ ID NO: 355803 - DNA, 15 bp, Homo sapiens
tccaaggtgtcccct

SEQ ID NO: 355804 - DNA, 15 bp, Homo sapiens
ttccaaggtgtcccc

SEQ ID NO: 355805 - DNA, 15 bp, Homo sapiens
cttccaaggtgtccc

SEQ ID NO: 355806 - DNA, 15 bp, Homo sapiens
gcttccaaggtgtcc

SEQ ID NO: 355807 - DNA, 15 bp, Homo sapiens
cgcttccaaggtgtc

SEQ ID NO: 355808 - DNA, 15 bp, Homo sapiens
gcgcttccaaggtgt

SEQ ID NO: 355809 - DNA, 15 bp, Homo sapiens
ggcgcttccaaggtg

SEQ ID NO: 355810 - DNA, 15 bp, Homo sapiens
tggcgcttccaaggt

SEQ ID NO: 355811 - DNA, 15 bp, Homo sapiens
gtggcgcttccaagg

SEQ ID NO: 355812 - DNA, 15 bp, Homo sapiens
cgtggcgcttccaag

SEQ ID NO: 355813 - DNA, 15 bp, Homo sapiens
gcgtggcgcttccaa

SEQ ID NO: 355814 - DNA, 15 bp, Homo sapiens
ggcgtggcgcttcca

SEQ ID NO: 355815 - DNA, 15 bp, Homo sapiens
aggcgtggcgcttcc

SEQ ID NO: 355816 - DNA, 15 bp, Homo sapiens
caggcgtggcgcttc

SEQ ID NO: 355817 - DNA, 15 bp, Homo sapiens
gcaggcgtggcgctt

SEQ ID NO: 355818 - DNA, 15 bp, Homo sapiens
ggcaggcgtggcgct

SEQ ID NO: 355819 - DNA, 15 bp, Homo sapiens
aggcaggcgtggcgc

SEQ ID NO: 355820 - DNA, 15 bp, Homo sapiens
gaggcaggcgtggcg

SEQ ID NO: 355821 - DNA, 15 bp, Homo sapiens
ggaggcaggcgtggc

SEQ ID NO: 355822 - DNA, 15 bp, Homo sapiens
gggaggcaggcgtgg

SEQ ID NO: 355823 - DNA, 15 bp, Homo sapiens
ggggaggcaggcgtg

SEQ ID NO: 355824 - DNA, 15 bp, Homo sapiens
cggggaggcaggcgt

SEQ ID NO: 355825 - DNA, 15 bp, Homo sapiens
gcggggaggcaggcg

SEQ ID NO: 355826 - DNA, 15 bp, Homo sapiens
tgcggggaggcaggc

SEQ ID NO: 355827 - DNA, 15 bp, Homo sapiens
gtgcggggaggcagg

SEQ ID NO: 355828 - DNA, 15 bp, Homo sapiens
agtgcggggaggcag

SEQ ID NO: 355829 - DNA, 15 bp, Homo sapiens
gagtgcggggaggca

SEQ ID NO: 355830 - DNA, 15 bp, Homo sapiens
ggagtgcggggaggc

SEQ ID NO: 355831 - DNA, 15 bp, Homo sapiens
cggagtgcggggagg

SEQ ID NO: 355832 - DNA, 15 bp, Homo sapiens
gcggagtgcggggag

SEQ ID NO: 355833 - DNA, 15 bp, Homo sapiens
ggcggagtgcgggga

SEQ ID NO: 355834 - DNA, 15 bp, Homo sapiens
gggcggagtgcgggg

SEQ ID NO: 355835 - DNA, 15 bp, Homo sapiens
cgggcggagtgcggg

SEQ ID NO: 355836 - DNA, 15 bp, Homo sapiens
gcgggcggagtgcgg

SEQ ID NO: 355837 - DNA, 15 bp, Homo sapiens
ggcgggcggagtgcg

SEQ ID NO: 355838 - DNA, 15 bp, Homo sapiens
cggcgggcggagtgc

SEQ ID NO: 355839 - DNA, 15 bp, Homo sapiens
gcggcgggcggagtg

SEQ ID NO: 355840 - DNA, 15 bp, Homo sapiens
ggcggcgggcggagt

SEQ ID NO: 355841 - DNA, 15 bp, Homo sapiens
cggcggcgggcggag

SEQ ID NO: 355842 - DNA, 15 bp, Homo sapiens
gcggcggcgggcgga

SEQ ID NO: 355843 - DNA, 15 bp, Homo sapiens
agcggcggcgggcgg

SEQ ID NO: 355844 - DNA, 15 bp, Homo sapiens
gagcggcggcgggcg

SEQ ID NO: 355845 - DNA, 15 bp, Homo sapiens
agagcggcggcgggc

SEQ ID NO: 355846 - DNA, 15 bp, Homo sapiens
gagagcggcggcggg

SEQ ID NO: 355847 - DNA, 15 bp, Homo sapiens
ggagagcggcggcgg

SEQ ID NO: 355848 - DNA, 15 bp, Homo sapiens
tggagagcggcggcg

SEQ ID NO: 355849 - DNA, 15 bp, Homo sapiens
ttggagagcggcggc

SEQ ID NO: 355850 - DNA, 15 bp, Homo sapiens
cttggagagcggcgg

SEQ ID NO: 355851 - DNA, 15 bp, Homo sapiens
ccttggagagcggcg

SEQ ID NO: 355852 - DNA, 15 bp, Homo sapiens
accttggagagcggc

SEQ ID NO: 355853 - DNA, 15 bp, Homo sapiens
caccttggagagcgg

SEQ ID NO: 355854 - DNA, 15 bp, Homo sapiens
gcaccttggagagcg

SEQ ID NO: 355855 - DNA, 15 bp, Homo sapiens
agcaccttggagagc

SEQ ID NO: 355856 - DNA, 15 bp, Homo sapiens
cagcaccttggagag

SEQ ID NO: 355857 - DNA, 15 bp, Homo sapiens
tcagcaccttggaga

SEQ ID NO: 355858 - DNA, 15 bp, Homo sapiens
ttcagcaccttggag

SEQ ID NO: 355859 - DNA, 15 bp, Homo sapiens
cttcagcaccttgga

SEQ ID NO: 355860 - DNA, 15 bp, Homo sapiens
acttcagcaccttgg

SEQ ID NO: 355861 - DNA, 15 bp, Homo sapiens
gacttcagcaccttg

SEQ ID NO: 355862 - DNA, 15 bp, Homo sapiens
cgacttcagcacctt

SEQ ID NO: 355863 - DNA, 15 bp, Homo sapiens
acgacttcagcacct

SEQ ID NO: 355864 - DNA, 15 bp, Homo sapiens
cacgacttcagcacc

SEQ ID NO: 355865 - DNA, 15 bp, Homo sapiens
gcacgacttcagcac

SEQ ID NO: 355866 - DNA, 15 bp, Homo sapiens
ggcacgacttcagca

SEQ ID NO: 355867 - DNA, 15 bp, Homo sapiens
gggcacgacttcagc

SEQ ID NO: 355868 - DNA, 15 bp, Homo sapiens
cgggcacgacttcag

SEQ ID NO: 355869 - DNA, 15 bp, Homo sapiens
ccgggcacgacttca

SEQ ID NO: 355870 - DNA, 15 bp, Homo sapiens
gccgggcacgacttc

SEQ ID NO: 355871 - DNA, 15 bp, Homo sapiens
cgccgggcacgactt

SEQ ID NO: 355872 - DNA, 15 bp, Homo sapiens
gcgccgggcacgact

SEQ ID NO: 355873 - DNA, 15 bp, Homo sapiens
ggcgccgggcacgac

SEQ ID NO: 355874 - DNA, 15 bp, Homo sapiens
aggcgccgggcacga

SEQ ID NO: 355875 - DNA, 15 bp, Homo sapiens
gaggcgccgggcacg

SEQ ID NO: 355876 - DNA, 15 bp, Homo sapiens
agaggcgccgggcac

SEQ ID NO: 355877 - DNA, 15 bp, Homo sapiens
gagaggcgccgggca

SEQ ID NO: 355878 - DNA, 15 bp, Homo sapiens
ggagaggcgccgggc

SEQ ID NO: 355879 - DNA, 15 bp, Homo sapiens
gggagaggcgccggg

SEQ ID NO: 355880 - DNA, 15 bp, Homo sapiens
agggagaggcgccgg

SEQ ID NO: 355881 - DNA, 15 bp, Homo sapiens
gagggagaggcgccg

SEQ ID NO: 355882 - DNA, 15 bp, Homo sapiens
ggagggagaggcgcc

SEQ ID NO: 355883 - DNA, 15 bp, Homo sapiens
cggagggagaggcgc

SEQ ID NO: 355884 - DNA, 15 bp, Homo sapiens
gcggagggagaggcg

SEQ ID NO: 355885 - DNA, 15 bp, Homo sapiens
agcggagggagaggc

SEQ ID NO: 355886 - DNA, 15 bp, Homo sapiens
cagcggagggagagg

SEQ ID NO: 355887 - DNA, 15 bp, Homo sapiens
gcagcggagggagag

SEQ ID NO: 355888 - DNA, 15 bp, Homo sapiens
agcagcggagggaga

SEQ ID NO: 355889 - DNA, 15 bp, Homo sapiens
gagcagcggagggag

SEQ ID NO: 355890 - DNA, 15 bp, Homo sapiens
ggagcagcggaggga

SEQ ID NO: 355891 - DNA, 15 bp, Homo sapiens
tggagcagcggaggg

SEQ ID NO: 355892 - DNA, 15 bp, Homo sapiens
ctggagcagcggagg

SEQ ID NO: 355893 - DNA, 15 bp, Homo sapiens
gctggagcagcggag

SEQ ID NO: 355894 - DNA, 15 bp, Homo sapiens
cgctggagcagcgga

SEQ ID NO: 355895 - DNA, 15 bp, Homo sapiens
gcgctggagcagcgg

SEQ ID NO: 355896 - DNA, 15 bp, Homo sapiens
cgcgctggagcagcg

SEQ ID NO: 355897 - DNA, 15 bp, Homo sapiens
ccgcgctggagcagc

SEQ ID NO: 355898 - DNA, 15 bp, Homo sapiens
cccgcgctggagcag

SEQ ID NO: 355899 - DNA, 15 bp, Homo sapiens
gcccgcgctggagca

SEQ ID NO: 355900 - DNA, 15 bp, Homo sapiens
tgcccgcgctggagc

SEQ ID NO: 355901 - DNA, 15 bp, Homo sapiens
atgcccgcgctggag

SEQ ID NO: 355902 - DNA, 15 bp, Homo sapiens
gatgcccgcgctgga

SEQ ID NO: 355903 - DNA, 15 bp, Homo sapiens
agatgcccgcgctgg

SEQ ID NO: 355904 - DNA, 15 bp, Homo sapiens
cagatgcccgcgctg

SEQ ID NO: 355905 - DNA, 15 bp, Homo sapiens
ccagatgcccgcgct

SEQ ID NO: 355906 - DNA, 15 bp, Homo sapiens
gccagatgcccgcgc

SEQ ID NO: 355907 - DNA, 15 bp, Homo sapiens
cgccagatgcccgcg

SEQ ID NO: 355908 - DNA, 15 bp, Homo sapiens
ccgccagatgcccgc

SEQ ID NO: 355909 - DNA, 15 bp, Homo sapiens
cccgccagatgcccg

SEQ ID NO: 355910 - DNA, 15 bp, Homo sapiens
ccccgccagatgccc

SEQ ID NO: 355911 - DNA, 15 bp, Homo sapiens
cccccgccagatgcc

SEQ ID NO: 355912 - DNA, 15 bp, Homo sapiens
acccccgccagatgc

SEQ ID NO: 355913 - DNA, 15 bp, Homo sapiens
cacccccgccagatg

SEQ ID NO: 355914 - DNA, 15 bp, Homo sapiens
acacccccgccagat

SEQ ID NO: 355915 - DNA, 15 bp, Homo sapiens
cacacccccgccaga

SEQ ID NO: 355916 - DNA, 15 bp, Homo sapiens
ccacacccccgccag

SEQ ID NO: 355917 - DNA, 15 bp, Homo sapiens
tccacacccccgcca

SEQ ID NO: 355918 - DNA, 15 bp, Homo sapiens
ctccacacccccgcc

SEQ ID NO: 355919 - DNA, 15 bp, Homo sapiens
gctccacacccccgc

SEQ ID NO: 355920 - DNA, 15 bp, Homo sapiens
ggctccacacccccg

SEQ ID NO: 355921 - DNA, 15 bp, Homo sapiens
gggctccacaccccc

SEQ ID NO: 355922 - DNA, 15 bp, Homo sapiens
tgggctccacacccc

SEQ ID NO: 355923 - DNA, 15 bp, Homo sapiens
gtgggctccacaccc

SEQ ID NO: 355924 - DNA, 15 bp, Homo sapiens
tgtgggctccacacc

SEQ ID NO: 355925 - DNA, 15 bp, Homo sapiens
gtgtgggctccacac

SEQ ID NO: 355926 - DNA, 15 bp, Homo sapiens
ggtgtgggctccaca

SEQ ID NO: 355927 - DNA, 15 bp, Homo sapiens
aggtgtgggctccac

SEQ ID NO: 355928 - DNA, 15 bp, Homo sapiens
gaggtgtgggctcca

SEQ ID NO: 355929 - DNA, 15 bp, Homo sapiens
tgaggtgtgggctcc

SEQ ID NO: 355930 - DNA, 15 bp, Homo sapiens
gtgaggtgtgggctc

SEQ ID NO: 355931 - DNA, 15 bp, Homo sapiens
agtgaggtgtgggct

SEQ ID NO: 355932 - DNA, 15 bp, Homo sapiens
gagtgaggtgtgggc

SEQ ID NO: 355933 - DNA, 15 bp, Homo sapiens
tgagtgaggtgtggg

SEQ ID NO: 355934 - DNA, 15 bp, Homo sapiens
gtgagtgaggtgtgg

SEQ ID NO: 355935 - DNA, 15 bp, Homo sapiens
ggtgagtgaggtgtg

SEQ ID NO: 355936 - DNA, 15 bp, Homo sapiens
gggtgagtgaggtgt

SEQ ID NO: 355937 - DNA, 15 bp, Homo sapiens
tgggtgagtgaggtg

SEQ ID NO: 355938 - DNA, 15 bp, Homo sapiens
atgggtgagtgaggt

SEQ ID NO: 355939 - DNA, 15 bp, Homo sapiens
gatgggtgagtgagg

SEQ ID NO: 355940 - DNA, 15 bp, Homo sapiens
ggatgggtgagtgag

SEQ ID NO: 355941 - DNA, 15 bp, Homo sapiens
gggatgggtgagtga

SEQ ID NO: 355942 - DNA, 15 bp, Homo sapiens
tgggatgggtgagtg

SEQ ID NO: 355943 - DNA, 15 bp, Homo sapiens
ctgggatgggtgagt

SEQ ID NO: 355944 - DNA, 15 bp, Homo sapiens
cctgggatgggtgag

SEQ ID NO: 355945 - DNA, 15 bp, Homo sapiens
gcctgggatgggtga

SEQ ID NO: 355946 - DNA, 15 bp, Homo sapiens
agcctgggatgggtg

SEQ ID NO: 355947 - DNA, 15 bp, Homo sapiens
cagcctgggatgggt

SEQ ID NO: 355948 - DNA, 15 bp, Homo sapiens
ccagcctgggatggg

SEQ ID NO: 355949 - DNA, 15 bp, Homo sapiens
gccagcctgggatgg

SEQ ID NO: 355950 - DNA, 15 bp, Homo sapiens
ggccagcctgggatg

SEQ ID NO: 355951 - DNA, 15 bp, Homo sapiens
gggccagcctgggat

SEQ ID NO: 355952 - DNA, 15 bp, Homo sapiens
tgggccagcctggga

SEQ ID NO: 355953 - DNA, 15 bp, Homo sapiens
ctgggccagcctggg

SEQ ID NO: 355954 - DNA, 15 bp, Homo sapiens
gctgggccagcctgg

SEQ ID NO: 355955 - DNA, 15 bp, Homo sapiens
ggctgggccagcctg

SEQ ID NO: 355956 - DNA, 15 bp, Homo sapiens
gggctgggccagcct

SEQ ID NO: 355957 - DNA, 15 bp, Homo sapiens
ggggctgggccagcc

SEQ ID NO: 355958 - DNA, 15 bp, Homo sapiens
aggggctgggccagc

SEQ ID NO: 355959 - DNA, 15 bp, Homo sapiens
gaggggctgggccag

SEQ ID NO: 355960 - DNA, 15 bp, Homo sapiens
ggaggggctgggcca

SEQ ID NO: 355961 - DNA, 15 bp, Homo sapiens
aggaggggctgggcc

SEQ ID NO: 355962 - DNA, 15 bp, Homo sapiens
aaggaggggctgggc

SEQ ID NO: 355963 - DNA, 15 bp, Homo sapiens
gaaggaggggctggg

SEQ ID NO: 355964 - DNA, 15 bp, Homo sapiens
agaaggaggggctgg

SEQ ID NO: 355965 - DNA, 15 bp, Homo sapiens
cagaaggaggggctg

SEQ ID NO: 355966 - DNA, 15 bp, Homo sapiens
ccagaaggaggggct

SEQ ID NO: 355967 - DNA, 15 bp, Homo sapiens
cccagaaggaggggc

SEQ ID NO: 355968 - DNA, 15 bp, Homo sapiens
ccccagaaggagggg

SEQ ID NO: 355969 - DNA, 15 bp, Homo sapiens
tccccagaaggaggg

SEQ ID NO: 355970 - DNA, 15 bp, Homo sapiens
ctccccagaaggagg

SEQ ID NO: 355971 - DNA, 15 bp, Homo sapiens
actccccagaaggag

SEQ ID NO: 355972 - DNA, 15 bp, Homo sapiens
gactccccagaagga

SEQ ID NO: 355973 - DNA, 15 bp, Homo sapiens
cgactccccagaagg

SEQ ID NO: 355974 - DNA, 15 bp, Homo sapiens
tcgactccccagaag

SEQ ID NO: 355975 - DNA, 15 bp, Homo sapiens
ctcgactccccagaa

SEQ ID NO: 355976 - DNA, 15 bp, Homo sapiens
cctcgactccccaga

SEQ ID NO: 355977 - DNA, 15 bp, Homo sapiens
tcctcgactccccag

SEQ ID NO: 355978 - DNA, 15 bp, Homo sapiens
ctcctcgactcccca

SEQ ID NO: 355979 - DNA, 15 bp, Homo sapiens
gctcctcgactcccc

SEQ ID NO: 355980 - DNA, 15 bp, Homo sapiens
ggctcctcgactccc

SEQ ID NO: 355981 - DNA, 15 bp, Homo sapiens
gggctcctcgactcc

SEQ ID NO: 355982 - DNA, 15 bp, Homo sapiens
ggggctcctcgactc

SEQ ID NO: 355983 - DNA, 15 bp, Homo sapiens
tggggctcctcgact

SEQ ID NO: 355984 - DNA, 15 bp, Homo sapiens
ctggggctcctcgac

SEQ ID NO: 355985 - DNA, 15 bp, Homo sapiens
tctggggctcctcga

SEQ ID NO: 355986 - DNA, 15 bp, Homo sapiens
gtctggggctcctcg

SEQ ID NO: 355987 - DNA, 15 bp, Homo sapiens
agtctggggctcctc

SEQ ID NO: 355988 - DNA, 15 bp, Homo sapiens
gagtctggggctcct

SEQ ID NO: 355989 - DNA, 15 bp, Homo sapiens
ggagtctggggctcc

SEQ ID NO: 355990 - DNA, 15 bp, Homo sapiens
cggagtctggggctc

SEQ ID NO: 355991 - DNA, 15 bp, Homo sapiens
gcggagtctggggct

SEQ ID NO: 355992 - DNA, 15 bp, Homo sapiens
ggcggagtctggggc

SEQ ID NO: 355993 - DNA, 15 bp, Homo sapiens
aggcggagtctgggg

SEQ ID NO: 355994 - DNA, 15 bp, Homo sapiens
gaggcggagtctggg

SEQ ID NO: 355995 - DNA, 15 bp, Homo sapiens
ggaggcggagtctgg

SEQ ID NO: 355996 - DNA, 15 bp, Homo sapiens
tggaggcggagtctg

SEQ ID NO: 355997 - DNA, 15 bp, Homo sapiens
gtggaggcggagtct

SEQ ID NO: 355998 - DNA, 15 bp, Homo sapiens
tgtggaggcggagtc

SEQ ID NO: 355999 - DNA, 15 bp, Homo sapiens
gtgtggaggcggagt

SEQ ID NO: 356000 - DNA, 15 bp, Homo sapiens
ggtgtggaggcggag

SEQ ID NO: 356001 - DNA, 15 bp, Homo sapiens
tggtgtggaggcgga

SEQ ID NO: 356002 - DNA, 15 bp, Homo sapiens
ttggtgtggaggcgg

SEQ ID NO: 356003 - DNA, 15 bp, Homo sapiens
tttggtgtggaggcg

SEQ ID NO: 356004 - DNA, 15 bp, Homo sapiens
ttttggtgtggaggc

SEQ ID NO: 356005 - DNA, 15 bp, Homo sapiens
gttttggtgtggagg

SEQ ID NO: 356006 - DNA, 15 bp, Homo sapiens
tgttttggtgtggag

SEQ ID NO: 356007 - DNA, 15 bp, Homo sapiens
ttgttttggtgtgga

SEQ ID NO: 356008 - DNA, 15 bp, Homo sapiens
cttgttttggtgtgg

SEQ ID NO: 356009 - DNA, 15 bp, Homo sapiens
ccttgttttggtgtg

SEQ ID NO: 356010 - DNA, 15 bp, Homo sapiens
accttgttttggtgt

SEQ ID NO: 356011 - DNA, 15 bp, Homo sapiens
aaccttgttttggtg

SEQ ID NO: 356012 - DNA, 15 bp, Homo sapiens
gaaccttgttttggt

SEQ ID NO: 356013 - DNA, 15 bp, Homo sapiens
agaaccttgttttgg

SEQ ID NO: 356014 - DNA, 15 bp, Homo sapiens
cagaaccttgttttg

SEQ ID NO: 356015 - DNA, 15 bp, Homo sapiens
acagaaccttgtttt

SEQ ID NO: 356016 - DNA, 15 bp, Homo sapiens
gacagaaccttgttt

SEQ ID NO: 356017 - DNA, 15 bp, Homo sapiens
tgacagaaccttgtt

SEQ ID NO: 356018 - DNA, 15 bp, Homo sapiens
ttgacagaaccttgt

SEQ ID NO: 356019 - DNA, 15 bp, Homo sapiens
tttgacagaaccttg

SEQ ID NO: 356020 - DNA, 15 bp, Homo sapiens
ttttgacagaacctt

SEQ ID NO: 356021 - DNA, 15 bp, Homo sapiens
attttgacagaacct

SEQ ID NO: 356022 - DNA, 15 bp, Homo sapiens
tattttgacagaacc

SEQ ID NO: 356023 - DNA, 15 bp, Homo sapiens
gtattttgacagaac

SEQ ID NO: 356024 - DNA, 15 bp, Homo sapiens
agtattttgacagaa

SEQ ID NO: 356025 - DNA, 15 bp, Homo sapiens
aagtattttgacaga

SEQ ID NO: 356026 - DNA, 15 bp, Homo sapiens
aaagtattttgacag

SEQ ID NO: 356027 - DNA, 15 bp, Homo sapiens
taaagtattttgaca

SEQ ID NO: 356028 - DNA, 15 bp, Homo sapiens
ataaagtattttgac

SEQ ID NO: 356029 - DNA, 15 bp, Homo sapiens
aataaagtattttga

SEQ ID NO: 356030 - DNA, 15 bp, Homo sapiens
aaataaagtattttg

SEQ ID NO: 356031 - DNA, 15 bp, Homo sapiens
gaaataaagtatttt

SEQ ID NO: 356032 - DNA, 15 bp, Homo sapiens
cgaaataaagtattt

SEQ ID NO: 356033 - DNA, 15 bp, Homo sapiens
ccgaaataaagtatt

SEQ ID NO: 356034 - DNA, 15 bp, Homo sapiens
tccgaaataaagtat

SEQ ID NO: 356035 - DNA, 15 bp, Homo sapiens
atccgaaataaagta

SEQ ID NO: 356036 - DNA, 15 bp, Homo sapiens
gatccgaaataaagt

SEQ ID NO: 356037 - DNA, 15 bp, Homo sapiens
tgatccgaaataaag

SEQ ID NO: 356038 - DNA, 15 bp, Homo sapiens
ctgatccgaaataaa

SEQ ID NO: 356039 - DNA, 15 bp, Homo sapiens
cctgatccgaaataa

SEQ ID NO: 356040 - DNA, 15 bp, Homo sapiens
gcctgatccgaaata

SEQ ID NO: 356041 - DNA, 15 bp, Homo sapiens
tgcctgatccgaaat

SEQ ID NO: 356042 - DNA, 15 bp, Homo sapiens
ctgcctgatccgaaa

SEQ ID NO: 356043 - DNA, 15 bp, Homo sapiens
actgcctgatccgaa

SEQ ID NO: 356044 - DNA, 15 bp, Homo sapiens
gactgcctgatccga

SEQ ID NO: 356045 - DNA, 15 bp, Homo sapiens
agactgcctgatccg

SEQ ID NO: 356046 - DNA, 15 bp, Homo sapiens
aagactgcctgatcc

SEQ ID NO: 356047 - DNA, 15 bp, Homo sapiens
taagactgcctgatc

SEQ ID NO: 356048 - DNA, 15 bp, Homo sapiens
ctaagactgcctgat

SEQ ID NO: 356049 - DNA, 15 bp, Homo sapiens
tctaagactgcctga

SEQ ID NO: 356050 - DNA, 15 bp, Homo sapiens
ttctaagactgcctg

SEQ ID NO: 356051 - DNA, 15 bp, Homo sapiens
tttctaagactgcct

SEQ ID NO: 356052 - DNA, 15 bp, Homo sapiens
ttttctaagactgcc

SEQ ID NO: 356053 - DNA, 15 bp, Homo sapiens
cttttctaagactgc

SEQ ID NO: 356054 - DNA, 15 bp, Homo sapiens
ccttttctaagactg

SEQ ID NO: 356055 - DNA, 15 bp, Homo sapiens
cccttttctaagact

SEQ ID NO: 356056 - DNA, 15 bp, Homo sapiens
ccccttttctaagac

SEQ ID NO: 356057 - DNA, 15 bp, Homo sapiens
cccccttttctaaga

SEQ ID NO: 356058 - DNA, 15 bp, Homo sapiens
ccccccttttctaag

SEQ ID NO: 356059 - DNA, 15 bp, Homo sapiens
accccccttttctaa

SEQ ID NO: 356060 - DNA, 15 bp, Homo sapiens
caccccccttttcta

SEQ ID NO: 356061 - DNA, 15 bp, Homo sapiens
tcaccccccttttct

SEQ ID NO: 356062 - DNA, 15 bp, Homo sapiens
atcaccccccttttc

SEQ ID NO: 356063 - DNA, 15 bp, Homo sapiens
aatcacccccctttt

SEQ ID NO: 356064 - DNA, 15 bp, Homo sapiens
caatcaccccccttt

SEQ ID NO: 356065 - DNA, 15 bp, Homo sapiens
acaatcacccccctt

SEQ ID NO: 356066 - DNA, 15 bp, Homo sapiens
cacaatcacccccct

SEQ ID NO: 356067 - DNA, 15 bp, Homo sapiens
ccacaatcacccccc

SEQ ID NO: 356068 - DNA, 15 bp, Homo sapiens
cccacaatcaccccc

SEQ ID NO: 356069 - DNA, 15 bp, Homo sapiens
gcccacaatcacccc

SEQ ID NO: 356070 - DNA, 15 bp, Homo sapiens
ggcccacaatcaccc

SEQ ID NO: 356071 - DNA, 15 bp, Homo sapiens
cggcccacaatcacc

SEQ ID NO: 356072 - DNA, 15 bp, Homo sapiens
acggcccacaatcac

SEQ ID NO: 356073 - DNA, 15 bp, Homo sapiens
cacggcccacaatca

SEQ ID NO: 356074 - DNA, 15 bp, Homo sapiens
ccacggcccacaatc

SEQ ID NO: 356075 - DNA, 15 bp, Homo sapiens
gccacggcccacaat

SEQ ID NO: 356076 - DNA, 15 bp, Homo sapiens
agccacggcccacaa

SEQ ID NO: 356077 - DNA, 15 bp, Homo sapiens
cagccacggcccaca

SEQ ID NO: 356078 - DNA, 15 bp, Homo sapiens
gcagccacggcccac

SEQ ID NO: 356079 - DNA, 15 bp, Homo sapiens
agcagccacggccca

SEQ ID NO: 356080 - DNA, 15 bp, Homo sapiens
gagcagccacggccc

SEQ ID NO: 356081 - DNA, 15 bp, Homo sapiens
ggagcagccacggcc

SEQ ID NO: 356082 - DNA, 15 bp, Homo sapiens
tggagcagccacggc

SEQ ID NO: 356083 - DNA, 15 bp, Homo sapiens
ttggagcagccacgg

SEQ ID NO: 356084 - DNA, 15 bp, Homo sapiens
tttggagcagccacg

SEQ ID NO: 356085 - DNA, 15 bp, Homo sapiens
ctttggagcagccac

SEQ ID NO: 356086 - DNA, 15 bp, Homo sapiens
tctttggagcagcca

SEQ ID NO: 356087 - DNA, 15 bp, Homo sapiens
gtctttggagcagcc

SEQ ID NO: 356088 - DNA, 15 bp, Homo sapiens
ggtctttggagcagc

SEQ ID NO: 356089 - DNA, 15 bp, Homo sapiens
tggtctttggagcag

SEQ ID NO: 356090 - DNA, 15 bp, Homo sapiens
ctggtctttggagca

SEQ ID NO: 356091 - DNA, 15 bp, Homo sapiens
cctggtctttggagc

SEQ ID NO: 356092 - DNA, 15 bp, Homo sapiens
ccctggtctttggag

SEQ ID NO: 356093 - DNA, 15 bp, Homo sapiens
gccctggtctttgga

SEQ ID NO: 356094 - DNA, 15 bp, Homo sapiens
cgccctggtctttgg

SEQ ID NO: 356095 - DNA, 15 bp, Homo sapiens
gcgccctggtctttg

SEQ ID NO: 356096 - DNA, 15 bp, Homo sapiens
tgcgccctggtcttt

SEQ ID NO: 356097 - DNA, 15 bp, Homo sapiens
gtgcgccctggtctt

SEQ ID NO: 356098 - DNA, 15 bp, Homo sapiens
ggtgcgccctggtct

SEQ ID NO: 356099 - DNA, 15 bp, Homo sapiens
gggtgcgccctggtc

SEQ ID NO: 356100 - DNA, 15 bp, Homo sapiens
cgggtgcgccctggt

SEQ ID NO: 356101 - DNA, 15 bp, Homo sapiens
ccgggtgcgccctgg

SEQ ID NO: 356102 - DNA, 15 bp, Homo sapiens
cccgggtgcgccctg

SEQ ID NO: 356103 - DNA, 15 bp, Homo sapiens
ccccgggtgcgccct

SEQ ID NO: 356104 - DNA, 15 bp, Homo sapiens
gccccgggtgcgccc

SEQ ID NO: 356105 - DNA, 15 bp, Homo sapiens
agccccgggtgcgcc

SEQ ID NO: 356106 - DNA, 15 bp, Homo sapiens
gagccccgggtgcgc

SEQ ID NO: 356107 - DNA, 15 bp, Homo sapiens
ggagccccgggtgcg

SEQ ID NO: 356108 - DNA, 15 bp, Homo sapiens
cggagccccgggtgc

SEQ ID NO: 356109 - DNA, 15 bp, Homo sapiens
ccggagccccgggtg

SEQ ID NO: 356110 - DNA, 15 bp, Homo sapiens
cccggagccccgggt

SEQ ID NO: 356111 - DNA, 15 bp, Homo sapiens
ccccggagccccggg

SEQ ID NO: 356112 - DNA, 15 bp, Homo sapiens
gccccggagccccgg

SEQ ID NO: 356113 - DNA, 15 bp, Homo sapiens
ggccccggagccccg

SEQ ID NO: 356114 - DNA, 15 bp, Homo sapiens
tggccccggagcccc

SEQ ID NO: 356115 - DNA, 15 bp, Homo sapiens
ctggccccggagccc

SEQ ID NO: 356116 - DNA, 15 bp, Homo sapiens
cctggccccggagcc

SEQ ID NO: 356117 - DNA, 15 bp, Homo sapiens
gcctggccccggagc

SEQ ID NO: 356118 - DNA, 15 bp, Homo sapiens
agcctggccccggag

SEQ ID NO: 356119 - DNA, 15 bp, Homo sapiens
gagcctggccccgga

SEQ ID NO: 356120 - DNA, 15 bp, Homo sapiens
ggagcctggccccgg

SEQ ID NO: 356121 - DNA, 15 bp, Homo sapiens
gggagcctggccccg

SEQ ID NO: 356122 - DNA, 15 bp, Homo sapiens
agggagcctggcccc

SEQ ID NO: 356123 - DNA, 15 bp, Homo sapiens
cagggagcctggccc

SEQ ID NO: 356124 - DNA, 15 bp, Homo sapiens
gcagggagcctggcc

SEQ ID NO: 356125 - DNA, 15 bp, Homo sapiens
tgcagggagcctggc

SEQ ID NO: 356126 - DNA, 15 bp, Homo sapiens
ctgcagggagcctgg

SEQ ID NO: 356127 - DNA, 15 bp, Homo sapiens
actgcagggagcctg

SEQ ID NO: 356128 - DNA, 15 bp, Homo sapiens
gactgcagggagcct

SEQ ID NO: 356129 - DNA, 15 bp, Homo sapiens
agactgcagggagcc

SEQ ID NO: 356130 - DNA, 15 bp, Homo sapiens
gagactgcagggagc

SEQ ID NO: 356131 - DNA, 15 bp, Homo sapiens
cgagactgcagggag

SEQ ID NO: 356132 - DNA, 15 bp, Homo sapiens
ccgagactgcaggga

SEQ ID NO: 356133 - DNA, 15 bp, Homo sapiens
gccgagactgcaggg

SEQ ID NO: 356134 - DNA, 15 bp, Homo sapiens
cgccgagactgcagg

SEQ ID NO: 356135 - DNA, 15 bp, Homo sapiens
ccgccgagactgcag

SEQ ID NO: 356136 - DNA, 15 bp, Homo sapiens
gccgccgagactgca

SEQ ID NO: 356137 - DNA, 15 bp, Homo sapiens
agccgccgagactgc

SEQ ID NO: 356138 - DNA, 15 bp, Homo sapiens
aagccgccgagactg

SEQ ID NO: 356139 - DNA, 15 bp, Homo sapiens
gaagccgccgagact

SEQ ID NO: 356140 - DNA, 15 bp, Homo sapiens
ggaagccgccgagac

SEQ ID NO: 356141 - DNA, 15 bp, Homo sapiens
aggaagccgccgaga

SEQ ID NO: 356142 - DNA, 15 bp, Homo sapiens
gaggaagccgccgag

SEQ ID NO: 356143 - DNA, 15 bp, Homo sapiens
ggaggaagccgccga

SEQ ID NO: 356144 - DNA, 15 bp, Homo sapiens
aggaggaagccgccg

SEQ ID NO: 356145 - DNA, 15 bp, Homo sapiens
gaggaggaagccgcc

SEQ ID NO: 356146 - DNA, 15 bp, Homo sapiens
ggaggaggaagccgc

SEQ ID NO: 356147 - DNA, 15 bp, Homo sapiens
gggaggaggaagccg

SEQ ID NO: 356148 - DNA, 15 bp, Homo sapiens
tgggaggaggaagcc

SEQ ID NO: 356149 - DNA, 15 bp, Homo sapiens
ctgggaggaggaagc

SEQ ID NO: 356150 - DNA, 15 bp, Homo sapiens
actgggaggaggaag

SEQ ID NO: 356151 - DNA, 15 bp, Homo sapiens
cactgggaggaggaa

SEQ ID NO: 356152 - DNA, 15 bp, Homo sapiens
acactgggaggagga

SEQ ID NO: 356153 - DNA, 15 bp, Homo sapiens
cacactgggaggagg

SEQ ID NO: 356154 - DNA, 15 bp, Homo sapiens
gcacactgggaggag

SEQ ID NO: 356155 - DNA, 15 bp, Homo sapiens
cgcacactgggagga

SEQ ID NO: 356156 - DNA, 15 bp, Homo sapiens
tcgcacactgggagg

SEQ ID NO: 356157 - DNA, 15 bp, Homo sapiens
ctcgcacactgggag

SEQ ID NO: 356158 - DNA, 15 bp, Homo sapiens
cctcgcacactggga

SEQ ID NO: 356159 - DNA, 15 bp, Homo sapiens
ccctcgcacactggg

SEQ ID NO: 356160 - DNA, 15 bp, Homo sapiens
tccctcgcacactgg

SEQ ID NO: 356161 - DNA, 15 bp, Homo sapiens
ctccctcgcacactg

SEQ ID NO: 356162 - DNA, 15 bp, Homo sapiens
cctccctcgcacact

SEQ ID NO: 356163 - DNA, 15 bp, Homo sapiens
gcctccctcgcacac

SEQ ID NO: 356164 - DNA, 15 bp, Homo sapiens
ggcctccctcgcaca

SEQ ID NO: 356165 - DNA, 15 bp, Homo sapiens
cggcctccctcgcac

SEQ ID NO: 356166 - DNA, 15 bp, Homo sapiens
ccggcctccctcgca

SEQ ID NO: 356167 - DNA, 15 bp, Homo sapiens
cccggcctccctcgc

SEQ ID NO: 356168 - DNA, 15 bp, Homo sapiens
tcccggcctccctcg

SEQ ID NO: 356169 - DNA, 15 bp, Homo sapiens
ctcccggcctccctc

SEQ ID NO: 356170 - DNA, 15 bp, Homo sapiens
cctcccggcctccct

SEQ ID NO: 356171 - DNA, 15 bp, Homo sapiens
ccctcccggcctccc

SEQ ID NO: 356172 - DNA, 15 bp, Homo sapiens
cccctcccggcctcc

SEQ ID NO: 356173 - DNA, 15 bp, Homo sapiens
acccctcccggcctc

SEQ ID NO: 356174 - DNA, 15 bp, Homo sapiens
gacccctcccggcct

SEQ ID NO: 356175 - DNA, 15 bp, Homo sapiens
ggacccctcccggcc

SEQ ID NO: 356176 - DNA, 15 bp, Homo sapiens
gggacccctcccggc

SEQ ID NO: 356177 - DNA, 15 bp, Homo sapiens
agggacccctcccgg

SEQ ID NO: 356178 - DNA, 15 bp, Homo sapiens
cagggacccctcccg

SEQ ID NO: 356179 - DNA, 15 bp, Homo sapiens
ccagggacccctccc

SEQ ID NO: 356180 - DNA, 15 bp, Homo sapiens
cccagggacccctcc

SEQ ID NO: 356181 - DNA, 15 bp, Homo sapiens
gcccagggacccctc

SEQ ID NO: 356182 - DNA, 15 bp, Homo sapiens
cgcccagggacccct

SEQ ID NO: 356183 - DNA, 15 bp, Homo sapiens
ccgcccagggacccc

SEQ ID NO: 356184 - DNA, 15 bp, Homo sapiens
cccgcccagggaccc

SEQ ID NO: 356185 - DNA, 15 bp, Homo sapiens
ccccgcccagggacc

SEQ ID NO: 356186 - DNA, 15 bp, Homo sapiens
tccccgcccagggac

SEQ ID NO: 356187 - DNA, 15 bp, Homo sapiens
ctccccgcccaggga

SEQ ID NO: 356188 - DNA, 15 bp, Homo sapiens
actccccgcccaggg

SEQ ID NO: 356189 - DNA, 15 bp, Homo sapiens
aactccccgcccagg

SEQ ID NO: 356190 - DNA, 15 bp, Homo sapiens
caactccccgcccag

SEQ ID NO: 356191 - DNA, 15 bp, Homo sapiens
gcaactccccgccca

SEQ ID NO: 356192 - DNA, 15 bp, Homo sapiens
agcaactccccgccc

SEQ ID NO: 356193 - DNA, 15 bp, Homo sapiens
cagcaactccccgcc

SEQ ID NO: 356194 - DNA, 15 bp, Homo sapiens
gcagcaactccccgc

SEQ ID NO: 356195 - DNA, 15 bp, Homo sapiens
cgcagcaactccccg

SEQ ID NO: 356196 - DNA, 15 bp, Homo sapiens
gcgcagcaactcccc

SEQ ID NO: 356197 - DNA, 15 bp, Homo sapiens
tgcgcagcaactccc

SEQ ID NO: 356198 - DNA, 15 bp, Homo sapiens
atgcgcagcaactcc

SEQ ID NO: 356199 - DNA, 15 bp, Homo sapiens
gatgcgcagcaactc

SEQ ID NO: 356200 - DNA, 15 bp, Homo sapiens
agatgcgcagcaact

SEQ ID NO: 356201 - DNA, 15 bp, Homo sapiens
cagatgcgcagcaac

SEQ ID NO: 356202 - DNA, 15 bp, Homo sapiens
acagatgcgcagcaa

SEQ ID NO: 356203 - DNA, 15 bp, Homo sapiens
aacagatgcgcagca

SEQ ID NO: 356204 - DNA, 15 bp, Homo sapiens
caacagatgcgcagc

SEQ ID NO: 356205 - DNA, 15 bp, Homo sapiens
acaacagatgcgcag

SEQ ID NO: 356206 - DNA, 15 bp, Homo sapiens
cacaacagatgcgca

SEQ ID NO: 356207 - DNA, 15 bp, Homo sapiens
acacaacagatgcgc

SEQ ID NO: 356208 - DNA, 15 bp, Homo sapiens
cacacaacagatgcg

SEQ ID NO: 356209 - DNA, 15 bp, Homo sapiens
acacacaacagatgc

SEQ ID NO: 356210 - DNA, 15 bp, Homo sapiens
cacacacaacagatg

SEQ ID NO: 356211 - DNA, 15 bp, Homo sapiens
acacacacaacagat

SEQ ID NO: 356212 - DNA, 15 bp, Homo sapiens
cacacacacaacaga

SEQ ID NO: 356213 - DNA, 15 bp, Homo sapiens
gcacacacacaacag

SEQ ID NO: 356214 - DNA, 15 bp, Homo sapiens
cgcacacacacaaca

SEQ ID NO: 356215 - DNA, 15 bp, Homo sapiens
acgcacacacacaac

SEQ ID NO: 356216 - DNA, 15 bp, Homo sapiens
gacgcacacacacaa

SEQ ID NO: 356217 - DNA, 15 bp, Homo sapiens
agacgcacacacaca

SEQ ID NO: 356218 - DNA, 15 bp, Homo sapiens
cagacgcacacacac

SEQ ID NO: 356219 - DNA, 15 bp, Homo sapiens
acagacgcacacaca

SEQ ID NO: 356220 - DNA, 15 bp, Homo sapiens
gacagacgcacacac

SEQ ID NO: 356221 - DNA, 15 bp, Homo sapiens
agacagacgcacaca

SEQ ID NO: 356222 - DNA, 15 bp, Homo sapiens
cagacagacgcacac

SEQ ID NO: 356223 - DNA, 15 bp, Homo sapiens
acagacagacgcaca

SEQ ID NO: 356224 - DNA, 15 bp, Homo sapiens
gacagacagacgcac

SEQ ID NO: 356225 - DNA, 15 bp, Homo sapiens
agacagacagacgca

SEQ ID NO: 356226 - DNA, 15 bp, Homo sapiens
cagacagacagacgc

SEQ ID NO: 356227 - DNA, 15 bp, Homo sapiens
acagacagacagacg

SEQ ID NO: 356228 - DNA, 15 bp, Homo sapiens
aacagacagacagac

SEQ ID NO: 356229 - DNA, 15 bp, Homo sapiens
gaacagacagacaga

SEQ ID NO: 356230 - DNA, 15 bp, Homo sapiens
tgaacagacagacag

SEQ ID NO: 356231 - DNA, 15 bp, Homo sapiens
ctgaacagacagaca

SEQ ID NO: 356232 - DNA, 15 bp, Homo sapiens
cctgaacagacagac

SEQ ID NO: 356233 - DNA, 15 bp, Homo sapiens
acctgaacagacaga

SEQ ID NO: 356234 - DNA, 15 bp, Homo sapiens
gacctgaacagacag

SEQ ID NO: 356235 - DNA, 15 bp, Homo sapiens
agacctgaacagaca

SEQ ID NO: 356236 - DNA, 15 bp, Homo sapiens
cagacctgaacagac

SEQ ID NO: 356237 - DNA, 15 bp, Homo sapiens
acagacctgaacaga

SEQ ID NO: 356238 - DNA, 15 bp, Homo sapiens
aacagacctgaacag

SEQ ID NO: 356239 - DNA, 15 bp, Homo sapiens
aaacagacctgaaca

SEQ ID NO: 356240 - DNA, 15 bp, Homo sapiens
gaaacagacctgaac

SEQ ID NO: 356241 - DNA, 15 bp, Homo sapiens
tgaaacagacctgaa

SEQ ID NO: 356242 - DNA, 15 bp, Homo sapiens
ctgaaacagacctga

SEQ ID NO: 356243 - DNA, 15 bp, Homo sapiens
tctgaaacagacctg

SEQ ID NO: 356244 - DNA, 15 bp, Homo sapiens
gtctgaaacagacct

SEQ ID NO: 356245 - DNA, 15 bp, Homo sapiens
agtctgaaacagacc

SEQ ID NO: 356246 - DNA, 15 bp, Homo sapiens
tagtctgaaacagac

SEQ ID NO: 356247 - DNA, 15 bp, Homo sapiens
gtagtctgaaacaga

SEQ ID NO: 356248 - DNA, 15 bp, Homo sapiens
cgtagtctgaaacag

SEQ ID NO: 356249 - DNA, 15 bp, Homo sapiens
acgtagtctgaaaca

SEQ ID NO: 356250 - DNA, 15 bp, Homo sapiens
gacgtagtctgaaac

SEQ ID NO: 356251 - DNA, 15 bp, Homo sapiens
agacgtagtctgaaa

SEQ ID NO: 356252 - DNA, 15 bp, Homo sapiens
cagacgtagtctgaa

SEQ ID NO: 356253 - DNA, 15 bp, Homo sapiens
gcagacgtagtctga

SEQ ID NO: 356254 - DNA, 15 bp, Homo sapiens
ggcagacgtagtctg

SEQ ID NO: 356255 - DNA, 15 bp, Homo sapiens
aggcagacgtagtct

SEQ ID NO: 356256 - DNA, 15 bp, Homo sapiens
caggcagacgtagtc

SEQ ID NO: 356257 - DNA, 15 bp, Homo sapiens
acaggcagacgtagt

SEQ ID NO: 356258 - DNA, 15 bp, Homo sapiens
gacaggcagacgtag

SEQ ID NO: 356259 - DNA, 15 bp, Homo sapiens
agacaggcagacgta

SEQ ID NO: 356260 - DNA, 15 bp, Homo sapiens
cagacaggcagacgt

SEQ ID NO: 356261 - DNA, 15 bp, Homo sapiens
acagacaggcagacg

SEQ ID NO: 356262 - DNA, 15 bp, Homo sapiens
gacagacaggcagac

SEQ ID NO: 356263 - DNA, 15 bp, Homo sapiens
ggacagacaggcaga

SEQ ID NO: 356264 - DNA, 15 bp, Homo sapiens
tggacagacaggcag

SEQ ID NO: 356265 - DNA, 15 bp, Homo sapiens
ctggacagacaggca

SEQ ID NO: 356266 - DNA, 15 bp, Homo sapiens
cctggacagacaggc

SEQ ID NO: 356267 - DNA, 15 bp, Homo sapiens
acctggacagacagg

SEQ ID NO: 356268 - DNA, 15 bp, Homo sapiens
gacctggacagacag

SEQ ID NO: 356269 - DNA, 15 bp, Homo sapiens
agacctggacagaca

SEQ ID NO: 356270 - DNA, 15 bp, Homo sapiens
cagacctggacagac

SEQ ID NO: 356271 - DNA, 15 bp, Homo sapiens
acagacctggacaga

SEQ ID NO: 356272 - DNA, 15 bp, Homo sapiens
aacagacctggacag

SEQ ID NO: 356273 - DNA, 15 bp, Homo sapiens
aaacagacctggaca

SEQ ID NO: 356274 - DNA, 15 bp, Homo sapiens
aaaacagacctggac

SEQ ID NO: 356275 - DNA, 15 bp, Homo sapiens
taaaacagacctgga

SEQ ID NO: 356276 - DNA, 15 bp, Homo sapiens
ctaaaacagacctgg

SEQ ID NO: 356277 - DNA, 15 bp, Homo sapiens
cctaaaacagacctg

SEQ ID NO: 356278 - DNA, 15 bp, Homo sapiens
gcctaaaacagacct

SEQ ID NO: 356279 - DNA, 15 bp, Homo sapiens
agcctaaaacagacc

SEQ ID NO: 356280 - DNA, 15 bp, Homo sapiens
cagcctaaaacagac

SEQ ID NO: 356281 - DNA, 15 bp, Homo sapiens
acagcctaaaacaga

SEQ ID NO: 356282 - DNA, 15 bp, Homo sapiens
cacagcctaaaacag

SEQ ID NO: 356283 - DNA, 15 bp, Homo sapiens
acacagcctaaaaca

SEQ ID NO: 356284 - DNA, 15 bp, Homo sapiens
gacacagcctaaaac

SEQ ID NO: 356285 - DNA, 15 bp, Homo sapiens
agacacagcctaaaa

SEQ ID NO: 356286 - DNA, 15 bp, Homo sapiens
cagacacagcctaaa

SEQ ID NO: 356287 - DNA, 15 bp, Homo sapiens
gcagacacagcctaa

SEQ ID NO: 356288 - DNA, 15 bp, Homo sapiens
ggcagacacagccta

SEQ ID NO: 356289 - DNA, 15 bp, Homo sapiens
aggcagacacagcct

SEQ ID NO: 356290 - DNA, 15 bp, Homo sapiens
caggcagacacagcc

SEQ ID NO: 356291 - DNA, 15 bp, Homo sapiens
acaggcagacacagc

SEQ ID NO: 356292 - DNA, 15 bp, Homo sapiens
gacaggcagacacag

SEQ ID NO: 356293 - DNA, 15 bp, Homo sapiens
agacaggcagacaca

SEQ ID NO: 356294 - DNA, 15 bp, Homo sapiens
gagacaggcagacac

SEQ ID NO: 356295 - DNA, 15 bp, Homo sapiens
agagacaggcagaca

SEQ ID NO: 356296 - DNA, 15 bp, Homo sapiens
gagagacaggcagac

SEQ ID NO: 356297 - DNA, 15 bp, Homo sapiens
agagagacaggcaga

SEQ ID NO: 356298 - DNA, 15 bp, Homo sapiens
cagagagacaggcag

SEQ ID NO: 356299 - DNA, 15 bp, Homo sapiens
acagagagacaggca

SEQ ID NO: 356300 - DNA, 15 bp, Homo sapiens
gacagagagacaggc

SEQ ID NO: 356301 - DNA, 15 bp, Homo sapiens
agacagagagacagg

SEQ ID NO: 356302 - DNA, 15 bp, Homo sapiens
cagacagagagacag

SEQ ID NO: 356303 - DNA, 15 bp, Homo sapiens
ccagacagagagaca

SEQ ID NO: 356304 - DNA, 15 bp, Homo sapiens
cccagacagagagac

SEQ ID NO: 356305 - DNA, 15 bp, Homo sapiens
acccagacagagaga

SEQ ID NO: 356306 - DNA, 15 bp, Homo sapiens
gacccagacagagag

SEQ ID NO: 356307 - DNA, 15 bp, Homo sapiens
agacccagacagaga

SEQ ID NO: 356308 - DNA, 15 bp, Homo sapiens
gagacccagacagag

SEQ ID NO: 356309 - DNA, 15 bp, Homo sapiens
agagacccagacaga

SEQ ID NO: 356310 - DNA, 15 bp, Homo sapiens
aagagacccagacag

SEQ ID NO: 356311 - DNA, 15 bp, Homo sapiens
aaagagacccagaca

SEQ ID NO: 356312 - DNA, 15 bp, Homo sapiens
gaaagagacccagac

SEQ ID NO: 356313 - DNA, 15 bp, Homo sapiens
tgaaagagacccaga

SEQ ID NO: 356314 - DNA, 15 bp, Homo sapiens
ctgaaagagacccag

SEQ ID NO: 356315 - DNA, 15 bp, Homo sapiens
cctgaaagagaccca

SEQ ID NO: 356316 - DNA, 15 bp, Homo sapiens
gcctgaaagagaccc

SEQ ID NO: 356317 - DNA, 15 bp, Homo sapiens
agcctgaaagagacc

SEQ ID NO: 356318 - DNA, 15 bp, Homo sapiens
cagcctgaaagagac

SEQ ID NO: 356319 - DNA, 15 bp, Homo sapiens
gcagcctgaaagaga

SEQ ID NO: 356320 - DNA, 15 bp, Homo sapiens
cgcagcctgaaagag

SEQ ID NO: 356321 - DNA, 15 bp, Homo sapiens
acgcagcctgaaaga

SEQ ID NO: 356322 - DNA, 15 bp, Homo sapiens
gacgcagcctgaaag

SEQ ID NO: 356323 - DNA, 15 bp, Homo sapiens
cgacgcagcctgaaa

SEQ ID NO: 356324 - DNA, 15 bp, Homo sapiens
ccgacgcagcctgaa

SEQ ID NO: 356325 - DNA, 15 bp, Homo sapiens
accgacgcagcctga

SEQ ID NO: 356326 - DNA, 15 bp, Homo sapiens
gaccgacgcagcctg

SEQ ID NO: 356327 - DNA, 15 bp, Homo sapiens
agaccgacgcagcct

SEQ ID NO: 356328 - DNA, 15 bp, Homo sapiens
cagaccgacgcagcc

SEQ ID NO: 356329 - DNA, 15 bp, Homo sapiens
acagaccgacgcagc

SEQ ID NO: 356330 - DNA, 15 bp, Homo sapiens
gacagaccgacgcag

SEQ ID NO: 356331 - DNA, 15 bp, Homo sapiens
agacagaccgacgca

SEQ ID NO: 356332 - DNA, 15 bp, Homo sapiens
cagacagaccgacgc

SEQ ID NO: 356333 - DNA, 15 bp, Homo sapiens
acagacagaccgacg

SEQ ID NO: 356334 - DNA, 15 bp, Homo sapiens
gacagacagaccgac

SEQ ID NO: 356335 - DNA, 15 bp, Homo sapiens
agacagacagaccga

SEQ ID NO: 356336 - DNA, 15 bp, Homo sapiens
cagacagacagaccg

SEQ ID NO: 356337 - DNA, 15 bp, Homo sapiens
ccagacagacagacc

SEQ ID NO: 356338 - DNA, 15 bp, Homo sapiens
cccagacagacagac

SEQ ID NO: 356339 - DNA, 15 bp, Homo sapiens
acccagacagacaga

SEQ ID NO: 356340 - DNA, 15 bp, Homo sapiens
gacccagacagacag

SEQ ID NO: 356341 - DNA, 15 bp, Homo sapiens
agacccagacagaca

SEQ ID NO: 356342 - DNA, 15 bp, Homo sapiens
cagacccagacagac

SEQ ID NO: 356343 - DNA, 15 bp, Homo sapiens
acagacccagacaga

SEQ ID NO: 356344 - DNA, 15 bp, Homo sapiens
aacagacccagacag

SEQ ID NO: 356345 - DNA, 15 bp, Homo sapiens
aaacagacccagaca

SEQ ID NO: 356346 - DNA, 15 bp, Homo sapiens
gaaacagacccagac

SEQ ID NO: 356347 - DNA, 15 bp, Homo sapiens
tgaaacagacccaga

SEQ ID NO: 356348 - DNA, 15 bp, Homo sapiens
ctgaaacagacccag

SEQ ID NO: 356349 - DNA, 15 bp, Homo sapiens
cctgaaacagaccca

SEQ ID NO: 356350 - DNA, 15 bp, Homo sapiens
gcctgaaacagaccc

SEQ ID NO: 356351 - DNA, 15 bp, Homo sapiens
agcctgaaacagacc

SEQ ID NO: 356352 - DNA, 15 bp, Homo sapiens
cagcctgaaacagac

SEQ ID NO: 356353 - DNA, 15 bp, Homo sapiens
acagcctgaaacaga

SEQ ID NO: 356354 - DNA, 15 bp, Homo sapiens
cacagcctgaaacag

SEQ ID NO: 356355 - DNA, 15 bp, Homo sapiens
acacagcctgaaaca

SEQ ID NO: 356356 - DNA, 15 bp, Homo sapiens
gacacagcctgaaac

SEQ ID NO: 356357 - DNA, 15 bp, Homo sapiens
agacacagcctgaaa

SEQ ID NO: 356358 - DNA, 15 bp, Homo sapiens
cagacacagcctgaa

SEQ ID NO: 356359 - DNA, 15 bp, Homo sapiens
acagacacagcctga

SEQ ID NO: 356360 - DNA, 15 bp, Homo sapiens
gacagacacagcctg

SEQ ID NO: 356361 - DNA, 15 bp, Homo sapiens
agacagacacagcct

SEQ ID NO: 356362 - DNA, 15 bp, Homo sapiens
cagacagacacagcc

SEQ ID NO: 356363 - DNA, 15 bp, Homo sapiens
acagacagacacagc

SEQ ID NO: 356364 - DNA, 15 bp, Homo sapiens
gacagacagacacag

SEQ ID NO: 356365 - DNA, 15 bp, Homo sapiens
agacagacagacaca

SEQ ID NO: 356366 - DNA, 15 bp, Homo sapiens
cagacagacagacac

SEQ ID NO: 356367 - DNA, 15 bp, Homo sapiens
acagacagacagaca

SEQ ID NO: 356368 - DNA, 15 bp, Homo sapiens
gacagacagacagac

SEQ ID NO: 356369 - DNA, 15 bp, Homo sapiens
agacagacagacaga

SEQ ID NO: 356370 - DNA, 15 bp, Homo sapiens
cagacagacagacag

SEQ ID NO: 356371 - DNA, 15 bp, Homo sapiens
ccagacagacagaca

SEQ ID NO: 356372 - DNA, 15 bp, Homo sapiens
ggacagacagacaga

SEQ ID NO: 356373 - DNA, 15 bp, Homo sapiens
cggacagacagacag

SEQ ID NO: 356374 - DNA, 15 bp, Homo sapiens
ccggacagacagaca

SEQ ID NO: 356375 - DNA, 15 bp, Homo sapiens
cccggacagacagac

SEQ ID NO: 356376 - DNA, 15 bp, Homo sapiens
acccggacagacaga

SEQ ID NO: 356377 - DNA, 15 bp, Homo sapiens
gacccggacagacag

SEQ ID NO: 356378 - DNA, 15 bp, Homo sapiens
agacccggacagaca

SEQ ID NO: 356379 - DNA, 15 bp, Homo sapiens
cagacccggacagac

SEQ ID NO: 356380 - DNA, 15 bp, Homo sapiens
acagacccggacaga

SEQ ID NO: 356381 - DNA, 15 bp, Homo sapiens
aacagacccggacag

SEQ ID NO: 356382 - DNA, 15 bp, Homo sapiens
aaacagacccggaca

SEQ ID NO: 356383 - DNA, 15 bp, Homo sapiens
gaaacagacccggac

SEQ ID NO: 356384 - DNA, 15 bp, Homo sapiens
tgaaacagacccgga

SEQ ID NO: 356385 - DNA, 15 bp, Homo sapiens
ctgaaacagacccgg

SEQ ID NO: 356386 - DNA, 15 bp, Homo sapiens
cctgaaacagacccg

SEQ ID NO: 356387 - DNA, 15 bp, Homo sapiens
ccagacacagcctga

SEQ ID NO: 356388 - DNA, 15 bp, Homo sapiens
cccagacacagcctg

SEQ ID NO: 356389 - DNA, 15 bp, Homo sapiens
acccagacacagcct

SEQ ID NO: 356390 - DNA, 15 bp, Homo sapiens
gacccagacacagcc

SEQ ID NO: 356391 - DNA, 15 bp, Homo sapiens
agacccagacacagc

SEQ ID NO: 356392 - DNA, 15 bp, Homo sapiens
cagacccagacacag

SEQ ID NO: 356393 - DNA, 15 bp, Homo sapiens
acagacccagacaca

SEQ ID NO: 356394 - DNA, 15 bp, Homo sapiens
aacagacccagacac

SEQ ID NO: 356395 - DNA, 15 bp, Homo sapiens
aacagacagacacag

SEQ ID NO: 356396 - DNA, 15 bp, Homo sapiens
aaacagacagacaca

SEQ ID NO: 356397 - DNA, 15 bp, Homo sapiens
caaacagacagacac

SEQ ID NO: 356398 - DNA, 15 bp, Homo sapiens
acaaacagacagaca

SEQ ID NO: 356399 - DNA, 15 bp, Homo sapiens
gacaaacagacagac

SEQ ID NO: 356400 - DNA, 15 bp, Homo sapiens
agacaaacagacaga

SEQ ID NO: 356401 - DNA, 15 bp, Homo sapiens
cagacaaacagacag

SEQ ID NO: 356402 - DNA, 15 bp, Homo sapiens
ccagacaaacagaca

SEQ ID NO: 356403 - DNA, 15 bp, Homo sapiens
cccagacaaacagac

SEQ ID NO: 356404 - DNA, 15 bp, Homo sapiens
acccagacaaacaga

SEQ ID NO: 356405 - DNA, 15 bp, Homo sapiens
gacccagacaaacag

SEQ ID NO: 356406 - DNA, 15 bp, Homo sapiens
agacccagacaaaca

SEQ ID NO: 356407 - DNA, 15 bp, Homo sapiens
cagacccagacaaac

SEQ ID NO: 356408 - DNA, 15 bp, Homo sapiens
acagacccagacaaa

SEQ ID NO: 356409 - DNA, 15 bp, Homo sapiens
aacagacccagacaa

SEQ ID NO: 356410 - DNA, 15 bp, Homo sapiens
ttgaaacagacccag

SEQ ID NO: 356411 - DNA, 15 bp, Homo sapiens
attgaaacagaccca

SEQ ID NO: 356412 - DNA, 15 bp, Homo sapiens
gattgaaacagaccc

SEQ ID NO: 356413 - DNA, 15 bp, Homo sapiens
agattgaaacagacc

SEQ ID NO: 356414 - DNA, 15 bp, Homo sapiens
cagattgaaacagac

SEQ ID NO: 356415 - DNA, 15 bp, Homo sapiens
acagattgaaacaga

SEQ ID NO: 356416 - DNA, 15 bp, Homo sapiens
cacagattgaaacag

SEQ ID NO: 356417 - DNA, 15 bp, Homo sapiens
acacagattgaaaca

SEQ ID NO: 356418 - DNA, 15 bp, Homo sapiens
gacacagattgaaac

SEQ ID NO: 356419 - DNA, 15 bp, Homo sapiens
agacacagattgaaa

SEQ ID NO: 356420 - DNA, 15 bp, Homo sapiens
cagacacagattgaa

SEQ ID NO: 356421 - DNA, 15 bp, Homo sapiens
acagacacagattga

SEQ ID NO: 356422 - DNA, 15 bp, Homo sapiens
gacagacacagattg

SEQ ID NO: 356423 - DNA, 15 bp, Homo sapiens
agacagacacagatt

SEQ ID NO: 356424 - DNA, 15 bp, Homo sapiens
cagacagacacagat

SEQ ID NO: 356425 - DNA, 15 bp, Homo sapiens
acagacagacacaga

SEQ ID NO: 356426 - DNA, 15 bp, Homo sapiens
tagacagacagacac

SEQ ID NO: 356427 - DNA, 15 bp, Homo sapiens
ctagacagacagaca

SEQ ID NO: 356428 - DNA, 15 bp, Homo sapiens
cctagacagacagac

SEQ ID NO: 356429 - DNA, 15 bp, Homo sapiens
acctagacagacaga

SEQ ID NO: 356430 - DNA, 15 bp, Homo sapiens
gacctagacagacag

SEQ ID NO: 356431 - DNA, 15 bp, Homo sapiens
agacctagacagaca

SEQ ID NO: 356432 - DNA, 15 bp, Homo sapiens
cagacctagacagac

SEQ ID NO: 356433 - DNA, 15 bp, Homo sapiens
acagacctagacaga

SEQ ID NO: 356434 - DNA, 15 bp, Homo sapiens
aacagacctagacag

SEQ ID NO: 356435 - DNA, 15 bp, Homo sapiens
aaacagacctagaca

SEQ ID NO: 356436 - DNA, 15 bp, Homo sapiens
gaaacagacctagac

SEQ ID NO: 356437 - DNA, 15 bp, Homo sapiens
tgaaacagacctaga

SEQ ID NO: 356438 - DNA, 15 bp, Homo sapiens
ctgaaacagacctag

SEQ ID NO: 356439 - DNA, 15 bp, Homo sapiens
cctgaaacagaccta

SEQ ID NO: 356440 - DNA, 15 bp, Homo sapiens
gcctgaaacagacct

SEQ ID NO: 356441 - DNA, 15 bp, Homo sapiens
aacagcctgaaacag

SEQ ID NO: 356442 - DNA, 15 bp, Homo sapiens
aaacagcctgaaaca

SEQ ID NO: 356443 - DNA, 15 bp, Homo sapiens
gaaacagcctgaaac

SEQ ID NO: 356444 - DNA, 15 bp, Homo sapiens
agaaacagcctgaaa

SEQ ID NO: 356445 - DNA, 15 bp, Homo sapiens
cagaaacagcctgaa

SEQ ID NO: 356446 - DNA, 15 bp, Homo sapiens
acagaaacagcctga

SEQ ID NO: 356447 - DNA, 15 bp, Homo sapiens
gacagaaacagcctg

SEQ ID NO: 356448 - DNA, 15 bp, Homo sapiens
agacagaaacagcct

SEQ ID NO: 356449 - DNA, 15 bp, Homo sapiens
cagacagaaacagcc

SEQ ID NO: 356450 - DNA, 15 bp, Homo sapiens
acagacagaaacagc

SEQ ID NO: 356451 - DNA, 15 bp, Homo sapiens
gacagacagaaacag

SEQ ID NO: 356452 - DNA, 15 bp, Homo sapiens
agacagacagaaaca

SEQ ID NO: 356453 - DNA, 15 bp, Homo sapiens
cagacagacagaaac

SEQ ID NO: 356454 - DNA, 15 bp, Homo sapiens
acagacagacagaaa

SEQ ID NO: 356455 - DNA, 15 bp, Homo sapiens
gacagacagacagaa

SEQ ID NO: 356456 - DNA, 15 bp, Homo sapiens
tccggacagacagac

SEQ ID NO: 356457 - DNA, 15 bp, Homo sapiens
atccggacagacaga

SEQ ID NO: 356458 - DNA, 15 bp, Homo sapiens
gatccggacagacag

SEQ ID NO: 356459 - DNA, 15 bp, Homo sapiens
agatccggacagaca

SEQ ID NO: 356460 - DNA, 15 bp, Homo sapiens
cagatccggacagac

SEQ ID NO: 356461 - DNA, 15 bp, Homo sapiens
acagatccggacaga

SEQ ID NO: 356462 - DNA, 15 bp, Homo sapiens
aacagatccggacag

SEQ ID NO: 356463 - DNA, 15 bp, Homo sapiens
aaacagatccggaca

SEQ ID NO: 356464 - DNA, 15 bp, Homo sapiens
gaaacagatccggac

SEQ ID NO: 356465 - DNA, 15 bp, Homo sapiens
tgaaacagatccgga

SEQ ID NO: 356466 - DNA, 15 bp, Homo sapiens
ctgaaacagatccgg

SEQ ID NO: 356467 - DNA, 15 bp, Homo sapiens
cctgaaacagatccg

SEQ ID NO: 356468 - DNA, 15 bp, Homo sapiens
gcctgaaacagatcc

SEQ ID NO: 356469 - DNA, 15 bp, Homo sapiens
agcctgaaacagatc

SEQ ID NO: 356470 - DNA, 15 bp, Homo sapiens
cagcctgaaacagat

SEQ ID NO: 356471 - DNA, 15 bp, Homo sapiens
gacagcctgaaacag

SEQ ID NO: 356472 - DNA, 15 bp, Homo sapiens
agacagcctgaaaca

SEQ ID NO: 356473 - DNA, 15 bp, Homo sapiens
cagacagcctgaaac

SEQ ID NO: 356474 - DNA, 15 bp, Homo sapiens
acagacagcctgaaa

SEQ ID NO: 356475 - DNA, 15 bp, Homo sapiens
gacagacagcctgaa

SEQ ID NO: 356476 - DNA, 15 bp, Homo sapiens
agacagacagcctga

SEQ ID NO: 356477 - DNA, 15 bp, Homo sapiens
cagacagacagcctg

SEQ ID NO: 356478 - DNA, 15 bp, Homo sapiens
acagacagacagcct

SEQ ID NO: 356479 - DNA, 15 bp, Homo sapiens
gacagacagacagcc

SEQ ID NO: 356480 - DNA, 15 bp, Homo sapiens
agacagacagacagc

SEQ ID NO: 356481 - DNA, 15 bp, Homo sapiens
aaacagacagacaga

SEQ ID NO: 356482 - DNA, 15 bp, Homo sapiens
caaacagacagacag

SEQ ID NO: 356483 - DNA, 15 bp, Homo sapiens
ggacagacagacaca

SEQ ID NO: 356484 - DNA, 15 bp, Homo sapiens
cggacagacagacac

SEQ ID NO: 356485 - DNA, 15 bp, Homo sapiens
tggacagacagacac

SEQ ID NO: 356486 - DNA, 15 bp, Homo sapiens
ctggacagacagaca

SEQ ID NO: 356487 - DNA, 15 bp, Homo sapiens
cctggacagacagac

SEQ ID NO: 356488 - DNA, 15 bp, Homo sapiens
acctggacagacaga

SEQ ID NO: 356489 - DNA, 15 bp, Homo sapiens
gaaacagacctggac

SEQ ID NO: 356490 - DNA, 15 bp, Homo sapiens
tgaaacagacctgga

SEQ ID NO: 356491 - DNA, 15 bp, Homo sapiens
ctgaaacagacctgg

SEQ ID NO: 356492 - DNA, 15 bp, Homo sapiens
cctgaaacagacctg

SEQ ID NO: 356493 - DNA, 15 bp, Homo sapiens
tacagcctgaaacag

SEQ ID NO: 356494 - DNA, 15 bp, Homo sapiens
atacagcctgaaaca

SEQ ID NO: 356495 - DNA, 15 bp, Homo sapiens
catacagcctgaaac

SEQ ID NO: 356496 - DNA, 15 bp, Homo sapiens
acatacagcctgaaa

SEQ ID NO: 356497 - DNA, 15 bp, Homo sapiens
cacatacagcctgaa

SEQ ID NO: 356498 - DNA, 15 bp, Homo sapiens
acacatacagcctga

SEQ ID NO: 356499 - DNA, 15 bp, Homo sapiens
cacacatacagcctg

SEQ ID NO: 356500 - DNA, 15 bp, Homo sapiens
acacacatacagcct

SEQ ID NO: 356501 - DNA, 15 bp, Homo sapiens
gacacacatacagcc

SEQ ID NO: 356502 - DNA, 15 bp, Homo sapiens
agacacacatacagc

SEQ ID NO: 356503 - DNA, 15 bp, Homo sapiens
cagacacacatacag

SEQ ID NO: 356504 - DNA, 15 bp, Homo sapiens
gcagacacacataca

SEQ ID NO: 356505 - DNA, 15 bp, Homo sapiens
agcagacacacatac

SEQ ID NO: 356506 - DNA, 15 bp, Homo sapiens
gagcagacacacata

SEQ ID NO: 356507 - DNA, 15 bp, Homo sapiens
agagcagacacacat

SEQ ID NO: 356508 - DNA, 15 bp, Homo sapiens
aagagcagacacaca

SEQ ID NO: 356509 - DNA, 15 bp, Homo sapiens
aaagagcagacacac

SEQ ID NO: 356510 - DNA, 15 bp, Homo sapiens
caaagagcagacaca

SEQ ID NO: 356511 - DNA, 15 bp, Homo sapiens
gcaaagagcagacac

SEQ ID NO: 356512 - DNA, 15 bp, Homo sapiens
agcaaagagcagaca

SEQ ID NO: 356513 - DNA, 15 bp, Homo sapiens
aagcaaagagcagac

SEQ ID NO: 356514 - DNA, 15 bp, Homo sapiens
gaagcaaagagcaga

SEQ ID NO: 356515 - DNA, 15 bp, Homo sapiens
agaagcaaagagcag

SEQ ID NO: 356516 - DNA, 15 bp, Homo sapiens
cagaagcaaagagca

SEQ ID NO: 356517 - DNA, 15 bp, Homo sapiens
gcagaagcaaagagc

SEQ ID NO: 356518 - DNA, 15 bp, Homo sapiens
agcagaagcaaagag

SEQ ID NO: 356519 - DNA, 15 bp, Homo sapiens
gagcagaagcaaaga

SEQ ID NO: 356520 - DNA, 15 bp, Homo sapiens
ggagcagaagcaaag

SEQ ID NO: 356521 - DNA, 15 bp, Homo sapiens
aggagcagaagcaaa

SEQ ID NO: 356522 - DNA, 15 bp, Homo sapiens
caggagcagaagcaa

SEQ ID NO: 356523 - DNA, 15 bp, Homo sapiens
ccaggagcagaagca

SEQ ID NO: 356524 - DNA, 15 bp, Homo sapiens
gccaggagcagaagc

SEQ ID NO: 356525 - DNA, 15 bp, Homo sapiens
agccaggagcagaag

SEQ ID NO: 356526 - DNA, 15 bp, Homo sapiens
gagccaggagcagaa

SEQ ID NO: 356527 - DNA, 15 bp, Homo sapiens
agagccaggagcaga

SEQ ID NO: 356528 - DNA, 15 bp, Homo sapiens
cagagccaggagcag

SEQ ID NO: 356529 - DNA, 15 bp, Homo sapiens
acagagccaggagca

SEQ ID NO: 356530 - DNA, 15 bp, Homo sapiens
cacagagccaggagc

SEQ ID NO: 356531 - DNA, 15 bp, Homo sapiens
acacagagccaggag

SEQ ID NO: 356532 - DNA, 15 bp, Homo sapiens
cacacagagccagga

SEQ ID NO: 356533 - DNA, 15 bp, Homo sapiens
acacacagagccagg

SEQ ID NO: 356534 - DNA, 15 bp, Homo sapiens
tacacacagagccag

SEQ ID NO: 356535 - DNA, 15 bp, Homo sapiens
atacacacagagcca

SEQ ID NO: 356536 - DNA, 15 bp, Homo sapiens
aatacacacagagcc

SEQ ID NO: 356537 - DNA, 15 bp, Homo sapiens
aaatacacacagagc

SEQ ID NO: 356538 - DNA, 15 bp, Homo sapiens
gaaatacacacagag

SEQ ID NO: 356539 - DNA, 15 bp, Homo sapiens
ggaaatacacacaga

SEQ ID NO: 356540 - DNA, 15 bp, Homo sapiens
gggaaatacacacag

SEQ ID NO: 356541 - DNA, 15 bp, Homo sapiens
cgggaaatacacaca

SEQ ID NO: 356542 - DNA, 15 bp, Homo sapiens
ccgggaaatacacac

SEQ ID NO: 356543 - DNA, 15 bp, Homo sapiens
cccgggaaatacaca

SEQ ID NO: 356544 - DNA, 15 bp, Homo sapiens
acccgggaaatacac

SEQ ID NO: 356545 - DNA, 15 bp, Homo sapiens
gacccgggaaataca

SEQ ID NO: 356546 - DNA, 15 bp, Homo sapiens
ggacccgggaaatac

SEQ ID NO: 356547 - DNA, 15 bp, Homo sapiens
aggacccgggaaata

SEQ ID NO: 356548 - DNA, 15 bp, Homo sapiens
caggacccgggaaat

SEQ ID NO: 356549 - DNA, 15 bp, Homo sapiens
acaggacccgggaaa

SEQ ID NO: 356550 - DNA, 15 bp, Homo sapiens
cacaggacccgggaa

SEQ ID NO: 356551 - DNA, 15 bp, Homo sapiens
ccacaggacccggga

SEQ ID NO: 356552 - DNA, 15 bp, Homo sapiens
gccacaggacccggg

SEQ ID NO: 356553 - DNA, 15 bp, Homo sapiens
ggccacaggacccgg

SEQ ID NO: 356554 - DNA, 15 bp, Homo sapiens
gggccacaggacccg

SEQ ID NO: 356555 - DNA, 15 bp, Homo sapiens
agggccacaggaccc

SEQ ID NO: 356556 - DNA, 15 bp, Homo sapiens
gagggccacaggacc

SEQ ID NO: 356557 - DNA, 15 bp, Homo sapiens
agagggccacaggac

SEQ ID NO: 356558 - DNA, 15 bp, Homo sapiens
aagagggccacagga

SEQ ID NO: 356559 - DNA, 15 bp, Homo sapiens
aaagagggccacagg

SEQ ID NO: 356560 - DNA, 15 bp, Homo sapiens
caaagagggccacag

SEQ ID NO: 356561 - DNA, 15 bp, Homo sapiens
gcaaagagggccaca

SEQ ID NO: 356562 - DNA, 15 bp, Homo sapiens
ggcaaagagggccac

SEQ ID NO: 356563 - DNA, 15 bp, Homo sapiens
aggcaaagagggcca

SEQ ID NO: 356564 - DNA, 15 bp, Homo sapiens
aaggcaaagagggcc

SEQ ID NO: 356565 - DNA, 15 bp, Homo sapiens
caaggcaaagagggc

SEQ ID NO: 356566 - DNA, 15 bp, Homo sapiens
acaaggcaaagaggg

SEQ ID NO: 356567 - DNA, 15 bp, Homo sapiens
cacaaggcaaagagg

SEQ ID NO: 356568 - DNA, 15 bp, Homo sapiens
acacaaggcaaagag

SEQ ID NO: 356569 - DNA, 15 bp, Homo sapiens
gacacaaggcaaaga

SEQ ID NO: 356570 - DNA, 15 bp, Homo sapiens
agacacaaggcaaag

SEQ ID NO: 356571 - DNA, 15 bp, Homo sapiens
cagacacaaggcaaa

SEQ ID NO: 356572 - DNA, 15 bp, Homo sapiens
tcagacacaaggcaa

SEQ ID NO: 356573 - DNA, 15 bp, Homo sapiens
ctcagacacaaggca

SEQ ID NO: 356574 - DNA, 15 bp, Homo sapiens
actcagacacaaggc

SEQ ID NO: 356575 - DNA, 15 bp, Homo sapiens
cactcagacacaagg

SEQ ID NO: 356576 - DNA, 15 bp, Homo sapiens
acactcagacacaag

SEQ ID NO: 356577 - DNA, 15 bp, Homo sapiens
gacactcagacacaa

SEQ ID NO: 356578 - DNA, 15 bp, Homo sapiens
cgacactcagacaca

SEQ ID NO: 356579 - DNA, 15 bp, Homo sapiens
ccgacactcagacac

SEQ ID NO: 356580 - DNA, 15 bp, Homo sapiens
accgacactcagaca

SEQ ID NO: 356581 - DNA, 15 bp, Homo sapiens
aaccgacactcagac

SEQ ID NO: 356582 - DNA, 15 bp, Homo sapiens
gaaccgacactcaga

SEQ ID NO: 356583 - DNA, 15 bp, Homo sapiens
ggaaccgacactcag

SEQ ID NO: 356584 - DNA, 15 bp, Homo sapiens
aggaaccgacactca

SEQ ID NO: 356585 - DNA, 15 bp, Homo sapiens
caggaaccgacactc

SEQ ID NO: 356586 - DNA, 15 bp, Homo sapiens
gcaggaaccgacact

SEQ ID NO: 356587 - DNA, 15 bp, Homo sapiens
cgcaggaaccgacac

SEQ ID NO: 356588 - DNA, 15 bp, Homo sapiens
acgcaggaaccgaca

SEQ ID NO: 356589 - DNA, 15 bp, Homo sapiens
cacgcaggaaccgac

SEQ ID NO: 356590 - DNA, 15 bp, Homo sapiens
ccacgcaggaaccga

SEQ ID NO: 356591 - DNA, 15 bp, Homo sapiens
cccacgcaggaaccg

SEQ ID NO: 356592 - DNA, 15 bp, Homo sapiens
gcccacgcaggaacc

SEQ ID NO: 356593 - DNA, 15 bp, Homo sapiens
ggcccacgcaggaac

SEQ ID NO: 356594 - DNA, 15 bp, Homo sapiens
aggcccacgcaggaa

SEQ ID NO: 356595 - DNA, 15 bp, Homo sapiens
gaggcccacgcagga

SEQ ID NO: 356596 - DNA, 15 bp, Homo sapiens
tgaggcccacgcagg

SEQ ID NO: 356597 - DNA, 15 bp, Homo sapiens
ctgaggcccacgcag

SEQ ID NO: 356598 - DNA, 15 bp, Homo sapiens
actgaggcccacgca

SEQ ID NO: 356599 - DNA, 15 bp, Homo sapiens
gactgaggcccacgc

SEQ ID NO: 356600 - DNA, 15 bp, Homo sapiens
tgactgaggcccacg

SEQ ID NO: 356601 - DNA, 15 bp, Homo sapiens
ctgactgaggcccac

SEQ ID NO: 356602 - DNA, 15 bp, Homo sapiens
cctgactgaggccca

SEQ ID NO: 356603 - DNA, 15 bp, Homo sapiens
gcctgactgaggccc

SEQ ID NO: 356604 - DNA, 15 bp, Homo sapiens
ggcctgactgaggcc

SEQ ID NO: 356605 - DNA, 15 bp, Homo sapiens
gggcctgactgaggc

SEQ ID NO: 356606 - DNA, 15 bp, Homo sapiens
agggcctgactgagg

SEQ ID NO: 356607 - DNA, 15 bp, Homo sapiens
cagggcctgactgag

SEQ ID NO: 356608 - DNA, 15 bp, Homo sapiens
ccagggcctgactga

SEQ ID NO: 356609 - DNA, 15 bp, Homo sapiens
cccagggcctgactg

SEQ ID NO: 356610 - DNA, 15 bp, Homo sapiens
acccagggcctgact

SEQ ID NO: 356611 - DNA, 15 bp, Homo sapiens
cacccagggcctgac

SEQ ID NO: 356612 - DNA, 15 bp, Homo sapiens
acacccagggcctga

SEQ ID NO: 356613 - DNA, 15 bp, Homo sapiens
cacacccagggcctg

SEQ ID NO: 356614 - DNA, 15 bp, Homo sapiens
acacacccagggcct

SEQ ID NO: 356615 - DNA, 15 bp, Homo sapiens
cacacacccagggcc

SEQ ID NO: 356616 - DNA, 15 bp, Homo sapiens
ccacacacccagggc

SEQ ID NO: 356617 - DNA, 15 bp, Homo sapiens
gccacacacccaggg

SEQ ID NO: 356618 - DNA, 15 bp, Homo sapiens
agccacacacccagg

SEQ ID NO: 356619 - DNA, 15 bp, Homo sapiens
tagccacacacccag

SEQ ID NO: 356620 - DNA, 15 bp, Homo sapiens
atagccacacaccca

SEQ ID NO: 356621 - DNA, 15 bp, Homo sapiens
catagccacacaccc

SEQ ID NO: 356622 - DNA, 15 bp, Homo sapiens
tcatagccacacacc

SEQ ID NO: 356623 - DNA, 15 bp, Homo sapiens
ctcatagccacacac

SEQ ID NO: 356624 - DNA, 15 bp, Homo sapiens
gctcatagccacaca

SEQ ID NO: 356625 - DNA, 15 bp, Homo sapiens
agctcatagccacac

SEQ ID NO: 356626 - DNA, 15 bp, Homo sapiens
cagctcatagccaca

SEQ ID NO: 356627 - DNA, 15 bp, Homo sapiens
acagctcatagccac

SEQ ID NO: 356628 - DNA, 15 bp, Homo sapiens
cacagctcatagcca

SEQ ID NO: 356629 - DNA, 15 bp, Homo sapiens
gcacagctcatagcc

SEQ ID NO: 356630 - DNA, 15 bp, Homo sapiens
ggcacagctcatagc

SEQ ID NO: 356631 - DNA, 15 bp, Homo sapiens
aggcacagctcatag

SEQ ID NO: 356632 - DNA, 15 bp, Homo sapiens
gaggcacagctcata

SEQ ID NO: 356633 - DNA, 15 bp, Homo sapiens
ggaggcacagctcat

SEQ ID NO: 356634 - DNA, 15 bp, Homo sapiens
gggaggcacagctca

SEQ ID NO: 356635 - DNA, 15 bp, Homo sapiens
ggggaggcacagctc

SEQ ID NO: 356636 - DNA, 15 bp, Homo sapiens
gggggaggcacagct

SEQ ID NO: 356637 - DNA, 15 bp, Homo sapiens
tgggggaggcacagc

SEQ ID NO: 356638 - DNA, 15 bp, Homo sapiens
atgggggaggcacag

SEQ ID NO: 356639 - DNA, 15 bp, Homo sapiens
aatgggggaggcaca

SEQ ID NO: 356640 - DNA, 15 bp, Homo sapiens
gaatgggggaggcac

SEQ ID NO: 356641 - DNA, 15 bp, Homo sapiens
agaatgggggaggca

SEQ ID NO: 356642 - DNA, 15 bp, Homo sapiens
cagaatgggggaggc

SEQ ID NO: 356643 - DNA, 15 bp, Homo sapiens
ccagaatgggggagg

SEQ ID NO: 356644 - DNA, 15 bp, Homo sapiens
gccagaatgggggag

SEQ ID NO: 356645 - DNA, 15 bp, Homo sapiens
tgccagaatggggga

SEQ ID NO: 356646 - DNA, 15 bp, Homo sapiens
atgccagaatggggg

SEQ ID NO: 356647 - DNA, 15 bp, Homo sapiens
gatgccagaatgggg

SEQ ID NO: 356648 - DNA, 15 bp, Homo sapiens
agatgccagaatggg

SEQ ID NO: 356649 - DNA, 15 bp, Homo sapiens
gagatgccagaatgg

SEQ ID NO: 356650 - DNA, 15 bp, Homo sapiens
agagatgccagaatg

SEQ ID NO: 356651 - DNA, 15 bp, Homo sapiens
cagagatgccagaat

SEQ ID NO: 356652 - DNA, 15 bp, Homo sapiens
gcagagatgccagaa

SEQ ID NO: 356653 - DNA, 15 bp, Homo sapiens
agcagagatgccaga

SEQ ID NO: 356654 - DNA, 15 bp, Homo sapiens
cagcagagatgccag

SEQ ID NO: 356655 - DNA, 15 bp, Homo sapiens
ccagcagagatgcca

SEQ ID NO: 356656 - DNA, 15 bp, Homo sapiens
cccagcagagatgcc

SEQ ID NO: 356657 - DNA, 15 bp, Homo sapiens
ccccagcagagatgc

SEQ ID NO: 356658 - DNA, 15 bp, Homo sapiens
accccagcagagatg

SEQ ID NO: 356659 - DNA, 15 bp, Homo sapiens
gaccccagcagagat

SEQ ID NO: 356660 - DNA, 15 bp, Homo sapiens
agaccccagcagaga

SEQ ID NO: 356661 - DNA, 15 bp, Homo sapiens
aagaccccagcagag

SEQ ID NO: 356662 - DNA, 15 bp, Homo sapiens
caagaccccagcaga

SEQ ID NO: 356663 - DNA, 15 bp, Homo sapiens
ccaagaccccagcag

SEQ ID NO: 356664 - DNA, 15 bp, Homo sapiens
gccaagaccccagca

SEQ ID NO: 356665 - DNA, 15 bp, Homo sapiens
ggccaagaccccagc

SEQ ID NO: 356666 - DNA, 15 bp, Homo sapiens
aggccaagaccccag

SEQ ID NO: 356667 - DNA, 15 bp, Homo sapiens
gaggccaagacccca

SEQ ID NO: 356668 - DNA, 15 bp, Homo sapiens
tgaggccaagacccc

SEQ ID NO: 356669 - DNA, 15 bp, Homo sapiens
gtgaggccaagaccc

SEQ ID NO: 356670 - DNA, 15 bp, Homo sapiens
cgtgaggccaagacc

SEQ ID NO: 356671 - DNA, 15 bp, Homo sapiens
acgtgaggccaagac

SEQ ID NO: 356672 - DNA, 15 bp, Homo sapiens
gacgtgaggccaaga

SEQ ID NO: 356673 - DNA, 15 bp, Homo sapiens
ggacgtgaggccaag

SEQ ID NO: 356674 - DNA, 15 bp, Homo sapiens
gggacgtgaggccaa

SEQ ID NO: 356675 - DNA, 15 bp, Homo sapiens
tgggacgtgaggcca

SEQ ID NO: 356676 - DNA, 15 bp, Homo sapiens
atgggacgtgaggcc

SEQ ID NO: 356677 - DNA, 15 bp, Homo sapiens
gatgggacgtgaggc

SEQ ID NO: 356678 - DNA, 15 bp, Homo sapiens
ggatgggacgtgagg

SEQ ID NO: 356679 - DNA, 15 bp, Homo sapiens
gggatgggacgtgag

SEQ ID NO: 356680 - DNA, 15 bp, Homo sapiens
ggggatgggacgtga

SEQ ID NO: 356681 - DNA, 15 bp, Homo sapiens
tggggatgggacgtg

SEQ ID NO: 356682 - DNA, 15 bp, Homo sapiens
ctggggatgggacgt

SEQ ID NO: 356683 - DNA, 15 bp, Homo sapiens
cctggggatgggacg

SEQ ID NO: 356684 - DNA, 15 bp, Homo sapiens
acctggggatgggac

SEQ ID NO: 356685 - DNA, 15 bp, Homo sapiens
cacctggggatggga

SEQ ID NO: 356686 - DNA, 15 bp, Homo sapiens
ccacctggggatggg

SEQ ID NO: 356687 - DNA, 15 bp, Homo sapiens
cccacctggggatgg

SEQ ID NO: 356688 - DNA, 15 bp, Homo sapiens
acccacctggggatg

SEQ ID NO: 356689 - DNA, 15 bp, Homo sapiens
tacccacctggggat

SEQ ID NO: 356690 - DNA, 15 bp, Homo sapiens
ctacccacctgggga

SEQ ID NO: 356691 - DNA, 15 bp, Homo sapiens
gctacccacctgggg

SEQ ID NO: 356692 - DNA, 15 bp, Homo sapiens
agctacccacctggg

SEQ ID NO: 356693 - DNA, 15 bp, Homo sapiens
cagctacccacctgg

SEQ ID NO: 356694 - DNA, 15 bp, Homo sapiens
gcagctacccacctg

SEQ ID NO: 356695 - DNA, 15 bp, Homo sapiens
ggcagctacccacct

SEQ ID NO: 356696 - DNA, 15 bp, Homo sapiens
gggcagctacccacc

SEQ ID NO: 356697 - DNA, 15 bp, Homo sapiens
tgggcagctacccac

SEQ ID NO: 356698 - DNA, 15 bp, Homo sapiens
ctgggcagctaccca

SEQ ID NO: 356699 - DNA, 15 bp, Homo sapiens
actgggcagctaccc

SEQ ID NO: 356700 - DNA, 15 bp, Homo sapiens
cactgggcagctacc

SEQ ID NO: 356701 - DNA, 15 bp, Homo sapiens
gcactgggcagctac

SEQ ID NO: 356702 - DNA, 15 bp, Homo sapiens
tgcactgggcagcta

SEQ ID NO: 356703 - DNA, 15 bp, Homo sapiens
ctgcactgggcagct

SEQ ID NO: 356704 - DNA, 15 bp, Homo sapiens
gctgcactgggcagc

SEQ ID NO: 356705 - DNA, 15 bp, Homo sapiens
tgctgcactgggcag

SEQ ID NO: 356706 - DNA, 15 bp, Homo sapiens
atgctgcactgggca

SEQ ID NO: 356707 - DNA, 15 bp, Homo sapiens
gatgctgcactgggc

SEQ ID NO: 356708 - DNA, 15 bp, Homo sapiens
ggatgctgcactggg

SEQ ID NO: 356709 - DNA, 15 bp, Homo sapiens
gggatgctgcactgg

SEQ ID NO: 356710 - DNA, 15 bp, Homo sapiens
ggggatgctgcactg

SEQ ID NO: 356711 - DNA, 15 bp, Homo sapiens
tggggatgctgcact

SEQ ID NO: 356712 - DNA, 15 bp, Homo sapiens
ttggggatgctgcac

SEQ ID NO: 356713 - DNA, 15 bp, Homo sapiens
cttggggatgctgca

SEQ ID NO: 356714 - DNA, 15 bp, Homo sapiens
ccttggggatgctgc

SEQ ID NO: 356715 - DNA, 15 bp, Homo sapiens
gccttggggatgctg

SEQ ID NO: 356716 - DNA, 15 bp, Homo sapiens
tgccttggggatgct

SEQ ID NO: 356717 - DNA, 15 bp, Homo sapiens
gtgccttggggatgc

SEQ ID NO: 356718 - DNA, 15 bp, Homo sapiens
ggtgccttggggatg

SEQ ID NO: 356719 - DNA, 15 bp, Homo sapiens
gggtgccttggggat

SEQ ID NO: 356720 - DNA, 15 bp, Homo sapiens
ggggtgccttgggga

SEQ ID NO: 356721 - DNA, 15 bp, Homo sapiens
aggggtgccttgggg

SEQ ID NO: 356722 - DNA, 15 bp, Homo sapiens
caggggtgccttggg

SEQ ID NO: 356723 - DNA, 15 bp, Homo sapiens
ccaggggtgccttgg

SEQ ID NO: 356724 - DNA, 15 bp, Homo sapiens
cccaggggtgccttg

SEQ ID NO: 356725 - DNA, 15 bp, Homo sapiens
gcccaggggtgcctt

SEQ ID NO: 356726 - DNA, 15 bp, Homo sapiens
tgcccaggggtgcct

SEQ ID NO: 356727 - DNA, 15 bp, Homo sapiens
ctgcccaggggtgcc

SEQ ID NO: 356728 - DNA, 15 bp, Homo sapiens
tctgcccaggggtgc

SEQ ID NO: 356729 - DNA, 15 bp, Homo sapiens
ctctgcccaggggtg

SEQ ID NO: 356730 - DNA, 15 bp, Homo sapiens
cctctgcccaggggt

SEQ ID NO: 356731 - DNA, 15 bp, Homo sapiens
ccctctgcccagggg

SEQ ID NO: 356732 - DNA, 15 bp, Homo sapiens
cccctctgcccaggg

SEQ ID NO: 356733 - DNA, 15 bp, Homo sapiens
gcccctctgcccagg

SEQ ID NO: 356734 - DNA, 15 bp, Homo sapiens
ggcccctctgcccag

SEQ ID NO: 356735 - DNA, 15 bp, Homo sapiens
aggcccctctgccca

SEQ ID NO: 356736 - DNA, 15 bp, Homo sapiens
caggcccctctgccc

SEQ ID NO: 356737 - DNA, 15 bp, Homo sapiens
ccaggcccctctgcc

SEQ ID NO: 356738 - DNA, 15 bp, Homo sapiens
cccaggcccctctgc

SEQ ID NO: 356739 - DNA, 15 bp, Homo sapiens
tcccaggcccctctg

SEQ ID NO: 356740 - DNA, 15 bp, Homo sapiens
ctcccaggcccctct

SEQ ID NO: 356741 - DNA, 15 bp, Homo sapiens
gctcccaggcccctc

SEQ ID NO: 356742 - DNA, 15 bp, Homo sapiens
tgctcccaggcccct

SEQ ID NO: 356743 - DNA, 15 bp, Homo sapiens
atgctcccaggcccc

SEQ ID NO: 356744 - DNA, 15 bp, Homo sapiens
tatgctcccaggccc

SEQ ID NO: 356745 - DNA, 15 bp, Homo sapiens
ctatgctcccaggcc

SEQ ID NO: 356746 - DNA, 15 bp, Homo sapiens
actatgctcccaggc

SEQ ID NO: 356747 - DNA, 15 bp, Homo sapiens
gactatgctcccagg

SEQ ID NO: 356748 - DNA, 15 bp, Homo sapiens
ggactatgctcccag

SEQ ID NO: 356749 - DNA, 15 bp, Homo sapiens
aggactatgctccca

SEQ ID NO: 356750 - DNA, 15 bp, Homo sapiens
caggactatgctccc

SEQ ID NO: 356751 - DNA, 15 bp, Homo sapiens
ccaggactatgctcc

SEQ ID NO: 356752 - DNA, 15 bp, Homo sapiens
gccaggactatgctc

SEQ ID NO: 356753 - DNA, 15 bp, Homo sapiens
cgccaggactatgct

SEQ ID NO: 356754 - DNA, 15 bp, Homo sapiens
ccgccaggactatgc

SEQ ID NO: 356755 - DNA, 15 bp, Homo sapiens
cccgccaggactatg

SEQ ID NO: 356756 - DNA, 15 bp, Homo sapiens
ccccgccaggactat

SEQ ID NO: 356757 - DNA, 15 bp, Homo sapiens
gccccgccaggacta

SEQ ID NO: 356758 - DNA, 15 bp, Homo sapiens
agccccgccaggact

SEQ ID NO: 356759 - DNA, 15 bp, Homo sapiens
gagccccgccaggac

SEQ ID NO: 356760 - DNA, 15 bp, Homo sapiens
tgagccccgccagga

SEQ ID NO: 356761 - DNA, 15 bp, Homo sapiens
gtgagccccgccagg

SEQ ID NO: 356762 - DNA, 15 bp, Homo sapiens
tgtgagccccgccag

SEQ ID NO: 356763 - DNA, 15 bp, Homo sapiens
ctgtgagccccgcca

SEQ ID NO: 356764 - DNA, 15 bp, Homo sapiens
gctgtgagccccgcc

SEQ ID NO: 356765 - DNA, 15 bp, Homo sapiens
agctgtgagccccgc

SEQ ID NO: 356766 - DNA, 15 bp, Homo sapiens
gagctgtgagccccg

SEQ ID NO: 356767 - DNA, 15 bp, Homo sapiens
cgagctgtgagcccc

SEQ ID NO: 356768 - DNA, 15 bp, Homo sapiens
acgagctgtgagccc

SEQ ID NO: 356769 - DNA, 15 bp, Homo sapiens
gacgagctgtgagcc

SEQ ID NO: 356770 - DNA, 15 bp, Homo sapiens
agacgagctgtgagc

SEQ ID NO: 356771 - DNA, 15 bp, Homo sapiens
gagacgagctgtgag

SEQ ID NO: 356772 - DNA, 15 bp, Homo sapiens
ggagacgagctgtga

SEQ ID NO: 356773 - DNA, 15 bp, Homo sapiens
gggagacgagctgtg

SEQ ID NO: 356774 - DNA, 15 bp, Homo sapiens
cgggagacgagctgt

SEQ ID NO: 356775 - DNA, 15 bp, Homo sapiens
gcgggagacgagctg

SEQ ID NO: 356776 - DNA, 15 bp, Homo sapiens
ggcgggagacgagct

SEQ ID NO: 356777 - DNA, 15 bp, Homo sapiens
cggcgggagacgagc

SEQ ID NO: 356778 - DNA, 15 bp, Homo sapiens
gcggcgggagacgag

SEQ ID NO: 356779 - DNA, 15 bp, Homo sapiens
ggcggcgggagacga

SEQ ID NO: 356780 - DNA, 15 bp, Homo sapiens
aggcggcgggagacg

SEQ ID NO: 356781 - DNA, 15 bp, Homo sapiens
gaggcggcgggagac

SEQ ID NO: 356782 - DNA, 15 bp, Homo sapiens
ggaggcggcgggaga

SEQ ID NO: 356783 - DNA, 15 bp, Homo sapiens
tggaggcggcgggag

SEQ ID NO: 356784 - DNA, 15 bp, Homo sapiens
ctggaggcggcggga

SEQ ID NO: 356785 - DNA, 15 bp, Homo sapiens
gctggaggcggcggg

SEQ ID NO: 356786 - DNA, 15 bp, Homo sapiens
ggctggaggcggcgg

SEQ ID NO: 356787 - DNA, 15 bp, Homo sapiens
gggctggaggcggcg

SEQ ID NO: 356788 - DNA, 15 bp, Homo sapiens
agggctggaggcggc

SEQ ID NO: 356789 - DNA, 15 bp, Homo sapiens
cagggctggaggcgg

SEQ ID NO: 356790 - DNA, 15 bp, Homo sapiens
gcagggctggaggcg

SEQ ID NO: 356791 - DNA, 15 bp, Homo sapiens
tgcagggctggaggc

SEQ ID NO: 356792 - DNA, 15 bp, Homo sapiens
gtgcagggctggagg

SEQ ID NO: 356793 - DNA, 15 bp, Homo sapiens
cgtgcagggctggag

SEQ ID NO: 356794 - DNA, 15 bp, Homo sapiens
acgtgcagggctgga

SEQ ID NO: 356795 - DNA, 15 bp, Homo sapiens
gacgtgcagggctgg

SEQ ID NO: 356796 - DNA, 15 bp, Homo sapiens
ggacgtgcagggctg

SEQ ID NO: 356797 - DNA, 15 bp, Homo sapiens
aggacgtgcagggct

SEQ ID NO: 356798 - DNA, 15 bp, Homo sapiens
caggacgtgcagggc

SEQ ID NO: 356799 - DNA, 15 bp, Homo sapiens
tcaggacgtgcaggg

SEQ ID NO: 356800 - DNA, 15 bp, Homo sapiens
ctcaggacgtgcagg

SEQ ID NO: 356801 - DNA, 15 bp, Homo sapiens
gctcaggacgtgcag

SEQ ID NO: 356802 - DNA, 15 bp, Homo sapiens
ggctcaggacgtgca

SEQ ID NO: 356803 - DNA, 15 bp, Homo sapiens
tggctcaggacgtgc

SEQ ID NO: 356804 - DNA, 15 bp, Homo sapiens
ctggctcaggacgtg

SEQ ID NO: 356805 - DNA, 15 bp, Homo sapiens
actggctcaggacgt

SEQ ID NO: 356806 - DNA, 15 bp, Homo sapiens
cactggctcaggacg

SEQ ID NO: 356807 - DNA, 15 bp, Homo sapiens
gcactggctcaggac

SEQ ID NO: 356808 - DNA, 15 bp, Homo sapiens
agcactggctcagga

SEQ ID NO: 356809 - DNA, 15 bp, Homo sapiens
gagcactggctcagg

SEQ ID NO: 356810 - DNA, 15 bp, Homo sapiens
cgagcactggctcag

SEQ ID NO: 356811 - DNA, 15 bp, Homo sapiens
ccgagcactggctca

SEQ ID NO: 356812 - DNA, 15 bp, Homo sapiens
gccgagcactggctc

SEQ ID NO: 356813 - DNA, 15 bp, Homo sapiens
ggccgagcactggct

SEQ ID NO: 356814 - DNA, 15 bp, Homo sapiens
gggccgagcactggc

SEQ ID NO: 356815 - DNA, 15 bp, Homo sapiens
tgggccgagcactgg

SEQ ID NO: 356816 - DNA, 15 bp, Homo sapiens
ctgggccgagcactg

SEQ ID NO: 356817 - DNA, 15 bp, Homo sapiens
cctgggccgagcact

SEQ ID NO: 356818 - DNA, 15 bp, Homo sapiens
gcctgggccgagcac

SEQ ID NO: 356819 - DNA, 15 bp, Homo sapiens
cgcctgggccgagca

SEQ ID NO: 356820 - DNA, 15 bp, Homo sapiens
gcgcctgggccgagc

SEQ ID NO: 356821 - DNA, 15 bp, Homo sapiens
ggcgcctgggccgag

SEQ ID NO: 356822 - DNA, 15 bp, Homo sapiens
tggcgcctgggccga

SEQ ID NO: 356823 - DNA, 15 bp, Homo sapiens
gtggcgcctgggccg

SEQ ID NO: 356824 - DNA, 15 bp, Homo sapiens
ggtggcgcctgggcc

SEQ ID NO: 356825 - DNA, 15 bp, Homo sapiens
gggtggcgcctgggc

SEQ ID NO: 356826 - DNA, 15 bp, Homo sapiens
tgggtggcgcctggg

SEQ ID NO: 356827 - DNA, 15 bp, Homo sapiens
ctgggtggcgcctgg

SEQ ID NO: 356828 - DNA, 15 bp, Homo sapiens
actgggtggcgcctg

SEQ ID NO: 356829 - DNA, 15 bp, Homo sapiens
gactgggtggcgcct

SEQ ID NO: 356830 - DNA, 15 bp, Homo sapiens
ggactgggtggcgcc

SEQ ID NO: 356831 - DNA, 15 bp, Homo sapiens
tggactgggtggcgc

SEQ ID NO: 356832 - DNA, 15 bp, Homo sapiens
ctggactgggtggcg

SEQ ID NO: 356833 - DNA, 15 bp, Homo sapiens
gctggactgggtggc

SEQ ID NO: 356834 - DNA, 15 bp, Homo sapiens
tgctggactgggtgg

SEQ ID NO: 356835 - DNA, 15 bp, Homo sapiens
ctgctggactgggtg

SEQ ID NO: 356836 - DNA, 15 bp, Homo sapiens
cctgctggactgggt

SEQ ID NO: 356837 - DNA, 15 bp, Homo sapiens
ccctgctggactggg

SEQ ID NO: 356838 - DNA, 15 bp, Homo sapiens
gccctgctggactgg

SEQ ID NO: 356839 - DNA, 15 bp, Homo sapiens
cgccctgctggactg

SEQ ID NO: 356840 - DNA, 15 bp, Homo sapiens
tcgccctgctggact

SEQ ID NO: 356841 - DNA, 15 bp, Homo sapiens
gtcgccctgctggac

SEQ ID NO: 356842 - DNA, 15 bp, Homo sapiens
ggtcgccctgctgga

SEQ ID NO: 356843 - DNA, 15 bp, Homo sapiens
aggtcgccctgctgg

SEQ ID NO: 356844 - DNA, 15 bp, Homo sapiens
caggtcgccctgctg

SEQ ID NO: 356845 - DNA, 15 bp, Homo sapiens
ccaggtcgccctgct

SEQ ID NO: 356846 - DNA, 15 bp, Homo sapiens
gccaggtcgccctgc

SEQ ID NO: 356847 - DNA, 15 bp, Homo sapiens
ggccaggtcgccctg

SEQ ID NO: 356848 - DNA, 15 bp, Homo sapiens
gggccaggtcgccct

SEQ ID NO: 356849 - DNA, 15 bp, Homo sapiens
tgggccaggtcgccc

SEQ ID NO: 356850 - DNA, 15 bp, Homo sapiens
ctgggccaggtcgcc

SEQ ID NO: 356851 - DNA, 15 bp, Homo sapiens
gctgggccaggtcgc

SEQ ID NO: 356852 - DNA, 15 bp, Homo sapiens
ggctgggccaggtcg

SEQ ID NO: 356853 - DNA, 15 bp, Homo sapiens
gggctgggccaggtc

SEQ ID NO: 356854 - DNA, 15 bp, Homo sapiens
ggggctgggccaggt

SEQ ID NO: 356855 - DNA, 15 bp, Homo sapiens
aggggctgggccagg

SEQ ID NO: 356856 - DNA, 15 bp, Homo sapiens
agaggggctgggcca

SEQ ID NO: 356857 - DNA, 15 bp, Homo sapiens
cagaggggctgggcc

SEQ ID NO: 356858 - DNA, 15 bp, Homo sapiens
acagaggggctgggc

SEQ ID NO: 356859 - DNA, 15 bp, Homo sapiens
aacagaggggctggg

SEQ ID NO: 356860 - DNA, 15 bp, Homo sapiens
caacagaggggctgg

SEQ ID NO: 356861 - DNA, 15 bp, Homo sapiens
gcaacagaggggctg

SEQ ID NO: 356862 - DNA, 15 bp, Homo sapiens
tgcaacagaggggct

SEQ ID NO: 356863 - DNA, 15 bp, Homo sapiens
atgcaacagaggggc

SEQ ID NO: 356864 - DNA, 15 bp, Homo sapiens
aatgcaacagagggg

SEQ ID NO: 356865 - DNA, 15 bp, Homo sapiens
gaatgcaacagaggg

SEQ ID NO: 356866 - DNA, 15 bp, Homo sapiens
ggaatgcaacagagg

SEQ ID NO: 356867 - DNA, 15 bp, Homo sapiens
aggaatgcaacagag

SEQ ID NO: 356868 - DNA, 15 bp, Homo sapiens
gaggaatgcaacaga

SEQ ID NO: 356869 - DNA, 15 bp, Homo sapiens
tgaggaatgcaacag

SEQ ID NO: 356870 - DNA, 15 bp, Homo sapiens
ctgaggaatgcaaca

SEQ ID NO: 356871 - DNA, 15 bp, Homo sapiens
cctgaggaatgcaac

SEQ ID NO: 356872 - DNA, 15 bp, Homo sapiens
tcctgaggaatgcaa

SEQ ID NO: 356873 - DNA, 15 bp, Homo sapiens
gtcctgaggaatgca

SEQ ID NO: 356874 - DNA, 15 bp, Homo sapiens
ggtcctgaggaatgc

SEQ ID NO: 356875 - DNA, 15 bp, Homo sapiens
tggtcctgaggaatg

SEQ ID NO: 356876 - DNA, 15 bp, Homo sapiens
ctggtcctgaggaat

SEQ ID NO: 356877 - DNA, 15 bp, Homo sapiens
cctggtcctgaggaa

SEQ ID NO: 356878 - DNA, 15 bp, Homo sapiens
ccctggtcctgagga

SEQ ID NO: 356879 - DNA, 15 bp, Homo sapiens
accctggtcctgagg

SEQ ID NO: 356880 - DNA, 15 bp, Homo sapiens
caccctggtcctgag

SEQ ID NO: 356881 - DNA, 15 bp, Homo sapiens
ccaccctggtcctga

SEQ ID NO: 356882 - DNA, 15 bp, Homo sapiens
gccaccctggtcctg

SEQ ID NO: 356883 - DNA, 15 bp, Homo sapiens
cgccaccctggtcct

SEQ ID NO: 356884 - DNA, 15 bp, Homo sapiens
acgccaccctggtcc

SEQ ID NO: 356885 - DNA, 15 bp, Homo sapiens
aacgccaccctggtc

SEQ ID NO: 356886 - DNA, 15 bp, Homo sapiens
caacgccaccctggt

SEQ ID NO: 356887 - DNA, 15 bp, Homo sapiens
acaacgccaccctgg

SEQ ID NO: 356888 - DNA, 15 bp, Homo sapiens
gacaacgccaccctg

SEQ ID NO: 356889 - DNA, 15 bp, Homo sapiens
ggacaacgccaccct

SEQ ID NO: 356890 - DNA, 15 bp, Homo sapiens
tggacaacgccaccc

SEQ ID NO: 356891 - DNA, 15 bp, Homo sapiens
ctggacaacgccacc

SEQ ID NO: 356892 - DNA, 15 bp, Homo sapiens
gctggacaacgccac

SEQ ID NO: 356893 - DNA, 15 bp, Homo sapiens
agctggacaacgcca

SEQ ID NO: 356894 - DNA, 15 bp, Homo sapiens
gagctggacaacgcc

SEQ ID NO: 356895 - DNA, 15 bp, Homo sapiens
ggagctggacaacgc

SEQ ID NO: 356896 - DNA, 15 bp, Homo sapiens
aggagctggacaacg

SEQ ID NO: 356897 - DNA, 15 bp, Homo sapiens
gaggagctggacaac

SEQ ID NO: 356898 - DNA, 15 bp, Homo sapiens
ggaggagctggacaa

SEQ ID NO: 356899 - DNA, 15 bp, Homo sapiens
cggaggagctggaca

SEQ ID NO: 356900 - DNA, 15 bp, Homo sapiens
acggaggagctggac

SEQ ID NO: 356901 - DNA, 15 bp, Homo sapiens
gacggaggagctgga

SEQ ID NO: 356902 - DNA, 15 bp, Homo sapiens
cgacggaggagctgg

SEQ ID NO: 356903 - DNA, 15 bp, Homo sapiens
tcgacggaggagctg

SEQ ID NO: 356904 - DNA, 15 bp, Homo sapiens
ttcgacggaggagct

SEQ ID NO: 356905 - DNA, 15 bp, Homo sapiens
attcgacggaggagc

SEQ ID NO: 356906 - DNA, 15 bp, Homo sapiens
aattcgacggaggag

SEQ ID NO: 356907 - DNA, 15 bp, Homo sapiens
caattcgacggagga

SEQ ID NO: 356908 - DNA, 15 bp, Homo sapiens
ccaattcgacggagg

SEQ ID NO: 356909 - DNA, 15 bp, Homo sapiens
accaattcgacggag

SEQ ID NO: 356910 - DNA, 15 bp, Homo sapiens
gaccaattcgacgga

SEQ ID NO: 356911 - DNA, 15 bp, Homo sapiens
tgaccaattcgacgg

SEQ ID NO: 356912 - DNA, 15 bp, Homo sapiens
ctgaccaattcgacg

SEQ ID NO: 356913 - DNA, 15 bp, Homo sapiens
cctgaccaattcgac

SEQ ID NO: 356914 - DNA, 15 bp, Homo sapiens
acctgaccaattcga

SEQ ID NO: 356915 - DNA, 15 bp, Homo sapiens
aacctgaccaattcg

SEQ ID NO: 356916 - DNA, 15 bp, Homo sapiens
gaacctgaccaattc

SEQ ID NO: 356917 - DNA, 15 bp, Homo sapiens
cgaacctgaccaatt

SEQ ID NO: 356918 - DNA, 15 bp, Homo sapiens
gcgaacctgaccaat

SEQ ID NO: 356919 - DNA, 15 bp, Homo sapiens
cgcgaacctgaccaa

SEQ ID NO: 356920 - DNA, 15 bp, Homo sapiens
ccgcgaacctgacca

SEQ ID NO: 356921 - DNA, 15 bp, Homo sapiens
accgcgaacctgacc

SEQ ID NO: 356922 - DNA, 15 bp, Homo sapiens
caccgcgaacctgac

SEQ ID NO: 356923 - DNA, 15 bp, Homo sapiens
acaccgcgaacctga

SEQ ID NO: 356924 - DNA, 15 bp, Homo sapiens
gacaccgcgaacctg

SEQ ID NO: 356925 - DNA, 15 bp, Homo sapiens
ggacaccgcgaacct

SEQ ID NO: 356926 - DNA, 15 bp, Homo sapiens
aggacaccgcgaacc

SEQ ID NO: 356927 - DNA, 15 bp, Homo sapiens
caggacaccgcgaac

SEQ ID NO: 356928 - DNA, 15 bp, Homo sapiens
ccaggacaccgcgaa

SEQ ID NO: 356929 - DNA, 15 bp, Homo sapiens
tccaggacaccgcga

SEQ ID NO: 356930 - DNA, 15 bp, Homo sapiens
ttccaggacaccgcg

SEQ ID NO: 356931 - DNA, 15 bp, Homo sapiens
cttccaggacaccgc

SEQ ID NO: 356932 - DNA, 15 bp, Homo sapiens
gcttccaggacaccg

SEQ ID NO: 356933 - DNA, 15 bp, Homo sapiens
ggcttccaggacacc

SEQ ID NO: 356934 - DNA, 15 bp, Homo sapiens
gggcttccaggacac

SEQ ID NO: 356935 - DNA, 15 bp, Homo sapiens
ggggcttccaggaca

SEQ ID NO: 356936 - DNA, 15 bp, Homo sapiens
tggggcttccaggac

SEQ ID NO: 356937 - DNA, 15 bp, Homo sapiens
ctggggcttccagga

SEQ ID NO: 356938 - DNA, 15 bp, Homo sapiens
actggggcttccagg

SEQ ID NO: 356939 - DNA, 15 bp, Homo sapiens
gactggggcttccag

SEQ ID NO: 356940 - DNA, 15 bp, Homo sapiens
agactggggcttcca

SEQ ID NO: 356941 - DNA, 15 bp, Homo sapiens
cagactggggcttcc
